United States Patent Application Publication US 2007/0048756 A1 - sequence listing, part 6

SEQ ID NO: 180859 - DNA, 33 bp, Homo sapien
gggaggaggttatacaaggaaataaatactagg

SEQ ID NO: 180860 - DNA, 33 bp, Homo sapien
gggaggaggttatacacggaaataaatactagg

SEQ ID NO: 180861 - DNA, 33 bp, Homo sapien
caagctgccttccaaaaccatttcatcagaagg

SEQ ID NO: 180862 - DNA, 33 bp, Homo sapien
caagctgccttccaaagccatttcatcagaagg

SEQ ID NO: 180863 - DNA, 33 bp, Homo sapien
caagtgatggaggaaaaatgtgtgcccttctga

SEQ ID NO: 180864 - DNA, 33 bp, Homo sapien
caagtgatggaggaaagatgtgtgcccttctga

SEQ ID NO: 180865 - DNA, 33 bp, Homo sapien
aagaggacttttaagaaatgccgtgactaaagt

SEQ ID NO: 180866 - DNA, 33 bp, Homo sapien
aagaggacttttaagagatgccgtgactaaagt

SEQ ID NO: 180867 - DNA, 33 bp, Homo sapien
tggcaggtaaaagtgacgcagagtttcagggct

SEQ ID NO: 180868 - DNA, 33 bp, Homo sapien
tggcaggtaaaagtgatgcagagtttcagggct

SEQ ID NO: 180869 - DNA, 33 bp, Homo sapien
ctgagcctgagggagacaaatgagggtcagcct

SEQ ID NO: 180870 - DNA, 33 bp, Homo sapien
ctgagcctgagggagataaatgagggtcagcct

SEQ ID NO: 180871 - DNA, 33 bp, Homo sapien
tgggctgtgttttttaacattctcaaggcaggc

SEQ ID NO: 180872 - DNA, 33 bp, Homo sapien
tgggctgtgttttttagcattctcaaggcaggc

SEQ ID NO: 180873 - DNA, 33 bp, Homo sapien
gggaggatgccaagaaagaaatggcccattgct

SEQ ID NO: 180874 - DNA, 33 bp, Homo sapien
gggaggatgccaagaaggaaatggcccattgct

SEQ ID NO: 180875 - DNA, 33 bp, Homo sapien
gagaaaataaaaaataagtgttcgtgctgctgc

SEQ ID NO: 180876 - DNA, 33 bp, Homo sapien
gagaaaataaaaaatacgtgttcgtgctgctgc

SEQ ID NO: 180877 - DNA, 33 bp, Homo sapien
ttgccaagatcacaggaactttaccccagccag

SEQ ID NO: 180878 - DNA, 33 bp, Homo sapien
ttgccaagatcacaggcactttaccccagccag

SEQ ID NO: 180879 - DNA, 33 bp, Homo sapien
agtttggacacccagaagcagcatgagggcata

SEQ ID NO: 180880 - DNA, 33 bp, Homo sapien
agtttggacacccagaggcagcatgagggcata

SEQ ID NO: 180881 - DNA, 33 bp, Homo sapien
tcctgctctctgttaccctgtatcttccaagtt

SEQ ID NO: 180882 - DNA, 33 bp, Homo sapien
tcctgctctctgttactctgtatcttccaagtt

SEQ ID NO: 180883 - DNA, 33 bp, Homo sapien
tattcaagaaagtacaagccttatacaaaattg

SEQ ID NO: 180884 - DNA, 33 bp, Homo sapien
tattcaagaaagtacaggccttatacaaaattg

SEQ ID NO: 180885 - DNA, 33 bp, Homo sapien
atacaaatcttaccacacttgcatgtttcaagg

SEQ ID NO: 180886 - DNA, 33 bp, Homo sapien
atacaaatcttaccacccttgcatgtttcaagg

SEQ ID NO: 180887 - DNA, 33 bp, Homo sapien
atccaactctgtgtaaacatctactgagtgcct

SEQ ID NO: 180888 - DNA, 33 bp, Homo sapien
atccaactctgtgtaagcatctactgagtgcct

SEQ ID NO: 180889 - DNA, 33 bp, Homo sapien
acatttctgtgaaccaccacttgagttgtttga

SEQ ID NO: 180890 - DNA, 33 bp, Homo sapien
acatttctgtgaaccatcacttgagttgtttga

SEQ ID NO: 180891 - DNA, 33 bp, Homo sapien
gactgtgagaatcaaacaaggcaaatttgcaaa

SEQ ID NO: 180892 - DNA, 33 bp, Homo sapien
gactgtgagaatcaaataaggcaaatttgcaaa

SEQ ID NO: 180893 - DNA, 33 bp, Homo sapien
aaatattaagattcaaatgtctacagggtttta

SEQ ID NO: 180894 - DNA, 33 bp, Homo sapien
aaatattaagattcaagtgtctacagggtttta

SEQ ID NO: 180895 - DNA, 33 bp, Homo sapien
gatgtatgttcctgagaaattccctgtagcttc

SEQ ID NO: 180896 - DNA, 33 bp, Homo sapien
gatgtatgttcctgagcaattccctgtagcttc

SEQ ID NO: 180897 - DNA, 33 bp, Homo sapien
caggaagaaatagccaagggatgatagaaacag

SEQ ID NO: 180898 - DNA, 33 bp, Homo sapien
caggaagaaatagccatgggatgatagaaacag

SEQ ID NO: 180899 - DNA, 33 bp, Homo sapien
aaataacattctcctaagtgaacattatctttg

SEQ ID NO: 180900 - DNA, 33 bp, Homo sapien
aaataacattctcctatgtgaacattatctttg

SEQ ID NO: 180901 - DNA, 33 bp, Homo sapien
gtgaggtaactgtccacgccttggaagagcttt

SEQ ID NO: 180902 - DNA, 33 bp, Homo sapien
gtgaggtaactgtccatgccttggaagagcttt

SEQ ID NO: 180903 - DNA, 33 bp, Homo sapien
gaaccatagcatgaaactctgtgtctcttggag

SEQ ID NO: 180904 - DNA, 33 bp, Homo sapien
gaaccatagcatgaaattctgtgtctcttggag

SEQ ID NO: 180905 - DNA, 33 bp, Homo sapien
atatcagacagaacagaatagatattaaatcaa

SEQ ID NO: 180906 - DNA, 33 bp, Homo sapien
atatcagacagaacagtatagatattaaatcaa

SEQ ID NO: 180907 - DNA, 33 bp, Homo sapien
aaagtacttttatctcaccatcctagcatttaa

SEQ ID NO: 180908 - DNA, 33 bp, Homo sapien
aaagtacttttatctcgccatcctagcatttaa

SEQ ID NO: 180909 - DNA, 33 bp, Homo sapien
ctgatgagctttaaaaaaaatctgaacaatgct

SEQ ID NO: 180910 - DNA, 33 bp, Homo sapien
ctgatgagctttaaaacaaatctgaacaatgct

SEQ ID NO: 180911 - DNA, 33 bp, Homo sapien
tctgaggaatggtccactcaactcctgcttata

SEQ ID NO: 180912 - DNA, 33 bp, Homo sapien
tctgaggaatggtccagtcaactcctgcttata

SEQ ID NO: 180913 - DNA, 33 bp, Homo sapien
acacttgggaaacataatatatcatgttggaca

SEQ ID NO: 180914 - DNA, 33 bp, Homo sapien
acacttgggaaacatactatatcatgttggaca

SEQ ID NO: 180915 - DNA, 33 bp, Homo sapien
cagctgtgatgtcttaaataagtcagctttcgt

SEQ ID NO: 180916 - DNA, 33 bp, Homo sapien
cagctgtgatgtcttagataagtcagctttcgt

SEQ ID NO: 180917 - DNA, 33 bp, Homo sapien
cacaaagtaagtccaaaccaggtctcagatgaa

SEQ ID NO: 180918 - DNA, 33 bp, Homo sapien
cacaaagtaagtccaagccaggtctcagatgaa

SEQ ID NO: 180919 - DNA, 33 bp, Homo sapien
catagtgctgacaggccagccccacggtaggcg

SEQ ID NO: 180920 - DNA, 33 bp, Homo sapien
catagtgctgacaggctagccccacggtaggcg

SEQ ID NO: 180921 - DNA, 33 bp, Homo sapien
gagtgctgacttcggacgtggagaagttcatgc

SEQ ID NO: 180922 - DNA, 33 bp, Homo sapien
gagtgctgacttcggatgtggagaagttcatgc

SEQ ID NO: 180923 - DNA, 33 bp, Homo sapien
tgacactccaagaccggaacgagaagctcttct

SEQ ID NO: 180924 - DNA, 33 bp, Homo sapien
tgacactccaagaccgtaacgagaagctcttct

SEQ ID NO: 180925 - DNA, 33 bp, Homo sapien
tgttcaaattctagccacgcccatttatagcca

SEQ ID NO: 180926 - DNA, 33 bp, Homo sapien
tgttcaaattctagccgcgcccatttatagcca

SEQ ID NO: 180927 - DNA, 33 bp, Homo sapien
caaagttgatgttgaaaagagtatttcttatgt

SEQ ID NO: 180928 - DNA, 33 bp, Homo sapien
caaagttgatgttgaagagagtatttcttatgt

SEQ ID NO: 180929 - DNA, 33 bp, Homo sapien
acacatggtgaaaaacagagactttttctgtgt

SEQ ID NO: 180930 - DNA, 33 bp, Homo sapien
acacatggtgaaaaacggagactttttctgtgt

SEQ ID NO: 180931 - DNA, 33 bp, Homo sapien
tcactgtggcttttcacaacagtccacttctct

SEQ ID NO: 180932 - DNA, 33 bp, Homo sapien
tcactgtggcttttcagaacagtccacttctct

SEQ ID NO: 180933 - DNA, 33 bp, Homo sapien
agaattgggtttggaaaataatgagcttaacat

SEQ ID NO: 180934 - DNA, 33 bp, Homo sapien
agaattgggtttggaacataatgagcttaacat

SEQ ID NO: 180935 - DNA, 33 bp, Homo sapien
tggctggaacatctgaagctctcactaaacaca

SEQ ID NO: 180936 - DNA, 33 bp, Homo sapien
tggctggaacatctgaggctctcactaaacaca

SEQ ID NO: 180937 - DNA, 33 bp, Homo sapien
atcaaccacctatcctcaaattccaaataagtg

SEQ ID NO: 180938 - DNA, 33 bp, Homo sapien
atcaaccacctatccttaaattccaaataagtg

SEQ ID NO: 180939 - DNA, 33 bp, Homo sapien
gcactatttcagttttctccttctgccacatcc

SEQ ID NO: 180940 - DNA, 33 bp, Homo sapien
gcactatttcagttttgtccttctgccacatcc

SEQ ID NO: 180941 - DNA, 33 bp, Homo sapien
tctgttgcacactttacacacattatgagttat

SEQ ID NO: 180942 - DNA, 33 bp, Homo sapien
tctgttgcacactttatacacattatgagttat

SEQ ID NO: 180943 - DNA, 33 bp, Homo sapien
ctataccattcccagaagaagcaggcattttca

SEQ ID NO: 180944 - DNA, 33 bp, Homo sapien
ctataccattcccagaggaagcaggcattttca

SEQ ID NO: 180945 - DNA, 33 bp, Homo sapien
tctgatgatattcaccaggctctatttggatat

SEQ ID NO: 180946 - DNA, 33 bp, Homo sapien
tctgatgatattcacctggctctatttggatat

SEQ ID NO: 180947 - DNA, 33 bp, Homo sapien
taagtggtgccattaacgtgtggttgattgaca

SEQ ID NO: 180948 - DNA, 33 bp, Homo sapien
taagtggtgccattaatgtgtggttgattgaca

SEQ ID NO: 180949 - DNA, 33 bp, Homo sapien
taactctagaaacacaataagcaaaattatata

SEQ ID NO: 180950 - DNA, 33 bp, Homo sapien
taactctagaaacacagtaagcaaaattatata

SEQ ID NO: 180951 - DNA, 33 bp, Homo sapien
ttaacaaatgcagagcacataaagaaatgcctg

SEQ ID NO: 180952 - DNA, 33 bp, Homo sapien
ttaacaaatgcagagcgcataaagaaatgcctg

SEQ ID NO: 180953 - DNA, 33 bp, Homo sapien
tttctctgtgaccatacagcatagtgctgcagt

SEQ ID NO: 180954 - DNA, 33 bp, Homo sapien
tttctctgtgaccatatagcatagtgctgcagt

SEQ ID NO: 180955 - DNA, 33 bp, Homo sapien
tataggtttgagaacactcctctattctcctta

SEQ ID NO: 180956 - DNA, 33 bp, Homo sapien
tataggtttgagaacagtcctctattctcctta

SEQ ID NO: 180957 - DNA, 33 bp, Homo sapien
tcatacttgtaccaaagaaaaagcacaggaagc

SEQ ID NO: 180958 - DNA, 33 bp, Homo sapien
tcatacttgtaccaaataaaaagcacaggaagc

SEQ ID NO: 180959 - DNA, 33 bp, Homo sapien
gaccctgtttaattggaattgttaatgcaagac

SEQ ID NO: 180960 - DNA, 33 bp, Homo sapien
gaccctgtttaattgggattgttaatgcaagac

SEQ ID NO: 180961 - DNA, 33 bp, Homo sapien
gatttgcagccaagacacccatgagagtacctt

SEQ ID NO: 180962 - DNA, 33 bp, Homo sapien
gatttgcagccaagacgcccatgagagtacctt

SEQ ID NO: 180963 - DNA, 33 bp, Homo sapien
gagggatttggggactcaattaatggaacatat

SEQ ID NO: 180964 - DNA, 33 bp, Homo sapien
gagggatttggggactgaattaatggaacatat

SEQ ID NO: 180965 - DNA, 33 bp, Homo sapien
gacatgctactcacaaccaggatgtcaggaggg

SEQ ID NO: 180966 - DNA, 33 bp, Homo sapien
gacatgctactcacaatcaggatgtcaggaggg

SEQ ID NO: 180967 - DNA, 33 bp, Homo sapien
ctccactctctgcccaatagaagatgttgagat

SEQ ID NO: 180968 - DNA, 33 bp, Homo sapien
ctccactctctgcccagtagaagatgttgagat

SEQ ID NO: 180969 - DNA, 33 bp, Homo sapien
agatccctgatataggaagcggagacaacaaaa

SEQ ID NO: 180970 - DNA, 33 bp, Homo sapien
agatccctgatataggcagcggagacaacaaaa

SEQ ID NO: 180971 - DNA, 33 bp, Homo sapien
tgcttcaagctgtagccgcacagggtgactatc

SEQ ID NO: 180972 - DNA, 33 bp, Homo sapien
tgcttcaagctgtagctgcacagggtgactatc

SEQ ID NO: 180973 - DNA, 33 bp, Homo sapien
cagctgacttcaggaacatataaaagatgttgt

SEQ ID NO: 180974 - DNA, 33 bp, Homo sapien
cagctgacttcaggaatatataaaagatgttgt

SEQ ID NO: 180975 - DNA, 33 bp, Homo sapien
gcattactcctcagaaaccctggctgattctca

SEQ ID NO: 180976 - DNA, 33 bp, Homo sapien
gcattactcctcagaacccctggctgattctca

SEQ ID NO: 180977 - DNA, 33 bp, Homo sapien
ccttccctgtttctagcccactatgtctaaagt

SEQ ID NO: 180978 - DNA, 33 bp, Homo sapien
ccttccctgtttctagtccactatgtctaaagt

SEQ ID NO: 180979 - DNA, 33 bp, Homo sapien
gccctttgggtccccaactgagagtctggaata

SEQ ID NO: 180980 - DNA, 33 bp, Homo sapien
gccctttgggtccccagctgagagtctggaata

SEQ ID NO: 180981 - DNA, 33 bp, Homo sapien
taagagagtgaacaataatggtatttcctggct

SEQ ID NO: 180982 - DNA, 33 bp, Homo sapien
taagagagtgaacaatgatggtatttcctggct

SEQ ID NO: 180983 - DNA, 33 bp, Homo sapien
gggcacactggtaaaagtaagtttaagaagtct

SEQ ID NO: 180984 - DNA, 33 bp, Homo sapien
gggcacactggtaaaattaagtttaagaagtct

SEQ ID NO: 180985 - DNA, 33 bp, Homo sapien
gcatttaaagccttcaatgaaataattaattgc

SEQ ID NO: 180986 - DNA, 33 bp, Homo sapien
gcatttaaagccttcagtgaaataattaattgc

SEQ ID NO: 180987 - DNA, 33 bp, Homo sapien
aataaatagccacgttaaaaggctctcctaagg

SEQ ID NO: 180988 - DNA, 33 bp, Homo sapien
aataaatagccacgttgaaaggctctcctaagg

SEQ ID NO: 180989 - DNA, 33 bp, Homo sapien
cactctggtagtcatgaaagagaagagtgtgag

SEQ ID NO: 180990 - DNA, 33 bp, Homo sapien
cactctggtagtcatggaagagaagagtgtgag

SEQ ID NO: 180991 - DNA, 33 bp, Homo sapien
aagttgggctaacaggaatacaggatggagtct

SEQ ID NO: 180992 - DNA, 33 bp, Homo sapien
aagttgggctaacagggatacaggatggagtct

SEQ ID NO: 180993 - DNA, 33 bp, Homo sapien
ctcatagaaatgttataaaggctcagtgtgtta

SEQ ID NO: 180994 - DNA, 33 bp, Homo sapien
ctcatagaaatgttatgaaggctcagtgtgtta

SEQ ID NO: 180995 - DNA, 33 bp, Homo sapien
agaattctgtaaagcaatatttcatagggaagc

SEQ ID NO: 180996 - DNA, 33 bp, Homo sapien
agaattctgtaaagcagtatttcatagggaagc

SEQ ID NO: 180997 - DNA, 33 bp, Homo sapien
gtctccactatcaaacaaaatgaacttgtatat

SEQ ID NO: 180998 - DNA, 33 bp, Homo sapien
gtctccactatcaaacgaaatgaacttgtatat

SEQ ID NO: 180999 - DNA, 33 bp, Homo sapien
ggaatgtgagtggaaacgatgtgtgtatatctt

SEQ ID NO: 181000 - DNA, 33 bp, Homo sapien
ggaatgtgagtggaaatgatgtgtgtatatctt

SEQ ID NO: 181001 - DNA, 33 bp, Homo sapien
atagcccttgcctcagaaaccacaactctatac

SEQ ID NO: 181002 - DNA, 33 bp, Homo sapien
atagcccttgcctcagcaaccacaactctatac

SEQ ID NO: 181003 - DNA, 33 bp, Homo sapien
ttttctccctaaatacacttcatgcttcatgag

SEQ ID NO: 181004 - DNA, 33 bp, Homo sapien
ttttctccctaaatactcttcatgcttcatgag

SEQ ID NO: 181005 - DNA, 33 bp, Homo sapien
atataaagttcttaccactttgcctggcacatg

SEQ ID NO: 181006 - DNA, 33 bp, Homo sapien
atataaagttcttaccgctttgcctggcacatg

SEQ ID NO: 181007 - DNA, 33 bp, Homo sapien
ttggaacctaaccgaacgaggcagaggtcagtg

SEQ ID NO: 181008 - DNA, 33 bp, Homo sapien
ttggaacctaaccgaatgaggcagaggtcagtg

SEQ ID NO: 181009 - DNA, 33 bp, Homo sapien
caatcgaactgattggcatttaaatttggatct

SEQ ID NO: 181010 - DNA, 33 bp, Homo sapien
caatcgaactgattggtatttaaatttggatct

SEQ ID NO: 181011 - DNA, 33 bp, Homo sapien
tccatcaggaatgagacgtaaatgaacaatttc

SEQ ID NO: 181012 - DNA, 33 bp, Homo sapien
tccatcaggaatgagatgtaaatgaacaatttc

SEQ ID NO: 181013 - DNA, 33 bp, Homo sapien
agagagaattagagaacagattcctttggagag

SEQ ID NO: 181014 - DNA, 33 bp, Homo sapien
agagagaattagagaagagattcctttggagag

SEQ ID NO: 181015 - DNA, 33 bp, Homo sapien
tattgatcatatttggcatgtcaggtgaactaa

SEQ ID NO: 181016 - DNA, 33 bp, Homo sapien
tattgatcatatttggtatgtcaggtgaactaa

SEQ ID NO: 181017 - DNA, 33 bp, Homo sapien
accagtactctgaagaagaaaaaattatctgtg

SEQ ID NO: 181018 - DNA, 33 bp, Homo sapien
accagtactctgaagaggaaaaaattatctgtg

SEQ ID NO: 181019 - DNA, 33 bp, Homo sapien
gctgggagagacagaaaatgctgaacatataga

SEQ ID NO: 181020 - DNA, 33 bp, Homo sapien
gctgggagagacagaagatgctgaacatataga

SEQ ID NO: 181021 - DNA, 33 bp, Homo sapien
ttaaatacaatgcatacgaactgtcacttaaga

SEQ ID NO: 181022 - DNA, 33 bp, Homo sapien
ttaaatacaatgcatatgaactgtcacttaaga

SEQ ID NO: 181023 - DNA, 33 bp, Homo sapien
aaattgtcgaaaggtacggaagagtgaatgttg

SEQ ID NO: 181024 - DNA, 33 bp, Homo sapien
aaattgtcgaaaggtatggaagagtgaatgttg

SEQ ID NO: 181025 - DNA, 33 bp, Homo sapien
actgaagagtaccaggcagttgtggcgacatgt

SEQ ID NO: 181026 - DNA, 33 bp, Homo sapien
actgaagagtaccaggtagttgtggcgacatgt

SEQ ID NO: 181027 - DNA, 33 bp, Homo sapien
aaagagtcagcactcaatgaagtctaggtagca

SEQ ID NO: 181028 - DNA, 33 bp, Homo sapien
aaagagtcagcactcagtgaagtctaggtagca

SEQ ID NO: 181029 - DNA, 33 bp, Homo sapien
aaagagaatggaaggaagaccaaaaagtgctta

SEQ ID NO: 181030 - DNA, 33 bp, Homo sapien
aaagagaatggaaggacgaccaaaaagtgctta

SEQ ID NO: 181031 - DNA, 33 bp, Homo sapien
ctgctcttcgtactgaccctgcttttctgcagg

SEQ ID NO: 181032 - DNA, 33 bp, Homo sapien
ctgctcttcgtactgatcctgcttttctgcagg

SEQ ID NO: 181033 - DNA, 33 bp, Homo sapien
aagtatataaagcacagagtatgaatatgagga

SEQ ID NO: 181034 - DNA, 33 bp, Homo sapien
aagtatataaagcacatagtatgaatatgagga

SEQ ID NO: 181035 - DNA, 33 bp, Homo sapien
atcacttgaatcaatcaatcagaaattatagtt

SEQ ID NO: 181036 - DNA, 33 bp, Homo sapien
atcacttgaatcaatccatcagaaattatagtt

SEQ ID NO: 181037 - DNA, 33 bp, Homo sapien
gagttaccttctcctacgatctaaacctctttt

SEQ ID NO: 181038 - DNA, 33 bp, Homo sapien
gagttaccttctcctatgatctaaacctctttt

SEQ ID NO: 181039 - DNA, 33 bp, Homo sapien
ctgatagttaatgccacactgcaatctgaggta

SEQ ID NO: 181040 - DNA, 33 bp, Homo sapien
ctgatagttaatgccatactgcaatctgaggta

SEQ ID NO: 181041 - DNA, 33 bp, Homo sapien
cccaaacttttttgtaaagccttctggagctag

SEQ ID NO: 181042 - DNA, 33 bp, Homo sapien
cccaaacttttttgtagagccttctggagctag

SEQ ID NO: 181043 - DNA, 33 bp, Homo sapien
tggggtacacaaaaaagtaaatctgaaacagac

SEQ ID NO: 181044 - DNA, 33 bp, Homo sapien
tggggtacacaaaaaattaaatctgaaacagac

SEQ ID NO: 181045 - DNA, 33 bp, Homo sapien
gaaaataatcagcacactgggaaagcctgcttc

SEQ ID NO: 181046 - DNA, 33 bp, Homo sapien
gaaaataatcagcacattgggaaagcctgcttc

SEQ ID NO: 181047 - DNA, 33 bp, Homo sapien
ggtggagaactcatgggagagaggcagacagaa

SEQ ID NO: 181048 - DNA, 33 bp, Homo sapien
ggtggagaactcatggtagagaggcagacagaa

SEQ ID NO: 181049 - DNA, 33 bp, Homo sapien
acaaggatcaaatcaacgattaagcctcttcat

SEQ ID NO: 181050 - DNA, 33 bp, Homo sapien
acaaggatcaaatcaaggattaagcctcttcat

SEQ ID NO: 181051 - DNA, 33 bp, Homo sapien
tagattcagactaaacgatctcagatttcttca

SEQ ID NO: 181052 - DNA, 33 bp, Homo sapien
tagattcagactaaactatctcagatttcttca

SEQ ID NO: 181053 - DNA, 33 bp, Homo sapien
atccatagagggtagccattgctggctcgaatg

SEQ ID NO: 181054 - DNA, 33 bp, Homo sapien
atccatagagggtagctattgctggctcgaatg

SEQ ID NO: 181055 - DNA, 33 bp, Homo sapien
ataggccatcacttaccacaccaatgtccacag

SEQ ID NO: 181056 - DNA, 33 bp, Homo sapien
ataggccatcacttactacaccaatgtccacag

SEQ ID NO: 181057 - DNA, 33 bp, Homo sapien
tgttgcaacattgggagtaacatcttcctctct

SEQ ID NO: 181058 - DNA, 33 bp, Homo sapien
tgttgcaacattgggattaacatcttcctctct

SEQ ID NO: 181059 - DNA, 33 bp, Homo sapien
ctgtatattgcaaacaatatcacaactgggtgg

SEQ ID NO: 181060 - DNA, 33 bp, Homo sapien
ctgtatattgcaaacattatcacaactgggtgg

SEQ ID NO: 181061 - DNA, 33 bp, Homo sapien
cgcactgagatattgcaaggaataacatcctct

SEQ ID NO: 181062 - DNA, 33 bp, Homo sapien
cgcactgagatattgcgaggaataacatcctct

SEQ ID NO: 181063 - DNA, 33 bp, Homo sapien
tatcacagggtgtaaaccaactgtgatattagg

SEQ ID NO: 181064 - DNA, 33 bp, Homo sapien
tatcacagggtgtaaatcaactgtgatattagg

SEQ ID NO: 181065 - DNA, 33 bp, Homo sapien
tgtacaccaagtgtgaaattaggagtcgtatct

SEQ ID NO: 181066 - DNA, 33 bp, Homo sapien
tgtacaccaagtgtgatattaggagtcgtatct

SEQ ID NO: 181067 - DNA, 33 bp, Homo sapien
ctaccacacaagggaagtagcaagagaccagtg

SEQ ID NO: 181068 - DNA, 33 bp, Homo sapien
ctaccacacaagggaattagcaagagaccagtg

SEQ ID NO: 181069 - DNA, 33 bp, Homo sapien
atgtgagtgatacaaccgtaatgctctgagtac

SEQ ID NO: 181070 - DNA, 33 bp, Homo sapien
atgtgagtgatacaactgtaatgctctgagtac

SEQ ID NO: 181071 - DNA, 33 bp, Homo sapien
tctttccatctcctaacattgtcattccatcaa

SEQ ID NO: 181072 - DNA, 33 bp, Homo sapien
tctttccatctcctaatattgtcattccatcaa

SEQ ID NO: 181073 - DNA, 33 bp, Homo sapien
cccctttcaataacacagagagttaccagtact

SEQ ID NO: 181074 - DNA, 33 bp, Homo sapien
cccctttcaataacacggagagttaccagtact

SEQ ID NO: 181075 - DNA, 33 bp, Homo sapien
atcaaattcatcttccactaatgcagcgtctac

SEQ ID NO: 181076 - DNA, 33 bp, Homo sapien
atcaaattcatcttccgctaatgcagcgtctac

SEQ ID NO: 181077 - DNA, 33 bp, Homo sapien
tcagcccatcatttaccctatacaagccccagc

SEQ ID NO: 181078 - DNA, 33 bp, Homo sapien
tcagcccatcatttactctatacaagccccagc

SEQ ID NO: 181079 - DNA, 33 bp, Homo sapien
tttatgtgaatgactgaatgactatatatgtag

SEQ ID NO: 181080 - DNA, 33 bp, Homo sapien
tttatgtgaatgactgtatgactatatatgtag

SEQ ID NO: 181081 - DNA, 33 bp, Homo sapien
gttcccataactaaagacaatttccagtcattc

SEQ ID NO: 181082 - DNA, 33 bp, Homo sapien
gttcccataactaaaggcaatttccagtcattc

SEQ ID NO: 181083 - DNA, 33 bp, Homo sapien
gataagctgaataacacgtcttaagaaagaaaa

SEQ ID NO: 181084 - DNA, 33 bp, Homo sapien
gataagctgaataacaggtcttaagaaagaaaa

SEQ ID NO: 181085 - DNA, 33 bp, Homo sapien
tcagaagcaaaagctaccaattcaagcagccct

SEQ ID NO: 181086 - DNA, 33 bp, Homo sapien
tcagaagcaaaagctatcaattcaagcagccct

SEQ ID NO: 181087 - DNA, 33 bp, Homo sapien
ttcagttatgcagctgaataagttctagagaac

SEQ ID NO: 181088 - DNA, 33 bp, Homo sapien
ttcagttatgcagctggataagttctagagaac

SEQ ID NO: 181089 - DNA, 33 bp, Homo sapien
actgaaaaatatcagacgtgaaagtggtgtgag

SEQ ID NO: 181090 - DNA, 33 bp, Homo sapien
actgaaaaatatcagatgtgaaagtggtgtgag

SEQ ID NO: 181091 - DNA, 33 bp, Homo sapien
gcagcaggccctgttacagcttagtggatattc

SEQ ID NO: 181092 - DNA, 33 bp, Homo sapien
gcagcaggccctgttatagcttagtggatattc

SEQ ID NO: 181093 - DNA, 33 bp, Homo sapien
aagttgctagtctgggccaaacacttttgtaca

SEQ ID NO: 181094 - DNA, 33 bp, Homo sapien
aagttgctagtctgggtcaaacacttttgtaca

SEQ ID NO: 181095 - DNA, 33 bp, Homo sapien
gaatgtgctcagagaaaaaagggctgctggcct

SEQ ID NO: 181096 - DNA, 33 bp, Homo sapien
gaatgtgctcagagaagaaagggctgctggcct

SEQ ID NO: 181097 - DNA, 33 bp, Homo sapien
cctacagccatttctaaggcctacaacaacaac

SEQ ID NO: 181098 - DNA, 33 bp, Homo sapien
cctacagccatttctagggcctacaacaacaac

SEQ ID NO: 181099 - DNA, 33 bp, Homo sapien
caacaaaatgatgaggccatgtttgacttttac

SEQ ID NO: 181100 - DNA, 33 bp, Homo sapien
caacaaaatgatgagggcatgtttgacttttac

SEQ ID NO: 181101 - DNA, 33 bp, Homo sapien
taggaaatgaaatcacactggcttataattatg

SEQ ID NO: 181102 - DNA, 33 bp, Homo sapien
taggaaatgaaatcacgctggcttataattatg

SEQ ID NO: 181103 - DNA, 33 bp, Homo sapien
aaaaacactgacctcaagagaataatttttcca

SEQ ID NO: 181104 - DNA, 33 bp, Homo sapien
aaaaacactgacctcaggagaataatttttcca

SEQ ID NO: 181105 - DNA, 33 bp, Homo sapien
gatgagagatgtgttaaaagtagagagacccag

SEQ ID NO: 181106 - DNA, 33 bp, Homo sapien
gatgagagatgtgttagaagtagagagacccag

SEQ ID NO: 181107 - DNA, 33 bp, Homo sapien
gtgctgagtaatgcataaaacccttggcctaca

SEQ ID NO: 181108 - DNA, 33 bp, Homo sapien
gtgctgagtaatgcatgaaacccttggcctaca

SEQ ID NO: 181109 - DNA, 33 bp, Homo sapien
tacagtcacattggggaagattaagacatgaga

SEQ ID NO: 181110 - DNA, 33 bp, Homo sapien
tacagtcacattgggggagattaagacatgaga

SEQ ID NO: 181111 - DNA, 33 bp, Homo sapien
ttgtttctgtattgtccatagttggttttccac

SEQ ID NO: 181112 - DNA, 33 bp, Homo sapien
ttgtttctgtattgtctatagttggttttccac

SEQ ID NO: 181113 - DNA, 33 bp, Homo sapien
gacttcttataacaacactctgaggttggcatt

SEQ ID NO: 181114 - DNA, 33 bp, Homo sapien
gacttcttataacaacgctctgaggttggcatt

SEQ ID NO: 181115 - DNA, 33 bp, Homo sapien
ctttccaaatcatcttcaaacctctttaaacac

SEQ ID NO: 181116 - DNA, 33 bp, Homo sapien
ctttccaaatcatctttaaacctctttaaacac

SEQ ID NO: 181117 - DNA, 33 bp, Homo sapien
aatttagtaaacttgaaaatccttctagaattg

SEQ ID NO: 181118 - DNA, 33 bp, Homo sapien
aatttagtaaacttgagaatccttctagaattg

SEQ ID NO: 181119 - DNA, 33 bp, Homo sapien
cttcacagatgagaaaactcacaaaactatgat

SEQ ID NO: 181120 - DNA, 33 bp, Homo sapien
cttcacagatgagaaagctcacaaaactatgat

SEQ ID NO: 181121 - DNA, 33 bp, Homo sapien
caaaacctataagaagccacatctggctattct

SEQ ID NO: 181122 - DNA, 33 bp, Homo sapien
caaaacctataagaagtcacatctggctattct

SEQ ID NO: 181123 - DNA, 33 bp, Homo sapien
cactgaccagaggaaacaaaaactggactgatt

SEQ ID NO: 181124 - DNA, 33 bp, Homo sapien
cactgaccagaggaaataaaaactggactgatt

SEQ ID NO: 181125 - DNA, 33 bp, Homo sapien
gaaaacaccatgtaggcagtaataagccgtgca

SEQ ID NO: 181126 - DNA, 33 bp, Homo sapien
gaaaacaccatgtaggtagtaataagccgtgca

SEQ ID NO: 181127 - DNA, 33 bp, Homo sapien
agaaattatagtataaagtggaatgtgaaaaag

SEQ ID NO: 181128 - DNA, 33 bp, Homo sapien
agaaattatagtataaggtggaatgtgaaaaag

SEQ ID NO: 181129 - DNA, 33 bp, Homo sapien
tagaagctgaggagaactgataacacaagaaga

SEQ ID NO: 181130 - DNA, 33 bp, Homo sapien
tagaagctgaggagaattgataacacaagaaga

SEQ ID NO: 181131 - DNA, 33 bp, Homo sapien
ttaaataggaaaattgaatatgctgtcataatt

SEQ ID NO: 181132 - DNA, 33 bp, Homo sapien
ttaaataggaaaattgtatatgctgtcataatt

SEQ ID NO: 181133 - DNA, 33 bp, Homo sapien
gcttctagtggacaacaacaatacagaagttgt

SEQ ID NO: 181134 - DNA, 33 bp, Homo sapien
gcttctagtggacaacgacaatacagaagttgt

SEQ ID NO: 181135 - DNA, 33 bp, Homo sapien
tcctctccttcctcagcctctttttcatcatcc

SEQ ID NO: 181136 - DNA, 33 bp, Homo sapien
tcctctccttcctcagtctctttttcatcatcc

SEQ ID NO: 181137 - DNA, 33 bp, Homo sapien
ggagaggatctggtgaaaattttgatcttagac

SEQ ID NO: 181138 - DNA, 33 bp, Homo sapien
ggagaggatctggtgacaattttgatcttagac

SEQ ID NO: 181139 - DNA, 33 bp, Homo sapien
catagcaataagaacactgaggacatagcaaat

SEQ ID NO: 181140 - DNA, 33 bp, Homo sapien
catagcaataagaacattgaggacatagcaaat

SEQ ID NO: 181141 - DNA, 33 bp, Homo sapien
ccttcaaagattgtagaaaaaactctcaagtgg

SEQ ID NO: 181142 - DNA, 33 bp, Homo sapien
ccttcaaagattgtaggaaaaactctcaagtgg

SEQ ID NO: 181143 - DNA, 33 bp, Homo sapien
tgttactgagtcttgaagtaaaggagttttgag

SEQ ID NO: 181144 - DNA, 33 bp, Homo sapien
tgttactgagtcttgaggtaaaggagttttgag

SEQ ID NO: 181145 - DNA, 33 bp, Homo sapien
ctcaatcacaacattaagagcatatcaatgagt

SEQ ID NO: 181146 - DNA, 33 bp, Homo sapien
ctcaatcacaacattacgagcatatcaatgagt

SEQ ID NO: 181147 - DNA, 33 bp, Homo sapien
catatgatatgtaagaacaattcaccatactaa

SEQ ID NO: 181148 - DNA, 33 bp, Homo sapien
catatgatatgtaagatcaattcaccatactaa

SEQ ID NO: 181149 - DNA, 33 bp, Homo sapien
cctctctggcttgaacacctctaacacctctgc

SEQ ID NO: 181150 - DNA, 33 bp, Homo sapien
cctctctggcttgaacgcctctaacacctctgc

SEQ ID NO: 181151 - DNA, 33 bp, Homo sapien
tgtgcaattaactttaccctcttccttgtccaa

SEQ ID NO: 181152 - DNA, 33 bp, Homo sapien
tgtgcaattaactttatcctcttccttgtccaa

SEQ ID NO: 181153 - DNA, 33 bp, Homo sapien
agaataggcaacttgaacttctgtaggagctag

SEQ ID NO: 181154 - DNA, 33 bp, Homo sapien
agaataggcaacttgatcttctgtaggagctag

SEQ ID NO: 181155 - DNA, 33 bp, Homo sapien
taattaaatgtctaccccataactcagcaattc

SEQ ID NO: 181156 - DNA, 33 bp, Homo sapien
taattaaatgtctacctcataactcagcaattc

SEQ ID NO: 181157 - DNA, 33 bp, Homo sapien
ctggtcacttcaataaagcaatgctgtagaggg

SEQ ID NO: 181158 - DNA, 33 bp, Homo sapien
ctggtcacttcaataacgcaatgctgtagaggg

SEQ ID NO: 181159 - DNA, 33 bp, Homo sapien
ataaatgtccttcgacaagtgaatgtttaacaa

SEQ ID NO: 181160 - DNA, 33 bp, Homo sapien
ataaatgtccttcgacgagtgaatgtttaacaa

SEQ ID NO: 181161 - DNA, 33 bp, Homo sapien
aggtgtaaatctaacacgtatatgaaacgcatt

SEQ ID NO: 181162 - DNA, 33 bp, Homo sapien
aggtgtaaatctaacatgtatatgaaacgcatt

SEQ ID NO: 181163 - DNA, 33 bp, Homo sapien
tgatggtagttaaacaactttgtgaatatatta

SEQ ID NO: 181164 - DNA, 33 bp, Homo sapien
tgatggtagttaaacacctttgtgaatatatta

SEQ ID NO: 181165 - DNA, 33 bp, Homo sapien
taagaaatcattaccaagacgaatatttagctc

SEQ ID NO: 181166 - DNA, 33 bp, Homo sapien
taagaaatcattaccaggacgaatatttagctc

SEQ ID NO: 181167 - DNA, 33 bp, Homo sapien
tataccttctaaaacagtctgacagttaaaaac

SEQ ID NO: 181168 - DNA, 33 bp, Homo sapien
tataccttctaaaacattctgacagttaaaaac

SEQ ID NO: 181169 - DNA, 33 bp, Homo sapien
gccgttaggttaaggacgatgaccagtcttaac

SEQ ID NO: 181170 - DNA, 33 bp, Homo sapien
gccgttaggttaaggatgatgaccagtcttaac

SEQ ID NO: 181171 - DNA, 33 bp, Homo sapien
aaaatctggatcaacactctaattctgggcaat

SEQ ID NO: 181172 - DNA, 33 bp, Homo sapien
aaaatctggatcaacattctaattctgggcaat

SEQ ID NO: 181173 - DNA, 33 bp, Homo sapien
tcatttgcatcaagtgcaccaagaataattatt

SEQ ID NO: 181174 - DNA, 33 bp, Homo sapien
tcatttgcatcaagtgtaccaagaataattatt

SEQ ID NO: 181175 - DNA, 33 bp, Homo sapien
gaattctagattgacaatgatttaaagataatc

SEQ ID NO: 181176 - DNA, 33 bp, Homo sapien
gaattctagattgacagtgatttaaagataatc

SEQ ID NO: 181177 - DNA, 33 bp, Homo sapien
tctgcaaccagaacctaaggtgacttatagttg

SEQ ID NO: 181178 - DNA, 33 bp, Homo sapien
tctgcaaccagaacctcaggtgacttatagttg

SEQ ID NO: 181179 - DNA, 33 bp, Homo sapien
tgtgtagcttcttgtaacataggattttgaaag

SEQ ID NO: 181180 - DNA, 33 bp, Homo sapien
tgtgtagcttcttgtaccataggattttgaaag

SEQ ID NO: 181181 - DNA, 33 bp, Homo sapien
gaaccagaggccataacgatatatagatacatc

SEQ ID NO: 181182 - DNA, 33 bp, Homo sapien
gaaccagaggccataatgatatatagatacatc

SEQ ID NO: 181183 - DNA, 33 bp, Homo sapien
cttgtgatgaacagcactaggttttggaatcca

SEQ ID NO: 181184 - DNA, 33 bp, Homo sapien
cttgtgatgaacagcattaggttttggaatcca

SEQ ID NO: 181185 - DNA, 33 bp, Homo sapien
tttcactctaatacacactaactaacatgtaac

SEQ ID NO: 181186 - DNA, 33 bp, Homo sapien
tttcactctaatacacgctaactaacatgtaac

SEQ ID NO: 181187 - DNA, 33 bp, Homo sapien
ggaaagagctttgacacactgaacaatatggaa

SEQ ID NO: 181188 - DNA, 33 bp, Homo sapien
ggaaagagctttgacatactgaacaatatggaa

SEQ ID NO: 181189 - DNA, 33 bp, Homo sapien
caggacttggaaataactgtacacactagtcaa

SEQ ID NO: 181190 - DNA, 33 bp, Homo sapien
caggacttggaaataattgtacacactagtcaa

SEQ ID NO: 181191 - DNA, 33 bp, Homo sapien
aaatctagtcctactacgatctacccttaagat

SEQ ID NO: 181192 - DNA, 33 bp, Homo sapien
aaatctagtcctactatgatctacccttaagat

SEQ ID NO: 181193 - DNA, 33 bp, Homo sapien
ttggcacatcaacagcaaagagaagattggagg

SEQ ID NO: 181194 - DNA, 33 bp, Homo sapien
ttggcacatcaacagcgaagagaagattggagg

SEQ ID NO: 181195 - DNA, 33 bp, Homo sapien
tactttggctttttttggtccaactctagttat

SEQ ID NO: 181196 - DNA, 33 bp, Homo sapien
tactttggcttttttttgtccaactctagttat

SEQ ID NO: 181197 - DNA, 33 bp, Homo sapien
caaagatctggagtcaaaggaatacaaagcagt

SEQ ID NO: 181198 - DNA, 33 bp, Homo sapien
caaagatctggagtcagaggaatacaaagcagt

SEQ ID NO: 181199 - DNA, 33 bp, Homo sapien
atacatatagcagtaaatcagtaatcaaaagca

SEQ ID NO: 181200 - DNA, 33 bp, Homo sapien
atacatatagcagtaactcagtaatcaaaagca

SEQ ID NO: 181201 - DNA, 33 bp, Homo sapien
agacacaaaagctccacatatttagagttaagc

SEQ ID NO: 181202 - DNA, 33 bp, Homo sapien
agacacaaaagctccagatatttagagttaagc

SEQ ID NO: 181203 - DNA, 33 bp, Homo sapien
attatacctcaataaactggttttgtaaagagg

SEQ ID NO: 181204 - DNA, 33 bp, Homo sapien
attatacctcaataaagtggttttgtaaagagg

SEQ ID NO: 181205 - DNA, 33 bp, Homo sapien
agtgatagtgagaatacggagatactggaactc

SEQ ID NO: 181206 - DNA, 33 bp, Homo sapien
agtgatagtgagaatatggagatactggaactc

SEQ ID NO: 181207 - DNA, 33 bp, Homo sapien
atgttctgcaactgcaaacagctcaggtgaaag

SEQ ID NO: 181208 - DNA, 33 bp, Homo sapien
atgttctgcaactgcacacagctcaggtgaaag

SEQ ID NO: 181209 - DNA, 33 bp, Homo sapien
cacatcaaagtggttaaatgtcaaagttcaaaa

SEQ ID NO: 181210 - DNA, 33 bp, Homo sapien
cacatcaaagtggttacatgtcaaagttcaaaa

SEQ ID NO: 181211 - DNA, 33 bp, Homo sapien
atcttctagttgggaacatactttggaattcac

SEQ ID NO: 181212 - DNA, 33 bp, Homo sapien
atcttctagttgggaatatactttggaattcac

SEQ ID NO: 181213 - DNA, 33 bp, Homo sapien
ttcacatacgggagaaggaaattagagccttgt

SEQ ID NO: 181214 - DNA, 33 bp, Homo sapien
ttcacatacgggagaatgaaattagagccttgt

SEQ ID NO: 181215 - DNA, 33 bp, Homo sapien
tgtgaccatcttacagacaaaatcaatgtgtag

SEQ ID NO: 181216 - DNA, 33 bp, Homo sapien
tgtgaccatcttacaggcaaaatcaatgtgtag

SEQ ID NO: 181217 - DNA, 33 bp, Homo sapien
aactttgtcttgacaacttctaaactgaatctt

SEQ ID NO: 181218 - DNA, 33 bp, Homo sapien
aactttgtcttgacaatttctaaactgaatctt

SEQ ID NO: 181219 - DNA, 33 bp, Homo sapien
taccaattttctctcaactatgattctcattct

SEQ ID NO: 181220 - DNA, 33 bp, Homo sapien
taccaattttctctcacctatgattctcattct

SEQ ID NO: 181221 - DNA, 33 bp, Homo sapien
tactacagtgaacatacagacttaacgttactc

SEQ ID NO: 181222 - DNA, 33 bp, Homo sapien
tactacagtgaacatatagacttaacgttactc

SEQ ID NO: 181223 - DNA, 33 bp, Homo sapien
agctcctctaaagtcaagaatcatagcacccat

SEQ ID NO: 181224 - DNA, 33 bp, Homo sapien
agctcctctaaagtcaggaatcatagcacccat

SEQ ID NO: 181225 - DNA, 33 bp, Homo sapien
tttaaatttagcacaaaccaagtagaatctgga

SEQ ID NO: 181226 - DNA, 33 bp, Homo sapien
tttaaatttagcacaatccaagtagaatctgga

SEQ ID NO: 181227 - DNA, 33 bp, Homo sapien
gctaggccagtactgcaaaaatatttgttaagc

SEQ ID NO: 181228 - DNA, 33 bp, Homo sapien
gctaggccagtactgcgaaaatatttgttaagc

SEQ ID NO: 181229 - DNA, 33 bp, Homo sapien
ttttgatattttgatccacagctatactaatag

SEQ ID NO: 181230 - DNA, 33 bp, Homo sapien
ttttgatattttgatcgacagctatactaatag

SEQ ID NO: 181231 - DNA, 33 bp, Homo sapien
aaaaaactgacttgtacaaacaaacatgagaat

SEQ ID NO: 181232 - DNA, 33 bp, Homo sapien
aaaaaactgacttgtagaaacaaacatgagaat

SEQ ID NO: 181233 - DNA, 33 bp, Homo sapien
aatgagagcacataggacattggctaactccag

SEQ ID NO: 181234 - DNA, 33 bp, Homo sapien
aatgagagcacatagggcattggctaactccag

SEQ ID NO: 181235 - DNA, 33 bp, Homo sapien
gcaatgggaagtgataccaacaaatatttttta

SEQ ID NO: 181236 - DNA, 33 bp, Homo sapien
gcaatgggaagtgatagcaacaaatatttttta

SEQ ID NO: 181237 - DNA, 33 bp, Homo sapien
tcagggagtagtaagaactttgaagtctggagg

SEQ ID NO: 181238 - DNA, 33 bp, Homo sapien
tcagggagtagtaagagctttgaagtctggagg

SEQ ID NO: 181239 - DNA, 33 bp, Homo sapien
aagccaccctgaaaaggctacataccatacatt

SEQ ID NO: 181240 - DNA, 33 bp, Homo sapien
aagccaccctgaaaagtctacataccatacatt

SEQ ID NO: 181241 - DNA, 33 bp, Homo sapien
attaaaaaataaaaaacagtgctaacatatata

SEQ ID NO: 181242 - DNA, 33 bp, Homo sapien
attaaaaaataaaaaagagtgctaacatatata

SEQ ID NO: 181243 - DNA, 33 bp, Homo sapien
tacctcatcttcctcacgtacaaacaggaataa

SEQ ID NO: 181244 - DNA, 33 bp, Homo sapien
tacctcatcttcctcatgtacaaacaggaataa

SEQ ID NO: 181245 - DNA, 33 bp, Homo sapien
taacctcttagcaacaatgccacaggttatatc

SEQ ID NO: 181246 - DNA, 33 bp, Homo sapien
taacctcttagcaacactgccacaggttatatc

SEQ ID NO: 181247 - DNA, 33 bp, Homo sapien
ttaaactggaaatacgaagcccttgaatcccaa

SEQ ID NO: 181248 - DNA, 33 bp, Homo sapien
ttaaactggaaatacgcagcccttgaatcccaa

SEQ ID NO: 181249 - DNA, 33 bp, Homo sapien
actctaaacctaaaagactgagaccaggttcac

SEQ ID NO: 181250 - DNA, 33 bp, Homo sapien
actctaaacctaaaagcctgagaccaggttcac

SEQ ID NO: 181251 - DNA, 33 bp, Homo sapien
aagcttagattggaggaatatgaaattattgtt

SEQ ID NO: 181252 - DNA, 33 bp, Homo sapien
aagcttagattggagggatatgaaattattgtt

SEQ ID NO: 181253 - DNA, 33 bp, Homo sapien
aagttctcgcaatatcaaaagcactttgaaagt

SEQ ID NO: 181254 - DNA, 33 bp, Homo sapien
aagttctcgcaatatccaaagcactttgaaagt

SEQ ID NO: 181255 - DNA, 33 bp, Homo sapien
tttaggttatatggaccagattcattcttgatg

SEQ ID NO: 181256 - DNA, 33 bp, Homo sapien
tttaggttatatggactagattcattcttgatg

SEQ ID NO: 181257 - DNA, 33 bp, Homo sapien
tagtattttgcttttacgagtcactcaaatggt

SEQ ID NO: 181258 - DNA, 33 bp, Homo sapien
tagtattttgcttttatgagtcactcaaatggt

SEQ ID NO: 181259 - DNA, 33 bp, Homo sapien
cctctgctttactgacgcctttcctactgccta

SEQ ID NO: 181260 - DNA, 33 bp, Homo sapien
cctctgctttactgactcctttcctactgccta

SEQ ID NO: 181261 - DNA, 33 bp, Homo sapien
tcataatgaagaaaatgaggtgtagcaaagtta

SEQ ID NO: 181262 - DNA, 33 bp, Homo sapien
tcataatgaagaaaattaggtgtagcaaagtta

SEQ ID NO: 181263 - DNA, 33 bp, Homo sapien
aatacaaagcttattacaccaagtcacatgact

SEQ ID NO: 181264 - DNA, 33 bp, Homo sapien
aatacaaagcttattataccaagtcacatgact

SEQ ID NO: 181265 - DNA, 33 bp, Homo sapien
ttattctagttctacaatagttcccagaggttc

SEQ ID NO: 181266 - DNA, 33 bp, Homo sapien
ttattctagttctacagtagttcccagaggttc

SEQ ID NO: 181267 - DNA, 33 bp, Homo sapien
aatttctattctaccacggaatctcctaaaaca

SEQ ID NO: 181268 - DNA, 33 bp, Homo sapien
aatttctattctaccatggaatctcctaaaaca

SEQ ID NO: 181269 - DNA, 33 bp, Homo sapien
ctggcaatagagagaaagatggcagaattttgc

SEQ ID NO: 181270 - DNA, 33 bp, Homo sapien
ctggcaatagagagaaggatggcagaattttgc

SEQ ID NO: 181271 - DNA, 33 bp, Homo sapien
gaggattccagaactcaaaaggatataatgttt

SEQ ID NO: 181272 - DNA, 33 bp, Homo sapien
gaggattccagaactcgaaaggatataatgttt

SEQ ID NO: 181273 - DNA, 33 bp, Homo sapien
gtacagtttgcaacaacgaaaacctgcaaatag

SEQ ID NO: 181274 - DNA, 33 bp, Homo sapien
gtacagtttgcaacaatgaaaacctgcaaatag

SEQ ID NO: 181275 - DNA, 33 bp, Homo sapien
aaggctgtcttcatagcagtagcatgagatttg

SEQ ID NO: 181276 - DNA, 33 bp, Homo sapien
aaggctgtcttcatagtagtagcatgagatttg

SEQ ID NO: 181277 - DNA, 33 bp, Homo sapien
aactgattttgaagacaaatacgactctagtgt

SEQ ID NO: 181278 - DNA, 33 bp, Homo sapien
aactgattttgaagacgaatacgactctagtgt

SEQ ID NO: 181279 - DNA, 33 bp, Homo sapien
tcacttctgaccgaaacacactctcaaaagctc

SEQ ID NO: 181280 - DNA, 33 bp, Homo sapien
tcacttctgaccgaaatacactctcaaaagctc

SEQ ID NO: 181281 - DNA, 33 bp, Homo sapien
tcttcttgtgctttagaagtcttacggcaaaaa

SEQ ID NO: 181282 - DNA, 33 bp, Homo sapien
tcttcttgtgctttaggagtcttacggcaaaaa

SEQ ID NO: 181283 - DNA, 33 bp, Homo sapien
tttgctctagaaatacaaaagatgtctcttaga

SEQ ID NO: 181284 - DNA, 33 bp, Homo sapien
tttgctctagaaatacgaaagatgtctcttaga

SEQ ID NO: 181285 - DNA, 33 bp, Homo sapien
tccttcctttttttcaacaaagtgagatgcaga

SEQ ID NO: 181286 - DNA, 33 bp, Homo sapien
tccttcctttttttcagcaaagtgagatgcaga

SEQ ID NO: 181287 - DNA, 33 bp, Homo sapien
caatccagaaggtataggtacaatcaaataatg

SEQ ID NO: 181288 - DNA, 33 bp, Homo sapien
caatccagaaggtatatgtacaatcaaataatg

SEQ ID NO: 181289 - DNA, 33 bp, Homo sapien
gagaccataaagtctacaggttggagtgttgtt

SEQ ID NO: 181290 - DNA, 33 bp, Homo sapien
gagaccataaagtctataggttggagtgttgtt

SEQ ID NO: 181291 - DNA, 33 bp, Homo sapien
tttttttcagtgattacatggacaaaaatttct

SEQ ID NO: 181292 - DNA, 33 bp, Homo sapien
tttttttcagtgattatatggacaaaaatttct

SEQ ID NO: 181293 - DNA, 33 bp, Homo sapien
atgaagtcttgaccaaaggtacacactcaggca

SEQ ID NO: 181294 - DNA, 33 bp, Homo sapien
atgaagtcttgaccaatggtacacactcaggca

SEQ ID NO: 181295 - DNA, 33 bp, Homo sapien
aggttaagtgatcaaactgtaaatacatcccaa

SEQ ID NO: 181296 - DNA, 33 bp, Homo sapien
aggttaagtgatcaaattgtaaatacatcccaa

SEQ ID NO: 181297 - DNA, 33 bp, Homo sapien
cctgtacatagtatgcaattccaacctgaacct

SEQ ID NO: 181298 - DNA, 33 bp, Homo sapien
cctgtacatagtatgcgattccaacctgaacct

SEQ ID NO: 181299 - DNA, 33 bp, Homo sapien
ctctatgtcttctgtaggaaaggccacaaagga

SEQ ID NO: 181300 - DNA, 33 bp, Homo sapien
ctctatgtcttctgtatgaaaggccacaaagga

SEQ ID NO: 181301 - DNA, 33 bp, Homo sapien
ctataatacagagaaaatttaagtgcaaatagt

SEQ ID NO: 181302 - DNA, 33 bp, Homo sapien
ctataatacagagaaactttaagtgcaaatagt

SEQ ID NO: 181303 - DNA, 33 bp, Homo sapien
tacttacgggtgtacacagagagtttaagatct

SEQ ID NO: 181304 - DNA, 33 bp, Homo sapien
tacttacgggtgtacatagagagtttaagatct

SEQ ID NO: 181305 - DNA, 33 bp, Homo sapien
gcattgtaactttggacgagagatttaaccatt

SEQ ID NO: 181306 - DNA, 33 bp, Homo sapien
gcattgtaactttggatgagagatttaaccatt

SEQ ID NO: 181307 - DNA, 33 bp, Homo sapien
agatatttctcaaccactgctaccagaactaca

SEQ ID NO: 181308 - DNA, 33 bp, Homo sapien
agatatttctcaaccattgctaccagaactaca

SEQ ID NO: 181309 - DNA, 33 bp, Homo sapien
tagttgttaatgctgacgtaattgtttcctgct

SEQ ID NO: 181310 - DNA, 33 bp, Homo sapien
tagttgttaatgctgatgtaattgtttcctgct

SEQ ID NO: 181311 - DNA, 33 bp, Homo sapien
agggatgctgagtctaagcaaggcagataaagc

SEQ ID NO: 181312 - DNA, 33 bp, Homo sapien
agggatgctgagtctaggcaaggcagataaagc

SEQ ID NO: 181313 - DNA, 33 bp, Homo sapien
ctacaggtctactttagggaagcctgaatctct

SEQ ID NO: 181314 - DNA, 33 bp, Homo sapien
ctacaggtctactttatggaagcctgaatctct

SEQ ID NO: 181315 - DNA, 33 bp, Homo sapien
taatgaccaaccacagaatgtacttcatgcttt

SEQ ID NO: 181316 - DNA, 33 bp, Homo sapien
taatgaccaaccacaggatgtacttcatgcttt

SEQ ID NO: 181317 - DNA, 33 bp, Homo sapien
caccagcagtgtataaatgagacagggtctcac

SEQ ID NO: 181318 - DNA, 33 bp, Homo sapien
caccagcagtgtataagtgagacagggtctcac

SEQ ID NO: 181319 - DNA, 33 bp, Homo sapien
gagcaccttttaatgcacttatctgccatccac

SEQ ID NO: 181320 - DNA, 33 bp, Homo sapien
gagcaccttttaatgcgcttatctgccatccac

SEQ ID NO: 181321 - DNA, 33 bp, Homo sapien
ggaaaagcagacctaaaagaaatcaagagtcag

SEQ ID NO: 181322 - DNA, 33 bp, Homo sapien
ggaaaagcagacctaagagaaatcaagagtcag

SEQ ID NO: 181323 - DNA, 33 bp, Homo sapien
acattcctgtgtccaaaacaaaagtcctgaggt

SEQ ID NO: 181324 - DNA, 33 bp, Homo sapien
acattcctgtgtccaagacaaaagtcctgaggt

SEQ ID NO: 181325 - DNA, 33 bp, Homo sapien
agtcagggtgtggtcaacttgccctgccgttaa

SEQ ID NO: 181326 - DNA, 33 bp, Homo sapien
agtcagggtgtggtcaccttgccctgccgttaa

SEQ ID NO: 181327 - DNA, 33 bp, Homo sapien
tgaacgtttcacctaccacatgagagatcttgt

SEQ ID NO: 181328 - DNA, 33 bp, Homo sapien
tgaacgtttcacctacgacatgagagatcttgt

SEQ ID NO: 181329 - DNA, 33 bp, Homo sapien
tgtctgttaacaaagaagggagctatccgggat

SEQ ID NO: 181330 - DNA, 33 bp, Homo sapien
tgtctgttaacaaagatgggagctatccgggat

SEQ ID NO: 181331 - DNA, 33 bp, Homo sapien
attctgtttggctaaagggaagtggtaagaacc

SEQ ID NO: 181332 - DNA, 33 bp, Homo sapien
attctgtttggctaaatggaagtggtaagaacc

SEQ ID NO: 181333 - DNA, 33 bp, Homo sapien
accatagactgccaggaaatttggacccaggct

SEQ ID NO: 181334 - DNA, 33 bp, Homo sapien
accatagactgccagggaatttggacccaggct

SEQ ID NO: 181335 - DNA, 33 bp, Homo sapien
ggaggcattgctgtaaactaggagaataatcta

SEQ ID NO: 181336 - DNA, 33 bp, Homo sapien
ggaggcattgctgtaatctaggagaataatcta

SEQ ID NO: 181337 - DNA, 33 bp, Homo sapien
atttaaaagatgaggaagcattagcctggagtg

SEQ ID NO: 181338 - DNA, 33 bp, Homo sapien
atttaaaagatgaggaggcattagcctggagtg

SEQ ID NO: 181339 - DNA, 33 bp, Homo sapien
tggaaagaatgatacacaaaggagaaccagaca

SEQ ID NO: 181340 - DNA, 33 bp, Homo sapien
tggaaagaatgatacataaaggagaaccagaca

SEQ ID NO: 181341 - DNA, 33 bp, Homo sapien
ttttgatatctctcttaaaaaaaatcacctttt

SEQ ID NO: 181342 - DNA, 33 bp, Homo sapien
ttttgatatctctcttcaaaaaaatcacctttt

SEQ ID NO: 181343 - DNA, 33 bp, Homo sapien
cgcattaaaagcctgccccaaattgtgaggttc

SEQ ID NO: 181344 - DNA, 33 bp, Homo sapien
cgcattaaaagcctgctccaaattgtgaggttc

SEQ ID NO: 181345 - DNA, 33 bp, Homo sapien
aacacatcatttcccaatattgaatcaggaaga

SEQ ID NO: 181346 - DNA, 33 bp, Homo sapien
aacacatcatttcccagtattgaatcaggaaga

SEQ ID NO: 181347 - DNA, 33 bp, Homo sapien
cttggatggatctacaagatgatgcaaggtcat

SEQ ID NO: 181348 - DNA, 33 bp, Homo sapien
cttggatggatctacaggatgatgcaaggtcat

SEQ ID NO: 181349 - DNA, 33 bp, Homo sapien
ctaagtcattatatccactgagatttgtatcat

SEQ ID NO: 181350 - DNA, 33 bp, Homo sapien
ctaagtcattatatcccctgagatttgtatcat

SEQ ID NO: 181351 - DNA, 33 bp, Homo sapien
gaattgcgtttactataaagaatgcaattagaa

SEQ ID NO: 181352 - DNA, 33 bp, Homo sapien
gaattgcgtttactatgaagaatgcaattagaa

SEQ ID NO: 181353 - DNA, 33 bp, Homo sapien
tcaggcttcaaagtaccctgctctatactccag

SEQ ID NO: 181354 - DNA, 33 bp, Homo sapien
tcaggcttcaaagtactctgctctatactccag

SEQ ID NO: 181355 - DNA, 33 bp, Homo sapien
atgaccgaaacacctcccattagaccccacttc

SEQ ID NO: 181356 - DNA, 33 bp, Homo sapien
atgaccgaaacacctcgcattagaccccacttc

SEQ ID NO: 181357 - DNA, 33 bp, Homo sapien
ttgctttacgtacggaataaggagaaggtagcc

SEQ ID NO: 181358 - DNA, 33 bp, Homo sapien
ttgctttacgtacggagtaaggagaaggtagcc

SEQ ID NO: 181359 - DNA, 33 bp, Homo sapien
ttcccaagtactgtcacatttcttctgtatgaa

SEQ ID NO: 181360 - DNA, 33 bp, Homo sapien
ttcccaagtactgtcatatttcttctgtatgaa

SEQ ID NO: 181361 - DNA, 33 bp, Homo sapien
ccacagttatagagcacgtggatgtaggagtac

SEQ ID NO: 181362 - DNA, 33 bp, Homo sapien
ccacagttatagagcatgtggatgtaggagtac

SEQ ID NO: 181363 - DNA, 33 bp, Homo sapien
tgtacatgctttcctactacctcatgtacctta

SEQ ID NO: 181364 - DNA, 33 bp, Homo sapien
tgtacatgctttcctattacctcatgtacctta

SEQ ID NO: 181365 - DNA, 33 bp, Homo sapien
aacagatttacagtgacataaaaccttcccagg

SEQ ID NO: 181366 - DNA, 33 bp, Homo sapien
aacagatttacagtgatataaaaccttcccagg

SEQ ID NO: 181367 - DNA, 33 bp, Homo sapien
tgtgtgtttgactctacaaatgtctatgttttc

SEQ ID NO: 181368 - DNA, 33 bp, Homo sapien
tgtgtgtttgactctataaatgtctatgttttc

SEQ ID NO: 181369 - DNA, 33 bp, Homo sapien
agcagcagattgaatcacactcaccaagatgtt

SEQ ID NO: 181370 - DNA, 33 bp, Homo sapien
agcagcagattgaatcgcactcaccaagatgtt

SEQ ID NO: 181371 - DNA, 33 bp, Homo sapien
atgcaaatgttactctaacctggaaactccctc

SEQ ID NO: 181372 - DNA, 33 bp, Homo sapien
atgcaaatgttactctcacctggaaactccctc

SEQ ID NO: 181373 - DNA, 33 bp, Homo sapien
cctttgaaaagataacaaacaacaaaagtgaca

SEQ ID NO: 181374 - DNA, 33 bp, Homo sapien
cctttgaaaagataaccaacaacaaaagtgaca

SEQ ID NO: 181375 - DNA, 33 bp, Homo sapien
gccattctccgtgaccacttcttattacagtgg

SEQ ID NO: 181376 - DNA, 33 bp, Homo sapien
gccattctccgtgaccccttcttattacagtgg

SEQ ID NO: 181377 - DNA, 33 bp, Homo sapien
ctcactctttgttctaaatggttcctaaatagg

SEQ ID NO: 181378 - DNA, 33 bp, Homo sapien
ctcactctttgttctagatggttcctaaatagg

SEQ ID NO: 181379 - DNA, 33 bp, Homo sapien
acaccaaatggccagcccttgatgtacaataga

SEQ ID NO: 181380 - DNA, 33 bp, Homo sapien
acaccaaatggccagctcttgatgtacaataga

SEQ ID NO: 181381 - DNA, 33 bp, Homo sapien
agatcattttctagaccaagggctgcagaagaa

SEQ ID NO: 181382 - DNA, 33 bp, Homo sapien
agatcattttctagactaagggctgcagaagaa

SEQ ID NO: 181383 - DNA, 33 bp, Homo sapien
ttcctggtatataacaaattctcaattaataca

SEQ ID NO: 181384 - DNA, 33 bp, Homo sapien
ttcctggtatataacagattctcaattaataca

SEQ ID NO: 181385 - DNA, 33 bp, Homo sapien
tgtgtactcccatgcacattgcagcactattca

SEQ ID NO: 181386 - DNA, 33 bp, Homo sapien
tgtgtactcccatgcatattgcagcactattca

SEQ ID NO: 181387 - DNA, 33 bp, Homo sapien
ctgaaaaatataagacaattgtagatctcatat

SEQ ID NO: 181388 - DNA, 33 bp, Homo sapien
ctgaaaaatataagacgattgtagatctcatat

SEQ ID NO: 181389 - DNA, 33 bp, Homo sapien
cttccacttgaaacaaccagaaaaattggataa

SEQ ID NO: 181390 - DNA, 33 bp, Homo sapien
cttccacttgaaacaatcagaaaaattggataa

SEQ ID NO: 181391 - DNA, 33 bp, Homo sapien
gggttgggaaactttccacctagagcagtactt

SEQ ID NO: 181392 - DNA, 33 bp, Homo sapien
gggttgggaaactttctacctagagcagtactt

SEQ ID NO: 181393 - DNA, 33 bp, Homo sapien
atttgcttattctaccaatttctcagttctaac

SEQ ID NO: 181394 - DNA, 33 bp, Homo sapien
atttgcttattctaccgatttctcagttctaac

SEQ ID NO: 181395 - DNA, 33 bp, Homo sapien
agtcagctggtaagtgaaatatgaatgtatttt

SEQ ID NO: 181396 - DNA, 33 bp, Homo sapien
agtcagctggtaagtggaatatgaatgtatttt

SEQ ID NO: 181397 - DNA, 33 bp, Homo sapien
agcagaaatcctacaaaccagaatccagaattt

SEQ ID NO: 181398 - DNA, 33 bp, Homo sapien
agcagaaatcctacaagccagaatccagaattt

SEQ ID NO: 181399 - DNA, 33 bp, Homo sapien
ttactcaacttgcagaactttttgaccaccaca

SEQ ID NO: 181400 - DNA, 33 bp, Homo sapien
ttactcaacttgcagacctttttgaccaccaca

SEQ ID NO: 181401 - DNA, 33 bp, Homo sapien
gatgaagagttggaaactggaaaaacatatact

SEQ ID NO: 181402 - DNA, 33 bp, Homo sapien
gatgaagagttggaaattggaaaaacatatact

SEQ ID NO: 181403 - DNA, 33 bp, Homo sapien
cttggggcagaggaatcagaatcctttcctggc

SEQ ID NO: 181404 - DNA, 33 bp, Homo sapien
cttggggcagaggaatgagaatcctttcctggc

SEQ ID NO: 181405 - DNA, 33 bp, Homo sapien
tctggtcgttagctgaaggatataagcctagaa

SEQ ID NO: 181406 - DNA, 33 bp, Homo sapien
tctggtcgttagctgagggatataagcctagaa

SEQ ID NO: 181407 - DNA, 33 bp, Homo sapien
tttcatctgctgtcagaaacggaaatgtgattg

SEQ ID NO: 181408 - DNA, 33 bp, Homo sapien
tttcatctgctgtcaggaacggaaatgtgattg

SEQ ID NO: 181409 - DNA, 33 bp, Homo sapien
tttttctttacctaaagtgatagacaagaaatc

SEQ ID NO: 181410 - DNA, 33 bp, Homo sapien
tttttctttacctaaattgatagacaagaaatc

SEQ ID NO: 181411 - DNA, 33 bp, Homo sapien
gaggattgcttctccaaagaggagtcaatggca

SEQ ID NO: 181412 - DNA, 33 bp, Homo sapien
gaggattgcttctccagagaggagtcaatggca

SEQ ID NO: 181413 - DNA, 33 bp, Homo sapien
caaaatctggtttaatgaagatctgtgaaggag

SEQ ID NO: 181414 - DNA, 33 bp, Homo sapien
caaaatctggtttaattaagatctgtgaaggag

SEQ ID NO: 181415 - DNA, 33 bp, Homo sapien
gaggcttctagaagtgcatgggcttcttcagag

SEQ ID NO: 181416 - DNA, 33 bp, Homo sapien
gaggcttctagaagtgtatgggcttcttcagag

SEQ ID NO: 181417 - DNA, 33 bp, Homo sapien
tgttatactctttaccactctgcgacatcaact

SEQ ID NO: 181418 - DNA, 33 bp, Homo sapien
tgttatactctttaccgctctgcgacatcaact

SEQ ID NO: 181419 - DNA, 33 bp, Homo sapien
cttttcttgaagacaccattctcttatctacga

SEQ ID NO: 181420 - DNA, 33 bp, Homo sapien
cttttcttgaagacacgattctcttatctacga

SEQ ID NO: 181421 - DNA, 33 bp, Homo sapien
caacctatcaatttagaagtcagtggcatgagt

SEQ ID NO: 181422 - DNA, 33 bp, Homo sapien
caacctatcaatttaggagtcagtggcatgagt

SEQ ID NO: 181423 - DNA, 33 bp, Homo sapien
ttgggagggcatgtaaacttcaaaacccttcca

SEQ ID NO: 181424 - DNA, 33 bp, Homo sapien
ttgggagggcatgtaagcttcaaaacccttcca

SEQ ID NO: 181425 - DNA, 33 bp, Homo sapien
gaccttgctgacaaaacgggttgtagttaagca

SEQ ID NO: 181426 - DNA, 33 bp, Homo sapien
gaccttgctgacaaaatgggttgtagttaagca

SEQ ID NO: 181427 - DNA, 33 bp, Homo sapien
tggttgaccatctacacacaaaggaccaaaagc

SEQ ID NO: 181428 - DNA, 33 bp, Homo sapien
tggttgaccatctacatacaaaggaccaaaagc

SEQ ID NO: 181429 - DNA, 33 bp, Homo sapien
tccaagccatgtgtgacctttctgaattattct

SEQ ID NO: 181430 - DNA, 33 bp, Homo sapien
tccaagccatgtgtgagctttctgaattattct

SEQ ID NO: 181431 - DNA, 33 bp, Homo sapien
agtgacattaccaagaaatgaagagagaaggtc

SEQ ID NO: 181432 - DNA, 33 bp, Homo sapien
agtgacattaccaagagatgaagagagaaggtc

SEQ ID NO: 181433 - DNA, 33 bp, Homo sapien
aagtaagcacactcaactgatcccagtgaagtt

SEQ ID NO: 181434 - DNA, 33 bp, Homo sapien
aagtaagcacactcaattgatcccagtgaagtt

SEQ ID NO: 181435 - DNA, 33 bp, Homo sapien
tttatctcttactagcagagtgactttgggtca

SEQ ID NO: 181436 - DNA, 33 bp, Homo sapien
tttatctcttactagcggagtgactttgggtca

SEQ ID NO: 181437 - DNA, 33 bp, Homo sapien
gtgttccctcctatacacaagcacagaaaatgc

SEQ ID NO: 181438 - DNA, 33 bp, Homo sapien
gtgttccctcctatacccaagcacagaaaatgc

SEQ ID NO: 181439 - DNA, 33 bp, Homo sapien
aacaagcttcatagacacattcctaccaacaat

SEQ ID NO: 181440 - DNA, 33 bp, Homo sapien
aacaagcttcatagactcattcctaccaacaat

SEQ ID NO: 181441 - DNA, 33 bp, Homo sapien
aatctctaagtgatgcagagccctttggtttct

SEQ ID NO: 181442 - DNA, 33 bp, Homo sapien
aatctctaagtgatgcggagccctttggtttct

SEQ ID NO: 181443 - DNA, 33 bp, Homo sapien
ccaagctctgtaatcacagtagaggaaaaccag

SEQ ID NO: 181444 - DNA, 33 bp, Homo sapien
ccaagctctgtaatcatagtagaggaaaaccag

SEQ ID NO: 181445 - DNA, 33 bp, Homo sapien
taaaatagtcactacgccaatgtaccatatttg

SEQ ID NO: 181446 - DNA, 33 bp, Homo sapien
taaaatagtcactacgtcaatgtaccatatttg

SEQ ID NO: 181447 - DNA, 33 bp, Homo sapien
ggaatctgagaaaatgacagaagcagaaaggtc

SEQ ID NO: 181448 - DNA, 33 bp, Homo sapien
ggaatctgagaaaatggcagaagcagaaaggtc

SEQ ID NO: 181449 - DNA, 33 bp, Homo sapien
tgaatccaaatacttaaagccaaatgatcttca

SEQ ID NO: 181450 - DNA, 33 bp, Homo sapien
tgaatccaaatacttacagccaaatgatcttca

SEQ ID NO: 181451 - DNA, 33 bp, Homo sapien; identical to SEQ ID NO: 181449

SEQ ID NO: 181452 - DNA, 33 bp, Homo sapien; identical to SEQ ID NO: 181450

SEQ ID NO: 181453 - DNA, 33 bp, Homo sapien
aacagaatgattgcccaaggtcacaccaataag

SEQ ID NO: 181454 - DNA, 33 bp, Homo sapien
aacagaatgattgcccgaggtcacaccaataag

SEQ ID NO: 181455 - DNA, 33 bp, Homo sapien
ctaatggtgttttgaacaagcatttagaaaatt

SEQ ID NO: 181456 - DNA, 33 bp, Homo sapien
ctaatggtgttttgaataagcatttagaaaatt

SEQ ID NO: 181457 - DNA, 33 bp, Homo sapien
attggctaaaactcaactacaggcctacatata

SEQ ID NO: 181458 - DNA, 33 bp, Homo sapien
attggctaaaactcaattacaggcctacatata

SEQ ID NO: 181459 - DNA, 33 bp, Homo sapien
tcaaatatatgacttacgaagttttcctgaata

SEQ ID NO: 181460 - DNA, 33 bp, Homo sapien
tcaaatatatgacttatgaagttttcctgaata

SEQ ID NO: 181461 - DNA, 33 bp, Homo sapien
gtggagaaaagggaaccgctgtacattgttggt

SEQ ID NO: 181462 - DNA, 33 bp, Homo sapien
gtggagaaaagggaactgctgtacattgttggt

SEQ ID NO: 181463 - DNA, 33 bp, Homo sapien
acaagccaaggacagaaaaatatattctgcatg

SEQ ID NO: 181464 - DNA, 33 bp, Homo sapien
acaagccaaggacagagaaatatattctgcatg

SEQ ID NO: 181465 - DNA, 33 bp, Homo sapien
ggtggtggaagaaagcagctttattgaagtggc

SEQ ID NO: 181466 - DNA, 33 bp, Homo sapien
ggtggtggaagaaagcggctttattgaagtggc

SEQ ID NO: 181467 - DNA, 33 bp, Homo sapien
gggaagctatctactaccgtgtgtaaccggggc

SEQ ID NO: 181468 - DNA, 33 bp, Homo sapien
gggaagctatctactatcgtgtgtaaccggggc

SEQ ID NO: 181469 - DNA, 33 bp, Homo sapien
ccaaactcctctgctaccttgttatctacttag

SEQ ID NO: 181470 - DNA, 33 bp, Homo sapien
ccaaactcctctgctatcttgttatctacttag

SEQ ID NO: 181471 - DNA, 33 bp, Homo sapien
tgctaaccgatagttacacctttaatgtctttt

SEQ ID NO: 181472 - DNA, 33 bp, Homo sapien
tgctaaccgatagttatacctttaatgtctttt

SEQ ID NO: 181473 - DNA, 33 bp, Homo sapien
gtatatatattcaatacaccgatgagatgagtc

SEQ ID NO: 181474 - DNA, 33 bp, Homo sapien
gtatatatattcaatagaccgatgagatgagtc

SEQ ID NO: 181475 - DNA, 33 bp, Homo sapien
ggctaagagaataactaagctcaaaactgacaa

SEQ ID NO: 181476 - DNA, 33 bp, Homo sapien
ggctaagagaataactgagctcaaaactgacaa

SEQ ID NO: 181477 - DNA, 33 bp, Homo sapien
actgccactacagatagattatggttcagatca

SEQ ID NO: 181478 - DNA, 33 bp, Homo sapien
actgccactacagatatattatggttcagatca

SEQ ID NO: 181479 - DNA, 33 bp, Homo sapien
atcctccaaacctaaacagcaagaggcattcca

SEQ ID NO: 181480 - DNA, 33 bp, Homo sapien
atcctccaaacctaaagagcaagaggcattcca

SEQ ID NO: 181481 - DNA, 33 bp, Homo sapien
tgctttgggaagggaaatagttggagcaagatg

SEQ ID NO: 181482 - DNA, 33 bp, Homo sapien
tgctttgggaagggaagtagttggagcaagatg

SEQ ID NO: 181483 - DNA, 33 bp, Homo sapien
tagaaagaacttgcaggatctccacataaacag

SEQ ID NO: 181484 - DNA, 33 bp, Homo sapien
tagaaagaacttgcagtatctccacataaacag

SEQ ID NO: 181485 - DNA, 33 bp, Homo sapien
ccaacagtaaatctagaccaataatgtgtgttt

SEQ ID NO: 181486 - DNA, 33 bp, Homo sapien
ccaacagtaaatctaggccaataatgtgtgttt

SEQ ID NO: 181487 - DNA, 33 bp, Homo sapien
ggctactatttagcaaatacagtcatgtcagtt

SEQ ID NO: 181488 - DNA, 33 bp, Homo sapien
ggctactatttagcaagtacagtcatgtcagtt

SEQ ID NO: 181489 - DNA, 33 bp, Homo sapien
tgcctctctaacttcaaccctttgtgcttcctc

SEQ ID NO: 181490 - DNA, 33 bp, Homo sapien
tgcctctctaacttcatccctttgtgcttcctc

SEQ ID NO: 181491 - DNA, 33 bp, Homo sapien
ggccattgcccatggaacacaaaagcctggctc

SEQ ID NO: 181492 - DNA, 33 bp, Homo sapien
ggccattgcccatggatcacaaaagcctggctc

SEQ ID NO: 181493 - DNA, 33 bp, Homo sapien
cagggtgcatattagcagagtattttctggtgg

SEQ ID NO: 181494 - DNA, 33 bp, Homo sapien
cagggtgcatattagcggagtattttctggtgg

SEQ ID NO: 181495 - DNA, 33 bp, Homo sapien
gaggtctgcagtgagaataggctgtgcctcagt

SEQ ID NO: 181496 - DNA, 33 bp, Homo sapien
gaggtctgcagtgagagtaggctgtgcctcagt

SEQ ID NO: 181497 - DNA, 33 bp, Homo sapien
tggtgatggaagatacacagacattaaatcatt

SEQ ID NO: 181498 - DNA, 33 bp, Homo sapien
tggtgatggaagatacccagacattaaatcatt

SEQ ID NO: 181499 - DNA, 33 bp, Homo sapien
gatcaggatacaaagacactaagctgtaaatga

SEQ ID NO: 181500 - DNA, 33 bp, Homo sapien
gatcaggatacaaagatactaagctgtaaatga

SEQ ID NO: 181501 - DNA, 33 bp, Homo sapien
taatatttaatgattacattcaaggctgtctga

SEQ ID NO: 181502 - DNA, 33 bp, Homo sapien
taatatttaatgattatattcaaggctgtctga

SEQ ID NO: 181503 - DNA, 33 bp, Homo sapien
tcaaagctgaatttaaaagaacaatttactgct

SEQ ID NO: 181504 - DNA, 33 bp, Homo sapien
tcaaagctgaatttaagagaacaatttactgct

SEQ ID NO: 181505 - DNA, 33 bp, Homo sapien
tgagtcacatgactacaagagcaactgtacaaa

SEQ ID NO: 181506 - DNA, 33 bp, Homo sapien
tgagtcacatgactacgagagcaactgtacaaa

SEQ ID NO: 181507 - DNA, 33 bp, Homo sapien
aaatggaattagaaaccctgttgaaatcaataa

SEQ ID NO: 181508 - DNA, 33 bp, Homo sapien
aaatggaattagaaactctgttgaaatcaataa

SEQ ID NO: 181509 - DNA, 33 bp, Homo sapien
cttgttgcatttgctcaaactcccatcacctca

SEQ ID NO: 181510 - DNA, 33 bp, Homo sapien
cttgttgcatttgctctaactcccatcacctca

SEQ ID NO: 181511 - DNA, 33 bp, Homo sapien
tgcacataaacatttaacatggcacttctcata

SEQ ID NO: 181512 - DNA, 33 bp, Homo sapien
tgcacataaacatttagcatggcacttctcata

SEQ ID NO: 181513 - DNA, 33 bp, Homo sapien
caactattaagtggaaaagctagaattagaaat

SEQ ID NO: 181514 - DNA, 33 bp, Homo sapien
caactattaagtggaagagctagaattagaaat

SEQ ID NO: 181515 - DNA, 33 bp, Homo sapien
gtcatgtcctcttttacagaattacgctgcctt

SEQ ID NO: 181516 - DNA, 33 bp, Homo sapien
gtcatgtcctcttttatagaattacgctgcctt

SEQ ID NO: 181517 - DNA, 33 bp, Homo sapien
aaacagggaaggaagaataatttgcaggaattt

SEQ ID NO: 181518 - DNA, 33 bp, Homo sapien
aaacagggaaggaagattaatttgcaggaattt

SEQ ID NO: 181519 - DNA, 33 bp, Homo sapien
ctactgtgggtgagggaaaatcaacagctgctg

SEQ ID NO: 181520 - DNA, 33 bp, Homo sapien
ctactgtgggtgagggcaaatcaacagctgctg

SEQ ID NO: 181521 - DNA, 33 bp, Homo sapien
ggttacagatgtaataaggagaaagaggtaaca

SEQ ID NO: 181522 - DNA, 33 bp, Homo sapien
ggttacagatgtaatatggagaaagaggtaaca

SEQ ID NO: 181523 - DNA, 33 bp, Homo sapien
tacggacagaactctgcagaacaacacttaaga

SEQ ID NO: 181524 - DNA, 33 bp, Homo sapien
tacggacagaactctggagaacaacacttaaga

SEQ ID NO: 181525 - DNA, 33 bp, Homo sapien
cagagatcatggaggaagtagagaaggctgggg

SEQ ID NO: 181526 - DNA, 33 bp, Homo sapien
cagagatcatggaggaggtagagaaggctgggg

SEQ ID NO: 181527 - DNA, 33 bp, Homo sapien
gtggagaaggaatcccggaaagaggaagaaacc

SEQ ID NO: 181528 - DNA, 33 bp, Homo sapien
gtggagaaggaatccctgaaagaggaagaaacc

SEQ ID NO: 181529 - DNA, 33 bp, Homo sapien
gtcctgtctagttccaccttctgccttgtcctg

SEQ ID NO: 181530 - DNA, 33 bp, Homo sapien
gtcctgtctagttccatcttctgccttgtcctg

SEQ ID NO: 181531 - DNA, 33 bp, Homo sapien
tagatggccatttggacggtttcctggttactt

SEQ ID NO: 181532 - DNA, 33 bp, Homo sapien
tagatggccatttggatggtttcctggttactt

SEQ ID NO: 181533 - DNA, 33 bp, Homo sapien
aaaaactctcagtatgcagtagagaaccaaatg

SEQ ID NO: 181534 - DNA, 33 bp, Homo sapien
aaaaactctcagtatggagtagagaaccaaatg

SEQ ID NO: 181535 - DNA, 33 bp, Homo sapien
acccactgttgaaaggccctggaagctctgaat

SEQ ID NO: 181536 - DNA, 33 bp, Homo sapien
acccactgttgaaaggtcctggaagctctgaat

SEQ ID NO: 181537 - DNA, 33 bp, Homo sapien
ccacaatgagataccacgttgcgccagttagaa

SEQ ID NO: 181538 - DNA, 33 bp, Homo sapien
ccacaatgagataccatgttgcgccagttagaa

SEQ ID NO: 181539 - DNA, 33 bp, Homo sapien
tagtcgctgtggaaaacagttttgagatttctc

SEQ ID NO: 181540 - DNA, 33 bp, Homo sapien
tagtcgctgtggaaaatagttttgagatttctc

SEQ ID NO: 181541 - DNA, 33 bp, Homo sapien
tttctacctctctccaatgagtaatctaaatgc

SEQ ID NO: 181542 - DNA, 33 bp, Homo sapien
tttctacctctctccagtgagtaatctaaatgc

SEQ ID NO: 181543 - DNA, 33 bp, Homo sapien
atgacccacagccaaacaggattttttaccact

SEQ ID NO: 181544 - DNA, 33 bp, Homo sapien
atgacccacagccaaataggattttttaccact

SEQ ID NO: 181545 - DNA, 33 bp, Homo sapien
gggatgatgatttcacagagaatggtaggttaa

SEQ ID NO: 181546 - DNA, 33 bp, Homo sapien
gggatgatgatttcacggagaatggtaggttaa

SEQ ID NO: 181547 - DNA, 33 bp, Homo sapien
ataatgtgctatgtccaacgaatgattttatgt

SEQ ID NO: 181548 - DNA, 33 bp, Homo sapien
ataatgtgctatgtccgacgaatgattttatgt

SEQ ID NO: 181549 - DNA, 33 bp, Homo sapien
gaaaatctcttgatcaactataatacattcatg

SEQ ID NO: 181550 - DNA, 33 bp, Homo sapien
gaaaatctcttgatcagctataatacattcatg

SEQ ID NO: 181551 - DNA, 33 bp, Homo sapien
agagtacagagataaccgttaagatgagaatgg

SEQ ID NO: 181552 - DNA, 33 bp, Homo sapien
agagtacagagataactgttaagatgagaatgg

SEQ ID NO: 181553 - DNA, 33 bp, Homo sapien
aaaaaatatataaaaagcaatgtcacagtaaaa

SEQ ID NO: 181554 - DNA, 33 bp, Homo sapien
aaaaaatatataaaaatcaatgtcacagtaaaa

SEQ ID NO: 181555 - DNA, 33 bp, Homo sapien
gataatgtttattgagcccttgtatgctagaga

SEQ ID NO: 181556 - DNA, 33 bp, Homo sapien
gataatgtttattgagtccttgtatgctagaga

SEQ ID NO: 181557 - DNA, 33 bp, Homo sapien
ttctatatgtcttacaaattagaaacatccata

SEQ ID NO: 181558 - DNA, 33 bp, Homo sapien
ttctatatgtcttacacattagaaacatccata

SEQ ID NO: 181559 - DNA, 33 bp, Homo sapien
ggcttctactgaaagacgctcatctcacctctg

SEQ ID NO: 181560 - DNA, 33 bp, Homo sapien
ggcttctactgaaagatgctcatctcacctctg

SEQ ID NO: 181561 - DNA, 33 bp, Homo sapien
aacctttccagacgtcactgaccatatcctctc

SEQ ID NO: 181562 - DNA, 33 bp, Homo sapien
aacctttccagacgtcgctgaccatatcctctc

SEQ ID NO: 181563 - DNA, 33 bp, Homo sapien
ccataattcttacatcaccactgttctgagttg

SEQ ID NO: 181564 - DNA, 33 bp, Homo sapien
ccataattcttacatcgccactgttctgagttg

SEQ ID NO: 181565 - DNA, 33 bp, Homo sapien
ttaaataaaacttccaatataatgaccaaaaaa

SEQ ID NO: 181566 - DNA, 33 bp, Homo sapien
ttaaataaaacttccagtataatgaccaaaaaa

SEQ ID NO: 181567 - DNA, 33 bp, Homo sapien
tttctagagggccaaaaagtgatactatctgat

SEQ ID NO: 181568 - DNA, 33 bp, Homo sapien
tttctagagggccaaagagtgatactatctgat

SEQ ID NO: 181569 - DNA, 33 bp, Homo sapien
gtgagcacaaatcagcccttcatattttggctt

SEQ ID NO: 181570 - DNA, 33 bp, Homo sapien
gtgagcacaaatcagctcttcatattttggctt

SEQ ID NO: 181571 - DNA, 33 bp, Homo sapien
ctgttgactgtgtctaccttcctcttagtaatg

SEQ ID NO: 181572 - DNA, 33 bp, Homo sapien
ctgttgactgtgtctatcttcctcttagtaatg

SEQ ID NO: 181573 - DNA, 33 bp, Homo sapien
tatccttgtaacatgaagcaaataagtattaat

SEQ ID NO: 181574 - DNA, 33 bp, Homo sapien
tatccttgtaacatgatgcaaataagtattaat

SEQ ID NO: 181575 - DNA, 33 bp, Homo sapien
accattaaatgaagataagtgctttgataaagt

SEQ ID NO: 181576 - DNA, 33 bp, Homo sapien
accattaaatgaagatgagtgctttgataaagt

SEQ ID NO: 181577 - DNA, 33 bp, Homo sapien
tatattcggccccaaaccccatgaaatgggaaa

SEQ ID NO: 181578 - DNA, 33 bp, Homo sapien
tatattcggccccaaatcccatgaaatgggaaa

SEQ ID NO: 181579 - DNA, 33 bp, Homo sapien
ccaaactgacagagtagctaaatagaagtgtca

SEQ ID NO: 181580 - DNA, 33 bp, Homo sapien
ccaaactgacagagtatctaaatagaagtgtca

SEQ ID NO: 181581 - DNA, 33 bp, Homo sapien
tctttctcttacatcacactttccttatacatg

SEQ ID NO: 181582 - DNA, 33 bp, Homo sapien
tctttctcttacatcatactttccttatacatg

SEQ ID NO: 181583 - DNA, 33 bp, Homo sapien
aaaggcacaggggcaacggcactgtctggtact

SEQ ID NO: 181584 - DNA, 33 bp, Homo sapien
aaaggcacaggggcaatggcactgtctggtact

SEQ ID NO: 181585 - DNA, 33 bp, Homo sapien
tgtctggtactagtctaaaaaatgtcatttatt

SEQ ID NO: 181586 - DNA, 33 bp, Homo sapien
tgtctggtactagtctgaaaaatgtcatttatt

SEQ ID NO: 181587 - DNA, 33 bp, Homo sapien
gaatggttttggaacaatgaaaggagagagaag

SEQ ID NO: 181588 - DNA, 33 bp, Homo sapien
gaatggttttggaacagtgaaaggagagagaag

SEQ ID NO: 181589 - DNA, 33 bp, Homo sapien
cacagttgggaagaaactttctagacaaaaaga

SEQ ID NO: 181590 - DNA, 33 bp, Homo sapien
cacagttgggaagaaagtttctagacaaaaaga

SEQ ID NO: 181591 - DNA, 33 bp, Homo sapien
taagatacaactgccaaaagtcatggaattacc

SEQ ID NO: 181592 - DNA, 33 bp, Homo sapien
taagatacaactgccagaagtcatggaattacc

SEQ ID NO: 181593 - DNA, 33 bp, Homo sapien
atgtttataaaggaggaatacaccaggacaact

SEQ ID NO: 181594 - DNA, 33 bp, Homo sapien
atgtttataaaggaggcatacaccaggacaact

SEQ ID NO: 181595 - DNA, 33 bp, Homo sapien
aggtagttttcaaccactgctatcctctccccc

SEQ ID NO: 181596 - DNA, 33 bp, Homo sapien
aggtagttttcaaccattgctatcctctccccc

SEQ ID NO: 181597 - DNA, 33 bp, Homo sapien
atggcgaaaaaccatacataaaccagtgcattc

SEQ ID NO: 181598 - DNA, 33 bp, Homo sapien
atggcgaaaaaccatatataaaccagtgcattc

SEQ ID NO: 181599 - DNA, 33 bp, Homo sapien
tctctgagatgaaagaaggcttagaaatgtgtt

SEQ ID NO: 181600 - DNA, 33 bp, Homo sapien
tctctgagatgaaagagggcttagaaatgtgtt

SEQ ID NO: 181601 - DNA, 33 bp, Homo sapien
tcaaatacagattccactacttgccaaattggg

SEQ ID NO: 181602 - DNA, 33 bp, Homo sapien
tcaaatacagattccattacttgccaaattggg

SEQ ID NO: 181603 - DNA, 33 bp, Homo sapien
ctaagttatattttctcaagagccctatcaatg

SEQ ID NO: 181604 - DNA, 33 bp, Homo sapien
ctaagttatattttctgaagagccctatcaatg

SEQ ID NO: 181605 - DNA, 33 bp, Homo sapien
gctgaaaacttgaaggaagagagattaaccctt

SEQ ID NO: 181606 - DNA, 33 bp, Homo sapien
gctgaaaacttgaaggtagagagattaaccctt

SEQ ID NO: 181607 - DNA, 33 bp, Homo sapien
atagcactgagacgtccctgaaaattttttcag

SEQ ID NO: 181608 - DNA, 33 bp, Homo sapien
atagcactgagacgtctctgaaaattttttcag

SEQ ID NO: 181609 - DNA, 33 bp, Homo sapien
aggaacctcaaccagacgatagtagcctgagaa

SEQ ID NO: 181610 - DNA, 33 bp, Homo sapien
aggaacctcaaccagatgatagtagcctgagaa

SEQ ID NO: 181611 - DNA, 33 bp, Homo sapien
gggaaaagggtggacaatgctagagaaatatcc

SEQ ID NO: 181612 - DNA, 33 bp, Homo sapien
gggaaaagggtggacagtgctagagaaatatcc

SEQ ID NO: 181613 - DNA, 33 bp, Homo sapien
actgtcttctgtctagccatacttctattcact

SEQ ID NO: 181614 - DNA, 33 bp, Homo sapien
actgtcttctgtctagtcatacttctattcact

SEQ ID NO: 181615 - DNA, 33 bp, Homo sapien
cctttagctgtctgcaccagtaccttaaacata

SEQ ID NO: 181616 - DNA, 33 bp, Homo sapien
cctttagctgtctgcatcagtaccttaaacata

SEQ ID NO: 181617 - DNA, 33 bp, Homo sapien
cattgcagggccaagaccagggtgaaaaaagtg

SEQ ID NO: 181618 - DNA, 33 bp, Homo sapien
cattgcagggccaagatcagggtgaaaaaagtg

SEQ ID NO: 181619 - DNA, 33 bp, Homo sapien
aaagtgatccccagggaactggaaactgacaaa

SEQ ID NO: 181620 - DNA, 33 bp, Homo sapien
aaagtgatccccagggtactggaaactgacaaa

SEQ ID NO: 181621 - DNA, 33 bp, Homo sapien
attgtgtggaataagaagtaaaaaccatgcagc

SEQ ID NO: 181622 - DNA, 33 bp, Homo sapien
attgtgtggaataagacgtaaaaaccatgcagc

SEQ ID NO: 181623 - DNA, 33 bp, Homo sapien
tagctaattgaatcacagcaacttcacaagata

SEQ ID NO: 181624 - DNA, 33 bp, Homo sapien
tagctaattgaatcacggcaacttcacaagata

SEQ ID NO: 181625 - DNA, 33 bp, Homo sapien
ctagttcattgcttagaatcttttatctgttct

SEQ ID NO: 181626 - DNA, 33 bp, Homo sapien
ctagttcattgcttaggatcttttatctgttct

SEQ ID NO: 181627 - DNA, 33 bp, Homo sapien
cattgcaaataaccagcaggaatgtccctagat

SEQ ID NO: 181628 - DNA, 33 bp, Homo sapien
cattgcaaataaccaggaggaatgtccctagat

SEQ ID NO: 181629 - DNA, 33 bp, Homo sapien
tacctagaggaacaaacgaacagtataatcttc

SEQ ID NO: 181630 - DNA, 33 bp, Homo sapien
tacctagaggaacaaatgaacagtataatcttc

SEQ ID NO: 181631 - DNA, 33 bp, Homo sapien
cagttctgatcaaaaacgtgcttacagaaagag

SEQ ID NO: 181632 - DNA, 33 bp, Homo sapien
cagttctgatcaaaaatgtgcttacagaaagag

SEQ ID NO: 181633 - DNA, 33 bp, Homo sapien
tcacatttgctacgaaacagtgtcccgtttgaa

SEQ ID NO: 181634 - DNA, 33 bp, Homo sapien
tcacatttgctacgaaccagtgtcccgtttgaa

SEQ ID NO: 181635 - DNA, 33 bp, Homo sapien
caatgccccaagatgccgagctttgaaaaggtt

SEQ ID NO: 181636 - DNA, 33 bp, Homo sapien
caatgccccaagatgctgagctttgaaaaggtt

SEQ ID NO: 181637 - DNA, 33 bp, Homo sapien
ctaacatgacaagtcaactttctcagtcaggct

SEQ ID NO: 181638 - DNA, 33 bp, Homo sapien
ctaacatgacaagtcagctttctcagtcaggct

SEQ ID NO: 181639 - DNA, 33 bp, Homo sapien
tgctagaaataataaacgcaataccaagagaaa

SEQ ID NO: 181640 - DNA, 33 bp, Homo sapien
tgctagaaataataaatgcaataccaagagaaa

SEQ ID NO: 181641 - DNA, 33 bp, Homo sapien
atgaacacagtgaggacctgtttctcttggtat

SEQ ID NO: 181642 - DNA, 33 bp, Homo sapien
atgaacacagtgaggatctgtttctcttggtat

SEQ ID NO: 181643 - DNA, 33 bp, Homo sapien
ccaaagcaatcctgataaaaaaaaacaacaaag

SEQ ID NO: 181644 - DNA, 33 bp, Homo sapien
ccaaagcaatcctgattaaaaaaaacaacaaag

SEQ ID NO: 181645 - DNA, 33 bp, Homo sapien
taagtgaaaaattccaaacacagaaacctagat

SEQ ID NO: 181646 - DNA, 33 bp, Homo sapien
taagtgaaaaattccagacacagaaacctagat

SEQ ID NO: 181647 - DNA, 33 bp, Homo sapien
agacagttttgatttccatgccagtaaaattgc

SEQ ID NO: 181648 - DNA, 33 bp, Homo sapien
agacagttttgatttctatgccagtaaaattgc

SEQ ID NO: 181649 - DNA, 33 bp, Homo sapien
agaggtgggtcatttcaaaattttttctagaaa

SEQ ID NO: 181650 - DNA, 33 bp, Homo sapien
agaggtgggtcatttcgaaattttttctagaaa

SEQ ID NO: 181651 - DNA, 33 bp, Homo sapien
tgagctagggaataaaacttctggctaggtggt

SEQ ID NO: 181652 - DNA, 33 bp, Homo sapien
tgagctagggaataaagcttctggctaggtggt

SEQ ID NO: 181653 - DNA, 33 bp, Homo sapien
ataccactattctctcaaattcctagatagata

SEQ ID NO: 181654 - DNA, 33 bp, Homo sapien
ataccactattctctccaattcctagatagata

SEQ ID NO: 181655 - DNA, 33 bp, Homo sapien
aagagaacttcaaatacatacaagtggaaatta

SEQ ID NO: 181656 - DNA, 33 bp, Homo sapien
aagagaacttcaaatagatacaagtggaaatta

SEQ ID NO: 181657 - DNA, 33 bp, Homo sapien
ggcaagtacctaacaaacatttacagcagtttc

SEQ ID NO: 181658 - DNA, 33 bp, Homo sapien
ggcaagtacctaacaagcatttacagcagtttc

SEQ ID NO: 181659 - DNA, 33 bp, Homo sapien
tacataatcttgaaaagtggtgccatctaaact

SEQ ID NO: 181660 - DNA, 33 bp, Homo sapien
tacataatcttgaaaattggtgccatctaaact

SEQ ID NO: 181661 - DNA, 33 bp, Homo sapien
ctttttccagatttcaatatattctctgatggc

SEQ ID NO: 181662 - DNA, 33 bp, Homo sapien
ctttttccagatttcagtatattctctgatggc

SEQ ID NO: 181663 - DNA, 33 bp, Homo sapien
aaactagctgtcaagtcaaggactggctttcac

SEQ ID NO: 181664 - DNA, 33 bp, Homo sapien
aaactagctgtcaagttaaggactggctttcac

SEQ ID NO: 181665 - DNA, 33 bp, Homo sapien
taaacgtcaggatagagataccacatgtggcaa

SEQ ID NO: 181666 - DNA, 33 bp, Homo sapien
taaacgtcaggatagatataccacatgtggcaa

SEQ ID NO: 181667 - DNA, 33 bp, Homo sapien
ggttaaatttcagttacagggcaattttcttat

SEQ ID NO: 181668 - DNA, 33 bp, Homo sapien
ggttaaatttcagttagagggcaattttcttat

SEQ ID NO: 181669 - DNA, 33 bp, Homo sapien
gaaacagagttgccagaataagtgaaaaacact

SEQ ID NO: 181670 - DNA, 33 bp, Homo sapien
gaaacagagttgccagcataagtgaaaaacact

SEQ ID NO: 181671 - DNA, 33 bp, Homo sapien
aagcagacataggttgaagtcctaattttgttc

SEQ ID NO: 181672 - DNA, 33 bp, Homo sapien
aagcagacataggttggagtcctaattttgttc

SEQ ID NO: 181673 - DNA, 33 bp, Homo sapien
acctgtggagcaacagaatataaagaatatttt

SEQ ID NO: 181674 - DNA, 33 bp, Homo sapien
acctgtggagcaacagcatataaagaatatttt

SEQ ID NO: 181675 - DNA, 33 bp, Homo sapien
accaccactatttccaaatcagtagttgtcaaa

SEQ ID NO: 181676 - DNA, 33 bp, Homo sapien
accaccactatttccagatcagtagttgtcaaa

SEQ ID NO: 181677 - DNA, 33 bp, Homo sapien
accttaatttttcctacctgccctcaggttttt

SEQ ID NO: 181678 - DNA, 33 bp, Homo sapien
accttaatttttcctatctgccctcaggttttt

SEQ ID NO: 181679 - DNA, 33 bp, Homo sapien
taaacttgacagcttaaaataacacacatttat

SEQ ID NO: 181680 - DNA, 33 bp, Homo sapien
taaacttgacagcttagaataacacacatttat

SEQ ID NO: 181681 - DNA, 33 bp, Homo sapien
gcaaaggaccacaaaaaagaggtcagacaaaat

SEQ ID NO: 181682 - DNA, 33 bp, Homo sapien
gcaaaggaccacaaaacagaggtcagacaaaat

SEQ ID NO: 181683 - DNA, 33 bp, Homo sapien
aagaaaaagctgttacccccacctgtgagtgat

SEQ ID NO: 181684 - DNA, 33 bp, Homo sapien
aagaaaaagctgttactcccacctgtgagtgat

SEQ ID NO: 181685 - DNA, 33 bp, Homo sapien
cattagcttgtgcaccaaattatgcaagtcatt

SEQ ID NO: 181686 - DNA, 33 bp, Homo sapien
cattagcttgtgcaccgaattatgcaagtcatt

SEQ ID NO: 181687 - DNA, 33 bp, Homo sapien
ttggccctgcccgtgcagagtatttatgtcctt

SEQ ID NO: 181688 - DNA, 33 bp, Homo sapien
ttggccctgcccgtgcggagtatttatgtcctt

SEQ ID NO: 181689 - DNA, 33 bp, Homo sapien
gtctgtggattctctaagtgatgtataattggg

SEQ ID NO: 181690 - DNA, 33 bp, Homo sapien
gtctgtggattctctaggtgatgtataattggg

SEQ ID NO: 181691 - DNA, 33 bp, Homo sapien
atatcagatggcaacaggagggaacaatgagaa

SEQ ID NO: 181692 - DNA, 33 bp, Homo sapien
atatcagatggcaacatgagggaacaatgagaa

SEQ ID NO: 181693 - DNA, 33 bp, Homo sapien
cttaagaaacttgacaatattcaatcagaacgt

SEQ ID NO: 181694 - DNA, 33 bp, Homo sapien
cttaagaaacttgacagtattcaatcagaacgt

SEQ ID NO: 181695 - DNA, 33 bp, Homo sapien
ggaaatctcttcagccccaactgcatgggaaga

SEQ ID NO: 181696 - DNA, 33 bp, Homo sapien
ggaaatctcttcagccgcaactgcatgggaaga

SEQ ID NO: 181697 - DNA, 33 bp, Homo sapien
tgcagcactaattcacaaatacatgataaggca

SEQ ID NO: 181698 - DNA, 33 bp, Homo sapien
tgcagcactaattcactaatacatgataaggca

SEQ ID NO: 181699 - DNA, 33 bp, Homo sapien
acatgtgttggggtcacagaaccatcagtagac

SEQ ID NO: 181700 - DNA, 33 bp, Homo sapien
acatgtgttggggtcatagaaccatcagtagac

SEQ ID NO: 181701 - DNA, 33 bp, Homo sapien
gcggtggttcagaaacactttcatctgttttca

SEQ ID NO: 181702 - DNA, 33 bp, Homo sapien
gcggtggttcagaaacgctttcatctgttttca

SEQ ID NO: 181703 - DNA, 33 bp, Homo sapien
aaaatccttgccttcacgatgattccattccac

SEQ ID NO: 181704 - DNA, 33 bp, Homo sapien
aaaatccttgccttcatgatgattccattccac

SEQ ID NO: 181705 - DNA, 33 bp, Homo sapien
gtagatctaagagtgcaacctcagaaatcccac

SEQ ID NO: 181706 - DNA, 33 bp, Homo sapien
gtagatctaagagtgcgacctcagaaatcccac

SEQ ID NO: 181707 - DNA, 33 bp, Homo sapien
atgctgggatatgcaccgagatttgtctaacta

SEQ ID NO: 181708 - DNA, 33 bp, Homo sapien
atgctgggatatgcactgagatttgtctaacta

SEQ ID NO: 181709 - DNA, 33 bp, Homo sapien
agtcttaccaatagtaacaggtcatgctgggat

SEQ ID NO: 181710 - DNA, 33 bp, Homo sapien
agtcttaccaatagtagcaggtcatgctgggat

SEQ ID NO: 181711 - DNA, 33 bp, Homo sapien
ctggccctctaattcaatctcctttgcttgagg

SEQ ID NO: 181712 - DNA, 33 bp, Homo sapien
ctggccctctaattcagtctcctttgcttgagg

SEQ ID NO: 181713 - DNA, 33 bp, Homo sapien
gaagttgacaaaacctcaaggctagtgtgatgt

SEQ ID NO: 181714 - DNA, 33 bp, Homo sapien
gaagttgacaaaacctgaaggctagtgtgatgt

SEQ ID NO: 181715 - DNA, 33 bp, Homo sapien
ctgtcttctatgaaaaagaggttgtgtgtatat

SEQ ID NO: 181716 - DNA, 33 bp, Homo sapien
ctgtcttctatgaaaaggaggttgtgtgtatat

SEQ ID NO: 181717 - DNA, 33 bp, Homo sapien
gaaagaatactttgcccctgacatatacacaca

SEQ ID NO: 181718 - DNA, 33 bp, Homo sapien
gaaagaatactttgcctctgacatatacacaca

SEQ ID NO: 181719 - DNA, 33 bp, Homo sapien
ctgattaccagttgaacgggtgtgaaagtgctc

SEQ ID NO: 181720 - DNA, 33 bp, Homo sapien
ctgattaccagttgaatgggtgtgaaagtgctc

SEQ ID NO: 181721 - DNA, 33 bp, Homo sapien
tcagtactatcctatcaccttctctgagagcaa

SEQ ID NO: 181722 - DNA, 33 bp, Homo sapien
tcagtactatcctatcgccttctctgagagcaa

SEQ ID NO: 181723 - DNA, 33 bp, Homo sapien
gtatttttctagccaaactttctcattctgatc

SEQ ID NO: 181724 - DNA, 33 bp, Homo sapien
gtatttttctagccaacctttctcattctgatc

SEQ ID NO: 181725 - DNA, 33 bp, Homo sapien
gagcttgtcttcatgaactaagccagggctact

SEQ ID NO: 181726 - DNA, 33 bp, Homo sapien
gagcttgtcttcatgagctaagccagggctact

SEQ ID NO: 181727 - DNA, 33 bp, Homo sapien
gttccctctaacatagaccaatttgtgcaacaa

SEQ ID NO: 181728 - DNA, 33 bp, Homo sapien
gttccctctaacataggccaatttgtgcaacaa

SEQ ID NO: 181729 - DNA, 33 bp, Homo sapien
ggcaataaagctaccaccgtgattaggggtaga

SEQ ID NO: 181730 - DNA, 33 bp, Homo sapien
ggcaataaagctaccatcgtgattaggggtaga

SEQ ID NO: 181731 - DNA, 33 bp, Homo sapien
tcagttacttatctgaggtaattttcaccacta

SEQ ID NO: 181732 - DNA, 33 bp, Homo sapien
tcagttacttatctgatgtaattttcaccacta

SEQ ID NO: 181733 - DNA, 33 bp, Homo sapien
ttcactgatactttcacagagaagattgaatta

SEQ ID NO: 181734 - DNA, 33 bp, Homo sapien
ttcactgatactttcatagagaagattgaatta

SEQ ID NO: 181735 - DNA, 33 bp, Homo sapien
gcaaaaatccacaacaaaatagtagcaaaccaa

SEQ ID NO: 181736 - DNA, 33 bp, Homo sapien
gcaaaaatccacaacagaatagtagcaaaccaa

SEQ ID NO: 181737 - DNA, 33 bp, Homo sapien
tgaaccaatcttataccgcaattcaatctccaa

SEQ ID NO: 181738 - DNA, 33 bp, Homo sapien
tgaaccaatcttatactgcaattcaatctccaa

SEQ ID NO: 181739 - DNA, 33 bp, Homo sapien
tatgccctttctcccactctagttagaagcaga

SEQ ID NO: 181740 - DNA, 33 bp, Homo sapien
tatgccctttctcccattctagttagaagcaga

SEQ ID NO: 181741 - DNA, 33 bp, Homo sapien
tctctcaaggcagtaaactggaaaagttgtagg

SEQ ID NO: 181742 - DNA, 33 bp, Homo sapien
tctctcaaggcagtaacctggaaaagttgtagg

SEQ ID NO: 181743 - DNA, 33 bp, Homo sapien
tactggacatgaataacaaagcagatactgtta

SEQ ID NO: 181744 - DNA, 33 bp, Homo sapien
tactggacatgaataagaaagcagatactgtta

SEQ ID NO: 181745 - DNA, 33 bp, Homo sapien
gaaccctttcttattacgccagctttttctgtg

SEQ ID NO: 181746 - DNA, 33 bp, Homo sapien
gaaccctttcttattatgccagctttttctgtg

SEQ ID NO: 181747 - DNA, 33 bp, Homo sapien
ctttatgtttcgagagaaaagtacttaggtggc

SEQ ID NO: 181748 - DNA, 33 bp, Homo sapien
ctttatgtttcgagaggaaagtacttaggtggc

SEQ ID NO: 181749 - DNA, 33 bp, Homo sapien
tccacaagcccaaacacagttcaatgtaacaaa

SEQ ID NO: 181750 - DNA, 33 bp, Homo sapien
tccacaagcccaaacatagttcaatgtaacaaa

SEQ ID NO: 181751 - DNA, 33 bp, Homo sapien
tgagcctatttaaccaacacaattttattgcag

SEQ ID NO: 181752 - DNA, 33 bp, Homo sapien
tgagcctatttaaccaccacaattttattgcag

SEQ ID NO: 181753 - DNA, 33 bp, Homo sapien
tactggataagagactaaggctctacttcatga

SEQ ID NO: 181754 - DNA, 33 bp, Homo sapien
tactggataagagactgaggctctacttcatga

SEQ ID NO: 181755 - DNA, 33 bp, Homo sapien
gcaatgagagatctaccctccatgatttaaaca

SEQ ID NO: 181756 - DNA, 33 bp, Homo sapien
gcaatgagagatctacgctccatgatttaaaca

SEQ ID NO: 181757 - DNA, 33 bp, Homo sapien
cagggtttaagggacacaaatgcaggaatctta

SEQ ID NO: 181758 - DNA, 33 bp, Homo sapien
cagggtttaagggacagaaatgcaggaatctta

SEQ ID NO: 181759 - DNA, 33 bp, Homo sapien
gcaaacttcaccactacgcaatgtattcatgta

SEQ ID NO: 181760 - DNA, 33 bp, Homo sapien
gcaaacttcaccactatgcaatgtattcatgta

SEQ ID NO: 181761 - DNA, 33 bp, Homo sapien
taactttgttccaaaccggatgctttttatctt

SEQ ID NO: 181762 - DNA, 33 bp, Homo sapien
taactttgttccaaactggatgctttttatctt

SEQ ID NO: 181763 - DNA, 33 bp, Homo sapien
acaatactacagaccaatatccctagtgaacat

SEQ ID NO: 181764 - DNA, 33 bp, Homo sapien
acaatactacagaccattatccctagtgaacat

SEQ ID NO: 181765 - DNA, 33 bp, Homo sapien
caagtccagtaccacaatgatacccaaaccaga

SEQ ID NO: 181766 - DNA, 33 bp, Homo sapien
caagtccagtaccacactgatacccaaaccaga

SEQ ID NO: 181767 - DNA, 33 bp, Homo sapien
acacataactgcctgagattgaactaggaagaa

SEQ ID NO: 181768 - DNA, 33 bp, Homo sapien
acacataactgcctgatattgaactaggaagaa

SEQ ID NO: 181769 - DNA, 33 bp, Homo sapien
tagcagtcactttttccaagtttttgaaattgc

SEQ ID NO: 181770 - DNA, 33 bp, Homo sapien
tagcagtcactttttcgaagtttttgaaattgc

SEQ ID NO: 181771 - DNA, 33 bp, Homo sapien
cattctgagaacttaacactgggctgtgcccca

SEQ ID NO: 181772 - DNA, 33 bp, Homo sapien
cattctgagaacttaatactgggctgtgcccca

SEQ ID NO: 181773 - DNA, 33 bp, Homo sapien
accagggagtgtaaggccccttcaggcaagaag

SEQ ID NO: 181774 - DNA, 33 bp, Homo sapien
accagggagtgtaaggtcccttcaggcaagaag

SEQ ID NO: 181775 - DNA, 33 bp, Homo sapien
caagaagcatgggcaaaaagctatgggaaaagc

SEQ ID NO: 181776 - DNA, 33 bp, Homo sapien
caagaagcatgggcaagaagctatgggaaaagc

SEQ ID NO: 181777 - DNA, 33 bp, Homo sapien
gctaatgcccagttaaagaggtataggaaagcc

SEQ ID NO: 181778 - DNA, 33 bp, Homo sapien
gctaatgcccagttaaggaggtataggaaagcc

SEQ ID NO: 181779 - DNA, 33 bp, Homo sapien
atggttgtatagaatacaggcttttgaggctac

SEQ ID NO: 181780 - DNA, 33 bp, Homo sapien
atggttgtatagaatagaggcttttgaggctac

SEQ ID NO: 181781 - DNA, 33 bp, Homo sapien
catactcacttagaaccgtaatatggagcaaag

SEQ ID NO: 181782 - DNA, 33 bp, Homo sapien
catactcacttagaactgtaatatggagcaaag

SEQ ID NO: 181783 - DNA, 33 bp, Homo sapien
tgataagccagaagtaagaaagctgcaatagtt

SEQ ID NO: 181784 - DNA, 33 bp, Homo sapien
tgataagccagaagtacgaaagctgcaatagtt

SEQ ID NO: 181785 - DNA, 33 bp, Homo sapien
atgtcaatagtcctgaagttgaaaaagtcctgt

SEQ ID NO: 181786 - DNA, 33 bp, Homo sapien
atgtcaatagtcctgaggttgaaaaagtcctgt

SEQ ID NO: 181787 - DNA, 33 bp, Homo sapien
aaaaagatattagcaacgctgtttaacaggcaa

SEQ ID NO: 181788 - DNA, 33 bp, Homo sapien
aaaaagatattagcaatgctgtttaacaggcaa

SEQ ID NO: 181789 - DNA, 33 bp, Homo sapien
agtgactaactgacccactaccaatacacaatt

SEQ ID NO: 181790 - DNA, 33 bp, Homo sapien
agtgactaactgacccgctaccaatacacaatt

SEQ ID NO: 181791 - DNA, 33 bp, Homo sapien
gtgtggtggtttggaaagattaatataacagtt

SEQ ID NO: 181792 - DNA, 33 bp, Homo sapien
gtgtggtggtttggaaggattaatataacagtt

SEQ ID NO: 181793 - DNA, 33 bp, Homo sapien
cccatccttcaaatgacggaatgtcaaagaaca

SEQ ID NO: 181794 - DNA, 33 bp, Homo sapien
cccatccttcaaatgatggaatgtcaaagaaca

SEQ ID NO: 181795 - DNA, 33 bp, Homo sapien
tagctctaggatcaagacaaacaaagctattta

SEQ ID NO: 181796 - DNA, 33 bp, Homo sapien
tagctctaggatcaagccaaacaaagctattta

SEQ ID NO: 181797 - DNA, 33 bp, Homo sapien
ctgcaaaggtgctgggcaagatctagactaatt

SEQ ID NO: 181798 - DNA, 33 bp, Homo sapien
ctgcaaaggtgctggggaagatctagactaatt

SEQ ID NO: 181799 - DNA, 33 bp, Homo sapien
tcgtgtaatacataggcaatcaaatggttagta

SEQ ID NO: 181800 - DNA, 33 bp, Homo sapien
tcgtgtaatacatagggaatcaaatggttagta

SEQ ID NO: 181801 - DNA, 33 bp, Homo sapien
tcttcctcctaagctaccaccatacaatatatt

SEQ ID NO: 181802 - DNA, 33 bp, Homo sapien
tcttcctcctaagctatcaccatacaatatatt

SEQ ID NO: 181803 - DNA, 33 bp, Homo sapien
gaaaaagggaactgggaacaagtattgaaagca

SEQ ID NO: 181804 - DNA, 33 bp, Homo sapien
gaaaaagggaactggggacaagtattgaaagca

SEQ ID NO: 181805 - DNA, 33 bp, Homo sapien
tatgagggtcttagaaaccataatcagattaga

SEQ ID NO: 181806 - DNA, 33 bp, Homo sapien
tatgagggtcttagaacccataatcagattaga

SEQ ID NO: 181807 - DNA, 33 bp, Homo sapien
gtgtcaattccggtcaacttcttaatctaaaat

SEQ ID NO: 181808 - DNA, 33 bp, Homo sapien
gtgtcaattccggtcatcttcttaatctaaaat

SEQ ID NO: 181809 - DNA, 33 bp, Homo sapien
gatttgatatctgaaaactcttctgattagtag

SEQ ID NO: 181810 - DNA, 33 bp, Homo sapien
gatttgatatctgaaacctcttctgattagtag

SEQ ID NO: 181811 - DNA, 33 bp, Homo sapien
tacagaaacattaccacaagttgaactttctag

SEQ ID NO: 181812 - DNA, 33 bp, Homo sapien
tacagaaacattaccataagttgaactttctag

SEQ ID NO: 181813 - DNA, 33 bp, Homo sapien
tttctgtttttcccacaataatgaatgtcatgt

SEQ ID NO: 181814 - DNA, 33 bp, Homo sapien
tttctgtttttcccaccataatgaatgtcatgt

SEQ ID NO: 181815 - DNA, 33 bp, Homo sapien
ccagtatgatgtcctcaatttgtaagatgttat

SEQ ID NO: 181816 - DNA, 33 bp, Homo sapien
ccagtatgatgtcctccatttgtaagatgttat

SEQ ID NO: 181817 - DNA, 33 bp, Homo sapien
tcaagggcttattggacgccaggttgccgggtt

SEQ ID NO: 181818 - DNA, 33 bp, Homo sapien
tcaagggcttattggatgccaggttgccgggtt

SEQ ID NO: 181819 - DNA, 33 bp, Homo sapien
gtcatttgttccagaaatacttatttaacaccc

SEQ ID NO: 181820 - DNA, 33 bp, Homo sapien
gtcatttgttccagaagtacttatttaacaccc

SEQ ID NO: 181821 - DNA, 33 bp, Homo sapien
ttttgcccattatttggatatcagcctaaatat

SEQ ID NO: 181822 - DNA, 33 bp, Homo sapien
ttttgcccattatttgtatatcagcctaaatat

SEQ ID NO: 181823 - DNA, 33 bp, Homo sapien
gttacttcatcagtgtcacacatgactcattaa

SEQ ID NO: 181824 - DNA, 33 bp, Homo sapien
gttacttcatcagtgttacacatgactcattaa

SEQ ID NO: 181825 - DNA, 33 bp, Homo sapien
aaatcaagagcacagacgtgtagcctagtactt

SEQ ID NO: 181826 - DNA, 33 bp, Homo sapien
aaatcaagagcacagatgtgtagcctagtactt

SEQ ID NO: 181827 - DNA, 33 bp, Homo sapien
tgaagttccttggtccaaacgcgaagaattcct

SEQ ID NO: 181828 - DNA, 33 bp, Homo sapien
tgaagttccttggtccgaacgcgaagaattcct

SEQ ID NO: 181829 - DNA, 33 bp, Homo sapien
ttttgatatttgaaaagctttagttttgattta

SEQ ID NO: 181830 - DNA, 33 bp, Homo sapien
ttttgatatttgaaaatctttagttttgattta

SEQ ID NO: 181831 - DNA, 33 bp, Homo sapien
aattgtttccaggttaccctttcatcataagaa

SEQ ID NO: 181832 - DNA, 33 bp, Homo sapien
aattgtttccaggttatcctttcatcataagaa

SEQ ID NO: 181833 - DNA, 33 bp, Homo sapien
gaaagtgtggccggtcactttgattggggatat

SEQ ID NO: 181834 - DNA, 33 bp, Homo sapien
gaaagtgtggccggtcgctttgattggggatat

SEQ ID NO: 181835 - DNA, 33 bp, Homo sapien
tctcaacataggtctccgaagaagctggggaac

SEQ ID NO: 181836 - DNA, 33 bp, Homo sapien
tctcaacataggtctctgaagaagctggggaac

SEQ ID NO: 181837 - DNA, 33 bp, Homo sapien
agtaacaatacaaggcccacaaaagagggctga

SEQ ID NO: 181838 - DNA, 33 bp, Homo sapien
agtaacaatacaaggcgcacaaaagagggctga

SEQ ID NO: 181839 - DNA, 33 bp, Homo sapien
atagcagggaaaagaaagtttcagcactttcag

SEQ ID NO: 181840 - DNA, 33 bp, Homo sapien
atagcagggaaaagaatgtttcagcactttcag

SEQ ID NO: 181841 - DNA, 33 bp, Homo sapien
tcaagatggaaaaaaagtgttccttcctgaaga

SEQ ID NO: 181842 - DNA, 33 bp, Homo sapien
tcaagatggaaaaaaattgttccttcctgaaga

SEQ ID NO: 181843 - DNA, 33 bp, Homo sapien
aaagaacaaacagtagacaatagtgagtataca

SEQ ID NO: 181844 - DNA, 33 bp, Homo sapien
aaagaacaaacagtagccaatagtgagtataca

SEQ ID NO: 181845 - DNA, 33 bp, Homo sapien
atagtttatgaattcaaaaaactagttctgcca

SEQ ID NO: 181846 - DNA, 33 bp, Homo sapien
atagtttatgaattcagaaaactagttctgcca

SEQ ID NO: 181847 - DNA, 33 bp, Homo sapien
tgaatattgctgaaaactgtgaagctgtcagat

SEQ ID NO: 181848 - DNA, 33 bp, Homo sapien
tgaatattgctgaaaattgtgaagctgtcagat

SEQ ID NO: 181849 - DNA, 33 bp, Homo sapien
atacagaatcagaaaaacttaagccaaactatg

SEQ ID NO: 181850 - DNA, 33 bp, Homo sapien
atacagaatcagaaaatcttaagccaaactatg

SEQ ID NO: 181851 - DNA, 33 bp, Homo sapien
tggactggagctacaacaaagactttcctgggc

SEQ ID NO: 181852 - DNA, 33 bp, Homo sapien
tggactggagctacaataaagactttcctgggc

SEQ ID NO: 181853 - DNA, 33 bp, Homo sapien
ttgaactctagattgaaattaggtgctattctc

SEQ ID NO: 181854 - DNA, 33 bp, Homo sapien
ttgaactctagattgagattaggtgctattctc

SEQ ID NO: 181855 - DNA, 33 bp, Homo sapien
tccatgagcctgaatcaaggactttgtctcaca

SEQ ID NO: 181856 - DNA, 33 bp, Homo sapien
tccatgagcctgaatctaggactttgtctcaca

SEQ ID NO: 181857 - DNA, 33 bp, Homo sapien
tgttcctagcacatcccatttttcttgctgtct

SEQ ID NO: 181858 - DNA, 33 bp, Homo sapien
tgttcctagcacatcctatttttcttgctgtct

SEQ ID NO: 181859 - DNA, 33 bp, Homo sapien
atgttaaaaaggccaaattcctcagttgtagcc

SEQ ID NO: 181860 - DNA, 33 bp, Homo sapien
atgttaaaaaggccaagttcctcagttgtagcc

SEQ ID NO: 181861 - DNA, 33 bp, Homo sapien
gcctacttgtcagaaccacctggtgaacttaaa

SEQ ID NO: 181862 - DNA, 33 bp, Homo sapien
gcctacttgtcagaacgacctggtgaacttaaa

SEQ ID NO: 181863 - DNA, 33 bp, Homo sapien
agtaggcagtcataaaccatctgttgaatgaat

SEQ ID NO: 181864 - DNA, 33 bp, Homo sapien
agtaggcagtcataaatcatctgttgaatgaat

SEQ ID NO: 181865 - DNA, 33 bp, Homo sapien
tatcacctcaatatagaacacaaaagatgatgt

SEQ ID NO: 181866 - DNA, 33 bp, Homo sapien
tatcacctcaatatagtacacaaaagatgatgt

SEQ ID NO: 181867 - DNA, 33 bp, Homo sapien
tcctgcttgccatgctgacaggtggcttgaaaa

SEQ ID NO: 181868 - DNA, 33 bp, Homo sapien
tcctgcttgccatgcttacaggtggcttgaaaa

SEQ ID NO: 181869 - DNA, 33 bp, Homo sapien
gataagcttgatcaataaatacctcaatcctag

SEQ ID NO: 181870 - DNA, 33 bp, Homo sapien
gataagcttgatcaatgaatacctcaatcctag

SEQ ID NO: 181871 - DNA, 33 bp, Homo sapien
attttacctttacatccgatattgcatattatc

SEQ ID NO: 181872 - DNA, 33 bp, Homo sapien
attttacctttacatctgatattgcatattatc

SEQ ID NO: 181873 - DNA, 33 bp, Homo sapien
tagactaagacttttaaacacatcaaggaggaa

SEQ ID NO: 181874 - DNA, 33 bp, Homo sapien
tagactaagacttttagacacatcaaggaggaa

SEQ ID NO: 181875 - DNA, 33 bp, Homo sapien
cccaggaaaaaaatacaaactcatgcactcaga

SEQ ID NO: 181876 - DNA, 33 bp, Homo sapien
cccaggaaaaaaatacgaactcatgcactcaga

SEQ ID NO: 181877 - DNA, 33 bp, Homo sapien
gtatgtgaattgcagaatcagactgagttgggc

SEQ ID NO: 181878 - DNA, 33 bp, Homo sapien
gtatgtgaattgcagagtcagactgagttgggc

SEQ ID NO: 181879 - DNA, 33 bp, Homo sapien
gcttcaactgtaaacactgtgaaatgctttctt

SEQ ID NO: 181880 - DNA, 33 bp, Homo sapien
gcttcaactgtaaacattgtgaaatgctttctt

SEQ ID NO: 181881 - DNA, 33 bp, Homo sapien
ataaggccatcagatacaccaaagtacacacat

SEQ ID NO: 181882 - DNA, 33 bp, Homo sapien
ataaggccatcagatataccaaagtacacacat

SEQ ID NO: 181883 - DNA, 33 bp, Homo sapien
taacttattggtcaaacggttctggagtttgca

SEQ ID NO: 181884 - DNA, 33 bp, Homo sapien
taacttattggtcaaatggttctggagtttgca

SEQ ID NO: 181885 - DNA, 33 bp, Homo sapien
gaactaaattggtacacggagttggatgtgtgt

SEQ ID NO: 181886 - DNA, 33 bp, Homo sapien
gaactaaattggtacatggagttggatgtgtgt

SEQ ID NO: 181887 - DNA, 33 bp, Homo sapien
taggaatcttcctattgaagcctcttgataaac

SEQ ID NO: 181888 - DNA, 33 bp, Homo sapien
taggaatcttcctatttaagcctcttgataaac

SEQ ID NO: 181889 - DNA, 33 bp, Homo sapien
tccatgcacagagctacggcctgccagcatagc

SEQ ID NO: 181890 - DNA, 33 bp, Homo sapien
tccatgcacagagctagggcctgccagcatagc

SEQ ID NO: 181891 - DNA, 33 bp, Homo sapien
taccagagatcattgaagacaagaatatattca

SEQ ID NO: 181892 - DNA, 33 bp, Homo sapien
taccagagatcattgaggacaagaatatattca

SEQ ID NO: 181893 - DNA, 33 bp, Homo sapien
ctctccgactctggcaccccgcttccctcttgt

SEQ ID NO: 181894 - DNA, 33 bp, Homo sapien
ctctccgactctggcatcccgcttccctcttgt

SEQ ID NO: 181895 - DNA, 33 bp, Homo sapien
atattctaagctcacaacagtgatatgagtcag

SEQ ID NO: 181896 - DNA, 33 bp, Homo sapien
atattctaagctcacaccagtgatatgagtcag

SEQ ID NO: 181897 - DNA, 33 bp, Homo sapien
ttaacttcacagaaaactgttggatctgttaga

SEQ ID NO: 181898 - DNA, 33 bp, Homo sapien
ttaacttcacagaaaattgttggatctgttaga

SEQ ID NO: 181899 - DNA, 33 bp, Homo sapien
tttgctttaagatctcacatttcagatagtact

SEQ ID NO: 181900 - DNA, 33 bp, Homo sapien
tttgctttaagatctcgcatttcagatagtact

SEQ ID NO: 181901 - DNA, 33 bp, Homo sapien
ttattccagtcagcacactttattatttaaatt

SEQ ID NO: 181902 - DNA, 33 bp, Homo sapien
ttattccagtcagcacgctttattatttaaatt

SEQ ID NO: 181903 - DNA, 33 bp, Homo sapien
atgcctccttattcctaacttgccctcttcttt

SEQ ID NO: 181904 - DNA, 33 bp, Homo sapien
atgcctccttattccttacttgccctcttcttt

SEQ ID NO: 181905 - DNA, 33 bp, Homo sapien
tagaaagcattatatacgtactggttgttatta

SEQ ID NO: 181906 - DNA, 33 bp, Homo sapien
tagaaagcattatatatgtactggttgttatta

SEQ ID NO: 181907 - DNA, 33 bp, Homo sapien
tctcctacctgcttacccatatacagacattca

SEQ ID NO: 181908 - DNA, 33 bp, Homo sapien
tctcctacctgcttactcatatacagacattca

SEQ ID NO: 181909 - DNA, 33 bp, Homo sapien
gtatttctgtacagaaaattggtttgtgtatag

SEQ ID NO: 181910 - DNA, 33 bp, Homo sapien
gtatttctgtacagaacattggtttgtgtatag

SEQ ID NO: 181911 - DNA, 33 bp, Homo sapien
ctctgactctgaaaacacatcatgttcaggatt

SEQ ID NO: 181912 - DNA, 33 bp, Homo sapien
ctctgactctgaaaacgcatcatgttcaggatt

SEQ ID NO: 181913 - DNA, 33 bp, Homo sapien
gaatcttttaagtcacacttgtcttctcccttt

SEQ ID NO: 181914 - DNA, 33 bp, Homo sapien
gaatcttttaagtcacccttgtcttctcccttt

SEQ ID NO: 181915 - DNA, 33 bp, Homo sapien
agtgatggattacaaaagtgcgggaggaacgtc

SEQ ID NO: 181916 - DNA, 33 bp, Homo sapien
agtgatggattacaaaggtgcgggaggaacgtc

SEQ ID NO: 181917 - DNA, 33 bp, Homo sapien
tttgtgagccactgtaacaaatcaactgaaccc

SEQ ID NO: 181918 - DNA, 33 bp, Homo sapien
tttgtgagccactgtagcaaatcaactgaaccc

SEQ ID NO: 181919 - DNA, 33 bp, Homo sapien
agtcatgtctaattaacggcatctctataaatt

SEQ ID NO: 181920 - DNA, 33 bp, Homo sapien
agtcatgtctaattaatggcatctctataaatt

SEQ ID NO: 181921 - DNA, 33 bp, Homo sapien
ttccaaatgaagggtgaaagttgccagtggatc

SEQ ID NO: 181922 - DNA, 33 bp, Homo sapien
ttccaaatgaagggtgcaagttgccagtggatc

SEQ ID NO: 181923 - DNA, 33 bp, Homo sapien
aaatcatagttgtttacggccattatgtgctta

SEQ ID NO: 181924 - DNA, 33 bp, Homo sapien
aaatcatagttgtttatggccattatgtgctta

SEQ ID NO: 181925 - DNA, 33 bp, Homo sapien
gagaattaagcaccacagtggcaaaaagcttgt

SEQ ID NO: 181926 - DNA, 33 bp, Homo sapien
gagaattaagcaccacggtggcaaaaagcttgt

SEQ ID NO: 181927 - DNA, 33 bp, Homo sapien
tggcaaaaagcttgtaaaggagtgggagtgtgt

SEQ ID NO: 181928 - DNA, 33 bp, Homo sapien
tggcaaaaagcttgtagaggagtgggagtgtgt

SEQ ID NO: 181929 - DNA, 33 bp, Homo sapien
tttacattgctctgaaaccgttcatttaatctt

SEQ ID NO: 181930 - DNA, 33 bp, Homo sapien
tttacattgctctgaacccgttcatttaatctt

SEQ ID NO: 181931 - DNA, 33 bp, Homo sapien
gaaaccatgagagtgtaaattcattggaactga

SEQ ID NO: 181932 - DNA, 33 bp, Homo sapien
gaaaccatgagagtgtgaattcattggaactga

SEQ ID NO: 181933 - DNA, 33 bp, Homo sapien
ctcctgcatcaatccaatcactgcctgtgtcat

SEQ ID NO: 181934 - DNA, 33 bp, Homo sapien
ctcctgcatcaatccagtcactgcctgtgtcat

SEQ ID NO: 181935 - DNA, 33 bp, Homo sapien
aagacatctatcataccgaattaggggcctacc

SEQ ID NO: 181936 - DNA, 33 bp, Homo sapien
aagacatctatcatactgaattaggggcctacc

SEQ ID NO: 181937 - DNA, 33 bp, Homo sapien
caagtataactaataaagatgaagtcatactgt

SEQ ID NO: 181938 - DNA, 33 bp, Homo sapien
caagtataactaataaggatgaagtcatactgt

SEQ ID NO: 181939 - DNA, 33 bp, Homo sapien
tttgaggttctggcaaaagacatgaattgagga

SEQ ID NO: 181940 - DNA, 33 bp, Homo sapien
tttgaggttctggcaacagacatgaattgagga

SEQ ID NO: 181941 - DNA, 33 bp, Homo sapien
tcttaataaccaaaagcattactggttcttttt

SEQ ID NO: 181942 - DNA, 33 bp, Homo sapien
tcttaataaccaaaaggattactggttcttttt

SEQ ID NO: 181943 - DNA, 33 bp, Homo sapien
tggtaaccattttctcccatgattcacttgctg

SEQ ID NO: 181944 - DNA, 33 bp, Homo sapien
tggtaaccattttctcgcatgattcacttgctg

SEQ ID NO: 181945 - DNA, 33 bp, Homo sapien
ccaggagaaaaagaaacgtgagagatcgtataa

SEQ ID NO: 181946 - DNA, 33 bp, Homo sapien
ccaggagaaaaagaaatgtgagagatcgtataa

SEQ ID NO: 181947 - DNA, 33 bp, Homo sapien
gcaatagctgttggcactcaaaaatatgagaga

SEQ ID NO: 181948 - DNA, 33 bp, Homo sapien
gcaatagctgttggcattcaaaaatatgagaga

SEQ ID NO: 181949 - DNA, 33 bp, Homo sapien
tgataagcataactaaagatttcagtgggcaag

SEQ ID NO: 181950 - DNA, 33 bp, Homo sapien
tgataagcataactaatgatttcagtgggcaag

SEQ ID NO: 181951 - DNA, 33 bp, Homo sapien
tactgaacaatacagaaatagacattttatcag

SEQ ID NO: 181952 - DNA, 33 bp, Homo sapien
tactgaacaatacagagatagacattttatcag

SEQ ID NO: 181953 - DNA, 33 bp, Homo sapien
acctaacaacatcacaggggggatcaaattcca

SEQ ID NO: 181954 - DNA, 33 bp, Homo sapien
acctaacaacatcacatgggggatcaaattcca

SEQ ID NO: 181955 - DNA, 33 bp, Homo sapien
tgcattaacttatcaacactataattttcactt

SEQ ID NO: 181956 - DNA, 33 bp, Homo sapien
tgcattaacttatcaagactataattttcactt

SEQ ID NO: 181957 - DNA, 33 bp, Homo sapien
tcaaatccatagggaaataagttatctattgga

SEQ ID NO: 181958 - DNA, 33 bp, Homo sapien
tcaaatccatagggaagtaagttatctattgga

SEQ ID NO: 181959 - DNA, 33 bp, Homo sapien
tgctcctctctatttaaaactccgcacatccaa

SEQ ID NO: 181960 - DNA, 33 bp, Homo sapien
tgctcctctctatttataactccgcacatccaa

SEQ ID NO: 181961 - DNA, 33 bp, Homo sapien
actatattggagtctacgcctctaaaccttgct

SEQ ID NO: 181962 - DNA, 33 bp, Homo sapien
actatattggagtctatgcctctaaaccttgct

SEQ ID NO: 181963 - DNA, 33 bp, Homo sapien
tggtagatgtcctttaacatcctagcatataca

SEQ ID NO: 181964 - DNA, 33 bp, Homo sapien
tggtagatgtcctttagcatcctagcatataca

SEQ ID NO: 181965 - DNA, 33 bp, Homo sapien
aactgtaacacatgcccactgaggtttctggcg

SEQ ID NO: 181966 - DNA, 33 bp, Homo sapien
aactgtaacacatgcctactgaggtttctggcg

SEQ ID NO: 181967 - DNA, 33 bp, Homo sapien
agattaaatgacatgaagtacgtaaagtgctag

SEQ ID NO: 181968 - DNA, 33 bp, Homo sapien
agattaaatgacatgatgtacgtaaagtgctag

SEQ ID NO: 181969 - DNA, 33 bp, Homo sapien
aaaatcagggatcataacactgacaaaagctct

SEQ ID NO: 181970 - DNA, 33 bp, Homo sapien
aaaatcagggatcatagcactgacaaaagctct

SEQ ID NO: 181971 - DNA, 33 bp, Homo sapien
tttgtatgcaagtgaaatctttaaatatataat

SEQ ID NO: 181972 - DNA, 33 bp, Homo sapien
tttgtatgcaagtgaactctttaaatatataat

SEQ ID NO: 181973 - DNA, 33 bp, Homo sapien
caaaagtcctgaacataaccctatatggtcggg

SEQ ID NO: 181974 - DNA, 33 bp, Homo sapien
caaaagtcctgaacatgaccctatatggtcggg

SEQ ID NO: 181975 - DNA, 33 bp, Homo sapien
tgggatgcctgataacagaggatagctaatatt

SEQ ID NO: 181976 - DNA, 33 bp, Homo sapien
tgggatgcctgataacggaggatagctaatatt

SEQ ID NO: 181977 - DNA, 33 bp, Homo sapien
ctttataatgttgcacaagacaaagggactcac

SEQ ID NO: 181978 - DNA, 33 bp, Homo sapien
ctttataatgttgcactagacaaagggactcac

SEQ ID NO: 181979 - DNA, 33 bp, Homo sapien
ctatttctagtacagacagttaggtcatgattc

SEQ ID NO: 181980 - DNA, 33 bp, Homo sapien
ctatttctagtacagatagttaggtcatgattc

SEQ ID NO: 181981 - DNA, 33 bp, Homo sapien
attgcaaattaaagaaagcatttatgacctgta

SEQ ID NO: 181982 - DNA, 33 bp, Homo sapien
attgcaaattaaagaacgcatttatgacctgta

SEQ ID NO: 181983 - DNA, 33 bp, Homo sapien
tataaacattacctaactatgccagacaagagt

SEQ ID NO: 181984 - DNA, 33 bp, Homo sapien
tataaacattacctaagtatgccagacaagagt

SEQ ID NO: 181985 - DNA, 33 bp, Homo sapien
tgaaagatattttaggaccatttcatatgatca

SEQ ID NO: 181986 - DNA, 33 bp, Homo sapien
tgaaagatattttagggccatttcatatgatca

SEQ ID NO: 181987 - DNA, 33 bp, Homo sapien
aagtcaaacaagatataatatcccccaatttaa

SEQ ID NO: 181988 - DNA, 33 bp, Homo sapien
aagtcaaacaagatattatatcccccaatttaa

SEQ ID NO: 181989 - DNA, 33 bp, Homo sapien
atttattaggaccttaccatattgtcagtgctt

SEQ ID NO: 181990 - DNA, 33 bp, Homo sapien
atttattaggaccttagcatattgtcagtgctt

SEQ ID NO: 181991 - DNA, 33 bp, Homo sapien
gggttgatgaggttgaggcacatgaatttatta

SEQ ID NO: 181992 - DNA, 33 bp, Homo sapien
gggttgatgaggttgatgcacatgaatttatta

SEQ ID NO: 181993 - DNA, 33 bp, Homo sapien
acattgaaaacatgtaaaacagtgtctgacaaa

SEQ ID NO: 181994 - DNA, 33 bp, Homo sapien
acattgaaaacatgtacaacagtgtctgacaaa

SEQ ID NO: 181995 - DNA, 33 bp, Homo sapien
attttcgacttgcaagaaaagttctcctctgtc

SEQ ID NO: 181996 - DNA, 33 bp, Homo sapien
attttcgacttgcaaggaaagttctcctctgtc

SEQ ID NO: 181997 - DNA, 33 bp, Homo sapien
ctgtgtggttttatggacatcaaactacgaaca

SEQ ID NO: 181998 - DNA, 33 bp, Homo sapien
ctgtgtggttttatgggcatcaaactacgaaca

SEQ ID NO: 181999 - DNA, 33 bp, Homo sapien
ttcacatgaagccaaactgacaactattcaatg

SEQ ID NO: 182000 - DNA, 33 bp, Homo sapien
ttcacatgaagccaaattgacaactattcaatg

SEQ ID NO: 182001 - DNA, 33 bp, Homo sapien
cagtttacaaaaaggaataactgccttctattc

SEQ ID NO: 182002 - DNA, 33 bp, Homo sapien
cagtttacaaaaaggagtaactgccttctattc

SEQ ID NO: 182003 - DNA, 33 bp, Homo sapien
gctgaactaatgctgacgagttgtttattatta

SEQ ID NO: 182004 - DNA, 33 bp, Homo sapien
gctgaactaatgctgatgagttgtttattatta

SEQ ID NO: 182005 - DNA, 33 bp, Homo sapien
tccatcacttttttaacaatgtctctaccacaa

SEQ ID NO: 182006 - DNA, 33 bp, Homo sapien
tccatcacttttttaagaatgtctctaccacaa

SEQ ID NO: 182007 - DNA, 33 bp, Homo sapien
ggtacttgataggaaagagcatggattatgttg

SEQ ID NO: 182008 - DNA, 33 bp, Homo sapien
ggtacttgataggaaatagcatggattatgttg

SEQ ID NO: 182009 - DNA, 33 bp, Homo sapien
ggttgagaaaggtcccgggaagagttcgcatct

SEQ ID NO: 182010 - DNA, 33 bp, Homo sapien
ggttgagaaaggtccctggaagagttcgcatct

SEQ ID NO: 182011 - DNA, 33 bp, Homo sapien
ccctgcatcattggaaaatttgaactaagaatg

SEQ ID NO: 182012 - DNA, 33 bp, Homo sapien
ccctgcatcattggaatatttgaactaagaatg

SEQ ID NO: 182013 - DNA, 33 bp, Homo sapien
gctattccaccctccaataaaggctaaaaccaa

SEQ ID NO: 182014 - DNA, 33 bp, Homo sapien
gctattccaccctccagtaaaggctaaaaccaa

SEQ ID NO: 182015 - DNA, 33 bp, Homo sapien
cagcaagctaagatacactggtttaaaattctt

SEQ ID NO: 182016 - DNA, 33 bp, Homo sapien
cagcaagctaagatacgctggtttaaaattctt

SEQ ID NO: 182017 - DNA, 33 bp, Homo sapien
tttaacattactagagactcatgtataagtaga

SEQ ID NO: 182018 - DNA, 33 bp, Homo sapien
tttaacattactagagtctcatgtataagtaga

SEQ ID NO: 182019 - DNA, 33 bp, Homo sapien
ggatagatcagattaaatgctaaaccagtaagt

SEQ ID NO: 182020 - DNA, 33 bp, Homo sapien
ggatagatcagattaagtgctaaaccagtaagt

SEQ ID NO: 182021 - DNA, 33 bp, Homo sapien
tggatgtctcctttaacagtataatgctatcag

SEQ ID NO: 182022 - DNA, 33 bp, Homo sapien
tggatgtctcctttaatagtataatgctatcag

SEQ ID NO: 182023 - DNA, 33 bp, Homo sapien
cttggctcttggtcacacgtttcttacactctc

SEQ ID NO: 182024 - DNA, 33 bp, Homo sapien
cttggctcttggtcacgcgtttcttacactctc

SEQ ID NO: 182025 - DNA, 33 bp, Homo sapien
cctcataggctcttcacagaaaggaacaataaa

SEQ ID NO: 182026 - DNA, 33 bp, Homo sapien
cctcataggctcttcatagaaaggaacaataaa

SEQ ID NO: 182027 - DNA, 33 bp, Homo sapien
gcctgaggtaaggacaaaaacattccttttcta

SEQ ID NO: 182028 - DNA, 33 bp, Homo sapien
gcctgaggtaaggacagaaacattccttttcta

SEQ ID NO: 182029 - DNA, 33 bp, Homo sapien
gctgtttttaaatgcaccttttcagaagttgat

SEQ ID NO: 182030 - DNA, 33 bp, Homo sapien
gctgtttttaaatgcatcttttcagaagttgat

SEQ ID NO: 182031 - DNA, 33 bp, Homo sapien
tttgaaatgaacaagactcacaaagtaagtata

SEQ ID NO: 182032 - DNA, 33 bp, Homo sapien
tttgaaatgaacaagattcacaaagtaagtata

SEQ ID NO: 182033 - DNA, 33 bp, Homo sapien
taatctgtttatctccaatgcttaagtctaagg

SEQ ID NO: 182034 - DNA, 33 bp, Homo sapien
taatctgtttatctccgatgcttaagtctaagg

SEQ ID NO: 182035 - DNA, 33 bp, Homo sapien
gaaaatatacattcaaagcagtcaaaggaaaaa

SEQ ID NO: 182036 - DNA, 33 bp, Homo sapien
gaaaatatacattcaacgcagtcaaaggaaaaa

SEQ ID NO: 182037 - DNA, 33 bp, Homo sapien
ttaccagtctacctaccactgatggccatttag

SEQ ID NO: 182038 - DNA, 33 bp, Homo sapien
ttaccagtctacctactactgatggccatttag

SEQ ID NO: 182039 - DNA, 33 bp, Homo sapien
gtatgaaaaactgttacagccaagaggagccta

SEQ ID NO: 182040 - DNA, 33 bp, Homo sapien
gtatgaaaaactgttatagccaagaggagccta

SEQ ID NO: 182041 - DNA, 33 bp, Homo sapien
gttctggggtcgcatccagtataccatattaca

SEQ ID NO: 182042 - DNA, 33 bp, Homo sapien
gttctggggtcgcatcgagtataccatattaca

SEQ ID NO: 182043 - DNA, 33 bp, Homo sapien
caacagcctaaaagtacggaaactgacaatgga

SEQ ID NO: 182044 - DNA, 33 bp, Homo sapien
caacagcctaaaagtatggaaactgacaatgga

SEQ ID NO: 182045 - DNA, 33 bp, Homo sapien
attccagtcatcataaatacatttgattctcac

SEQ ID NO: 182046 - DNA, 33 bp, Homo sapien
attccagtcatcataagtacatttgattctcac

SEQ ID NO: 182047 - DNA, 33 bp, Homo sapien
ggccattgcatataaactgttagctccagaata

SEQ ID NO: 182048 - DNA, 33 bp, Homo sapien
ggccattgcatataaattgttagctccagaata

SEQ ID NO: 182049 - DNA, 33 bp, Homo sapien
aatagtggcttgaacacggggtaacattagagg

SEQ ID NO: 182050 - DNA, 33 bp, Homo sapien
aatagtggcttgaacatggggtaacattagagg

SEQ ID NO: 182051 - DNA, 33 bp, Homo sapien
taacagctccctgaccaatcttcagtatctact

SEQ ID NO: 182052 - DNA, 33 bp, Homo sapien
taacagctccctgaccgatcttcagtatctact

SEQ ID NO: 182053 - DNA, 33 bp, Homo sapien
tggcagacaaaaaggcaagcaaatatgtgtgcg

SEQ ID NO: 182054 - DNA, 33 bp, Homo sapien
tggcagacaaaaaggcgagcaaatatgtgtgcg

SEQ ID NO: 182055 - DNA, 33 bp, Homo sapien
tcatcttttttactagaagcccactcctgccat

SEQ ID NO: 182056 - DNA, 33 bp, Homo sapien
tcatcttttttactaggagcccactcctgccat

SEQ ID NO: 182057 - DNA, 33 bp, Homo sapien
cacctcagattattagacattacattctcataa

SEQ ID NO: 182058 - DNA, 33 bp, Homo sapien
cacctcagattattaggcattacattctcataa

SEQ ID NO: 182059 - DNA, 33 bp, Homo sapien
tatttgaggggtgttcacaaaaacaatatacat

SEQ ID NO: 182060 - DNA, 33 bp, Homo sapien
tatttgaggggtgttcgcaaaaacaatatacat

SEQ ID NO: 182061 - DNA, 33 bp, Homo sapien
cgaactaccattcaagacctcccgcatttgttc

SEQ ID NO: 182062 - DNA, 33 bp, Homo sapien
cgaactaccattcaaggcctcccgcatttgttc

SEQ ID NO: 182063 - DNA, 33 bp, Homo sapien
tcttgctctaatgatacgccaagaaactttcaa

SEQ ID NO: 182064 - DNA, 33 bp, Homo sapien
tcttgctctaatgatatgccaagaaactttcaa

SEQ ID NO: 182065 - DNA, 33 bp, Homo sapien
atgtggagtagtgccaaatgaggtcagtaggtg

SEQ ID NO: 182066 - DNA, 33 bp, Homo sapien
atgtggagtagtgccagatgaggtcagtaggtg

SEQ ID NO: 182067 - DNA, 33 bp, Homo sapien
cctaacactctttgaaaagctgactgtgcttat

SEQ ID NO: 182068 - DNA, 33 bp, Homo sapien
cctaacactctttgaacagctgactgtgcttat

SEQ ID NO: 182069 - DNA, 33 bp, Homo sapien
tctctagtctatgctacaaggtaagctccatga

SEQ ID NO: 182070 - DNA, 33 bp, Homo sapien
tctctagtctatgctagaaggtaagctccatga

SEQ ID NO: 182071 - DNA, 33 bp, Homo sapien
tgtacaagcaaaaaacagcaaatttagcataat

SEQ ID NO: 182072 - DNA, 33 bp, Homo sapien
tgtacaagcaaaaaacggcaaatttagcataat

SEQ ID NO: 182073 - DNA, 33 bp, Homo sapien
caaaaaaaaggttttcgcatggaagtggatacc

SEQ ID NO: 182074 - DNA, 33 bp, Homo sapien
caaaaaaaaggttttctcatggaagtggatacc

SEQ ID NO: 182075 - DNA, 33 bp, Homo sapien
tgatttttttttacagccagaatgagtaatgat

SEQ ID NO: 182076 - DNA, 33 bp, Homo sapien
tgatttttttttacagtcagaatgagtaatgat

SEQ ID NO: 182077 - DNA, 33 bp, Homo sapien
aaatagaattgagagaatcatcaggataatagc

SEQ ID NO: 182078 - DNA, 33 bp, Homo sapien
aaatagaattgagagactcatcaggataatagc

SEQ ID NO: 182079 - DNA, 33 bp, Homo sapien
attatgggctccattcaatacatagatcagaaa

SEQ ID NO: 182080 - DNA, 33 bp, Homo sapien
attatgggctccattccatacatagatcagaaa

SEQ ID NO: 182081 - DNA, 33 bp, Homo sapien
tttgcattatggcattcaacactatagggcacc

SEQ ID NO: 182082 - DNA, 33 bp, Homo sapien
tttgcattatggcatttaacactatagggcacc

SEQ ID NO: 182083 - DNA, 33 bp, Homo sapien; identical to SEQ ID NO: 182081

SEQ ID NO: 182084 - DNA, 33 bp, Homo sapien; identical to SEQ ID NO: 182082

SEQ ID NO: 182085 - DNA, 33 bp, Homo sapien
acatttaaacaacaaccctggaatacaattctt

SEQ ID NO: 182086 - DNA, 33 bp, Homo sapien
acatttaaacaacaacgctggaatacaattctt

SEQ ID NO: 182087 - DNA, 33 bp, Homo sapien
taaaaatctatgatcgcatgatatattttgaaa

SEQ ID NO: 182088 - DNA, 33 bp, Homo sapien
taaaaatctatgatcggatgatatattttgaaa

SEQ ID NO: 182089 - DNA, 33 bp, Homo sapien
tccactgccaggtaaagcaatggccagactaca

SEQ ID NO: 182090 - DNA, 33 bp, Homo sapien
tccactgccaggtaaatcaatggccagactaca

SEQ ID NO: 182091 - DNA, 33 bp, Homo sapien
agttattggccttaaacaggagacagaaagaga

SEQ ID NO: 182092 - DNA, 33 bp, Homo sapien
agttattggccttaaataggagacagaaagaga

SEQ ID NO: 182093 - DNA, 33 bp, Homo sapien
ttatataattgtaggcaaatcatttctctgggc

SEQ ID NO: 182094 - DNA, 33 bp, Homo sapien
ttatataattgtaggcgaatcatttctctgggc

SEQ ID NO: 182095 - DNA, 33 bp, Homo sapien
agataaaaactctaagacaattctaatttatca

SEQ ID NO: 182096 - DNA, 33 bp, Homo sapien
agataaaaactctaaggcaattctaatttatca

SEQ ID NO: 182097 - DNA, 33 bp, Homo sapien; identical to SEQ ID NO: 182095

SEQ ID NO: 182098 - DNA, 33 bp, Homo sapien; identical to SEQ ID NO: 182096

SEQ ID NO: 182099 - DNA, 33 bp, Homo sapien
catatactggcgtttacggtacttaaagtcaaa

SEQ ID NO: 182100 - DNA, 33 bp, Homo sapien
catatactggcgtttatggtacttaaagtcaaa

SEQ ID NO: 182101 - DNA, 33 bp, Homo sapien
gagtacccactgacataacgatggcgataatag

SEQ ID NO: 182102 - DNA, 33 bp, Homo sapien
gagtacccactgacatgacgatggcgataatag

SEQ ID NO: 182103 - DNA, 33 bp, Homo sapien
agaggagaaacagtagaaacttgcttatcccct

SEQ ID NO: 182104 - DNA, 33 bp, Homo sapien
agaggagaaacagtagcaacttgcttatcccct

SEQ ID NO: 182105 - DNA, 33 bp, Homo sapien
tatataaaaaatattccagatgaagcggttttt

SEQ ID NO: 182106 - DNA, 33 bp, Homo sapien
tatataaaaaatattctagatgaagcggttttt

SEQ ID NO: 182107 - DNA, 33 bp, Homo sapien
acctagagattcacaggacccctagcaactata

SEQ ID NO: 182108 - DNA, 33 bp, Homo sapien
acctagagattcacagtacccctagcaactata

SEQ ID NO: 182109 - DNA, 33 bp, Homo sapien
aattctgttgctccaccatcaatagacatcaca

SEQ ID NO: 182110 - DNA, 33 bp, Homo sapien
aattctgttgctccactatcaatagacatcaca

SEQ ID NO: 182111 - DNA, 33 bp, Homo sapien
atcataaaagcacaaaaacaatttgctgagctg

SEQ ID NO: 182112 - DNA, 33 bp, Homo sapien
atcataaaagcacaaagacaatttgctgagctg

SEQ ID NO: 182113 - DNA, 33 bp, Homo sapien
gagagaaaacaaaagcaatgaggttaaatgaca

SEQ ID NO: 182114 - DNA, 33 bp, Homo sapien
gagagaaaacaaaagcgatgaggttaaatgaca

SEQ ID NO: 182115 - DNA, 33 bp, Homo sapien; identical to SEQ ID NO: 182113

SEQ ID NO: 182116 - DNA, 33 bp, Homo sapien; identical to SEQ ID NO: 182114

SEQ ID NO: 182117 - DNA, 33 bp, Homo sapien
gcaggtgatggagtgaccttgttagtgatattt

SEQ ID NO: 182118 - DNA, 33 bp, Homo sapien
gcaggtgatggagtgatcttgttagtgatattt

SEQ ID NO: 182119 - DNA, 33 bp, Homo sapien
aaccagctttcacaagcatagaaagaaaatgca

SEQ ID NO: 182120 - DNA, 33 bp, Homo sapien
aaccagctttcacaagtatagaaagaaaatgca

SEQ ID NO: 182121 - DNA, 33 bp, Homo sapien
agaaaggttaatgcagacataaggagagtagag

SEQ ID NO: 182122 - DNA, 33 bp, Homo sapien
agaaaggttaatgcaggcataaggagagtagag

SEQ ID NO: 182123 - DNA, 33 bp, Homo sapien
atgaagacagtttctgaagaaatcattaaaaat

SEQ ID NO: 182124 - DNA, 33 bp, Homo sapien
atgaagacagtttctggagaaatcattaaaaat

SEQ ID NO: 182125 - DNA, 33 bp, Homo sapien
ctctctagttttgtgacgctattttccttaaac

SEQ ID NO: 182126 - DNA, 33 bp, Homo sapien
ctctctagttttgtgatgctattttccttaaac

SEQ ID NO: 182127 - DNA, 33 bp, Homo sapien
attgctatctcaaataactccttttttagtcag

SEQ ID NO: 182128 - DNA, 33 bp, Homo sapien
attgctatctcaaatatctccttttttagtcag

SEQ ID NO: 182129 - DNA, 33 bp, Homo sapien
gtttcctttgttttgagctgctttactctgtgg

SEQ ID NO: 182130 - DNA, 33 bp, Homo sapien
gtttcctttgttttgatctgctttactctgtgg

SEQ ID NO: 182131 - DNA, 33 bp, Homo sapien
gtattattacaaagcaggaagattctgcacttt

SEQ ID NO: 182132 - DNA, 33 bp, Homo sapien
gtattattacaaagcatgaagattctgcacttt

SEQ ID NO: 182133 - DNA, 33 bp, Homo sapien
tttccttgccaccaaaccttcttcctcaatgct

SEQ ID NO: 182134 - DNA, 33 bp, Homo sapien
tttccttgccaccaaatcttcttcctcaatgct

SEQ ID NO: 182135 - DNA, 33 bp, Homo sapien
aatgttcagatccacaaagcctaaagtcatatg

SEQ ID NO: 182136 - DNA, 33 bp, Homo sapien
aatgttcagatccacagagcctaaagtcatatg

SEQ ID NO: 182137 - DNA, 33 bp, Homo sapien
tgaaaaaataatcagcaatgcacaacttaaaga

SEQ ID NO: 182138 - DNA, 33 bp, Homo sapien
tgaaaaaataatcagcgatgcacaacttaaaga

SEQ ID NO: 182139 - DNA, 33 bp, Homo sapien
cagtgtttattataatcaggccgaagataacaa

SEQ ID NO: 182140 - DNA, 33 bp, Homo sapien
cagtgtttattataatgaggccgaagataacaa

SEQ ID NO: 182141 - DNA, 33 bp, Homo sapien
atttagtccactcaaagaaactaccaaatatgt

SEQ ID NO: 182142 - DNA, 33 bp, Homo sapien
atttagtccactcaaataaactaccaaatatgt

SEQ ID NO: 182143 - DNA, 33 bp, Homo sapien
aaaccaagtccattcacggaatctgacatctta

SEQ ID NO: 182144 - DNA, 33 bp, Homo sapien
aaaccaagtccattcatggaatctgacatctta

SEQ ID NO: 182145 - DNA, 33 bp, Homo sapien; identical to SEQ ID NO: 182143

SEQ ID NO: 182146 - DNA, 33 bp, Homo sapien; identical to SEQ ID NO: 182144

SEQ ID NO: 182147 - DNA, 33 bp, Homo sapien
agttgtcttcaaacaaatggctaatatagtcag

SEQ ID NO: 182148 - DNA, 33 bp, Homo sapien
agttgtcttcaaacaattggctaatatagtcag

SEQ ID NO: 182149 - DNA, 33 bp, Homo sapien
tatgagagtaagtcacacgcattttctggtttt

SEQ ID NO: 182150 - DNA, 33 bp, Homo sapien
tatgagagtaagtcacgcgcattttctggtttt

SEQ ID NO: 182151 - DNA, 33 bp, Homo sapien
ataaaacaggatattgaagctgagaaaaacaat

SEQ ID NO: 182152 - DNA, 33 bp, Homo sapien
ataaaacaggatattggagctgagaaaaacaat

SEQ ID NO: 182153 - DNA, 33 bp, Homo sapien
tttaaaataggcaaagaacctgataagattttt

SEQ ID NO: 182154 - DNA, 33 bp, Homo sapien
tttaaaataggcaaaggacctgataagattttt

SEQ ID NO: 182155 - DNA, 33 bp, Homo sapien
tagagttgttactagactaatgacccaattcag

SEQ ID NO: 182156 - DNA, 33 bp, Homo sapien
tagagttgttactagattaatgacccaattcag

SEQ ID NO: 182157 - DNA, 33 bp, Homo sapien
tgttaaagtaaagttacggcttataccacaatc

SEQ ID NO: 182158 - DNA, 33 bp, Homo sapien
tgttaaagtaaagttatggcttataccacaatc

SEQ ID NO: 182159 - DNA, 33 bp, Homo sapien
gaatgtagaaagatacggccattatgaaaaaac

SEQ ID NO: 182160 - DNA, 33 bp, Homo sapien
gaatgtagaaagatactgccattatgaaaaaac

SEQ ID NO: 182161 - DNA, 33 bp, Homo sapien
gattatgaaaaatagacgggacagcagacacaa

SEQ ID NO: 182162 - DNA, 33 bp, Homo sapien
gattatgaaaaatagatgggacagcagacacaa

SEQ ID NO: 182163 - DNA, 33 bp, Homo sapien
tacaacaatgtcaacaatagccacttactcaaa

SEQ ID NO: 182164 - DNA, 33 bp, Homo sapien
tacaacaatgtcaacagtagccacttactcaaa

SEQ ID NO: 182165 - DNA, 33 bp, Homo sapien
ttcattgggaaggaaactcaagatcaagattcg

SEQ ID NO: 182166 - DNA, 33 bp, Homo sapien
ttcattgggaaggaaattcaagatcaagattcg

SEQ ID NO: 182167 - DNA, 33 bp, Homo sapien
atttatttatttatggaaagagtctcactcagg

SEQ ID NO: 182168 - DNA, 33 bp, Homo sapien
atttatttatttatgggaagagtctcactcagg

SEQ ID NO: 182169 - DNA, 33 bp, Homo sapien
aattggaaggctaaaccatttccctagtatctt

SEQ ID NO: 182170 - DNA, 33 bp, Homo sapien
aattggaaggctaaactatttccctagtatctt

SEQ ID NO: 182171 - DNA, 33 bp, Homo sapien
gggttaaattcaaagccatcgtcaatcttactc

SEQ ID NO: 182172 - DNA, 33 bp, Homo sapien
gggttaaattcaaagctatcgtcaatcttactc

SEQ ID NO: 182173 - DNA, 33 bp, Homo sapien
tcctcaagtgttccaaatagaaaagccaagttt

SEQ ID NO: 182174 - DNA, 33 bp, Homo sapien
tcctcaagtgttccaagtagaaaagccaagttt

SEQ ID NO: 182175 - DNA, 33 bp, Homo sapien
aagagcagcagaatgacagagtgactttttttt

SEQ ID NO: 182176 - DNA, 33 bp, Homo sapien
aagagcagcagaatgatagagtgactttttttt

SEQ ID NO: 182177 - DNA, 33 bp, Homo sapien
gatttattgctacataacaaaggaagtaaacca

SEQ ID NO: 182178 - DNA, 33 bp, Homo sapien
gatttattgctacatagcaaaggaagtaaacca

SEQ ID NO: 182179 - DNA, 33 bp, Homo sapien
attggatttaaatagaaggtgcctatcaaatgt

SEQ ID NO: 182180 - DNA, 33 bp, Homo sapien
attggatttaaatagagggtgcctatcaaatgt

SEQ ID NO: 182181 - DNA, 33 bp, Homo sapien
ctttttgtaagtgaggaaaattaggcttggaga

SEQ ID NO: 182182 - DNA, 33 bp, Homo sapien
ctttttgtaagtgagggaaattaggcttggaga

SEQ ID NO: 182183 - DNA, 33 bp, Homo sapien
tttccagtgaggcttcccttctactctactccc

SEQ ID NO: 182184 - DNA, 33 bp, Homo sapien
tttccagtgaggcttctcttctactctactccc

SEQ ID NO: 182185 - DNA, 33 bp, Homo sapien
tgaaatcccttaacaccaatgatccctgttctg

SEQ ID NO: 182186 - DNA, 33 bp, Homo sapien
tgaaatcccttaacactaatgatccctgttctg

SEQ ID NO: 182187 - DNA, 33 bp, Homo sapien
acgcaacttaagagtgacactactacagtaagg

SEQ ID NO: 182188 - DNA, 33 bp, Homo sapien
acgcaacttaagagtggcactactacagtaagg

SEQ ID NO: 182189 - DNA, 33 bp, Homo sapien
tttagtcaactggtaccgatagctcatgagtat

SEQ ID NO: 182190 - DNA, 33 bp, Homo sapien
tttagtcaactggtactgatagctcatgagtat

SEQ ID NO: 182191 - DNA, 33 bp, Homo sapien; identical to SEQ ID NO: 182189

SEQ ID NO: 182192 - DNA, 33 bp, Homo sapien; identical to SEQ ID NO: 182190

SEQ ID NO: 182193 - DNA, 33 bp, Homo sapien
attatgtattcaacacaaaagaaggcagtaatg

SEQ ID NO: 182194 - DNA, 33 bp, Homo sapien
attatgtattcaacacgaaagaaggcagtaatg

SEQ ID NO: 182195 - DNA, 33 bp, Homo sapien
ttccacaagcacaaagacttatacaaggcatcc

SEQ ID NO: 182196 - DNA, 33 bp, Homo sapien
ttccacaagcacaaaggcttatacaaggcatcc

SEQ ID NO: 182197 - DNA, 33 bp, Homo sapien; identical to SEQ ID NO: 182195

SEQ ID NO: 182198 - DNA, 33 bp, Homo sapien; identical to SEQ ID NO: 182196

SEQ ID NO: 182199 - DNA, 33 bp, Homo sapien
aatgataatttcatcaatatttcacctaaatca

SEQ ID NO: 182200 - DNA, 33 bp, Homo sapien
aatgataatttcatcagtatttcacctaaatca

SEQ ID NO: 182201 - DNA, 33 bp, Homo sapien
attgtttctattaaaacggctccttgaaggcca

SEQ ID NO: 182202 - DNA, 33 bp, Homo sapien
attgtttctattaaaatggctccttgaaggcca

SEQ ID NO: 182203 - DNA, 33 bp, Homo sapien
ttaattgagtacacacgatataccaggccctga

SEQ ID NO: 182204 - DNA, 33 bp, Homo sapien
ttaattgagtacacactatataccaggccctga

SEQ ID NO: 182205 - DNA, 33 bp, Homo sapien
tgcagaatagcatgaaataaaactggaaaggca

SEQ ID NO: 182206 - DNA, 33 bp, Homo sapien
tgcagaatagcatgaagtaaaactggaaaggca

SEQ ID NO: 182207 - DNA, 33 bp, Homo sapien
gataatctcctgctaacgccttttggtaagcag

SEQ ID NO: 182208 - DNA, 33 bp, Homo sapien
gataatctcctgctaatgccttttggtaagcag

SEQ ID NO: 182209 - DNA, 33 bp, Homo sapien
ctcatctagaatggcagaccagctttgaaacat

SEQ ID NO: 182210 - DNA, 33 bp, Homo sapien
ctcatctagaatggcataccagctttgaaacat

SEQ ID NO: 182211 - DNA, 33 bp, Homo sapien
atgctaggacagcaggaataaaccagaatagtc

SEQ ID NO: 182212 - DNA, 33 bp, Homo sapien
atgctaggacagcaggcataaaccagaatagtc

SEQ ID NO: 182213 - DNA, 33 bp, Homo sapien
atagatagatgattgacagattacttttagata

SEQ ID NO: 182214 - DNA, 33 bp, Homo sapien
atagatagatgattgatagattacttttagata

SEQ ID NO: 182215 - DNA, 33 bp, Homo sapien
actcaataataatacacggtaatgcatagtaat

SEQ ID NO: 182216 - DNA, 33 bp, Homo sapien
actcaataataatacatggtaatgcatagtaat

SEQ ID NO: 182217 - DNA, 33 bp, Homo sapien
gtataatgaaacactgcagttctggcctcttgt

SEQ ID NO: 182218 - DNA, 33 bp, Homo sapien
gtataatgaaacactgtagttctggcctcttgt

SEQ ID NO: 182219 - DNA, 33 bp, Homo sapien
gtcaccctgtgaaaaaacacccatattctttct

SEQ ID NO: 182220 - DNA, 33 bp, Homo sapien
gtcaccctgtgaaaaaccacccatattctttct

SEQ ID NO: 182221 - DNA, 33 bp, Homo sapien
ctggctttatattccaggtttctccttttttta

SEQ ID NO: 182222 - DNA, 33 bp, Homo sapien
ctggctttatattccatgtttctccttttttta

SEQ ID NO: 182223 - DNA, 33 bp, Homo sapien
aattttcctttctcagccgtcttctacctccag

SEQ ID NO: 182224 - DNA, 33 bp, Homo sapien
aattttcctttctcagtcgtcttctacctccag

SEQ ID NO: 182225 - DNA, 33 bp, Homo sapien
tgcagaccttgtcttgcagtgctactcataaca

SEQ ID NO: 182226 - DNA, 33 bp, Homo sapien
tgcagaccttgtcttgtagtgctactcataaca

SEQ ID NO: 182227 - DNA, 33 bp, Homo sapien
aaaataacacataaaagtattggtttgataaaa

SEQ ID NO: 182228 - DNA, 33 bp, Homo sapien
aaaataacacataaaattattggtttgataaaa

SEQ ID NO: 182229 - DNA, 33 bp, Homo sapien
ttaatatagcaaatcacgtaggaatcaaaaaga

SEQ ID NO: 182230 - DNA, 33 bp, Homo sapien
ttaatatagcaaatcatgtaggaatcaaaaaga

SEQ ID NO: 182231 - DNA, 33 bp, Homo sapien
ggttgaaaatgaggtcaaatatctgttaaaacc

SEQ ID NO: 182232 - DNA, 33 bp, Homo sapien
ggttgaaaatgaggtcgaatatctgttaaaacc

SEQ ID NO: 182233 - DNA, 33 bp, Homo sapien
aggatccatcagttaaataaacttcaacaagct

SEQ ID NO: 182234 - DNA, 33 bp, Homo sapien
aggatccatcagttaagtaaacttcaacaagct

SEQ ID NO: 182235 - DNA, 33 bp, Homo sapien
acacctgcatgacataataagtctggcagcagt

SEQ ID NO: 182236 - DNA, 33 bp, Homo sapien
acacctgcatgacatagtaagtctggcagcagt

SEQ ID NO: 182237 - DNA, 33 bp, Homo sapien
tcataagcttgtaatgccacctttattatctgc

SEQ ID NO: 182238 - DNA, 33 bp, Homo sapien
tcataagcttgtaatgtcacctttattatctgc

SEQ ID NO: 182239 - DNA, 33 bp, Homo sapien
agactagttatcttacccatctcttacaactgg

SEQ ID NO: 182240 - DNA, 33 bp, Homo sapien
agactagttatcttactcatctcttacaactgg

SEQ ID NO: 182241 - DNA, 33 bp, Homo sapien
gaaaatggcaactcaacgttttaagttagtatt

SEQ ID NO: 182242 - DNA, 33 bp, Homo sapien
gaaaatggcaactcaatgttttaagttagtatt

SEQ ID NO: 182243 - DNA, 33 bp, Homo sapien
cacctggatttagctaagtgaaaatacagaatc

SEQ ID NO: 182244 - DNA, 33 bp, Homo sapien
cacctggatttagctacgtgaaaatacagaatc

SEQ ID NO: 182245 - DNA, 33 bp, Homo sapien
aaatgtgtacatggacactggcaactctgcctc

SEQ ID NO: 182246 - DNA, 33 bp, Homo sapien
aaatgtgtacatggacgctggcaactctgcctc

SEQ ID NO: 182247 - DNA, 33 bp, Homo sapien
tttgcatttctgcatacatttgaaagtcggctt

SEQ ID NO: 182248 - DNA, 33 bp, Homo sapien
tttgcatttctgcatatatttgaaagtcggctt

SEQ ID NO: 182249 - DNA, 33 bp, Homo sapien
tgcttctgaatgagaaacttttgtactctgaaa

SEQ ID NO: 182250 - DNA, 33 bp, Homo sapien
tgcttctgaatgagaaccttttgtactctgaaa

SEQ ID NO: 182251 - DNA, 33 bp, Homo sapien
cattattaatccataaccttcacaagcatcagt

SEQ ID NO: 182252 - DNA, 33 bp, Homo sapien
cattattaatccataagcttcacaagcatcagt

SEQ ID NO: 182253 - DNA, 33 bp, Homo sapien
atttttaaaaaatgaccgctctaagttatgtgt

SEQ ID NO: 182254 - DNA, 33 bp, Homo sapien
atttttaaaaaatgactgctctaagttatgtgt

SEQ ID NO: 182255 - DNA, 33 bp, Homo sapien
agatttaaaatgaggaagtataaacaaaacaaa

SEQ ID NO: 182256 - DNA, 33 bp, Homo sapien
agatttaaaatgaggatgtataaacaaaacaaa

SEQ ID NO: 182257 - DNA, 33 bp, Homo sapien
agacaaacaccaatgccaaatcagaattttaaa

SEQ ID NO: 182258 - DNA, 33 bp, Homo sapien
agacaaacaccaatgctaaatcagaattttaaa

SEQ ID NO: 182259 - DNA, 33 bp, Homo sapien
tgtgctgaacccatgacgtaggagacacaaggc

SEQ ID NO: 182260 - DNA, 33 bp, Homo sapien
tgtgctgaacccatgatgtaggagacacaaggc

SEQ ID NO: 182261 - DNA, 33 bp, Homo sapien
taaaattccaataaatgaagaggtatcattgtc

SEQ ID NO: 182262 - DNA, 33 bp, Homo sapien
taaaattccaataaattaagaggtatcattgtc

SEQ ID NO: 182263 - DNA, 33 bp, Homo sapien
acttttgaatgaagtcaactctcttccagtctt

SEQ ID NO: 182264 - DNA, 33 bp, Homo sapien
acttttgaatgaagtcgactctcttccagtctt

SEQ ID NO: 182265 - DNA, 33 bp, Homo sapien
ctaaaattccacccaacaatcatagccaaattg

SEQ ID NO: 182266 - DNA, 33 bp, Homo sapien
ctaaaattccacccaagaatcatagccaaattg

SEQ ID NO: 182267 - DNA, 33 bp, Homo sapien
tagtccaatattagccactataatgaacagctg

SEQ ID NO: 182268 - DNA, 33 bp, Homo sapien
tagtccaatattagccgctataatgaacagctg

SEQ ID NO: 182269 - DNA, 33 bp, Homo sapien
caagtctaaaactctacgaatcagtgtctattg

SEQ ID NO: 182270 - DNA, 33 bp, Homo sapien
caagtctaaaactctatgaatcagtgtctattg

SEQ ID NO: 182271 - DNA, 33 bp, Homo sapien
tatgcttgcaagtggaaaaatagggtacagaaa

SEQ ID NO: 182272 - DNA, 33 bp, Homo sapien
tatgcttgcaagtggataaatagggtacagaaa

SEQ ID NO: 182273 - DNA, 33 bp, Homo sapien
taatattctacttacaaatatcctgatgtataa

SEQ ID NO: 182274 - DNA, 33 bp, Homo sapien
taatattctacttacagatatcctgatgtataa

SEQ ID NO: 182275 - DNA, 33 bp, Homo sapien
taatgttaactatgacccagtaaagttacgtgt

SEQ ID NO: 182276 - DNA, 33 bp, Homo sapien
taatgttaactatgactcagtaaagttacgtgt

SEQ ID NO: 182277 - DNA, 33 bp, Homo sapien
cccctttgaacttccagctgttatttcagtcat

SEQ ID NO: 182278 - DNA, 33 bp, Homo sapien
cccctttgaacttccatctgttatttcagtcat

SEQ ID NO: 182279 - DNA, 33 bp, Homo sapien
atctagtatgttgacaatacttacagcctacag

SEQ ID NO: 182280 - DNA, 33 bp, Homo sapien
atctagtatgttgacagtacttacagcctacag

SEQ ID NO: 182281 - DNA, 33 bp, Homo sapien
tgtgggtgtgcaaagacaaaagagttgggcttc

SEQ ID NO: 182282 - DNA, 33 bp, Homo sapien
tgtgggtgtgcaaagataaaagagttgggcttc

SEQ ID NO: 182283 - DNA, 33 bp, Homo sapien
aaaatattaagccaggaagattctgtccggaat

SEQ ID NO: 182284 - DNA, 33 bp, Homo sapien
aaaatattaagccaggcagattctgtccggaat

SEQ ID NO: 182285 - DNA, 33 bp, Homo sapien
tacagaaatgcccttacgtagaaaattaaagct

SEQ ID NO: 182286 - DNA, 33 bp, Homo sapien
tacagaaatgcccttatgtagaaaattaaagct

SEQ ID NO: 182287 - DNA, 33 bp, Homo sapien
ttgataagttcctctgaaaaggctaaattaaaa

SEQ ID NO: 182288 - DNA, 33 bp, Homo sapien
ttgataagttcctctgcaaaggctaaattaaaa

SEQ ID NO: 182289 - DNA, 33 bp, Homo sapien
ggcacctccccggccacacccatttgcactgca

SEQ ID NO: 182290 - DNA, 33 bp, Homo sapien
ggcacctccccggccatacccatttgcactgca

SEQ ID NO: 182291 - DNA, 33 bp, Homo sapien
tttttattgtctcaagaagaacttaatagcaat

SEQ ID NO: 182292 - DNA, 33 bp, Homo sapien
tttttattgtctcaaggagaacttaatagcaat

SEQ ID NO: 182293 - DNA, 33 bp, Homo sapien
atccgatgtgtttttccctggtatttccttagt

SEQ ID NO: 182294 - DNA, 33 bp, Homo sapien
atccgatgtgtttttctctggtatttccttagt

SEQ ID NO: 182295 - DNA, 33 bp, Homo sapien
aatgttttatgaagttaaactctcaaatttggt

SEQ ID NO: 182296 - DNA, 33 bp, Homo sapien
aatgttttatgaagttcaactctcaaatttggt

SEQ ID NO: 182297 - DNA, 33 bp, Homo sapien
atagaattttgcaacaaaacaatggtggggcct

SEQ ID NO: 182298 - DNA, 33 bp, Homo sapien
atagaattttgcaacagaacaatggtggggcct

SEQ ID NO: 182299 - DNA, 33 bp, Homo sapien; identical to SEQ ID NO: 182297

SEQ ID NO: 182300 - DNA, 33 bp, Homo sapien; identical to SEQ ID NO: 182298

SEQ ID NO: 182301 - DNA, 33 bp, Homo sapien
tgaatcttaaaattgcagatgtactgagacaat

SEQ ID NO: 182302 - DNA, 33 bp, Homo sapien
tgaatcttaaaattgcggatgtactgagacaat

SEQ ID NO: 182303 - DNA, 33 bp, Homo sapien; identical to SEQ ID NO: 182301

SEQ ID NO: 182304 - DNA, 33 bp, Homo sapien; identical to SEQ ID NO: 182302

SEQ ID NO: 182305 - DNA, 33 bp, Homo sapien
cactgttaaccatcacaagaggttagattaaca

SEQ ID NO: 182306 - DNA, 33 bp, Homo sapien
cactgttaaccatcacgagaggttagattaaca

SEQ ID NO: 182307 - DNA, 33 bp, Homo sapien
aaatagcacttacttccccaatttaaaatctaa

SEQ ID NO: 182308 - DNA, 33 bp, Homo sapien
aaatagcacttacttctccaatttaaaatctaa

SEQ ID NO: 182309 - DNA, 33 bp, Homo sapien
aatctaaacttctttaacaaagctctacaaaat

SEQ ID NO: 182310 - DNA, 33 bp, Homo sapien
aatctaaacttctttagcaaagctctacaaaat

SEQ ID NO: 182311 - DNA, 33 bp, Homo sapien
cactattgcccttttaaggtctatgatatctaa

SEQ ID NO: 182312 - DNA, 33 bp, Homo sapien
cactattgcccttttagggtctatgatatctaa

SEQ ID NO: 182313 - DNA, 33 bp, Homo sapien
tggactgcagggatcaaatttcattcatctttt

SEQ ID NO: 182314 - DNA, 33 bp, Homo sapien
tggactgcagggatcacatttcattcatctttt

SEQ ID NO: 182315 - DNA, 33 bp, Homo sapien; identical to SEQ ID NO: 182313

SEQ ID NO: 182316 - DNA, 33 bp, Homo sapien; identical to SEQ ID NO: 182314

SEQ ID NO: 182317 - DNA, 33 bp, Homo sapien
cagtctgaaacagatacgccaaaaaaaaacaaa

SEQ ID NO: 182318 - DNA, 33 bp, Homo sapien
cagtctgaaacagatatgccaaaaaaaaacaaa

SEQ ID NO: 182319 - DNA, 33 bp, Homo sapien
gaaaatgtttctcccactggacagaaatgagaa

SEQ ID NO: 182320 - DNA, 33 bp, Homo sapien
gaaaatgtttctcccattggacagaaatgagaa

SEQ ID NO: 182321 - DNA, 33 bp, Homo sapien
tggagggaaataaaaccgcctcaggaacagagt

SEQ ID NO: 182322 - DNA, 33 bp, Homo sapien
tggagggaaataaaactgcctcaggaacagagt

SEQ ID NO: 182323 - DNA, 33 bp, Homo sapien
gtgaaccaggtcagcaatctggacaggtcttta

SEQ ID NO: 182324 - DNA, 33 bp, Homo sapien
gtgaaccaggtcagcagtctggacaggtcttta

SEQ ID NO: 182325 - DNA, 33 bp, Homo sapien
tgcaaacaagattgcaaattctttaaataccat

SEQ ID NO: 182326 - DNA, 33 bp, Homo sapien
tgcaaacaagattgcatattctttaaataccat

SEQ ID NO: 182327 - DNA, 33 bp, Homo sapien
tatatcaatttatctgcattgtcttctctttct

SEQ ID NO: 182328 - DNA, 33 bp, Homo sapien
tatatcaatttatctggattgtcttctctttct

SEQ ID NO: 182329 - DNA, 33 bp, Homo sapien; identical to SEQ ID NO: 182327

SEQ ID NO: 182330 - DNA, 33 bp, Homo sapien; identical to SEQ ID NO: 182328

SEQ ID NO: 182331 - DNA, 33 bp, Homo sapien
cataatcacataattcccctgagtgccttgctt

SEQ ID NO: 182332 - DNA, 33 bp, Homo sapien
cataatcacataattctcctgagtgccttgctt

SEQ ID NO: 182333 - DNA, 33 bp, Homo sapien
gaacttatagttgaataatggttgcctctggaa

SEQ ID NO: 182334 - DNA, 33 bp, Homo sapien
gaacttatagttgaatcatggttgcctctggaa

SEQ ID NO: 182335 - DNA, 33 bp, Homo sapien
atgggaggtagtaagaaaagatggtggttgggg

SEQ ID NO: 182336 - DNA, 33 bp, Homo sapien
atgggaggtagtaagagaagatggtggttgggg

SEQ ID NO: 182337 - DNA, 33 bp, Homo sapien
ccaggaagattccaaccgtctggataggacttc

SEQ ID NO: 182338 - DNA, 33 bp, Homo sapien
ccaggaagattccaactgtctggataggacttc

SEQ ID NO: 182339 - DNA, 33 bp, Homo sapien
ctgaaagactaaaataagatggagagacacaaa

SEQ ID NO: 182340 - DNA, 33 bp, Homo sapien
ctgaaagactaaaataggatggagagacacaaa

SEQ ID NO: 182341 - DNA, 33 bp, Homo sapien
tcatgactgtgttagccaatgactatcatggaa

SEQ ID NO: 182342 - DNA, 33 bp, Homo sapien
tcatgactgtgttagctaatgactatcatggaa

SEQ ID NO: 182343 - DNA, 33 bp, Homo sapien
tcctattcaggggacacatggttaactcaagtt

SEQ ID NO: 182344 - DNA, 33 bp, Homo sapien
tcctattcaggggacatatggttaactcaagtt

SEQ ID NO: 182345 - DNA, 33 bp, Homo sapien; identical to SEQ ID NO: 182343

SEQ ID NO: 182346 - DNA, 33 bp, Homo sapien; identical to SEQ ID NO: 182344

SEQ ID NO: 182347 - DNA, 33 bp, Homo sapien
atctccgcaatgtaacagaagtctaaaccactg

SEQ ID NO: 182348 - DNA, 33 bp, Homo sapien
atctccgcaatgtaacggaagtctaaaccactg

SEQ ID NO: 182349 - DNA, 33 bp, Homo sapien
atcagtctataaatcaaccctgctctgagctct

SEQ ID NO: 182350 - DNA, 33 bp, Homo sapien
atcagtctataaatcagccctgctctgagctct

SEQ ID NO: 182351 - DNA, 33 bp, Homo sapien
aaccaatctcacagccgccactttggcaaacaa

SEQ ID NO: 182352 - DNA, 33 bp, Homo sapien
aaccaatctcacagcctccactttggcaaacaa

SEQ ID NO: 182353 - DNA, 33 bp, Homo sapien
ggcttcttctagtaaacaaggatcaagtataaa

SEQ ID NO: 182354 - DNA, 33 bp, Homo sapien
ggcttcttctagtaaataaggatcaagtataaa

SEQ ID NO: 182355 - DNA, 33 bp, Homo sapien
cccttttgggttactaccaatgcatttccaaca

SEQ ID NO: 182356 - DNA, 33 bp, Homo sapien
cccttttgggttactagcaatgcatttccaaca

SEQ ID NO: 182357 - DNA, 33 bp, Homo sapien
ctcgaaccatatgccaaattcctaccaaaccaa

SEQ ID NO: 182358 - DNA, 33 bp, Homo sapien
ctcgaaccatatgccagattcctaccaaaccaa

SEQ ID NO: 182359 - DNA, 33 bp, Homo sapien; identical to SEQ ID NO: 182357

SEQ ID NO: 182360 - DNA, 33 bp, Homo sapien; identical to SEQ ID NO: 182358

SEQ ID NO: 182361 - DNA, 33 bp, Homo sapien
acattccatgaagtaaaaataacacttccattc

SEQ ID NO: 182362 - DNA, 33 bp, Homo sapien
acattccatgaagtaacaataacacttccattc

SEQ ID NO: 182363 - DNA, 33 bp, Homo sapien
ctgaaaggttcagaacaagtttcaggagagaga

SEQ ID NO: 182364 - DNA, 33 bp, Homo sapien
ctgaaaggttcagaacgagtttcaggagagaga

SEQ ID NO: 182365 - DNA, 33 bp, Homo sapien
tgtttgcagatgacaccattgtatgtttagaaa

SEQ ID NO: 182366 - DNA, 33 bp, Homo sapien
tgtttgcagatgacacgattgtatgtttagaaa

SEQ ID NO: 182367 - DNA, 33 bp, Homo sapien
gcctactgtgtcttaacaaacattctaagccaa

SEQ ID NO: 182368 - DNA, 33 bp, Homo sapien
gcctactgtgtcttaataaacattctaagccaa

SEQ ID NO: 182369 - DNA, 33 bp, Homo sapien
attcaaactttgcatagatctttgtctctctat

SEQ ID NO: 182370 - DNA, 33 bp, Homo sapien
attcaaactttgcatatatctttgtctctctat

SEQ ID NO: 182371 - DNA, 33 bp, Homo sapien
catagtattacctctaaagcaagcgtcggtgag

SEQ ID NO: 182372 - DNA, 33 bp, Homo sapien
catagtattacctctacagcaagcgtcggtgag

SEQ ID NO: 182373 - DNA, 33 bp, Homo sapien; identical to SEQ ID NO: 182371

SEQ ID NO: 182374 - DNA, 33 bp, Homo sapien; identical to SEQ ID NO: 182372

SEQ ID NO: 182375 - DNA, 33 bp, Homo sapien
aggcattcaggtttaactaccatgttttggtag

SEQ ID NO: 182376 - DNA, 33 bp, Homo sapien
aggcattcaggtttaattaccatgttttggtag

SEQ ID NO: 182377 - DNA, 33 bp, Homo sapien
agatttctaaccagaacaactctaagataataa

SEQ ID NO: 182378 - DNA, 33 bp, Homo sapien
agatttctaaccagaagaactctaagataataa

SEQ ID NO: 182379 - DNA, 33 bp, Homo sapien
gagaacagttctcctaagtatatgctgtgtttc

SEQ ID NO: 182380 - DNA, 33 bp, Homo sapien
gagaacagttctcctaggtatatgctgtgtttc

SEQ ID NO: 182381 - DNA, 33 bp, Homo sapien; identical to SEQ ID NO: 182379

SEQ ID NO: 182382 - DNA, 33 bp, Homo sapien; identical to SEQ ID NO: 182380

SEQ ID NO: 182383 - DNA, 33 bp, Homo sapien
ttacaccactagtatgaatttacttcagatatg

SEQ ID NO: 182384 - DNA, 33 bp, Homo sapien
ttacaccactagtatggatttacttcagatatg

SEQ ID NO: 182385 - DNA, 33 bp, Homo sapien
atgatctgaaaaactcccttcactcattcatta

SEQ ID NO: 182386 - DNA, 33 bp, Homo sapien
atgatctgaaaaactctcttcactcattcatta

SEQ ID NO: 182387 - DNA, 33 bp, Homo sapien
agcctctcaaagaaacaaccacttctgtgcgct

SEQ ID NO: 182388 - DNA, 33 bp, Homo sapien
agcctctcaaagaaacgaccacttctgtgcgct

SEQ ID NO: 182389 - DNA, 33 bp, Homo sapien
gaaggatatttagacactgccttttaccataca

SEQ ID NO: 182390 - DNA, 33 bp, Homo sapien
gaaggatatttagacattgccttttaccataca

SEQ ID NO: 182391 - DNA, 33 bp, Homo sapien
aaagaaaaactattgacaaagatgccaacatgg

SEQ ID NO: 182392 - DNA, 33 bp, Homo sapien
aaagaaaaactattgataaagatgccaacatgg

SEQ ID NO: 182393 - DNA, 33 bp, Homo sapien
ccttttgtcagatttagccacaaacatttcata

SEQ ID NO: 182394 - DNA, 33 bp, Homo sapien
ccttttgtcagatttatccacaaacatttcata

SEQ ID NO: 182395 - DNA, 33 bp, Homo sapien
tctgtaccttacttgcaaatgcttcaacagtgt

SEQ ID NO: 182396 - DNA, 33 bp, Homo sapien
tctgtaccttacttgcgaatgcttcaacagtgt

SEQ ID NO: 182397 - DNA, 33 bp, Homo sapien
gacttataaatgataaatagcagatggaggagg

SEQ ID NO: 182398 - DNA, 33 bp, Homo sapien
gacttataaatgataactagcagatggaggagg

SEQ ID NO: 182399 - DNA, 33 bp, Homo sapien
actaatgtaagagaaaatgagttaggaggaaag

SEQ ID NO: 182400 - DNA, 33 bp, Homo sapien
actaatgtaagagaaactgagttaggaggaaag

SEQ ID NO: 182401 - DNA, 33 bp, Homo sapien
ttgttgattacatttacactgcgaattgttatt

SEQ ID NO: 182402 - DNA, 33 bp, Homo sapien
ttgttgattacatttatactgcgaattgttatt

SEQ ID NO: 182403 - DNA, 33 bp, Homo sapien
aaattatagcaaggaacatgaattctcagacat

SEQ ID NO: 182404 - DNA, 33 bp, Homo sapien
aaattatagcaaggaagatgaattctcagacat

SEQ ID NO: 182405 - DNA, 33 bp, Homo sapien
atctaacttccctgcaccactaaacccttttag

SEQ ID NO: 182406 - DNA, 33 bp, Homo sapien
atctaacttccctgcatcactaaacccttttag

SEQ ID NO: 182407 - DNA, 33 bp, Homo sapien
taaattcagattaagacgcaactttgcacacat

SEQ ID NO: 182408 - DNA, 33 bp, Homo sapien
taaattcagattaagatgcaactttgcacacat

SEQ ID NO: 182409 - DNA, 33 bp, Homo sapien
atttgagaaaaccaatgaatgaactgaatgaga

SEQ ID NO: 182410 - DNA, 33 bp, Homo sapien
atttgagaaaaccaattaatgaactgaatgaga

SEQ ID NO: 182411 - DNA, 33 bp, Homo sapien
ttcactcattttatacgggagtaggcatggtag

SEQ ID NO: 182412 - DNA, 33 bp, Homo sapien
ttcactcattttatactggagtaggcatggtag

SEQ ID NO: 182413 - DNA, 33 bp, Homo sapien
atctgtaaaacattgacaacagagtgctgtgaa

SEQ ID NO: 182414 - DNA, 33 bp, Homo sapien
atctgtaaaacattgataacagagtgctgtgaa

SEQ ID NO: 182415 - DNA, 33 bp, Homo sapien
cttgcacttcacatggaaaaagcagggaaagag

SEQ ID NO: 182416 - DNA, 33 bp, Homo sapien
cttgcacttcacatggcaaaagcagggaaagag

SEQ ID NO: 182417 - DNA, 33 bp, Homo sapien
ttaaaatgtcacacaacttgttgttcttaccaa

SEQ ID NO: 182418 - DNA, 33 bp, Homo sapien
ttaaaatgtcacacaatttgttgttcttaccaa

SEQ ID NO: 182419 - DNA, 33 bp, Homo sapien
gagatttccttatataacctgagtgaataagct

SEQ ID NO: 182420 - DNA, 33 bp, Homo sapien
gagatttccttatataccctgagtgaataagct

SEQ ID NO: 182421 - DNA, 33 bp, Homo sapien
aataataaaggaaaaacgtgatagcctagaatt

SEQ ID NO: 182422 - DNA, 33 bp, Homo sapien
aataataaaggaaaaaggtgatagcctagaatt

SEQ ID NO: 182423 - DNA, 33 bp, Homo sapien
ttccaaaggcctgaaacgtgaaggagagcttga

SEQ ID NO: 182424 - DNA, 33 bp, Homo sapien
ttccaaaggcctgaaatgtgaaggagagcttga

SEQ ID NO: 182425 - DNA, 33 bp, Homo sapien
agttcctttcaaatgggcattcaatgcattcaa

SEQ ID NO: 182426 - DNA, 33 bp, Homo sapien
agttcctttcaaatggtcattcaatgcattcaa

SEQ ID NO: 182427 - DNA, 33 bp, Homo sapien
caaaagaactaattaaacctttgtcagatgagt

SEQ ID NO: 182428 - DNA, 33 bp, Homo sapien
caaaagaactaattaaccctttgtcagatgagt

SEQ ID NO: 182429 - DNA, 33 bp, Homo sapien
ataatatttgcagtaacagagcttgttctttga

SEQ ID NO: 182430 - DNA, 33 bp, Homo sapien
ataatatttgcagtaatagagcttgttctttga

SEQ ID NO: 182431 - DNA, 33 bp, Homo sapien
gtgtcagagatgaaataacagccaattaaagct

SEQ ID NO: 182432 - DNA, 33 bp, Homo sapien
gtgtcagagatgaaatcacagccaattaaagct

SEQ ID NO: 182433 - DNA, 33 bp, Homo sapien
cactgcatagaattcacataacatccaggggaa

SEQ ID NO: 182434 - DNA, 33 bp, Homo sapien
cactgcatagaattcagataacatccaggggaa

SEQ ID NO: 182435 - DNA, 33 bp, Homo sapien
tttactggtattgcaactgactcattctggaag

SEQ ID NO: 182436 - DNA, 33 bp, Homo sapien
tttactggtattgcaagtgactcattctggaag

SEQ ID NO: 182437 - DNA, 33 bp, Homo sapien
aaataataaatgctaccggcaaactatacaact

SEQ ID NO: 182438 - DNA, 33 bp, Homo sapien
aaataataaatgctactggcaaactatacaact

SEQ ID NO: 182439 - DNA, 33 bp, Homo sapien
gtttcagacgctataaggcatcctttttataac

SEQ ID NO: 182440 - DNA, 33 bp, Homo sapien
gtttcagacgctataatgcatcctttttataac

SEQ ID NO: 182441 - DNA, 33 bp, Homo sapien
agcaagctatgcagcaagctaatgcagagacag

SEQ ID NO: 182442 - DNA, 33 bp, Homo sapien
agcaagctatgcagcaggctaatgcagagacag

SEQ ID NO: 182443 - DNA, 33 bp, Homo sapien
catttcttctttgccacatgactcttaggctct

SEQ ID NO: 182444 - DNA, 33 bp, Homo sapien
catttcttctttgccagatgactcttaggctct

SEQ ID NO: 182445 - DNA, 33 bp, Homo sapien
ttgtgtctacatcctacagggcgttgcctggat

SEQ ID NO: 182446 - DNA, 33 bp, Homo sapien
ttgtgtctacatcctatagggcgttgcctggat

SEQ ID NO: 182447 - DNA, 33 bp, Homo sapien
atttcctttaattttacggctcatgattcaagc

SEQ ID NO: 182448 - DNA, 33 bp, Homo sapien
atttcctttaattttatggctcatgattcaagc

SEQ ID NO: 182449 - DNA, 33 bp, Homo sapien
aagtttgtggacaacaactttcattaccttcct

SEQ ID NO: 182450 - DNA, 33 bp, Homo sapien
aagtttgtggacaacagctttcattaccttcct

SEQ ID NO: 182451 - DNA, 33 bp, Homo sapien
gaaaattgatattaaaactgcataaattgctta

SEQ ID NO: 182452 - DNA, 33 bp, Homo sapien
gaaaattgatattaaagctgcataaattgctta

SEQ ID NO: 182453 - DNA, 33 bp, Homo sapien
ttaagatagtctcttacgagttaatcttaggtg

SEQ ID NO: 182454 - DNA, 33 bp, Homo sapien
ttaagatagtctcttatgagttaatcttaggtg

SEQ ID NO: 182455 - DNA, 33 bp, Homo sapien
cctaaaggacatatgcagagtttccattttggg

SEQ ID NO: 182456 - DNA, 33 bp, Homo sapien
cctaaaggacatatgcggagtttccattttggg

SEQ ID NO: 182457 - DNA, 33 bp, Homo sapien
cccagcagcactcaaactacagattgttcagaa

SEQ ID NO: 182458 - DNA, 33 bp, Homo sapien
cccagcagcactcaaagtacagattgttcagaa

SEQ ID NO: 182459 - DNA, 33 bp, Homo sapien
acagacaataattcacaccctcatgtgtctaat

SEQ ID NO: 182460 - DNA, 33 bp, Homo sapien
acagacaataattcacgccctcatgtgtctaat

SEQ ID NO: 182461 - DNA, 33 bp, Homo sapien
ttctctctgaacctcaaaatttttcttcaaaat

SEQ ID NO: 182462 - DNA, 33 bp, Homo sapien
ttctctctgaacctcataatttttcttcaaaat

SEQ ID NO: 182463 - DNA, 33 bp, Homo sapien
tctgattatctctgaagctgcgtttgaggataa

SEQ ID NO: 182464 - DNA, 33 bp, Homo sapien
tctgattatctctgaatctgcgtttgaggataa

SEQ ID NO: 182465 - DNA, 33 bp, Homo sapien
ctttagataatagaagaaaagtgcaactagctt

SEQ ID NO: 182466 - DNA, 33 bp, Homo sapien
ctttagataatagaaggaaagtgcaactagctt

SEQ ID NO: 182467 - DNA, 33 bp, Homo sapien
gcagctatctcaggaaagagcccagaactggaa

SEQ ID NO: 182468 - DNA, 33 bp, Homo sapien
gcagctatctcaggaaggagcccagaactggaa

SEQ ID NO: 182469 - DNA, 33 bp, Homo sapien
tcatcttttatcctcaatcatacctgtatctta

SEQ ID NO: 182470 - DNA, 33 bp, Homo sapien
tcatcttttatcctcagtcatacctgtatctta

SEQ ID NO: 182471 - DNA, 33 bp, Homo sapien
tttctattgatcaggacggttgggcaagaaagt

SEQ ID NO: 182472 - DNA, 33 bp, Homo sapien
tttctattgatcaggatggttgggcaagaaagt

SEQ ID NO: 182473 - DNA, 33 bp, Homo sapien
gccagaaataacagaaagcatgtactttgcagt

SEQ ID NO: 182474 - DNA, 33 bp, Homo sapien
gccagaaataacagaaggcatgtactttgcagt

SEQ ID NO: 182475 - DNA, 33 bp, Homo sapien
gactaagacaatcacaatagtggagaaaggcct

SEQ ID NO: 182476 - DNA, 33 bp, Homo sapien
gactaagacaatcacagtagtggagaaaggcct

SEQ ID NO: 182477 - DNA, 33 bp, Homo sapien
gtactgaaggaggataatacaaggtgggctgaa

SEQ ID NO: 182478 - DNA, 33 bp, Homo sapien
gtactgaaggaggatactacaaggtgggctgaa

SEQ ID NO: 182479 - DNA, 33 bp, Homo sapien
atattgtacttatgcaactataagccaaagaac

SEQ ID NO: 182480 - DNA, 33 bp, Homo sapien
atattgtacttatgcagctataagccaaagaac

SEQ ID NO: 182481 - DNA, 33 bp, Homo sapien
ctaggaatcacatagacagaaaaaagtcaaaac

SEQ ID NO: 182482 - DNA, 33 bp, Homo sapien
ctaggaatcacatagagagaaaaaagtcaaaac

SEQ ID NO: 182483 - DNA, 33 bp, Homo sapien
ttccaatcagtagccacatttggtcctcatagg

SEQ ID NO: 182484 - DNA, 33 bp, Homo sapien
ttccaatcagtagccatatttggtcctcatagg

SEQ ID NO: 182485 - DNA, 33 bp, Homo sapien
cttaggtcaactcttcaattgtcactcaactac

SEQ ID NO: 182486 - DNA, 33 bp, Homo sapien
cttaggtcaactcttcgattgtcactcaactac

SEQ ID NO: 182487 - DNA, 33 bp, Homo sapien
atgcactcatcacctaccaagtttcctaacagt

SEQ ID NO: 182488 - DNA, 33 bp, Homo sapien
atgcactcatcacctagcaagtttcctaacagt

SEQ ID NO: 182489 - DNA, 33 bp, Homo sapien
caccttacctcagttacagtaatgcatttttca

SEQ ID NO: 182490 - DNA, 33 bp, Homo sapien
caccttacctcagttatagtaatgcatttttca

SEQ ID NO: 182491 - DNA, 33 bp, Homo sapien
agaacacttacctagcacatcagacagaataac

SEQ ID NO: 182492 - DNA, 33 bp, Homo sapien
agaacacttacctagcgcatcagacagaataac

SEQ ID NO: 182493 - DNA, 33 bp, Homo sapien
cattcattactgttggaaatgaaaaatgagaca

SEQ ID NO: 182494 - DNA, 33 bp, Homo sapien
cattcattactgttgggaatgaaaaatgagaca

SEQ ID NO: 182495 - DNA, 33 bp, Homo sapien
atataaagagcagagcaaagaaaataatcacac

SEQ ID NO: 182496 - DNA, 33 bp, Homo sapien
atataaagagcagagcgaagaaaataatcacac

SEQ ID NO: 182497 - DNA, 33 bp, Homo sapien
ttagcacagcatagagaaagtcataacttaaaa

SEQ ID NO: 182498 - DNA, 33 bp, Homo sapien
ttagcacagcatagagcaagtcataacttaaaa

SEQ ID NO: 182499 - DNA, 33 bp, Homo sapien
tgaaacttaccagatcaccataccagatgccag

SEQ ID NO: 182500 - DNA, 33 bp, Homo sapien
tgaaacttaccagatcgccataccagatgccag

SEQ ID NO: 182501 - DNA, 33 bp, Homo sapien
atattatttcaagcaaattagggtatttcccaa

SEQ ID NO: 182502 - DNA, 33 bp, Homo sapien
atattatttcaagcaatttagggtatttcccaa

SEQ ID NO: 182503 - DNA, 33 bp, Homo sapien
gttaacctttatcaccagaatgtcaataaaaac

SEQ ID NO: 182504 - DNA, 33 bp, Homo sapien
gttaacctttatcaccggaatgtcaataaaaac

SEQ ID NO: 182505 - DNA, 33 bp, Homo sapien
ctgttggcttttaaaaaactctgctgaacagaa

SEQ ID NO: 182506 - DNA, 33 bp, Homo sapien
ctgttggcttttaaaatactctgctgaacagaa

SEQ ID NO: 182507 - DNA, 33 bp, Homo sapien
tctgtaaattgctttgaaactatagccatttta

SEQ ID NO: 182508 - DNA, 33 bp, Homo sapien
tctgtaaattgctttggaactatagccatttta

SEQ ID NO: 182509 - DNA, 33 bp, Homo sapien
aggatgtagactcttaagttaactccagtaact

SEQ ID NO: 182510 - DNA, 33 bp, Homo sapien
aggatgtagactcttatgttaactccagtaact

SEQ ID NO: 182511 - DNA, 33 bp, Homo sapien
agtatcaaatgtgtcacagtcttttgatctgaa

SEQ ID NO: 182512 - DNA, 33 bp, Homo sapien
agtatcaaatgtgtcatagtcttttgatctgaa

SEQ ID NO: 182513 - DNA, 33 bp, Homo sapien
aggtcattttttgctaggatgataaataaagga

SEQ ID NO: 182514 - DNA, 33 bp, Homo sapien
aggtcattttttgctatgatgataaataaagga

SEQ ID NO: 182515 - DNA, 33 bp, Homo sapien
tggtatctttgcaatcactatgttctctgcctg

SEQ ID NO: 182516 - DNA, 33 bp, Homo sapien
tggtatctttgcaatcgctatgttctctgcctg

SEQ ID NO: 182517 - DNA, 33 bp, Homo sapien
tggatcataatctggccgaatttctgtgctgtg

SEQ ID NO: 182518 - DNA, 33 bp, Homo sapien
tggatcataatctggctgaatttctgtgctgtg

SEQ ID NO: 182519 - DNA, 33 bp, Homo sapien
gttgaacataccatcccatccttagagtcaaga

SEQ ID NO: 182520 - DNA, 33 bp, Homo sapien
gttgaacataccatccgatccttagagtcaaga

SEQ ID NO: 182521 - DNA, 33 bp, Homo sapien
agcaataagatatccaactctaatctgactcca

SEQ ID NO: 182522 - DNA, 33 bp, Homo sapien
agcaataagatatccagctctaatctgactcca

SEQ ID NO: 182523 - DNA, 33 bp, Homo sapien
gttcagttcatgatgcaaagggaggtcaggcat

SEQ ID NO: 182524 - DNA, 33 bp, Homo sapien
gttcagttcatgatgcgaagggaggtcaggcat

SEQ ID NO: 182525 - DNA, 33 bp, Homo sapien
agaatccaaaataaaacggtgctgtttatgaga

SEQ ID NO: 182526 - DNA, 33 bp, Homo sapien
agaatccaaaataaaatggtgctgtttatgaga

SEQ ID NO: 182527 - DNA, 33 bp, Homo sapien
actataatttgaaggcacctaatttgccttgag

SEQ ID NO: 182528 - DNA, 33 bp, Homo sapien
actataatttgaaggcgcctaatttgccttgag

SEQ ID NO: 182529 - DNA, 33 bp, Homo sapien
tctatttcaagcaattaaaggcattaatctcat

SEQ ID NO: 182530 - DNA, 33 bp, Homo sapien
tctatttcaagcaattcaaggcattaatctcat

SEQ ID NO: 182531 - DNA, 33 bp, Homo sapien
cctcactcaaagagaacaggtttgcctcctgtt

SEQ ID NO: 182532 - DNA, 33 bp, Homo sapien
cctcactcaaagagaataggtttgcctcctgtt

SEQ ID NO: 182533 - DNA, 33 bp, Homo sapien
tgatactggttgtgatcaagaattatttgcaga

SEQ ID NO: 182534 - DNA, 33 bp, Homo sapien
tgatactggttgtgattaagaattatttgcaga

SEQ ID NO: 182535 - DNA, 33 bp, Homo sapien
aagtagtcaaaaccaactcatggctagagtata

SEQ ID NO: 182536 - DNA, 33 bp, Homo sapien
aagtagtcaaaaccaattcatggctagagtata

SEQ ID NO: 182537 - DNA, 33 bp, Homo sapien
tctaatagtcaaaacaatggagctcatggacat

SEQ ID NO: 182538 - DNA, 33 bp, Homo sapien
tctaatagtcaaaacagtggagctcatggacat

SEQ ID NO: 182539 - DNA, 33 bp, Homo sapien
tacaaatgccaaagaacgttctcagttgaacat

SEQ ID NO: 182540 - DNA, 33 bp, Homo sapien
tacaaatgccaaagaatgttctcagttgaacat

SEQ ID NO: 182541 - DNA, 33 bp, Homo sapien
gtagttatcggtagtcaatctagttgcagagac

SEQ ID NO: 182542 - DNA, 33 bp, Homo sapien
gtagttatcggtagtctatctagttgcagagac

SEQ ID NO: 182543 - DNA, 33 bp, Homo sapien
ccctgccgtttgcagacgtttcagaagttatag

SEQ ID NO: 182544 - DNA, 33 bp, Homo sapien
ccctgccgtttgcagatgtttcagaagttatag

SEQ ID NO: 182545 - DNA, 33 bp, Homo sapien
taatggttagaaatgacgatagttctattgaac

SEQ ID NO: 182546 - DNA, 33 bp, Homo sapien
taatggttagaaatgaggatagttctattgaac

SEQ ID NO: 182547 - DNA, 33 bp, Homo sapien
tgcttcgtataatgaccgaaactgcatccatat

SEQ ID NO: 182548 - DNA, 33 bp, Homo sapien
tgcttcgtataatgacggaaactgcatccatat

SEQ ID NO: 182549 - DNA, 33 bp, Homo sapien
caataatttaagcatcactcagcacaccatttc

SEQ ID NO: 182550 - DNA, 33 bp, Homo sapien
caataatttaagcatcgctcagcacaccatttc

SEQ ID NO: 182551 - DNA, 33 bp, Homo sapien
aactatttaactagagaacccttatcatgcttt

SEQ ID NO: 182552 - DNA, 33 bp, Homo sapien
aactatttaactagagtacccttatcatgcttt

SEQ ID NO: 182553 - DNA, 33 bp, Homo sapien
ggaaaggaattaacaaagagcatgaaggtatct

SEQ ID NO: 182554 - DNA, 33 bp, Homo sapien
ggaaaggaattaacaaggagcatgaaggtatct

SEQ ID NO: 182555 - DNA, 33 bp, Homo sapien
cctcattggcactcgacggacaagctgcacctc

SEQ ID NO: 182556 - DNA, 33 bp, Homo sapien
cctcattggcactcgatggacaagctgcacctc

SEQ ID NO: 182557 - DNA, 33 bp, Homo sapien
cagttatttataacataagttgaattactgctc

SEQ ID NO: 182558 - DNA, 33 bp, Homo sapien
cagttatttataacatgagttgaattactgctc

SEQ ID NO: 182559 - DNA, 33 bp, Homo sapien
atatgaaaagaggctcaccattatcaatcatca

SEQ ID NO: 182560 - DNA, 33 bp, Homo sapien
atatgaaaagaggctcgccattatcaatcatca

SEQ ID NO: 182561 - DNA, 33 bp, Homo sapien
tggcaactaggaatgaccgaaaataagatctgg

SEQ ID NO: 182562 - DNA, 33 bp, Homo sapien
tggcaactaggaatgatcgaaaataagatctgg

SEQ ID NO: 182563 - DNA, 33 bp, Homo sapien
tgaaaatacactctaaaccatatcttaaccaat

SEQ ID NO: 182564 - DNA, 33 bp, Homo sapien
tgaaaatacactctaagccatatcttaaccaat

SEQ ID NO: 182565 - DNA, 33 bp, Homo sapien
ggcgattaaacacacactcttgggattttttag

SEQ ID NO: 182566 - DNA, 33 bp, Homo sapien
ggcgattaaacacacattcttgggattttttag

SEQ ID NO: 182567 - DNA, 33 bp, Homo sapien
agagcaaaatttggcactgaatcattgttcaaa

SEQ ID NO: 182568 - DNA, 33 bp, Homo sapien
agagcaaaatttggcagtgaatcattgttcaaa

SEQ ID NO: 182569 - DNA, 33 bp, Homo sapien
gatatacaagcaagaaagtaaagtcataataac

SEQ ID NO: 182570 - DNA, 33 bp, Homo sapien
gatatacaagcaagaaggtaaagtcataataac

SEQ ID NO: 182571 - DNA, 33 bp, Homo sapien
gagtaatttgatttcactatctatgcaaactgt

SEQ ID NO: 182572 - DNA, 33 bp, Homo sapien
gagtaatttgatttcattatctatgcaaactgt

SEQ ID NO: 182573 - DNA, 33 bp, Homo sapien
taaaaattttcaccaccgaatcccataaattaa

SEQ ID NO: 182574 - DNA, 33 bp, Homo sapien
taaaaattttcaccactgaatcccataaattaa

SEQ ID NO: 182575 - DNA, 33 bp, Homo sapien
gcaaccaccttgtaagaattgcacaaaggggag

SEQ ID NO: 182576 - DNA, 33 bp, Homo sapien
gcaaccaccttgtaaggattgcacaaaggggag

SEQ ID NO: 182577 - DNA, 33 bp, Homo sapien
tgcccaatttctgctggactatcttaaaacatt

SEQ ID NO: 182578 - DNA, 33 bp, Homo sapien
tgcccaatttctgctgtactatcttaaaacatt

SEQ ID NO: 182579 - DNA, 33 bp, Homo sapien
tagagtatcatctgacacataggaataattaac

SEQ ID NO: 182580 - DNA, 33 bp, Homo sapien
tagagtatcatctgacgcataggaataattaac

SEQ ID NO: 182581 - DNA, 33 bp, Homo sapien
tatattgttatgagaactaagaagtttgagtgt

SEQ ID NO: 182582 - DNA, 33 bp, Homo sapien
tatattgttatgagaagtaagaagtttgagtgt

SEQ ID NO: 182583 - DNA, 33 bp, Homo sapien
tatttaacattgcatcacttggaccaataggat

SEQ ID NO: 182584 - DNA, 33 bp, Homo sapien
tatttaacattgcatcgcttggaccaataggat

SEQ ID NO: 182585 - DNA, 33 bp, Homo sapien
cttcactgtaaaacccaacactatgaaaacctt

SEQ ID NO: 182586 - DNA, 33 bp, Homo sapien
cttcactgtaaaacccgacactatgaaaacctt

SEQ ID NO: 182587 - DNA, 33 bp, Homo sapien
gaagtgttctccctcaaataatctaacattttc

SEQ ID NO: 182588 - DNA, 33 bp, Homo sapien
gaagtgttctccctcagataatctaacattttc

SEQ ID NO: 182589 - DNA, 33 bp, Homo sapien
catgcaaacttgtttcccaaccaactgactaag

SEQ ID NO: 182590 - DNA, 33 bp, Homo sapien
catgcaaacttgtttctcaaccaactgactaag

SEQ ID NO: 182591 - DNA, 33 bp, Homo sapien
ttttcccatcaaaagaaaggaggatttagatga

SEQ ID NO: 182592 - DNA, 33 bp, Homo sapien
ttttcccatcaaaagagaggaggatttagatga

SEQ ID NO: 182593 - DNA, 33 bp, Homo sapien
aggtagtaacagggataagaatagcctcctgcc

SEQ ID NO: 182594 - DNA, 33 bp, Homo sapien
aggtagtaacagggatgagaatagcctcctgcc

SEQ ID NO: 182595 - DNA, 33 bp, Homo sapien
cctcctgccataaacaactataaaactaagtat

SEQ ID NO: 182596 - DNA, 33 bp, Homo sapien
cctcctgccataaacagctataaaactaagtat

SEQ ID NO: 182597 - DNA, 33 bp, Homo sapien
gatagcctgaagagtacaggagaaaggtagtgg

SEQ ID NO: 182598 - DNA, 33 bp, Homo sapien
gatagcctgaagagtataggagaaaggtagtgg

SEQ ID NO: 182599 - DNA, 33 bp, Homo sapien
gagtggagtaataaaaatggaaggtatatatgt

SEQ ID NO: 182600 - DNA, 33 bp, Homo sapien
gagtggagtaataaaattggaaggtatatatgt

SEQ ID NO: 182601 - DNA, 33 bp, Homo sapien
tttgtccactcatcaaacaattcacactgaact

SEQ ID NO: 182602 - DNA, 33 bp, Homo sapien
tttgtccactcatcaagcaattcacactgaact

SEQ ID NO: 182603 - DNA, 33 bp, Homo sapien
acaattgtataatgagcatgtaagcttataatg

SEQ ID NO: 182604 - DNA, 33 bp, Homo sapien
acaattgtataatgagtatgtaagcttataatg

SEQ ID NO: 182605 - DNA, 33 bp, Homo sapien
aatcttggcttttagaaacaactgcccttctct

SEQ ID NO: 182606 - DNA, 33 bp, Homo sapien
aatcttggcttttagagacaactgcccttctct

SEQ ID NO: 182607 - DNA, 33 bp, Homo sapien
gtgatgtgtgccataactccttaaaatacaaat

SEQ ID NO: 182608 - DNA, 33 bp, Homo sapien
gtgatgtgtgccataagtccttaaaatacaaat

SEQ ID NO: 182609 - DNA, 33 bp, Homo sapien
attagttctccttgaccgatctattaaatataa

SEQ ID NO: 182610 - DNA, 33 bp, Homo sapien
attagttctccttgactgatctattaaatataa

SEQ ID NO: 182611 - DNA, 33 bp, Homo sapien
ataagaagaggtggtaaccaatccaataaatcc

SEQ ID NO: 182612 - DNA, 33 bp, Homo sapien
ataagaagaggtggtatccaatccaataaatcc

SEQ ID NO: 182613 - DNA, 33 bp, Homo sapien
tgcttctatattatgaacatcttccacttatct

SEQ ID NO: 182614 - DNA, 33 bp, Homo sapien
tgcttctatattatgatcatcttccacttatct

SEQ ID NO: 182615 - DNA, 33 bp, Homo sapien
aaaattagggttagaacttaagccacttgactg

SEQ ID NO: 182616 - DNA, 33 bp, Homo sapien
aaaattagggttagaatttaagccacttgactg

SEQ ID NO: 182617 - DNA, 33 bp, Homo sapien
tctcaatgaacactaaccataattccttcaaat

SEQ ID NO: 182618 - DNA, 33 bp, Homo sapien
tctcaatgaacactaatcataattccttcaaat

SEQ ID NO: 182619 - DNA, 33 bp, Homo sapien
atggtttcaatttcaacgttaaacagaagtaaa

SEQ ID NO: 182620 - DNA, 33 bp, Homo sapien
atggtttcaatttcaaggttaaacagaagtaaa

SEQ ID NO: 182621 - DNA, 33 bp, Homo sapien
cagccattccgcatggaagaaattggacaaaac

SEQ ID NO: 182622 - DNA, 33 bp, Homo sapien
cagccattccgcatgggagaaattggacaaaac

SEQ ID NO: 182623 - DNA, 33 bp, Homo sapien
acagactaatatactccctacccatcatcacca

SEQ ID NO: 182624 - DNA, 33 bp, Homo sapien
acagactaatatactctctacccatcatcacca

SEQ ID NO: 182625 - DNA, 33 bp, Homo sapien
ccactctctcatttacaaggctaagtattcccg

SEQ ID NO: 182626 - DNA, 33 bp, Homo sapien
ccactctctcatttacgaggctaagtattcccg

SEQ ID NO: 182627 - DNA, 33 bp, Homo sapien
gcccacagggacttctaaaactgtgtatcctca

SEQ ID NO: 182628 - DNA, 33 bp, Homo sapien
gcccacagggacttctgaaactgtgtatcctca

SEQ ID NO: 182629 - DNA, 33 bp, Homo sapien
ttcagctttcactcacactttgagttgaccctc

SEQ ID NO: 182630 - DNA, 33 bp, Homo sapien
ttcagctttcactcacgctttgagttgaccctc

SEQ ID NO: 182631 - DNA, 33 bp, Homo sapien
actcagtctttcaccacctgagggcttccttgg

SEQ ID NO: 182632 - DNA, 33 bp, Homo sapien
actcagtctttcaccatctgagggcttccttgg

SEQ ID NO: 182633 - DNA, 33 bp, Homo sapien
aacttctaacaattcaacaatgaacaatgaaca

SEQ ID NO: 182634 - DNA, 33 bp, Homo sapien
aacttctaacaattcagcaatgaacaatgaaca

SEQ ID NO: 182635 - DNA, 33 bp, Homo sapien
agttttcctgtaatgaagggtccaatatgacaa

SEQ ID NO: 182636 - DNA, 33 bp, Homo sapien
agttttcctgtaatgaggggtccaatatgacaa

SEQ ID NO: 182637 - DNA, 33 bp, Homo sapien
aatctactgtgtttagcacaaaatctcctctga

SEQ ID NO: 182638 - DNA, 33 bp, Homo sapien
aatctactgtgtttagtacaaaatctcctctga

SEQ ID NO: 182639 - DNA, 33 bp, Homo sapien
gttcttaaggagcttaacctattccataactaa

SEQ ID NO: 182640 - DNA, 33 bp, Homo sapien
gttcttaaggagcttagcctattccataactaa

SEQ ID NO: 182641 - DNA, 33 bp, Homo sapien
agtgaggtgatttaaaaatgacaagtaccataa

SEQ ID NO: 182642 - DNA, 33 bp, Homo sapien
agtgaggtgatttaaatatgacaagtaccataa

SEQ ID NO: 182643 - DNA, 33 bp, Homo sapien
catagctcttaggagacaggaataatgagaaga

SEQ ID NO: 182644 - DNA, 33 bp, Homo sapien
catagctcttaggagagaggaataatgagaaga

SEQ ID NO: 182645 - DNA, 33 bp, Homo sapien
gttttaaaatgatgagaaattttagtgaccttc

SEQ ID NO: 182646 - DNA, 33 bp, Homo sapien
gttttaaaatgatgagcaattttagtgaccttc

SEQ ID NO: 182647 - DNA, 33 bp, Homo sapien
ggcttgacatttgtaacctcagactcaaaactc

SEQ ID NO: 182648 - DNA, 33 bp, Homo sapien
ggcttgacatttgtaatctcagactcaaaactc

SEQ ID NO: 182649 - DNA, 33 bp, Homo sapien
ctcaaagtcaaataacaagcagttttcaagctg

SEQ ID NO: 182650 - DNA, 33 bp, Homo sapien
ctcaaagtcaaataacgagcagttttcaagctg

SEQ ID NO: 182651 - DNA, 33 bp, Homo sapien
tgaatctgcaagacagaaagatacacaaataat

SEQ ID NO: 182652 - DNA, 33 bp, Homo sapien
tgaatctgcaagacagtaagatacacaaataat

SEQ ID NO: 182653 - DNA, 33 bp, Homo sapien
tgctgcgatgctccaaatagatacaaacagcag

SEQ ID NO: 182654 - DNA, 33 bp, Homo sapien
tgctgcgatgctccaagtagatacaaacagcag

SEQ ID NO: 182655 - DNA, 33 bp, Homo sapien
acacatttaccatacaatgcagcaactcgattc

SEQ ID NO: 182656 - DNA, 33 bp, Homo sapien
acacatttaccatacagtgcagcaactcgattc

SEQ ID NO: 182657 - DNA, 33 bp, Homo sapien
gaaagatttatcttacactgacctttgcacaat

SEQ ID NO: 182658 - DNA, 33 bp, Homo sapien
gaaagatttatcttactctgacctttgcacaat

SEQ ID NO: 182659 - DNA, 33 bp, Homo sapien
ccccagctaattgtcacaaccaaattgtcctaa

SEQ ID NO: 182660 - DNA, 33 bp, Homo sapien
ccccagctaattgtcataaccaaattgtcctaa

SEQ ID NO: 182661 - DNA, 33 bp, Homo sapien
aacttctgagccaaacagagttagagtccagtt

SEQ ID NO: 182662 - DNA, 33 bp, Homo sapien
aacttctgagccaaacggagttagagtccagtt

SEQ ID NO: 182663 - DNA, 33 bp, Homo sapien
aaagataggtaaacaaagtgccagaaagtcagt

SEQ ID NO: 182664 - DNA, 33 bp, Homo sapien
aaagataggtaaacaaggtgccagaaagtcagt

SEQ ID NO: 182665 - DNA, 33 bp, Homo sapien
ctttcctagatctgaaatctaccccaatagtct

SEQ ID NO: 182666 - DNA, 33 bp, Homo sapien
ctttcctagatctgaattctaccccaatagtct

SEQ ID NO: 182667 - DNA, 33 bp, Homo sapien
gaacaggtgggttagaataggaaatttgaataa

SEQ ID NO: 182668 - DNA, 33 bp, Homo sapien
gaacaggtgggttagagtaggaaatttgaataa

SEQ ID NO: 182669 - DNA, 33 bp, Homo sapien
tgatagagctggaaaacgcagtacaagaacctg

SEQ ID NO: 182670 - DNA, 33 bp, Homo sapien
tgatagagctggaaaatgcagtacaagaacctg

SEQ ID NO: 182671 - DNA, 33 bp, Homo sapien
tgtttgtttctcctgcaatagtcaggtccctct

SEQ ID NO: 182672 - DNA, 33 bp, Homo sapien
tgtttgtttctcctgcgatagtcaggtccctct

SEQ ID NO: 182673 - DNA, 33 bp, Homo sapien
aaatttctaaaatgtaacagctattaaataagt

SEQ ID NO: 182674 - DNA, 33 bp, Homo sapien
aaatttctaaaatgtagcagctattaaataagt

SEQ ID NO: 182675 - DNA, 33 bp, Homo sapien
taaacaaaatgttcccaaaatttctacaaattt

SEQ ID NO: 182676 - DNA, 33 bp, Homo sapien
taaacaaaatgttccccaaatttctacaaattt

SEQ ID NO: 182677 - DNA, 33 bp, Homo sapien
atctctccaacatgaaatagtctccagctggga

SEQ ID NO: 182678 - DNA, 33 bp, Homo sapien
atctctccaacatgaagtagtctccagctggga

SEQ ID NO: 182679 - DNA, 33 bp, Homo sapien
catgcagcaagctataaagattcctttgggagg

SEQ ID NO: 182680 - DNA, 33 bp, Homo sapien
catgcagcaagctatacagattcctttgggagg

SEQ ID NO: 182681 - DNA, 33 bp, Homo sapien
aacaactgtctttccaaagttatggttttggtt

SEQ ID NO: 182682 - DNA, 33 bp, Homo sapien
aacaactgtctttccacagttatggttttggtt

SEQ ID NO: 182683 - DNA, 33 bp, Homo sapien
tcaatttcatcagtgcaaagggaaacaattgaa

SEQ ID NO: 182684 - DNA, 33 bp, Homo sapien
tcaatttcatcagtgcgaagggaaacaattgaa

SEQ ID NO: 182685 - DNA, 33 bp, Homo sapien
tggctttcattactgacggaaattcagctttca

SEQ ID NO: 182686 - DNA, 33 bp, Homo sapien
tggctttcattactgatggaaattcagctttca

SEQ ID NO: 182687 - DNA, 33 bp, Homo sapien
aagaatttgtcacaagaagacctgtgctatcaa

SEQ ID NO: 182688 - DNA, 33 bp, Homo sapien
aagaatttgtcacaagtagacctgtgctatcaa

SEQ ID NO: 182689 - DNA, 33 bp, Homo sapien
cctaccactttgacagaaatttaatatattcta

SEQ ID NO: 182690 - DNA, 33 bp, Homo sapien
cctaccactttgacagcaatttaatatattcta

SEQ ID NO: 182691 - DNA, 33 bp, Homo sapien
ggaatgaagagagcaacgcaataaagcaagtca

SEQ ID NO: 182692 - DNA, 33 bp, Homo sapien
ggaatgaagagagcaatgcaataaagcaagtca

SEQ ID NO: 182693 - DNA, 33 bp, Homo sapien
tgttcatgagactagacggaagaaagaaagaaa

SEQ ID NO: 182694 - DNA, 33 bp, Homo sapien
tgttcatgagactagatggaagaaagaaagaaa

SEQ ID NO: 182695 - DNA, 33 bp, Homo sapien
tacaattgcaggtgaactaggaacaacatagga

SEQ ID NO: 182696 - DNA, 33 bp, Homo sapien
tacaattgcaggtgaattaggaacaacatagga

SEQ ID NO: 182697 - DNA, 33 bp, Homo sapien
ttaaccactctaggaacgggatgtatggctcta

SEQ ID NO: 182698 - DNA, 33 bp, Homo sapien
ttaaccactctaggaatgggatgtatggctcta

SEQ ID NO: 182699 - DNA, 33 bp, Homo sapien
ggtaaataaaagatgaatagccactacgtaaaa

SEQ ID NO: 182700 - DNA, 33 bp, Homo sapien
ggtaaataaaagatgattagccactacgtaaaa

SEQ ID NO: 182701 - DNA, 33 bp, Homo sapien
cggattcaaccaaatgcaatgcaaataccatgt

SEQ ID NO: 182702 - DNA, 33 bp, Homo sapien
cggattcaaccaaatgtaatgcaaataccatgt

SEQ ID NO: 182703 - DNA, 33 bp, Homo sapien
ctagagtatgacctcaaatgtgaaagacaagaa

SEQ ID NO: 182704 - DNA, 33 bp, Homo sapien
ctagagtatgacctcagatgtgaaagacaagaa

SEQ ID NO: 182705 - DNA, 33 bp, Homo sapien
atgctgtttgggttaccgtaaaggacatcgaaa

SEQ ID NO: 182706 - DNA, 33 bp, Homo sapien
atgctgtttgggttactgtaaaggacatcgaaa

SEQ ID NO: 182707 - DNA, 33 bp, Homo sapien
gcaaagtctcaggatacgaaaccattgtgcaaa

SEQ ID NO: 182708 - DNA, 33 bp, Homo sapien
gcaaagtctcaggatatgaaaccattgtgcaaa

SEQ ID NO: 182709 - DNA, 33 bp, Homo sapien
tctccaagctcaagtgaacctcagtgtctgttg

SEQ ID NO: 182710 - DNA, 33 bp, Homo sapien
tctccaagctcaagtggacctcagtgtctgttg

SEQ ID NO: 182711 - DNA, 33 bp, Homo sapien
aggtgagcttgcactaaattttgatcaaaggga

SEQ ID NO: 182712 - DNA, 33 bp, Homo sapien
aggtgagcttgcactagattttgatcaaaggga

SEQ ID NO: 182713 - DNA, 33 bp, Homo sapien
gtgattcatcttttacaccaggtcttagacaaa

SEQ ID NO: 182714 - DNA, 33 bp, Homo sapien
gtgattcatcttttactccaggtcttagacaaa

SEQ ID NO: 182715 - DNA, 33 bp, Homo sapien
aacagaaattctgataaaaaaattcaaacgacg

SEQ ID NO: 182716 - DNA, 33 bp, Homo sapien
aacagaaattctgatacaaaaattcaaacgacg

SEQ ID NO: 182717 - DNA, 33 bp, Homo sapien
atatgtggtttttaaaatgttgttgaatcggcc

SEQ ID NO: 182718 - DNA, 33 bp, Homo sapien
atatgtggtttttaaagtgttgttgaatcggcc

SEQ ID NO: 182719 - DNA, 33 bp, Homo sapien
tttttcctggctttgaaatttagaaaacatgga

SEQ ID NO: 182720 - DNA, 33 bp, Homo sapien
tttttcctggctttgacatttagaaaacatgga

SEQ ID NO: 182721 - DNA, 33 bp, Homo sapien
gcaaaatgcagacacaatcaagtaaaataagat

SEQ ID NO: 182722 - DNA, 33 bp, Homo sapien
gcaaaatgcagacacagtcaagtaaaataagat

SEQ ID NO: 182723 - DNA, 33 bp, Homo sapien
agatgacagagtgatcaaattgtctatgacttt

SEQ ID NO: 182724 - DNA, 33 bp, Homo sapien
agatgacagagtgatccaattgtctatgacttt

SEQ ID NO: 182725 - DNA, 33 bp, Homo sapien
tgaaagagtaatgtcaactctcaattatgattt

SEQ ID NO: 182726 - DNA, 33 bp, Homo sapien
tgaaagagtaatgtcatctctcaattatgattt

SEQ ID NO: 182727 - DNA, 33 bp, Homo sapien
ctggaagctatttataaaatgcatatcaaagct

SEQ ID NO: 182728 - DNA, 33 bp, Homo sapien
ctggaagctatttatagaatgcatatcaaagct

SEQ ID NO: 182729 - DNA, 33 bp, Homo sapien
aatagtctatcccagccaatgtggacatcctca

SEQ ID NO: 182730 - DNA, 33 bp, Homo sapien
aatagtctatcccagctaatgtggacatcctca

SEQ ID NO: 182731 - DNA, 33 bp, Homo sapien
gctactttgaaagttgcattgctaaatttgctt

SEQ ID NO: 182732 - DNA, 33 bp, Homo sapien
gctactttgaaagttggattgctaaatttgctt

SEQ ID NO: 182733 - DNA, 33 bp, Homo sapien
taccttccctcaaagacaatgtagacataattt

SEQ ID NO: 182734 - DNA, 33 bp, Homo sapien
taccttccctcaaagataatgtagacataattt

SEQ ID NO: 182735 - DNA, 33 bp, Homo sapien
tatagcagtaagatacaaaataccaacctgctt

SEQ ID NO: 182736 - DNA, 33 bp, Homo sapien
tatagcagtaagataccaaataccaacctgctt

SEQ ID NO: 182737 - DNA, 33 bp, Homo sapien
ctaggttcctagttcaagattgttcttttctga

SEQ ID NO: 182738 - DNA, 33 bp, Homo sapien
ctaggttcctagttcaggattgttcttttctga

SEQ ID NO: 182739 - DNA, 33 bp, Homo sapien
ctaaatcgtaaacaaccataaagggagcgtctt

SEQ ID NO: 182740 - DNA, 33 bp, Homo sapien
ctaaatcgtaaacaactataaagggagcgtctt

SEQ ID NO: 182741 - DNA, 33 bp, Homo sapien
tgaaacaggagatctacaggtgtgctttaccaa

SEQ ID NO: 182742 - DNA, 33 bp, Homo sapien
tgaaacaggagatctagaggtgtgctttaccaa

SEQ ID NO: 182743 - DNA, 33 bp, Homo sapien
tatattgacttgagaccaaggcttaatcaattg

SEQ ID NO: 182744 - DNA, 33 bp, Homo sapien
tatattgacttgagactaaggcttaatcaattg

SEQ ID NO: 182745 - DNA, 33 bp, Homo sapien
tttttgcaaccacttacaaaacctgatttttac

SEQ ID NO: 182746 - DNA, 33 bp, Homo sapien
tttttgcaaccacttataaaacctgatttttac

SEQ ID NO: 182747 - DNA, 33 bp, Homo sapien
gtgggtatgtctatacaaagttaaactctgtgc

SEQ ID NO: 182748 - DNA, 33 bp, Homo sapien
gtgggtatgtctatacgaagttaaactctgtgc

SEQ ID NO: 182749 - DNA, 33 bp, Homo sapien
agtctcaagcctcaaaaagcaggagagtgaagg

SEQ ID NO: 182750 - DNA, 33 bp, Homo sapien
agtctcaagcctcaaatagcaggagagtgaagg

SEQ ID NO: 182751 - DNA, 33 bp, Homo sapien
tctttgtccctccagacgtaaggcattatgttt

SEQ ID NO: 182752 - DNA, 33 bp, Homo sapien
tctttgtccctccagatgtaaggcattatgttt

SEQ ID NO: 182753 - DNA, 33 bp, Homo sapien
tatataaagtaccatgaaacactaagcaggcga

SEQ ID NO: 182754 - DNA, 33 bp, Homo sapien
tatataaagtaccatggaacactaagcaggcga

SEQ ID NO: 182755 - DNA, 33 bp, Homo sapien
ttaaaaaaaatcaaaacgtcagttctgttgaca

SEQ ID NO: 182756 - DNA, 33 bp, Homo sapien
ttaaaaaaaatcaaaatgtcagttctgttgaca

SEQ ID NO: 182757 - DNA, 33 bp, Homo sapien
taggatttgtgttcagaccataaaaagtagagg

SEQ ID NO: 182758 - DNA, 33 bp, Homo sapien
taggatttgtgttcaggccataaaaagtagagg

SEQ ID NO: 182759 - DNA, 33 bp, Homo sapien
tacattctgcattgtacctttcttgaccttatg

SEQ ID NO: 182760 - DNA, 33 bp, Homo sapien
tacattctgcattgtagctttcttgaccttatg

SEQ ID NO: 182761 - DNA, 33 bp, Homo sapien
agacaagcactttaaacgtcataggaaagacac

SEQ ID NO: 182762 - DNA, 33 bp, Homo sapien
agacaagcactttaaatgtcataggaaagacac

SEQ ID NO: 182763 - DNA, 33 bp, Homo sapien
gttgggtctgtgaaaaattattagttttcgggt

SEQ ID NO: 182764 - DNA, 33 bp, Homo sapien
gttgggtctgtgaaaagttattagttttcgggt

SEQ ID NO: 182765 - DNA, 33 bp, Homo sapien
agactagaagagactgcagtgacaaaaatgcat

SEQ ID NO: 182766 - DNA, 33 bp, Homo sapien
agactagaagagactggagtgacaaaaatgcat

SEQ ID NO: 182767 - DNA, 33 bp, Homo sapien
ctacttctagccctataaacataaatttgcaaa

SEQ ID NO: 182768 - DNA, 33 bp, Homo sapien
ctacttctagccctattaacataaatttgcaaa

SEQ ID NO: 182769 - DNA, 33 bp, Homo sapien
taaatgtgattcatcccataaagagaactaaag

SEQ ID NO: 182770 - DNA, 33 bp, Homo sapien
taaatgtgattcatcctataaagagaactaaag

SEQ ID NO: 182771 - DNA, 33 bp, Homo sapien
cagataccaaaatctacggatgtccaaattcct

SEQ ID NO: 182772 - DNA, 33 bp, Homo sapien
cagataccaaaatctatggatgtccaaattcct

SEQ ID NO: 182773 - DNA, 33 bp, Homo sapien
atagaattttcctcaccgaagattatttgagtc

SEQ ID NO: 182774 - DNA, 33 bp, Homo sapien
atagaattttcctcactgaagattatttgagtc

SEQ ID NO: 182775 - DNA, 33 bp, Homo sapien
ctttttaaatgaagaacattgttagcaaaatat

SEQ ID NO: 182776 - DNA, 33 bp, Homo sapien
ctttttaaatgaagaatattgttagcaaaatat

SEQ ID NO: 182777 - DNA, 33 bp, Homo sapien
ttctttcatctctgcaacctgtttagaaatata

SEQ ID NO: 182778 - DNA, 33 bp, Homo sapien
ttctttcatctctgcatcctgtttagaaatata

SEQ ID NO: 182779 - DNA, 33 bp, Homo sapien
ctatatgatgtcttaacgcatttcaaacaagaa

SEQ ID NO: 182780 - DNA, 33 bp, Homo sapien
ctatatgatgtcttaatgcatttcaaacaagaa

SEQ ID NO: 182781 - DNA, 33 bp, Homo sapien
tcccttaaatcccaacagatctatattcacagg

SEQ ID NO: 182782 - DNA, 33 bp, Homo sapien
tcccttaaatcccaacggatctatattcacagg

SEQ ID NO: 182783 - DNA, 33 bp, Homo sapien
taaagttaccatatgacgcagaaatataactcc

SEQ ID NO: 182784 - DNA, 33 bp, Homo sapien
taaagttaccatatgatgcagaaatataactcc

SEQ ID NO: 182785 - DNA, 33 bp, Homo sapien
tagcctgaaaattatacctcaattaaccagata

SEQ ID NO: 182786 - DNA, 33 bp, Homo sapien
tagcctgaaaattatagctcaattaaccagata

SEQ ID NO: 182787 - DNA, 33 bp, Homo sapien
aaacaaattcatcaaaattgagcgaaggatatg

SEQ ID NO: 182788 - DNA, 33 bp, Homo sapien
aaacaaattcatcaaagttgagcgaaggatatg

SEQ ID NO: 182789 - DNA, 33 bp, Homo sapien
gttattaaattacccaagctagttctatttctc

SEQ ID NO: 182790 - DNA, 33 bp, Homo sapien
gttattaaattacccatgctagttctatttctc

SEQ ID NO: 182791 - DNA, 33 bp, Homo sapien
acaaaatgaagctggaacatcttgctgaacaac

SEQ ID NO: 182792 - DNA, 33 bp, Homo sapien
acaaaatgaagctggagcatcttgctgaacaac

SEQ ID NO: 182793 - DNA, 33 bp, Homo sapien
tagtgacatttgactacaaaaagaaaagagatg

SEQ ID NO: 182794 - DNA, 33 bp, Homo sapien
tagtgacatttgactataaaaagaaaagagatg

SEQ ID NO: 182795 - DNA, 33 bp, Homo sapien
ctgggcttattccccaactttgaaacagtataa

SEQ ID NO: 182796 - DNA, 33 bp, Homo sapien
ctgggcttattccccatctttgaaacagtataa

SEQ ID NO: 182797 - DNA, 33 bp, Homo sapien
taatatttagttctaaatattcagttgtgagta

SEQ ID NO: 182798 - DNA, 33 bp, Homo sapien
taatatttagttctaattattcagttgtgagta

SEQ ID NO: 182799 - DNA, 33 bp, Homo sapien
tgctttgagaaacaaacgtaaacttcataattt

SEQ ID NO: 182800 - DNA, 33 bp, Homo sapien
tgctttgagaaacaaatgtaaacttcataattt

SEQ ID NO: 182801 - DNA, 33 bp, Homo sapien
gattgcgctagaaggaaaaacaaaagaagcagc

SEQ ID NO: 182802 - DNA, 33 bp, Homo sapien
gattgcgctagaaggagaaacaaaagaagcagc

SEQ ID NO: 182803 - DNA, 33 bp, Homo sapien
agtaaaacataaaaaccctgtctaatgtatgta

SEQ ID NO: 182804 - DNA, 33 bp, Homo sapien
agtaaaacataaaaactctgtctaatgtatgta

SEQ ID NO: 182805 - DNA, 33 bp, Homo sapien
tttgcattatttccttcaaagtgtggattttca

SEQ ID NO: 182806 - DNA, 33 bp, Homo sapien
tttgcattatttccttgaaagtgtggattttca

SEQ ID NO: 182807 - DNA, 33 bp, Homo sapien
agaatattgactgttgcaattctaaacaattca

SEQ ID NO: 182808 - DNA, 33 bp, Homo sapien
agaatattgactgttgtaattctaaacaattca

SEQ ID NO: 182809 - DNA, 33 bp, Homo sapien
ttgacatgggcaaagtcaagaaaagaggtagaa

SEQ ID NO: 182810 - DNA, 33 bp, Homo sapien
ttgacatgggcaaagttaagaaaagaggtagaa

SEQ ID NO: 182811 - DNA, 33 bp, Homo sapien
gcacagaggaaattataaaaaatacgtgttgaa

SEQ ID NO: 182812 - DNA, 33 bp, Homo sapien
gcacagaggaaattatcaaaaatacgtgttgaa

SEQ ID NO: 182813 - DNA, 33 bp, Homo sapien
tgtattgatttaagcaaatttctgttataagaa

SEQ ID NO: 182814 - DNA, 33 bp, Homo sapien
tgtattgatttaagcacatttctgttataagaa

SEQ ID NO: 182815 - DNA, 33 bp, Homo sapien
atattcaccatatactcaggccacagagttaaa

SEQ ID NO: 182816 - DNA, 33 bp, Homo sapien
atattcaccatatactgaggccacagagttaaa

SEQ ID NO: 182817 - DNA, 33 bp, Homo sapien
gtttcctttttctctcaacagatacattctgtt

SEQ ID NO: 182818 - DNA, 33 bp, Homo sapien
gtttcctttttctctcgacagatacattctgtt

SEQ ID NO: 182819 - DNA, 33 bp, Homo sapien
agaatgctcaaaagtagctaaagattagccttg

SEQ ID NO: 182820 - DNA, 33 bp, Homo sapien
agaatgctcaaaagtatctaaagattagccttg

SEQ ID NO: 182821 - DNA, 33 bp, Homo sapien
aggaaaacttctgcaacgaagtgatgtaaatga

SEQ ID NO: 182822 - DNA, 33 bp, Homo sapien
aggaaaacttctgcaatgaagtgatgtaaatga

SEQ ID NO: 182823 - DNA, 33 bp, Homo sapien
ttaaactatgaaagacaggaacaggaacaccgt

SEQ ID NO: 182824 - DNA, 33 bp, Homo sapien
ttaaactatgaaagaccggaacaggaacaccgt

SEQ ID NO: 182825 - DNA, 33 bp, Homo sapien
aaactgcttaataagtcaattctctcaagttct

SEQ ID NO: 182826 - DNA, 33 bp, Homo sapien
aaactgcttaataagtgaattctctcaagttct

SEQ ID NO: 182827 - DNA, 33 bp, Homo sapien
agagaacataggcatcaaatatcaggattgttc

SEQ ID NO: 182828 - DNA, 33 bp, Homo sapien
agagaacataggcatcgaatatcaggattgttc

SEQ ID NO: 182829 - DNA, 33 bp, Homo sapien
ggtggatgatgggaaacctggtcagccacgaat

SEQ ID NO: 182830 - DNA, 33 bp, Homo sapien
ggtggatgatgggaaatctggtcagccacgaat

SEQ ID NO: 182831 - DNA, 33 bp, Homo sapien
aagcttgtcatcaaaaaactttaattgttcaat

SEQ ID NO: 182832 - DNA, 33 bp, Homo sapien
aagcttgtcatcaaaagactttaattgttcaat

SEQ ID NO: 182833 - DNA, 33 bp, Homo sapien
tgtactatttggtgtaagagtcttatgctgtcc

SEQ ID NO: 182834 - DNA, 33 bp, Homo sapien
tgtactatttggtgtaggagtcttatgctgtcc

SEQ ID NO: 182835 - DNA, 33 bp, Homo sapien
ttgtgatttggaacaacatgaatgaacctggag

SEQ ID NO: 182836 - DNA, 33 bp, Homo sapien
ttgtgatttggaacaatatgaatgaacctggag

SEQ ID NO: 182837 - DNA, 33 bp, Homo sapien
acacataagtgttgaaaatgtggaaaaaaggaa

SEQ ID NO: 182838 - DNA, 33 bp, Homo sapien
acacataagtgttgaagatgtggaaaaaaggaa

SEQ ID NO: 182839 - DNA, 33 bp, Homo sapien
gtgttcataaatgttactaaaccatgtggcagc

SEQ ID NO: 182840 - DNA, 33 bp, Homo sapien
gtgttcataaatgttattaaaccatgtggcagc

SEQ ID NO: 182841 - DNA, 33 bp, Homo sapien
ttatgtagtatcctggaataaagtacattggga

SEQ ID NO: 182842 - DNA, 33 bp, Homo sapien
ttatgtagtatcctggcataaagtacattggga

SEQ ID NO: 182843 - DNA, 33 bp, Homo sapien
tacaaatctcaacttccagccaagagctgagct

SEQ ID NO: 182844 - DNA, 33 bp, Homo sapien
tacaaatctcaacttcgagccaagagctgagct

SEQ ID NO: 182845 - DNA, 33 bp, Homo sapien
aaggagtgctgaggaaatatgggcaatgttcta

SEQ ID NO: 182846 - DNA, 33 bp, Homo sapien
aaggagtgctgaggaagtatgggcaatgttcta

SEQ ID NO: 182847 - DNA, 33 bp, Homo sapien
aaaggaaagtggattacagaaccatctgtcatt

SEQ ID NO: 182848 - DNA, 33 bp, Homo sapien
aaaggaaagtggattagagaaccatctgtcatt

SEQ ID NO: 182849 - DNA, 33 bp, Homo sapien
ttccattatgcttccactacaatttgttcaaac

SEQ ID NO: 182850 - DNA, 33 bp, Homo sapien
ttccattatgcttccattacaatttgttcaaac

SEQ ID NO: 182851 - DNA, 33 bp, Homo sapien
gtgcctgacgcctatacccagctttaaactgat

SEQ ID NO: 182852 - DNA, 33 bp, Homo sapien
gtgcctgacgcctatatccagctttaaactgat

SEQ ID NO: 182853 - DNA, 33 bp, Homo sapien
ccttctaagaccttccaaggttctgcagatcca

SEQ ID NO: 182854 - DNA, 33 bp, Homo sapien
ccttctaagaccttcccaggttctgcagatcca

SEQ ID NO: 182855 - DNA, 33 bp, Homo sapien
cttctggattagactacaatctgcacccctgga

SEQ ID NO: 182856 - DNA, 33 bp, Homo sapien
cttctggattagactagaatctgcacccctgga

SEQ ID NO: 182857 - DNA, 33 bp, Homo sapien
gtgtttgtagggtggagaaattattctgtatga

SEQ ID NO: 182858 - DNA, 33 bp, Homo sapien
gtgtttgtagggtggataaattattctgtatga

SEQ ID NO: 182859 - DNA, 33 bp, Homo sapien
tgacttcagccttgagccagatatgttgtgcct

SEQ ID NO: 182860 - DNA, 33 bp, Homo sapien
tgacttcagccttgagtcagatatgttgtgcct

SEQ ID NO: 182861 - DNA, 33 bp, Homo sapien
tgtattctttcttgcaatgactcgttaatattt

SEQ ID NO: 182862 - DNA, 33 bp, Homo sapien
tgtattctttcttgcagtgactcgttaatattt

SEQ ID NO: 182863 - DNA, 33 bp, Homo sapien
gtatattctccagctaaatatttggataaccct

SEQ ID NO: 182864 - DNA, 33 bp, Homo sapien
gtatattctccagctagatatttggataaccct

SEQ ID NO: 182865 - DNA, 33 bp, Homo sapien
gatttaaacttccaaacaatcccatctaactgt

SEQ ID NO: 182866 - DNA, 33 bp, Homo sapien
gatttaaacttccaaataatcccatctaactgt

SEQ ID NO: 182867 - DNA, 33 bp, Homo sapien
ctctccttttactcaactcatattcatggcatt

SEQ ID NO: 182868 - DNA, 33 bp, Homo sapien
ctctccttttactcaagtcatattcatggcatt

SEQ ID NO: 182869 - DNA, 33 bp, Homo sapien
cctacaaggcatcggcaagtttgggacttaagc

SEQ ID NO: 182870 - DNA, 33 bp, Homo sapien
cctacaaggcatcggcgagtttgggacttaagc

SEQ ID NO: 182871 - DNA, 33 bp, Homo sapien
gctaaggaagcaagtaaaatctcagataccact

SEQ ID NO: 182872 - DNA, 33 bp, Homo sapien
gctaaggaagcaagtataatctcagataccact

SEQ ID NO: 182873 - DNA, 33 bp, Homo sapien
tttctgctttgttttgaatagatttaggtttca

SEQ ID NO: 182874 - DNA, 33 bp, Homo sapien
tttctgctttgttttggatagatttaggtttca

SEQ ID NO: 182875 - DNA, 33 bp, Homo sapien
agatggaaggcaataccatacactctgagatcc

SEQ ID NO: 182876 - DNA, 33 bp, Homo sapien
agatggaaggcaatactatacactctgagatcc

SEQ ID NO: 182877 - DNA, 33 bp, Homo sapien
ttttccaagtcctataaccaatgttcatttcct

SEQ ID NO: 182878 - DNA, 33 bp, Homo sapien
ttttccaagtcctatacccaatgttcatttcct

SEQ ID NO: 182879 - DNA, 33 bp, Homo sapien
cacttaccttagaagaagttcaagagggactgt

SEQ ID NO: 182880 - DNA, 33 bp, Homo sapien
cacttaccttagaagaggttcaagagggactgt

SEQ ID NO: 182881 - DNA, 33 bp, Homo sapien
ccttccaatattgttaggtaccacttgtcataa

SEQ ID NO: 182882 - DNA, 33 bp, Homo sapien
ccttccaatattgttatgtaccacttgtcataa

SEQ ID NO: 182883 - DNA, 33 bp, Homo sapien
caaagtagccgttcaaaaaatatttcttaatat

SEQ ID NO: 182884 - DNA, 33 bp, Homo sapien
caaagtagccgttcaataaatatttcttaatat

SEQ ID NO: 182885 - DNA, 33 bp, Homo sapien
gaaaattaataaggacacattttttacagccat

SEQ ID NO: 182886 - DNA, 33 bp, Homo sapien
gaaaattaataaggacgcattttttacagccat

SEQ ID NO: 182887 - DNA, 33 bp, Homo sapien
gaccacaatttcaaaccagtatatcttattcct

SEQ ID NO: 182888 - DNA, 33 bp, Homo sapien
gaccacaatttcaaacgagtatatcttattcct

SEQ ID NO: 182889 - DNA, 33 bp, Homo sapien
cctgatagtattgatccaagcatggccagatgg

SEQ ID NO: 182890 - DNA, 33 bp, Homo sapien
cctgatagtattgatctaagcatggccagatgg

SEQ ID NO: 182891 - DNA, 33 bp, Homo sapien
cacattgtagttgagaaagtgagacaaatcaag

SEQ ID NO: 182892 - DNA, 33 bp, Homo sapien
cacattgtagttgagacagtgagacaaatcaag

SEQ ID NO: 182893 - DNA, 33 bp, Homo sapien
ccataatctatttggccagaaaggttgattcat

SEQ ID NO: 182894 - DNA, 33 bp, Homo sapien
ccataatctatttggctagaaaggttgattcat

SEQ ID NO: 182895 - DNA, 33 bp, Homo sapien
ctactccaataacaaaaaggtgggagttaccag

SEQ ID NO: 182896 - DNA, 33 bp, Homo sapien
ctactccaataacaaacaggtgggagttaccag

SEQ ID NO: 182897 - DNA, 33 bp, Homo sapien
aatcaatcaaccatataatatggctcctccaac

SEQ ID NO: 182898 - DNA, 33 bp, Homo sapien
aatcaatcaaccatatgatatggctcctccaac

SEQ ID NO: 182899 - DNA, 33 bp, Homo sapien
ctcctccaacaaagaaactagtcagttggataa

SEQ ID NO: 182900 - DNA, 33 bp, Homo sapien
ctcctccaacaaagaagctagtcagttggataa

SEQ ID NO: 182901 - DNA, 33 bp, Homo sapien
ttgtactgaatcgcaaatctactgctatggcta

SEQ ID NO: 182902 - DNA, 33 bp, Homo sapien
ttgtactgaatcgcaactctactgctatggcta

SEQ ID NO: 182903 - DNA, 33 bp, Homo sapien
gttggaataaaaatgcaacattcacaaagatct

SEQ ID NO: 182904 - DNA, 33 bp, Homo sapien
gttggaataaaaatgctacattcacaaagatct

SEQ ID NO: 182905 - DNA, 33 bp, Homo sapien
cctagcacagtgaagaataaatagatgaagtac

SEQ ID NO: 182906 - DNA, 33 bp, Homo sapien
cctagcacagtgaagagtaaatagatgaagtac

SEQ ID NO: 182907 - DNA, 33 bp, Homo sapien
tatcccatggtgataacacaggactccggggaa

SEQ ID NO: 182908 - DNA, 33 bp, Homo sapien
tatcccatggtgataatacaggactccggggaa

SEQ ID NO: 182909 - DNA, 33 bp, Homo sapien
ttcctgacattcctagaagagtctataatgcaa

SEQ ID NO: 182910 - DNA, 33 bp, Homo sapien
ttcctgacattcctaggagagtctataatgcaa

SEQ ID NO: 182911 - DNA, 33 bp, Homo sapien
catatgtgtgcatgaaaaaattatatatacaaa

SEQ ID NO: 182912 - DNA, 33 bp, Homo sapien
catatgtgtgcatgaagaaattatatatacaaa

SEQ ID NO: 182913 - DNA, 33 bp, Homo sapien
ctatactaagttactcaaaattattctcagttc

SEQ ID NO: 182914 - DNA, 33 bp, Homo sapien
ctatactaagttactcgaaattattctcagttc

SEQ ID NO: 182915 - DNA, 33 bp, Homo sapien
agatgagcacctatcactctattggccttttta

SEQ ID NO: 182916 - DNA, 33 bp, Homo sapien
agatgagcacctatcattctattggccttttta

SEQ ID NO: 182917 - DNA, 33 bp, Homo sapien
agggaacactgaatgaactgaatgaaatctgtg

SEQ ID NO: 182918 - DNA, 33 bp, Homo sapien
agggaacactgaatgacctgaatgaaatctgtg

SEQ ID NO: 182919 - DNA, 33 bp, Homo sapien
gatgacaggttacttcacttgtatataattatg

SEQ ID NO: 182920 - DNA, 33 bp, Homo sapien
gatgacaggttacttcgcttgtatataattatg

SEQ ID NO: 182921 - DNA, 33 bp, Homo sapien
ttacgtttgtatctgaaatgtagcagaaaatga

SEQ ID NO: 182922 - DNA, 33 bp, Homo sapien
ttacgtttgtatctgagatgtagcagaaaatga

SEQ ID NO: 182923 - DNA, 33 bp, Homo sapien
ccatttatgagggaatcaacttccatgatccaa

SEQ ID NO: 182924 - DNA, 33 bp, Homo sapien
ccatttatgagggaatgaacttccatgatccaa

SEQ ID NO: 182925 - DNA, 33 bp, Homo sapien
tcccactttactgaaacgatctttctgcctatc

SEQ ID NO: 182926 - DNA, 33 bp, Homo sapien
tcccactttactgaaatgatctttctgcctatc

SEQ ID NO: 182927 - DNA, 33 bp, Homo sapien
gactgtcacaacctaccgcttttaatttaatga

SEQ ID NO: 182928 - DNA, 33 bp, Homo sapien
gactgtcacaacctactgcttttaatttaatga

SEQ ID NO: 182929 - DNA, 33 bp, Homo sapien
cataattagaacactcaaaagccaccaatttat

SEQ ID NO: 182930 - DNA, 33 bp, Homo sapien
cataattagaacactcgaaagccaccaatttat

SEQ ID NO: 182931 - DNA, 33 bp, Homo sapien
tgtttgttaaaatgcacgtgtacagttttctaa

SEQ ID NO: 182932 - DNA, 33 bp, Homo sapien
tgtttgttaaaatgcatgtgtacagttttctaa

SEQ ID NO: 182933 - DNA, 33 bp, Homo sapien
cctatgtagatcacgaaaaaaccatgagtgatg

SEQ ID NO: 182934 - DNA, 33 bp, Homo sapien
cctatgtagatcacgagaaaaccatgagtgatg

SEQ ID NO: 182935 - DNA, 33 bp, Homo sapien
aatctaaattcagccaaaacattttaaggaagt

SEQ ID NO: 182936 - DNA, 33 bp, Homo sapien
aatctaaattcagccataacattttaaggaagt

SEQ ID NO: 182937 - DNA, 33 bp, Homo sapien
ggattttgagaataacagcagaaacaaacctac

SEQ ID NO: 182938 - DNA, 33 bp, Homo sapien
ggattttgagaataacggcagaaacaaacctac

SEQ ID NO: 182939 - DNA, 33 bp, Homo sapien
ttccccatttaagtaaccattccaccacaccag

SEQ ID NO: 182940 - DNA, 33 bp, Homo sapien
ttccccatttaagtaatcattccaccacaccag

SEQ ID NO: 182941 - DNA, 33 bp, Homo sapien
tctcatttgccatttaacatcatcattaaattt

SEQ ID NO: 182942 - DNA, 33 bp, Homo sapien
tctcatttgccatttagcatcatcattaaattt

SEQ ID NO: 182943 - DNA, 33 bp, Homo sapien
acctatcatgagaaaccatgaaaactctatact

SEQ ID NO: 182944 - DNA, 33 bp, Homo sapien
acctatcatgagaaactatgaaaactctatact

SEQ ID NO: 182945 - DNA, 33 bp, Homo sapien
atgaagccctacctcacctctgaccctctgttc

SEQ ID NO: 182946 - DNA, 33 bp, Homo sapien
atgaagccctacctcatctctgaccctctgttc

SEQ ID NO: 182947 - DNA, 33 bp, Homo sapien
aaaaaaaggcagctgacgttccgggtcataaac

SEQ ID NO: 182948 - DNA, 33 bp, Homo sapien
aaaaaaaggcagctgatgttccgggtcataaac

SEQ ID NO: 182949 - DNA, 33 bp, Homo sapien
atctgagtcaatttaacccttgctgtttggaat

SEQ ID NO: 182950 - DNA, 33 bp, Homo sapien
atctgagtcaatttaagccttgctgtttggaat

SEQ ID NO: 182951 - DNA, 33 bp, Homo sapien
gccatgctgaatgtgaatcaacatccaagacat

SEQ ID NO: 182952 - DNA, 33 bp, Homo sapien
gccatgctgaatgtgagtcaacatccaagacat

SEQ ID NO: 182953 - DNA, 33 bp, Homo sapien
gaaaacaatagaggaaagcttgtgggagactaa

SEQ ID NO: 182954 - DNA, 33 bp, Homo sapien
gaaaacaatagaggaaggcttgtgggagactaa

SEQ ID NO: 182955 - DNA, 33 bp, Homo sapien
caagaagtcatatttccctagatccacgtccac

SEQ ID NO: 182956 - DNA, 33 bp, Homo sapien
caagaagtcatatttctctagatccacgtccac

SEQ ID NO: 182957 - DNA, 33 bp, Homo sapien
cccttgtcacctcagactctccagagcctaaag

SEQ ID NO: 182958 - DNA, 33 bp, Homo sapien
cccttgtcacctcagattctccagagcctaaag

SEQ ID NO: 182959 - DNA, 33 bp, Homo sapien
atgtttttgcttattacgtcattcttagagttc

SEQ ID NO: 182960 - DNA, 33 bp, Homo sapien
atgtttttgcttattatgtcattcttagagttc

SEQ ID NO: 182961 - DNA, 33 bp, Homo sapien
ttggaatactaaaaaaattgaatgtttgcctct

SEQ ID NO: 182962 - DNA, 33 bp, Homo sapien
ttggaatactaaaaaagttgaatgtttgcctct

SEQ ID NO: 182963 - DNA, 33 bp, Homo sapien
tcactatcttcctgcaaatcaccaaggtaacag

SEQ ID NO: 182964 - DNA, 33 bp, Homo sapien
tcactatcttcctgcatatcaccaaggtaacag

SEQ ID NO: 182965 - DNA, 33 bp, Homo sapien
cacatagaagtagcaaaaaagacatacttaaaa

SEQ ID NO: 182966 - DNA, 33 bp, Homo sapien
cacatagaagtagcaacaaagacatacttaaaa

SEQ ID NO: 182967 - DNA, 33 bp, Homo sapien
aattcccttaatgtgaagtttttgtcagtgtca

SEQ ID NO: 182968 - DNA, 33 bp, Homo sapien
aattcccttaatgtgacgtttttgtcagtgtca

SEQ ID NO: 182969 - DNA, 33 bp, Homo sapien
gtgaccagttactggccgacccagaaaaagggt

SEQ ID NO: 182970 - DNA, 33 bp, Homo sapien
gtgaccagttactggctgacccagaaaaagggt

SEQ ID NO: 182971 - DNA, 33 bp, Homo sapien
tacaggtcactatctacataccagttgtacaca

SEQ ID NO: 182972 - DNA, 33 bp, Homo sapien
tacaggtcactatctatataccagttgtacaca

SEQ ID NO: 182973 - DNA, 33 bp, Homo sapien
atctaataatgagaaaaccaatcacataagctc

SEQ ID NO: 182974 - DNA, 33 bp, Homo sapien
atctaataatgagaaatccaatcacataagctc

SEQ ID NO: 182975 - DNA, 33 bp, Homo sapien
tacacacagcatatataaactttgaaatgtatt

SEQ ID NO: 182976 - DNA, 33 bp, Homo sapien
tacacacagcatatatcaactttgaaatgtatt

SEQ ID NO: 182977 - DNA, 33 bp, Homo sapien
attattcctggaattgaaaccctttagcctagt

SEQ ID NO: 182978 - DNA, 33 bp, Homo sapien
attattcctggaattgcaaccctttagcctagt

SEQ ID NO: 182979 - DNA, 33 bp, Homo sapien
agggagaatgtggaaccgtgggcaagtgcgttt

SEQ ID NO: 182980 - DNA, 33 bp, Homo sapien
agggagaatgtggaactgtgggcaagtgcgttt

SEQ ID NO: 182981 - DNA, 33 bp, Homo sapien
tggcatcagatctaccccaaaatgtatctcaaa

SEQ ID NO: 182982 - DNA, 33 bp, Homo sapien
tggcatcagatctacctcaaaatgtatctcaaa

SEQ ID NO: 182983 - DNA, 33 bp, Homo sapien
agtttgaattccctgtaaaaagagactgagact

SEQ ID NO: 182984 - DNA, 33 bp, Homo sapien
agtttgaattccctgtcaaaagagactgagact

SEQ ID NO: 182985 - DNA, 33 bp, Homo sapien
gtactccatcttggccactattcacattaatat

SEQ ID NO: 182986 - DNA, 33 bp, Homo sapien
gtactccatcttggccgctattcacattaatat

SEQ ID NO: 182987 - DNA, 33 bp, Homo sapien
acattaatactgtacaaacgtcccaattctata

SEQ ID NO: 182988 - DNA, 33 bp, Homo sapien
acattaatactgtacatacgtcccaattctata

SEQ ID NO: 182989 - DNA, 33 bp, Homo sapien
ttttttcctactcaagcctcaagatggggatac

SEQ ID NO: 182990 - DNA, 33 bp, Homo sapien
ttttttcctactcaaggctcaagatggggatac

SEQ ID NO: 182991 - DNA, 33 bp, Homo sapien
attagacatgacacacaatttaatcaatcctat

SEQ ID NO: 182992 - DNA, 33 bp, Homo sapien
attagacatgacacacgatttaatcaatcctat

SEQ ID NO: 182993 - DNA, 33 bp, Homo sapien
tccttttttctggtaacgtgggctcagtatttt

SEQ ID NO: 182994 - DNA, 33 bp, Homo sapien
tccttttttctggtaatgtgggctcagtatttt

SEQ ID NO: 182995 - DNA, 33 bp, Homo sapien
aaatacctgaaactcacgaagtcaaatattatg

SEQ ID NO: 182996 - DNA, 33 bp, Homo sapien
aaatacctgaaactcatgaagtcaaatattatg

SEQ ID NO: 182997 - DNA, 33 bp, Homo sapien
aactccatctttcataaaactcacgaaaaatgc

SEQ ID NO: 182998 - DNA, 33 bp, Homo sapien
aactccatctttcatacaactcacgaaaaatgc

SEQ ID NO: 182999 - DNA, 33 bp, Homo sapien
ttatttgttgtaatcactaaatcccagttactc

SEQ ID NO: 183000 - DNA, 33 bp, Homo sapien
ttatttgttgtaatcattaaatcccagttactc

SEQ ID NO: 183001 - DNA, 33 bp, Homo sapien
ctctctaattctgactcaaggactaataaaaga

SEQ ID NO: 183002 - DNA, 33 bp, Homo sapien
ctctctaattctgacttaaggactaataaaaga

SEQ ID NO: 183003 - DNA, 33 bp, Homo sapien
gagtagctggattacaaatgcatgctaccaggc

SEQ ID NO: 183004 - DNA, 33 bp, Homo sapien
gagtagctggattacagatgcatgctaccaggc

SEQ ID NO: 183005 - DNA, 33 bp, Homo sapien
cgcccaaactggaatgcagtgtctcggtctcag

SEQ ID NO: 183006 - DNA, 33 bp, Homo sapien
cgcccaaactggaatgtagtgtctcggtctcag

SEQ ID NO: 183007 - DNA, 33 bp, Homo sapien
caatcagataaagaaactcagttatctggtatc

SEQ ID NO: 183008 - DNA, 33 bp, Homo sapien
caatcagataaagaaagtcagttatctggtatc

SEQ ID NO: 183009 - DNA, 33 bp, Homo sapien
tgcctgaatacacaagaaagtacatactcttca

SEQ ID NO: 183010 - DNA, 33 bp, Homo sapien
tgcctgaatacacaaggaagtacatactcttca

SEQ ID NO: 183011 - DNA, 33 bp, Homo sapien
gtgagacaagataagggcagagttaaggaactg

SEQ ID NO: 183012 - DNA, 33 bp, Homo sapien
gtgagacaagataaggtcagagttaaggaactg

SEQ ID NO: 183013 - DNA, 33 bp, Homo sapien
gaatttagcgtgcataaaggtatcaaatagcag

SEQ ID NO: 183014 - DNA, 33 bp, Homo sapien
gaatttagcgtgcatacaggtatcaaatagcag

SEQ ID NO: 183015 - DNA, 33 bp, Homo sapien
ttgtgtgtaaaataaaaatgacaacttacctca

SEQ ID NO: 183016 - DNA, 33 bp, Homo sapien
ttgtgtgtaaaataaagatgacaacttacctca

SEQ ID NO: 183017 - DNA, 33 bp, Homo sapien
ttcatttccttatgaagactccagtgtcatgta

SEQ ID NO: 183018 - DNA, 33 bp, Homo sapien
ttcatttccttatgaatactccagtgtcatgta

SEQ ID NO: 183019 - DNA, 33 bp, Homo sapien
ttcatatgtatatttagctagcaacaatacctg

SEQ ID NO: 183020 - DNA, 33 bp, Homo sapien
ttcatatgtatatttatctagcaacaatacctg

SEQ ID NO: 183021 - DNA, 33 bp, Homo sapien
catgatagagtagccaaagtaatcctttaatat

SEQ ID NO: 183022 - DNA, 33 bp, Homo sapien
catgatagagtagccagagtaatcctttaatat

SEQ ID NO: 183023 - DNA, 33 bp, Homo sapien
ggacacacagttaaaactcacagttgctgcctt

SEQ ID NO: 183024 - DNA, 33 bp, Homo sapien
ggacacacagttaaaagtcacagttgctgcctt

SEQ ID NO: 183025 - DNA, 33 bp, Homo sapien
aacataacttatcccacaaatatcatcacttca

SEQ ID NO: 183026 - DNA, 33 bp, Homo sapien
aacataacttatcccataaatatcatcacttca

SEQ ID NO: 183027 - DNA, 33 bp, Homo sapien
aatctgtgcagaaaaaatgcttaataactttaa

SEQ ID NO: 183028 - DNA, 33 bp, Homo sapien
aatctgtgcagaaaaagtgcttaataactttaa

SEQ ID NO: 183029 - DNA, 33 bp, Homo sapien
ttgacagggtatttacactccctactaccacca

SEQ ID NO: 183030 - DNA, 33 bp, Homo sapien
ttgacagggtatttactctccctactaccacca

SEQ ID NO: 183031 - DNA, 33 bp, Homo sapien
ttttgtctgtgctgcagtcaggaagattacagt

SEQ ID NO: 183032 - DNA, 33 bp, Homo sapien
ttttgtctgtgctgcattcaggaagattacagt

SEQ ID NO: 183033 - DNA, 33 bp, Homo sapien
taacaaaactgtaaacactccaggatcaaagat

SEQ ID NO: 183034 - DNA, 33 bp, Homo sapien
taacaaaactgtaaactctccaggatcaaagat

SEQ ID NO: 183035 - DNA, 33 bp, Homo sapien
gcggtgtgctaacaagactaattcacttgctgg

SEQ ID NO: 183036 - DNA, 33 bp, Homo sapien
gcggtgtgctaacaagcctaattcacttgctgg

SEQ ID NO: 183037 - DNA, 33 bp, Homo sapien
tccacatgattttgaacgggcaaggtaggaaga

SEQ ID NO: 183038 - DNA, 33 bp, Homo sapien
tccacatgattttgaatgggcaaggtaggaaga

SEQ ID NO: 183039 - DNA, 33 bp, Homo sapien
agaagaattaggatcaagaagctacctatctgg

SEQ ID NO: 183040 - DNA, 33 bp, Homo sapien
agaagaattaggatcatgaagctacctatctgg

SEQ ID NO: 183041 - DNA, 33 bp, Homo sapien
tgggttagtgatcaagaaagattttcaaaatgc

SEQ ID NO: 183042 - DNA, 33 bp, Homo sapien
tgggttagtgatcaaggaagattttcaaaatgc

SEQ ID NO: 183043 - DNA, 33 bp, Homo sapien
ctctcattcgtgtaacccatattattttataaa

SEQ ID NO: 183044 - DNA, 33 bp, Homo sapien
ctctcattcgtgtaactcatattattttataaa

SEQ ID NO: 183045 - DNA, 33 bp, Homo sapien
caatgtaaagtaaaaaagtgttttgccttgata

SEQ ID NO: 183046 - DNA, 33 bp, Homo sapien
caatgtaaagtaaaaacgtgttttgccttgata

SEQ ID NO: 183047 - DNA, 33 bp, Homo sapien
ctgctttatgtttcctaaatttccaatgtccca

SEQ ID NO: 183048 - DNA, 33 bp, Homo sapien
ctgctttatgtttccttaatttccaatgtccca

SEQ ID NO: 183049 - DNA, 33 bp, Homo sapien
taattaacattcagccactaaaccaggaccaaa

SEQ ID NO: 183050 - DNA, 33 bp, Homo sapien
taattaacattcagcctctaaaccaggaccaaa

SEQ ID NO: 183051 - DNA, 33 bp, Homo sapien
gttgctagcgaacatacatttaggctgtgggcc

SEQ ID NO: 183052 - DNA, 33 bp, Homo sapien
gttgctagcgaacatatatttaggctgtgggcc

SEQ ID NO: 183053 - DNA, 33 bp, Homo sapien
gacttcttattttggaggtactatgaaagtaga

SEQ ID NO: 183054 - DNA, 33 bp, Homo sapien
gacttcttattttggatgtactatgaaagtaga

SEQ ID NO: 183055 - DNA, 33 bp, Homo sapien
taccttgttgtataaacgattaccctatggtga

SEQ ID NO: 183056 - DNA, 33 bp, Homo sapien
taccttgttgtataaatgattaccctatggtga

SEQ ID NO: 183057 - DNA, 33 bp, Homo sapien
tatatttagaccaaaaatttatcaaggatggca

SEQ ID NO: 183058 - DNA, 33 bp, Homo sapien
tatatttagaccaaaagtttatcaaggatggca

SEQ ID NO: 183059 - DNA, 33 bp, Homo sapien
catcatcatgactggaaataatgcctgaaattg

SEQ ID NO: 183060 - DNA, 33 bp, Homo sapien
catcatcatgactggagataatgcctgaaattg

SEQ ID NO: 183061 - DNA, 33 bp, Homo sapien
agcacacttcttgcagaccttatgtaaaaagag

SEQ ID NO: 183062 - DNA, 33 bp, Homo sapien
agcacacttcttgcagcccttatgtaaaaagag

SEQ ID NO: 183063 - DNA, 33 bp, Homo sapien
attgcaataaacaagacgtaagtttctacagca

SEQ ID NO: 183064 - DNA, 33 bp, Homo sapien
attgcaataaacaagatgtaagtttctacagca

SEQ ID NO: 183065 - DNA, 33 bp, Homo sapien
aaaaatagcataaagaacaaactctacaatctc

SEQ ID NO: 183066 - DNA, 33 bp, Homo sapien
aaaaatagcataaagagcaaactctacaatctc

SEQ ID NO: 183067 - DNA, 33 bp, Homo sapien
cattcacagctttataacatttagtgaacatta

SEQ ID NO: 183068 - DNA, 33 bp, Homo sapien
cattcacagctttatagcatttagtgaacatta

SEQ ID NO: 183069 - DNA, 33 bp, Homo sapien
tagtctttgtcatcaaaactgcgtaacatttaa

SEQ ID NO: 183070 - DNA, 33 bp, Homo sapien
tagtctttgtcatcaagactgcgtaacatttaa

SEQ ID NO: 183071 - DNA, 33 bp, Homo sapien
cctccttgcattcagaaataaccatgtgattga

SEQ ID NO: 183072 - DNA, 33 bp, Homo sapien
cctccttgcattcagagataaccatgtgattga

SEQ ID NO: 183073 - DNA, 33 bp, Homo sapien
gactcacacagcaagactatttaactgtgccta

SEQ ID NO: 183074 - DNA, 33 bp, Homo sapien
gactcacacagcaagagtatttaactgtgccta

SEQ ID NO: 183075 - DNA, 33 bp, Homo sapien
caacaacaacaatggcaatgtgtagaacattat

SEQ ID NO: 183076 - DNA, 33 bp, Homo sapien
caacaacaacaatggctatgtgtagaacattat

SEQ ID NO: 183077 - DNA, 33 bp, Homo sapien
tcaagagctacacagcaatttttttctggtcca

SEQ ID NO: 183078 - DNA, 33 bp, Homo sapien
tcaagagctacacagcgatttttttctggtcca

SEQ ID NO: 183079 - DNA, 33 bp, Homo sapien
aatgatactatattgtgacaagcgcccgacaga

SEQ ID NO: 183080 - DNA, 33 bp, Homo sapien
aatgatactatattgttacaagcgcccgacaga

SEQ ID NO: 183081 - DNA, 33 bp, Homo sapien
ctagcagggcggcatgacaaattctgtaatttg

SEQ ID NO: 183082 - DNA, 33 bp, Homo sapien
ctagcagggcggcatggcaaattctgtaatttg

SEQ ID NO: 183083 - DNA, 33 bp, Homo sapien
ttatattcttctaaagcctcgggagtgatttga

SEQ ID NO: 183084 - DNA, 33 bp, Homo sapien
ttatattcttctaaaggctcgggagtgatttga

SEQ ID NO: 183085 - DNA, 33 bp, Homo sapien
ccagtcaatcctcagaagagcccacagttaaca

SEQ ID NO: 183086 - DNA, 33 bp, Homo sapien
ccagtcaatcctcagaggagcccacagttaaca

SEQ ID NO: 183087 - DNA, 33 bp, Homo sapien
tccaagctaaaaaaaaacgcatatattattgaa

SEQ ID NO: 183088 - DNA, 33 bp, Homo sapien
tccaagctaaaaaaaaccgcatatattattgaa

SEQ ID NO: 183089 - DNA, 33 bp, Homo sapien
ggctgcactcagccgcgactcaggatcaacttt

SEQ ID NO: 183090 - DNA, 33 bp, Homo sapien
ggctgcactcagccgctactcaggatcaacttt

SEQ ID NO: 183091 - DNA, 33 bp, Homo sapien
gcaaaatattccaaaggcttactggttatctcc

SEQ ID NO: 183092 - DNA, 33 bp, Homo sapien
gcaaaatattccaaagtcttactggttatctcc

SEQ ID NO: 183093 - DNA, 33 bp, Homo sapien
agaaaagagtagaaaccagagaatcaattccaa

SEQ ID NO: 183094 - DNA, 33 bp, Homo sapien
agaaaagagtagaaactagagaatcaattccaa

SEQ ID NO: 183095 - DNA, 33 bp, Homo sapien
gtgaaagctagggcagaccaagttgtttttatg

SEQ ID NO: 183096 - DNA, 33 bp, Homo sapien
gtgaaagctagggcaggccaagttgtttttatg

SEQ ID NO: 183097 - DNA, 33 bp, Homo sapien
caaacctataaaaacaaagcaatgtccaacctt

SEQ ID NO: 183098 - DNA, 33 bp, Homo sapien
caaacctataaaaacagagcaatgtccaacctt

SEQ ID NO: 183099 - DNA, 33 bp, Homo sapien
gtaatgtttggagaaaccactttccaaggatgt

SEQ ID NO: 183100 - DNA, 33 bp, Homo sapien
gtaatgtttggagaaatcactttccaaggatgt

SEQ ID NO: 183101 - DNA, 33 bp, Homo sapien
ggaaaatctcttcccaccagtcaaagtaaagct

SEQ ID NO: 183102 - DNA, 33 bp, Homo sapien
ggaaaatctcttcccatcagtcaaagtaaagct

SEQ ID NO: 183103 - DNA, 33 bp, Homo sapien
gatgagaattaagagcaatagaacccttacatt

SEQ ID NO: 183104 - DNA, 33 bp, Homo sapien
gatgagaattaagagctatagaacccttacatt

SEQ ID NO: 183105 - DNA, 33 bp, Homo sapien
gcaatactgctccaaacaactttttgctctact

SEQ ID NO: 183106 - DNA, 33 bp, Homo sapien
gcaatactgctccaaataactttttgctctact

SEQ ID NO: 183107 - DNA, 33 bp, Homo sapien
tcaaaaacaaaaattcaatggctaagacaataa

SEQ ID NO: 183108 - DNA, 33 bp, Homo sapien
tcaaaaacaaaaattccatggctaagacaataa

SEQ ID NO: 183109 - DNA, 33 bp, Homo sapien
taacaataaggcgagtaaaagggagagagagct

SEQ ID NO: 183110 - DNA, 33 bp, Homo sapien
taacaataaggcgagtgaaagggagagagagct

SEQ ID NO: 183111 - DNA, 33 bp, Homo sapien
tattcttcacattgtagctgaaagtgcttatat

SEQ ID NO: 183112 - DNA, 33 bp, Homo sapien
tattcttcacattgtatctgaaagtgcttatat

SEQ ID NO: 183113 - DNA, 33 bp, Homo sapien
acctcaatggcttataaagtgtggtaccttaag

SEQ ID NO: 183114 - DNA, 33 bp, Homo sapien
acctcaatggcttatagagtgtggtaccttaag

SEQ ID NO: 183115 - DNA, 33 bp, Homo sapien
tctgttgctgccatatgaagtggctggatggga

SEQ ID NO: 183116 - DNA, 33 bp, Homo sapien
tctgttgctgccatattaagtggctggatggga

SEQ ID NO: 183117 - DNA, 33 bp, Homo sapien
acagtgccagaacgtacgctctgaaagtgttag

SEQ ID NO: 183118 - DNA, 33 bp, Homo sapien
acagtgccagaacgtatgctctgaaagtgttag

SEQ ID NO: 183119 - DNA, 33 bp, Homo sapien
cagctcttgaattctaccctatattgctaggag

SEQ ID NO: 183120 - DNA, 33 bp, Homo sapien
cagctcttgaattctatcctatattgctaggag

SEQ ID NO: 183121 - DNA, 33 bp, Homo sapien
ctccatcctccgtctcacaaaagaaaaacaaat

SEQ ID NO: 183122 - DNA, 33 bp, Homo sapien
ctccatcctccgtctcccaaaagaaaaacaaat

SEQ ID NO: 183123 - DNA, 33 bp, Homo sapien
agagttaatcacgaccactcttagctttcacta

SEQ ID NO: 183124 - DNA, 33 bp, Homo sapien
agagttaatcacgaccgctcttagctttcacta

SEQ ID NO: 183125 - DNA, 33 bp, Homo sapien
aaatctataactcaaaatatcttttcttcttag

SEQ ID NO: 183126 - DNA, 33 bp, Homo sapien
aaatctataactcaaagtatcttttcttcttag

SEQ ID NO: 183127 - DNA, 33 bp, Homo sapien
gcgaacttaaaggcaacaataagtccagaacct

SEQ ID NO: 183128 - DNA, 33 bp, Homo sapien
gcgaacttaaaggcaagaataagtccagaacct

SEQ ID NO: 183129 - DNA, 33 bp, Homo sapien
caattaattaagcagaagtttgcattttccttg

SEQ ID NO: 183130 - DNA, 33 bp, Homo sapien
caattaattaagcagaggtttgcattttccttg

SEQ ID NO: 183131 - DNA, 33 bp, Homo sapien
tttagtaggtatgaaacaaatgcccatgagttg

SEQ ID NO: 183132 - DNA, 33 bp, Homo sapien
tttagtaggtatgaaagaaatgcccatgagttg

SEQ ID NO: 183133 - DNA, 33 bp, Homo sapien
cttctttatgcaacaaacttattttctgtaatg

SEQ ID NO: 183134 - DNA, 33 bp, Homo sapien
cttctttatgcaacaatcttattttctgtaatg

SEQ ID NO: 183135 - DNA, 33 bp, Homo sapien
agttaagctattctgacgattcttctttccaca

SEQ ID NO: 183136 - DNA, 33 bp, Homo sapien
agttaagctattctgatgattcttctttccaca

SEQ ID NO: 183137 - DNA, 33 bp, Homo sapien
actgtgaagaccataagctaactttcttctatg

SEQ ID NO: 183138 - DNA, 33 bp, Homo sapien
actgtgaagaccataatctaactttcttctatg

SEQ ID NO: 183139 - DNA, 33 bp, Homo sapien
tccggcagttgaagacacaggagagccaatggt

SEQ ID NO: 183140 - DNA, 33 bp, Homo sapien
tccggcagttgaagacccaggagagccaatggt

SEQ ID NO: 183141 - DNA, 33 bp, Homo sapien
tgtctcactccgtgtgcacttgctgtgtgttca

SEQ ID NO: 183142 - DNA, 33 bp, Homo sapien
tgtctcactccgtgtgtacttgctgtgtgttca

SEQ ID NO: 183143 - DNA, 33 bp, Homo sapien
tcaacatcctgcccaagtaagtcctataataac

SEQ ID NO: 183144 - DNA, 33 bp, Homo sapien
tcaacatcctgcccaattaagtcctataataac

SEQ ID NO: 183145 - DNA, 33 bp, Homo sapien
tactctgtgagaagatcaaccaaccttggatga

SEQ ID NO: 183146 - DNA, 33 bp, Homo sapien
tactctgtgagaagattaaccaaccttggatga

SEQ ID NO: 183147 - DNA, 33 bp, Homo sapien
ttttattccattgccaagcttaaaccttttttt

SEQ ID NO: 183148 - DNA, 33 bp, Homo sapien
ttttattccattgccatgcttaaaccttttttt

SEQ ID NO: 183149 - DNA, 33 bp, Homo sapien
tacaatagacaacaaactgctatggtgagtatt

SEQ ID NO: 183150 - DNA, 33 bp, Homo sapien
tacaatagacaacaaagtgctatggtgagtatt

SEQ ID NO: 183151 - DNA, 33 bp, Homo sapien
atcgcttgaacctgaagaccaagaacctgcatg

SEQ ID NO: 183152 - DNA, 33 bp, Homo sapien
atcgcttgaacctgaataccaagaacctgcatg

SEQ ID NO: 183153 - DNA, 33 bp, Homo sapien
agttgaatgaatgaccacatcttcctggttctt

SEQ ID NO: 183154 - DNA, 33 bp, Homo sapien
agttgaatgaatgaccgcatcttcctggttctt

SEQ ID NO: 183155 - DNA, 33 bp, Homo sapien
ttttaaattttcagaaaagctgacaagatagta

SEQ ID NO: 183156 - DNA, 33 bp, Homo sapien
ttttaaattttcagaagagctgacaagatagta

SEQ ID NO: 183157 - DNA, 33 bp, Homo sapien
tctttatcttgccagccctctgagatacctcaa

SEQ ID NO: 183158 - DNA, 33 bp, Homo sapien
tctttatcttgccagctctctgagatacctcaa

SEQ ID NO: 183159 - DNA, 33 bp, Homo sapien
ctagattgggatataacaagaaactgaagaaga

SEQ ID NO: 183160 - DNA, 33 bp, Homo sapien
ctagattgggatataagaagaaactgaagaaga

SEQ ID NO: 183161 - DNA, 33 bp, Homo sapien
agaacttgtctggaccacaagactctatatttc

SEQ ID NO: 183162 - DNA, 33 bp, Homo sapien
agaacttgtctggaccccaagactctatatttc

SEQ ID NO: 183163 - DNA, 33 bp, Homo sapien
tgctaagggcataagaaaacctgaggtgaagct

SEQ ID NO: 183164 - DNA, 33 bp, Homo sapien
tgctaagggcataagacaacctgaggtgaagct

SEQ ID NO: 183165 - DNA, 33 bp, Homo sapien
agcaggactggaagacaaactgaataaggacta

SEQ ID NO: 183166 - DNA, 33 bp, Homo sapien
agcaggactggaagacgaactgaataaggacta

SEQ ID NO: 183167 - DNA, 33 bp, Homo sapien
gtttttgtttgttgaaatataagatggtggaga

SEQ ID NO: 183168 - DNA, 33 bp, Homo sapien
gtttttgtttgttgaactataagatggtggaga

SEQ ID NO: 183169 - DNA, 33 bp, Homo sapien
aatacctccacatctaactggtttcaaaagagt

SEQ ID NO: 183170 - DNA, 33 bp, Homo sapien
aatacctccacatctagctggtttcaaaagagt

SEQ ID NO: 183171 - DNA, 33 bp, Homo sapien
aaagaacctaaggtaacggatagaatgtgtttt

SEQ ID NO: 183172 - DNA, 33 bp, Homo sapien
aaagaacctaaggtaatggatagaatgtgtttt

SEQ ID NO: 183173 - DNA, 33 bp, Homo sapien
aagcaactatgaaaaacccagcagctctaatta

SEQ ID NO: 183174 - DNA, 33 bp, Homo sapien
aagcaactatgaaaaatccagcagctctaatta

SEQ ID NO: 183175 - DNA, 33 bp, Homo sapien
cagcaaggaactgagacactcattctaacaacc

SEQ ID NO: 183176 - DNA, 33 bp, Homo sapien
cagcaaggaactgagatactcattctaacaacc

SEQ ID NO: 183177 - DNA, 33 bp, Homo sapien
tacacaccttctgcagcaaaaactggtcactgt

SEQ ID NO: 183178 - DNA, 33 bp, Homo sapien
tacacaccttctgcagtaaaaactggtcactgt

SEQ ID NO: 183179 - DNA, 33 bp, Homo sapien
gctttcttatcctgggaagatatttttagcctc

SEQ ID NO: 183180 - DNA, 33 bp, Homo sapien
gctttcttatcctgggcagatatttttagcctc

SEQ ID NO: 183181 - DNA, 33 bp, Homo sapien
gtttttggaccataagacctagtggatccaatg

SEQ ID NO: 183182 - DNA, 33 bp, Homo sapien
gtttttggaccataaggcctagtggatccaatg

SEQ ID NO: 183183 - DNA, 33 bp, Homo sapien
gattttaaaaatagcacgtatcacacttgaaaa

SEQ ID NO: 183184 - DNA, 33 bp, Homo sapien
gattttaaaaatagcatgtatcacacttgaaaa

SEQ ID NO: 183185 - DNA, 33 bp, Homo sapien
ttcaagaataagaataccttttttctcctgtaa

SEQ ID NO: 183186 - DNA, 33 bp, Homo sapien
ttcaagaataagaatatcttttttctcctgtaa

SEQ ID NO: 183187 - DNA, 33 bp, Homo sapien
ggttgcttgacacctaaaaatcatcaaagcctg

SEQ ID NO: 183188 - DNA, 33 bp, Homo sapien
ggttgcttgacacctacaaatcatcaaagcctg

SEQ ID NO: 183189 - DNA, 33 bp, Homo sapien
tgccaggtttgacacaatgattaatgagctagt

SEQ ID NO: 183190 - DNA, 33 bp, Homo sapien
tgccaggtttgacacagtgattaatgagctagt

SEQ ID NO: 183191 - DNA, 33 bp, Homo sapien
cctggcaccgtgcctgaaacacagtagcctctc

SEQ ID NO: 183192 - DNA, 33 bp, Homo sapien
cctggcaccgtgcctgcaacacagtagcctctc

SEQ ID NO: 183193 - DNA, 33 bp, Homo sapien
ttgttcagcccattcacatctaagcatgggtga

SEQ ID NO: 183194 - DNA, 33 bp, Homo sapien
ttgttcagcccattcagatctaagcatgggtga

SEQ ID NO: 183195 - DNA, 33 bp, Homo sapien
cccttcagccaaagaccacgggaacaccagaag

SEQ ID NO: 183196 - DNA, 33 bp, Homo sapien
cccttcagccaaagactacgggaacaccagaag

SEQ ID NO: 183197 - DNA, 33 bp, Homo sapien
aaggtaacatattaaaccaccaacacaatgcct

SEQ ID NO: 183198 - DNA, 33 bp, Homo sapien
aaggtaacatattaaagcaccaacacaatgcct

SEQ ID NO: 183199 - DNA, 33 bp, Homo sapien
gcgtggttgtattcacactgtacatacaatttt

SEQ ID NO: 183200 - DNA, 33 bp, Homo sapien
gcgtggttgtattcacgctgtacatacaatttt

SEQ ID NO: 183201 - DNA, 33 bp, Homo sapien
tttactcatttttatcaaattcatctaaaatac

SEQ ID NO: 183202 - DNA, 33 bp, Homo sapien
tttactcatttttatcgaattcatctaaaatac

SEQ ID NO: 183203 - DNA, 33 bp, Homo sapien
gttactaatttccatgaaggcatattaggctaa

SEQ ID NO: 183204 - DNA, 33 bp, Homo sapien
gttactaatttccatgcaggcatattaggctaa

SEQ ID NO: 183205 - DNA, 33 bp, Homo sapien
ccatataaaatactgaactgtaatcactggact

SEQ ID NO: 183206 - DNA, 33 bp, Homo sapien
ccatataaaatactgagctgtaatcactggact

SEQ ID NO: 183207 - DNA, 33 bp, Homo sapien
aaccaagaatagcctaatactgtctgccagaga

SEQ ID NO: 183208 - DNA, 33 bp, Homo sapien
aaccaagaatagcctagtactgtctgccagaga

SEQ ID NO: 183209 - DNA, 33 bp, Homo sapien
gcttctcttcttggaaacccaaacactgttgag

SEQ ID NO: 183210 - DNA, 33 bp, Homo sapien
gcttctcttcttggaagcccaaacactgttgag

SEQ ID NO: 183211 - DNA, 33 bp, Homo sapien
agtctgcacaaaaagcaagagcactaggttctg

SEQ ID NO: 183212 - DNA, 33 bp, Homo sapien
agtctgcacaaaaagcgagagcactaggttctg

SEQ ID NO: 183213 - DNA, 33 bp, Homo sapien
tcaaggaataaaacaccacctctttatctcccc

SEQ ID NO: 183214 - DNA, 33 bp, Homo sapien
tcaaggaataaaacacgacctctttatctcccc

SEQ ID NO: 183215 - DNA, 33 bp, Homo sapien
tgtgtctttgcattgacggattactaatttatt

SEQ ID NO: 183216 - DNA, 33 bp, Homo sapien
tgtgtctttgcattgatggattactaatttatt

SEQ ID NO: 183217 - DNA, 33 bp, Homo sapien
actcaatgatttcgaaaataacaaagaaaacca

SEQ ID NO: 183218 - DNA, 33 bp, Homo sapien
actcaatgatttcgaagataacaaagaaaacca

SEQ ID NO: 183219 - DNA, 33 bp, Homo sapien
ctgctgagatgcttcagaagaaacgggggagag

SEQ ID NO: 183220 - DNA, 33 bp, Homo sapien
ctgctgagatgcttcataagaaacgggggagag

SEQ ID NO: 183221 - DNA, 33 bp, Homo sapien
ttttttcatggagagacggcataaaaggcagat

SEQ ID NO: 183222 - DNA, 33 bp, Homo sapien
ttttttcatggagagatggcataaaaggcagat

SEQ ID NO: 183223 - DNA, 33 bp, Homo sapien
aggaaagaatcaagaactcaatgtatcaactct

SEQ ID NO: 183224 - DNA, 33 bp, Homo sapien
aggaaagaatcaagaagtcaatgtatcaactct

SEQ ID NO: 183225 - DNA, 33 bp, Homo sapien
tgtctatagtaacctgaaattagacttgtttta

SEQ ID NO: 183226 - DNA, 33 bp, Homo sapien
tgtctatagtaacctggaattagacttgtttta

SEQ ID NO: 183227 - DNA, 33 bp, Homo sapien
tccactgagaaattacagcttccatttatcaca

SEQ ID NO: 183228 - DNA, 33 bp, Homo sapien
tccactgagaaattacggcttccatttatcaca

SEQ ID NO: 183229 - DNA, 33 bp, Homo sapien
aaaagacctagatcaaagagtgaaacaggtcct

SEQ ID NO: 183230 - DNA, 33 bp, Homo sapien
aaaagacctagatcaaggagtgaaacaggtcct

SEQ ID NO: 183231 - DNA, 33 bp, Homo sapien
ataacaatagaaatacagacgacacagttggta

SEQ ID NO: 183232 - DNA, 33 bp, Homo sapien
ataacaatagaaatactgacgacacagttggta

SEQ ID NO: 183233 - DNA, 33 bp, Homo sapien
tattcagaagtcctaacgtgctctattcattgc

SEQ ID NO: 183234 - DNA, 33 bp, Homo sapien
tattcagaagtcctaatgtgctctattcattgc

SEQ ID NO: 183235 - DNA, 33 bp, Homo sapien
taaagttggagcaagaaatactctcaaatgaat

SEQ ID NO: 183236 - DNA, 33 bp, Homo sapien
taaagttggagcaagacatactctcaaatgaat

SEQ ID NO: 183237 - DNA, 33 bp, Homo sapien
catttttctgtggtagacaatatgctagatgtc

SEQ ID NO: 183238 - DNA, 33 bp, Homo sapien
catttttctgtggtagccaatatgctagatgtc

SEQ ID NO: 183239 - DNA, 33 bp, Homo sapien
taatcaatggtgtacaaacgtgaaaaattttga

SEQ ID NO: 183240 - DNA, 33 bp, Homo sapien
taatcaatggtgtacagacgtgaaaaattttga

SEQ ID NO: 183241 - DNA, 33 bp, Homo sapien
ggtagctataacatcaggtgtattttacgtagg

SEQ ID NO: 183242 - DNA, 33 bp, Homo sapien
ggtagctataacatcatgtgtattttacgtagg

SEQ ID NO: 183243 - DNA, 33 bp, Homo sapien
tcttggcagcttttcaccttcaattttaagaaa

SEQ ID NO: 183244 - DNA, 33 bp, Homo sapien
tcttggcagcttttcatcttcaattttaagaaa

SEQ ID NO: 183245 - DNA, 33 bp, Homo sapien
ctcttgtttctctgagcaagcttggctgaaaaa

SEQ ID NO: 183246 - DNA, 33 bp, Homo sapien
ctcttgtttctctgaggaagcttggctgaaaaa

SEQ ID NO: 183247 - DNA, 33 bp, Homo sapien
accctaatttctatcacgtcagagacatctctt

SEQ ID NO: 183248 - DNA, 33 bp, Homo sapien
accctaatttctatcaggtcagagacatctctt

SEQ ID NO: 183249 - DNA, 33 bp, Homo sapien
tcctcccctgtgtctcagaaaccacacaaaatt

SEQ ID NO: 183250 - DNA, 33 bp, Homo sapien
tcctcccctgtgtctccgaaaccacacaaaatt

SEQ ID NO: 183251 - DNA, 33 bp, Homo sapien
ccaagacccttcacaaacaccaagacttcctga

SEQ ID NO: 183252 - DNA, 33 bp, Homo sapien
ccaagacccttcacaagcaccaagacttcctga

SEQ ID NO: 183253 - DNA, 33 bp, Homo sapien
tatctgcaagaataccaatgttccatgtaaaga

SEQ ID NO: 183254 - DNA, 33 bp, Homo sapien
tatctgcaagaataccgatgttccatgtaaaga

SEQ ID NO: 183255 - DNA, 33 bp, Homo sapien
tcaaactcaccagtcacgtaggtcacctcactc

SEQ ID NO: 183256 - DNA, 33 bp, Homo sapien
tcaaactcaccagtcaggtaggtcacctcactc

SEQ ID NO: 183257 - DNA, 33 bp, Homo sapien
actggtgagtttgaaaaaagctgggcaggtatg

SEQ ID NO: 183258 - DNA, 33 bp, Homo sapien
actggtgagtttgaaagaagctgggcaggtatg

SEQ ID NO: 183259 - DNA, 33 bp, Homo sapien
tggcaccagcacactggatgggagcacatctct

SEQ ID NO: 183260 - DNA, 33 bp, Homo sapien
tggcaccagcacactgtatgggagcacatctct

SEQ ID NO: 183261 - DNA, 33 bp, Homo sapien
cttctgcctttctccactcactgtttgctcctt

SEQ ID NO: 183262 - DNA, 33 bp, Homo sapien
cttctgcctttctccattcactgtttgctcctt

SEQ ID NO: 183263 - DNA, 33 bp, Homo sapien
tgtctatttggagaatcagaaatatatatagta

SEQ ID NO: 183264 - DNA, 33 bp, Homo sapien
tgtctatttggagaatgagaaatatatatagta

SEQ ID NO: 183265 - DNA, 33 bp, Homo sapien
tgtagatgaattttaaccatacacagagtaaat

SEQ ID NO: 183266 - DNA, 33 bp, Homo sapien
tgtagatgaattttaatcatacacagagtaaat

SEQ ID NO: 183267 - DNA, 33 bp, Homo sapien
taatgttcagtgcagacattaataaagagtttc

SEQ ID NO: 183268 - DNA, 33 bp, Homo sapien
taatgttcagtgcagatattaataaagagtttc

SEQ ID NO: 183269 - DNA, 33 bp, Homo sapien
cacatttgcaggtatcaagagttagtagttcag

SEQ ID NO: 183270 - DNA, 33 bp, Homo sapien
cacatttgcaggtatcgagagttagtagttcag

SEQ ID NO: 183271 - DNA, 33 bp, Homo sapien
ctttgattcaataacccgcatcattcttggttg

SEQ ID NO: 183272 - DNA, 33 bp, Homo sapien
ctttgattcaataacctgcatcattcttggttg

SEQ ID NO: 183273 - DNA, 33 bp, Homo sapien
ctatagtttggctctcaaccttcttttgaaagc

SEQ ID NO: 183274 - DNA, 33 bp, Homo sapien
ctatagtttggctctccaccttcttttgaaagc

SEQ ID NO: 183275 - DNA, 33 bp, Homo sapien
atgattgcagccactaaaatcgaccccttgcac

SEQ ID NO: 183276 - DNA, 33 bp, Homo sapien
atgattgcagccactacaatcgaccccttgcac

SEQ ID NO: 183277 - DNA, 33 bp, Homo sapien
acttccatttaatgacaaagtatatctgggctt

SEQ ID NO: 183278 - DNA, 33 bp, Homo sapien
acttccatttaatgacgaagtatatctgggctt

SEQ ID NO: 183279 - DNA, 33 bp, Homo sapien
acaattgaaaacatcacattagtctacaaaatt

SEQ ID NO: 183280 - DNA, 33 bp, Homo sapien
acaattgaaaacatcatattagtctacaaaatt

SEQ ID NO: 183281 - DNA, 33 bp, Homo sapien
tgccaaaatagctttaagactatgctaatatat

SEQ ID NO: 183282 - DNA, 33 bp, Homo sapien
tgccaaaatagctttaggactatgctaatatat

SEQ ID NO: 183283 - DNA, 33 bp, Homo sapien
gaagacgattttggcacagaagacttagctagg

SEQ ID NO: 183284 - DNA, 33 bp, Homo sapien
gaagacgattttggcatagaagacttagctagg

SEQ ID NO: 183285 - DNA, 33 bp, Homo sapien
attgccacagagaagagaaaatttgtattgtat

SEQ ID NO: 183286 - DNA, 33 bp, Homo sapien
attgccacagagaagataaaatttgtattgtat

SEQ ID NO: 183287 - DNA, 33 bp, Homo sapien
caggatgcatgacaaaatataagtggaaatact

SEQ ID NO: 183288 - DNA, 33 bp, Homo sapien
caggatgcatgacaaagtataagtggaaatact

SEQ ID NO: 183289 - DNA, 33 bp, Homo sapien
atcttgagtatttcaacctgttattttggagct

SEQ ID NO: 183290 - DNA, 33 bp, Homo sapien
atcttgagtatttcaatctgttattttggagct

SEQ ID NO: 183291 - DNA, 33 bp, Homo sapien
ccatagatgtagagacaatgtttatagcgtgct

SEQ ID NO: 183292 - DNA, 33 bp, Homo sapien
ccatagatgtagagacgatgtttatagcgtgct

SEQ ID NO: 183293 - DNA, 33 bp, Homo sapien
gcatagagcatttgaccatagcaatagacctgt

SEQ ID NO: 183294 - DNA, 33 bp, Homo sapien
gcatagagcatttgacgatagcaatagacctgt

SEQ ID NO: 183295 - DNA, 33 bp, Homo sapien
agttcccaagttaatcaatgaaatcctcaagta

SEQ ID NO: 183296 - DNA, 33 bp, Homo sapien
agttcccaagttaatcgatgaaatcctcaagta

SEQ ID NO: 183297 - DNA, 33 bp, Homo sapien
tccttcatttagttcccctcatcactcctatct

SEQ ID NO: 183298 - DNA, 33 bp, Homo sapien
tccttcatttagttcctctcatcactcctatct

SEQ ID NO: 183299 - DNA, 33 bp, Homo sapien
catagttcaagtggaaccagggtttgtatgatt

SEQ ID NO: 183300 - DNA, 33 bp, Homo sapien
catagttcaagtggaagcagggtttgtatgatt

SEQ ID NO: 183301 - DNA, 33 bp, Homo sapien
ctatgactttaccttcagaaatgtgcatactct

SEQ ID NO: 183302 - DNA, 33 bp, Homo sapien
ctatgactttaccttcggaaatgtgcatactct

SEQ ID NO: 183303 - DNA, 33 bp, Homo sapien
tggtacaatgcagtgaagtaccaggccacttag

SEQ ID NO: 183304 - DNA, 33 bp, Homo sapien
tggtacaatgcagtgaggtaccaggccacttag

SEQ ID NO: 183305 - DNA, 33 bp, Homo sapien
ctttgcaatagaataaacacttaatagctggta

SEQ ID NO: 183306 - DNA, 33 bp, Homo sapien
ctttgcaatagaataagcacttaatagctggta

SEQ ID NO: 183307 - DNA, 33 bp, Homo sapien
tgagatagacagcaaaaatgtaccataggacta

SEQ ID NO: 183308 - DNA, 33 bp, Homo sapien
tgagatagacagcaaacatgtaccataggacta

SEQ ID NO: 183309 - DNA, 33 bp, Homo sapien
taaagcccaatagatggactgtgattgcttctt

SEQ ID NO: 183310 - DNA, 33 bp, Homo sapien
taaagcccaatagatgtactgtgattgcttctt

SEQ ID NO: 183311 - DNA, 33 bp, Homo sapien
attagtcatatgttctaaaaatataccatgtag

SEQ ID NO: 183312 - DNA, 33 bp, Homo sapien
attagtcatatgttctgaaaatataccatgtag

SEQ ID NO: 183313 - DNA, 33 bp, Homo sapien
gaagtaatgattggaaaaaaattcagtcatttt

SEQ ID NO: 183314 - DNA, 33 bp, Homo sapien
gaagtaatgattggaagaaaattcagtcatttt

SEQ ID NO: 183315 - DNA, 33 bp, Homo sapien
ggcattgaatcagacaccttttttgcagtacat

SEQ ID NO: 183316 - DNA, 33 bp, Homo sapien
ggcattgaatcagacatcttttttgcagtacat

SEQ ID NO: 183317 - DNA, 33 bp, Homo sapien
gcccttagtctccggagaacaagcacaggttta

SEQ ID NO: 183318 - DNA, 33 bp, Homo sapien
gcccttagtctccggataacaagcacaggttta

SEQ ID NO: 183319 - DNA, 33 bp, Homo sapien
aaagtcttcattctacacctagattatttttgg

SEQ ID NO: 183320 - DNA, 33 bp, Homo sapien
aaagtcttcattctacgcctagattatttttgg

SEQ ID NO: 183321 - DNA, 33 bp, Homo sapien
gccattctcctgaagcaatggccagcttgataa

SEQ ID NO: 183322 - DNA, 33 bp, Homo sapien
gccattctcctgaagcgatggccagcttgataa

SEQ ID NO: 183323 - DNA, 33 bp, Homo sapien
gagctcaactcacatacgtctctaaggcaagca

SEQ ID NO: 183324 - DNA, 33 bp, Homo sapien
gagctcaactcacatatgtctctaaggcaagca

SEQ ID NO: 183325 - DNA, 33 bp, Homo sapien
gtagcagcaggcattaacagacatttaattgtg

SEQ ID NO: 183326 - DNA, 33 bp, Homo sapien
gtagcagcaggcattaccagacatttaattgtg

SEQ ID NO: 183327 - DNA, 33 bp, Homo sapien
attccaggtaactccaaagtggtataatattct

SEQ ID NO: 183328 - DNA, 33 bp, Homo sapien
attccaggtaactccagagtggtataatattct

SEQ ID NO: 183329 - DNA, 33 bp, Homo sapien
tctgctcctaaccctaactttgtcacctgtgaa

SEQ ID NO: 183330 - DNA, 33 bp, Homo sapien
tctgctcctaaccctatctttgtcacctgtgaa

SEQ ID NO: 183331 - DNA, 33 bp, Homo sapien
ttgccatgcacgtgcacatgtttgaaggggtac

SEQ ID NO: 183332 - DNA, 33 bp, Homo sapien
ttgccatgcacgtgcagatgtttgaaggggtac

SEQ ID NO: 183333 - DNA, 33 bp, Homo sapien
ggaactaacttcagaactgctttgagtccatgt

SEQ ID NO: 183334 - DNA, 33 bp, Homo sapien
ggaactaacttcagaattgctttgagtccatgt

SEQ ID NO: 183335 - DNA, 33 bp, Homo sapien
gcagttacaaactgaaaagacattcaagaaaat

SEQ ID NO: 183336 - DNA, 33 bp, Homo sapien
gcagttacaaactgaacagacattcaagaaaat

SEQ ID NO: 183337 - DNA, 33 bp, Homo sapien
ctttagagtaagaaaaaatgatagttgaggata

SEQ ID NO: 183338 - DNA, 33 bp, Homo sapien
ctttagagtaagaaaagatgatagttgaggata

SEQ ID NO: 183339 - DNA, 33 bp, Homo sapien
ggaagccaaagaatcaaattttcaagaatgaaa

SEQ ID NO: 183340 - DNA, 33 bp, Homo sapien
ggaagccaaagaatcagattttcaagaatgaaa

SEQ ID NO: 183341 - DNA, 33 bp, Homo sapien
tgttttacatgactaaatatgccaagttgacga

SEQ ID NO: 183342 - DNA, 33 bp, Homo sapien
tgttttacatgactaattatgccaagttgacga

SEQ ID NO: 183343 - DNA, 33 bp, Homo sapien
tttgatgttaggctagaaagtagaaaactactt

SEQ ID NO: 183344 - DNA, 33 bp, Homo sapien
tttgatgttaggctaggaagtagaaaactactt

SEQ ID NO: 183345 - DNA, 33 bp, Homo sapien
ctttgcagtggtaccaggtttagggtaaatttg

SEQ ID NO: 183346 - DNA, 33 bp, Homo sapien
ctttgcagtggtaccatgtttagggtaaatttg

SEQ ID NO: 183347 - DNA, 33 bp, Homo sapien
atatctttacagtccacggaaaagtaaaatgct

SEQ ID NO: 183348 - DNA, 33 bp, Homo sapien
atatctttacagtccatggaaaagtaaaatgct

SEQ ID NO: 183349 - DNA, 33 bp, Homo sapien
ttttggttgtgtggagcatggtagttggagata

SEQ ID NO: 183350 - DNA, 33 bp, Homo sapien
ttttggttgtgtggaggatggtagttggagata

SEQ ID NO: 183351 - DNA, 33 bp, Homo sapien
tgaccaaggccttgtgaaagagccaacacttta

SEQ ID NO: 183352 - DNA, 33 bp, Homo sapien
tgaccaaggccttgtggaagagccaacacttta

SEQ ID NO: 183353 - DNA, 33 bp, Homo sapien
ggcaataattttgagcagcacatacattggcca

SEQ ID NO: 183354 - DNA, 33 bp, Homo sapien
ggcaataattttgagcggcacatacattggcca

SEQ ID NO: 183355 - DNA, 33 bp, Homo sapien
atgtcatttattagaaacaacaatgtggtatag

SEQ ID NO: 183356 - DNA, 33 bp, Homo sapien
atgtcatttattagaatcaacaatgtggtatag

SEQ ID NO: 183357 - DNA, 33 bp, Homo sapien
cattgtcatagcaacccagattcccccacagtt

SEQ ID NO: 183358 - DNA, 33 bp, Homo sapien
cattgtcatagcaacctagattcccccacagtt

SEQ ID NO: 183359 - DNA, 33 bp, Homo sapien
aagagaatgatggatacgtattgactccggaca

SEQ ID NO: 183360 - DNA, 33 bp, Homo sapien
aagagaatgatggatatgtattgactccggaca

SEQ ID NO: 183361 - DNA, 33 bp, Homo sapien
tgcacctacaagacaaagcgctacttcattcaa

SEQ ID NO: 183362 - DNA, 33 bp, Homo sapien
tgcacctacaagacaaggcgctacttcattcaa

SEQ ID NO: 183363 - DNA, 33 bp, Homo sapien
actttgtgaaaggaacaagtgtctacctgaccc

SEQ ID NO: 183364 - DNA, 33 bp, Homo sapien
actttgtgaaaggaaccagtgtctacctgaccc

SEQ ID NO: 183365 - DNA, 33 bp, Homo sapien
cgtgatcaactatgcactctgaaaatttattca

SEQ ID NO: 183366 - DNA, 33 bp, Homo sapien
cgtgatcaactatgcattctgaaaatttattca

SEQ ID NO: 183367 - DNA, 33 bp, Homo sapien
aaaaagtattctgtcacgtgtcaacaaagtggc

SEQ ID NO: 183368 - DNA, 33 bp, Homo sapien
aaaaagtattctgtcatgtgtcaacaaagtggc

SEQ ID NO: 183369 - DNA, 33 bp, Homo sapien
taaagaattgactcacaacttgtttttattctt

SEQ ID NO: 183370 - DNA, 33 bp, Homo sapien
taaagaattgactcacgacttgtttttattctt

SEQ ID NO: 183371 - DNA, 33 bp, Homo sapien
aagggatacatacaaacgatattaagctgcttg

SEQ ID NO: 183372 - DNA, 33 bp, Homo sapien
aagggatacatacaaaggatattaagctgcttg

SEQ ID NO: 183373 - DNA, 33 bp, Homo sapien
aataacttttggccaccagaatacaatgtgtat

SEQ ID NO: 183374 - DNA, 33 bp, Homo sapien
aataacttttggccactagaatacaatgtgtat

SEQ ID NO: 183375 - DNA, 33 bp, Homo sapien
aggttcagtaggcagaaagaggattgacattta

SEQ ID NO: 183376 - DNA, 33 bp, Homo sapien
aggttcagtaggcagagagaggattgacattta

SEQ ID NO: 183377 - DNA, 33 bp, Homo sapien
ccagcagaaggtaagaaagtagcacttggagta

SEQ ID NO: 183378 - DNA, 33 bp, Homo sapien
ccagcagaaggtaagagagtagcacttggagta

SEQ ID NO: 183379 - DNA, 33 bp, Homo sapien
attcactggccattggaatggtttttcctttaa

SEQ ID NO: 183380 - DNA, 33 bp, Homo sapien
attcactggccattggcatggtttttcctttaa

SEQ ID NO: 183381 - DNA, 33 bp, Homo sapien
aagctaagactagaggaaggaggccaccttaca

SEQ ID NO: 183382 - DNA, 33 bp, Homo sapien
aagctaagactagagggaggaggccaccttaca

SEQ ID NO: 183383 - DNA, 33 bp, Homo sapien
tgtttataaatgcagaaactgtttgtaaatgca

SEQ ID NO: 183384 - DNA, 33 bp, Homo sapien
tgtttataaatgcagagactgtttgtaaatgca

SEQ ID NO: 183385 - DNA, 33 bp, Homo sapien
aaaacttttcctggaccagtaaagaaatgtagt

SEQ ID NO: 183386 - DNA, 33 bp, Homo sapien
aaaacttttcctggactagtaaagaaatgtagt

SEQ ID NO: 183387 - DNA, 33 bp, Homo sapien
tgtgctctgcaaaatcacacagtaaaaaccaag

SEQ ID NO: 183388 - DNA, 33 bp, Homo sapien
tgtgctctgcaaaatcgcacagtaaaaaccaag

SEQ ID NO: 183389 - DNA, 33 bp, Homo sapien
tcaaaagtgaagactacaaaagatgattagata

SEQ ID NO: 183390 - DNA, 33 bp, Homo sapien
tcaaaagtgaagactagaaaagatgattagata

SEQ ID NO: 183391 - DNA, 33 bp, Homo sapien
tcaaccaattatatcccgatcaacttgaacaac

SEQ ID NO: 183392 - DNA, 33 bp, Homo sapien
tcaaccaattatatcctgatcaacttgaacaac

SEQ ID NO: 183393 - DNA, 33 bp, Homo sapien
cactttgtatttttcccatcattcagtgttata

SEQ ID NO: 183394 - DNA, 33 bp, Homo sapien
cactttgtatttttcctatcattcagtgttata

SEQ ID NO: 183395 - DNA, 33 bp, Homo sapien
tattccttccatcagcgccaacaacattgatgc

SEQ ID NO: 183396 - DNA, 33 bp, Homo sapien
tattccttccatcagctccaacaacattgatgc

SEQ ID NO: 183397 - DNA, 33 bp, Homo sapien
taactgaagactgacaacaggaatttgaggatg

SEQ ID NO: 183398 - DNA, 33 bp, Homo sapien
taactgaagactgacaccaggaatttgaggatg

SEQ ID NO: 183399 - DNA, 33 bp, Homo sapien
atctggagaattctgactatgttacaggacttg

SEQ ID NO: 183400 - DNA, 33 bp, Homo sapien
atctggagaattctgattatgttacaggacttg

SEQ ID NO: 183401 - DNA, 33 bp, Homo sapien
ctcctgacttagacaccgaatgtattcaaaatt

SEQ ID NO: 183402 - DNA, 33 bp, Homo sapien
ctcctgacttagacactgaatgtattcaaaatt

SEQ ID NO: 183403 - DNA, 33 bp, Homo sapien
tctcactctttacagacgcatttattctgccaa

SEQ ID NO: 183404 - DNA, 33 bp, Homo sapien
tctcactctttacagatgcatttattctgccaa

SEQ ID NO: 183405 - DNA, 33 bp, Homo sapien
aagtattgcaaatgaaatgttctgtgtgctctg

SEQ ID NO: 183406 - DNA, 33 bp, Homo sapien
aagtattgcaaatgaattgttctgtgtgctctg

SEQ ID NO: 183407 - DNA, 33 bp, Homo sapien
gttgtctcattcttcaatcgaaatgtggggatg

SEQ ID NO: 183408 - DNA, 33 bp, Homo sapien
gttgtctcattcttcagtcgaaatgtggggatg

SEQ ID NO: 183409 - DNA, 33 bp, Homo sapien
aaagctaagtttgaaaataggctccacattcta

SEQ ID NO: 183410 - DNA, 33 bp, Homo sapien
aaagctaagtttgaaagtaggctccacattcta

SEQ ID NO: 183411 - DNA, 33 bp, Homo sapien
tttagatgtgtgagagaaaggtatactgcagtt

SEQ ID NO: 183412 - DNA, 33 bp, Homo sapien
tttagatgtgtgagagcaaggtatactgcagtt

SEQ ID NO: 183413 - DNA, 33 bp, Homo sapien
agattaccaaaactaccagatgattgcttcata

SEQ ID NO: 183414 - DNA, 33 bp, Homo sapien
agattaccaaaactacgagatgattgcttcata

SEQ ID NO: 183415 - DNA, 33 bp, Homo sapien
aatgtcttgaactgaaagtgattaaaagttgaa

SEQ ID NO: 183416 - DNA, 33 bp, Homo sapien
aatgtcttgaactgaaggtgattaaaagttgaa

SEQ ID NO: 183417 - DNA, 33 bp, Homo sapien
caaagcactggcaaaaacccaagtcactacctt

SEQ ID NO: 183418 - DNA, 33 bp, Homo sapien
caaagcactggcaaaaccccaagtcactacctt

SEQ ID NO: 183419 - DNA, 33 bp, Homo sapien
gtggtagtgtccttcagatgctcacaggaaggt

SEQ ID NO: 183420 - DNA, 33 bp, Homo sapien
gtggtagtgtccttcatatgctcacaggaaggt

SEQ ID NO: 183421 - DNA, 33 bp, Homo sapien
tatttttctgcttagcacttgataataatcaag

SEQ ID NO: 183422 - DNA, 33 bp, Homo sapien
tatttttctgcttagcgcttgataataatcaag

SEQ ID NO: 183423 - DNA, 33 bp, Homo sapien
ttatcagagtttgtggcaaatcagtcaaactta

SEQ ID NO: 183424 - DNA, 33 bp, Homo sapien
ttatcagagtttgtggtaaatcagtcaaactta

SEQ ID NO: 183425 - DNA, 33 bp, Homo sapien
ggaccactctttaagacagattgaactggaaca

SEQ ID NO: 183426 - DNA, 33 bp, Homo sapien
ggaccactctttaagatagattgaactggaaca

SEQ ID NO: 183427 - DNA, 33 bp, Homo sapien
tagtctctaaagctcaacaaagaaatccatgtg

SEQ ID NO: 183428 - DNA, 33 bp, Homo sapien
tagtctctaaagctcagcaaagaaatccatgtg

SEQ ID NO: 183429 - DNA, 33 bp, Homo sapien
atattttatcagcaagacaactgaaatacaaag

SEQ ID NO: 183430 - DNA, 33 bp, Homo sapien
atattttatcagcaaggcaactgaaatacaaag

SEQ ID NO: 183431 - DNA, 33 bp, Homo sapien
gacttcaaacatagtgaacattcaataaacgat

SEQ ID NO: 183432 - DNA, 33 bp, Homo sapien
gacttcaaacatagtggacattcaataaacgat

SEQ ID NO: 183433 - DNA, 33 bp, Homo sapien
agcatttagaagcagaaaaaagtagattagcac

SEQ ID NO: 183434 - DNA, 33 bp, Homo sapien
agcatttagaagcagagaaaagtagattagcac

SEQ ID NO: 183435 - DNA, 33 bp, Homo sapien
tttccaagacctaatccactggctcgttagtga

SEQ ID NO: 183436 - DNA, 33 bp, Homo sapien
tttccaagacctaatctactggctcgttagtga

SEQ ID NO: 183437 - DNA, 33 bp, Homo sapien
gcattaaagttgtaaaatgcctggctcatgaaa

SEQ ID NO: 183438 - DNA, 33 bp, Homo sapien
gcattaaagttgtaaattgcctggctcatgaaa

SEQ ID NO: 183439 - DNA, 33 bp, Homo sapien
tttttgtctcatatacaggtgttttatctaagc

SEQ ID NO: 183440 - DNA, 33 bp, Homo sapien
tttttgtctcatatacgggtgttttatctaagc

SEQ ID NO: 183441 - DNA, 33 bp, Homo sapien
gaatttgacaaaggtgaattagctactaggtta

SEQ ID NO: 183442 - DNA, 33 bp, Homo sapien
gaatttgacaaaggtggattagctactaggtta

SEQ ID NO: 183443 - DNA, 33 bp, Homo sapien
ccaccactttgcctcacgggctgggaagtttca

SEQ ID NO: 183444 - DNA, 33 bp, Homo sapien
ccaccactttgcctcatgggctgggaagtttca

SEQ ID NO: 183445 - DNA, 33 bp, Homo sapien
acactaccctcttgtcactgggcttttaaaaat

SEQ ID NO: 183446 - DNA, 33 bp, Homo sapien
acactaccctcttgtcgctgggcttttaaaaat

SEQ ID NO: 183447 - DNA, 33 bp, Homo sapien
gtcccttgcaagacaactgatttgaccactagc

SEQ ID NO: 183448 - DNA, 33 bp, Homo sapien
gtcccttgcaagacaagtgatttgaccactagc

SEQ ID NO: 183449 - DNA, 33 bp, Homo sapien
cttcattcattttaaacgtgagaaaaggccaag

SEQ ID NO: 183450 - DNA, 33 bp, Homo sapien
cttcattcattttaaatgtgagaaaaggccaag

SEQ ID NO: 183451 - DNA, 33 bp, Homo sapien
tttggactccaagttgaaagtaactggatttaa

SEQ ID NO: 183452 - DNA, 33 bp, Homo sapien
tttggactccaagttggaagtaactggatttaa

SEQ ID NO: 183453 - DNA, 33 bp, Homo sapien
attttgaaattcttgacgcttttgcaaaaacaa

SEQ ID NO: 183454 - DNA, 33 bp, Homo sapien
attttgaaattcttgatgcttttgcaaaaacaa

SEQ ID NO: 183455 - DNA, 33 bp, Homo sapien
ttaggaccaaaagagaataaaacaatctgtgaa

SEQ ID NO: 183456 - DNA, 33 bp, Homo sapien
ttaggaccaaaagagagtaaaacaatctgtgaa

SEQ ID NO: 183457 - DNA, 33 bp, Homo sapien
tgcactggattttcataacttagtaggcaaata

SEQ ID NO: 183458 - DNA, 33 bp, Homo sapien
tgcactggattttcatgacttagtaggcaaata

SEQ ID NO: 183459 - DNA, 33 bp, Homo sapien
atattgagacttattaaatggaaccactggatt

SEQ ID NO: 183460 - DNA, 33 bp, Homo sapien
atattgagacttattagatggaaccactggatt

SEQ ID NO: 183461 - DNA, 33 bp, Homo sapien
acatggtgagcttttacagcctgtaatatacta

SEQ ID NO: 183462 - DNA, 33 bp, Homo sapien
acatggtgagcttttatagcctgtaatatacta

SEQ ID NO: 183463 - DNA, 33 bp, Homo sapien
atgcagtaggggtaaacgatcataactgcatct

SEQ ID NO: 183464 - DNA, 33 bp, Homo sapien
atgcagtaggggtaaaggatcataactgcatct

SEQ ID NO: 183465 - DNA, 33 bp, Homo sapien
ttccatattattttaacgggcctacttgtgtac

SEQ ID NO: 183466 - DNA, 33 bp, Homo sapien
ttccatattattttaatgggcctacttgtgtac

SEQ ID NO: 183467 - DNA, 33 bp, Homo sapien
ttttcttcagagaaacggtggtaggatcagtgc

SEQ ID NO: 183468 - DNA, 33 bp, Homo sapien
ttttcttcagagaaactgtggtaggatcagtgc

SEQ ID NO: 183469 - DNA, 33 bp, Homo sapien
ggttaccagctgaagacagtttctttgaaataa

SEQ ID NO: 183470 - DNA, 33 bp, Homo sapien
ggttaccagctgaagatagtttctttgaaataa

SEQ ID NO: 183471 - DNA, 33 bp, Homo sapien
tagaagatttgtttcacgtaagctcactagggt

SEQ ID NO: 183472 - DNA, 33 bp, Homo sapien
tagaagatttgtttcatgtaagctcactagggt

SEQ ID NO: 183473 - DNA, 33 bp, Homo sapien
aatggcattatggcagacctggtaattgcaact

SEQ ID NO: 183474 - DNA, 33 bp, Homo sapien
aatggcattatggcagtcctggtaattgcaact

SEQ ID NO: 183475 - DNA, 33 bp, Homo sapien
cagaagtgtgttcttacgcagtaatatagtggt

SEQ ID NO: 183476 - DNA, 33 bp, Homo sapien
cagaagtgtgttcttatgcagtaatatagtggt

SEQ ID NO: 183477 - DNA, 33 bp, Homo sapien
aatacgtgaataatctaaaacagtgatgtatta

SEQ ID NO: 183478 - DNA, 33 bp, Homo sapien
aatacgtgaataatctgaaacagtgatgtatta

SEQ ID NO: 183479 - DNA, 33 bp, Homo sapien
acagttatggctgctccaaaatgaaaaactaca

SEQ ID NO: 183480 - DNA, 33 bp, Homo sapien
acagttatggctgctctaaaatgaaaaactaca

SEQ ID NO: 183481 - DNA, 33 bp, Homo sapien
ctaggattttgattggaattagatttaacctat

SEQ ID NO: 183482 - DNA, 33 bp, Homo sapien
ctaggattttgattgggattagatttaacctat

SEQ ID NO: 183483 - DNA, 33 bp, Homo sapien
aagagagattgattaaagtcataaatttctctt

SEQ ID NO: 183484 - DNA, 33 bp, Homo sapien
aagagagattgattaaggtcataaatttctctt

SEQ ID NO: 183485 - DNA, 33 bp, Homo sapien
atagtgatagggtctgaactaaaatctggataa

SEQ ID NO: 183486 - DNA, 33 bp, Homo sapien
atagtgatagggtctggactaaaatctggataa

SEQ ID NO: 183487 - DNA, 33 bp, Homo sapien
ttgcagactatgtcaacataaaatttccttcaa

SEQ ID NO: 183488 - DNA, 33 bp, Homo sapien
ttgcagactatgtcaatataaaatttccttcaa

SEQ ID NO: 183489 - DNA, 33 bp, Homo sapien
caggtcttaaacattaactgaaatggttaaaga

SEQ ID NO: 183490 - DNA, 33 bp, Homo sapien
caggtcttaaacattagctgaaatggttaaaga

SEQ ID NO: 183491 - DNA, 33 bp, Homo sapien
aatgaaaagcaacagacattataaccaactaaa

SEQ ID NO: 183492 - DNA, 33 bp, Homo sapien
aatgaaaagcaacagatattataaccaactaaa

SEQ ID NO: 183493 - DNA, 33 bp, Homo sapien
ggaccagttacatggacatcaagaagaagagag

SEQ ID NO: 183494 - DNA, 33 bp, Homo sapien
ggaccagttacatggatatcaagaagaagagag

SEQ ID NO: 183495 - DNA, 33 bp, Homo sapien
ttcattatttttcaatcaggctcttttagtggg

SEQ ID NO: 183496 - DNA, 33 bp, Homo sapien
ttcattatttttcaatgaggctcttttagtggg

SEQ ID NO: 183497 - DNA, 33 bp, Homo sapien
tacttagcttccctaaaccttgttgtgcccctc

SEQ ID NO: 183498 - DNA, 33 bp, Homo sapien
tacttagcttccctaagccttgttgtgcccctc

SEQ ID NO: 183499 - DNA, 33 bp, Homo sapien
gaagatggattatgcaatgagactcagtttatg

SEQ ID NO: 183500 - DNA, 33 bp, Homo sapien
gaagatggattatgcagtgagactcagtttatg

SEQ ID NO: 183501 - DNA, 33 bp, Homo sapien
ggactgggcgatgcttaaagactgaggatggtg

SEQ ID NO: 183502 - DNA, 33 bp, Homo sapien
ggactgggcgatgcttgaagactgaggatggtg

SEQ ID NO: 183503 - DNA, 33 bp, Homo sapien
ttcaattacttttcaaatggtctcagaagccaa

SEQ ID NO: 183504 - DNA, 33 bp, Homo sapien
ttcaattacttttcaagtggtctcagaagccaa

SEQ ID NO: 183505 - DNA, 33 bp, Homo sapien
ataaccatcacaatacaaaagcaggttttaagt

SEQ ID NO: 183506 - DNA, 33 bp, Homo sapien
ataaccatcacaatactaaagcaggttttaagt

SEQ ID NO: 183507 - DNA, 33 bp, Homo sapien
gctcagtgccagagataaattggacagccttat

SEQ ID NO: 183508 - DNA, 33 bp, Homo sapien
gctcagtgccagagatgaattggacagccttat

SEQ ID NO: 183509 - DNA, 33 bp, Homo sapien
gcagagttttgaaggacgagttggaaactgttg

SEQ ID NO: 183510 - DNA, 33 bp, Homo sapien
gcagagttttgaaggatgagttggaaactgttg

SEQ ID NO: 183511 - DNA, 33 bp, Homo sapien
cttctcatgacttcagcatagcccagtggctga

SEQ ID NO: 183512 - DNA, 33 bp, Homo sapien
cttctcatgacttcagtatagcccagtggctga

SEQ ID NO: 183513 - DNA, 33 bp, Homo sapien
tgctataaaataggtacgcttgttatcttcatt

SEQ ID NO: 183514 - DNA, 33 bp, Homo sapien
tgctataaaataggtatgcttgttatcttcatt

SEQ ID NO: 183515 - DNA, 33 bp, Homo sapien
atcaaaacttcatgaaaatttctcaaggtgaca

SEQ ID NO: 183516 - DNA, 33 bp, Homo sapien
atcaaaacttcatgaacatttctcaaggtgaca

SEQ ID NO: 183517 - DNA, 33 bp, Homo sapien
cccagtaagatcactcaattggagctgtcattc

SEQ ID NO: 183518 - DNA, 33 bp, Homo sapien
cccagtaagatcactctattggagctgtcattc

SEQ ID NO: 183519 - DNA, 33 bp, Homo sapien
cacatcaggtgaggtacacaaattaacaatctc

SEQ ID NO: 183520 - DNA, 33 bp, Homo sapien
cacatcaggtgaggtatacaaattaacaatctc

SEQ ID NO: 183521 - DNA, 33 bp, Homo sapien
ctagtatgttggcttacgagaaatgggcatcct

SEQ ID NO: 183522 - DNA, 33 bp, Homo sapien
ctagtatgttggcttatgagaaatgggcatcct

SEQ ID NO: 183523 - DNA, 33 bp, Homo sapien
tgctggttgcgaattacggaggcctcttgaaga

SEQ ID NO: 183524 - DNA, 33 bp, Homo sapien
tgctggttgcgaattatggaggcctcttgaaga

SEQ ID NO: 183525 - DNA, 33 bp, Homo sapien
ctgaatagtggcttcaaaaagatatgtccaagc

SEQ ID NO: 183526 - DNA, 33 bp, Homo sapien
ctgaatagtggcttcacaaagatatgtccaagc

SEQ ID NO: 183527 - DNA, 33 bp, Homo sapien
gttgtggctgaatggcaaaccttcatttaggtg

SEQ ID NO: 183528 - DNA, 33 bp, Homo sapien
gttgtggctgaatggcgaaccttcatttaggtg

SEQ ID NO: 183529 - DNA, 33 bp, Homo sapien
aggaacacgccagttacaagttgtggctgaatg

SEQ ID NO: 183530 - DNA, 33 bp, Homo sapien
aggaacacgccagttataagttgtggctgaatg

SEQ ID NO: 183531 - DNA, 33 bp, Homo sapien
tgttatatgtgtttgaaatcaggtgcgccgttc

SEQ ID NO: 183532 - DNA, 33 bp, Homo sapien
tgttatatgtgtttgagatcaggtgcgccgttc

SEQ ID NO: 183533 - DNA, 33 bp, Homo sapien
tcaaaaatagatggtaataatatggccacaaag

SEQ ID NO: 183534 - DNA, 33 bp, Homo sapien
tcaaaaatagatggtactaatatggccacaaag

SEQ ID NO: 183535 - DNA, 33 bp, Homo sapien
aaaggcctccgagttacgaataattaataaata

SEQ ID NO: 183536 - DNA, 33 bp, Homo sapien
aaaggcctccgagttatgaataattaataaata

SEQ ID NO: 183537 - DNA, 33 bp, Homo sapien
gaaggtctctttcagaccaagtggcctgcagat

SEQ ID NO: 183538 - DNA, 33 bp, Homo sapien
gaaggtctctttcagatcaagtggcctgcagat

SEQ ID NO: 183539 - DNA, 33 bp, Homo sapien
tttcatgtatttgttaagcctaccagatatcag

SEQ ID NO: 183540 - DNA, 33 bp, Homo sapien
tttcatgtatttgttaggcctaccagatatcag

SEQ ID NO: 183541 - DNA, 33 bp, Homo sapien
tgacttttagccattccaggatctctgttttca

SEQ ID NO: 183542 - DNA, 33 bp, Homo sapien
tgacttttagccattctaggatctctgttttca

SEQ ID NO: 183543 - DNA, 33 bp, Homo sapien
aatgtgtatgcttatacaaggaccttttcccca

SEQ ID NO: 183544 - DNA, 33 bp, Homo sapien
aatgtgtatgcttatataaggaccttttcccca

SEQ ID NO: 183545 - DNA, 33 bp, Homo sapien
aacgaaaagtaaattaactgagcattgacaagt

SEQ ID NO: 183546 - DNA, 33 bp, Homo sapien
aacgaaaagtaaattacctgagcattgacaagt

SEQ ID NO: 183547 - DNA, 33 bp, Homo sapien
aacaactaacagcataacattccataaggagtt

SEQ ID NO: 183548 - DNA, 33 bp, Homo sapien
aacaactaacagcatatcattccataaggagtt

SEQ ID NO: 183549 - DNA, 33 bp, Homo sapien
aagaagggttactctacgatcccgtcctaccta

SEQ ID NO: 183550 - DNA, 33 bp, Homo sapien
aagaagggttactctatgatcccgtcctaccta

SEQ ID NO: 183551 - DNA, 33 bp, Homo sapien
actatttccagatggacaaaatcgctagcactt

SEQ ID NO: 183552 - DNA, 33 bp, Homo sapien
actatttccagatggataaaatcgctagcactt

SEQ ID NO: 183553 - DNA, 33 bp, Homo sapien
cttaaaaaatgtggtgaactggcctagccaaca

SEQ ID NO: 183554 - DNA, 33 bp, Homo sapien
cttaaaaaatgtggtggactggcctagccaaca

SEQ ID NO: 183555 - DNA, 33 bp, Homo sapien
gacttctgatgtgtgacgcttcagctagacagt

SEQ ID NO: 183556 - DNA, 33 bp, Homo sapien
gacttctgatgtgtgatgcttcagctagacagt

SEQ ID NO: 183557 - DNA, 33 bp, Homo sapien
tagcttaaatttaatacgcaaatggtcacccta

SEQ ID NO: 183558 - DNA, 33 bp, Homo sapien
tagcttaaatttaatatgcaaatggtcacccta

SEQ ID NO: 183559 - DNA, 33 bp, Homo sapien
gctttttagtttcctacggccaatatgacaagt

SEQ ID NO: 183560 - DNA, 33 bp, Homo sapien
gctttttagtttcctagggccaatatgacaagt

SEQ ID NO: 183561 - DNA, 33 bp, Homo sapien
gatatgatgacagtaaactttgcaatgcactga

SEQ ID NO: 183562 - DNA, 33 bp, Homo sapien
gatatgatgacagtaacctttgcaatgcactga

SEQ ID NO: 183563 - DNA, 33 bp, Homo sapien
ttttgttgttaaagagccaattcttatcagcat

SEQ ID NO: 183564 - DNA, 33 bp, Homo sapien
ttttgttgttaaagaggcaattcttatcagcat

SEQ ID NO: 183565 - DNA, 33 bp, Homo sapien
acagccaattgtcaaaaggctactgttcacaaa

SEQ ID NO: 183566 - DNA, 33 bp, Homo sapien
acagccaattgtcaaatggctactgttcacaaa

SEQ ID NO: 183567 - DNA, 33 bp, Homo sapien
tgtttggtccattgacagcaataaaggaacgtt

SEQ ID NO: 183568 - DNA, 33 bp, Homo sapien
tgtttggtccattgacggcaataaaggaacgtt

SEQ ID NO: 183569 - DNA, 33 bp, Homo sapien
taaactagtcactttacgtactttcaattactg

SEQ ID NO: 183570 - DNA, 33 bp, Homo sapien
taaactagtcactttatgtactttcaattactg

SEQ ID NO: 183571 - DNA, 33 bp, Homo sapien
cacacacacaagccgcccaaagaatgttggctc

SEQ ID NO: 183572 - DNA, 33 bp, Homo sapien
cacacacacaagccgcgcaaagaatgttggctc

SEQ ID NO: 183573 - DNA, 33 bp, Homo sapien
ttagtcaagctgaggacgggggcaaatgttcta

SEQ ID NO: 183574 - DNA, 33 bp, Homo sapien
ttagtcaagctgaggatgggggcaaatgttcta

SEQ ID NO: 183575 - DNA, 33 bp, Homo sapien
cagagtgcgaacaaagaagatgaaaatgtcttt

SEQ ID NO: 183576 - DNA, 33 bp, Homo sapien
cagagtgcgaacaaaggagatgaaaatgtcttt

SEQ ID NO: 183577 - DNA, 33 bp, Homo sapien
catggcaaatttaaaactaagagctgcaactgg

SEQ ID NO: 183578 - DNA, 33 bp, Homo sapien
catggcaaatttaaaattaagagctgcaactgg

SEQ ID NO: 183579 - DNA, 33 bp, Homo sapien
aaaatatcatatgttaaccctagtgatgaagag

SEQ ID NO: 183580 - DNA, 33 bp, Homo sapien
aaaatatcatatgttacccctagtgatgaagag

SEQ ID NO: 183581 - DNA, 33 bp, Homo sapien
caatgtgactcagagcaatgtgctgccctttat

SEQ ID NO: 183582 - DNA, 33 bp, Homo sapien
caatgtgactcagagcgatgtgctgccctttat

SEQ ID NO: 183583 - DNA, 33 bp, Homo sapien
ggcagagacggtgatacaccattgccttcagca

SEQ ID NO: 183584 - DNA, 33 bp, Homo sapien
ggcagagacggtgatataccattgccttcagca

SEQ ID NO: 183585 - DNA, 33 bp, Homo sapien
atgaaagagctttgcaacacattctttctttaa

SEQ ID NO: 183586 - DNA, 33 bp, Homo sapien
atgaaagagctttgcagcacattctttctttaa

SEQ ID NO: 183587 - DNA, 33 bp, Homo sapien
gtgttctgactttccccatattgagagaggctt

SEQ ID NO: 183588 - DNA, 33 bp, Homo sapien
gtgttctgactttccctatattgagagaggctt

SEQ ID NO: 183589 - DNA, 33 bp, Homo sapien
catcatttttgaagacaggtaaatggttttgtg

SEQ ID NO: 183590 - DNA, 33 bp, Homo sapien
catcatttttgaagacgggtaaatggttttgtg

SEQ ID NO: 183591 - DNA, 33 bp, Homo sapien
agtgaattcggagcaacattatcaccactgcat

SEQ ID NO: 183592 - DNA, 33 bp, Homo sapien
agtgaattcggagcaatattatcaccactgcat

SEQ ID NO: 183593 - DNA, 33 bp, Homo sapien
cttcctattcaatcaccgagttttgcccattta

SEQ ID NO: 183594 - DNA, 33 bp, Homo sapien
cttcctattcaatcactgagttttgcccattta

SEQ ID NO: 183595 - DNA, 33 bp, Homo sapien
ggatagttcttcctcacggatgtcagaagctgg

SEQ ID NO: 183596 - DNA, 33 bp, Homo sapien
ggatagttcttcctcatggatgtcagaagctgg

SEQ ID NO: 183597 - DNA, 33 bp, Homo sapien
gagttcagccaacttaaagaaggaaactgttgt

SEQ ID NO: 183598 - DNA, 33 bp, Homo sapien
gagttcagccaacttatagaaggaaactgttgt

SEQ ID NO: 183599 - DNA, 33 bp, Homo sapien
ttatgtctcctgtagcacgtttaaagggatcaa

SEQ ID NO: 183600 - DNA, 33 bp, Homo sapien
ttatgtctcctgtagcgcgtttaaagggatcaa

SEQ ID NO: 183601 - DNA, 33 bp, Homo sapien
agtattccacattggacgaaagtgtggtgaaaa

SEQ ID NO: 183602 - DNA, 33 bp, Homo sapien
agtattccacattggatgaaagtgtggtgaaaa

SEQ ID NO: 183603 - DNA, 33 bp, Homo sapien
gtttgccagaagccaacttgccaaaaatcaatg

SEQ ID NO: 183604 - DNA, 33 bp, Homo sapien
gtttgccagaagccaatttgccaaaaatcaatg

SEQ ID NO: 183605 - DNA, 33 bp, Homo sapien
gaagggtcagctatcacggaaagaacctgctct

SEQ ID NO: 183606 - DNA, 33 bp, Homo sapien
gaagggtcagctatcatggaaagaacctgctct

SEQ ID NO: 183607 - DNA, 33 bp, Homo sapien
aattgctgtaaataggaattaggatccaattac

SEQ ID NO: 183608 - DNA, 33 bp, Homo sapien
aattgctgtaaatagggattaggatccaattac

SEQ ID NO: 183609 - DNA, 33 bp, Homo sapien
agctttgccttagacacacttaggatccctagg

SEQ ID NO: 183610 - DNA, 33 bp, Homo sapien
agctttgccttagacagacttaggatccctagg

SEQ ID NO: 183611 - DNA, 33 bp, Homo sapien
aatactgaagagtatgcacttaatccagtaatt

SEQ ID NO: 183612 - DNA, 33 bp, Homo sapien
aatactgaagagtatgtacttaatccagtaatt

SEQ ID NO: 183613 - DNA, 33 bp, Homo sapien
cttcaaggcctcgtcacccaatactgccacatt

SEQ ID NO: 183614 - DNA, 33 bp, Homo sapien
cttcaaggcctcgtcatccaatactgccacatt

SEQ ID NO: 183615 - DNA, 33 bp, Homo sapien
tattatttctgatgaaaactttcccttataaac

SEQ ID NO: 183616 - DNA, 33 bp, Homo sapien
tattatttctgatgaagactttcccttataaac

SEQ ID NO: 183617 - DNA, 33 bp, Homo sapien
attggagaattagcagcatgtaggtagtagatg

SEQ ID NO: 183618 - DNA, 33 bp, Homo sapien
attggagaattagcagtatgtaggtagtagatg

SEQ ID NO: 183619 - DNA, 33 bp, Homo sapien
agaggctcaaaacagaccattgttaataagtgg

SEQ ID NO: 183620 - DNA, 33 bp, Homo sapien
agaggctcaaaacagatcattgttaataagtgg

SEQ ID NO: 183621 - DNA, 33 bp, Homo sapien
gatattcttaaatgacaagacaatttcctttgg

SEQ ID NO: 183622 - DNA, 33 bp, Homo sapien
gatattcttaaatgacgagacaatttcctttgg

SEQ ID NO: 183623 - DNA, 33 bp, Homo sapien
gagtgacagatccaaactctacaacaatcagag

SEQ ID NO: 183624 - DNA, 33 bp, Homo sapien
gagtgacagatccaaagtctacaacaatcagag

SEQ ID NO: 183625 - DNA, 33 bp, Homo sapien
accctttgtggtgccaagaaagaagaaactgca

SEQ ID NO: 183626 - DNA, 33 bp, Homo sapien
accctttgtggtgccaggaaagaagaaactgca

SEQ ID NO: 183627 - DNA, 33 bp, Homo sapien
tcttgggacatggcaaacactaaaaaatgccag

SEQ ID NO: 183628 - DNA, 33 bp, Homo sapien
tcttgggacatggcaagcactaaaaaatgccag

SEQ ID NO: 183629 - DNA, 33 bp, Homo sapien
cctgctggtcatttgacatttattgtgaacatt

SEQ ID NO: 183630 - DNA, 33 bp, Homo sapien
cctgctggtcatttgagatttattgtgaacatt

SEQ ID NO: 183631 - DNA, 33 bp, Homo sapien
ggccatgacactgtagcagtttacagctctgct

SEQ ID NO: 183632 - DNA, 33 bp, Homo sapien
ggccatgacactgtagtagtttacagctctgct

SEQ ID NO: 183633 - DNA, 33 bp, Homo sapien
ggagtcatcaccactcagaaggccctggattat

SEQ ID NO: 183634 - DNA, 33 bp, Homo sapien
ggagtcatcaccactcggaaggccctggattat

SEQ ID NO: 183635 - DNA, 33 bp, Homo sapien
cagatgtagacaaagaaggttttccgccatcct

SEQ ID NO: 183636 - DNA, 33 bp, Homo sapien
cagatgtagacaaagagggttttccgccatcct

SEQ ID NO: 183637 - DNA, 33 bp, Homo sapien
aagattccaagaaaacaatgaagaatgtggtaa

SEQ ID NO: 183638 - DNA, 33 bp, Homo sapien
aagattccaagaaaacgatgaagaatgtggtaa

SEQ ID NO: 183639 - DNA, 33 bp, Homo sapien
ccaatctgtaagaatcaaaaatgcttgtctata

SEQ ID NO: 183640 - DNA, 33 bp, Homo sapien
ccaatctgtaagaatccaaaatgcttgtctata

SEQ ID NO: 183641 - DNA, 33 bp, Homo sapien
cctccttgacaggcacaattatgttgtccatca

SEQ ID NO: 183642 - DNA, 33 bp, Homo sapien
cctccttgacaggcacgattatgttgtccatca

SEQ ID NO: 183643 - DNA, 33 bp, Homo sapien
ctttctgaagacaaaccataatggagaatagaa

SEQ ID NO: 183644 - DNA, 33 bp, Homo sapien
ctttctgaagacaaactataatggagaatagaa

SEQ ID NO: 183645 - DNA, 33 bp, Homo sapien
aatatataatggcataaaaatatagttgcaggt

SEQ ID NO: 183646 - DNA, 33 bp, Homo sapien
aatatataatggcatagaaatatagttgcaggt

SEQ ID NO: 183647 - DNA, 33 bp, Homo sapien
actgttctgaaggccacagtgctgtgaacagat

SEQ ID NO: 183648 - DNA, 33 bp, Homo sapien
actgttctgaaggccatagtgctgtgaacagat

SEQ ID NO: 183649 - DNA, 33 bp, Homo sapien
gtccccccaaaaaatccaatgctgtgacattgt

SEQ ID NO: 183650 - DNA, 33 bp, Homo sapien
gtccccccaaaaaatctaatgctgtgacattgt

SEQ ID NO: 183651 - DNA, 33 bp, Homo sapien
acctggacacacaacaagtattccagagactct

SEQ ID NO: 183652 - DNA, 33 bp, Homo sapien
acctggacacacaacacgtattccagagactct

SEQ ID NO: 183653 - DNA, 33 bp, Homo sapien
gttacatcaacaaacacgaaccattccttccct

SEQ ID NO: 183654 - DNA, 33 bp, Homo sapien
gttacatcaacaaacatgaaccattccttccct

SEQ ID NO: 183655 - DNA, 33 bp, Homo sapien
ttctccaaactgcaaccaagaactttctgcaag

SEQ ID NO: 183656 - DNA, 33 bp, Homo sapien
ttctccaaactgcaactaagaactttctgcaag

SEQ ID NO: 183657 - DNA, 33 bp, Homo sapien
ccctggtgtgaatcaccgcatacagaccctagc

SEQ ID NO: 183658 - DNA, 33 bp, Homo sapien
ccctggtgtgaatcactgcatacagaccctagc

SEQ ID NO: 183659 - DNA, 33 bp, Homo sapien
ctggctctgtcattgactagctctgtagctctg

SEQ ID NO: 183660 - DNA, 33 bp, Homo sapien
ctggctctgtcattgagtagctctgtagctctg

SEQ ID NO: 183661 - DNA, 33 bp, Homo sapien
gcatcttcgacatccaccaatttggtaccacag

SEQ ID NO: 183662 - DNA, 33 bp, Homo sapien
gcatcttcgacatccatcaatttggtaccacag

SEQ ID NO: 183663 - DNA, 33 bp, Homo sapien
tagaattccatttaccaagattcaatttacaca

SEQ ID NO: 183664 - DNA, 33 bp, Homo sapien
tagaattccatttaccgagattcaatttacaca

SEQ ID NO: 183665 - DNA, 33 bp, Homo sapien
actctcaaactgaggcaatcttagtacattcag

SEQ ID NO: 183666 - DNA, 33 bp, Homo sapien
actctcaaactgaggctatcttagtacattcag

SEQ ID NO: 183667 - DNA, 33 bp, Homo sapien
gattctgccccaaccacctctaagcccaatcaa

SEQ ID NO: 183668 - DNA, 33 bp, Homo sapien
gattctgccccaaccatctctaagcccaatcaa

SEQ ID NO: 183669 - DNA, 33 bp, Homo sapien
attcttctctttcaccaaacagggtacattcaa

SEQ ID NO: 183670 - DNA, 33 bp, Homo sapien
attcttctctttcaccgaacagggtacattcaa

SEQ ID NO: 183671 - DNA, 33 bp, Homo sapien
tgggaagcagataagaaacagtgagatggacaa

SEQ ID NO: 183672 - DNA, 33 bp, Homo sapien
tgggaagcagataagatacagtgagatggacaa

SEQ ID NO: 183673 - DNA, 33 bp, Homo sapien
actcctctcgtcatcaagctcactatacatcta

SEQ ID NO: 183674 - DNA, 33 bp, Homo sapien
actcctctcgtcatcaggctcactatacatcta

SEQ ID NO: 183675 - DNA, 33 bp, Homo sapien
tggactctggactctacattcttaggtatttct

SEQ ID NO: 183676 - DNA, 33 bp, Homo sapien
tggactctggactctatattcttaggtatttct

SEQ ID NO: 183677 - DNA, 33 bp, Homo sapien
tgctttggcctgcggacaacaaggtgatggcaa

SEQ ID NO: 183678 - DNA, 33 bp, Homo sapien
tgctttggcctgcggagaacaaggtgatggcaa

SEQ ID NO: 183679 - DNA, 33 bp, Homo sapien
tggcacatacatgttcaaaaaatgagaaagaca

SEQ ID NO: 183680 - DNA, 33 bp, Homo sapien
tggcacatacatgttcgaaaaatgagaaagaca

SEQ ID NO: 183681 - DNA, 33 bp, Homo sapien
tgtaattactgaattacccatttttacattatt

SEQ ID NO: 183682 - DNA, 33 bp, Homo sapien
tgtaattactgaattatccatttttacattatt

SEQ ID NO: 183683 - DNA, 33 bp, Homo sapien
acctgacactgggtaactcgtaaagaaaagagg

SEQ ID NO: 183684 - DNA, 33 bp, Homo sapien
acctgacactgggtaattcgtaaagaaaagagg

SEQ ID NO: 183685 - DNA, 33 bp, Homo sapien
gggctacatttttcaccgagcctctggttgctt

SEQ ID NO: 183686 - DNA, 33 bp, Homo sapien
gggctacatttttcactgagcctctggttgctt

SEQ ID NO: 183687 - DNA, 33 bp, Homo sapien
gtattttagaaatagcaaaacataacaaagtga

SEQ ID NO: 183688 - DNA, 33 bp, Homo sapien
gtattttagaaatagctaaacataacaaagtga

SEQ ID NO: 183689 - DNA, 33 bp, Homo sapien
actcacacccacatacagtaggctattataacc

SEQ ID NO: 183690 - DNA, 33 bp, Homo sapien
actcacacccacatactgtaggctattataacc

SEQ ID NO: 183691 - DNA, 33 bp, Homo sapien
tctggctcgtgatccaaagtgagtggagattag

SEQ ID NO: 183692 - DNA, 33 bp, Homo sapien
tctggctcgtgatccagagtgagtggagattag

SEQ ID NO: 183693 - DNA, 33 bp, Homo sapien
tcatgaaaaatgatacaagcagttttcactata

SEQ ID NO: 183694 - DNA, 33 bp, Homo sapien
tcatgaaaaatgataccagcagttttcactata

SEQ ID NO: 183695 - DNA, 33 bp, Homo sapien
gttttacttttttaccacattatcaggctacaa

SEQ ID NO: 183696 - DNA, 33 bp, Homo sapien
gttttacttttttaccgcattatcaggctacaa

SEQ ID NO: 183697 - DNA, 33 bp, Homo sapien
tcttccctattcattgaaaagtctgtatttctc

SEQ ID NO: 183698 - DNA, 33 bp, Homo sapien
tcttccctattcattgcaaagtctgtatttctc

SEQ ID NO: 183699 - DNA, 33 bp, Homo sapien
taggatcaccagcagcagctctaagaaggaccc

SEQ ID NO: 183700 - DNA, 33 bp, Homo sapien
taggatcaccagcagcggctctaagaaggaccc

SEQ ID NO: 183701 - DNA, 33 bp, Homo sapien
gcacttagaaggaggacgtagccttgggtggac

SEQ ID NO: 183702 - DNA, 33 bp, Homo sapien
gcacttagaaggaggatgtagccttgggtggac

SEQ ID NO: 183703 - DNA, 33 bp, Homo sapien
cttctggagtgaatagaaagactgggctgggcg

SEQ ID NO: 183704 - DNA, 33 bp, Homo sapien
cttctggagtgaataggaagactgggctgggcg

SEQ ID NO: 183705 - DNA, 33 bp, Homo sapien
gcagataaacttccaactgtctggcttagcact

SEQ ID NO: 183706 - DNA, 33 bp, Homo sapien
gcagataaacttccaagtgtctggcttagcact

SEQ ID NO: 183707 - DNA, 33 bp, Homo sapien
tgattctgctataatacaacttctgagccagtt

SEQ ID NO: 183708 - DNA, 33 bp, Homo sapien
tgattctgctataatataacttctgagccagtt

SEQ ID NO: 183709 - DNA, 33 bp, Homo sapien
ttaataatgctataaacagtaactagcacacag

SEQ ID NO: 183710 - DNA, 33 bp, Homo sapien
ttaataatgctataaagagtaactagcacacag

SEQ ID NO: 183711 - DNA, 33 bp, Homo sapien
actgctgcagtcttgcaatttaaccagttctta

SEQ ID NO: 183712 - DNA, 33 bp, Homo sapien
actgctgcagtcttgcgatttaaccagttctta

SEQ ID NO: 183713 - DNA, 33 bp, Homo sapien
caaggcctgattaagaatagaatgtgtgctaac

SEQ ID NO: 183714 - DNA, 33 bp, Homo sapien
caaggcctgattaagagtagaatgtgtgctaac

SEQ ID NO: 183715 - DNA, 33 bp, Homo sapien
gaggactgaggaaggacgggaagcaatggggta

SEQ ID NO: 183716 - DNA, 33 bp, Homo sapien
gaggactgaggaaggatgggaagcaatggggta

SEQ ID NO: 183717 - DNA, 33 bp, Homo sapien
ttctttgtctctccccactggaccgtgtacctg

SEQ ID NO: 183718 - DNA, 33 bp, Homo sapien
ttctttgtctctccccgctggaccgtgtacctg

SEQ ID NO: 183719 - DNA, 33 bp, Homo sapien
cggttagattagaaaacagtctgcactgtggcc

SEQ ID NO: 183720 - DNA, 33 bp, Homo sapien
cggttagattagaaaagagtctgcactgtggcc

SEQ ID NO: 183721 - DNA, 33 bp, Homo sapien
aaggttttgtggggcaagtctaggaatctgatt

SEQ ID NO: 183722 - DNA, 33 bp, Homo sapien
aaggttttgtggggcaggtctaggaatctgatt

SEQ ID NO: 183723 - DNA, 33 bp, Homo sapien
caatgagatatcaccgaatacctgttacaatgg

SEQ ID NO: 183724 - DNA, 33 bp, Homo sapien
caatgagatatcaccgcatacctgttacaatgg

SEQ ID NO: 183725 - DNA, 33 bp, Homo sapien
tacaaactccgtgtcccgagcttcatcagggtc

SEQ ID NO: 183726 - DNA, 33 bp, Homo sapien
tacaaactccgtgtcctgagcttcatcagggtc

SEQ ID NO: 183727 - DNA, 33 bp, Homo sapien
aaggggtctcctcacagtctctgagactacggc

SEQ ID NO: 183728 - DNA, 33 bp, Homo sapien
aaggggtctcctcacattctctgagactacggc

SEQ ID NO: 183729 - DNA, 33 bp, Homo sapien
cagcagctgttgaaaactgatctctcaaatctg

SEQ ID NO: 183730 - DNA, 33 bp, Homo sapien
cagcagctgttgaaaattgatctctcaaatctg

SEQ ID NO: 183731 - DNA, 33 bp, Homo sapien
cttaatgtttgaccaaattgcaatcaccaaatc

SEQ ID NO: 183732 - DNA, 33 bp, Homo sapien
cttaatgtttgaccaagttgcaatcaccaaatc

SEQ ID NO: 183733 - DNA, 33 bp, Homo sapien
tgttttagctgactaacacacaagagaaggctg

SEQ ID NO: 183734 - DNA, 33 bp, Homo sapien
tgttttagctgactaagacacaagagaaggctg

SEQ ID NO: 183735 - DNA, 33 bp, Homo sapien
agcactgagatgtgcccgaccagagagtgtact

SEQ ID NO: 183736 - DNA, 33 bp, Homo sapien
agcactgagatgtgcctgaccagagagtgtact

SEQ ID NO: 183737 - DNA, 33 bp, Homo sapien
aaaggccttccgcttacacccctctcccacagt

SEQ ID NO: 183738 - DNA, 33 bp, Homo sapien
aaaggccttccgcttatacccctctcccacagt

SEQ ID NO: 183739 - DNA, 33 bp, Homo sapien
ctctacctatcacctccgaaactgcttatacat

SEQ ID NO: 183740 - DNA, 33 bp, Homo sapien
ctctacctatcacctctgaaactgcttatacat

SEQ ID NO: 183741 - DNA, 33 bp, Homo sapien
tgtgtttaaatctgaacctgcgagaggagcttt

SEQ ID NO: 183742 - DNA, 33 bp, Homo sapien
tgtgtttaaatctgaatctgcgagaggagcttt

SEQ ID NO: 183743 - DNA, 33 bp, Homo sapien
gctatgctgcaggaccaacagagggaatctggt

SEQ ID NO: 183744 - DNA, 33 bp, Homo sapien
gctatgctgcaggaccgacagagggaatctggt

SEQ ID NO: 183745 - DNA, 33 bp, Homo sapien
cagtcagggctacagacgctggcaaagttgtgg

SEQ ID NO: 183746 - DNA, 33 bp, Homo sapien
cagtcagggctacagatgctggcaaagttgtgg

SEQ ID NO: 183747 - DNA, 33 bp, Homo sapien
tgtgtttagcttcaggaaataaaaatgcagtca

SEQ ID NO: 183748 - DNA, 33 bp, Homo sapien
tgtgtttagcttcagggaataaaaatgcagtca

SEQ ID NO: 183749 - DNA, 33 bp, Homo sapien
agcatacattacagaacaggagtctttagcatg

SEQ ID NO: 183750 - DNA, 33 bp, Homo sapien
agcatacattacagaataggagtctttagcatg

SEQ ID NO: 183751 - DNA, 33 bp, Homo sapien
tgggtgccaatcctccactgtgatgctgacagt

SEQ ID NO: 183752 - DNA, 33 bp, Homo sapien
tgggtgccaatcctcctctgtgatgctgacagt

SEQ ID NO: 183753 - DNA, 33 bp, Homo sapien
tgggtaattacctagaaatgggtgccaatcctc

SEQ ID NO: 183754 - DNA, 33 bp, Homo sapien
tgggtaattacctagagatgggtgccaatcctc

SEQ ID NO: 183755 - DNA, 33 bp, Homo sapien
aaagacagcaagggataaagaaaaaggtgaaaa

SEQ ID NO: 183756 - DNA, 33 bp, Homo sapien
aaagacagcaagggatgaagaaaaaggtgaaaa

SEQ ID NO: 183757 - DNA, 33 bp, Homo sapien
tgttttgtggatgctcacataagtaacttcaat

SEQ ID NO: 183758 - DNA, 33 bp, Homo sapien
tgttttgtggatgctcgcataagtaacttcaat

SEQ ID NO: 183759 - DNA, 33 bp, Homo sapien
ataggttattgagattcaacacagttaggagat

SEQ ID NO: 183760 - DNA, 33 bp, Homo sapien
ataggttattgagatttaacacagttaggagat

SEQ ID NO: 183761 - DNA, 33 bp, Homo sapien
ttttataaaacatgacgagagggactccatctt

SEQ ID NO: 183762 - DNA, 33 bp, Homo sapien
ttttataaaacatgactagagggactccatctt

SEQ ID NO: 183763 - DNA, 33 bp, Homo sapien
aatggtcattatagcaccaatggcccctacctt

SEQ ID NO: 183764 - DNA, 33 bp, Homo sapien
aatggtcattatagcagcaatggcccctacctt

SEQ ID NO: 183765 - DNA, 33 bp, Homo sapien
aatcaggccttacctcagacctatgggtagagt

SEQ ID NO: 183766 - DNA, 33 bp, Homo sapien
aatcaggccttacctcggacctatgggtagagt

SEQ ID NO: 183767 - DNA, 33 bp, Homo sapien
ttagagtgactaatctaaaaaagcaggtaatga

SEQ ID NO: 183768 - DNA, 33 bp, Homo sapien
ttagagtgactaatctgaaaaagcaggtaatga

SEQ ID NO: 183769 - DNA, 33 bp, Homo sapien
gctattcatttcctcaaagaaagagtccatata

SEQ ID NO: 183770 - DNA, 33 bp, Homo sapien
gctattcatttcctcagagaaagagtccatata

SEQ ID NO: 183771 - DNA, 33 bp, Homo sapien
gaaccagaaaatagataaggaagtttcagaaat

SEQ ID NO: 183772 - DNA, 33 bp, Homo sapien
gaaccagaaaatagattaggaagtttcagaaat

SEQ ID NO: 183773 - DNA, 33 bp, Homo sapien
gcatttcagagcatataagccttattcagcctg

SEQ ID NO: 183774 - DNA, 33 bp, Homo sapien
gcatttcagagcatatgagccttattcagcctg

SEQ ID NO: 183775 - DNA, 33 bp, Homo sapien
cacatctggagataaaactctcaatccacacat

SEQ ID NO: 183776 - DNA, 33 bp, Homo sapien
cacatctggagataaacctctcaatccacacat

SEQ ID NO: 183777 - DNA, 33 bp, Homo sapien
aacccatttggtaacactggcattgcttggtag

SEQ ID NO: 183778 - DNA, 33 bp, Homo sapien
aacccatttggtaacattggcattgcttggtag

SEQ ID NO: 183779 - DNA, 33 bp, Homo sapien
tagattgtgacattcactaggtttcaacattta

SEQ ID NO: 183780 - DNA, 33 bp, Homo sapien
tagattgtgacattcattaggtttcaacattta

SEQ ID NO: 183781 - DNA, 33 bp, Homo sapien
cacagttcccatacagcacccaaaggatgactc

SEQ ID NO: 183782 - DNA, 33 bp, Homo sapien
cacagttcccatacagtacccaaaggatgactc

SEQ ID NO: 183783 - DNA, 33 bp, Homo sapien
atctagactgattgcacatttgggtgatttgaa

SEQ ID NO: 183784 - DNA, 33 bp, Homo sapien
atctagactgattgcatatttgggtgatttgaa

SEQ ID NO: 183785 - DNA, 33 bp, Homo sapien
agctgttgttagaatccatctgagtggagatgg

SEQ ID NO: 183786 - DNA, 33 bp, Homo sapien
agctgttgttagaatctatctgagtggagatgg

SEQ ID NO: 183787 - DNA, 33 bp, Homo sapien
tcctaacagctctacacatatctacgtggtgcc

SEQ ID NO: 183788 - DNA, 33 bp, Homo sapien
tcctaacagctctacatatatctacgtggtgcc

SEQ ID NO: 183789 - DNA, 33 bp, Homo sapien
ggacttccaatcctccaaaactgtgggaaataa

SEQ ID NO: 183790 - DNA, 33 bp, Homo sapien
ggacttccaatcctccgaaactgtgggaaataa

SEQ ID NO: 183791 - DNA, 33 bp, Homo sapien
cagattcagaaaaagcactcgacaaaattatat

SEQ ID NO: 183792 - DNA, 33 bp, Homo sapien
cagattcagaaaaagcgctcgacaaaattatat

SEQ ID NO: 183793 - DNA, 33 bp, Homo sapien
atccatcatctcaaacacttattggttctttgt

SEQ ID NO: 183794 - DNA, 33 bp, Homo sapien
atccatcatctcaaacccttattggttctttgt

SEQ ID NO: 183795 - DNA, 33 bp, Homo sapien
ggagctcaggtggtaacgcttgccaactgctca

SEQ ID NO: 183796 - DNA, 33 bp, Homo sapien
ggagctcaggtggtaatgcttgccaactgctca

SEQ ID NO: 183797 - DNA, 33 bp, Homo sapien
attatattacaacaaacgtatactgaagactga

SEQ ID NO: 183798 - DNA, 33 bp, Homo sapien
attatattacaacaaatgtatactgaagactga

SEQ ID NO: 183799 - DNA, 33 bp, Homo sapien
ttgcctaaagacaccaccgagtaagtgataggc

SEQ ID NO: 183800 - DNA, 33 bp, Homo sapien
ttgcctaaagacaccagcgagtaagtgataggc

SEQ ID NO: 183801 - DNA, 33 bp, Homo sapien
agctttccagtcttgtcaaaatgaattgttctt

SEQ ID NO: 183802 - DNA, 33 bp, Homo sapien
agctttccagtcttgtgaaaatgaattgttctt

SEQ ID NO: 183803 - DNA, 33 bp, Homo sapien
aacggtttcaacttgcaaagttctctaaattac

SEQ ID NO: 183804 - DNA, 33 bp, Homo sapien
aacggtttcaacttgctaagttctctaaattac

SEQ ID NO: 183805 - DNA, 33 bp, Homo sapien
gtgttaatcactgccccgaagttgcagcacact

SEQ ID NO: 183806 - DNA, 33 bp, Homo sapien
gtgttaatcactgccctgaagttgcagcacact

SEQ ID NO: 183807 - DNA, 33 bp, Homo sapien
gtcacagcaattaggaataaggtcagatgtaga

SEQ ID NO: 183808 - DNA, 33 bp, Homo sapien
gtcacagcaattaggattaaggtcagatgtaga

SEQ ID NO: 183809 - DNA, 33 bp, Homo sapien
aattttattgccttcaaatgtgctttttggttt

SEQ ID NO: 183810 - DNA, 33 bp, Homo sapien
aattttattgccttcatatgtgctttttggttt

SEQ ID NO: 183811 - DNA, 33 bp, Homo sapien
taaacatctatttatactaaccccagacaaaat

SEQ ID NO: 183812 - DNA, 33 bp, Homo sapien
taaacatctatttatattaaccccagacaaaat

SEQ ID NO: 183813 - DNA, 33 bp, Homo sapien
actgaaagagcaataaaaatagagtggagaatg

SEQ ID NO: 183814 - DNA, 33 bp, Homo sapien
actgaaagagcaataacaatagagtggagaatg

SEQ ID NO: 183815 - DNA, 33 bp, Homo sapien
gtataatctaccatacacaatgtttagtgtcag

SEQ ID NO: 183816 - DNA, 33 bp, Homo sapien
gtataatctaccatacgcaatgtttagtgtcag

SEQ ID NO: 183817 - DNA, 33 bp, Homo sapien
ttggatcagattcccacccctggactagttaag

SEQ ID NO: 183818 - DNA, 33 bp, Homo sapien
ttggatcagattcccatccctggactagttaag

SEQ ID NO: 183819 - DNA, 33 bp, Homo sapien
caagtttgtcaataaaatacatgatctctctaa

SEQ ID NO: 183820 - DNA, 33 bp, Homo sapien
caagtttgtcaataaagtacatgatctctctaa

SEQ ID NO: 183821 - DNA, 33 bp, Homo sapien
tgacaaacttctctgagtatgccattttttttc

SEQ ID NO: 183822 - DNA, 33 bp, Homo sapien
tgacaaacttctctgattatgccattttttttc

SEQ ID NO: 183823 - DNA, 33 bp, Homo sapien
accccatccctctaccggcaagtctcaaagcac

SEQ ID NO: 183824 - DNA, 33 bp, Homo sapien
accccatccctctacctgcaagtctcaaagcac

SEQ ID NO: 183825 - DNA, 33 bp, Homo sapien
gtaaaagatttacagcccttgctcattttggtc

SEQ ID NO: 183826 - DNA, 33 bp, Homo sapien
gtaaaagatttacagctcttgctcattttggtc

SEQ ID NO: 183827 - DNA, 33 bp, Homo sapien
actcaaatgttcctaaaacataatcattaatga

SEQ ID NO: 183828 - DNA, 33 bp, Homo sapien
actcaaatgttcctaatacataatcattaatga

SEQ ID NO: 183829 - DNA, 33 bp, Homo sapien
caattctgaagtgacaggaaatgtatgtgatgt

SEQ ID NO: 183830 - DNA, 33 bp, Homo sapien
caattctgaagtgacatgaaatgtatgtgatgt

SEQ ID NO: 183831 - DNA, 33 bp, Homo sapien
actccaattggtcatcaaaagtatttattagta

SEQ ID NO: 183832 - DNA, 33 bp, Homo sapien
actccaattggtcatccaaagtatttattagta

SEQ ID NO: 183833 - DNA, 33 bp, Homo sapien; identical to SEQ ID NO: 183831

SEQ ID NO: 183834 - DNA, 33 bp, Homo sapien; identical to SEQ ID NO: 183832

SEQ ID NO: 183835 - DNA, 33 bp, Homo sapien
gctgttgtagaggttaaagatctaaaacaaact

SEQ ID NO: 183836 - DNA, 33 bp, Homo sapien
gctgttgtagaggttacagatctaaaacaaact

SEQ ID NO: 183837 - DNA, 33 bp, Homo sapien
aaatgcttggctggaacggattaaatattctgt

SEQ ID NO: 183838 - DNA, 33 bp, Homo sapien
aaatgcttggctggaatggattaaatattctgt

SEQ ID NO: 183839 - DNA, 33 bp, Homo sapien
tccaaattaccatatacagtctcccatgaatga

SEQ ID NO: 183840 - DNA, 33 bp, Homo sapien
tccaaattaccatatagagtctcccatgaatga

SEQ ID NO: 183841 - DNA, 33 bp, Homo sapien
atcccttgtgggtctaagtgcctctgaaggcag

SEQ ID NO: 183842 - DNA, 33 bp, Homo sapien
atcccttgtgggtctaggtgcctctgaaggcag

SEQ ID NO: 183843 - DNA, 33 bp, Homo sapien
agctcacttcattagaaaaaagtcataccccaa

SEQ ID NO: 183844 - DNA, 33 bp, Homo sapien
agctcacttcattagacaaaagtcataccccaa

SEQ ID NO: 183845 - DNA, 33 bp, Homo sapien
agttttcctgagaaaacggcacagctccaaaac

SEQ ID NO: 183846 - DNA, 33 bp, Homo sapien
agttttcctgagaaaatggcacagctccaaaac

SEQ ID NO: 183847 - DNA, 33 bp, Homo sapien
agataccaatgttttacccattttagtgtcagc

SEQ ID NO: 183848 - DNA, 33 bp, Homo sapien
agataccaatgttttatccattttagtgtcagc

SEQ ID NO: 183849 - DNA, 33 bp, Homo sapien
gtatatgtagatgacacggtttaataagctaca

SEQ ID NO: 183850 - DNA, 33 bp, Homo sapien
gtatatgtagatgacatggtttaataagctaca

SEQ ID NO: 183851 - DNA, 33 bp, Homo sapien
gtaaagattttcctgtaaaacgtatgtgcaaat

SEQ ID NO: 183852 - DNA, 33 bp, Homo sapien
gtaaagattttcctgtgaaacgtatgtgcaaat

SEQ ID NO: 183853 - DNA, 33 bp, Homo sapien
aaattaactcaagctggattaaagacttaaatg

SEQ ID NO: 183854 - DNA, 33 bp, Homo sapien
aaattaactcaagctgtattaaagacttaaatg

SEQ ID NO: 183855 - DNA, 33 bp, Homo sapien
cacctagactttcatacgaatttttaaagaact

SEQ ID NO: 183856 - DNA, 33 bp, Homo sapien
cacctagactttcataggaatttttaaagaact

SEQ ID NO: 183857 - DNA, 33 bp, Homo sapien
tgtggtattatcttaaagttccaaatggtatgt

SEQ ID NO: 183858 - DNA, 33 bp, Homo sapien
tgtggtattatcttaatgttccaaatggtatgt

SEQ ID NO: 183859 - DNA, 33 bp, Homo sapien
ccacttccaatcagcaataataaggagcacctc

SEQ ID NO: 183860 - DNA, 33 bp, Homo sapien
ccacttccaatcagcagtaataaggagcacctc

SEQ ID NO: 183861 - DNA, 33 bp, Homo sapien
agtttttgtgtagatacatgttttactttctct

SEQ ID NO: 183862 - DNA, 33 bp, Homo sapien
agtttttgtgtagatagatgttttactttctct

SEQ ID NO: 183863 - DNA, 33 bp, Homo sapien
tgtctactgtaaataacgctatgaacaatggtg

SEQ ID NO: 183864 - DNA, 33 bp, Homo sapien
tgtctactgtaaataatgctatgaacaatggtg

SEQ ID NO: 183865 - DNA, 33 bp, Homo sapien
agtcatactgccaagaaagaggtacagaggatc

SEQ ID NO: 183866 - DNA, 33 bp, Homo sapien
agtcatactgccaagagagaggtacagaggatc

SEQ ID NO: 183867 - DNA, 33 bp, Homo sapien
taatgctttccttgatcaactccacctttctcc

SEQ ID NO: 183868 - DNA, 33 bp, Homo sapien
taatgctttccttgatgaactccacctttctcc

SEQ ID NO: 183869 - DNA, 33 bp, Homo sapien
aagactgtacattgagcaacattattataacat

SEQ ID NO: 183870 - DNA, 33 bp, Homo sapien
aagactgtacattgaggaacattattataacat

SEQ ID NO: 183871 - DNA, 33 bp, Homo sapien
agttgttattagctacagaaaacatcacaaaat

SEQ ID NO: 183872 - DNA, 33 bp, Homo sapien
agttgttattagctacggaaaacatcacaaaat

SEQ ID NO: 183873 - DNA, 33 bp, Homo sapien
ctaagtattcatctgaagtacctgatctgtgtt

SEQ ID NO: 183874 - DNA, 33 bp, Homo sapien
ctaagtattcatctgaggtacctgatctgtgtt

SEQ ID NO: 183875 - DNA, 33 bp, Homo sapien
ttgttggttatcataacgtacaatgcatttaaa

SEQ ID NO: 183876 - DNA, 33 bp, Homo sapien
ttgttggttatcataatgtacaatgcatttaaa

SEQ ID NO: 183877 - DNA, 33 bp, Homo sapien
cacttcttcggtacgaccaataacattcaggta

SEQ ID NO: 183878 - DNA, 33 bp, Homo sapien
cacttcttcggtacgatcaataacattcaggta

SEQ ID NO: 183879 - DNA, 33 bp, Homo sapien
catctttgtatgagtaacttttaaaatttcatt

SEQ ID NO: 183880 - DNA, 33 bp, Homo sapien
catctttgtatgagtaccttttaaaatttcatt

SEQ ID NO: 183881 - DNA, 33 bp, Homo sapien
ccttccttgactaacagggtcttcttgttacat

SEQ ID NO: 183882 - DNA, 33 bp, Homo sapien
ccttccttgactaacatggtcttcttgttacat

SEQ ID NO: 183883 - DNA, 33 bp, Homo sapien
accaacctaacagaacaaattagctagatttca

SEQ ID NO: 183884 - DNA, 33 bp, Homo sapien
accaacctaacagaaccaattagctagatttca

SEQ ID NO: 183885 - DNA, 33 bp, Homo sapien
aagatgggtctgcgagccatttggccataccta

SEQ ID NO: 183886 - DNA, 33 bp, Homo sapien
aagatgggtctgcgagtcatttggccataccta

SEQ ID NO: 183887 - DNA, 33 bp, Homo sapien
cctgtgtctacacttacggcagagtcaatagaa

SEQ ID NO: 183888 - DNA, 33 bp, Homo sapien
cctgtgtctacacttatggcagagtcaatagaa

SEQ ID NO: 183889 - DNA, 33 bp, Homo sapien
caatatgggtgatgatcaatctaaaaaacaagg

SEQ ID NO: 183890 - DNA, 33 bp, Homo sapien
caatatgggtgatgatgaatctaaaaaacaagg

SEQ ID NO: 183891 - DNA, 33 bp, Homo sapien
tggatgtcaaaatgcagtagaagatggaaacca

SEQ ID NO: 183892 - DNA, 33 bp, Homo sapien
tggatgtcaaaatgcattagaagatggaaacca

SEQ ID NO: 183893 - DNA, 33 bp, Homo sapien
tgaaaacacactggcccagaatctgtgctagaa

SEQ ID NO: 183894 - DNA, 33 bp, Homo sapien
tgaaaacacactggcctagaatctgtgctagaa

SEQ ID NO: 183895 - DNA, 33 bp, Homo sapien
acaagtgccccaattccacccttcatggtgaca

SEQ ID NO: 183896 - DNA, 33 bp, Homo sapien
acaagtgccccaattctacccttcatggtgaca

SEQ ID NO: 183897 - DNA, 33 bp, Homo sapien
ccaagatcaaacttaccggctctgtgggtttca

SEQ ID NO: 183898 - DNA, 33 bp, Homo sapien
ccaagatcaaacttactggctctgtgggtttca

SEQ ID NO: 183899 - DNA, 33 bp, Homo sapien
taaaagacacattgacaagataagtgaaaagct

SEQ ID NO: 183900 - DNA, 33 bp, Homo sapien
taaaagacacattgaccagataagtgaaaagct

SEQ ID NO: 183901 - DNA, 33 bp, Homo sapien
atgagagtgagattaaaccagaagctgaatttt

SEQ ID NO: 183902 - DNA, 33 bp, Homo sapien
atgagagtgagattaacccagaagctgaatttt

SEQ ID NO: 183903 - DNA, 33 bp, Homo sapien
gcctccagaactgcaaagctatacatttctgtt

SEQ ID NO: 183904 - DNA, 33 bp, Homo sapien
gcctccagaactgcaaggctatacatttctgtt

SEQ ID NO: 183905 - DNA, 33 bp, Homo sapien
cttatttggtggaggaccagtatgaagtgaagc

SEQ ID NO: 183906 - DNA, 33 bp, Homo sapien
cttatttggtggaggagcagtatgaagtgaagc

SEQ ID NO: 183907 - DNA, 33 bp, Homo sapien
catcaaagttgaaaacaaagccaatttttatta

SEQ ID NO: 183908 - DNA, 33 bp, Homo sapien
catcaaagttgaaaacgaagccaatttttatta

SEQ ID NO: 183909 - DNA, 33 bp, Homo sapien
ttatataccatatcaaccttattcatgtgatta

SEQ ID NO: 183910 - DNA, 33 bp, Homo sapien
ttatataccatatcaagcttattcatgtgatta

SEQ ID NO: 183911 - DNA, 33 bp, Homo sapien
attcaaatcctctataaacttgctcctttcatc

SEQ ID NO: 183912 - DNA, 33 bp, Homo sapien
attcaaatcctctatatacttgctcctttcatc

SEQ ID NO: 183913 - DNA, 33 bp, Homo sapien
ctttgggaaaccgacactatctgaattctacct

SEQ ID NO: 183914 - DNA, 33 bp, Homo sapien
ctttgggaaaccgacattatctgaattctacct

SEQ ID NO: 183915 - DNA, 33 bp, Homo sapien
caagtagctagagccacgaaagggagagccgct

SEQ ID NO: 183916 - DNA, 33 bp, Homo sapien
caagtagctagagccatgaaagggagagccgct

SEQ ID NO: 183917 - DNA, 33 bp, Homo sapien
cgtcatcacaagctaccggaagacagaggggct

SEQ ID NO: 183918 - DNA, 33 bp, Homo sapien
cgtcatcacaagctactggaagacagaggggct

SEQ ID NO: 183919 - DNA, 33 bp, Homo sapien
ctcaaccaccctacaaataagaacagcagctac

SEQ ID NO: 183920 - DNA, 33 bp, Homo sapien
ctcaaccaccctacaattaagaacagcagctac

SEQ ID NO: 183921 - DNA, 33 bp, Homo sapien
gggtgcctgccgagaacagcttgaccagacctg

SEQ ID NO: 183922 - DNA, 33 bp, Homo sapien
gggtgcctgccgagaagagcttgaccagacctg

SEQ ID NO: 183923 - DNA, 33 bp, Homo sapien
actaacgcccattacaccccactgtacaaccca

SEQ ID NO: 183924 - DNA, 33 bp, Homo sapien
actaacgcccattacatcccactgtacaaccca

SEQ ID NO: 183925 - DNA, 33 bp, Homo sapien
gcgtggggaaggtggactagaaggtgactggga

SEQ ID NO: 183926 - DNA, 33 bp, Homo sapien
gcgtggggaaggtggagtagaaggtgactggga

SEQ ID NO: 183927 - DNA, 33 bp, Homo sapien
gttagaggactaagatcagacatgggtttctgt

SEQ ID NO: 183928 - DNA, 33 bp, Homo sapien
gttagaggactaagatgagacatgggtttctgt

SEQ ID NO: 183929 - DNA, 33 bp, Homo sapien
gacctggctttcaacacctctgtgctgagccca

SEQ ID NO: 183930 - DNA, 33 bp, Homo sapien
gacctggctttcaacatctctgtgctgagccca

SEQ ID NO: 183931 - DNA, 33 bp, Homo sapien
acagtcttgtatcatccagcaagtaagtaaagc

SEQ ID NO: 183932 - DNA, 33 bp, Homo sapien
acagtcttgtatcatctagcaagtaagtaaagc

SEQ ID NO: 183933 - DNA, 33 bp, Homo sapien
cactcctgagtcctttcgaaaccactgtccatg

SEQ ID NO: 183934 - DNA, 33 bp, Homo sapien
cactcctgagtccttttgaaaccactgtccatg

SEQ ID NO: 183935 - DNA, 33 bp, Homo sapien
tggaaatgttatcttacgtggaaaatggtcttt

SEQ ID NO: 183936 - DNA, 33 bp, Homo sapien
tggaaatgttatcttaggtggaaaatggtcttt

SEQ ID NO: 183937 - DNA, 33 bp, Homo sapien
gcacaaggtgataagcacaccctgcgtaggaca

SEQ ID NO: 183938 - DNA, 33 bp, Homo sapien
gcacaaggtgataagcgcaccctgcgtaggaca

SEQ ID NO: 183939 - DNA, 33 bp, Homo sapien
ctctttattccccagacctcctttgcatactgc

SEQ ID NO: 183940 - DNA, 33 bp, Homo sapien
ctctttattccccagatctcctttgcatactgc

SEQ ID NO: 183941 - DNA, 33 bp, Homo sapien
tttgtgattattttacgaactacctgtcactaa

SEQ ID NO: 183942 - DNA, 33 bp, Homo sapien
tttgtgattattttactaactacctgtcactaa

SEQ ID NO: 183943 - DNA, 33 bp, Homo sapien
gagccagagaaatgggaacgtgaagctgcagtg

SEQ ID NO: 183944 - DNA, 33 bp, Homo sapien
gagccagagaaatgggcacgtgaagctgcagtg

SEQ ID NO: 183945 - DNA, 33 bp, Homo sapien
gggagatgggcttgaacaaatgtgcactacacc

SEQ ID NO: 183946 - DNA, 33 bp, Homo sapien
gggagatgggcttgaagaaatgtgcactacacc

SEQ ID NO: 183947 - DNA, 33 bp, Homo sapien
taagacttaactccaacgccagacctatagtct

SEQ ID NO: 183948 - DNA, 33 bp, Homo sapien
taagacttaactccaatgccagacctatagtct

SEQ ID NO: 183949 - DNA, 33 bp, Homo sapien
gagaaagaaggctcaaaactctccagcctggaa

SEQ ID NO: 183950 - DNA, 33 bp, Homo sapien
gagaaagaaggctcaagactctccagcctggaa

SEQ ID NO: 183951 - DNA, 33 bp, Homo sapien
ggcatttttatcactcactgagaaatgaggaaa

SEQ ID NO: 183952 - DNA, 33 bp, Homo sapien
ggcatttttatcactccctgagaaatgaggaaa

SEQ ID NO: 183953 - DNA, 33 bp, Homo sapien
tggctttctactgtcaaatggtgggcagaggca

SEQ ID NO: 183954 - DNA, 33 bp, Homo sapien
tggctttctactgtcacatggtgggcagaggca

SEQ ID NO: 183955 - DNA, 33 bp, Homo sapien
gttctctcatctttaacctagagggttggatga

SEQ ID NO: 183956 - DNA, 33 bp, Homo sapien
gttctctcatctttaatctagagggttggatga

SEQ ID NO: 183957 - DNA, 33 bp, Homo sapien
ggtgactgctgaaaaactggaagagtcccgcag

SEQ ID NO: 183958 - DNA, 33 bp, Homo sapien
ggtgactgctgaaaaagtggaagagtcccgcag

SEQ ID NO: 183959 - DNA, 33 bp, Homo sapien
tagcacaaccctgtaggatagctgagaattcct

SEQ ID NO: 183960 - DNA, 33 bp, Homo sapien
tagcacaaccctgtagtatagctgagaattcct

SEQ ID NO: 183961 - DNA, 33 bp, Homo sapien
ggggctttctgtgaagaagagaagagcttgctg

SEQ ID NO: 183962 - DNA, 33 bp, Homo sapien
ggggctttctgtgaagtagagaagagcttgctg

SEQ ID NO: 183963 - DNA, 33 bp, Homo sapien
acaaaaaaatttggtgcacatagaggtagctct

SEQ ID NO: 183964 - DNA, 33 bp, Homo sapien
acaaaaaaatttggtggacatagaggtagctct

SEQ ID NO: 183965 - DNA, 33 bp, Homo sapien
agtaagaccacactaaaatcacaactccccagg

SEQ ID NO: 183966 - DNA, 33 bp, Homo sapien
agtaagaccacactaagatcacaactccccagg

SEQ ID NO: 183967 - DNA, 33 bp, Homo sapien
aacacctgtttaatggaattgaattttcagcat

SEQ ID NO: 183968 - DNA, 33 bp, Homo sapien
aacacctgtttaatgggattgaattttcagcat

SEQ ID NO: 183969 - DNA, 33 bp, Homo sapien
gagacttcttagttacaaacaaccattccaggg

SEQ ID NO: 183970 - DNA, 33 bp, Homo sapien
gagacttcttagttacgaacaaccattccaggg

SEQ ID NO: 183971 - DNA, 33 bp, Homo sapien
catgagatatttccacacaatatttattgccta

SEQ ID NO: 183972 - DNA, 33 bp, Homo sapien
catgagatatttccacccaatatttattgccta

SEQ ID NO: 183973 - DNA, 33 bp, Homo sapien
atgtattagctcattaaatccttccaacaaccc

SEQ ID NO: 183974 - DNA, 33 bp, Homo sapien
atgtattagctcattagatccttccaacaaccc

SEQ ID NO: 183975 - DNA, 33 bp, Homo sapien
gtttccctaaggttcacctggacctgcttttct

SEQ ID NO: 183976 - DNA, 33 bp, Homo sapien
gtttccctaaggttcatctggacctgcttttct

SEQ ID NO: 183977 - DNA, 33 bp, Homo sapien
gcacacacattgagagcccaggttaactccaaa

SEQ ID NO: 183978 - DNA, 33 bp, Homo sapien
gcacacacattgagagtccaggttaactccaaa

SEQ ID NO: 183979 - DNA, 33 bp, Homo sapien
gtaagatgggaaggaaatcttcaaagccagggg

SEQ ID NO: 183980 - DNA, 33 bp, Homo sapien
gtaagatgggaaggaagtcttcaaagccagggg

SEQ ID NO: 183981 - DNA, 33 bp, Homo sapien
tgttaggattacataaaaggttctgagatccct

SEQ ID NO: 183982 - DNA, 33 bp, Homo sapien
tgttaggattacataagaggttctgagatccct

SEQ ID NO: 183983 - DNA, 33 bp, Homo sapien
ctcatcgttagttacactgaattttcacgactc

SEQ ID NO: 183984 - DNA, 33 bp, Homo sapien
ctcatcgttagttacattgaattttcacgactc

SEQ ID NO: 183985 - DNA, 33 bp, Homo sapien
caaacatttatctccaatgagtttctcttgtca

SEQ ID NO: 183986 - DNA, 33 bp, Homo sapien
caaacatttatctccagtgagtttctcttgtca

SEQ ID NO: 183987 - DNA, 33 bp, Homo sapien
ttgtcatctttaatgaagatcacgtggctgtag

SEQ ID NO: 183988 - DNA, 33 bp, Homo sapien
ttgtcatctttaatgatgatcacgtggctgtag

SEQ ID NO: 183989 - DNA, 33 bp, Homo sapien
agttaaggctgctacccaaatgattcctgatta

SEQ ID NO: 183990 - DNA, 33 bp, Homo sapien
agttaaggctgctacctaaatgattcctgatta

SEQ ID NO: 183991 - DNA, 33 bp, Homo sapien
gaatcagcattttggcacatataatagaaaaga

SEQ ID NO: 183992 - DNA, 33 bp, Homo sapien
gaatcagcattttggcccatataatagaaaaga

SEQ ID NO: 183993 - DNA, 33 bp, Homo sapien
tgctgattctaaaaacacttttccatttgacac

SEQ ID NO: 183994 - DNA, 33 bp, Homo sapien
tgctgattctaaaaacgcttttccatttgacac

SEQ ID NO: 183995 - DNA, 33 bp, Homo sapien
acctatcccgttgtcgcaaagcaatttatagga

SEQ ID NO: 183996 - DNA, 33 bp, Homo sapien
acctatcccgttgtcgtaaagcaatttatagga

SEQ ID NO: 183997 - DNA, 33 bp, Homo sapien
cttaagttcaaaaagaggcaaaggagaaagttc

SEQ ID NO: 183998 - DNA, 33 bp, Homo sapien
cttaagttcaaaaagatgcaaaggagaaagttc

SEQ ID NO: 183999 - DNA, 33 bp, Homo sapien
gcagtttagattgtaaatgtgagatgtgaaatg

SEQ ID NO: 184000 - DNA, 33 bp, Homo sapien
gcagtttagattgtaagtgtgagatgtgaaatg

SEQ ID NO: 184001 - DNA, 33 bp, Homo sapien
tttaagagctttatgacggagggaaggcacaat

SEQ ID NO: 184002 - DNA, 33 bp, Homo sapien
tttaagagctttatgatggagggaaggcacaat

SEQ ID NO: 184003 - DNA, 33 bp, Homo sapien
tgagctgtcgtatctacgattatttctgttatc

SEQ ID NO: 184004 - DNA, 33 bp, Homo sapien
tgagctgtcgtatctatgattatttctgttatc

SEQ ID NO: 184005 - DNA, 33 bp, Homo sapien
ctagcccagtccataacaggtgctgaaccaatg

SEQ ID NO: 184006 - DNA, 33 bp, Homo sapien
ctagcccagtccataataggtgctgaaccaatg

SEQ ID NO: 184007 - DNA, 33 bp, Homo sapien
gtgactaggtgcattgccaataagcactaacat

SEQ ID NO: 184008 - DNA, 33 bp, Homo sapien
gtgactaggtgcattgtcaataagcactaacat

SEQ ID NO: 184009 - DNA, 33 bp, Homo sapien
tcctctctagctaagaaaattctagatggtatc

SEQ ID NO: 184010 - DNA, 33 bp, Homo sapien
tcctctctagctaagagaattctagatggtatc

SEQ ID NO: 184011 - DNA, 33 bp, Homo sapien
attttcctttcacagaatcaagctcaacttcaa

SEQ ID NO: 184012 - DNA, 33 bp, Homo sapien
attttcctttcacagactcaagctcaacttcaa

SEQ ID NO: 184013 - DNA, 33 bp, Homo sapien
tgcactgtccagaacaataatatgatatttgaa

SEQ ID NO: 184014 - DNA, 33 bp, Homo sapien
tgcactgtccagaacagtaatatgatatttgaa

SEQ ID NO: 184015 - DNA, 33 bp, Homo sapien
cagggtcatcatcggaccagctatgacagtcat

SEQ ID NO: 184016 - DNA, 33 bp, Homo sapien
cagggtcatcatcggagcagctatgacagtcat

SEQ ID NO: 184017 - DNA, 33 bp, Homo sapien
aattgatggcctgaaaataaataacaattattg

SEQ ID NO: 184018 - DNA, 33 bp, Homo sapien
aattgatggcctgaaagtaaataacaattattg

SEQ ID NO: 184019 - DNA, 33 bp, Homo sapien
ttctggtctgaaatacactaaaagtgaggagca

SEQ ID NO: 184020 - DNA, 33 bp, Homo sapien
ttctggtctgaaatacgctaaaagtgaggagca

SEQ ID NO: 184021 - DNA, 33 bp, Homo sapien
ggaatcttgaataacaatgatgacttggaaatg

SEQ ID NO: 184022 - DNA, 33 bp, Homo sapien
ggaatcttgaataacagtgatgacttggaaatg

SEQ ID NO: 184023 - DNA, 33 bp, Homo sapien
atgaatgtgggttctacactcaggtggagccaa

SEQ ID NO: 184024 - DNA, 33 bp, Homo sapien
atgaatgtgggttctagactcaggtggagccaa

SEQ ID NO: 184025 - DNA, 33 bp, Homo sapien
gaggatcacttaaaccaggaagctcaagaccag

SEQ ID NO: 184026 - DNA, 33 bp, Homo sapien
gaggatcacttaaaccgggaagctcaagaccag

SEQ ID NO: 184027 - DNA, 33 bp, Homo sapien
gcaaactttgcataggaatcactgtggggaagg

SEQ ID NO: 184028 - DNA, 33 bp, Homo sapien
gcaaactttgcatagggatcactgtggggaagg

SEQ ID NO: 184029 - DNA, 33 bp, Homo sapien
aagtttgcaaaacaccactttatagtattaaaa

SEQ ID NO: 184030 - DNA, 33 bp, Homo sapien
aagtttgcaaaacaccgctttatagtattaaaa

SEQ ID NO: 184031 - DNA, 33 bp, Homo sapien
aattatttcctgtactaacttgttctttctgca

SEQ ID NO: 184032 - DNA, 33 bp, Homo sapien
aattatttcctgtactgacttgttctttctgca

SEQ ID NO: 184033 - DNA, 33 bp, Homo sapien
ttttgagggagcagggaaagcatttttggcacc

SEQ ID NO: 184034 - DNA, 33 bp, Homo sapien
ttttgagggagcaggggaagcatttttggcacc

SEQ ID NO: 184035 - DNA, 33 bp, Homo sapien
ctgtgctgctggcttaaaatgtgagcttgtcta

SEQ ID NO: 184036 - DNA, 33 bp, Homo sapien
ctgtgctgctggcttataatgtgagcttgtcta

SEQ ID NO: 184037 - DNA, 33 bp, Homo sapien
atgagtaataacaaaccctagcggaatggatga

SEQ ID NO: 184038 - DNA, 33 bp, Homo sapien
atgagtaataacaaacgctagcggaatggatga

SEQ ID NO: 184039 - DNA, 33 bp, Homo sapien
agttaggagccatttgcaataaggaaaccagat

SEQ ID NO: 184040 - DNA, 33 bp, Homo sapien
agttaggagccatttggaataaggaaaccagat

SEQ ID NO: 184041 - DNA, 33 bp, Homo sapien
gagacagacacaaaacaggtgattgacttattg

SEQ ID NO: 184042 - DNA, 33 bp, Homo sapien
gagacagacacaaaacgggtgattgacttattg

SEQ ID NO: 184043 - DNA, 33 bp, Homo sapien
aattttccttttcaggacatggcaaaaaaaatt

SEQ ID NO: 184044 - DNA, 33 bp, Homo sapien
aattttccttttcagggcatggcaaaaaaaatt

SEQ ID NO: 184045 - DNA, 33 bp, Homo sapien
gaatttccattattaaaggagatctgaatgtat

SEQ ID NO: 184046 - DNA, 33 bp, Homo sapien
gaatttccattattaacggagatctgaatgtat

SEQ ID NO: 184047 - DNA, 33 bp, Homo sapien
ctcttgcattttcttcactgtttatccacatct

SEQ ID NO: 184048 - DNA, 33 bp, Homo sapien
ctcttgcattttcttcgctgtttatccacatct

SEQ ID NO: 184049 - DNA, 33 bp, Homo sapien
gtcgttggttagtctacagctcattccgcaagt

SEQ ID NO: 184050 - DNA, 33 bp, Homo sapien
gtcgttggttagtctagagctcattccgcaagt

SEQ ID NO: 184051 - DNA, 33 bp, Homo sapien
gcaattgctaagaccacgagtcctatgtttgct

SEQ ID NO: 184052 - DNA, 33 bp, Homo sapien
gcaattgctaagaccatgagtcctatgtttgct

SEQ ID NO: 184053 - DNA, 33 bp, Homo sapien
agaatatggtgttgaaatccaaaaaagggaact

SEQ ID NO: 184054 - DNA, 33 bp, Homo sapien
agaatatggtgttgaagtccaaaaaagggaact

SEQ ID NO: 184055 - DNA, 33 bp, Homo sapien
atgcagtgttaagttacgctgtggaggaagaac

SEQ ID NO: 184056 - DNA, 33 bp, Homo sapien
atgcagtgttaagttatgctgtggaggaagaac

SEQ ID NO: 184057 - DNA, 33 bp, Homo sapien
gactagacagctttaccgatttttgtggtttat

SEQ ID NO: 184058 - DNA, 33 bp, Homo sapien
gactagacagctttactgatttttgtggtttat

SEQ ID NO: 184059 - DNA, 33 bp, Homo sapien
aacttatttatgacgcagatttctttactcaca

SEQ ID NO: 184060 - DNA, 33 bp, Homo sapien
aacttatttatgacgccgatttctttactcaca

SEQ ID NO: 184061 - DNA, 33 bp, Homo sapien
agacattctgttcccacggatatgcgggaaaca

SEQ ID NO: 184062 - DNA, 33 bp, Homo sapien
agacattctgttcccagggatatgcgggaaaca

SEQ ID NO: 184063 - DNA, 33 bp, Homo sapien
gcaacgatagtggtcacgttcagcaacagcttc

SEQ ID NO: 184064 - DNA, 33 bp, Homo sapien
gcaacgatagtggtcatgttcagcaacagcttc

SEQ ID NO: 184065 - DNA, 33 bp, Homo sapien
ttggaatttatactcacaagacatagctaacat

SEQ ID NO: 184066 - DNA, 33 bp, Homo sapien
ttggaatttatactcataagacatagctaacat

SEQ ID NO: 184067 - DNA, 33 bp, Homo sapien
ttggggctgaaagccggaattctttaatcacgt

SEQ ID NO: 184068 - DNA, 33 bp, Homo sapien
ttggggctgaaagccgtaattctttaatcacgt

SEQ ID NO: 184069 - DNA, 33 bp, Homo sapien
tgcagtgggttgtctcaccatctgtagctctca

SEQ ID NO: 184070 - DNA, 33 bp, Homo sapien
tgcagtgggttgtctcgccatctgtagctctca

SEQ ID NO: 184071 - DNA, 33 bp, Homo sapien
aaaattcaagacccacaattttcatccaggaga

SEQ ID NO: 184072 - DNA, 33 bp, Homo sapien
aaaattcaagacccaccattttcatccaggaga

SEQ ID NO: 184073 - DNA, 33 bp, Homo sapien
ttaatgatagtagtgccgagacatgaaaactaa

SEQ ID NO: 184074 - DNA, 33 bp, Homo sapien
ttaatgatagtagtgctgagacatgaaaactaa

SEQ ID NO: 184075 - DNA, 33 bp, Homo sapien
agttttgctccgaaagacttaccgaggagggag

SEQ ID NO: 184076 - DNA, 33 bp, Homo sapien
agttttgctccgaaagccttaccgaggagggag

SEQ ID NO: 184077 - DNA, 33 bp, Homo sapien
tgtgtgttctctatgacgttctcagtattgtta

SEQ ID NO: 184078 - DNA, 33 bp, Homo sapien
tgtgtgttctctatgatgttctcagtattgtta

SEQ ID NO: 184079 - DNA, 33 bp, Homo sapien
attgcttctcagtagcaaatttttgggatttct

SEQ ID NO: 184080 - DNA, 33 bp, Homo sapien
attgcttctcagtagctaatttttgggatttct

SEQ ID NO: 184081 - DNA, 33 bp, Homo sapien
taaaacaaagctagaaagaagagccattattaa

SEQ ID NO: 184082 - DNA, 33 bp, Homo sapien
taaaacaaagctagaaggaagagccattattaa

SEQ ID NO: 184083 - DNA, 33 bp, Homo sapien
taattacactgtcttaccaggagcaggagctac

SEQ ID NO: 184084 - DNA, 33 bp, Homo sapien
taattacactgtcttatcaggagcaggagctac

SEQ ID NO: 184085 - DNA, 33 bp, Homo sapien
ttgtgtgtgtgcttaaagtaaccaaagccaatt

SEQ ID NO: 184086 - DNA, 33 bp, Homo sapien
ttgtgtgtgtgcttaaggtaaccaaagccaatt

SEQ ID NO: 184087 - DNA, 33 bp, Homo sapien
ctcttccgcttgtcccaaagtcagggctggcaa

SEQ ID NO: 184088 - DNA, 33 bp, Homo sapien
ctcttccgcttgtcccgaagtcagggctggcaa

SEQ ID NO: 184089 - DNA, 33 bp, Homo sapien
tctctgtgtgaaagacaagaaagaaatcagcag

SEQ ID NO: 184090 - DNA, 33 bp, Homo sapien
tctctgtgtgaaagacgagaaagaaatcagcag

SEQ ID NO: 184091 - DNA, 33 bp, Homo sapien
ggacagatgcaaagcccgagatgactgattttc

SEQ ID NO: 184092 - DNA, 33 bp, Homo sapien
ggacagatgcaaagcctgagatgactgattttc

SEQ ID NO: 184093 - DNA, 33 bp, Homo sapien
acttgcagtaaagggcaccaacatgtttaaaga

SEQ ID NO: 184094 - DNA, 33 bp, Homo sapien
acttgcagtaaagggcgccaacatgtttaaaga

SEQ ID NO: 184095 - DNA, 33 bp, Homo sapien
ctttaggaagtcagcacgaatgggccctaagtt

SEQ ID NO: 184096 - DNA, 33 bp, Homo sapien
ctttaggaagtcagcatgaatgggccctaagtt

SEQ ID NO: 184097 - DNA, 33 bp, Homo sapien
ccctggttctgttaatgactgcatgtcccaaaa

SEQ ID NO: 184098 - DNA, 33 bp, Homo sapien
ccctggttctgttaattactgcatgtcccaaaa

SEQ ID NO: 184099 - DNA, 33 bp, Homo sapien
agttaccttctttcagcctctgttatggtacct

SEQ ID NO: 184100 - DNA, 33 bp, Homo sapien
agttaccttctttcagtctctgttatggtacct

SEQ ID NO: 184101 - DNA, 33 bp, Homo sapien
cctgcagcagaataaaatttaaatgagacaata

SEQ ID NO: 184102 - DNA, 33 bp, Homo sapien
cctgcagcagaataaagtttaaatgagacaata

SEQ ID NO: 184103 - DNA, 33 bp, Homo sapien
tgagcttcctgagaacaaaacagtgaaccacca

SEQ ID NO: 184104 - DNA, 33 bp, Homo sapien
tgagcttcctgagaacgaaacagtgaaccacca

SEQ ID NO: 184105 - DNA, 33 bp, Homo sapien
ctgttttcttgatccacagctgccagaggaaca

SEQ ID NO: 184106 - DNA, 33 bp, Homo sapien
ctgttttcttgatccatagctgccagaggaaca

SEQ ID NO: 184107 - DNA, 33 bp, Homo sapien
gtcaacttgaagcaaacgtgggaagactcgatg

SEQ ID NO: 184108 - DNA, 33 bp, Homo sapien
gtcaacttgaagcaaaggtgggaagactcgatg

SEQ ID NO: 184109 - DNA, 33 bp, Homo sapien
ggctcagatttcattgcatctctcatggcttag

SEQ ID NO: 184110 - DNA, 33 bp, Homo sapien
ggctcagatttcattggatctctcatggcttag

SEQ ID NO: 184111 - DNA, 33 bp, Homo sapien
gtaccatcagagttcaaagaaggaactagtgac

SEQ ID NO: 184112 - DNA, 33 bp, Homo sapien
gtaccatcagagttcagagaaggaactagtgac

SEQ ID NO: 184113 - DNA, 33 bp, Homo sapien
cccctgacctttgacaaatatattggtgcttgg

SEQ ID NO: 184114 - DNA, 33 bp, Homo sapien
cccctgacctttgacatatatattggtgcttgg

SEQ ID NO: 184115 - DNA, 33 bp, Homo sapien
gttaatctgaaactccaaagaatgcaacaattt

SEQ ID NO: 184116 - DNA, 33 bp, Homo sapien
gttaatctgaaactccgaagaatgcaacaattt

SEQ ID NO: 184117 - DNA, 33 bp, Homo sapien
gcactagactacttatcagcagaagagggtggg

SEQ ID NO: 184118 - DNA, 33 bp, Homo sapien
gcactagactacttattagcagaagagggtggg

SEQ ID NO: 184119 - DNA, 33 bp, Homo sapien
ctggtactgtacaaacaccactaacccttatgc

SEQ ID NO: 184120 - DNA, 33 bp, Homo sapien
ctggtactgtacaaacgccactaacccttatgc

SEQ ID NO: 184121 - DNA, 33 bp, Homo sapien
ctttcacctgtggtgcaatgggtttcatcagtc

SEQ ID NO: 184122 - DNA, 33 bp, Homo sapien
ctttcacctgtggtgcgatgggtttcatcagtc

SEQ ID NO: 184123 - DNA, 33 bp, Homo sapien
tggctctagtaacccaacagtcatggacaaaaa

SEQ ID NO: 184124 - DNA, 33 bp, Homo sapien
tggctctagtaacccaccagtcatggacaaaaa

SEQ ID NO: 184125 - DNA, 33 bp, Homo sapien
acttcagaagctgcaaatgtcatcacacaaact

SEQ ID NO: 184126 - DNA, 33 bp, Homo sapien
acttcagaagctgcaactgtcatcacacaaact

SEQ ID NO: 184127 - DNA, 33 bp, Homo sapien
cactcacactcatccacctggaaagaacagggt

SEQ ID NO: 184128 - DNA, 33 bp, Homo sapien
cactcacactcatccatctggaaagaacagggt

SEQ ID NO: 184129 - DNA, 33 bp, Homo sapien
ttggagtagacagaaaggttgggtaataggctg

SEQ ID NO: 184130 - DNA, 33 bp, Homo sapien
ttggagtagacagaaatgttgggtaataggctg

SEQ ID NO: 184131 - DNA, 33 bp, Homo sapien
gaagggccagataatacgatataggatttcggg

SEQ ID NO: 184132 - DNA, 33 bp, Homo sapien
gaagggccagataataggatataggatttcggg

SEQ ID NO: 184133 - DNA, 33 bp, Homo sapien
ggaaacactttttaaaatgctgatcatgctatt

SEQ ID NO: 184134 - DNA, 33 bp, Homo sapien
ggaaacactttttaaactgctgatcatgctatt

SEQ ID NO: 184135 - DNA, 33 bp, Homo sapien
aatattaatctgatccagcactacaaaacactg

SEQ ID NO: 184136 - DNA, 33 bp, Homo sapien
aatattaatctgatccggcactacaaaacactg

SEQ ID NO: 184137 - DNA, 33 bp, Homo sapien
gatgaagtggggtcaacgttctcatgctgtgct

SEQ ID NO: 184138 - DNA, 33 bp, Homo sapien
gatgaagtggggtcaatgttctcatgctgtgct

SEQ ID NO: 184139 - DNA, 33 bp, Homo sapien
agttgtactgagataacgcagcttttgttgttg

SEQ ID NO: 184140 - DNA, 33 bp, Homo sapien
agttgtactgagataatgcagcttttgttgttg

SEQ ID NO: 184141 - DNA, 33 bp, Homo sapien
tgatatttcttcctcaaaagccattcttcctca

SEQ ID NO: 184142 - DNA, 33 bp, Homo sapien
tgatatttcttcctcacaagccattcttcctca

SEQ ID NO: 184143 - DNA, 33 bp, Homo sapien
tcttagctttgccccaaaatgagtcactttggt

SEQ ID NO: 184144 - DNA, 33 bp, Homo sapien
tcttagctttgccccataatgagtcactttggt

SEQ ID NO: 184145 - DNA, 33 bp, Homo sapien
ctcaggaatggtgggaatcagcaatgtgttgtg

SEQ ID NO: 184146 - DNA, 33 bp, Homo sapien
ctcaggaatggtgggattcagcaatgtgttgtg

SEQ ID NO: 184147 - DNA, 33 bp, Homo sapien
atataaataaactccaaatatttacacaacaca

SEQ ID NO: 184148 - DNA, 33 bp, Homo sapien
atataaataaactccagatatttacacaacaca

SEQ ID NO: 184149 - DNA, 33 bp, Homo sapien
cattggatggaggctaccttgtccactgtaagg

SEQ ID NO: 184150 - DNA, 33 bp, Homo sapien
cattggatggaggctatcttgtccactgtaagg

SEQ ID NO: 184151 - DNA, 33 bp, Homo sapien
acaattacctctcgaacagagcccaattaactg

SEQ ID NO: 184152 - DNA, 33 bp, Homo sapien
acaattacctctcgaatagagcccaattaactg

SEQ ID NO: 184153 - DNA, 33 bp, Homo sapien
tgtcagtcagagtgtagaagggtcaatgcgtag

SEQ ID NO: 184154 - DNA, 33 bp, Homo sapien
tgtcagtcagagtgtataagggtcaatgcgtag

SEQ ID NO: 184155 - DNA, 33 bp, Homo sapien
tttttcccagaaacctcacgtcttagatgctgc

SEQ ID NO: 184156 - DNA, 33 bp, Homo sapien
tttttcccagaaacctgacgtcttagatgctgc

SEQ ID NO: 184157 - DNA, 33 bp, Homo sapien
ttcagtattgactttacgatggcacttagtaca

SEQ ID NO: 184158 - DNA, 33 bp, Homo sapien
ttcagtattgactttatgatggcacttagtaca

SEQ ID NO: 184159 - DNA, 33 bp, Homo sapien
atcatggttcaaaggcgcattgacaaaccaaca

SEQ ID NO: 184160 - DNA, 33 bp, Homo sapien
atcatggttcaaaggctcattgacaaaccaaca

SEQ ID NO: 184161 - DNA, 33 bp, Homo sapien
ggtttgccttatttgaacttggtctgaacaatt

SEQ ID NO: 184162 - DNA, 33 bp, Homo sapien
ggtttgccttatttgatcttggtctgaacaatt

SEQ ID NO: 184163 - DNA, 33 bp, Homo sapien
attttggctagcggaaaccctagattttgcttt

SEQ ID NO: 184164 - DNA, 33 bp, Homo sapien
attttggctagcggaagccctagattttgcttt

SEQ ID NO: 184165 - DNA, 33 bp, Homo sapien
agtcagcactgcaagacatattagtttacaagc

SEQ ID NO: 184166 - DNA, 33 bp, Homo sapien
agtcagcactgcaagatatattagtttacaagc

SEQ ID NO: 184167 - DNA, 33 bp, Homo sapien
ccacatttaacccttaagaatccaacaggcgct

SEQ ID NO: 184168 - DNA, 33 bp, Homo sapien
ccacatttaacccttaggaatccaacaggcgct

SEQ ID NO: 184169 - DNA, 33 bp, Homo sapien
agactgagtggctgcccaaattcatgtagctct

SEQ ID NO: 184170 - DNA, 33 bp, Homo sapien
agactgagtggctgcctaaattcatgtagctct

SEQ ID NO: 184171 - DNA, 33 bp, Homo sapien
gctgcttcctagaccaatcatctctcagacatt

SEQ ID NO: 184172 - DNA, 33 bp, Homo sapien
gctgcttcctagaccagtcatctctcagacatt

SEQ ID NO: 184173 - DNA, 33 bp, Homo sapien
ggccccattactggacagtcaataccaagagaa

SEQ ID NO: 184174 - DNA, 33 bp, Homo sapien
ggccccattactggacggtcaataccaagagaa

SEQ ID NO: 184175 - DNA, 33 bp, Homo sapien
tgccttgtggagcacaacccatttctgttggct

SEQ ID NO: 184176 - DNA, 33 bp, Homo sapien
tgccttgtggagcacagcccatttctgttggct

SEQ ID NO: 184177 - DNA, 33 bp, Homo sapien
ctttacctcctctcaaaaacattagggagggca

SEQ ID NO: 184178 - DNA, 33 bp, Homo sapien
ctttacctcctctcaacaacattagggagggca

SEQ ID NO: 184179 - DNA, 33 bp, Homo sapien
ttttattcctatttaaaaacgtctaacaattcc

SEQ ID NO: 184180 - DNA, 33 bp, Homo sapien
ttttattcctatttaacaacgtctaacaattcc

SEQ ID NO: 184181 - DNA, 33 bp, Homo sapien
ggtttggtcctatttgcattattcccatgtcac

SEQ ID NO: 184182 - DNA, 33 bp, Homo sapien
ggtttggtcctatttgtattattcccatgtcac

SEQ ID NO: 184183 - DNA, 33 bp, Homo sapien
gcggaggacactgaatgaaataacatacataaa

SEQ ID NO: 184184 - DNA, 33 bp, Homo sapien
gcggaggacactgaattaaataacatacataaa

SEQ ID NO: 184185 - DNA, 33 bp, Homo sapien
cataaggaattctctcaaaaacaaggtgaccac

SEQ ID NO: 184186 - DNA, 33 bp, Homo sapien
cataaggaattctctctaaaacaaggtgaccac

SEQ ID NO: 184187 - DNA, 33 bp, Homo sapien
ccagcagataattagaaccactgcctgcacatc

SEQ ID NO: 184188 - DNA, 33 bp, Homo sapien
ccagcagataattagacccactgcctgcacatc

SEQ ID NO: 184189 - DNA, 33 bp, Homo sapien
cagagcaagtaacctcgataaatggagcctaac

SEQ ID NO: 184190 - DNA, 33 bp, Homo sapien
cagagcaagtaacctctataaatggagcctaac

SEQ ID NO: 184191 - DNA, 33 bp, Homo sapien
agaaaaagtgtccgtcaaagcccttgctcacct

SEQ ID NO: 184192 - DNA, 33 bp, Homo sapien
agaaaaagtgtccgtcgaagcccttgctcacct

SEQ ID NO: 184193 - DNA, 33 bp, Homo sapien
gtaatggaatcataaacccaaaatcatagagcc

SEQ ID NO: 184194 - DNA, 33 bp, Homo sapien
gtaatggaatcataaatccaaaatcatagagcc

SEQ ID NO: 184195 - DNA, 33 bp, Homo sapien
tcttgctttgttcatacgtagcacagttgaaat

SEQ ID NO: 184196 - DNA, 33 bp, Homo sapien
tcttgctttgttcatatgtagcacagttgaaat

SEQ ID NO: 184197 - DNA, 33 bp, Homo sapien
tagaaccgtagacagtaacataaaaattgtata

SEQ ID NO: 184198 - DNA, 33 bp, Homo sapien
tagaaccgtagacagtgacataaaaattgtata

SEQ ID NO: 184199 - DNA, 33 bp, Homo sapien
cctcaaactgttgatgaactgattaatatgtac

SEQ ID NO: 184200 - DNA, 33 bp, Homo sapien
cctcaaactgttgatgtactgattaatatgtac

SEQ ID NO: 184201 - DNA, 33 bp, Homo sapien
caggcaggtaaccaaactgagataagcagccca

SEQ ID NO: 184202 - DNA, 33 bp, Homo sapien
caggcaggtaaccaaattgagataagcagccca

SEQ ID NO: 184203 - DNA, 33 bp, Homo sapien
gaataaatggtgcccactcacttttttcttttt

SEQ ID NO: 184204 - DNA, 33 bp, Homo sapien
gaataaatggtgcccattcacttttttcttttt

SEQ ID NO: 184205 - DNA, 33 bp, Homo sapien
gtaagactctgctacaagtcagagggaatccaa

SEQ ID NO: 184206 - DNA, 33 bp, Homo sapien
gtaagactctgctacacgtcagagggaatccaa

SEQ ID NO: 184207 - DNA, 33 bp, Homo sapien
ggctgatggaagcttgcagtcacggtttgggat

SEQ ID NO: 184208 - DNA, 33 bp, Homo sapien
ggctgatggaagcttgtagtcacggtttgggat

SEQ ID NO: 184209 - DNA, 33 bp, Homo sapien
ggactttggcaaagaagagtggaaagaaagttg

SEQ ID NO: 184210 - DNA, 33 bp, Homo sapien
ggactttggcaaagaatagtggaaagaaagttg

SEQ ID NO: 184211 - DNA, 33 bp, Homo sapien
tctgaccaacttcaaacgccaggaggctgtttc

SEQ ID NO: 184212 - DNA, 33 bp, Homo sapien
tctgaccaacttcaaaggccaggaggctgtttc

SEQ ID NO: 184213 - DNA, 33 bp, Homo sapien
gcagctggcatgctaaagtgtcatacctagaac

SEQ ID NO: 184214 - DNA, 33 bp, Homo sapien
gcagctggcatgctaaggtgtcatacctagaac

SEQ ID NO: 184215 - DNA, 33 bp, Homo sapien
tggtaggtggctcagacaagttcctaaaaaggt

SEQ ID NO: 184216 - DNA, 33 bp, Homo sapien
tggtaggtggctcagagaagttcctaaaaaggt

SEQ ID NO: 184217 - DNA, 33 bp, Homo sapien
agaagttaggtctctgaatttctatttcaggtt

SEQ ID NO: 184218 - DNA, 33 bp, Homo sapien
agaagttaggtctctggatttctatttcaggtt

SEQ ID NO: 184219 - DNA, 33 bp, Homo sapien
gttggtccttctttcaaatagatgtgtgagttc

SEQ ID NO: 184220 - DNA, 33 bp, Homo sapien
gttggtccttctttcagatagatgtgtgagttc

SEQ ID NO: 184221 - DNA, 33 bp, Homo sapien
gaggactgcggagttacctttgggacttaggat

SEQ ID NO: 184222 - DNA, 33 bp, Homo sapien
gaggactgcggagttatctttgggacttaggat

SEQ ID NO: 184223 - DNA, 33 bp, Homo sapien
gtaatttttgtcttcaatcctccatctgtttct

SEQ ID NO: 184224 - DNA, 33 bp, Homo sapien
gtaatttttgtcttcattcctccatctgtttct

SEQ ID NO: 184225 - DNA, 33 bp, Homo sapien
ccagggtcctaatacccggatggacttagatag

SEQ ID NO: 184226 - DNA, 33 bp, Homo sapien
ccagggtcctaatacctggatggacttagatag

SEQ ID NO: 184227 - DNA, 33 bp, Homo sapien
aaaaggctttaatggaaatgacagagccataga

SEQ ID NO: 184228 - DNA, 33 bp, Homo sapien
aaaaggctttaatggagatgacagagccataga

SEQ ID NO: 184229 - DNA, 33 bp, Homo sapien
caaacatttctgcaccaaccctgattcagttga

SEQ ID NO: 184230 - DNA, 33 bp, Homo sapien
caaacatttctgcaccgaccctgattcagttga

SEQ ID NO: 184231 - DNA, 33 bp, Homo sapien
ggaaaatggagggatcaatgttatattgtaatt

SEQ ID NO: 184232 - DNA, 33 bp, Homo sapien
ggaaaatggagggatcgatgttatattgtaatt

SEQ ID NO: 184233 - DNA, 33 bp, Homo sapien
taaaggatatgcattacaactggtcacagcaat

SEQ ID NO: 184234 - DNA, 33 bp, Homo sapien
taaaggatatgcattataactggtcacagcaat

SEQ ID NO: 184235 - DNA, 33 bp, Homo sapien
catagtgtatgatgtccgaagaaaccaggacca

SEQ ID NO: 184236 - DNA, 33 bp, Homo sapien
catagtgtatgatgtctgaagaaaccaggacca

SEQ ID NO: 184237 - DNA, 33 bp, Homo sapien
ggtgagtactccttgcgcctactattccttata

SEQ ID NO: 184238 - DNA, 33 bp, Homo sapien
ggtgagtactccttgctcctactattccttata

SEQ ID NO: 184239 - DNA, 33 bp, Homo sapien
aatctcttttccataactacagcccctcaaaac

SEQ ID NO: 184240 - DNA, 33 bp, Homo sapien
aatctcttttccataagtacagcccctcaaaac

SEQ ID NO: 184241 - DNA, 33 bp, Homo sapien
gcctggcctcactcccagaaagtatggtgcaaa

SEQ ID NO: 184242 - DNA, 33 bp, Homo sapien
gcctggcctcactcccggaaagtatggtgcaaa

SEQ ID NO: 184243 - DNA, 33 bp, Homo sapien
tctggccacacatatcaattccttgctgattca

SEQ ID NO: 184244 - DNA, 33 bp, Homo sapien
tctggccacacatatcgattccttgctgattca

SEQ ID NO: 184245 - DNA, 33 bp, Homo sapien
atttcaacgttgtttacgacaccaagtattagc

SEQ ID NO: 184246 - DNA, 33 bp, Homo sapien
atttcaacgttgtttatgacaccaagtattagc

SEQ ID NO: 184247 - DNA, 33 bp, Homo sapien
ataaagatatctttcacagtgtctcctattcag

SEQ ID NO: 184248 - DNA, 33 bp, Homo sapien
ataaagatatctttcagagtgtctcctattcag

SEQ ID NO: 184249 - DNA, 33 bp, Homo sapien
accatcagcaatgtccaccattaaaaacagaaa

SEQ ID NO: 184250 - DNA, 33 bp, Homo sapien
accatcagcaatgtccgccattaaaaacagaaa

SEQ ID NO: 184251 - DNA, 33 bp, Homo sapien
tcacaacaaatgtttacagagtagtttcaatct

SEQ ID NO: 184252 - DNA, 33 bp, Homo sapien
tcacaacaaatgtttatagagtagtttcaatct

SEQ ID NO: 184253 - DNA, 33 bp, Homo sapien
atagcaatgtgagagccgcctaatacttctatg

SEQ ID NO: 184254 - DNA, 33 bp, Homo sapien
atagcaatgtgagagctgcctaatacttctatg

SEQ ID NO: 184255 - DNA, 33 bp, Homo sapien
tcgggaaacacagtcacggcggaaggcaaacag

SEQ ID NO: 184256 - DNA, 33 bp, Homo sapien
tcgggaaacacagtcatggcggaaggcaaacag

SEQ ID NO: 184257 - DNA, 33 bp, Homo sapien
actcatgccttaatcactattcacatttcctaa

SEQ ID NO: 184258 - DNA, 33 bp, Homo sapien
actcatgccttaatcattattcacatttcctaa

SEQ ID NO: 184259 - DNA, 33 bp, Homo sapien
agtcagttcccacagaagaaaagtgaaggcagt

SEQ ID NO: 184260 - DNA, 33 bp, Homo sapien
agtcagttcccacagaggaaaagtgaaggcagt

SEQ ID NO: 184261 - DNA, 33 bp, Homo sapien
agagatcggggattaccagtgtctggtctactt

SEQ ID NO: 184262 - DNA, 33 bp, Homo sapien
agagatcggggattacgagtgtctggtctactt

SEQ ID NO: 184263 - DNA, 33 bp, Homo sapien
agtattgagcagatcaactagacaaaaaataaa

SEQ ID NO: 184264 - DNA, 33 bp, Homo sapien
agtattgagcagatcatctagacaaaaaataaa

SEQ ID NO: 184265 - DNA, 33 bp, Homo sapien
gagatgcattccaaaacgtcttgaggctcattg

SEQ ID NO: 184266 - DNA, 33 bp, Homo sapien
gagatgcattccaaaatgtcttgaggctcattg

SEQ ID NO: 184267 - DNA, 33 bp, Homo sapien
gagtcatggggctacactacactctgtcagcac

SEQ ID NO: 184268 - DNA, 33 bp, Homo sapien
gagtcatggggctacattacactctgtcagcac

SEQ ID NO: 184269 - DNA, 33 bp, Homo sapien
agtggagaaagcaatggaataagagcacatggt

SEQ ID NO: 184270 - DNA, 33 bp, Homo sapien
agtggagaaagcaatgtaataagagcacatggt

SEQ ID NO: 184271 - DNA, 33 bp, Homo sapien
gatgtgctgcacaaagaccatccttgggccaag

SEQ ID NO: 184272 - DNA, 33 bp, Homo sapien
gatgtgctgcacaaaggccatccttgggccaag

SEQ ID NO: 184273 - DNA, 33 bp, Homo sapien
acactctggtgataaccgtgactctgctgggca

SEQ ID NO: 184274 - DNA, 33 bp, Homo sapien
acactctggtgataactgtgactctgctgggca

SEQ ID NO: 184275 - DNA, 33 bp, Homo sapien
aaatccagttgaaaaagaattcctcaaactagt

SEQ ID NO: 184276 - DNA, 33 bp, Homo sapien
aaatccagttgaaaaataattcctcaaactagt

SEQ ID NO: 184277 - DNA, 33 bp, Homo sapien
cctatactgattgatacattctgttttagactg

SEQ ID NO: 184278 - DNA, 33 bp, Homo sapien
cctatactgattgatatattctgttttagactg

SEQ ID NO: 184279 - DNA, 33 bp, Homo sapien
tctatattttcttctacgtgatgtatgtataat

SEQ ID NO: 184280 - DNA, 33 bp, Homo sapien
tctatattttcttctatgtgatgtatgtataat

SEQ ID NO: 184281 - DNA, 33 bp, Homo sapien
attatatggagaaaaaaccagagatttaaattt

SEQ ID NO: 184282 - DNA, 33 bp, Homo sapien
attatatggagaaaaagccagagatttaaattt

SEQ ID NO: 184283 - DNA, 33 bp, Homo sapien
aggactaagaacggataaaaaatgaattccttc

SEQ ID NO: 184284 - DNA, 33 bp, Homo sapien
aggactaagaacggatgaaaaatgaattccttc

SEQ ID NO: 184285 - DNA, 33 bp, Homo sapien
ttctccagctaggtaaccccatagcatcccagt

SEQ ID NO: 184286 - DNA, 33 bp, Homo sapien
ttctccagctaggtaatcccatagcatcccagt

SEQ ID NO: 184287 - DNA, 33 bp, Homo sapien
tacaaagatgatgggactaagagatttaagtaa

SEQ ID NO: 184288 - DNA, 33 bp, Homo sapien
tacaaagatgatgggattaagagatttaagtaa

SEQ ID NO: 184289 - DNA, 33 bp, Homo sapien
ataaaaggattccatccaacagaacagtgatcc

SEQ ID NO: 184290 - DNA, 33 bp, Homo sapien
ataaaaggattccatcgaacagaacagtgatcc

SEQ ID NO: 184291 - DNA, 33 bp, Homo sapien
gcagagaaaaatccccagagacacagtgctgac

SEQ ID NO: 184292 - DNA, 33 bp, Homo sapien
gcagagaaaaatccccggagacacagtgctgac

SEQ ID NO: 184293 - DNA, 33 bp, Homo sapien
aatccaggccgaatgaagagaaaaaggaaggcc

SEQ ID NO: 184294 - DNA, 33 bp, Homo sapien
aatccaggccgaatgaggagaaaaaggaaggcc

SEQ ID NO: 184295 - DNA, 33 bp, Homo sapien
acaacatgaatggaaccgagagacattaagtga

SEQ ID NO: 184296 - DNA, 33 bp, Homo sapien
acaacatgaatggaacggagagacattaagtga

SEQ ID NO: 184297 - DNA, 33 bp, Homo sapien
cagggctcagcctctaaaacaactacagtcatg

SEQ ID NO: 184298 - DNA, 33 bp, Homo sapien
cagggctcagcctctataacaactacagtcatg

SEQ ID NO: 184299 - DNA, 33 bp, Homo sapien
acaaaatcagacgagacagtgacaccagcaaga

SEQ ID NO: 184300 - DNA, 33 bp, Homo sapien
acaaaatcagacgagagagtgacaccagcaaga

SEQ ID NO: 184301 - DNA, 33 bp, Homo sapien
agcttaatcatgagagaaaccctgttctgtgat

SEQ ID NO: 184302 - DNA, 33 bp, Homo sapien
agcttaatcatgagaggaaccctgttctgtgat

SEQ ID NO: 184303 - DNA, 33 bp, Homo sapien
agcccaagaatcttcaccttttaacatgctccc

SEQ ID NO: 184304 - DNA, 33 bp, Homo sapien
agcccaagaatcttcatcttttaacatgctccc

SEQ ID NO: 184305 - DNA, 33 bp, Homo sapien
gtcacaaaggtatcaaagtatcaagttctggca

SEQ ID NO: 184306 - DNA, 33 bp, Homo sapien
gtcacaaaggtatcaatgtatcaagttctggca

SEQ ID NO: 184307 - DNA, 33 bp, Homo sapien
gtctagaaaataacaaattagctaaaggaagat

SEQ ID NO: 184308 - DNA, 33 bp, Homo sapien
gtctagaaaataacaagttagctaaaggaagat

SEQ ID NO: 184309 - DNA, 33 bp, Homo sapien
gtagagctacggaacacaacataggaggggcgt

SEQ ID NO: 184310 - DNA, 33 bp, Homo sapien
gtagagctacggaacagaacataggaggggcgt

SEQ ID NO: 184311 - DNA, 33 bp, Homo sapien
aagttgggttgcctgaccactagatttgggcag

SEQ ID NO: 184312 - DNA, 33 bp, Homo sapien
aagttgggttgcctgagcactagatttgggcag

SEQ ID NO: 184313 - DNA, 33 bp, Homo sapien
atgagaaggaatgttacacctggaaattcccag

SEQ ID NO: 184314 - DNA, 33 bp, Homo sapien
atgagaaggaatgttatacctggaaattcccag

SEQ ID NO: 184315 - DNA, 33 bp, Homo sapien
gcacagagtatacaaacggactgaatatataag

SEQ ID NO: 184316 - DNA, 33 bp, Homo sapien
gcacagagtatacaaatggactgaatatataag

SEQ ID NO: 184317 - DNA, 33 bp, Homo sapien
aagaattgtcttcgaccactcataaaatacact

SEQ ID NO: 184318 - DNA, 33 bp, Homo sapien
aagaattgtcttcgactactcataaaatacact

SEQ ID NO: 184319 - DNA, 33 bp, Homo sapien
aatagagttacccacaagaaactggaaatcgag

SEQ ID NO: 184320 - DNA, 33 bp, Homo sapien
aatagagttacccacacgaaactggaaatcgag

SEQ ID NO: 184321 - DNA, 33 bp, Homo sapien
agtggtaatggccaaaaagcttggtcagattct

SEQ ID NO: 184322 - DNA, 33 bp, Homo sapien
agtggtaatggccaaatagcttggtcagattct

SEQ ID NO: 184323 - DNA, 33 bp, Homo sapien
aagtgactatgtctggaattattacctgttttc

SEQ ID NO: 184324 - DNA, 33 bp, Homo sapien
aagtgactatgtctgggattattacctgttttc

SEQ ID NO: 184325 - DNA, 33 bp, Homo sapien
gcaccaaattttactcacgtccatttgaagaga

SEQ ID NO: 184326 - DNA, 33 bp, Homo sapien
gcaccaaattttactcgcgtccatttgaagaga

SEQ ID NO: 184327 - DNA, 33 bp, Homo sapien
cttcagtagccgattcaattcgatgaaagaaag

SEQ ID NO: 184328 - DNA, 33 bp, Homo sapien
cttcagtagccgattcgattcgatgaaagaaag

SEQ ID NO: 184329 - DNA, 33 bp, Homo sapien
agaaattatataggtgaaacacagagacgtaaa

SEQ ID NO: 184330 - DNA, 33 bp, Homo sapien
agaaattatataggtgtaacacagagacgtaaa

SEQ ID NO: 184331 - DNA, 33 bp, Homo sapien
tttaagctagctagaacgatttttgttttctac

SEQ ID NO: 184332 - DNA, 33 bp, Homo sapien
tttaagctagctagaatgatttttgttttctac

SEQ ID NO: 184333 - DNA, 33 bp, Homo sapien
acctacagaactgtaaaagaatccatttgtgtt

SEQ ID NO: 184334 - DNA, 33 bp, Homo sapien
acctacagaactgtaagagaatccatttgtgtt

SEQ ID NO: 184335 - DNA, 33 bp, Homo sapien
aggctagttgctctccacatctgcagaatacct

SEQ ID NO: 184336 - DNA, 33 bp, Homo sapien
aggctagttgctctcctcatctgcagaatacct

SEQ ID NO: 184337 - DNA, 33 bp, Homo sapien
cctagcaatatccagacaagaaaggaccaactt

SEQ ID NO: 184338 - DNA, 33 bp, Homo sapien
cctagcaatatccagataagaaaggaccaactt

SEQ ID NO: 184339 - DNA, 33 bp, Homo sapien
gcttgaaacaggtacacgggccagggaaatgcc

SEQ ID NO: 184340 - DNA, 33 bp, Homo sapien
gcttgaaacaggtacatgggccagggaaatgcc

SEQ ID NO: 184341 - DNA, 33 bp, Homo sapien
tactgctgagcatcccgaagggagacctaaatc

SEQ ID NO: 184342 - DNA, 33 bp, Homo sapien
tactgctgagcatccctaagggagacctaaatc

SEQ ID NO: 184343 - DNA, 33 bp, Homo sapien
ctcttcctcagagatacaggctgctgtgcctcc

SEQ ID NO: 184344 - DNA, 33 bp, Homo sapien
ctcttcctcagagatataggctgctgtgcctcc

SEQ ID NO: 184345 - DNA, 33 bp, Homo sapien
aacgtcccatgcctgacagagattgagcattga

SEQ ID NO: 184346 - DNA, 33 bp, Homo sapien
aacgtcccatgcctgagagagattgagcattga

SEQ ID NO: 184347 - DNA, 33 bp, Homo sapien
gccaggatgattccaaacaggagggtgacaaca

SEQ ID NO: 184348 - DNA, 33 bp, Homo sapien
gccaggatgattccaagcaggagggtgacaaca

SEQ ID NO: 184349 - DNA, 33 bp, Homo sapien
atagcaaggtttcctgaagaagtagatggggaa

SEQ ID NO: 184350 - DNA, 33 bp, Homo sapien
atagcaaggtttcctggagaagtagatggggaa

SEQ ID NO: 184351 - DNA, 33 bp, Homo sapien
ttagagccagtatgaaaaaatacaacttttctt

SEQ ID NO: 184352 - DNA, 33 bp, Homo sapien
ttagagccagtatgaacaaatacaacttttctt

SEQ ID NO: 184353 - DNA, 33 bp, Homo sapien
gaacaagcaattcaccaaaaatgggtgtaaaaa

SEQ ID NO: 184354 - DNA, 33 bp, Homo sapien
gaacaagcaattcaccgaaaatgggtgtaaaaa

SEQ ID NO: 184355 - DNA, 33 bp, Homo sapien
ataggaggacagaatcaactatggcatttaaac

SEQ ID NO: 184356 - DNA, 33 bp, Homo sapien
ataggaggacagaatccactatggcatttaaac

SEQ ID NO: 184357 - DNA, 33 bp, Homo sapien
gaaatcaccaccatgcaccaccctctacatgac

SEQ ID NO: 184358 - DNA, 33 bp, Homo sapien
gaaatcaccaccatgcgccaccctctacatgac

SEQ ID NO: 184359 - DNA, 33 bp, Homo sapien
atgccaatgagtcataagttttgcctctttaca

SEQ ID NO: 184360 - DNA, 33 bp, Homo sapien
atgccaatgagtcataggttttgcctctttaca

SEQ ID NO: 184361 - DNA, 33 bp, Homo sapien
ttacacttgtagccacaggagttgtaaatagga

SEQ ID NO: 184362 - DNA, 33 bp, Homo sapien
ttacacttgtagccacgggagttgtaaatagga

SEQ ID NO: 184363 - DNA, 33 bp, Homo sapien
aaagataggtagcttaccctagatctcataact

SEQ ID NO: 184364 - DNA, 33 bp, Homo sapien
aaagataggtagcttatcctagatctcataact

SEQ ID NO: 184365 - DNA, 33 bp, Homo sapien
tcaaggagactgtcaactatatatgatcattca

SEQ ID NO: 184366 - DNA, 33 bp, Homo sapien
tcaaggagactgtcaattatatatgatcattca

SEQ ID NO: 184367 - DNA, 33 bp, Homo sapien
ttaagggaagatcaagacaaaattgcttttatt

SEQ ID NO: 184368 - DNA, 33 bp, Homo sapien
ttaagggaagatcaaggcaaaattgcttttatt

SEQ ID NO: 184369 - DNA, 33 bp, Homo sapien
aaaagcttaatgaaaaattgaggtttgtcgctt

SEQ ID NO: 184370 - DNA, 33 bp, Homo sapien
aaaagcttaatgaaaatttgaggtttgtcgctt

SEQ ID NO: 184371 - DNA, 33 bp, Homo sapien
atgttcaaattctagccccactccatgaccttg

SEQ ID NO: 184372 - DNA, 33 bp, Homo sapien
atgttcaaattctagcgccactccatgaccttg

SEQ ID NO: 184373 - DNA, 33 bp, Homo sapien
aagatattgacatgaaaatatttgtatgtgggc

SEQ ID NO: 184374 - DNA, 33 bp, Homo sapien
aagatattgacatgaacatatttgtatgtgggc

SEQ ID NO: 184375 - DNA, 33 bp, Homo sapien
gctcttattttgcctacgacactggttaatttc

SEQ ID NO: 184376 - DNA, 33 bp, Homo sapien
gctcttattttgcctatgacactggttaatttc

SEQ ID NO: 184377 - DNA, 33 bp, Homo sapien
tggtttaaagactacactcctcagtaccaggcc

SEQ ID NO: 184378 - DNA, 33 bp, Homo sapien
tggtttaaagactacattcctcagtaccaggcc

SEQ ID NO: 184379 - DNA, 33 bp, Homo sapien
tgttctgtatctccagaagtcccctgaggcctg

SEQ ID NO: 184380 - DNA, 33 bp, Homo sapien
tgttctgtatctccaggagtcccctgaggcctg

SEQ ID NO: 184381 - DNA, 33 bp, Homo sapien
agaagatttagggatcaataagcaaggacttta

SEQ ID NO: 184382 - DNA, 33 bp, Homo sapien
agaagatttagggatctataagcaaggacttta

SEQ ID NO: 184383 - DNA, 33 bp, Homo sapien
ttacaaggagacagcactagattattttcataa

SEQ ID NO: 184384 - DNA, 33 bp, Homo sapien
ttacaaggagacagcattagattattttcataa

SEQ ID NO: 184385 - DNA, 33 bp, Homo sapien
ctcagggtgatgtgcaaacgaaagctttcatat

SEQ ID NO: 184386 - DNA, 33 bp, Homo sapien
ctcagggtgatgtgcatacgaaagctttcatat

SEQ ID NO: 184387 - DNA, 33 bp, Homo sapien
tttcaatgtcttcccacctgttttgaggtcatg

SEQ ID NO: 184388 - DNA, 33 bp, Homo sapien
tttcaatgtcttcccatctgttttgaggtcatg

SEQ ID NO: 184389 - DNA, 33 bp, Homo sapien
agtgcatctgcctatgcaaaataatttcaaaga

SEQ ID NO: 184390 - DNA, 33 bp, Homo sapien
agtgcatctgcctatgtaaaataatttcaaaga

SEQ ID NO: 184391 - DNA, 33 bp, Homo sapien
cctgtttgatatggaagtaagactagagatcct

SEQ ID NO: 184392 - DNA, 33 bp, Homo sapien
cctgtttgatatggaattaagactagagatcct

SEQ ID NO: 184393 - DNA, 33 bp, Homo sapien
aggaaatgattgttcaagaccatctttaaatct

SEQ ID NO: 184394 - DNA, 33 bp, Homo sapien
aggaaatgattgttcatgaccatctttaaatct

SEQ ID NO: 184395 - DNA, 33 bp, Homo sapien
gggttctcagaggcaaattcagaccgtgttgtt

SEQ ID NO: 184396 - DNA, 33 bp, Homo sapien
gggttctcagaggcaagttcagaccgtgttgtt

SEQ ID NO: 184397 - DNA, 33 bp, Homo sapien
catctacgttatccataaagtgtcgcgagagaa

SEQ ID NO: 184398 - DNA, 33 bp, Homo sapien
catctacgttatccatgaagtgtcgcgagagaa

SEQ ID NO: 184399 - DNA, 33 bp, Homo sapien
tcaccagtaaggtttacagccccgcctatcact

SEQ ID NO: 184400 - DNA, 33 bp, Homo sapien
tcaccagtaaggtttatagccccgcctatcact

SEQ ID NO: 184401 - DNA, 33 bp, Homo sapien
caaactaattcctgaaacttgcaacacaaaaat

SEQ ID NO: 184402 - DNA, 33 bp, Homo sapien
caaactaattcctgaaccttgcaacacaaaaat

SEQ ID NO: 184403 - DNA, 33 bp, Homo sapien
tatcatgagaaaaacaagagtttagacagggtt

SEQ ID NO: 184404 - DNA, 33 bp, Homo sapien
tatcatgagaaaaacaggagtttagacagggtt

SEQ ID NO: 184405 - DNA, 33 bp, Homo sapien
ggcgtgtggagcaatcagaacgttcacttctgc

SEQ ID NO: 184406 - DNA, 33 bp, Homo sapien
ggcgtgtggagcaatcggaacgttcacttctgc

SEQ ID NO: 184407 - DNA, 33 bp, Homo sapien
gagagagaggctgaccagagagattagggatat

SEQ ID NO: 184408 - DNA, 33 bp, Homo sapien
gagagagaggctgaccggagagattagggatat

SEQ ID NO: 184409 - DNA, 33 bp, Homo sapien
ataagagttcattcaacaaacgagtgcaagttt

SEQ ID NO: 184410 - DNA, 33 bp, Homo sapien
ataagagttcattcaataaacgagtgcaagttt

SEQ ID NO: 184411 - DNA, 33 bp, Homo sapien
gttttcttgaagctaaggaggaaactttatcta

SEQ ID NO: 184412 - DNA, 33 bp, Homo sapien
gttttcttgaagctaatgaggaaactttatcta

SEQ ID NO: 184413 - DNA, 33 bp, Homo sapien
aggggtcactgcaaaccgaattagaagcaaatg

SEQ ID NO: 184414 - DNA, 33 bp, Homo sapien
aggggtcactgcaaactgaattagaagcaaatg

SEQ ID NO: 184415 - DNA, 33 bp, Homo sapien
ggaaagctaatggaacaagattacaagactgtg

SEQ ID NO: 184416 - DNA, 33 bp, Homo sapien
ggaaagctaatggaacgagattacaagactgtg

SEQ ID NO: 184417 - DNA, 33 bp, Homo sapien
gttcttcattgccccactgcgtattttcccaac

SEQ ID NO: 184418 - DNA, 33 bp, Homo sapien
gttcttcattgccccattgcgtattttcccaac

SEQ ID NO: 184419 - DNA, 33 bp, Homo sapien
aatagtgaataactgaagccacctaaaatgccc

SEQ ID NO: 184420 - DNA, 33 bp, Homo sapien
aatagtgaataactgacgccacctaaaatgccc

SEQ ID NO: 184421 - DNA, 33 bp, Homo sapien
gtgtcattgtcagagtaaaaaattagacactcg

SEQ ID NO: 184422 - DNA, 33 bp, Homo sapien
gtgtcattgtcagagtgaaaaattagacactcg

SEQ ID NO: 184423 - DNA, 33 bp, Homo sapien
catcaacctttggactcaggtttggaattgctt

SEQ ID NO: 184424 - DNA, 33 bp, Homo sapien
catcaacctttggacttaggtttggaattgctt

SEQ ID NO: 184425 - DNA, 33 bp, Homo sapien
aataaggaatgagttcaaattttaggaaccaca

SEQ ID NO: 184426 - DNA, 33 bp, Homo sapien
aataaggaatgagttcgaattttaggaaccaca

SEQ ID NO: 184427 - DNA, 33 bp, Homo sapien
tctgggaagagggaaaaaggttgcttctgcttt

SEQ ID NO: 184428 - DNA, 33 bp, Homo sapien
tctgggaagagggaaacaggttgcttctgcttt

SEQ ID NO: 184429 - DNA, 33 bp, Homo sapien
catatcctcacatttccagtgcccttgagactg

SEQ ID NO: 184430 - DNA, 33 bp, Homo sapien
catatcctcacatttctagtgcccttgagactg

SEQ ID NO: 184431 - DNA, 33 bp, Homo sapien
attccaaatatccagaaactgagactccacaag

SEQ ID NO: 184432 - DNA, 33 bp, Homo sapien
attccaaatatccagacactgagactccacaag

SEQ ID NO: 184433 - DNA, 33 bp, Homo sapien
gattctcagtctgtaaagcaaatcagagagatt

SEQ ID NO: 184434 - DNA, 33 bp, Homo sapien
gattctcagtctgtaacgcaaatcagagagatt

SEQ ID NO: 184435 - DNA, 33 bp, Homo sapien
tattaccatagtattaagccaaaacagggtctg

SEQ ID NO: 184436 - DNA, 33 bp, Homo sapien
tattaccatagtattaggccaaaacagggtctg

SEQ ID NO: 184437 - DNA, 33 bp, Homo sapien
aacagaaaggaagagacgcattgtttcatgaaa

SEQ ID NO: 184438 - DNA, 33 bp, Homo sapien
aacagaaaggaagagatgcattgtttcatgaaa

SEQ ID NO: 184439 - DNA, 33 bp, Homo sapien
tactctgttttatttacctttgtttgctccatg

SEQ ID NO: 184440 - DNA, 33 bp, Homo sapien
tactctgttttatttatctttgtttgctccatg

SEQ ID NO: 184441 - DNA, 33 bp, Homo sapien
ttgatgaaaggcaagaatatttctagcaggaca

SEQ ID NO: 184442 - DNA, 33 bp, Homo sapien
ttgatgaaaggcaagattatttctagcaggaca

SEQ ID NO: 184443 - DNA, 33 bp, Homo sapien
tcactgttgaacaaagaacttgcctgtaaggtt

SEQ ID NO: 184444 - DNA, 33 bp, Homo sapien
tcactgttgaacaaaggacttgcctgtaaggtt

SEQ ID NO: 184445 - DNA, 33 bp, Homo sapien
tccaggcaactgaagtaaactgaattgaactga

SEQ ID NO: 184446 - DNA, 33 bp, Homo sapien
tccaggcaactgaagtgaactgaattgaactga

SEQ ID NO: 184447 - DNA, 33 bp, Homo sapien
tgagggctaggcaaaaacactatatttgagcca

SEQ ID NO: 184448 - DNA, 33 bp, Homo sapien
tgagggctaggcaaaagcactatatttgagcca

SEQ ID NO: 184449 - DNA, 33 bp, Homo sapien
gaagaggaagaaagcaaaatcattcctatctga

SEQ ID NO: 184450 - DNA, 33 bp, Homo sapien
gaagaggaagaaagcacaatcattcctatctga

SEQ ID NO: 184451 - DNA, 33 bp, Homo sapien
tgagactgctgaaactgaagtttaggatggtaa

SEQ ID NO: 184452 - DNA, 33 bp, Homo sapien
tgagactgctgaaacttaagtttaggatggtaa

SEQ ID NO: 184453 - DNA, 33 bp, Homo sapien
agtttaggatggtaaaaggagaggaatatgaac

SEQ ID NO: 184454 - DNA, 33 bp, Homo sapien
agtttaggatggtaaagggagaggaatatgaac

SEQ ID NO: 184455 - DNA, 33 bp, Homo sapien
catgctgttttgggaaatctgagattgtctcaa

SEQ ID NO: 184456 - DNA, 33 bp, Homo sapien
catgctgttttgggaattctgagattgtctcaa

SEQ ID NO: 184457 - DNA, 33 bp, Homo sapien
gaatctggctgaaaccaagagacagcagggaaa

SEQ ID NO: 184458 - DNA, 33 bp, Homo sapien
gaatctggctgaaaccgagagacagcagggaaa

SEQ ID NO: 184459 - DNA, 33 bp, Homo sapien
ttactgtatcggacctaaatcagcccatgcttg

SEQ ID NO: 184460 - DNA, 33 bp, Homo sapien
ttactgtatcggacctgaatcagcccatgcttg

SEQ ID NO: 184461 - DNA, 33 bp, Homo sapien
attgttaaaagtactcaaggcagttattcagat

SEQ ID NO: 184462 - DNA, 33 bp, Homo sapien
attgttaaaagtactcgaggcagttattcagat

SEQ ID NO: 184463 - DNA, 33 bp, Homo sapien
ctccctctggagtcaaagttcattcctgtccat

SEQ ID NO: 184464 - DNA, 33 bp, Homo sapien
ctccctctggagtcaacgttcattcctgtccat

SEQ ID NO: 184465 - DNA, 33 bp, Homo sapien
agcaatgtttaaggaaaaagagagataatctta

SEQ ID NO: 184466 - DNA, 33 bp, Homo sapien
agcaatgtttaaggaacaagagagataatctta

SEQ ID NO: 184467 - DNA, 33 bp, Homo sapien
gaactgaatatgttgccgagagctttctgaact

SEQ ID NO: 184468 - DNA, 33 bp, Homo sapien
gaactgaatatgttgctgagagctttctgaact

SEQ ID NO: 184469 - DNA, 33 bp, Homo sapien
gtatttgttgcaaaagaatgctatcccaagtca

SEQ ID NO: 184470 - DNA, 33 bp, Homo sapien
gtatttgttgcaaaaggatgctatcccaagtca

SEQ ID NO: 184471 - DNA, 33 bp, Homo sapien
cgtgatattttgatgacagataaacagagtcta

SEQ ID NO: 184472 - DNA, 33 bp, Homo sapien
cgtgatattttgatgatagataaacagagtcta

SEQ ID NO: 184473 - DNA, 33 bp, Homo sapien
tgtgaacctcataattgaagtattttcagcaaa

SEQ ID NO: 184474 - DNA, 33 bp, Homo sapien
tgtgaacctcataatttaagtattttcagcaaa

SEQ ID NO: 184475 - DNA, 33 bp, Homo sapien
tctgtactaaatctcaatccctctgacctgtga

SEQ ID NO: 184476 - DNA, 33 bp, Homo sapien
tctgtactaaatctcattccctctgacctgtga

SEQ ID NO: 184477 - DNA, 33 bp, Homo sapien
aatgtctcagagggagaaaatgattgactgggt

SEQ ID NO: 184478 - DNA, 33 bp, Homo sapien
aatgtctcagagggaggaaatgattgactgggt

SEQ ID NO: 184479 - DNA, 33 bp, Homo sapien
gaatcctagaaccaccacttatagtcgtgtgac

SEQ ID NO: 184480 - DNA, 33 bp, Homo sapien
gaatcctagaaccaccgcttatagtcgtgtgac

SEQ ID NO: 184481 - DNA, 33 bp, Homo sapien
aggtaaggatgctcaacaaagggaatttgacta

SEQ ID NO: 184482 - DNA, 33 bp, Homo sapien
aggtaaggatgctcaataaagggaatttgacta

SEQ ID NO: 184483 - DNA, 33 bp, Homo sapien
tttcttgacctcgacaagtgttttgtagacttt

SEQ ID NO: 184484 - DNA, 33 bp, Homo sapien
tttcttgacctcgacaggtgttttgtagacttt

SEQ ID NO: 184485 - DNA, 33 bp, Homo sapien
aaaatatattgctttacgcttggataatggtca

SEQ ID NO: 184486 - DNA, 33 bp, Homo sapien
aaaatatattgctttaggcttggataatggtca

SEQ ID NO: 184487 - DNA, 33 bp, Homo sapien
atgtgctgcataaaccagggacttgtttccagc

SEQ ID NO: 184488 - DNA, 33 bp, Homo sapien
atgtgctgcataaaccggggacttgtttccagc

SEQ ID NO: 184489 - DNA, 33 bp, Homo sapien
taaagcacaaattggacagcagataaagttggt

SEQ ID NO: 184490 - DNA, 33 bp, Homo sapien
taaagcacaaattggagagcagataaagttggt

SEQ ID NO: 184491 - DNA, 33 bp, Homo sapien
catgcaagtcacaggggacatgatggctcagct

SEQ ID NO: 184492 - DNA, 33 bp, Homo sapien
catgcaagtcacagggtacatgatggctcagct

SEQ ID NO: 184493 - DNA, 33 bp, Homo sapien
cttatgtaacatgacactgacccttttgtatag

SEQ ID NO: 184494 - DNA, 33 bp, Homo sapien
cttatgtaacatgacattgacccttttgtatag

SEQ ID NO: 184495 - DNA, 33 bp, Homo sapien
agaccagtggacttaacatcaagacaggagttt

SEQ ID NO: 184496 - DNA, 33 bp, Homo sapien
agaccagtggacttaatatcaagacaggagttt

SEQ ID NO: 184497 - DNA, 33 bp, Homo sapien
actaggcacagaggaaaaacattcaacaggtgt

SEQ ID NO: 184498 - DNA, 33 bp, Homo sapien
actaggcacagaggaagaacattcaacaggtgt

SEQ ID NO: 184499 - DNA, 33 bp, Homo sapien
aacaatacccagttgaacaggaagcaagcaaag

SEQ ID NO: 184500 - DNA, 33 bp, Homo sapien
aacaatacccagttgagcaggaagcaagcaaag

SEQ ID NO: 184501 - DNA, 33 bp, Homo sapien
aggaaaatattcacccacttagcacaacccatg

SEQ ID NO: 184502 - DNA, 33 bp, Homo sapien
aggaaaatattcacccgcttagcacaacccatg

SEQ ID NO: 184503 - DNA, 33 bp, Homo sapien
tgatgggaggccatagaagaataggttttcaac

SEQ ID NO: 184504 - DNA, 33 bp, Homo sapien
tgatgggaggccatagtagaataggttttcaac

SEQ ID NO: 184505 - DNA, 33 bp, Homo sapien
gcctcccatcactaaacttgaaaagcaatccac

SEQ ID NO: 184506 - DNA, 33 bp, Homo sapien
gcctcccatcactaaatttgaaaagcaatccac

SEQ ID NO: 184507 - DNA, 33 bp, Homo sapien
gaaggagaagatagaaagttggagacatttcac

SEQ ID NO: 184508 - DNA, 33 bp, Homo sapien
gaaggagaagatagaacgttggagacatttcac

SEQ ID NO: 184509 - DNA, 33 bp, Homo sapien
tatcttctccttcaaacctcattttcagctttg

SEQ ID NO: 184510 - DNA, 33 bp, Homo sapien
tatcttctccttcaaatctcattttcagctttg

SEQ ID NO: 184511 - DNA, 33 bp, Homo sapien
aattctgttagctctaacttcaacatctctgta

SEQ ID NO: 184512 - DNA, 33 bp, Homo sapien
aattctgttagctctatcttcaacatctctgta

SEQ ID NO: 184513 - DNA, 33 bp, Homo sapien
tagaagagaagagagacgataagcctactaaat

SEQ ID NO: 184514 - DNA, 33 bp, Homo sapien
tagaagagaagagagatgataagcctactaaat

SEQ ID NO: 184515 - DNA, 33 bp, Homo sapien
aaaatgtgagaaataaattaagaacagcatcat

SEQ ID NO: 184516 - DNA, 33 bp, Homo sapien
aaaatgtgagaaataatttaagaacagcatcat

SEQ ID NO: 184517 - DNA, 33 bp, Homo sapien
attgcttaagtaggccagagttatgaattgagg

SEQ ID NO: 184518 - DNA, 33 bp, Homo sapien
attgcttaagtaggccggagttatgaattgagg

SEQ ID NO: 184519 - DNA, 33 bp, Homo sapien
tccttctgtgtatatcagagtttgtgtctcttc

SEQ ID NO: 184520 - DNA, 33 bp, Homo sapien
tccttctgtgtatatcggagtttgtgtctcttc

SEQ ID NO: 184521 - DNA, 33 bp, Homo sapien
gcaaaaaagcaagagaaactagtaacaggcaga

SEQ ID NO: 184522 - DNA, 33 bp, Homo sapien
gcaaaaaagcaagagacactagtaacaggcaga

SEQ ID NO: 184523 - DNA, 33 bp, Homo sapien
ttgaaattttgtcctcacaacaaccccatatag

SEQ ID NO: 184524 - DNA, 33 bp, Homo sapien
ttgaaattttgtcctcgcaacaaccccatatag

SEQ ID NO: 184525 - DNA, 33 bp, Homo sapien
ctttttgcttgtgtggaaataatacttactata

SEQ ID NO: 184526 - DNA, 33 bp, Homo sapien
ctttttgcttgtgtgggaataatacttactata

SEQ ID NO: 184527 - DNA, 33 bp, Homo sapien
aggagctgtgtagtgccatggactcagggatga

SEQ ID NO: 184528 - DNA, 33 bp, Homo sapien
aggagctgtgtagtgctatggactcagggatga

SEQ ID NO: 184529 - DNA, 33 bp, Homo sapien
ctagcgtggatgtttcccaagcagttttcaact

SEQ ID NO: 184530 - DNA, 33 bp, Homo sapien
ctagcgtggatgtttctcaagcagttttcaact

SEQ ID NO: 184531 - DNA, 33 bp, Homo sapien
gctgaaacactccccccggctgaccacattgca

SEQ ID NO: 184532 - DNA, 33 bp, Homo sapien
gctgaaacactccccctggctgaccacattgca

SEQ ID NO: 184533 - DNA, 33 bp, Homo sapien
cttcctaagccattgaggaaggagaagaataaa

SEQ ID NO: 184534 - DNA, 33 bp, Homo sapien
cttcctaagccattgatgaaggagaagaataaa

SEQ ID NO: 184535 - DNA, 33 bp, Homo sapien
taaggcaagagatgtccatgtgtattgtgttta

SEQ ID NO: 184536 - DNA, 33 bp, Homo sapien
taaggcaagagatgtctatgtgtattgtgttta

SEQ ID NO: 184537 - DNA, 33 bp, Homo sapien
ttctctatccccagaccaaaacttccctctcca

SEQ ID NO: 184538 - DNA, 33 bp, Homo sapien
ttctctatccccagactaaaacttccctctcca

SEQ ID NO: 184539 - DNA, 33 bp, Homo sapien
cttcctgaattgaggaacaccaatccactgctt

SEQ ID NO: 184540 - DNA, 33 bp, Homo sapien
cttcctgaattgaggaccaccaatccactgctt

SEQ ID NO: 184541 - DNA, 33 bp, Homo sapien
gtagatagacaaggcaaaagactataattattt

SEQ ID NO: 184542 - DNA, 33 bp, Homo sapien
gtagatagacaaggcacaagactataattattt

SEQ ID NO: 184543 - DNA, 33 bp, Homo sapien
ttgtgatacaagaaacacttcatgatctggccc

SEQ ID NO: 184544 - DNA, 33 bp, Homo sapien
ttgtgatacaagaaacccttcatgatctggccc

SEQ ID NO: 184545 - DNA, 33 bp, Homo sapien
ggtgtgcctctactaacctcctgggacatcctt

SEQ ID NO: 184546 - DNA, 33 bp, Homo sapien
ggtgtgcctctactaagctcctgggacatcctt

SEQ ID NO: 184547 - DNA, 33 bp, Homo sapien
aataatgataggagtaaaagacgggcagcgttt

SEQ ID NO: 184548 - DNA, 33 bp, Homo sapien
aataatgataggagtagaagacgggcagcgttt

SEQ ID NO: 184549 - DNA, 33 bp, Homo sapien
gcagatttcaggtgaggatgaattctggatatg

SEQ ID NO: 184550 - DNA, 33 bp, Homo sapien
gcagatttcaggtgagtatgaattctggatatg

SEQ ID NO: 184551 - DNA, 33 bp, Homo sapien
tagaaaaaattgataacggctttaaactagggt

SEQ ID NO: 184552 - DNA, 33 bp, Homo sapien
tagaaaaaattgataagggctttaaactagggt

SEQ ID NO: 184553 - DNA, 33 bp, Homo sapien
tggcttctgccaaagtaactgagacaagaaacc

SEQ ID NO: 184554 - DNA, 33 bp, Homo sapien
tggcttctgccaaagtgactgagacaagaaacc

SEQ ID NO: 184555 - DNA, 33 bp, Homo sapien
taattgacattggtacgatccacagaccttatc

SEQ ID NO: 184556 - DNA, 33 bp, Homo sapien
taattgacattggtactatccacagaccttatc

SEQ ID NO: 184557 - DNA, 33 bp, Homo sapien
ggcaatagttacatgaagctaatgtgacaaaaa

SEQ ID NO: 184558 - DNA, 33 bp, Homo sapien
ggcaatagttacatgaggctaatgtgacaaaaa

SEQ ID NO: 184559 - DNA, 33 bp, Homo sapien
tgtggaaaatctcgctcaatcagggcagacaat

SEQ ID NO: 184560 - DNA, 33 bp, Homo sapien
tgtggaaaatctcgcttaatcagggcagacaat

SEQ ID NO: 184561 - DNA, 33 bp, Homo sapien
atacatagtactgttaccatttcagcaaatttg

SEQ ID NO: 184562 - DNA, 33 bp, Homo sapien
atacatagtactgttatcatttcagcaaatttg

SEQ ID NO: 184563 - DNA, 33 bp, Homo sapien
atatagaggcaattaaagcatagtcaatgtacg

SEQ ID NO: 184564 - DNA, 33 bp, Homo sapien
atatagaggcaattaaggcatagtcaatgtacg

SEQ ID NO: 184565 - DNA, 33 bp, Homo sapien
ttgggccataatcacactggtatcatcatttaa

SEQ ID NO: 184566 - DNA, 33 bp, Homo sapien
ttgggccataatcacattggtatcatcatttaa

SEQ ID NO: 184567 - DNA, 33 bp, Homo sapien
agttttgcacagagaacgtgtctggttcaatgg

SEQ ID NO: 184568 - DNA, 33 bp, Homo sapien
agttttgcacagagaatgtgtctggttcaatgg

SEQ ID NO: 184569 - DNA, 33 bp, Homo sapien
ctcatcataacactgcaaagtgggcattcttac

SEQ ID NO: 184570 - DNA, 33 bp, Homo sapien
ctcatcataacactgcgaagtgggcattcttac

SEQ ID NO: 184571 - DNA, 33 bp, Homo sapien
ttatatcagtctgcaaatgaataactattggct

SEQ ID NO: 184572 - DNA, 33 bp, Homo sapien
ttatatcagtctgcaagtgaataactattggct

SEQ ID NO: 184573 - DNA, 33 bp, Homo sapien
tccatcatgacacttcaatacagcattcatcca

SEQ ID NO: 184574 - DNA, 33 bp, Homo sapien
tccatcatgacacttcgatacagcattcatcca

SEQ ID NO: 184575 - DNA, 33 bp, Homo sapien
aatatttgttgaatgacggagtgagggtgtgac

SEQ ID NO: 184576 - DNA, 33 bp, Homo sapien
aatatttgttgaatgatggagtgagggtgtgac

SEQ ID NO: 184577 - DNA, 33 bp, Homo sapien
tcatgaggcttcagcacgtacaattccgaggtc

SEQ ID NO: 184578 - DNA, 33 bp, Homo sapien
tcatgaggcttcagcatgtacaattccgaggtc

SEQ ID NO: 184579 - DNA, 33 bp, Homo sapien
aattgtacatctaagacccaattaatttcctct

SEQ ID NO: 184580 - DNA, 33 bp, Homo sapien
aattgtacatctaagatccaattaatttcctct

SEQ ID NO: 184581 - DNA, 33 bp, Homo sapien
tctagaactttaaaaaaatagatgtgggccaga

SEQ ID NO: 184582 - DNA, 33 bp, Homo sapien
tctagaactttaaaaacatagatgtgggccaga

SEQ ID NO: 184583 - DNA, 33 bp, Homo sapien
gggtggtatgacccagcaatgtgacccctgaca

SEQ ID NO: 184584 - DNA, 33 bp, Homo sapien
gggtggtatgacccaggaatgtgacccctgaca

SEQ ID NO: 184585 - DNA, 33 bp, Homo sapien
cacttggccaagagaaaatagaggagtaaccct

SEQ ID NO: 184586 - DNA, 33 bp, Homo sapien
cacttggccaagagaagatagaggagtaaccct

SEQ ID NO: 184587 - DNA, 33 bp, Homo sapien
tgtgctttgagatgaacgtgggcactggtatcc

SEQ ID NO: 184588 - DNA, 33 bp, Homo sapien
tgtgctttgagatgaatgtgggcactggtatcc

SEQ ID NO: 184589 - DNA, 33 bp, Homo sapien
gttctggtttgaaagaaatatctaaaagttacc

SEQ ID NO: 184590 - DNA, 33 bp, Homo sapien
gttctggtttgaaagagatatctaaaagttacc

SEQ ID NO: 184591 - DNA, 33 bp, Homo sapien
ttgcagcagcaccagcaaaagtcaagtcctctg

SEQ ID NO: 184592 - DNA, 33 bp, Homo sapien
ttgcagcagcaccagcgaaagtcaagtcctctg

SEQ ID NO: 184593 - DNA, 33 bp, Homo sapien
tttggagtatattagtcaacatgcatatttgtt

SEQ ID NO: 184594 - DNA, 33 bp, Homo sapien
tttggagtatattagtgaacatgcatatttgtt

SEQ ID NO: 184595 - DNA, 33 bp, Homo sapien
tcttctctccacttcccggaagctagtaaatca

SEQ ID NO: 184596 - DNA, 33 bp, Homo sapien
tcttctctccacttcctggaagctagtaaatca

SEQ ID NO: 184597 - DNA, 33 bp, Homo sapien
tggatttcctgtcgtaaagcagacttcttgcct

SEQ ID NO: 184598 - DNA, 33 bp, Homo sapien
tggatttcctgtcgtagagcagacttcttgcct

SEQ ID NO: 184599 - DNA, 33 bp, Homo sapien
gcaaattaaagataacgcctgtcctcagggaac

SEQ ID NO: 184600 - DNA, 33 bp, Homo sapien
gcaaattaaagataactcctgtcctcagggaac

SEQ ID NO: 184601 - DNA, 33 bp, Homo sapien
ataaccctcctgtttacagaagtcactcattta

SEQ ID NO: 184602 - DNA, 33 bp, Homo sapien
ataaccctcctgtttagagaagtcactcattta

SEQ ID NO: 184603 - DNA, 33 bp, Homo sapien
ctgctttttgcagagaccggctaatgaaatgaa

SEQ ID NO: 184604 - DNA, 33 bp, Homo sapien
ctgctttttgcagagatcggctaatgaaatgaa

SEQ ID NO: 184605 - DNA, 33 bp, Homo sapien
aagctgcccaaaaatgacagaggcaagcttggg

SEQ ID NO: 184606 - DNA, 33 bp, Homo sapien
aagctgcccaaaaatgtcagaggcaagcttggg

SEQ ID NO: 184607 - DNA, 33 bp, Homo sapien
ctgtctcctccccagaaactgtactgaaatacc

SEQ ID NO: 184608 - DNA, 33 bp, Homo sapien
ctgtctcctccccagatactgtactgaaatacc

SEQ ID NO: 184609 - DNA, 33 bp, Homo sapien
atacaaaaaatcttgaagaattaagtgcttagg

SEQ ID NO: 184610 - DNA, 33 bp, Homo sapien
atacaaaaaatcttgaggaattaagtgcttagg

SEQ ID NO: 184611 - DNA, 33 bp, Homo sapien
gaaggagttaaaggagccaaaaatggactatac

SEQ ID NO: 184612 - DNA, 33 bp, Homo sapien
gaaggagttaaaggagtcaaaaatggactatac

SEQ ID NO: 184613 - DNA, 33 bp, Homo sapien
tgatgtcaccctggcacgcttcttggacaatcc

SEQ ID NO: 184614 - DNA, 33 bp, Homo sapien
tgatgtcaccctggcaggcttcttggacaatcc

SEQ ID NO: 184615 - DNA, 33 bp, Homo sapien
tgcatctgttagagcaacttgtcacattgcctt

SEQ ID NO: 184616 - DNA, 33 bp, Homo sapien
tgcatctgttagagcaccttgtcacattgcctt

SEQ ID NO: 184617 - DNA, 33 bp, Homo sapien
agtgtccactgaacaagaaattatagctcctgt

SEQ ID NO: 184618 - DNA, 33 bp, Homo sapien
agtgtccactgaacaataaattatagctcctgt

SEQ ID NO: 184619 - DNA, 33 bp, Homo sapien
ataacacttaagctaaagggttgatttcatcag

SEQ ID NO: 184620 - DNA, 33 bp, Homo sapien
ataacacttaagctaacgggttgatttcatcag

SEQ ID NO: 184621 - DNA, 33 bp, Homo sapien
cccatctcttcaaggccccaactacctatctat

SEQ ID NO: 184622 - DNA, 33 bp, Homo sapien
cccatctcttcaaggctccaactacctatctat

SEQ ID NO: 184623 - DNA, 33 bp, Homo sapien
ctcagtgaacccatacaacaaccaggagagaag

SEQ ID NO: 184624 - DNA, 33 bp, Homo sapien
ctcagtgaacccatacgacaaccaggagagaag

SEQ ID NO: 184625 - DNA, 33 bp, Homo sapien
gctaccctggacgtgccatgtcgtttcagggcc

SEQ ID NO: 184626 - DNA, 33 bp, Homo sapien
gctaccctggacgtgctatgtcgtttcagggcc

SEQ ID NO: 184627 - DNA, 33 bp, Homo sapien
gttagtgagattgcccagaaaagtaagaaaccc

SEQ ID NO: 184628 - DNA, 33 bp, Homo sapien
gttagtgagattgcccggaaaagtaagaaaccc

SEQ ID NO: 184629 - DNA, 33 bp, Homo sapien
catcattaccttcagaatcatttgaagttttag

SEQ ID NO: 184630 - DNA, 33 bp, Homo sapien
catcattaccttcagagtcatttgaagttttag

SEQ ID NO: 184631 - DNA, 33 bp, Homo sapien
ttgattcctaatcacaatggtagtgagtgatgg

SEQ ID NO: 184632 - DNA, 33 bp, Homo sapien
ttgattcctaatcacagtggtagtgagtgatgg

SEQ ID NO: 184633 - DNA, 33 bp, Homo sapien
taaatggccacagtcaaattggtaaaaatgact

SEQ ID NO: 184634 - DNA, 33 bp, Homo sapien
taaatggccacagtcagattggtaaaaatgact

SEQ ID NO: 184635 - DNA, 33 bp, Homo sapien
tgctcagctctggtagaaacctccctgggagtc

SEQ ID NO: 184636 - DNA, 33 bp, Homo sapien
tgctcagctctggtagcaacctccctgggagtc

SEQ ID NO: 184637 - DNA, 33 bp, Homo sapien
cagcccttctgggccacgttggtaacagcaagc

SEQ ID NO: 184638 - DNA, 33 bp, Homo sapien
cagcccttctgggccatgttggtaacagcaagc

SEQ ID NO: 184639 - DNA, 33 bp, Homo sapien
atgacaataacatgcactaaagtaaacacagtt

SEQ ID NO: 184640 - DNA, 33 bp, Homo sapien
atgacaataacatgcattaaagtaaacacagtt

SEQ ID NO: 184641 - DNA, 33 bp, Homo sapien
ggccttcatgtggagagtctcatgagtcttact

SEQ ID NO: 184642 - DNA, 33 bp, Homo sapien
ggccttcatgtggagattctcatgagtcttact

SEQ ID NO: 184643 - DNA, 33 bp, Homo sapien
tgcatctctagccccccagtaatcatcagtgtg

SEQ ID NO: 184644 - DNA, 33 bp, Homo sapien
tgcatctctagcccccgagtaatcatcagtgtg

SEQ ID NO: 184645 - DNA, 33 bp, Homo sapien
atatgaagtattgacacctaatttttttaaagg

SEQ ID NO: 184646 - DNA, 33 bp, Homo sapien
atatgaagtattgacatctaatttttttaaagg

SEQ ID NO: 184647 - DNA, 33 bp, Homo sapien
tccttgctttgctaagaaagaccacataagcct

SEQ ID NO: 184648 - DNA, 33 bp, Homo sapien
tccttgctttgctaagcaagaccacataagcct

SEQ ID NO: 184649 - DNA, 33 bp, Homo sapien
catatcaagggctcacaataaagggtaattaga

SEQ ID NO: 184650 - DNA, 33 bp, Homo sapien
catatcaagggctcacgataaagggtaattaga

SEQ ID NO: 184651 - DNA, 33 bp, Homo sapien
acccatcccctccttaggtatcagcaactcctc

SEQ ID NO: 184652 - DNA, 33 bp, Homo sapien
acccatcccctccttatgtatcagcaactcctc

SEQ ID NO: 184653 - DNA, 33 bp, Homo sapien
taatacttccatcttaccccaagaggagacact

SEQ ID NO: 184654 - DNA, 33 bp, Homo sapien
taatacttccatcttatcccaagaggagacact

SEQ ID NO: 184655 - DNA, 33 bp, Homo sapien
cacgttcaagccgctaacaaaacatggaaaagt

SEQ ID NO: 184656 - DNA, 33 bp, Homo sapien
cacgttcaagccgctagcaaaacatggaaaagt

SEQ ID NO: 184657 - DNA, 33 bp, Homo sapien
catatcccagggaataccagtttccattcagtg

SEQ ID NO: 184658 - DNA, 33 bp, Homo sapien
catatcccagggaatatcagtttccattcagtg

SEQ ID NO: 184659 - DNA, 33 bp, Homo sapien
tggctccctttgcacacagtgaataacagatgc

SEQ ID NO: 184660 - DNA, 33 bp, Homo sapien
tggctccctttgcacatagtgaataacagatgc

SEQ ID NO: 184661 - DNA, 33 bp, Homo sapien
tgggttagtgctcactaagacttggatatttgt

SEQ ID NO: 184662 - DNA, 33 bp, Homo sapien
tgggttagtgctcactgagacttggatatttgt

SEQ ID NO: 184663 - DNA, 33 bp, Homo sapien
ggaaccaaaagatccaatcctgagagcccatgc

SEQ ID NO: 184664 - DNA, 33 bp, Homo sapien
ggaaccaaaagatccattcctgagagcccatgc

SEQ ID NO: 184665 - DNA, 33 bp, Homo sapien
tgatgcagagcccagacagaaacaggaaccacc

SEQ ID NO: 184666 - DNA, 33 bp, Homo sapien
tgatgcagagcccagagagaaacaggaaccacc

SEQ ID NO: 184667 - DNA, 33 bp, Homo sapien
ttctggacctctggaacgggctgaggactaaca

SEQ ID NO: 184668 - DNA, 33 bp, Homo sapien
ttctggacctctggaatgggctgaggactaaca

SEQ ID NO: 184669 - DNA, 33 bp, Homo sapien
cagggatttgggcccacgtcatttaatgaggga

SEQ ID NO: 184670 - DNA, 33 bp, Homo sapien
cagggatttgggcccatgtcatttaatgaggga

SEQ ID NO: 184671 - DNA, 33 bp, Homo sapien
agttttcttagcttcaaaatccatagagtgaaa

SEQ ID NO: 184672 - DNA, 33 bp, Homo sapien
agttttcttagcttcagaatccatagagtgaaa

SEQ ID NO: 184673 - DNA, 33 bp, Homo sapien
ccaccgcctgctaaccaggatggtcatgtgcca

SEQ ID NO: 184674 - DNA, 33 bp, Homo sapien
ccaccgcctgctaacccggatggtcatgtgcca

SEQ ID NO: 184675 - DNA, 33 bp, Homo sapien
ttgttctctatcatccaaatttgacaattactg

SEQ ID NO: 184676 - DNA, 33 bp, Homo sapien
ttgttctctatcatccgaatttgacaattactg

SEQ ID NO: 184677 - DNA, 33 bp, Homo sapien
agagatcacagggaaacatttaagtggagagga

SEQ ID NO: 184678 - DNA, 33 bp, Homo sapien
agagatcacagggaaatatttaagtggagagga

SEQ ID NO: 184679 - DNA, 33 bp, Homo sapien
ccaaactgtaagaagacagaaggtacaggaaca

SEQ ID NO: 184680 - DNA, 33 bp, Homo sapien
ccaaactgtaagaagagagaaggtacaggaaca

SEQ ID NO: 184681 - DNA, 33 bp, Homo sapien
catgcccagccactaacggtttcttacattaaa

SEQ ID NO: 184682 - DNA, 33 bp, Homo sapien
catgcccagccactaatggtttcttacattaaa

SEQ ID NO: 184683 - DNA, 33 bp, Homo sapien
cagtctactatatgacaaaagcacaaataaact

SEQ ID NO: 184684 - DNA, 33 bp, Homo sapien
cagtctactatatgacgaaagcacaaataaact

SEQ ID NO: 184685 - DNA, 33 bp, Homo sapien
tatcctgagtccggtggagagctggaaatggag

SEQ ID NO: 184686 - DNA, 33 bp, Homo sapien
tatcctgagtccggtgtagagctggaaatggag

SEQ ID NO: 184687 - DNA, 33 bp, Homo sapien
gttggcctataatgtgaatattacagtagatga

SEQ ID NO: 184688 - DNA, 33 bp, Homo sapien
gttggcctataatgtggatattacagtagatga

SEQ ID NO: 184689 - DNA, 33 bp, Homo sapien
cgaatatggtttaaaaattaagcactgtggttc

SEQ ID NO: 184690 - DNA, 33 bp, Homo sapien
cgaatatggtttaaaagttaagcactgtggttc

SEQ ID NO: 184691 - DNA, 33 bp, Homo sapien
agatgctggatttaaaagccaagtcccaaactt

SEQ ID NO: 184692 - DNA, 33 bp, Homo sapien
agatgctggatttaaaggccaagtcccaaactt

SEQ ID NO: 184693 - DNA, 33 bp, Homo sapien
tcttcactcccacgccaatctgcagttagtggc

SEQ ID NO: 184694 - DNA, 33 bp, Homo sapien
tcttcactcccacgccgatctgcagttagtggc

SEQ ID NO: 184695 - DNA, 33 bp, Homo sapien
gactttattgtaaacactcatgccactggaaaa

SEQ ID NO: 184696 - DNA, 33 bp, Homo sapien
gactttattgtaaacagtcatgccactggaaaa

SEQ ID NO: 184697 - DNA, 33 bp, Homo sapien
agaagaagcagttacaccatctaaataacacaa

SEQ ID NO: 184698 - DNA, 33 bp, Homo sapien
agaagaagcagttacatcatctaaataacacaa

SEQ ID NO: 184699 - DNA, 33 bp, Homo sapien
ctgagtcatgcaattgaagggaatcccattttc

SEQ ID NO: 184700 - DNA, 33 bp, Homo sapien
ctgagtcatgcaattggagggaatcccattttc

SEQ ID NO: 184701 - DNA, 33 bp, Homo sapien
tgactgaagtgcctcaaatacctcacatgaagg

SEQ ID NO: 184702 - DNA, 33 bp, Homo sapien
tgactgaagtgcctcagatacctcacatgaagg

SEQ ID NO: 184703 - DNA, 33 bp, Homo sapien
gtagagttagaaaaaaagtatcatctttctgag

SEQ ID NO: 184704 - DNA, 33 bp, Homo sapien
gtagagttagaaaaaaggtatcatctttctgag

SEQ ID NO: 184705 - DNA, 33 bp, Homo sapien
cctttgaatgtcataaatcacaagggcaagaag

SEQ ID NO: 184706 - DNA, 33 bp, Homo sapien
cctttgaatgtcataagtcacaagggcaagaag

SEQ ID NO: 184707 - DNA, 33 bp, Homo sapien
atgtgataggtaaaagactcattgcctctggac

SEQ ID NO: 184708 - DNA, 33 bp, Homo sapien
atgtgataggtaaaagcctcattgcctctggac

SEQ ID NO: 184709 - DNA, 33 bp, Homo sapien
ggttgcctctggtggcaagttgggattggctgg

SEQ ID NO: 184710 - DNA, 33 bp, Homo sapien
ggttgcctctggtggcgagttgggattggctgg

SEQ ID NO: 184711 - DNA, 33 bp, Homo sapien
cgtgaccaaaatatgacgttaaaatcagcaact

SEQ ID NO: 184712 - DNA, 33 bp, Homo sapien
cgtgaccaaaatatgatgttaaaatcagcaact

SEQ ID NO: 184713 - DNA, 33 bp, Homo sapien
ttgatctataacccagaaaatgcacttttggga

SEQ ID NO: 184714 - DNA, 33 bp, Homo sapien
ttgatctataacccagcaaatgcacttttggga

SEQ ID NO: 184715 - DNA, 33 bp, Homo sapien
tcaagttcccacaggaaaatcacaatggagttt

SEQ ID NO: 184716 - DNA, 33 bp, Homo sapien
tcaagttcccacaggagaatcacaatggagttt

SEQ ID NO: 184717 - DNA, 33 bp, Homo sapien
gggctgagtttgtgacaagagggaaaacacaaa

SEQ ID NO: 184718 - DNA, 33 bp, Homo sapien
gggctgagtttgtgacgagagggaaaacacaaa

SEQ ID NO: 184719 - DNA, 33 bp, Homo sapien
agtgagggagtaggagccaaggcagggatctga

SEQ ID NO: 184720 - DNA, 33 bp, Homo sapien
agtgagggagtaggagtcaaggcagggatctga

SEQ ID NO: 184721 - DNA, 33 bp, Homo sapien
ttgtcattctctcttcgagtacttccatagaga

SEQ ID NO: 184722 - DNA, 33 bp, Homo sapien
ttgtcattctctcttctagtacttccatagaga

SEQ ID NO: 184723 - DNA, 33 bp, Homo sapien
tttatgcagctagggaaggagtgagtcgtaaag

SEQ ID NO: 184724 - DNA, 33 bp, Homo sapien
tttatgcagctagggagggagtgagtcgtaaag

SEQ ID NO: 184725 - DNA, 33 bp, Homo sapien
caatgaagcatgactgaaatattaaacggtgct

SEQ ID NO: 184726 - DNA, 33 bp, Homo sapien
caatgaagcatgactggaatattaaacggtgct

SEQ ID NO: 184727 - DNA, 33 bp, Homo sapien
ctaagatctcaataaacggttttcatgctgatg

SEQ ID NO: 184728 - DNA, 33 bp, Homo sapien
ctaagatctcaataaatggttttcatgctgatg

SEQ ID NO: 184729 - DNA, 33 bp, Homo sapien
gcccatcttcttcttcaattgatcccatcatgg

SEQ ID NO: 184730 - DNA, 33 bp, Homo sapien
gcccatcttcttcttccattgatcccatcatgg

SEQ ID NO: 184731 - DNA, 33 bp, Homo sapien
atgacatgattctagccctagagaagttgagaa

SEQ ID NO: 184732 - DNA, 33 bp, Homo sapien
atgacatgattctagctctagagaagttgagaa

SEQ ID NO: 184733 - DNA, 33 bp, Homo sapien
agaaggcaatgggttgaaggagcaggaaggcac

SEQ ID NO: 184734 - DNA, 33 bp, Homo sapien
agaaggcaatgggttggaggagcaggaaggcac

SEQ ID NO: 184735 - DNA, 33 bp, Homo sapien
ccagtagcatcccaagcatctgaatgaggaggg

SEQ ID NO: 184736 - DNA, 33 bp, Homo sapien
ccagtagcatcccaagtatctgaatgaggaggg

SEQ ID NO: 184737 - DNA, 33 bp, Homo sapien
gttaagtgcatacaaaatgctccagtaaccatg

SEQ ID NO: 184738 - DNA, 33 bp, Homo sapien
gttaagtgcatacaaagtgctccagtaaccatg

SEQ ID NO: 184739 - DNA, 33 bp, Homo sapien
accaactctaatcagcacatttaaattacatgg

SEQ ID NO: 184740 - DNA, 33 bp, Homo sapien
accaactctaatcagcgcatttaaattacatgg

SEQ ID NO: 184741 - DNA, 33 bp, Homo sapien
ttcaggattgctaccacaaggtaataaattaat

SEQ ID NO: 184742 - DNA, 33 bp, Homo sapien
ttcaggattgctaccataaggtaataaattaat

SEQ ID NO: 184743 - DNA, 33 bp, Homo sapien
aatgtctttctttttcacatccaattgtttagt

SEQ ID NO: 184744 - DNA, 33 bp, Homo sapien
aatgtctttctttttcgcatccaattgtttagt

SEQ ID NO: 184745 - DNA, 33 bp, Homo sapien
agcctcttcctcattacggagctgattttctag

SEQ ID NO: 184746 - DNA, 33 bp, Homo sapien
agcctcttcctcattatggagctgattttctag

SEQ ID NO: 184747 - DNA, 33 bp, Homo sapien
ctaaatgcagactagggagttgggaggaggaac

SEQ ID NO: 184748 - DNA, 33 bp, Homo sapien
ctaaatgcagactaggtagttgggaggaggaac

SEQ ID NO: 184749 - DNA, 33 bp, Homo sapien
gaaggcctgtccttccacaggcattcttgccat

SEQ ID NO: 184750 - DNA, 33 bp, Homo sapien
gaaggcctgtccttccgcaggcattcttgccat

SEQ ID NO: 184751 - DNA, 33 bp, Homo sapien
cactttctacccagaacaaaaatgagcaagata

SEQ ID NO: 184752 - DNA, 33 bp, Homo sapien
cactttctacccagaataaaaatgagcaagata

SEQ ID NO: 184753 - DNA, 33 bp, Homo sapien
ttgctgctttttggaacaaatgagaggttcctg

SEQ ID NO: 184754 - DNA, 33 bp, Homo sapien
ttgctgctttttggaataaatgagaggttcctg

SEQ ID NO: 184755 - DNA, 33 bp, Homo sapien
atactcaaggaaaaaagcaaacaaaattggtca

SEQ ID NO: 184756 - DNA, 33 bp, Homo sapien
atactcaaggaaaaaatcaaacaaaattggtca

SEQ ID NO: 184757 - DNA, 33 bp, Homo sapien
gccaggattagaaccacagagctgcagacacaa

SEQ ID NO: 184758 - DNA, 33 bp, Homo sapien
gccaggattagaaccagagagctgcagacacaa

SEQ ID NO: 184759 - DNA, 33 bp, Homo sapien
ttattttgtctcaccaatcctactttcctcgtc

SEQ ID NO: 184760 - DNA, 33 bp, Homo sapien
ttattttgtctcaccagtcctactttcctcgtc

SEQ ID NO: 184761 - DNA, 33 bp, Homo sapien
aggagtctagtaggggaatgaagaagaggagct

SEQ ID NO: 184762 - DNA, 33 bp, Homo sapien
aggagtctagtagggggatgaagaagaggagct

SEQ ID NO: 184763 - DNA, 33 bp, Homo sapien
aatgcctcataaatgccgcacaaatgtcggttg

SEQ ID NO: 184764 - DNA, 33 bp, Homo sapien
aatgcctcataaatgctgcacaaatgtcggttg

SEQ ID NO: 184765 - DNA, 33 bp, Homo sapien
ccaagctgcatgctccgctcgttctttttttgt

SEQ ID NO: 184766 - DNA, 33 bp, Homo sapien
ccaagctgcatgctcctctcgttctttttttgt

SEQ ID NO: 184767 - DNA, 33 bp, Homo sapien
atatatgtttaaagtccgaactggaatgtctgg

SEQ ID NO: 184768 - DNA, 33 bp, Homo sapien
atatatgtttaaagtctgaactggaatgtctgg

SEQ ID NO: 184769 - DNA, 33 bp, Homo sapien
tgatgtgaccgctaaacgtgtccctgggacaga

SEQ ID NO: 184770 - DNA, 33 bp, Homo sapien
tgatgtgaccgctaaatgtgtccctgggacaga

SEQ ID NO: 184771 - DNA, 33 bp, Homo sapien
ttctctccaacacccgaaagggaatacaggaag

SEQ ID NO: 184772 - DNA, 33 bp, Homo sapien
ttctctccaacacccggaagggaatacaggaag

SEQ ID NO: 184773 - DNA, 33 bp, Homo sapien
cccgttttgtgagcctaacttcaaccccactcc

SEQ ID NO: 184774 - DNA, 33 bp, Homo sapien
cccgttttgtgagccttacttcaaccccactcc

SEQ ID NO: 184775 - DNA, 33 bp, Homo sapien
aacgggtttgggatcaacacttttgcaaatcct

SEQ ID NO: 184776 - DNA, 33 bp, Homo sapien
aacgggtttgggatcaccacttttgcaaatcct

SEQ ID NO: 184777 - DNA, 33 bp, Homo sapien
gagttttcaaagaatacgaggaacatagtgctg

SEQ ID NO: 184778 - DNA, 33 bp, Homo sapien
gagttttcaaagaatatgaggaacatagtgctg

SEQ ID NO: 184779 - DNA, 33 bp, Homo sapien
atacacacaacccaaaagcgctgaagttaagca

SEQ ID NO: 184780 - DNA, 33 bp, Homo sapien
atacacacaacccaaaggcgctgaagttaagca

SEQ ID NO: 184781 - DNA, 33 bp, Homo sapien
acactcagaaaaagtaagtgtttcagtattaag

SEQ ID NO: 184782 - DNA, 33 bp, Homo sapien
acactcagaaaaagtacgtgtttcagtattaag

SEQ ID NO: 184783 - DNA, 33 bp, Homo sapien
gtgattgactaagagcacttgtatttctgaagg

SEQ ID NO: 184784 - DNA, 33 bp, Homo sapien
gtgattgactaagagcgcttgtatttctgaagg

SEQ ID NO: 184785 - DNA, 33 bp, Homo sapien
cagtattgcataattcaaataacagcagttact

SEQ ID NO: 184786 - DNA, 33 bp, Homo sapien
cagtattgcataattctaataacagcagttact

SEQ ID NO: 184787 - DNA, 33 bp, Homo sapien
tattgatctatgtctacgcatctgagccctcat

SEQ ID NO: 184788 - DNA, 33 bp, Homo sapien
tattgatctatgtctatgcatctgagccctcat

SEQ ID NO: 184789 - DNA, 33 bp, Homo sapien
ccagatcaagccatgacataactagtgcagtgt

SEQ ID NO: 184790 - DNA, 33 bp, Homo sapien
ccagatcaagccatgatataactagtgcagtgt

SEQ ID NO: 184791 - DNA, 33 bp, Homo sapien
cagatcagcttagttgaatgttaactctttcac

SEQ ID NO: 184792 - DNA, 33 bp, Homo sapien
cagatcagcttagttggatgttaactctttcac

SEQ ID NO: 184793 - DNA, 33 bp, Homo sapien
gctacctaactcgaacagcaattgtaaagatgg

SEQ ID NO: 184794 - DNA, 33 bp, Homo sapien
gctacctaactcgaacggcaattgtaaagatgg

SEQ ID NO: 184795 - DNA, 33 bp, Homo sapien
actttgcaaacacaagcgcaataaagatgttta

SEQ ID NO: 184796 - DNA, 33 bp, Homo sapien
actttgcaaacacaagtgcaataaagatgttta

SEQ ID NO: 184797 - DNA, 33 bp, Homo sapien
atcatacactttggtccctggagcacttcctga

SEQ ID NO: 184798 - DNA, 33 bp, Homo sapien
atcatacactttggtctctggagcacttcctga

SEQ ID NO: 184799 - DNA, 33 bp, Homo sapien
tatacaatgtctcatacgttctttgcagctgtc

SEQ ID NO: 184800 - DNA, 33 bp, Homo sapien
tatacaatgtctcatatgttctttgcagctgtc

SEQ ID NO: 184801 - DNA, 33 bp, Homo sapien
acttcacaattctttgcagcaagtgaagacata

SEQ ID NO: 184802 - DNA, 33 bp, Homo sapien
acttcacaattctttgtagcaagtgaagacata

SEQ ID NO: 184803 - DNA, 33 bp, Homo sapien
tactgatttaagaaaactgtgacagagtgcagt

SEQ ID NO: 184804 - DNA, 33 bp, Homo sapien
tactgatttaagaaaattgtgacagagtgcagt

SEQ ID NO: 184805 - DNA, 33 bp, Homo sapien
tctgcttctccatttaagttgagagaacccctc

SEQ ID NO: 184806 - DNA, 33 bp, Homo sapien
tctgcttctccatttaggttgagagaacccctc

SEQ ID NO: 184807 - DNA, 33 bp, Homo sapien
atacttctatttcataagcaccaagacttctgt

SEQ ID NO: 184808 - DNA, 33 bp, Homo sapien
atacttctatttcataggcaccaagacttctgt

SEQ ID NO: 184809 - DNA, 33 bp, Homo sapien
cctatggtgtgccagacattgcttcagtcctaa

SEQ ID NO: 184810 - DNA, 33 bp, Homo sapien
cctatggtgtgccagatattgcttcagtcctaa

SEQ ID NO: 184811 - DNA, 33 bp, Homo sapien
ggtatcctgttcagcactagcagcagcatagaa

SEQ ID NO: 184812 - DNA, 33 bp, Homo sapien
ggtatcctgttcagcattagcagcagcatagaa

SEQ ID NO: 184813 - DNA, 33 bp, Homo sapien
gcttggcagaaacttaacaagtcaagtctttgt

SEQ ID NO: 184814 - DNA, 33 bp, Homo sapien
gcttggcagaaacttaccaagtcaagtctttgt

SEQ ID NO: 184815 - DNA, 33 bp, Homo sapien
tctgtagaggattatacctcagtgtaactgtgg

SEQ ID NO: 184816 - DNA, 33 bp, Homo sapien
tctgtagaggattatatctcagtgtaactgtgg

SEQ ID NO: 184817 - DNA, 33 bp, Homo sapien
atgttagataagaaaggccattagggaatcaga

SEQ ID NO: 184818 - DNA, 33 bp, Homo sapien
atgttagataagaaagtccattagggaatcaga

SEQ ID NO: 184819 - DNA, 33 bp, Homo sapien
tgagttttctccccaaaaatctgtgagctcttt

SEQ ID NO: 184820 - DNA, 33 bp, Homo sapien
tgagttttctccccaacaatctgtgagctcttt

SEQ ID NO: 184821 - DNA, 33 bp, Homo sapien
ctctcttccttctatcaccataatggctgaatg

SEQ ID NO: 184822 - DNA, 33 bp, Homo sapien
ctctcttccttctatcgccataatggctgaatg

SEQ ID NO: 184823 - DNA, 33 bp, Homo sapien
tttgattttcactttgcaacttgttccagcaga

SEQ ID NO: 184824 - DNA, 33 bp, Homo sapien
tttgattttcactttgtaacttgttccagcaga

SEQ ID NO: 184825 - DNA, 33 bp, Homo sapien
agttgtactgaggttaagggatggactcaaggc

SEQ ID NO: 184826 - DNA, 33 bp, Homo sapien
agttgtactgaggttaggggatggactcaaggc

SEQ ID NO: 184827 - DNA, 33 bp, Homo sapien
actggagagtagtgaacaacactaagggcagag

SEQ ID NO: 184828 - DNA, 33 bp, Homo sapien
actggagagtagtgaataacactaagggcagag

SEQ ID NO: 184829 - DNA, 33 bp, Homo sapien
ctattgtttgcttgcaatcgacagtgaagagac

SEQ ID NO: 184830 - DNA, 33 bp, Homo sapien
ctattgtttgcttgcagtcgacagtgaagagac

SEQ ID NO: 184831 - DNA, 33 bp, Homo sapien
tgtccattcctctcaaaaagtcttcactggcag

SEQ ID NO: 184832 - DNA, 33 bp, Homo sapien
tgtccattcctctcaagaagtcttcactggcag

SEQ ID NO: 184833 - DNA, 33 bp, Homo sapien
gaaaatgcttttcttcacaagcattcccccaaa

SEQ ID NO: 184834 - DNA, 33 bp, Homo sapien
gaaaatgcttttcttcgcaagcattcccccaaa

SEQ ID NO: 184835 - DNA, 33 bp, Homo sapien
tgctatggttcttacaatatgtttcttcaagta

SEQ ID NO: 184836 - DNA, 33 bp, Homo sapien
tgctatggttcttacagtatgtttcttcaagta

SEQ ID NO: 184837 - DNA, 33 bp, Homo sapien
aatttgtctttaccacagtggataagtcaaagt

SEQ ID NO: 184838 - DNA, 33 bp, Homo sapien
aatttgtctttaccactgtggataagtcaaagt

SEQ ID NO: 184839 - DNA, 33 bp, Homo sapien
tcaattcatttcatcaatcatcactggaattcc

SEQ ID NO: 184840 - DNA, 33 bp, Homo sapien
tcaattcatttcatcagtcatcactggaattcc

SEQ ID NO: 184841 - DNA, 33 bp, Homo sapien
aaggaatcttgttgcacagtgaaagttacttcc

SEQ ID NO: 184842 - DNA, 33 bp, Homo sapien
aaggaatcttgttgcatagtgaaagttacttcc

SEQ ID NO: 184843 - DNA, 33 bp, Homo sapien
tatataggatcagttcactataggtaccgtaat

SEQ ID NO: 184844 - DNA, 33 bp, Homo sapien
tatataggatcagttcgctataggtaccgtaat

SEQ ID NO: 184845 - DNA, 33 bp, Homo sapien
agtctggtacctagacagctagaggctttggga

SEQ ID NO: 184846 - DNA, 33 bp, Homo sapien
agtctggtacctagacggctagaggctttggga

SEQ ID NO: 184847 - DNA, 33 bp, Homo sapien
aaatcacttctgacaactctgttcctggtcaga

SEQ ID NO: 184848 - DNA, 33 bp, Homo sapien
aaatcacttctgacaattctgttcctggtcaga

SEQ ID NO: 184849 - DNA, 33 bp, Homo sapien
ccgactggagaagtgacggtataggaagcctgt

SEQ ID NO: 184850 - DNA, 33 bp, Homo sapien
ccgactggagaagtgagggtataggaagcctgt

SEQ ID NO: 184851 - DNA, 33 bp, Homo sapien
tccttgctcttctctgaacttcttctcctttgc

SEQ ID NO: 184852 - DNA, 33 bp, Homo sapien
tccttgctcttctctgcacttcttctcctttgc

SEQ ID NO: 184853 - DNA, 33 bp, Homo sapien
tctccctttccacaccaagtttccctgttacca

SEQ ID NO: 184854 - DNA, 33 bp, Homo sapien
tctccctttccacacctagtttccctgttacca

SEQ ID NO: 184855 - DNA, 33 bp, Homo sapien
tagtacctacctcatacgcagttgtagtgataa

SEQ ID NO: 184856 - DNA, 33 bp, Homo sapien
tagtacctacctcataggcagttgtagtgataa

SEQ ID NO: 184857 - DNA, 33 bp, Homo sapien
tctctgctctttccagacattatcagttcttgt

SEQ ID NO: 184858 - DNA, 33 bp, Homo sapien
tctctgctctttccaggcattatcagttcttgt

SEQ ID NO: 184859 - DNA, 33 bp, Homo sapien
acagtctatagttctacgattttagtgactcta

SEQ ID NO: 184860 - DNA, 33 bp, Homo sapien
acagtctatagttctatgattttagtgactcta

SEQ ID NO: 184861 - DNA, 33 bp, Homo sapien
tgtgttcaggggtggacaagtatatcaacaagt

SEQ ID NO: 184862 - DNA, 33 bp, Homo sapien
tgtgttcaggggtggagaagtatatcaacaagt

SEQ ID NO: 184863 - DNA, 33 bp, Homo sapien
tgcttaaggatgtgtcaaaaactccattaactg

SEQ ID NO: 184864 - DNA, 33 bp, Homo sapien
tgcttaaggatgtgtcgaaaactccattaactg

SEQ ID NO: 184865 - DNA, 33 bp, Homo sapien
cttcaactaaataaaaatttccagaatatctac

SEQ ID NO: 184866 - DNA, 33 bp, Homo sapien
cttcaactaaataaaagtttccagaatatctac

SEQ ID NO: 184867 - DNA, 33 bp, Homo sapien
caaaatcctaaaagaccaaagttattatgtagg

SEQ ID NO: 184868 - DNA, 33 bp, Homo sapien
caaaatcctaaaagacgaaagttattatgtagg

SEQ ID NO: 184869 - DNA, 33 bp, Homo sapien
gacggacattcaaacccctgacccatttcttgg

SEQ ID NO: 184870 - DNA, 33 bp, Homo sapien
gacggacattcaaacctctgacccatttcttgg

SEQ ID NO: 184871 - DNA, 33 bp, Homo sapien
atggaacaaaagcaaaagtggccttcctttctt

SEQ ID NO: 184872 - DNA, 33 bp, Homo sapien
atggaacaaaagcaaacgtggccttcctttctt

SEQ ID NO: 184873 - DNA, 33 bp, Homo sapien
tttagggtagaggataagcagtagttctatttc

SEQ ID NO: 184874 - DNA, 33 bp, Homo sapien
tttagggtagaggataggcagtagttctatttc

SEQ ID NO: 184875 - DNA, 33 bp, Homo sapien
taaaataaccctgagacatggtttgcacttgtc

SEQ ID NO: 184876 - DNA, 33 bp, Homo sapien
taaaataaccctgagagatggtttgcacttgtc

SEQ ID NO: 184877 - DNA, 33 bp, Homo sapien
ggcctgagttggctaaatgggccagtactttac

SEQ ID NO: 184878 - DNA, 33 bp, Homo sapien
ggcctgagttggctaagtgggccagtactttac

SEQ ID NO: 184879 - DNA, 33 bp, Homo sapien
ttcccaccttgtggacagattcagacctgaaga

SEQ ID NO: 184880 - DNA, 33 bp, Homo sapien
ttcccaccttgtggacggattcagacctgaaga

SEQ ID NO: 184881 - DNA, 33 bp, Homo sapien
gtctttacaatggtgaataaattgattgcataa

SEQ ID NO: 184882 - DNA, 33 bp, Homo sapien
gtctttacaatggtgagtaaattgattgcataa

SEQ ID NO: 184883 - DNA, 33 bp, Homo sapien
gttctaagcacttgacacatcttttgacactga

SEQ ID NO: 184884 - DNA, 33 bp, Homo sapien
gttctaagcacttgacgcatcttttgacactga

SEQ ID NO: 184885 - DNA, 33 bp, Homo sapien
tggaaccacagaggctaaaagattggtctgtta

SEQ ID NO: 184886 - DNA, 33 bp, Homo sapien
tggaaccacagaggctgaaagattggtctgtta

SEQ ID NO: 184887 - DNA, 33 bp, Homo sapien
taagagaatcactcacagatatgagagtaccta

SEQ ID NO: 184888 - DNA, 33 bp, Homo sapien
taagagaatcactcacggatatgagagtaccta

SEQ ID NO: 184889 - DNA, 33 bp, Homo sapien
gcagccatatacataaatctcacaaatgtaaaa

SEQ ID NO: 184890 - DNA, 33 bp, Homo sapien
gcagccatatacataagtctcacaaatgtaaaa

SEQ ID NO: 184891 - DNA, 33 bp, Homo sapien
aggtaagtctttttaacaagtaatgttggaatg

SEQ ID NO: 184892 - DNA, 33 bp, Homo sapien
aggtaagtctttttaataagtaatgttggaatg

SEQ ID NO: 184893 - DNA, 33 bp, Homo sapien
cattattatgctaacaaaaaggcatggatcacc

SEQ ID NO: 184894 - DNA, 33 bp, Homo sapien
cattattatgctaacagaaaggcatggatcacc

SEQ ID NO: 184895 - DNA, 33 bp, Homo sapien
atgatgtttacacttgaagaacttatcaaagtt

SEQ ID NO: 184896 - DNA, 33 bp, Homo sapien
atgatgtttacacttgcagaacttatcaaagtt

SEQ ID NO: 184897 - DNA, 33 bp, Homo sapien
gaggccaggataaggacgaagtaggtcacagga

SEQ ID NO: 184898 - DNA, 33 bp, Homo sapien
gaggccaggataaggatgaagtaggtcacagga

SEQ ID NO: 184899 - DNA, 33 bp, Homo sapien
tgaacccagtattcgaagcttaagaatgagtaa

SEQ ID NO: 184900 - DNA, 33 bp, Homo sapien
tgaacccagtattcgaggcttaagaatgagtaa

SEQ ID NO: 184901 - DNA, 33 bp, Homo sapien
aacattctagctaagaacccatcaataacacaa

SEQ ID NO: 184902 - DNA, 33 bp, Homo sapien
aacattctagctaagagcccatcaataacacaa

SEQ ID NO: 184903 - DNA, 33 bp, Homo sapien
tgggagctcttgcttaacacacaagctagtgag

SEQ ID NO: 184904 - DNA, 33 bp, Homo sapien
tgggagctcttgcttatcacacaagctagtgag

SEQ ID NO: 184905 - DNA, 33 bp, Homo sapien
tctacagaaccataaacgctcttgaactcatca

SEQ ID NO: 184906 - DNA, 33 bp, Homo sapien
tctacagaaccataaatgctcttgaactcatca

SEQ ID NO: 184907 - DNA, 33 bp, Homo sapien
tgattgtcattttctaccatctctaccctgtgt

SEQ ID NO: 184908 - DNA, 33 bp, Homo sapien
tgattgtcattttctatcatctctaccctgtgt

SEQ ID NO: 184909 - DNA, 33 bp, Homo sapien
atttgtatgcattataactcttatttagttctc

SEQ ID NO: 184910 - DNA, 33 bp, Homo sapien
atttgtatgcattatatctcttatttagttctc

SEQ ID NO: 184911 - DNA, 33 bp, Homo sapien
catttctctatctgcactatttcatttgcacct

SEQ ID NO: 184912 - DNA, 33 bp, Homo sapien
catttctctatctgcagtatttcatttgcacct

SEQ ID NO: 184913 - DNA, 33 bp, Homo sapien
attaccacttctttcaacctattttgccatctg

SEQ ID NO: 184914 - DNA, 33 bp, Homo sapien
attaccacttctttcagcctattttgccatctg

SEQ ID NO: 184915 - DNA, 33 bp, Homo sapien
ttaaggaattaggcatgacagggagacttggct

SEQ ID NO: 184916 - DNA, 33 bp, Homo sapien
ttaaggaattaggcattacagggagacttggct

SEQ ID NO: 184917 - DNA, 33 bp, Homo sapien
aaatctgcccaagaacaaggtgttgaagaggag

SEQ ID NO: 184918 - DNA, 33 bp, Homo sapien
aaatctgcccaagaacgaggtgttgaagaggag

SEQ ID NO: 184919 - DNA, 33 bp, Homo sapien
tcctagcataatcaccacatcgaagcaatttcc

SEQ ID NO: 184920 - DNA, 33 bp, Homo sapien
tcctagcataatcaccgcatcgaagcaatttcc

SEQ ID NO: 184921 - DNA, 33 bp, Homo sapien
agataatctctattccccctggacaccagctca

SEQ ID NO: 184922 - DNA, 33 bp, Homo sapien
agataatctctattccgcctggacaccagctca

SEQ ID NO: 184923 - DNA, 33 bp, Homo sapien
atattgtctacgtggaaaacttctctgaatctc

SEQ ID NO: 184924 - DNA, 33 bp, Homo sapien
atattgtctacgtggacaacttctctgaatctc

SEQ ID NO: 184925 - DNA, 33 bp, Homo sapien
atactttaatggtgaactctgaaaaaaactcag

SEQ ID NO: 184926 - DNA, 33 bp, Homo sapien
atactttaatggtgaattctgaaaaaaactcag

SEQ ID NO: 184927 - DNA, 33 bp, Homo sapien
aattttccagtctctaccatgaagcaaggactc

SEQ ID NO: 184928 - DNA, 33 bp, Homo sapien
aattttccagtctctatcatgaagcaaggactc

SEQ ID NO: 184929 - DNA, 33 bp, Homo sapien
aaaaataccctgacaacattgaatattcagagt

SEQ ID NO: 184930 - DNA, 33 bp, Homo sapien
aaaaataccctgacaagattgaatattcagagt

SEQ ID NO: 184931 - DNA, 33 bp, Homo sapien
aggcaatggaaggaaacgctctctccaaatttt

SEQ ID NO: 184932 - DNA, 33 bp, Homo sapien
aggcaatggaaggaaatgctctctccaaatttt

SEQ ID NO: 184933 - DNA, 33 bp, Homo sapien
agacatctggagtggcccttcaaaggtactaac

SEQ ID NO: 184934 - DNA, 33 bp, Homo sapien
agacatctggagtggctcttcaaaggtactaac

SEQ ID NO: 184935 - DNA, 33 bp, Homo sapien
ttaagaaagattgataaaacaagtgagacaatt

SEQ ID NO: 184936 - DNA, 33 bp, Homo sapien
ttaagaaagattgatagaacaagtgagacaatt

SEQ ID NO: 184937 - DNA, 33 bp, Homo sapien
tcattcacactgagaccattcagacacaccagg

SEQ ID NO: 184938 - DNA, 33 bp, Homo sapien
tcattcacactgagacgattcagacacaccagg

SEQ ID NO: 184939 - DNA, 33 bp, Homo sapien
agaagactagtaagatgagatagaacctcacta

SEQ ID NO: 184940 - DNA, 33 bp, Homo sapien
agaagactagtaagattagatagaacctcacta

SEQ ID NO: 184941 - DNA, 33 bp, Homo sapien
aagaacactctgcaaacatggatactttgaatg

SEQ ID NO: 184942 - DNA, 33 bp, Homo sapien
aagaacactctgcaaagatggatactttgaatg

SEQ ID NO: 184943 - DNA, 33 bp, Homo sapien
aaagtaccagggaatacgaggcagggaaaaagt

SEQ ID NO: 184944 - DNA, 33 bp, Homo sapien
aaagtaccagggaatatgaggcagggaaaaagt

SEQ ID NO: 184945 - DNA, 33 bp, Homo sapien
tataataagtcattaacagtttggagttgaaaa

SEQ ID NO: 184946 - DNA, 33 bp, Homo sapien
tataataagtcattaatagtttggagttgaaaa

SEQ ID NO: 184947 - DNA, 33 bp, Homo sapien
caaaaccacacgaacacgtacatagcaaggaag

SEQ ID NO: 184948 - DNA, 33 bp, Homo sapien
caaaaccacacgaacaggtacatagcaaggaag

SEQ ID NO: 184949 - DNA, 33 bp, Homo sapien
ccaacttcacctatcacgttcatcccagcctaa

SEQ ID NO: 184950 - DNA, 33 bp, Homo sapien
ccaacttcacctatcatgttcatcccagcctaa

SEQ ID NO: 184951 - DNA, 33 bp, Homo sapien
atattagaagggaaacagctcactgaagaggca

SEQ ID NO: 184952 - DNA, 33 bp, Homo sapien
atattagaagggaaacggctcactgaagaggca

SEQ ID NO: 184953 - DNA, 33 bp, Homo sapien
gtgacccaatgtcttccaggtctgagtgcgcac

SEQ ID NO: 184954 - DNA, 33 bp, Homo sapien
gtgacccaatgtcttcgaggtctgagtgcgcac

SEQ ID NO: 184955 - DNA, 33 bp, Homo sapien
tgggctttgtttcctaggcaaaatatctggtaa

SEQ ID NO: 184956 - DNA, 33 bp, Homo sapien
tgggctttgtttcctatgcaaaatatctggtaa

SEQ ID NO: 184957 - DNA, 33 bp, Homo sapien
ataatggacagttccactgctacggtcacttga

SEQ ID NO: 184958 - DNA, 33 bp, Homo sapien
ataatggacagttccagtgctacggtcacttga

SEQ ID NO: 184959 - DNA, 33 bp, Homo sapien
taacatatccctgaggcaaaaccctgcaacttc

SEQ ID NO: 184960 - DNA, 33 bp, Homo sapien
taacatatccctgaggtaaaaccctgcaacttc

SEQ ID NO: 184961 - DNA, 33 bp, Homo sapien
ataccagggatttaaacgcttattaatcttttc

SEQ ID NO: 184962 - DNA, 33 bp, Homo sapien
ataccagggatttaaaggcttattaatcttttc

SEQ ID NO: 184963 - DNA, 33 bp, Homo sapien
gtctcataaaatggcaccagaacctacccaatt

SEQ ID NO: 184964 - DNA, 33 bp, Homo sapien
gtctcataaaatggcagcagaacctacccaatt

SEQ ID NO: 184965 - DNA, 33 bp, Homo sapien
acccctgtatgtctagaatatggcaaaaatggg

SEQ ID NO: 184966 - DNA, 33 bp, Homo sapien
acccctgtatgtctagcatatggcaaaaatggg

SEQ ID NO: 184967 - DNA, 33 bp, Homo sapien
caagtgtatcaataaaatcttgggcaaagaagc

SEQ ID NO: 184968 - DNA, 33 bp, Homo sapien
caagtgtatcaataaagtcttgggcaaagaagc

SEQ ID NO: 184969 - DNA, 33 bp, Homo sapien
ttgattaaatttcaccaaacatctctgggcagc

SEQ ID NO: 184970 - DNA, 33 bp, Homo sapien
ttgattaaatttcaccgaacatctctgggcagc

SEQ ID NO: 184971 - DNA, 33 bp, Homo sapien
taagacaagacactacagatttgagaagaaaag

SEQ ID NO: 184972 - DNA, 33 bp, Homo sapien
taagacaagacactaccgatttgagaagaaaag

SEQ ID NO: 184973 - DNA, 33 bp, Homo sapien
aatcatggatcccttacgtctttactggaactt

SEQ ID NO: 184974 - DNA, 33 bp, Homo sapien
aatcatggatcccttatgtctttactggaactt

SEQ ID NO: 184975 - DNA, 33 bp, Homo sapien
tatggaagaactgtccaactctgaggctaagaa

SEQ ID NO: 184976 - DNA, 33 bp, Homo sapien
tatggaagaactgtccgactctgaggctaagaa

SEQ ID NO: 184977 - DNA, 33 bp, Homo sapien
attgccccatatatgcactcccctcacatgatg

SEQ ID NO: 184978 - DNA, 33 bp, Homo sapien
attgccccatatatgcgctcccctcacatgatg

SEQ ID NO: 184979 - DNA, 33 bp, Homo sapien
taatgctccaagtctgcacccttagcaagtgaa

SEQ ID NO: 184980 - DNA, 33 bp, Homo sapien
taatgctccaagtctgtacccttagcaagtgaa

SEQ ID NO: 184981 - DNA, 33 bp, Homo sapien
ttgtcatatgtgagaaaatatgaatttgtttta

SEQ ID NO: 184982 - DNA, 33 bp, Homo sapien
ttgtcatatgtgagaagatatgaatttgtttta

SEQ ID NO: 184983 - DNA, 33 bp, Homo sapien
aaattttaggcctgaccctcaaccttcctgtct

SEQ ID NO: 184984 - DNA, 33 bp, Homo sapien
aaattttaggcctgactctcaaccttcctgtct

SEQ ID NO: 184985 - DNA, 33 bp, Homo sapien
tcagaggaaccaaactcagcctagcaagaacag

SEQ ID NO: 184986 - DNA, 33 bp, Homo sapien
tcagaggaaccaaacttagcctagcaagaacag

SEQ ID NO: 184987 - DNA, 33 bp, Homo sapien
atgatagactatgataaagatgataggtagata

SEQ ID NO: 184988 - DNA, 33 bp, Homo sapien
atgatagactatgatagagatgataggtagata

SEQ ID NO: 184989 - DNA, 33 bp, Homo sapien
cctatctgaaataaaaagactgtaaattagtgt

SEQ ID NO: 184990 - DNA, 33 bp, Homo sapien
cctatctgaaataaaaggactgtaaattagtgt

SEQ ID NO: 184991 - DNA, 33 bp, Homo sapien
gcaaagattaatgcccaaggataagtactgcca

SEQ ID NO: 184992 - DNA, 33 bp, Homo sapien
gcaaagattaatgcccgaggataagtactgcca

SEQ ID NO: 184993 - DNA, 33 bp, Homo sapien
agccactgctttgctaacttactaaattatctg

SEQ ID NO: 184994 - DNA, 33 bp, Homo sapien
agccactgctttgctagcttactaaattatctg

SEQ ID NO: 184995 - DNA, 33 bp, Homo sapien
aatataaactctgacaacttagagactttgcta

SEQ ID NO: 184996 - DNA, 33 bp, Homo sapien
aatataaactctgacagcttagagactttgcta

SEQ ID NO: 184997 - DNA, 33 bp, Homo sapien
gccatttggattatcactgaagaattttcctga

SEQ ID NO: 184998 - DNA, 33 bp, Homo sapien
gccatttggattatcattgaagaattttcctga

SEQ ID NO: 184999 - DNA, 33 bp, Homo sapien
ttcttagatgacagatcaattctagaccctgaa

SEQ ID NO: 185000 - DNA, 33 bp, Homo sapien
ttcttagatgacagattaattctagaccctgaa

SEQ ID NO: 185001 - DNA, 33 bp, Homo sapien
attccttgagtgattcaaaagcttcctaggttg

SEQ ID NO: 185002 - DNA, 33 bp, Homo sapien
attccttgagtgattccaaagcttcctaggttg

SEQ ID NO: 185003 - DNA, 33 bp, Homo sapien
aacggtttcatcaatcacatagaagtttcattc

SEQ ID NO: 185004 - DNA, 33 bp, Homo sapien
aacggtttcatcaatcccatagaagtttcattc

SEQ ID NO: 185005 - DNA, 33 bp, Homo sapien
cagtgtcccaaatggaactctattattcactca

SEQ ID NO: 185006 - DNA, 33 bp, Homo sapien
cagtgtcccaaatggatctctattattcactca

SEQ ID NO: 185007 - DNA, 33 bp, Homo sapien
ctgcctatggcttatgaatatctgttttgcatt

SEQ ID NO: 185008 - DNA, 33 bp, Homo sapien
ctgcctatggcttatggatatctgttttgcatt

SEQ ID NO: 185009 - DNA, 33 bp, Homo sapien
catgctagacattacaaattttacattgttcgg

SEQ ID NO: 185010 - DNA, 33 bp, Homo sapien
catgctagacattacacattttacattgttcgg

SEQ ID NO: 185011 - DNA, 33 bp, Homo sapien
caaaattagacactaaaaaagaaatgatcggca

SEQ ID NO: 185012 - DNA, 33 bp, Homo sapien
caaaattagacactaacaaagaaatgatcggca

SEQ ID NO: 185013 - DNA, 33 bp, Homo sapien
cccatcaatgcctcaccacagcttctactaaca

SEQ ID NO: 185014 - DNA, 33 bp, Homo sapien
cccatcaatgcctcacgacagcttctactaaca

SEQ ID NO: 185015 - DNA, 33 bp, Homo sapien
caacatcttcatcgtcactactatcagaatcac

SEQ ID NO: 185016 - DNA, 33 bp, Homo sapien
caacatcttcatcgtctctactatcagaatcac

SEQ ID NO: 185017 - DNA, 33 bp, Homo sapien
atgctgtccatgtttgaatgggcaacctccaag

SEQ ID NO: 185018 - DNA, 33 bp, Homo sapien
atgctgtccatgtttggatgggcaacctccaag

SEQ ID NO: 185019 - DNA, 33 bp, Homo sapien
caccctctagttgtgaaattcaaaaatgtctcc

SEQ ID NO: 185020 - DNA, 33 bp, Homo sapien
caccctctagttgtgagattcaaaaatgtctcc

SEQ ID NO: 185021 - DNA, 33 bp, Homo sapien
catacaccaatcagaaagggactgttcagaaaa

SEQ ID NO: 185022 - DNA, 33 bp, Homo sapien
catacaccaatcagaaggggactgttcagaaaa

SEQ ID NO: 185023 - DNA, 33 bp, Homo sapien
attttgcactccgcaactctgagcttctatttg

SEQ ID NO: 185024 - DNA, 33 bp, Homo sapien
attttgcactccgcaattctgagcttctatttg

SEQ ID NO: 185025 - DNA, 33 bp, Homo sapien
atgttagttctctagaagctttaccaattttac

SEQ ID NO: 185026 - DNA, 33 bp, Homo sapien
atgttagttctctagacgctttaccaattttac

SEQ ID NO: 185027 - DNA, 33 bp, Homo sapien
acctgcttgcctgcaacatgagttttacaccat

SEQ ID NO: 185028 - DNA, 33 bp, Homo sapien
acctgcttgcctgcaatatgagttttacaccat

SEQ ID NO: 185029 - DNA, 33 bp, Homo sapien
ctataaatctgagaaaatccacaaacccgtagc

SEQ ID NO: 185030 - DNA, 33 bp, Homo sapien
ctataaatctgagaaattccacaaacccgtagc

SEQ ID NO: 185031 - DNA, 33 bp, Homo sapien
aaagtgttgggtactacagcataacctttgaaa

SEQ ID NO: 185032 - DNA, 33 bp, Homo sapien
aaagtgttgggtactatagcataacctttgaaa

SEQ ID NO: 185033 - DNA, 33 bp, Homo sapien
cataaagcagagatgaataaaagccagagggag

SEQ ID NO: 185034 - DNA, 33 bp, Homo sapien
cataaagcagagatgagtaaaagccagagggag

SEQ ID NO: 185035 - DNA, 33 bp, Homo sapien
tctctggaacaatcacagtctttctctcgctac

SEQ ID NO: 185036 - DNA, 33 bp, Homo sapien
tctctggaacaatcactgtctttctctcgctac

SEQ ID NO: 185037 - DNA, 33 bp, Homo sapien
gatccatcttttagcaagaggtacatttcctta

SEQ ID NO: 185038 - DNA, 33 bp, Homo sapien
gatccatcttttagcaggaggtacatttcctta

SEQ ID NO: 185039 - DNA, 33 bp, Homo sapien
gacataaaaggttacacattgtatgatgctact

SEQ ID NO: 185040 - DNA, 33 bp, Homo sapien
gacataaaaggttacatattgtatgatgctact

SEQ ID NO: 185041 - DNA, 33 bp, Homo sapien
ttttccactggaatgccctgatgaacaccagct

SEQ ID NO: 185042 - DNA, 33 bp, Homo sapien
ttttccactggaatgcgctgatgaacaccagct

SEQ ID NO: 185043 - DNA, 33 bp, Homo sapien
ccattgacaggaggtactaaagagtcctgtgga

SEQ ID NO: 185044 - DNA, 33 bp, Homo sapien
ccattgacaggaggtattaaagagtcctgtgga

SEQ ID NO: 185045 - DNA, 33 bp, Homo sapien
atttcattctcctttaggttaatttgaaactaa

SEQ ID NO: 185046 - DNA, 33 bp, Homo sapien
atttcattctcctttatgttaatttgaaactaa

SEQ ID NO: 185047 - DNA, 33 bp, Homo sapien
aacttaatggaatagaaggtagcaaccacacat

SEQ ID NO: 185048 - DNA, 33 bp, Homo sapien
aacttaatggaatagacggtagcaaccacacat

SEQ ID NO: 185049 - DNA, 33 bp, Homo sapien
gcacagggtgctatggaagaatagggcagtgct

SEQ ID NO: 185050 - DNA, 33 bp, Homo sapien
gcacagggtgctatgggagaatagggcagtgct

SEQ ID NO: 185051 - DNA, 33 bp, Homo sapien
aaaacaatgaggattggcaaaaaactggcatca

SEQ ID NO: 185052 - DNA, 33 bp, Homo sapien
aaaacaatgaggattgtcaaaaaactggcatca

SEQ ID NO: 185053 - DNA, 33 bp, Homo sapien
ctgtacattctgatacacagcacatgttgaata

SEQ ID NO: 185054 - DNA, 33 bp, Homo sapien
ctgtacattctgatacgcagcacatgttgaata

SEQ ID NO: 185055 - DNA, 33 bp, Homo sapien
tatccaagaaacatgaataaaataacaggaaat

SEQ ID NO: 185056 - DNA, 33 bp, Homo sapien
tatccaagaaacatgagtaaaataacaggaaat

SEQ ID NO: 185057 - DNA, 33 bp, Homo sapien
gttctccaacctttaaagccacacttactctga

SEQ ID NO: 185058 - DNA, 33 bp, Homo sapien
gttctccaacctttaaggccacacttactctga

SEQ ID NO: 185059 - DNA, 33 bp, Homo sapien
gttttgccagggacaaaattaaaagaaggacaa

SEQ ID NO: 185060 - DNA, 33 bp, Homo sapien
gttttgccagggacaagattaaaagaaggacaa

SEQ ID NO: 185061 - DNA, 33 bp, Homo sapien
gctcaaatatgtgtcaataccactagcaacatt

SEQ ID NO: 185062 - DNA, 33 bp, Homo sapien
gctcaaatatgtgtcagtaccactagcaacatt

SEQ ID NO: 185063 - DNA, 33 bp, Homo sapien
ggaaaggggtgattacaaatttagtcattagct

SEQ ID NO: 185064 - DNA, 33 bp, Homo sapien
ggaaaggggtgattacgaatttagtcattagct

SEQ ID NO: 185065 - DNA, 33 bp, Homo sapien
tttctcataggcatggaaaagtgttattctaat

SEQ ID NO: 185066 - DNA, 33 bp, Homo sapien
tttctcataggcatgggaaagtgttattctaat

SEQ ID NO: 185067 - DNA, 33 bp, Homo sapien
atattcccaaggttccactcaagcagaaataga

SEQ ID NO: 185068 - DNA, 33 bp, Homo sapien
atattcccaaggttcctctcaagcagaaataga

SEQ ID NO: 185069 - DNA, 33 bp, Homo sapien
aagctagcaacttcaacgcaatatatttagtgg

SEQ ID NO: 185070 - DNA, 33 bp, Homo sapien
aagctagcaacttcaatgcaatatatttagtgg

SEQ ID NO: 185071 - DNA, 33 bp, Homo sapien
ttccaattcatccttacacataactacaatttt

SEQ ID NO: 185072 - DNA, 33 bp, Homo sapien
ttccaattcatccttatacataactacaatttt

SEQ ID NO: 185073 - DNA, 33 bp, Homo sapien
ggtcagggtatagccaagaaaatgcaatttact

SEQ ID NO: 185074 - DNA, 33 bp, Homo sapien
ggtcagggtatagccaggaaaatgcaatttact

SEQ ID NO: 185075 - DNA, 33 bp, Homo sapien
agggagacagcaaagtcactagagtccaggtgt

SEQ ID NO: 185076 - DNA, 33 bp, Homo sapien
agggagacagcaaagttactagagtccaggtgt

SEQ ID NO: 185077 - DNA, 33 bp, Homo sapien
attcttaacatcaagacgaacactttgggccac

SEQ ID NO: 185078 - DNA, 33 bp, Homo sapien
attcttaacatcaagatgaacactttgggccac

SEQ ID NO: 185079 - DNA, 33 bp, Homo sapien
gctcctttggtacagcaatgggggctttgcctg

SEQ ID NO: 185080 - DNA, 33 bp, Homo sapien
gctcctttggtacagcgatgggggctttgcctg

SEQ ID NO: 185081 - DNA, 33 bp, Homo sapien
ggtgccaacaacaaggcaatcatttggctttgc

SEQ ID NO: 185082 - DNA, 33 bp, Homo sapien
ggtgccaacaacaaggtaatcatttggctttgc

SEQ ID NO: 185083 - DNA, 33 bp, Homo sapien
acaaacatataacagacgtataacaaatgttat

SEQ ID NO: 185084 - DNA, 33 bp, Homo sapien
acaaacatataacagatgtataacaaatgttat

SEQ ID NO: 185085 - DNA, 33 bp, Homo sapien
gactagctggaagttgaagcttagaacatccta

SEQ ID NO: 185086 - DNA, 33 bp, Homo sapien
gactagctggaagttggagcttagaacatccta

SEQ ID NO: 185087 - DNA, 33 bp, Homo sapien
cttggagccttttccaccccaggcagatgtact

SEQ ID NO: 185088 - DNA, 33 bp, Homo sapien
cttggagccttttccatcccaggcagatgtact

SEQ ID NO: 185089 - DNA, 33 bp, Homo sapien
ttcgacaatgcacgaaacagccctatgcaataa

SEQ ID NO: 185090 - DNA, 33 bp, Homo sapien
ttcgacaatgcacgaagcagccctatgcaataa

SEQ ID NO: 185091 - DNA, 33 bp, Homo sapien
atctctgataatggcaactcaattttagttgtt

SEQ ID NO: 185092 - DNA, 33 bp, Homo sapien
atctctgataatggcagctcaattttagttgtt

SEQ ID NO: 185093 - DNA, 33 bp, Homo sapien
ccttgatccttgatgcgacataatttaaatgtc

SEQ ID NO: 185094 - DNA, 33 bp, Homo sapien
ccttgatccttgatgctacataatttaaatgtc

SEQ ID NO: 185095 - DNA, 33 bp, Homo sapien
tacacctgaagtcttgaaatgcccttgctaaaa

SEQ ID NO: 185096 - DNA, 33 bp, Homo sapien
tacacctgaagtcttggaatgcccttgctaaaa

SEQ ID NO: 185097 - DNA, 33 bp, Homo sapien
acagcagccattgaaaactaatacaaagccttt

SEQ ID NO: 185098 - DNA, 33 bp, Homo sapien
acagcagccattgaaacctaatacaaagccttt

SEQ ID NO: 185099 - DNA, 33 bp, Homo sapien
tattcctgcactttcacctaactacttgctttc

SEQ ID NO: 185100 - DNA, 33 bp, Homo sapien
tattcctgcactttcatctaactacttgctttc

SEQ ID NO: 185101 - DNA, 33 bp, Homo sapien
aatacactactgagacaggatctattctttagg

SEQ ID NO: 185102 - DNA, 33 bp, Homo sapien
aatacactactgagactggatctattctttagg

SEQ ID NO: 185103 - DNA, 33 bp, Homo sapien
atcttctggaaattaaataaaatgccaaacaag

SEQ ID NO: 185104 - DNA, 33 bp, Homo sapien
atcttctggaaattaagtaaaatgccaaacaag

SEQ ID NO: 185105 - DNA, 33 bp, Homo sapien
caagaatttgaggaaacgtccttctactaatat

SEQ ID NO: 185106 - DNA, 33 bp, Homo sapien
caagaatttgaggaaatgtccttctactaatat

SEQ ID NO: 185107 - DNA, 33 bp, Homo sapien
agtcttggagaagagcacgagaacctagaccgc

SEQ ID NO: 185108 - DNA, 33 bp, Homo sapien
agtcttggagaagagcgcgagaacctagaccgc

SEQ ID NO: 185109 - DNA, 33 bp, Homo sapien
ttgtgttctcagttcacggtatagttttaacaa

SEQ ID NO: 185110 - DNA, 33 bp, Homo sapien
ttgtgttctcagttcatggtatagttttaacaa

SEQ ID NO: 185111 - DNA, 33 bp, Homo sapien
gaagtttgttatcaccaatcgtttgaagccttc

SEQ ID NO: 185112 - DNA, 33 bp, Homo sapien
gaagtttgttatcaccgatcgtttgaagccttc

SEQ ID NO: 185113 - DNA, 33 bp, Homo sapien
tgtgcttgactgtaacgctatagttggtttcta

SEQ ID NO: 185114 - DNA, 33 bp, Homo sapien
tgtgcttgactgtaactctatagttggtttcta

SEQ ID NO: 185115 - DNA, 33 bp, Homo sapien
agtatgagtggaatataaactgtacacataatt

SEQ ID NO: 185116 - DNA, 33 bp, Homo sapien
agtatgagtggaatatgaactgtacacataatt

SEQ ID NO: 185117 - DNA, 33 bp, Homo sapien
gtttctaccagcaccaaactcttacttgtagca

SEQ ID NO: 185118 - DNA, 33 bp, Homo sapien
gtttctaccagcaccagactcttacttgtagca

SEQ ID NO: 185119 - DNA, 33 bp, Homo sapien
ctgtggtcttacataaacagccagctggaagac

SEQ ID NO: 185120 - DNA, 33 bp, Homo sapien
ctgtggtcttacataagcagccagctggaagac

SEQ ID NO: 185121 - DNA, 33 bp, Homo sapien
attctccaccacataaaccatttacactttaga

SEQ ID NO: 185122 - DNA, 33 bp, Homo sapien
attctccaccacataagccatttacactttaga

SEQ ID NO: 185123 - DNA, 33 bp, Homo sapien
gaagccatcctgttcaatctctctgacctctac

SEQ ID NO: 185124 - DNA, 33 bp, Homo sapien
gaagccatcctgttcagtctctctgacctctac

SEQ ID NO: 185125 - DNA, 33 bp, Homo sapien
ctctgagtcaactaaaaggtctaatggagagga

SEQ ID NO: 185126 - DNA, 33 bp, Homo sapien
ctctgagtcaactaaacggtctaatggagagga

SEQ ID NO: 185127 - DNA, 33 bp, Homo sapien
aagaaattgctgtcccaggagcattcagtgtag

SEQ ID NO: 185128 - DNA, 33 bp, Homo sapien
aagaaattgctgtcccgggagcattcagtgtag

SEQ ID NO: 185129 - DNA, 33 bp, Homo sapien
ctgctttccttacaacagtgagatgcttactat

SEQ ID NO: 185130 - DNA, 33 bp, Homo sapien
ctgctttccttacaaccgtgagatgcttactat

SEQ ID NO: 185131 - DNA, 33 bp, Homo sapien
aaatttctgaacacaaaataaagtttacaaagg

SEQ ID NO: 185132 - DNA, 33 bp, Homo sapien
aaatttctgaacacaacataaagtttacaaagg

SEQ ID NO: 185133 - DNA, 33 bp, Homo sapien
gtcaatatcacattcacggacatagtctaataa

SEQ ID NO: 185134 - DNA, 33 bp, Homo sapien
gtcaatatcacattcatggacatagtctaataa

SEQ ID NO: 185135 - DNA, 33 bp, Homo sapien
tggttatacagaaatacacattagtgcttatta

SEQ ID NO: 185136 - DNA, 33 bp, Homo sapien
tggttatacagaaatatacattagtgcttatta

SEQ ID NO: 185137 - DNA, 33 bp, Homo sapien
tttgtggatgaggagtcaaggaacagtaagatt

SEQ ID NO: 185138 - DNA, 33 bp, Homo sapien
tttgtggatgaggagtgaaggaacagtaagatt

SEQ ID NO: 185139 - DNA, 33 bp, Homo sapien
ctaaaccacttgccttaaactgtttcactcttg

SEQ ID NO: 185140 - DNA, 33 bp, Homo sapien
ctaaaccacttgcctttaactgtttcactcttg

SEQ ID NO: 185141 - DNA, 33 bp, Homo sapien
aagctaaagagaaagacgcagttatatagttac

SEQ ID NO: 185142 - DNA, 33 bp, Homo sapien
aagctaaagagaaagatgcagttatatagttac

SEQ ID NO: 185143 - DNA, 33 bp, Homo sapien
agtcatgaaaataccaagaatgtgaaagtaatt

SEQ ID NO: 185144 - DNA, 33 bp, Homo sapien
agtcatgaaaataccatgaatgtgaaagtaatt

SEQ ID NO: 185145 - DNA, 33 bp, Homo sapien
aaatcaatgcatggaaagtatacttggctcagc

SEQ ID NO: 185146 - DNA, 33 bp, Homo sapien
aaatcaatgcatggaaggtatacttggctcagc

SEQ ID NO: 185147 - DNA, 33 bp, Homo sapien
aagcttggaaatatcaacataaattgtccatag

SEQ ID NO: 185148 - DNA, 33 bp, Homo sapien
aagcttggaaatatcaccataaattgtccatag

SEQ ID NO: 185149 - DNA, 33 bp, Homo sapien
agctggatggggactacatggttgttatattgt

SEQ ID NO: 185150 - DNA, 33 bp, Homo sapien
agctggatggggactatatggttgttatattgt

SEQ ID NO: 185151 - DNA, 33 bp, Homo sapien
atctgaaaagccataaaacacagtcagagctaa

SEQ ID NO: 185152 - DNA, 33 bp, Homo sapien
atctgaaaagccataatacacagtcagagctaa

SEQ ID NO: 185153 - DNA, 33 bp, Homo sapien
cagtgtggaaagagaacaggataatggtaagga

SEQ ID NO: 185154 - DNA, 33 bp, Homo sapien
cagtgtggaaagagaagaggataatggtaagga

SEQ ID NO: 185155 - DNA, 33 bp, Homo sapien
atacacactgtattccccatatcttaaattaca

SEQ ID NO: 185156 - DNA, 33 bp, Homo sapien
atacacactgtattcctcatatcttaaattaca

SEQ ID NO: 185157 - DNA, 33 bp, Homo sapien
gccatacctaaactaaatatctcccagaagttt

SEQ ID NO: 185158 - DNA, 33 bp, Homo sapien
gccatacctaaactaagtatctcccagaagttt

SEQ ID NO: 185159 - DNA, 33 bp, Homo sapien
agctgaagatgacttaaatttgataaaagggaa

SEQ ID NO: 185160 - DNA, 33 bp, Homo sapien
agctgaagatgacttacatttgataaaagggaa

SEQ ID NO: 185161 - DNA, 33 bp, Homo sapien
ggcagcaataaaataactaaaaccttgtaccat

SEQ ID NO: 185162 - DNA, 33 bp, Homo sapien
ggcagcaataaaataattaaaaccttgtaccat

SEQ ID NO: 185163 - DNA, 33 bp, Homo sapien
ctgttcaaattgttaaccattttatccacaatt

SEQ ID NO: 185164 - DNA, 33 bp, Homo sapien
ctgttcaaattgttaatcattttatccacaatt

SEQ ID NO: 185165 - DNA, 33 bp, Homo sapien
ttatttatatttacaaactagcacagggaagat

SEQ ID NO: 185166 - DNA, 33 bp, Homo sapien
ttatttatatttacaacctagcacagggaagat

SEQ ID NO: 185167 - DNA, 33 bp, Homo sapien
gtaacattaggaatggaatgtatgttttccact

SEQ ID NO: 185168 - DNA, 33 bp, Homo sapien
gtaacattaggaatgggatgtatgttttccact

SEQ ID NO: 185169 - DNA, 33 bp, Homo sapien
ccaaaactgtctaaaacgctctgcactttttga

SEQ ID NO: 185170 - DNA, 33 bp, Homo sapien
ccaaaactgtctaaaatgctctgcactttttga

SEQ ID NO: 185171 - DNA, 33 bp, Homo sapien
aatagcacatctgatacgctttggcaggtacct

SEQ ID NO: 185172 - DNA, 33 bp, Homo sapien
aatagcacatctgatatgctttggcaggtacct

SEQ ID NO: 185173 - DNA, 33 bp, Homo sapien
tctctttctttaactacgtgccgagctgaaata

SEQ ID NO: 185174 - DNA, 33 bp, Homo sapien
tctctttctttaactatgtgccgagctgaaata

SEQ ID NO: 185175 - DNA, 33 bp, Homo sapien
gagccaacattttcacaccatgtgcctcacagc

SEQ ID NO: 185176 - DNA, 33 bp, Homo sapien
gagccaacattttcacgccatgtgcctcacagc

SEQ ID NO: 185177 - DNA, 33 bp, Homo sapien
aagacattctatttgccaaaggtccttctaagg

SEQ ID NO: 185178 - DNA, 33 bp, Homo sapien
aagacattctatttgctaaaggtccttctaagg

SEQ ID NO: 185179 - DNA, 33 bp, Homo sapien
acattggtaactgcacaatatatcagtctccct

SEQ ID NO: 185180 - DNA, 33 bp, Homo sapien
acattggtaactgcacgatatatcagtctccct

SEQ ID NO: 185181 - DNA, 33 bp, Homo sapien
gaatagatacaaagaacgcttagggttatctca

SEQ ID NO: 185182 - DNA, 33 bp, Homo sapien
gaatagatacaaagaatgcttagggttatctca

SEQ ID NO: 185183 - DNA, 33 bp, Homo sapien
ttgaagaaagaatgcaaagttttatttagtgga

SEQ ID NO: 185184 - DNA, 33 bp, Homo sapien
ttgaagaaagaatgcagagttttatttagtgga

SEQ ID NO: 185185 - DNA, 33 bp, Homo sapien
ttcttttcggatattacggcagggctctggagt

SEQ ID NO: 185186 - DNA, 33 bp, Homo sapien
ttcttttcggatattatggcagggctctggagt

SEQ ID NO: 185187 - DNA, 33 bp, Homo sapien
aacgtcatattactcccatatcaaatgcagatc

SEQ ID NO: 185188 - DNA, 33 bp, Homo sapien
aacgtcatattactcctatatcaaatgcagatc

SEQ ID NO: 185189 - DNA, 33 bp, Homo sapien
cctgatttgcagtcgcaatgggcagaggtacaa

SEQ ID NO: 185190 - DNA, 33 bp, Homo sapien
cctgatttgcagtcgcgatgggcagaggtacaa

SEQ ID NO: 185191 - DNA, 33 bp, Homo sapien
ctaatggcttttcctacacaagtagttcacatc

SEQ ID NO: 185192 - DNA, 33 bp, Homo sapien
ctaatggcttttcctatacaagtagttcacatc

SEQ ID NO: 185193 - DNA, 33 bp, Homo sapien
aagatttcaggtgctcaaagataggcctaaagg

SEQ ID NO: 185194 - DNA, 33 bp, Homo sapien
aagatttcaggtgctcgaagataggcctaaagg

SEQ ID NO: 185195 - DNA, 33 bp, Homo sapien
acaacaacaaaaaaaacaactctggctttgcag

SEQ ID NO: 185196 - DNA, 33 bp, Homo sapien
acaacaacaaaaaaaataactctggctttgcag

SEQ ID NO: 185197 - DNA, 33 bp, Homo sapien
gtttatgagccttgaaataaacaaatagcagtc

SEQ ID NO: 185198 - DNA, 33 bp, Homo sapien
gtttatgagccttgaagtaaacaaatagcagtc

SEQ ID NO: 185199 - DNA, 33 bp, Homo sapien
taaagatcactagatacaggctaaaattaggca

SEQ ID NO: 185200 - DNA, 33 bp, Homo sapien
taaagatcactagatataggctaaaattaggca

SEQ ID NO: 185201 - DNA, 33 bp, Homo sapien
tctgtaatgcttgccaccttctaatatgtacta

SEQ ID NO: 185202 - DNA, 33 bp, Homo sapien
tctgtaatgcttgccatcttctaatatgtacta

SEQ ID NO: 185203 - DNA, 33 bp, Homo sapien
aactgagtggccaggaacaacacaagcaaactt

SEQ ID NO: 185204 - DNA, 33 bp, Homo sapien
aactgagtggccaggatcaacacaagcaaactt

SEQ ID NO: 185205 - DNA, 33 bp, Homo sapien
agttgagcaacaagaaagtgaaaggaaatttag

SEQ ID NO: 185206 - DNA, 33 bp, Homo sapien
agttgagcaacaagaatgtgaaaggaaatttag

SEQ ID NO: 185207 - DNA, 33 bp, Homo sapien
caatgtccctgtgaagcattcattcttacatct

SEQ ID NO: 185208 - DNA, 33 bp, Homo sapien
caatgtccctgtgaaggattcattcttacatct

SEQ ID NO: 185209 - DNA, 33 bp, Homo sapien
acctcttttccttccacagaatgtgaggactaa

SEQ ID NO: 185210 - DNA, 33 bp, Homo sapien
acctcttttccttccatagaatgtgaggactaa

SEQ ID NO: 185211 - DNA, 33 bp, Homo sapien
tgaagcatgagaataccgatttacatggaagct

SEQ ID NO: 185212 - DNA, 33 bp, Homo sapien
tgaagcatgagaatactgatttacatggaagct

SEQ ID NO: 185213 - DNA, 33 bp, Homo sapien
gtattgtgaatggtagcctacacatacgcaaat

SEQ ID NO: 185214 - DNA, 33 bp, Homo sapien
gtattgtgaatggtagtctacacatacgcaaat

SEQ ID NO: 185215 - DNA, 33 bp, Homo sapien
ttttgtactgggcgataacataaatagtgatct

SEQ ID NO: 185216 - DNA, 33 bp, Homo sapien
ttttgtactgggcgattacataaatagtgatct

SEQ ID NO: 185217 - DNA, 33 bp, Homo sapien
atgcctgctaattttacctcttagacaggatat

SEQ ID NO: 185218 - DNA, 33 bp, Homo sapien
atgcctgctaattttatctcttagacaggatat

SEQ ID NO: 185219 - DNA, 33 bp, Homo sapien
ggccaagaagtgagacagcaggaatgtactggg

SEQ ID NO: 185220 - DNA, 33 bp, Homo sapien
ggccaagaagtgagacggcaggaatgtactggg

SEQ ID NO: 185221 - DNA, 33 bp, Homo sapien
gacagtcttcctcttccatctaggctggagtgt

SEQ ID NO: 185222 - DNA, 33 bp, Homo sapien
gacagtcttcctcttctatctaggctggagtgt

SEQ ID NO: 185223 - DNA, 33 bp, Homo sapien
tctggtctttggctcacgtctctactgtgtgac

SEQ ID NO: 185224 - DNA, 33 bp, Homo sapien
tctggtctttggctcatgtctctactgtgtgac

SEQ ID NO: 185225 - DNA, 33 bp, Homo sapien
gcaagatagaaaacacgcacaagtctaaagctg

SEQ ID NO: 185226 - DNA, 33 bp, Homo sapien
gcaagatagaaaacactcacaagtctaaagctg

SEQ ID NO: 185227 - DNA, 33 bp, Homo sapien
aaatggggacaatagcacttaactcacaggaag

SEQ ID NO: 185228 - DNA, 33 bp, Homo sapien
aaatggggacaatagcgcttaactcacaggaag

SEQ ID NO: 185229 - DNA, 33 bp, Homo sapien
agtacttcattcacaaactagcaatcagattat

SEQ ID NO: 185230 - DNA, 33 bp, Homo sapien
agtacttcattcacaacctagcaatcagattat

SEQ ID NO: 185231 - DNA, 33 bp, Homo sapien
aaatgggtatataagaacacaagcctcagagag

SEQ ID NO: 185232 - DNA, 33 bp, Homo sapien
aaatgggtatataagagcacaagcctcagagag

SEQ ID NO: 185233 - DNA, 33 bp, Homo sapien
atagctgattcttagcaactctttgtccaactg

SEQ ID NO: 185234 - DNA, 33 bp, Homo sapien
atagctgattcttagctactctttgtccaactg

SEQ ID NO: 185235 - DNA, 33 bp, Homo sapien
tctgtttctctcaggtcacattcttcattcttc

SEQ ID NO: 185236 - DNA, 33 bp, Homo sapien
tctgtttctctcaggtgacattcttcattcttc

SEQ ID NO: 185237 - DNA, 33 bp, Homo sapien
gcaaaaggcctgcatccgaaacggaaatgatct

SEQ ID NO: 185238 - DNA, 33 bp, Homo sapien
gcaaaaggcctgcatctgaaacggaaatgatct

SEQ ID NO: 185239 - DNA, 33 bp, Homo sapien
ccacactctctatgaaagacttcaaattctctc

SEQ ID NO: 185240 - DNA, 33 bp, Homo sapien
ccacactctctatgaatgacttcaaattctctc

SEQ ID NO: 185241 - DNA, 33 bp, Homo sapien
tctttataccgctataagtgtgaataatgcaat

SEQ ID NO: 185242 - DNA, 33 bp, Homo sapien
tctttataccgctataggtgtgaataatgcaat

SEQ ID NO: 185243 - DNA, 33 bp, Homo sapien
cctatgccctctcattcaacttgcattctgtta

SEQ ID NO: 185244 - DNA, 33 bp, Homo sapien
cctatgccctctcattgaacttgcattctgtta

SEQ ID NO: 185245 - DNA, 33 bp, Homo sapien
acactatcccttgagcaatttggaggcaagaac

SEQ ID NO: 185246 - DNA, 33 bp, Homo sapien
acactatcccttgagcgatttggaggcaagaac

SEQ ID NO: 185247 - DNA, 33 bp, Homo sapien
cactatgcataatgcacgggcttgcagcttgta

SEQ ID NO: 185248 - DNA, 33 bp, Homo sapien
cactatgcataatgcaggggcttgcagcttgta

SEQ ID NO: 185249 - DNA, 33 bp, Homo sapien
ctcatcatcttagatccccttccttgattgtcc

SEQ ID NO: 185250 - DNA, 33 bp, Homo sapien
ctcatcatcttagatctccttccttgattgtcc

SEQ ID NO: 185251 - DNA, 33 bp, Homo sapien
tgtacagcattagacccagcaataatatgaatt

SEQ ID NO: 185252 - DNA, 33 bp, Homo sapien
tgtacagcattagacctagcaataatatgaatt

SEQ ID NO: 185253 - DNA, 33 bp, Homo sapien
aatgggcctctttgccactcttgttctgcccac

SEQ ID NO: 185254 - DNA, 33 bp, Homo sapien
aatgggcctctttgccgctcttgttctgcccac

SEQ ID NO: 185255 - DNA, 33 bp, Homo sapien
gtgttgagaagataaactatagaaacaagaatg

SEQ ID NO: 185256 - DNA, 33 bp, Homo sapien
gtgttgagaagataaagtatagaaacaagaatg

SEQ ID NO: 185257 - DNA, 33 bp, Homo sapien
gacattttccatcagcaccaaataatttgctgg

SEQ ID NO: 185258 - DNA, 33 bp, Homo sapien
gacattttccatcagcgccaaataatttgctgg

SEQ ID NO: 185259 - DNA, 33 bp, Homo sapien
tattggtatcatcatacacatatcaaccttata

SEQ ID NO: 185260 - DNA, 33 bp, Homo sapien
tattggtatcatcatatacatatcaaccttata

SEQ ID NO: 185261 - DNA, 33 bp, Homo sapien
tctgaggtgggcctaaaaatccggatttctaac

SEQ ID NO: 185262 - DNA, 33 bp, Homo sapien
tctgaggtgggcctaagaatccggatttctaac

SEQ ID NO: 185263 - DNA, 33 bp, Homo sapien
attacctcagaactaaccacatttagattttag

SEQ ID NO: 185264 - DNA, 33 bp, Homo sapien
attacctcagaactaagcacatttagattttag

SEQ ID NO: 185265 - DNA, 33 bp, Homo sapien
tgccaagtcgattgaccaagagaaggctgaatg

SEQ ID NO: 185266 - DNA, 33 bp, Homo sapien
tgccaagtcgattgacgaagagaaggctgaatg

SEQ ID NO: 185267 - DNA, 33 bp, Homo sapien
atacaacattagtgagaacttcaggattctggg

SEQ ID NO: 185268 - DNA, 33 bp, Homo sapien
atacaacattagtgagtacttcaggattctggg

SEQ ID NO: 185269 - DNA, 33 bp, Homo sapien
tttgcctcccattacaacatttttctgaagtct

SEQ ID NO: 185270 - DNA, 33 bp, Homo sapien
tttgcctcccattacagcatttttctgaagtct

SEQ ID NO: 185271 - DNA, 33 bp, Homo sapien
gcattcagatcaccaaaagagtttgttaaagta

SEQ ID NO: 185272 - DNA, 33 bp, Homo sapien
gcattcagatcaccaagagagtttgttaaagta

SEQ ID NO: 185273 - DNA, 33 bp, Homo sapien
tatatttcttgacagcaagtaatccgaaagctc

SEQ ID NO: 185274 - DNA, 33 bp, Homo sapien
tatatttcttgacagctagtaatccgaaagctc

SEQ ID NO: 185275 - DNA, 33 bp, Homo sapien
aatgaaacagaaaacaggtaccacccaaagtta

SEQ ID NO: 185276 - DNA, 33 bp, Homo sapien
aatgaaacagaaaacatgtaccacccaaagtta

SEQ ID NO: 185277 - DNA, 33 bp, Homo sapien
ctgtcgtgtttaggaacgtccacctattactgt

SEQ ID NO: 185278 - DNA, 33 bp, Homo sapien
ctgtcgtgtttaggaatgtccacctattactgt

SEQ ID NO: 185279 - DNA, 33 bp, Homo sapien
tccctattatggcaagcacaacaggcaggaatg

SEQ ID NO: 185280 - DNA, 33 bp, Homo sapien
tccctattatggcaagtacaacaggcaggaatg

SEQ ID NO: 185281 - DNA, 33 bp, Homo sapien
cgttcataaatttcaccaagtcatcaacacaaa

SEQ ID NO: 185282 - DNA, 33 bp, Homo sapien
cgttcataaatttcactaagtcatcaacacaaa

SEQ ID NO: 185283 - DNA, 33 bp, Homo sapien
agactatgaattctaagcaggctgaaaagatag

SEQ ID NO: 185284 - DNA, 33 bp, Homo sapien
agactatgaattctaatcaggctgaaaagatag

SEQ ID NO: 185285 - DNA, 33 bp, Homo sapien
ttttcaataggagccaatacatctctatgtgaa

SEQ ID NO: 185286 - DNA, 33 bp, Homo sapien
ttttcaataggagccagtacatctctatgtgaa

SEQ ID NO: 185287 - DNA, 33 bp, Homo sapien
tgttaatggaggtcaggattactaaggctggat

SEQ ID NO: 185288 - DNA, 33 bp, Homo sapien
tgttaatggaggtcagtattactaaggctggat

SEQ ID NO: 185289 - DNA, 33 bp, Homo sapien
taggcttccgggaaaaggtgagaacactggcaa

SEQ ID NO: 185290 - DNA, 33 bp, Homo sapien
taggcttccgggaaaatgtgagaacactggcaa

SEQ ID NO: 185291 - DNA, 33 bp, Homo sapien
ggaacccagggctaaccacagagatgctgtcag

SEQ ID NO: 185292 - DNA, 33 bp, Homo sapien
ggaacccagggctaactacagagatgctgtcag

SEQ ID NO: 185293 - DNA, 33 bp, Homo sapien
ggagtctttggtgagacctcttaatgcatatgc

SEQ ID NO: 185294 - DNA, 33 bp, Homo sapien
ggagtctttggtgagatctcttaatgcatatgc

SEQ ID NO: 185295 - DNA, 33 bp, Homo sapien
tctacttgaatgcagcaaacttaccaatatatt

SEQ ID NO: 185296 - DNA, 33 bp, Homo sapien
tctacttgaatgcagccaacttaccaatatatt

SEQ ID NO: 185297 - DNA, 33 bp, Homo sapien
agcatcaataataggacatactttcactatttg

SEQ ID NO: 185298 - DNA, 33 bp, Homo sapien
agcatcaataataggagatactttcactatttg

SEQ ID NO: 185299 - DNA, 33 bp, Homo sapien
ctaggcatggcctcaaaagacctatattagaaa

SEQ ID NO: 185300 - DNA, 33 bp, Homo sapien
ctaggcatggcctcaagagacctatattagaaa

SEQ ID NO: 185301 - DNA, 33 bp, Homo sapien
ttagcacgtcctcttagagctctgtagatccaa

SEQ ID NO: 185302 - DNA, 33 bp, Homo sapien
ttagcacgtcctcttatagctctgtagatccaa

SEQ ID NO: 185303 - DNA, 33 bp, Homo sapien
ctcacataatcccaagcagagcacaaggcagtg

SEQ ID NO: 185304 - DNA, 33 bp, Homo sapien
ctcacataatcccaagtagagcacaaggcagtg

SEQ ID NO: 185305 - DNA, 33 bp, Homo sapien
atatggacaactatgaaccacttaagaagtttc

SEQ ID NO: 185306 - DNA, 33 bp, Homo sapien
atatggacaactatgagccacttaagaagtttc

SEQ ID NO: 185307 - DNA, 33 bp, Homo sapien
ttatctttggagttagacaaccctagatctgac

SEQ ID NO: 185308 - DNA, 33 bp, Homo sapien
ttatctttggagttaggcaaccctagatctgac

SEQ ID NO: 185309 - DNA, 33 bp, Homo sapien
ctgttagtgagtggcaaaatgacaagtcagatc

SEQ ID NO: 185310 - DNA, 33 bp, Homo sapien
ctgttagtgagtggcagaatgacaagtcagatc

SEQ ID NO: 185311 - DNA, 33 bp, Homo sapien
cttggaagaacttgaactgggccttggaagaag

SEQ ID NO: 185312 - DNA, 33 bp, Homo sapien
cttggaagaacttgaattgggccttggaagaag

SEQ ID NO: 185313 - DNA, 33 bp, Homo sapien
tatgggggcacaaggaaaagaaagttaattaac

SEQ ID NO: 185314 - DNA, 33 bp, Homo sapien
tatgggggcacaaggagaagaaagttaattaac

SEQ ID NO: 185315 - DNA, 33 bp, Homo sapien
aagtggaaccatttttgagtgtgacttcatttc

SEQ ID NO: 185316 - DNA, 33 bp, Homo sapien
aagtggaaccattttttagtgtgacttcatttc

SEQ ID NO: 185317 - DNA, 33 bp, Homo sapien
attgaacagagcaaaactagaatttcgaaaact

SEQ ID NO: 185318 - DNA, 33 bp, Homo sapien
attgaacagagcaaaattagaatttcgaaaact

SEQ ID NO: 185319 - DNA, 33 bp, Homo sapien
tcagttcagggttcagcaaattagcaaaattac

SEQ ID NO: 185320 - DNA, 33 bp, Homo sapien
tcagttcagggttcaggaaattagcaaaattac

SEQ ID NO: 185321 - DNA, 33 bp, Homo sapien
atgaaaaggtagagcactctcaatgttttgagt

SEQ ID NO: 185322 - DNA, 33 bp, Homo sapien
atgaaaaggtagagcagtctcaatgttttgagt

SEQ ID NO: 185323 - DNA, 33 bp, Homo sapien
ggctgtaaataaaccaaattcagtaagagaaac

SEQ ID NO: 185324 - DNA, 33 bp, Homo sapien
ggctgtaaataaaccagattcagtaagagaaac

SEQ ID NO: 185325 - DNA, 33 bp, Homo sapien
atgataaaggggaaaggatcataattttatgaa

SEQ ID NO: 185326 - DNA, 33 bp, Homo sapien
atgataaaggggaaagtatcataattttatgaa

SEQ ID NO: 185327 - DNA, 33 bp, Homo sapien
tagactgtttttcccacacctccaagaaggaag

SEQ ID NO: 185328 - DNA, 33 bp, Homo sapien
tagactgtttttcccatacctccaagaaggaag

SEQ ID NO: 185329 - DNA, 33 bp, Homo sapien
acttactactaataacaatacaggcagtttcca

SEQ ID NO: 185330 - DNA, 33 bp, Homo sapien
acttactactaataacgatacaggcagtttcca

SEQ ID NO: 185331 - DNA, 33 bp, Homo sapien
ttcccaacagcataacaagtgtaattttatggg

SEQ ID NO: 185332 - DNA, 33 bp, Homo sapien
ttcccaacagcataacgagtgtaattttatggg

SEQ ID NO: 185333 - DNA, 33 bp, Homo sapien
gcaacttattgtggagaccaaatggcatttttt

SEQ ID NO: 185334 - DNA, 33 bp, Homo sapien
gcaacttattgtggaggccaaatggcatttttt

SEQ ID NO: 185335 - DNA, 33 bp, Homo sapien
caaaggtagaatctaaatatgaactgacatatt

SEQ ID NO: 185336 - DNA, 33 bp, Homo sapien
caaaggtagaatctaattatgaactgacatatt

SEQ ID NO: 185337 - DNA, 33 bp, Homo sapien
catgtgtgatattcaccgaggcatgtccctgga

SEQ ID NO: 185338 - DNA, 33 bp, Homo sapien
catgtgtgatattcactgaggcatgtccctgga

SEQ ID NO: 185339 - DNA, 33 bp, Homo sapien
ccacaattgaaaagccaagagctatctgtgata

SEQ ID NO: 185340 - DNA, 33 bp, Homo sapien
ccacaattgaaaagccgagagctatctgtgata

SEQ ID NO: 185341 - DNA, 33 bp, Homo sapien
atttacctcatctggacgttacttttcctaaaa

SEQ ID NO: 185342 - DNA, 33 bp, Homo sapien
atttacctcatctggatgttacttttcctaaaa

SEQ ID NO: 185343 - DNA, 33 bp, Homo sapien
tataaacagaagttgacgcacgctaaggtactc

SEQ ID NO: 185344 - DNA, 33 bp, Homo sapien
tataaacagaagttgatgcacgctaaggtactc

SEQ ID NO: 185345 - DNA, 33 bp, Homo sapien
cctaaattccagaggaaaagttcacagtgaagt

SEQ ID NO: 185346 - DNA, 33 bp, Homo sapien
cctaaattccagaggagaagttcacagtgaagt

SEQ ID NO: 185347 - DNA, 33 bp, Homo sapien
tgaatctgcattttagcccagtttttctgtcac

SEQ ID NO: 185348 - DNA, 33 bp, Homo sapien
tgaatctgcattttagtccagtttttctgtcac

SEQ ID NO: 185349 - DNA, 33 bp, Homo sapien
tattggcaggtaataccaattataaaacgtgtg

SEQ ID NO: 185350 - DNA, 33 bp, Homo sapien
tattggcaggtaatactaattataaaacgtgtg

SEQ ID NO: 185351 - DNA, 33 bp, Homo sapien
aacactgattatgtgacggcatagcatgaaaac

SEQ ID NO: 185352 - DNA, 33 bp, Homo sapien
aacactgattatgtgatggcatagcatgaaaac

SEQ ID NO: 185353 - DNA, 33 bp, Homo sapien
gaaccaggcctcagcaatagaatcagtgtcccc

SEQ ID NO: 185354 - DNA, 33 bp, Homo sapien
gaaccaggcctcagcagtagaatcagtgtcccc

SEQ ID NO: 185355 - DNA, 33 bp, Homo sapien
aaaatacatggcccagactagatgttcagtcgt

SEQ ID NO: 185356 - DNA, 33 bp, Homo sapien
aaaatacatggcccagtctagatgttcagtcgt

SEQ ID NO: 185357 - DNA, 33 bp, Homo sapien
tgccttagaagagtccaatgcattcacatagca

SEQ ID NO: 185358 - DNA, 33 bp, Homo sapien
tgccttagaagagtcccatgcattcacatagca

SEQ ID NO: 185359 - DNA, 33 bp, Homo sapien
catctaaggagtcccaactatgtctaggcacca

SEQ ID NO: 185360 - DNA, 33 bp, Homo sapien
catctaaggagtcccagctatgtctaggcacca

SEQ ID NO: 185361 - DNA, 33 bp, Homo sapien
actgggagccatcttaaaggccatttaacacat

SEQ ID NO: 185362 - DNA, 33 bp, Homo sapien
actgggagccatcttagaggccatttaacacat

SEQ ID NO: 185363 - DNA, 33 bp, Homo sapien
attcctgaaactagaacgaacagacacacaaag

SEQ ID NO: 185364 - DNA, 33 bp, Homo sapien
attcctgaaactagaatgaacagacacacaaag

SEQ ID NO: 185365 - DNA, 33 bp, Homo sapien
gtcttcaaggaacttacctgtcttcaaggcact

SEQ ID NO: 185366 - DNA, 33 bp, Homo sapien
gtcttcaaggaacttatctgtcttcaaggcact

SEQ ID NO: 185367 - DNA, 33 bp, Homo sapien
atcatgaatggaatgaagatgtcagacacccag

SEQ ID NO: 185368 - DNA, 33 bp, Homo sapien
atcatgaatggaatgaggatgtcagacacccag

SEQ ID NO: 185369 - DNA, 33 bp, Homo sapien
caggctctaaactccacgctactcttactacca

SEQ ID NO: 185370 - DNA, 33 bp, Homo sapien
caggctctaaactccatgctactcttactacca

SEQ ID NO: 185371 - DNA, 33 bp, Homo sapien
tgacaggcataactcactgaagtaaaggcgtgt

SEQ ID NO: 185372 - DNA, 33 bp, Homo sapien
tgacaggcataactcattgaagtaaaggcgtgt

SEQ ID NO: 185373 - DNA, 33 bp, Homo sapien
atcatccttattaaaacagctggaatttatgaa

SEQ ID NO: 185374 - DNA, 33 bp, Homo sapien
atcatccttattaaaagagctggaatttatgaa

SEQ ID NO: 185375 - DNA, 33 bp, Homo sapien
agtataaggaaaaggaacatttctgagtctggg

SEQ ID NO: 185376 - DNA, 33 bp, Homo sapien
agtataaggaaaaggagcatttctgagtctggg

SEQ ID NO: 185377 - DNA, 33 bp, Homo sapien
tttgcctcgggagagaaaaagagagtcgattcc

SEQ ID NO: 185378 - DNA, 33 bp, Homo sapien
tttgcctcgggagagataaagagagtcgattcc

SEQ ID NO: 185379 - DNA, 33 bp, Homo sapien
gtagcaagagaacagactaatagagtgtgcaat

SEQ ID NO: 185380 - DNA, 33 bp, Homo sapien
gtagcaagagaacagagtaatagagtgtgcaat

SEQ ID NO: 185381 - DNA, 33 bp, Homo sapien
aaaaggacaggaatacaaggcaaagtttggaat

SEQ ID NO: 185382 - DNA, 33 bp, Homo sapien
aaaaggacaggaatacgaggcaaagtttggaat

SEQ ID NO: 185383 - DNA, 33 bp, Homo sapien
agacctagcctatcccaattaacacagatcctc

SEQ ID NO: 185384 - DNA, 33 bp, Homo sapien
agacctagcctatcccgattaacacagatcctc

SEQ ID NO: 185385 - DNA, 33 bp, Homo sapien
agcacattaatgagtcaaatcaaactatttgta

SEQ ID NO: 185386 - DNA, 33 bp, Homo sapien
agcacattaatgagtcgaatcaaactatttgta

SEQ ID NO: 185387 - DNA, 33 bp, Homo sapien
tctcacaggaattcaacaggtttcaatctcacc

SEQ ID NO: 185388 - DNA, 33 bp, Homo sapien
tctcacaggaattcaagaggtttcaatctcacc

SEQ ID NO: 185389 - DNA, 33 bp, Homo sapien
attttaacattgcataacagagaatacctatct

SEQ ID NO: 185390 - DNA, 33 bp, Homo sapien
attttaacattgcatagcagagaatacctatct

SEQ ID NO: 185391 - DNA, 33 bp, Homo sapien
ttcaaagagctatttcacctattcccgtgcctc

SEQ ID NO: 185392 - DNA, 33 bp, Homo sapien
ttcaaagagctatttctcctattcccgtgcctc

SEQ ID NO: 185393 - DNA, 33 bp, Homo sapien
tatcctaaatgcaatccattatttgtgaaaact

SEQ ID NO: 185394 - DNA, 33 bp, Homo sapien
tatcctaaatgcaatctattatttgtgaaaact

SEQ ID NO: 185395 - DNA, 33 bp, Homo sapien
tttgtttcacacagaaaagacttggggtggaca

SEQ ID NO: 185396 - DNA, 33 bp, Homo sapien
tttgtttcacacagaagagacttggggtggaca

SEQ ID NO: 185397 - DNA, 33 bp, Homo sapien
atttagtcaacgtagaagacaatcagacgaaag

SEQ ID NO: 185398 - DNA, 33 bp, Homo sapien
atttagtcaacgtagaggacaatcagacgaaag

SEQ ID NO: 185399 - DNA, 33 bp, Homo sapien
ttggtttcagttgcatgaatgtgttgacttcag

SEQ ID NO: 185400 - DNA, 33 bp, Homo sapien
ttggtttcagttgcattaatgtgttgacttcag

SEQ ID NO: 185401 - DNA, 33 bp, Homo sapien
ttatataagctctaccacttttaaatttttaac

SEQ ID NO: 185402 - DNA, 33 bp, Homo sapien
ttatataagctctaccgcttttaaatttttaac

SEQ ID NO: 185403 - DNA, 33 bp, Homo sapien
taccactatgtaatgcacttgtcttatctttgt

SEQ ID NO: 185404 - DNA, 33 bp, Homo sapien
taccactatgtaatgcccttgtcttatctttgt

SEQ ID NO: 185405 - DNA, 33 bp, Homo sapien
ctgtgccagtcaggtaaagatggatgatccccc

SEQ ID NO: 185406 - DNA, 33 bp, Homo sapien
ctgtgccagtcaggtagagatggatgatccccc

SEQ ID NO: 185407 - DNA, 33 bp, Homo sapien
cttaatgacaagtagcaattaccattaccatat

SEQ ID NO: 185408 - DNA, 33 bp, Homo sapien
cttaatgacaagtagccattaccattaccatat

SEQ ID NO: 185409 - DNA, 33 bp, Homo sapien
gagtccatctgtgagaatcccatccccactctg

SEQ ID NO: 185410 - DNA, 33 bp, Homo sapien
gagtccatctgtgagagtcccatccccactctg

SEQ ID NO: 185411 - DNA, 33 bp, Homo sapien
ctactgagcagccatacataaatatctaatccc

SEQ ID NO: 185412 - DNA, 33 bp, Homo sapien
ctactgagcagccatagataaatatctaatccc

SEQ ID NO: 185413 - DNA, 33 bp, Homo sapien
tgtggattattatgggaaaagctgttggcaggt

SEQ ID NO: 185414 - DNA, 33 bp, Homo sapien
tgtggattattatggggaaagctgttggcaggt

SEQ ID NO: 185415 - DNA, 33 bp, Homo sapien
taggattattgctgcacaatttcttgccaaata

SEQ ID NO: 185416 - DNA, 33 bp, Homo sapien
taggattattgctgcataatttcttgccaaata

SEQ ID NO: 185417 - DNA, 33 bp, Homo sapien
ttttcaagtagggtagacatgcttttggaagca

SEQ ID NO: 185418 - DNA, 33 bp, Homo sapien
ttttcaagtagggtaggcatgcttttggaagca

SEQ ID NO: 185419 - DNA, 33 bp, Homo sapien
ttcctcaaaaacaaaacttccaacagacactat

SEQ ID NO: 185420 - DNA, 33 bp, Homo sapien
ttcctcaaaaacaaaagttccaacagacactat

SEQ ID NO: 185421 - DNA, 33 bp, Homo sapien
cttaccttctttaggcgctcggattcactaatc

SEQ ID NO: 185422 - DNA, 33 bp, Homo sapien
cttaccttctttaggctctcggattcactaatc

SEQ ID NO: 185423 - DNA, 33 bp, Homo sapien
gaatggtgctttatcaagagggtgattataaac

SEQ ID NO: 185424 - DNA, 33 bp, Homo sapien
gaatggtgctttatcatgagggtgattataaac

SEQ ID NO: 185425 - DNA, 33 bp, Homo sapien
ttacacgggtaagtgacgctaggacttccattg

SEQ ID NO: 185426 - DNA, 33 bp, Homo sapien
ttacacgggtaagtgatgctaggacttccattg

SEQ ID NO: 185427 - DNA, 33 bp, Homo sapien
gacagctttattaggaaaaaactagaagagaat

SEQ ID NO: 185428 - DNA, 33 bp, Homo sapien
gacagctttattaggagaaaactagaagagaat

SEQ ID NO: 185429 - DNA, 33 bp, Homo sapien
tcagtatgtaatttaacatggcctaatgtaaac

SEQ ID NO: 185430 - DNA, 33 bp, Homo sapien
tcagtatgtaatttaatatggcctaatgtaaac

SEQ ID NO: 185431 - DNA, 33 bp, Homo sapien
aagaatttctccagtacgtacaacacaaaagaa

SEQ ID NO: 185432 - DNA, 33 bp, Homo sapien
aagaatttctccagtatgtacaacacaaaagaa

SEQ ID NO: 185433 - DNA, 33 bp, Homo sapien
caactatttaatgtcaagttgtaatcctctttg

SEQ ID NO: 185434 - DNA, 33 bp, Homo sapien
caactatttaatgtcatgttgtaatcctctttg

SEQ ID NO: 185435 - DNA, 33 bp, Homo sapien
ttgataatttggtaaacgttggttcatgagtta

SEQ ID NO: 185436 - DNA, 33 bp, Homo sapien
ttgataatttggtaaatgttggttcatgagtta

SEQ ID NO: 185437 - DNA, 33 bp, Homo sapien
atctaatcacattggacactttcaatatttggc

SEQ ID NO: 185438 - DNA, 33 bp, Homo sapien
atctaatcacattggatactttcaatatttggc

SEQ ID NO: 185439 - DNA, 33 bp, Homo sapien
ttttgctgttttttaacggactgcagattgcag

SEQ ID NO: 185440 - DNA, 33 bp, Homo sapien
ttttgctgttttttaatggactgcagattgcag

SEQ ID NO: 185441 - DNA, 33 bp, Homo sapien
aatgtgaatgagagaactgtaattgtaaaaacc

SEQ ID NO: 185442 - DNA, 33 bp, Homo sapien
aatgtgaatgagagaattgtaattgtaaaaacc

SEQ ID NO: 185443 - DNA, 33 bp, Homo sapien
ggttgcttatgttggaacttttccattgtgagg

SEQ ID NO: 185444 - DNA, 33 bp, Homo sapien
ggttgcttatgttggaccttttccattgtgagg

SEQ ID NO: 185445 - DNA, 33 bp, Homo sapien
gaaatgtatttggcaacgaatagtggagaaatt

SEQ ID NO: 185446 - DNA, 33 bp, Homo sapien
gaaatgtatttggcaatgaatagtggagaaatt

SEQ ID NO: 185447 - DNA, 33 bp, Homo sapien
atcagttaaatttacaaccttcacaagtttcac

SEQ ID NO: 185448 - DNA, 33 bp, Homo sapien
atcagttaaatttacatccttcacaagtttcac

SEQ ID NO: 185449 - DNA, 33 bp, Homo sapien
gaggctaatgggctaaaacaagagccaaaggaa

SEQ ID NO: 185450 - DNA, 33 bp, Homo sapien
gaggctaatgggctaacacaagagccaaaggaa

SEQ ID NO: 185451 - DNA, 33 bp, Homo sapien
ataaaaccagcataaacgagcaacaggagttga

SEQ ID NO: 185452 - DNA, 33 bp, Homo sapien
ataaaaccagcataaatgagcaacaggagttga

SEQ ID NO: 185453 - DNA, 33 bp, Homo sapien
cagtttctgcacataaagtaattctcttgtcca

SEQ ID NO: 185454 - DNA, 33 bp, Homo sapien
cagtttctgcacataaggtaattctcttgtcca

SEQ ID NO: 185455 - DNA, 33 bp, Homo sapien
gaaaggaaagcaattaagcatattataaatcat

SEQ ID NO: 185456 - DNA, 33 bp, Homo sapien
gaaaggaaagcaattaggcatattataaatcat

SEQ ID NO: 185457 - DNA, 33 bp, Homo sapien
catgcccattctctcaacgtagttatgttgtaa

SEQ ID NO: 185458 - DNA, 33 bp, Homo sapien
catgcccattctctcatcgtagttatgttgtaa

SEQ ID NO: 185459 - DNA, 33 bp, Homo sapien
ctatcctaaatattgcacctatccaatacagct

SEQ ID NO: 185460 - DNA, 33 bp, Homo sapien
ctatcctaaatattgcgcctatccaatacagct

SEQ ID NO: 185461 - DNA, 33 bp, Homo sapien
tgaaagtcatatgtaacctcttgttaaactaat

SEQ ID NO: 185462 - DNA, 33 bp, Homo sapien
tgaaagtcatatgtaatctcttgttaaactaat

SEQ ID NO: 185463 - DNA, 33 bp, Homo sapien
cttttcacataaattaacagatggctcaacaac

SEQ ID NO: 185464 - DNA, 33 bp, Homo sapien
cttttcacataaattatcagatggctcaacaac

SEQ ID NO: 185465 - DNA, 33 bp, Homo sapien
caagagtattgagaacaatgaaattattatttt

SEQ ID NO: 185466 - DNA, 33 bp, Homo sapien
caagagtattgagaacgatgaaattattatttt

SEQ ID NO: 185467 - DNA, 33 bp, Homo sapien
ggttctcagtattttcaaaatgtggcgcatggg

SEQ ID NO: 185468 - DNA, 33 bp, Homo sapien
ggttctcagtattttccaaatgtggcgcatggg

SEQ ID NO: 185469 - DNA, 33 bp, Homo sapien
cttggacctcttggacactacaccggaccccac

SEQ ID NO: 185470 - DNA, 33 bp, Homo sapien
cttggacctcttggacgctacaccggaccccac

SEQ ID NO: 185471 - DNA, 33 bp, Homo sapien
tttatgtacgcttctcgctaaagttgagtctct

SEQ ID NO: 185472 - DNA, 33 bp, Homo sapien
tttatgtacgcttctctctaaagttgagtctct

SEQ ID NO: 185473 - DNA, 33 bp, Homo sapien
ttcagtacctttgaaggccttagtgtgctccat

SEQ ID NO: 185474 - DNA, 33 bp, Homo sapien
ttcagtacctttgaagtccttagtgtgctccat

SEQ ID NO: 185475 - DNA, 33 bp, Homo sapien
tctggtgcacatgtacagcggttccatttcaga

SEQ ID NO: 185476 - DNA, 33 bp, Homo sapien
tctggtgcacatgtacggcggttccatttcaga

SEQ ID NO: 185477 - DNA, 33 bp, Homo sapien
acaaacatatgaaaaaaaaaaaggtcatcactg

SEQ ID NO: 185478 - DNA, 33 bp, Homo sapien
acaaacatatgaaaaacaaaaaggtcatcactg

SEQ ID NO: 185479 - DNA, 33 bp, Homo sapien; identical to SEQ ID NO: 185477

SEQ ID NO: 185480 - DNA, 33 bp, Homo sapien; identical to SEQ ID NO: 185478

SEQ ID NO: 185481 - DNA, 33 bp, Homo sapien
gaagaagtactaaatacggcaatgaaagaacac

SEQ ID NO: 185482 - DNA, 33 bp, Homo sapien
gaagaagtactaaatatggcaatgaaagaacac

SEQ ID NO: 185483 - DNA, 33 bp, Homo sapien
cgaaacataacaaacaacaagtcacttatcaat

SEQ ID NO: 185484 - DNA, 33 bp, Homo sapien
cgaaacataacaaacagcaagtcacttatcaat

SEQ ID NO: 185485 - DNA, 33 bp, Homo sapien
ctaaggacttggtatcacaataaataaatagac

SEQ ID NO: 185486 - DNA, 33 bp, Homo sapien
ctaaggacttggtatcgcaataaataaatagac

SEQ ID NO: 185487 - DNA, 33 bp, Homo sapien
atggattcactcaacaaataatacatcaaataa

SEQ ID NO: 185488 - DNA, 33 bp, Homo sapien
atggattcactcaacagataatacatcaaataa

SEQ ID NO: 185489 - DNA, 33 bp, Homo sapien
ttcacacttggctacacaacaataagagacggg

SEQ ID NO: 185490 - DNA, 33 bp, Homo sapien
ttcacacttggctacataacaataagagacggg

SEQ ID NO: 185491 - DNA, 33 bp, Homo sapien
tatttgcagaattcagaataatcatggtaagat

SEQ ID NO: 185492 - DNA, 33 bp, Homo sapien
tatttgcagaattcaggataatcatggtaagat

SEQ ID NO: 185493 - DNA, 33 bp, Homo sapien
ataaaaaacgtctccagtcattctagaaattgt

SEQ ID NO: 185494 - DNA, 33 bp, Homo sapien
ataaaaaacgtctccattcattctagaaattgt

SEQ ID NO: 185495 - DNA, 33 bp, Homo sapien
agtgagggatataagcacaatagggaaataggt

SEQ ID NO: 185496 - DNA, 33 bp, Homo sapien
agtgagggatataagcgcaatagggaaataggt

SEQ ID NO: 185497 - DNA, 33 bp, Homo sapien
aaatataagtacaagaaagaaaacattgattgg

SEQ ID NO: 185498 - DNA, 33 bp, Homo sapien
aaatataagtacaagagagaaaacattgattgg

SEQ ID NO: 185499 - DNA, 33 bp, Homo sapien
taatttttcactcttacccttagcactctctat

SEQ ID NO: 185500 - DNA, 33 bp, Homo sapien
taatttttcactcttatccttagcactctctat

SEQ ID NO: 185501 - DNA, 33 bp, Homo sapien
acctactatttatcacacattgttctagacact

SEQ ID NO: 185502 - DNA, 33 bp, Homo sapien
acctactatttatcacgcattgttctagacact

SEQ ID NO: 185503 - DNA, 33 bp, Homo sapien
ttgcatcctaaattacacaacttaatacaacaa

SEQ ID NO: 185504 - DNA, 33 bp, Homo sapien
ttgcatcctaaattacgcaacttaatacaacaa

SEQ ID NO: 185505 - DNA, 33 bp, Homo sapien
tgtcttggagttttgaccttaacaacgtttctc

SEQ ID NO: 185506 - DNA, 33 bp, Homo sapien
tgtcttggagttttgatcttaacaacgtttctc

SEQ ID NO: 185507 - DNA, 33 bp, Homo sapien
caaatgttttttcatgccaaagagctgcttcat

SEQ ID NO: 185508 - DNA, 33 bp, Homo sapien
caaatgttttttcatggcaaagagctgcttcat

SEQ ID NO: 185509 - DNA, 33 bp, Homo sapien
agtaaacattgtataactattgctgctattttt

SEQ ID NO: 185510 - DNA, 33 bp, Homo sapien
agtaaacattgtataattattgctgctattttt

SEQ ID NO: 185511 - DNA, 33 bp, Homo sapien
tcctctctaaatagcaggaatattttactacta

SEQ ID NO: 185512 - DNA, 33 bp, Homo sapien
tcctctctaaatagcatgaatattttactacta

SEQ ID NO: 185513 - DNA, 33 bp, Homo sapien
ctatttagagaggacacaggcataaactgttct

SEQ ID NO: 185514 - DNA, 33 bp, Homo sapien
ctatttagagaggacagaggcataaactgttct

SEQ ID NO: 185515 - DNA, 33 bp, Homo sapien
aactcagtgattgtaacccaaagaaaataacag

SEQ ID NO: 185516 - DNA, 33 bp, Homo sapien
aactcagtgattgtaatccaaagaaaataacag

SEQ ID NO: 185517 - DNA, 33 bp, Homo sapien
gatggaaagtctagaacttagtgaattgaataa

SEQ ID NO: 185518 - DNA, 33 bp, Homo sapien
gatggaaagtctagaatttagtgaattgaataa

SEQ ID NO: 185519 - DNA, 33 bp, Homo sapien
tttaaaatcaccagtccagttcaagtaaatact

SEQ ID NO: 185520 - DNA, 33 bp, Homo sapien
tttaaaatcaccagtctagttcaagtaaatact

SEQ ID NO: 185521 - DNA, 33 bp, Homo sapien
ttaattgaaatgcatcacccttacctctcagta

SEQ ID NO: 185522 - DNA, 33 bp, Homo sapien
ttaattgaaatgcatcgcccttacctctcagta

SEQ ID NO: 185523 - DNA, 33 bp, Homo sapien
ctacttccttatataccacctccttgcatccta

SEQ ID NO: 185524 - DNA, 33 bp, Homo sapien
ctacttccttatatactacctccttgcatccta

SEQ ID NO: 185525 - DNA, 33 bp, Homo sapien
cttgcatcctacaatactatctttcccccattt

SEQ ID NO: 185526 - DNA, 33 bp, Homo sapien
cttgcatcctacaatattatctttcccccattt

SEQ ID NO: 185527 - DNA, 33 bp, Homo sapien
ttttcaatagcagcaacctgttcgtttacacaa

SEQ ID NO: 185528 - DNA, 33 bp, Homo sapien
ttttcaatagcagcaatctgttcgtttacacaa

SEQ ID NO: 185529 - DNA, 33 bp, Homo sapien
agctaaacacaaaatacaatgctcaaatatatc

SEQ ID NO: 185530 - DNA, 33 bp, Homo sapien
agctaaacacaaaatataatgctcaaatatatc

SEQ ID NO: 185531 - DNA, 33 bp, Homo sapien
tcattaagtttaccagacatacaatcaagaatc

SEQ ID NO: 185532 - DNA, 33 bp, Homo sapien
tcattaagtttaccagccatacaatcaagaatc

SEQ ID NO: 185533 - DNA, 33 bp, Homo sapien
tagattaaaattttcacaacctgataatgtaca

SEQ ID NO: 185534 - DNA, 33 bp, Homo sapien
tagattaaaattttcataacctgataatgtaca

SEQ ID NO: 185535 - DNA, 33 bp, Homo sapien
ctactagaagaactcactgaaattttccatatc

SEQ ID NO: 185536 - DNA, 33 bp, Homo sapien
ctactagaagaactcattgaaattttccatatc

SEQ ID NO: 185537 - DNA, 33 bp, Homo sapien
tgaattaaataggaaaacagatatgacggtgtc

SEQ ID NO: 185538 - DNA, 33 bp, Homo sapien
tgaattaaataggaaaccagatatgacggtgtc

SEQ ID NO: 185539 - DNA, 33 bp, Homo sapien
actcctctttagttaacagaacgaacaggcaga

SEQ ID NO: 185540 - DNA, 33 bp, Homo sapien
actcctctttagttaatagaacgaacaggcaga

SEQ ID NO: 185541 - DNA, 33 bp, Homo sapien
cccacagctaatataccgactagggaaaaaact

SEQ ID NO: 185542 - DNA, 33 bp, Homo sapien
cccacagctaatatactgactagggaaaaaact

SEQ ID NO: 185543 - DNA, 33 bp, Homo sapien
gagcaggatatagataggaagtaaggtaaacag

SEQ ID NO: 185544 - DNA, 33 bp, Homo sapien
gagcaggatatagatatgaagtaaggtaaacag

SEQ ID NO: 185545 - DNA, 33 bp, Homo sapien
taaagaaagcttctgccagtacatatttaaatt

SEQ ID NO: 185546 - DNA, 33 bp, Homo sapien
taaagaaagcttctgctagtacatatttaaatt

SEQ ID NO: 185547 - DNA, 33 bp, Homo sapien
tcagcacattattgaaaaaacactgattaaagg

SEQ ID NO: 185548 - DNA, 33 bp, Homo sapien
tcagcacattattgaagaaacactgattaaagg

SEQ ID NO: 185549 - DNA, 33 bp, Homo sapien
gataaactgtctttaacgtcatatcatgagagt

SEQ ID NO: 185550 - DNA, 33 bp, Homo sapien
gataaactgtctttaatgtcatatcatgagagt

SEQ ID NO: 185551 - DNA, 33 bp, Homo sapien
ttattattactctggaacctttttcacccctgc

SEQ ID NO: 185552 - DNA, 33 bp, Homo sapien
ttattattactctggaccctttttcacccctgc

SEQ ID NO: 185553 - DNA, 33 bp, Homo sapien
aacatatgagagggaaaaggtagcattagaaga

SEQ ID NO: 185554 - DNA, 33 bp, Homo sapien
aacatatgagagggaacaggtagcattagaaga

SEQ ID NO: 185555 - DNA, 33 bp, Homo sapien
ttaacttactatgacaaacaaacaattaacata

SEQ ID NO: 185556 - DNA, 33 bp, Homo sapien
ttaacttactatgacacacaaacaattaacata

SEQ ID NO: 185557 - DNA, 33 bp, Homo sapien
aaaaggtaagaagtgacgatagaaagaaaaata

SEQ ID NO: 185558 - DNA, 33 bp, Homo sapien
aaaaggtaagaagtgatgatagaaagaaaaata

SEQ ID NO: 185559 - DNA, 33 bp, Homo sapien
gtctttaggttgatagcagataaactgtaattc

SEQ ID NO: 185560 - DNA, 33 bp, Homo sapien
gtctttaggttgatagtagataaactgtaattc

SEQ ID NO: 185561 - DNA, 33 bp, Homo sapien
aatttctaaatttgacactatcagttttactct

SEQ ID NO: 185562 - DNA, 33 bp, Homo sapien
aatttctaaatttgacgctatcagttttactct

SEQ ID NO: 185563 - DNA, 33 bp, Homo sapien
ccttgtaaaattgatacagcctggaggggatga

SEQ ID NO: 185564 - DNA, 33 bp, Homo sapien
ccttgtaaaattgatagagcctggaggggatga

SEQ ID NO: 185565 - DNA, 33 bp, Homo sapien
tgcagacattgttcataaagggagtgagggagg

SEQ ID NO: 185566 - DNA, 33 bp, Homo sapien
tgcagacattgttcatgaagggagtgagggagg

SEQ ID NO: 185567 - DNA, 33 bp, Homo sapien
tctaaccttgagctcaaacatggaagaatttct

SEQ ID NO: 185568 - DNA, 33 bp, Homo sapien
tctaaccttgagctcagacatggaagaatttct

SEQ ID NO: 185569 - DNA, 33 bp, Homo sapien
atcctattacaaaaacggaagttcacagagatt

SEQ ID NO: 185570 - DNA, 33 bp, Homo sapien
atcctattacaaaaactgaagttcacagagatt

SEQ ID NO: 185571 - DNA, 33 bp, Homo sapien
gatgaaacatctgccacgagtcaagatttattt

SEQ ID NO: 185572 - DNA, 33 bp, Homo sapien
gatgaaacatctgccatgagtcaagatttattt

SEQ ID NO: 185573 - DNA, 33 bp, Homo sapien
tttttaagagagacaaagcatagaccatttatg

SEQ ID NO: 185574 - DNA, 33 bp, Homo sapien
tttttaagagagacaacgcatagaccatttatg

SEQ ID NO: 185575 - DNA, 33 bp, Homo sapien
atatcataagtaaatcaacaccaaggtaattct

SEQ ID NO: 185576 - DNA, 33 bp, Homo sapien
atatcataagtaaatcgacaccaaggtaattct

SEQ ID NO: 185577 - DNA, 33 bp, Homo sapien
tataagcattatttcaatcattttttagagttc

SEQ ID NO: 185578 - DNA, 33 bp, Homo sapien
tataagcattatttcagtcattttttagagttc

SEQ ID NO: 185579 - DNA, 33 bp, Homo sapien
atctaaatattaattacgaagtcagagaataca

SEQ ID NO: 185580 - DNA, 33 bp, Homo sapien
atctaaatattaattatgaagtcagagaataca

SEQ ID NO: 185581 - DNA, 33 bp, Homo sapien
gggcatccttttaagaacattacacagataagc

SEQ ID NO: 185582 - DNA, 33 bp, Homo sapien
gggcatccttttaagagcattacacagataagc

SEQ ID NO: 185583 - DNA, 33 bp, Homo sapien
cacctataatattttccagatgcagagacatgg

SEQ ID NO: 185584 - DNA, 33 bp, Homo sapien
cacctataatattttctagatgcagagacatgg

SEQ ID NO: 185585 - DNA, 33 bp, Homo sapien
tttaccctgtgcagatcacatcaagattaagtg

SEQ ID NO: 185586 - DNA, 33 bp, Homo sapien
tttaccctgtgcagattacatcaagattaagtg

SEQ ID NO: 185587 - DNA, 33 bp, Homo sapien
catagaacattctcaaaataggagacagaataa

SEQ ID NO: 185588 - DNA, 33 bp, Homo sapien
catagaacattctcaacataggagacagaataa

SEQ ID NO: 185589 - DNA, 33 bp, Homo sapien
ctgtcatggtacagtacaggaatcatatcctca

SEQ ID NO: 185590 - DNA, 33 bp, Homo sapien
ctgtcatggtacagtagaggaatcatatcctca

SEQ ID NO: 185591 - DNA, 33 bp, Homo sapien
aataggtcaaaattagcaacagatattccatta

SEQ ID NO: 185592 - DNA, 33 bp, Homo sapien
aataggtcaaaattaggaacagatattccatta

SEQ ID NO: 185593 - DNA, 33 bp, Homo sapien
atctaccatgtgatcaagtttaacatcatcgtg

SEQ ID NO: 185594 - DNA, 33 bp, Homo sapien
atctaccatgtgatcaggtttaacatcatcgtg

SEQ ID NO: 185595 - DNA, 33 bp, Homo sapien
tcatgaaaaaatggctaacaatctagaaaccat

SEQ ID NO: 185596 - DNA, 33 bp, Homo sapien
tcatgaaaaaatggcttacaatctagaaaccat

SEQ ID NO: 185597 - DNA, 33 bp, Homo sapien
tgaatgtaagctctaacgatacagggaaagatg

SEQ ID NO: 185598 - DNA, 33 bp, Homo sapien
tgaatgtaagctctaatgatacagggaaagatg

SEQ ID NO: 185599 - DNA, 33 bp, Homo sapien
ctttgtgcagccttgaagaagggaaataaatca

SEQ ID NO: 185600 - DNA, 33 bp, Homo sapien
ctttgtgcagccttgaggaagggaaataaatca

SEQ ID NO: 185601 - DNA, 33 bp, Homo sapien
atcatatctggtgggcgatctgcattttgaggt

SEQ ID NO: 185602 - DNA, 33 bp, Homo sapien
atcatatctggtgggctatctgcattttgaggt

SEQ ID NO: 185603 - DNA, 33 bp, Homo sapien
attatgaagaaaataaagcatagaaaaattcag

SEQ ID NO: 185604 - DNA, 33 bp, Homo sapien
attatgaagaaaataaggcatagaaaaattcag

SEQ ID NO: 185605 - DNA, 33 bp, Homo sapien
taattgatgtgcaaataatcataataacacttt

SEQ ID NO: 185606 - DNA, 33 bp, Homo sapien
taattgatgtgcaaatgatcataataacacttt

SEQ ID NO: 185607 - DNA, 33 bp, Homo sapien
tgtgtgactatggacacaactcttacttaatgt

SEQ ID NO: 185608 - DNA, 33 bp, Homo sapien
tgtgtgactatggacataactcttacttaatgt

SEQ ID NO: 185609 - DNA, 33 bp, Homo sapien
ggatagaagacccatgaatttttattgctatgg

SEQ ID NO: 185610 - DNA, 33 bp, Homo sapien
ggatagaagacccatggatttttattgctatgg

SEQ ID NO: 185611 - DNA, 33 bp, Homo sapien
ttagtctagtattaacactaccaaagactacat

SEQ ID NO: 185612 - DNA, 33 bp, Homo sapien
ttagtctagtattaaccctaccaaagactacat

SEQ ID NO: 185613 - DNA, 33 bp, Homo sapien
aaatggaattgtggtacagaaaagcagaaagtt

SEQ ID NO: 185614 - DNA, 33 bp, Homo sapien
aaatggaattgtggtatagaaaagcagaaagtt

SEQ ID NO: 185615 - DNA, 33 bp, Homo sapien
ggtttcaattacaagagtatatagtcagcggtt

SEQ ID NO: 185616 - DNA, 33 bp, Homo sapien
ggtttcaattacaagattatatagtcagcggtt

SEQ ID NO: 185617 - DNA, 33 bp, Homo sapien
atagtggtttaagaatcattagcctggctgggt

SEQ ID NO: 185618 - DNA, 33 bp, Homo sapien
atagtggtttaagaattattagcctggctgggt

SEQ ID NO: 185619 - DNA, 33 bp, Homo sapien
attgatgtcttcaatggcaatcaactatcacac

SEQ ID NO: 185620 - DNA, 33 bp, Homo sapien
attgatgtcttcaatgtcaatcaactatcacac

SEQ ID NO: 185621 - DNA, 33 bp, Homo sapien
ggaaaatggtataagaaaccaagatttgtgtgt

SEQ ID NO: 185622 - DNA, 33 bp, Homo sapien
ggaaaatggtataagagaccaagatttgtgtgt

SEQ ID NO: 185623 - DNA, 33 bp, Homo sapien
ttactgaaattcctggaagggatagacgggtca

SEQ ID NO: 185624 - DNA, 33 bp, Homo sapien
ttactgaaattcctggcagggatagacgggtca

SEQ ID NO: 185625 - DNA, 33 bp, Homo sapien
gctttggctaaggtcaaagaaaatgaatcatgg

SEQ ID NO: 185626 - DNA, 33 bp, Homo sapien
gctttggctaaggtcagagaaaatgaatcatgg

SEQ ID NO: 185627 - DNA, 33 bp, Homo sapien
tgtatgaatttagaaagccctgctatccaaaat

SEQ ID NO: 185628 - DNA, 33 bp, Homo sapien
tgtatgaatttagaaatccctgctatccaaaat

SEQ ID NO: 185629 - DNA, 33 bp, Homo sapien
actaataaatgaatcccgaaagtactgtatttt

SEQ ID NO: 185630 - DNA, 33 bp, Homo sapien
actaataaatgaatcctgaaagtactgtatttt

SEQ ID NO: 185631 - DNA, 33 bp, Homo sapien
tggtgattcagtgatgaaaagatagaaaaagaa

SEQ ID NO: 185632 - DNA, 33 bp, Homo sapien
tggtgattcagtgatggaaagatagaaaaagaa

SEQ ID NO: 185633 - DNA, 33 bp, Homo sapien
agaaggttatggctgcagagagtaaaatgactg

SEQ ID NO: 185634 - DNA, 33 bp, Homo sapien
agaaggttatggctgcggagagtaaaatgactg

SEQ ID NO: 185635 - DNA, 33 bp, Homo sapien
tcttatatgccatatcgaattcatccacatccc

SEQ ID NO: 185636 - DNA, 33 bp, Homo sapien
tcttatatgccatatctaattcatccacatccc

SEQ ID NO: 185637 - DNA, 33 bp, Homo sapien
tctgacctgaatgttaccatcagatgctattca

SEQ ID NO: 185638 - DNA, 33 bp, Homo sapien
tctgacctgaatgttatcatcagatgctattca

SEQ ID NO: 185639 - DNA, 33 bp, Homo sapien
aagatggaactgatgaagtaggagaatgaggaa

SEQ ID NO: 185640 - DNA, 33 bp, Homo sapien
aagatggaactgatgatgtaggagaatgaggaa

SEQ ID NO: 185641 - DNA, 33 bp, Homo sapien
ggacaatgtgcaataaaggttttcatgtcctct

SEQ ID NO: 185642 - DNA, 33 bp, Homo sapien
ggacaatgtgcaataagggttttcatgtcctct

SEQ ID NO: 185643 - DNA, 33 bp, Homo sapien
gtagagagtggtgggagataggctttaaaaaaa

SEQ ID NO: 185644 - DNA, 33 bp, Homo sapien
gtagagagtggtgggatataggctttaaaaaaa

SEQ ID NO: 185645 - DNA, 33 bp, Homo sapien
ttaaaatgactcatgaaaataaggacaaaggcg

SEQ ID NO: 185646 - DNA, 33 bp, Homo sapien
ttaaaatgactcatgagaataaggacaaaggcg

SEQ ID NO: 185647 - DNA, 33 bp, Homo sapien
aagcaaataacacttgcatgtttgcccaaaatt

SEQ ID NO: 185648 - DNA, 33 bp, Homo sapien
aagcaaataacacttgtatgtttgcccaaaatt

SEQ ID NO: 185649 - DNA, 33 bp, Homo sapien
taccacaaccccacaagttatcagtattagaag

SEQ ID NO: 185650 - DNA, 33 bp, Homo sapien
taccacaaccccacaatttatcagtattagaag

SEQ ID NO: 185651 - DNA, 33 bp, Homo sapien
tgtggcctgaagtcataatagagagtagagccc

SEQ ID NO: 185652 - DNA, 33 bp, Homo sapien
tgtggcctgaagtcattatagagagtagagccc

SEQ ID NO: 185653 - DNA, 33 bp, Homo sapien
atcacagaatatgacccgcttgtagcacctctc

SEQ ID NO: 185654 - DNA, 33 bp, Homo sapien
atcacagaatatgacctgcttgtagcacctctc

SEQ ID NO: 185655 - DNA, 33 bp, Homo sapien
tctctgcccctcactaactttacaaccatggga

SEQ ID NO: 185656 - DNA, 33 bp, Homo sapien
tctctgcccctcactagctttacaaccatggga

SEQ ID NO: 185657 - DNA, 33 bp, Homo sapien
tttacattttattgaaagtttcatggtaaaaca

SEQ ID NO: 185658 - DNA, 33 bp, Homo sapien
tttacattttattgaacgtttcatggtaaaaca

SEQ ID NO: 185659 - DNA, 33 bp, Homo sapien
caattaacattattgactatttgctgtataaca

SEQ ID NO: 185660 - DNA, 33 bp, Homo sapien
caattaacattattgagtatttgctgtataaca

SEQ ID NO: 185661 - DNA, 33 bp, Homo sapien
tagaacttactcctcccatgtagcttcaatttt

SEQ ID NO: 185662 - DNA, 33 bp, Homo sapien
tagaacttactcctcctatgtagcttcaatttt

SEQ ID NO: 185663 - DNA, 33 bp, Homo sapien
gtgctagctttaggaacagcggtaaaccagagg

SEQ ID NO: 185664 - DNA, 33 bp, Homo sapien
gtgctagctttaggaagagcggtaaaccagagg

SEQ ID NO: 185665 - DNA, 33 bp, Homo sapien
gccagctcattactaccaggttagctctcaggt

SEQ ID NO: 185666 - DNA, 33 bp, Homo sapien
gccagctcattactacgaggttagctctcaggt

SEQ ID NO: 185667 - DNA, 33 bp, Homo sapien
agactcgctacggctaaataattactgtcgaag

SEQ ID NO: 185668 - DNA, 33 bp, Homo sapien
agactcgctacggctatataattactgtcgaag

SEQ ID NO: 185669 - DNA, 33 bp, Homo sapien
cccccagtcaacattacatagatccacgagaca

SEQ ID NO: 185670 - DNA, 33 bp, Homo sapien
cccccagtcaacattagatagatccacgagaca

SEQ ID NO: 185671 - DNA, 33 bp, Homo sapien
ttcattctctcattcaaccatttatctaatttt

SEQ ID NO: 185672 - DNA, 33 bp, Homo sapien
ttcattctctcattcacccatttatctaatttt

SEQ ID NO: 185673 - DNA, 33 bp, Homo sapien
aactcagaggtaactcaatgcattgcacacaaa

SEQ ID NO: 185674 - DNA, 33 bp, Homo sapien
aactcagaggtaactcgatgcattgcacacaaa

SEQ ID NO: 185675 - DNA, 33 bp, Homo sapien
tgcaatgtaatgtactaacaaataaatctttgc

SEQ ID NO: 185676 - DNA, 33 bp, Homo sapien
tgcaatgtaatgtactgacaaataaatctttgc

SEQ ID NO: 185677 - DNA, 33 bp, Homo sapien
agcccagggtgctgaaagtgagaagaacactat

SEQ ID NO: 185678 - DNA, 33 bp, Homo sapien
agcccagggtgctgaacgtgagaagaacactat

SEQ ID NO: 185679 - DNA, 33 bp, Homo sapien
atggcatggagtctaaacgtgatgatcatatag

SEQ ID NO: 185680 - DNA, 33 bp, Homo sapien
atggcatggagtctaagcgtgatgatcatatag

SEQ ID NO: 185681 - DNA, 33 bp, Homo sapien
ggagttgagtttaggacacctggctatatgatc

SEQ ID NO: 185682 - DNA, 33 bp, Homo sapien
ggagttgagtttaggatacctggctatatgatc

SEQ ID NO: 185683 - DNA, 33 bp, Homo sapien
cattgtcttctatagcacatacaccagatgtct

SEQ ID NO: 185684 - DNA, 33 bp, Homo sapien
cattgtcttctatagcgcatacaccagatgtct

SEQ ID NO: 185685 - DNA, 33 bp, Homo sapien
gctgtcctacaagaaacgctgaacagattttgt

SEQ ID NO: 185686 - DNA, 33 bp, Homo sapien
gctgtcctacaagaaatgctgaacagattttgt

SEQ ID NO: 185687 - DNA, 33 bp, Homo sapien
ttttatggctgtataggataccacggtctatat

SEQ ID NO: 185688 - DNA, 33 bp, Homo sapien
ttttatggctgtatagtataccacggtctatat

SEQ ID NO: 185689 - DNA, 33 bp, Homo sapien
atactcgtgacattaacactactcctcactcca

SEQ ID NO: 185690 - DNA, 33 bp, Homo sapien
atactcgtgacattaatactactcctcactcca

SEQ ID NO: 185691 - DNA, 33 bp, Homo sapien
atttgaaacacttatccctgactttcatgcctc

SEQ ID NO: 185692 - DNA, 33 bp, Homo sapien
atttgaaacacttatctctgactttcatgcctc

SEQ ID NO: 185693 - DNA, 33 bp, Homo sapien
gaactctttcattataggtttggcactgaaggg

SEQ ID NO: 185694 - DNA, 33 bp, Homo sapien
gaactctttcattatatgtttggcactgaaggg

SEQ ID NO: 185695 - DNA, 33 bp, Homo sapien
gggttcccagtctctacacaataaagcagaatt

SEQ ID NO: 185696 - DNA, 33 bp, Homo sapien
gggttcccagtctctatacaataaagcagaatt

SEQ ID NO: 185697 - DNA, 33 bp, Homo sapien
ataaagacaatgagataaactgacaaattctgt

SEQ ID NO: 185698 - DNA, 33 bp, Homo sapien
ataaagacaatgagatgaactgacaaattctgt

SEQ ID NO: 185699 - DNA, 33 bp, Homo sapien
tccactgtcttctatacagcttagtcttttttt

SEQ ID NO: 185700 - DNA, 33 bp, Homo sapien
tccactgtcttctatatagcttagtcttttttt

SEQ ID NO: 185701 - DNA, 33 bp, Homo sapien
atacaacttgagatgacgaaatgattttttttt

SEQ ID NO: 185702 - DNA, 33 bp, Homo sapien
atacaacttgagatgatgaaatgattttttttt

SEQ ID NO: 185703 - DNA, 33 bp, Homo sapien
ttagtttttcactaaacccttttgctaaaatga

SEQ ID NO: 185704 - DNA, 33 bp, Homo sapien
ttagtttttcactaaatccttttgctaaaatga

SEQ ID NO: 185705 - DNA, 33 bp, Homo sapien
tttctgagctttgaaccaggtatctggcttgga

SEQ ID NO: 185706 - DNA, 33 bp, Homo sapien
tttctgagctttgaacgaggtatctggcttgga

SEQ ID NO: 185707 - DNA, 33 bp, Homo sapien
aaaatgaccttggagacattttagaagtaattc

SEQ ID NO: 185708 - DNA, 33 bp, Homo sapien
aaaatgaccttggagatattttagaagtaattc

SEQ ID NO: 185709 - DNA, 33 bp, Homo sapien
gagtcctctaatgacaactcattcttaatacta

SEQ ID NO: 185710 - DNA, 33 bp, Homo sapien
gagtcctctaatgacatctcattcttaatacta

SEQ ID NO: 185711 - DNA, 33 bp, Homo sapien
ctaggtttgaactcagaactccgctacttaata

SEQ ID NO: 185712 - DNA, 33 bp, Homo sapien
ctaggtttgaactcagcactccgctacttaata

SEQ ID NO: 185713 - DNA, 33 bp, Homo sapien
tcatagaaatgagataagacttaaaattggatg

SEQ ID NO: 185714 - DNA, 33 bp, Homo sapien
tcatagaaatgagataggacttaaaattggatg

SEQ ID NO: 185715 - DNA, 33 bp, Homo sapien
tgaattaccagggggaaaaatgcaaatagtccc

SEQ ID NO: 185716 - DNA, 33 bp, Homo sapien
tgaattaccagggggagaaatgcaaatagtccc

SEQ ID NO: 185717 - DNA, 33 bp, Homo sapien
ggacgttgtgtctgtacggttgcagaaaaacat

SEQ ID NO: 185718 - DNA, 33 bp, Homo sapien
ggacgttgtgtctgtatggttgcagaaaaacat

SEQ ID NO: 185719 - DNA, 33 bp, Homo sapien
gagtgaagtaaaaagacaaaactggaatccact

SEQ ID NO: 185720 - DNA, 33 bp, Homo sapien
gagtgaagtaaaaagagaaaactggaatccact

SEQ ID NO: 185721 - DNA, 33 bp, Homo sapien
ttctttccatttttaccgccaattttgattctc

SEQ ID NO: 185722 - DNA, 33 bp, Homo sapien
ttctttccatttttactgccaattttgattctc

SEQ ID NO: 185723 - DNA, 33 bp, Homo sapien
actggttatatctgaaagtcactgaaccatgta

SEQ ID NO: 185724 - DNA, 33 bp, Homo sapien
actggttatatctgaatgtcactgaaccatgta

SEQ ID NO: 185725 - DNA, 33 bp, Homo sapien
agtatacaggcacatacgttgagggttatttac

SEQ ID NO: 185726 - DNA, 33 bp, Homo sapien
agtatacaggcacatatgttgagggttatttac

SEQ ID NO: 185727 - DNA, 33 bp, Homo sapien
ccctaagagaccagaaaaggttgagttctgctt

SEQ ID NO: 185728 - DNA, 33 bp, Homo sapien
ccctaagagaccagaataggttgagttctgctt

SEQ ID NO: 185729 - DNA, 33 bp, Homo sapien
tctagttgttgctccaatgaaatttgctttttc

SEQ ID NO: 185730 - DNA, 33 bp, Homo sapien
tctagttgttgctccagtgaaatttgctttttc

SEQ ID NO: 185731 - DNA, 33 bp, Homo sapien
agacgtgccatgaggaaaagtctagtgtccgtc

SEQ ID NO: 185732 - DNA, 33 bp, Homo sapien
agacgtgccatgaggagaagtctagtgtccgtc

SEQ ID NO: 185733 - DNA, 33 bp, Homo sapien
aagttttattcataacacaaagcagcaagcaat

SEQ ID NO: 185734 - DNA, 33 bp, Homo sapien
aagttttattcataacccaaagcagcaagcaat

SEQ ID NO: 185735 - DNA, 33 bp, Homo sapien
gacacagaggatgggaatatctgaatacaaaac

SEQ ID NO: 185736 - DNA, 33 bp, Homo sapien
gacacagaggatgggagtatctgaatacaaaac

SEQ ID NO: 185737 - DNA, 33 bp, Homo sapien
ttccccaaaggaatgacaagttactaagttcag

SEQ ID NO: 185738 - DNA, 33 bp, Homo sapien
ttccccaaaggaatgataagttactaagttcag

SEQ ID NO: 185739 - DNA, 33 bp, Homo sapien
taatccaggtgaagaacgagtgtggtctgaact

SEQ ID NO: 185740 - DNA, 33 bp, Homo sapien
taatccaggtgaagaatgagtgtggtctgaact

SEQ ID NO: 185741 - DNA, 33 bp, Homo sapien
cattgcagagccttcaactaacaggatttgtag

SEQ ID NO: 185742 - DNA, 33 bp, Homo sapien
cattgcagagccttcatctaacaggatttgtag

SEQ ID NO: 185743 - DNA, 33 bp, Homo sapien
ctctatgtgaagtgaacgatatgttaattagat

SEQ ID NO: 185744 - DNA, 33 bp, Homo sapien
ctctatgtgaagtgaatgatatgttaattagat

SEQ ID NO: 185745 - DNA, 33 bp, Homo sapien
ttgaattatgattgaaaaaccaaaaattacata

SEQ ID NO: 185746 - DNA, 33 bp, Homo sapien
ttgaattatgattgaagaaccaaaaattacata

SEQ ID NO: 185747 - DNA, 33 bp, Homo sapien
ctggaaggacgagatgaagatacatttgggtat

SEQ ID NO: 185748 - DNA, 33 bp, Homo sapien
ctggaaggacgagatggagatacatttgggtat

SEQ ID NO: 185749 - DNA, 33 bp, Homo sapien
gttacgcttctctttgcatcagatgaccagatc

SEQ ID NO: 185750 - DNA, 33 bp, Homo sapien
gttacgcttctctttgtatcagatgaccagatc

SEQ ID NO: 185751 - DNA, 33 bp, Homo sapien
acattccatgatgtaccacgtgaagctgatctc

SEQ ID NO: 185752 - DNA, 33 bp, Homo sapien
acattccatgatgtacgacgtgaagctgatctc

SEQ ID NO: 185753 - DNA, 33 bp, Homo sapien
agtccagcaagtagtacgaggagttaagcagca

SEQ ID NO: 185754 - DNA, 33 bp, Homo sapien
agtccagcaagtagtatgaggagttaagcagca

SEQ ID NO: 185755 - DNA, 33 bp, Homo sapien
atttaaagtgaaaatacgacactgacgataaat

SEQ ID NO: 185756 - DNA, 33 bp, Homo sapien
atttaaagtgaaaatatgacactgacgataaat

SEQ ID NO: 185757 - DNA, 33 bp, Homo sapien
gtgataggagagaaggaactgcttcatccaata

SEQ ID NO: 185758 - DNA, 33 bp, Homo sapien
gtgataggagagaaggtactgcttcatccaata

SEQ ID NO: 185759 - DNA, 33 bp, Homo sapien
agatattacagaaatacaaaagatcgatgatta

SEQ ID NO: 185760 - DNA, 33 bp, Homo sapien
agatattacagaaatataaaagatcgatgatta

SEQ ID NO: 185761 - DNA, 33 bp, Homo sapien
tgagtcgtaactgtacagtaaatacagcagttg

SEQ ID NO: 185762 - DNA, 33 bp, Homo sapien
tgagtcgtaactgtacggtaaatacagcagttg

SEQ ID NO: 185763 - DNA, 33 bp, Homo sapien
aggactacaattaatacctgtattcttagtccc

SEQ ID NO: 185764 - DNA, 33 bp, Homo sapien
aggactacaattaatatctgtattcttagtccc

SEQ ID NO: 185765 - DNA, 33 bp, Homo sapien
aaaacaagttgaaaaaactcattgctatggttt

SEQ ID NO: 185766 - DNA, 33 bp, Homo sapien
aaaacaagttgaaaaatctcattgctatggttt

SEQ ID NO: 185767 - DNA, 33 bp, Homo sapien
cactctaaactactcaaaaagaaacacacagac

SEQ ID NO: 185768 - DNA, 33 bp, Homo sapien
cactctaaactactcacaaagaaacacacagac

SEQ ID NO: 185769 - DNA, 33 bp, Homo sapien
ggaggtaacttcatgaaaagaataagatcagtc

SEQ ID NO: 185770 - DNA, 33 bp, Homo sapien
ggaggtaacttcatgagaagaataagatcagtc

SEQ ID NO: 185771 - DNA, 33 bp, Homo sapien
cttttcatacctaaaacggcttctattacatga

SEQ ID NO: 185772 - DNA, 33 bp, Homo sapien
cttttcatacctaaaatggcttctattacatga

SEQ ID NO: 185773 - DNA, 33 bp, Homo sapien
gtctatagaaactacaatgaaatgcatatctat

SEQ ID NO: 185774 - DNA, 33 bp, Homo sapien
gtctatagaaactacagtgaaatgcatatctat

SEQ ID NO: 185775 - DNA, 33 bp, Homo sapien
tctttattctcattccaacttgatctcttgaga

SEQ ID NO: 185776 - DNA, 33 bp, Homo sapien
tctttattctcattcctacttgatctcttgaga

SEQ ID NO: 185777 - DNA, 33 bp, Homo sapien
gtcaaattataccaccggaagcacttagcatat

SEQ ID NO: 185778 - DNA, 33 bp, Homo sapien
gtcaaattataccacctgaagcacttagcatat

SEQ ID NO: 185779 - DNA, 33 bp, Homo sapien
ttaggttcatataaacagtgtgtaatcaaatgc

SEQ ID NO: 185780 - DNA, 33 bp, Homo sapien
ttaggttcatataaaccgtgtgtaatcaaatgc

SEQ ID NO: 185781 - DNA, 33 bp, Homo sapien
tgggagtgtgcctacaaatagatcctgagggtg

SEQ ID NO: 185782 - DNA, 33 bp, Homo sapien
tgggagtgtgcctacagatagatcctgagggtg

SEQ ID NO: 185783 - DNA, 33 bp, Homo sapien
ggcatctgagtagataccttgtaccaacacttg

SEQ ID NO: 185784 - DNA, 33 bp, Homo sapien
ggcatctgagtagatatcttgtaccaacacttg

SEQ ID NO: 185785 - DNA, 33 bp, Homo sapien
ctgtatgactgttttgcaaccatttaatctaac

SEQ ID NO: 185786 - DNA, 33 bp, Homo sapien
ctgtatgactgttttgtaaccatttaatctaac

SEQ ID NO: 185787 - DNA, 33 bp, Homo sapien
tcatcatcatgccacaagttaaatccagggaca

SEQ ID NO: 185788 - DNA, 33 bp, Homo sapien
tcatcatcatgccacaggttaaatccagggaca

SEQ ID NO: 185789 - DNA, 33 bp, Homo sapien
cacccagttggagatactaatttgaagagcagg

SEQ ID NO: 185790 - DNA, 33 bp, Homo sapien
cacccagttggagatattaatttgaagagcagg

SEQ ID NO: 185791 - DNA, 33 bp, Homo sapien
cactctcttgatgatccctttcaggagcatggc

SEQ ID NO: 185792 - DNA, 33 bp, Homo sapien
cactctcttgatgatctctttcaggagcatggc

SEQ ID NO: 185793 - DNA, 33 bp, Homo sapien
gccacttcctcatgtaacttatttgtgctttta

SEQ ID NO: 185794 - DNA, 33 bp, Homo sapien
gccacttcctcatgtagcttatttgtgctttta

SEQ ID NO: 185795 - DNA, 33 bp, Homo sapien
catcaatcattcagtgaaatcagaccaggatga

SEQ ID NO: 185796 - DNA, 33 bp, Homo sapien
catcaatcattcagtgtaatcagaccaggatga

SEQ ID NO: 185797 - DNA, 33 bp, Homo sapien
ggtaacaaaggagcaaagatcccaagtgtctta

SEQ ID NO: 185798 - DNA, 33 bp, Homo sapien
ggtaacaaaggagcaatgatcccaagtgtctta

SEQ ID NO: 185799 - DNA, 33 bp, Homo sapien
taaaatatgccgctagaatgtgaagaaaagttt

SEQ ID NO: 185800 - DNA, 33 bp, Homo sapien
taaaatatgccgctaggatgtgaagaaaagttt

SEQ ID NO: 185801 - DNA, 33 bp, Homo sapien
gtacttggtgtagttacaggaagagcactgaaa

SEQ ID NO: 185802 - DNA, 33 bp, Homo sapien
gtacttggtgtagttataggaagagcactgaaa

SEQ ID NO: 185803 - DNA, 33 bp, Homo sapien
ataggtcataaaaaaaccttatcactgacctta

SEQ ID NO: 185804 - DNA, 33 bp, Homo sapien
ataggtcataaaaaaagcttatcactgacctta

SEQ ID NO: 185805 - DNA, 33 bp, Homo sapien
gacataatcccaggcactgagatttctactaag

SEQ ID NO: 185806 - DNA, 33 bp, Homo sapien
gacataatcccaggcattgagatttctactaag

SEQ ID NO: 185807 - DNA, 33 bp, Homo sapien
ataaatccttggagacaaaaataaagtaactga

SEQ ID NO: 185808 - DNA, 33 bp, Homo sapien
ataaatccttggagaccaaaataaagtaactga

SEQ ID NO: 185809 - DNA, 33 bp, Homo sapien
agggactgagacaacaagcatatctctaacaaa

SEQ ID NO: 185810 - DNA, 33 bp, Homo sapien
agggactgagacaacaggcatatctctaacaaa

SEQ ID NO: 185811 - DNA, 33 bp, Homo sapien
aaaaggaaactcatgaacaataatcatctgaaa

SEQ ID NO: 185812 - DNA, 33 bp, Homo sapien
aaaaggaaactcatgagcaataatcatctgaaa

SEQ ID NO: 185813 - DNA, 33 bp, Homo sapien
ggtgtgagatggtatccgactggaattttgatt

SEQ ID NO: 185814 - DNA, 33 bp, Homo sapien
ggtgtgagatggtatctgactggaattttgatt

SEQ ID NO: 185815 - DNA, 33 bp, Homo sapien
ccaaatttataaataacctggaagacaaactag

SEQ ID NO: 185816 - DNA, 33 bp, Homo sapien
ccaaatttataaataagctggaagacaaactag

SEQ ID NO: 185817 - DNA, 33 bp, Homo sapien
aatccctttctacatacaaaactagactgcatt

SEQ ID NO: 185818 - DNA, 33 bp, Homo sapien
aatccctttctacatataaaactagactgcatt

SEQ ID NO: 185819 - DNA, 33 bp, Homo sapien
aaagttagaggcttataaaactttcggaaggac

SEQ ID NO: 185820 - DNA, 33 bp, Homo sapien
aaagttagaggcttatgaaactttcggaaggac

SEQ ID NO: 185821 - DNA, 33 bp, Homo sapien
agagaccgtaacataagcactgttttcacccga

SEQ ID NO: 185822 - DNA, 33 bp, Homo sapien
agagaccgtaacataatcactgttttcacccga

SEQ ID NO: 185823 - DNA, 33 bp, Homo sapien
ttaaaattattataggccagaagttttcatgtg

SEQ ID NO: 185824 - DNA, 33 bp, Homo sapien
ttaaaattattataggtcagaagttttcatgtg

SEQ ID NO: 185825 - DNA, 33 bp, Homo sapien
gtaaagattgatgaaaataatgattatggtgtt

SEQ ID NO: 185826 - DNA, 33 bp, Homo sapien
gtaaagattgatgaaagtaatgattatggtgtt

SEQ ID NO: 185827 - DNA, 33 bp, Homo sapien
accgcaccagtccttacagcattttaaaatata

SEQ ID NO: 185828 - DNA, 33 bp, Homo sapien
accgcaccagtccttatagcattttaaaatata

SEQ ID NO: 185829 - DNA, 33 bp, Homo sapien
tgagtagctgagactacaagcacatgttaccac

SEQ ID NO: 185830 - DNA, 33 bp, Homo sapien
tgagtagctgagactagaagcacatgttaccac

SEQ ID NO: 185831 - DNA, 33 bp, Homo sapien
aattaatgcaagaacacaacaccaaatacctca

SEQ ID NO: 185832 - DNA, 33 bp, Homo sapien
aattaatgcaagaacagaacaccaaatacctca

SEQ ID NO: 185833 - DNA, 33 bp, Homo sapien
gcagaatcagggtcaaattccatcccagtgcca

SEQ ID NO: 185834 - DNA, 33 bp, Homo sapien
gcagaatcagggtcaagttccatcccagtgcca

SEQ ID NO: 185835 - DNA, 33 bp, Homo sapien
tttttactaaccgtgggaagtcacaaggaaaac

SEQ ID NO: 185836 - DNA, 33 bp, Homo sapien
tttttactaaccgtggtaagtcacaaggaaaac

SEQ ID NO: 185837 - DNA, 33 bp, Homo sapien
gaaattttgggttcaccgtagatggaagatata

SEQ ID NO: 185838 - DNA, 33 bp, Homo sapien
gaaattttgggttcactgtagatggaagatata

SEQ ID NO: 185839 - DNA, 33 bp, Homo sapien
cctagtcccaagttataagaagaccgatgtccc

SEQ ID NO: 185840 - DNA, 33 bp, Homo sapien
cctagtcccaagttatgagaagaccgatgtccc

SEQ ID NO: 185841 - DNA, 33 bp, Homo sapien
aaagggcaactgagaaatggccaatcttccatc

SEQ ID NO: 185842 - DNA, 33 bp, Homo sapien
aaagggcaactgagaactggccaatcttccatc

SEQ ID NO: 185843 - DNA, 33 bp, Homo sapien
tggcaacttccctccaggcagctgaaacattga

SEQ ID NO: 185844 - DNA, 33 bp, Homo sapien
tggcaacttccctccatgcagctgaaacattga

SEQ ID NO: 185845 - DNA, 33 bp, Homo sapien
gtatatatggaaccgaagtacattttgtagtgt

SEQ ID NO: 185846 - DNA, 33 bp, Homo sapien
gtatatatggaaccgaggtacattttgtagtgt

SEQ ID NO: 185847 - DNA, 33 bp, Homo sapien
tcatagatttaaagacacttctccctcagagta

SEQ ID NO: 185848 - DNA, 33 bp, Homo sapien
tcatagatttaaagacgcttctccctcagagta

SEQ ID NO: 185849 - DNA, 33 bp, Homo sapien
cccatcctatgtgaaaattcagtacctaacctt

SEQ ID NO: 185850 - DNA, 33 bp, Homo sapien
cccatcctatgtgaaatttcagtacctaacctt

SEQ ID NO: 185851 - DNA, 33 bp, Homo sapien
agggtaaaagtgatcagaaaatccttcatgaag

SEQ ID NO: 185852 - DNA, 33 bp, Homo sapien
agggtaaaagtgatcataaaatccttcatgaag

SEQ ID NO: 185853 - DNA, 33 bp, Homo sapien
atttacctcagatctgcactctttcaatttcaa

SEQ ID NO: 185854 - DNA, 33 bp, Homo sapien
atttacctcagatctggactctttcaatttcaa

SEQ ID NO: 185855 - DNA, 33 bp, Homo sapien
acagagattggatgtaagactcaaatttatgtt

SEQ ID NO: 185856 - DNA, 33 bp, Homo sapien
acagagattggatgtaggactcaaatttatgtt

SEQ ID NO: 185857 - DNA, 33 bp, Homo sapien
gacacatgaacgcaggcaggggtacaccacaca

SEQ ID NO: 185858 - DNA, 33 bp, Homo sapien
gacacatgaacgcaggtaggggtacaccacaca

SEQ ID NO: 185859 - DNA, 33 bp, Homo sapien
caaaattagtcatactcaggttgaaagaaaagt

SEQ ID NO: 185860 - DNA, 33 bp, Homo sapien
caaaattagtcatacttaggttgaaagaaaagt

SEQ ID NO: 185861 - DNA, 33 bp, Homo sapien
gccaaattaagagatactagagttgtagagtcc

SEQ ID NO: 185862 - DNA, 33 bp, Homo sapien
gccaaattaagagatattagagttgtagagtcc

SEQ ID NO: 185863 - DNA, 33 bp, Homo sapien
cagagggaccttctgccgatctggacacatcat

SEQ ID NO: 185864 - DNA, 33 bp, Homo sapien
cagagggaccttctgctgatctggacacatcat

SEQ ID NO: 185865 - DNA, 33 bp, Homo sapien
ggtaaactgattaacaaggttgtaagtaaaaac

SEQ ID NO: 185866 - DNA, 33 bp, Homo sapien
ggtaaactgattaacagggttgtaagtaaaaac

SEQ ID NO: 185867 - DNA, 33 bp, Homo sapien
tataaaacaatcataaataaccaggtaatgaca

SEQ ID NO: 185868 - DNA, 33 bp, Homo sapien
tataaaacaatcataagtaaccaggtaatgaca

SEQ ID NO: 185869 - DNA, 33 bp, Homo sapien
caaatatttctgggaaacatctgaaacatagga

SEQ ID NO: 185870 - DNA, 33 bp, Homo sapien
caaatatttctgggaagcatctgaaacatagga

SEQ ID NO: 185871 - DNA, 33 bp, Homo sapien
atgagagatttatcagacattacacaacaaaaa

SEQ ID NO: 185872 - DNA, 33 bp, Homo sapien
atgagagatttatcaggcattacacaacaaaaa

SEQ ID NO: 185873 - DNA, 33 bp, Homo sapien
gttttgcttttagtaccatttatgtgatgaatc

SEQ ID NO: 185874 - DNA, 33 bp, Homo sapien
gttttgcttttagtactatttatgtgatgaatc

SEQ ID NO: 185875 - DNA, 33 bp, Homo sapien
ttgtacagatacaccacacagccataagaaata

SEQ ID NO: 185876 - DNA, 33 bp, Homo sapien
ttgtacagatacaccatacagccataagaaata

SEQ ID NO: 185877 - DNA, 33 bp, Homo sapien
ttctaaccaggttcaaaatttaatgtccttatt

SEQ ID NO: 185878 - DNA, 33 bp, Homo sapien
ttctaaccaggttcaacatttaatgtccttatt

SEQ ID NO: 185879 - DNA, 33 bp, Homo sapien
ccctgagcagtcttcaaagattttcacatgaga

SEQ ID NO: 185880 - DNA, 33 bp, Homo sapien
ccctgagcagtcttcagagattttcacatgaga

SEQ ID NO: 185881 - DNA, 33 bp, Homo sapien
gtcagcaaactcagccaacacgctctatctgac

SEQ ID NO: 185882 - DNA, 33 bp, Homo sapien
gtcagcaaactcagcccacacgctctatctgac

SEQ ID NO: 185883 - DNA, 33 bp, Homo sapien
aggaaaaaaaaaatgaacatgcctattattaga

SEQ ID NO: 185884 - DNA, 33 bp, Homo sapien
aggaaaaaaaaaatgagcatgcctattattaga

SEQ ID NO: 185885 - DNA, 33 bp, Homo sapien
atttgtctaatgatcccatgtccggttttgtta

SEQ ID NO: 185886 - DNA, 33 bp, Homo sapien
atttgtctaatgatcctatgtccggttttgtta

SEQ ID NO: 185887 - DNA, 33 bp, Homo sapien
attcaatcaagaaataccattaccagatatata

SEQ ID NO: 185888 - DNA, 33 bp, Homo sapien
attcaatcaagaaatatcattaccagatatata

SEQ ID NO: 185889 - DNA, 33 bp, Homo sapien
tattaccactaacgaaagtactctaggaataag

SEQ ID NO: 185890 - DNA, 33 bp, Homo sapien
tattaccactaacgaaggtactctaggaataag

SEQ ID NO: 185891 - DNA, 33 bp, Homo sapien
tgagtgccatgattaccatgcagttcagaagga

SEQ ID NO: 185892 - DNA, 33 bp, Homo sapien
tgagtgccatgattactatgcagttcagaagga

SEQ ID NO: 185893 - DNA, 33 bp, Homo sapien
aatgctttaggagaagcagaaatatccataaat

SEQ ID NO: 185894 - DNA, 33 bp, Homo sapien
aatgctttaggagaagtagaaatatccataaat

SEQ ID NO: 185895 - DNA, 33 bp, Homo sapien
tatctgaggttccaaacctgataataggatagg

SEQ ID NO: 185896 - DNA, 33 bp, Homo sapien
tatctgaggttccaaatctgataataggatagg

SEQ ID NO: 185897 - DNA, 33 bp, Homo sapien
acagctgtactaaataagagaaagaaccaggga

SEQ ID NO: 185898 - DNA, 33 bp, Homo sapien
acagctgtactaaatatgagaaagaaccaggga

SEQ ID NO: 185899 - DNA, 33 bp, Homo sapien
ttctccttgaaacagacgtaaaaatttgaaatt

SEQ ID NO: 185900 - DNA, 33 bp, Homo sapien
ttctccttgaaacagatgtaaaaatttgaaatt

SEQ ID NO: 185901 - DNA, 33 bp, Homo sapien
actgaccaaaatattacgtggtgtatgtctata

SEQ ID NO: 185902 - DNA, 33 bp, Homo sapien
actgaccaaaatattatgtggtgtatgtctata

SEQ ID NO: 185903 - DNA, 33 bp, Homo sapien
gggcttgaggattttcacttttcagtattccat

SEQ ID NO: 185904 - DNA, 33 bp, Homo sapien
gggcttgaggattttcgcttttcagtattccat

SEQ ID NO: 185905 - DNA, 33 bp, Homo sapien
ttgctatactttggcaaggagaccggtggcatt

SEQ ID NO: 185906 - DNA, 33 bp, Homo sapien
ttgctatactttggcagggagaccggtggcatt

SEQ ID NO: 185907 - DNA, 33 bp, Homo sapien
gaaaaggaaaagtagaaccaacatacatttagt

SEQ ID NO: 185908 - DNA, 33 bp, Homo sapien
gaaaaggaaaagtagatccaacatacatttagt

SEQ ID NO: 185909 - DNA, 33 bp, Homo sapien
tttaaatctcatctgcaataaaattaagtatgt

SEQ ID NO: 185910 - DNA, 33 bp, Homo sapien
tttaaatctcatctgcgataaaattaagtatgt

SEQ ID NO: 185911 - DNA, 33 bp, Homo sapien
acccataatactcagtaaaaaagtttacacctc

SEQ ID NO: 185912 - DNA, 33 bp, Homo sapien
acccataatactcagttaaaaagtttacacctc

SEQ ID NO: 185913 - DNA, 33 bp, Homo sapien
ttacgaattaagtactaaaggtctccgagctat

SEQ ID NO: 185914 - DNA, 33 bp, Homo sapien
ttacgaattaagtactgaaggtctccgagctat

SEQ ID NO: 185915 - DNA, 33 bp, Homo sapien
ctttcagttgcagatgccaggaactcagctctc

SEQ ID NO: 185916 - DNA, 33 bp, Homo sapien
ctttcagttgcagatggcaggaactcagctctc

SEQ ID NO: 185917 - DNA, 33 bp, Homo sapien
tacagtgagtaccatacacttaatgtttaacat

SEQ ID NO: 185918 - DNA, 33 bp, Homo sapien
tacagtgagtaccatatacttaatgtttaacat

SEQ ID NO: 185919 - DNA, 33 bp, Homo sapien
tttgtaataccagtcaaacgaaacagttttctc

SEQ ID NO: 185920 - DNA, 33 bp, Homo sapien
tttgtaataccagtcagacgaaacagttttctc

SEQ ID NO: 185921 - DNA, 33 bp, Homo sapien
ctggtgttttgagaaacctgactacctaagata

SEQ ID NO: 185922 - DNA, 33 bp, Homo sapien
ctggtgttttgagaaagctgactacctaagata

SEQ ID NO: 185923 - DNA, 33 bp, Homo sapien
taacctaactaagacaaaataaccaatcatctt

SEQ ID NO: 185924 - DNA, 33 bp, Homo sapien
taacctaactaagacataataaccaatcatctt

SEQ ID NO: 185925 - DNA, 33 bp, Homo sapien
tctttacatgtccagactcatgagcataaagat

SEQ ID NO: 185926 - DNA, 33 bp, Homo sapien
tctttacatgtccagagtcatgagcataaagat

SEQ ID NO: 185927 - DNA, 33 bp, Homo sapien
ctgggcagattttcaccgagatttgatatgaat

SEQ ID NO: 185928 - DNA, 33 bp, Homo sapien
ctgggcagattttcactgagatttgatatgaat

SEQ ID NO: 185929 - DNA, 33 bp, Homo sapien
gagctcttgcaaggcaatactagacaaattccc

SEQ ID NO: 185930 - DNA, 33 bp, Homo sapien
gagctcttgcaaggcagtactagacaaattccc

SEQ ID NO: 185931 - DNA, 33 bp, Homo sapien
ctgtcaggggtatgaaaggaaggagagcatcgg

SEQ ID NO: 185932 - DNA, 33 bp, Homo sapien
ctgtcaggggtatgaagggaaggagagcatcgg

SEQ ID NO: 185933 - DNA, 33 bp, Homo sapien
ggtaaacgtgcgccacagtgatttgttgcatag

SEQ ID NO: 185934 - DNA, 33 bp, Homo sapien
ggtaaacgtgcgccacggtgatttgttgcatag

SEQ ID NO: 185935 - DNA, 33 bp, Homo sapien
acaagagtttatgttacgctcccttatgtcata

SEQ ID NO: 185936 - DNA, 33 bp, Homo sapien
acaagagtttatgttatgctcccttatgtcata

SEQ ID NO: 185937 - DNA, 33 bp, Homo sapien
aaaaaaatttgcaaaaattatcacgccatagcc

SEQ ID NO: 185938 - DNA, 33 bp, Homo sapien
aaaaaaatttgcaaaagttatcacgccatagcc

SEQ ID NO: 185939 - DNA, 33 bp, Homo sapien
atggtgcttttttcaaacatacccatgaccaat

SEQ ID NO: 185940 - DNA, 33 bp, Homo sapien
atggtgcttttttcaaccatacccatgaccaat

SEQ ID NO: 185941 - DNA, 33 bp, Homo sapien
gcattgggtagaatcacagctctttgcaaatct

SEQ ID NO: 185942 - DNA, 33 bp, Homo sapien
gcattgggtagaatcatagctctttgcaaatct

SEQ ID NO: 185943 - DNA, 33 bp, Homo sapien
attctagcagcaagtcaataaggtaatgctttg

SEQ ID NO: 185944 - DNA, 33 bp, Homo sapien
attctagcagcaagtcgataaggtaatgctttg

SEQ ID NO: 185945 - DNA, 33 bp, Homo sapien
catcagttattgaggcaataccaagtgttagac

SEQ ID NO: 185946 - DNA, 33 bp, Homo sapien
catcagttattgaggcgataccaagtgttagac

SEQ ID NO: 185947 - DNA, 33 bp, Homo sapien
attgtaagaagattatcagttgaataaggacca

SEQ ID NO: 185948 - DNA, 33 bp, Homo sapien
attgtaagaagattattagttgaataaggacca

SEQ ID NO: 185949 - DNA, 33 bp, Homo sapien
caaaaatatgacagtaccaataagaccaacagt

SEQ ID NO: 185950 - DNA, 33 bp, Homo sapien
caaaaatatgacagtagcaataagaccaacagt

SEQ ID NO: 185951 - DNA, 33 bp, Homo sapien
ttacttattgtaacaccgaagaaactaatcccc

SEQ ID NO: 185952 - DNA, 33 bp, Homo sapien
ttacttattgtaacactgaagaaactaatcccc

SEQ ID NO: 185953 - DNA, 33 bp, Homo sapien
aaattctgccagctaaatcaatatcttaccagt

SEQ ID NO: 185954 - DNA, 33 bp, Homo sapien
aaattctgccagctaactcaatatcttaccagt

SEQ ID NO: 185955 - DNA, 33 bp, Homo sapien
ttagggaagtgctgagaatagtgaactataaga

SEQ ID NO: 185956 - DNA, 33 bp, Homo sapien
ttagggaagtgctgaggatagtgaactataaga

SEQ ID NO: 185957 - DNA, 33 bp, Homo sapien
actgctctgtaggctacatatggcattgtctac

SEQ ID NO: 185958 - DNA, 33 bp, Homo sapien
actgctctgtaggctatatatggcattgtctac

SEQ ID NO: 185959 - DNA, 33 bp, Homo sapien
aggtgtcaccttccagaagaattgcactcaatt

SEQ ID NO: 185960 - DNA, 33 bp, Homo sapien
aggtgtcaccttccaggagaattgcactcaatt

SEQ ID NO: 185961 - DNA, 33 bp, Homo sapien
atcagggtaaaataccaccgaatatttgcatat

SEQ ID NO: 185962 - DNA, 33 bp, Homo sapien
atcagggtaaaataccgccgaatatttgcatat

SEQ ID NO: 185963 - DNA, 33 bp, Homo sapien
tactgccacttttacactacgaaggtttatttt

SEQ ID NO: 185964 - DNA, 33 bp, Homo sapien
tactgccacttttacattacgaaggtttatttt

SEQ ID NO: 185965 - DNA, 33 bp, Homo sapien
agaacaggactgtggacgcactgagattttctg

SEQ ID NO: 185966 - DNA, 33 bp, Homo sapien
agaacaggactgtggaggcactgagattttctg

SEQ ID NO: 185967 - DNA, 33 bp, Homo sapien
tttcaaaatcctaataagttctatgcacatgaa

SEQ ID NO: 185968 - DNA, 33 bp, Homo sapien
tttcaaaatcctaataggttctatgcacatgaa

SEQ ID NO: 185969 - DNA, 33 bp, Homo sapien
tagattaatgccaacaagtgataaatagatata

SEQ ID NO: 185970 - DNA, 33 bp, Homo sapien
tagattaatgccaacaggtgataaatagatata

SEQ ID NO: 185971 - DNA, 33 bp, Homo sapien
tgcagcccagtgtcttaaaccaaatgctagcaa

SEQ ID NO: 185972 - DNA, 33 bp, Homo sapien
tgcagcccagtgtcttcaaccaaatgctagcaa

SEQ ID NO: 185973 - DNA, 33 bp, Homo sapien
atagtggtttgaaaacaaatctacccgtaacaa

SEQ ID NO: 185974 - DNA, 33 bp, Homo sapien
atagtggtttgaaaacgaatctacccgtaacaa

SEQ ID NO: 185975 - DNA, 33 bp, Homo sapien
ttaatttcatagaagcaaagttattgtcacttc

SEQ ID NO: 185976 - DNA, 33 bp, Homo sapien
ttaatttcatagaagcgaagttattgtcacttc

SEQ ID NO: 185977 - DNA, 33 bp, Homo sapien
actgaactagtggatgcacaaattcctaaagtg

SEQ ID NO: 185978 - DNA, 33 bp, Homo sapien
actgaactagtggatggacaaattcctaaagtg

SEQ ID NO: 185979 - DNA, 33 bp, Homo sapien
ttggatgagacaaaaaattgaggtcctgaccat

SEQ ID NO: 185980 - DNA, 33 bp, Homo sapien
ttggatgagacaaaaagttgaggtcctgaccat

SEQ ID NO: 185981 - DNA, 33 bp, Homo sapien
cttaagtgagccagaaatggagggaggatataa

SEQ ID NO: 185982 - DNA, 33 bp, Homo sapien
cttaagtgagccagaattggagggaggatataa

SEQ ID NO: 185983 - DNA, 33 bp, Homo sapien
ttctatccatagggaactgcataattttccaac

SEQ ID NO: 185984 - DNA, 33 bp, Homo sapien
ttctatccatagggaagtgcataattttccaac

SEQ ID NO: 185985 - DNA, 33 bp, Homo sapien
tctctcccaatgtcagacacgtacctaaagcat

SEQ ID NO: 185986 - DNA, 33 bp, Homo sapien
tctctcccaatgtcaggcacgtacctaaagcat

SEQ ID NO: 185987 - DNA, 33 bp, Homo sapien
taagagatagaaaagacacacagtcccagagag

SEQ ID NO: 185988 - DNA, 33 bp, Homo sapien
taagagatagaaaagatacacagtcccagagag

SEQ ID NO: 185989 - DNA, 33 bp, Homo sapien
cttacataaaacagatgaacaggagaaaaggat

SEQ ID NO: 185990 - DNA, 33 bp, Homo sapien
cttacataaaacagattaacaggagaaaaggat

SEQ ID NO: 185991 - DNA, 33 bp, Homo sapien
aggttaacgtgccatccctttgatctattttag

SEQ ID NO: 185992 - DNA, 33 bp, Homo sapien
aggttaacgtgccatctctttgatctattttag

SEQ ID NO: 185993 - DNA, 33 bp, Homo sapien
gctactccatttacaccgcaatgatcccattat

SEQ ID NO: 185994 - DNA, 33 bp, Homo sapien
gctactccatttacactgcaatgatcccattat

SEQ ID NO: 185995 - DNA, 33 bp, Homo sapien
tttttctggcaagtaaatggacgtagccttggg

SEQ ID NO: 185996 - DNA, 33 bp, Homo sapien
tttttctggcaagtaagtggacgtagccttggg

SEQ ID NO: 185997 - DNA, 33 bp, Homo sapien
tcaaataactggttgaagtgtggaacaaacaac

SEQ ID NO: 185998 - DNA, 33 bp, Homo sapien
tcaaataactggttgaggtgtggaacaaacaac

SEQ ID NO: 185999 - DNA, 33 bp, Homo sapien
tatagtgcttaactgacggcaaataatctgctg

SEQ ID NO: 186000 - DNA, 33 bp, Homo sapien
tatagtgcttaactgatggcaaataatctgctg

SEQ ID NO: 186001 - DNA, 33 bp, Homo sapien
gactctatctacaaccccaaatgaccatgaagt

SEQ ID NO: 186002 - DNA, 33 bp, Homo sapien
gactctatctacaacctcaaatgaccatgaagt

SEQ ID NO: 186003 - DNA, 33 bp, Homo sapien
gaatgttgttcagctcacaaatgaaatgagcta

SEQ ID NO: 186004 - DNA, 33 bp, Homo sapien
gaatgttgttcagctcgcaaatgaaatgagcta

SEQ ID NO: 186005 - DNA, 33 bp, Homo sapien
tagagacattaaattaacacatcctattggaaa

SEQ ID NO: 186006 - DNA, 33 bp, Homo sapien
tagagacattaaattagcacatcctattggaaa

SEQ ID NO: 186007 - DNA, 33 bp, Homo sapien
tatttggaaccctttgaatttacatacagtcta

SEQ ID NO: 186008 - DNA, 33 bp, Homo sapien
tatttggaaccctttgcatttacatacagtcta

SEQ ID NO: 186009 - DNA, 33 bp, Homo sapien
aacttaatccaagagaacatctaacaaagtatc

SEQ ID NO: 186010 - DNA, 33 bp, Homo sapien
aacttaatccaagagaccatctaacaaagtatc

SEQ ID NO: 186011 - DNA, 33 bp, Homo sapien
tatttttgtgtaagtcactcagtatatggtaat

SEQ ID NO: 186012 - DNA, 33 bp, Homo sapien
tatttttgtgtaagtctctcagtatatggtaat

SEQ ID NO: 186013 - DNA, 33 bp, Homo sapien
gttccagtgtggatccacttagattgtagatgt

SEQ ID NO: 186014 - DNA, 33 bp, Homo sapien
gttccagtgtggatcctcttagattgtagatgt

SEQ ID NO: 186015 - DNA, 33 bp, Homo sapien
tcatcagtgatgaacacccatgacctaatcacc

SEQ ID NO: 186016 - DNA, 33 bp, Homo sapien
tcatcagtgatgaacatccatgacctaatcacc

SEQ ID NO: 186017 - DNA, 33 bp, Homo sapien
agataatgaagtctaacggcaccaacttgaaga

SEQ ID NO: 186018 - DNA, 33 bp, Homo sapien
agataatgaagtctaatggcaccaacttgaaga

SEQ ID NO: 186019 - DNA, 33 bp, Homo sapien
aggtgtcctgatctaacaggaatcactggtaag

SEQ ID NO: 186020 - DNA, 33 bp, Homo sapien
aggtgtcctgatctaataggaatcactggtaag

SEQ ID NO: 186021 - DNA, 33 bp, Homo sapien
ttgcaagaccttacacaaataaaagaatacctg

SEQ ID NO: 186022 - DNA, 33 bp, Homo sapien
ttgcaagaccttacacgaataaaagaatacctg

SEQ ID NO: 186023 - DNA, 33 bp, Homo sapien
gaatcttctgagacaaaaattaagtatctcagc

SEQ ID NO: 186024 - DNA, 33 bp, Homo sapien
gaatcttctgagacaacaattaagtatctcagc

SEQ ID NO: 186025 - DNA, 33 bp, Homo sapien
tagagcagaagtttaacaagcaaaaggaataga

SEQ ID NO: 186026 - DNA, 33 bp, Homo sapien
tagagcagaagtttaataagcaaaaggaataga

SEQ ID NO: 186027 - DNA, 33 bp, Homo sapien
tattctagagttttcaggttgaagcagaaatca

SEQ ID NO: 186028 - DNA, 33 bp, Homo sapien
tattctagagttttcatgttgaagcagaaatca

SEQ ID NO: 186029 - DNA, 33 bp, Homo sapien
gcaggcatgaccatccagcaaaagtgtaaaagt

SEQ ID NO: 186030 - DNA, 33 bp, Homo sapien
gcaggcatgaccatccggcaaaagtgtaaaagt

SEQ ID NO: 186031 - DNA, 33 bp, Homo sapien
tcatttcaaaataccactgggggatacttatga

SEQ ID NO: 186032 - DNA, 33 bp, Homo sapien
tcatttcaaaataccattgggggatacttatga

SEQ ID NO: 186033 - DNA, 33 bp, Homo sapien
ttgaatgaatgcatagaaagatgaagtctgtaa

SEQ ID NO: 186034 - DNA, 33 bp, Homo sapien
ttgaatgaatgcataggaagatgaagtctgtaa

SEQ ID NO: 186035 - DNA, 33 bp, Homo sapien
aggaaacggataggaacagagctataatttttt

SEQ ID NO: 186036 - DNA, 33 bp, Homo sapien
aggaaacggataggaatagagctataatttttt

SEQ ID NO: 186037 - DNA, 33 bp, Homo sapien
aagatagtgtttataagtggagaagaaggagtt

SEQ ID NO: 186038 - DNA, 33 bp, Homo sapien
aagatagtgtttataattggagaagaaggagtt

SEQ ID NO: 186039 - DNA, 33 bp, Homo sapien
ctgtcctggcaactaacattcttaaatttctgt

SEQ ID NO: 186040 - DNA, 33 bp, Homo sapien
ctgtcctggcaactaatattcttaaatttctgt

SEQ ID NO: 186041 - DNA, 33 bp, Homo sapien
attggaaaatcgtaacccaacatattaaccaaa

SEQ ID NO: 186042 - DNA, 33 bp, Homo sapien
attggaaaatcgtaactcaacatattaaccaaa

SEQ ID NO: 186043 - DNA, 33 bp, Homo sapien
tgttgcactcctggagaagaaaatagtttgctc

SEQ ID NO: 186044 - DNA, 33 bp, Homo sapien
tgttgcactcctggagtagaaaatagtttgctc

SEQ ID NO: 186045 - DNA, 33 bp, Homo sapien
tactggcttccccagaacagtgtcccatgagaa

SEQ ID NO: 186046 - DNA, 33 bp, Homo sapien
tactggcttccccagagcagtgtcccatgagaa

SEQ ID NO: 186047 - DNA, 33 bp, Homo sapien
agaagatagcttagttaaaaagtactgggccag

SEQ ID NO: 186048 - DNA, 33 bp, Homo sapien
agaagatagcttagttgaaaagtactgggccag

SEQ ID NO: 186049 - DNA, 33 bp, Homo sapien
cttgaactcctgcttaccctactctgtccataa

SEQ ID NO: 186050 - DNA, 33 bp, Homo sapien
cttgaactcctgcttatcctactctgtccataa

SEQ ID NO: 186051 - DNA, 33 bp, Homo sapien
taggttgcagtagtgcaattaacttaatcagga

SEQ ID NO: 186052 - DNA, 33 bp, Homo sapien
taggttgcagtagtgcgattaacttaatcagga

SEQ ID NO: 186053 - DNA, 33 bp, Homo sapien
tagtgagcctggtaaactgttgacagtagatgg

SEQ ID NO: 186054 - DNA, 33 bp, Homo sapien
tagtgagcctggtaaattgttgacagtagatgg

SEQ ID NO: 186055 - DNA, 33 bp, Homo sapien
catcttgcctaattgaaactgtgtacccactga

SEQ ID NO: 186056 - DNA, 33 bp, Homo sapien
catcttgcctaattgatactgtgtacccactga

SEQ ID NO: 186057 - DNA, 33 bp, Homo sapien
ttgattctagtcttctaacatgatcctataatg

SEQ ID NO: 186058 - DNA, 33 bp, Homo sapien
ttgattctagtcttcttacatgatcctataatg

SEQ ID NO: 186059 - DNA, 33 bp, Homo sapien
tgagcattttctcctacgtctattggctgcata

SEQ ID NO: 186060 - DNA, 33 bp, Homo sapien
tgagcattttctcctatgtctattggctgcata

SEQ ID NO: 186061 - DNA, 33 bp, Homo sapien
tgaaaaagaagcattacggggtaaatcagtata

SEQ ID NO: 186062 - DNA, 33 bp, Homo sapien
tgaaaaagaagcattatggggtaaatcagtata

SEQ ID NO: 186063 - DNA, 33 bp, Homo sapien
aattgaaggcagagtcagaacagaatattcact

SEQ ID NO: 186064 - DNA, 33 bp, Homo sapien
aattgaaggcagagtcggaacagaatattcact

SEQ ID NO: 186065 - DNA, 33 bp, Homo sapien
agtcttatgaactaaactaaggtggactctata

SEQ ID NO: 186066 - DNA, 33 bp, Homo sapien
agtcttatgaactaaattaaggtggactctata

SEQ ID NO: 186067 - DNA, 33 bp, Homo sapien
ataaagcacgaatattcaaactttgtgaggcta

SEQ ID NO: 186068 - DNA, 33 bp, Homo sapien
ataaagcacgaatatttaaactttgtgaggcta

SEQ ID NO: 186069 - DNA, 33 bp, Homo sapien
cccctgaaaactggtacgagacaagaatgccca

SEQ ID NO: 186070 - DNA, 33 bp, Homo sapien
cccctgaaaactggtatgagacaagaatgccca

SEQ ID NO: 186071 - DNA, 33 bp, Homo sapien
atatctattataaaacagaaaacattctcaaca

SEQ ID NO: 186072 - DNA, 33 bp, Homo sapien
atatctattataaaacggaaaacattctcaaca

SEQ ID NO: 186073 - DNA, 33 bp, Homo sapien
gaaatgggaacacaatgatataaactacagtcc

SEQ ID NO: 186074 - DNA, 33 bp, Homo sapien
gaaatgggaacacaattatataaactacagtcc

SEQ ID NO: 186075 - DNA, 33 bp, Homo sapien
tgatgggcctgagatcaacttcagtgatgggga

SEQ ID NO: 186076 - DNA, 33 bp, Homo sapien
tgatgggcctgagatcgacttcagtgatgggga

SEQ ID NO: 186077 - DNA, 33 bp, Homo sapien
cttcagctaacacaaaagcttgtggcataacta

SEQ ID NO: 186078 - DNA, 33 bp, Homo sapien
cttcagctaacacaaaggcttgtggcataacta

SEQ ID NO: 186079 - DNA, 33 bp, Homo sapien
gatggtcatgatcagtgaactttgccagtatct

SEQ ID NO: 186080 - DNA, 33 bp, Homo sapien
gatggtcatgatcagttaactttgccagtatct

SEQ ID NO: 186081 - DNA, 33 bp, Homo sapien
gagtccaggaagcaaagaatttgtttatgcctt

SEQ ID NO: 186082 - DNA, 33 bp, Homo sapien
gagtccaggaagcaaataatttgtttatgcctt

SEQ ID NO: 186083 - DNA, 33 bp, Homo sapien
ggcattcaacaagaagacccactttacagcaaa

SEQ ID NO: 186084 - DNA, 33 bp, Homo sapien
ggcattcaacaagaaggcccactttacagcaaa

SEQ ID NO: 186085 - DNA, 33 bp, Homo sapien
ttcctctcaatatgtaagtatgtgtcttaaaca

SEQ ID NO: 186086 - DNA, 33 bp, Homo sapien
ttcctctcaatatgtaggtatgtgtcttaaaca

SEQ ID NO: 186087 - DNA, 33 bp, Homo sapien
cttttacatttcaggaccttgtctgcttctatc

SEQ ID NO: 186088 - DNA, 33 bp, Homo sapien
cttttacatttcaggatcttgtctgcttctatc

SEQ ID NO: 186089 - DNA, 33 bp, Homo sapien
gagtgccagagaagcaatactttttctcatata

SEQ ID NO: 186090 - DNA, 33 bp, Homo sapien
gagtgccagagaagcactactttttctcatata

SEQ ID NO: 186091 - DNA, 33 bp, Homo sapien
aacagaaggaaggctaagaattttcgcattcat

SEQ ID NO: 186092 - DNA, 33 bp, Homo sapien
aacagaaggaaggctaggaattttcgcattcat

SEQ ID NO: 186093 - DNA, 33 bp, Homo sapien
tttaatcaaaatggcacgtaaggaaaccaattt

SEQ ID NO: 186094 - DNA, 33 bp, Homo sapien
tttaatcaaaatggcatgtaaggaaaccaattt

SEQ ID NO: 186095 - DNA, 33 bp, Homo sapien
ggtatttttgttacagcaaattagcacagcacc

SEQ ID NO: 186096 - DNA, 33 bp, Homo sapien
ggtatttttgttacagtaaattagcacagcacc

SEQ ID NO: 186097 - DNA, 33 bp, Homo sapien
tcaatacatagcaataataatcaaataatgtta

SEQ ID NO: 186098 - DNA, 33 bp, Homo sapien
tcaatacatagcaatagtaatcaaataatgtta

SEQ ID NO: 186099 - DNA, 33 bp, Homo sapien
tgtattttcgttgggacgttgaatacacatttc

SEQ ID NO: 186100 - DNA, 33 bp, Homo sapien
tgtattttcgttgggatgttgaatacacatttc

SEQ ID NO: 186101 - DNA, 33 bp, Homo sapien
aatgtccaaaagttaacaaaatagcaaatgaag

SEQ ID NO: 186102 - DNA, 33 bp, Homo sapien
aatgtccaaaagttaataaaatagcaaatgaag

SEQ ID NO: 186103 - DNA, 33 bp, Homo sapien
agccattttccacttaactaagcagcttcagag

SEQ ID NO: 186104 - DNA, 33 bp, Homo sapien
agccattttccacttacctaagcagcttcagag

SEQ ID NO: 186105 - DNA, 33 bp, Homo sapien
ctaagaaaacactccaatattaaaaggattgca

SEQ ID NO: 186106 - DNA, 33 bp, Homo sapien
ctaagaaaacactccagtattaaaaggattgca

SEQ ID NO: 186107 - DNA, 33 bp, Homo sapien
agaattctgcattttacgtgaaaaacagcttgt

SEQ ID NO: 186108 - DNA, 33 bp, Homo sapien
agaattctgcattttatgtgaaaaacagcttgt

SEQ ID NO: 186109 - DNA, 33 bp, Homo sapien
gtgtgaattcagaaataaagttggatttacatt

SEQ ID NO: 186110 - DNA, 33 bp, Homo sapien
gtgtgaattcagaaatgaagttggatttacatt

SEQ ID NO: 186111 - DNA, 33 bp, Homo sapien
tttctatgcctagataggtttagatacacaaat

SEQ ID NO: 186112 - DNA, 33 bp, Homo sapien
tttctatgcctagatatgtttagatacacaaat

SEQ ID NO: 186113 - DNA, 33 bp, Homo sapien
gataatcacattcctgccaacatcttaagcagt

SEQ ID NO: 186114 - DNA, 33 bp, Homo sapien
gataatcacattcctggcaacatcttaagcagt

SEQ ID NO: 186115 - DNA, 33 bp, Homo sapien
ctgtcagacatggttccaggtgtgtgaaatcaa

SEQ ID NO: 186116 - DNA, 33 bp, Homo sapien
ctgtcagacatggttctaggtgtgtgaaatcaa

SEQ ID NO: 186117 - DNA, 33 bp, Homo sapien
aagaccaactatgctccaacataactgcaactt

SEQ ID NO: 186118 - DNA, 33 bp, Homo sapien
aagaccaactatgctctaacataactgcaactt

SEQ ID NO: 186119 - DNA, 33 bp, Homo sapien
aaaggaaagtttccatgaaataagtcattcagt

SEQ ID NO: 186120 - DNA, 33 bp, Homo sapien
aaaggaaagtttccattaaataagtcattcagt

SEQ ID NO: 186121 - DNA, 33 bp, Homo sapien
acttgagatattatcacgtatacaagccaagat

SEQ ID NO: 186122 - DNA, 33 bp, Homo sapien
acttgagatattatcaggtatacaagccaagat

SEQ ID NO: 186123 - DNA, 33 bp, Homo sapien
ccatgagagctatgtgaattcctgaagccagtg

SEQ ID NO: 186124 - DNA, 33 bp, Homo sapien
ccatgagagctatgtgtattcctgaagccagtg

SEQ ID NO: 186125 - DNA, 33 bp, Homo sapien
ttgtattcccggtgtaccagaaattgtgctttg

SEQ ID NO: 186126 - DNA, 33 bp, Homo sapien
ttgtattcccggtgtatcagaaattgtgctttg

SEQ ID NO: 186127 - DNA, 33 bp, Homo sapien
cctagatgtccaggtaaaagtctactgcagggg

SEQ ID NO: 186128 - DNA, 33 bp, Homo sapien
cctagatgtccaggtagaagtctactgcagggg

SEQ ID NO: 186129 - DNA, 33 bp, Homo sapien
ccccacttagccatgacgtcctgattagtgtat

SEQ ID NO: 186130 - DNA, 33 bp, Homo sapien
ccccacttagccatgatgtcctgattagtgtat

SEQ ID NO: 186131 - DNA, 33 bp, Homo sapien
aacaatggagtgcatacacagtagtggtctcct

SEQ ID NO: 186132 - DNA, 33 bp, Homo sapien
aacaatggagtgcatatacagtagtggtctcct

SEQ ID NO: 186133 - DNA, 33 bp, Homo sapien
tccttccacgctttcccatcattgtttagcttc

SEQ ID NO: 186134 - DNA, 33 bp, Homo sapien
tccttccacgctttcctatcattgtttagcttc

SEQ ID NO: 186135 - DNA, 33 bp, Homo sapien
gtaaatgaccatcaaacgtccatcaaataatga

SEQ ID NO: 186136 - DNA, 33 bp, Homo sapien
gtaaatgaccatcaaatgtccatcaaataatga

SEQ ID NO: 186137 - DNA, 33 bp, Homo sapien
aaatgtaaatctaaaccaccatatcctatcact

SEQ ID NO: 186138 - DNA, 33 bp, Homo sapien
aaatgtaaatctaaactaccatatcctatcact

SEQ ID NO: 186139 - DNA, 33 bp, Homo sapien
caaaaaggtggaggaacggaggatttgttttct

SEQ ID NO: 186140 - DNA, 33 bp, Homo sapien
caaaaaggtggaggaagggaggatttgttttct

SEQ ID NO: 186141 - DNA, 33 bp, Homo sapien
tgatggggcaaaatgcagaatcatttaagacag

SEQ ID NO: 186142 - DNA, 33 bp, Homo sapien
tgatggggcaaaatgcggaatcatttaagacag

SEQ ID NO: 186143 - DNA, 33 bp, Homo sapien
aatgtgtattttacagaccacagtgttatttta

SEQ ID NO: 186144 - DNA, 33 bp, Homo sapien
aatgtgtattttacagcccacagtgttatttta

SEQ ID NO: 186145 - DNA, 33 bp, Homo sapien
atcacaaagaaggacacaatcggttttgaaaag

SEQ ID NO: 186146 - DNA, 33 bp, Homo sapien
atcacaaagaaggacataatcggttttgaaaag

SEQ ID NO: 186147 - DNA, 33 bp, Homo sapien
aggggaacacatttgagcatggtacccgttata

SEQ ID NO: 186148 - DNA, 33 bp, Homo sapien
aggggaacacatttgatcatggtacccgttata

SEQ ID NO: 186149 - DNA, 33 bp, Homo sapien
cctaataggcatttacaaaatactcatctaata

SEQ ID NO: 186150 - DNA, 33 bp, Homo sapien
cctaataggcatttacgaaatactcatctaata

SEQ ID NO: 186151 - DNA, 33 bp, Homo sapien
atggtaattctgcaaacagtctttacccataaa

SEQ ID NO: 186152 - DNA, 33 bp, Homo sapien
atggtaattctgcaaatagtctttacccataaa

SEQ ID NO: 186153 - DNA, 33 bp, Homo sapien
agtctttacccataaactctcaagtacatttga

SEQ ID NO: 186154 - DNA, 33 bp, Homo sapien
agtctttacccataaagtctcaagtacatttga

SEQ ID NO: 186155 - DNA, 33 bp, Homo sapien
tctatttagataaccacgtggctttttgttatt

SEQ ID NO: 186156 - DNA, 33 bp, Homo sapien
tctatttagataaccatgtggctttttgttatt

SEQ ID NO: 186157 - DNA, 33 bp, Homo sapien
gaagaaacatatttcaagataataacagccatc

SEQ ID NO: 186158 - DNA, 33 bp, Homo sapien
gaagaaacatatttcaggataataacagccatc

SEQ ID NO: 186159 - DNA, 33 bp, Homo sapien
aactatagcagtaaaaactttgggcaatttgag

SEQ ID NO: 186160 - DNA, 33 bp, Homo sapien
aactatagcagtaaaagctttgggcaatttgag

SEQ ID NO: 186161 - DNA, 33 bp, Homo sapien
atgcttttgtagtgcagtaccgtatttgtaact

SEQ ID NO: 186162 - DNA, 33 bp, Homo sapien
atgcttttgtagtgcattaccgtatttgtaact

SEQ ID NO: 186163 - DNA, 33 bp, Homo sapien
tagatttctataaaacggattcatgtccaacag

SEQ ID NO: 186164 - DNA, 33 bp, Homo sapien
tagatttctataaaactgattcatgtccaacag

SEQ ID NO: 186165 - DNA, 33 bp, Homo sapien
gagaagggaaatattggaatgctttctcctcct

SEQ ID NO: 186166 - DNA, 33 bp, Homo sapien
gagaagggaaatattgtaatgctttctcctcct

SEQ ID NO: 186167 - DNA, 33 bp, Homo sapien
ctttggtcattttaaaatcaagttgttcatttt

SEQ ID NO: 186168 - DNA, 33 bp, Homo sapien
ctttggtcattttaaattcaagttgttcatttt

SEQ ID NO: 186169 - DNA, 33 bp, Homo sapien
gacatactcaaagtcacgcagtaaattatttac

SEQ ID NO: 186170 - DNA, 33 bp, Homo sapien
gacatactcaaagtcatgcagtaaattatttac

SEQ ID NO: 186171 - DNA, 33 bp, Homo sapien
caaatcctgaatttaactgatgttgatgtaacc

SEQ ID NO: 186172 - DNA, 33 bp, Homo sapien
caaatcctgaatttaattgatgttgatgtaacc

SEQ ID NO: 186173 - DNA, 33 bp, Homo sapien
ttgtttcatgctctggaaaaaacttgtgagtca

SEQ ID NO: 186174 - DNA, 33 bp, Homo sapien
ttgtttcatgctctgggaaaaacttgtgagtca

SEQ ID NO: 186175 - DNA, 33 bp, Homo sapien
gctcagtgccttctccacctgttgcaaattctc

SEQ ID NO: 186176 - DNA, 33 bp, Homo sapien
gctcagtgccttctccgcctgttgcaaattctc

SEQ ID NO: 186177 - DNA, 33 bp, Homo sapien
cctttatatggaataacgagaggtctgagaaaa

SEQ ID NO: 186178 - DNA, 33 bp, Homo sapien
cctttatatggaataatgagaggtctgagaaaa

SEQ ID NO: 186179 - DNA, 33 bp, Homo sapien
ggaaatgtaagatggacacagagatatactgca

SEQ ID NO: 186180 - DNA, 33 bp, Homo sapien
ggaaatgtaagatggatacagagatatactgca

SEQ ID NO: 186181 - DNA, 33 bp, Homo sapien
ggtcaaagtcggcttaccctgcaatcgtttatg

SEQ ID NO: 186182 - DNA, 33 bp, Homo sapien
ggtcaaagtcggcttatcctgcaatcgtttatg

SEQ ID NO: 186183 - DNA, 33 bp, Homo sapien
aaacttagctattgaacgttagagttaggccat

SEQ ID NO: 186184 - DNA, 33 bp, Homo sapien
aaacttagctattgaaggttagagttaggccat

SEQ ID NO: 186185 - DNA, 33 bp, Homo sapien
tttccaaatcaaataactaaactcagcgtccta

SEQ ID NO: 186186 - DNA, 33 bp, Homo sapien
tttccaaatcaaataagtaaactcagcgtccta

SEQ ID NO: 186187 - DNA, 33 bp, Homo sapien
cttccaatgaaatctacacgagaaatattagca

SEQ ID NO: 186188 - DNA, 33 bp, Homo sapien
cttccaatgaaatctatacgagaaatattagca

SEQ ID NO: 186189 - DNA, 33 bp, Homo sapien
ttgcaaactgtacatacggcaaaggtctaatat

SEQ ID NO: 186190 - DNA, 33 bp, Homo sapien
ttgcaaactgtacatatggcaaaggtctaatat

SEQ ID NO: 186191 - DNA, 33 bp, Homo sapien
atgtgattatcttagcaaatatgaaactactaa

SEQ ID NO: 186192 - DNA, 33 bp, Homo sapien
atgtgattatcttagcgaatatgaaactactaa

SEQ ID NO: 186193 - DNA, 33 bp, Homo sapien
ttaaggtgtgcaaatagcttatccaaacaaaca

SEQ ID NO: 186194 - DNA, 33 bp, Homo sapien
ttaaggtgtgcaaatatcttatccaaacaaaca

SEQ ID NO: 186195 - DNA, 33 bp, Homo sapien
gatctgctttggccaactaaatgtgagcaggga

SEQ ID NO: 186196 - DNA, 33 bp, Homo sapien
gatctgctttggccaattaaatgtgagcaggga

SEQ ID NO: 186197 - DNA, 33 bp, Homo sapien
agggtctccactgatacgaggttgtcatcgttt

SEQ ID NO: 186198 - DNA, 33 bp, Homo sapien
agggtctccactgatatgaggttgtcatcgttt

SEQ ID NO: 186199 - DNA, 33 bp, Homo sapien
accattgcagggaaaacgcttcatctacagtcc

SEQ ID NO: 186200 - DNA, 33 bp, Homo sapien
accattgcagggaaaatgcttcatctacagtcc

SEQ ID NO: 186201 - DNA, 33 bp, Homo sapien
ttctgttgacatttaagtgcctttgtaaaagta

SEQ ID NO: 186202 - DNA, 33 bp, Homo sapien
ttctgttgacatttaattgcctttgtaaaagta

SEQ ID NO: 186203 - DNA, 33 bp, Homo sapien
tataatcaaaagtgacagtattttgcctaccta

SEQ ID NO: 186204 - DNA, 33 bp, Homo sapien
tataatcaaaagtgactgtattttgcctaccta

SEQ ID NO: 186205 - DNA, 33 bp, Homo sapien
tagggactctgggcaaaggaggtggtaatcttc

SEQ ID NO: 186206 - DNA, 33 bp, Homo sapien
tagggactctgggcaagggaggtggtaatcttc

SEQ ID NO: 186207 - DNA, 33 bp, Homo sapien
ccatctgagcttctaagtcagtagttcatgagt

SEQ ID NO: 186208 - DNA, 33 bp, Homo sapien
ccatctgagcttctaattcagtagttcatgagt

SEQ ID NO: 186209 - DNA, 33 bp, Homo sapien
gggaattagcacttcaacagctgtatagacaag

SEQ ID NO: 186210 - DNA, 33 bp, Homo sapien
gggaattagcacttcagcagctgtatagacaag

SEQ ID NO: 186211 - DNA, 33 bp, Homo sapien
tcacaagatgaagtcccaggatatgccgtctgc

SEQ ID NO: 186212 - DNA, 33 bp, Homo sapien
tcacaagatgaagtcctaggatatgccgtctgc

SEQ ID NO: 186213 - DNA, 33 bp, Homo sapien
ggagaaatagtcttcaccacattaacctattca

SEQ ID NO: 186214 - DNA, 33 bp, Homo sapien
ggagaaatagtcttcatcacattaacctattca

SEQ ID NO: 186215 - DNA, 33 bp, Homo sapien
tagagctttcatttccccacagctttctatcta

SEQ ID NO: 186216 - DNA, 33 bp, Homo sapien
tagagctttcatttcctcacagctttctatcta

SEQ ID NO: 186217 - DNA, 33 bp, Homo sapien
agacatatagtactcacgggtccatacaaattc

SEQ ID NO: 186218 - DNA, 33 bp, Homo sapien
agacatatagtactcatgggtccatacaaattc

SEQ ID NO: 186219 - DNA, 33 bp, Homo sapien
tgggcaagtagatgcacgtaaaattcaaatgag

SEQ ID NO: 186220 - DNA, 33 bp, Homo sapien
tgggcaagtagatgcatgtaaaattcaaatgag

SEQ ID NO: 186221 - DNA, 33 bp, Homo sapien
ctgatcacacaaatgtaaataaaatagaacaaa

SEQ ID NO: 186222 - DNA, 33 bp, Homo sapien
ctgatcacacaaatgtgaataaaatagaacaaa

SEQ ID NO: 186223 - DNA, 33 bp, Homo sapien
agaaattctaggcctacgtttccgttgtgtcct

SEQ ID NO: 186224 - DNA, 33 bp, Homo sapien
agaaattctaggcctatgtttccgttgtgtcct

SEQ ID NO: 186225 - DNA, 33 bp, Homo sapien
tcacttaaatagtgggccataactccatgaatc

SEQ ID NO: 186226 - DNA, 33 bp, Homo sapien
tcacttaaatagtgggtcataactccatgaatc

SEQ ID NO: 186227 - DNA, 33 bp, Homo sapien
tggctctgattcaatcactggcaaaatattagc

SEQ ID NO: 186228 - DNA, 33 bp, Homo sapien
tggctctgattcaatcgctggcaaaatattagc

SEQ ID NO: 186229 - DNA, 33 bp, Homo sapien
aatcaagagatctacaatgcaggaatcttttga

SEQ ID NO: 186230 - DNA, 33 bp, Homo sapien
aatcaagagatctacagtgcaggaatcttttga

SEQ ID NO: 186231 - DNA, 33 bp, Homo sapien
atccacctttcattcaagatacttcgctctcca

SEQ ID NO: 186232 - DNA, 33 bp, Homo sapien
atccacctttcattcacgatacttcgctctcca

SEQ ID NO: 186233 - DNA, 33 bp, Homo sapien
attaaagcctaggtaacgcattttgtaatttag

SEQ ID NO: 186234 - DNA, 33 bp, Homo sapien
attaaagcctaggtaatgcattttgtaatttag

SEQ ID NO: 186235 - DNA, 33 bp, Homo sapien
caactattgaagagacgcatactgtaatatgta

SEQ ID NO: 186236 - DNA, 33 bp, Homo sapien
caactattgaagagactcatactgtaatatgta

SEQ ID NO: 186237 - DNA, 33 bp, Homo sapien
atagccacctgaaaaaacgttcttgttaaaggt

SEQ ID NO: 186238 - DNA, 33 bp, Homo sapien
atagccacctgaaaaagcgttcttgttaaaggt

SEQ ID NO: 186239 - DNA, 33 bp, Homo sapien
gtaactatacactcaccaagcctatatagtttc

SEQ ID NO: 186240 - DNA, 33 bp, Homo sapien
gtaactatacactcacgaagcctatatagtttc

SEQ ID NO: 186241 - DNA, 33 bp, Homo sapien
catgttggtgttgaaaagtcagtaaattataaa

SEQ ID NO: 186242 - DNA, 33 bp, Homo sapien
catgttggtgttgaaaggtcagtaaattataaa

SEQ ID NO: 186243 - DNA, 33 bp, Homo sapien
cccattaaatgtgatactagctctaggtttttt

SEQ ID NO: 186244 - DNA, 33 bp, Homo sapien
cccattaaatgtgatattagctctaggtttttt

SEQ ID NO: 186245 - DNA, 33 bp, Homo sapien
tcctgaccttagcagaaaagagtccagtttttt

SEQ ID NO: 186246 - DNA, 33 bp, Homo sapien
tcctgaccttagcagagaagagtccagtttttt

SEQ ID NO: 186247 - DNA, 33 bp, Homo sapien
cttcaaactacagaggaaaagcaatttggacac

SEQ ID NO: 186248 - DNA, 33 bp, Homo sapien
cttcaaactacagaggcaaagcaatttggacac

SEQ ID NO: 186249 - DNA, 33 bp, Homo sapien
ctctcacatatattcacggtatccctgaaaacc

SEQ ID NO: 186250 - DNA, 33 bp, Homo sapien
ctctcacatatattcatggtatccctgaaaacc

SEQ ID NO: 186251 - DNA, 33 bp, Homo sapien
agattcacaaataaaaagttgcagttcttattt

SEQ ID NO: 186252 - DNA, 33 bp, Homo sapien
agattcacaaataaaaggttgcagttcttattt

SEQ ID NO: 186253 - DNA, 33 bp, Homo sapien
tacactcaatgagacaataatcattgagtatct

SEQ ID NO: 186254 - DNA, 33 bp, Homo sapien
tacactcaatgagacagtaatcattgagtatct

SEQ ID NO: 186255 - DNA, 33 bp, Homo sapien
gtggcaagaagaagtccaaagatattccacaga

SEQ ID NO: 186256 - DNA, 33 bp, Homo sapien
gtggcaagaagaagtctaaagatattccacaga

SEQ ID NO: 186257 - DNA, 33 bp, Homo sapien
ttacctatcagtagacaacaggcttacaacagc

SEQ ID NO: 186258 - DNA, 33 bp, Homo sapien
ttacctatcagtagaccacaggcttacaacagc

SEQ ID NO: 186259 - DNA, 33 bp, Homo sapien
tctgtatctgattctacgcaaacattaaaaaat

SEQ ID NO: 186260 - DNA, 33 bp, Homo sapien
tctgtatctgattctatgcaaacattaaaaaat

SEQ ID NO: 186261 - DNA, 33 bp, Homo sapien
aagagcaagcaggagggaaaagaggaaggaaag

SEQ ID NO: 186262 - DNA, 33 bp, Homo sapien
aagagcaagcaggaggtaaaagaggaaggaaag

SEQ ID NO: 186263 - DNA, 33 bp, Homo sapien
gctatattagtgagtacgttactgagtttcctg

SEQ ID NO: 186264 - DNA, 33 bp, Homo sapien
gctatattagtgagtatgttactgagtttcctg

SEQ ID NO: 186265 - DNA, 33 bp, Homo sapien
ctcatgggctgttataataaatattggctccat

SEQ ID NO: 186266 - DNA, 33 bp, Homo sapien
ctcatgggctgttatagtaaatattggctccat

SEQ ID NO: 186267 - DNA, 33 bp, Homo sapien
taattttgtataaaacagatgacagaacagttc

SEQ ID NO: 186268 - DNA, 33 bp, Homo sapien
taattttgtataaaacggatgacagaacagttc

SEQ ID NO: 186269 - DNA, 33 bp, Homo sapien
gcacaagattctgatacagatactttttgttta

SEQ ID NO: 186270 - DNA, 33 bp, Homo sapien
gcacaagattctgatagagatactttttgttta

SEQ ID NO: 186271 - DNA, 33 bp, Homo sapien
ctatctgtatttctaccaacattttgtccatga

SEQ ID NO: 186272 - DNA, 33 bp, Homo sapien
ctatctgtatttctactaacattttgtccatga

SEQ ID NO: 186273 - DNA, 33 bp, Homo sapien
ttaggcctccttaagcactcctcttgagagagt

SEQ ID NO: 186274 - DNA, 33 bp, Homo sapien
ttaggcctccttaagccctcctcttgagagagt

SEQ ID NO: 186275 - DNA, 33 bp, Homo sapien
taatgtgagacaataacggatgtcagtttaaac

SEQ ID NO: 186276 - DNA, 33 bp, Homo sapien
taatgtgagacaataatggatgtcagtttaaac

SEQ ID NO: 186277 - DNA, 33 bp, Homo sapien
tcacttgactaagcaaattcttcatcaatcacc

SEQ ID NO: 186278 - DNA, 33 bp, Homo sapien
tcacttgactaagcaatttcttcatcaatcacc

SEQ ID NO: 186279 - DNA, 33 bp, Homo sapien
gagaatgtgttatatccgaagccaagtgaataa

SEQ ID NO: 186280 - DNA, 33 bp, Homo sapien
gagaatgtgttatatctgaagccaagtgaataa

SEQ ID NO: 186281 - DNA, 33 bp, Homo sapien
atgttactgacatcaagtggataaaggtcaggg

SEQ ID NO: 186282 - DNA, 33 bp, Homo sapien
atgttactgacatcaattggataaaggtcaggg

SEQ ID NO: 186283 - DNA, 33 bp, Homo sapien
ttttagaattacctccaagttccaatgcacaac

SEQ ID NO: 186284 - DNA, 33 bp, Homo sapien
ttttagaattacctccgagttccaatgcacaac

SEQ ID NO: 186285 - DNA, 33 bp, Homo sapien
ttatccaagtgcagggaatagacagataacata

SEQ ID NO: 186286 - DNA, 33 bp, Homo sapien
ttatccaagtgcagggcatagacagataacata

SEQ ID NO: 186287 - DNA, 33 bp, Homo sapien
gaacttaagttccacaaatgaaagagaaattct

SEQ ID NO: 186288 - DNA, 33 bp, Homo sapien
gaacttaagttccacagatgaaagagaaattct

SEQ ID NO: 186289 - DNA, 33 bp, Homo sapien
gaaagcaaagggaagcagaaagcaaattaatca

SEQ ID NO: 186290 - DNA, 33 bp, Homo sapien
gaaagcaaagggaagcggaaagcaaattaatca

SEQ ID NO: 186291 - DNA, 33 bp, Homo sapien
ataaataaaatgccatcagtattacctactgct

SEQ ID NO: 186292 - DNA, 33 bp, Homo sapien
ataaataaaatgccatgagtattacctactgct

SEQ ID NO: 186293 - DNA, 33 bp, Homo sapien
ttttaacatctgtgcaaattatggttactttgc

SEQ ID NO: 186294 - DNA, 33 bp, Homo sapien
ttttaacatctgtgcatattatggttactttgc

SEQ ID NO: 186295 - DNA, 33 bp, Homo sapien
tgttaactatttgaacgggttgagaagtctcct

SEQ ID NO: 186296 - DNA, 33 bp, Homo sapien
tgttaactatttgaactggttgagaagtctcct

SEQ ID NO: 186297 - DNA, 33 bp, Homo sapien
gcatgattgtcaaacactgtgatagagggtagt

SEQ ID NO: 186298 - DNA, 33 bp, Homo sapien
gcatgattgtcaaacattgtgatagagggtagt

SEQ ID NO: 186299 - DNA, 33 bp, Homo sapien
cagagtattacattaaactgtcatcttgcagag

SEQ ID NO: 186300 - DNA, 33 bp, Homo sapien
cagagtattacattaagctgtcatcttgcagag

SEQ ID NO: 186301 - DNA, 33 bp, Homo sapien
cagttcagttctttaacagttcagttacccaaa

SEQ ID NO: 186302 - DNA, 33 bp, Homo sapien
cagttcagttctttaagagttcagttacccaaa

SEQ ID NO: 186303 - DNA, 33 bp, Homo sapien
agatgagtaattagaacccttttaagattaaca

SEQ ID NO: 186304 - DNA, 33 bp, Homo sapien
agatgagtaattagaatccttttaagattaaca

SEQ ID NO: 186305 - DNA, 33 bp, Homo sapien
cagtgaatgcatcataactcctgctcaaaatag

SEQ ID NO: 186306 - DNA, 33 bp, Homo sapien
cagtgaatgcatcatacctcctgctcaaaatag

SEQ ID NO: 186307 - DNA, 33 bp, Homo sapien
caggttctggaggtcaagattgattatcagctg

SEQ ID NO: 186308 - DNA, 33 bp, Homo sapien
caggttctggaggtcaggattgattatcagctg

SEQ ID NO: 186309 - DNA, 33 bp, Homo sapien
gacactgagtttgacaacaagttacacatggaa

SEQ ID NO: 186310 - DNA, 33 bp, Homo sapien
gacactgagtttgacatcaagttacacatggaa

SEQ ID NO: 186311 - DNA, 33 bp, Homo sapien
atcaactaaaactacaatcctccatatctttaa

SEQ ID NO: 186312 - DNA, 33 bp, Homo sapien
atcaactaaaactacagtcctccatatctttaa

SEQ ID NO: 186313 - DNA, 33 bp, Homo sapien
gtataaagcagaaaaagtttgtgtgggatgaca

SEQ ID NO: 186314 - DNA, 33 bp, Homo sapien
gtataaagcagaaaaattttgtgtgggatgaca

SEQ ID NO: 186315 - DNA, 33 bp, Homo sapien
ttatggtgtgcattcaataacagctagggcttt

SEQ ID NO: 186316 - DNA, 33 bp, Homo sapien
ttatggtgtgcattcagtaacagctagggcttt

SEQ ID NO: 186317 - DNA, 33 bp, Homo sapien
taaagccattttagtacgtagcatacataacaa

SEQ ID NO: 186318 - DNA, 33 bp, Homo sapien
taaagccattttagtaggtagcatacataacaa

SEQ ID NO: 186319 - DNA, 33 bp, Homo sapien
atactggataagtttacggaagtgcactaaaag

SEQ ID NO: 186320 - DNA, 33 bp, Homo sapien
atactggataagtttatggaagtgcactaaaag

SEQ ID NO: 186321 - DNA, 33 bp, Homo sapien
aatggaaagccagtaacgaggctaggggcttgg

SEQ ID NO: 186322 - DNA, 33 bp, Homo sapien
aatggaaagccagtaaggaggctaggggcttgg

SEQ ID NO: 186323 - DNA, 33 bp, Homo sapien
agtctccttaaaccaacgtgtgtaacaatttta

SEQ ID NO: 186324 - DNA, 33 bp, Homo sapien
agtctccttaaaccaatgtgtgtaacaatttta

SEQ ID NO: 186325 - DNA, 33 bp, Homo sapien
actatgtggactttacaaacgctgtatactttg

SEQ ID NO: 186326 - DNA, 33 bp, Homo sapien
actatgtggactttaccaacgctgtatactttg

SEQ ID NO: 186327 - DNA, 33 bp, Homo sapien
ttgtgttcagcatttacggtatattggagagta

SEQ ID NO: 186328 - DNA, 33 bp, Homo sapien
ttgtgttcagcatttatggtatattggagagta

SEQ ID NO: 186329 - DNA, 33 bp, Homo sapien
gttatttaagatgtcaataagttctggaaatat

SEQ ID NO: 186330 - DNA, 33 bp, Homo sapien
gttatttaagatgtcagtaagttctggaaatat

SEQ ID NO: 186331 - DNA, 33 bp, Homo sapien
atagaacaatatgtggcagtgagatagaatgta

SEQ ID NO: 186332 - DNA, 33 bp, Homo sapien
atagaacaatatgtggtagtgagatagaatgta

SEQ ID NO: 186333 - DNA, 33 bp, Homo sapien
tataatttatgtcctcaagcttatccagaatcc

SEQ ID NO: 186334 - DNA, 33 bp, Homo sapien
tataatttatgtcctcgagcttatccagaatcc

SEQ ID NO: 186335 - DNA, 33 bp, Homo sapien
aaagcgcatattaaaaattactagctagctcat

SEQ ID NO: 186336 - DNA, 33 bp, Homo sapien
aaagcgcatattaaaacttactagctagctcat

SEQ ID NO: 186337 - DNA, 33 bp, Homo sapien
tgctttgcactaatgaagggttacatgatgacc

SEQ ID NO: 186338 - DNA, 33 bp, Homo sapien
tgctttgcactaatgaggggttacatgatgacc

SEQ ID NO: 186339 - DNA, 33 bp, Homo sapien
cctaatttttgattacagaagtatctatgacaa

SEQ ID NO: 186340 - DNA, 33 bp, Homo sapien
cctaatttttgattacggaagtatctatgacaa

SEQ ID NO: 186341 - DNA, 33 bp, Homo sapien
ttgttcaatcaatcccagctttgtatatatcat

SEQ ID NO: 186342 - DNA, 33 bp, Homo sapien
ttgttcaatcaatcccggctttgtatatatcat

SEQ ID NO: 186343 - DNA, 33 bp, Homo sapien
gtttgctgtaactgccccttcctttcacaaaag

SEQ ID NO: 186344 - DNA, 33 bp, Homo sapien
gtttgctgtaactgcctcttcctttcacaaaag

SEQ ID NO: 186345 - DNA, 33 bp, Homo sapien
attctgtgaaaaatggaattagtaatttaatat

SEQ ID NO: 186346 - DNA, 33 bp, Homo sapien
attctgtgaaaaatggcattagtaatttaatat

SEQ ID NO: 186347 - DNA, 33 bp, Homo sapien
atacaaaaagctcaaacaacaactcaagaggaa

SEQ ID NO: 186348 - DNA, 33 bp, Homo sapien
atacaaaaagctcaaagaacaactcaagaggaa

SEQ ID NO: 186349 - DNA, 33 bp, Homo sapien
tagtaatgacattgaacgaaaatggactaaact

SEQ ID NO: 186350 - DNA, 33 bp, Homo sapien
tagtaatgacattgaatgaaaatggactaaact

SEQ ID NO: 186351 - DNA, 33 bp, Homo sapien
cagctagcaattaatgaaagttctcagctggtt

SEQ ID NO: 186352 - DNA, 33 bp, Homo sapien
cagctagcaattaatggaagttctcagctggtt

SEQ ID NO: 186353 - DNA, 33 bp, Homo sapien
taaattgtaagccaacccgtttgcaggataaaa

SEQ ID NO: 186354 - DNA, 33 bp, Homo sapien
taaattgtaagccaactcgtttgcaggataaaa

SEQ ID NO: 186355 - DNA, 33 bp, Homo sapien
ctctctacaagggcaaaacagagaggaaatatg

SEQ ID NO: 186356 - DNA, 33 bp, Homo sapien
ctctctacaagggcaacacagagaggaaatatg

SEQ ID NO: 186357 - DNA, 33 bp, Homo sapien
aaattagagatgaagtaaagtatcaaatagaca

SEQ ID NO: 186358 - DNA, 33 bp, Homo sapien
aaattagagatgaagtcaagtatcaaatagaca

SEQ ID NO: 186359 - DNA, 33 bp, Homo sapien
taatctctggccttaaatagtgactcaaagtag

SEQ ID NO: 186360 - DNA, 33 bp, Homo sapien
taatctctggccttaattagtgactcaaagtag

SEQ ID NO: 186361 - DNA, 33 bp, Homo sapien
atagaggcacacgatacaggatcaacatataaa

SEQ ID NO: 186362 - DNA, 33 bp, Homo sapien
atagaggcacacgatagaggatcaacatataaa

SEQ ID NO: 186363 - DNA, 33 bp, Homo sapien
tttaataaaaaatcacaaaacctgcaaagaaac

SEQ ID NO: 186364 - DNA, 33 bp, Homo sapien
tttaataaaaaatcacgaaacctgcaaagaaac

SEQ ID NO: 186365 - DNA, 33 bp, Homo sapien
atggtagtaccctgaaagtaggttttttgtttg

SEQ ID NO: 186366 - DNA, 33 bp, Homo sapien
atggtagtaccctgaaggtaggttttttgtttg

SEQ ID NO: 186367 - DNA, 33 bp, Homo sapien
ggcaaacatcatacaccctgctttcttattgag

SEQ ID NO: 186368 - DNA, 33 bp, Homo sapien
ggcaaacatcatacactctgctttcttattgag

SEQ ID NO: 186369 - DNA, 33 bp, Homo sapien
gtttctcttggtagaagattttcaactctttct

SEQ ID NO: 186370 - DNA, 33 bp, Homo sapien
gtttctcttggtagaatattttcaactctttct

SEQ ID NO: 186371 - DNA, 33 bp, Homo sapien
ttatttgtagctacctaaatcaaactccccaaa

SEQ ID NO: 186372 - DNA, 33 bp, Homo sapien
ttatttgtagctacctgaatcaaactccccaaa

SEQ ID NO: 186373 - DNA, 33 bp, Homo sapien
tccacagcagtttgaagtcgacctggaacactc

SEQ ID NO: 186374 - DNA, 33 bp, Homo sapien
tccacagcagtttgaattcgacctggaacactc

SEQ ID NO: 186375 - DNA, 33 bp, Homo sapien; identical to SEQ ID NO: 186373

SEQ ID NO: 186376 - DNA, 33 bp, Homo sapien; identical to SEQ ID NO: 186374

SEQ ID NO: 186377 - DNA, 33 bp, Homo sapien
tcagcattattcatcaagatataacctaaagca

SEQ ID NO: 186378 - DNA, 33 bp, Homo sapien
tcagcattattcatcaggatataacctaaagca

SEQ ID NO: 186379 - DNA, 33 bp, Homo sapien
tgcattgcttggattcgacacttgaagtccata

SEQ ID NO: 186380 - DNA, 33 bp, Homo sapien
tgcattgcttggattctacacttgaagtccata

SEQ ID NO: 186381 - DNA, 33 bp, Homo sapien
actgtcaagaaaaaccagcctgccaagaccaaa

SEQ ID NO: 186382 - DNA, 33 bp, Homo sapien
actgtcaagaaaaaccggcctgccaagaccaaa

SEQ ID NO: 186383 - DNA, 33 bp, Homo sapien
ttaatatgtgactcaaaatttttgtaaggtcaa

SEQ ID NO: 186384 - DNA, 33 bp, Homo sapien
ttaatatgtgactcaacatttttgtaaggtcaa

SEQ ID NO: 186385 - DNA, 33 bp, Homo sapien
tcccagagtaattgcaaatgatggccaatacta

SEQ ID NO: 186386 - DNA, 33 bp, Homo sapien
tcccagagtaattgcagatgatggccaatacta

SEQ ID NO: 186387 - DNA, 33 bp, Homo sapien
acatagtacctgataaatagttttccagccctc

SEQ ID NO: 186388 - DNA, 33 bp, Homo sapien
acatagtacctgataagtagttttccagccctc

SEQ ID NO: 186389 - DNA, 33 bp, Homo sapien
caggatatacatcgcactgatatgagaaattag

SEQ ID NO: 186390 - DNA, 33 bp, Homo sapien
caggatatacatcgcattgatatgagaaattag

SEQ ID NO: 186391 - DNA, 33 bp, Homo sapien
ttgctaaccagtttccacagaatgatttattga

SEQ ID NO: 186392 - DNA, 33 bp, Homo sapien
ttgctaaccagtttccgcagaatgatttattga

SEQ ID NO: 186393 - DNA, 33 bp, Homo sapien
aaaatggaaacaataccaaaacctctggaatac

SEQ ID NO: 186394 - DNA, 33 bp, Homo sapien
aaaatggaaacaatacgaaaacctctggaatac

SEQ ID NO: 186395 - DNA, 33 bp, Homo sapien
ggcaaagagtttatcaatcttctgagggaagaa

SEQ ID NO: 186396 - DNA, 33 bp, Homo sapien
ggcaaagagtttatcagtcttctgagggaagaa

SEQ ID NO: 186397 - DNA, 33 bp, Homo sapien
tagctcttttaggagaaaatgatttttgttcat

SEQ ID NO: 186398 - DNA, 33 bp, Homo sapien
tagctcttttaggagacaatgatttttgttcat

SEQ ID NO: 186399 - DNA, 33 bp, Homo sapien
gcacatcatcagttaacaaccaatagtcaggtg

SEQ ID NO: 186400 - DNA, 33 bp, Homo sapien
gcacatcatcagttaataaccaatagtcaggtg

SEQ ID NO: 186401 - DNA, 33 bp, Homo sapien
tcatctctactctcaacggttcttattttgaaa

SEQ ID NO: 186402 - DNA, 33 bp, Homo sapien
tcatctctactctcaatggttcttattttgaaa

SEQ ID NO: 186403 - DNA, 33 bp, Homo sapien
tttggttaaatagactaagcaatacatgttatt

SEQ ID NO: 186404 - DNA, 33 bp, Homo sapien
tttggttaaatagactgagcaatacatgttatt

SEQ ID NO: 186405 - DNA, 33 bp, Homo sapien
gatttggccccactccaactttcattcgtatta

SEQ ID NO: 186406 - DNA, 33 bp, Homo sapien
gatttggccccactccgactttcattcgtatta

SEQ ID NO: 186407 - DNA, 33 bp, Homo sapien
agcagtaaagtgcagaatacaatatcaacatac

SEQ ID NO: 186408 - DNA, 33 bp, Homo sapien
agcagtaaagtgcagagtacaatatcaacatac

SEQ ID NO: 186409 - DNA, 33 bp, Homo sapien
ctacaatcagcaggtaacgaagccagtgaggct

SEQ ID NO: 186410 - DNA, 33 bp, Homo sapien
ctacaatcagcaggtagcgaagccagtgaggct

SEQ ID NO: 186411 - DNA, 33 bp, Homo sapien
atcacagaggtccagacaaaaaggtgggcacct

SEQ ID NO: 186412 - DNA, 33 bp, Homo sapien
atcacagaggtccagagaaaaaggtgggcacct

SEQ ID NO: 186413 - DNA, 33 bp, Homo sapien
tatcatcgaatgttaacggactaagcatggaaa

SEQ ID NO: 186414 - DNA, 33 bp, Homo sapien
tatcatcgaatgttaatggactaagcatggaaa

SEQ ID NO: 186415 - DNA, 33 bp, Homo sapien
ggctttcagttttccactaattgagtatgatat

SEQ ID NO: 186416 - DNA, 33 bp, Homo sapien
ggctttcagttttccattaattgagtatgatat

SEQ ID NO: 186417 - DNA, 33 bp, Homo sapien
atggaatttgttgccactagacctactttggaa

SEQ ID NO: 186418 - DNA, 33 bp, Homo sapien
atggaatttgttgccattagacctactttggaa

SEQ ID NO: 186419 - DNA, 33 bp, Homo sapien
aaacacaaaatactcacaatgactggcatatgt

SEQ ID NO: 186420 - DNA, 33 bp, Homo sapien
aaacacaaaatactcataatgactggcatatgt

SEQ ID NO: 186421 - DNA, 33 bp, Homo sapien
atcataagtttcatgaagtctccacagtcacgc

SEQ ID NO: 186422 - DNA, 33 bp, Homo sapien
atcataagtttcatgaggtctccacagtcacgc

SEQ ID NO: 186423 - DNA, 33 bp, Homo sapien
gagaagattcaatcaaagtgtaaatgcatgatg

SEQ ID NO: 186424 - DNA, 33 bp, Homo sapien
gagaagattcaatcaaggtgtaaatgcatgatg

SEQ ID NO: 186425 - DNA, 33 bp, Homo sapien
gtacagtcttcatttccccaggaattatatttt

SEQ ID NO: 186426 - DNA, 33 bp, Homo sapien
gtacagtcttcatttctccaggaattatatttt

SEQ ID NO: 186427 - DNA, 33 bp, Homo sapien
aacacactattacaccactttacagttattagg

SEQ ID NO: 186428 - DNA, 33 bp, Homo sapien
aacacactattacaccgctttacagttattagg

SEQ ID NO: 186429 - DNA, 33 bp, Homo sapien
ccaaacaatgtggaaaattcatcaaagagagac

SEQ ID NO: 186430 - DNA, 33 bp, Homo sapien
ccaaacaatgtggaaagttcatcaaagagagac

SEQ ID NO: 186431 - DNA, 33 bp, Homo sapien
gtatctatacatcattaaagcatagaggtcatc

SEQ ID NO: 186432 - DNA, 33 bp, Homo sapien
gtatctatacatcatttaagcatagaggtcatc

SEQ ID NO: 186433 - DNA, 33 bp, Homo sapien
ccatgttttagcaaataatcttctactggcaga

SEQ ID NO: 186434 - DNA, 33 bp, Homo sapien
ccatgttttagcaaattatcttctactggcaga

SEQ ID NO: 186435 - DNA, 33 bp, Homo sapien
ttttccccacaagtcaatccttgaaaccacctc

SEQ ID NO: 186436 - DNA, 33 bp, Homo sapien
ttttccccacaagtcagtccttgaaaccacctc

SEQ ID NO: 186437 - DNA, 33 bp, Homo sapien
tgacaggacggacaccaataagcaagtctgact

SEQ ID NO: 186438 - DNA, 33 bp, Homo sapien
tgacaggacggacaccgataagcaagtctgact

SEQ ID NO: 186439 - DNA, 33 bp, Homo sapien
ttcttctcaaaaatgacgtagggttagttatgg

SEQ ID NO: 186440 - DNA, 33 bp, Homo sapien
ttcttctcaaaaatgatgtagggttagttatgg

SEQ ID NO: 186441 - DNA, 33 bp, Homo sapien
ttacagtgttccttcacatcaaatagtaattct

SEQ ID NO: 186442 - DNA, 33 bp, Homo sapien
ttacagtgttccttcagatcaaatagtaattct

SEQ ID NO: 186443 - DNA, 33 bp, Homo sapien
aatgagaacctatgaactgtgtctttcaggatg

SEQ ID NO: 186444 - DNA, 33 bp, Homo sapien
aatgagaacctatgaagtgtgtctttcaggatg

SEQ ID NO: 186445 - DNA, 33 bp, Homo sapien
gttgagcacaatttcaaatacctgtttgccatt

SEQ ID NO: 186446 - DNA, 33 bp, Homo sapien
gttgagcacaatttcatatacctgtttgccatt

SEQ ID NO: 186447 - DNA, 33 bp, Homo sapien
acccaaatctcataacaaattgtaatccccaca

SEQ ID NO: 186448 - DNA, 33 bp, Homo sapien
acccaaatctcataaccaattgtaatccccaca

SEQ ID NO: 186449 - DNA, 33 bp, Homo sapien
agtgagttctcatgaagtctgaggatttaaaag

SEQ ID NO: 186450 - DNA, 33 bp, Homo sapien
agtgagttctcatgaattctgaggatttaaaag

SEQ ID NO: 186451 - DNA, 33 bp, Homo sapien
agttccccaggcttaacagcaagcatcaatagg

SEQ ID NO: 186452 - DNA, 33 bp, Homo sapien
agttccccaggcttaatagcaagcatcaatagg

SEQ ID NO: 186453 - DNA, 33 bp, Homo sapien
tgcccgctttcttcacaattattcaacatagta

SEQ ID NO: 186454 - DNA, 33 bp, Homo sapien
tgcccgctttcttcacgattattcaacatagta

SEQ ID NO: 186455 - DNA, 33 bp, Homo sapien
agatatgaaagttatcagaatcttatcccaaat

SEQ ID NO: 186456 - DNA, 33 bp, Homo sapien
agatatgaaagttatcggaatcttatcccaaat

SEQ ID NO: 186457 - DNA, 33 bp, Homo sapien
atgaagtgctgccaatcattagtctattctgag

SEQ ID NO: 186458 - DNA, 33 bp, Homo sapien
atgaagtgctgccaattattagtctattctgag

SEQ ID NO: 186459 - DNA, 33 bp, Homo sapien
ttcaattatgactttacggacctggaatcagaa

SEQ ID NO: 186460 - DNA, 33 bp, Homo sapien
ttcaattatgactttatggacctggaatcagaa

SEQ ID NO: 186461 - DNA, 33 bp, Homo sapien
gagctcttagcctgccaggcaatgcaagatcaa

SEQ ID NO: 186462 - DNA, 33 bp, Homo sapien
gagctcttagcctgccgggcaatgcaagatcaa

SEQ ID NO: 186463 - DNA, 33 bp, Homo sapien
tatgaatattagtgccaaatttttcctgttaat

SEQ ID NO: 186464 - DNA, 33 bp, Homo sapien
tatgaatattagtgccgaatttttcctgttaat

SEQ ID NO: 186465 - DNA, 33 bp, Homo sapien
ctccacattggtaaaacctgaaagtacaacctt

SEQ ID NO: 186466 - DNA, 33 bp, Homo sapien
ctccacattggtaaaatctgaaagtacaacctt

SEQ ID NO: 186467 - DNA, 33 bp, Homo sapien
gtgttaaagttctaacacccagcatgatggtat

SEQ ID NO: 186468 - DNA, 33 bp, Homo sapien
gtgttaaagttctaacccccagcatgatggtat

SEQ ID NO: 186469 - DNA, 33 bp, Homo sapien
tggtgggagaaataccacagagaaaaagtatgg

SEQ ID NO: 186470 - DNA, 33 bp, Homo sapien
tggtgggagaaatacctcagagaaaaagtatgg

SEQ ID NO: 186471 - DNA, 33 bp, Homo sapien
tctggcatatatttaaggaatgttagctgctat

SEQ ID NO: 186472 - DNA, 33 bp, Homo sapien
tctggcatatatttaatgaatgttagctgctat

SEQ ID NO: 186473 - DNA, 33 bp, Homo sapien
atagtaatttgaaatacaagtttaggcagaatt

SEQ ID NO: 186474 - DNA, 33 bp, Homo sapien
atagtaatttgaaatataagtttaggcagaatt

SEQ ID NO: 186475 - DNA, 33 bp, Homo sapien
gctgagtcattggataaggaaaacacacacaca

SEQ ID NO: 186476 - DNA, 33 bp, Homo sapien
gctgagtcattggatacggaaaacacacacaca

SEQ ID NO: 186477 - DNA, 33 bp, Homo sapien
tagataaataaaggcaatatgctcataagcaga

SEQ ID NO: 186478 - DNA, 33 bp, Homo sapien
tagataaataaaggcagtatgctcataagcaga

SEQ ID NO: 186479 - DNA, 33 bp, Homo sapien
gaagtgagctgacagaacttttgtaagatgaca

SEQ ID NO: 186480 - DNA, 33 bp, Homo sapien
gaagtgagctgacagagcttttgtaagatgaca

SEQ ID NO: 186481 - DNA, 33 bp, Homo sapien
tcctttagcaagacccactgcagaagcctgtgc

SEQ ID NO: 186482 - DNA, 33 bp, Homo sapien
tcctttagcaagacccgctgcagaagcctgtgc

SEQ ID NO: 186483 - DNA, 33 bp, Homo sapien
caacaaggaaagaaccagagatcattatgttaa

SEQ ID NO: 186484 - DNA, 33 bp, Homo sapien
caacaaggaaagaaccggagatcattatgttaa

SEQ ID NO: 186485 - DNA, 33 bp, Homo sapien
tgagcataggcgagtccctttttatttatattt

SEQ ID NO: 186486 - DNA, 33 bp, Homo sapien
tgagcataggcgagtcgctttttatttatattt

SEQ ID NO: 186487 - DNA, 33 bp, Homo sapien
gaaagagtcctaaatactaattgtttatgccag

SEQ ID NO: 186488 - DNA, 33 bp, Homo sapien
gaaagagtcctaaatattaattgtttatgccag

SEQ ID NO: 186489 - DNA, 33 bp, Homo sapien
tatgataacagttcagaatcatttaagaatgac

SEQ ID NO: 186490 - DNA, 33 bp, Homo sapien
tatgataacagttcaggatcatttaagaatgac

SEQ ID NO: 186491 - DNA, 33 bp, Homo sapien
aaaagagcaaaaagacaaaggtgttccaattgt

SEQ ID NO: 186492 - DNA, 33 bp, Homo sapien
aaaagagcaaaaagacgaaggtgttccaattgt

SEQ ID NO: 186493 - DNA, 33 bp, Homo sapien
acacgcacaagggataactaacaggcaaagtag

SEQ ID NO: 186494 - DNA, 33 bp, Homo sapien
acacgcacaagggatagctaacaggcaaagtag

SEQ ID NO: 186495 - DNA, 33 bp, Homo sapien
tgtccaattaagtagcactatctgttagaaatg

SEQ ID NO: 186496 - DNA, 33 bp, Homo sapien
tgtccaattaagtagcgctatctgttagaaatg

SEQ ID NO: 186497 - DNA, 33 bp, Homo sapien
gatacatgagaaagaaaggattcggcaaattac

SEQ ID NO: 186498 - DNA, 33 bp, Homo sapien
gatacatgagaaagaatggattcggcaaattac

SEQ ID NO: 186499 - DNA, 33 bp, Homo sapien
aatgccacctgtagtaacctggcctctgtaata

SEQ ID NO: 186500 - DNA, 33 bp, Homo sapien
aatgccacctgtagtagcctggcctctgtaata

SEQ ID NO: 186501 - DNA, 33 bp, Homo sapien
acacagaacttagaaccatgctccaaaaaacta

SEQ ID NO: 186502 - DNA, 33 bp, Homo sapien
acacagaacttagaactatgctccaaaaaacta

SEQ ID NO: 186503 - DNA, 33 bp, Homo sapien
tctttgttctcaactcacctggaatacaaggta

SEQ ID NO: 186504 - DNA, 33 bp, Homo sapien
tctttgttctcaactctcctggaatacaaggta

SEQ ID NO: 186505 - DNA, 33 bp, Homo sapien
tagcattctgacagagaacttaagcagagatgt

SEQ ID NO: 186506 - DNA, 33 bp, Homo sapien
tagcattctgacagaggacttaagcagagatgt

SEQ ID NO: 186507 - DNA, 33 bp, Homo sapien
tatgttagtgttcctccatacatcataccagtg

SEQ ID NO: 186508 - DNA, 33 bp, Homo sapien
tatgttagtgttcctctatacatcataccagtg

SEQ ID NO: 186509 - DNA, 33 bp, Homo sapien
gttgaataggtaaaaactgcacacttatttagt

SEQ ID NO: 186510 - DNA, 33 bp, Homo sapien
gttgaataggtaaaaattgcacacttatttagt

SEQ ID NO: 186511 - DNA, 33 bp, Homo sapien
acctctttatttaaaacgagtcatgagtcaccc

SEQ ID NO: 186512 - DNA, 33 bp, Homo sapien
acctctttatttaaaatgagtcatgagtcaccc

SEQ ID NO: 186513 - DNA, 33 bp, Homo sapien
gagcagaggttttatcagagaacagtcaaaagg

SEQ ID NO: 186514 - DNA, 33 bp, Homo sapien
gagcagaggttttatcggagaacagtcaaaagg

SEQ ID NO: 186515 - DNA, 33 bp, Homo sapien
taggatacacataacacagtaagaaacacacaa

SEQ ID NO: 186516 - DNA, 33 bp, Homo sapien
taggatacacataacagagtaagaaacacacaa

SEQ ID NO: 186517 - DNA, 33 bp, Homo sapien
ttagtgagggtatggccaaacagacaaaattaa

SEQ ID NO: 186518 - DNA, 33 bp, Homo sapien
ttagtgagggtatggctaaacagacaaaattaa

SEQ ID NO: 186519 - DNA, 33 bp, Homo sapien
ttggttataaattctgaactttcgtgaattatt

SEQ ID NO: 186520 - DNA, 33 bp, Homo sapien
ttggttataaattctgcactttcgtgaattatt

SEQ ID NO: 186521 - DNA, 33 bp, Homo sapien
agcacataaatgttcacgtcaatatgatttatt

SEQ ID NO: 186522 - DNA, 33 bp, Homo sapien
agcacataaatgttcatgtcaatatgatttatt

SEQ ID NO: 186523 - DNA, 33 bp, Homo sapien
gagttgtcagtcgacactaaatgaaaagaagga

SEQ ID NO: 186524 - DNA, 33 bp, Homo sapien
gagttgtcagtcgacattaaatgaaaagaagga

SEQ ID NO: 186525 - DNA, 33 bp, Homo sapien
tgtagtttatcctcgaaccaaaacaaattaact

SEQ ID NO: 186526 - DNA, 33 bp, Homo sapien
tgtagtttatcctcgagccaaaacaaattaact

SEQ ID NO: 186527 - DNA, 33 bp, Homo sapien
aaaataatcacattgaatattttgttagattag

SEQ ID NO: 186528 - DNA, 33 bp, Homo sapien
aaaataatcacattgagtattttgttagattag

SEQ ID NO: 186529 - DNA, 33 bp, Homo sapien
agatcagcaaacctaaactcacaggccaaagaa

SEQ ID NO: 186530 - DNA, 33 bp, Homo sapien
agatcagcaaacctaacctcacaggccaaagaa

SEQ ID NO: 186531 - DNA, 33 bp, Homo sapien
tgagggaagaacactgaagaatatccaaattta

SEQ ID NO: 186532 - DNA, 33 bp, Homo sapien
tgagggaagaacactggagaatatccaaattta

SEQ ID NO: 186533 - DNA, 33 bp, Homo sapien
agacgcattacacctaccattaagctcatcttg

SEQ ID NO: 186534 - DNA, 33 bp, Homo sapien
agacgcattacacctatcattaagctcatcttg

SEQ ID NO: 186535 - DNA, 33 bp, Homo sapien
agccacagaaacatgaaaaaaggttgcctccca

SEQ ID NO: 186536 - DNA, 33 bp, Homo sapien
agccacagaaacatgagaaaaggttgcctccca

SEQ ID NO: 186537 - DNA, 33 bp, Homo sapien
taaagtgtttgccaagacataataaatactata

SEQ ID NO: 186538 - DNA, 33 bp, Homo sapien
taaagtgtttgccaagtcataataaatactata

SEQ ID NO: 186539 - DNA, 33 bp, Homo sapien
cgaatagtgttttcacaacttgcctagtgtttc

SEQ ID NO: 186540 - DNA, 33 bp, Homo sapien
cgaatagtgttttcacgacttgcctagtgtttc

SEQ ID NO: 186541 - DNA, 33 bp, Homo sapien
acacacatctataacaaaaatggctccatgatg

SEQ ID NO: 186542 - DNA, 33 bp, Homo sapien
acacacatctataacagaaatggctccatgatg

SEQ ID NO: 186543 - DNA, 33 bp, Homo sapien
ttttggtcttctggcccctagagctatgagaaa

SEQ ID NO: 186544 - DNA, 33 bp, Homo sapien
ttttggtcttctggccgctagagctatgagaaa

SEQ ID NO: 186545 - DNA, 33 bp, Homo sapien
caagctctgtgcactccgagcgaggttcccttc

SEQ ID NO: 186546 - DNA, 33 bp, Homo sapien
caagctctgtgcactctgagcgaggttcccttc

SEQ ID NO: 186547 - DNA, 33 bp, Homo sapien
aattttataaactccaatgcaaacattttatta

SEQ ID NO: 186548 - DNA, 33 bp, Homo sapien
aattttataaactccagtgcaaacattttatta

SEQ ID NO: 186549 - DNA, 33 bp, Homo sapien
aacattcagtcaataacattcagggagtgaaaa

SEQ ID NO: 186550 - DNA, 33 bp, Homo sapien
aacattcagtcaataatattcagggagtgaaaa

SEQ ID NO: 186551 - DNA, 33 bp, Homo sapien
ttcaataaaggatatacgagtggctgtgcttgc

SEQ ID NO: 186552 - DNA, 33 bp, Homo sapien
ttcaataaaggatatatgagtggctgtgcttgc

SEQ ID NO: 186553 - DNA, 33 bp, Homo sapien
ttattttctgagaagggccatacagagatttac

SEQ ID NO: 186554 - DNA, 33 bp, Homo sapien
ttattttctgagaaggtccatacagagatttac

SEQ ID NO: 186555 - DNA, 33 bp, Homo sapien
actttttcaatggtaaagatgtaagtgaggaag

SEQ ID NO: 186556 - DNA, 33 bp, Homo sapien
actttttcaatggtaaggatgtaagtgaggaag

SEQ ID NO: 186557 - DNA, 33 bp, Homo sapien
tgaagctgtgtgtccaccaaaaggaagtaaatg

SEQ ID NO: 186558 - DNA, 33 bp, Homo sapien
tgaagctgtgtgtccagcaaaaggaagtaaatg

SEQ ID NO: 186559 - DNA, 33 bp, Homo sapien
aatttctaagcttaaaaacctcttgtatgtcag

SEQ ID NO: 186560 - DNA, 33 bp, Homo sapien
aatttctaagcttaaacacctcttgtatgtcag

SEQ ID NO: 186561 - DNA, 33 bp, Homo sapien
cacctgcagcctgcaccgacagttttactggca

SEQ ID NO: 186562 - DNA, 33 bp, Homo sapien
cacctgcagcctgcacggacagttttactggca

SEQ ID NO: 186563 - DNA, 33 bp, Homo sapien
accatcagagagcttaggtggtcaggcctccct

SEQ ID NO: 186564 - DNA, 33 bp, Homo sapien
accatcagagagcttatgtggtcaggcctccct

SEQ ID NO: 186565 - DNA, 33 bp, Homo sapien
gggtcactccccagcaactactaccatagctcc

SEQ ID NO: 186566 - DNA, 33 bp, Homo sapien
gggtcactccccagcagctactaccatagctcc

SEQ ID NO: 186567 - DNA, 33 bp, Homo sapien
gactggcagaccagaccggatggtgctcagaac

SEQ ID NO: 186568 - DNA, 33 bp, Homo sapien
gactggcagaccagactggatggtgctcagaac

SEQ ID NO: 186569 - DNA, 33 bp, Homo sapien
ttgtttgcttgttaaaaatttctgccttaatgt

SEQ ID NO: 186570 - DNA, 33 bp, Homo sapien
ttgtttgcttgttaaagatttctgccttaatgt

SEQ ID NO: 186571 - DNA, 33 bp, Homo sapien
agatcaacaaattgacagaaccaaaaatctttg

SEQ ID NO: 186572 - DNA, 33 bp, Homo sapien
agatcaacaaattgactgaaccaaaaatctttg

SEQ ID NO: 186573 - DNA, 33 bp, Homo sapien
atctttctcaaccaaaaatctaaaaggattttt

SEQ ID NO: 186574 - DNA, 33 bp, Homo sapien
atctttctcaaccaaatatctaaaaggattttt

SEQ ID NO: 186575 - DNA, 33 bp, Homo sapien
ccccatctgctgacgaaaacactccgatggatt

SEQ ID NO: 186576 - DNA, 33 bp, Homo sapien
ccccatctgctgacgagaacactccgatggatt

SEQ ID NO: 186577 - DNA, 33 bp, Homo sapien
ggttcccgtgtttgagcatctgaggtgatgggt

SEQ ID NO: 186578 - DNA, 33 bp, Homo sapien
ggttcccgtgtttgagtatctgaggtgatgggt

SEQ ID NO: 186579 - DNA, 33 bp, Homo sapien
ctgctacttccacaaaagttaaaagctgataag

SEQ ID NO: 186580 - DNA, 33 bp, Homo sapien
ctgctacttccacaaaggttaaaagctgataag

SEQ ID NO: 186581 - DNA, 33 bp, Homo sapien
aacctatgagccattaataagaagaataatgat

SEQ ID NO: 186582 - DNA, 33 bp, Homo sapien
aacctatgagccattagtaagaagaataatgat

SEQ ID NO: 186583 - DNA, 33 bp, Homo sapien
aacttttgtattggagaaaaacatccttgtgta

SEQ ID NO: 186584 - DNA, 33 bp, Homo sapien
aacttttgtattggaggaaaacatccttgtgta

SEQ ID NO: 186585 - DNA, 33 bp, Homo sapien
taaacccaatggcaaacacttagtcctcatgtt

SEQ ID NO: 186586 - DNA, 33 bp, Homo sapien
taaacccaatggcaaatacttagtcctcatgtt

SEQ ID NO: 186587 - DNA, 33 bp, Homo sapien
taaaaaagaagatctcaaacaacttaacatttt

SEQ ID NO: 186588 - DNA, 33 bp, Homo sapien
taaaaaagaagatctcgaacaacttaacatttt

SEQ ID NO: 186589 - DNA, 33 bp, Homo sapien
ctcaagtcactagaagaagcaagaataagttaa

SEQ ID NO: 186590 - DNA, 33 bp, Homo sapien
ctcaagtcactagaagcagcaagaataagttaa

SEQ ID NO: 186591 - DNA, 33 bp, Homo sapien
gtgagaatgtaaaacaagaatggagagtcgaag

SEQ ID NO: 186592 - DNA, 33 bp, Homo sapien
gtgagaatgtaaaacaggaatggagagtcgaag

SEQ ID NO: 186593 - DNA, 33 bp, Homo sapien
atttatttaccaatggaacttgaaaaatttttg

SEQ ID NO: 186594 - DNA, 33 bp, Homo sapien
atttatttaccaatgggacttgaaaaatttttg

SEQ ID NO: 186595 - DNA, 33 bp, Homo sapien
caggtagatttatttccgaaagatttctttctt

SEQ ID NO: 186596 - DNA, 33 bp, Homo sapien
caggtagatttatttctgaaagatttctttctt

SEQ ID NO: 186597 - DNA, 33 bp, Homo sapien
agatcgaattcatcaagaaatttacgttttttc

SEQ ID NO: 186598 - DNA, 33 bp, Homo sapien
agatcgaattcatcaataaatttacgttttttc

SEQ ID NO: 186599 - DNA, 33 bp, Homo sapien
agacagatcttttgcccatattttactcatatt

SEQ ID NO: 186600 - DNA, 33 bp, Homo sapien
agacagatcttttgccgatattttactcatatt

SEQ ID NO: 186601 - DNA, 33 bp, Homo sapien
cagtttttacatataactgttggccatctgtgt

SEQ ID NO: 186602 - DNA, 33 bp, Homo sapien
cagtttttacatataattgttggccatctgtgt

SEQ ID NO: 186603 - DNA, 33 bp, Homo sapien
attccctcttggtcaacgtacactttccctcag

SEQ ID NO: 186604 - DNA, 33 bp, Homo sapien
attccctcttggtcaatgtacactttccctcag

SEQ ID NO: 186605 - DNA, 33 bp, Homo sapien
cagagccagaagatacaaagcgcaaggtaattg

SEQ ID NO: 186606 - DNA, 33 bp, Homo sapien
cagagccagaagatacgaagcgcaaggtaattg

SEQ ID NO: 186607 - DNA, 33 bp, Homo sapien
actgtacctcgataacaggccatattcatcatg

SEQ ID NO: 186608 - DNA, 33 bp, Homo sapien
actgtacctcgataactggccatattcatcatg

SEQ ID NO: 186609 - DNA, 33 bp, Homo sapien
ctgtatacgaggtaacgaatgatcaagaaagtt

SEQ ID NO: 186610 - DNA, 33 bp, Homo sapien
ctgtatacgaggtaactaatgatcaagaaagtt

SEQ ID NO: 186611 - DNA, 33 bp, Homo sapien
ccataaggatttcacaatacgacaaatttaaaa

SEQ ID NO: 186612 - DNA, 33 bp, Homo sapien
ccataaggatttcacagtacgacaaatttaaaa

SEQ ID NO: 186613 - DNA, 33 bp, Homo sapien
actactatgtgaatgacactgtgataattattt

SEQ ID NO: 186614 - DNA, 33 bp, Homo sapien
actactatgtgaatgatactgtgataattattt

SEQ ID NO: 186615 - DNA, 33 bp, Homo sapien
tattgatttatacgcactattgaaattttatct

SEQ ID NO: 186616 - DNA, 33 bp, Homo sapien
tattgatttatacgcattattgaaattttatct

SEQ ID NO: 186617 - DNA, 33 bp, Homo sapien
ataagcatggagagaactattgcaaccaccttt

SEQ ID NO: 186618 - DNA, 33 bp, Homo sapien
ataagcatggagagaattattgcaaccaccttt

SEQ ID NO: 186619 - DNA, 33 bp, Homo sapien
aaaacattactttgataactaatcttgcaagta

SEQ ID NO: 186620 - DNA, 33 bp, Homo sapien
aaaacattactttgattactaatcttgcaagta

SEQ ID NO: 186621 - DNA, 33 bp, Homo sapien
cacataaaataaagaacgcattgattctctctg

SEQ ID NO: 186622 - DNA, 33 bp, Homo sapien
cacataaaataaagaaggcattgattctctctg

SEQ ID NO: 186623 - DNA, 33 bp, Homo sapien
aattttttaacttgtgcaaatggagtatgtaaa

SEQ ID NO: 186624 - DNA, 33 bp, Homo sapien
aattttttaacttgtgtaaatggagtatgtaaa

SEQ ID NO: 186625 - DNA, 33 bp, Homo sapien
aatatgtcaaattatacgttgtatctaggtttt

SEQ ID NO: 186626 - DNA, 33 bp, Homo sapien
aatatgtcaaattatatgttgtatctaggtttt

SEQ ID NO: 186627 - DNA, 33 bp, Homo sapien
agtagggttaaaatgaacacaggatacaaacgt

SEQ ID NO: 186628 - DNA, 33 bp, Homo sapien
agtagggttaaaatgagcacaggatacaaacgt

SEQ ID NO: 186629 - DNA, 33 bp, Homo sapien
tagcctggtgttaagcactccactgacaaagcc

SEQ ID NO: 186630 - DNA, 33 bp, Homo sapien
tagcctggtgttaagcgctccactgacaaagcc

SEQ ID NO: 186631 - DNA, 33 bp, Homo sapien
tcagcataatcataaacctcaaaagacacctct

SEQ ID NO: 186632 - DNA, 33 bp, Homo sapien
tcagcataatcataaatctcaaaagacacctct

SEQ ID NO: 186633 - DNA, 33 bp, Homo sapien
tattaattagtattacagatttgagacacattt

SEQ ID NO: 186634 - DNA, 33 bp, Homo sapien
tattaattagtattaccgatttgagacacattt

SEQ ID NO: 186635 - DNA, 33 bp, Homo sapien
gtaacagtgagtgagagaatagggtagggaaag

SEQ ID NO: 186636 - DNA, 33 bp, Homo sapien
gtaacagtgagtgagataatagggtagggaaag

SEQ ID NO: 186637 - DNA, 33 bp, Homo sapien
cttaaagtttggtctgaagaacagcaacatcag

SEQ ID NO: 186638 - DNA, 33 bp, Homo sapien
cttaaagtttggtctgcagaacagcaacatcag

SEQ ID NO: 186639 - DNA, 33 bp, Homo sapien
tctttctatcattcaaatcttgctaaggttacc

SEQ ID NO: 186640 - DNA, 33 bp, Homo sapien
tctttctatcattcaactcttgctaaggttacc

SEQ ID NO: 186641 - DNA, 33 bp, Homo sapien
acgcaaattatagagaagtaaatggatttgtgt

SEQ ID NO: 186642 - DNA, 33 bp, Homo sapien
acgcaaattatagagaggtaaatggatttgtgt

SEQ ID NO: 186643 - DNA, 33 bp, Homo sapien
aacactcttgaaaatcaagtcttcctgtctaca

SEQ ID NO: 186644 - DNA, 33 bp, Homo sapien
aacactcttgaaaatcgagtcttcctgtctaca

SEQ ID NO: 186645 - DNA, 33 bp, Homo sapien
ggatgactctattccacgtctctctttttattc

SEQ ID NO: 186646 - DNA, 33 bp, Homo sapien
ggatgactctattccaggtctctctttttattc

SEQ ID NO: 186647 - DNA, 33 bp, Homo sapien
agttgctgtgagaatcaatcatagaacagcttc

SEQ ID NO: 186648 - DNA, 33 bp, Homo sapien
agttgctgtgagaatccatcatagaacagcttc

SEQ ID NO: 186649 - DNA, 33 bp, Homo sapien
taataaatacgtgggtaaatgtctgttccgggc

SEQ ID NO: 186650 - DNA, 33 bp, Homo sapien
taataaatacgtgggtgaatgtctgttccgggc

SEQ ID NO: 186651 - DNA, 33 bp, Homo sapien
tggggagaagagtggccaatctatctatatctc

SEQ ID NO: 186652 - DNA, 33 bp, Homo sapien
tggggagaagagtggctaatctatctatatctc

SEQ ID NO: 186653 - DNA, 33 bp, Homo sapien
tttgcttccttgtgaaataaacttttaaaggga

SEQ ID NO: 186654 - DNA, 33 bp, Homo sapien
tttgcttccttgtgaactaaacttttaaaggga

SEQ ID NO: 186655 - DNA, 33 bp, Homo sapien
tttctaaaatcagagacatcagtggtaggaaac

SEQ ID NO: 186656 - DNA, 33 bp, Homo sapien
tttctaaaatcagagagatcagtggtaggaaac

SEQ ID NO: 186657 - DNA, 33 bp, Homo sapien
aaatgatggtataaacaattaaaaacacaaaca

SEQ ID NO: 186658 - DNA, 33 bp, Homo sapien
aaatgatggtataaacgattaaaaacacaaaca

SEQ ID NO: 186659 - DNA, 33 bp, Homo sapien
caatctacctatacagaatttctcttcatgata

SEQ ID NO: 186660 - DNA, 33 bp, Homo sapien
caatctacctatacagtatttctcttcatgata

SEQ ID NO: 186661 - DNA, 33 bp, Homo sapien
atattaaggctttcggcaattccactttgtatt

SEQ ID NO: 186662 - DNA, 33 bp, Homo sapien
atattaaggctttcggtaattccactttgtatt

SEQ ID NO: 186663 - DNA, 33 bp, Homo sapien
atctaagtctggaggtcacaaatgatatctctt

SEQ ID NO: 186664 - DNA, 33 bp, Homo sapien
atctaagtctggaggtgacaaatgatatctctt

SEQ ID NO: 186665 - DNA, 33 bp, Homo sapien
aaatgtcgaaatatagacagatgcaaataagaa

SEQ ID NO: 186666 - DNA, 33 bp, Homo sapien
aaatgtcgaaatataggcagatgcaaataagaa

SEQ ID NO: 186667 - DNA, 33 bp, Homo sapien
tagcacaaggatgtgaatacagtaaattgtatg

SEQ ID NO: 186668 - DNA, 33 bp, Homo sapien
tagcacaaggatgtgactacagtaaattgtatg

SEQ ID NO: 186669 - DNA, 33 bp, Homo sapien
actgaacaactcaatcaactgtaagtaaaagat

SEQ ID NO: 186670 - DNA, 33 bp, Homo sapien
actgaacaactcaatctactgtaagtaaaagat

SEQ ID NO: 186671 - DNA, 33 bp, Homo sapien
gatatttcagtgttaacggtagcacataataag

SEQ ID NO: 186672 - DNA, 33 bp, Homo sapien
gatatttcagtgttaatggtagcacataataag

SEQ ID NO: 186673 - DNA, 33 bp, Homo sapien
ttatttcaacccaagaaagaaaatgtctatctt

SEQ ID NO: 186674 - DNA, 33 bp, Homo sapien
ttatttcaacccaagagagaaaatgtctatctt

SEQ ID NO: 186675 - DNA, 33 bp, Homo sapien
ggtgaaaatcagatagcaaaatacacatctcaa

SEQ ID NO: 186676 - DNA, 33 bp, Homo sapien
ggtgaaaatcagatagtaaaatacacatctcaa

SEQ ID NO: 186677 - DNA, 33 bp, Homo sapien
taagcaaatagttgcacattaagagctagaata

SEQ ID NO: 186678 - DNA, 33 bp, Homo sapien
taagcaaatagttgcagattaagagctagaata

SEQ ID NO: 186679 - DNA, 33 bp, Homo sapien
ataaagcatgatgaaaatgccaaatcataattt

SEQ ID NO: 186680 - DNA, 33 bp, Homo sapien
ataaagcatgatgaaagtgccaaatcataattt

SEQ ID NO: 186681 - DNA, 33 bp, Homo sapien
taaaacagtttggtaaacttacagcttggctca

SEQ ID NO: 186682 - DNA, 33 bp, Homo sapien
taaaacagtttggtaatcttacagcttggctca

SEQ ID NO: 186683 - DNA, 33 bp, Homo sapien
cacaagcatacatagacgaatagagtcacacca

SEQ ID NO: 186684 - DNA, 33 bp, Homo sapien
cacaagcatacatagatgaatagagtcacacca

SEQ ID NO: 186685 - DNA, 33 bp, Homo sapien
aacgaagtgatacaaaacatgactactgagaat

SEQ ID NO: 186686 - DNA, 33 bp, Homo sapien
aacgaagtgatacaaagcatgactactgagaat

SEQ ID NO: 186687 - DNA, 33 bp, Homo sapien
aaaggaaaaagggcagaagctaaccattcttgg

SEQ ID NO: 186688 - DNA, 33 bp, Homo sapien
aaaggaaaaagggcaggagctaaccattcttgg

SEQ ID NO: 186689 - DNA, 33 bp, Homo sapien
gaaattcacattagccaattctaagaactaggg

SEQ ID NO: 186690 - DNA, 33 bp, Homo sapien
gaaattcacattagccgattctaagaactaggg

SEQ ID NO: 186691 - DNA, 33 bp, Homo sapien
ttacacaaataagtaaatgaacataaaaagtgt

SEQ ID NO: 186692 - DNA, 33 bp, Homo sapien
ttacacaaataagtaagtgaacataaaaagtgt

SEQ ID NO: 186693 - DNA, 33 bp, Homo sapien
ggtctggtggataagaaagcaatgaaatatata

SEQ ID NO: 186694 - DNA, 33 bp, Homo sapien
ggtctggtggataagacagcaatgaaatatata

SEQ ID NO: 186695 - DNA, 33 bp, Homo sapien
tacttcaacaatgtgaactctagctgccgccaa

SEQ ID NO: 186696 - DNA, 33 bp, Homo sapien
tacttcaacaatgtgagctctagctgccgccaa

SEQ ID NO: 186697 - DNA, 33 bp, Homo sapien
agcacagcacggatacactactgccctccacag

SEQ ID NO: 186698 - DNA, 33 bp, Homo sapien
agcacagcacggatacgctactgccctccacag

SEQ ID NO: 186699 - DNA, 33 bp, Homo sapien
gttttcatagtaataacattgctaacatactgt

SEQ ID NO: 186700 - DNA, 33 bp, Homo sapien
gttttcatagtaataagattgctaacatactgt

SEQ ID NO: 186701 - DNA, 33 bp, Homo sapien
atcataggcacatgaaagcaaaatgtactggtg

SEQ ID NO: 186702 - DNA, 33 bp, Homo sapien
atcataggcacatgaacgcaaaatgtactggtg

SEQ ID NO: 186703 - DNA, 33 bp, Homo sapien
ttattcataggtacaacgctgatggctcttctg

SEQ ID NO: 186704 - DNA, 33 bp, Homo sapien
ttattcataggtacaaggctgatggctcttctg

SEQ ID NO: 186705 - DNA, 33 bp, Homo sapien
atcggtgtactcagtcaacaaccctggatccaa

SEQ ID NO: 186706 - DNA, 33 bp, Homo sapien
atcggtgtactcagtcgacaaccctggatccaa

SEQ ID NO: 186707 - DNA, 33 bp, Homo sapien
gtgctttgtcagtgaacggtaatattttgaaag

SEQ ID NO: 186708 - DNA, 33 bp, Homo sapien
gtgctttgtcagtgaatggtaatattttgaaag

SEQ ID NO: 186709 - DNA, 33 bp, Homo sapien
tggtattgcatatagccgagcaattgatcaatt

SEQ ID NO: 186710 - DNA, 33 bp, Homo sapien
tggtattgcatatagctgagcaattgatcaatt

SEQ ID NO: 186711 - DNA, 33 bp, Homo sapien
ttctgtttaccttgtcacttttgtaggaaatgc

SEQ ID NO: 186712 - DNA, 33 bp, Homo sapien
ttctgtttaccttgtcgcttttgtaggaaatgc

SEQ ID NO: 186713 - DNA, 33 bp, Homo sapien
tgaggttcagcagaagcctcgaatgggaaagtg

SEQ ID NO: 186714 - DNA, 33 bp, Homo sapien
tgaggttcagcagaagtctcgaatgggaaagtg

SEQ ID NO: 186715 - DNA, 33 bp, Homo sapien
tctgtctagatcctgcaactcttgtttgatgca

SEQ ID NO: 186716 - DNA, 33 bp, Homo sapien
tctgtctagatcctgcgactcttgtttgatgca

SEQ ID NO: 186717 - DNA, 33 bp, Homo sapien
gccatggtatttcagacgactccagttataaag

SEQ ID NO: 186718 - DNA, 33 bp, Homo sapien
gccatggtatttcagatgactccagttataaag

SEQ ID NO: 186719 - DNA, 33 bp, Homo sapien
tcagccataaagataccgctgttcactggtggg

SEQ ID NO: 186720 - DNA, 33 bp, Homo sapien
tcagccataaagatactgctgttcactggtggg

SEQ ID NO: 186721 - DNA, 33 bp, Homo sapien
cattcatgctccttcccatgactaaactttctt

SEQ ID NO: 186722 - DNA, 33 bp, Homo sapien
cattcatgctccttcctatgactaaactttctt

SEQ ID NO: 186723 - DNA, 33 bp, Homo sapien
gcatgaatgaagagcaacttaagtttggaaagg

SEQ ID NO: 186724 - DNA, 33 bp, Homo sapien
gcatgaatgaagagcatcttaagtttggaaagg

SEQ ID NO: 186725 - DNA, 33 bp, Homo sapien
tttatcaagatacttcaaaattcgttataattt

SEQ ID NO: 186726 - DNA, 33 bp, Homo sapien
tttatcaagatacttctaaattcgttataattt

SEQ ID NO: 186727 - DNA, 33 bp, Homo sapien
gaagctaaaatagagaaaggcagtttattaggg

SEQ ID NO: 186728 - DNA, 33 bp, Homo sapien
gaagctaaaatagagagaggcagtttattaggg

SEQ ID NO: 186729 - DNA, 33 bp, Homo sapien
ctgcttggtcctcaaaagatatatgacagcaag

SEQ ID NO: 186730 - DNA, 33 bp, Homo sapien
ctgcttggtcctcaaaggatatatgacagcaag

SEQ ID NO: 186731 - DNA, 33 bp, Homo sapien
cattctagtaggagaaaaagataactaagatgt

SEQ ID NO: 186732 - DNA, 33 bp, Homo sapien
cattctagtaggagaagaagataactaagatgt

SEQ ID NO: 186733 - DNA, 33 bp, Homo sapien
tgggacaatttcagcaaataagtaagtaagtaa

SEQ ID NO: 186734 - DNA, 33 bp, Homo sapien
tgggacaatttcagcagataagtaagtaagtaa

SEQ ID NO: 186735 - DNA, 33 bp, Homo sapien
gcattcttcatgtacactgggcataaagtgaat

SEQ ID NO: 186736 - DNA, 33 bp, Homo sapien
gcattcttcatgtacattgggcataaagtgaat

SEQ ID NO: 186737 - DNA, 33 bp, Homo sapien
acatatgctctagaaaagtttctccaaaatgca

SEQ ID NO: 186738 - DNA, 33 bp, Homo sapien
acatatgctctagaaaggtttctccaaaatgca

SEQ ID NO: 186739 - DNA, 33 bp, Homo sapien
tcacctgcttcaccacagaaattttaaattcag

SEQ ID NO: 186740 - DNA, 33 bp, Homo sapien
tcacctgcttcaccacggaaattttaaattcag

SEQ ID NO: 186741 - DNA, 33 bp, Homo sapien
tgaagtgggttaatcagtcagcagatttcagga

SEQ ID NO: 186742 - DNA, 33 bp, Homo sapien
tgaagtgggttaatcattcagcagatttcagga

SEQ ID NO: 186743 - DNA, 33 bp, Homo sapien
ttgagattcatacatcaaggacaaagcctctgt

SEQ ID NO: 186744 - DNA, 33 bp, Homo sapien
ttgagattcatacatcgaggacaaagcctctgt

SEQ ID NO: 186745 - DNA, 33 bp, Homo sapien
aatcattgattgaagaaaacttcccatgtataa

SEQ ID NO: 186746 - DNA, 33 bp, Homo sapien
aatcattgattgaagagaacttcccatgtataa

SEQ ID NO: 186747 - DNA, 33 bp, Homo sapien
gagcactggacccagaaacaagaactgaggtta

SEQ ID NO: 186748 - DNA, 33 bp, Homo sapien
gagcactggacccagagacaagaactgaggtta

SEQ ID NO: 186749 - DNA, 33 bp, Homo sapien
tcttgaattgtaagcaccataatgcccacgtgt

SEQ ID NO: 186750 - DNA, 33 bp, Homo sapien
tcttgaattgtaagcagcataatgcccacgtgt

SEQ ID NO: 186751 - DNA, 33 bp, Homo sapien
tgtgtatataagaaaacgtatcttgccgaggaa

SEQ ID NO: 186752 - DNA, 33 bp, Homo sapien
tgtgtatataagaaaatgtatcttgccgaggaa

SEQ ID NO: 186753 - DNA, 33 bp, Homo sapien
catgaagactattcaacttccaacaatttttat

SEQ ID NO: 186754 - DNA, 33 bp, Homo sapien
catgaagactattcaatttccaacaatttttat

SEQ ID NO: 186755 - DNA, 33 bp, Homo sapien
attaatcaagtgatgaatcaatatacttaccat

SEQ ID NO: 186756 - DNA, 33 bp, Homo sapien
attaatcaagtgatgagtcaatatacttaccat

SEQ ID NO: 186757 - DNA, 33 bp, Homo sapien
agaagaactgatgacacgcttaatcattgtagt

SEQ ID NO: 186758 - DNA, 33 bp, Homo sapien
agaagaactgatgacaggcttaatcattgtagt

SEQ ID NO: 186759 - DNA, 33 bp, Homo sapien
gattttctatgcccacaatttgatatgcaactt

SEQ ID NO: 186760 - DNA, 33 bp, Homo sapien
gattttctatgcccactatttgatatgcaactt

SEQ ID NO: 186761 - DNA, 33 bp, Homo sapien
atcttgataactcacaatctcaggaacctgctt

SEQ ID NO: 186762 - DNA, 33 bp, Homo sapien
atcttgataactcacagtctcaggaacctgctt

SEQ ID NO: 186763 - DNA, 33 bp, Homo sapien
ttaggcaaaaggaatacaaataacacacataaa

SEQ ID NO: 186764 - DNA, 33 bp, Homo sapien
ttaggcaaaaggaatataaataacacacataaa

SEQ ID NO: 186765 - DNA, 33 bp, Homo sapien
cttcttttagtaggcaagttatcctgaaaatta

SEQ ID NO: 186766 - DNA, 33 bp, Homo sapien
cttcttttagtaggcaggttatcctgaaaatta

SEQ ID NO: 186767 - DNA, 33 bp, Homo sapien
aataaatcttttcctacagttttggcacaatca

SEQ ID NO: 186768 - DNA, 33 bp, Homo sapien
aataaatcttttcctagagttttggcacaatca

SEQ ID NO: 186769 - DNA, 33 bp, Homo sapien
aaaactgaaaaaaaaaatgccaagtgaacctgc

SEQ ID NO: 186770 - DNA, 33 bp, Homo sapien
aaaactgaaaaaaaaagtgccaagtgaacctgc

SEQ ID NO: 186771 - DNA, 33 bp, Homo sapien
taatgttggagggttacgtttggagagccatta

SEQ ID NO: 186772 - DNA, 33 bp, Homo sapien
taatgttggagggttatgtttggagagccatta

SEQ ID NO: 186773 - DNA, 33 bp, Homo sapien
aaattagtgtctgtctcaattagaatgactcta

SEQ ID NO: 186774 - DNA, 33 bp, Homo sapien
aaattagtgtctgtctgaattagaatgactcta

SEQ ID NO: 186775 - DNA, 33 bp, Homo sapien
cacagacagaaatctaagggttgtgtcttacta

SEQ ID NO: 186776 - DNA, 33 bp, Homo sapien
cacagacagaaatctatgggttgtgtcttacta

SEQ ID NO: 186777 - DNA, 33 bp, Homo sapien
acaaaactcttctgaacatatggaaactgaata

SEQ ID NO: 186778 - DNA, 33 bp, Homo sapien
acaaaactcttctgaatatatggaaactgaata

SEQ ID NO: 186779 - DNA, 33 bp, Homo sapien
attttgtctcagaactaaaagatgactattttt

SEQ ID NO: 186780 - DNA, 33 bp, Homo sapien
attttgtctcagaactcaaagatgactattttt

SEQ ID NO: 186781 - DNA, 33 bp, Homo sapien
tagttcacaatttttaagcatgaaggactgtaa

SEQ ID NO: 186782 - DNA, 33 bp, Homo sapien
tagttcacaatttttaggcatgaaggactgtaa

SEQ ID NO: 186783 - DNA, 33 bp, Homo sapien
tgctcatgtcaaactacgtctaaatatcttggc

SEQ ID NO: 186784 - DNA, 33 bp, Homo sapien
tgctcatgtcaaactatgtctaaatatcttggc

SEQ ID NO: 186785 - DNA, 33 bp, Homo sapien
ataggaaaccatcaaactgacagtgcctattct

SEQ ID NO: 186786 - DNA, 33 bp, Homo sapien
ataggaaaccatcaaagtgacagtgcctattct

SEQ ID NO: 186787 - DNA, 33 bp, Homo sapien
tgccaccaccatgtacaaagaacctttcacctc

SEQ ID NO: 186788 - DNA, 33 bp, Homo sapien
tgccaccaccatgtacgaagaacctttcacctc

SEQ ID NO: 186789 - DNA, 33 bp, Homo sapien
atgtcctggaagttcacgggtggagaaatggca

SEQ ID NO: 186790 - DNA, 33 bp, Homo sapien
atgtcctggaagttcatgggtggagaaatggca

SEQ ID NO: 186791 - DNA, 33 bp, Homo sapien
gaaatgtgtagtgaaccggaaattcctacatca

SEQ ID NO: 186792 - DNA, 33 bp, Homo sapien
gaaatgtgtagtgaactggaaattcctacatca

SEQ ID NO: 186793 - DNA, 33 bp, Homo sapien
tctttcataggccagactccagataatgatgta

SEQ ID NO: 186794 - DNA, 33 bp, Homo sapien
tctttcataggccagattccagataatgatgta

SEQ ID NO: 186795 - DNA, 33 bp, Homo sapien
atgtatttaatagcagcattgagcagggttgga

SEQ ID NO: 186796 - DNA, 33 bp, Homo sapien
atgtatttaatagcaggattgagcagggttgga

SEQ ID NO: 186797 - DNA, 33 bp, Homo sapien
gatgaggaagaagtaacgctctcaaatactgga

SEQ ID NO: 186798 - DNA, 33 bp, Homo sapien
gatgaggaagaagtaatgctctcaaatactgga

SEQ ID NO: 186799 - DNA, 33 bp, Homo sapien
agctacatatccattcacttaatcacaaggtat

SEQ ID NO: 186800 - DNA, 33 bp, Homo sapien
agctacatatccattctcttaatcacaaggtat

SEQ ID NO: 186801 - DNA, 33 bp, Homo sapien
agctatatgccaatctaaaaaatgaaagctact

SEQ ID NO: 186802 - DNA, 33 bp, Homo sapien
agctatatgccaatctgaaaaatgaaagctact

SEQ ID NO: 186803 - DNA, 33 bp, Homo sapien
ttcatgcctaccaaaaaactttctgaataatat

SEQ ID NO: 186804 - DNA, 33 bp, Homo sapien
ttcatgcctaccaaaacactttctgaataatat

SEQ ID NO: 186805 - DNA, 33 bp, Homo sapien
ataaaatggataaagcagcaatggaatttatta

SEQ ID NO: 186806 - DNA, 33 bp, Homo sapien
ataaaatggataaagcggcaatggaatttatta

SEQ ID NO: 186807 - DNA, 33 bp, Homo sapien
gtcttttttatcttaaggccctcatagactgga

SEQ ID NO: 186808 - DNA, 33 bp, Homo sapien
gtcttttttatcttaatgccctcatagactgga

SEQ ID NO: 186809 - DNA, 33 bp, Homo sapien
aacaccagctaagttgcattatgtaagaaactc

SEQ ID NO: 186810 - DNA, 33 bp, Homo sapien
aacaccagctaagttgtattatgtaagaaactc

SEQ ID NO: 186811 - DNA, 33 bp, Homo sapien
tggtatatggttgatacggtttgactttgtgtc

SEQ ID NO: 186812 - DNA, 33 bp, Homo sapien
tggtatatggttgatatggtttgactttgtgtc

SEQ ID NO: 186813 - DNA, 33 bp, Homo sapien
cattgtcccttctcacgctgctataaagatact

SEQ ID NO: 186814 - DNA, 33 bp, Homo sapien
cattgtcccttctcactctgctataaagatact

SEQ ID NO: 186815 - DNA, 33 bp, Homo sapien
acagtattggaacggcacgggtagagaccatgg

SEQ ID NO: 186816 - DNA, 33 bp, Homo sapien
acagtattggaacggcgcgggtagagaccatgg

SEQ ID NO: 186817 - DNA, 33 bp, Homo sapien
tctgtgttagacacaacatttggcattccacat

SEQ ID NO: 186818 - DNA, 33 bp, Homo sapien
tctgtgttagacacaagatttggcattccacat

SEQ ID NO: 186819 - DNA, 33 bp, Homo sapien
atagacaagaaggatacgagaatcaccactcca

SEQ ID NO: 186820 - DNA, 33 bp, Homo sapien
atagacaagaaggataggagaatcaccactcca

SEQ ID NO: 186821 - DNA, 33 bp, Homo sapien
ttgatattgagccatgaaacacaaaatgaggtg

SEQ ID NO: 186822 - DNA, 33 bp, Homo sapien
ttgatattgagccatgcaacacaaaatgaggtg

SEQ ID NO: 186823 - DNA, 33 bp, Homo sapien
agtagaggagatcccacaaatgtatcacatact

SEQ ID NO: 186824 - DNA, 33 bp, Homo sapien
agtagaggagatcccagaaatgtatcacatact

SEQ ID NO: 186825 - DNA, 33 bp, Homo sapien
tgcaagcgcaagcacaagtgaatgatatttaaa

SEQ ID NO: 186826 - DNA, 33 bp, Homo sapien
tgcaagcgcaagcacacgtgaatgatatttaaa

SEQ ID NO: 186827 - DNA, 33 bp, Homo sapien
ttgcagctgaaaaagcacaaagtagaggaactc

SEQ ID NO: 186828 - DNA, 33 bp, Homo sapien
ttgcagctgaaaaagcgcaaagtagaggaactc

SEQ ID NO: 186829 - DNA, 33 bp, Homo sapien
aatagtgctctaatgaatacacacatgcatgca

SEQ ID NO: 186830 - DNA, 33 bp, Homo sapien
aatagtgctctaatgagtacacacatgcatgca

SEQ ID NO: 186831 - DNA, 33 bp, Homo sapien
ggataaagaaccacgaaccattcatatgctgtc

SEQ ID NO: 186832 - DNA, 33 bp, Homo sapien
ggataaagaaccacgacccattcatatgctgtc

SEQ ID NO: 186833 - DNA, 33 bp, Homo sapien
tttgtgtactacacacactctgttgcaactact

SEQ ID NO: 186834 - DNA, 33 bp, Homo sapien
tttgtgtactacacactctctgttgcaactact

SEQ ID NO: 186835 - DNA, 33 bp, Homo sapien
atgagaataaataatccgaaacaagttgtgatg

SEQ ID NO: 186836 - DNA, 33 bp, Homo sapien
atgagaataaataatctgaaacaagttgtgatg

SEQ ID NO: 186837 - DNA, 33 bp, Homo sapien
cctaatacttgcttaaatgaatcaggattctaa

SEQ ID NO: 186838 - DNA, 33 bp, Homo sapien
cctaatacttgcttaagtgaatcaggattctaa

SEQ ID NO: 186839 - DNA, 33 bp, Homo sapien
acacatggggtatttacgtaattcttaaacaat

SEQ ID NO: 186840 - DNA, 33 bp, Homo sapien
acacatggggtatttatgtaattcttaaacaat

SEQ ID NO: 186841 - DNA, 33 bp, Homo sapien
tctcttggcttcaataatattctagcttcttct

SEQ ID NO: 186842 - DNA, 33 bp, Homo sapien
tctcttggcttcaatagtattctagcttcttct

SEQ ID NO: 186843 - DNA, 33 bp, Homo sapien
atagtgttgttggaaactggtttaacttattgg

SEQ ID NO: 186844 - DNA, 33 bp, Homo sapien
atagtgttgttggaaagtggtttaacttattgg

SEQ ID NO: 186845 - DNA, 33 bp, Homo sapien
agacagatcgggcttaccattgtttatttcata

SEQ ID NO: 186846 - DNA, 33 bp, Homo sapien
agacagatcgggcttatcattgtttatttcata

SEQ ID NO: 186847 - DNA, 33 bp, Homo sapien
cagtaaacctaaaatgcaaacatcacttttacc

SEQ ID NO: 186848 - DNA, 33 bp, Homo sapien
cagtaaacctaaaatggaaacatcacttttacc

SEQ ID NO: 186849 - DNA, 33 bp, Homo sapien
tggcataaaatattgaggtgtttatctttgatg

SEQ ID NO: 186850 - DNA, 33 bp, Homo sapien
tggcataaaatattgatgtgtttatctttgatg

SEQ ID NO: 186851 - DNA, 33 bp, Homo sapien
gtctaatagtagataaccggcagccctaagatg

SEQ ID NO: 186852 - DNA, 33 bp, Homo sapien
gtctaatagtagataatcggcagccctaagatg

SEQ ID NO: 186853 - DNA, 33 bp, Homo sapien
attctcataagtataacaagcgtaagctagagg

SEQ ID NO: 186854 - DNA, 33 bp, Homo sapien
attctcataagtataagaagcgtaagctagagg

SEQ ID NO: 186855 - DNA, 33 bp, Homo sapien
ttttcggaatcttttacacctccgatttgcctt

SEQ ID NO: 186856 - DNA, 33 bp, Homo sapien
ttttcggaatcttttatacctccgatttgcctt

SEQ ID NO: 186857 - DNA, 33 bp, Homo sapien
ttcatcccaatcaccacagtagtttgctaatga

SEQ ID NO: 186858 - DNA, 33 bp, Homo sapien
ttcatcccaatcaccagagtagtttgctaatga

SEQ ID NO: 186859 - DNA, 33 bp, Homo sapien
taactgaataaatgaaaagataaattggtcagt

SEQ ID NO: 186860 - DNA, 33 bp, Homo sapien
taactgaataaatgaacagataaattggtcagt

SEQ ID NO: 186861 - DNA, 33 bp, Homo sapien
caagaatgtttgatggcattttttaagtcacac

SEQ ID NO: 186862 - DNA, 33 bp, Homo sapien
caagaatgtttgatggtattttttaagtcacac

SEQ ID NO: 186863 - DNA, 33 bp, Homo sapien
taaagggcttcattaaaattctgatttcataat

SEQ ID NO: 186864 - DNA, 33 bp, Homo sapien
taaagggcttcattaacattctgatttcataat

SEQ ID NO: 186865 - DNA, 33 bp, Homo sapien
gatgacatcatgagggaaaggtgtgtgttatgg

SEQ ID NO: 186866 - DNA, 33 bp, Homo sapien
gatgacatcatgaggggaaggtgtgtgttatgg

SEQ ID NO: 186867 - DNA, 33 bp, Homo sapien
gtcactgcctttctcagcaagataaagagaagg

SEQ ID NO: 186868 - DNA, 33 bp, Homo sapien
gtcactgcctttctcatcaagataaagagaagg

SEQ ID NO: 186869 - DNA, 33 bp, Homo sapien
cagctcaagattaatacagtgtagtcaaacatc

SEQ ID NO: 186870 - DNA, 33 bp, Homo sapien
cagctcaagattaatatagtgtagtcaaacatc

SEQ ID NO: 186871 - DNA, 33 bp, Homo sapien
cccttcagattaattaagccttttgcatgcagt

SEQ ID NO: 186872 - DNA, 33 bp, Homo sapien
cccttcagattaattacgccttttgcatgcagt

SEQ ID NO: 186873 - DNA, 33 bp, Homo sapien
tacggatctgattccaatcactgtttatctcat

SEQ ID NO: 186874 - DNA, 33 bp, Homo sapien
tacggatctgattccagtcactgtttatctcat

SEQ ID NO: 186875 - DNA, 33 bp, Homo sapien
cacattgctacaaaagacatagtaacatacttt

SEQ ID NO: 186876 - DNA, 33 bp, Homo sapien
cacattgctacaaaagtcatagtaacatacttt

SEQ ID NO: 186877 - DNA, 33 bp, Homo sapien
ggatggttcttttgaaaacagctggcagatggg

SEQ ID NO: 186878 - DNA, 33 bp, Homo sapien
ggatggttcttttgaagacagctggcagatggg

SEQ ID NO: 186879 - DNA, 33 bp, Homo sapien
tacacagttttctgaactgcctgattaactctg

SEQ ID NO: 186880 - DNA, 33 bp, Homo sapien
tacacagttttctgaagtgcctgattaactctg

SEQ ID NO: 186881 - DNA, 33 bp, Homo sapien
actccaaccttgtacacagaacatggaactgag

SEQ ID NO: 186882 - DNA, 33 bp, Homo sapien
actccaaccttgtacatagaacatggaactgag

SEQ ID NO: 186883 - DNA, 33 bp, Homo sapien
aggtcttgttaccctgaagaaaccacagctgta

SEQ ID NO: 186884 - DNA, 33 bp, Homo sapien
aggtcttgttaccctggagaaaccacagctgta

SEQ ID NO: 186885 - DNA, 33 bp, Homo sapien
tggaagcaaaacactacggtaaatgaaatcctt

SEQ ID NO: 186886 - DNA, 33 bp, Homo sapien
tggaagcaaaacactatggtaaatgaaatcctt

SEQ ID NO: 186887 - DNA, 33 bp, Homo sapien
cagatgagtgaatttaaatggacttttacaggt

SEQ ID NO: 186888 - DNA, 33 bp, Homo sapien
cagatgagtgaatttagatggacttttacaggt

SEQ ID NO: 186889 - DNA, 33 bp, Homo sapien
ggtccatttattctcccatcatacaggacggat

SEQ ID NO: 186890 - DNA, 33 bp, Homo sapien
ggtccatttattctcctatcatacaggacggat

SEQ ID NO: 186891 - DNA, 33 bp, Homo sapien
attttaccctgaggaaatgaaaaagtgaagagc

SEQ ID NO: 186892 - DNA, 33 bp, Homo sapien
attttaccctgaggaactgaaaaagtgaagagc

SEQ ID NO: 186893 - DNA, 33 bp, Homo sapien
gcagacgtaaggaagacgcaggttcgtcagaga

SEQ ID NO: 186894 - DNA, 33 bp, Homo sapien
gcagacgtaaggaagatgcaggttcgtcagaga

SEQ ID NO: 186895 - DNA, 33 bp, Homo sapien
tttaaacatcacaacacaatcactaaatttgct

SEQ ID NO: 186896 - DNA, 33 bp, Homo sapien
tttaaacatcacaacataatcactaaatttgct

SEQ ID NO: 186897 - DNA, 33 bp, Homo sapien
taatacttgagtagcaaataatcaaagatgttt

SEQ ID NO: 186898 - DNA, 33 bp, Homo sapien
taatacttgagtagcagataatcaaagatgttt

SEQ ID NO: 186899 - DNA, 33 bp, Homo sapien
aattcatttcactaatcagactctgttttctaa

SEQ ID NO: 186900 - DNA, 33 bp, Homo sapien
aattcatttcactaattagactctgttttctaa

SEQ ID NO: 186901 - DNA, 33 bp, Homo sapien
tgagagtgcagactctaaatttttctagtttga

SEQ ID NO: 186902 - DNA, 33 bp, Homo sapien
tgagagtgcagactcttaatttttctagtttga

SEQ ID NO: 186903 - DNA, 33 bp, Homo sapien
gcacgtaatattctaaccttaaccctctccata

SEQ ID NO: 186904 - DNA, 33 bp, Homo sapien
gcacgtaatattctaatcttaaccctctccata

SEQ ID NO: 186905 - DNA, 33 bp, Homo sapien
ctttccatcacccaaacggcaatcatagtcact

SEQ ID NO: 186906 - DNA, 33 bp, Homo sapien
ctttccatcacccaaatggcaatcatagtcact

SEQ ID NO: 186907 - DNA, 33 bp, Homo sapien
atttacaatatacagcagaagtagaagtgacta

SEQ ID NO: 186908 - DNA, 33 bp, Homo sapien
atttacaatatacagcggaagtagaagtgacta

SEQ ID NO: 186909 - DNA, 33 bp, Homo sapien
ctgggctaaggtgatacactctcctcacccccc

SEQ ID NO: 186910 - DNA, 33 bp, Homo sapien
ctgggctaaggtgatatactctcctcacccccc

SEQ ID NO: 186911 - DNA, 33 bp, Homo sapien
cttactgtacagatcaagtcttcttctatggta

SEQ ID NO: 186912 - DNA, 33 bp, Homo sapien
cttactgtacagatcaggtcttcttctatggta

SEQ ID NO: 186913 - DNA, 33 bp, Homo sapien
aacattaacccacccagaactggtatggagccg

SEQ ID NO: 186914 - DNA, 33 bp, Homo sapien
aacattaacccacccataactggtatggagccg

SEQ ID NO: 186915 - DNA, 33 bp, Homo sapien
attctgccttagatcaaccatcatcttgcttgg

SEQ ID NO: 186916 - DNA, 33 bp, Homo sapien
attctgccttagatcagccatcatcttgcttgg

SEQ ID NO: 186917 - DNA, 33 bp, Homo sapien
agtctctcaattgccacatttacaagcttctta

SEQ ID NO: 186918 - DNA, 33 bp, Homo sapien
agtctctcaattgccatatttacaagcttctta

SEQ ID NO: 186919 - DNA, 33 bp, Homo sapien
taagtcagatacaaaagaatttccttttcaaag

SEQ ID NO: 186920 - DNA, 33 bp, Homo sapien
taagtcagatacaaaataatttccttttcaaag

SEQ ID NO: 186921 - DNA, 33 bp, Homo sapien
cttggaagtaggggacaaagaacagggatgctg

SEQ ID NO: 186922 - DNA, 33 bp, Homo sapien
cttggaagtaggggacgaagaacagggatgctg

SEQ ID NO: 186923 - DNA, 33 bp, Homo sapien
ctggttccctcctaagacatgtggagattatgg

SEQ ID NO: 186924 - DNA, 33 bp, Homo sapien
ctggttccctcctaagtcatgtggagattatgg

SEQ ID NO: 186925 - DNA, 33 bp, Homo sapien
ataacaaacatgttaacaagtggcctacgtata

SEQ ID NO: 186926 - DNA, 33 bp, Homo sapien
ataacaaacatgttaataagtggcctacgtata

SEQ ID NO: 186927 - DNA, 33 bp, Homo sapien
gctgctatgggattagaatataaatcttcaagt

SEQ ID NO: 186928 - DNA, 33 bp, Homo sapien
gctgctatgggattagtatataaatcttcaagt

SEQ ID NO: 186929 - DNA, 33 bp, Homo sapien
atttatgtcaatctaacgggacctatacaattt

SEQ ID NO: 186930 - DNA, 33 bp, Homo sapien
atttatgtcaatctaatgggacctatacaattt

SEQ ID NO: 186931 - DNA, 33 bp, Homo sapien
gtaagtagtttatgaagccctttctgatgatga

SEQ ID NO: 186932 - DNA, 33 bp, Homo sapien
gtaagtagtttatgaatccctttctgatgatga

SEQ ID NO: 186933 - DNA, 33 bp, Homo sapien
ttcctgctctagatgaatatgtgatctggtagg

SEQ ID NO: 186934 - DNA, 33 bp, Homo sapien
ttcctgctctagatgagtatgtgatctggtagg

SEQ ID NO: 186935 - DNA, 33 bp, Homo sapien
aaatttcagaaaagaaaggtgaattgtaaatta

SEQ ID NO: 186936 - DNA, 33 bp, Homo sapien
aaatttcagaaaagaagggtgaattgtaaatta

SEQ ID NO: 186937 - DNA, 33 bp, Homo sapien
catataaacctcaatccagtaaacatttgaaac

SEQ ID NO: 186938 - DNA, 33 bp, Homo sapien
catataaacctcaatctagtaaacatttgaaac

SEQ ID NO: 186939 - DNA, 33 bp, Homo sapien
cattagagtagcattacggtgaatatttctcaa

SEQ ID NO: 186940 - DNA, 33 bp, Homo sapien
cattagagtagcattatggtgaatatttctcaa

SEQ ID NO: 186941 - DNA, 33 bp, Homo sapien
ccataattgaaaattccgaaccaagattagaga

SEQ ID NO: 186942 - DNA, 33 bp, Homo sapien
ccataattgaaaattctgaaccaagattagaga

SEQ ID NO: 186943 - DNA, 33 bp, Homo sapien
ccttcagaaaatttccaaagagaatgaaatctt

SEQ ID NO: 186944 - DNA, 33 bp, Homo sapien
ccttcagaaaatttccgaagagaatgaaatctt

SEQ ID NO: 186945 - DNA, 33 bp, Homo sapien
gcaccatctggacatacctagagagggccatct

SEQ ID NO: 186946 - DNA, 33 bp, Homo sapien
gcaccatctggacatagctagagagggccatct

SEQ ID NO: 186947 - DNA, 33 bp, Homo sapien
tagttctcaccatggaaatgtacggaaacactc

SEQ ID NO: 186948 - DNA, 33 bp, Homo sapien
tagttctcaccatggagatgtacggaaacactc

SEQ ID NO: 186949 - DNA, 33 bp, Homo sapien
tttttctttcatcagcactgtactcaaatgtca

SEQ ID NO: 186950 - DNA, 33 bp, Homo sapien
tttttctttcatcagcgctgtactcaaatgtca

SEQ ID NO: 186951 - DNA, 33 bp, Homo sapien
acttctaggattttcaccaattcctcataagaa

SEQ ID NO: 186952 - DNA, 33 bp, Homo sapien
acttctaggattttcatcaattcctcataagaa

SEQ ID NO: 186953 - DNA, 33 bp, Homo sapien
ctgaatacaccatgataaaggcaaaggtagtga

SEQ ID NO: 186954 - DNA, 33 bp, Homo sapien
ctgaatacaccatgatcaaggcaaaggtagtga

SEQ ID NO: 186955 - DNA, 33 bp, Homo sapien
caggtattatgaaatcacagtttgctcttgaaa

SEQ ID NO: 186956 - DNA, 33 bp, Homo sapien
caggtattatgaaatcgcagtttgctcttgaaa

SEQ ID NO: 186957 - DNA, 33 bp, Homo sapien
tctatttgtgtaagaactggagccttttgaata

SEQ ID NO: 186958 - DNA, 33 bp, Homo sapien
tctatttgtgtaagaattggagccttttgaata

SEQ ID NO: 186959 - DNA, 33 bp, Homo sapien
ccctttccaagcatcaagaataaattgatcaag

SEQ ID NO: 186960 - DNA, 33 bp, Homo sapien
ccctttccaagcatcaggaataaattgatcaag

SEQ ID NO: 186961 - DNA, 33 bp, Homo sapien
tctctaggttttttcaatcatcctacataaata

SEQ ID NO: 186962 - DNA, 33 bp, Homo sapien
tctctaggttttttcagtcatcctacataaata

SEQ ID NO: 186963 - DNA, 33 bp, Homo sapien
acttaactatgcatcacaggtagatatttaata

SEQ ID NO: 186964 - DNA, 33 bp, Homo sapien
acttaactatgcatcagaggtagatatttaata

SEQ ID NO: 186965 - DNA, 33 bp, Homo sapien
tattttttagaagacaagaaacagatatgaagt

SEQ ID NO: 186966 - DNA, 33 bp, Homo sapien
tattttttagaagacaggaaacagatatgaagt

SEQ ID NO: 186967 - DNA, 33 bp, Homo sapien
gtgttggagtggaaggccaaatttggaaaatat

SEQ ID NO: 186968 - DNA, 33 bp, Homo sapien
gtgttggagtggaaggtcaaatttggaaaatat

SEQ ID NO: 186969 - DNA, 33 bp, Homo sapien
tttactcagtgtcatagggtgttggagtggaag

SEQ ID NO: 186970 - DNA, 33 bp, Homo sapien
tttactcagtgtcatatggtgttggagtggaag

SEQ ID NO: 186971 - DNA, 33 bp, Homo sapien
aaacttcacatcattaaaaacattcggctgagt

SEQ ID NO: 186972 - DNA, 33 bp, Homo sapien
aaacttcacatcattagaaacattcggctgagt

SEQ ID NO: 186973 - DNA, 33 bp, Homo sapien
atgagggtttggataactggaaaaaagatagga

SEQ ID NO: 186974 - DNA, 33 bp, Homo sapien
atgagggtttggataagtggaaaaaagatagga

SEQ ID NO: 186975 - DNA, 33 bp, Homo sapien
ttttcccattgtcttcactattaacactcagct

SEQ ID NO: 186976 - DNA, 33 bp, Homo sapien
ttttcccattgtcttcgctattaacactcagct

SEQ ID NO: 186977 - DNA, 33 bp, Homo sapien
aaagaaggtcaaatggcaattgatgaagtaatc

SEQ ID NO: 186978 - DNA, 33 bp, Homo sapien
aaagaaggtcaaatgggaattgatgaagtaatc

SEQ ID NO: 186979 - DNA, 33 bp, Homo sapien
taacttagacctaccactctccaactctctttt

SEQ ID NO: 186980 - DNA, 33 bp, Homo sapien
taacttagacctaccattctccaactctctttt

SEQ ID NO: 186981 - DNA, 33 bp, Homo sapien
agctggtgacgttgaaactgaagccaatgctca

SEQ ID NO: 186982 - DNA, 33 bp, Homo sapien
agctggtgacgttgaatctgaagccaatgctca

SEQ ID NO: 186983 - DNA, 33 bp, Homo sapien
tgaatctcagcatccaaatagttgctgatctta

SEQ ID NO: 186984 - DNA, 33 bp, Homo sapien
tgaatctcagcatccagatagttgctgatctta

SEQ ID NO: 186985 - DNA, 33 bp, Homo sapien
ttgtccttttttgttccactgatgtcctattca

SEQ ID NO: 186986 - DNA, 33 bp, Homo sapien
ttgtccttttttgttcgactgatgtcctattca

SEQ ID NO: 186987 - DNA, 33 bp, Homo sapien
ttgctacttttaaagccgatttatctaacaata

SEQ ID NO: 186988 - DNA, 33 bp, Homo sapien
ttgctacttttaaagctgatttatctaacaata

SEQ ID NO: 186989 - DNA, 33 bp, Homo sapien
agaactgcatatgaaaaccttcttgaagttcta

SEQ ID NO: 186990 - DNA, 33 bp, Homo sapien
agaactgcatatgaaatccttcttgaagttcta

SEQ ID NO: 186991 - DNA, 33 bp, Homo sapien
ctaacaaggtactgcaaattcatggattgcagt

SEQ ID NO: 186992 - DNA, 33 bp, Homo sapien
ctaacaaggtactgcacattcatggattgcagt

SEQ ID NO: 186993 - DNA, 33 bp, Homo sapien
acagagatagataaaacttatgttacttgtatg

SEQ ID NO: 186994 - DNA, 33 bp, Homo sapien
acagagatagataaaagttatgttacttgtatg

SEQ ID NO: 186995 - DNA, 33 bp, Homo sapien
aatctttccagtactacgagagatcttttgttt

SEQ ID NO: 186996 - DNA, 33 bp, Homo sapien
aatctttccagtactatgagagatcttttgttt

SEQ ID NO: 186997 - DNA, 33 bp, Homo sapien
tcatcaagagttattgcagcgtcaacagtgttt

SEQ ID NO: 186998 - DNA, 33 bp, Homo sapien
tcatcaagagttattgtagcgtcaacagtgttt

SEQ ID NO: 186999 - DNA, 33 bp, Homo sapien
tttaaacaactctcacacaaaatttaataataa

SEQ ID NO: 187000 - DNA, 33 bp, Homo sapien
tttaaacaactctcacgcaaaatttaataataa

SEQ ID NO: 187001 - DNA, 33 bp, Homo sapien
gctgccaaaacaggaacgcagatatctttaaaa

SEQ ID NO: 187002 - DNA, 33 bp, Homo sapien
gctgccaaaacaggaatgcagatatctttaaaa

SEQ ID NO: 187003 - DNA, 33 bp, Homo sapien
gcatacagagtgtcctaaaccaaagtcttacaa

SEQ ID NO: 187004 - DNA, 33 bp, Homo sapien
gcatacagagtgtcctgaaccaaagtcttacaa

SEQ ID NO: 187005 - DNA, 33 bp, Homo sapien
cacgggactgttgacaataacaaagatatggaa

SEQ ID NO: 187006 - DNA, 33 bp, Homo sapien
cacgggactgttgacagtaacaaagatatggaa

SEQ ID NO: 187007 - DNA, 33 bp, Homo sapien
gcagaaagattaaaaacgtgtaccatgcaaata

SEQ ID NO: 187008 - DNA, 33 bp, Homo sapien
gcagaaagattaaaaaggtgtaccatgcaaata

SEQ ID NO: 187009 - DNA, 33 bp, Homo sapien
gaaagaaagtttaagacgcaagaagtggtaaga

SEQ ID NO: 187010 - DNA, 33 bp, Homo sapien
gaaagaaagtttaagatgcaagaagtggtaaga

SEQ ID NO: 187011 - DNA, 33 bp, Homo sapien
tatgacatatattaaaagtagccagagagggag

SEQ ID NO: 187012 - DNA, 33 bp, Homo sapien
tatgacatatattaaaggtagccagagagggag

SEQ ID NO: 187013 - DNA, 33 bp, Homo sapien
tttatccaaacagtcaatattcatgtagtactg

SEQ ID NO: 187014 - DNA, 33 bp, Homo sapien
tttatccaaacagtcagtattcatgtagtactg

SEQ ID NO: 187015 - DNA, 33 bp, Homo sapien
caaaaagttatgggacaaactatacacaacata

SEQ ID NO: 187016 - DNA, 33 bp, Homo sapien
caaaaagttatgggacgaactatacacaacata

SEQ ID NO: 187017 - DNA, 33 bp, Homo sapien
atctaggtctcaggtcaaatgttaccttctcgg

SEQ ID NO: 187018 - DNA, 33 bp, Homo sapien
atctaggtctcaggtctaatgttaccttctcgg

SEQ ID NO: 187019 - DNA, 33 bp, Homo sapien
caatttggtgccagtaaaacactaaagcaagca

SEQ ID NO: 187020 - DNA, 33 bp, Homo sapien
caatttggtgccagtagaacactaaagcaagca

SEQ ID NO: 187021 - DNA, 33 bp, Homo sapien
ttatcatttcaaacccagatggctaggagaatg

SEQ ID NO: 187022 - DNA, 33 bp, Homo sapien
ttatcatttcaaacccggatggctaggagaatg

SEQ ID NO: 187023 - DNA, 33 bp, Homo sapien
ttctgggatttgcacaagtatgacctcaaactc

SEQ ID NO: 187024 - DNA, 33 bp, Homo sapien
ttctgggatttgcacaggtatgacctcaaactc

SEQ ID NO: 187025 - DNA, 33 bp, Homo sapien
tcacacaatgctggaaatcctctaatattttat

SEQ ID NO: 187026 - DNA, 33 bp, Homo sapien
tcacacaatgctggaactcctctaatattttat

SEQ ID NO: 187027 - DNA, 33 bp, Homo sapien
gacagaatcaatcataccacaaacctcagcttc

SEQ ID NO: 187028 - DNA, 33 bp, Homo sapien
gacagaatcaatcatatcacaaacctcagcttc

SEQ ID NO: 187029 - DNA, 33 bp, Homo sapien
tctggacttaaacgtaacatttgacaaattgga

SEQ ID NO: 187030 - DNA, 33 bp, Homo sapien
tctggacttaaacgtatcatttgacaaattgga

SEQ ID NO: 187031 - DNA, 33 bp, Homo sapien
gctagtgatgaagagcaaaggaaagaaggattt

SEQ ID NO: 187032 - DNA, 33 bp, Homo sapien
gctagtgatgaagagcgaaggaaagaaggattt

SEQ ID NO: 187033 - DNA, 33 bp, Homo sapien
gtccacctaccaaatacaagcacagtgagttgc

SEQ ID NO: 187034 - DNA, 33 bp, Homo sapien
gtccacctaccaaatagaagcacagtgagttgc

SEQ ID NO: 187035 - DNA, 33 bp, Homo sapien
tgagcctcactaccagcatttctgggtcaccag

SEQ ID NO: 187036 - DNA, 33 bp, Homo sapien
tgagcctcactaccaggatttctgggtcaccag

SEQ ID NO: 187037 - DNA, 33 bp, Homo sapien
atgtgtacggaagaaaataaagatcttgtatga

SEQ ID NO: 187038 - DNA, 33 bp, Homo sapien
atgtgtacggaagaaagtaaagatcttgtatga

SEQ ID NO: 187039 - DNA, 33 bp, Homo sapien
tagcttctcttaagaaacattctctcattattt

SEQ ID NO: 187040 - DNA, 33 bp, Homo sapien
tagcttctcttaagaaccattctctcattattt

SEQ ID NO: 187041 - DNA, 33 bp, Homo sapien
tactcatacagagtagacatttttaaagaatca

SEQ ID NO: 187042 - DNA, 33 bp, Homo sapien
tactcatacagagtagtcatttttaaagaatca

SEQ ID NO: 187043 - DNA, 33 bp, Homo sapien
gttgcatagtattccactatctgaatacactgt

SEQ ID NO: 187044 - DNA, 33 bp, Homo sapien
gttgcatagtattccattatctgaatacactgt

SEQ ID NO: 187045 - DNA, 33 bp, Homo sapien
accaatcctcatattacattaggctcatgaata

SEQ ID NO: 187046 - DNA, 33 bp, Homo sapien
accaatcctcatattatattaggctcatgaata

SEQ ID NO: 187047 - DNA, 33 bp, Homo sapien
ctcaagcaccttctgagatccagctgacaaaaa

SEQ ID NO: 187048 - DNA, 33 bp, Homo sapien
ctcaagcaccttctgatatccagctgacaaaaa

SEQ ID NO: 187049 - DNA, 33 bp, Homo sapien
aattgttaggactttacggacaaagattgtacc

SEQ ID NO: 187050 - DNA, 33 bp, Homo sapien
aattgttaggactttatggacaaagattgtacc

SEQ ID NO: 187051 - DNA, 33 bp, Homo sapien
agcacggatgcttaaacgaaggtgatatattga

SEQ ID NO: 187052 - DNA, 33 bp, Homo sapien
agcacggatgcttaaatgaaggtgatatattga

SEQ ID NO: 187053 - DNA, 33 bp, Homo sapien
ataaaacttaaaatgcgcacttacacaaataag

SEQ ID NO: 187054 - DNA, 33 bp, Homo sapien
ataaaacttaaaatgctcacttacacaaataag

SEQ ID NO: 187055 - DNA, 33 bp, Homo sapien
gttttcttgtccttccaacctcaggatctttgc

SEQ ID NO: 187056 - DNA, 33 bp, Homo sapien
gttttcttgtccttccgacctcaggatctttgc

SEQ ID NO: 187057 - DNA, 33 bp, Homo sapien
atatgatatatagggaccatttacaaattatat

SEQ ID NO: 187058 - DNA, 33 bp, Homo sapien
atatgatatatagggatcatttacaaattatat

SEQ ID NO: 187059 - DNA, 33 bp, Homo sapien
tagactgcttgcctggaagtaccgtctgtttac

SEQ ID NO: 187060 - DNA, 33 bp, Homo sapien
tagactgcttgcctggtagtaccgtctgtttac

SEQ ID NO: 187061 - DNA, 33 bp, Homo sapien
acaggatcaatcaatccgaaacctcatcatcat

SEQ ID NO: 187062 - DNA, 33 bp, Homo sapien
acaggatcaatcaatctgaaacctcatcatcat

SEQ ID NO: 187063 - DNA, 33 bp, Homo sapien
tttactgaagactggaatcaaaccttcctttta

SEQ ID NO: 187064 - DNA, 33 bp, Homo sapien
tttactgaagactggattcaaaccttcctttta

SEQ ID NO: 187065 - DNA, 33 bp, Homo sapien
tagtccaagctatgtcacgtggttatcacagaa

SEQ ID NO: 187066 - DNA, 33 bp, Homo sapien
tagtccaagctatgtcgcgtggttatcacagaa

SEQ ID NO: 187067 - DNA, 33 bp, Homo sapien
cttttttactgaattaagttcagccagacaaag

SEQ ID NO: 187068 - DNA, 33 bp, Homo sapien
cttttttactgaattatgttcagccagacaaag

SEQ ID NO: 187069 - DNA, 33 bp, Homo sapien
tcttttggcatatcgacccatatagttaagttg

SEQ ID NO: 187070 - DNA, 33 bp, Homo sapien
tcttttggcatatcgagccatatagttaagttg

SEQ ID NO: 187071 - DNA, 33 bp, Homo sapien
cataaaatacctctcactgaagttacacaaagg

SEQ ID NO: 187072 - DNA, 33 bp, Homo sapien
cataaaatacctctcattgaagttacacaaagg

SEQ ID NO: 187073 - DNA, 33 bp, Homo sapien
tttgaagagacatgggaagagatggatctgtta

SEQ ID NO: 187074 - DNA, 33 bp, Homo sapien
tttgaagagacatggggagagatggatctgtta

SEQ ID NO: 187075 - DNA, 33 bp, Homo sapien
atcaaagaactcaaaaattttctctaacagtaa

SEQ ID NO: 187076 - DNA, 33 bp, Homo sapien
atcaaagaactcaaaagttttctctaacagtaa

SEQ ID NO: 187077 - DNA, 33 bp, Homo sapien
atctgttactaaggagcagttttccatgtaatt

SEQ ID NO: 187078 - DNA, 33 bp, Homo sapien
atctgttactaaggaggagttttccatgtaatt

SEQ ID NO: 187079 - DNA, 33 bp, Homo sapien
gctactaagtcacttgaactacagagataaaat

SEQ ID NO: 187080 - DNA, 33 bp, Homo sapien
gctactaagtcacttggactacagagataaaat

SEQ ID NO: 187081 - DNA, 33 bp, Homo sapien
atttaaattgtaagagcccagatgaataaaaga

SEQ ID NO: 187082 - DNA, 33 bp, Homo sapien
atttaaattgtaagagtccagatgaataaaaga

SEQ ID NO: 187083 - DNA, 33 bp, Homo sapien
tacaagaaggctagaactgtgcttgtatttttt

SEQ ID NO: 187084 - DNA, 33 bp, Homo sapien
tacaagaaggctagaattgtgcttgtatttttt

SEQ ID NO: 187085 - DNA, 33 bp, Homo sapien
caattatcttcaaagccactggtataaatctca

SEQ ID NO: 187086 - DNA, 33 bp, Homo sapien
caattatcttcaaagctactggtataaatctca

SEQ ID NO: 187087 - DNA, 33 bp, Homo sapien
gtggcaacaactatgactactaatacgtaactc

SEQ ID NO: 187088 - DNA, 33 bp, Homo sapien
gtggcaacaactatgagtactaatacgtaactc

SEQ ID NO: 187089 - DNA, 33 bp, Homo sapien
taaagcagaatcagaaagtttatcttagcataa

SEQ ID NO: 187090 - DNA, 33 bp, Homo sapien
taaagcagaatcagaaggtttatcttagcataa

SEQ ID NO: 187091 - DNA, 33 bp, Homo sapien
tatttacttgtgatgcactttatcctttatcct

SEQ ID NO: 187092 - DNA, 33 bp, Homo sapien
tatttacttgtgatgcgctttatcctttatcct

SEQ ID NO: 187093 - DNA, 33 bp, Homo sapien; identical to SEQ ID NO: 187091

SEQ ID NO: 187094 - DNA, 33 bp, Homo sapien; identical to SEQ ID NO: 187092

SEQ ID NO: 187095 - DNA, 33 bp, Homo sapien
ttttttacagataaggcaaaagccaagaaaact

SEQ ID NO: 187096 - DNA, 33 bp, Homo sapien
ttttttacagataaggtaaaagccaagaaaact

SEQ ID NO: 187097 - DNA, 33 bp, Homo sapien
atcattttggttttgaagacaaatgcccttgtt

SEQ ID NO: 187098 - DNA, 33 bp, Homo sapien
atcattttggttttgatgacaaatgcccttgtt

SEQ ID NO: 187099 - DNA, 33 bp, Homo sapien
agtacaattaaaggtacagaagtaacagaatac

SEQ ID NO: 187100 - DNA, 33 bp, Homo sapien
agtacaattaaaggtatagaagtaacagaatac

SEQ ID NO: 187101 - DNA, 33 bp, Homo sapien
cggaggctgccgtaccactctagctacttttct

SEQ ID NO: 187102 - DNA, 33 bp, Homo sapien
cggaggctgccgtaccgctctagctacttttct

SEQ ID NO: 187103 - DNA, 33 bp, Homo sapien
cccaccgtcctgtgcagagaaacatcccactat

SEQ ID NO: 187104 - DNA, 33 bp, Homo sapien
cccaccgtcctgtgcatagaaacatcccactat

SEQ ID NO: 187105 - DNA, 33 bp, Homo sapien
ccagtttctctagcaaaccgattttggttcaat

SEQ ID NO: 187106 - DNA, 33 bp, Homo sapien
ccagtttctctagcaacccgattttggttcaat

SEQ ID NO: 187107 - DNA, 33 bp, Homo sapien
ggaggcgcctattcaaaggaaataaaaaatata

SEQ ID NO: 187108 - DNA, 33 bp, Homo sapien
ggaggcgcctattcaagggaaataaaaaatata

SEQ ID NO: 187109 - DNA, 33 bp, Homo sapien
gcatacacactttgaaagaagaaaatcaatgtt

SEQ ID NO: 187110 - DNA, 33 bp, Homo sapien
gcatacacactttgaaggaagaaaatcaatgtt

SEQ ID NO: 187111 - DNA, 33 bp, Homo sapien
ctccaaataattttaaccaggaaagtgtcatgt

SEQ ID NO: 187112 - DNA, 33 bp, Homo sapien
ctccaaataattttaatcaggaaagtgtcatgt

SEQ ID NO: 187113 - DNA, 33 bp, Homo sapien
gaattcttccattactcaaatgctgggcaaata

SEQ ID NO: 187114 - DNA, 33 bp, Homo sapien
gaattcttccattacttaaatgctgggcaaata

SEQ ID NO: 187115 - DNA, 33 bp, Homo sapien
agtagttacaattcaaacaatagtattctccta

SEQ ID NO: 187116 - DNA, 33 bp, Homo sapien
agtagttacaattcaagcaatagtattctccta

SEQ ID NO: 187117 - DNA, 33 bp, Homo sapien
taacttgctctgataaagtgatgttagtatatg

SEQ ID NO: 187118 - DNA, 33 bp, Homo sapien
taacttgctctgataatgtgatgttagtatatg

SEQ ID NO: 187119 - DNA, 33 bp, Homo sapien
ttgataaaaatggctaaactaaaacacagattt

SEQ ID NO: 187120 - DNA, 33 bp, Homo sapien
ttgataaaaatggctacactaaaacacagattt

SEQ ID NO: 187121 - DNA, 33 bp, Homo sapien
gttgtaggttaatgaaaagcatcaattttgaca

SEQ ID NO: 187122 - DNA, 33 bp, Homo sapien
gttgtaggttaatgaagagcatcaattttgaca

SEQ ID NO: 187123 - DNA, 33 bp, Homo sapien
aaagcttatgtccacacgtaatgtgcacataaa

SEQ ID NO: 187124 - DNA, 33 bp, Homo sapien
aaagcttatgtccacaggtaatgtgcacataaa

SEQ ID NO: 187125 - DNA, 33 bp, Homo sapien
taaaatttggtgattaggaataaagcttctgta

SEQ ID NO: 187126 - DNA, 33 bp, Homo sapien
taaaatttggtgattatgaataaagcttctgta

SEQ ID NO: 187127 - DNA, 33 bp, Homo sapien
aagagagagatgagttcaaatgttctaaattct

SEQ ID NO: 187128 - DNA, 33 bp, Homo sapien
aagagagagatgagttgaaatgttctaaattct

SEQ ID NO: 187129 - DNA, 33 bp, Homo sapien
aagatggctgtgaagaaagtgctacagttgatt

SEQ ID NO: 187130 - DNA, 33 bp, Homo sapien
aagatggctgtgaagagagtgctacagttgatt

SEQ ID NO: 187131 - DNA, 33 bp, Homo sapien
ggtagaacttatgagcaatgaaactggatattt

SEQ ID NO: 187132 - DNA, 33 bp, Homo sapien
ggtagaacttatgagctatgaaactggatattt

SEQ ID NO: 187133 - DNA, 33 bp, Homo sapien
tgattcaatgaatcccagatgaggttcaggaat

SEQ ID NO: 187134 - DNA, 33 bp, Homo sapien
tgattcaatgaatcccggatgaggttcaggaat

SEQ ID NO: 187135 - DNA, 33 bp, Homo sapien
tatttggttatgaaaagtgttatcaaaaaggac

SEQ ID NO: 187136 - DNA, 33 bp, Homo sapien
tatttggttatgaaaattgttatcaaaaaggac

SEQ ID NO: 187137 - DNA, 33 bp, Homo sapien
gcacctattcagagaacgctttattttgtacca

SEQ ID NO: 187138 - DNA, 33 bp, Homo sapien
gcacctattcagagaatgctttattttgtacca

SEQ ID NO: 187139 - DNA, 33 bp, Homo sapien
taatggcttgagcttccaaattgctgaagggtt

SEQ ID NO: 187140 - DNA, 33 bp, Homo sapien
taatggcttgagcttcgaaattgctgaagggtt

SEQ ID NO: 187141 - DNA, 33 bp, Homo sapien
ccaaattacagtcacacgattgcttagtgagca

SEQ ID NO: 187142 - DNA, 33 bp, Homo sapien
ccaaattacagtcacatgattgcttagtgagca

SEQ ID NO: 187143 - DNA, 33 bp, Homo sapien
aaaagggacaaatcaaattcttggtgtagggca

SEQ ID NO: 187144 - DNA, 33 bp, Homo sapien
aaaagggacaaatcaagttcttggtgtagggca

SEQ ID NO: 187145 - DNA, 33 bp, Homo sapien
aataggactgcatacactggattaaatcccctg

SEQ ID NO: 187146 - DNA, 33 bp, Homo sapien
aataggactgcatacattggattaaatcccctg

SEQ ID NO: 187147 - DNA, 33 bp, Homo sapien
ggatgtagtcagcatacaggataagataggtac

SEQ ID NO: 187148 - DNA, 33 bp, Homo sapien
ggatgtagtcagcatataggataagataggtac

SEQ ID NO: 187149 - DNA, 33 bp, Homo sapien
ctatggtgacaaagctaagagtattgggttgaa

SEQ ID NO: 187150 - DNA, 33 bp, Homo sapien
ctatggtgacaaagctgagagtattgggttgaa

SEQ ID NO: 187151 - DNA, 33 bp, Homo sapien
aaagtgaatttcatcaacagttcaattcaataa

SEQ ID NO: 187152 - DNA, 33 bp, Homo sapien
aaagtgaatttcatcatcagttcaattcaataa

SEQ ID NO: 187153 - DNA, 33 bp, Homo sapien
tcatcagctgtttcgaaatcaagacaaattccc

SEQ ID NO: 187154 - DNA, 33 bp, Homo sapien
tcatcagctgtttcgagatcaagacaaattccc

SEQ ID NO: 187155 - DNA, 33 bp, Homo sapien
acagattgtcaacccacgtctattaaagaggct

SEQ ID NO: 187156 - DNA, 33 bp, Homo sapien
acagattgtcaacccatgtctattaaagaggct

SEQ ID NO: 187157 - DNA, 33 bp, Homo sapien
catgagatcatagtaactggatcagatgagcaa

SEQ ID NO: 187158 - DNA, 33 bp, Homo sapien
catgagatcatagtaattggatcagatgagcaa

SEQ ID NO: 187159 - DNA, 33 bp, Homo sapien
gtgatctatcagggtccctgttggtatttgcct

SEQ ID NO: 187160 - DNA, 33 bp, Homo sapien
gtgatctatcagggtctctgttggtatttgcct

SEQ ID NO: 187161 - DNA, 33 bp, Homo sapien
tttaaggtgtcttaggacaaaataactagcata

SEQ ID NO: 187162 - DNA, 33 bp, Homo sapien
tttaaggtgtcttagggcaaaataactagcata

SEQ ID NO: 187163 - DNA, 33 bp, Homo sapien
taatgaaggtattgtaccttttgagcatgctat

SEQ ID NO: 187164 - DNA, 33 bp, Homo sapien
taatgaaggtattgtatcttttgagcatgctat

SEQ ID NO: 187165 - DNA, 33 bp, Homo sapien
cagggtgcctaggaaacgagaaaaacgaataga

SEQ ID NO: 187166 - DNA, 33 bp, Homo sapien
cagggtgcctaggaaatgagaaaaacgaataga

SEQ ID NO: 187167 - DNA, 33 bp, Homo sapien
tagccaaaatgatatcaccaatccaagttctgt

SEQ ID NO: 187168 - DNA, 33 bp, Homo sapien
tagccaaaatgatatccccaatccaagttctgt

SEQ ID NO: 187169 - DNA, 33 bp, Homo sapien
tgcatttgagccaataggacaaaaggatgagta

SEQ ID NO: 187170 - DNA, 33 bp, Homo sapien
tgcatttgagccaatatgacaaaaggatgagta

SEQ ID NO: 187171 - DNA, 33 bp, Homo sapien
ttggttatagagcagcaacggcagatagggcag

SEQ ID NO: 187172 - DNA, 33 bp, Homo sapien
ttggttatagagcagccacggcagatagggcag

SEQ ID NO: 187173 - DNA, 33 bp, Homo sapien
aggagtcttagacgtgaaccttgtaatgaataa

SEQ ID NO: 187174 - DNA, 33 bp, Homo sapien
aggagtcttagacgtggaccttgtaatgaataa

SEQ ID NO: 187175 - DNA, 33 bp, Homo sapien
aaaggacacatgataccgatctactaaaacagg

SEQ ID NO: 187176 - DNA, 33 bp, Homo sapien
aaaggacacatgatactgatctactaaaacagg

SEQ ID NO: 187177 - DNA, 33 bp, Homo sapien
attttgtaactctctaagtaaggcaaaggacac

SEQ ID NO: 187178 - DNA, 33 bp, Homo sapien
attttgtaactctctacgtaaggcaaaggacac

SEQ ID NO: 187179 - DNA, 33 bp, Homo sapien
agattatgaaggagaaatctattttgtaactct

SEQ ID NO: 187180 - DNA, 33 bp, Homo sapien
agattatgaaggagaagtctattttgtaactct

SEQ ID NO: 187181 - DNA, 33 bp, Homo sapien
caactggtgtgagaataacggactaactttatt

SEQ ID NO: 187182 - DNA, 33 bp, Homo sapien
caactggtgtgagaatgacggactaactttatt

SEQ ID NO: 187183 - DNA, 33 bp, Homo sapien
tcagtccaactaaaacaacaattttggctcaaa

SEQ ID NO: 187184 - DNA, 33 bp, Homo sapien
tcagtccaactaaaacgacaattttggctcaaa

SEQ ID NO: 187185 - DNA, 33 bp, Homo sapien
tctccagttcagaacacagacatttaggtctag

SEQ ID NO: 187186 - DNA, 33 bp, Homo sapien
tctccagttcagaacatagacatttaggtctag

SEQ ID NO: 187187 - DNA, 33 bp, Homo sapien
gacaatcagatgctaaacatttgttagccccct

SEQ ID NO: 187188 - DNA, 33 bp, Homo sapien
gacaatcagatgctaagcatttgttagccccct

SEQ ID NO: 187189 - DNA, 33 bp, Homo sapien
ggcaatagaaaaaaaaccattcaggtaaaaatg

SEQ ID NO: 187190 - DNA, 33 bp, Homo sapien
ggcaatagaaaaaaaatcattcaggtaaaaatg

SEQ ID NO: 187191 - DNA, 33 bp, Homo sapien
taaacaatacagagaacttattatgtcacataa

SEQ ID NO: 187192 - DNA, 33 bp, Homo sapien
taaacaatacagagaatttattatgtcacataa

SEQ ID NO: 187193 - DNA, 33 bp, Homo sapien
actctgatggccctaaaatacaggcaggggtgg

SEQ ID NO: 187194 - DNA, 33 bp, Homo sapien
actctgatggccctaagatacaggcaggggtgg

SEQ ID NO: 187195 - DNA, 33 bp, Homo sapien
tggtgggagttggaggccattgtccttagcaaa

SEQ ID NO: 187196 - DNA, 33 bp, Homo sapien
tggtgggagttggaggtcattgtccttagcaaa

SEQ ID NO: 187197 - DNA, 33 bp, Homo sapien
agatgggaagatgagacaaaggctggaacttct

SEQ ID NO: 187198 - DNA, 33 bp, Homo sapien
agatgggaagatgagagaaaggctggaacttct

SEQ ID NO: 187199 - DNA, 33 bp, Homo sapien
tattgtttgagttctacgctaacaaacactgga

SEQ ID NO: 187200 - DNA, 33 bp, Homo sapien
tattgtttgagttctatgctaacaaacactgga

SEQ ID NO: 187201 - DNA, 33 bp, Homo sapien
catagcacaaccatggaattatattgcacatac

SEQ ID NO: 187202 - DNA, 33 bp, Homo sapien
catagcacaaccatgggattatattgcacatac

SEQ ID NO: 187203 - DNA, 33 bp, Homo sapien
ggtttaattggatgacagagaattgtataagaa

SEQ ID NO: 187204 - DNA, 33 bp, Homo sapien
ggtttaattggatgacggagaattgtataagaa

SEQ ID NO: 187205 - DNA, 33 bp, Homo sapien
tagagatatgcaaagtcaatgtagacttgtttt

SEQ ID NO: 187206 - DNA, 33 bp, Homo sapien
tagagatatgcaaagttaatgtagacttgtttt

SEQ ID NO: 187207 - DNA, 33 bp, Homo sapien
taacatgctgataaccagaaatcaagcatggtg

SEQ ID NO: 187208 - DNA, 33 bp, Homo sapien
taacatgctgataaccggaaatcaagcatggtg

SEQ ID NO: 187209 - DNA, 33 bp, Homo sapien
taaaagaggttcaaaactactaacttagtctct

SEQ ID NO: 187210 - DNA, 33 bp, Homo sapien
taaaagaggttcaaaattactaacttagtctct

SEQ ID NO: 187211 - DNA, 33 bp, Homo sapien
tgtggagtgttggggcagacagagactaagtta

SEQ ID NO: 187212 - DNA, 33 bp, Homo sapien
tgtggagtgttggggccgacagagactaagtta

SEQ ID NO: 187213 - DNA, 33 bp, Homo sapien
gtcagaactctgcgagaccaccaatatgctaca

SEQ ID NO: 187214 - DNA, 33 bp, Homo sapien
gtcagaactctgcgagtccaccaatatgctaca

SEQ ID NO: 187215 - DNA, 33 bp, Homo sapien
gcttagagcttgtggcaaaggattagtagatcg

SEQ ID NO: 187216 - DNA, 33 bp, Homo sapien
gcttagagcttgtggcgaaggattagtagatcg

SEQ ID NO: 187217 - DNA, 33 bp, Homo sapien
agtaattgtgcaagaacactctaaaccacattt

SEQ ID NO: 187218 - DNA, 33 bp, Homo sapien
agtaattgtgcaagaatactctaaaccacattt

SEQ ID NO: 187219 - DNA, 33 bp, Homo sapien
cagctcttagtttatgaagacagccaaactata

SEQ ID NO: 187220 - DNA, 33 bp, Homo sapien
cagctcttagtttatgtagacagccaaactata

SEQ ID NO: 187221 - DNA, 33 bp, Homo sapien
ctctgtgtctctaaaaagtggattgccttcttt

SEQ ID NO: 187222 - DNA, 33 bp, Homo sapien
ctctgtgtctctaaaacgtggattgccttcttt

SEQ ID NO: 187223 - DNA, 33 bp, Homo sapien
atcatatcatgtatcaatgaatcaatcaatcaa

SEQ ID NO: 187224 - DNA, 33 bp, Homo sapien
atcatatcatgtatcagtgaatcaatcaatcaa

SEQ ID NO: 187225 - DNA, 33 bp, Homo sapien
tggatttggaccattaccttagaccatatgcaa

SEQ ID NO: 187226 - DNA, 33 bp, Homo sapien
tggatttggaccattatcttagaccatatgcaa

SEQ ID NO: 187227 - DNA, 33 bp, Homo sapien
aattcttttggcaatacatctagaaatggagtt

SEQ ID NO: 187228 - DNA, 33 bp, Homo sapien
aattcttttggcaatatatctagaaatggagtt

SEQ ID NO: 187229 - DNA, 33 bp, Homo sapien
tttgtaataattttgaccaagtgcaaattatcc

SEQ ID NO: 187230 - DNA, 33 bp, Homo sapien
tttgtaataattttgatcaagtgcaaattatcc

SEQ ID NO: 187231 - DNA, 33 bp, Homo sapien
gcctcataaatgaaggaaaggtagtcttttaca

SEQ ID NO: 187232 - DNA, 33 bp, Homo sapien
gcctcataaatgaagggaaggtagtcttttaca

SEQ ID NO: 187233 - DNA, 33 bp, Homo sapien
atgtatttgtcaggagaaatcacattggctgtt

SEQ ID NO: 187234 - DNA, 33 bp, Homo sapien
atgtatttgtcaggaggaatcacattggctgtt

SEQ ID NO: 187235 - DNA, 33 bp, Homo sapien
acagaagccagtcaaagcctgtggaccagcatc

SEQ ID NO: 187236 - DNA, 33 bp, Homo sapien
acagaagccagtcaaatcctgtggaccagcatc

SEQ ID NO: 187237 - DNA, 33 bp, Homo sapien
cataattctctgattccccagataggtgtttga

SEQ ID NO: 187238 - DNA, 33 bp, Homo sapien
cataattctctgattctccagataggtgtttga

SEQ ID NO: 187239 - DNA, 33 bp, Homo sapien
ggttctcagatgaagaagtcataagctacctgg

SEQ ID NO: 187240 - DNA, 33 bp, Homo sapien
ggttctcagatgaagaggtcataagctacctgg

SEQ ID NO: 187241 - DNA, 33 bp, Homo sapien
agctcacactttctaaggtaatagtactctgta

SEQ ID NO: 187242 - DNA, 33 bp, Homo sapien
agctcacactttctaatgtaatagtactctgta

SEQ ID NO: 187243 - DNA, 33 bp, Homo sapien
tatttttagcaagggaccacttttagtactaag

SEQ ID NO: 187244 - DNA, 33 bp, Homo sapien
tatttttagcaagggatcacttttagtactaag

SEQ ID NO: 187245 - DNA, 33 bp, Homo sapien
cctcctttgagctgcccaggcaccgtcaccatc

SEQ ID NO: 187246 - DNA, 33 bp, Homo sapien
cctcctttgagctgccgaggcaccgtcaccatc

SEQ ID NO: 187247 - DNA, 33 bp, Homo sapien
aatttgatgcactttacgacctgggaagaaatc

SEQ ID NO: 187248 - DNA, 33 bp, Homo sapien
aatttgatgcactttatgacctgggaagaaatc

SEQ ID NO: 187249 - DNA, 33 bp, Homo sapien
tttctaacacagacaaaaaaagagtgtgctgac

SEQ ID NO: 187250 - DNA, 33 bp, Homo sapien
tttctaacacagacaagaaaagagtgtgctgac

SEQ ID NO: 187251 - DNA, 33 bp, Homo sapien
acatcactatttctcaaaaaattagttggtgta

SEQ ID NO: 187252 - DNA, 33 bp, Homo sapien
acatcactatttctcataaaattagttggtgta

SEQ ID NO: 187253 - DNA, 33 bp, Homo sapien
tattaaatgcaacttaggaaacaccaatgatgc

SEQ ID NO: 187254 - DNA, 33 bp, Homo sapien
tattaaatgcaacttatgaaacaccaatgatgc

SEQ ID NO: 187255 - DNA, 33 bp, Homo sapien
ccaccctacataaacactaatgtgaactgtcct

SEQ ID NO: 187256 - DNA, 33 bp, Homo sapien
ccaccctacataaacattaatgtgaactgtcct

SEQ ID NO: 187257 - DNA, 33 bp, Homo sapien
tgggatgccatgaacaatgtctataaaagccag

SEQ ID NO: 187258 - DNA, 33 bp, Homo sapien
tgggatgccatgaacagtgtctataaaagccag

SEQ ID NO: 187259 - DNA, 33 bp, Homo sapien
tcccaaaacaattacaatggtaacgtcaaagag

SEQ ID NO: 187260 - DNA, 33 bp, Homo sapien
tcccaaaacaattacagtggtaacgtcaaagag

SEQ ID NO: 187261 - DNA, 33 bp, Homo sapien
tcatataagattcctacgctgtatgcctactat

SEQ ID NO: 187262 - DNA, 33 bp, Homo sapien
tcatataagattcctatgctgtatgcctactat

SEQ ID NO: 187263 - DNA, 33 bp, Homo sapien
gtctgtctgtctctcaaataccttgtactatac

SEQ ID NO: 187264 - DNA, 33 bp, Homo sapien
gtctgtctgtctctcagataccttgtactatac

SEQ ID NO: 187265 - DNA, 33 bp, Homo sapien
gcagattttaggcaggaaaaattctttaaaaga

SEQ ID NO: 187266 - DNA, 33 bp, Homo sapien
gcagattttaggcagggaaaattctttaaaaga

SEQ ID NO: 187267 - DNA, 33 bp, Homo sapien
tttggtcaggcttttcaaattctctttcatcag

SEQ ID NO: 187268 - DNA, 33 bp, Homo sapien
tttggtcaggcttttccaattctctttcatcag

SEQ ID NO: 187269 - DNA, 33 bp, Homo sapien
gtctgcagttggggaacaagggtaactttctgt

SEQ ID NO: 187270 - DNA, 33 bp, Homo sapien
gtctgcagttggggaataagggtaactttctgt

SEQ ID NO: 187271 - DNA, 33 bp, Homo sapien
agaataaggctccacccgagaagtcagttgata

SEQ ID NO: 187272 - DNA, 33 bp, Homo sapien
agaataaggctccacctgagaagtcagttgata

SEQ ID NO: 187273 - DNA, 33 bp, Homo sapien
tccagcttccatttccaaacactaagctcactt

SEQ ID NO: 187274 - DNA, 33 bp, Homo sapien
tccagcttccatttcccaacactaagctcactt

SEQ ID NO: 187275 - DNA, 33 bp, Homo sapien
gatttcttggttataaatagtcttagtttgttg

SEQ ID NO: 187276 - DNA, 33 bp, Homo sapien
gatttcttggttataagtagtcttagtttgttg

SEQ ID NO: 187277 - DNA, 33 bp, Homo sapien
aggccgtctttgctcaatactgccccaggccgt

SEQ ID NO: 187278 - DNA, 33 bp, Homo sapien
aggccgtctttgctcagtactgccccaggccgt

SEQ ID NO: 187279 - DNA, 33 bp, Homo sapien
gacttacagtttttccacctggctctcagtgta

SEQ ID NO: 187280 - DNA, 33 bp, Homo sapien
gacttacagtttttccgcctggctctcagtgta

SEQ ID NO: 187281 - DNA, 33 bp, Homo sapien
ctcgtggtactaaaaacgcacacaaatatcaca

SEQ ID NO: 187282 - DNA, 33 bp, Homo sapien
ctcgtggtactaaaaatgcacacaaatatcaca

SEQ ID NO: 187283 - DNA, 33 bp, Homo sapien
attttaggaagaactaacttaaactaatggact

SEQ ID NO: 187284 - DNA, 33 bp, Homo sapien
attttaggaagaactaccttaaactaatggact

SEQ ID NO: 187285 - DNA, 33 bp, Homo sapien
ttacctttttcagtcaaggtacgaggccatagg

SEQ ID NO: 187286 - DNA, 33 bp, Homo sapien
ttacctttttcagtcagggtacgaggccatagg

SEQ ID NO: 187287 - DNA, 33 bp, Homo sapien
gagaaagaaggatatccatcgaagggttcccaa

SEQ ID NO: 187288 - DNA, 33 bp, Homo sapien
gagaaagaaggatatcgatcgaagggttcccaa

SEQ ID NO: 187289 - DNA, 33 bp, Homo sapien
acccagaattaaaaacaaaactgtctaatatat

SEQ ID NO: 187290 - DNA, 33 bp, Homo sapien
acccagaattaaaaacgaaactgtctaatatat

SEQ ID NO: 187291 - DNA, 33 bp, Homo sapien
gggttcaagtctaatagctgagtccttacattt

SEQ ID NO: 187292 - DNA, 33 bp, Homo sapien
gggttcaagtctaatatctgagtccttacattt

SEQ ID NO: 187293 - DNA, 33 bp, Homo sapien
aagcaaagagagtgaccacttggcatatatctg

SEQ ID NO: 187294 - DNA, 33 bp, Homo sapien
aagcaaagagagtgactacttggcatatatctg

SEQ ID NO: 187295 - DNA, 33 bp, Homo sapien
ggaccagacgtttataacaccaatgtcaagaaa

SEQ ID NO: 187296 - DNA, 33 bp, Homo sapien
ggaccagacgtttatatcaccaatgtcaagaaa

SEQ ID NO: 187297 - DNA, 33 bp, Homo sapien
ttactaagttgttttaagctagttctgggagag

SEQ ID NO: 187298 - DNA, 33 bp, Homo sapien
ttactaagttgttttaggctagttctgggagag

SEQ ID NO: 187299 - DNA, 33 bp, Homo sapien
tgaagtatcagaaggacgtatgcctccaagtac

SEQ ID NO: 187300 - DNA, 33 bp, Homo sapien
tgaagtatcagaaggatgtatgcctccaagtac

SEQ ID NO: 187301 - DNA, 33 bp, Homo sapien
ccttaggaatccagaaagctgagctcagagatt

SEQ ID NO: 187302 - DNA, 33 bp, Homo sapien
ccttaggaatccagaacgctgagctcagagatt

SEQ ID NO: 187303 - DNA, 33 bp, Homo sapien
gagacaataaaagaaaatgtattacttcacaga

SEQ ID NO: 187304 - DNA, 33 bp, Homo sapien
gagacaataaaagaaactgtattacttcacaga

SEQ ID NO: 187305 - DNA, 33 bp, Homo sapien
ttcacttttgtcattgaatgagattatgcagag

SEQ ID NO: 187306 - DNA, 33 bp, Homo sapien
ttcacttttgtcattggatgagattatgcagag

SEQ ID NO: 187307 - DNA, 33 bp, Homo sapien
ctctatttctctttcacacaatttgccttaaaa

SEQ ID NO: 187308 - DNA, 33 bp, Homo sapien
ctctatttctctttcatacaatttgccttaaaa

SEQ ID NO: 187309 - DNA, 33 bp, Homo sapien
tctaagaagaaacataactgcacatctatctgg

SEQ ID NO: 187310 - DNA, 33 bp, Homo sapien
tctaagaagaaacatatctgcacatctatctgg

SEQ ID NO: 187311 - DNA, 33 bp, Homo sapien
tatattcacgttattacgctaccaatctctaga

SEQ ID NO: 187312 - DNA, 33 bp, Homo sapien
tatattcacgttattatgctaccaatctctaga

SEQ ID NO: 187313 - DNA, 33 bp, Homo sapien
ctatcattagtgtccaaatgagtttctattgaa

SEQ ID NO: 187314 - DNA, 33 bp, Homo sapien
ctatcattagtgtccagatgagtttctattgaa

SEQ ID NO: 187315 - DNA, 33 bp, Homo sapien
agtcatagttacaaaccgggttggagatgtatt

SEQ ID NO: 187316 - DNA, 33 bp, Homo sapien
agtcatagttacaaactgggttggagatgtatt

SEQ ID NO: 187317 - DNA, 33 bp, Homo sapien
atttcccaagcttgacaagacttatactgaatg

SEQ ID NO: 187318 - DNA, 33 bp, Homo sapien
atttcccaagcttgacgagacttatactgaatg

SEQ ID NO: 187319 - DNA, 33 bp, Homo sapien
ctgatctagaaaataacgtctcaactcatctgt

SEQ ID NO: 187320 - DNA, 33 bp, Homo sapien
ctgatctagaaaataatgtctcaactcatctgt

SEQ ID NO: 187321 - DNA, 33 bp, Homo sapien
acaggatctgctatgaagaaaatggaaaggagt

SEQ ID NO: 187322 - DNA, 33 bp, Homo sapien
acaggatctgctatgaggaaaatggaaaggagt

SEQ ID NO: 187323 - DNA, 33 bp, Homo sapien
ccatttctgatgaagcacctaattgtttcttaa

SEQ ID NO: 187324 - DNA, 33 bp, Homo sapien
ccatttctgatgaagcgcctaattgtttcttaa

SEQ ID NO: 187325 - DNA, 33 bp, Homo sapien
cttccagggcccaagaagcatattagcacctgt

SEQ ID NO: 187326 - DNA, 33 bp, Homo sapien
cttccagggcccaagaggcatattagcacctgt

SEQ ID NO: 187327 - DNA, 33 bp, Homo sapien
gtttagtttgtaggaacgtaaagtctgacattg

SEQ ID NO: 187328 - DNA, 33 bp, Homo sapien
gtttagtttgtaggaatgtaaagtctgacattg

SEQ ID NO: 187329 - DNA, 33 bp, Homo sapien
gttccatatgttataaatctcggccctggtctt

SEQ ID NO: 187330 - DNA, 33 bp, Homo sapien
gttccatatgttataactctcggccctggtctt

SEQ ID NO: 187331 - DNA, 33 bp, Homo sapien
ttctgagtttccctaacaacattggcacaaact

SEQ ID NO: 187332 - DNA, 33 bp, Homo sapien
ttctgagtttccctaagaacattggcacaaact

SEQ ID NO: 187333 - DNA, 33 bp, Homo sapien
tataatggagctaaacaattcctatcgcctaat

SEQ ID NO: 187334 - DNA, 33 bp, Homo sapien
tataatggagctaaaccattcctatcgcctaat

SEQ ID NO: 187335 - DNA, 33 bp, Homo sapien
ttgcttttaaacttgcaaaggctatcagaagtt

SEQ ID NO: 187336 - DNA, 33 bp, Homo sapien
ttgcttttaaacttgcgaaggctatcagaagtt

SEQ ID NO: 187337 - DNA, 33 bp, Homo sapien
aagttttctagcccccaaaaagagtaagtttca

SEQ ID NO: 187338 - DNA, 33 bp, Homo sapien
aagttttctagccccccaaaagagtaagtttca

SEQ ID NO: 187339 - DNA, 33 bp, Homo sapien
acaagtaaagtgcttaaggcaacatctggttaa

SEQ ID NO: 187340 - DNA, 33 bp, Homo sapien
acaagtaaagtgcttagggcaacatctggttaa

SEQ ID NO: 187341 - DNA, 33 bp, Homo sapien
ctaataacactatacaacttatggaacactatt

SEQ ID NO: 187342 - DNA, 33 bp, Homo sapien
ctaataacactatacagcttatggaacactatt

SEQ ID NO: 187343 - DNA, 33 bp, Homo sapien
cagggctgatacctcacaaggacgttgtaaaga

SEQ ID NO: 187344 - DNA, 33 bp, Homo sapien
cagggctgatacctcataaggacgttgtaaaga

SEQ ID NO: 187345 - DNA, 33 bp, Homo sapien
ttcagtgttcttgttgaaatttagcaatcaaaa

SEQ ID NO: 187346 - DNA, 33 bp, Homo sapien
ttcagtgttcttgttgtaatttagcaatcaaaa

SEQ ID NO: 187347 - DNA, 33 bp, Homo sapien
attgggggatgcaaaaataatatatgatgcttg

SEQ ID NO: 187348 - DNA, 33 bp, Homo sapien
attgggggatgcaaaactaatatatgatgcttg

SEQ ID NO: 187349 - DNA, 33 bp, Homo sapien
gtgttatataacccacagtatgagtaaatacca

SEQ ID NO: 187350 - DNA, 33 bp, Homo sapien
gtgttatataacccacggtatgagtaaatacca

SEQ ID NO: 187351 - DNA, 33 bp, Homo sapien
ttagaatctagctagacaagatgggtggtacag

SEQ ID NO: 187352 - DNA, 33 bp, Homo sapien
ttagaatctagctagagaagatgggtggtacag

SEQ ID NO: 187353 - DNA, 33 bp, Homo sapien
cttcaaggatttttaacctagaaagactcagag

SEQ ID NO: 187354 - DNA, 33 bp, Homo sapien
cttcaaggatttttaagctagaaagactcagag

SEQ ID NO: 187355 - DNA, 33 bp, Homo sapien
gaacctggatgaacaaatatgaactgataaaat

SEQ ID NO: 187356 - DNA, 33 bp, Homo sapien
gaacctggatgaacaattatgaactgataaaat

SEQ ID NO: 187357 - DNA, 33 bp, Homo sapien
gattgctaggtaaaacagtagctctattcttag

SEQ ID NO: 187358 - DNA, 33 bp, Homo sapien
gattgctaggtaaaacggtagctctattcttag

SEQ ID NO: 187359 - DNA, 33 bp, Homo sapien
aaagttccttttatcactgacgaaatctcatat

SEQ ID NO: 187360 - DNA, 33 bp, Homo sapien
aaagttccttttatcattgacgaaatctcatat

SEQ ID NO: 187361 - DNA, 33 bp, Homo sapien
aaaggtatttttgatccaatttaagctgcagtt

SEQ ID NO: 187362 - DNA, 33 bp, Homo sapien
aaaggtatttttgatctaatttaagctgcagtt

SEQ ID NO: 187363 - DNA, 33 bp, Homo sapien
atgctacattttggtacaatatcaggactgttt

SEQ ID NO: 187364 - DNA, 33 bp, Homo sapien
atgctacattttggtataatatcaggactgttt

SEQ ID NO: 187365 - DNA, 33 bp, Homo sapien
attcagacaagttttcactaaatcagttcaact

SEQ ID NO: 187366 - DNA, 33 bp, Homo sapien
attcagacaagttttcgctaaatcagttcaact

SEQ ID NO: 187367 - DNA, 33 bp, Homo sapien
gtggtgaatactgccaaaagaatcaaggtcatc

SEQ ID NO: 187368 - DNA, 33 bp, Homo sapien
gtggtgaatactgccagaagaatcaaggtcatc

SEQ ID NO: 187369 - DNA, 33 bp, Homo sapien
gttcaacaatatgccaacttagatatcctgatg

SEQ ID NO: 187370 - DNA, 33 bp, Homo sapien
gttcaacaatatgccagcttagatatcctgatg

SEQ ID NO: 187371 - DNA, 33 bp, Homo sapien
atgattaccaattatacgcctgaaaactgacag

SEQ ID NO: 187372 - DNA, 33 bp, Homo sapien
atgattaccaattatatgcctgaaaactgacag

SEQ ID NO: 187373 - DNA, 33 bp, Homo sapien
ctctggaacccctggcgcttccggttacactga

SEQ ID NO: 187374 - DNA, 33 bp, Homo sapien
ctctggaacccctggctcttccggttacactga

SEQ ID NO: 187375 - DNA, 33 bp, Homo sapien
ttttctttaataataacgccctcggtatcgagt

SEQ ID NO: 187376 - DNA, 33 bp, Homo sapien
ttttctttaataataatgccctcggtatcgagt

SEQ ID NO: 187377 - DNA, 33 bp, Homo sapien
tatctctccaggaaagaccatattatgaaagtg

SEQ ID NO: 187378 - DNA, 33 bp, Homo sapien
tatctctccaggaaaggccatattatgaaagtg

SEQ ID NO: 187379 - DNA, 33 bp, Homo sapien
aaggtcaaaggttttccctcatttttgtgacgt

SEQ ID NO: 187380 - DNA, 33 bp, Homo sapien
aaggtcaaaggttttctctcatttttgtgacgt

SEQ ID NO: 187381 - DNA, 33 bp, Homo sapien
ctatgtcaaagcagaaccgtttgtcaattgaat

SEQ ID NO: 187382 - DNA, 33 bp, Homo sapien
ctatgtcaaagcagaatcgtttgtcaattgaat

SEQ ID NO: 187383 - DNA, 33 bp, Homo sapien
ctactagatacaggcaaaccttgatgtatttct

SEQ ID NO: 187384 - DNA, 33 bp, Homo sapien
ctactagatacaggcataccttgatgtatttct

SEQ ID NO: 187385 - DNA, 33 bp, Homo sapien
ctagtagggcaatgaccgtattcctaggctgct

SEQ ID NO: 187386 - DNA, 33 bp, Homo sapien
ctagtagggcaatgactgtattcctaggctgct

SEQ ID NO: 187387 - DNA, 33 bp, Homo sapien
aaattcaactcataaaaaagaatcctattcaaa

SEQ ID NO: 187388 - DNA, 33 bp, Homo sapien
aaattcaactcataaagaagaatcctattcaaa

SEQ ID NO: 187389 - DNA, 33 bp, Homo sapien
ttaagactactgcataaagaggctgttagttta

SEQ ID NO: 187390 - DNA, 33 bp, Homo sapien
ttaagactactgcatagagaggctgttagttta

SEQ ID NO: 187391 - DNA, 33 bp, Homo sapien
aatagttttgtgtagagatttctggattttcta

SEQ ID NO: 187392 - DNA, 33 bp, Homo sapien
aatagttttgtgtagatatttctggattttcta

SEQ ID NO: 187393 - DNA, 33 bp, Homo sapien
ccggaatgtgttaagacaaagcattaacatgtt

SEQ ID NO: 187394 - DNA, 33 bp, Homo sapien
ccggaatgtgttaagagaaagcattaacatgtt

SEQ ID NO: 187395 - DNA, 33 bp, Homo sapien
aattaaaaacctggaacgacaaataataacata

SEQ ID NO: 187396 - DNA, 33 bp, Homo sapien
aattaaaaacctggaatgacaaataataacata

SEQ ID NO: 187397 - DNA, 33 bp, Homo sapien
gtagagttatgggccacgagtgagactaggaaa

SEQ ID NO: 187398 - DNA, 33 bp, Homo sapien
gtagagttatgggccatgagtgagactaggaaa

SEQ ID NO: 187399 - DNA, 33 bp, Homo sapien
taaaataagtcagaaaggtagagttatgggcca

SEQ ID NO: 187400 - DNA, 33 bp, Homo sapien
taaaataagtcagaaatgtagagttatgggcca

SEQ ID NO: 187401 - DNA, 33 bp, Homo sapien
tatgccaccattcagaagccctactcaacactg

SEQ ID NO: 187402 - DNA, 33 bp, Homo sapien
tatgccaccattcagaggccctactcaacactg

SEQ ID NO: 187403 - DNA, 33 bp, Homo sapien
gctatttttctgaaacacacaccattttataat

SEQ ID NO: 187404 - DNA, 33 bp, Homo sapien
gctatttttctgaaacgcacaccattttataat

SEQ ID NO: 187405 - DNA, 33 bp, Homo sapien
ggttctgtcacaaggacctcagagtactgggta

SEQ ID NO: 187406 - DNA, 33 bp, Homo sapien
ggttctgtcacaaggagctcagagtactgggta

SEQ ID NO: 187407 - DNA, 33 bp, Homo sapien
cagcacatgtctcaggaaaggcctgtattgact

SEQ ID NO: 187408 - DNA, 33 bp, Homo sapien
cagcacatgtctcagggaaggcctgtattgact

SEQ ID NO: 187409 - DNA, 33 bp, Homo sapien
gttagagcgcctgacaaaaagaaagatataaac

SEQ ID NO: 187410 - DNA, 33 bp, Homo sapien
gttagagcgcctgacagaaagaaagatataaac

SEQ ID NO: 187411 - DNA, 33 bp, Homo sapien
gaggataagtatcctaaacaggagaaataacga

SEQ ID NO: 187412 - DNA, 33 bp, Homo sapien
gaggataagtatcctacacaggagaaataacga

SEQ ID NO: 187413 - DNA, 33 bp, Homo sapien
gttttccaaagccaagaaggggttactatactt

SEQ ID NO: 187414 - DNA, 33 bp, Homo sapien
gttttccaaagccaagtaggggttactatactt

SEQ ID NO: 187415 - DNA, 33 bp, Homo sapien
gcatccgtagagtaaccctgcagttagactgac

SEQ ID NO: 187416 - DNA, 33 bp, Homo sapien
gcatccgtagagtaacgctgcagttagactgac

SEQ ID NO: 187417 - DNA, 33 bp, Homo sapien
aataaatacctcttcacagtagtacctctagtt

SEQ ID NO: 187418 - DNA, 33 bp, Homo sapien
aataaatacctcttcatagtagtacctctagtt

SEQ ID NO: 187419 - DNA, 33 bp, Homo sapien
cttattggcttctaaaacacattataaattact

SEQ ID NO: 187420 - DNA, 33 bp, Homo sapien
cttattggcttctaaaccacattataaattact

SEQ ID NO: 187421 - DNA, 33 bp, Homo sapien
aataactgcgcccagaggaaatggtagtcccat

SEQ ID NO: 187422 - DNA, 33 bp, Homo sapien
aataactgcgcccagatgaaatggtagtcccat

SEQ ID NO: 187423 - DNA, 33 bp, Homo sapien
taaataatgctacaggaaattcttaagtaagtt

SEQ ID NO: 187424 - DNA, 33 bp, Homo sapien
taaataatgctacagggaattcttaagtaagtt

SEQ ID NO: 187425 - DNA, 33 bp, Homo sapien
ctcctgggctagtgaccgaagcaacactctggc

SEQ ID NO: 187426 - DNA, 33 bp, Homo sapien
ctcctgggctagtgactgaagcaacactctggc

SEQ ID NO: 187427 - DNA, 33 bp, Homo sapien
cttcacagacatggaaagattcaggaaaaatgt

SEQ ID NO: 187428 - DNA, 33 bp, Homo sapien
cttcacagacatggaatgattcaggaaaaatgt

SEQ ID NO: 187429 - DNA, 33 bp, Homo sapien
tgaaacactcaactcccctctgtatccctggga

SEQ ID NO: 187430 - DNA, 33 bp, Homo sapien
tgaaacactcaactcctctctgtatccctggga

SEQ ID NO: 187431 - DNA, 33 bp, Homo sapien
tgggtagtataaaccaaattttagagatgacga

SEQ ID NO: 187432 - DNA, 33 bp, Homo sapien
tgggtagtataaaccacattttagagatgacga

SEQ ID NO: 187433 - DNA, 33 bp, Homo sapien
ttttgaaaagtggtcccaaaatgactgtcatca

SEQ ID NO: 187434 - DNA, 33 bp, Homo sapien
ttttgaaaagtggtcctaaaatgactgtcatca

SEQ ID NO: 187435 - DNA, 33 bp, Homo sapien
acagagtcgctttgggcaattaactctacaaca

SEQ ID NO: 187436 - DNA, 33 bp, Homo sapien
acagagtcgctttgggtaattaactctacaaca

SEQ ID NO: 187437 - DNA, 33 bp, Homo sapien
tccaatgtctggctaactgaggctgtgaaggaa

SEQ ID NO: 187438 - DNA, 33 bp, Homo sapien
tccaatgtctggctaattgaggctgtgaaggaa

SEQ ID NO: 187439 - DNA, 33 bp, Homo sapien
atattaccagatcaagaaatcaaggattactag

SEQ ID NO: 187440 - DNA, 33 bp, Homo sapien
atattaccagatcaagcaatcaaggattactag

SEQ ID NO: 187441 - DNA, 33 bp, Homo sapien
ggcaggacatgggataaaatctgaggcttctgg

SEQ ID NO: 187442 - DNA, 33 bp, Homo sapien
ggcaggacatgggatagaatctgaggcttctgg

SEQ ID NO: 187443 - DNA, 33 bp, Homo sapien
ggaatgaatccagagggaattttaaaatgtttt

SEQ ID NO: 187444 - DNA, 33 bp, Homo sapien
ggaatgaatccagaggtaattttaaaatgtttt

SEQ ID NO: 187445 - DNA, 33 bp, Homo sapien
ctgatgggtacactggcaaaataaataaataaa

SEQ ID NO: 187446 - DNA, 33 bp, Homo sapien
ctgatgggtacactggtaaaataaataaataaa

SEQ ID NO: 187447 - DNA, 33 bp, Homo sapien
tgaagagtcccaaaaaccagagaccattttcat

SEQ ID NO: 187448 - DNA, 33 bp, Homo sapien
tgaagagtcccaaaaagcagagaccattttcat

SEQ ID NO: 187449 - DNA, 33 bp, Homo sapien
tcgttctctgcaaaaaagaggcagttgagggta

SEQ ID NO: 187450 - DNA, 33 bp, Homo sapien
tcgttctctgcaaaaaggaggcagttgagggta

SEQ ID NO: 187451 - DNA, 33 bp, Homo sapien
cagttttgggctatacacaatttcaaagttaac

SEQ ID NO: 187452 - DNA, 33 bp, Homo sapien
cagttttgggctatacgcaatttcaaagttaac

SEQ ID NO: 187453 - DNA, 33 bp, Homo sapien
cttcctaattagcacaatgagaggcttggactg

SEQ ID NO: 187454 - DNA, 33 bp, Homo sapien
cttcctaattagcacagtgagaggcttggactg

SEQ ID NO: 187455 - DNA, 33 bp, Homo sapien
ggtagcatgagggccaatctgagaaggcgggga

SEQ ID NO: 187456 - DNA, 33 bp, Homo sapien
ggtagcatgagggccagtctgagaaggcgggga

SEQ ID NO: 187457 - DNA, 33 bp, Homo sapien
gaggggagaatgatgccatcagatttaccttta

SEQ ID NO: 187458 - DNA, 33 bp, Homo sapien
gaggggagaatgatgctatcagatttaccttta

SEQ ID NO: 187459 - DNA, 33 bp, Homo sapien
ggggtctttataagagccagaaaggtgtatcag

SEQ ID NO: 187460 - DNA, 33 bp, Homo sapien
ggggtctttataagaggcagaaaggtgtatcag

SEQ ID NO: 187461 - DNA, 33 bp, Homo sapien
tcaaacaaaagcccgaaaagcaggtacaataga

SEQ ID NO: 187462 - DNA, 33 bp, Homo sapien
tcaaacaaaagcccgagaagcaggtacaataga

SEQ ID NO: 187463 - DNA, 33 bp, Homo sapien
ccctgtaattttcccgacacaaatggtcagccc

SEQ ID NO: 187464 - DNA, 33 bp, Homo sapien
ccctgtaattttcccgccacaaatggtcagccc

SEQ ID NO: 187465 - DNA, 33 bp, Homo sapien
atgtcacaccagctggcaaaggagaaatgtttt

SEQ ID NO: 187466 - DNA, 33 bp, Homo sapien
atgtcacaccagctggtaaaggagaaatgtttt

SEQ ID NO: 187467 - DNA, 33 bp, Homo sapien
gagacatagcagctcaaaataatggttacattt

SEQ ID NO: 187468 - DNA, 33 bp, Homo sapien
gagacatagcagctcagaataatggttacattt

SEQ ID NO: 187469 - DNA, 33 bp, Homo sapien
ctaaaagaagaagcaacgagaagctataacttc

SEQ ID NO: 187470 - DNA, 33 bp, Homo sapien
ctaaaagaagaagcaatgagaagctataacttc

SEQ ID NO: 187471 - DNA, 33 bp, Homo sapien
aaacaatagccattaacgttctgtaataggcag

SEQ ID NO: 187472 - DNA, 33 bp, Homo sapien
aaacaatagccattaaggttctgtaataggcag

SEQ ID NO: 187473 - DNA, 33 bp, Homo sapien
tgtatttgtaatgatccccagcatttgaaaata

SEQ ID NO: 187474 - DNA, 33 bp, Homo sapien
tgtatttgtaatgatctccagcatttgaaaata

SEQ ID NO: 187475 - DNA, 33 bp, Homo sapien
ggattcaaactgcctcaaaaccagttgttgccc

SEQ ID NO: 187476 - DNA, 33 bp, Homo sapien
ggattcaaactgcctcgaaaccagttgttgccc

SEQ ID NO: 187477 - DNA, 33 bp, Homo sapien
taaaacaaaaatatggccaaagagtcataggat

SEQ ID NO: 187478 - DNA, 33 bp, Homo sapien
taaaacaaaaatatggtcaaagagtcataggat

SEQ ID NO: 187479 - DNA, 33 bp, Homo sapien
cattctagtatctaaactggtaactcttatacc

SEQ ID NO: 187480 - DNA, 33 bp, Homo sapien
cattctagtatctaaattggtaactcttatacc

SEQ ID NO: 187481 - DNA, 33 bp, Homo sapien
ggtactacttgactttcaacattatacacatga

SEQ ID NO: 187482 - DNA, 33 bp, Homo sapien
ggtactacttgacttttaacattatacacatga

SEQ ID NO: 187483 - DNA, 33 bp, Homo sapien
tctcccatatcagcaggaaggcattagaaaact

SEQ ID NO: 187484 - DNA, 33 bp, Homo sapien
tctcccatatcagcagtaaggcattagaaaact

SEQ ID NO: 187485 - DNA, 33 bp, Homo sapien
tggtctggaaccaaaccggctatatctccaaga

SEQ ID NO: 187486 - DNA, 33 bp, Homo sapien
tggtctggaaccaaactggctatatctccaaga

SEQ ID NO: 187487 - DNA, 33 bp, Homo sapien
gcaattaatattggataagcacaaaccatactc

SEQ ID NO: 187488 - DNA, 33 bp, Homo sapien
gcaattaatattggatgagcacaaaccatactc

SEQ ID NO: 187489 - DNA, 33 bp, Homo sapien
agaggatcatttgggcaccacgtgaaattgatg

SEQ ID NO: 187490 - DNA, 33 bp, Homo sapien
agaggatcatttgggcgccacgtgaaattgatg

SEQ ID NO: 187491 - DNA, 33 bp, Homo sapien
ctctgggactattggcaaagtaactatttcttg

SEQ ID NO: 187492 - DNA, 33 bp, Homo sapien
ctctgggactattggcgaagtaactatttcttg

SEQ ID NO: 187493 - DNA, 33 bp, Homo sapien
gcaataagaattcttagggcacctgcaaatata

SEQ ID NO: 187494 - DNA, 33 bp, Homo sapien
gcaataagaattcttatggcacctgcaaatata

SEQ ID NO: 187495 - DNA, 33 bp, Homo sapien
actggttattttctaacgttaccagctgatgct

SEQ ID NO: 187496 - DNA, 33 bp, Homo sapien
actggttattttctaatgttaccagctgatgct

SEQ ID NO: 187497 - DNA, 33 bp, Homo sapien
aggtttatgtgttcaaccacagatattagagta

SEQ ID NO: 187498 - DNA, 33 bp, Homo sapien
aggtttatgtgttcaatcacagatattagagta

SEQ ID NO: 187499 - DNA, 33 bp, Homo sapien
aaagaacaaaacctcaaagaagatttaacaacc

SEQ ID NO: 187500 - DNA, 33 bp, Homo sapien
aaagaacaaaacctcagagaagatttaacaacc

SEQ ID NO: 187501 - DNA, 33 bp, Homo sapien
ccacaaactggtggtacgccaatggtctctttt

SEQ ID NO: 187502 - DNA, 33 bp, Homo sapien
ccacaaactggtggtatgccaatggtctctttt

SEQ ID NO: 187503 - DNA, 33 bp, Homo sapien
taggtccatttcactcactaatgtagatctgaa

SEQ ID NO: 187504 - DNA, 33 bp, Homo sapien
taggtccatttcactcgctaatgtagatctgaa

SEQ ID NO: 187505 - DNA, 33 bp, Homo sapien
gtattatatttttgcaactctgaaaaataacga

SEQ ID NO: 187506 - DNA, 33 bp, Homo sapien
gtattatatttttgcacctctgaaaaataacga

SEQ ID NO: 187507 - DNA, 33 bp, Homo sapien
tccaagaaactctagaatcaactatgcaactgt

SEQ ID NO: 187508 - DNA, 33 bp, Homo sapien
tccaagaaactctagactcaactatgcaactgt

SEQ ID NO: 187509 - DNA, 33 bp, Homo sapien
ggggtcttacactgacaagttcctctgcatgaa

SEQ ID NO: 187510 - DNA, 33 bp, Homo sapien
ggggtcttacactgacgagttcctctgcatgaa

SEQ ID NO: 187511 - DNA, 33 bp, Homo sapien
tttccagatcaaaacacagtgtgcctttgtata

SEQ ID NO: 187512 - DNA, 33 bp, Homo sapien
tttccagatcaaaacagagtgtgcctttgtata

SEQ ID NO: 187513 - DNA, 33 bp, Homo sapien
tcttggcctacagctacatccatgctgctgcaa

SEQ ID NO: 187514 - DNA, 33 bp, Homo sapien
tcttggcctacagctatatccatgctgctgcaa

SEQ ID NO: 187515 - DNA, 33 bp, Homo sapien
aaaattcaagggagtacgggtgtcttgcataac

SEQ ID NO: 187516 - DNA, 33 bp, Homo sapien
aaaattcaagggagtaggggtgtcttgcataac

SEQ ID NO: 187517 - DNA, 33 bp, Homo sapien
ttaagtttgttcctccagctttcatttcttttt

SEQ ID NO: 187518 - DNA, 33 bp, Homo sapien
ttaagtttgttcctccggctttcatttcttttt

SEQ ID NO: 187519 - DNA, 33 bp, Homo sapien
atggaagagagtggcacggctgaactatatgca

SEQ ID NO: 187520 - DNA, 33 bp, Homo sapien
atggaagagagtggcagggctgaactatatgca

SEQ ID NO: 187521 - DNA, 33 bp, Homo sapien
aagagtaagtgaaatcaacaaaagtagtttgtt

SEQ ID NO: 187522 - DNA, 33 bp, Homo sapien
aagagtaagtgaaatccacaaaagtagtttgtt

SEQ ID NO: 187523 - DNA, 33 bp, Homo sapien
gctctaccaatcctcccgcaacatttaaatcat

SEQ ID NO: 187524 - DNA, 33 bp, Homo sapien
gctctaccaatcctcctgcaacatttaaatcat

SEQ ID NO: 187525 - DNA, 33 bp, Homo sapien
gctggcaggctgagaaaagaaggtggaagacag

SEQ ID NO: 187526 - DNA, 33 bp, Homo sapien
gctggcaggctgagaagagaaggtggaagacag

SEQ ID NO: 187527 - DNA, 33 bp, Homo sapien
aatcacttgcacagataaatagtaaataaaatg

SEQ ID NO: 187528 - DNA, 33 bp, Homo sapien
aatcacttgcacagatgaatagtaaataaaatg

SEQ ID NO: 187529 - DNA, 33 bp, Homo sapien
accactctcaacatagcctataaatcatttctg

SEQ ID NO: 187530 - DNA, 33 bp, Homo sapien
accactctcaacatagtctataaatcatttctg

SEQ ID NO: 187531 - DNA, 33 bp, Homo sapien
gttatttagagctcccagatttttaatactctt

SEQ ID NO: 187532 - DNA, 33 bp, Homo sapien
gttatttagagctcccggatttttaatactctt

SEQ ID NO: 187533 - DNA, 33 bp, Homo sapien
agttgctgatgaaaaactggatgttcaatcttt

SEQ ID NO: 187534 - DNA, 33 bp, Homo sapien
agttgctgatgaaaaattggatgttcaatcttt

SEQ ID NO: 187535 - DNA, 33 bp, Homo sapien
aaaagcagcttgtgccaaaatacatttatctgt

SEQ ID NO: 187536 - DNA, 33 bp, Homo sapien
aaaagcagcttgtgccgaaatacatttatctgt

SEQ ID NO: 187537 - DNA, 33 bp, Homo sapien
cttaatctaaactgagaaagaaattcacactaa

SEQ ID NO: 187538 - DNA, 33 bp, Homo sapien
cttaatctaaactgaggaagaaattcacactaa

SEQ ID NO: 187539 - DNA, 33 bp, Homo sapien
acagttggagccttcaaaacttctccctcagta

SEQ ID NO: 187540 - DNA, 33 bp, Homo sapien
acagttggagccttcagaacttctccctcagta

SEQ ID NO: 187541 - DNA, 33 bp, Homo sapien
tcacctaggtctaatgccaaatgttagataata

SEQ ID NO: 187542 - DNA, 33 bp, Homo sapien
tcacctaggtctaatgtcaaatgttagataata

SEQ ID NO: 187543 - DNA, 33 bp, Homo sapien
tagggaaagaggaatacacaaacgtttggaaga

SEQ ID NO: 187544 - DNA, 33 bp, Homo sapien
tagggaaagaggaatatacaaacgtttggaaga

SEQ ID NO: 187545 - DNA, 33 bp, Homo sapien
tgcagacctgatcatagctttatcaatcatttg

SEQ ID NO: 187546 - DNA, 33 bp, Homo sapien
tgcagacctgatcatatctttatcaatcatttg

SEQ ID NO: 187547 - DNA, 33 bp, Homo sapien
gggatgtggtactgagaccaaggaagaacagga

SEQ ID NO: 187548 - DNA, 33 bp, Homo sapien
gggatgtggtactgaggccaaggaagaacagga

SEQ ID NO: 187549 - DNA, 33 bp, Homo sapien
tttctacttcttggtaaaacacattttgtatga

SEQ ID NO: 187550 - DNA, 33 bp, Homo sapien
tttctacttcttggtagaacacattttgtatga

SEQ ID NO: 187551 - DNA, 33 bp, Homo sapien
gataaggccaagagaactgtaattttcaaaaac

SEQ ID NO: 187552 - DNA, 33 bp, Homo sapien
gataaggccaagagaattgtaattttcaaaaac

SEQ ID NO: 187553 - DNA, 33 bp, Homo sapien
actctgagcaagagaacgatgtatataggccat

SEQ ID NO: 187554 - DNA, 33 bp, Homo sapien
actctgagcaagagaatgatgtatataggccat

SEQ ID NO: 187555 - DNA, 33 bp, Homo sapien
acacataaatcacatgaaatccaaagagtctat

SEQ ID NO: 187556 - DNA, 33 bp, Homo sapien
acacataaatcacatgcaatccaaagagtctat

SEQ ID NO: 187557 - DNA, 33 bp, Homo sapien
gtaaggaggcgtaacacaactctgtataggaat

SEQ ID NO: 187558 - DNA, 33 bp, Homo sapien
gtaaggaggcgtaacagaactctgtataggaat

SEQ ID NO: 187559 - DNA, 33 bp, Homo sapien
gggaacattagatgtgaaactacgggatcacgt

SEQ ID NO: 187560 - DNA, 33 bp, Homo sapien
gggaacattagatgtggaactacgggatcacgt

SEQ ID NO: 187561 - DNA, 33 bp, Homo sapien
tcatgcagagtctaaacgttatgcttatctctg

SEQ ID NO: 187562 - DNA, 33 bp, Homo sapien
tcatgcagagtctaaatgttatgcttatctctg

SEQ ID NO: 187563 - DNA, 33 bp, Homo sapien; identical to SEQ ID NO: 187561

SEQ ID NO: 187564 - DNA, 33 bp, Homo sapien; identical to SEQ ID NO: 187562

SEQ ID NO: 187565 - DNA, 33 bp, Homo sapien
ctatagaatgtatgtgaaggtagctaaggaact

SEQ ID NO: 187566 - DNA, 33 bp, Homo sapien
ctatagaatgtatgtgcaggtagctaaggaact

SEQ ID NO: 187567 - DNA, 33 bp, Homo sapien
tgctattttaaaagacagtcttcaagttcagaa

SEQ ID NO: 187568 - DNA, 33 bp, Homo sapien
tgctattttaaaagactgtcttcaagttcagaa

SEQ ID NO: 187569 - DNA, 33 bp, Homo sapien
gataaacttacaaatgctaccagtgtggattac

SEQ ID NO: 187570 - DNA, 33 bp, Homo sapien
gataaacttacaaatgttaccagtgtggattac

SEQ ID NO: 187571 - DNA, 33 bp, Homo sapien
aactagtactaaatgccctaaaacgaaacaaaa

SEQ ID NO: 187572 - DNA, 33 bp, Homo sapien
aactagtactaaatgctctaaaacgaaacaaaa

SEQ ID NO: 187573 - DNA, 33 bp, Homo sapien
aatagaggaaatttaaaagagtgaatatttgca

SEQ ID NO: 187574 - DNA, 33 bp, Homo sapien
aatagaggaaatttaagagagtgaatatttgca

SEQ ID NO: 187575 - DNA, 33 bp, Homo sapien
ttacagtaggtattaactgttcagcatcttaag

SEQ ID NO: 187576 - DNA, 33 bp, Homo sapien
ttacagtaggtattaattgttcagcatcttaag

SEQ ID NO: 187577 - DNA, 33 bp, Homo sapien
attaagttttgagtcaaatgacccaggagctga

SEQ ID NO: 187578 - DNA, 33 bp, Homo sapien
attaagttttgagtcagatgacccaggagctga

SEQ ID NO: 187579 - DNA, 33 bp, Homo sapien
ttatccatgccccccaatctacatgaaatggag

SEQ ID NO: 187580 - DNA, 33 bp, Homo sapien
ttatccatgccccccagtctacatgaaatggag

SEQ ID NO: 187581 - DNA, 33 bp, Homo sapien
ggttggctggtaattaataagttgtgttgatgc

SEQ ID NO: 187582 - DNA, 33 bp, Homo sapien
ggttggctggtaattagtaagttgtgttgatgc

SEQ ID NO: 187583 - DNA, 33 bp, Homo sapien
ctatgacaatatctgaaagaatgaatggatacc

SEQ ID NO: 187584 - DNA, 33 bp, Homo sapien
ctatgacaatatctgagagaatgaatggatacc

SEQ ID NO: 187585 - DNA, 33 bp, Homo sapien
ccactgctttgggacactgattctcttactctt

SEQ ID NO: 187586 - DNA, 33 bp, Homo sapien
ccactgctttgggacagtgattctcttactctt

SEQ ID NO: 187587 - DNA, 33 bp, Homo sapien
ggactgaatatctggagaagtaaatgagacata

SEQ ID NO: 187588 - DNA, 33 bp, Homo sapien
ggactgaatatctggataagtaaatgagacata

SEQ ID NO: 187589 - DNA, 33 bp, Homo sapien
tctcataagaccagtacattgaggattaggttt

SEQ ID NO: 187590 - DNA, 33 bp, Homo sapien
tctcataagaccagtatattgaggattaggttt

SEQ ID NO: 187591 - DNA, 33 bp, Homo sapien
accaccagatggcccactgctcaagagagtcat

SEQ ID NO: 187592 - DNA, 33 bp, Homo sapien
accaccagatggcccattgctcaagagagtcat

SEQ ID NO: 187593 - DNA, 33 bp, Homo sapien
tctgtgcttagttttcaaggctacttcatgggg

SEQ ID NO: 187594 - DNA, 33 bp, Homo sapien
tctgtgcttagttttcgaggctacttcatgggg

SEQ ID NO: 187595 - DNA, 33 bp, Homo sapien
tattctcagtgttttaagaggcactaagcccat

SEQ ID NO: 187596 - DNA, 33 bp, Homo sapien
tattctcagtgttttaggaggcactaagcccat

SEQ ID NO: 187597 - DNA, 33 bp, Homo sapien
tgcgtcttggtttctaatacaggaagtgacatt

SEQ ID NO: 187598 - DNA, 33 bp, Homo sapien
tgcgtcttggtttctactacaggaagtgacatt

SEQ ID NO: 187599 - DNA, 33 bp, Homo sapien
tttttgtttgttttaccatagcaaagtctgacc

SEQ ID NO: 187600 - DNA, 33 bp, Homo sapien
tttttgtttgttttactatagcaaagtctgacc

SEQ ID NO: 187601 - DNA, 33 bp, Homo sapien
gtccctgacttccagacggtatctctggaccag

SEQ ID NO: 187602 - DNA, 33 bp, Homo sapien
gtccctgacttccagatggtatctctggaccag

SEQ ID NO: 187603 - DNA, 33 bp, Homo sapien
acattactggtagcctaagagtactccctgtga

SEQ ID NO: 187604 - DNA, 33 bp, Homo sapien
acattactggtagcctgagagtactccctgtga

SEQ ID NO: 187605 - DNA, 33 bp, Homo sapien
actgcctgcagatgcactcattacttcctacct

SEQ ID NO: 187606 - DNA, 33 bp, Homo sapien
actgcctgcagatgcattcattacttcctacct

SEQ ID NO: 187607 - DNA, 33 bp, Homo sapien
tttcatggctaaaaacacaggccttatttaaaa

SEQ ID NO: 187608 - DNA, 33 bp, Homo sapien
tttcatggctaaaaacgcaggccttatttaaaa

SEQ ID NO: 187609 - DNA, 33 bp, Homo sapien
gacggaaaagaactcacggatctcctggaaaat

SEQ ID NO: 187610 - DNA, 33 bp, Homo sapien
gacggaaaagaactcatggatctcctggaaaat

SEQ ID NO: 187611 - DNA, 33 bp, Homo sapien
catacaagcaagtgcacaaatgaatagatgctt

SEQ ID NO: 187612 - DNA, 33 bp, Homo sapien
catacaagcaagtgcagaaatgaatagatgctt

SEQ ID NO: 187613 - DNA, 33 bp, Homo sapien
acctagacagactagaagccccaagatgcaagc

SEQ ID NO: 187614 - DNA, 33 bp, Homo sapien
acctagacagactagatgccccaagatgcaagc

SEQ ID NO: 187615 - DNA, 33 bp, Homo sapien
tagtctgtctaggtataagagcactaggcagaa

SEQ ID NO: 187616 - DNA, 33 bp, Homo sapien
tagtctgtctaggtatgagagcactaggcagaa

SEQ ID NO: 187617 - DNA, 33 bp, Homo sapien
taattagaattgtgataaatcctctacagaaaa

SEQ ID NO: 187618 - DNA, 33 bp, Homo sapien
taattagaattgtgatcaatcctctacagaaaa

SEQ ID NO: 187619 - DNA, 33 bp, Homo sapien
aatcctctacagaaaaagtaaagggtgctataa

SEQ ID NO: 187620 - DNA, 33 bp, Homo sapien
aatcctctacagaaaatgtaaagggtgctataa

SEQ ID NO: 187621 - DNA, 33 bp, Homo sapien
ttaaataagggaagaacagctcaagatgagatg

SEQ ID NO: 187622 - DNA, 33 bp, Homo sapien
ttaaataagggaagaatagctcaagatgagatg

SEQ ID NO: 187623 - DNA, 33 bp, Homo sapien
aaaacagtacttccaactaactctgcttttttt

SEQ ID NO: 187624 - DNA, 33 bp, Homo sapien
aaaacagtacttccaattaactctgcttttttt

SEQ ID NO: 187625 - DNA, 33 bp, Homo sapien
tttgctgaaaatcatcaagtttggtatctagac

SEQ ID NO: 187626 - DNA, 33 bp, Homo sapien
tttgctgaaaatcatccagtttggtatctagac

SEQ ID NO: 187627 - DNA, 33 bp, Homo sapien
ttccccagattccatgaaagtatatgacagaag

SEQ ID NO: 187628 - DNA, 33 bp, Homo sapien
ttccccagattccatgcaagtatatgacagaag

SEQ ID NO: 187629 - DNA, 33 bp, Homo sapien
aactttcaacagatacaatggctctctctacct

SEQ ID NO: 187630 - DNA, 33 bp, Homo sapien
aactttcaacagatactatggctctctctacct

SEQ ID NO: 187631 - DNA, 33 bp, Homo sapien
gatttgattccaaaacaggatagccatgattgt

SEQ ID NO: 187632 - DNA, 33 bp, Homo sapien
gatttgattccaaaacgggatagccatgattgt

SEQ ID NO: 187633 - DNA, 33 bp, Homo sapien
ctgtgggtctctcataaatggctgatatggttt

SEQ ID NO: 187634 - DNA, 33 bp, Homo sapien
ctgtgggtctctcatacatggctgatatggttt

SEQ ID NO: 187635 - DNA, 33 bp, Homo sapien
ggtttgcacgtaagacacctacctatctcccta

SEQ ID NO: 187636 - DNA, 33 bp, Homo sapien
ggtttgcacgtaagactcctacctatctcccta

SEQ ID NO: 187637 - DNA, 33 bp, Homo sapien
tcttcttgctgcaaagaaagacttcttaatctg

SEQ ID NO: 187638 - DNA, 33 bp, Homo sapien
tcttcttgctgcaaagtaagacttcttaatctg

SEQ ID NO: 187639 - DNA, 33 bp, Homo sapien
cctacttcctccctatcataaacattcattcat

SEQ ID NO: 187640 - DNA, 33 bp, Homo sapien
cctacttcctccctatgataaacattcattcat

SEQ ID NO: 187641 - DNA, 33 bp, Homo sapien
gcttgttcctgttagaaaattacatatatcagg

SEQ ID NO: 187642 - DNA, 33 bp, Homo sapien
gcttgttcctgttagataattacatatatcagg

SEQ ID NO: 187643 - DNA, 33 bp, Homo sapien
tttatgatctaagagaacaatggtagaggcaga

SEQ ID NO: 187644 - DNA, 33 bp, Homo sapien
tttatgatctaagagagcaatggtagaggcaga

SEQ ID NO: 187645 - DNA, 33 bp, Homo sapien
gagtccatgttcaacaacctcattttggtcaga

SEQ ID NO: 187646 - DNA, 33 bp, Homo sapien
gagtccatgttcaacagcctcattttggtcaga

SEQ ID NO: 187647 - DNA, 33 bp, Homo sapien
aaacaaacattaattacccagtttgcactaggc

SEQ ID NO: 187648 - DNA, 33 bp, Homo sapien
aaacaaacattaattatccagtttgcactaggc

SEQ ID NO: 187649 - DNA, 33 bp, Homo sapien
cacaatgaccaagtgaacacaatgacttcctaa

SEQ ID NO: 187650 - DNA, 33 bp, Homo sapien
cacaatgaccaagtgagcacaatgacttcctaa

SEQ ID NO: 187651 - DNA, 33 bp, Homo sapien
tagaacccaactcgaggcaacaagatgaagatg

SEQ ID NO: 187652 - DNA, 33 bp, Homo sapien
tagaacccaactcgagtcaacaagatgaagatg

SEQ ID NO: 187653 - DNA, 33 bp, Homo sapien
ttttagttgccgaggccataaaccttgaaattg

SEQ ID NO: 187654 - DNA, 33 bp, Homo sapien
ttttagttgccgaggcgataaaccttgaaattg

SEQ ID NO: 187655 - DNA, 33 bp, Homo sapien
tacctctgaggaagcactctaacttattggcca

SEQ ID NO: 187656 - DNA, 33 bp, Homo sapien
tacctctgaggaagcattctaacttattggcca

SEQ ID NO: 187657 - DNA, 33 bp, Homo sapien
aacctcaaaaatgactcaaagattcttaccaca

SEQ ID NO: 187658 - DNA, 33 bp, Homo sapien
aacctcaaaaatgactgaaagattcttaccaca

SEQ ID NO: 187659 - DNA, 33 bp, Homo sapien
agggtgtaattaagccgatgaactcgtacctcc

SEQ ID NO: 187660 - DNA, 33 bp, Homo sapien
agggtgtaattaagcctatgaactcgtacctcc

SEQ ID NO: 187661 - DNA, 33 bp, Homo sapien
caatgaaaagaaagaccgaaataggttgagaat

SEQ ID NO: 187662 - DNA, 33 bp, Homo sapien
caatgaaaagaaagactgaaataggttgagaat

SEQ ID NO: 187663 - DNA, 33 bp, Homo sapien
gcctttcaattgcagcgcatacataacatcttc

SEQ ID NO: 187664 - DNA, 33 bp, Homo sapien
gcctttcaattgcagctcatacataacatcttc

SEQ ID NO: 187665 - DNA, 33 bp, Homo sapien
tctttcctgtctcaccaatgggcctagtgcgtc

SEQ ID NO: 187666 - DNA, 33 bp, Homo sapien
tctttcctgtctcaccgatgggcctagtgcgtc

SEQ ID NO: 187667 - DNA, 33 bp, Homo sapien
taaagaatgctgacaacaagaagaagattttta

SEQ ID NO: 187668 - DNA, 33 bp, Homo sapien
taaagaatgctgacaagaagaagaagattttta

SEQ ID NO: 187669 - DNA, 33 bp, Homo sapien
gtctggatttatagtcaatttgtcactgtgatc

SEQ ID NO: 187670 - DNA, 33 bp, Homo sapien
gtctggatttatagtccatttgtcactgtgatc

SEQ ID NO: 187671 - DNA, 33 bp, Homo sapien
gggtaggagggagaggaagttagcgagagttag

SEQ ID NO: 187672 - DNA, 33 bp, Homo sapien
gggtaggagggagagggagttagcgagagttag

SEQ ID NO: 187673 - DNA, 33 bp, Homo sapien
acagctggcttctccaacatcctgggttcctta

SEQ ID NO: 187674 - DNA, 33 bp, Homo sapien
acagctggcttctccaccatcctgggttcctta

SEQ ID NO: 187675 - DNA, 33 bp, Homo sapien
agttccttttcttcccagattcaattgggttcc

SEQ ID NO: 187676 - DNA, 33 bp, Homo sapien
agttccttttcttcccggattcaattgggttcc

SEQ ID NO: 187677 - DNA, 33 bp, Homo sapien
agcctaagtcaaattgaaaagatttaagtgctt

SEQ ID NO: 187678 - DNA, 33 bp, Homo sapien
agcctaagtcaaattggaaagatttaagtgctt

SEQ ID NO: 187679 - DNA, 33 bp, Homo sapien
tttaaacattcaattacgtccaaccatcagact

SEQ ID NO: 187680 - DNA, 33 bp, Homo sapien
tttaaacattcaattatgtccaaccatcagact

SEQ ID NO: 187681 - DNA, 33 bp, Homo sapien
aaggacataaacaggaaccctctcaaaggaaga

SEQ ID NO: 187682 - DNA, 33 bp, Homo sapien
aaggacataaacaggacccctctcaaaggaaga

SEQ ID NO: 187683 - DNA, 33 bp, Homo sapien
atttcctgaggcaagccctatgctaattttatt

SEQ ID NO: 187684 - DNA, 33 bp, Homo sapien
atttcctgaggcaagctctatgctaattttatt

SEQ ID NO: 187685 - DNA, 33 bp, Homo sapien
agggaacaagcagatacgtaggaagaacattct

SEQ ID NO: 187686 - DNA, 33 bp, Homo sapien
agggaacaagcagatatgtaggaagaacattct

SEQ ID NO: 187687 - DNA, 33 bp, Homo sapien
ctttgatgtagacagcacatgtttccaagttaa

SEQ ID NO: 187688 - DNA, 33 bp, Homo sapien
ctttgatgtagacagcgcatgtttccaagttaa

SEQ ID NO: 187689 - DNA, 33 bp, Homo sapien
atgggggtcaacaagccatagccctcaggccac

SEQ ID NO: 187690 - DNA, 33 bp, Homo sapien
atgggggtcaacaagctatagccctcaggccac

SEQ ID NO: 187691 - DNA, 33 bp, Homo sapien
tcaataatcaagaagcaatggaaaaaggcactg

SEQ ID NO: 187692 - DNA, 33 bp, Homo sapien
tcaataatcaagaagcgatggaaaaaggcactg

SEQ ID NO: 187693 - DNA, 33 bp, Homo sapien
gaagcaacaactgaaacgtaagcctactgtttt

SEQ ID NO: 187694 - DNA, 33 bp, Homo sapien
gaagcaacaactgaaatgtaagcctactgtttt

SEQ ID NO: 187695 - DNA, 33 bp, Homo sapien
ctgccttgtcaacatcccctaacacatcagttt

SEQ ID NO: 187696 - DNA, 33 bp, Homo sapien
ctgccttgtcaacatctcctaacacatcagttt

SEQ ID NO: 187697 - DNA, 33 bp, Homo sapien
aaatctcaatgtaaaactgtggttgtgtttaag

SEQ ID NO: 187698 - DNA, 33 bp, Homo sapien
aaatctcaatgtaaaattgtggttgtgtttaag

SEQ ID NO: 187699 - DNA, 33 bp, Homo sapien
cttgaaatcatagctcgctctcaaaatatgaat

SEQ ID NO: 187700 - DNA, 33 bp, Homo sapien
cttgaaatcatagctctctctcaaaatatgaat

SEQ ID NO: 187701 - DNA, 33 bp, Homo sapien
ctgaggaagtgaagtcaagaaacttgttcaagg

SEQ ID NO: 187702 - DNA, 33 bp, Homo sapien
ctgaggaagtgaagtccagaaacttgttcaagg

SEQ ID NO: 187703 - DNA, 33 bp, Homo sapien
tcttttccgagtcttaaaagataattcctaata

SEQ ID NO: 187704 - DNA, 33 bp, Homo sapien
tcttttccgagtcttacaagataattcctaata

SEQ ID NO: 187705 - DNA, 33 bp, Homo sapien
tttaggtttaaagctcaattttggtgcttacta

SEQ ID NO: 187706 - DNA, 33 bp, Homo sapien
tttaggtttaaagctcgattttggtgcttacta

SEQ ID NO: 187707 - DNA, 33 bp, Homo sapien
gaaaagatttctttggaaagttcaagagaaatg

SEQ ID NO: 187708 - DNA, 33 bp, Homo sapien
gaaaagatttctttggtaagttcaagagaaatg

SEQ ID NO: 187709 - DNA, 33 bp, Homo sapien
catttagcaagcattcaataaattgtaactact

SEQ ID NO: 187710 - DNA, 33 bp, Homo sapien
catttagcaagcattcgataaattgtaactact

SEQ ID NO: 187711 - DNA, 33 bp, Homo sapien
gcattctggctaatgaactaccaccaacatttt

SEQ ID NO: 187712 - DNA, 33 bp, Homo sapien
gcattctggctaatgagctaccaccaacatttt

SEQ ID NO: 187713 - DNA, 33 bp, Homo sapien
ctggatattatctgcaagtgttggaaataaaac

SEQ ID NO: 187714 - DNA, 33 bp, Homo sapien
ctggatattatctgcaggtgttggaaataaaac

SEQ ID NO: 187715 - DNA, 33 bp, Homo sapien
tcgttatgaaaagtcccattctctgtcataaaa

SEQ ID NO: 187716 - DNA, 33 bp, Homo sapien
tcgttatgaaaagtcctattctctgtcataaaa

SEQ ID NO: 187717 - DNA, 33 bp, Homo sapien
tcaaacagaggtacatgaatactttccaagtgg

SEQ ID NO: 187718 - DNA, 33 bp, Homo sapien
tcaaacagaggtacattaatactttccaagtgg

SEQ ID NO: 187719 - DNA, 33 bp, Homo sapien
actttttctggactctcactcaagaagcgttca

SEQ ID NO: 187720 - DNA, 33 bp, Homo sapien
actttttctggactcttactcaagaagcgttca

SEQ ID NO: 187721 - DNA, 33 bp, Homo sapien
actagaaaagtatctcaaacaggcaaggcagaa

SEQ ID NO: 187722 - DNA, 33 bp, Homo sapien
actagaaaagtatctcgaacaggcaaggcagaa

SEQ ID NO: 187723 - DNA, 33 bp, Homo sapien
ttccaagtcacatttaaaagaatcactctcact

SEQ ID NO: 187724 - DNA, 33 bp, Homo sapien
ttccaagtcacatttagaagaatcactctcact

SEQ ID NO: 187725 - DNA, 33 bp, Homo sapien
agtccaatttccttcacaaatgtgattcctcat

SEQ ID NO: 187726 - DNA, 33 bp, Homo sapien
agtccaatttccttcataaatgtgattcctcat

SEQ ID NO: 187727 - DNA, 33 bp, Homo sapien
aggtaactgctcaagacaatggagcaaataggg

SEQ ID NO: 187728 - DNA, 33 bp, Homo sapien
aggtaactgctcaagataatggagcaaataggg

SEQ ID NO: 187729 - DNA, 33 bp, Homo sapien
agacaattcagtcagcaatcctgtcctcaattg

SEQ ID NO: 187730 - DNA, 33 bp, Homo sapien
agacaattcagtcagcgatcctgtcctcaattg

SEQ ID NO: 187731 - DNA, 33 bp, Homo sapien
aaaagagcagggactcaaaagatgtaggccagt

SEQ ID NO: 187732 - DNA, 33 bp, Homo sapien
aaaagagcagggactccaaagatgtaggccagt

SEQ ID NO: 187733 - DNA, 33 bp, Homo sapien
aaaatggttactgaaacgctcagtatgtgcttg

SEQ ID NO: 187734 - DNA, 33 bp, Homo sapien
aaaatggttactgaaatgctcagtatgtgcttg

SEQ ID NO: 187735 - DNA, 33 bp, Homo sapien
aatagttatctaaaaaaaagtcatgatataaca

SEQ ID NO: 187736 - DNA, 33 bp, Homo sapien
aatagttatctaaaaataagtcatgatataaca

SEQ ID NO: 187737 - DNA, 33 bp, Homo sapien
gtgttgtaaaatgagaacaaatgacttctttca

SEQ ID NO: 187738 - DNA, 33 bp, Homo sapien
gtgttgtaaaatgagaccaaatgacttctttca

SEQ ID NO: 187739 - DNA, 33 bp, Homo sapien
cttcctctggggttgaagaagcaataaacaatt

SEQ ID NO: 187740 - DNA, 33 bp, Homo sapien
cttcctctggggttgaggaagcaataaacaatt

SEQ ID NO: 187741 - DNA, 33 bp, Homo sapien
tgaaggaactctaggaatatgtgtgcagaagtt

SEQ ID NO: 187742 - DNA, 33 bp, Homo sapien
tgaaggaactctaggagtatgtgtgcagaagtt

SEQ ID NO: 187743 - DNA, 33 bp, Homo sapien
aagctgctgattcccaaagataatggtgctgaa

SEQ ID NO: 187744 - DNA, 33 bp, Homo sapien
aagctgctgattcccagagataatggtgctgaa

SEQ ID NO: 187745 - DNA, 33 bp, Homo sapien
ggaaaacaaattcagtcaaactagtgaagccat

SEQ ID NO: 187746 - DNA, 33 bp, Homo sapien
ggaaaacaaattcagtgaaactagtgaagccat

SEQ ID NO: 187747 - DNA, 33 bp, Homo sapien
tggtttgtgcttcgtgaaactcagaacagagaa

SEQ ID NO: 187748 - DNA, 33 bp, Homo sapien
tggtttgtgcttcgtgcaactcagaacagagaa

SEQ ID NO: 187749 - DNA, 33 bp, Homo sapien
gacttgaaacaacataagtgtatttctcacggt

SEQ ID NO: 187750 - DNA, 33 bp, Homo sapien
gacttgaaacaacatacgtgtatttctcacggt

SEQ ID NO: 187751 - DNA, 33 bp, Homo sapien
tcatctttatcacgctcaattttgactccaacc

SEQ ID NO: 187752 - DNA, 33 bp, Homo sapien
tcatctttatcacgcttaattttgactccaacc

SEQ ID NO: 187753 - DNA, 33 bp, Homo sapien
ctgtattttgacataactagaggtttaaaaaat

SEQ ID NO: 187754 - DNA, 33 bp, Homo sapien
ctgtattttgacataagtagaggtttaaaaaat

SEQ ID NO: 187755 - DNA, 33 bp, Homo sapien
agtattacaattcccaccttgtacatgaaaaag

SEQ ID NO: 187756 - DNA, 33 bp, Homo sapien
agtattacaattcccatcttgtacatgaaaaag

SEQ ID NO: 187757 - DNA, 33 bp, Homo sapien
tgggagccaaaagagacgtgaataaaatagagg

SEQ ID NO: 187758 - DNA, 33 bp, Homo sapien
tgggagccaaaagagatgtgaataaaatagagg

SEQ ID NO: 187759 - DNA, 33 bp, Homo sapien
tttatttacaaaacttcaagaacagtgcacaca

SEQ ID NO: 187760 - DNA, 33 bp, Homo sapien
tttatttacaaaacttgaagaacagtgcacaca

SEQ ID NO: 187761 - DNA, 33 bp, Homo sapien
aagcttcagttttctaacatatcagccctgccc

SEQ ID NO: 187762 - DNA, 33 bp, Homo sapien
aagcttcagttttctatcatatcagccctgccc

SEQ ID NO: 187763 - DNA, 33 bp, Homo sapien
ctccattactcttaacaatgttcatacaaaata

SEQ ID NO: 187764 - DNA, 33 bp, Homo sapien
ctccattactcttaacgatgttcatacaaaata

SEQ ID NO: 187765 - DNA, 33 bp, Homo sapien
tcaaatcattttttgacagacacagcgacaagt

SEQ ID NO: 187766 - DNA, 33 bp, Homo sapien
tcaaatcattttttgatagacacagcgacaagt

SEQ ID NO: 187767 - DNA, 33 bp, Homo sapien
gatctccgatgtctgaaggttataggtttggca

SEQ ID NO: 187768 - DNA, 33 bp, Homo sapien
gatctccgatgtctgagggttataggtttggca

SEQ ID NO: 187769 - DNA, 33 bp, Homo sapien
ctgcatcagcccggtcaccccaagctccactcc

SEQ ID NO: 187770 - DNA, 33 bp, Homo sapien
ctgcatcagcccggtcgccccaagctccactcc

SEQ ID NO: 187771 - DNA, 33 bp, Homo sapien
gtcatttggaagaagaaaaaattgaatccataa

SEQ ID NO: 187772 - DNA, 33 bp, Homo sapien
gtcatttggaagaagacaaaattgaatccataa

SEQ ID NO: 187773 - DNA, 33 bp, Homo sapien
aatcttcctctctggacactggacaagtcaaag

SEQ ID NO: 187774 - DNA, 33 bp, Homo sapien
aatcttcctctctggatactggacaagtcaaag

SEQ ID NO: 187775 - DNA, 33 bp, Homo sapien
acgtgtgtcctatgcagtattaaagtgcctgat

SEQ ID NO: 187776 - DNA, 33 bp, Homo sapien
acgtgtgtcctatgcattattaaagtgcctgat

SEQ ID NO: 187777 - DNA, 33 bp, Homo sapien
ctcccattttttgagcactgcttcagtaagtgt

SEQ ID NO: 187778 - DNA, 33 bp, Homo sapien
ctcccattttttgagcgctgcttcagtaagtgt

SEQ ID NO: 187779 - DNA, 33 bp, Homo sapien
ccccctattttgtgccaattaaatggataccaa

SEQ ID NO: 187780 - DNA, 33 bp, Homo sapien
ccccctattttgtgccgattaaatggataccaa

SEQ ID NO: 187781 - DNA, 33 bp, Homo sapien
tctgtcagatttaaagactgtaacagcagaaat

SEQ ID NO: 187782 - DNA, 33 bp, Homo sapien
tctgtcagatttaaagtctgtaacagcagaaat

SEQ ID NO: 187783 - DNA, 33 bp, Homo sapien
agttggtaaatgaggcaatggtttttaagagaa

SEQ ID NO: 187784 - DNA, 33 bp, Homo sapien
agttggtaaatgaggcgatggtttttaagagaa

SEQ ID NO: 187785 - DNA, 33 bp, Homo sapien
ggacagctttttccggacaaagaaagcagaaaa

SEQ ID NO: 187786 - DNA, 33 bp, Homo sapien
ggacagctttttccgggcaaagaaagcagaaaa

SEQ ID NO: 187787 - DNA, 33 bp, Homo sapien
gggataaaaacccaatcagcaagtacctaaaag

SEQ ID NO: 187788 - DNA, 33 bp, Homo sapien
gggataaaaacccaatgagcaagtacctaaaag

SEQ ID NO: 187789 - DNA, 33 bp, Homo sapien
ctaaatgtggtgtgtacgatggaagcgtgtgaa

SEQ ID NO: 187790 - DNA, 33 bp, Homo sapien
ctaaatgtggtgtgtatgatggaagcgtgtgaa

SEQ ID NO: 187791 - DNA, 33 bp, Homo sapien
agagcccaactcatgcgatttcttccatgtaat

SEQ ID NO: 187792 - DNA, 33 bp, Homo sapien
agagcccaactcatgctatttcttccatgtaat

SEQ ID NO: 187793 - DNA, 33 bp, Homo sapien
agtgagcatacaaataaaaagtgtgacctaggt

SEQ ID NO: 187794 - DNA, 33 bp, Homo sapien
agtgagcatacaaatacaaagtgtgacctaggt

SEQ ID NO: 187795 - DNA, 33 bp, Homo sapien
gagatatcttggtatacgccctttcaacctctc

SEQ ID NO: 187796 - DNA, 33 bp, Homo sapien
gagatatcttggtatatgccctttcaacctctc

SEQ ID NO: 187797 - DNA, 33 bp, Homo sapien
cacttagagtaaaagcaaaactgcttaccataa

SEQ ID NO: 187798 - DNA, 33 bp, Homo sapien
cacttagagtaaaagccaaactgcttaccataa

SEQ ID NO: 187799 - DNA, 33 bp, Homo sapien
tttctgcttttgtctacggaggattatcttgta

SEQ ID NO: 187800 - DNA, 33 bp, Homo sapien
tttctgcttttgtctatggaggattatcttgta

SEQ ID NO: 187801 - DNA, 33 bp, Homo sapien
aagccacggcccttgcagaatgacacagcccac

SEQ ID NO: 187802 - DNA, 33 bp, Homo sapien
aagccacggcccttgcggaatgacacagcccac

SEQ ID NO: 187803 - DNA, 33 bp, Homo sapien
aaaaaccttgaaaaacgatgaatggctaactag

SEQ ID NO: 187804 - DNA, 33 bp, Homo sapien
aaaaaccttgaaaaactatgaatggctaactag

SEQ ID NO: 187805 - DNA, 33 bp, Homo sapien
aagacaatattaatcaaaaagaacaaagcagga

SEQ ID NO: 187806 - DNA, 33 bp, Homo sapien
aagacaatattaatcagaaagaacaaagcagga

SEQ ID NO: 187807 - DNA, 33 bp, Homo sapien
cttgctgaatgttaagccatccttgcattgatg

SEQ ID NO: 187808 - DNA, 33 bp, Homo sapien
cttgctgaatgttaagtcatccttgcattgatg

SEQ ID NO: 187809 - DNA, 33 bp, Homo sapien
aagcccagaatgggagccatatacgtcccagtt

SEQ ID NO: 187810 - DNA, 33 bp, Homo sapien
aagcccagaatgggaggcatatacgtcccagtt

SEQ ID NO: 187811 - DNA, 33 bp, Homo sapien
tgtatattggatgtgaaaggtgaaaaaaaacta

SEQ ID NO: 187812 - DNA, 33 bp, Homo sapien
tgtatattggatgtgagaggtgaaaaaaaacta

SEQ ID NO: 187813 - DNA, 33 bp, Homo sapien
ttacttgttccctaaaacctattcctttcccag

SEQ ID NO: 187814 - DNA, 33 bp, Homo sapien
ttacttgttccctaaagcctattcctttcccag

SEQ ID NO: 187815 - DNA, 33 bp, Homo sapien
aaacacattgaaatcacgggcataatcaaattt

SEQ ID NO: 187816 - DNA, 33 bp, Homo sapien
aaacacattgaaatcatgggcataatcaaattt

SEQ ID NO: 187817 - DNA, 33 bp, Homo sapien
acagaagattaaacatgacagaagaacaggtat

SEQ ID NO: 187818 - DNA, 33 bp, Homo sapien
acagaagattaaacattacagaagaacaggtat

SEQ ID NO: 187819 - DNA, 33 bp, Homo sapien
cccctctgcagtcagagattagtgactcttcat

SEQ ID NO: 187820 - DNA, 33 bp, Homo sapien
cccctctgcagtcagatattagtgactcttcat

SEQ ID NO: 187821 - DNA, 33 bp, Homo sapien
gaataatatagatgtgcatttaggtaaagaagt

SEQ ID NO: 187822 - DNA, 33 bp, Homo sapien
gaataatatagatgtggatttaggtaaagaagt

SEQ ID NO: 187823 - DNA, 33 bp, Homo sapien
gtctagtgtctttaccagggaaagtctcacaca

SEQ ID NO: 187824 - DNA, 33 bp, Homo sapien
gtctagtgtctttacctgggaaagtctcacaca

SEQ ID NO: 187825 - DNA, 33 bp, Homo sapien
aagacaaaatccaccccgctgaatacaatttaa

SEQ ID NO: 187826 - DNA, 33 bp, Homo sapien
aagacaaaatccaccctgctgaatacaatttaa

SEQ ID NO: 187827 - DNA, 33 bp, Homo sapien
ggccccaggaagtaaactatctgacattatagg

SEQ ID NO: 187828 - DNA, 33 bp, Homo sapien
ggccccaggaagtaaagtatctgacattatagg

SEQ ID NO: 187829 - DNA, 33 bp, Homo sapien
tccatctatcatagtcactggaaacaaatttta

SEQ ID NO: 187830 - DNA, 33 bp, Homo sapien
tccatctatcatagtcgctggaaacaaatttta

SEQ ID NO: 187831 - DNA, 33 bp, Homo sapien
ttaatatatctttacaatctactaagctcctgt

SEQ ID NO: 187832 - DNA, 33 bp, Homo sapien
ttaatatatctttacagtctactaagctcctgt

SEQ ID NO: 187833 - DNA, 33 bp, Homo sapien
tagctggcaccttaaaaccttgaaattggtgag

SEQ ID NO: 187834 - DNA, 33 bp, Homo sapien
tagctggcaccttaaagccttgaaattggtgag

SEQ ID NO: 187835 - DNA, 33 bp, Homo sapien
tgaatccacgaccacaaagaaaacagcagaact

SEQ ID NO: 187836 - DNA, 33 bp, Homo sapien
tgaatccacgaccacacagaaaacagcagaact

SEQ ID NO: 187837 - DNA, 33 bp, Homo sapien
ttaatcagtgaattccactagctattcaagagc

SEQ ID NO: 187838 - DNA, 33 bp, Homo sapien
ttaatcagtgaattcccctagctattcaagagc

SEQ ID NO: 187839 - DNA, 33 bp, Homo sapien
cagggcccagctgttacggaggcaggaacattt

SEQ ID NO: 187840 - DNA, 33 bp, Homo sapien
cagggcccagctgttatggaggcaggaacattt

SEQ ID NO: 187841 - DNA, 33 bp, Homo sapien
attgtggggataattaagtttcaaaattgtccc

SEQ ID NO: 187842 - DNA, 33 bp, Homo sapien
attgtggggataattaggtttcaaaattgtccc

SEQ ID NO: 187843 - DNA, 33 bp, Homo sapien
agtgcttttctacacacggttctttaagaggca

SEQ ID NO: 187844 - DNA, 33 bp, Homo sapien
agtgcttttctacacatggttctttaagaggca

SEQ ID NO: 187845 - DNA, 33 bp, Homo sapien
tagtagtttatactgtcaattgttctcatgttt

SEQ ID NO: 187846 - DNA, 33 bp, Homo sapien
tagtagtttatactgttaattgttctcatgttt

SEQ ID NO: 187847 - DNA, 33 bp, Homo sapien
acaaactctaaagtcccctctcttcagcagctt

SEQ ID NO: 187848 - DNA, 33 bp, Homo sapien
acaaactctaaagtcctctctcttcagcagctt

SEQ ID NO: 187849 - DNA, 33 bp, Homo sapien
tataatttagcttataccctgaagtccatcctc

SEQ ID NO: 187850 - DNA, 33 bp, Homo sapien
tataatttagcttatatcctgaagtccatcctc

SEQ ID NO: 187851 - DNA, 33 bp, Homo sapien
gcacccaggtagaccaaaaagcacatgagaagg

SEQ ID NO: 187852 - DNA, 33 bp, Homo sapien
gcacccaggtagaccagaaagcacatgagaagg

SEQ ID NO: 187853 - DNA, 33 bp, Homo sapien
gaacgagggaactgaactaatgtggagtgcttc

SEQ ID NO: 187854 - DNA, 33 bp, Homo sapien
gaacgagggaactgaattaatgtggagtgcttc

SEQ ID NO: 187855 - DNA, 33 bp, Homo sapien
tattaagttttcattcaaacagtgaaaaattaa

SEQ ID NO: 187856 - DNA, 33 bp, Homo sapien
tattaagttttcattcgaacagtgaaaaattaa

SEQ ID NO: 187857 - DNA, 33 bp, Homo sapien
gcaaagatcaaatcaacatcaaaaagtgatgag

SEQ ID NO: 187858 - DNA, 33 bp, Homo sapien
gcaaagatcaaatcaatatcaaaaagtgatgag

SEQ ID NO: 187859 - DNA, 33 bp, Homo sapien
actgtgctctacatataaatggcttccaaactg

SEQ ID NO: 187860 - DNA, 33 bp, Homo sapien
actgtgctctacatatgaatggcttccaaactg

SEQ ID NO: 187861 - DNA, 33 bp, Homo sapien
aaaaaaggttatatgacgatttgcagactggct

SEQ ID NO: 187862 - DNA, 33 bp, Homo sapien
aaaaaaggttatatgatgatttgcagactggct

SEQ ID NO: 187863 - DNA, 33 bp, Homo sapien
actggctcttaaaagcgtccacctgtaaatgcc

SEQ ID NO: 187864 - DNA, 33 bp, Homo sapien
actggctcttaaaagcttccacctgtaaatgcc

SEQ ID NO: 187865 - DNA, 33 bp, Homo sapien
tggcagatgttggtgcccactcttgtcttctaa

SEQ ID NO: 187866 - DNA, 33 bp, Homo sapien
tggcagatgttggtgctcactcttgtcttctaa

SEQ ID NO: 187867 - DNA, 33 bp, Homo sapien
cttgctactaagttcaagagtcactccacacta

SEQ ID NO: 187868 - DNA, 33 bp, Homo sapien
cttgctactaagttcaggagtcactccacacta

SEQ ID NO: 187869 - DNA, 33 bp, Homo sapien
catgcaatatgtaaaaggatcttacagcactct

SEQ ID NO: 187870 - DNA, 33 bp, Homo sapien
catgcaatatgtaaaatgatcttacagcactct

SEQ ID NO: 187871 - DNA, 33 bp, Homo sapien
aaatttctttatcttacggcataccaaatgtgt

SEQ ID NO: 187872 - DNA, 33 bp, Homo sapien
aaatttctttatcttatggcataccaaatgtgt

SEQ ID NO: 187873 - DNA, 33 bp, Homo sapien
ttcagctctatgatacaatctgagtgtcagtca

SEQ ID NO: 187874 - DNA, 33 bp, Homo sapien
ttcagctctatgatacgatctgagtgtcagtca

SEQ ID NO: 187875 - DNA, 33 bp, Homo sapien
tttcactggaggtaacagggaagacttcaatga

SEQ ID NO: 187876 - DNA, 33 bp, Homo sapien
tttcactggaggtaactgggaagacttcaatga

SEQ ID NO: 187877 - DNA, 33 bp, Homo sapien
agtgaaaacatatgacagacttgcaataaatgt

SEQ ID NO: 187878 - DNA, 33 bp, Homo sapien
agtgaaaacatatgacggacttgcaataaatgt

SEQ ID NO: 187879 - DNA, 33 bp, Homo sapien
aaagcagacattgccaactggttatctcttttc

SEQ ID NO: 187880 - DNA, 33 bp, Homo sapien
aaagcagacattgccagctggttatctcttttc

SEQ ID NO: 187881 - DNA, 33 bp, Homo sapien
tttttagcttctccaacattcttggtttatttc

SEQ ID NO: 187882 - DNA, 33 bp, Homo sapien
tttttagcttctccaatattcttggtttatttc

SEQ ID NO: 187883 - DNA, 33 bp, Homo sapien
ctcctgtcttaggtcaagttccaagaaacagcc

SEQ ID NO: 187884 - DNA, 33 bp, Homo sapien
ctcctgtcttaggtcaggttccaagaaacagcc

SEQ ID NO: 187885 - DNA, 33 bp, Homo sapien
cttctctgtttgacaacctcctccatttgacag

SEQ ID NO: 187886 - DNA, 33 bp, Homo sapien
cttctctgtttgacaatctcctccatttgacag

SEQ ID NO: 187887 - DNA, 33 bp, Homo sapien
aggaatttgtgtttcccaactcttgaatgttag

SEQ ID NO: 187888 - DNA, 33 bp, Homo sapien
aggaatttgtgtttcctaactcttgaatgttag

SEQ ID NO: 187889 - DNA, 33 bp, Homo sapien
taagcatttcagaaacaaagggtagaagtagaa

SEQ ID NO: 187890 - DNA, 33 bp, Homo sapien
taagcatttcagaaacgaagggtagaagtagaa

SEQ ID NO: 187891 - DNA, 33 bp, Homo sapien
tttgatagaatgttgaaacttcagactcctctg

SEQ ID NO: 187892 - DNA, 33 bp, Homo sapien
tttgatagaatgttgagacttcagactcctctg

SEQ ID NO: 187893 - DNA, 33 bp, Homo sapien
tatttactggcacacaagctggaaaactggcaa

SEQ ID NO: 187894 - DNA, 33 bp, Homo sapien
tatttactggcacacaggctggaaaactggcaa

SEQ ID NO: 187895 - DNA, 33 bp, Homo sapien
agcctcaaagggtaacacctagacagtcagaat

SEQ ID NO: 187896 - DNA, 33 bp, Homo sapien
agcctcaaagggtaacgcctagacagtcagaat

SEQ ID NO: 187897 - DNA, 33 bp, Homo sapien
ttgcaggctgaataaacgatggaagaaaactac

SEQ ID NO: 187898 - DNA, 33 bp, Homo sapien
ttgcaggctgaataaatgatggaagaaaactac

SEQ ID NO: 187899 - DNA, 33 bp, Homo sapien
caatgcttgcccctaacagttttgtttgatttg

SEQ ID NO: 187900 - DNA, 33 bp, Homo sapien
caatgcttgcccctaatagttttgtttgatttg

SEQ ID NO: 187901 - DNA, 33 bp, Homo sapien
aacttccaaagtgacaatagacctggcttcttg

SEQ ID NO: 187902 - DNA, 33 bp, Homo sapien
aacttccaaagtgacagtagacctggcttcttg

SEQ ID NO: 187903 - DNA, 33 bp, Homo sapien
ttgagtcccaccatcaacttgaaatcaggtatt

SEQ ID NO: 187904 - DNA, 33 bp, Homo sapien
ttgagtcccaccatcagcttgaaatcaggtatt

SEQ ID NO: 187905 - DNA, 33 bp, Homo sapien
tcatgaggcacccatacatttagtcaaacacta

SEQ ID NO: 187906 - DNA, 33 bp, Homo sapien
tcatgaggcacccatatatttagtcaaacacta

SEQ ID NO: 187907 - DNA, 33 bp, Homo sapien
tgtctcttgagtaccacgtcttcttcatcttta

SEQ ID NO: 187908 - DNA, 33 bp, Homo sapien
tgtctcttgagtaccatgtcttcttcatcttta

SEQ ID NO: 187909 - DNA, 33 bp, Homo sapien
cacagctgcacaagaaaggaccaacataatcag

SEQ ID NO: 187910 - DNA, 33 bp, Homo sapien
cacagctgcacaagaagggaccaacataatcag

SEQ ID NO: 187911 - DNA, 33 bp, Homo sapien
aatacttgtgagaaacacactactggagttact

SEQ ID NO: 187912 - DNA, 33 bp, Homo sapien
aatacttgtgagaaacgcactactggagttact

SEQ ID NO: 187913 - DNA, 33 bp, Homo sapien
ctgtactaagctaaataaggaatgtaacattaa

SEQ ID NO: 187914 - DNA, 33 bp, Homo sapien
ctgtactaagctaaatgaggaatgtaacattaa

SEQ ID NO: 187915 - DNA, 33 bp, Homo sapien
ctattatttttccaggaaaatgttgctgattct

SEQ ID NO: 187916 - DNA, 33 bp, Homo sapien
ctattatttttccagggaaatgttgctgattct

SEQ ID NO: 187917 - DNA, 33 bp, Homo sapien
tgtattcccctttttacgtgacacatgactgta

SEQ ID NO: 187918 - DNA, 33 bp, Homo sapien
tgtattcccctttttatgtgacacatgactgta

SEQ ID NO: 187919 - DNA, 33 bp, Homo sapien
gaagaaactgaaacaactgaacaagcaaaaacc

SEQ ID NO: 187920 - DNA, 33 bp, Homo sapien
gaagaaactgaaacaagtgaacaagcaaaaacc

SEQ ID NO: 187921 - DNA, 33 bp, Homo sapien; identical to SEQ ID NO: 187919

SEQ ID NO: 187922 - DNA, 33 bp, Homo sapien; identical to SEQ ID NO: 187920

SEQ ID NO: 187923 - DNA, 33 bp, Homo sapien
aaaaatacttatcttcaaatacttatgctaaaa

SEQ ID NO: 187924 - DNA, 33 bp, Homo sapien
aaaaatacttatcttcgaatacttatgctaaaa

SEQ ID NO: 187925 - DNA, 33 bp, Homo sapien
gctagggttaaaagtcactggtttagatcagtt

SEQ ID NO: 187926 - DNA, 33 bp, Homo sapien
gctagggttaaaagtcgctggtttagatcagtt

SEQ ID NO: 187927 - DNA, 33 bp, Homo sapien
gaatttcatgtaactacgtcatactttgtttta

SEQ ID NO: 187928 - DNA, 33 bp, Homo sapien
gaatttcatgtaactatgtcatactttgtttta

SEQ ID NO: 187929 - DNA, 33 bp, Homo sapien
ctggtgacattcagtaagtgatgtagtctattt

SEQ ID NO: 187930 - DNA, 33 bp, Homo sapien
ctggtgacattcagtaggtgatgtagtctattt

SEQ ID NO: 187931 - DNA, 33 bp, Homo sapien
ctgctggtgtttatggccagtttttaagtatat

SEQ ID NO: 187932 - DNA, 33 bp, Homo sapien
ctgctggtgtttatggtcagtttttaagtatat

SEQ ID NO: 187933 - DNA, 33 bp, Homo sapien
gagcaaggtagcaggcccgtacagtgaggctgt

SEQ ID NO: 187934 - DNA, 33 bp, Homo sapien
gagcaaggtagcaggctcgtacagtgaggctgt

SEQ ID NO: 187935 - DNA, 33 bp, Homo sapien
tgggaatatgctggaacacagtgttggtgacaa

SEQ ID NO: 187936 - DNA, 33 bp, Homo sapien
tgggaatatgctggaatacagtgttggtgacaa

SEQ ID NO: 187937 - DNA, 33 bp, Homo sapien
tactgacatgggatctgaatgaactttaagtga

SEQ ID NO: 187938 - DNA, 33 bp, Homo sapien
tactgacatgggatcttaatgaactttaagtga

SEQ ID NO: 187939 - DNA, 33 bp, Homo sapien
gtttgaaattgcactaagtagcctgggaagaag

SEQ ID NO: 187940 - DNA, 33 bp, Homo sapien
gtttgaaattgcactaggtagcctgggaagaag

SEQ ID NO: 187941 - DNA, 33 bp, Homo sapien
atcccagcaattttaacggacgtacctccagaa

SEQ ID NO: 187942 - DNA, 33 bp, Homo sapien
atcccagcaattttaatggacgtacctccagaa

SEQ ID NO: 187943 - DNA, 33 bp, Homo sapien
gtctaagggaaagggaacaccttggatgaaccg

SEQ ID NO: 187944 - DNA, 33 bp, Homo sapien
gtctaagggaaagggagcaccttggatgaaccg

SEQ ID NO: 187945 - DNA, 33 bp, Homo sapien
ccccagtgctcgcaggaaaggtctaatcaagat

SEQ ID NO: 187946 - DNA, 33 bp, Homo sapien
ccccagtgctcgcagggaaggtctaatcaagat

SEQ ID NO: 187947 - DNA, 33 bp, Homo sapien
tccgtataaccgcaaccgaagactatcaacctt

SEQ ID NO: 187948 - DNA, 33 bp, Homo sapien
tccgtataaccgcaactgaagactatcaacctt

SEQ ID NO: 187949 - DNA, 33 bp, Homo sapien
tgtaaggaaaggcaagaattagaattatgtatc

SEQ ID NO: 187950 - DNA, 33 bp, Homo sapien
tgtaaggaaaggcaaggattagaattatgtatc

SEQ ID NO: 187951 - DNA, 33 bp, Homo sapien
gtcacagagaacagatcaagtgactacctcata

SEQ ID NO: 187952 - DNA, 33 bp, Homo sapien
gtcacagagaacagatgaagtgactacctcata

SEQ ID NO: 187953 - DNA, 33 bp, Homo sapien
actgccatgctctggaatatagtgaatttactt

SEQ ID NO: 187954 - DNA, 33 bp, Homo sapien
actgccatgctctggagtatagtgaatttactt

SEQ ID NO: 187955 - DNA, 33 bp, Homo sapien
atcttagtgcgtctggacataggattcatacag

SEQ ID NO: 187956 - DNA, 33 bp, Homo sapien
atcttagtgcgtctgggcataggattcatacag

SEQ ID NO: 187957 - DNA, 33 bp, Homo sapien
agagccagacttcaacaagatgtctaggtatta

SEQ ID NO: 187958 - DNA, 33 bp, Homo sapien
agagccagacttcaacgagatgtctaggtatta

SEQ ID NO: 187959 - DNA, 33 bp, Homo sapien
tcccctatatttgatcgcatagtgccataaact

SEQ ID NO: 187960 - DNA, 33 bp, Homo sapien
tcccctatatttgatctcatagtgccataaact

SEQ ID NO: 187961 - DNA, 33 bp, Homo sapien
catctagaagtaatagaatggaccaatcaacca

SEQ ID NO: 187962 - DNA, 33 bp, Homo sapien
catctagaagtaataggatggaccaatcaacca

SEQ ID NO: 187963 - DNA, 33 bp, Homo sapien
acagtgttgtgaaaggcatagacccctgaggaa

SEQ ID NO: 187964 - DNA, 33 bp, Homo sapien
acagtgttgtgaaaggtatagacccctgaggaa

SEQ ID NO: 187965 - DNA, 33 bp, Homo sapien
ggtccatagagaaggagaagattttgttaaccc

SEQ ID NO: 187966 - DNA, 33 bp, Homo sapien
ggtccatagagaaggataagattttgttaaccc

SEQ ID NO: 187967 - DNA, 33 bp, Homo sapien
gggaggaaattcctgccgaccctgacaagcaat

SEQ ID NO: 187968 - DNA, 33 bp, Homo sapien
gggaggaaattcctgctgaccctgacaagcaat

SEQ ID NO: 187969 - DNA, 33 bp, Homo sapien
ggctcacaactgtaaccgcagcttcttgggagg

SEQ ID NO: 187970 - DNA, 33 bp, Homo sapien
ggctcacaactgtaactgcagcttcttgggagg

SEQ ID NO: 187971 - DNA, 33 bp, Homo sapien
aggatgagtagtctcaaagaagatctttccacc

SEQ ID NO: 187972 - DNA, 33 bp, Homo sapien
aggatgagtagtctcacagaagatctttccacc

SEQ ID NO: 187973 - DNA, 33 bp, Homo sapien
gtttcatggtcttatacatggttcattttataa

SEQ ID NO: 187974 - DNA, 33 bp, Homo sapien
gtttcatggtcttatatatggttcattttataa

SEQ ID NO: 187975 - DNA, 33 bp, Homo sapien
tgaaaacaatgtccgacggaactaatgatgaaa

SEQ ID NO: 187976 - DNA, 33 bp, Homo sapien
tgaaaacaatgtccgatggaactaatgatgaaa

SEQ ID NO: 187977 - DNA, 33 bp, Homo sapien
atcatgttgtacctccggatataatgtgatatg

SEQ ID NO: 187978 - DNA, 33 bp, Homo sapien
atcatgttgtacctcctgatataatgtgatatg

SEQ ID NO: 187979 - DNA, 33 bp, Homo sapien
gttaagtcagttctaaagacagatagactttgg

SEQ ID NO: 187980 - DNA, 33 bp, Homo sapien
gttaagtcagttctaacgacagatagactttgg

SEQ ID NO: 187981 - DNA, 33 bp, Homo sapien
cacttgtatgtacctcaaattcagcatgcctga

SEQ ID NO: 187982 - DNA, 33 bp, Homo sapien
cacttgtatgtacctcgaattcagcatgcctga

SEQ ID NO: 187983 - DNA, 33 bp, Homo sapien
cttttggattctgaaaccaccagtggataagat

SEQ ID NO: 187984 - DNA, 33 bp, Homo sapien
cttttggattctgaaatcaccagtggataagat

SEQ ID NO: 187985 - DNA, 33 bp, Homo sapien
tctccgttttaacatacgtgttgcaaatatttt

SEQ ID NO: 187986 - DNA, 33 bp, Homo sapien
tctccgttttaacatatgtgttgcaaatatttt

SEQ ID NO: 187987 - DNA, 33 bp, Homo sapien
tggactgaattctatcccttcaaaattcatata

SEQ ID NO: 187988 - DNA, 33 bp, Homo sapien
tggactgaattctatctcttcaaaattcatata

SEQ ID NO: 187989 - DNA, 33 bp, Homo sapien
caactgaagagagtaacctgtaatctgcattta

SEQ ID NO: 187990 - DNA, 33 bp, Homo sapien
caactgaagagagtaatctgtaatctgcattta

SEQ ID NO: 187991 - DNA, 33 bp, Homo sapien
aaaatttagtatttgacatcagaacaatcactt

SEQ ID NO: 187992 - DNA, 33 bp, Homo sapien
aaaatttagtatttgatatcagaacaatcactt

SEQ ID NO: 187993 - DNA, 33 bp, Homo sapien
aattttccaaaaaagggaacttatgaggtagtc

SEQ ID NO: 187994 - DNA, 33 bp, Homo sapien
aattttccaaaaaaggtaacttatgaggtagtc

SEQ ID NO: 187995 - DNA, 33 bp, Homo sapien
tttgtttggtatgttgaagatgtcacgcctatt

SEQ ID NO: 187996 - DNA, 33 bp, Homo sapien
tttgtttggtatgttggagatgtcacgcctatt

SEQ ID NO: 187997 - DNA, 33 bp, Homo sapien
gttgacctgtcaactaaaatggaccctcatctc

SEQ ID NO: 187998 - DNA, 33 bp, Homo sapien
gttgacctgtcaactacaatggaccctcatctc

SEQ ID NO: 187999 - DNA, 33 bp, Homo sapien
tgaaataatctgtgaacatgggacaacaatgac

SEQ ID NO: 188000 - DNA, 33 bp, Homo sapien
tgaaataatctgtgaatatgggacaacaatgac

SEQ ID NO: 188001 - DNA, 33 bp, Homo sapien
catgtctagtgtggaccaggggaaattcattag

SEQ ID NO: 188002 - DNA, 33 bp, Homo sapien
catgtctagtgtggactaggggaaattcattag

SEQ ID NO: 188003 - DNA, 33 bp, Homo sapien
aacacaggttttcaaacggatacttttaatatt

SEQ ID NO: 188004 - DNA, 33 bp, Homo sapien
aacacaggttttcaaatggatacttttaatatt

SEQ ID NO: 188005 - DNA, 33 bp, Homo sapien
gggagattgttaaacaacttaatagcctgcttt

SEQ ID NO: 188006 - DNA, 33 bp, Homo sapien
gggagattgttaaacagcttaatagcctgcttt

SEQ ID NO: 188007 - DNA, 33 bp, Homo sapien
gactctgctgtaggcacaacatgaattgtcata

SEQ ID NO: 188008 - DNA, 33 bp, Homo sapien
gactctgctgtaggcagaacatgaattgtcata

SEQ ID NO: 188009 - DNA, 33 bp, Homo sapien
ttacaggttgactataagaagttgccaattttc

SEQ ID NO: 188010 - DNA, 33 bp, Homo sapien
ttacaggttgactataggaagttgccaattttc

SEQ ID NO: 188011 - DNA, 33 bp, Homo sapien
acatatcattgcaaagaaacagtgactattttc

SEQ ID NO: 188012 - DNA, 33 bp, Homo sapien
acatatcattgcaaaggaacagtgactattttc

SEQ ID NO: 188013 - DNA, 33 bp, Homo sapien
agcaagacctatgagtaaagctatctttggatc

SEQ ID NO: 188014 - DNA, 33 bp, Homo sapien
agcaagacctatgagtgaagctatctttggatc

SEQ ID NO: 188015 - DNA, 33 bp, Homo sapien
ggaggaatagtaaaaaaattggtggtcattttt

SEQ ID NO: 188016 - DNA, 33 bp, Homo sapien
ggaggaatagtaaaaatattggtggtcattttt

SEQ ID NO: 188017 - DNA, 33 bp, Homo sapien
gcctagcacaaaataaagactctctaaatgcta

SEQ ID NO: 188018 - DNA, 33 bp, Homo sapien
gcctagcacaaaataaggactctctaaatgcta

SEQ ID NO: 188019 - DNA, 33 bp, Homo sapien
cttgaatccactagacagaagttgcaaggagcc

SEQ ID NO: 188020 - DNA, 33 bp, Homo sapien
cttgaatccactagacggaagttgcaaggagcc

SEQ ID NO: 188021 - DNA, 33 bp, Homo sapien
tgcctctatgataatacggtttctgcactacag

SEQ ID NO: 188022 - DNA, 33 bp, Homo sapien
tgcctctatgataatatggtttctgcactacag

SEQ ID NO: 188023 - DNA, 33 bp, Homo sapien
ttacagcgtgctagaaggtatttaacaataata

SEQ ID NO: 188024 - DNA, 33 bp, Homo sapien
ttacagcgtgctagaatgtatttaacaataata

SEQ ID NO: 188025 - DNA, 33 bp, Homo sapien
actgactcctagaatcaatgtgttgcggatgtt

SEQ ID NO: 188026 - DNA, 33 bp, Homo sapien
actgactcctagaatcgatgtgttgcggatgtt

SEQ ID NO: 188027 - DNA, 33 bp, Homo sapien
tgttcactgtctctaacattttaaaaactcctt

SEQ ID NO: 188028 - DNA, 33 bp, Homo sapien
tgttcactgtctctaagattttaaaaactcctt

SEQ ID NO: 188029 - DNA, 33 bp, Homo sapien
atgaaggcttagattgaaattctggcactacta

SEQ ID NO: 188030 - DNA, 33 bp, Homo sapien
atgaaggcttagattggaattctggcactacta

SEQ ID NO: 188031 - DNA, 33 bp, Homo sapien
cattactaatgcaagaaggtccttaggcaagag

SEQ ID NO: 188032 - DNA, 33 bp, Homo sapien
cattactaatgcaagagggtccttaggcaagag

SEQ ID NO: 188033 - DNA, 33 bp, Homo sapien
ccagatctcaggtgaactgaatgagaactcact

SEQ ID NO: 188034 - DNA, 33 bp, Homo sapien
ccagatctcaggtgaattgaatgagaactcact

SEQ ID NO: 188035 - DNA, 33 bp, Homo sapien
catgatagttacaacaatgtacttgattcaact

SEQ ID NO: 188036 - DNA, 33 bp, Homo sapien
catgatagttacaacagtgtacttgattcaact

SEQ ID NO: 188037 - DNA, 33 bp, Homo sapien
ctcagtaactgctttgaactcttgcttaaggtt

SEQ ID NO: 188038 - DNA, 33 bp, Homo sapien
ctcagtaactgctttggactcttgcttaaggtt

SEQ ID NO: 188039 - DNA, 33 bp, Homo sapien
aaaaactatgtaaaaggcttggcacggtggctc

SEQ ID NO: 188040 - DNA, 33 bp, Homo sapien
aaaaactatgtaaaagtcttggcacggtggctc

SEQ ID NO: 188041 - DNA, 33 bp, Homo sapien
acagcctttagagtcaaatgaacttggattaga

SEQ ID NO: 188042 - DNA, 33 bp, Homo sapien
acagcctttagagtcacatgaacttggattaga

SEQ ID NO: 188043 - DNA, 33 bp, Homo sapien
caagtcacagagtcacaaattgtctagaatcaa

SEQ ID NO: 188044 - DNA, 33 bp, Homo sapien
caagtcacagagtcacgaattgtctagaatcaa

SEQ ID NO: 188045 - DNA, 33 bp, Homo sapien
tcttccatatgctaacagtgtatctttcccctc

SEQ ID NO: 188046 - DNA, 33 bp, Homo sapien
tcttccatatgctaactgtgtatctttcccctc

SEQ ID NO: 188047 - DNA, 33 bp, Homo sapien
tttagaaatacatgttaaaattatgggtaaaat

SEQ ID NO: 188048 - DNA, 33 bp, Homo sapien
tttagaaatacatgttgaaattatgggtaaaat

SEQ ID NO: 188049 - DNA, 33 bp, Homo sapien
ttaacttagtgaactgcaaatccaaatttagaa

SEQ ID NO: 188050 - DNA, 33 bp, Homo sapien
ttaacttagtgaactggaaatccaaatttagaa

SEQ ID NO: 188051 - DNA, 33 bp, Homo sapien
gtgaacacactcagataacaaaggtttcaggag

SEQ ID NO: 188052 - DNA, 33 bp, Homo sapien
gtgaacacactcagattacaaaggtttcaggag

SEQ ID NO: 188053 - DNA, 33 bp, Homo sapien
ttctagaaaataccgaataatctacaatgacaa

SEQ ID NO: 188054 - DNA, 33 bp, Homo sapien
ttctagaaaataccgactaatctacaatgacaa

SEQ ID NO: 188055 - DNA, 33 bp, Homo sapien
aaaaaaaccaggtcatcaggtataatctttgat

SEQ ID NO: 188056 - DNA, 33 bp, Homo sapien
aaaaaaaccaggtcatgaggtataatctttgat

SEQ ID NO: 188057 - DNA, 33 bp, Homo sapien
agtagaactcagggaacgccagctgatgtctag

SEQ ID NO: 188058 - DNA, 33 bp, Homo sapien
agtagaactcagggaatgccagctgatgtctag

SEQ ID NO: 188059 - DNA, 33 bp, Homo sapien
agctgagcaattcactcactgagctgttgaact

SEQ ID NO: 188060 - DNA, 33 bp, Homo sapien
agctgagcaattcacttactgagctgttgaact

SEQ ID NO: 188061 - DNA, 33 bp, Homo sapien
tatcgccaaggctcgaagttcagtactcttgtc

SEQ ID NO: 188062 - DNA, 33 bp, Homo sapien
tatcgccaaggctcgacgttcagtactcttgtc

SEQ ID NO: 188063 - DNA, 33 bp, Homo sapien
tggcttgaaaaatctaaggcccagactataaga

SEQ ID NO: 188064 - DNA, 33 bp, Homo sapien
tggcttgaaaaatctagggcccagactataaga

SEQ ID NO: 188065 - DNA, 33 bp, Homo sapien
aaatctgacagtgaagcctagatttgtacgtgt

SEQ ID NO: 188066 - DNA, 33 bp, Homo sapien
aaatctgacagtgaaggctagatttgtacgtgt

SEQ ID NO: 188067 - DNA, 33 bp, Homo sapien
tcttttgggcccgagacgacaaggcaccatagt

SEQ ID NO: 188068 - DNA, 33 bp, Homo sapien
tcttttgggcccgagatgacaaggcaccatagt

SEQ ID NO: 188069 - DNA, 33 bp, Homo sapien
aggtttgtaggtaaaaagaactcaacttgagac

SEQ ID NO: 188070 - DNA, 33 bp, Homo sapien
aggtttgtaggtaaaaggaactcaacttgagac

SEQ ID NO: 188071 - DNA, 33 bp, Homo sapien
ttttgacttggcaactcaaaccctacaatacta

SEQ ID NO: 188072 - DNA, 33 bp, Homo sapien
ttttgacttggcaactgaaaccctacaatacta

SEQ ID NO: 188073 - DNA, 33 bp, Homo sapien
cttatgtcagtaacctaaaaatctgggaaactt

SEQ ID NO: 188074 - DNA, 33 bp, Homo sapien
cttatgtcagtaacctgaaaatctgggaaactt

SEQ ID NO: 188075 - DNA, 33 bp, Homo sapien
cctcctcctcaggcaacttcctttctatcgaac

SEQ ID NO: 188076 - DNA, 33 bp, Homo sapien
cctcctcctcaggcaatttcctttctatcgaac

SEQ ID NO: 188077 - DNA, 33 bp, Homo sapien
acacttacatgaactcaatcagtcttcagtctt

SEQ ID NO: 188078 - DNA, 33 bp, Homo sapien
acacttacatgaactcgatcagtcttcagtctt

SEQ ID NO: 188079 - DNA, 33 bp, Homo sapien
gtgtgctttcccacgaccacttcatagcattga

SEQ ID NO: 188080 - DNA, 33 bp, Homo sapien
gtgtgctttcccacgatcacttcatagcattga

SEQ ID NO: 188081 - DNA, 33 bp, Homo sapien
agtagttgcaaataagacaaggcactggagaga

SEQ ID NO: 188082 - DNA, 33 bp, Homo sapien
agtagttgcaaataaggcaaggcactggagaga

SEQ ID NO: 188083 - DNA, 33 bp, Homo sapien
ttcatgccattattaaagttaataccctcagaa

SEQ ID NO: 188084 - DNA, 33 bp, Homo sapien
ttcatgccattattaaggttaataccctcagaa

SEQ ID NO: 188085 - DNA, 33 bp, Homo sapien
aaacttcaccccaaaacgtaataattgccgtaa

SEQ ID NO: 188086 - DNA, 33 bp, Homo sapien
aaacttcaccccaaaatgtaataattgccgtaa

SEQ ID NO: 188087 - DNA, 33 bp, Homo sapien
tcataactcctgttgaaaggatcggtctggtat

SEQ ID NO: 188088 - DNA, 33 bp, Homo sapien
tcataactcctgttgagaggatcggtctggtat

SEQ ID NO: 188089 - DNA, 33 bp, Homo sapien
gtggtagcgagacaaaagtgaacatggcaggtt

SEQ ID NO: 188090 - DNA, 33 bp, Homo sapien
gtggtagcgagacaaaggtgaacatggcaggtt

SEQ ID NO: 188091 - DNA, 33 bp, Homo sapien
cttgaggttacacaagaaaggaaacctgccatg

SEQ ID NO: 188092 - DNA, 33 bp, Homo sapien
cttgaggttacacaaggaaggaaacctgccatg

SEQ ID NO: 188093 - DNA, 33 bp, Homo sapien
atgaccttgacccacccagatttcttacagaat

SEQ ID NO: 188094 - DNA, 33 bp, Homo sapien
atgaccttgacccaccgagatttcttacagaat

SEQ ID NO: 188095 - DNA, 33 bp, Homo sapien
atttacaatttacagcaagcaataaaacaagat

SEQ ID NO: 188096 - DNA, 33 bp, Homo sapien
atttacaatttacagcgagcaataaaacaagat

SEQ ID NO: 188097 - DNA, 33 bp, Homo sapien
atcaagttgggtttgtaaaatcactttgcaata

SEQ ID NO: 188098 - DNA, 33 bp, Homo sapien
atcaagttgggtttgtgaaatcactttgcaata

SEQ ID NO: 188099 - DNA, 33 bp, Homo sapien
gcctctactcccttgacagcaaccaatcctggc

SEQ ID NO: 188100 - DNA, 33 bp, Homo sapien
gcctctactcccttgatagcaaccaatcctggc

SEQ ID NO: 188101 - DNA, 33 bp, Homo sapien
cagtttcactgaacatcaacgtcagaccagagc

SEQ ID NO: 188102 - DNA, 33 bp, Homo sapien
cagtttcactgaacattaacgtcagaccagagc

SEQ ID NO: 188103 - DNA, 33 bp, Homo sapien
tccacaccaaggcctaaatatgagtgccaggcc

SEQ ID NO: 188104 - DNA, 33 bp, Homo sapien
tccacaccaaggcctacatatgagtgccaggcc

SEQ ID NO: 188105 - DNA, 33 bp, Homo sapien
gagctttccgacttaagagtcaaacattataat

SEQ ID NO: 188106 - DNA, 33 bp, Homo sapien
gagctttccgacttaatagtcaaacattataat

SEQ ID NO: 188107 - DNA, 33 bp, Homo sapien
gaccagaagcaggaaaattcatacgaggttaga

SEQ ID NO: 188108 - DNA, 33 bp, Homo sapien
gaccagaagcaggaaagttcatacgaggttaga

SEQ ID NO: 188109 - DNA, 33 bp, Homo sapien
cagtttcgcacaccaaaaatgatcagagtcagt

SEQ ID NO: 188110 - DNA, 33 bp, Homo sapien
cagtttcgcacaccaagaatgatcagagtcagt

SEQ ID NO: 188111 - DNA, 33 bp, Homo sapien
ccatgatatcaacaccacaatcaaggtaataga

SEQ ID NO: 188112 - DNA, 33 bp, Homo sapien
ccatgatatcaacaccgcaatcaaggtaataga

SEQ ID NO: 188113 - DNA, 33 bp, Homo sapien
tctcctccaaaggatcacatttgaatctaatga

SEQ ID NO: 188114 - DNA, 33 bp, Homo sapien
tctcctccaaaggatctcatttgaatctaatga

SEQ ID NO: 188115 - DNA, 33 bp, Homo sapien
aggccacaaactcaaacgtgacaggagtaattc

SEQ ID NO: 188116 - DNA, 33 bp, Homo sapien
aggccacaaactcaaatgtgacaggagtaattc

SEQ ID NO: 188117 - DNA, 33 bp, Homo sapien
tagctactaaacaatacatgaaatggtgagtga

SEQ ID NO: 188118 - DNA, 33 bp, Homo sapien
tagctactaaacaatatatgaaatggtgagtga

SEQ ID NO: 188119 - DNA, 33 bp, Homo sapien
gaggtccaatacccaactctgtcagctttgaaa

SEQ ID NO: 188120 - DNA, 33 bp, Homo sapien
gaggtccaatacccaattctgtcagctttgaaa

SEQ ID NO: 188121 - DNA, 33 bp, Homo sapien
tttctgtcctattttccatttttttgtctttca

SEQ ID NO: 188122 - DNA, 33 bp, Homo sapien
tttctgtcctattttctatttttttgtctttca

SEQ ID NO: 188123 - DNA, 33 bp, Homo sapien
gaggaggtctgcaatgaacaagggatttcaatt

SEQ ID NO: 188124 - DNA, 33 bp, Homo sapien
gaggaggtctgcaatggacaagggatttcaatt

SEQ ID NO: 188125 - DNA, 33 bp, Homo sapien
caaagccagggtactaagtatttatagaagtcc

SEQ ID NO: 188126 - DNA, 33 bp, Homo sapien
caaagccagggtactatgtatttatagaagtcc

SEQ ID NO: 188127 - DNA, 33 bp, Homo sapien
tgctaaatggagtggaagaacagtgcttatcaa

SEQ ID NO: 188128 - DNA, 33 bp, Homo sapien
tgctaaatggagtggaggaacagtgcttatcaa

SEQ ID NO: 188129 - DNA, 33 bp, Homo sapien
agagttggaaacaagtaacttctggacaaatgg

SEQ ID NO: 188130 - DNA, 33 bp, Homo sapien
agagttggaaacaagtcacttctggacaaatgg

SEQ ID NO: 188131 - DNA, 33 bp, Homo sapien
gttacgacgtaaagaaacactgctgtccaaaag

SEQ ID NO: 188132 - DNA, 33 bp, Homo sapien
gttacgacgtaaagaaccactgctgtccaaaag

SEQ ID NO: 188133 - DNA, 33 bp, Homo sapien
cgtgatcatttgaagaatcttaagtgatctttt

SEQ ID NO: 188134 - DNA, 33 bp, Homo sapien
cgtgatcatttgaagactcttaagtgatctttt

SEQ ID NO: 188135 - DNA, 33 bp, Homo sapien
tgtgctgtcggttgcactcacagggtagtttgg

SEQ ID NO: 188136 - DNA, 33 bp, Homo sapien
tgtgctgtcggttgcattcacagggtagtttgg

SEQ ID NO: 188137 - DNA, 33 bp, Homo sapien
ccttttcaatgtttaaatacgtttagacacaca

SEQ ID NO: 188138 - DNA, 33 bp, Homo sapien
ccttttcaatgtttaagtacgtttagacacaca

SEQ ID NO: 188139 - DNA, 33 bp, Homo sapien
ggaatgttaaactcccacgtcatagaaataatg

SEQ ID NO: 188140 - DNA, 33 bp, Homo sapien
ggaatgttaaactcccgcgtcatagaaataatg

SEQ ID NO: 188141 - DNA, 33 bp, Homo sapien
attcagatactgagaaactttagagaaattccc

SEQ ID NO: 188142 - DNA, 33 bp, Homo sapien
attcagatactgagaacctttagagaaattccc

SEQ ID NO: 188143 - DNA, 33 bp, Homo sapien
taagtgcctggctctaataagtgcttaaaaatg

SEQ ID NO: 188144 - DNA, 33 bp, Homo sapien
taagtgcctggctctagtaagtgcttaaaaatg

SEQ ID NO: 188145 - DNA, 33 bp, Homo sapien
atggtgcaccttatcacatgtcaaactctgact

SEQ ID NO: 188146 - DNA, 33 bp, Homo sapien
atggtgcaccttatcatatgtcaaactctgact

SEQ ID NO: 188147 - DNA, 33 bp, Homo sapien
cgcatggggcagaagaaatgatatgagacagct

SEQ ID NO: 188148 - DNA, 33 bp, Homo sapien
cgcatggggcagaagagatgatatgagacagct

SEQ ID NO: 188149 - DNA, 33 bp, Homo sapien
tgagccagacagagaactggggaagcagaattg

SEQ ID NO: 188150 - DNA, 33 bp, Homo sapien
tgagccagacagagaattggggaagcagaattg

SEQ ID NO: 188151 - DNA, 33 bp, Homo sapien
ggtggtagaaacaacacggactttgaaataagg

SEQ ID NO: 188152 - DNA, 33 bp, Homo sapien
ggtggtagaaacaacatggactttgaaataagg

SEQ ID NO: 188153 - DNA, 33 bp, Homo sapien
caatcctgtttattaacggtcctgtttatttaa

SEQ ID NO: 188154 - DNA, 33 bp, Homo sapien
caatcctgtttattaatggtcctgtttatttaa

SEQ ID NO: 188155 - DNA, 33 bp, Homo sapien
ttattatgactttgacaaatttaatcttatgtt

SEQ ID NO: 188156 - DNA, 33 bp, Homo sapien
ttattatgactttgacgaatttaatcttatgtt

SEQ ID NO: 188157 - DNA, 33 bp, Homo sapien
ctcaattctcgtaacagtaattctataattatt

SEQ ID NO: 188158 - DNA, 33 bp, Homo sapien
ctcaattctcgtaacattaattctataattatt

SEQ ID NO: 188159 - DNA, 33 bp, Homo sapien
gacctcactcttgtaaccttgcctggccgttct

SEQ ID NO: 188160 - DNA, 33 bp, Homo sapien
gacctcactcttgtaatcttgcctggccgttct

SEQ ID NO: 188161 - DNA, 33 bp, Homo sapien
cctattttccagtacaaggactagcttagaccg

SEQ ID NO: 188162 - DNA, 33 bp, Homo sapien
cctattttccagtacagggactagcttagaccg

SEQ ID NO: 188163 - DNA, 33 bp, Homo sapien
acctcaataagcccaacttaggaaaacaataaa

SEQ ID NO: 188164 - DNA, 33 bp, Homo sapien
acctcaataagcccaatttaggaaaacaataaa

SEQ ID NO: 188165 - DNA, 33 bp, Homo sapien
aaggaaaactattccaaacttagaaaacgtaga

SEQ ID NO: 188166 - DNA, 33 bp, Homo sapien
aaggaaaactattccagacttagaaaacgtaga

SEQ ID NO: 188167 - DNA, 33 bp, Homo sapien
tgtgatattttatgaaaaagccctattcaaata

SEQ ID NO: 188168 - DNA, 33 bp, Homo sapien
tgtgatattttatgaagaagccctattcaaata

SEQ ID NO: 188169 - DNA, 33 bp, Homo sapien
tctgcatatttttatactaagtttgatgacaag

SEQ ID NO: 188170 - DNA, 33 bp, Homo sapien
tctgcatatttttatattaagtttgatgacaag

SEQ ID NO: 188171 - DNA, 33 bp, Homo sapien
aagttatgtgtccataggcctgaccagtatagt

SEQ ID NO: 188172 - DNA, 33 bp, Homo sapien
aagttatgtgtccatatgcctgaccagtatagt

SEQ ID NO: 188173 - DNA, 33 bp, Homo sapien
tgttactctctcagtaaaatcctcaccacacca

SEQ ID NO: 188174 - DNA, 33 bp, Homo sapien
tgttactctctcagtagaatcctcaccacacca

SEQ ID NO: 188175 - DNA, 33 bp, Homo sapien
agtatagatcacaaagcccacttcattcatgaa

SEQ ID NO: 188176 - DNA, 33 bp, Homo sapien
agtatagatcacaaaggccacttcattcatgaa

SEQ ID NO: 188177 - DNA, 33 bp, Homo sapien
ggccgagaagagtcaacgggcctatcgcaaact

SEQ ID NO: 188178 - DNA, 33 bp, Homo sapien
ggccgagaagagtcaatgggcctatcgcaaact

SEQ ID NO: 188179 - DNA, 33 bp, Homo sapien
taacttccattggctcaccattgtcacaacgca

SEQ ID NO: 188180 - DNA, 33 bp, Homo sapien
taacttccattggctcgccattgtcacaacgca

SEQ ID NO: 188181 - DNA, 33 bp, Homo sapien
ccattgtcacaacgcaccttcaaggtttatatt

SEQ ID NO: 188182 - DNA, 33 bp, Homo sapien
ccattgtcacaacgcatcttcaaggtttatatt

SEQ ID NO: 188183 - DNA, 33 bp, Homo sapien
ttgctctttgtcctcaagttgggtatgaaatgc

SEQ ID NO: 188184 - DNA, 33 bp, Homo sapien
ttgctctttgtcctcaggttgggtatgaaatgc

SEQ ID NO: 188185 - DNA, 33 bp, Homo sapien
attactacaatctataagtctaaggatgcaaat

SEQ ID NO: 188186 - DNA, 33 bp, Homo sapien
attactacaatctataggtctaaggatgcaaat

SEQ ID NO: 188187 - DNA, 33 bp, Homo sapien
aaaagaagacctttaacgctcaacaacatgcat

SEQ ID NO: 188188 - DNA, 33 bp, Homo sapien
aaaagaagacctttaaggctcaacaacatgcat

SEQ ID NO: 188189 - DNA, 33 bp, Homo sapien
ttgtaacctttttcaccgtagagattagaatcc

SEQ ID NO: 188190 - DNA, 33 bp, Homo sapien
ttgtaacctttttcactgtagagattagaatcc

SEQ ID NO: 188191 - DNA, 33 bp, Homo sapien
cgatgtttcttattgcaaatgactcctttgtta

SEQ ID NO: 188192 - DNA, 33 bp, Homo sapien
cgatgtttcttattgcgaatgactcctttgtta

SEQ ID NO: 188193 - DNA, 33 bp, Homo sapien
tgaaaaacagaaaccacagtaacaaaggagtca

SEQ ID NO: 188194 - DNA, 33 bp, Homo sapien
tgaaaaacagaaaccagagtaacaaaggagtca

SEQ ID NO: 188195 - DNA, 33 bp, Homo sapien
aaagagttcagttacaacctggtaaatttttca

SEQ ID NO: 188196 - DNA, 33 bp, Homo sapien
aaagagttcagttacagcctggtaaatttttca

SEQ ID NO: 188197 - DNA, 33 bp, Homo sapien
aactgaacaaaagaataagttaaatatgccact

SEQ ID NO: 188198 - DNA, 33 bp, Homo sapien
aactgaacaaaagaatgagttaaatatgccact

SEQ ID NO: 188199 - DNA, 33 bp, Homo sapien
agagagggaaatgctccaggtaagaaaggcccc

SEQ ID NO: 188200 - DNA, 33 bp, Homo sapien
agagagggaaatgctcgaggtaagaaaggcccc

SEQ ID NO: 188201 - DNA, 33 bp, Homo sapien
agggaacatgaccacaaacgattcatgaacctt

SEQ ID NO: 188202 - DNA, 33 bp, Homo sapien
agggaacatgaccacagacgattcatgaacctt

SEQ ID NO: 188203 - DNA, 33 bp, Homo sapien
actgacacagcaaaagcccacgagcaaccatga

SEQ ID NO: 188204 - DNA, 33 bp, Homo sapien
actgacacagcaaaagtccacgagcaaccatga

SEQ ID NO: 188205 - DNA, 33 bp, Homo sapien
tgaacaattcatcagccaagtttgtctggctag

SEQ ID NO: 188206 - DNA, 33 bp, Homo sapien
tgaacaattcatcagcgaagtttgtctggctag

SEQ ID NO: 188207 - DNA, 33 bp, Homo sapien
tgaaggaggaaagaagaaaacagactccaaaga

SEQ ID NO: 188208 - DNA, 33 bp, Homo sapien
tgaaggaggaaagaaggaaacagactccaaaga

SEQ ID NO: 188209 - DNA, 33 bp, Homo sapien
aagaaaagtcaaaaccactcaatgcttatctct

SEQ ID NO: 188210 - DNA, 33 bp, Homo sapien
aagaaaagtcaaaaccgctcaatgcttatctct

SEQ ID NO: 188211 - DNA, 33 bp, Homo sapien
aaagtcaagaagttaaagtgaaaaatgcaagaa

SEQ ID NO: 188212 - DNA, 33 bp, Homo sapien
aaagtcaagaagttaacgtgaaaaatgcaagaa

SEQ ID NO: 188213 - DNA, 33 bp, Homo sapien
gggtcatctataggcaaataaggatggtcacct

SEQ ID NO: 188214 - DNA, 33 bp, Homo sapien
gggtcatctataggcacataaggatggtcacct

SEQ ID NO: 188215 - DNA, 33 bp, Homo sapien
aaaaagatcctgaataactagagaaatcctaag

SEQ ID NO: 188216 - DNA, 33 bp, Homo sapien
aaaaagatcctgaatagctagagaaatcctaag

SEQ ID NO: 188217 - DNA, 33 bp, Homo sapien
gagccctcaggtctcagcaaaatctccaggaag

SEQ ID NO: 188218 - DNA, 33 bp, Homo sapien
gagccctcaggtctcatcaaaatctccaggaag

SEQ ID NO: 188219 - DNA, 33 bp, Homo sapien
aataaatatagttttcactctttatgaccaata

SEQ ID NO: 188220 - DNA, 33 bp, Homo sapien
aataaatatagttttctctctttatgaccaata

SEQ ID NO: 188221 - DNA, 33 bp, Homo sapien
atggttggaaacctaaaggcatctacagtgttt

SEQ ID NO: 188222 - DNA, 33 bp, Homo sapien
atggttggaaacctaagggcatctacagtgttt

SEQ ID NO: 188223 - DNA, 33 bp, Homo sapien
taggtccatttcaagggcctaaaagaagtagat

SEQ ID NO: 188224 - DNA, 33 bp, Homo sapien
taggtccatttcaaggtcctaaaagaagtagat

SEQ ID NO: 188225 - DNA, 33 bp, Homo sapien
caatcttaacagaagaagtgcctgaaatctact

SEQ ID NO: 188226 - DNA, 33 bp, Homo sapien
caatcttaacagaagacgtgcctgaaatctact

SEQ ID NO: 188227 - DNA, 33 bp, Homo sapien
gtgcttcggatggaagcaaatgcagtctctctt

SEQ ID NO: 188228 - DNA, 33 bp, Homo sapien
gtgcttcggatggaagtaaatgcagtctctctt

SEQ ID NO: 188229 - DNA, 33 bp, Homo sapien
tcccaaaagcaatatggaaagtgaatgaaacca

SEQ ID NO: 188230 - DNA, 33 bp, Homo sapien
tcccaaaagcaatatgtaaagtgaatgaaacca

SEQ ID NO: 188231 - DNA, 33 bp, Homo sapien
tttgatttcaagtaaacaatgactaacttttgg

SEQ ID NO: 188232 - DNA, 33 bp, Homo sapien
tttgatttcaagtaaagaatgactaacttttgg

SEQ ID NO: 188233 - DNA, 33 bp, Homo sapien
tggaaggtcatgtgaaggtgtttggactttatc

SEQ ID NO: 188234 - DNA, 33 bp, Homo sapien
tggaaggtcatgtgaatgtgtttggactttatc

SEQ ID NO: 188235 - DNA, 33 bp, Homo sapien
gcagtatgggtaagaggaactgctacttagcat

SEQ ID NO: 188236 - DNA, 33 bp, Homo sapien
gcagtatgggtaagagtaactgctacttagcat

SEQ ID NO: 188237 - DNA, 33 bp, Homo sapien
ctgcgggtgtgtttcaccaaacagttacaggaa

SEQ ID NO: 188238 - DNA, 33 bp, Homo sapien
ctgcgggtgtgtttcatcaaacagttacaggaa

SEQ ID NO: 188239 - DNA, 33 bp, Homo sapien
tgccagtgaaaagggcaaaagtcagtactggct

SEQ ID NO: 188240 - DNA, 33 bp, Homo sapien
tgccagtgaaaagggcgaaagtcagtactggct

SEQ ID NO: 188241 - DNA, 33 bp, Homo sapien
gtactatattaacaggcagcaatgtaggcctca

SEQ ID NO: 188242 - DNA, 33 bp, Homo sapien
gtactatattaacaggtagcaatgtaggcctca

SEQ ID NO: 188243 - DNA, 33 bp, Homo sapien
gtttgatatttttgtcagaacagtagtaaaaca

SEQ ID NO: 188244 - DNA, 33 bp, Homo sapien
gtttgatatttttgtcggaacagtagtaaaaca

SEQ ID NO: 188245 - DNA, 33 bp, Homo sapien
tcatagtagaagtagcaactttatgagggtgta

SEQ ID NO: 188246 - DNA, 33 bp, Homo sapien
tcatagtagaagtagccactttatgagggtgta

SEQ ID NO: 188247 - DNA, 33 bp, Homo sapien
gacattgggaactttacagttaaaaagcagcta

SEQ ID NO: 188248 - DNA, 33 bp, Homo sapien
gacattgggaactttagagttaaaaagcagcta

SEQ ID NO: 188249 - DNA, 33 bp, Homo sapien
acataaacgagaaaaaacttttcctgagcaatt

SEQ ID NO: 188250 - DNA, 33 bp, Homo sapien
acataaacgagaaaaatcttttcctgagcaatt

SEQ ID NO: 188251 - DNA, 33 bp, Homo sapien
tgaggcattgtactgacagagtggtgtagcaag

SEQ ID NO: 188252 - DNA, 33 bp, Homo sapien
tgaggcattgtactgagagagtggtgtagcaag

SEQ ID NO: 188253 - DNA, 33 bp, Homo sapien
tatagaatatctcagacgtcttcagttagaaaa

SEQ ID NO: 188254 - DNA, 33 bp, Homo sapien
tatagaatatctcagatgtcttcagttagaaaa

SEQ ID NO: 188255 - DNA, 33 bp, Homo sapien
catttgaaatttttgcaacctcatgatactaag

SEQ ID NO: 188256 - DNA, 33 bp, Homo sapien
catttgaaatttttgctacctcatgatactaag

SEQ ID NO: 188257 - DNA, 33 bp, Homo sapien
gatcatgagagttcagaaaggcatgaagctgag

SEQ ID NO: 188258 - DNA, 33 bp, Homo sapien
gatcatgagagttcaggaaggcatgaagctgag

SEQ ID NO: 188259 - DNA, 33 bp, Homo sapien
atatgtgtgtgactcacatcctttgcacagagt

SEQ ID NO: 188260 - DNA, 33 bp, Homo sapien
atatgtgtgtgactcatatcctttgcacagagt

SEQ ID NO: 188261 - DNA, 33 bp, Homo sapien
aaggtaatagatgctgaatatctaagacttagc

SEQ ID NO: 188262 - DNA, 33 bp, Homo sapien
aaggtaatagatgctgcatatctaagacttagc

SEQ ID NO: 188263 - DNA, 33 bp, Homo sapien
gggttgaattcactacaacggcttctctaagtc

SEQ ID NO: 188264 - DNA, 33 bp, Homo sapien
gggttgaattcactaccacggcttctctaagtc

SEQ ID NO: 188265 - DNA, 33 bp, Homo sapien
ttttctagatcttgtacgtatgcttttctcttt

SEQ ID NO: 188266 - DNA, 33 bp, Homo sapien
ttttctagatcttgtatgtatgcttttctcttt

SEQ ID NO: 188267 - DNA, 33 bp, Homo sapien
tctaatagaaacctctcacttgtcaaatgagaa

SEQ ID NO: 188268 - DNA, 33 bp, Homo sapien
tctaatagaaacctcttacttgtcaaatgagaa

SEQ ID NO: 188269 - DNA, 33 bp, Homo sapien
ttgccttatgcttgaccatttgtcttcctttat

SEQ ID NO: 188270 - DNA, 33 bp, Homo sapien
ttgccttatgcttgactatttgtcttcctttat

SEQ ID NO: 188271 - DNA, 33 bp, Homo sapien
tgtttcctacttcaaaaacagatttgatggatg

SEQ ID NO: 188272 - DNA, 33 bp, Homo sapien
tgtttcctacttcaaagacagatttgatggatg

SEQ ID NO: 188273 - DNA, 33 bp, Homo sapien
tggctacttattggtaactcccagcctgttgtc

SEQ ID NO: 188274 - DNA, 33 bp, Homo sapien
tggctacttattggtatctcccagcctgttgtc

SEQ ID NO: 188275 - DNA, 33 bp, Homo sapien
tctgtataggaaactcactgttttcttctctgt

SEQ ID NO: 188276 - DNA, 33 bp, Homo sapien
tctgtataggaaactcgctgttttcttctctgt

SEQ ID NO: 188277 - DNA, 33 bp, Homo sapien
atgaggaccgaaagaactgcacacatctagcac

SEQ ID NO: 188278 - DNA, 33 bp, Homo sapien
atgaggaccgaaagaattgcacacatctagcac

SEQ ID NO: 188279 - DNA, 33 bp, Homo sapien
agtagaaacagtatgccgaggcaatctaggtaa

SEQ ID NO: 188280 - DNA, 33 bp, Homo sapien
agtagaaacagtatgctgaggcaatctaggtaa

SEQ ID NO: 188281 - DNA, 33 bp, Homo sapien
ctgttattagagaaacaacaaagctgtaaagaa

SEQ ID NO: 188282 - DNA, 33 bp, Homo sapien
ctgttattagagaaacgacaaagctgtaaagaa

SEQ ID NO: 188283 - DNA, 33 bp, Homo sapien
tctaatgtattatgagccaaaatggttaatttt

SEQ ID NO: 188284 - DNA, 33 bp, Homo sapien
tctaatgtattatgaggcaaaatggttaatttt

SEQ ID NO: 188285 - DNA, 33 bp, Homo sapien
ttgtgttgcatgaaataattgccttttatttga

SEQ ID NO: 188286 - DNA, 33 bp, Homo sapien
ttgtgttgcatgaaatgattgccttttatttga

SEQ ID NO: 188287 - DNA, 33 bp, Homo sapien
gtgaaacagtttagaaaaaaggacagtaatctc

SEQ ID NO: 188288 - DNA, 33 bp, Homo sapien
gtgaaacagtttagaagaaaggacagtaatctc

SEQ ID NO: 188289 - DNA, 33 bp, Homo sapien
tattgagcttccactgcagtcagttcttaaatg

SEQ ID NO: 188290 - DNA, 33 bp, Homo sapien
tattgagcttccactgtagtcagttcttaaatg

SEQ ID NO: 188291 - DNA, 33 bp, Homo sapien
tattcagaactgccagaagaaaccttcatgact

SEQ ID NO: 188292 - DNA, 33 bp, Homo sapien
tattcagaactgccaggagaaaccttcatgact

SEQ ID NO: 188293 - DNA, 33 bp, Homo sapien
tgtgatccagacagaacgcaggtctacaatcca

SEQ ID NO: 188294 - DNA, 33 bp, Homo sapien
tgtgatccagacagaatgcaggtctacaatcca

SEQ ID NO: 188295 - DNA, 33 bp, Homo sapien
tagctattaattttcaatacccaaagacctctg

SEQ ID NO: 188296 - DNA, 33 bp, Homo sapien
tagctattaattttcagtacccaaagacctctg

SEQ ID NO: 188297 - DNA, 33 bp, Homo sapien
acttcttcttttgttgaaaattactggttttta

SEQ ID NO: 188298 - DNA, 33 bp, Homo sapien
acttcttcttttgttggaaattactggttttta

SEQ ID NO: 188299 - DNA, 33 bp, Homo sapien
atccaactgtccttgcaaaatctgagtactctt

SEQ ID NO: 188300 - DNA, 33 bp, Homo sapien
atccaactgtccttgccaaatctgagtactctt

SEQ ID NO: 188301 - DNA, 33 bp, Homo sapien
ttgcaaagatcttttccagagtatgcaactctg

SEQ ID NO: 188302 - DNA, 33 bp, Homo sapien
ttgcaaagatcttttctagagtatgcaactctg

SEQ ID NO: 188303 - DNA, 33 bp, Homo sapien
ggccgagttcatgagccgcaacacgatgtaagt

SEQ ID NO: 188304 - DNA, 33 bp, Homo sapien
ggccgagttcatgagctgcaacacgatgtaagt

SEQ ID NO: 188305 - DNA, 33 bp, Homo sapien
acctgtagtcctagtcactgaagaggctgaggt

SEQ ID NO: 188306 - DNA, 33 bp, Homo sapien
acctgtagtcctagtccctgaagaggctgaggt

SEQ ID NO: 188307 - DNA, 33 bp, Homo sapien
tcatgctaaatgctcacagtgtttcattaaatg

SEQ ID NO: 188308 - DNA, 33 bp, Homo sapien
tcatgctaaatgctcatagtgtttcattaaatg

SEQ ID NO: 188309 - DNA, 33 bp, Homo sapien
cctcacatatttcaaaaccatctcaaattcaca

SEQ ID NO: 188310 - DNA, 33 bp, Homo sapien
cctcacatatttcaaatccatctcaaattcaca

SEQ ID NO: 188311 - DNA, 33 bp, Homo sapien
aaaaataatcagacaccaatttagctcttagaa

SEQ ID NO: 188312 - DNA, 33 bp, Homo sapien
aaaaataatcagacacgaatttagctcttagaa

SEQ ID NO: 188313 - DNA, 33 bp, Homo sapien
ttatcagtagtaagaaatgccagaacttaaaga

SEQ ID NO: 188314 - DNA, 33 bp, Homo sapien
ttatcagtagtaagaagtgccagaacttaaaga

SEQ ID NO: 188315 - DNA, 33 bp, Homo sapien
ccaatgtgacaagatccattatcagtagtaaga

SEQ ID NO: 188316 - DNA, 33 bp, Homo sapien
ccaatgtgacaagatctattatcagtagtaaga

SEQ ID NO: 188317 - DNA, 33 bp, Homo sapien
ttgggaaagaaaactaagtttccaggccacaca

SEQ ID NO: 188318 - DNA, 33 bp, Homo sapien
ttgggaaagaaaactaggtttccaggccacaca

SEQ ID NO: 188319 - DNA, 33 bp, Homo sapien
atagaatgcatgggacaaaatagtttttataga

SEQ ID NO: 188320 - DNA, 33 bp, Homo sapien
atagaatgcatgggaccaaatagtttttataga

SEQ ID NO: 188321 - DNA, 33 bp, Homo sapien
aatccagatttccttacagaaaatgagtaagta

SEQ ID NO: 188322 - DNA, 33 bp, Homo sapien
aatccagatttccttagagaaaatgagtaagta

SEQ ID NO: 188323 - DNA, 33 bp, Homo sapien
ccccaccaccaattccacatatcctctgagggt

SEQ ID NO: 188324 - DNA, 33 bp, Homo sapien
ccccaccaccaattccgcatatcctctgagggt

SEQ ID NO: 188325 - DNA, 33 bp, Homo sapien
tgatctcccaacaaaaagattttaggcttagac

SEQ ID NO: 188326 - DNA, 33 bp, Homo sapien
tgatctcccaacaaaaggattttaggcttagac

SEQ ID NO: 188327 - DNA, 33 bp, Homo sapien
tcatctctaatccaatcaactagagccatactg

SEQ ID NO: 188328 - DNA, 33 bp, Homo sapien
tcatctctaatccaattaactagagccatactg

SEQ ID NO: 188329 - DNA, 33 bp, Homo sapien
tcaatgtttatatacacgtgatgtgctggtaag

SEQ ID NO: 188330 - DNA, 33 bp, Homo sapien
tcaatgtttatatacatgtgatgtgctggtaag

SEQ ID NO: 188331 - DNA, 33 bp, Homo sapien
agtcataaccataagactatagtttgcagaaat

SEQ ID NO: 188332 - DNA, 33 bp, Homo sapien
agtcataaccataagattatagtttgcagaaat

SEQ ID NO: 188333 - DNA, 33 bp, Homo sapien
ttttatgagtcactcaagcttctcctgtggcat

SEQ ID NO: 188334 - DNA, 33 bp, Homo sapien
ttttatgagtcactcacgcttctcctgtggcat

SEQ ID NO: 188335 - DNA, 33 bp, Homo sapien
tgttaagatagcaataataatatacgttagcct

SEQ ID NO: 188336 - DNA, 33 bp, Homo sapien
tgttaagatagcaatagtaatatacgttagcct

SEQ ID NO: 188337 - DNA, 33 bp, Homo sapien
tgggtttgacacaaataagaacgttcataaacg

SEQ ID NO: 188338 - DNA, 33 bp, Homo sapien
tgggtttgacacaaatgagaacgttcataaacg

SEQ ID NO: 188339 - DNA, 33 bp, Homo sapien
cctaccacaattggcccatatatgcctgctgtc

SEQ ID NO: 188340 - DNA, 33 bp, Homo sapien
cctaccacaattggcctatatatgcctgctgtc

SEQ ID NO: 188341 - DNA, 33 bp, Homo sapien
agtgggtgaggttagaagtagcccttgaaaatc

SEQ ID NO: 188342 - DNA, 33 bp, Homo sapien
agtgggtgaggttagaggtagcccttgaaaatc

SEQ ID NO: 188343 - DNA, 33 bp, Homo sapien
gaaatcaacatgtcaaagagatatttacacttc

SEQ ID NO: 188344 - DNA, 33 bp, Homo sapien
gaaatcaacatgtcaaggagatatttacacttc

SEQ ID NO: 188345 - DNA, 33 bp, Homo sapien
gttttacataactggaatatttgtgccaagaat

SEQ ID NO: 188346 - DNA, 33 bp, Homo sapien
gttttacataactggattatttgtgccaagaat

SEQ ID NO: 188347 - DNA, 33 bp, Homo sapien
ttctggtaaaatccacagtcaagtctcacagtg

SEQ ID NO: 188348 - DNA, 33 bp, Homo sapien
ttctggtaaaatccacggtcaagtctcacagtg

SEQ ID NO: 188349 - DNA, 33 bp, Homo sapien
agagttgtaggatgtaagatacagaaaaaaaag

SEQ ID NO: 188350 - DNA, 33 bp, Homo sapien
agagttgtaggatgtacgatacagaaaaaaaag

SEQ ID NO: 188351 - DNA, 33 bp, Homo sapien
cattaacaacggcaaacggcaagtttataagtc

SEQ ID NO: 188352 - DNA, 33 bp, Homo sapien
cattaacaacggcaaatggcaagtttataagtc

SEQ ID NO: 188353 - DNA, 33 bp, Homo sapien
aagcccacagaagtgacagagtgtgcaacgccc

SEQ ID NO: 188354 - DNA, 33 bp, Homo sapien
aagcccacagaagtgagagagtgtgcaacgccc

SEQ ID NO: 188355 - DNA, 33 bp, Homo sapien
aagtttggaattttccagagacttgttcaatgg

SEQ ID NO: 188356 - DNA, 33 bp, Homo sapien
aagtttggaattttccggagacttgttcaatgg

SEQ ID NO: 188357 - DNA, 33 bp, Homo sapien
gataattggttatgccaaaaataagttagcctc

SEQ ID NO: 188358 - DNA, 33 bp, Homo sapien
gataattggttatgccgaaaataagttagcctc

SEQ ID NO: 188359 - DNA, 33 bp, Homo sapien
tctttttatagattaactgctgaactcttgtta

SEQ ID NO: 188360 - DNA, 33 bp, Homo sapien
tctttttatagattaattgctgaactcttgtta

SEQ ID NO: 188361 - DNA, 33 bp, Homo sapien
atagtgactggtcaacaaattggattctctctc

SEQ ID NO: 188362 - DNA, 33 bp, Homo sapien
atagtgactggtcaaccaattggattctctctc

SEQ ID NO: 188363 - DNA, 33 bp, Homo sapien
tgagtgacatcggtgacgcaaattgggaccaat

SEQ ID NO: 188364 - DNA, 33 bp, Homo sapien
tgagtgacatcggtgatgcaaattgggaccaat

SEQ ID NO: 188365 - DNA, 33 bp, Homo sapien
gaaactaagtagcccccccaagtctcagtttct

SEQ ID NO: 188366 - DNA, 33 bp, Homo sapien
gaaactaagtagcccctccaagtctcagtttct

SEQ ID NO: 188367 - DNA, 33 bp, Homo sapien
tgtctcactgtattctaaatctaccccagacct

SEQ ID NO: 188368 - DNA, 33 bp, Homo sapien
tgtctcactgtattctgaatctaccccagacct

SEQ ID NO: 188369 - DNA, 33 bp, Homo sapien
caatcttacattttacactatttcacacagctt

SEQ ID NO: 188370 - DNA, 33 bp, Homo sapien
caatcttacattttactctatttcacacagctt

SEQ ID NO: 188371 - DNA, 33 bp, Homo sapien
gaatggctatcagcaaaatgtcagaaaataaca

SEQ ID NO: 188372 - DNA, 33 bp, Homo sapien
gaatggctatcagcaagatgtcagaaaataaca

SEQ ID NO: 188373 - DNA, 33 bp, Homo sapien
attctatttctataaccgagttaccatagagag

SEQ ID NO: 188374 - DNA, 33 bp, Homo sapien
attctatttctataactgagttaccatagagag

SEQ ID NO: 188375 - DNA, 33 bp, Homo sapien
attacattgataaagcccaaataaatgaaatag

SEQ ID NO: 188376 - DNA, 33 bp, Homo sapien
attacattgataaagctcaaataaatgaaatag

SEQ ID NO: 188377 - DNA, 33 bp, Homo sapien
ataggtttccacttcccagtcacttgaaggtaa

SEQ ID NO: 188378 - DNA, 33 bp, Homo sapien
ataggtttccacttcctagtcacttgaaggtaa

SEQ ID NO: 188379 - DNA, 33 bp, Homo sapien
tgacctcctaagttacccaacctttgctttgta

SEQ ID NO: 188380 - DNA, 33 bp, Homo sapien
tgacctcctaagttactcaacctttgctttgta

SEQ ID NO: 188381 - DNA, 33 bp, Homo sapien
caggagattgcttcaacttacagcttacctctg

SEQ ID NO: 188382 - DNA, 33 bp, Homo sapien
caggagattgcttcaatttacagcttacctctg

SEQ ID NO: 188383 - DNA, 33 bp, Homo sapien
tttggctagcaggtaacctgccaacacttggtg

SEQ ID NO: 188384 - DNA, 33 bp, Homo sapien
tttggctagcaggtaagctgccaacacttggtg

SEQ ID NO: 188385 - DNA, 33 bp, Homo sapien
ctggcaagcctataacagtcacctttgggtcag

SEQ ID NO: 188386 - DNA, 33 bp, Homo sapien
ctggcaagcctataacggtcacctttgggtcag

SEQ ID NO: 188387 - DNA, 33 bp, Homo sapien
ataaaagtgattgattcaaggactattcttttg

SEQ ID NO: 188388 - DNA, 33 bp, Homo sapien
ataaaagtgattgatttaaggactattcttttg

SEQ ID NO: 188389 - DNA, 33 bp, Homo sapien
ataatggatagtgcaacaagacatataggtgct

SEQ ID NO: 188390 - DNA, 33 bp, Homo sapien
ataatggatagtgcaataagacatataggtgct

SEQ ID NO: 188391 - DNA, 33 bp, Homo sapien
tcctctacttaaaaaaacaccagttccactcct

SEQ ID NO: 188392 - DNA, 33 bp, Homo sapien
tcctctacttaaaaaagcaccagttccactcct

SEQ ID NO: 188393 - DNA, 33 bp, Homo sapien
cagaataaggactctcaagttactaatggattc

SEQ ID NO: 188394 - DNA, 33 bp, Homo sapien
cagaataaggactctccagttactaatggattc

SEQ ID NO: 188395 - DNA, 33 bp, Homo sapien
tagagctaaatttaacagagtattgtaggcata

SEQ ID NO: 188396 - DNA, 33 bp, Homo sapien
tagagctaaatttaacggagtattgtaggcata

SEQ ID NO: 188397 - DNA, 33 bp, Homo sapien
aagattaaataacttcactattgtcacccaacc

SEQ ID NO: 188398 - DNA, 33 bp, Homo sapien
aagattaaataacttccctattgtcacccaacc

SEQ ID NO: 188399 - DNA, 33 bp, Homo sapien
aatgaatgaactccatcgatgtctcctgaatat

SEQ ID NO: 188400 - DNA, 33 bp, Homo sapien
aatgaatgaactccatggatgtctcctgaatat

SEQ ID NO: 188401 - DNA, 33 bp, Homo sapien
gatcagtccagagtacactgatattcactgaac

SEQ ID NO: 188402 - DNA, 33 bp, Homo sapien
gatcagtccagagtacgctgatattcactgaac

SEQ ID NO: 188403 - DNA, 33 bp, Homo sapien
agaatgtggattgtaacaaagaagaggaaaaca

SEQ ID NO: 188404 - DNA, 33 bp, Homo sapien
agaatgtggattgtaagaaagaagaggaaaaca

SEQ ID NO: 188405 - DNA, 33 bp, Homo sapien
caaatggaaaaattgaaccactcagatacattt

SEQ ID NO: 188406 - DNA, 33 bp, Homo sapien
caaatggaaaaattgacccactcagatacattt

SEQ ID NO: 188407 - DNA, 33 bp, Homo sapien
tcacgcctttgtcacacatttctttagaaagtt

SEQ ID NO: 188408 - DNA, 33 bp, Homo sapien
tcacgcctttgtcacatatttctttagaaagtt

SEQ ID NO: 188409 - DNA, 33 bp, Homo sapien
gacaaagaaaggaggaacctcacaaaacagaaa

SEQ ID NO: 188410 - DNA, 33 bp, Homo sapien
gacaaagaaaggaggagcctcacaaaacagaaa

SEQ ID NO: 188411 - DNA, 33 bp, Homo sapien
ttattatatagaacacaaagtatactaagcaac

SEQ ID NO: 188412 - DNA, 33 bp, Homo sapien
ttattatatagaacacgaagtatactaagcaac

SEQ ID NO: 188413 - DNA, 33 bp, Homo sapien
agaatttcagaatcaacgtatttaactgggcat

SEQ ID NO: 188414 - DNA, 33 bp, Homo sapien
agaatttcagaatcaatgtatttaactgggcat

SEQ ID NO: 188415 - DNA, 33 bp, Homo sapien
ttggtcttctctaccacctcatccaaacaaaaa

SEQ ID NO: 188416 - DNA, 33 bp, Homo sapien
ttggtcttctctaccatctcatccaaacaaaaa

SEQ ID NO: 188417 - DNA, 33 bp, Homo sapien
cagtaagatgtacggtcaaaaagcaatgtgact

SEQ ID NO: 188418 - DNA, 33 bp, Homo sapien
cagtaagatgtacggtgaaaaagcaatgtgact

SEQ ID NO: 188419 - DNA, 33 bp, Homo sapien
cgaacgggactgcggacgttcggaagctcttca

SEQ ID NO: 188420 - DNA, 33 bp, Homo sapien
cgaacgggactgcggatgttcggaagctcttca

SEQ ID NO: 188421 - DNA, 33 bp, Homo sapien
gttcattagctgagaactatactagtcaaagga

SEQ ID NO: 188422 - DNA, 33 bp, Homo sapien
gttcattagctgagaagtatactagtcaaagga

SEQ ID NO: 188423 - DNA, 33 bp, Homo sapien
gcataacattaaaatacggcaaagcagagagct

SEQ ID NO: 188424 - DNA, 33 bp, Homo sapien
gcataacattaaaatatggcaaagcagagagct

SEQ ID NO: 188425 - DNA, 33 bp, Homo sapien
ctcatttctaagcaaagtcatcgcccaaacaaa

SEQ ID NO: 188426 - DNA, 33 bp, Homo sapien
ctcatttctaagcaaattcatcgcccaaacaaa

SEQ ID NO: 188427 - DNA, 33 bp, Homo sapien
tcacacccacattccaccagagttctaccacaa

SEQ ID NO: 188428 - DNA, 33 bp, Homo sapien
tcacacccacattccagcagagttctaccacaa

SEQ ID NO: 188429 - DNA, 33 bp, Homo sapien
accaatcatgcattagaatctgtatgtggtgcc

SEQ ID NO: 188430 - DNA, 33 bp, Homo sapien
accaatcatgcattaggatctgtatgtggtgcc

SEQ ID NO: 188431 - DNA, 33 bp, Homo sapien
ttgctgataaaaagaaaacaagagccaagagct

SEQ ID NO: 188432 - DNA, 33 bp, Homo sapien
ttgctgataaaaagaatacaagagccaagagct

SEQ ID NO: 188433 - DNA, 33 bp, Homo sapien
ttcttattaacattaaatcacaaagtacagaat

SEQ ID NO: 188434 - DNA, 33 bp, Homo sapien
ttcttattaacattaagtcacaaagtacagaat

SEQ ID NO: 188435 - DNA, 33 bp, Homo sapien
aaatcacacaacctggaaaagaaaaggacacac

SEQ ID NO: 188436 - DNA, 33 bp, Homo sapien
aaatcacacaacctggcaaagaaaaggacacac

SEQ ID NO: 188437 - DNA, 33 bp, Homo sapien
gcgtgataagtagggtcacatagatgcaagcac

SEQ ID NO: 188438 - DNA, 33 bp, Homo sapien
gcgtgataagtagggttacatagatgcaagcac

SEQ ID NO: 188439 - DNA, 33 bp, Homo sapien
ctcctcttagccaccaaccttttgtcagccact

SEQ ID NO: 188440 - DNA, 33 bp, Homo sapien
ctcctcttagccaccacccttttgtcagccact

SEQ ID NO: 188441 - DNA, 33 bp, Homo sapien
catatgctttacaagactcatggattaataaaa

SEQ ID NO: 188442 - DNA, 33 bp, Homo sapien
catatgctttacaagattcatggattaataaaa

SEQ ID NO: 188443 - DNA, 33 bp, Homo sapien
ggtgctacaccaagccaatacatgaccttttta

SEQ ID NO: 188444 - DNA, 33 bp, Homo sapien
ggtgctacaccaagccgatacatgaccttttta

SEQ ID NO: 188445 - DNA, 33 bp, Homo sapien
agaatgtgtaatgatcaaagggtgattagtgat

SEQ ID NO: 188446 - DNA, 33 bp, Homo sapien
agaatgtgtaatgatcgaagggtgattagtgat

SEQ ID NO: 188447 - DNA, 33 bp, Homo sapien
tccactgattttcagcaaagtatatattgggaa

SEQ ID NO: 188448 - DNA, 33 bp, Homo sapien
tccactgattttcagcgaagtatatattgggaa

SEQ ID NO: 188449 - DNA, 33 bp, Homo sapien
taaattcatgtatttacagtccactgattttca

SEQ ID NO: 188450 - DNA, 33 bp, Homo sapien
taaattcatgtatttatagtccactgattttca

SEQ ID NO: 188451 - DNA, 33 bp, Homo sapien
atctcatgctcatggaccaaaagtattagcatt

SEQ ID NO: 188452 - DNA, 33 bp, Homo sapien
atctcatgctcatggatcaaaagtattagcatt

SEQ ID NO: 188453 - DNA, 33 bp, Homo sapien
tccacaaaagcttaagcacataatatcagtctg

SEQ ID NO: 188454 - DNA, 33 bp, Homo sapien
tccacaaaagcttaaggacataatatcagtctg

SEQ ID NO: 188455 - DNA, 33 bp, Homo sapien
caaaatatgttccagcccatatactctttctac

SEQ ID NO: 188456 - DNA, 33 bp, Homo sapien
caaaatatgttccagctcatatactctttctac

SEQ ID NO: 188457 - DNA, 33 bp, Homo sapien
caatctctgttttgacaggtaattttggtgtac

SEQ ID NO: 188458 - DNA, 33 bp, Homo sapien
caatctctgttttgacgggtaattttggtgtac

SEQ ID NO: 188459 - DNA, 33 bp, Homo sapien
ctgactaccgctaataaaacccagaatgctgca

SEQ ID NO: 188460 - DNA, 33 bp, Homo sapien
ctgactaccgctaatataacccagaatgctgca

SEQ ID NO: 188461 - DNA, 33 bp, Homo sapien
aaagtaataactaacacaccggaacgcaaaaag

SEQ ID NO: 188462 - DNA, 33 bp, Homo sapien
aaagtaataactaacataccggaacgcaaaaag

SEQ ID NO: 188463 - DNA, 33 bp, Homo sapien
ttttcatttctcatctcacttttttaatgtatc

SEQ ID NO: 188464 - DNA, 33 bp, Homo sapien
ttttcatttctcatctgacttttttaatgtatc

SEQ ID NO: 188465 - DNA, 33 bp, Homo sapien
tcgagtagtacatttacgtgatggagcagtaag

SEQ ID NO: 188466 - DNA, 33 bp, Homo sapien
tcgagtagtacatttatgtgatggagcagtaag

SEQ ID NO: 188467 - DNA, 33 bp, Homo sapien
cagcttccattgttacggaggttaactttacta

SEQ ID NO: 188468 - DNA, 33 bp, Homo sapien
cagcttccattgttactgaggttaactttacta

SEQ ID NO: 188469 - DNA, 33 bp, Homo sapien
taatccctgtaattcaatctctggtacagggta

SEQ ID NO: 188470 - DNA, 33 bp, Homo sapien
taatccctgtaattcagtctctggtacagggta

SEQ ID NO: 188471 - DNA, 33 bp, Homo sapien
gagtatcgtattaatccgaaacttggccaatta

SEQ ID NO: 188472 - DNA, 33 bp, Homo sapien
gagtatcgtattaatctgaaacttggccaatta

SEQ ID NO: 188473 - DNA, 33 bp, Homo sapien
gaatagccttttaaaacgcagccttaggtctgt

SEQ ID NO: 188474 - DNA, 33 bp, Homo sapien
gaatagccttttaaaatgcagccttaggtctgt

SEQ ID NO: 188475 - DNA, 33 bp, Homo sapien
atgagcctaacattccagagtgatggtaaagca

SEQ ID NO: 188476 - DNA, 33 bp, Homo sapien
atgagcctaacattccggagtgatggtaaagca

SEQ ID NO: 188477 - DNA, 33 bp, Homo sapien
tattgcttccactgaaatgtcaagaggcagcag

SEQ ID NO: 188478 - DNA, 33 bp, Homo sapien
tattgcttccactgaactgtcaagaggcagcag

SEQ ID NO: 188479 - DNA, 33 bp, Homo sapien
ttgctgaagacaggccaaagtcatcagaatcac

SEQ ID NO: 188480 - DNA, 33 bp, Homo sapien
ttgctgaagacaggccgaagtcatcagaatcac

SEQ ID NO: 188481 - DNA, 33 bp, Homo sapien
acatcctatatttagtaacgatatttggactga

SEQ ID NO: 188482 - DNA, 33 bp, Homo sapien
acatcctatatttagttacgatatttggactga

SEQ ID NO: 188483 - DNA, 33 bp, Homo sapien
agatttgattgactcacgattctgccagcatgg

SEQ ID NO: 188484 - DNA, 33 bp, Homo sapien
agatttgattgactcatgattctgccagcatgg

SEQ ID NO: 188485 - DNA, 33 bp, Homo sapien
catctaagaatatggaaaacagttgtccctgta

SEQ ID NO: 188486 - DNA, 33 bp, Homo sapien
catctaagaatatggagaacagttgtccctgta

SEQ ID NO: 188487 - DNA, 33 bp, Homo sapien
atgacttttcaatcaacgatggaccatgtatac

SEQ ID NO: 188488 - DNA, 33 bp, Homo sapien
atgacttttcaatcaatgatggaccatgtatac

SEQ ID NO: 188489 - DNA, 33 bp, Homo sapien
tacggtgctacaataactacagtaaccagaaat

SEQ ID NO: 188490 - DNA, 33 bp, Homo sapien
tacggtgctacaataattacagtaaccagaaat

SEQ ID NO: 188491 - DNA, 33 bp, Homo sapien
accagaaatttttaaacgttcttcatccaaaag

SEQ ID NO: 188492 - DNA, 33 bp, Homo sapien
accagaaatttttaaaggttcttcatccaaaag

SEQ ID NO: 188493 - DNA, 33 bp, Homo sapien
tccatccttaaagccaacattagcagatcgatt

SEQ ID NO: 188494 - DNA, 33 bp, Homo sapien
tccatccttaaagccagcattagcagatcgatt

SEQ ID NO: 188495 - DNA, 33 bp, Homo sapien
gtttgcatgtaaagcccatccagtgacttgtcc

SEQ ID NO: 188496 - DNA, 33 bp, Homo sapien
gtttgcatgtaaagcctatccagtgacttgtcc

SEQ ID NO: 188497 - DNA, 33 bp, Homo sapien
taagtataggcaaagaaaggatatcatgatttt

SEQ ID NO: 188498 - DNA, 33 bp, Homo sapien
taagtataggcaaagacaggatatcatgatttt

SEQ ID NO: 188499 - DNA, 33 bp, Homo sapien
tttccttaaatgaaacaaacaccttcagatgaa

SEQ ID NO: 188500 - DNA, 33 bp, Homo sapien
tttccttaaatgaaacgaacaccttcagatgaa

SEQ ID NO: 188501 - DNA, 33 bp, Homo sapien
gcaatattgatagcaacggttttctaatttggg

SEQ ID NO: 188502 - DNA, 33 bp, Homo sapien
gcaatattgatagcaatggttttctaatttggg

SEQ ID NO: 188503 - DNA, 33 bp, Homo sapien
catgtctgaaaattcacgtattctggatcaagc

SEQ ID NO: 188504 - DNA, 33 bp, Homo sapien
catgtctgaaaattcatgtattctggatcaagc

SEQ ID NO: 188505 - DNA, 33 bp, Homo sapien
aagccatttaatctgaccccctaaggccatcta

SEQ ID NO: 188506 - DNA, 33 bp, Homo sapien
aagccatttaatctgatcccctaaggccatcta

SEQ ID NO: 188507 - DNA, 33 bp, Homo sapien
agagtaatagccatgcaacctagagcaagtttc

SEQ ID NO: 188508 - DNA, 33 bp, Homo sapien
agagtaatagccatgcgacctagagcaagtttc

SEQ ID NO: 188509 - DNA, 33 bp, Homo sapien
taacagggaaactctacgaaacaccttcacaca

SEQ ID NO: 188510 - DNA, 33 bp, Homo sapien
taacagggaaactctatgaaacaccttcacaca

SEQ ID NO: 188511 - DNA, 33 bp, Homo sapien
atcaaatgtgtaaaatcatgttttggataggtt

SEQ ID NO: 188512 - DNA, 33 bp, Homo sapien
atcaaatgtgtaaaattatgttttggataggtt

SEQ ID NO: 188513 - DNA, 33 bp, Homo sapien
ggaagaaaacactaccaagagtggatggagaag

SEQ ID NO: 188514 - DNA, 33 bp, Homo sapien
ggaagaaaacactaccgagagtggatggagaag

SEQ ID NO: 188515 - DNA, 33 bp, Homo sapien
ttacatattagataccaatactgaactttgaat

SEQ ID NO: 188516 - DNA, 33 bp, Homo sapien
ttacatattagataccgatactgaactttgaat

SEQ ID NO: 188517 - DNA, 33 bp, Homo sapien
ctcccagcagaactcaccacttgatatgtggcc

SEQ ID NO: 188518 - DNA, 33 bp, Homo sapien
ctcccagcagaactcatcacttgatatgtggcc

SEQ ID NO: 188519 - DNA, 33 bp, Homo sapien
gccctgggtgggtcaaaaaacaccattcaagag

SEQ ID NO: 188520 - DNA, 33 bp, Homo sapien
gccctgggtgggtcaagaaacaccattcaagag

SEQ ID NO: 188521 - DNA, 33 bp, Homo sapien
gagcaaagacctgcaactgaaggctttaggatt

SEQ ID NO: 188522 - DNA, 33 bp, Homo sapien
gagcaaagacctgcaattgaaggctttaggatt

SEQ ID NO: 188523 - DNA, 33 bp, Homo sapien
tgatagtaaaaattcaaaatcagaagaatacac

SEQ ID NO: 188524 - DNA, 33 bp, Homo sapien
tgatagtaaaaattcataatcagaagaatacac

SEQ ID NO: 188525 - DNA, 33 bp, Homo sapien
aaatcacataagtcgaggcaagttatggtaata

SEQ ID NO: 188526 - DNA, 33 bp, Homo sapien
aaatcacataagtcgatgcaagttatggtaata

SEQ ID NO: 188527 - DNA, 33 bp, Homo sapien
tttagtagttctattacgtgcatgcattctttc

SEQ ID NO: 188528 - DNA, 33 bp, Homo sapien
tttagtagttctattatgtgcatgcattctttc

SEQ ID NO: 188529 - DNA, 33 bp, Homo sapien
gttttgcttatttttcaaacattataaagcagt

SEQ ID NO: 188530 - DNA, 33 bp, Homo sapien
gttttgcttatttttcgaacattataaagcagt

SEQ ID NO: 188531 - DNA, 33 bp, Homo sapien
aggtatttggtcaaggaaaataaaagaatatgt

SEQ ID NO: 188532 - DNA, 33 bp, Homo sapien
aggtatttggtcaagggaaataaaagaatatgt

SEQ ID NO: 188533 - DNA, 33 bp, Homo sapien
tagtattaaccagttacgcacaaaatatgaata

SEQ ID NO: 188534 - DNA, 33 bp, Homo sapien
tagtattaaccagttatgcacaaaatatgaata

SEQ ID NO: 188535 - DNA, 33 bp, Homo sapien
tgagctatattatttgcagtactaggctgacac

SEQ ID NO: 188536 - DNA, 33 bp, Homo sapien
tgagctatattatttggagtactaggctgacac

SEQ ID NO: 188537 - DNA, 33 bp, Homo sapien
aaggatgccaactagcactatgtttattcaaca

SEQ ID NO: 188538 - DNA, 33 bp, Homo sapien
aaggatgccaactagctctatgtttattcaaca

SEQ ID NO: 188539 - DNA, 33 bp, Homo sapien
tgtctcttcttccaggaactcaaatcctatcag

SEQ ID NO: 188540 - DNA, 33 bp, Homo sapien
tgtctcttcttccagggactcaaatcctatcag

SEQ ID NO: 188541 - DNA, 33 bp, Homo sapien
ttatactaaattttaacgtgccatccttccata

SEQ ID NO: 188542 - DNA, 33 bp, Homo sapien
ttatactaaattttaatgtgccatccttccata

SEQ ID NO: 188543 - DNA, 33 bp, Homo sapien
tgggatcatacttcaaaagatttataaatttct

SEQ ID NO: 188544 - DNA, 33 bp, Homo sapien
tgggatcatacttcaatagatttataaatttct

SEQ ID NO: 188545 - DNA, 33 bp, Homo sapien
gttttgtagtgtagcaaagctgataaattaggt

SEQ ID NO: 188546 - DNA, 33 bp, Homo sapien
gttttgtagtgtagcacagctgataaattaggt

SEQ ID NO: 188547 - DNA, 33 bp, Homo sapien
atggcagtctttttgaagtgtcctcacgtggag

SEQ ID NO: 188548 - DNA, 33 bp, Homo sapien
atggcagtctttttgatgtgtcctcacgtggag

SEQ ID NO: 188549 - DNA, 33 bp, Homo sapien
gagacaaagaatactccgaaggaaagaaatagt

SEQ ID NO: 188550 - DNA, 33 bp, Homo sapien
gagacaaagaatactctgaaggaaagaaatagt

SEQ ID NO: 188551 - DNA, 33 bp, Homo sapien
ttcattttgagtataaaccagggtaacttttaa

SEQ ID NO: 188552 - DNA, 33 bp, Homo sapien
ttcattttgagtataagccagggtaacttttaa

SEQ ID NO: 188553 - DNA, 33 bp, Homo sapien
ctcacagaatctgtcacggtttgttcatgcaac

SEQ ID NO: 188554 - DNA, 33 bp, Homo sapien
ctcacagaatctgtcatggtttgttcatgcaac

SEQ ID NO: 188555 - DNA, 33 bp, Homo sapien
gacgctaatgcttgaaaattaagactgtgtctt

SEQ ID NO: 188556 - DNA, 33 bp, Homo sapien
gacgctaatgcttgaagattaagactgtgtctt

SEQ ID NO: 188557 - DNA, 33 bp, Homo sapien
atacataccttggttgcatgaaagcatttctca

SEQ ID NO: 188558 - DNA, 33 bp, Homo sapien
atacataccttggttggatgaaagcatttctca

SEQ ID NO: 188559 - DNA, 33 bp, Homo sapien
ttatgtcatttacttacagcgtttcagtcagca

SEQ ID NO: 188560 - DNA, 33 bp, Homo sapien
ttatgtcatttacttatagcgtttcagtcagca

SEQ ID NO: 188561 - DNA, 33 bp, Homo sapien
aaagctctaaaacttggaatcatctctaggtca

SEQ ID NO: 188562 - DNA, 33 bp, Homo sapien
aaagctctaaaacttgtaatcatctctaggtca

SEQ ID NO: 188563 - DNA, 33 bp, Homo sapien
agataacaaaagactcaatgaacagtcacttta

SEQ ID NO: 188564 - DNA, 33 bp, Homo sapien
agataacaaaagactcgatgaacagtcacttta

SEQ ID NO: 188565 - DNA, 33 bp, Homo sapien
cttgtacaagtgataagctagttgagaggttgg

SEQ ID NO: 188566 - DNA, 33 bp, Homo sapien
cttgtacaagtgataatctagttgagaggttgg

SEQ ID NO: 188567 - DNA, 33 bp, Homo sapien
tttattttcaagactacgtaacatacaatttaa

SEQ ID NO: 188568 - DNA, 33 bp, Homo sapien
tttattttcaagactatgtaacatacaatttaa

SEQ ID NO: 188569 - DNA, 33 bp, Homo sapien
ttgcactactagtaagcctctatctacatgaca

SEQ ID NO: 188570 - DNA, 33 bp, Homo sapien
ttgcactactagtaagtctctatctacatgaca

SEQ ID NO: 188571 - DNA, 33 bp, Homo sapien
cctactaaccattctcaaattcgccatagccct

SEQ ID NO: 188572 - DNA, 33 bp, Homo sapien
cctactaaccattctcgaattcgccatagccct

SEQ ID NO: 188573 - DNA, 33 bp, Homo sapien
aagtccctatttagagaacaagtgattatgcta

SEQ ID NO: 188574 - DNA, 33 bp, Homo sapien
aagtccctatttagagcacaagtgattatgcta

SEQ ID NO: 188575 - DNA, 33 bp, Homo sapien
caactcaactttaaaccactggatttctagaac

SEQ ID NO: 188576 - DNA, 33 bp, Homo sapien
caactcaactttaaactactggatttctagaac

SEQ ID NO: 188577 - DNA, 33 bp, Homo sapien
atttgattgattggtcacgttaatgcgcagaaa

SEQ ID NO: 188578 - DNA, 33 bp, Homo sapien
atttgattgattggtcgcgttaatgcgcagaaa

SEQ ID NO: 188579 - DNA, 33 bp, Homo sapien
tacagaaaaaggattagaaaatggtacatgagc

SEQ ID NO: 188580 - DNA, 33 bp, Homo sapien
tacagaaaaaggattataaaatggtacatgagc

SEQ ID NO: 188581 - DNA, 33 bp, Homo sapien
atagggtaactgcaaagacattcctattcaaaa

SEQ ID NO: 188582 - DNA, 33 bp, Homo sapien
atagggtaactgcaaatacattcctattcaaaa

SEQ ID NO: 188583 - DNA, 33 bp, Homo sapien
tgcatgaacaccatcacggtttttagcccatgt

SEQ ID NO: 188584 - DNA, 33 bp, Homo sapien
tgcatgaacaccatcagggtttttagcccatgt

SEQ ID NO: 188585 - DNA, 33 bp, Homo sapien
cattaccacattcatcaaattcatagaagttac

SEQ ID NO: 188586 - DNA, 33 bp, Homo sapien
cattaccacattcatcgaattcatagaagttac

SEQ ID NO: 188587 - DNA, 33 bp, Homo sapien
tactacattatctacaatgctttttactggaat

SEQ ID NO: 188588 - DNA, 33 bp, Homo sapien
tactacattatctacagtgctttttactggaat

SEQ ID NO: 188589 - DNA, 33 bp, Homo sapien
ttttttgagaaagggcagcaagtgtgcctgaag

SEQ ID NO: 188590 - DNA, 33 bp, Homo sapien
ttttttgagaaagggcggcaagtgtgcctgaag

SEQ ID NO: 188591 - DNA, 33 bp, Homo sapien
acacattgtacagatacgcaaaaaatcaaaagt

SEQ ID NO: 188592 - DNA, 33 bp, Homo sapien
acacattgtacagatatgcaaaaaatcaaaagt

SEQ ID NO: 188593 - DNA, 33 bp, Homo sapien
ctttcatattcatatcacatgtcgtttttttca

SEQ ID NO: 188594 - DNA, 33 bp, Homo sapien
ctttcatattcatatcgcatgtcgtttttttca

SEQ ID NO: 188595 - DNA, 33 bp, Homo sapien
aggttactctattctaccttaagagctatgctt

SEQ ID NO: 188596 - DNA, 33 bp, Homo sapien
aggttactctattctatcttaagagctatgctt

SEQ ID NO: 188597 - DNA, 33 bp, Homo sapien
ttgtacatacattagaactccgatttcctatca

SEQ ID NO: 188598 - DNA, 33 bp, Homo sapien
ttgtacatacattagacctccgatttcctatca

SEQ ID NO: 188599 - DNA, 33 bp, Homo sapien
ctgatgggaagaagtacgtgaatgctgatattt

SEQ ID NO: 188600 - DNA, 33 bp, Homo sapien
ctgatgggaagaagtatgtgaatgctgatattt

SEQ ID NO: 188601 - DNA, 33 bp, Homo sapien
gtaaatctcttccagacgcaccctcacagacaa

SEQ ID NO: 188602 - DNA, 33 bp, Homo sapien
gtaaatctcttccagatgcaccctcacagacaa

SEQ ID NO: 188603 - DNA, 33 bp, Homo sapien
taagtttcctgacatgcatttacaagacttcct

SEQ ID NO: 188604 - DNA, 33 bp, Homo sapien
taagtttcctgacatgtatttacaagacttcct

SEQ ID NO: 188605 - DNA, 33 bp, Homo sapien
tgaattggttcatactcaaatcttgttatgatt

SEQ ID NO: 188606 - DNA, 33 bp, Homo sapien
tgaattggttcatacttaaatcttgttatgatt

SEQ ID NO: 188607 - DNA, 33 bp, Homo sapien
aagcttttattcatcacaagacaacataaaaaa

SEQ ID NO: 188608 - DNA, 33 bp, Homo sapien
aagcttttattcatcagaagacaacataaaaaa

SEQ ID NO: 188609 - DNA, 33 bp, Homo sapien
gggttgcaagattccaaatcttttctttgagct

SEQ ID NO: 188610 - DNA, 33 bp, Homo sapien
gggttgcaagattccagatcttttctttgagct

SEQ ID NO: 188611 - DNA, 33 bp, Homo sapien
catatctaaacatagaaaaggtgccataaaata

SEQ ID NO: 188612 - DNA, 33 bp, Homo sapien
catatctaaacatagataaggtgccataaaata

SEQ ID NO: 188613 - DNA, 33 bp, Homo sapien
ttttcctgcctataaagccagcctcttctcaac

SEQ ID NO: 188614 - DNA, 33 bp, Homo sapien
ttttcctgcctataaatccagcctcttctcaac

SEQ ID NO: 188615 - DNA, 33 bp, Homo sapien
attggtggcttataaacggcagaaatgtatttc

SEQ ID NO: 188616 - DNA, 33 bp, Homo sapien
attggtggcttataaatggcagaaatgtatttc

SEQ ID NO: 188617 - DNA, 33 bp, Homo sapien
tggcaaaagatactgaacaaagccaaaaccaaa

SEQ ID NO: 188618 - DNA, 33 bp, Homo sapien
tggcaaaagatactgagcaaagccaaaaccaaa

SEQ ID NO: 188619 - DNA, 33 bp, Homo sapien
catcttaggcattggacgagggggactggtaaa

SEQ ID NO: 188620 - DNA, 33 bp, Homo sapien
catcttaggcattggatgagggggactggtaaa

SEQ ID NO: 188621 - DNA, 33 bp, Homo sapien
aatatctaatcatagactcctcaaaacaatgaa

SEQ ID NO: 188622 - DNA, 33 bp, Homo sapien
aatatctaatcatagagtcctcaaaacaatgaa

SEQ ID NO: 188623 - DNA, 33 bp, Homo sapien
actgtacaatggagaaaccccgcaaacactacc

SEQ ID NO: 188624 - DNA, 33 bp, Homo sapien
actgtacaatggagaagccccgcaaacactacc

SEQ ID NO: 188625 - DNA, 33 bp, Homo sapien
cttcctgttgtgtcaactcgtcagtgcttctgt

SEQ ID NO: 188626 - DNA, 33 bp, Homo sapien
cttcctgttgtgtcaattcgtcagtgcttctgt

SEQ ID NO: 188627 - DNA, 33 bp, Homo sapien
caaaagtctttgtatactaaaccagcacagtta

SEQ ID NO: 188628 - DNA, 33 bp, Homo sapien
caaaagtctttgtatattaaaccagcacagtta

SEQ ID NO: 188629 - DNA, 33 bp, Homo sapien
ccaagcacatccatatgaggggtatgcttatgc

SEQ ID NO: 188630 - DNA, 33 bp, Homo sapien
ccaagcacatccatattaggggtatgcttatgc

SEQ ID NO: 188631 - DNA, 33 bp, Homo sapien
ataggagatgaaagtacgaagtgtggagggatg

SEQ ID NO: 188632 - DNA, 33 bp, Homo sapien
ataggagatgaaagtatgaagtgtggagggatg

SEQ ID NO: 188633 - DNA, 33 bp, Homo sapien
agatttgctgagaataacttcccctcaaaagaa

SEQ ID NO: 188634 - DNA, 33 bp, Homo sapien
agatttgctgagaatagcttcccctcaaaagaa

SEQ ID NO: 188635 - DNA, 33 bp, Homo sapien
gataaaagccatgatcagaaagttgagtccagt

SEQ ID NO: 188636 - DNA, 33 bp, Homo sapien
gataaaagccatgatcggaaagttgagtccagt

SEQ ID NO: 188637 - DNA, 33 bp, Homo sapien
tatgtatcaacttctacaactgccctctttcat

SEQ ID NO: 188638 - DNA, 33 bp, Homo sapien
tatgtatcaacttctataactgccctctttcat

SEQ ID NO: 188639 - DNA, 33 bp, Homo sapien
acctgataagttttgacgtaggtatacttgatg

SEQ ID NO: 188640 - DNA, 33 bp, Homo sapien
acctgataagttttgatgtaggtatacttgatg

SEQ ID NO: 188641 - DNA, 33 bp, Homo sapien
tgtcagtaatgctctcaactaccttaatctccc

SEQ ID NO: 188642 - DNA, 33 bp, Homo sapien
tgtcagtaatgctctcgactaccttaatctccc

SEQ ID NO: 188643 - DNA, 33 bp, Homo sapien
tcattgcactcacacaaactaagagtgtagcat

SEQ ID NO: 188644 - DNA, 33 bp, Homo sapien
tcattgcactcacacagactaagagtgtagcat

SEQ ID NO: 188645 - DNA, 33 bp, Homo sapien
gtggctttctgatttaaagatgagagcaactaa

SEQ ID NO: 188646 - DNA, 33 bp, Homo sapien
gtggctttctgatttacagatgagagcaactaa

SEQ ID NO: 188647 - DNA, 33 bp, Homo sapien
aacatattctctcacaatagttacacaaaatgt

SEQ ID NO: 188648 - DNA, 33 bp, Homo sapien
aacatattctctcacagtagttacacaaaatgt

SEQ ID NO: 188649 - DNA, 33 bp, Homo sapien
ccagtgacaagcctcaactaaggctcaggtatg

SEQ ID NO: 188650 - DNA, 33 bp, Homo sapien
ccagtgacaagcctcagctaaggctcaggtatg

SEQ ID NO: 188651 - DNA, 33 bp, Homo sapien
aaggctcaggtatgatcagagagctgctaataa

SEQ ID NO: 188652 - DNA, 33 bp, Homo sapien
aaggctcaggtatgattagagagctgctaataa

SEQ ID NO: 188653 - DNA, 33 bp, Homo sapien
aagatgtcaggggaagcaggaaacagaatagca

SEQ ID NO: 188654 - DNA, 33 bp, Homo sapien
aagatgtcaggggaaggaggaaacagaatagca

SEQ ID NO: 188655 - DNA, 33 bp, Homo sapien
gcagaaacagacaccaaatagtcctcagagaga

SEQ ID NO: 188656 - DNA, 33 bp, Homo sapien
gcagaaacagacaccagatagtcctcagagaga

SEQ ID NO: 188657 - DNA, 33 bp, Homo sapien
cattttgtgagcacacacctacaaagccacaac

SEQ ID NO: 188658 - DNA, 33 bp, Homo sapien
cattttgtgagcacacgcctacaaagccacaac

SEQ ID NO: 188659 - DNA, 33 bp, Homo sapien
gacatcttgattgcaaacttgtataatactaac

SEQ ID NO: 188660 - DNA, 33 bp, Homo sapien
gacatcttgattgcaaccttgtataatactaac

SEQ ID NO: 188661 - DNA, 33 bp, Homo sapien
atacacagtagaacaaaaaatagaaaaagccta

SEQ ID NO: 188662 - DNA, 33 bp, Homo sapien
atacacagtagaacaagaaatagaaaaagccta

SEQ ID NO: 188663 - DNA, 33 bp, Homo sapien
tcacacagtgtcaagacgattcagaaagactca

SEQ ID NO: 188664 - DNA, 33 bp, Homo sapien
tcacacagtgtcaagatgattcagaaagactca

SEQ ID NO: 188665 - DNA, 33 bp, Homo sapien
cagagcctgtcattaacaacttgatccaaagtc

SEQ ID NO: 188666 - DNA, 33 bp, Homo sapien
cagagcctgtcattaataacttgatccaaagtc

SEQ ID NO: 188667 - DNA, 33 bp, Homo sapien
ttccctggattttctacgacactggtatagaga

SEQ ID NO: 188668 - DNA, 33 bp, Homo sapien
ttccctggattttctatgacactggtatagaga

SEQ ID NO: 188669 - DNA, 33 bp, Homo sapien
ggcaactggaccactccaggctgggaagttgga

SEQ ID NO: 188670 - DNA, 33 bp, Homo sapien
ggcaactggaccactctaggctgggaagttgga

SEQ ID NO: 188671 - DNA, 33 bp, Homo sapien
ctcttgcagaatcttacgaaggaatctataaac

SEQ ID NO: 188672 - DNA, 33 bp, Homo sapien
ctcttgcagaatcttatgaaggaatctataaac

SEQ ID NO: 188673 - DNA, 33 bp, Homo sapien
cagtgttaactgccccccaagctaaagctagtt

SEQ ID NO: 188674 - DNA, 33 bp, Homo sapien
cagtgttaactgccccgcaagctaaagctagtt

SEQ ID NO: 188675 - DNA, 33 bp, Homo sapien
aggtttccaagatcaacggacagacagtgggta

SEQ ID NO: 188676 - DNA, 33 bp, Homo sapien
aggtttccaagatcaagggacagacagtgggta

SEQ ID NO: 188677 - DNA, 33 bp, Homo sapien
catttagatatagacacgaatggtatctctgag

SEQ ID NO: 188678 - DNA, 33 bp, Homo sapien
catttagatatagacatgaatggtatctctgag

SEQ ID NO: 188679 - DNA, 33 bp, Homo sapien
tttccaaaccaacaaacgccatcaaatcacaaa

SEQ ID NO: 188680 - DNA, 33 bp, Homo sapien
tttccaaaccaacaaatgccatcaaatcacaaa

SEQ ID NO: 188681 - DNA, 33 bp, Homo sapien
ttgttggtttggaaaactgtccatatcacatat

SEQ ID NO: 188682 - DNA, 33 bp, Homo sapien
ttgttggtttggaaaattgtccatatcacatat

SEQ ID NO: 188683 - DNA, 33 bp, Homo sapien
ttaaaattactatgcaactgtttctcccctatt

SEQ ID NO: 188684 - DNA, 33 bp, Homo sapien
ttaaaattactatgcagctgtttctcccctatt

SEQ ID NO: 188685 - DNA, 33 bp, Homo sapien
catttgccttagttatgaaatcatcaccttttg

SEQ ID NO: 188686 - DNA, 33 bp, Homo sapien
catttgccttagttattaaatcatcaccttttg

SEQ ID NO: 188687 - DNA, 33 bp, Homo sapien
aaatattagttgctcccatcagctaacatttcc

SEQ ID NO: 188688 - DNA, 33 bp, Homo sapien
aaatattagttgctcctatcagctaacatttcc

SEQ ID NO: 188689 - DNA, 33 bp, Homo sapien
gtaatttagagaagaaaaggtgatgaatatgct

SEQ ID NO: 188690 - DNA, 33 bp, Homo sapien
gtaatttagagaagaacaggtgatgaatatgct

SEQ ID NO: 188691 - DNA, 33 bp, Homo sapien
ctgtaatgaagcttgacaattgttaatgccagt

SEQ ID NO: 188692 - DNA, 33 bp, Homo sapien
ctgtaatgaagcttgataattgttaatgccagt

SEQ ID NO: 188693 - DNA, 33 bp, Homo sapien
ttttacaaggcatgagaccctgctctggctaca

SEQ ID NO: 188694 - DNA, 33 bp, Homo sapien
ttttacaaggcatgaggccctgctctggctaca

SEQ ID NO: 188695 - DNA, 33 bp, Homo sapien
caccaaccatgtacaaagtttcccttatctcca

SEQ ID NO: 188696 - DNA, 33 bp, Homo sapien
caccaaccatgtacaatgtttcccttatctcca

SEQ ID NO: 188697 - DNA, 33 bp, Homo sapien
gcctagaatcagaaaacttcctgctgtggttta

SEQ ID NO: 188698 - DNA, 33 bp, Homo sapien
gcctagaatcagaaaatttcctgctgtggttta

SEQ ID NO: 188699 - DNA, 33 bp, Homo sapien
ttactgccattcaaaagtgcttatattccccca

SEQ ID NO: 188700 - DNA, 33 bp, Homo sapien
ttactgccattcaaaattgcttatattccccca

SEQ ID NO: 188701 - DNA, 33 bp, Homo sapien
agtttcctttgcctctaacataaccaatattct

SEQ ID NO: 188702 - DNA, 33 bp, Homo sapien
agtttcctttgcctcttacataaccaatattct

SEQ ID NO: 188703 - DNA, 33 bp, Homo sapien
ctcctctgatcctgaaatccctattcttttctc

SEQ ID NO: 188704 - DNA, 33 bp, Homo sapien
ctcctctgatcctgaagtccctattcttttctc

SEQ ID NO: 188705 - DNA, 33 bp, Homo sapien
tttactatgtgttcagaaccatgcgagacctag

SEQ ID NO: 188706 - DNA, 33 bp, Homo sapien
tttactatgtgttcagcaccatgcgagacctag

SEQ ID NO: 188707 - DNA, 33 bp, Homo sapien
ggtaagggctctactgaaaggatgcataaacac

SEQ ID NO: 188708 - DNA, 33 bp, Homo sapien
ggtaagggctctactggaaggatgcataaacac

SEQ ID NO: 188709 - DNA, 33 bp, Homo sapien
gaaatccctgtagagacattggaatagtgcaca

SEQ ID NO: 188710 - DNA, 33 bp, Homo sapien
gaaatccctgtagagatattggaatagtgcaca

SEQ ID NO: 188711 - DNA, 33 bp, Homo sapien
gacttagtggagttaaggacttgtttaaatcat

SEQ ID NO: 188712 - DNA, 33 bp, Homo sapien
gacttagtggagttaatgacttgtttaaatcat

SEQ ID NO: 188713 - DNA, 33 bp, Homo sapien
atctatctctggataaatggatagatagagatt

SEQ ID NO: 188714 - DNA, 33 bp, Homo sapien
atctatctctggataagtggatagatagagatt

SEQ ID NO: 188715 - DNA, 33 bp, Homo sapien
agttgcatttccaataaagcaaaaatgttccat

SEQ ID NO: 188716 - DNA, 33 bp, Homo sapien
agttgcatttccaatacagcaaaaatgttccat

SEQ ID NO: 188717 - DNA, 33 bp, Homo sapien
ctttaagtatgtaagacagtgttgatctcctat

SEQ ID NO: 188718 - DNA, 33 bp, Homo sapien
ctttaagtatgtaagatagtgttgatctcctat

SEQ ID NO: 188719 - DNA, 33 bp, Homo sapien
ttggaaaaaactgtctaaagtaattcatgtcta

SEQ ID NO: 188720 - DNA, 33 bp, Homo sapien
ttggaaaaaactgtctgaagtaattcatgtcta

SEQ ID NO: 188721 - DNA, 33 bp, Homo sapien
tctgcccactattacactggcaaaaatagacac

SEQ ID NO: 188722 - DNA, 33 bp, Homo sapien
tctgcccactattacattggcaaaaatagacac

SEQ ID NO: 188723 - DNA, 33 bp, Homo sapien
cagatatgatataaacagcaccttagtctaaac

SEQ ID NO: 188724 - DNA, 33 bp, Homo sapien
cagatatgatataaacggcaccttagtctaaac

SEQ ID NO: 188725 - DNA, 33 bp, Homo sapien
tcattaagcccatccacaactttataactcagt

SEQ ID NO: 188726 - DNA, 33 bp, Homo sapien
tcattaagcccatccataactttataactcagt

SEQ ID NO: 188727 - DNA, 33 bp, Homo sapien
aacaatgccatttaaactgttgccaagatttgt

SEQ ID NO: 188728 - DNA, 33 bp, Homo sapien
aacaatgccatttaaattgttgccaagatttgt

SEQ ID NO: 188729 - DNA, 33 bp, Homo sapien
tttacttttagagagaggaatatgctttcacga

SEQ ID NO: 188730 - DNA, 33 bp, Homo sapien
tttacttttagagagatgaatatgctttcacga

SEQ ID NO: 188731 - DNA, 33 bp, Homo sapien
cccatgcttgctggaaatggtgcagaccaacag

SEQ ID NO: 188732 - DNA, 33 bp, Homo sapien
cccatgcttgctggaagtggtgcagaccaacag

SEQ ID NO: 188733 - DNA, 33 bp, Homo sapien
gttgagaaaaaacagcacaaggacagaggatag

SEQ ID NO: 188734 - DNA, 33 bp, Homo sapien
gttgagaaaaaacagcgcaaggacagaggatag

SEQ ID NO: 188735 - DNA, 33 bp, Homo sapien
attggatgaaataagtcaccccatcatgtttgc

SEQ ID NO: 188736 - DNA, 33 bp, Homo sapien
attggatgaaataagttaccccatcatgtttgc

SEQ ID NO: 188737 - DNA, 33 bp, Homo sapien
cttgatcaaaggaaaacaggagatgagaggagc

SEQ ID NO: 188738 - DNA, 33 bp, Homo sapien
cttgatcaaaggaaaagaggagatgagaggagc

SEQ ID NO: 188739 - DNA, 33 bp, Homo sapien
attatcaaaatagtccaacactggtatacttgg

SEQ ID NO: 188740 - DNA, 33 bp, Homo sapien
attatcaaaatagtccgacactggtatacttgg

SEQ ID NO: 188741 - DNA, 33 bp, Homo sapien
cattaatgagaaatcaatgaaacaataattgat

SEQ ID NO: 188742 - DNA, 33 bp, Homo sapien
cattaatgagaaatcagtgaaacaataattgat

SEQ ID NO: 188743 - DNA, 33 bp, Homo sapien
gtttcacttacaatcgcagcttccaagaaccta

SEQ ID NO: 188744 - DNA, 33 bp, Homo sapien
gtttcacttacaatcgtagcttccaagaaccta

SEQ ID NO: 188745 - DNA, 33 bp, Homo sapien
ctggaacagttgggcaagtaattatctgacttg

SEQ ID NO: 188746 - DNA, 33 bp, Homo sapien
ctggaacagttgggcaggtaattatctgacttg

SEQ ID NO: 188747 - DNA, 33 bp, Homo sapien
atgtgggaggaaaccaatgcagacatgaagaga

SEQ ID NO: 188748 - DNA, 33 bp, Homo sapien
atgtgggaggaaaccagtgcagacatgaagaga

SEQ ID NO: 188749 - DNA, 33 bp, Homo sapien
taacttctcttatgagaccactttttcctttag

SEQ ID NO: 188750 - DNA, 33 bp, Homo sapien
taacttctcttatgagtccactttttcctttag

SEQ ID NO: 188751 - DNA, 33 bp, Homo sapien
cacagaaagtacaaaacgtggaactcctaacta

SEQ ID NO: 188752 - DNA, 33 bp, Homo sapien
cacagaaagtacaaaatgtggaactcctaacta

SEQ ID NO: 188753 - DNA, 33 bp, Homo sapien
tgctcgcaggttatagaagagacataagtaggc

SEQ ID NO: 188754 - DNA, 33 bp, Homo sapien
tgctcgcaggttataggagagacataagtaggc

SEQ ID NO: 188755 - DNA, 33 bp, Homo sapien
ggttgtaggatgtgggaaataggtgagtctaca

SEQ ID NO: 188756 - DNA, 33 bp, Homo sapien
ggttgtaggatgtggggaataggtgagtctaca

SEQ ID NO: 188757 - DNA, 33 bp, Homo sapien
gagcccagagtactatcagagaaagtggaggag

SEQ ID NO: 188758 - DNA, 33 bp, Homo sapien
gagcccagagtactattagagaaagtggaggag

SEQ ID NO: 188759 - DNA, 33 bp, Homo sapien
tgaacaactccatggaagtaattaatgccattg

SEQ ID NO: 188760 - DNA, 33 bp, Homo sapien
tgaacaactccatggatgtaattaatgccattg

SEQ ID NO: 188761 - DNA, 33 bp, Homo sapien
ggaatttgtagctataaatttcctctgaacact

SEQ ID NO: 188762 - DNA, 33 bp, Homo sapien
ggaatttgtagctatacatttcctctgaacact

SEQ ID NO: 188763 - DNA, 33 bp, Homo sapien
agttagcatattatcaatccacagtgcaggaaa

SEQ ID NO: 188764 - DNA, 33 bp, Homo sapien
agttagcatattatcattccacagtgcaggaaa

SEQ ID NO: 188765 - DNA, 33 bp, Homo sapien
aaagaaaatgcggcatcaagagacatttctgag

SEQ ID NO: 188766 - DNA, 33 bp, Homo sapien
aaagaaaatgcggcatgaagagacatttctgag

SEQ ID NO: 188767 - DNA, 33 bp, Homo sapien
aaacatagaccccagacgccctaatctaagtgt

SEQ ID NO: 188768 - DNA, 33 bp, Homo sapien
aaacatagaccccagatgccctaatctaagtgt

SEQ ID NO: 188769 - DNA, 33 bp, Homo sapien
tggctcctggtatcaacatcaggacactcattc

SEQ ID NO: 188770 - DNA, 33 bp, Homo sapien
tggctcctggtatcaatatcaggacactcattc

SEQ ID NO: 188771 - DNA, 33 bp, Homo sapien
tgttttagatctacaaagagcaaataactggaa

SEQ ID NO: 188772 - DNA, 33 bp, Homo sapien
tgttttagatctacaaggagcaaataactggaa

SEQ ID NO: 188773 - DNA, 33 bp, Homo sapien
cagggtgggaccagggccagaaaaggtcagaac

SEQ ID NO: 188774 - DNA, 33 bp, Homo sapien
cagggtgggaccagggtcagaaaaggtcagaac

SEQ ID NO: 188775 - DNA, 33 bp, Homo sapien
aattatacataacacccctgtagccctgtggct

SEQ ID NO: 188776 - DNA, 33 bp, Homo sapien
aattatacataacacctctgtagccctgtggct

SEQ ID NO: 188777 - DNA, 33 bp, Homo sapien
atcaaggtgggcagggaaagccctttggtgtta

SEQ ID NO: 188778 - DNA, 33 bp, Homo sapien
atcaaggtgggcagggcaagccctttggtgtta

SEQ ID NO: 188779 - DNA, 33 bp, Homo sapien
aagatgctggctgcaaagatgtacggggattaa

SEQ ID NO: 188780 - DNA, 33 bp, Homo sapien
aagatgctggctgcaaggatgtacggggattaa

SEQ ID NO: 188781 - DNA, 33 bp, Homo sapien
accaaacagtaggtccaattatgcttccatata

SEQ ID NO: 188782 - DNA, 33 bp, Homo sapien
accaaacagtaggtccgattatgcttccatata

SEQ ID NO: 188783 - DNA, 33 bp, Homo sapien
gattgatgtgtctgaacagcaatgattccattc

SEQ ID NO: 188784 - DNA, 33 bp, Homo sapien
gattgatgtgtctgaatagcaatgattccattc

SEQ ID NO: 188785 - DNA, 33 bp, Homo sapien
agtgggtgtggctatgaaaaggaaaaatgagtc

SEQ ID NO: 188786 - DNA, 33 bp, Homo sapien
agtgggtgtggctatggaaaggaaaaatgagtc

SEQ ID NO: 188787 - DNA, 33 bp, Homo sapien
ttctacttcgttgacactgcatgacaattgtta

SEQ ID NO: 188788 - DNA, 33 bp, Homo sapien
ttctacttcgttgacattgcatgacaattgtta

SEQ ID NO: 188789 - DNA, 33 bp, Homo sapien
aagctccgcaaaagaaacagggatgattgaata

SEQ ID NO: 188790 - DNA, 33 bp, Homo sapien
aagctccgcaaaagaagcagggatgattgaata

SEQ ID NO: 188791 - DNA, 33 bp, Homo sapien
tttgcagcccctgtaacggtaatcatatgaaag

SEQ ID NO: 188792 - DNA, 33 bp, Homo sapien
tttgcagcccctgtaatggtaatcatatgaaag

SEQ ID NO: 188793 - DNA, 33 bp, Homo sapien
cggtgtttcacagggcaaggaatcaagattcag

SEQ ID NO: 188794 - DNA, 33 bp, Homo sapien
cggtgtttcacagggcgaggaatcaagattcag

SEQ ID NO: 188795 - DNA, 33 bp, Homo sapien
aagaatgtccccatagaacttcgagccatattt

SEQ ID NO: 188796 - DNA, 33 bp, Homo sapien
aagaatgtccccatagcacttcgagccatattt

SEQ ID NO: 188797 - DNA, 33 bp, Homo sapien
tcagtattctcatgtacaaagcagtagtcatat

SEQ ID NO: 188798 - DNA, 33 bp, Homo sapien
tcagtattctcatgtagaaagcagtagtcatat

SEQ ID NO: 188799 - DNA, 33 bp, Homo sapien
ctgggaatttagcctccaatgcaacagtgttga

SEQ ID NO: 188800 - DNA, 33 bp, Homo sapien
ctgggaatttagcctctaatgcaacagtgttga

SEQ ID NO: 188801 - DNA, 33 bp, Homo sapien
ccagtgtgagtgcaaacacagacaccagcaaac

SEQ ID NO: 188802 - DNA, 33 bp, Homo sapien
ccagtgtgagtgcaaatacagacaccagcaaac

SEQ ID NO: 188803 - DNA, 33 bp, Homo sapien
gtatgtgttctaaaaaaaatgaatgtatccatg

SEQ ID NO: 188804 - DNA, 33 bp, Homo sapien
gtatgtgttctaaaaagaatgaatgtatccatg

SEQ ID NO: 188805 - DNA, 33 bp, Homo sapien
ttgtgggtggaggagaaggaaggacccgaagtt

SEQ ID NO: 188806 - DNA, 33 bp, Homo sapien
ttgtgggtggaggagagggaaggacccgaagtt

SEQ ID NO: 188807 - DNA, 33 bp, Homo sapien
acgtgtccatgagttaaagacagctgagaaagg

SEQ ID NO: 188808 - DNA, 33 bp, Homo sapien
acgtgtccatgagttagagacagctgagaaagg

SEQ ID NO: 188809 - DNA, 33 bp, Homo sapien
ttatgcagagtgacaaattacttaaaagctttg

SEQ ID NO: 188810 - DNA, 33 bp, Homo sapien
ttatgcagagtgacaagttacttaaaagctttg

SEQ ID NO: 188811 - DNA, 33 bp, Homo sapien
agtagaaatgacctgaaccttctgagcagcatc

SEQ ID NO: 188812 - DNA, 33 bp, Homo sapien
agtagaaatgacctgacccttctgagcagcatc

SEQ ID NO: 188813 - DNA, 33 bp, Homo sapien
aaatactgtggtgctcccccaagatctcctctt

SEQ ID NO: 188814 - DNA, 33 bp, Homo sapien
aaatactgtggtgctctcccaagatctcctctt

SEQ ID NO: 188815 - DNA, 33 bp, Homo sapien
tcctcttggtattctggatcagtaactccaaca

SEQ ID NO: 188816 - DNA, 33 bp, Homo sapien
tcctcttggtattctgtatcagtaactccaaca

SEQ ID NO: 188817 - DNA, 33 bp, Homo sapien
tgtggttatggtaagtcttgagagaaatgagca

SEQ ID NO: 188818 - DNA, 33 bp, Homo sapien
tgtggttatggtaagttttgagagaaatgagca

SEQ ID NO: 188819 - DNA, 33 bp, Homo sapien
cacaaagatgggattcagaaattgtcaagatat

SEQ ID NO: 188820 - DNA, 33 bp, Homo sapien
cacaaagatgggattcggaaattgtcaagatat

SEQ ID NO: 188821 - DNA, 33 bp, Homo sapien
agcctgtgggttaaaacggtagccacaagcact

SEQ ID NO: 188822 - DNA, 33 bp, Homo sapien
agcctgtgggttaaaatggtagccacaagcact

SEQ ID NO: 188823 - DNA, 33 bp, Homo sapien
ggaagcaaatctgagcaaatattcctattttct

SEQ ID NO: 188824 - DNA, 33 bp, Homo sapien
ggaagcaaatctgagcgaatattcctattttct

SEQ ID NO: 188825 - DNA, 33 bp, Homo sapien
gctcatctggtctaagcacaaatctgaagcctt

SEQ ID NO: 188826 - DNA, 33 bp, Homo sapien
gctcatctggtctaagtacaaatctgaagcctt

SEQ ID NO: 188827 - DNA, 33 bp, Homo sapien
tcttctacctgggaaccatactcctcactcagt

SEQ ID NO: 188828 - DNA, 33 bp, Homo sapien
tcttctacctgggaactatactcctcactcagt

SEQ ID NO: 188829 - DNA, 33 bp, Homo sapien
attcatgccttcattgcaggtgattttgttcaa

SEQ ID NO: 188830 - DNA, 33 bp, Homo sapien
attcatgccttcattgtaggtgattttgttcaa

SEQ ID NO: 188831 - DNA, 33 bp, Homo sapien
tctctcagaaaagagactagggttagaaaggag

SEQ ID NO: 188832 - DNA, 33 bp, Homo sapien
tctctcagaaaagagattagggttagaaaggag

SEQ ID NO: 188833 - DNA, 33 bp, Homo sapien
agctgcagatacaatcacatcgttcatggtgat

SEQ ID NO: 188834 - DNA, 33 bp, Homo sapien
agctgcagatacaatcgcatcgttcatggtgat

SEQ ID NO: 188835 - DNA, 33 bp, Homo sapien
gtgtacattctaatagcaacgtgtgcattctaa

SEQ ID NO: 188836 - DNA, 33 bp, Homo sapien
gtgtacattctaatagtaacgtgtgcattctaa

SEQ ID NO: 188837 - DNA, 33 bp, Homo sapien
caacttacaagggacacgtaggaactcttcaag

SEQ ID NO: 188838 - DNA, 33 bp, Homo sapien
caacttacaagggacatgtaggaactcttcaag

SEQ ID NO: 188839 - DNA, 33 bp, Homo sapien
atccagtaaggcagtcaaatttccactttgttc

SEQ ID NO: 188840 - DNA, 33 bp, Homo sapien
atccagtaaggcagtccaatttccactttgttc

SEQ ID NO: 188841 - DNA, 33 bp, Homo sapien
tccttacacaatttcaataagattttgggggca

SEQ ID NO: 188842 - DNA, 33 bp, Homo sapien
tccttacacaatttcattaagattttgggggca

SEQ ID NO: 188843 - DNA, 33 bp, Homo sapien
ttaggtataatcatgacccaaaaactccctccc

SEQ ID NO: 188844 - DNA, 33 bp, Homo sapien
ttaggtataatcatgatccaaaaactccctccc

SEQ ID NO: 188845 - DNA, 33 bp, Homo sapien
tccctccctattgctacagaaggaaaactcctt

SEQ ID NO: 188846 - DNA, 33 bp, Homo sapien
tccctccctattgctagagaaggaaaactcctt

SEQ ID NO: 188847 - DNA, 33 bp, Homo sapien
gaatggcacaagcctagacctatctctgattct

SEQ ID NO: 188848 - DNA, 33 bp, Homo sapien
gaatggcacaagcctatacctatctctgattct

SEQ ID NO: 188849 - DNA, 33 bp, Homo sapien
ctgactggacattaacagagaggtgatttatgg

SEQ ID NO: 188850 - DNA, 33 bp, Homo sapien
ctgactggacattaacggagaggtgatttatgg

SEQ ID NO: 188851 - DNA, 33 bp, Homo sapien
actaataatgagtatcagaagtgtgcataaaat

SEQ ID NO: 188852 - DNA, 33 bp, Homo sapien
actaataatgagtatcggaagtgtgcataaaat

SEQ ID NO: 188853 - DNA, 33 bp, Homo sapien
agatttcaattatatacgctacccttttctcca

SEQ ID NO: 188854 - DNA, 33 bp, Homo sapien
agatttcaattatatatgctacccttttctcca

SEQ ID NO: 188855 - DNA, 33 bp, Homo sapien
actcaaaatgagctgacgaaattagaagcatgg

SEQ ID NO: 188856 - DNA, 33 bp, Homo sapien
actcaaaatgagctgaggaaattagaagcatgg

SEQ ID NO: 188857 - DNA, 33 bp, Homo sapien
aaaagtattcacaaaaagttgatattggttagc

SEQ ID NO: 188858 - DNA, 33 bp, Homo sapien
aaaagtattcacaaaatgttgatattggttagc

SEQ ID NO: 188859 - DNA, 33 bp, Homo sapien
attctattcctgtagacgttaagacattagtgt

SEQ ID NO: 188860 - DNA, 33 bp, Homo sapien
attctattcctgtagatgttaagacattagtgt

SEQ ID NO: 188861 - DNA, 33 bp, Homo sapien
tcaaaatcttagtgcacattctaggtgatagta

SEQ ID NO: 188862 - DNA, 33 bp, Homo sapien
tcaaaatcttagtgcatattctaggtgatagta

SEQ ID NO: 188863 - DNA, 33 bp, Homo sapien
cttccatgaagcagataagcgaggaagcagtgg

SEQ ID NO: 188864 - DNA, 33 bp, Homo sapien
cttccatgaagcagatgagcgaggaagcagtgg

SEQ ID NO: 188865 - DNA, 33 bp, Homo sapien
ggagtccagatgttgacgacttgattgttctag

SEQ ID NO: 188866 - DNA, 33 bp, Homo sapien
ggagtccagatgttgatgacttgattgttctag

SEQ ID NO: 188867 - DNA, 33 bp, Homo sapien
agtaagagtctttacaacacagtggtggagcaa

SEQ ID NO: 188868 - DNA, 33 bp, Homo sapien
agtaagagtctttacatcacagtggtggagcaa

SEQ ID NO: 188869 - DNA, 33 bp, Homo sapien
tcatagttaaacctcaataaagaatgaattgca

SEQ ID NO: 188870 - DNA, 33 bp, Homo sapien
tcatagttaaacctcagtaaagaatgaattgca

SEQ ID NO: 188871 - DNA, 33 bp, Homo sapien
acttcaaagacaatgacgtcacttagtacaggg

SEQ ID NO: 188872 - DNA, 33 bp, Homo sapien
acttcaaagacaatgatgtcacttagtacaggg

SEQ ID NO: 188873 - DNA, 33 bp, Homo sapien
aactgatttacacttccaccgacagtgtataag

SEQ ID NO: 188874 - DNA, 33 bp, Homo sapien
aactgatttacacttcgaccgacagtgtataag

SEQ ID NO: 188875 - DNA, 33 bp, Homo sapien
ttaaaaagaaaaattgaaaagtcatggagccac

SEQ ID NO: 188876 - DNA, 33 bp, Homo sapien
ttaaaaagaaaaattggaaagtcatggagccac

SEQ ID NO: 188877 - DNA, 33 bp, Homo sapien
aggatatggctgggtccataagcaaatggtaat

SEQ ID NO: 188878 - DNA, 33 bp, Homo sapien
aggatatggctgggtctataagcaaatggtaat

SEQ ID NO: 188879 - DNA, 33 bp, Homo sapien
ttcttatctttatctcagaccatcctactgagg

SEQ ID NO: 188880 - DNA, 33 bp, Homo sapien
ttcttatctttatctcggaccatcctactgagg

SEQ ID NO: 188881 - DNA, 33 bp, Homo sapien
ttttcttggtgccttaacattcaggctgctgaa

SEQ ID NO: 188882 - DNA, 33 bp, Homo sapien
ttttcttggtgccttagcattcaggctgctgaa

SEQ ID NO: 188883 - DNA, 33 bp, Homo sapien
acttatggaacattcaacttactcataacaaaa

SEQ ID NO: 188884 - DNA, 33 bp, Homo sapien
acttatggaacattcagcttactcataacaaaa

SEQ ID NO: 188885 - DNA, 33 bp, Homo sapien
agctcagatttttccaatattggttagcacaca

SEQ ID NO: 188886 - DNA, 33 bp, Homo sapien
agctcagatttttccagtattggttagcacaca

SEQ ID NO: 188887 - DNA, 33 bp, Homo sapien
taaataattaatagcactagaggcacaaaaatg

SEQ ID NO: 188888 - DNA, 33 bp, Homo sapien
taaataattaatagcagtagaggcacaaaaatg

SEQ ID NO: 188889 - DNA, 33 bp, Homo sapien
ctgaacaaacaaaatacgcacaacagcaaacac

SEQ ID NO: 188890 - DNA, 33 bp, Homo sapien
ctgaacaaacaaaatatgcacaacagcaaacac

SEQ ID NO: 188891 - DNA, 33 bp, Homo sapien
tggattacacaattacacgtagcaaagaatcta

SEQ ID NO: 188892 - DNA, 33 bp, Homo sapien
tggattacacaattacccgtagcaaagaatcta

SEQ ID NO: 188893 - DNA, 33 bp, Homo sapien
aatcttcaatgggtaagtggtcaaacacttttg

SEQ ID NO: 188894 - DNA, 33 bp, Homo sapien
aatcttcaatgggtaattggtcaaacacttttg

SEQ ID NO: 188895 - DNA, 33 bp, Homo sapien
ttattctttattaaagcctacttctaactcatc

SEQ ID NO: 188896 - DNA, 33 bp, Homo sapien
ttattctttattaaaggctacttctaactcatc

SEQ ID NO: 188897 - DNA, 33 bp, Homo sapien
tgaaattttacacataggcagaggtctttttat

SEQ ID NO: 188898 - DNA, 33 bp, Homo sapien
tgaaattttacacatatgcagaggtctttttat

SEQ ID NO: 188899 - DNA, 33 bp, Homo sapien
gtgaggacatagagagaaggtgccatctataca

SEQ ID NO: 188900 - DNA, 33 bp, Homo sapien
gtgaggacatagagaggaggtgccatctataca

SEQ ID NO: 188901 - DNA, 33 bp, Homo sapien
gactcctaaggcttagaatcacaattagtaccc

SEQ ID NO: 188902 - DNA, 33 bp, Homo sapien
gactcctaaggcttaggatcacaattagtaccc

SEQ ID NO: 188903 - DNA, 33 bp, Homo sapien
agtcaggttggatatcgatctgctctatttgtt

SEQ ID NO: 188904 - DNA, 33 bp, Homo sapien
agtcaggttggatatctatctgctctatttgtt

SEQ ID NO: 188905 - DNA, 33 bp, Homo sapien
ggatggatatagcaaagttatctagcagttagc

SEQ ID NO: 188906 - DNA, 33 bp, Homo sapien
ggatggatatagcaaatttatctagcagttagc

SEQ ID NO: 188907 - DNA, 33 bp, Homo sapien
atgataattgtttccaaactcaggggaaagcac

SEQ ID NO: 188908 - DNA, 33 bp, Homo sapien
atgataattgtttccacactcaggggaaagcac

SEQ ID NO: 188909 - DNA, 33 bp, Homo sapien
tccttatatgatgaaacactgtctttccagttg

SEQ ID NO: 188910 - DNA, 33 bp, Homo sapien
tccttatatgatgaaatactgtctttccagttg

SEQ ID NO: 188911 - DNA, 33 bp, Homo sapien
cacctttgtgtctccactctggcgcaccctgca

SEQ ID NO: 188912 - DNA, 33 bp, Homo sapien
cacctttgtgtctccattctggcgcaccctgca

SEQ ID NO: 188913 - DNA, 33 bp, Homo sapien
ggctgactccttgtcacctttctaaacccagtt

SEQ ID NO: 188914 - DNA, 33 bp, Homo sapien
ggctgactccttgtcatctttctaaacccagtt

SEQ ID NO: 188915 - DNA, 33 bp, Homo sapien
ggggtgggggagagtaaggagaaggtggctgtg

SEQ ID NO: 188916 - DNA, 33 bp, Homo sapien
ggggtgggggagagtagggagaaggtggctgtg

SEQ ID NO: 188917 - DNA, 33 bp, Homo sapien
attcaggacgaaaagaacattaaagcacgttat

SEQ ID NO: 188918 - DNA, 33 bp, Homo sapien
attcaggacgaaaagagcattaaagcacgttat

SEQ ID NO: 188919 - DNA, 33 bp, Homo sapien
gcttaatcctggagtacagtttgacaattgtac

SEQ ID NO: 188920 - DNA, 33 bp, Homo sapien
gcttaatcctggagtatagtttgacaattgtac

SEQ ID NO: 188921 - DNA, 33 bp, Homo sapien
gtacctttagtctaaccatcataagtttagtgc

SEQ ID NO: 188922 - DNA, 33 bp, Homo sapien
gtacctttagtctaacgatcataagtttagtgc

SEQ ID NO: 188923 - DNA, 33 bp, Homo sapien
actggcctgaaattcgaaagactcagtagtttg

SEQ ID NO: 188924 - DNA, 33 bp, Homo sapien
actggcctgaaattcggaagactcagtagtttg

SEQ ID NO: 188925 - DNA, 33 bp, Homo sapien
aaattacacagcaacaacgaggacaacaggcaa

SEQ ID NO: 188926 - DNA, 33 bp, Homo sapien
aaattacacagcaacatcgaggacaacaggcaa

SEQ ID NO: 188927 - DNA, 33 bp, Homo sapien
tttgatcgcttttaaaattagggcatctgttaa

SEQ ID NO: 188928 - DNA, 33 bp, Homo sapien
tttgatcgcttttaaagttagggcatctgttaa

SEQ ID NO: 188929 - DNA, 33 bp, Homo sapien
gagaaattatgtgttccatattgcaaggatatc

SEQ ID NO: 188930 - DNA, 33 bp, Homo sapien
gagaaattatgtgttctatattgcaaggatatc

SEQ ID NO: 188931 - DNA, 33 bp, Homo sapien
cgtgcactcagaaatcaatgtataacttttgac

SEQ ID NO: 188932 - DNA, 33 bp, Homo sapien
cgtgcactcagaaatcgatgtataacttttgac

SEQ ID NO: 188933 - DNA, 33 bp, Homo sapien
tactttgtttgaattcaccaaatatgtttttct

SEQ ID NO: 188934 - DNA, 33 bp, Homo sapien
tactttgtttgaattcgccaaatatgtttttct

SEQ ID NO: 188935 - DNA, 33 bp, Homo sapien
ggtattattgtctatgcataccaatgtggctga

SEQ ID NO: 188936 - DNA, 33 bp, Homo sapien
ggtattattgtctatgtataccaatgtggctga

SEQ ID NO: 188937 - DNA, 33 bp, Homo sapien
agagggagttaaagccgcatagattctgttttc

SEQ ID NO: 188938 - DNA, 33 bp, Homo sapien
agagggagttaaagcctcatagattctgttttc

SEQ ID NO: 188939 - DNA, 33 bp, Homo sapien
attcctctgttcttaaagttcatctgagacaag

SEQ ID NO: 188940 - DNA, 33 bp, Homo sapien
attcctctgttcttaaggttcatctgagacaag

SEQ ID NO: 188941 - DNA, 33 bp, Homo sapien
ttatcctccttttacaaatgaagaaatggaggc

SEQ ID NO: 188942 - DNA, 33 bp, Homo sapien
ttatcctccttttacatatgaagaaatggaggc

SEQ ID NO: 188943 - DNA, 33 bp, Homo sapien
aagtcctcttctaagcgcactgtttgttggatt

SEQ ID NO: 188944 - DNA, 33 bp, Homo sapien
aagtcctcttctaagctcactgtttgttggatt

SEQ ID NO: 188945 - DNA, 33 bp, Homo sapien
agaaatgtattctgtcactgaaccctcacaaat

SEQ ID NO: 188946 - DNA, 33 bp, Homo sapien
agaaatgtattctgtccctgaaccctcacaaat

SEQ ID NO: 188947 - DNA, 33 bp, Homo sapien
agtctttcattattacaaattgcaacaaatatt

SEQ ID NO: 188948 - DNA, 33 bp, Homo sapien
agtctttcattattaccaattgcaacaaatatt

SEQ ID NO: 188949 - DNA, 33 bp, Homo sapien
gctgtttgtgtagttacaatcagtgttattgtt

SEQ ID NO: 188950 - DNA, 33 bp, Homo sapien
gctgtttgtgtagttataatcagtgttattgtt

SEQ ID NO: 188951 - DNA, 33 bp, Homo sapien
cagtgacatcgttacacagaacaagcatttgta

SEQ ID NO: 188952 - DNA, 33 bp, Homo sapien
cagtgacatcgttacatagaacaagcatttgta

SEQ ID NO: 188953 - DNA, 33 bp, Homo sapien
ttcattgcgtgtagaccaagtttctcttttgtg

SEQ ID NO: 188954 - DNA, 33 bp, Homo sapien
ttcattgcgtgtagactaagtttctcttttgtg

SEQ ID NO: 188955 - DNA, 33 bp, Homo sapien
ctaaaagacatcatcaatatcagttttaccagt

SEQ ID NO: 188956 - DNA, 33 bp, Homo sapien
ctaaaagacatcatcagtatcagttttaccagt

SEQ ID NO: 188957 - DNA, 33 bp, Homo sapien
gggtgtaaaaagacccaatgaatagtgtatatc

SEQ ID NO: 188958 - DNA, 33 bp, Homo sapien
gggtgtaaaaagacccgatgaatagtgtatatc

SEQ ID NO: 188959 - DNA, 33 bp, Homo sapien
ggcaattccaatgtgcagcaaaatgtgggaatc

SEQ ID NO: 188960 - DNA, 33 bp, Homo sapien
ggcaattccaatgtgcggcaaaatgtgggaatc

SEQ ID NO: 188961 - DNA, 33 bp, Homo sapien
gcaaggtggtatactacgatgttttccttctcc

SEQ ID NO: 188962 - DNA, 33 bp, Homo sapien
gcaaggtggtatactatgatgttttccttctcc

SEQ ID NO: 188963 - DNA, 33 bp, Homo sapien
ctctgtcaacttacaaagagtggcatttctggt

SEQ ID NO: 188964 - DNA, 33 bp, Homo sapien
ctctgtcaacttacaacgagtggcatttctggt

SEQ ID NO: 188965 - DNA, 33 bp, Homo sapien
gatgtatgttcagagaagatctgttaaaaaaca

SEQ ID NO: 188966 - DNA, 33 bp, Homo sapien
gatgtatgttcagagaggatctgttaaaaaaca

SEQ ID NO: 188967 - DNA, 33 bp, Homo sapien
aaagttctaataaaagccacctgaaaccttgca

SEQ ID NO: 188968 - DNA, 33 bp, Homo sapien
aaagttctaataaaagtcacctgaaaccttgca

SEQ ID NO: 188969 - DNA, 33 bp, Homo sapien
cctccttaatactaaacccaccttttcataatg

SEQ ID NO: 188970 - DNA, 33 bp, Homo sapien
cctccttaatactaaatccaccttttcataatg

SEQ ID NO: 188971 - DNA, 33 bp, Homo sapien
tcttgcttacataaaaatcagagaccctcttca

SEQ ID NO: 188972 - DNA, 33 bp, Homo sapien
tcttgcttacataaaattcagagaccctcttca

SEQ ID NO: 188973 - DNA, 33 bp, Homo sapien
taaaaagttacagtgacaagcagagttttaaag

SEQ ID NO: 188974 - DNA, 33 bp, Homo sapien
taaaaagttacagtgataagcagagttttaaag

SEQ ID NO: 188975 - DNA, 33 bp, Homo sapien
atatttccagcttctaaactaaggagaatacaa

SEQ ID NO: 188976 - DNA, 33 bp, Homo sapien
atatttccagcttctatactaaggagaatacaa

SEQ ID NO: 188977 - DNA, 33 bp, Homo sapien
tctgtcttgacatggggccatatcagcaattaa

SEQ ID NO: 188978 - DNA, 33 bp, Homo sapien
tctgtcttgacatgggtccatatcagcaattaa

SEQ ID NO: 188979 - DNA, 33 bp, Homo sapien
tattgctaatgtcctaaccttttcctagttatc

SEQ ID NO: 188980 - DNA, 33 bp, Homo sapien
tattgctaatgtcctagccttttcctagttatc

SEQ ID NO: 188981 - DNA, 33 bp, Homo sapien
aactaggctaaacagaaatgtaaggcaggaaag

SEQ ID NO: 188982 - DNA, 33 bp, Homo sapien
aactaggctaaacagagatgtaaggcaggaaag

SEQ ID NO: 188983 - DNA, 33 bp, Homo sapien
tctttgagttctggatcaaattgcacaactgtg

SEQ ID NO: 188984 - DNA, 33 bp, Homo sapien
tctttgagttctggattaaattgcacaactgtg

SEQ ID NO: 188985 - DNA, 33 bp, Homo sapien
gagcatctgttgttagaaaggcagtatgctagg

SEQ ID NO: 188986 - DNA, 33 bp, Homo sapien
gagcatctgttgttagtaaggcagtatgctagg

SEQ ID NO: 188987 - DNA, 33 bp, Homo sapien
aaatgagaattggagaagtgattgactgtgcta

SEQ ID NO: 188988 - DNA, 33 bp, Homo sapien
aaatgagaattggagatgtgattgactgtgcta

SEQ ID NO: 188989 - DNA, 33 bp, Homo sapien
agggagagggtttccaagaagtgatgttgctgt

SEQ ID NO: 188990 - DNA, 33 bp, Homo sapien
agggagagggtttccaggaagtgatgttgctgt

SEQ ID NO: 188991 - DNA, 33 bp, Homo sapien
gtaaactaaagaataaaaactataaggccacag

SEQ ID NO: 188992 - DNA, 33 bp, Homo sapien
gtaaactaaagaataagaactataaggccacag

SEQ ID NO: 188993 - DNA, 33 bp, Homo sapien
tttcctccattaaagcacatatcacactcttta

SEQ ID NO: 188994 - DNA, 33 bp, Homo sapien
tttcctccattaaagcgcatatcacactcttta

SEQ ID NO: 188995 - DNA, 33 bp, Homo sapien
ctgatatgagactataaaaaaacggagaaaatt

SEQ ID NO: 188996 - DNA, 33 bp, Homo sapien
ctgatatgagactatagaaaaacggagaaaatt

SEQ ID NO: 188997 - DNA, 33 bp, Homo sapien
tttgacttcaaaaatcactccctctctttctct

SEQ ID NO: 188998 - DNA, 33 bp, Homo sapien
tttgacttcaaaaatctctccctctctttctct

SEQ ID NO: 188999 - DNA, 33 bp, Homo sapien
cagttgtttagaccaaaatccttagaattatct

SEQ ID NO: 189000 - DNA, 33 bp, Homo sapien
cagttgtttagaccaagatccttagaattatct

SEQ ID NO: 189001 - DNA, 33 bp, Homo sapien
tttttagattgatagcagaaataatgatggtaa

SEQ ID NO: 189002 - DNA, 33 bp, Homo sapien
tttttagattgatagcggaaataatgatggtaa

SEQ ID NO: 189003 - DNA, 33 bp, Homo sapien
ctcatgcgatcttgagaaaattatctaatctct

SEQ ID NO: 189004 - DNA, 33 bp, Homo sapien
ctcatgcgatcttgagcaaattatctaatctct

SEQ ID NO: 189005 - DNA, 33 bp, Homo sapien
aatggcaacaagactcactgaaaccaaaaaaat

SEQ ID NO: 189006 - DNA, 33 bp, Homo sapien
aatggcaacaagactcgctgaaaccaaaaaaat

SEQ ID NO: 189007 - DNA, 33 bp, Homo sapien
ttcttttctttgctctaaaactctagtcacact

SEQ ID NO: 189008 - DNA, 33 bp, Homo sapien
ttcttttctttgctctcaaactctagtcacact

SEQ ID NO: 189009 - DNA, 33 bp, Homo sapien
aaaatgctttgaataccgtagaggctcaataaa

SEQ ID NO: 189010 - DNA, 33 bp, Homo sapien
aaaatgctttgaatactgtagaggctcaataaa

SEQ ID NO: 189011 - DNA, 33 bp, Homo sapien
agtgttactcatagaaccagaactcctaaacac

SEQ ID NO: 189012 - DNA, 33 bp, Homo sapien
agtgttactcatagaagcagaactcctaaacac

SEQ ID NO: 189013 - DNA, 33 bp, Homo sapien
tagctaatagccttaaaaattctctctccattt

SEQ ID NO: 189014 - DNA, 33 bp, Homo sapien
tagctaatagccttaacaattctctctccattt

SEQ ID NO: 189015 - DNA, 33 bp, Homo sapien
tcttcctatctttggacgttgtgttcttagtac

SEQ ID NO: 189016 - DNA, 33 bp, Homo sapien
tcttcctatctttggatgttgtgttcttagtac

SEQ ID NO: 189017 - DNA, 33 bp, Homo sapien
atttaattgtttctaccgcaactatttatttgt

SEQ ID NO: 189018 - DNA, 33 bp, Homo sapien
atttaattgtttctactgcaactatttatttgt

SEQ ID NO: 189019 - DNA, 33 bp, Homo sapien
ccttgatgggtgaatacgctccgataggtggag

SEQ ID NO: 189020 - DNA, 33 bp, Homo sapien
ccttgatgggtgaatatgctccgataggtggag

SEQ ID NO: 189021 - DNA, 33 bp, Homo sapien
tctacaaggaacttaaaaaattctcaagaaaaa

SEQ ID NO: 189022 - DNA, 33 bp, Homo sapien
tctacaaggaacttaacaaattctcaagaaaaa

SEQ ID NO: 189023 - DNA, 33 bp, Homo sapien
tacatcctagacctaaggtacaagctgaaacta

SEQ ID NO: 189024 - DNA, 33 bp, Homo sapien
tacatcctagacctaatgtacaagctgaaacta

SEQ ID NO: 189025 - DNA, 33 bp, Homo sapien
aaaataagctcagagaagtaaactaactatgag

SEQ ID NO: 189026 - DNA, 33 bp, Homo sapien
aaaataagctcagagatgtaaactaactatgag

SEQ ID NO: 189027 - DNA, 33 bp, Homo sapien
actcccacttgccatacgtggatgccattatac

SEQ ID NO: 189028 - DNA, 33 bp, Homo sapien
actcccacttgccatatgtggatgccattatac

SEQ ID NO: 189029 - DNA, 33 bp, Homo sapien
ctgagtctgcaaaggaagcttaaggtgaggctg

SEQ ID NO: 189030 - DNA, 33 bp, Homo sapien
ctgagtctgcaaaggaggcttaaggtgaggctg

SEQ ID NO: 189031 - DNA, 33 bp, Homo sapien
gcaagctgcaatgtcactccaaaatcagtaata

SEQ ID NO: 189032 - DNA, 33 bp, Homo sapien
gcaagctgcaatgtcattccaaaatcagtaata

SEQ ID NO: 189033 - DNA, 33 bp, Homo sapien
gttttcttagtgcctagaatagagaaaatatat

SEQ ID NO: 189034 - DNA, 33 bp, Homo sapien
gttttcttagtgcctataatagagaaaatatat

SEQ ID NO: 189035 - DNA, 33 bp, Homo sapien
tccaccctatatttcccgctttctctctgacca

SEQ ID NO: 189036 - DNA, 33 bp, Homo sapien
tccaccctatatttcctgctttctctctgacca

SEQ ID NO: 189037 - DNA, 33 bp, Homo sapien
ttcagagctcatgttaaatggtaccactgctac

SEQ ID NO: 189038 - DNA, 33 bp, Homo sapien
ttcagagctcatgttagatggtaccactgctac

SEQ ID NO: 189039 - DNA, 33 bp, Homo sapien
cttttcaaccttagcaggttaaggctctgtctt

SEQ ID NO: 189040 - DNA, 33 bp, Homo sapien
cttttcaaccttagcatgttaaggctctgtctt

SEQ ID NO: 189041 - DNA, 33 bp, Homo sapien
ttcttcatagtctgaacaagattctgagtccct

SEQ ID NO: 189042 - DNA, 33 bp, Homo sapien
ttcttcatagtctgaataagattctgagtccct

SEQ ID NO: 189043 - DNA, 33 bp, Homo sapien
aatttgattcacagtaaaatttcacagtagggc

SEQ ID NO: 189044 - DNA, 33 bp, Homo sapien
aatttgattcacagtataatttcacagtagggc

SEQ ID NO: 189045 - DNA, 33 bp, Homo sapien
atatatctatacactacgcaatgccttcttgct

SEQ ID NO: 189046 - DNA, 33 bp, Homo sapien
atatatctatacactatgcaatgccttcttgct

SEQ ID NO: 189047 - DNA, 33 bp, Homo sapien
taacaggttctgagtacaaacatagctcaatga

SEQ ID NO: 189048 - DNA, 33 bp, Homo sapien
taacaggttctgagtagaaacatagctcaatga

SEQ ID NO: 189049 - DNA, 33 bp, Homo sapien
aacacatttcaagagcaagcaataatccaaaac

SEQ ID NO: 189050 - DNA, 33 bp, Homo sapien
aacacatttcaagagcgagcaataatccaaaac

SEQ ID NO: 189051 - DNA, 33 bp, Homo sapien
taaattaacattgtatcacatttactacatact

SEQ ID NO: 189052 - DNA, 33 bp, Homo sapien
taaattaacattgtatgacatttactacatact

SEQ ID NO: 189053 - DNA, 33 bp, Homo sapien
gattctctgcttttaaaaaggtcatgatttagt

SEQ ID NO: 189054 - DNA, 33 bp, Homo sapien
gattctctgcttttaagaaggtcatgatttagt

SEQ ID NO: 189055 - DNA, 33 bp, Homo sapien
caactaacaatgattacgattgtagttgaaaaa

SEQ ID NO: 189056 - DNA, 33 bp, Homo sapien
caactaacaatgattatgattgtagttgaaaaa

SEQ ID NO: 189057 - DNA, 33 bp, Homo sapien
gtaaaatgagtagcaacagtgatgtctatactc

SEQ ID NO: 189058 - DNA, 33 bp, Homo sapien
gtaaaatgagtagcaagagtgatgtctatactc

SEQ ID NO: 189059 - DNA, 33 bp, Homo sapien
aatagtcaacactcgacgaaaaaatacattcct

SEQ ID NO: 189060 - DNA, 33 bp, Homo sapien
aatagtcaacactcgatgaaaaaatacattcct

SEQ ID NO: 189061 - DNA, 33 bp, Homo sapien
aagacagatcaatggaaattatgtactaagcat

SEQ ID NO: 189062 - DNA, 33 bp, Homo sapien
aagacagatcaatggagattatgtactaagcat

SEQ ID NO: 189063 - DNA, 33 bp, Homo sapien
cattggagtcagacagaaggagttgcttatttg

SEQ ID NO: 189064 - DNA, 33 bp, Homo sapien
cattggagtcagacaggaggagttgcttatttg

SEQ ID NO: 189065 - DNA, 33 bp, Homo sapien
gagccacatctacttaccttgctcaataaatcc

SEQ ID NO: 189066 - DNA, 33 bp, Homo sapien
gagccacatctacttatcttgctcaataaatcc

SEQ ID NO: 189067 - DNA, 33 bp, Homo sapien
caatatccaatactaaaatgttccagaaggtat

SEQ ID NO: 189068 - DNA, 33 bp, Homo sapien
caatatccaatactaagatgttccagaaggtat

SEQ ID NO: 189069 - DNA, 33 bp, Homo sapien
atgcacttgaatatagaattccagaaatgtttg

SEQ ID NO: 189070 - DNA, 33 bp, Homo sapien
atgcacttgaatataggattccagaaatgtttg

SEQ ID NO: 189071 - DNA, 33 bp, Homo sapien
gtacctcatttccttacgtaggaagctgcattg

SEQ ID NO: 189072 - DNA, 33 bp, Homo sapien
gtacctcatttccttatgtaggaagctgcattg

SEQ ID NO: 189073 - DNA, 33 bp, Homo sapien
actgtattgaactgcccatattgaactataatc

SEQ ID NO: 189074 - DNA, 33 bp, Homo sapien
actgtattgaactgcctatattgaactataatc

SEQ ID NO: 189075 - DNA, 33 bp, Homo sapien
aggaagaagacaagtgcagttgaagaaggcatg

SEQ ID NO: 189076 - DNA, 33 bp, Homo sapien
aggaagaagacaagtggagttgaagaaggcatg

SEQ ID NO: 189077 - DNA, 33 bp, Homo sapien
gtgtaaggtgaaggaaatcatctctattcagtg

SEQ ID NO: 189078 - DNA, 33 bp, Homo sapien
gtgtaaggtgaaggaagtcatctctattcagtg

SEQ ID NO: 189079 - DNA, 33 bp, Homo sapien
ccatgctctgtgcttacagtcagtctaattaaa

SEQ ID NO: 189080 - DNA, 33 bp, Homo sapien
ccatgctctgtgcttatagtcagtctaattaaa

SEQ ID NO: 189081 - DNA, 33 bp, Homo sapien
gggatttttattaagcagagcatgtgtcctaaa

SEQ ID NO: 189082 - DNA, 33 bp, Homo sapien
gggatttttattaagcggagcatgtgtcctaaa

SEQ ID NO: 189083 - DNA, 33 bp, Homo sapien
actaaatctgtgattacgaatgtgtcaacttgt

SEQ ID NO: 189084 - DNA, 33 bp, Homo sapien
actaaatctgtgattatgaatgtgtcaacttgt

SEQ ID NO: 189085 - DNA, 33 bp, Homo sapien
cagtattatgtaacaaaccaaacgcttatggaa

SEQ ID NO: 189086 - DNA, 33 bp, Homo sapien
cagtattatgtaacaatccaaacgcttatggaa

SEQ ID NO: 189087 - DNA, 33 bp, Homo sapien
gagcccgcaaattaaacatggttgtgttaggct

SEQ ID NO: 189088 - DNA, 33 bp, Homo sapien
gagcccgcaaattaaatatggttgtgttaggct

SEQ ID NO: 189089 - DNA, 33 bp, Homo sapien
aagtggctggctcagagattcaagatacaagaa

SEQ ID NO: 189090 - DNA, 33 bp, Homo sapien
aagtggctggctcagatattcaagatacaagaa

SEQ ID NO: 189091 - DNA, 33 bp, Homo sapien
tttaacaaaatatcagacaggaaatttagactt

SEQ ID NO: 189092 - DNA, 33 bp, Homo sapien
tttaacaaaatatcaggcaggaaatttagactt

SEQ ID NO: 189093 - DNA, 33 bp, Homo sapien
cactgacattgtagaactgaagacttcctagaa

SEQ ID NO: 189094 - DNA, 33 bp, Homo sapien
cactgacattgtagaattgaagacttcctagaa

SEQ ID NO: 189095 - DNA, 33 bp, Homo sapien
actgtctgctctgttacaatctctgcaacctac

SEQ ID NO: 189096 - DNA, 33 bp, Homo sapien
actgtctgctctgttagaatctctgcaacctac

SEQ ID NO: 189097 - DNA, 33 bp, Homo sapien
catgacccagcttatcaaatggtcacaatcacc

SEQ ID NO: 189098 - DNA, 33 bp, Homo sapien
catgacccagcttatcgaatggtcacaatcacc

SEQ ID NO: 189099 - DNA, 33 bp, Homo sapien
ggaattgttaatgaagacctctctgaaaaggtg

SEQ ID NO: 189100 - DNA, 33 bp, Homo sapien
ggaattgttaatgaagccctctctgaaaaggtg

SEQ ID NO: 189101 - DNA, 33 bp, Homo sapien
tattatatgtcaggaactatgcttggggtatta

SEQ ID NO: 189102 - DNA, 33 bp, Homo sapien
tattatatgtcaggaattatgcttggggtatta

SEQ ID NO: 189103 - DNA, 33 bp, Homo sapien
catatttatacagctacacttaatagcaaggaa

SEQ ID NO: 189104 - DNA, 33 bp, Homo sapien
catatttatacagctagacttaatagcaaggaa

SEQ ID NO: 189105 - DNA, 33 bp, Homo sapien
tctgaaaagaaaaagtaaataggtgagccagat

SEQ ID NO: 189106 - DNA, 33 bp, Homo sapien
tctgaaaagaaaaagtgaataggtgagccagat

SEQ ID NO: 189107 - DNA, 33 bp, Homo sapien
tatactctgtgggtgacggggaatcatgagagt

SEQ ID NO: 189108 - DNA, 33 bp, Homo sapien
tatactctgtgggtgatggggaatcatgagagt

SEQ ID NO: 189109 - DNA, 33 bp, Homo sapien
tcatagaaaatagtaacgtagtatgccacagat

SEQ ID NO: 189110 - DNA, 33 bp, Homo sapien
tcatagaaaatagtaatgtagtatgccacagat

SEQ ID NO: 189111 - DNA, 33 bp, Homo sapien
cacctactatggccaaactacattatagccaat

SEQ ID NO: 189112 - DNA, 33 bp, Homo sapien
cacctactatggccaagctacattatagccaat

SEQ ID NO: 189113 - DNA, 33 bp, Homo sapien
gaataatttggggagtaaactaagatatttatt

SEQ ID NO: 189114 - DNA, 33 bp, Homo sapien
gaataatttggggagttaactaagatatttatt

SEQ ID NO: 189115 - DNA, 33 bp, Homo sapien
cagtgctaaatttctccgacaatctcccttaat

SEQ ID NO: 189116 - DNA, 33 bp, Homo sapien
cagtgctaaatttctctgacaatctcccttaat

SEQ ID NO: 189117 - DNA, 33 bp, Homo sapien
ccatcctgctgagtaacagttgtttcccctgtg

SEQ ID NO: 189118 - DNA, 33 bp, Homo sapien
ccatcctgctgagtaatagttgtttcccctgtg

SEQ ID NO: 189119 - DNA, 33 bp, Homo sapien
tgaaagtttggagatggacgagtatagatactt

SEQ ID NO: 189120 - DNA, 33 bp, Homo sapien
tgaaagtttggagatgtacgagtatagatactt

SEQ ID NO: 189121 - DNA, 33 bp, Homo sapien
tcacactgacattttacagcatagaaacctgag

SEQ ID NO: 189122 - DNA, 33 bp, Homo sapien
tcacactgacattttatagcatagaaacctgag

SEQ ID NO: 189123 - DNA, 33 bp, Homo sapien
caatatcatgttgaaagggccaaagctggaagc

SEQ ID NO: 189124 - DNA, 33 bp, Homo sapien
caatatcatgttgaaatggccaaagctggaagc

SEQ ID NO: 189125 - DNA, 33 bp, Homo sapien
atacaccactctttgaacttgtaatcttctatt

SEQ ID NO: 189126 - DNA, 33 bp, Homo sapien
atacaccactctttgatcttgtaatcttctatt

SEQ ID NO: 189127 - DNA, 33 bp, Homo sapien
tttgtctaaatgcccccaacttccattcaaaca

SEQ ID NO: 189128 - DNA, 33 bp, Homo sapien
tttgtctaaatgcccctaacttccattcaaaca

SEQ ID NO: 189129 - DNA, 33 bp, Homo sapien
ggcttccaaaaatgatcactcccacagaaatac

SEQ ID NO: 189130 - DNA, 33 bp, Homo sapien
ggcttccaaaaatgatgactcccacagaaatac

SEQ ID NO: 189131 - DNA, 33 bp, Homo sapien
aaactgatgctatgtgaaattcagataaggctt

SEQ ID NO: 189132 - DNA, 33 bp, Homo sapien
aaactgatgctatgtgtaattcagataaggctt

SEQ ID NO: 189133 - DNA, 33 bp, Homo sapien
aatgttgccatttacactcacaaagtcctcatt

SEQ ID NO: 189134 - DNA, 33 bp, Homo sapien
aatgttgccatttacattcacaaagtcctcatt

SEQ ID NO: 189135 - DNA, 33 bp, Homo sapien
cgtgtgtaagttatgcaatgtatgttcaaaatg

SEQ ID NO: 189136 - DNA, 33 bp, Homo sapien
cgtgtgtaagttatgcgatgtatgttcaaaatg

SEQ ID NO: 189137 - DNA, 33 bp, Homo sapien
aggcatgtatccccaaaagttcttcagatcaaa

SEQ ID NO: 189138 - DNA, 33 bp, Homo sapien
aggcatgtatccccaagagttcttcagatcaaa

SEQ ID NO: 189139 - DNA, 33 bp, Homo sapien
aggaaagggcatgttacggattaggaaaagcat

SEQ ID NO: 189140 - DNA, 33 bp, Homo sapien
aggaaagggcatgttatggattaggaaaagcat

SEQ ID NO: 189141 - DNA, 33 bp, Homo sapien
ctcatatattactccaaacctgatacagttcta

SEQ ID NO: 189142 - DNA, 33 bp, Homo sapien
ctcatatattactccacacctgatacagttcta

SEQ ID NO: 189143 - DNA, 33 bp, Homo sapien
tatattgctcaagtagcatcaggtaaacaattg

SEQ ID NO: 189144 - DNA, 33 bp, Homo sapien
tatattgctcaagtagtatcaggtaaacaattg

SEQ ID NO: 189145 - DNA, 33 bp, Homo sapien
gagcatccttcttaaagcatctaacctgtaaca

SEQ ID NO: 189146 - DNA, 33 bp, Homo sapien
gagcatccttcttaaatcatctaacctgtaaca

SEQ ID NO: 189147 - DNA, 33 bp, Homo sapien
tataggtctcttcttgaaagaatgaggatgaga

SEQ ID NO: 189148 - DNA, 33 bp, Homo sapien
tataggtctcttcttgtaagaatgaggatgaga

SEQ ID NO: 189149 - DNA, 33 bp, Homo sapien
ataaaaatattaaacaggagctgatttctgctt

SEQ ID NO: 189150 - DNA, 33 bp, Homo sapien
ataaaaatattaaacatgagctgatttctgctt

SEQ ID NO: 189151 - DNA, 33 bp, Homo sapien
cttaaattagtcttgacactttgaaatcctcag

SEQ ID NO: 189152 - DNA, 33 bp, Homo sapien
cttaaattagtcttgatactttgaaatcctcag

SEQ ID NO: 189153 - DNA, 33 bp, Homo sapien
taagtagcatttgtagccaaagtcctaaaaaag

SEQ ID NO: 189154 - DNA, 33 bp, Homo sapien
taagtagcatttgtaggcaaagtcctaaaaaag

SEQ ID NO: 189155 - DNA, 33 bp, Homo sapien
ctctaatgactcttcaaggatcacgttttgaac

SEQ ID NO: 189156 - DNA, 33 bp, Homo sapien
ctctaatgactcttcagggatcacgttttgaac

SEQ ID NO: 189157 - DNA, 33 bp, Homo sapien
acaagaaaactggaaacttaatggttctctgat

SEQ ID NO: 189158 - DNA, 33 bp, Homo sapien
acaagaaaactggaaatttaatggttctctgat

SEQ ID NO: 189159 - DNA, 33 bp, Homo sapien
ggttctttttacgtcaacatatcattccgtata

SEQ ID NO: 189160 - DNA, 33 bp, Homo sapien
ggttctttttacgtcaccatatcattccgtata

SEQ ID NO: 189161 - DNA, 33 bp, Homo sapien
gtgtcacaaatgaccaatgatgcatatagagaa

SEQ ID NO: 189162 - DNA, 33 bp, Homo sapien
gtgtcacaaatgaccagtgatgcatatagagaa

SEQ ID NO: 189163 - DNA, 33 bp, Homo sapien
ttcagtctttaatgcaatccttatcactcaatg

SEQ ID NO: 189164 - DNA, 33 bp, Homo sapien
ttcagtctttaatgcattccttatcactcaatg

SEQ ID NO: 189165 - DNA, 33 bp, Homo sapien
aactatcttcctgacactggaatggtgaattaa

SEQ ID NO: 189166 - DNA, 33 bp, Homo sapien
aactatcttcctgacattggaatggtgaattaa

SEQ ID NO: 189167 - DNA, 33 bp, Homo sapien
actaatcttctattaaactactttgccatttca

SEQ ID NO: 189168 - DNA, 33 bp, Homo sapien
actaatcttctattaagctactttgccatttca

SEQ ID NO: 189169 - DNA, 33 bp, Homo sapien
agtcacagacattaaaataatctcgaattttgc

SEQ ID NO: 189170 - DNA, 33 bp, Homo sapien
agtcacagacattaaagtaatctcgaattttgc

SEQ ID NO: 189171 - DNA, 33 bp, Homo sapien
atttcctgttgcaatgaagaaatcctttcaaat

SEQ ID NO: 189172 - DNA, 33 bp, Homo sapien
atttcctgttgcaatgcagaaatcctttcaaat

SEQ ID NO: 189173 - DNA, 33 bp, Homo sapien
atggataatataaatcaaatctcctaatccaaa

SEQ ID NO: 189174 - DNA, 33 bp, Homo sapien
atggataatataaatccaatctcctaatccaaa

SEQ ID NO: 189175 - DNA, 33 bp, Homo sapien
cagcagaagcgctttacgcaaatttcccattct

SEQ ID NO: 189176 - DNA, 33 bp, Homo sapien
cagcagaagcgctttatgcaaatttcccattct

SEQ ID NO: 189177 - DNA, 33 bp, Homo sapien
tcacacaagggctttacgtagagacaaatacac

SEQ ID NO: 189178 - DNA, 33 bp, Homo sapien
tcacacaagggctttatgtagagacaaatacac

SEQ ID NO: 189179 - DNA, 33 bp, Homo sapien
agctgggtaatacagaaaagacaaatgcataac

SEQ ID NO: 189180 - DNA, 33 bp, Homo sapien
agctgggtaatacagagaagacaaatgcataac

SEQ ID NO: 189181 - DNA, 33 bp, Homo sapien
atataactgcattcgagtcaacacattcttctt

SEQ ID NO: 189182 - DNA, 33 bp, Homo sapien
atataactgcattcgattcaacacattcttctt

SEQ ID NO: 189183 - DNA, 33 bp, Homo sapien
taggaattttgaaacaataccactctcaacctc

SEQ ID NO: 189184 - DNA, 33 bp, Homo sapien
taggaattttgaaacagtaccactctcaacctc

SEQ ID NO: 189185 - DNA, 33 bp, Homo sapien
aacaaaatactgtcaaatgggtgacttaaaaca

SEQ ID NO: 189186 - DNA, 33 bp, Homo sapien
aacaaaatactgtcaagtgggtgacttaaaaca

SEQ ID NO: 189187 - DNA, 33 bp, Homo sapien
tactagttaggttcaacgtattcagtttactat

SEQ ID NO: 189188 - DNA, 33 bp, Homo sapien
tactagttaggttcaatgtattcagtttactat

SEQ ID NO: 189189 - DNA, 33 bp, Homo sapien
catgccttggtgtagaaaactttttacttactg

SEQ ID NO: 189190 - DNA, 33 bp, Homo sapien
catgccttggtgtagataactttttacttactg

SEQ ID NO: 189191 - DNA, 33 bp, Homo sapien
ctacaatagcacctgaaatgaatttaattccct

SEQ ID NO: 189192 - DNA, 33 bp, Homo sapien
ctacaatagcacctgagatgaatttaattccct

SEQ ID NO: 189193 - DNA, 33 bp, Homo sapien
cacattttaatcaactcacatgatgagccaaat

SEQ ID NO: 189194 - DNA, 33 bp, Homo sapien
cacattttaatcaacttacatgatgagccaaat

SEQ ID NO: 189195 - DNA, 33 bp, Homo sapien
aatgtaaatctgcaaacgcctaaacttaaaaaa

SEQ ID NO: 189196 - DNA, 33 bp, Homo sapien
aatgtaaatctgcaaatgcctaaacttaaaaaa

SEQ ID NO: 189197 - DNA, 33 bp, Homo sapien
aagggtaaaagatctccacaagcagaactacaa

SEQ ID NO: 189198 - DNA, 33 bp, Homo sapien
aagggtaaaagatctctacaagcagaactacaa

SEQ ID NO: 189199 - DNA, 33 bp, Homo sapien
cttttctcccttctgaactgaaagcaaccagta

SEQ ID NO: 189200 - DNA, 33 bp, Homo sapien
cttttctcccttctgatctgaaagcaaccagta

SEQ ID NO: 189201 - DNA, 33 bp, Homo sapien
cacaactgctctaaccgatggtttccaaaaaat

SEQ ID NO: 189202 - DNA, 33 bp, Homo sapien
cacaactgctctaacctatggtttccaaaaaat

SEQ ID NO: 189203 - DNA, 33 bp, Homo sapien
ctggggcaactgaaccaaggtcaaatctcagct

SEQ ID NO: 189204 - DNA, 33 bp, Homo sapien
ctggggcaactgaaccgaggtcaaatctcagct

SEQ ID NO: 189205 - DNA, 33 bp, Homo sapien
tgcagatggctggcgtcaatcagctcaatagat

SEQ ID NO: 189206 - DNA, 33 bp, Homo sapien
tgcagatggctggcgttaatcagctcaatagat

SEQ ID NO: 189207 - DNA, 33 bp, Homo sapien
gagtttgacatagtggaaaaaacatggacattg

SEQ ID NO: 189208 - DNA, 33 bp, Homo sapien
gagtttgacatagtggtaaaaacatggacattg

SEQ ID NO: 189209 - DNA, 33 bp, Homo sapien
gaggtggcatttcaacaaagcccttgaataagt

SEQ ID NO: 189210 - DNA, 33 bp, Homo sapien
gaggtggcatttcaacgaagcccttgaataagt

SEQ ID NO: 189211 - DNA, 33 bp, Homo sapien
tctgacaatcctagccaaactcttaggtgataa

SEQ ID NO: 189212 - DNA, 33 bp, Homo sapien
tctgacaatcctagccgaactcttaggtgataa

SEQ ID NO: 189213 - DNA, 33 bp, Homo sapien
caagctgatgcaaagagaccagtgattaagtcc

SEQ ID NO: 189214 - DNA, 33 bp, Homo sapien
caagctgatgcaaagataccagtgattaagtcc

SEQ ID NO: 189215 - DNA, 33 bp, Homo sapien
gtgtgaagatgcttacaaaagagtactgttctg

SEQ ID NO: 189216 - DNA, 33 bp, Homo sapien
gtgtgaagatgcttaccaaagagtactgttctg

SEQ ID NO: 189217 - DNA, 33 bp, Homo sapien
aaatcaaggatatgcaacttgtgttagttacta

SEQ ID NO: 189218 - DNA, 33 bp, Homo sapien
aaatcaaggatatgcatcttgtgttagttacta

SEQ ID NO: 189219 - DNA, 33 bp, Homo sapien
gagtattttcccctcaatatgacatttgtaaca

SEQ ID NO: 189220 - DNA, 33 bp, Homo sapien
gagtattttcccctcagtatgacatttgtaaca

SEQ ID NO: 189221 - DNA, 33 bp, Homo sapien
ggttatctaagggacaaaattactcagtaagat

SEQ ID NO: 189222 - DNA, 33 bp, Homo sapien
ggttatctaagggacagaattactcagtaagat

SEQ ID NO: 189223 - DNA, 33 bp, Homo sapien
tgccttaccttttgagaagatctgtcagaggtg

SEQ ID NO: 189224 - DNA, 33 bp, Homo sapien
tgccttaccttttgaggagatctgtcagaggtg

SEQ ID NO: 189225 - DNA, 33 bp, Homo sapien
atcttgaacaggtgacactcttacattttaaat

SEQ ID NO: 189226 - DNA, 33 bp, Homo sapien
atcttgaacaggtgactctcttacattttaaat

SEQ ID NO: 189227 - DNA, 33 bp, Homo sapien
tgctcattgaaactcacagacaaaaggtgcctg

SEQ ID NO: 189228 - DNA, 33 bp, Homo sapien
tgctcattgaaactcagagacaaaaggtgcctg

SEQ ID NO: 189229 - DNA, 33 bp, Homo sapien
tcattcagctttattcaagtggccaactctgcc

SEQ ID NO: 189230 - DNA, 33 bp, Homo sapien
tcattcagctttattcgagtggccaactctgcc

SEQ ID NO: 189231 - DNA, 33 bp, Homo sapien
tttccagaatagcataacaatcttcggtgtatt

SEQ ID NO: 189232 - DNA, 33 bp, Homo sapien
tttccagaatagcatagcaatcttcggtgtatt

SEQ ID NO: 189233 - DNA, 33 bp, Homo sapien
aactatgtctacatggcaaggttaacattcata

SEQ ID NO: 189234 - DNA, 33 bp, Homo sapien
aactatgtctacatgggaaggttaacattcata

SEQ ID NO: 189235 - DNA, 33 bp, Homo sapien
taatgtcatttgtcaacattttcagccagtcaa

SEQ ID NO: 189236 - DNA, 33 bp, Homo sapien
taatgtcatttgtcaatattttcagccagtcaa

SEQ ID NO: 189237 - DNA, 33 bp, Homo sapien
agggtttgagatagcaaaacaatagagctaaga

SEQ ID NO: 189238 - DNA, 33 bp, Homo sapien
agggtttgagatagcagaacaatagagctaaga

SEQ ID NO: 189239 - DNA, 33 bp, Homo sapien
aatagtggcaacatcaccaaggccccaggaata

SEQ ID NO: 189240 - DNA, 33 bp, Homo sapien
aatagtggcaacatcatcaaggccccaggaata

SEQ ID NO: 189241 - DNA, 33 bp, Homo sapien
ccttcctgaaatttccggagttattcaatacac

SEQ ID NO: 189242 - DNA, 33 bp, Homo sapien
ccttcctgaaatttcctgagttattcaatacac

SEQ ID NO: 189243 - DNA, 33 bp, Homo sapien
catctgtgtgaatccaagtttgagaacaactgc

SEQ ID NO: 189244 - DNA, 33 bp, Homo sapien
catctgtgtgaatccacgtttgagaacaactgc

SEQ ID NO: 189245 - DNA, 33 bp, Homo sapien
gttcatggttttccaccgtaccacaactccttc

SEQ ID NO: 189246 - DNA, 33 bp, Homo sapien
gttcatggttttccactgtaccacaactccttc

SEQ ID NO: 189247 - DNA, 33 bp, Homo sapien
caagcattgtattttcaccacttgtacttgtac

SEQ ID NO: 189248 - DNA, 33 bp, Homo sapien
caagcattgtattttccccacttgtacttgtac

SEQ ID NO: 189249 - DNA, 33 bp, Homo sapien
gattctgacctgtgaaataatgacttaaattaa

SEQ ID NO: 189250 - DNA, 33 bp, Homo sapien
gattctgacctgtgaagtaatgacttaaattaa

SEQ ID NO: 189251 - DNA, 33 bp, Homo sapien
caaatgggagagctcactaactagcaaatgtcc

SEQ ID NO: 189252 - DNA, 33 bp, Homo sapien
caaatgggagagctcattaactagcaaatgtcc

SEQ ID NO: 189253 - DNA, 33 bp, Homo sapien
tgtggactgatcaaagacagtcagattaatagt

SEQ ID NO: 189254 - DNA, 33 bp, Homo sapien
tgtggactgatcaaagtcagtcagattaatagt

SEQ ID NO: 189255 - DNA, 33 bp, Homo sapien
gatcagtccacagtgaagctgcatcttaagtta

SEQ ID NO: 189256 - DNA, 33 bp, Homo sapien
gatcagtccacagtgaggctgcatcttaagtta

SEQ ID NO: 189257 - DNA, 33 bp, Homo sapien
aatgaacctttttccaatgaaacacttccagat

SEQ ID NO: 189258 - DNA, 33 bp, Homo sapien
aatgaacctttttccagtgaaacacttccagat

SEQ ID NO: 189259 - DNA, 33 bp, Homo sapien
taggaaatcaggaagcacagggattgcaaaata

SEQ ID NO: 189260 - DNA, 33 bp, Homo sapien
taggaaatcaggaagcgcagggattgcaaaata

SEQ ID NO: 189261 - DNA, 33 bp, Homo sapien
tattcaccaattgtcccccaaaatgtcctttaa

SEQ ID NO: 189262 - DNA, 33 bp, Homo sapien
tattcaccaattgtcctccaaaatgtcctttaa

SEQ ID NO: 189263 - DNA, 33 bp, Homo sapien
agtcatgtcagaacccaaatagagagtgtttgt

SEQ ID NO: 189264 - DNA, 33 bp, Homo sapien
agtcatgtcagaacccgaatagagagtgtttgt

SEQ ID NO: 189265 - DNA, 33 bp, Homo sapien
caagtttatgactgacaaattcctatacacatg

SEQ ID NO: 189266 - DNA, 33 bp, Homo sapien
caagtttatgactgactaattcctatacacatg

SEQ ID NO: 189267 - DNA, 33 bp, Homo sapien
aaaagtgaagcctatggaactcattgagataca

SEQ ID NO: 189268 - DNA, 33 bp, Homo sapien
aaaagtgaagcctatgtaactcattgagataca

SEQ ID NO: 189269 - DNA, 33 bp, Homo sapien
ttttgtatggctctataacatgaaatttatatt

SEQ ID NO: 189270 - DNA, 33 bp, Homo sapien
ttttgtatggctctatgacatgaaatttatatt

SEQ ID NO: 189271 - DNA, 33 bp, Homo sapien
taaactggagatttcaaaaaaagtcttcctttc

SEQ ID NO: 189272 - DNA, 33 bp, Homo sapien
taaactggagatttcataaaaagtcttcctttc

SEQ ID NO: 189273 - DNA, 33 bp, Homo sapien
aatttaattggctgcccatcagatgacctcctt

SEQ ID NO: 189274 - DNA, 33 bp, Homo sapien
aatttaattggctgcctatcagatgacctcctt

SEQ ID NO: 189275 - DNA, 33 bp, Homo sapien
atgactggttgacttaccaaatcacatgactat

SEQ ID NO: 189276 - DNA, 33 bp, Homo sapien
atgactggttgacttatcaaatcacatgactat

SEQ ID NO: 189277 - DNA, 33 bp, Homo sapien
ctgagcaactggctaaactctatctgcacccgg

SEQ ID NO: 189278 - DNA, 33 bp, Homo sapien
ctgagcaactggctaacctctatctgcacccgg

SEQ ID NO: 189279 - DNA, 33 bp, Homo sapien
cataatcttagaatcacgtagaaaccaagattc

SEQ ID NO: 189280 - DNA, 33 bp, Homo sapien
cataatcttagaatcatgtagaaaccaagattc

SEQ ID NO: 189281 - DNA, 33 bp, Homo sapien
aatgttgaaagaaatacgtaaagggtggcaaaa

SEQ ID NO: 189282 - DNA, 33 bp, Homo sapien
aatgttgaaagaaatatgtaaagggtggcaaaa

SEQ ID NO: 189283 - DNA, 33 bp, Homo sapien
gttcaaggtggctaccagaactacagccattac

SEQ ID NO: 189284 - DNA, 33 bp, Homo sapien
gttcaaggtggctaccggaactacagccattac

SEQ ID NO: 189285 - DNA, 33 bp, Homo sapien
attttgtaaaactatccaaacagaactaaaaat

SEQ ID NO: 189286 - DNA, 33 bp, Homo sapien
attttgtaaaactatcgaaacagaactaaaaat

SEQ ID NO: 189287 - DNA, 33 bp, Homo sapien
tctcaaaattttatcccgaatgcaaatctctcc

SEQ ID NO: 189288 - DNA, 33 bp, Homo sapien
tctcaaaattttatcctgaatgcaaatctctcc

SEQ ID NO: 189289 - DNA, 33 bp, Homo sapien
acagcaagagtcgatacatgaggacaggttaaa

SEQ ID NO: 189290 - DNA, 33 bp, Homo sapien
acagcaagagtcgatatatgaggacaggttaaa

SEQ ID NO: 189291 - DNA, 33 bp, Homo sapien
ctgtaagttctccatacgcactgcctttcctga

SEQ ID NO: 189292 - DNA, 33 bp, Homo sapien
ctgtaagttctccatatgcactgcctttcctga

SEQ ID NO: 189293 - DNA, 33 bp, Homo sapien
ttctttatcttgtaaaactgagattctagatca

SEQ ID NO: 189294 - DNA, 33 bp, Homo sapien
ttctttatcttgtaaagctgagattctagatca

SEQ ID NO: 189295 - DNA, 33 bp, Homo sapien
aacccaaatgcaaaaaaaatcgaataaaagata

SEQ ID NO: 189296 - DNA, 33 bp, Homo sapien
aacccaaatgcaaaaagaatcgaataaaagata

SEQ ID NO: 189297 - DNA, 33 bp, Homo sapien
ggttcatggtggaagacgctttctgagacttga

SEQ ID NO: 189298 - DNA, 33 bp, Homo sapien
ggttcatggtggaagatgctttctgagacttga

SEQ ID NO: 189299 - DNA, 33 bp, Homo sapien
ctttgtaaaacccatcccagtttgcttagaatc

SEQ ID NO: 189300 - DNA, 33 bp, Homo sapien
ctttgtaaaacccatctcagtttgcttagaatc

SEQ ID NO: 189301 - DNA, 33 bp, Homo sapien
cagtgccttcaaagtacgagaagctacctgtga

SEQ ID NO: 189302 - DNA, 33 bp, Homo sapien
cagtgccttcaaagtatgagaagctacctgtga

SEQ ID NO: 189303 - DNA, 33 bp, Homo sapien
aaggatacacagacagcagtagacaaacaagaa

SEQ ID NO: 189304 - DNA, 33 bp, Homo sapien
aaggatacacagacagtagtagacaaacaagaa

SEQ ID NO: 189305 - DNA, 33 bp, Homo sapien
gtttgagagtcatgccaacctgagatcactcct

SEQ ID NO: 189306 - DNA, 33 bp, Homo sapien
gtttgagagtcatgccgacctgagatcactcct

SEQ ID NO: 189307 - DNA, 33 bp, Homo sapien
tttctaagcagcagtcgctcaatctgtgattac

SEQ ID NO: 189308 - DNA, 33 bp, Homo sapien
tttctaagcagcagtctctcaatctgtgattac

SEQ ID NO: 189309 - DNA, 33 bp, Homo sapien
tctctaatcacataaaaacacaaattctgaagg

SEQ ID NO: 189310 - DNA, 33 bp, Homo sapien
tctctaatcacataaagacacaaattctgaagg

SEQ ID NO: 189311 - DNA, 33 bp, Homo sapien
ccttgaggggcaacaacctgataaccgtaggat

SEQ ID NO: 189312 - DNA, 33 bp, Homo sapien
ccttgaggggcaacaatctgataaccgtaggat

SEQ ID NO: 189313 - DNA, 33 bp, Homo sapien
tcatctggttctgataccaagataatattagtc

SEQ ID NO: 189314 - DNA, 33 bp, Homo sapien
tcatctggttctgatatcaagataatattagtc

SEQ ID NO: 189315 - DNA, 33 bp, Homo sapien
tttcttccgtaatcaaacctttctagattttca

SEQ ID NO: 189316 - DNA, 33 bp, Homo sapien
tttcttccgtaatcaaccctttctagattttca

SEQ ID NO: 189317 - DNA, 33 bp, Homo sapien
cctcatccagtgtaaagaaagtacattgaattc

SEQ ID NO: 189318 - DNA, 33 bp, Homo sapien
cctcatccagtgtaaataaagtacattgaattc

SEQ ID NO: 189319 - DNA, 33 bp, Homo sapien
tcctgtctcaaaaataacagcaataataacaaa

SEQ ID NO: 189320 - DNA, 33 bp, Homo sapien
tcctgtctcaaaaatatcagcaataataacaaa

SEQ ID NO: 189321 - DNA, 33 bp, Homo sapien
atgaaacctttgttgaaaagtcaaattaatgta

SEQ ID NO: 189322 - DNA, 33 bp, Homo sapien
atgaaacctttgttgagaagtcaaattaatgta

SEQ ID NO: 189323 - DNA, 33 bp, Homo sapien
tcttggcttctggaacaatttccttctggtttg

SEQ ID NO: 189324 - DNA, 33 bp, Homo sapien
tcttggcttctggaacgatttccttctggtttg

SEQ ID NO: 189325 - DNA, 33 bp, Homo sapien
gtcaagtggaaaaatacatatgcaaataagtaa

SEQ ID NO: 189326 - DNA, 33 bp, Homo sapien
gtcaagtggaaaaatagatatgcaaataagtaa

SEQ ID NO: 189327 - DNA, 33 bp, Homo sapien
atgggccaaattccccaattaaaagacacacaa

SEQ ID NO: 189328 - DNA, 33 bp, Homo sapien
atgggccaaattcccctattaaaagacacacaa

SEQ ID NO: 189329 - DNA, 33 bp, Homo sapien
cctctacttgccagagcattgggggaaacccat

SEQ ID NO: 189330 - DNA, 33 bp, Homo sapien
cctctacttgccagagtattgggggaaacccat

SEQ ID NO: 189331 - DNA, 33 bp, Homo sapien
gcaagataaagtcatcagaacgaatatctacca

SEQ ID NO: 189332 - DNA, 33 bp, Homo sapien
gcaagataaagtcatcggaacgaatatctacca

SEQ ID NO: 189333 - DNA, 33 bp, Homo sapien
gaaaatggttgggacaagaaattcacatagtaa

SEQ ID NO: 189334 - DNA, 33 bp, Homo sapien
gaaaatggttgggacaggaaattcacatagtaa

SEQ ID NO: 189335 - DNA, 33 bp, Homo sapien
accaatgacagctgacagcttatatggtcaagt

SEQ ID NO: 189336 - DNA, 33 bp, Homo sapien
accaatgacagctgactgcttatatggtcaagt

SEQ ID NO: 189337 - DNA, 33 bp, Homo sapien
cattgaacttcaccaccgatatagctctttcat

SEQ ID NO: 189338 - DNA, 33 bp, Homo sapien
cattgaacttcaccactgatatagctctttcat

SEQ ID NO: 189339 - DNA, 33 bp, Homo sapien
caattgaaaatgtaagaattgagagttgttgga

SEQ ID NO: 189340 - DNA, 33 bp, Homo sapien
caattgaaaatgtaagtattgagagttgttgga

SEQ ID NO: 189341 - DNA, 33 bp, Homo sapien
tctcaggaattcttcacgaggacaaagtttgag

SEQ ID NO: 189342 - DNA, 33 bp, Homo sapien
tctcaggaattcttcatgaggacaaagtttgag

SEQ ID NO: 189343 - DNA, 33 bp, Homo sapien
aaattgttcaaacctcactatacaaaataaact

SEQ ID NO: 189344 - DNA, 33 bp, Homo sapien
aaattgttcaaacctctctatacaaaataaact

SEQ ID NO: 189345 - DNA, 33 bp, Homo sapien
aggagatacctaaacccaaacttagattctgtc

SEQ ID NO: 189346 - DNA, 33 bp, Homo sapien
aggagatacctaaacctaaacttagattctgtc

SEQ ID NO: 189347 - DNA, 33 bp, Homo sapien
tcacagctcatgatgaagataatttacctgaaa

SEQ ID NO: 189348 - DNA, 33 bp, Homo sapien
tcacagctcatgatgatgataatttacctgaaa

SEQ ID NO: 189349 - DNA, 33 bp, Homo sapien
gcatgtggtttatcaccaagttatccaatccac

SEQ ID NO: 189350 - DNA, 33 bp, Homo sapien
gcatgtggtttatcacgaagttatccaatccac

SEQ ID NO: 189351 - DNA, 33 bp, Homo sapien
gccttttttttttgccactgtcttctatcagaa

SEQ ID NO: 189352 - DNA, 33 bp, Homo sapien
gccttttttttttgccgctgtcttctatcagaa

SEQ ID NO: 189353 - DNA, 33 bp, Homo sapien
aatgttttttatttgacgtatttgcatatctat

SEQ ID NO: 189354 - DNA, 33 bp, Homo sapien
aatgttttttatttgatgtatttgcatatctat

SEQ ID NO: 189355 - DNA, 33 bp, Homo sapien
tgtgtgagaaaactccagaaatttctaaatgca

SEQ ID NO: 189356 - DNA, 33 bp, Homo sapien
tgtgtgagaaaactccggaaatttctaaatgca

SEQ ID NO: 189357 - DNA, 33 bp, Homo sapien
gctgtacaaagagacaaaggctgttagctatgg

SEQ ID NO: 189358 - DNA, 33 bp, Homo sapien
gctgtacaaagagacagaggctgttagctatgg

SEQ ID NO: 189359 - DNA, 33 bp, Homo sapien
cccaatgatgaaactagaggttcccagaagcaa

SEQ ID NO: 189360 - DNA, 33 bp, Homo sapien
cccaatgatgaaactataggttcccagaagcaa

SEQ ID NO: 189361 - DNA, 33 bp, Homo sapien
aagagagggatgaataaaagaagatgtggggct

SEQ ID NO: 189362 - DNA, 33 bp, Homo sapien
aagagagggatgaatacaagaagatgtggggct

SEQ ID NO: 189363 - DNA, 33 bp, Homo sapien
ctccctgtcatcttaccctttgattggagacag

SEQ ID NO: 189364 - DNA, 33 bp, Homo sapien
ctccctgtcatcttacgctttgattggagacag

SEQ ID NO: 189365 - DNA, 33 bp, Homo sapien
atcacactacactgtcactgtcataactagctg

SEQ ID NO: 189366 - DNA, 33 bp, Homo sapien
atcacactacactgtcgctgtcataactagctg

SEQ ID NO: 189367 - DNA, 33 bp, Homo sapien
cagttatggataagacccgagctttgattgact

SEQ ID NO: 189368 - DNA, 33 bp, Homo sapien
cagttatggataagactcgagctttgattgact

SEQ ID NO: 189369 - DNA, 33 bp, Homo sapien
accttcacccatggaacggataaacagctttct

SEQ ID NO: 189370 - DNA, 33 bp, Homo sapien
accttcacccatggaatggataaacagctttct

SEQ ID NO: 189371 - DNA, 33 bp, Homo sapien
gagcggttctggaggaacatacttctgctcccc

SEQ ID NO: 189372 - DNA, 33 bp, Homo sapien
gagcggttctggaggatcatacttctgctcccc

SEQ ID NO: 189373 - DNA, 33 bp, Homo sapien
ggccctattgcatgtcccttgactcttttttgt

SEQ ID NO: 189374 - DNA, 33 bp, Homo sapien
ggccctattgcatgtcgcttgactcttttttgt

SEQ ID NO: 189375 - DNA, 33 bp, Homo sapien; identical to SEQ ID NO: 189373

SEQ ID NO: 189376 - DNA, 33 bp, Homo sapien; identical to SEQ ID NO: 189374

SEQ ID NO: 189377 - DNA, 33 bp, Homo sapien
gcctcctaatcattctaaccttctaggatgcaa

SEQ ID NO: 189378 - DNA, 33 bp, Homo sapien
gcctcctaatcattcttaccttctaggatgcaa

SEQ ID NO: 189379 - DNA, 33 bp, Homo sapien
aaatagaagcaagcacaaggatttaaaatagaa

SEQ ID NO: 189380 - DNA, 33 bp, Homo sapien
aaatagaagcaagcaccaggatttaaaatagaa

SEQ ID NO: 189381 - DNA, 33 bp, Homo sapien
taaaatagacttaacaactccataaattttgtg

SEQ ID NO: 189382 - DNA, 33 bp, Homo sapien
taaaatagacttaacatctccataaattttgtg

SEQ ID NO: 189383 - DNA, 33 bp, Homo sapien
gcagttattctttgaacttatcctattacagat

SEQ ID NO: 189384 - DNA, 33 bp, Homo sapien
gcagttattctttgaagttatcctattacagat

SEQ ID NO: 189385 - DNA, 33 bp, Homo sapien
aaaaactggtgacccacagagtccatcataagc

SEQ ID NO: 189386 - DNA, 33 bp, Homo sapien
aaaaactggtgacccatagagtccatcataagc

SEQ ID NO: 189387 - DNA, 33 bp, Homo sapien
ctcagtaccaggcaacactttccatgttgaaat

SEQ ID NO: 189388 - DNA, 33 bp, Homo sapien
ctcagtaccaggcaaccctttccatgttgaaat

SEQ ID NO: 189389 - DNA, 33 bp, Homo sapien
atatcacacaatataaatgatgtcttctgcctc

SEQ ID NO: 189390 - DNA, 33 bp, Homo sapien
atatcacacaatataagtgatgtcttctgcctc

SEQ ID NO: 189391 - DNA, 33 bp, Homo sapien
gtgtggactaggagggaactattactccaaaat

SEQ ID NO: 189392 - DNA, 33 bp, Homo sapien
gtgtggactaggaggggactattactccaaaat

SEQ ID NO: 189393 - DNA, 33 bp, Homo sapien
ctgaggttttccagcacagcattggattctgaa

SEQ ID NO: 189394 - DNA, 33 bp, Homo sapien
ctgaggttttccagcagagcattggattctgaa

SEQ ID NO: 189395 - DNA, 33 bp, Homo sapien
ccaggacgttttagggacactagcccagcagac

SEQ ID NO: 189396 - DNA, 33 bp, Homo sapien
ccaggacgttttagggtcactagcccagcagac

SEQ ID NO: 189397 - DNA, 33 bp, Homo sapien
atatatgagaattgtacgtgataaataatatat

SEQ ID NO: 189398 - DNA, 33 bp, Homo sapien
atatatgagaattgtatgtgataaataatatat

SEQ ID NO: 189399 - DNA, 33 bp, Homo sapien
tggcagaaacttagtacattttagctcttttta

SEQ ID NO: 189400 - DNA, 33 bp, Homo sapien
tggcagaaacttagtatattttagctcttttta

SEQ ID NO: 189401 - DNA, 33 bp, Homo sapien
ccattgtaaaataccaatcttacctttcatact

SEQ ID NO: 189402 - DNA, 33 bp, Homo sapien
ccattgtaaaataccagtcttacctttcatact

SEQ ID NO: 189403 - DNA, 33 bp, Homo sapien
cttttgtccagccacagggttctttagcacatt

SEQ ID NO: 189404 - DNA, 33 bp, Homo sapien
cttttgtccagccacatggttctttagcacatt

SEQ ID NO: 189405 - DNA, 33 bp, Homo sapien
gcctactatttagctaccacttataagtcagat

SEQ ID NO: 189406 - DNA, 33 bp, Homo sapien
gcctactatttagctatcacttataagtcagat

SEQ ID NO: 189407 - DNA, 33 bp, Homo sapien
tagtgctgttgacaaacatctgaaagcatgtgt

SEQ ID NO: 189408 - DNA, 33 bp, Homo sapien
tagtgctgttgacaaatatctgaaagcatgtgt

SEQ ID NO: 189409 - DNA, 33 bp, Homo sapien
gattttggaataaggacgctaaaccagtaaata

SEQ ID NO: 189410 - DNA, 33 bp, Homo sapien
gattttggaataaggatgctaaaccagtaaata

SEQ ID NO: 189411 - DNA, 33 bp, Homo sapien
gatgactttgacaagacgtttccacctcttttc

SEQ ID NO: 189412 - DNA, 33 bp, Homo sapien
gatgactttgacaagatgtttccacctcttttc

SEQ ID NO: 189413 - DNA, 33 bp, Homo sapien
agcttggttgtaggacaaagaaatgtaatcttt

SEQ ID NO: 189414 - DNA, 33 bp, Homo sapien
agcttggttgtaggaccaagaaatgtaatcttt

SEQ ID NO: 189415 - DNA, 33 bp, Homo sapien
cgtgaaaagaaatctcactgcttgggtaaggtc

SEQ ID NO: 189416 - DNA, 33 bp, Homo sapien
cgtgaaaagaaatctcgctgcttgggtaaggtc

SEQ ID NO: 189417 - DNA, 33 bp, Homo sapien
ctagttgttcaaaccaagcacttgaaactcatc

SEQ ID NO: 189418 - DNA, 33 bp, Homo sapien
ctagttgttcaaaccaggcacttgaaactcatc

SEQ ID NO: 189419 - DNA, 33 bp, Homo sapien
tggaagatgtgagggaatatttcagtaggctta

SEQ ID NO: 189420 - DNA, 33 bp, Homo sapien
tggaagatgtgagggactatttcagtaggctta

SEQ ID NO: 189421 - DNA, 33 bp, Homo sapien
ggaagtcaccttactaaacaagactctcaagta

SEQ ID NO: 189422 - DNA, 33 bp, Homo sapien
ggaagtcaccttactacacaagactctcaagta

SEQ ID NO: 189423 - DNA, 33 bp, Homo sapien
cttcatcctcagtggcactcttctgattaaagc

SEQ ID NO: 189424 - DNA, 33 bp, Homo sapien
cttcatcctcagtggccctcttctgattaaagc

SEQ ID NO: 189425 - DNA, 33 bp, Homo sapien
gtgatgtctttactagccatgttaagttgcaga

SEQ ID NO: 189426 - DNA, 33 bp, Homo sapien
gtgatgtctttactagtcatgttaagttgcaga

SEQ ID NO: 189427 - DNA, 33 bp, Homo sapien
taatgctttatagggactaatggagaaatgaat

SEQ ID NO: 189428 - DNA, 33 bp, Homo sapien
taatgctttatagggattaatggagaaatgaat

SEQ ID NO: 189429 - DNA, 33 bp, Homo sapien
cgggtctcctgtcttacataacgacgctgaaaa

SEQ ID NO: 189430 - DNA, 33 bp, Homo sapien
cgggtctcctgtcttatataacgacgctgaaaa

SEQ ID NO: 189431 - DNA, 33 bp, Homo sapien
aacacatttacatagcaaagagaacaacacatg

SEQ ID NO: 189432 - DNA, 33 bp, Homo sapien
aacacatttacatagcgaagagaacaacacatg

SEQ ID NO: 189433 - DNA, 33 bp, Homo sapien
agctcaaacaattctgaaggagaaaattttaat

SEQ ID NO: 189434 - DNA, 33 bp, Homo sapien
agctcaaacaattctgcaggagaaaattttaat

SEQ ID NO: 189435 - DNA, 33 bp, Homo sapien
ttacaatttaatggaacgaaggcatttaaacta

SEQ ID NO: 189436 - DNA, 33 bp, Homo sapien
ttacaatttaatggaatgaaggcatttaaacta

SEQ ID NO: 189437 - DNA, 33 bp, Homo sapien
ttagtcaaggactcgaagtctaccgattgagaa

SEQ ID NO: 189438 - DNA, 33 bp, Homo sapien
ttagtcaaggactcgaggtctaccgattgagaa

SEQ ID NO: 189439 - DNA, 33 bp, Homo sapien; identical to SEQ ID NO: 189437

SEQ ID NO: 189440 - DNA, 33 bp, Homo sapien; identical to SEQ ID NO: 189438

SEQ ID NO: 189441 - DNA, 33 bp, Homo sapien
gtattacaactcaatgaaatctttaaaacgttg

SEQ ID NO: 189442 - DNA, 33 bp, Homo sapien
gtattacaactcaatggaatctttaaaacgttg

SEQ ID NO: 189443 - DNA, 33 bp, Homo sapien; identical to SEQ ID NO: 189441

SEQ ID NO: 189444 - DNA, 33 bp, Homo sapien; identical to SEQ ID NO: 189442

SEQ ID NO: 189445 - DNA, 33 bp, Homo sapien
aaactgaaagcatgcaccacctttctttttacc

SEQ ID NO: 189446 - DNA, 33 bp, Homo sapien
aaactgaaagcatgcatcacctttctttttacc

SEQ ID NO: 189447 - DNA, 33 bp, Homo sapien
catttcacagtctagggaaagtcatgggaaatg

SEQ ID NO: 189448 - DNA, 33 bp, Homo sapien
catttcacagtctaggtaaagtcatgggaaatg

SEQ ID NO: 189449 - DNA, 33 bp, Homo sapien
gcattacatcaccttacgtggaaccaaaactgt

SEQ ID NO: 189450 - DNA, 33 bp, Homo sapien
gcattacatcaccttatgtggaaccaaaactgt

SEQ ID NO: 189451 - DNA, 33 bp, Homo sapien; identical to SEQ ID NO: 189449

SEQ ID NO: 189452 - DNA, 33 bp, Homo sapien; identical to SEQ ID NO: 189450

SEQ ID NO: 189453 - DNA, 33 bp, Homo sapien
tattgttaccttaaacacctgaggaattgtatc

SEQ ID NO: 189454 - DNA, 33 bp, Homo sapien
tattgttaccttaaactcctgaggaattgtatc

SEQ ID NO: 189455 - DNA, 33 bp, Homo sapien
tttatgaagctgaaatcatgctttacaggaatt

SEQ ID NO: 189456 - DNA, 33 bp, Homo sapien
tttatgaagctgaaattatgctttacaggaatt

SEQ ID NO: 189457 - DNA, 33 bp, Homo sapien
acatcgtgatgatacagtaagacagtttaagca

SEQ ID NO: 189458 - DNA, 33 bp, Homo sapien
acatcgtgatgatacattaagacagtttaagca

SEQ ID NO: 189459 - DNA, 33 bp, Homo sapien
ctgggaagaggtagaaacgtattgtcaaagtca

SEQ ID NO: 189460 - DNA, 33 bp, Homo sapien
ctgggaagaggtagaagcgtattgtcaaagtca

SEQ ID NO: 189461 - DNA, 33 bp, Homo sapien
tgcgaggtcactgaaacgaaagacttaaaggag

SEQ ID NO: 189462 - DNA, 33 bp, Homo sapien
tgcgaggtcactgaaaggaaagacttaaaggag

SEQ ID NO: 189463 - DNA, 33 bp, Homo sapien
gtctgaacaactagataagaacattacaaagaa

SEQ ID NO: 189464 - DNA, 33 bp, Homo sapien
gtctgaacaactagatgagaacattacaaagaa

SEQ ID NO: 189465 - DNA, 33 bp, Homo sapien
cattacaaagaagcaacgctatttaaaattctg

SEQ ID NO: 189466 - DNA, 33 bp, Homo sapien
cattacaaagaagcaatgctatttaaaattctg

SEQ ID NO: 189467 - DNA, 33 bp, Homo sapien
cacatttgaagagttacgtagttcaggatgaga

SEQ ID NO: 189468 - DNA, 33 bp, Homo sapien
cacatttgaagagttatgtagttcaggatgaga

SEQ ID NO: 189469 - DNA, 33 bp, Homo sapien
ttaagtgtaggctaaaccctcgtgtacctcatg

SEQ ID NO: 189470 - DNA, 33 bp, Homo sapien
ttaagtgtaggctaaatcctcgtgtacctcatg

SEQ ID NO: 189471 - DNA, 33 bp, Homo sapien
tttctggagaagtgcaaatggatcgctcttcat

SEQ ID NO: 189472 - DNA, 33 bp, Homo sapien
tttctggagaagtgcacatggatcgctcttcat

SEQ ID NO: 189473 - DNA, 33 bp, Homo sapien
ataaaaagagtaacatcatgggcttagattatt

SEQ ID NO: 189474 - DNA, 33 bp, Homo sapien
ataaaaagagtaacatgatgggcttagattatt

SEQ ID NO: 189475 - DNA, 33 bp, Homo sapien
aatgtgccttagcaaaggtagtctctgtccatg

SEQ ID NO: 189476 - DNA, 33 bp, Homo sapien
aatgtgccttagcaaatgtagtctctgtccatg

SEQ ID NO: 189477 - DNA, 33 bp, Homo sapien
aagatgacaggtgtccagcaaattaaactctta

SEQ ID NO: 189478 - DNA, 33 bp, Homo sapien
aagatgacaggtgtccggcaaattaaactctta

SEQ ID NO: 189479 - DNA, 33 bp, Homo sapien
aatatgtgatagaataaggtgactttgagccca

SEQ ID NO: 189480 - DNA, 33 bp, Homo sapien
aatatgtgatagaatagggtgactttgagccca

SEQ ID NO: 189481 - DNA, 33 bp, Homo sapien
gagacattctacaaaaatcctcttctaaaatgt

SEQ ID NO: 189482 - DNA, 33 bp, Homo sapien
gagacattctacaaaattcctcttctaaaatgt

SEQ ID NO: 189483 - DNA, 33 bp, Homo sapien
tttctgtttcttaaataaaaatcagcttgttta

SEQ ID NO: 189484 - DNA, 33 bp, Homo sapien
tttctgtttcttaaatcaaaatcagcttgttta

SEQ ID NO: 189485 - DNA, 33 bp, Homo sapien
tcagaactcactggaaataggggtctatgcaga

SEQ ID NO: 189486 - DNA, 33 bp, Homo sapien
tcagaactcactggaagtaggggtctatgcaga

SEQ ID NO: 189487 - DNA, 33 bp, Homo sapien
tgacgtttgaatcaacaacaagacatagtaccc

SEQ ID NO: 189488 - DNA, 33 bp, Homo sapien
tgacgtttgaatcaacgacaagacatagtaccc

SEQ ID NO: 189489 - DNA, 33 bp, Homo sapien
gtgataaaggagtacaaatttgcaggtcaaatc

SEQ ID NO: 189490 - DNA, 33 bp, Homo sapien
gtgataaaggagtacagatttgcaggtcaaatc

SEQ ID NO: 189491 - DNA, 33 bp, Homo sapien
tctctttcttcttccagacaaatgtcaaaattt

SEQ ID NO: 189492 - DNA, 33 bp, Homo sapien
tctctttcttcttccatacaaatgtcaaaattt

SEQ ID NO: 189493 - DNA, 33 bp, Homo sapien
taccgatatgagatgacatgttattggttttca

SEQ ID NO: 189494 - DNA, 33 bp, Homo sapien
taccgatatgagatgatatgttattggttttca

SEQ ID NO: 189495 - DNA, 33 bp, Homo sapien
tataacaatatgcatccccagttctagaaaagg

SEQ ID NO: 189496 - DNA, 33 bp, Homo sapien
tataacaatatgcatctccagttctagaaaagg

SEQ ID NO: 189497 - DNA, 33 bp, Homo sapien
cattcttctgctctgcacacagaatacactata

SEQ ID NO: 189498 - DNA, 33 bp, Homo sapien
cattcttctgctctgcgcacagaatacactata

SEQ ID NO: 189499 - DNA, 33 bp, Homo sapien
atctcaatagacatggaaagctttcgatgaaat

SEQ ID NO: 189500 - DNA, 33 bp, Homo sapien
atctcaatagacatgggaagctttcgatgaaat

SEQ ID NO: 189501 - DNA, 33 bp, Homo sapien
tcagttatactatgaaactaaaagtgctctcaa

SEQ ID NO: 189502 - DNA, 33 bp, Homo sapien
tcagttatactatgaatctaaaagtgctctcaa

SEQ ID NO: 189503 - DNA, 33 bp, Homo sapien
acatctaaggtttccactctgtcaaaagtttta

SEQ ID NO: 189504 - DNA, 33 bp, Homo sapien
acatctaaggtttccattctgtcaaaagtttta

SEQ ID NO: 189505 - DNA, 33 bp, Homo sapien
attgaaaagtagccaggagggagagtctgggaa

SEQ ID NO: 189506 - DNA, 33 bp, Homo sapien
attgaaaagtagccagtagggagagtctgggaa

SEQ ID NO: 189507 - DNA, 33 bp, Homo sapien
acattgatgtgatccactgcaaactttggacat

SEQ ID NO: 189508 - DNA, 33 bp, Homo sapien
acattgatgtgatccattgcaaactttggacat

SEQ ID NO: 189509 - DNA, 33 bp, Homo sapien
gtagccaattacaatacctgtaacagtgaaaga

SEQ ID NO: 189510 - DNA, 33 bp, Homo sapien
gtagccaattacaatatctgtaacagtgaaaga

SEQ ID NO: 189511 - DNA, 33 bp, Homo sapien
tttctttgtgaacagaactaataggttgacagg

SEQ ID NO: 189512 - DNA, 33 bp, Homo sapien
tttctttgtgaacagagctaataggttgacagg

SEQ ID NO: 189513 - DNA, 33 bp, Homo sapien
tgtttcatagatataaaaatgatagcagctaac

SEQ ID NO: 189514 - DNA, 33 bp, Homo sapien
tgtttcatagatataataatgatagcagctaac

SEQ ID NO: 189515 - DNA, 33 bp, Homo sapien
attgacaacctccaaaattgtccttctcaactt

SEQ ID NO: 189516 - DNA, 33 bp, Homo sapien
attgacaacctccaaacttgtccttctcaactt

SEQ ID NO: 189517 - DNA, 33 bp, Homo sapien
aatagcagcatagagacagtagctcccatgctg

SEQ ID NO: 189518 - DNA, 33 bp, Homo sapien
aatagcagcatagagagagtagctcccatgctg

SEQ ID NO: 189519 - DNA, 33 bp, Homo sapien
tataattgtatgatacaggcaaattaagcagta

SEQ ID NO: 189520 - DNA, 33 bp, Homo sapien
tataattgtatgatactggcaaattaagcagta

SEQ ID NO: 189521 - DNA, 33 bp, Homo sapien
aacactgcttaaaacagcctgtccaatcattgt

SEQ ID NO: 189522 - DNA, 33 bp, Homo sapien
aacactgcttaaaacatcctgtccaatcattgt

SEQ ID NO: 189523 - DNA, 33 bp, Homo sapien
aagagactgacctgtaggcacataaatgagtgg

SEQ ID NO: 189524 - DNA, 33 bp, Homo sapien
aagagactgacctgtatgcacataaatgagtgg

SEQ ID NO: 189525 - DNA, 33 bp, Homo sapien
tcttgcatcaagaacaatctcctcttaggtttc

SEQ ID NO: 189526 - DNA, 33 bp, Homo sapien
tcttgcatcaagaacagtctcctcttaggtttc

SEQ ID NO: 189527 - DNA, 33 bp, Homo sapien
ttatgctctgatggtgcaacaagaatcctctca

SEQ ID NO: 189528 - DNA, 33 bp, Homo sapien
ttatgctctgatggtgtaacaagaatcctctca

SEQ ID NO: 189529 - DNA, 33 bp, Homo sapien
ccggtaatgataaatacgcagccaaatataaaa

SEQ ID NO: 189530 - DNA, 33 bp, Homo sapien
ccggtaatgataaatatgcagccaaatataaaa

SEQ ID NO: 189531 - DNA, 33 bp, Homo sapien
aaaatgatgactattacggtttgtgaacttatt

SEQ ID NO: 189532 - DNA, 33 bp, Homo sapien
aaaatgatgactattatggtttgtgaacttatt

SEQ ID NO: 189533 - DNA, 33 bp, Homo sapien
ttttagcttagataacaatttctactcatgttc

SEQ ID NO: 189534 - DNA, 33 bp, Homo sapien
ttttagcttagataaccatttctactcatgttc

SEQ ID NO: 189535 - DNA, 33 bp, Homo sapien
aggaaaaacaacattccaatctctctacttgca

SEQ ID NO: 189536 - DNA, 33 bp, Homo sapien
aggaaaaacaacattcgaatctctctacttgca

SEQ ID NO: 189537 - DNA, 33 bp, Homo sapien
ttgtaaaggtgaataaagcagcagtaaccatat

SEQ ID NO: 189538 - DNA, 33 bp, Homo sapien
ttgtaaaggtgaataaggcagcagtaaccatat

SEQ ID NO: 189539 - DNA, 33 bp, Homo sapien
taatgtattattttagcccttcatacagcattt

SEQ ID NO: 189540 - DNA, 33 bp, Homo sapien
taatgtattattttagtccttcatacagcattt

SEQ ID NO: 189541 - DNA, 33 bp, Homo sapien
tgtttttcctagattaaagtttccaagaatgcc

SEQ ID NO: 189542 - DNA, 33 bp, Homo sapien
tgtttttcctagattacagtttccaagaatgcc

SEQ ID NO: 189543 - DNA, 33 bp, Homo sapien
tagatgacaaataaaaatgtgctgtatctgaat

SEQ ID NO: 189544 - DNA, 33 bp, Homo sapien
tagatgacaaataaaagtgtgctgtatctgaat

SEQ ID NO: 189545 - DNA, 33 bp, Homo sapien
cagattgcttttaatcactatgaggatgaacac

SEQ ID NO: 189546 - DNA, 33 bp, Homo sapien
cagattgcttttaatctctatgaggatgaacac

SEQ ID NO: 189547 - DNA, 33 bp, Homo sapien
caaactgaatcaactcacattatccttaccctc

SEQ ID NO: 189548 - DNA, 33 bp, Homo sapien
caaactgaatcaactcgcattatccttaccctc

SEQ ID NO: 189549 - DNA, 33 bp, Homo sapien
tgtaccttatactcaccgcttgtctactatttt

SEQ ID NO: 189550 - DNA, 33 bp, Homo sapien
tgtaccttatactcactgcttgtctactatttt

SEQ ID NO: 189551 - DNA, 33 bp, Homo sapien
tgcatgtgtgaacatacctttaatgggatttgg

SEQ ID NO: 189552 - DNA, 33 bp, Homo sapien
tgcatgtgtgaacatatctttaatgggatttgg

SEQ ID NO: 189553 - DNA, 33 bp, Homo sapien
gaatgtgtaacaaatacaagaagagtcagtatt

SEQ ID NO: 189554 - DNA, 33 bp, Homo sapien
gaatgtgtaacaaatataagaagagtcagtatt

SEQ ID NO: 189555 - DNA, 33 bp, Homo sapien
agttggctgagagacaaaacagagtgagtgagc

SEQ ID NO: 189556 - DNA, 33 bp, Homo sapien
agttggctgagagacacaacagagtgagtgagc

SEQ ID NO: 189557 - DNA, 33 bp, Homo sapien
tacgtaccataattccagaccttaggtcaaagc

SEQ ID NO: 189558 - DNA, 33 bp, Homo sapien
tacgtaccataattccggaccttaggtcaaagc

SEQ ID NO: 189559 - DNA, 33 bp, Homo sapien
agccagccctgaatcacaccaataacttgctaa

SEQ ID NO: 189560 - DNA, 33 bp, Homo sapien
agccagccctgaatcataccaataacttgctaa

SEQ ID NO: 189561 - DNA, 33 bp, Homo sapien
ataaattgtctctttaaatgtcagaactaggaa

SEQ ID NO: 189562 - DNA, 33 bp, Homo sapien
ataaattgtctctttacatgtcagaactaggaa

SEQ ID NO: 189563 - DNA, 33 bp, Homo sapien
ggtggagtgacttggacaaggtggtcagggaag

SEQ ID NO: 189564 - DNA, 33 bp, Homo sapien
ggtggagtgacttggataaggtggtcagggaag

SEQ ID NO: 189565 - DNA, 33 bp, Homo sapien
gaggtagcatggtgaaattactaattggatatg

SEQ ID NO: 189566 - DNA, 33 bp, Homo sapien
gaggtagcatggtgaagttactaattggatatg

SEQ ID NO: 189567 - DNA, 33 bp, Homo sapien
ataagtagcttatttgaagaagacgttaactaa

SEQ ID NO: 189568 - DNA, 33 bp, Homo sapien
ataagtagcttatttggagaagacgttaactaa

SEQ ID NO: 189569 - DNA, 33 bp, Homo sapien
gcctctctatgtcataagtgttagaggcacagc

SEQ ID NO: 189570 - DNA, 33 bp, Homo sapien
gcctctctatgtcataggtgttagaggcacagc

SEQ ID NO: 189571 - DNA, 33 bp, Homo sapien
gttaatactttgatgccatatgttgtgcatttc

SEQ ID NO: 189572 - DNA, 33 bp, Homo sapien
gttaatactttgatgctatatgttgtgcatttc

SEQ ID NO: 189573 - DNA, 33 bp, Homo sapien
aactaattgtaacaagaaagcttctagaacatg

SEQ ID NO: 189574 - DNA, 33 bp, Homo sapien
aactaattgtaacaaggaagcttctagaacatg

SEQ ID NO: 189575 - DNA, 33 bp, Homo sapien
atcattactctacctaccacagtaactaaagtg

SEQ ID NO: 189576 - DNA, 33 bp, Homo sapien
atcattactctacctatcacagtaactaaagtg

SEQ ID NO: 189577 - DNA, 33 bp, Homo sapien
caaagaactgaattgtcaacaattggaatgaat

SEQ ID NO: 189578 - DNA, 33 bp, Homo sapien
caaagaactgaattgtgaacaattggaatgaat

SEQ ID NO: 189579 - DNA, 33 bp, Homo sapien
gctacgtttatccaaacgctcatgcctcacctg

SEQ ID NO: 189580 - DNA, 33 bp, Homo sapien
gctacgtttatccaaatgctcatgcctcacctg

SEQ ID NO: 189581 - DNA, 33 bp, Homo sapien
aagactatgggaggaacaggattgtggaggaat

SEQ ID NO: 189582 - DNA, 33 bp, Homo sapien
aagactatgggaggaataggattgtggaggaat

SEQ ID NO: 189583 - DNA, 33 bp, Homo sapien
ctatggacacagggtacggttttgtgtcagaca

SEQ ID NO: 189584 - DNA, 33 bp, Homo sapien
ctatggacacagggtatggttttgtgtcagaca

SEQ ID NO: 189585 - DNA, 33 bp, Homo sapien
ccaaatagaaaattacaccagaatctctcttat

SEQ ID NO: 189586 - DNA, 33 bp, Homo sapien
ccaaatagaaaattacgccagaatctctcttat

SEQ ID NO: 189587 - DNA, 33 bp, Homo sapien
tactacagaaaataaactaaaaactgtcagcaa

SEQ ID NO: 189588 - DNA, 33 bp, Homo sapien
tactacagaaaataaattaaaaactgtcagcaa

SEQ ID NO: 189589 - DNA, 33 bp, Homo sapien
gatattagagactccaacctcgaatcatgctaa

SEQ ID NO: 189590 - DNA, 33 bp, Homo sapien
gatattagagactccatcctcgaatcatgctaa

SEQ ID NO: 189591 - DNA, 33 bp, Homo sapien
cactggaacccaagaaagtctataaacagcaga

SEQ ID NO: 189592 - DNA, 33 bp, Homo sapien
cactggaacccaagaaggtctataaacagcaga

SEQ ID NO: 189593 - DNA, 33 bp, Homo sapien
ttatagcttttctctcaaatattttcagtcatt

SEQ ID NO: 189594 - DNA, 33 bp, Homo sapien
ttatagcttttctctcgaatattttcagtcatt

SEQ ID NO: 189595 - DNA, 33 bp, Homo sapien
tcagaaagtcccatcccagagcgttgtcagtat

SEQ ID NO: 189596 - DNA, 33 bp, Homo sapien
tcagaaagtcccatcctagagcgttgtcagtat

SEQ ID NO: 189597 - DNA, 33 bp, Homo sapien
ggaagcaatgtcagtaagcatgaatcagaactg

SEQ ID NO: 189598 - DNA, 33 bp, Homo sapien
ggaagcaatgtcagtaggcatgaatcagaactg

SEQ ID NO: 189599 - DNA, 33 bp, Homo sapien
gttttctttttaggccaaagtgtaatataccca

SEQ ID NO: 189600 - DNA, 33 bp, Homo sapien
gttttctttttaggccgaagtgtaatataccca

SEQ ID NO: 189601 - DNA, 33 bp, Homo sapien
acttggaacagtcaaacgaaattatacttagct

SEQ ID NO: 189602 - DNA, 33 bp, Homo sapien
acttggaacagtcaaatgaaattatacttagct

SEQ ID NO: 189603 - DNA, 33 bp, Homo sapien
cagtcatgtttcctaacgatggggatgcattat

SEQ ID NO: 189604 - DNA, 33 bp, Homo sapien
cagtcatgtttcctaaggatggggatgcattat

SEQ ID NO: 189605 - DNA, 33 bp, Homo sapien
tactatttgcctttaacattggagcaatcgaca

SEQ ID NO: 189606 - DNA, 33 bp, Homo sapien
tactatttgcctttaatattggagcaatcgaca

SEQ ID NO: 189607 - DNA, 33 bp, Homo sapien
tagggctatgggctgaaaacgcatgggtgggct

SEQ ID NO: 189608 - DNA, 33 bp, Homo sapien
tagggctatgggctgagaacgcatgggtgggct

SEQ ID NO: 189609 - DNA, 33 bp, Homo sapien
tttagagaaagggatgaaaataaatatcatata

SEQ ID NO: 189610 - DNA, 33 bp, Homo sapien
tttagagaaagggatggaaataaatatcatata

SEQ ID NO: 189611 - DNA, 33 bp, Homo sapien
ttatttgaattggttcactgttgagggacactg

SEQ ID NO: 189612 - DNA, 33 bp, Homo sapien
ttatttgaattggttcgctgttgagggacactg

SEQ ID NO: 189613 - DNA, 33 bp, Homo sapien
aaatactgtgacatacaagaaataattgactct

SEQ ID NO: 189614 - DNA, 33 bp, Homo sapien
aaatactgtgacatacgagaaataattgactct

SEQ ID NO: 189615 - DNA, 33 bp, Homo sapien
ggattgctaggaaataaggtaagggcacattgg

SEQ ID NO: 189616 - DNA, 33 bp, Homo sapien
ggattgctaggaaatacggtaagggcacattgg

SEQ ID NO: 189617 - DNA, 33 bp, Homo sapien
aatgactagtggtactaagcttttttcatatac

SEQ ID NO: 189618 - DNA, 33 bp, Homo sapien
aatgactagtggtactgagcttttttcatatac

SEQ ID NO: 189619 - DNA, 33 bp, Homo sapien; identical to SEQ ID NO: 189617

SEQ ID NO: 189620 - DNA, 33 bp, Homo sapien; identical to SEQ ID NO: 189618

SEQ ID NO: 189621 - DNA, 33 bp, Homo sapien
tgagcatggcaaccaggagaaggaaaaccttgt

SEQ ID NO: 189622 - DNA, 33 bp, Homo sapien
tgagcatggcaaccagtagaaggaaaaccttgt

SEQ ID NO: 189623 - DNA, 33 bp, Homo sapien
tacattatacacatgactattagtgtgattcga

SEQ ID NO: 189624 - DNA, 33 bp, Homo sapien
tacattatacacatgattattagtgtgattcga

SEQ ID NO: 189625 - DNA, 33 bp, Homo sapien
aacaggaatgaagctacggaagtgtaaagcaat

SEQ ID NO: 189626 - DNA, 33 bp, Homo sapien
aacaggaatgaagctatggaagtgtaaagcaat

SEQ ID NO: 189627 - DNA, 33 bp, Homo sapien
ttggcacacagtggaacgaaataaatctatctt

SEQ ID NO: 189628 - DNA, 33 bp, Homo sapien
ttggcacacagtggaatgaaataaatctatctt

SEQ ID NO: 189629 - DNA, 33 bp, Homo sapien
gtgttctgatggattacatacaagaagttttcc

SEQ ID NO: 189630 - DNA, 33 bp, Homo sapien
gtgttctgatggattatatacaagaagttttcc

SEQ ID NO: 189631 - DNA, 33 bp, Homo sapien
taaaataatgtggtaacggcacaataatagaca

SEQ ID NO: 189632 - DNA, 33 bp, Homo sapien
taaaataatgtggtaatggcacaataatagaca

SEQ ID NO: 189633 - DNA, 33 bp, Homo sapien
tcttcaactctattcaataatcactctgctcct

SEQ ID NO: 189634 - DNA, 33 bp, Homo sapien
tcttcaactctattcagtaatcactctgctcct

SEQ ID NO: 189635 - DNA, 33 bp, Homo sapien
ccatattctgggcttacgtttgaggtgagccat

SEQ ID NO: 189636 - DNA, 33 bp, Homo sapien
ccatattctgggcttatgtttgaggtgagccat

SEQ ID NO: 189637 - DNA, 33 bp, Homo sapien
cagatctggagctccacggcataactctgatgt

SEQ ID NO: 189638 - DNA, 33 bp, Homo sapien
cagatctggagctccatggcataactctgatgt

SEQ ID NO: 189639 - DNA, 33 bp, Homo sapien
tagctttcagattaaacccttagagactttcca

SEQ ID NO: 189640 - DNA, 33 bp, Homo sapien
tagctttcagattaaatccttagagactttcca

SEQ ID NO: 189641 - DNA, 33 bp, Homo sapien
cctgcacatctcattcaaggccaaccttatatc

SEQ ID NO: 189642 - DNA, 33 bp, Homo sapien
cctgcacatctcattcgaggccaaccttatatc

SEQ ID NO: 189643 - DNA, 33 bp, Homo sapien
acaagacagggctctaaactgataatccaagat

SEQ ID NO: 189644 - DNA, 33 bp, Homo sapien
acaagacagggctctacactgataatccaagat

SEQ ID NO: 189645 - DNA, 33 bp, Homo sapien
atagtagtactaatacagagtggtaaggcttgc

SEQ ID NO: 189646 - DNA, 33 bp, Homo sapien
atagtagtactaatacggagtggtaaggcttgc

SEQ ID NO: 189647 - DNA, 33 bp, Homo sapien
agcagatagaagacgacaaaatatcagaaaata

SEQ ID NO: 189648 - DNA, 33 bp, Homo sapien
agcagatagaagacgataaaatatcagaaaata

SEQ ID NO: 189649 - DNA, 33 bp, Homo sapien
atattggccttctaaaatatgatgcagaacatg

SEQ ID NO: 189650 - DNA, 33 bp, Homo sapien
atattggccttctaaactatgatgcagaacatg

SEQ ID NO: 189651 - DNA, 33 bp, Homo sapien
ccatagagattaaaaaactcatccaacttcaca

SEQ ID NO: 189652 - DNA, 33 bp, Homo sapien
ccatagagattaaaaacctcatccaacttcaca

SEQ ID NO: 189653 - DNA, 33 bp, Homo sapien
gtgaatcagtatgaataagtgacgttttgggga

SEQ ID NO: 189654 - DNA, 33 bp, Homo sapien
gtgaatcagtatgaatgagtgacgttttgggga

SEQ ID NO: 189655 - DNA, 33 bp, Homo sapien
gtcagtgacttacaacagcacacatttattctc

SEQ ID NO: 189656 - DNA, 33 bp, Homo sapien
gtcagtgacttacaacggcacacatttattctc

SEQ ID NO: 189657 - DNA, 33 bp, Homo sapien
aattgatgcccattggaactttatagcaatcat

SEQ ID NO: 189658 - DNA, 33 bp, Homo sapien
aattgatgcccattggtactttatagcaatcat

SEQ ID NO: 189659 - DNA, 33 bp, Homo sapien
gtactattgttgacaacaaaataatgttcaatt

SEQ ID NO: 189660 - DNA, 33 bp, Homo sapien
gtactattgttgacaataaaataatgttcaatt

SEQ ID NO: 189661 - DNA, 33 bp, Homo sapien
tttcttttcaaccctcactatccccaacctcat

SEQ ID NO: 189662 - DNA, 33 bp, Homo sapien
tttcttttcaaccctctctatccccaacctcat

SEQ ID NO: 189663 - DNA, 33 bp, Homo sapien
gctttccactgctagtcaatatctccgggactg

SEQ ID NO: 189664 - DNA, 33 bp, Homo sapien
gctttccactgctagttaatatctccgggactg

SEQ ID NO: 189665 - DNA, 33 bp, Homo sapien
agaggattgaattacacgtatgctcaaagacct

SEQ ID NO: 189666 - DNA, 33 bp, Homo sapien
agaggattgaattacaggtatgctcaaagacct

SEQ ID NO: 189667 - DNA, 33 bp, Homo sapien
aaatgtgtagctttaccgcctgaataaatggat

SEQ ID NO: 189668 - DNA, 33 bp, Homo sapien
aaatgtgtagctttactgcctgaataaatggat

SEQ ID NO: 189669 - DNA, 33 bp, Homo sapien
agatgtaattagttaaaatgaagccatcctgga

SEQ ID NO: 189670 - DNA, 33 bp, Homo sapien
agatgtaattagttaagatgaagccatcctgga

SEQ ID NO: 189671 - DNA, 33 bp, Homo sapien
tgacactgacctgcataagtataaacatttata

SEQ ID NO: 189672 - DNA, 33 bp, Homo sapien
tgacactgacctgcattagtataaacatttata

SEQ ID NO: 189673 - DNA, 33 bp, Homo sapien
catcccatgctaccccaatttcagctgctttaa

SEQ ID NO: 189674 - DNA, 33 bp, Homo sapien
catcccatgctaccccgatttcagctgctttaa

SEQ ID NO: 189675 - DNA, 33 bp, Homo sapien
tcagattggaataagaccttgtggacctatctt

SEQ ID NO: 189676 - DNA, 33 bp, Homo sapien
tcagattggaataagatcttgtggacctatctt

SEQ ID NO: 189677 - DNA, 33 bp, Homo sapien
ctcagaatgaacccggaaagacatttaaaggtg

SEQ ID NO: 189678 - DNA, 33 bp, Homo sapien
ctcagaatgaacccgggaagacatttaaaggtg

SEQ ID NO: 189679 - DNA, 33 bp, Homo sapien
cccttagcttaacatcaaagatcttccagtgct

SEQ ID NO: 189680 - DNA, 33 bp, Homo sapien
cccttagcttaacatcgaagatcttccagtgct

SEQ ID NO: 189681 - DNA, 33 bp, Homo sapien
tgaaacaataaccctgaaatgtatgcaaccgaa

SEQ ID NO: 189682 - DNA, 33 bp, Homo sapien
tgaaacaataaccctgcaatgtatgcaaccgaa

SEQ ID NO: 189683 - DNA, 33 bp, Homo sapien
atggaacacttaaatccacactgtgctccttat

SEQ ID NO: 189684 - DNA, 33 bp, Homo sapien
atggaacacttaaatctacactgtgctccttat

SEQ ID NO: 189685 - DNA, 33 bp, Homo sapien
tcacctaatcaaataactgtgcttctctttgtg

SEQ ID NO: 189686 - DNA, 33 bp, Homo sapien
tcacctaatcaaataattgtgcttctctttgtg

SEQ ID NO: 189687 - DNA, 33 bp, Homo sapien
ccttcctgtctgacatcatgaagacatacatta

SEQ ID NO: 189688 - DNA, 33 bp, Homo sapien
ccttcctgtctgacattatgaagacatacatta

SEQ ID NO: 189689 - DNA, 33 bp, Homo sapien
ctatgaacagctcacactacatcaaaggaggca

SEQ ID NO: 189690 - DNA, 33 bp, Homo sapien
ctatgaacagctcacagtacatcaaaggaggca

SEQ ID NO: 189691 - DNA, 33 bp, Homo sapien
aattgttttgacaacacctgtagttaatttgga

SEQ ID NO: 189692 - DNA, 33 bp, Homo sapien
aattgttttgacaacatctgtagttaatttgga

SEQ ID NO: 189693 - DNA, 33 bp, Homo sapien
aaagaaaaggataaccactgttgtatgaaattc

SEQ ID NO: 189694 - DNA, 33 bp, Homo sapien
aaagaaaaggataaccgctgttgtatgaaattc

SEQ ID NO: 189695 - DNA, 33 bp, Homo sapien
ttggcctccagttttcaaaaatattaatgttga

SEQ ID NO: 189696 - DNA, 33 bp, Homo sapien
ttggcctccagttttcgaaaatattaatgttga

SEQ ID NO: 189697 - DNA, 33 bp, Homo sapien
cttaatttatgaaaaaagatgttgaaacacagg

SEQ ID NO: 189698 - DNA, 33 bp, Homo sapien
cttaatttatgaaaaaggatgttgaaacacagg

SEQ ID NO: 189699 - DNA, 33 bp, Homo sapien
aacaatttcaaaaaacaaaccaaagcattttta

SEQ ID NO: 189700 - DNA, 33 bp, Homo sapien
aacaatttcaaaaaaccaaccaaagcattttta

SEQ ID NO: 189701 - DNA, 33 bp, Homo sapien
ttttgttcatatcaacaccaatcaaacaaattg

SEQ ID NO: 189702 - DNA, 33 bp, Homo sapien
ttttgttcatatcaactccaatcaaacaaattg

SEQ ID NO: 189703 - DNA, 33 bp, Homo sapien
gtagatgagtgcagaccatccaactacccattg

SEQ ID NO: 189704 - DNA, 33 bp, Homo sapien
gtagatgagtgcagactatccaactacccattg

SEQ ID NO: 189705 - DNA, 33 bp, Homo sapien
cagtacaaatagctaacgtatcaaaggctaatg

SEQ ID NO: 189706 - DNA, 33 bp, Homo sapien
cagtacaaatagctaatgtatcaaaggctaatg

SEQ ID NO: 189707 - DNA, 33 bp, Homo sapien
atcactaaattgataaaggatgtcagaaaaata

SEQ ID NO: 189708 - DNA, 33 bp, Homo sapien
atcactaaattgataagggatgtcagaaaaata

SEQ ID NO: 189709 - DNA, 33 bp, Homo sapien
ttacttaaggactctgaaaagtagtaagctaca

SEQ ID NO: 189710 - DNA, 33 bp, Homo sapien
ttacttaaggactctgcaaagtagtaagctaca

SEQ ID NO: 189711 - DNA, 33 bp, Homo sapien
gaatagagtttcctacaagctacagatttagtt

SEQ ID NO: 189712 - DNA, 33 bp, Homo sapien
gaatagagtttcctacgagctacagatttagtt

SEQ ID NO: 189713 - DNA, 33 bp, Homo sapien
agagatgtatgacaaacgcctcagaaagtaact

SEQ ID NO: 189714 - DNA, 33 bp, Homo sapien
agagatgtatgacaaatgcctcagaaagtaact

SEQ ID NO: 189715 - DNA, 33 bp, Homo sapien
agtggtttgctagaaaaaggttaatttcttctt

SEQ ID NO: 189716 - DNA, 33 bp, Homo sapien
agtggtttgctagaaagaggttaatttcttctt

SEQ ID NO: 189717 - DNA, 33 bp, Homo sapien
tccggacaacaaagcactgagtcatatctgaac

SEQ ID NO: 189718 - DNA, 33 bp, Homo sapien
tccggacaacaaagcagtgagtcatatctgaac

SEQ ID NO: 189719 - DNA, 33 bp, Homo sapien
tgagggaatttgggtaacgtttgtgatatgcta

SEQ ID NO: 189720 - DNA, 33 bp, Homo sapien
tgagggaatttgggtagcgtttgtgatatgcta

SEQ ID NO: 189721 - DNA, 33 bp, Homo sapien
tatcatcatgggcttacgctttaaaataattat

SEQ ID NO: 189722 - DNA, 33 bp, Homo sapien
tatcatcatgggcttatgctttaaaataattat

SEQ ID NO: 189723 - DNA, 33 bp, Homo sapien
gtgttacaaaagaccaccttatgcagaggaagg

SEQ ID NO: 189724 - DNA, 33 bp, Homo sapien
gtgttacaaaagaccatcttatgcagaggaagg

SEQ ID NO: 189725 - DNA, 33 bp, Homo sapien
tctcgtaataaatccaaaataatccctaagtcc

SEQ ID NO: 189726 - DNA, 33 bp, Homo sapien
tctcgtaataaatccagaataatccctaagtcc

SEQ ID NO: 189727 - DNA, 33 bp, Homo sapien
cacattttgttcatcactaatttaccaaataca

SEQ ID NO: 189728 - DNA, 33 bp, Homo sapien
cacattttgttcatcattaatttaccaaataca

SEQ ID NO: 189729 - DNA, 33 bp, Homo sapien
caaatatctcttggaaattcaaagactcactta

SEQ ID NO: 189730 - DNA, 33 bp, Homo sapien
caaatatctcttggaagttcaaagactcactta

SEQ ID NO: 189731 - DNA, 33 bp, Homo sapien
tcctgaaggttgtgtcacaggcatttggctcag

SEQ ID NO: 189732 - DNA, 33 bp, Homo sapien
tcctgaaggttgtgtcgcaggcatttggctcag

SEQ ID NO: 189733 - DNA, 33 bp, Homo sapien
ccatgaccatgaactcaaacaccagctcagtga

SEQ ID NO: 189734 - DNA, 33 bp, Homo sapien
ccatgaccatgaactcgaacaccagctcagtga

SEQ ID NO: 189735 - DNA, 33 bp, Homo sapien
tgagtaggatggcaaagacttcaattcttacct

SEQ ID NO: 189736 - DNA, 33 bp, Homo sapien
tgagtaggatggcaaatacttcaattcttacct

SEQ ID NO: 189737 - DNA, 33 bp, Homo sapien
catcttcactacttcacgtcctgtcaattctca

SEQ ID NO: 189738 - DNA, 33 bp, Homo sapien
catcttcactacttcatgtcctgtcaattctca

SEQ ID NO: 189739 - DNA, 33 bp, Homo sapien
tactccttttcttacaacctgagaattgacagg

SEQ ID NO: 189740 - DNA, 33 bp, Homo sapien
tactccttttcttacatcctgagaattgacagg

SEQ ID NO: 189741 - DNA, 33 bp, Homo sapien
agctgtattaaagctacgtatcaaccttgaaaa

SEQ ID NO: 189742 - DNA, 33 bp, Homo sapien
agctgtattaaagctatgtatcaaccttgaaaa

SEQ ID NO: 189743 - DNA, 33 bp, Homo sapien
aaactacacttccccaatccattgcagtgagga

SEQ ID NO: 189744 - DNA, 33 bp, Homo sapien
aaactacacttccccagtccattgcagtgagga

SEQ ID NO: 189745 - DNA, 33 bp, Homo sapien
cacagctagttaaatgacaagacttactaccac

SEQ ID NO: 189746 - DNA, 33 bp, Homo sapien
cacagctagttaaatggcaagacttactaccac

SEQ ID NO: 189747 - DNA, 33 bp, Homo sapien
gctgaatgtggagttgcaaagagatgtccgcaa

SEQ ID NO: 189748 - DNA, 33 bp, Homo sapien
gctgaatgtggagttggaaagagatgtccgcaa

SEQ ID NO: 189749 - DNA, 33 bp, Homo sapien
ttagtcacctctagagaaaagctgaatgcttgc

SEQ ID NO: 189750 - DNA, 33 bp, Homo sapien
ttagtcacctctagaggaaagctgaatgcttgc

SEQ ID NO: 189751 - DNA, 33 bp, Homo sapien
gatttttcaagctgcaataataatatcttgcct

SEQ ID NO: 189752 - DNA, 33 bp, Homo sapien
gatttttcaagctgcagtaataatatcttgcct

SEQ ID NO: 189753 - DNA, 33 bp, Homo sapien
cacactggacaatgtaaagtacttccattataa

SEQ ID NO: 189754 - DNA, 33 bp, Homo sapien
cacactggacaatgtagagtacttccattataa

SEQ ID NO: 189755 - DNA, 33 bp, Homo sapien
taactctggacgtatgcaagtgtagcatatgta

SEQ ID NO: 189756 - DNA, 33 bp, Homo sapien
taactctggacgtatgtaagtgtagcatatgta

SEQ ID NO: 189757 - DNA, 33 bp, Homo sapien
ccaaccataaaagtctaactagctcaacaaatt

SEQ ID NO: 189758 - DNA, 33 bp, Homo sapien
ccaaccataaaagtcttactagctcaacaaatt

SEQ ID NO: 189759 - DNA, 33 bp, Homo sapien
agaccagagctgattacgggaaagtagttagct

SEQ ID NO: 189760 - DNA, 33 bp, Homo sapien
agaccagagctgattatgggaaagtagttagct

SEQ ID NO: 189761 - DNA, 33 bp, Homo sapien
aataagaatgaaggtaacgggatttatcaaaaa

SEQ ID NO: 189762 - DNA, 33 bp, Homo sapien
aataagaatgaaggtaccgggatttatcaaaaa

SEQ ID NO: 189763 - DNA, 33 bp, Homo sapien
atgtgtcaactgtatacgttatctctacataag

SEQ ID NO: 189764 - DNA, 33 bp, Homo sapien
atgtgtcaactgtatatgttatctctacataag

SEQ ID NO: 189765 - DNA, 33 bp, Homo sapien
tgtttacctcctgaaactgtatgctacattttg

SEQ ID NO: 189766 - DNA, 33 bp, Homo sapien
tgtttacctcctgaaattgtatgctacattttg

SEQ ID NO: 189767 - DNA, 33 bp, Homo sapien
ttggcaatctagtaacaatgcctagtacaaaac

SEQ ID NO: 189768 - DNA, 33 bp, Homo sapien
ttggcaatctagtaacgatgcctagtacaaaac

SEQ ID NO: 189769 - DNA, 33 bp, Homo sapien
tattagaacttgccaacgtatgtgcagtaattg

SEQ ID NO: 189770 - DNA, 33 bp, Homo sapien
tattagaacttgccaatgtatgtgcagtaattg

SEQ ID NO: 189771 - DNA, 33 bp, Homo sapien
cagcaagcagaatgacactatagatgacaaaat

SEQ ID NO: 189772 - DNA, 33 bp, Homo sapien
cagcaagcagaatgactctatagatgacaaaat

SEQ ID NO: 189773 - DNA, 33 bp, Homo sapien
catattgatgacaaaaatctattatgtggttgt

SEQ ID NO: 189774 - DNA, 33 bp, Homo sapien
catattgatgacaaaagtctattatgtggttgt

SEQ ID NO: 189775 - DNA, 33 bp, Homo sapien; identical to SEQ ID NO: 189773

SEQ ID NO: 189776 - DNA, 33 bp, Homo sapien; identical to SEQ ID NO: 189774

SEQ ID NO: 189777 - DNA, 33 bp, Homo sapien
tgaaaatcaaagaaacaatgcctaaaattaaaa

SEQ ID NO: 189778 - DNA, 33 bp, Homo sapien
tgaaaatcaaagaaaccatgcctaaaattaaaa

SEQ ID NO: 189779 - DNA, 33 bp, Homo sapien
caaaacactatacatacaaatagtaaacgcata

SEQ ID NO: 189780 - DNA, 33 bp, Homo sapien
caaaacactatacatagaaatagtaaacgcata

SEQ ID NO: 189781 - DNA, 33 bp, Homo sapien
tggcttccataaatcaaaagaaaatgtctatat

SEQ ID NO: 189782 - DNA, 33 bp, Homo sapien
tggcttccataaatcagaagaaaatgtctatat

SEQ ID NO: 189783 - DNA, 33 bp, Homo sapien
ttgaagagtagatataaagtttacttccactta

SEQ ID NO: 189784 - DNA, 33 bp, Homo sapien
ttgaagagtagatatatagtttacttccactta

SEQ ID NO: 189785 - DNA, 33 bp, Homo sapien
tggtagaagaacataactaacattccaatttca

SEQ ID NO: 189786 - DNA, 33 bp, Homo sapien
tggtagaagaacataattaacattccaatttca

SEQ ID NO: 189787 - DNA, 33 bp, Homo sapien
ctataatgctgccttacgaaaatactaagtgta

SEQ ID NO: 189788 - DNA, 33 bp, Homo sapien
ctataatgctgccttatgaaaatactaagtgta

SEQ ID NO: 189789 - DNA, 33 bp, Homo sapien
ctttttgttctgttcacgtcttcaattaagtcc

SEQ ID NO: 189790 - DNA, 33 bp, Homo sapien
ctttttgttctgttcatgtcttcaattaagtcc

SEQ ID NO: 189791 - DNA, 33 bp, Homo sapien
gaggctaagtcccaagcaagctgataagtagtt

SEQ ID NO: 189792 - DNA, 33 bp, Homo sapien
gaggctaagtcccaaggaagctgataagtagtt

SEQ ID NO: 189793 - DNA, 33 bp, Homo sapien
cctattttgggtgaaacctcttcgtcatcttca

SEQ ID NO: 189794 - DNA, 33 bp, Homo sapien
cctattttgggtgaaatctcttcgtcatcttca

SEQ ID NO: 189795 - DNA, 33 bp, Homo sapien
catctaaacctcaaagaacaaggtgactttagc

SEQ ID NO: 189796 - DNA, 33 bp, Homo sapien
catctaaacctcaaaggacaaggtgactttagc

SEQ ID NO: 189797 - DNA, 33 bp, Homo sapien
gggaaattctccaaaactatttcttcctatttg

SEQ ID NO: 189798 - DNA, 33 bp, Homo sapien
gggaaattctccaaaattatttcttcctatttg

SEQ ID NO: 189799 - DNA, 33 bp, Homo sapien
ccagctttatgcctaaatatattgcaaagagaa

SEQ ID NO: 189800 - DNA, 33 bp, Homo sapien
ccagctttatgcctaactatattgcaaagagaa

SEQ ID NO: 189801 - DNA, 33 bp, Homo sapien
aaatattaggtttgctaaataccttaaggtcat

SEQ ID NO: 189802 - DNA, 33 bp, Homo sapien
aaatattaggtttgcttaataccttaaggtcat

SEQ ID NO: 189803 - DNA, 33 bp, Homo sapien
aaaaaatgattggctacgttaatcaagagcacc

SEQ ID NO: 189804 - DNA, 33 bp, Homo sapien
aaaaaatgattggctatgttaatcaagagcacc

SEQ ID NO: 189805 - DNA, 33 bp, Homo sapien
gcctcccaggcctaaaatataagccagaaggaa

SEQ ID NO: 189806 - DNA, 33 bp, Homo sapien
gcctcccaggcctaaagtataagccagaaggaa

SEQ ID NO: 189807 - DNA, 33 bp, Homo sapien
acacagggagttagacactggaaagactcagac

SEQ ID NO: 189808 - DNA, 33 bp, Homo sapien
acacagggagttagacgctggaaagactcagac

SEQ ID NO: 189809 - DNA, 33 bp, Homo sapien
caaacattctctaggacctttagaggtagatga

SEQ ID NO: 189810 - DNA, 33 bp, Homo sapien
caaacattctctaggagctttagaggtagatga

SEQ ID NO: 189811 - DNA, 33 bp, Homo sapien
ggataattgtattccacggtgagatatttttgg

SEQ ID NO: 189812 - DNA, 33 bp, Homo sapien
ggataattgtattccatggtgagatatttttgg

SEQ ID NO: 189813 - DNA, 33 bp, Homo sapien
cctatattggttatcaatgaaacaaaagattca

SEQ ID NO: 189814 - DNA, 33 bp, Homo sapien
cctatattggttatcagtgaaacaaaagattca

SEQ ID NO: 189815 - DNA, 33 bp, Homo sapien
atactgagataaacaaactgttgccttttcttt

SEQ ID NO: 189816 - DNA, 33 bp, Homo sapien
atactgagataaacaagctgttgccttttcttt

SEQ ID NO: 189817 - DNA, 33 bp, Homo sapien
ctatggagactgtggcaagacccactggtagaa

SEQ ID NO: 189818 - DNA, 33 bp, Homo sapien
ctatggagactgtggcgagacccactggtagaa

SEQ ID NO: 189819 - DNA, 33 bp, Homo sapien
agtgaaattactgctcaaaaattaataagcaat

SEQ ID NO: 189820 - DNA, 33 bp, Homo sapien
agtgaaattactgctcgaaaattaataagcaat

SEQ ID NO: 189821 - DNA, 33 bp, Homo sapien
gaagtggggacatcccaaaatccattctggtga

SEQ ID NO: 189822 - DNA, 33 bp, Homo sapien
gaagtggggacatccccaaatccattctggtga

SEQ ID NO: 189823 - DNA, 33 bp, Homo sapien
gtattcttatgacaatatatctgtgaggattcc

SEQ ID NO: 189824 - DNA, 33 bp, Homo sapien
gtattcttatgacaatgtatctgtgaggattcc

SEQ ID NO: 189825 - DNA, 33 bp, Homo sapien
tgttatacccaaagtcacaaatgctttatgaca

SEQ ID NO: 189826 - DNA, 33 bp, Homo sapien
tgttatacccaaagtcgcaaatgctttatgaca

SEQ ID NO: 189827 - DNA, 33 bp, Homo sapien
gattttaaaaccctggaaagtctgcttccaaag

SEQ ID NO: 189828 - DNA, 33 bp, Homo sapien
gattttaaaaccctggcaagtctgcttccaaag

SEQ ID NO: 189829 - DNA, 33 bp, Homo sapien
gaaaactggatatttacgtaggctgagattgat

SEQ ID NO: 189830 - DNA, 33 bp, Homo sapien
gaaaactggatatttatgtaggctgagattgat

SEQ ID NO: 189831 - DNA, 33 bp, Homo sapien
ttctgatacaaggttcaagtggttcctgataaa

SEQ ID NO: 189832 - DNA, 33 bp, Homo sapien
ttctgatacaaggttctagtggttcctgataaa

SEQ ID NO: 189833 - DNA, 33 bp, Homo sapien
aatgaagccaagcacaaataagcaaaaataaaa

SEQ ID NO: 189834 - DNA, 33 bp, Homo sapien
aatgaagccaagcacagataagcaaaaataaaa

SEQ ID NO: 189835 - DNA, 33 bp, Homo sapien
gtataggatttggagaagagttatctttttgag

SEQ ID NO: 189836 - DNA, 33 bp, Homo sapien
gtataggatttggagaggagttatctttttgag

SEQ ID NO: 189837 - DNA, 33 bp, Homo sapien
attctagcttgacacacaaccttcttctagttt

SEQ ID NO: 189838 - DNA, 33 bp, Homo sapien
attctagcttgacacataaccttcttctagttt

SEQ ID NO: 189839 - DNA, 33 bp, Homo sapien
gttactgatcaaaaacaacaaatgccttccact

SEQ ID NO: 189840 - DNA, 33 bp, Homo sapien
gttactgatcaaaaacgacaaatgccttccact

SEQ ID NO: 189841 - DNA, 33 bp, Homo sapien
aaatgccttccactcaaacattcatttattcat

SEQ ID NO: 189842 - DNA, 33 bp, Homo sapien
aaatgccttccactcatacattcatttattcat

SEQ ID NO: 189843 - DNA, 33 bp, Homo sapien
gtggtttattacatgccctttatctaacagcct

SEQ ID NO: 189844 - DNA, 33 bp, Homo sapien
gtggtttattacatgcgctttatctaacagcct

SEQ ID NO: 189845 - DNA, 33 bp, Homo sapien
atattatgctgcttcccacaaaaaattctcatc

SEQ ID NO: 189846 - DNA, 33 bp, Homo sapien
atattatgctgcttcctacaaaaaattctcatc

SEQ ID NO: 189847 - DNA, 33 bp, Homo sapien
ttcaagattctgcatggagcatcaaagagtcag

SEQ ID NO: 189848 - DNA, 33 bp, Homo sapien
ttcaagattctgcatgtagcatcaaagagtcag

SEQ ID NO: 189849 - DNA, 33 bp, Homo sapien
gcagacccaccactgacgtctatccctctggat

SEQ ID NO: 189850 - DNA, 33 bp, Homo sapien
gcagacccaccactgatgtctatccctctggat

SEQ ID NO: 189851 - DNA, 33 bp, Homo sapien
gtcacaatcctggtccaagccatcctctgtttc

SEQ ID NO: 189852 - DNA, 33 bp, Homo sapien
gtcacaatcctggtccgagccatcctctgtttc

SEQ ID NO: 189853 - DNA, 33 bp, Homo sapien
gctcctagtggttcccagaagatgtacatgctt

SEQ ID NO: 189854 - DNA, 33 bp, Homo sapien
gctcctagtggttcccggaagatgtacatgctt

SEQ ID NO: 189855 - DNA, 33 bp, Homo sapien
gagcatttcagttctacgaagcaaagagaccag

SEQ ID NO: 189856 - DNA, 33 bp, Homo sapien
gagcatttcagttctatgaagcaaagagaccag

SEQ ID NO: 189857 - DNA, 33 bp, Homo sapien
tgtaaagtacttagtacagttctctggtataaa

SEQ ID NO: 189858 - DNA, 33 bp, Homo sapien
tgtaaagtacttagtatagttctctggtataaa

SEQ ID NO: 189859 - DNA, 33 bp, Homo sapien
tgtaatttccatgtaaacattcccctcccttct

SEQ ID NO: 189860 - DNA, 33 bp, Homo sapien
tgtaatttccatgtaaccattcccctcccttct

SEQ ID NO: 189861 - DNA, 33 bp, Homo sapien
aaccatttatctcttcaagtagtgccttctgaa

SEQ ID NO: 189862 - DNA, 33 bp, Homo sapien
aaccatttatctcttcgagtagtgccttctgaa

SEQ ID NO: 189863 - DNA, 33 bp, Homo sapien
caagccagtccaacaccagggaacctaccctgt

SEQ ID NO: 189864 - DNA, 33 bp, Homo sapien
caagccagtccaacactagggaacctaccctgt

SEQ ID NO: 189865 - DNA, 33 bp, Homo sapien
cgcacttggcagtgaaaatttatttagtaccta

SEQ ID NO: 189866 - DNA, 33 bp, Homo sapien
cgcacttggcagtgaatatttatttagtaccta

SEQ ID NO: 189867 - DNA, 33 bp, Homo sapien
gaaatgttaatatccactagctgtagtgaggct

SEQ ID NO: 189868 - DNA, 33 bp, Homo sapien
gaaatgttaatatccattagctgtagtgaggct

SEQ ID NO: 189869 - DNA, 33 bp, Homo sapien
actcactggctgtagaaacactgaagcaaatat

SEQ ID NO: 189870 - DNA, 33 bp, Homo sapien
actcactggctgtagacacactgaagcaaatat

SEQ ID NO: 189871 - DNA, 33 bp, Homo sapien
tagtaagtctgtgttacgggctgaatggtatcc

SEQ ID NO: 189872 - DNA, 33 bp, Homo sapien
tagtaagtctgtgttatgggctgaatggtatcc

SEQ ID NO: 189873 - DNA, 33 bp, Homo sapien
aggtaaagcatggagcactatgaaagcaggtaa

SEQ ID NO: 189874 - DNA, 33 bp, Homo sapien
aggtaaagcatggagcgctatgaaagcaggtaa

SEQ ID NO: 189875 - DNA, 33 bp, Homo sapien
ggcctttgggaggtaaatatggaataggggtgc

SEQ ID NO: 189876 - DNA, 33 bp, Homo sapien
ggcctttgggaggtaagtatggaataggggtgc

SEQ ID NO: 189877 - DNA, 33 bp, Homo sapien
ttgggattgagaagaacgctatctcagtttgct

SEQ ID NO: 189878 - DNA, 33 bp, Homo sapien
ttgggattgagaagaatgctatctcagtttgct

SEQ ID NO: 189879 - DNA, 33 bp, Homo sapien
agtgggatagaggataataataatcaaaatacc

SEQ ID NO: 189880 - DNA, 33 bp, Homo sapien
agtgggatagaggatagtaataatcaaaatacc

SEQ ID NO: 189881 - DNA, 33 bp, Homo sapien
attgtcaactcttctacggtgaaggggctggtg

SEQ ID NO: 189882 - DNA, 33 bp, Homo sapien
attgtcaactcttctatggtgaaggggctggtg

SEQ ID NO: 189883 - DNA, 33 bp, Homo sapien
ttcaccacttttgagacgaccaacatgatttta

SEQ ID NO: 189884 - DNA, 33 bp, Homo sapien
ttcaccacttttgagatgaccaacatgatttta

SEQ ID NO: 189885 - DNA, 33 bp, Homo sapien
ttggtattaagctatacgcaatgtgttaagtac

SEQ ID NO: 189886 - DNA, 33 bp, Homo sapien
ttggtattaagctatatgcaatgtgttaagtac

SEQ ID NO: 189887 - DNA, 33 bp, Homo sapien
gtatcatcttacgacaaattatctccaaagaag

SEQ ID NO: 189888 - DNA, 33 bp, Homo sapien
gtatcatcttacgacatattatctccaaagaag

SEQ ID NO: 189889 - DNA, 33 bp, Homo sapien
gaggccctcttgtcaaagtcagttacagatgag

SEQ ID NO: 189890 - DNA, 33 bp, Homo sapien
gaggccctcttgtcaaggtcagttacagatgag

SEQ ID NO: 189891 - DNA, 33 bp, Homo sapien
tgtttccgatccctgaagacttctcttactttc

SEQ ID NO: 189892 - DNA, 33 bp, Homo sapien
tgtttccgatccctgaggacttctcttactttc

SEQ ID NO: 189893 - DNA, 33 bp, Homo sapien
tcttactttcttgacaactgaaacgtgcattta

SEQ ID NO: 189894 - DNA, 33 bp, Homo sapien
tcttactttcttgacatctgaaacgtgcattta

SEQ ID NO: 189895 - DNA, 33 bp, Homo sapien
acctgattcatacacaatgacaacgggagagtg

SEQ ID NO: 189896 - DNA, 33 bp, Homo sapien
acctgattcatacacagtgacaacgggagagtg

SEQ ID NO: 189897 - DNA, 33 bp, Homo sapien
aaagaccaagacaaacccatcttcacagagaaa

SEQ ID NO: 189898 - DNA, 33 bp, Homo sapien
aaagaccaagacaaactcatcttcacagagaaa

SEQ ID NO: 189899 - DNA, 33 bp, Homo sapien
ttaaaagaattataacagcaagaaaatcccaga

SEQ ID NO: 189900 - DNA, 33 bp, Homo sapien
ttaaaagaattataacggcaagaaaatcccaga

SEQ ID NO: 189901 - DNA, 33 bp, Homo sapien
tgggccaatgtgaacacgtccctcttcaaaaca

SEQ ID NO: 189902 - DNA, 33 bp, Homo sapien
tgggccaatgtgaacaggtccctcttcaaaaca

SEQ ID NO: 189903 - DNA, 33 bp, Homo sapien
aattccatagctattgcatgaggatggtccagt

SEQ ID NO: 189904 - DNA, 33 bp, Homo sapien
aattccatagctattgtatgaggatggtccagt

SEQ ID NO: 189905 - DNA, 33 bp, Homo sapien
gtgatttatcaggtcaaagaactaaggggagta

SEQ ID NO: 189906 - DNA, 33 bp, Homo sapien
gtgatttatcaggtcagagaactaaggggagta

SEQ ID NO: 189907 - DNA, 33 bp, Homo sapien
ggttatccatctcatcaagaatttatccactga

SEQ ID NO: 189908 - DNA, 33 bp, Homo sapien
ggttatccatctcatcgagaatttatccactga

SEQ ID NO: 189909 - DNA, 33 bp, Homo sapien
atattttgtggcagaaaattcgtggaccttgtc

SEQ ID NO: 189910 - DNA, 33 bp, Homo sapien
atattttgtggcagaagattcgtggaccttgtc

SEQ ID NO: 189911 - DNA, 33 bp, Homo sapien
tgaaaaggctgatgacaatggttctgccaggaa

SEQ ID NO: 189912 - DNA, 33 bp, Homo sapien
tgaaaaggctgatgacgatggttctgccaggaa

SEQ ID NO: 189913 - DNA, 33 bp, Homo sapien
tgtcatcccataagctaaacatatgaaggcaat

SEQ ID NO: 189914 - DNA, 33 bp, Homo sapien
tgtcatcccataagctgaacatatgaaggcaat

SEQ ID NO: 189915 - DNA, 33 bp, Homo sapien
tccgttcagttaatagacaattaaaatatctca

SEQ ID NO: 189916 - DNA, 33 bp, Homo sapien
tccgttcagttaatagtcaattaaaatatctca

SEQ ID NO: 189917 - DNA, 33 bp, Homo sapien
ctgagatgattttaacagcattctaaattatct

SEQ ID NO: 189918 - DNA, 33 bp, Homo sapien
ctgagatgattttaacggcattctaaattatct

SEQ ID NO: 189919 - DNA, 33 bp, Homo sapien
tgagaaattatagatacgtgatttcgcagaaac

SEQ ID NO: 189920 - DNA, 33 bp, Homo sapien
tgagaaattatagatatgtgatttcgcagaaac

SEQ ID NO: 189921 - DNA, 33 bp, Homo sapien
taagatttatgaatgacagaatagcagttctaa

SEQ ID NO: 189922 - DNA, 33 bp, Homo sapien
taagatttatgaatgatagaatagcagttctaa

SEQ ID NO: 189923 - DNA, 33 bp, Homo sapien
tgccaggtgctgtgccgaacactttaaatatat

SEQ ID NO: 189924 - DNA, 33 bp, Homo sapien
tgccaggtgctgtgcctaacactttaaatatat

SEQ ID NO: 189925 - DNA, 33 bp, Homo sapien
actttcaaatggttggaaaaaaaagtgtgtgta

SEQ ID NO: 189926 - DNA, 33 bp, Homo sapien
actttcaaatggttgggaaaaaaagtgtgtgta

SEQ ID NO: 189927 - DNA, 33 bp, Homo sapien
atttttggcacattcacgcaatacggtgaagag

SEQ ID NO: 189928 - DNA, 33 bp, Homo sapien
atttttggcacattcatgcaatacggtgaagag

SEQ ID NO: 189929 - DNA, 33 bp, Homo sapien
cactataaagagaaagccagacaaatgtggtga

SEQ ID NO: 189930 - DNA, 33 bp, Homo sapien
cactataaagagaaagtcagacaaatgtggtga

SEQ ID NO: 189931 - DNA, 33 bp, Homo sapien
gtttaaatatctcttacctggacaataacaatg

SEQ ID NO: 189932 - DNA, 33 bp, Homo sapien
gtttaaatatctcttatctggacaataacaatg

SEQ ID NO: 189933 - DNA, 33 bp, Homo sapien
gatctccatccctaccacttctgctatacagca

SEQ ID NO: 189934 - DNA, 33 bp, Homo sapien
gatctccatccctaccgcttctgctatacagca

SEQ ID NO: 189935 - DNA, 33 bp, Homo sapien
gattattcccttactcccttcttcccgagcaga

SEQ ID NO: 189936 - DNA, 33 bp, Homo sapien
gattattcccttactctcttcttcccgagcaga

SEQ ID NO: 189937 - DNA, 33 bp, Homo sapien
agaaagaaagcaggtacgtgagcacagatttgt

SEQ ID NO: 189938 - DNA, 33 bp, Homo sapien
agaaagaaagcaggtatgtgagcacagatttgt

SEQ ID NO: 189939 - DNA, 33 bp, Homo sapien
tttgagtcattcagcaataaaaagtttgagaaa

SEQ ID NO: 189940 - DNA, 33 bp, Homo sapien
tttgagtcattcagcagtaaaaagtttgagaaa

SEQ ID NO: 189941 - DNA, 33 bp, Homo sapien
gcacaactggctttgaagtacagagtggtggta

SEQ ID NO: 189942 - DNA, 33 bp, Homo sapien
gcacaactggctttgaggtacagagtggtggta

SEQ ID NO: 189943 - DNA, 33 bp, Homo sapien
tacagaaatgtaaataagagccaaaatgagata

SEQ ID NO: 189944 - DNA, 33 bp, Homo sapien
tacagaaatgtaaataggagccaaaatgagata

SEQ ID NO: 189945 - DNA, 33 bp, Homo sapien
cgtggtttatcggacacgattttgtagatagaa

SEQ ID NO: 189946 - DNA, 33 bp, Homo sapien
cgtggtttatcggacatgattttgtagatagaa

SEQ ID NO: 189947 - DNA, 33 bp, Homo sapien
actaaaacactacataaaatccactttcccatg

SEQ ID NO: 189948 - DNA, 33 bp, Homo sapien
actaaaacactacatagaatccactttcccatg

SEQ ID NO: 189949 - DNA, 33 bp, Homo sapien
cagtttaagtctaatacgcagctacagagcagt

SEQ ID NO: 189950 - DNA, 33 bp, Homo sapien
cagtttaagtctaatatgcagctacagagcagt

SEQ ID NO: 189951 - DNA, 33 bp, Homo sapien
gtttctcatcaatcacactgtttggagtgaaca

SEQ ID NO: 189952 - DNA, 33 bp, Homo sapien
gtttctcatcaatcacgctgtttggagtgaaca

SEQ ID NO: 189953 - DNA, 33 bp, Homo sapien
agaaaaattaagttcaccttgccacaatcaata

SEQ ID NO: 189954 - DNA, 33 bp, Homo sapien
agaaaaattaagttcatcttgccacaatcaata

SEQ ID NO: 189955 - DNA, 33 bp, Homo sapien
caataaacattccacaaatcactgtgactatca

SEQ ID NO: 189956 - DNA, 33 bp, Homo sapien
caataaacattccacacatcactgtgactatca

SEQ ID NO: 189957 - DNA, 33 bp, Homo sapien
atatttttctcttgccacatttagctttgggtt

SEQ ID NO: 189958 - DNA, 33 bp, Homo sapien
atatttttctcttgccgcatttagctttgggtt

SEQ ID NO: 189959 - DNA, 33 bp, Homo sapien
tgttggagataattgacagaatataaacagtga

SEQ ID NO: 189960 - DNA, 33 bp, Homo sapien
tgttggagataattgagagaatataaacagtga

SEQ ID NO: 189961 - DNA, 33 bp, Homo sapien
cttatactatacacaagaattagttcagaatag

SEQ ID NO: 189962 - DNA, 33 bp, Homo sapien
cttatactatacacaataattagttcagaatag

SEQ ID NO: 189963 - DNA, 33 bp, Homo sapien
aaaagctggcagaaacaaagacaactggatatt

SEQ ID NO: 189964 - DNA, 33 bp, Homo sapien
aaaagctggcagaaaccaagacaactggatatt

SEQ ID NO: 189965 - DNA, 33 bp, Homo sapien
gctcttagacaaaggaacaagagctgctaagcc

SEQ ID NO: 189966 - DNA, 33 bp, Homo sapien
gctcttagacaaaggagcaagagctgctaagcc

SEQ ID NO: 189967 - DNA, 33 bp, Homo sapien
tctatcaggaaagtaacacaagtagtgctatta

SEQ ID NO: 189968 - DNA, 33 bp, Homo sapien
tctatcaggaaagtaatacaagtagtgctatta

SEQ ID NO: 189969 - DNA, 33 bp, Homo sapien
ctgtagtaaagcttcccagttgctggttttgtt

SEQ ID NO: 189970 - DNA, 33 bp, Homo sapien
ctgtagtaaagcttcctagttgctggttttgtt

SEQ ID NO: 189971 - DNA, 33 bp, Homo sapien
atgatatgatagagagaagagctatgtctcctg

SEQ ID NO: 189972 - DNA, 33 bp, Homo sapien
atgatatgatagagagtagagctatgtctcctg

SEQ ID NO: 189973 - DNA, 33 bp, Homo sapien
ctagaattcatagtgcaaagtcccaaaaaggag

SEQ ID NO: 189974 - DNA, 33 bp, Homo sapien
ctagaattcatagtgcgaagtcccaaaaaggag

SEQ ID NO: 189975 - DNA, 33 bp, Homo sapien
ttttccttagtatttacgagaaattagccctta

SEQ ID NO: 189976 - DNA, 33 bp, Homo sapien
ttttccttagtatttatgagaaattagccctta

SEQ ID NO: 189977 - DNA, 33 bp, Homo sapien
atgatgcccattttacaaagtctattcagtgtt

SEQ ID NO: 189978 - DNA, 33 bp, Homo sapien
atgatgcccattttactaagtctattcagtgtt

SEQ ID NO: 189979 - DNA, 33 bp, Homo sapien
gcaagagactggagaaagaagaaaaatcgaata

SEQ ID NO: 189980 - DNA, 33 bp, Homo sapien
gcaagagactggagaaggaagaaaaatcgaata

SEQ ID NO: 189981 - DNA, 33 bp, Homo sapien
tcaacagagttcttacacattctggtttctagc

SEQ ID NO: 189982 - DNA, 33 bp, Homo sapien
tcaacagagttcttacgcattctggtttctagc

SEQ ID NO: 189983 - DNA, 33 bp, Homo sapien
attgatccttgtctaaacagctctaaaagtagt

SEQ ID NO: 189984 - DNA, 33 bp, Homo sapien
attgatccttgtctaatcagctctaaaagtagt

SEQ ID NO: 189985 - DNA, 33 bp, Homo sapien
ttgagtgaacactgtacgcaaggtggtctatta

SEQ ID NO: 189986 - DNA, 33 bp, Homo sapien
ttgagtgaacactgtatgcaaggtggtctatta

SEQ ID NO: 189987 - DNA, 33 bp, Homo sapien
taacactaggtcaattaaagtttattctgcaaa

SEQ ID NO: 189988 - DNA, 33 bp, Homo sapien
taacactaggtcaattgaagtttattctgcaaa

SEQ ID NO: 189989 - DNA, 33 bp, Homo sapien
tcttctgcctatacaactctccccatttgattt

SEQ ID NO: 189990 - DNA, 33 bp, Homo sapien
tcttctgcctatacaattctccccatttgattt

SEQ ID NO: 189991 - DNA, 33 bp, Homo sapien
ttcaaacccactgataccatccttgtccaaaac

SEQ ID NO: 189992 - DNA, 33 bp, Homo sapien
ttcaaacccactgatatcatccttgtccaaaac

SEQ ID NO: 189993 - DNA, 33 bp, Homo sapien
tttaagtgggagacaaatctagtcttggttatt

SEQ ID NO: 189994 - DNA, 33 bp, Homo sapien
tttaagtgggagacaagtctagtcttggttatt

SEQ ID NO: 189995 - DNA, 33 bp, Homo sapien
tctctgaccaaaaagaaggataaaaatcaataa

SEQ ID NO: 189996 - DNA, 33 bp, Homo sapien
tctctgaccaaaaagagggataaaaatcaataa

SEQ ID NO: 189997 - DNA, 33 bp, Homo sapien
aataaggaatactatgacaaatcttagaccaaa

SEQ ID NO: 189998 - DNA, 33 bp, Homo sapien
aataaggaatactatgtcaaatcttagaccaaa

SEQ ID NO: 189999 - DNA, 33 bp, Homo sapien
tgaacatctttgtcacaatagattagtgtgcac

SEQ ID NO: 190000 - DNA, 33 bp, Homo sapien
tgaacatctttgtcacgatagattagtgtgcac

SEQ ID NO: 190001 - DNA, 33 bp, Homo sapien
tgaggctgtggcaggaccaggtacacagcaagc

SEQ ID NO: 190002 - DNA, 33 bp, Homo sapien
tgaggctgtggcaggatcaggtacacagcaagc

SEQ ID NO: 190003 - DNA, 33 bp, Homo sapien
agacacacaaccaaataatatcaggcacgaatc

SEQ ID NO: 190004 - DNA, 33 bp, Homo sapien
agacacacaaccaaatgatatcaggcacgaatc

SEQ ID NO: 190005 - DNA, 33 bp, Homo sapien
gaattccaactgattacgttcttgctaatactt

SEQ ID NO: 190006 - DNA, 33 bp, Homo sapien
gaattccaactgattatgttcttgctaatactt

SEQ ID NO: 190007 - DNA, 33 bp, Homo sapien
tatgaagtatttctaccgcttatctaattggta

SEQ ID NO: 190008 - DNA, 33 bp, Homo sapien
tatgaagtatttctactgcttatctaattggta

SEQ ID NO: 190009 - DNA, 33 bp, Homo sapien
aaaaagcataatacacactaacagaaagggtac

SEQ ID NO: 190010 - DNA, 33 bp, Homo sapien
aaaaagcataatacacgctaacagaaagggtac

SEQ ID NO: 190011 - DNA, 33 bp, Homo sapien
cttaaacaaaacatgaacaagccaaatctaagg

SEQ ID NO: 190012 - DNA, 33 bp, Homo sapien
cttaaacaaaacatgagcaagccaaatctaagg

SEQ ID NO: 190013 - DNA, 33 bp, Homo sapien
ccaagagtttccttcaacaaatatttatcaact

SEQ ID NO: 190014 - DNA, 33 bp, Homo sapien
ccaagagtttccttcatcaaatatttatcaact

SEQ ID NO: 190015 - DNA, 33 bp, Homo sapien
aagtgccaagagtcaacttatgcacatacaagc

SEQ ID NO: 190016 - DNA, 33 bp, Homo sapien
aagtgccaagagtcaatttatgcacatacaagc

SEQ ID NO: 190017 - DNA, 33 bp, Homo sapien
ctaaatgctgtttctacatacaaaggcattctt

SEQ ID NO: 190018 - DNA, 33 bp, Homo sapien
ctaaatgctgtttctatatacaaaggcattctt

SEQ ID NO: 190019 - DNA, 33 bp, Homo sapien
tactttgcttcctgcaaccgtcaaatatcacac

SEQ ID NO: 190020 - DNA, 33 bp, Homo sapien
tactttgcttcctgcatccgtcaaatatcacac

SEQ ID NO: 190021 - DNA, 33 bp, Homo sapien
aagttcctgaaggtgacataaaatccatataca

SEQ ID NO: 190022 - DNA, 33 bp, Homo sapien
aagttcctgaaggtgatataaaatccatataca

SEQ ID NO: 190023 - DNA, 33 bp, Homo sapien
tgtaactgtcttgggcaaattagagcaaaccct

SEQ ID NO: 190024 - DNA, 33 bp, Homo sapien
tgtaactgtcttgggcgaattagagcaaaccct

SEQ ID NO: 190025 - DNA, 33 bp, Homo sapien
cactgggctagtagtgaaatgcagctttggagt

SEQ ID NO: 190026 - DNA, 33 bp, Homo sapien
cactgggctagtagtggaatgcagctttggagt

SEQ ID NO: 190027 - DNA, 33 bp, Homo sapien
tgatgcagctgttagacagttgcgaatgcactc

SEQ ID NO: 190028 - DNA, 33 bp, Homo sapien
tgatgcagctgttagatagttgcgaatgcactc

SEQ ID NO: 190029 - DNA, 33 bp, Homo sapien
ggtcatctatgtgataactggaaaccctctatt

SEQ ID NO: 190030 - DNA, 33 bp, Homo sapien
ggtcatctatgtgatatctggaaaccctctatt

SEQ ID NO: 190031 - DNA, 33 bp, Homo sapien
tgtcatagaaacagggaattctgagcaactaga

SEQ ID NO: 190032 - DNA, 33 bp, Homo sapien
tgtcatagaaacaggggattctgagcaactaga

SEQ ID NO: 190033 - DNA, 33 bp, Homo sapien
gagacacaagttaggaagccaccgcagaattca

SEQ ID NO: 190034 - DNA, 33 bp, Homo sapien
gagacacaagttaggaggccaccgcagaattca

SEQ ID NO: 190035 - DNA, 33 bp, Homo sapien
tggctaccagtttgccacatggcccccaatgag

SEQ ID NO: 190036 - DNA, 33 bp, Homo sapien
tggctaccagtttgccgcatggcccccaatgag

SEQ ID NO: 190037 - DNA, 33 bp, Homo sapien
agtgaatacttcctgacgtttacgctcttgtac

SEQ ID NO: 190038 - DNA, 33 bp, Homo sapien
agtgaatacttcctgatgtttacgctcttgtac

SEQ ID NO: 190039 - DNA, 33 bp, Homo sapien
gtgcaaatatcctctcaagcaattcccaggtag

SEQ ID NO: 190040 - DNA, 33 bp, Homo sapien
gtgcaaatatcctctctagcaattcccaggtag

SEQ ID NO: 190041 - DNA, 33 bp, Homo sapien
caggcagcttttcccactccctgcttggtttga

SEQ ID NO: 190042 - DNA, 33 bp, Homo sapien
caggcagcttttcccattccctgcttggtttga

SEQ ID NO: 190043 - DNA, 33 bp, Homo sapien
gtctactcatcagacaaatttataccgtctctg

SEQ ID NO: 190044 - DNA, 33 bp, Homo sapien
gtctactcatcagacatatttataccgtctctg

SEQ ID NO: 190045 - DNA, 33 bp, Homo sapien
tggcttaaggacaaaccaagcaagtatcaaaaa

SEQ ID NO: 190046 - DNA, 33 bp, Homo sapien
tggcttaaggacaaactaagcaagtatcaaaaa

SEQ ID NO: 190047 - DNA, 33 bp, Homo sapien
acttctctgccatcacaatacttttagctctct

SEQ ID NO: 190048 - DNA, 33 bp, Homo sapien
acttctctgccatcacgatacttttagctctct

SEQ ID NO: 190049 - DNA, 33 bp, Homo sapien
agccaactaaaatcaaatcaatcaaagaatgag

SEQ ID NO: 190050 - DNA, 33 bp, Homo sapien
agccaactaaaatcaagtcaatcaaagaatgag

SEQ ID NO: 190051 - DNA, 33 bp, Homo sapien
aaaggcacgtcgtacacggtggcagacaagaga

SEQ ID NO: 190052 - DNA, 33 bp, Homo sapien
aaaggcacgtcgtacatggtggcagacaagaga

SEQ ID NO: 190053 - DNA, 33 bp, Homo sapien
ggtatattccttaacaacttattgtagctatag

SEQ ID NO: 190054 - DNA, 33 bp, Homo sapien
ggtatattccttaacagcttattgtagctatag

SEQ ID NO: 190055 - DNA, 33 bp, Homo sapien
aaatttttaaaccacccgaaatgtgtgttatag

SEQ ID NO: 190056 - DNA, 33 bp, Homo sapien
aaatttttaaaccacctgaaatgtgtgttatag

SEQ ID NO: 190057 - DNA, 33 bp, Homo sapien
gtgtgtgtgcatagtcacatagatcgatgagtg

SEQ ID NO: 190058 - DNA, 33 bp, Homo sapien
gtgtgtgtgcatagtctcatagatcgatgagtg

SEQ ID NO: 190059 - DNA, 33 bp, Homo sapien
aaataaatgaatgaccaaataaaataatgtgaa

SEQ ID NO: 190060 - DNA, 33 bp, Homo sapien
aaataaatgaatgaccgaataaaataatgtgaa

SEQ ID NO: 190061 - DNA, 33 bp, Homo sapien
gctatctaaccaatggcactaaggatacactta

SEQ ID NO: 190062 - DNA, 33 bp, Homo sapien
gctatctaaccaatgggactaaggatacactta

SEQ ID NO: 190063 - DNA, 33 bp, Homo sapien
tcaatctactaaacacagtactcaggtcacatt

SEQ ID NO: 190064 - DNA, 33 bp, Homo sapien
tcaatctactaaacacggtactcaggtcacatt

SEQ ID NO: 190065 - DNA, 33 bp, Homo sapien
tggcaagtttgaacagcaatgtgtttggtggtt

SEQ ID NO: 190066 - DNA, 33 bp, Homo sapien
tggcaagtttgaacaggaatgtgtttggtggtt

SEQ ID NO: 190067 - DNA, 33 bp, Homo sapien
ttgtaaaacaggcaaaaaagaaagaatgattta

SEQ ID NO: 190068 - DNA, 33 bp, Homo sapien
ttgtaaaacaggcaaagaagaaagaatgattta

SEQ ID NO: 190069 - DNA, 33 bp, Homo sapien
gaaatactaagatatgaaaacatgtcatggttt

SEQ ID NO: 190070 - DNA, 33 bp, Homo sapien
gaaatactaagatatgcaaacatgtcatggttt

SEQ ID NO: 190071 - DNA, 33 bp, Homo sapien
aatcttaagggattgccattgtatatgtgagcc

SEQ ID NO: 190072 - DNA, 33 bp, Homo sapien
aatcttaagggattgctattgtatatgtgagcc

SEQ ID NO: 190073 - DNA, 33 bp, Homo sapien
ctgcaaatttaggctacctgatacagcctagtc

SEQ ID NO: 190074 - DNA, 33 bp, Homo sapien
ctgcaaatttaggctatctgatacagcctagtc

SEQ ID NO: 190075 - DNA, 33 bp, Homo sapien
atatccctgtcattaaacgacacataaataact

SEQ ID NO: 190076 - DNA, 33 bp, Homo sapien
atatccctgtcattaagcgacacataaataact

SEQ ID NO: 190077 - DNA, 33 bp, Homo sapien
cctctgagttcagccacagctactggactgttc

SEQ ID NO: 190078 - DNA, 33 bp, Homo sapien
cctctgagttcagccatagctactggactgttc

SEQ ID NO: 190079 - DNA, 33 bp, Homo sapien
cagtgtgtcaacaaaacctcctctgtaattaat

SEQ ID NO: 190080 - DNA, 33 bp, Homo sapien
cagtgtgtcaacaaaatctcctctgtaattaat

SEQ ID NO: 190081 - DNA, 33 bp, Homo sapien
tacaacttgatatttgaacaaagtaggtaaaat

SEQ ID NO: 190082 - DNA, 33 bp, Homo sapien
tacaacttgatatttggacaaagtaggtaaaat

SEQ ID NO: 190083 - DNA, 33 bp, Homo sapien
catgggatccttgccaagtgactggaatgaaag

SEQ ID NO: 190084 - DNA, 33 bp, Homo sapien
catgggatccttgccatgtgactggaatgaaag

SEQ ID NO: 190085 - DNA, 33 bp, Homo sapien
acaaatttgacttctgaaagagggactagggga

SEQ ID NO: 190086 - DNA, 33 bp, Homo sapien
acaaatttgacttctggaagagggactagggga

SEQ ID NO: 190087 - DNA, 33 bp, Homo sapien
accttcagccagcctccagaaaatgcagtagat

SEQ ID NO: 190088 - DNA, 33 bp, Homo sapien
accttcagccagcctctagaaaatgcagtagat

SEQ ID NO: 190089 - DNA, 33 bp, Homo sapien
aagccctctcttcttcactggaccttcagccag

SEQ ID NO: 190090 - DNA, 33 bp, Homo sapien
aagccctctcttcttcgctggaccttcagccag

SEQ ID NO: 190091 - DNA, 33 bp, Homo sapien
taatggccacatataaatcaaggacatatttgc

SEQ ID NO: 190092 - DNA, 33 bp, Homo sapien
taatggccacatataagtcaaggacatatttgc

SEQ ID NO: 190093 - DNA, 33 bp, Homo sapien
tctctcttccatacccagaaatctaatcagaaa

SEQ ID NO: 190094 - DNA, 33 bp, Homo sapien
tctctcttccatacccggaaatctaatcagaaa

SEQ ID NO: 190095 - DNA, 33 bp, Homo sapien
atagtacggtagatagcaagtgctaaggagaaa

SEQ ID NO: 190096 - DNA, 33 bp, Homo sapien
atagtacggtagatagtaagtgctaaggagaaa

SEQ ID NO: 190097 - DNA, 33 bp, Homo sapien
atgtggaacagtacacaccatgtaggcactcta

SEQ ID NO: 190098 - DNA, 33 bp, Homo sapien
atgtggaacagtacacgccatgtaggcactcta

SEQ ID NO: 190099 - DNA, 33 bp, Homo sapien
ggagcttgtgattctcaaataagcttctgagat

SEQ ID NO: 190100 - DNA, 33 bp, Homo sapien
ggagcttgtgattctctaataagcttctgagat

SEQ ID NO: 190101 - DNA, 33 bp, Homo sapien
tttcaataatttccaaatgtttgaagaagtaga

SEQ ID NO: 190102 - DNA, 33 bp, Homo sapien
tttcaataatttccaagtgtttgaagaagtaga

SEQ ID NO: 190103 - DNA, 33 bp, Homo sapien
ggaaggatctggacaccgattacttaaagtaac

SEQ ID NO: 190104 - DNA, 33 bp, Homo sapien
ggaaggatctggacactgattacttaaagtaac

SEQ ID NO: 190105 - DNA, 33 bp, Homo sapien
aaagaaactcgttccaacattttcaccagcttt

SEQ ID NO: 190106 - DNA, 33 bp, Homo sapien
aaagaaactcgttccagcattttcaccagcttt

SEQ ID NO: 190107 - DNA, 33 bp, Homo sapien
accacgtaaggcggacaaaccctcaggctcctg

SEQ ID NO: 190108 - DNA, 33 bp, Homo sapien
accacgtaaggcggacgaaccctcaggctcctg

SEQ ID NO: 190109 - DNA, 33 bp, Homo sapien
cctagcaacaaagagacacctatccacatcaat

SEQ ID NO: 190110 - DNA, 33 bp, Homo sapien
cctagcaacaaagagagacctatccacatcaat

SEQ ID NO: 190111 - DNA, 33 bp, Homo sapien
cttagtgatagagcccaaacttgtttctgaagc

SEQ ID NO: 190112 - DNA, 33 bp, Homo sapien
cttagtgatagagccccaacttgtttctgaagc

SEQ ID NO: 190113 - DNA, 33 bp, Homo sapien
aaaagtcctgggtagaaagaattcaagtctggc

SEQ ID NO: 190114 - DNA, 33 bp, Homo sapien
aaaagtcctgggtagagagaattcaagtctggc

SEQ ID NO: 190115 - DNA, 33 bp, Homo sapien
ctgaaattcattccaaacggtagaaaaagaagg

SEQ ID NO: 190116 - DNA, 33 bp, Homo sapien
ctgaaattcattccaagcggtagaaaaagaagg

SEQ ID NO: 190117 - DNA, 33 bp, Homo sapien
ttgcatctgcctgagcacagaatagttcattct

SEQ ID NO: 190118 - DNA, 33 bp, Homo sapien
ttgcatctgcctgagcgcagaatagttcattct

SEQ ID NO: 190119 - DNA, 33 bp, Homo sapien
agttaagagagctgtacggaacagattcttcct

SEQ ID NO: 190120 - DNA, 33 bp, Homo sapien
agttaagagagctgtatggaacagattcttcct

SEQ ID NO: 190121 - DNA, 33 bp, Homo sapien
cttaatggtaaaaaaccagctttcccactaaga

SEQ ID NO: 190122 - DNA, 33 bp, Homo sapien
cttaatggtaaaaaactagctttcccactaaga

SEQ ID NO: 190123 - DNA, 33 bp, Homo sapien
aagacatgtaaagctgaaatgtaatataaagaa

SEQ ID NO: 190124 - DNA, 33 bp, Homo sapien
aagacatgtaaagctgcaatgtaatataaagaa

SEQ ID NO: 190125 - DNA, 33 bp, Homo sapien
actttgcagagagagaggatgataaagggtttt

SEQ ID NO: 190126 - DNA, 33 bp, Homo sapien
actttgcagagagagatgatgataaagggtttt

SEQ ID NO: 190127 - DNA, 33 bp, Homo sapien
atttccttaactgggtaaatggttaaacagcct

SEQ ID NO: 190128 - DNA, 33 bp, Homo sapien
atttccttaactgggtgaatggttaaacagcct

SEQ ID NO: 190129 - DNA, 33 bp, Homo sapien
actcaaaggatgtgaacatatctacgtttctta

SEQ ID NO: 190130 - DNA, 33 bp, Homo sapien
actcaaaggatgtgaatatatctacgtttctta

SEQ ID NO: 190131 - DNA, 33 bp, Homo sapien
cttggctatgtgattaagggcagatttagcatt

SEQ ID NO: 190132 - DNA, 33 bp, Homo sapien
cttggctatgtgattaggggcagatttagcatt

SEQ ID NO: 190133 - DNA, 33 bp, Homo sapien
gccttatagatgaaagcaccaggtatcagtagg

SEQ ID NO: 190134 - DNA, 33 bp, Homo sapien
gccttatagatgaaagtaccaggtatcagtagg

SEQ ID NO: 190135 - DNA, 33 bp, Homo sapien
gtggaaaggaacacaaataataatagcagtaga

SEQ ID NO: 190136 - DNA, 33 bp, Homo sapien
gtggaaaggaacacaactaataatagcagtaga

SEQ ID NO: 190137 - DNA, 33 bp, Homo sapien
gaggaatctgatgagacagaattaaaggttatt

SEQ ID NO: 190138 - DNA, 33 bp, Homo sapien
gaggaatctgatgagatagaattaaaggttatt

SEQ ID NO: 190139 - DNA, 33 bp, Homo sapien
ccctcatttttcctcagatcatcctcaaggggg

SEQ ID NO: 190140 - DNA, 33 bp, Homo sapien
ccctcatttttcctcatatcatcctcaaggggg

SEQ ID NO: 190141 - DNA, 33 bp, Homo sapien
cgaattttttcacctaataaccacatctaacaa

SEQ ID NO: 190142 - DNA, 33 bp, Homo sapien
cgaattttttcacctagtaaccacatctaacaa

SEQ ID NO: 190143 - DNA, 33 bp, Homo sapien
ctaaggtccagaaagacaaactatggagtttta

SEQ ID NO: 190144 - DNA, 33 bp, Homo sapien
ctaaggtccagaaagagaaactatggagtttta

SEQ ID NO: 190145 - DNA, 33 bp, Homo sapien
ttctcatcacttctcacgcctttactttttacc

SEQ ID NO: 190146 - DNA, 33 bp, Homo sapien
ttctcatcacttctcatgcctttactttttacc

SEQ ID NO: 190147 - DNA, 33 bp, Homo sapien
tatttcattagacaaacagcattagatgttaag

SEQ ID NO: 190148 - DNA, 33 bp, Homo sapien
tatttcattagacaaatagcattagatgttaag

SEQ ID NO: 190149 - DNA, 33 bp, Homo sapien
aagtaaaagaggaaaaaccaactctgaaaatat

SEQ ID NO: 190150 - DNA, 33 bp, Homo sapien
aagtaaaagaggaaaagccaactctgaaaatat

SEQ ID NO: 190151 - DNA, 33 bp, Homo sapien
atgtgtttatgctctacgaggcaacatttagta

SEQ ID NO: 190152 - DNA, 33 bp, Homo sapien
atgtgtttatgctctatgaggcaacatttagta

SEQ ID NO: 190153 - DNA, 33 bp, Homo sapien
ccaataaaccagttagacaaaatgcttactaca

SEQ ID NO: 190154 - DNA, 33 bp, Homo sapien
ccaataaaccagttaggcaaaatgcttactaca

SEQ ID NO: 190155 - DNA, 33 bp, Homo sapien
gcatgaagtgaagacccacaaacgggccaaagc

SEQ ID NO: 190156 - DNA, 33 bp, Homo sapien
gcatgaagtgaagacctacaaacgggccaaagc

SEQ ID NO: 190157 - DNA, 33 bp, Homo sapien
gcatgacctcattagaacttggggtaaatgttg

SEQ ID NO: 190158 - DNA, 33 bp, Homo sapien
gcatgacctcattagagcttggggtaaatgttg

SEQ ID NO: 190159 - DNA, 33 bp, Homo sapien
ttctgactctcttgtaagattattttgaacatc

SEQ ID NO: 190160 - DNA, 33 bp, Homo sapien
ttctgactctcttgtaggattattttgaacatc

SEQ ID NO: 190161 - DNA, 33 bp, Homo sapien
cctcagatagtctgataaggtaagaaatgtgct

SEQ ID NO: 190162 - DNA, 33 bp, Homo sapien
cctcagatagtctgatcaggtaagaaatgtgct

SEQ ID NO: 190163 - DNA, 33 bp, Homo sapien
gcatgaggttctgatacaggaataaagacagag

SEQ ID NO: 190164 - DNA, 33 bp, Homo sapien
gcatgaggttctgatataggaataaagacagag

SEQ ID NO: 190165 - DNA, 33 bp, Homo sapien
attacaatagtctgtagctaaggtttactcttt

SEQ ID NO: 190166 - DNA, 33 bp, Homo sapien
attacaatagtctgtatctaaggtttactcttt

SEQ ID NO: 190167 - DNA, 33 bp, Homo sapien
attagatcatgtagacagaacttattttttctt

SEQ ID NO: 190168 - DNA, 33 bp, Homo sapien
attagatcatgtagactgaacttattttttctt

SEQ ID NO: 190169 - DNA, 33 bp, Homo sapien
ttgatcttctacaccaatcaacttacattatat

SEQ ID NO: 190170 - DNA, 33 bp, Homo sapien
ttgatcttctacaccagtcaacttacattatat

SEQ ID NO: 190171 - DNA, 33 bp, Homo sapien
taatataaagaagccaccaaaaaatgagagaga

SEQ ID NO: 190172 - DNA, 33 bp, Homo sapien
taatataaagaagccatcaaaaaatgagagaga

SEQ ID NO: 190173 - DNA, 33 bp, Homo sapien
ctgatagagaaacaaaagcatgcaaagattgag

SEQ ID NO: 190174 - DNA, 33 bp, Homo sapien
ctgatagagaaacaaaggcatgcaaagattgag

SEQ ID NO: 190175 - DNA, 33 bp, Homo sapien
ttcaaaggtgcccgaactcctattggtctgcga

SEQ ID NO: 190176 - DNA, 33 bp, Homo sapien
ttcaaaggtgcccgaattcctattggtctgcga

SEQ ID NO: 190177 - DNA, 33 bp, Homo sapien
cagatgcataatgtggacaaggagctgaggatg

SEQ ID NO: 190178 - DNA, 33 bp, Homo sapien
cagatgcataatgtggtcaaggagctgaggatg

SEQ ID NO: 190179 - DNA, 33 bp, Homo sapien
attatccaaatatcagcccagtacttggcatat

SEQ ID NO: 190180 - DNA, 33 bp, Homo sapien
attatccaaatatcagtccagtacttggcatat

SEQ ID NO: 190181 - DNA, 33 bp, Homo sapien
gagctatcaacaatggcagaagggtcaaaggtg

SEQ ID NO: 190182 - DNA, 33 bp, Homo sapien
gagctatcaacaatggtagaagggtcaaaggtg

SEQ ID NO: 190183 - DNA, 33 bp, Homo sapien
ggatctgtctattagcccattgtagtactttag

SEQ ID NO: 190184 - DNA, 33 bp, Homo sapien
ggatctgtctattagctcattgtagtactttag

SEQ ID NO: 190185 - DNA, 33 bp, Homo sapien
aacggtgtggtattgacgcaaagatgaccaaat

SEQ ID NO: 190186 - DNA, 33 bp, Homo sapien
aacggtgtggtattgatgcaaagatgaccaaat

SEQ ID NO: 190187 - DNA, 33 bp, Homo sapien
accaaatcaatcaatgcaacagattacagaccc

SEQ ID NO: 190188 - DNA, 33 bp, Homo sapien
accaaatcaatcaatggaacagattacagaccc

SEQ ID NO: 190189 - DNA, 33 bp, Homo sapien
tatgctctcagtaagcacagacttatttctaag

SEQ ID NO: 190190 - DNA, 33 bp, Homo sapien
tatgctctcagtaagcccagacttatttctaag

SEQ ID NO: 190191 - DNA, 33 bp, Homo sapien
atggaactactgaacagggtattgtagccattt

SEQ ID NO: 190192 - DNA, 33 bp, Homo sapien
atggaactactgaacatggtattgtagccattt

SEQ ID NO: 190193 - DNA, 33 bp, Homo sapien
ggaataaaacttcagacggagcaaataatcagc

SEQ ID NO: 190194 - DNA, 33 bp, Homo sapien
ggaataaaacttcagatggagcaaataatcagc

SEQ ID NO: 190195 - DNA, 33 bp, Homo sapien
ttcctaccaagatgcaaatttcaggaaggaagc

SEQ ID NO: 190196 - DNA, 33 bp, Homo sapien
ttcctaccaagatgcagatttcaggaaggaagc

SEQ ID NO: 190197 - DNA, 33 bp, Homo sapien
tatcaaagcctgcatcacatcatatgctaattc

SEQ ID NO: 190198 - DNA, 33 bp, Homo sapien
tatcaaagcctgcatcccatcatatgctaattc

SEQ ID NO: 190199 - DNA, 33 bp, Homo sapien
ctggattcccacaaaacctggccaagtgtgggc

SEQ ID NO: 190200 - DNA, 33 bp, Homo sapien
ctggattcccacaaaatctggccaagtgtgggc

SEQ ID NO: 190201 - DNA, 33 bp, Homo sapien
ctagtgtccttctctacgactgatttttcaacc

SEQ ID NO: 190202 - DNA, 33 bp, Homo sapien
ctagtgtccttctctatgactgatttttcaacc

SEQ ID NO: 190203 - DNA, 33 bp, Homo sapien
agatgacagtaaaaaaagctacagaacagacaa

SEQ ID NO: 190204 - DNA, 33 bp, Homo sapien
agatgacagtaaaaaacgctacagaacagacaa

SEQ ID NO: 190205 - DNA, 33 bp, Homo sapien
atttgaggtgaccacccgggtccatgagatgac

SEQ ID NO: 190206 - DNA, 33 bp, Homo sapien
atttgaggtgaccacctgggtccatgagatgac

SEQ ID NO: 190207 - DNA, 33 bp, Homo sapien
tctgatacttcttgtcacaaataatttttagag

SEQ ID NO: 190208 - DNA, 33 bp, Homo sapien
tctgatacttcttgtcgcaaataatttttagag

SEQ ID NO: 190209 - DNA, 33 bp, Homo sapien
ggggaatccaaacccaagcgtctgttgccagtg

SEQ ID NO: 190210 - DNA, 33 bp, Homo sapien
ggggaatccaaacccaggcgtctgttgccagtg

SEQ ID NO: 190211 - DNA, 33 bp, Homo sapien
atccatcttttaacagaaaactcacaaggtgaa

SEQ ID NO: 190212 - DNA, 33 bp, Homo sapien
atccatcttttaacaggaaactcacaaggtgaa

SEQ ID NO: 190213 - DNA, 33 bp, Homo sapien
cactcagggctgtgccagaaagccagaaaccag

SEQ ID NO: 190214 - DNA, 33 bp, Homo sapien
cactcagggctgtgccggaaagccagaaaccag

SEQ ID NO: 190215 - DNA, 33 bp, Homo sapien; identical to SEQ ID NO: 190213

SEQ ID NO: 190216 - DNA, 33 bp, Homo sapien; identical to SEQ ID NO: 190214

SEQ ID NO: 190217 - DNA, 33 bp, Homo sapien
tccttctattccaatgaactcattagaaattca

SEQ ID NO: 190218 - DNA, 33 bp, Homo sapien
tccttctattccaatggactcattagaaattca

SEQ ID NO: 190219 - DNA, 33 bp, Homo sapien
ctcagaattagaccaccgaaaatctgagttcag

SEQ ID NO: 190220 - DNA, 33 bp, Homo sapien
ctcagaattagaccactgaaaatctgagttcag

SEQ ID NO: 190221 - DNA, 33 bp, Homo sapien
atccagtgttaagtgaagctaatatttctaatg

SEQ ID NO: 190222 - DNA, 33 bp, Homo sapien
atccagtgttaagtgaggctaatatttctaatg

SEQ ID NO: 190223 - DNA, 33 bp, Homo sapien
acgcctccttgctttacgtgtgacatgatcaga

SEQ ID NO: 190224 - DNA, 33 bp, Homo sapien
acgcctccttgctttatgtgtgacatgatcaga

SEQ ID NO: 190225 - DNA, 33 bp, Homo sapien
actttgaacaactgacaagaagctagcattacc

SEQ ID NO: 190226 - DNA, 33 bp, Homo sapien
actttgaacaactgacgagaagctagcattacc

SEQ ID NO: 190227 - DNA, 33 bp, Homo sapien
aagaagtgctctgctaaattgaaggctaaagca

SEQ ID NO: 190228 - DNA, 33 bp, Homo sapien
aagaagtgctctgctacattgaaggctaaagca

SEQ ID NO: 190229 - DNA, 33 bp, Homo sapien
gtacttaaaattaccaagtatctgtcatgctag

SEQ ID NO: 190230 - DNA, 33 bp, Homo sapien
gtacttaaaattaccatgtatctgtcatgctag

SEQ ID NO: 190231 - DNA, 33 bp, Homo sapien
tcacaggtgattggtaaactgccttctaaagac

SEQ ID NO: 190232 - DNA, 33 bp, Homo sapien
tcacaggtgattggtatactgccttctaaagac

SEQ ID NO: 190233 - DNA, 33 bp, Homo sapien
gtgccactcactaaaaaggccagctttgccaag

SEQ ID NO: 190234 - DNA, 33 bp, Homo sapien
gtgccactcactaaaacggccagctttgccaag

SEQ ID NO: 190235 - DNA, 33 bp, Homo sapien
ttctgtattccttttaccttcagcaagcacctc

SEQ ID NO: 190236 - DNA, 33 bp, Homo sapien
ttctgtattccttttatcttcagcaagcacctc

SEQ ID NO: 190237 - DNA, 33 bp, Homo sapien
atccctctggcagataccaggtctcttttccac

SEQ ID NO: 190238 - DNA, 33 bp, Homo sapien
atccctctggcagatatcaggtctcttttccac

SEQ ID NO: 190239 - DNA, 33 bp, Homo sapien
agttgtggtattgctaaagtcctgcccttcatg

SEQ ID NO: 190240 - DNA, 33 bp, Homo sapien
agttgtggtattgctagagtcctgcccttcatg

SEQ ID NO: 190241 - DNA, 33 bp, Homo sapien
taggcttttggctttaaggattgtgtacaaagg

SEQ ID NO: 190242 - DNA, 33 bp, Homo sapien
taggcttttggctttagggattgtgtacaaagg

SEQ ID NO: 190243 - DNA, 33 bp, Homo sapien
taatagttatttcacactatcttattcaagcta

SEQ ID NO: 190244 - DNA, 33 bp, Homo sapien
taatagttatttcacagtatcttattcaagcta

SEQ ID NO: 190245 - DNA, 33 bp, Homo sapien
ctctttcagttcttaccggtaggaattcccaga

SEQ ID NO: 190246 - DNA, 33 bp, Homo sapien
ctctttcagttcttactggtaggaattcccaga

SEQ ID NO: 190247 - DNA, 33 bp, Homo sapien
atatttgccattcagaaaagaaagaaatctcta

SEQ ID NO: 190248 - DNA, 33 bp, Homo sapien
atatttgccattcagagaagaaagaaatctcta

SEQ ID NO: 190249 - DNA, 33 bp, Homo sapien
cgtgactgaaagcccaatacaaacacaccacat

SEQ ID NO: 190250 - DNA, 33 bp, Homo sapien
cgtgactgaaagcccagtacaaacacaccacat

SEQ ID NO: 190251 - DNA, 33 bp, Homo sapien
tagcgaggtgatcaagaaaagtgattaggcctc

SEQ ID NO: 190252 - DNA, 33 bp, Homo sapien
tagcgaggtgatcaaggaaagtgattaggcctc

SEQ ID NO: 190253 - DNA, 33 bp, Homo sapien
attctaactcttcataaccctagtttccagtga

SEQ ID NO: 190254 - DNA, 33 bp, Homo sapien
attctaactcttcatagccctagtttccagtga

SEQ ID NO: 190255 - DNA, 33 bp, Homo sapien
gtttccagtgaaaaaacccaggattacttaatt

SEQ ID NO: 190256 - DNA, 33 bp, Homo sapien
gtttccagtgaaaaaagccaggattacttaatt

SEQ ID NO: 190257 - DNA, 33 bp, Homo sapien
agggaagacagaaaatcaaaagctgtcctcaaa

SEQ ID NO: 190258 - DNA, 33 bp, Homo sapien
agggaagacagaaaatgaaaagctgtcctcaaa

SEQ ID NO: 190259 - DNA, 33 bp, Homo sapien
aagggactcctagttaaagtgagtgcagttgta

SEQ ID NO: 190260 - DNA, 33 bp, Homo sapien
aagggactcctagttacagtgagtgcagttgta

SEQ ID NO: 190261 - DNA, 33 bp, Homo sapien
aaatctttatttctcaagcaacccatttgcctt

SEQ ID NO: 190262 - DNA, 33 bp, Homo sapien
aaatctttatttctcaggcaacccatttgcctt

SEQ ID NO: 190263 - DNA, 33 bp, Homo sapien
gttttaaaacttccacagcgattgactttcata

SEQ ID NO: 190264 - DNA, 33 bp, Homo sapien
gttttaaaacttccaccgcgattgactttcata

SEQ ID NO: 190265 - DNA, 33 bp, Homo sapien
ccctcactgtaacataaaagagaagaaaagata

SEQ ID NO: 190266 - DNA, 33 bp, Homo sapien
ccctcactgtaacatacaagagaagaaaagata

SEQ ID NO: 190267 - DNA, 33 bp, Homo sapien
tgtgtttttggtttcactattctggttgatcta

SEQ ID NO: 190268 - DNA, 33 bp, Homo sapien
tgtgtttttggtttcagtattctggttgatcta

SEQ ID NO: 190269 - DNA, 33 bp, Homo sapien
caatgttagctagaacactaggccactaggctg

SEQ ID NO: 190270 - DNA, 33 bp, Homo sapien
caatgttagctagaacgctaggccactaggctg

SEQ ID NO: 190271 - DNA, 33 bp, Homo sapien
actgttctctttttaaacttaacactatgataa

SEQ ID NO: 190272 - DNA, 33 bp, Homo sapien
actgttctctttttaagcttaacactatgataa

SEQ ID NO: 190273 - DNA, 33 bp, Homo sapien
tatacaaatgaatgaaatggtatcatatatgat

SEQ ID NO: 190274 - DNA, 33 bp, Homo sapien
tatacaaatgaatgaactggtatcatatatgat

SEQ ID NO: 190275 - DNA, 33 bp, Homo sapien
tcctctgtgttatgaagtgtgatgatatgaaac

SEQ ID NO: 190276 - DNA, 33 bp, Homo sapien
tcctctgtgttatgaattgtgatgatatgaaac

SEQ ID NO: 190277 - DNA, 33 bp, Homo sapien
taaggacctgattttaggctgaatacaagacgc

SEQ ID NO: 190278 - DNA, 33 bp, Homo sapien
taaggacctgattttatgctgaatacaagacgc

SEQ ID NO: 190279 - DNA, 33 bp, Homo sapien
gacaaaaggatcaaaccgtttccaagtcactta

SEQ ID NO: 190280 - DNA, 33 bp, Homo sapien
gacaaaaggatcaaactgtttccaagtcactta

SEQ ID NO: 190281 - DNA, 33 bp, Homo sapien
gccaagattgacctaccccaaaagagttagagg

SEQ ID NO: 190282 - DNA, 33 bp, Homo sapien
gccaagattgacctacgccaaaagagttagagg

SEQ ID NO: 190283 - DNA, 33 bp, Homo sapien
cttgaggaaactactcaaggctaggccaagatt

SEQ ID NO: 190284 - DNA, 33 bp, Homo sapien
cttgaggaaactactcgaggctaggccaagatt

SEQ ID NO: 190285 - DNA, 33 bp, Homo sapien
gctaacataaaacatacagacatggatgaagct

SEQ ID NO: 190286 - DNA, 33 bp, Homo sapien
gctaacataaaacatagagacatggatgaagct

SEQ ID NO: 190287 - DNA, 33 bp, Homo sapien
tatagcactgcattcacagagattactaaataa

SEQ ID NO: 190288 - DNA, 33 bp, Homo sapien
tatagcactgcattcatagagattactaaataa

SEQ ID NO: 190289 - DNA, 33 bp, Homo sapien
ataatgtctgccatgcaaaatatttctagctaa

SEQ ID NO: 190290 - DNA, 33 bp, Homo sapien
ataatgtctgccatgcgaaatatttctagctaa

SEQ ID NO: 190291 - DNA, 33 bp, Homo sapien
tactttgttgatgtagacatttaatgctataaa

SEQ ID NO: 190292 - DNA, 33 bp, Homo sapien
tactttgttgatgtaggcatttaatgctataaa

SEQ ID NO: 190293 - DNA, 33 bp, Homo sapien
ggccagtggttcgttcaatcttggaaggtttta

SEQ ID NO: 190294 - DNA, 33 bp, Homo sapien
ggccagtggttcgttccatcttggaaggtttta

SEQ ID NO: 190295 - DNA, 33 bp, Homo sapien
gattatgttgtgttcaagagtgaatttgggaag

SEQ ID NO: 190296 - DNA, 33 bp, Homo sapien
gattatgttgtgttcaggagtgaatttgggaag

SEQ ID NO: 190297 - DNA, 33 bp, Homo sapien
ttcagcaaataaaactaagaagtgcagccagtg

SEQ ID NO: 190298 - DNA, 33 bp, Homo sapien
ttcagcaaataaaactgagaagtgcagccagtg

SEQ ID NO: 190299 - DNA, 33 bp, Homo sapien
gcaagaaaatctgaaaaatgatacaagacgtga

SEQ ID NO: 190300 - DNA, 33 bp, Homo sapien
gcaagaaaatctgaaacatgatacaagacgtga

SEQ ID NO: 190301 - DNA, 33 bp, Homo sapien
gaaattcactcttccactaactacaagtcctta

SEQ ID NO: 190302 - DNA, 33 bp, Homo sapien
gaaattcactcttccattaactacaagtcctta

SEQ ID NO: 190303 - DNA, 33 bp, Homo sapien
aattgaaattagatgaaggctacatgagtgttg

SEQ ID NO: 190304 - DNA, 33 bp, Homo sapien
aattgaaattagatgatggctacatgagtgttg

SEQ ID NO: 190305 - DNA, 33 bp, Homo sapien
gaaattggtaagggaaataaaccaacaacagta

SEQ ID NO: 190306 - DNA, 33 bp, Homo sapien
gaaattggtaagggaagtaaaccaacaacagta

SEQ ID NO: 190307 - DNA, 33 bp, Homo sapien
cttaaagatctcacaactatactcaaagccttc

SEQ ID NO: 190308 - DNA, 33 bp, Homo sapien
cttaaagatctcacaattatactcaaagccttc

SEQ ID NO: 190309 - DNA, 33 bp, Homo sapien
gtccactgccatgcaactgagaaccttgagctt

SEQ ID NO: 190310 - DNA, 33 bp, Homo sapien
gtccactgccatgcaattgagaaccttgagctt

SEQ ID NO: 190311 - DNA, 33 bp, Homo sapien
aacaaacaatagctcaaaaaaagggcaaaacat

SEQ ID NO: 190312 - DNA, 33 bp, Homo sapien
aacaaacaatagctcacaaaaagggcaaaacat

SEQ ID NO: 190313 - DNA, 33 bp, Homo sapien
tgtaacttacaggaaacgtctaaattcacattc

SEQ ID NO: 190314 - DNA, 33 bp, Homo sapien
tgtaacttacaggaaatgtctaaattcacattc

SEQ ID NO: 190315 - DNA, 33 bp, Homo sapien
agaaagaataacagcacgttcttaaaacaacag

SEQ ID NO: 190316 - DNA, 33 bp, Homo sapien
agaaagaataacagcatgttcttaaaacaacag

SEQ ID NO: 190317 - DNA, 33 bp, Homo sapien
tcagaaggctgtggcactaatccaggcaacaga

SEQ ID NO: 190318 - DNA, 33 bp, Homo sapien
tcagaaggctgtggcagtaatccaggcaacaga

SEQ ID NO: 190319 - DNA, 33 bp, Homo sapien
taatccaggcaacagaagatagtagcctaatca

SEQ ID NO: 190320 - DNA, 33 bp, Homo sapien
taatccaggcaacagatgatagtagcctaatca

SEQ ID NO: 190321 - DNA, 33 bp, Homo sapien
aattcctgctagaggaagaatatacggggtcaa

SEQ ID NO: 190322 - DNA, 33 bp, Homo sapien
aattcctgctagaggaggaatatacggggtcaa

SEQ ID NO: 190323 - DNA, 33 bp, Homo sapien
ttattgtagttcaggccatcagaatggatttaa

SEQ ID NO: 190324 - DNA, 33 bp, Homo sapien
ttattgtagttcaggcgatcagaatggatttaa

SEQ ID NO: 190325 - DNA, 33 bp, Homo sapien
cttcaagaatagctggaattagaattgtgaatg

SEQ ID NO: 190326 - DNA, 33 bp, Homo sapien
cttcaagaatagctgggattagaattgtgaatg

SEQ ID NO: 190327 - DNA, 33 bp, Homo sapien
tgcataattgtgaaatgagtataggttgctgct

SEQ ID NO: 190328 - DNA, 33 bp, Homo sapien
tgcataattgtgaaattagtataggttgctgct

SEQ ID NO: 190329 - DNA, 33 bp, Homo sapien
cacagtgaaggccacaatgtagtacccgattat

SEQ ID NO: 190330 - DNA, 33 bp, Homo sapien
cacagtgaaggccacagtgtagtacccgattat

SEQ ID NO: 190331 - DNA, 33 bp, Homo sapien
agaaaaacttgggtaacaacttgtacatggtga

SEQ ID NO: 190332 - DNA, 33 bp, Homo sapien
agaaaaacttgggtaataacttgtacatggtga

SEQ ID NO: 190333 - DNA, 33 bp, Homo sapien
atacatatgatcactcactcaatctatatactt

SEQ ID NO: 190334 - DNA, 33 bp, Homo sapien
atacatatgatcactcgctcaatctatatactt

SEQ ID NO: 190335 - DNA, 33 bp, Homo sapien
ggtttctttttaaaacgataagcacaaaaggaa

SEQ ID NO: 190336 - DNA, 33 bp, Homo sapien
ggtttctttttaaaactataagcacaaaaggaa

SEQ ID NO: 190337 - DNA, 33 bp, Homo sapien
agttcttgtgttcttactaaattgttgactcta

SEQ ID NO: 190338 - DNA, 33 bp, Homo sapien
agttcttgtgttcttattaaattgttgactcta

SEQ ID NO: 190339 - DNA, 33 bp, Homo sapien
aggttaagggacactacgaggaagcaattgacc

SEQ ID NO: 190340 - DNA, 33 bp, Homo sapien
aggttaagggacactatgaggaagcaattgacc

SEQ ID NO: 190341 - DNA, 33 bp, Homo sapien
tatttaaattcatttacggcctattttccccca

SEQ ID NO: 190342 - DNA, 33 bp, Homo sapien
tatttaaattcatttatggcctattttccccca

SEQ ID NO: 190343 - DNA, 33 bp, Homo sapien
ttctctggacttggaaactcatcttttaaattc

SEQ ID NO: 190344 - DNA, 33 bp, Homo sapien
ttctctggacttggaacctcatcttttaaattc

SEQ ID NO: 190345 - DNA, 33 bp, Homo sapien
gagtctcttatgaggcagatttggtttgaaaac

SEQ ID NO: 190346 - DNA, 33 bp, Homo sapien
gagtctcttatgaggccgatttggtttgaaaac

SEQ ID NO: 190347 - DNA, 33 bp, Homo sapien
caatgaatgatgcaagaaataagagtgaaaatg

SEQ ID NO: 190348 - DNA, 33 bp, Homo sapien
caatgaatgatgcaagcaataagagtgaaaatg

SEQ ID NO: 190349 - DNA, 33 bp, Homo sapien
acttctcttcacttaactatggccaggggaatg

SEQ ID NO: 190350 - DNA, 33 bp, Homo sapien
acttctcttcacttaattatggccaggggaatg

SEQ ID NO: 190351 - DNA, 33 bp, Homo sapien
ttctagaagaggcaaaagtatagcaatagaagg

SEQ ID NO: 190352 - DNA, 33 bp, Homo sapien
ttctagaagaggcaaacgtatagcaatagaagg

SEQ ID NO: 190353 - DNA, 33 bp, Homo sapien
atgcttttggttagagacaatgagtggtcttct

SEQ ID NO: 190354 - DNA, 33 bp, Homo sapien
atgcttttggttagaggcaatgagtggtcttct

SEQ ID NO: 190355 - DNA, 33 bp, Homo sapien
ggaaagaattatgtacagactgctgctgataaa

SEQ ID NO: 190356 - DNA, 33 bp, Homo sapien
ggaaagaattatgtacggactgctgctgataaa

SEQ ID NO: 190357 - DNA, 33 bp, Homo sapien
caaaagcagagcctacagagaaacatttttgga

SEQ ID NO: 190358 - DNA, 33 bp, Homo sapien
caaaagcagagcctactgagaaacatttttgga

SEQ ID NO: 190359 - DNA, 33 bp, Homo sapien
tggataccaaaatctgcagaagttcaagtctct

SEQ ID NO: 190360 - DNA, 33 bp, Homo sapien
tggataccaaaatctgtagaagttcaagtctct

SEQ ID NO: 190361 - DNA, 33 bp, Homo sapien
aggttagaaggtacagcataagagaaaagggag

SEQ ID NO: 190362 - DNA, 33 bp, Homo sapien
aggttagaaggtacaggataagagaaaagggag

SEQ ID NO: 190363 - DNA, 33 bp, Homo sapien
ttccatttattagccacgtgacacaggacaagc

SEQ ID NO: 190364 - DNA, 33 bp, Homo sapien
ttccatttattagccatgtgacacaggacaagc

SEQ ID NO: 190365 - DNA, 33 bp, Homo sapien
atcacaataactggcacacagtataataaatac

SEQ ID NO: 190366 - DNA, 33 bp, Homo sapien
atcacaataactggcatacagtataataaatac

SEQ ID NO: 190367 - DNA, 33 bp, Homo sapien
attccaaatgaaagtagagactccttattcaaa

SEQ ID NO: 190368 - DNA, 33 bp, Homo sapien
attccaaatgaaagtatagactccttattcaaa

SEQ ID NO: 190369 - DNA, 33 bp, Homo sapien
caaatagaatttaggaagtcttctgtacaaata

SEQ ID NO: 190370 - DNA, 33 bp, Homo sapien
caaatagaatttaggaggtcttctgtacaaata

SEQ ID NO: 190371 - DNA, 33 bp, Homo sapien
ccagggctgaattaaacactggactagttgggg

SEQ ID NO: 190372 - DNA, 33 bp, Homo sapien
ccagggctgaattaaatactggactagttgggg

SEQ ID NO: 190373 - DNA, 33 bp, Homo sapien
ctctgccagattttcaaatgtttaatggatttg

SEQ ID NO: 190374 - DNA, 33 bp, Homo sapien
ctctgccagattttcagatgtttaatggatttg

SEQ ID NO: 190375 - DNA, 33 bp, Homo sapien
gtcaggactttcacaacgaagagaaaaataaag

SEQ ID NO: 190376 - DNA, 33 bp, Homo sapien
gtcaggactttcacaatgaagagaaaaataaag

SEQ ID NO: 190377 - DNA, 33 bp, Homo sapien
ctaattttttagaacaaagaatgagtcacgtga

SEQ ID NO: 190378 - DNA, 33 bp, Homo sapien
ctaattttttagaacagagaatgagtcacgtga

SEQ ID NO: 190379 - DNA, 33 bp, Homo sapien
tcagctgaccaactctcacggtacttgatgaac

SEQ ID NO: 190380 - DNA, 33 bp, Homo sapien
tcagctgaccaactcttacggtacttgatgaac

SEQ ID NO: 190381 - DNA, 33 bp, Homo sapien
tttaccaattaacagaagttgccattactaaac

SEQ ID NO: 190382 - DNA, 33 bp, Homo sapien
tttaccaattaacagaggttgccattactaaac

SEQ ID NO: 190383 - DNA, 33 bp, Homo sapien
aagaaattgcacaaagcaagttttggagtgctc

SEQ ID NO: 190384 - DNA, 33 bp, Homo sapien
aagaaattgcacaaagtaagttttggagtgctc

SEQ ID NO: 190385 - DNA, 33 bp, Homo sapien
agtgaaaagttcaggcagaatcaagaggcctcg

SEQ ID NO: 190386 - DNA, 33 bp, Homo sapien
agtgaaaagttcaggcggaatcaagaggcctcg

SEQ ID NO: 190387 - DNA, 33 bp, Homo sapien
tttgtcacttgccagccagacattgcaactctg

SEQ ID NO: 190388 - DNA, 33 bp, Homo sapien
tttgtcacttgccagctagacattgcaactctg

SEQ ID NO: 190389 - DNA, 33 bp, Homo sapien
catatctgagtcatctcaacaaggataggctga

SEQ ID NO: 190390 - DNA, 33 bp, Homo sapien
catatctgagtcatcttaacaaggataggctga

SEQ ID NO: 190391 - DNA, 33 bp, Homo sapien
aagcagatgattcaaagttcagattattaaatt

SEQ ID NO: 190392 - DNA, 33 bp, Homo sapien
aagcagatgattcaaatttcagattattaaatt

SEQ ID NO: 190393 - DNA, 33 bp, Homo sapien
gcatttcttctatgaaacatctctgaaactcga

SEQ ID NO: 190394 - DNA, 33 bp, Homo sapien
gcatttcttctatgaagcatctctgaaactcga

SEQ ID NO: 190395 - DNA, 33 bp, Homo sapien
ttgcttttttactctcaaaagggcatttcttct

SEQ ID NO: 190396 - DNA, 33 bp, Homo sapien
ttgcttttttactctcgaaagggcatttcttct

SEQ ID NO: 190397 - DNA, 33 bp, Homo sapien
tgtactgcatgagtaacagggcactgtcatgat

SEQ ID NO: 190398 - DNA, 33 bp, Homo sapien
tgtactgcatgagtaatagggcactgtcatgat

SEQ ID NO: 190399 - DNA, 33 bp, Homo sapien
cttggtcatattaaaccattgaaaggacacgac

SEQ ID NO: 190400 - DNA, 33 bp, Homo sapien
cttggtcatattaaactattgaaaggacacgac

SEQ ID NO: 190401 - DNA, 33 bp, Homo sapien
atcagcttagactccacactggcccattacaag

SEQ ID NO: 190402 - DNA, 33 bp, Homo sapien
atcagcttagactccatactggcccattacaag

SEQ ID NO: 190403 - DNA, 33 bp, Homo sapien
ctcaactctatgtggcaccttagactatagttc

SEQ ID NO: 190404 - DNA, 33 bp, Homo sapien
ctcaactctatgtggctccttagactatagttc

SEQ ID NO: 190405 - DNA, 33 bp, Homo sapien
tgctcaacctctaagcagcgagttcggtaacac

SEQ ID NO: 190406 - DNA, 33 bp, Homo sapien
tgctcaacctctaagcggcgagttcggtaacac

SEQ ID NO: 190407 - DNA, 33 bp, Homo sapien
cacctaatcaaattagacaacgatggaagatga

SEQ ID NO: 190408 - DNA, 33 bp, Homo sapien
cacctaatcaaattagtcaacgatggaagatga

SEQ ID NO: 190409 - DNA, 33 bp, Homo sapien
tatttatggaataaggcatcttgcttggcattg

SEQ ID NO: 190410 - DNA, 33 bp, Homo sapien
tatttatggaataagggatcttgcttggcattg

SEQ ID NO: 190411 - DNA, 33 bp, Homo sapien
tgccactgaaaaataaactctctcctttcctga

SEQ ID NO: 190412 - DNA, 33 bp, Homo sapien
tgccactgaaaaataacctctctcctttcctga

SEQ ID NO: 190413 - DNA, 33 bp, Homo sapien
tatggttacatgtaagcctggtttatacctgtt

SEQ ID NO: 190414 - DNA, 33 bp, Homo sapien
tatggttacatgtaagtctggtttatacctgtt

SEQ ID NO: 190415 - DNA, 33 bp, Homo sapien
attctaacaatgaggcagccatgatacacttct

SEQ ID NO: 190416 - DNA, 33 bp, Homo sapien
attctaacaatgaggcggccatgatacacttct

SEQ ID NO: 190417 - DNA, 33 bp, Homo sapien
ttgaatctaccttctaactatctctcatatctt

SEQ ID NO: 190418 - DNA, 33 bp, Homo sapien
ttgaatctaccttctagctatctctcatatctt

SEQ ID NO: 190419 - DNA, 33 bp, Homo sapien
agagataaagttccaacatgacttagtgtggtg

SEQ ID NO: 190420 - DNA, 33 bp, Homo sapien
agagataaagttccaatatgacttagtgtggtg

SEQ ID NO: 190421 - DNA, 33 bp, Homo sapien
gagagaagatgatacacagaaacaaacagggac

SEQ ID NO: 190422 - DNA, 33 bp, Homo sapien
gagagaagatgatacagagaaacaaacagggac

SEQ ID NO: 190423 - DNA, 33 bp, Homo sapien
agagcttatcaatgtcactctgtaaaaaaggca

SEQ ID NO: 190424 - DNA, 33 bp, Homo sapien
agagcttatcaatgtcgctctgtaaaaaaggca

SEQ ID NO: 190425 - DNA, 33 bp, Homo sapien
taaaaagccaagcactcaaacatgtggcaatac

SEQ ID NO: 190426 - DNA, 33 bp, Homo sapien
taaaaagccaagcacttaaacatgtggcaatac

SEQ ID NO: 190427 - DNA, 33 bp, Homo sapien
tggtcttcttaaattacatcagtctctcttgct

SEQ ID NO: 190428 - DNA, 33 bp, Homo sapien
tggtcttcttaaattagatcagtctctcttgct

SEQ ID NO: 190429 - DNA, 33 bp, Homo sapien
tgtcaaattaacggatcactctgtgaagtctta

SEQ ID NO: 190430 - DNA, 33 bp, Homo sapien
tgtcaaattaacggattactctgtgaagtctta

SEQ ID NO: 190431 - DNA, 33 bp, Homo sapien
ctattttttagaatacaacgttgctgttgagaa

SEQ ID NO: 190432 - DNA, 33 bp, Homo sapien
ctattttttagaatactacgttgctgttgagaa

SEQ ID NO: 190433 - DNA, 33 bp, Homo sapien
gctgacttttcaccacagcaataggctgccttt

SEQ ID NO: 190434 - DNA, 33 bp, Homo sapien
gctgacttttcaccacggcaataggctgccttt

SEQ ID NO: 190435 - DNA, 33 bp, Homo sapien
atattataatcataaaactccactcacttatat

SEQ ID NO: 190436 - DNA, 33 bp, Homo sapien
atattataatcataaagctccactcacttatat

SEQ ID NO: 190437 - DNA, 33 bp, Homo sapien
attttctagattttgacgtcttctttgagctcc

SEQ ID NO: 190438 - DNA, 33 bp, Homo sapien
attttctagattttgaggtcttctttgagctcc

SEQ ID NO: 190439 - DNA, 33 bp, Homo sapien
aagaagggacacaggaccataagaaaggcaatg

SEQ ID NO: 190440 - DNA, 33 bp, Homo sapien
aagaagggacacaggatcataagaaaggcaatg

SEQ ID NO: 190441 - DNA, 33 bp, Homo sapien
gcagaaccaagtataacatgaagtcctagaaga

SEQ ID NO: 190442 - DNA, 33 bp, Homo sapien
gcagaaccaagtataatatgaagtcctagaaga

SEQ ID NO: 190443 - DNA, 33 bp, Homo sapien
gtgcgcaggcaaacaaaaacccatctgatcctg

SEQ ID NO: 190444 - DNA, 33 bp, Homo sapien
gtgcgcaggcaaacaacaacccatctgatcctg

SEQ ID NO: 190445 - DNA, 33 bp, Homo sapien
gccaaaggtctcaagaaagagaagtattaggtt

SEQ ID NO: 190446 - DNA, 33 bp, Homo sapien
gccaaaggtctcaagagagagaagtattaggtt

SEQ ID NO: 190447 - DNA, 33 bp, Homo sapien
gtgaattataaacacacacaaatgcgtacacac

SEQ ID NO: 190448 - DNA, 33 bp, Homo sapien
gtgaattataaacacatacaaatgcgtacacac

SEQ ID NO: 190449 - DNA, 33 bp, Homo sapien
ttcttctgttgctgacccttgctttagaaattt

SEQ ID NO: 190450 - DNA, 33 bp, Homo sapien
ttcttctgttgctgactcttgctttagaaattt

SEQ ID NO: 190451 - DNA, 33 bp, Homo sapien
ttcctgctgtgctctgcaaaaagagtaaaaaca

SEQ ID NO: 190452 - DNA, 33 bp, Homo sapien
ttcctgctgtgctctgtaaaaagagtaaaaaca

SEQ ID NO: 190453 - DNA, 33 bp, Homo sapien
acactggctccaaggacaaattttgtagctgaa

SEQ ID NO: 190454 - DNA, 33 bp, Homo sapien
acactggctccaaggataaattttgtagctgaa

SEQ ID NO: 190455 - DNA, 33 bp, Homo sapien
gctgctataaactggacgtgacatttgccttct

SEQ ID NO: 190456 - DNA, 33 bp, Homo sapien
gctgctataaactggatgtgacatttgccttct

SEQ ID NO: 190457 - DNA, 33 bp, Homo sapien
caaagcacctagcaacggtcattgttcaaggga

SEQ ID NO: 190458 - DNA, 33 bp, Homo sapien
caaagcacctagcaactgtcattgttcaaggga

SEQ ID NO: 190459 - DNA, 33 bp, Homo sapien
gggtgctggtgcgggaagatgttgtagatctgg

SEQ ID NO: 190460 - DNA, 33 bp, Homo sapien
gggtgctggtgcgggaggatgttgtagatctgg

SEQ ID NO: 190461 - DNA, 33 bp, Homo sapien
cagactgaatcagaatcagaatggaattagaat

SEQ ID NO: 190462 - DNA, 33 bp, Homo sapien
cagactgaatcagaattagaatggaattagaat

SEQ ID NO: 190463 - DNA, 33 bp, Homo sapien
gcatcccacttatctacgtaattcaaagcaaga

SEQ ID NO: 190464 - DNA, 33 bp, Homo sapien
gcatcccacttatctatgtaattcaaagcaaga

SEQ ID NO: 190465 - DNA, 33 bp, Homo sapien
ccttgaattgttttgaccattataagccaggct

SEQ ID NO: 190466 - DNA, 33 bp, Homo sapien
ccttgaattgttttgatcattataagccaggct

SEQ ID NO: 190467 - DNA, 33 bp, Homo sapien
caccctccgaaggttcaaggctatttgtgttcg

SEQ ID NO: 190468 - DNA, 33 bp, Homo sapien
caccctccgaaggttcgaggctatttgtgttcg

SEQ ID NO: 190469 - DNA, 33 bp, Homo sapien
taaaccaagaatgataaactaattttaaccaat

SEQ ID NO: 190470 - DNA, 33 bp, Homo sapien
taaaccaagaatgatagactaattttaaccaat

SEQ ID NO: 190471 - DNA, 33 bp, Homo sapien
cgtttgaggctgcataagcacaatctcaaattc

SEQ ID NO: 190472 - DNA, 33 bp, Homo sapien
cgtttgaggctgcataggcacaatctcaaattc

SEQ ID NO: 190473 - DNA, 33 bp, Homo sapien
aaactagctcgtttcacgtactcccctcgtcca

SEQ ID NO: 190474 - DNA, 33 bp, Homo sapien
aaactagctcgtttcatgtactcccctcgtcca

SEQ ID NO: 190475 - DNA, 33 bp, Homo sapien
gccttggtgacttctcccatcatgttgcagact

SEQ ID NO: 190476 - DNA, 33 bp, Homo sapien
gccttggtgacttctctcatcatgttgcagact

SEQ ID NO: 190477 - DNA, 33 bp, Homo sapien
tggaaaatttagaatacgaacacaggcctttgt

SEQ ID NO: 190478 - DNA, 33 bp, Homo sapien
tggaaaatttagaatatgaacacaggcctttgt

SEQ ID NO: 190479 - DNA, 33 bp, Homo sapien
cgctaacagtaaattcaattgttctcaccatga

SEQ ID NO: 190480 - DNA, 33 bp, Homo sapien
cgctaacagtaaattccattgttctcaccatga

SEQ ID NO: 190481 - DNA, 33 bp, Homo sapien
aagactgtccaataatcacttacctgccgttta

SEQ ID NO: 190482 - DNA, 33 bp, Homo sapien
aagactgtccaataattacttacctgccgttta

SEQ ID NO: 190483 - DNA, 33 bp, Homo sapien
gaagtcctatagagtacctgacatgcctctctt

SEQ ID NO: 190484 - DNA, 33 bp, Homo sapien
gaagtcctatagagtatctgacatgcctctctt

SEQ ID NO: 190485 - DNA, 33 bp, Homo sapien
ctgcttctatctggcaagtcccttactttactc

SEQ ID NO: 190486 - DNA, 33 bp, Homo sapien
ctgcttctatctggcacgtcccttactttactc

SEQ ID NO: 190487 - DNA, 33 bp, Homo sapien
accaagagccccataactgctagaggccacctg

SEQ ID NO: 190488 - DNA, 33 bp, Homo sapien
accaagagccccataattgctagaggccacctg

SEQ ID NO: 190489 - DNA, 33 bp, Homo sapien
gccatacaataacaaacgttggcaaggatgagg

SEQ ID NO: 190490 - DNA, 33 bp, Homo sapien
gccatacaataacaaatgttggcaaggatgagg

SEQ ID NO: 190491 - DNA, 33 bp, Homo sapien
cggtacctataaactacggagtactattgatag

SEQ ID NO: 190492 - DNA, 33 bp, Homo sapien
cggtacctataaactatggagtactattgatag

SEQ ID NO: 190493 - DNA, 33 bp, Homo sapien
taatgaaaataaaagacggtgatgtcataggga

SEQ ID NO: 190494 - DNA, 33 bp, Homo sapien
taatgaaaataaaagatggtgatgtcataggga

SEQ ID NO: 190495 - DNA, 33 bp, Homo sapien
ggttgaacaagacagagacgtttcttattttgt

SEQ ID NO: 190496 - DNA, 33 bp, Homo sapien
ggttgaacaagacagatacgtttcttattttgt

SEQ ID NO: 190497 - DNA, 33 bp, Homo sapien
cttgttcaaccttgcacgcccagtgcttgacac

SEQ ID NO: 190498 - DNA, 33 bp, Homo sapien
cttgttcaaccttgcatgcccagtgcttgacac

SEQ ID NO: 190499 - DNA, 33 bp, Homo sapien
tccaactgaccataaacaagcattcagatggtt

SEQ ID NO: 190500 - DNA, 33 bp, Homo sapien
tccaactgaccataaataagcattcagatggtt

SEQ ID NO: 190501 - DNA, 33 bp, Homo sapien
catgtcgctggtagcaatacctgtctagcgagt

SEQ ID NO: 190502 - DNA, 33 bp, Homo sapien
catgtcgctggtagcagtacctgtctagcgagt

SEQ ID NO: 190503 - DNA, 33 bp, Homo sapien
tatccagaagctccccaaactcacttctcttgg

SEQ ID NO: 190504 - DNA, 33 bp, Homo sapien
tatccagaagctccccgaactcacttctcttgg

SEQ ID NO: 190505 - DNA, 33 bp, Homo sapien
gacttcaggtttctctaagaacactcagactca

SEQ ID NO: 190506 - DNA, 33 bp, Homo sapien
gacttcaggtttctcttagaacactcagactca

SEQ ID NO: 190507 - DNA, 33 bp, Homo sapien
tcacacttatatctcaagacttttcaagggctg

SEQ ID NO: 190508 - DNA, 33 bp, Homo sapien
tcacacttatatctcaggacttttcaagggctg

SEQ ID NO: 190509 - DNA, 33 bp, Homo sapien
tacaaggacgaagaaagatagttaataacctct

SEQ ID NO: 190510 - DNA, 33 bp, Homo sapien
tacaaggacgaagaaatatagttaataacctct

SEQ ID NO: 190511 - DNA, 33 bp, Homo sapien
cctaaaactctggggaagaatctatacagtgaa

SEQ ID NO: 190512 - DNA, 33 bp, Homo sapien
cctaaaactctggggaggaatctatacagtgaa

SEQ ID NO: 190513 - DNA, 33 bp, Homo sapien
cctattttaagtctcccagatgagtctaagaca

SEQ ID NO: 190514 - DNA, 33 bp, Homo sapien
cctattttaagtctcctagatgagtctaagaca

SEQ ID NO: 190515 - DNA, 33 bp, Homo sapien
actgtgcccagccaacagtattttcttcttagg

SEQ ID NO: 190516 - DNA, 33 bp, Homo sapien
actgtgcccagccaacggtattttcttcttagg

SEQ ID NO: 190517 - DNA, 33 bp, Homo sapien
cctggataaacaaagaggaatatgacactgttt

SEQ ID NO: 190518 - DNA, 33 bp, Homo sapien
cctggataaacaaagatgaatatgacactgttt

SEQ ID NO: 190519 - DNA, 33 bp, Homo sapien
tgctactgactgtttaagttataccacagatta

SEQ ID NO: 190520 - DNA, 33 bp, Homo sapien
tgctactgactgtttaggttataccacagatta

SEQ ID NO: 190521 - DNA, 33 bp, Homo sapien
ctgttcatgagctctaaaaagctgtagaactat

SEQ ID NO: 190522 - DNA, 33 bp, Homo sapien
ctgttcatgagctctagaaagctgtagaactat

SEQ ID NO: 190523 - DNA, 33 bp, Homo sapien
cacgtttattaccaaccctaatcctatgcttcc

SEQ ID NO: 190524 - DNA, 33 bp, Homo sapien
cacgtttattaccaacgctaatcctatgcttcc

SEQ ID NO: 190525 - DNA, 33 bp, Homo sapien
atgataccacgataaaggtactgtttatcaaaa

SEQ ID NO: 190526 - DNA, 33 bp, Homo sapien
atgataccacgataaatgtactgtttatcaaaa

SEQ ID NO: 190527 - DNA, 33 bp, Homo sapien
cctatgtgctgaagaaagagatgatagccaggc

SEQ ID NO: 190528 - DNA, 33 bp, Homo sapien
cctatgtgctgaagaacgagatgatagccaggc

SEQ ID NO: 190529 - DNA, 33 bp, Homo sapien
gcctgggcgacatggagaaaaccagtctctaca

SEQ ID NO: 190530 - DNA, 33 bp, Homo sapien
gcctgggcgacatggataaaaccagtctctaca

SEQ ID NO: 190531 - DNA, 33 bp, Homo sapien
gatttagcttccacaaatctgtactttgcggtt

SEQ ID NO: 190532 - DNA, 33 bp, Homo sapien
gatttagcttccacaagtctgtactttgcggtt

SEQ ID NO: 190533 - DNA, 33 bp, Homo sapien
actcctaggtgtatgcacaagagaaaatgaata

SEQ ID NO: 190534 - DNA, 33 bp, Homo sapien
actcctaggtgtatgcgcaagagaaaatgaata

SEQ ID NO: 190535 - DNA, 33 bp, Homo sapien
catctcaatttgtttcccatagcagtactttgt

SEQ ID NO: 190536 - DNA, 33 bp, Homo sapien
catctcaatttgtttctcatagcagtactttgt

SEQ ID NO: 190537 - DNA, 33 bp, Homo sapien
ggaagataaagttgagaagctctatcaaaaagt

SEQ ID NO: 190538 - DNA, 33 bp, Homo sapien
ggaagataaagttgaggagctctatcaaaaagt

SEQ ID NO: 190539 - DNA, 33 bp, Homo sapien
ccaatgaaaagtgagagtcgttttcttacaggc

SEQ ID NO: 190540 - DNA, 33 bp, Homo sapien
ccaatgaaaagtgagattcgttttcttacaggc

SEQ ID NO: 190541 - DNA, 33 bp, Homo sapien
tcctgctactttcaggcacgtcctactctgtct

SEQ ID NO: 190542 - DNA, 33 bp, Homo sapien
tcctgctactttcaggtacgtcctactctgtct

SEQ ID NO: 190543 - DNA, 33 bp, Homo sapien
tcaataataatcaaagaagtagggaggcttgtg

SEQ ID NO: 190544 - DNA, 33 bp, Homo sapien
tcaataataatcaaaggagtagggaggcttgtg

SEQ ID NO: 190545 - DNA, 33 bp, Homo sapien
gactatgtataaggcagtctgcatgttcatgga

SEQ ID NO: 190546 - DNA, 33 bp, Homo sapien
gactatgtataaggcattctgcatgttcatgga

SEQ ID NO: 190547 - DNA, 33 bp, Homo sapien
gatcttgttttttacccagcatgccaaaccctt

SEQ ID NO: 190548 - DNA, 33 bp, Homo sapien
gatcttgttttttaccgagcatgccaaaccctt

SEQ ID NO: 190549 - DNA, 33 bp, Homo sapien
ggaagagttggagagacgtaggtaaagatccac

SEQ ID NO: 190550 - DNA, 33 bp, Homo sapien
ggaagagttggagagatgtaggtaaagatccac

SEQ ID NO: 190551 - DNA, 33 bp, Homo sapien
cttgaacaccggaccaaattgagtactagctca

SEQ ID NO: 190552 - DNA, 33 bp, Homo sapien
cttgaacaccggaccatattgagtactagctca

SEQ ID NO: 190553 - DNA, 33 bp, Homo sapien
gaagcagttgacctaactgaaaggtaaaatggc

SEQ ID NO: 190554 - DNA, 33 bp, Homo sapien
gaagcagttgacctaattgaaaggtaaaatggc

SEQ ID NO: 190555 - DNA, 33 bp, Homo sapien
aatgacatcatgctatcaggtggaatgagcaag

SEQ ID NO: 190556 - DNA, 33 bp, Homo sapien
aatgacatcatgctattaggtggaatgagcaag

SEQ ID NO: 190557 - DNA, 33 bp, Homo sapien
tatgctgcagttcaagactaaagcctatctgcc

SEQ ID NO: 190558 - DNA, 33 bp, Homo sapien
tatgctgcagttcaagcctaaagcctatctgcc

SEQ ID NO: 190559 - DNA, 33 bp, Homo sapien
aacaatgggcttaaaacagtaaacaatgccaca

SEQ ID NO: 190560 - DNA, 33 bp, Homo sapien
aacaatgggcttaaaatagtaaacaatgccaca

SEQ ID NO: 190561 - DNA, 33 bp, Homo sapien
tcagtcatcttagctacatcttctagataactt

SEQ ID NO: 190562 - DNA, 33 bp, Homo sapien
tcagtcatcttagctagatcttctagataactt

SEQ ID NO: 190563 - DNA, 33 bp, Homo sapien
ttgcagcttcctctcaaccttcataaaatcgaa

SEQ ID NO: 190564 - DNA, 33 bp, Homo sapien
ttgcagcttcctctcagccttcataaaatcgaa

SEQ ID NO: 190565 - DNA, 33 bp, Homo sapien
tatattggtgatttcaaaaaatataattagaaa

SEQ ID NO: 190566 - DNA, 33 bp, Homo sapien
tatattggtgatttcagaaaatataattagaaa

SEQ ID NO: 190567 - DNA, 33 bp, Homo sapien
tagtatataaccgaacaacaagataaatcaaac

SEQ ID NO: 190568 - DNA, 33 bp, Homo sapien
tagtatataaccgaaccacaagataaatcaaac

SEQ ID NO: 190569 - DNA, 33 bp, Homo sapien
attaagagaaacctcaagtaggggtggtagctc

SEQ ID NO: 190570 - DNA, 33 bp, Homo sapien
attaagagaaacctcaggtaggggtggtagctc

SEQ ID NO: 190571 - DNA, 33 bp, Homo sapien
gtgaacccagttgtcagtaagagccatttgcct

SEQ ID NO: 190572 - DNA, 33 bp, Homo sapien
gtgaacccagttgtcattaagagccatttgcct

SEQ ID NO: 190573 - DNA, 33 bp, Homo sapien
ggaaagtcttcgggaacgctaacctgaatgggg

SEQ ID NO: 190574 - DNA, 33 bp, Homo sapien
ggaaagtcttcgggaatgctaacctgaatgggg

SEQ ID NO: 190575 - DNA, 33 bp, Homo sapien
tcaaaaattataggcaataagtggcagggcagg

SEQ ID NO: 190576 - DNA, 33 bp, Homo sapien
tcaaaaattataggcagtaagtggcagggcagg

SEQ ID NO: 190577 - DNA, 33 bp, Homo sapien
attccaattatgtgtacgttaggtcatttgatg

SEQ ID NO: 190578 - DNA, 33 bp, Homo sapien
attccaattatgtgtaggttaggtcatttgatg

SEQ ID NO: 190579 - DNA, 33 bp, Homo sapien
attgtaaatggatctacagcagcagttctcaac

SEQ ID NO: 190580 - DNA, 33 bp, Homo sapien
attgtaaatggatctagagcagcagttctcaac

SEQ ID NO: 190581 - DNA, 33 bp, Homo sapien
aatctactcttgaaaccctccaatctattaaac

SEQ ID NO: 190582 - DNA, 33 bp, Homo sapien
aatctactcttgaaactctccaatctattaaac

SEQ ID NO: 190583 - DNA, 33 bp, Homo sapien
ctggaccagataccatgatcaagctgaattgaa

SEQ ID NO: 190584 - DNA, 33 bp, Homo sapien
ctggaccagataccattatcaagctgaattgaa

SEQ ID NO: 190585 - DNA, 33 bp, Homo sapien
tatttcaaacacaccaatatatctgaaattcaa

SEQ ID NO: 190586 - DNA, 33 bp, Homo sapien
tatttcaaacacaccagtatatctgaaattcaa

SEQ ID NO: 190587 - DNA, 33 bp, Homo sapien
gaatgcatggcacaaaatcactctaggtaggta

SEQ ID NO: 190588 - DNA, 33 bp, Homo sapien
gaatgcatggcacaaagtcactctaggtaggta

SEQ ID NO: 190589 - DNA, 33 bp, Homo sapien
tggtggtatgtgctcacagtcccagaaactcag

SEQ ID NO: 190590 - DNA, 33 bp, Homo sapien
tggtggtatgtgctcatagtcccagaaactcag

SEQ ID NO: 190591 - DNA, 33 bp, Homo sapien
tagatggaaattgttacctgaggaaagaaagtg

SEQ ID NO: 190592 - DNA, 33 bp, Homo sapien
tagatggaaattgttatctgaggaaagaaagtg

SEQ ID NO: 190593 - DNA, 33 bp, Homo sapien
ccaccgcgccgagcctaaagttattttcttcaa

SEQ ID NO: 190594 - DNA, 33 bp, Homo sapien
ccaccgcgccgagcctcaagttattttcttcaa

SEQ ID NO: 190595 - DNA, 33 bp, Homo sapien
ctctcaagttctccacagatctttcctggataa

SEQ ID NO: 190596 - DNA, 33 bp, Homo sapien
ctctcaagttctccacggatctttcctggataa

SEQ ID NO: 190597 - DNA, 33 bp, Homo sapien
tccatgagtcacacaactctctttagcaaatta

SEQ ID NO: 190598 - DNA, 33 bp, Homo sapien
tccatgagtcacacaagtctctttagcaaatta

SEQ ID NO: 190599 - DNA, 33 bp, Homo sapien
tctcatttctaaaataggaatatgcctagattt

SEQ ID NO: 190600 - DNA, 33 bp, Homo sapien
tctcatttctaaaatatgaatatgcctagattt

SEQ ID NO: 190601 - DNA, 33 bp, Homo sapien
tggcaactggcatatagaagtttaataaatatt

SEQ ID NO: 190602 - DNA, 33 bp, Homo sapien
tggcaactggcatatataagtttaataaatatt

SEQ ID NO: 190603 - DNA, 33 bp, Homo sapien
ttaacaaaatccccaaatagttcatatacacac

SEQ ID NO: 190604 - DNA, 33 bp, Homo sapien
ttaacaaaatccccaagtagttcatatacacac

SEQ ID NO: 190605 - DNA, 33 bp, Homo sapien
tagccattctaacaggaattagtatctcactgg

SEQ ID NO: 190606 - DNA, 33 bp, Homo sapien
tagccattctaacaggtattagtatctcactgg

SEQ ID NO: 190607 - DNA, 33 bp, Homo sapien
aatccagacgatgtacgggcatgaggttagaca

SEQ ID NO: 190608 - DNA, 33 bp, Homo sapien
aatccagacgatgtactggcatgaggttagaca

SEQ ID NO: 190609 - DNA, 33 bp, Homo sapien
cttcccaaactccaaagatgtgcacgttgttaa

SEQ ID NO: 190610 - DNA, 33 bp, Homo sapien
cttcccaaactccaaatatgtgcacgttgttaa

SEQ ID NO: 190611 - DNA, 33 bp, Homo sapien
gaagtgtactaggaagacaaagagaagtagaat

SEQ ID NO: 190612 - DNA, 33 bp, Homo sapien
gaagtgtactaggaagccaaagagaagtagaat

SEQ ID NO: 190613 - DNA, 33 bp, Homo sapien
ctggattaatgtataaatgaagttcatctttat

SEQ ID NO: 190614 - DNA, 33 bp, Homo sapien
ctggattaatgtataagtgaagttcatctttat

SEQ ID NO: 190615 - DNA, 33 bp, Homo sapien
gagatggaagtggtagacaaagcttactagctc

SEQ ID NO: 190616 - DNA, 33 bp, Homo sapien
gagatggaagtggtaggcaaagcttactagctc

SEQ ID NO: 190617 - DNA, 33 bp, Homo sapien
aacctcaactaaactaccctgaattatggctcc

SEQ ID NO: 190618 - DNA, 33 bp, Homo sapien
aacctcaactaaactatcctgaattatggctcc

SEQ ID NO: 190619 - DNA, 33 bp, Homo sapien
taactggtcgttgcagcagccctttctgtgcat

SEQ ID NO: 190620 - DNA, 33 bp, Homo sapien
taactggtcgttgcagtagccctttctgtgcat

SEQ ID NO: 190621 - DNA, 33 bp, Homo sapien
taactttaactctgtacaagaaaaatttgaaaa

SEQ ID NO: 190622 - DNA, 33 bp, Homo sapien
taactttaactctgtagaagaaaaatttgaaaa

SEQ ID NO: 190623 - DNA, 33 bp, Homo sapien
tgtaaaataagaagccaacatcatctctagttt

SEQ ID NO: 190624 - DNA, 33 bp, Homo sapien
tgtaaaataagaagccgacatcatctctagttt

SEQ ID NO: 190625 - DNA, 33 bp, Homo sapien
ataagtagtgtttcacagattctactatctttc

SEQ ID NO: 190626 - DNA, 33 bp, Homo sapien
ataagtagtgtttcaccgattctactatctttc

SEQ ID NO: 190627 - DNA, 33 bp, Homo sapien
ttttattaagtaactcaacctaggcaatacatt

SEQ ID NO: 190628 - DNA, 33 bp, Homo sapien
ttttattaagtaactccacctaggcaatacatt

SEQ ID NO: 190629 - DNA, 33 bp, Homo sapien
tgaaaagaagccacccacatggtaactggggga

SEQ ID NO: 190630 - DNA, 33 bp, Homo sapien
tgaaaagaagccacccgcatggtaactggggga

SEQ ID NO: 190631 - DNA, 33 bp, Homo sapien
caatatttactgcttcaatttatctgtctctta

SEQ ID NO: 190632 - DNA, 33 bp, Homo sapien
caatatttactgcttcgatttatctgtctctta

SEQ ID NO: 190633 - DNA, 33 bp, Homo sapien
gaaggaaaagtgatgccaataggaaagtcttaa

SEQ ID NO: 190634 - DNA, 33 bp, Homo sapien
gaaggaaaagtgatgctaataggaaagtcttaa

SEQ ID NO: 190635 - DNA, 33 bp, Homo sapien
ggagggacaaggggacaaggagatttgaagcac

SEQ ID NO: 190636 - DNA, 33 bp, Homo sapien
ggagggacaaggggacgaggagatttgaagcac

SEQ ID NO: 190637 - DNA, 33 bp, Homo sapien
agtcttcaaatttgacggagatttctagtttat

SEQ ID NO: 190638 - DNA, 33 bp, Homo sapien
agtcttcaaatttgactgagatttctagtttat

SEQ ID NO: 190639 - DNA, 33 bp, Homo sapien
ttattacgagactcaggatcttccttaaacttc

SEQ ID NO: 190640 - DNA, 33 bp, Homo sapien
ttattacgagactcagtatcttccttaaacttc

SEQ ID NO: 190641 - DNA, 33 bp, Homo sapien
atcagtgacttcctgacgagatacacagtctac

SEQ ID NO: 190642 - DNA, 33 bp, Homo sapien
atcagtgacttcctgatgagatacacagtctac

SEQ ID NO: 190643 - DNA, 33 bp, Homo sapien
cctcattcctaagccacgttcctctagtaatga

SEQ ID NO: 190644 - DNA, 33 bp, Homo sapien
cctcattcctaagccatgttcctctagtaatga

SEQ ID NO: 190645 - DNA, 33 bp, Homo sapien
gaaagtgagttcatgaggaatttctgatattgg

SEQ ID NO: 190646 - DNA, 33 bp, Homo sapien
gaaagtgagttcatgatgaatttctgatattgg

SEQ ID NO: 190647 - DNA, 33 bp, Homo sapien
gcccatgattttgggcccttggcttccatccat

SEQ ID NO: 190648 - DNA, 33 bp, Homo sapien
gcccatgattttgggcgcttggcttccatccat

SEQ ID NO: 190649 - DNA, 33 bp, Homo sapien
taagtgtgagagaaaccgagaattgcaaagaca

SEQ ID NO: 190650 - DNA, 33 bp, Homo sapien
taagtgtgagagaaactgagaattgcaaagaca

SEQ ID NO: 190651 - DNA, 33 bp, Homo sapien
tcttagctggatgtgaactactagaaggtgaga

SEQ ID NO: 190652 - DNA, 33 bp, Homo sapien
tcttagctggatgtgagctactagaaggtgaga

SEQ ID NO: 190653 - DNA, 33 bp, Homo sapien
aagctaagatctataggacacaggaagggacta

SEQ ID NO: 190654 - DNA, 33 bp, Homo sapien
aagctaagatctatagtacacaggaagggacta

SEQ ID NO: 190655 - DNA, 33 bp, Homo sapien
atattcaatgaaccaaatggcttttatttgcat

SEQ ID NO: 190656 - DNA, 33 bp, Homo sapien
atattcaatgaaccaactggcttttatttgcat

SEQ ID NO: 190657 - DNA, 33 bp, Homo sapien
tttatccgctctgacagtctctgatctgccctt

SEQ ID NO: 190658 - DNA, 33 bp, Homo sapien
tttatccgctctgacattctctgatctgccctt

SEQ ID NO: 190659 - DNA, 33 bp, Homo sapien
gactcacaggaagttccatatacattacagctt

SEQ ID NO: 190660 - DNA, 33 bp, Homo sapien
gactcacaggaagttctatatacattacagctt

SEQ ID NO: 190661 - DNA, 33 bp, Homo sapien; identical to SEQ ID NO: 190659

SEQ ID NO: 190662 - DNA, 33 bp, Homo sapien; identical to SEQ ID NO: 190660

SEQ ID NO: 190663 - DNA, 33 bp, Homo sapien
caataatgagtaagaaaattggatcagtaataa

SEQ ID NO: 190664 - DNA, 33 bp, Homo sapien
caataatgagtaagaagattggatcagtaataa

SEQ ID NO: 190665 - DNA, 33 bp, Homo sapien
cataatccaaagtgaacaaattttgcttaaaag

SEQ ID NO: 190666 - DNA, 33 bp, Homo sapien
cataatccaaagtgaataaattttgcttaaaag

SEQ ID NO: 190667 - DNA, 33 bp, Homo sapien
ttcttatctaaagccagcaacggtcccaccctc

SEQ ID NO: 190668 - DNA, 33 bp, Homo sapien
ttcttatctaaagccatcaacggtcccaccctc

SEQ ID NO: 190669 - DNA, 33 bp, Homo sapien
ctattcgcgctctgacaaagtgcaggggatata

SEQ ID NO: 190670 - DNA, 33 bp, Homo sapien
ctattcgcgctctgacgaagtgcaggggatata

SEQ ID NO: 190671 - DNA, 33 bp, Homo sapien
gatgataatagcaacccctgagttgtgacaacc

SEQ ID NO: 190672 - DNA, 33 bp, Homo sapien
gatgataatagcaaccgctgagttgtgacaacc

SEQ ID NO: 190673 - DNA, 33 bp, Homo sapien
acagcctactgcttaaaggagctttgaggttgt

SEQ ID NO: 190674 - DNA, 33 bp, Homo sapien
acagcctactgcttaagggagctttgaggttgt

SEQ ID NO: 190675 - DNA, 33 bp, Homo sapien
aaattgagctccaggaagtatgtatacaatgtt

SEQ ID NO: 190676 - DNA, 33 bp, Homo sapien
aaattgagctccaggaggtatgtatacaatgtt

SEQ ID NO: 190677 - DNA, 33 bp, Homo sapien
atttagatcaccatataaaaggaaaatgctaaa

SEQ ID NO: 190678 - DNA, 33 bp, Homo sapien
atttagatcaccatatcaaaggaaaatgctaaa

SEQ ID NO: 190679 - DNA, 33 bp, Homo sapien
gtaaactgacgtacgacaatcatattaaggatg

SEQ ID NO: 190680 - DNA, 33 bp, Homo sapien
gtaaactgacgtacgataatcatattaaggatg

SEQ ID NO: 190681 - DNA, 33 bp, Homo sapien
tgaatcaaatgtagaaaacaagccactgaggta

SEQ ID NO: 190682 - DNA, 33 bp, Homo sapien
tgaatcaaatgtagaacacaagccactgaggta

SEQ ID NO: 190683 - DNA, 33 bp, Homo sapien
aattacccagcacaacggtgaaactctgtattg

SEQ ID NO: 190684 - DNA, 33 bp, Homo sapien
aattacccagcacaactgtgaaactctgtattg

SEQ ID NO: 190685 - DNA, 33 bp, Homo sapien
aaagcagaaagcccaaatcagacagtgaatcag

SEQ ID NO: 190686 - DNA, 33 bp, Homo sapien
aaagcagaaagcccaagtcagacagtgaatcag

SEQ ID NO: 190687 - DNA, 33 bp, Homo sapien
ttaatgtaggtatagaaaagttgcaggtcagtt

SEQ ID NO: 190688 - DNA, 33 bp, Homo sapien
ttaatgtaggtatagagaagttgcaggtcagtt

SEQ ID NO: 190689 - DNA, 33 bp, Homo sapien
atctaaaaacaaccacactgtaagccttgtcat

SEQ ID NO: 190690 - DNA, 33 bp, Homo sapien
atctaaaaacaaccactctgtaagccttgtcat

SEQ ID NO: 190691 - DNA, 33 bp, Homo sapien
agtatctgcttctaaccaatattggctgcctct

SEQ ID NO: 190692 - DNA, 33 bp, Homo sapien
agtatctgcttctaactaatattggctgcctct

SEQ ID NO: 190693 - DNA, 33 bp, Homo sapien
aagaagatgaattacacgtacccagagagtttg

SEQ ID NO: 190694 - DNA, 33 bp, Homo sapien
aagaagatgaattacaggtacccagagagtttg

SEQ ID NO: 190695 - DNA, 33 bp, Homo sapien
actcctcttatgttccaattcctgagttaaact

SEQ ID NO: 190696 - DNA, 33 bp, Homo sapien
actcctcttatgttccgattcctgagttaaact

SEQ ID NO: 190697 - DNA, 33 bp, Homo sapien
gagtctgtcctactcacagtaaagtggtcatgg

SEQ ID NO: 190698 - DNA, 33 bp, Homo sapien
gagtctgtcctactcatagtaaagtggtcatgg

SEQ ID NO: 190699 - DNA, 33 bp, Homo sapien
taatgccaagtaagacaaactaaagtgacatgg

SEQ ID NO: 190700 - DNA, 33 bp, Homo sapien
taatgccaagtaagacgaactaaagtgacatgg

SEQ ID NO: 190701 - DNA, 33 bp, Homo sapien
caagaagaaaatcagccctggcaatggaagtga

SEQ ID NO: 190702 - DNA, 33 bp, Homo sapien
caagaagaaaatcagctctggcaatggaagtga

SEQ ID NO: 190703 - DNA, 33 bp, Homo sapien
tgaggaaactgctctacgttccttgtcacctga

SEQ ID NO: 190704 - DNA, 33 bp, Homo sapien
tgaggaaactgctctatgttccttgtcacctga

SEQ ID NO: 190705 - DNA, 33 bp, Homo sapien
atgctgcttatggctgaatgttttcattatgtt

SEQ ID NO: 190706 - DNA, 33 bp, Homo sapien
atgctgcttatggctggatgttttcattatgtt

SEQ ID NO: 190707 - DNA, 33 bp, Homo sapien
tgcagccgtctcctacaatccctttaaatgcca

SEQ ID NO: 190708 - DNA, 33 bp, Homo sapien
tgcagccgtctcctactatccctttaaatgcca

SEQ ID NO: 190709 - DNA, 33 bp, Homo sapien
gggaagggaggatgaaaaggacttggctagaag

SEQ ID NO: 190710 - DNA, 33 bp, Homo sapien
gggaagggaggatgaagaggacttggctagaag

SEQ ID NO: 190711 - DNA, 33 bp, Homo sapien
ctattcacaatagccaagatacagatcaaccta

SEQ ID NO: 190712 - DNA, 33 bp, Homo sapien
ctattcacaatagccaggatacagatcaaccta

SEQ ID NO: 190713 - DNA, 33 bp, Homo sapien
gattgttctgcttacccacttcaggctcacatg

SEQ ID NO: 190714 - DNA, 33 bp, Homo sapien
gattgttctgcttacctacttcaggctcacatg

SEQ ID NO: 190715 - DNA, 33 bp, Homo sapien
aatagagaaaacacaacaaggcaagcaagcatc

SEQ ID NO: 190716 - DNA, 33 bp, Homo sapien
aatagagaaaacacaataaggcaagcaagcatc

SEQ ID NO: 190717 - DNA, 33 bp, Homo sapien
ccttaggatggaatctaaactcccttgcttggc

SEQ ID NO: 190718 - DNA, 33 bp, Homo sapien
ccttaggatggaatctgaactcccttgcttggc

SEQ ID NO: 190719 - DNA, 33 bp, Homo sapien
agccaacagaaaaaaaattctgggacaagagtg

SEQ ID NO: 190720 - DNA, 33 bp, Homo sapien
agccaacagaaaaaaagttctgggacaagagtg

SEQ ID NO: 190721 - DNA, 33 bp, Homo sapien
acgggttgtgatggtgcagcaccttgaaagggt

SEQ ID NO: 190722 - DNA, 33 bp, Homo sapien
acgggttgtgatggtgtagcaccttgaaagggt

SEQ ID NO: 190723 - DNA, 33 bp, Homo sapien
aaatatcctccaaaaaatattcttgcatcaata

SEQ ID NO: 190724 - DNA, 33 bp, Homo sapien
aaatatcctccaaaaagtattcttgcatcaata

SEQ ID NO: 190725 - DNA, 33 bp, Homo sapien
aaggtttgtagccacaagttttttggttttcaa

SEQ ID NO: 190726 - DNA, 33 bp, Homo sapien
aaggtttgtagccacaggttttttggttttcaa

SEQ ID NO: 190727 - DNA, 33 bp, Homo sapien
aatgaacattcaggacaagctaatattctggaa

SEQ ID NO: 190728 - DNA, 33 bp, Homo sapien
aatgaacattcaggactagctaatattctggaa

SEQ ID NO: 190729 - DNA, 33 bp, Homo sapien
aagccacttttcatgacgtagcatagacttcct

SEQ ID NO: 190730 - DNA, 33 bp, Homo sapien
aagccacttttcatgatgtagcatagacttcct

SEQ ID NO: 190731 - DNA, 33 bp, Homo sapien
acataggatatgttgcaatccaaaactcaacaa

SEQ ID NO: 190732 - DNA, 33 bp, Homo sapien
acataggatatgttgcgatccaaaactcaacaa

SEQ ID NO: 190733 - DNA, 33 bp, Homo sapien
aattctacgctgaaaaccactttcctcagagat

SEQ ID NO: 190734 - DNA, 33 bp, Homo sapien
aattctacgctgaaaatcactttcctcagagat

SEQ ID NO: 190735 - DNA, 33 bp, Homo sapien
taaggctgaagagataaaaactggagttcaggc

SEQ ID NO: 190736 - DNA, 33 bp, Homo sapien
taaggctgaagagatataaactggagttcaggc

SEQ ID NO: 190737 - DNA, 33 bp, Homo sapien
cctgaaaagctgaaataagcagatgccccaagg

SEQ ID NO: 190738 - DNA, 33 bp, Homo sapien
cctgaaaagctgaaatcagcagatgccccaagg

SEQ ID NO: 190739 - DNA, 33 bp, Homo sapien
attgcattaattgaaaatcagagttgctgtggg

SEQ ID NO: 190740 - DNA, 33 bp, Homo sapien
attgcattaattgaaagtcagagttgctgtggg

SEQ ID NO: 190741 - DNA, 33 bp, Homo sapien
atgatagaaattaggacaacagtaagaggctaa

SEQ ID NO: 190742 - DNA, 33 bp, Homo sapien
atgatagaaattaggagaacagtaagaggctaa

SEQ ID NO: 190743 - DNA, 33 bp, Homo sapien
tttcctcagtgtataaacttctgcagctgacag

SEQ ID NO: 190744 - DNA, 33 bp, Homo sapien
tttcctcagtgtataagcttctgcagctgacag

SEQ ID NO: 190745 - DNA, 33 bp, Homo sapien
gaaggacaaaaacatacggtcatttcaattggt

SEQ ID NO: 190746 - DNA, 33 bp, Homo sapien
gaaggacaaaaacatatggtcatttcaattggt

SEQ ID NO: 190747 - DNA, 33 bp, Homo sapien
ctgactgaagtttgaaatgctacagttttgagg

SEQ ID NO: 190748 - DNA, 33 bp, Homo sapien
ctgactgaagtttgaagtgctacagttttgagg

SEQ ID NO: 190749 - DNA, 33 bp, Homo sapien
gtataggataactcaacttcccctaattacacc

SEQ ID NO: 190750 - DNA, 33 bp, Homo sapien
gtataggataactcaatttcccctaattacacc

SEQ ID NO: 190751 - DNA, 33 bp, Homo sapien
agacagtctgacccaacgacaatgtacttactg

SEQ ID NO: 190752 - DNA, 33 bp, Homo sapien
agacagtctgacccaatgacaatgtacttactg

SEQ ID NO: 190753 - DNA, 33 bp, Homo sapien
tcctgtttgatgaagcgcgcattctagccaatc

SEQ ID NO: 190754 - DNA, 33 bp, Homo sapien
tcctgtttgatgaagctcgcattctagccaatc

SEQ ID NO: 190755 - DNA, 33 bp, Homo sapien
cagaggtaaaatttgacgttgggtgtggtaggc

SEQ ID NO: 190756 - DNA, 33 bp, Homo sapien
cagaggtaaaatttgatgttgggtgtggtaggc

SEQ ID NO: 190757 - DNA, 33 bp, Homo sapien
ttctttctttggactaggagagatagacatcct

SEQ ID NO: 190758 - DNA, 33 bp, Homo sapien
ttctttctttggactatgagagatagacatcct

SEQ ID NO: 190759 - DNA, 33 bp, Homo sapien
cattagtgacaaagtcaaattcaaacctaagat

SEQ ID NO: 190760 - DNA, 33 bp, Homo sapien
cattagtgacaaagtccaattcaaacctaagat

SEQ ID NO: 190761 - DNA, 33 bp, Homo sapien
ttctaggagtcagttgaaacatgagagaacatt

SEQ ID NO: 190762 - DNA, 33 bp, Homo sapien
ttctaggagtcagttggaacatgagagaacatt

SEQ ID NO: 190763 - DNA, 33 bp, Homo sapien
caggaagtactaaagaaggaggcattgttatca

SEQ ID NO: 190764 - DNA, 33 bp, Homo sapien
caggaagtactaaagatggaggcattgttatca

SEQ ID NO: 190765 - DNA, 33 bp, Homo sapien
atcatttatttcaacacacttttctataatcag

SEQ ID NO: 190766 - DNA, 33 bp, Homo sapien
atcatttatttcaacatacttttctataatcag

SEQ ID NO: 190767 - DNA, 33 bp, Homo sapien
ctttccatttaagtgacagatggaaagccacat

SEQ ID NO: 190768 - DNA, 33 bp, Homo sapien
ctttccatttaagtgatagatggaaagccacat

SEQ ID NO: 190769 - DNA, 33 bp, Homo sapien
gcagtgtatagagttcaagttgcatcccatcgt

SEQ ID NO: 190770 - DNA, 33 bp, Homo sapien
gcagtgtatagagttcgagttgcatcccatcgt

SEQ ID NO: 190771 - DNA, 33 bp, Homo sapien
aaaaagaaatatatggcccacagatgaaaaagg

SEQ ID NO: 190772 - DNA, 33 bp, Homo sapien
aaaaagaaatatatggtccacagatgaaaaagg

SEQ ID NO: 190773 - DNA, 33 bp, Homo sapien
actgattctacagttcaaaaatgcaagatagga

SEQ ID NO: 190774 - DNA, 33 bp, Homo sapien
actgattctacagttcgaaaatgcaagatagga

SEQ ID NO: 190775 - DNA, 33 bp, Homo sapien
aggtggagagagaatacaccaacaggaaggaaa

SEQ ID NO: 190776 - DNA, 33 bp, Homo sapien
aggtggagagagaatagaccaacaggaaggaaa

SEQ ID NO: 190777 - DNA, 33 bp, Homo sapien
tactcatttttaatgaaggcagtaactcaaact

SEQ ID NO: 190778 - DNA, 33 bp, Homo sapien
tactcatttttaatgagggcagtaactcaaact

SEQ ID NO: 190779 - DNA, 33 bp, Homo sapien
cccacggtgggaagcaacctaaggatgagttca

SEQ ID NO: 190780 - DNA, 33 bp, Homo sapien
cccacggtgggaagcagcctaaggatgagttca

SEQ ID NO: 190781 - DNA, 33 bp, Homo sapien
tcaaaactatgttcacaataataccgaaatttt

SEQ ID NO: 190782 - DNA, 33 bp, Homo sapien
tcaaaactatgttcactataataccgaaatttt

SEQ ID NO: 190783 - DNA, 33 bp, Homo sapien
catgtagatttcactcaaatgatgagagaaacc

SEQ ID NO: 190784 - DNA, 33 bp, Homo sapien
catgtagatttcactcgaatgatgagagaaacc

SEQ ID NO: 190785 - DNA, 33 bp, Homo sapien
aaaaaaaatcaatcctaaactgctcagcatttt

SEQ ID NO: 190786 - DNA, 33 bp, Homo sapien
aaaaaaaatcaatcctgaactgctcagcatttt

SEQ ID NO: 190787 - DNA, 33 bp, Homo sapien
catgtctctcagcagcaaaggatttgaggtggc

SEQ ID NO: 190788 - DNA, 33 bp, Homo sapien
catgtctctcagcagcgaaggatttgaggtggc

SEQ ID NO: 190789 - DNA, 33 bp, Homo sapien
agcttttcttatttcaacaactgtcctgtgaaa

SEQ ID NO: 190790 - DNA, 33 bp, Homo sapien
agcttttcttatttcatcaactgtcctgtgaaa

SEQ ID NO: 190791 - DNA, 33 bp, Homo sapien
gagagtcttagttccacgtcattctttttaata

SEQ ID NO: 190792 - DNA, 33 bp, Homo sapien
gagagtcttagttccaggtcattctttttaata

SEQ ID NO: 190793 - DNA, 33 bp, Homo sapien
tcaagggtgatagcaacttcttacagcttaaac

SEQ ID NO: 190794 - DNA, 33 bp, Homo sapien
tcaagggtgatagcaatttcttacagcttaaac

SEQ ID NO: 190795 - DNA, 33 bp, Homo sapien
aattatacatatataccgcatgaacacatgtaa

SEQ ID NO: 190796 - DNA, 33 bp, Homo sapien
aattatacatatatactgcatgaacacatgtaa

SEQ ID NO: 190797 - DNA, 33 bp, Homo sapien
agttacaaactcagcaagcccaaactctagttg

SEQ ID NO: 190798 - DNA, 33 bp, Homo sapien
agttacaaactcagcatgcccaaactctagttg

SEQ ID NO: 190799 - DNA, 33 bp, Homo sapien
gtgttaggtggaaccagtgctgacttagagggt

SEQ ID NO: 190800 - DNA, 33 bp, Homo sapien
gtgttaggtggaaccattgctgacttagagggt

SEQ ID NO: 190801 - DNA, 33 bp, Homo sapien
ttcatgttacagattacggtgacttggatgata

SEQ ID NO: 190802 - DNA, 33 bp, Homo sapien
ttcatgttacagattatggtgacttggatgata

SEQ ID NO: 190803 - DNA, 33 bp, Homo sapien
atacctccacttgaccaaaacctgtcttttcac

SEQ ID NO: 190804 - DNA, 33 bp, Homo sapien
atacctccacttgaccgaaacctgtcttttcac

SEQ ID NO: 190805 - DNA, 33 bp, Homo sapien
gttgattaggcacaaaacttcctttaacatacc

SEQ ID NO: 190806 - DNA, 33 bp, Homo sapien
gttgattaggcacaaaccttcctttaacatacc

SEQ ID NO: 190807 - DNA, 33 bp, Homo sapien
ggctattaaaatccatcaatcatctaacctaaa

SEQ ID NO: 190808 - DNA, 33 bp, Homo sapien
ggctattaaaatccatgaatcatctaacctaaa

SEQ ID NO: 190809 - DNA, 33 bp, Homo sapien
cctagagaatattgccaagcaaaaacatgggtt

SEQ ID NO: 190810 - DNA, 33 bp, Homo sapien
cctagagaatattgccgagcaaaaacatgggtt

SEQ ID NO: 190811 - DNA, 33 bp, Homo sapien
ctagaataatacaccactggaaatcctaattgt

SEQ ID NO: 190812 - DNA, 33 bp, Homo sapien
ctagaataatacaccattggaaatcctaattgt

SEQ ID NO: 190813 - DNA, 33 bp, Homo sapien
aaggataacatttgtacatacagtgcctccagt

SEQ ID NO: 190814 - DNA, 33 bp, Homo sapien
aaggataacatttgtatatacagtgcctccagt

SEQ ID NO: 190815 - DNA, 33 bp, Homo sapien
cctactcttttgacaccgtgagcaggataccaa

SEQ ID NO: 190816 - DNA, 33 bp, Homo sapien
cctactcttttgacactgtgagcaggataccaa

SEQ ID NO: 190817 - DNA, 33 bp, Homo sapien
ctcagtagtcaaaatacctgtagtaggaagcca

SEQ ID NO: 190818 - DNA, 33 bp, Homo sapien
ctcagtagtcaaaatatctgtagtaggaagcca

SEQ ID NO: 190819 - DNA, 33 bp, Homo sapien
tcagctcagaattccacgtccagtccacctttc

SEQ ID NO: 190820 - DNA, 33 bp, Homo sapien
tcagctcagaattccaggtccagtccacctttc

SEQ ID NO: 190821 - DNA, 33 bp, Homo sapien
cttgtgtcttcgtttacgctgtaccatcaccta

SEQ ID NO: 190822 - DNA, 33 bp, Homo sapien
cttgtgtcttcgtttatgctgtaccatcaccta

SEQ ID NO: 190823 - DNA, 33 bp, Homo sapien
ttagtcgtacacatcaaacctctcttaaatata

SEQ ID NO: 190824 - DNA, 33 bp, Homo sapien
ttagtcgtacacatcagacctctcttaaatata

SEQ ID NO: 190825 - DNA, 33 bp, Homo sapien
aaacactaatggcggaagggaaattatattgta

SEQ ID NO: 190826 - DNA, 33 bp, Homo sapien
aaacactaatggcggacgggaaattatattgta

SEQ ID NO: 190827 - DNA, 33 bp, Homo sapien
cgcagcaaaatccattaaaatgttgcctttttt

SEQ ID NO: 190828 - DNA, 33 bp, Homo sapien
cgcagcaaaatccattgaaatgttgcctttttt

SEQ ID NO: 190829 - DNA, 33 bp, Homo sapien
atatgtaatctgaacacatgatgacagagtagg

SEQ ID NO: 190830 - DNA, 33 bp, Homo sapien
atatgtaatctgaacagatgatgacagagtagg

SEQ ID NO: 190831 - DNA, 33 bp, Homo sapien
aaaaggaatgaagtgcaaatacctcctgtaaca

SEQ ID NO: 190832 - DNA, 33 bp, Homo sapien
aaaaggaatgaagtgcgaatacctcctgtaaca

SEQ ID NO: 190833 - DNA, 33 bp, Homo sapien
tgggttgatgaaataacagattatccaggaagg

SEQ ID NO: 190834 - DNA, 33 bp, Homo sapien
tgggttgatgaaataatagattatccaggaagg

SEQ ID NO: 190835 - DNA, 33 bp, Homo sapien
gcaggggcttcacatcactggtctagctctgta

SEQ ID NO: 190836 - DNA, 33 bp, Homo sapien
gcaggggcttcacatccctggtctagctctgta

SEQ ID NO: 190837 - DNA, 33 bp, Homo sapien
tctgaaaatgaggtcaagtcatttcataaagct

SEQ ID NO: 190838 - DNA, 33 bp, Homo sapien
tctgaaaatgaggtcacgtcatttcataaagct

SEQ ID NO: 190839 - DNA, 33 bp, Homo sapien
tcttcttcaaccattaacaatggaggtacattc

SEQ ID NO: 190840 - DNA, 33 bp, Homo sapien
tcttcttcaaccattagcaatggaggtacattc

SEQ ID NO: 190841 - DNA, 33 bp, Homo sapien
cctccagaagctaggcaagtagcatagaagaga

SEQ ID NO: 190842 - DNA, 33 bp, Homo sapien
cctccagaagctaggcgagtagcatagaagaga

SEQ ID NO: 190843 - DNA, 33 bp, Homo sapien
ggcctttcagaaagtagaagcaaagctgggatt

SEQ ID NO: 190844 - DNA, 33 bp, Homo sapien
ggcctttcagaaagtataagcaaagctgggatt

SEQ ID NO: 190845 - DNA, 33 bp, Homo sapien
gtgggttctactattacgcccagtttacagagg

SEQ ID NO: 190846 - DNA, 33 bp, Homo sapien
gtgggttctactattatgcccagtttacagagg

SEQ ID NO: 190847 - DNA, 33 bp, Homo sapien
tcatggatgctgaaggcagacaatgcaatagat

SEQ ID NO: 190848 - DNA, 33 bp, Homo sapien
tcatggatgctgaaggtagacaatgcaatagat

SEQ ID NO: 190849 - DNA, 33 bp, Homo sapien
acactctggctgacgacgtgaaacattgcagtg

SEQ ID NO: 190850 - DNA, 33 bp, Homo sapien
acactctggctgacgatgtgaaacattgcagtg

SEQ ID NO: 190851 - DNA, 33 bp, Homo sapien
ggcccggagaggacaactcacttgcctaaggtc

SEQ ID NO: 190852 - DNA, 33 bp, Homo sapien
ggcccggagaggacaagtcacttgcctaaggtc

SEQ ID NO: 190853 - DNA, 33 bp, Homo sapien
caccccatcctcagaactctcttaaatgacacg

SEQ ID NO: 190854 - DNA, 33 bp, Homo sapien
caccccatcctcagaattctcttaaatgacacg

SEQ ID NO: 190855 - DNA, 33 bp, Homo sapien
cccccaaactgaggctcagaagattgaatctcc

SEQ ID NO: 190856 - DNA, 33 bp, Homo sapien
cccccaaactgaggcttagaagattgaatctcc

SEQ ID NO: 190857 - DNA, 33 bp, Homo sapien
agtagggagtataagacggtatatgggaaatct

SEQ ID NO: 190858 - DNA, 33 bp, Homo sapien
agtagggagtataagatggtatatgggaaatct

SEQ ID NO: 190859 - DNA, 33 bp, Homo sapien
aaaaacaggacaacaaaaagtcaccatagcctt

SEQ ID NO: 190860 - DNA, 33 bp, Homo sapien
aaaaacaggacaacaataagtcaccatagcctt

SEQ ID NO: 190861 - DNA, 33 bp, Homo sapien
tacctccgtgtccctcactgtcagccacacgtg

SEQ ID NO: 190862 - DNA, 33 bp, Homo sapien
tacctccgtgtccctcgctgtcagccacacgtg

SEQ ID NO: 190863 - DNA, 33 bp, Homo sapien
cctttgccaagtctgcaaccatctgtggtctgg

SEQ ID NO: 190864 - DNA, 33 bp, Homo sapien
cctttgccaagtctgcgaccatctgtggtctgg

SEQ ID NO: 190865 - DNA, 33 bp, Homo sapien
cagggagcttgtaatacgatagaagggatagtt

SEQ ID NO: 190866 - DNA, 33 bp, Homo sapien
cagggagcttgtaatatgatagaagggatagtt

SEQ ID NO: 190867 - DNA, 33 bp, Homo sapien
ttcctgcacggaggaaaggactgaggtttcaaa

SEQ ID NO: 190868 - DNA, 33 bp, Homo sapien
ttcctgcacggaggaagggactgaggtttcaaa

SEQ ID NO: 190869 - DNA, 33 bp, Homo sapien
aatatccaaaaagaaacggatgaccttcatatg

SEQ ID NO: 190870 - DNA, 33 bp, Homo sapien
aatatccaaaaagaaatggatgaccttcatatg

SEQ ID NO: 190871 - DNA, 33 bp, Homo sapien
tccactggtcttgacaaccttcattaatcttct

SEQ ID NO: 190872 - DNA, 33 bp, Homo sapien
tccactggtcttgacagccttcattaatcttct

SEQ ID NO: 190873 - DNA, 33 bp, Homo sapien
catgtatatccttgaaacttgccatttctcctt

SEQ ID NO: 190874 - DNA, 33 bp, Homo sapien
catgtatatccttgaagcttgccatttctcctt

SEQ ID NO: 190875 - DNA, 33 bp, Homo sapien
gggactgctggggatgcacactctattggactc

SEQ ID NO: 190876 - DNA, 33 bp, Homo sapien
gggactgctggggatgtacactctattggactc

SEQ ID NO: 190877 - DNA, 33 bp, Homo sapien
cagcatggacattagaatcagacaagaaagact

SEQ ID NO: 190878 - DNA, 33 bp, Homo sapien
cagcatggacattagagtcagacaagaaagact

SEQ ID NO: 190879 - DNA, 33 bp, Homo sapien
ggaagtggaaaaatcgaatatttagctgtggag

SEQ ID NO: 190880 - DNA, 33 bp, Homo sapien
ggaagtggaaaaatcggatatttagctgtggag

SEQ ID NO: 190881 - DNA, 33 bp, Homo sapien
agacccacctgtacccccttgacagctaccaca

SEQ ID NO: 190882 - DNA, 33 bp, Homo sapien
agacccacctgtaccctcttgacagctaccaca

SEQ ID NO: 190883 - DNA, 33 bp, Homo sapien
ggaaaaataactctgcaatctgtatttggcatt

SEQ ID NO: 190884 - DNA, 33 bp, Homo sapien
ggaaaaataactctgcgatctgtatttggcatt

SEQ ID NO: 190885 - DNA, 33 bp, Homo sapien
cgaagaacagttctgaaattacacagttgatgc

SEQ ID NO: 190886 - DNA, 33 bp, Homo sapien
cgaagaacagttctgatattacacagttgatgc

SEQ ID NO: 190887 - DNA, 33 bp, Homo sapien
gttttccctaaaagaacctctcctgtctcactc

SEQ ID NO: 190888 - DNA, 33 bp, Homo sapien
gttttccctaaaagaagctctcctgtctcactc

SEQ ID NO: 190889 - DNA, 33 bp, Homo sapien
cccttgccaaaggctacgtggagatccaaaagt

SEQ ID NO: 190890 - DNA, 33 bp, Homo sapien
cccttgccaaaggctatgtggagatccaaaagt

SEQ ID NO: 190891 - DNA, 33 bp, Homo sapien
tagaaaattaccaaaccgatgaactcaccggcc

SEQ ID NO: 190892 - DNA, 33 bp, Homo sapien
tagaaaattaccaaactgatgaactcaccggcc

SEQ ID NO: 190893 - DNA, 33 bp, Homo sapien
tctgtaatttatctaaatattgctgggagttga

SEQ ID NO: 190894 - DNA, 33 bp, Homo sapien
tctgtaatttatctaagtattgctgggagttga

SEQ ID NO: 190895 - DNA, 33 bp, Homo sapien
atatatataaatatacacaaagccatacaaata

SEQ ID NO: 190896 - DNA, 33 bp, Homo sapien
atatatataaatatacgcaaagccatacaaata

SEQ ID NO: 190897 - DNA, 33 bp, Homo sapien
tgctacactgtgtaagccagacctttcctgtgt

SEQ ID NO: 190898 - DNA, 33 bp, Homo sapien
tgctacactgtgtaagtcagacctttcctgtgt

SEQ ID NO: 190899 - DNA, 33 bp, Homo sapien
tggagggtttaccacaatgcctggtgggctgag

SEQ ID NO: 190900 - DNA, 33 bp, Homo sapien
tggagggtttaccacagtgcctggtgggctgag

SEQ ID NO: 190901 - DNA, 33 bp, Homo sapien
atctaccaaatctcaacaggaacagtgagtctg

SEQ ID NO: 190902 - DNA, 33 bp, Homo sapien
atctaccaaatctcaataggaacagtgagtctg

SEQ ID NO: 190903 - DNA, 33 bp, Homo sapien
tgatgcgtatccaacaaacacttgcaaatgtac

SEQ ID NO: 190904 - DNA, 33 bp, Homo sapien
tgatgcgtatccaacatacacttgcaaatgtac

SEQ ID NO: 190905 - DNA, 33 bp, Homo sapien
acaagaagctcaacaaacacctgggaaactcat

SEQ ID NO: 190906 - DNA, 33 bp, Homo sapien
acaagaagctcaacaatcacctgggaaactcat

SEQ ID NO: 190907 - DNA, 33 bp, Homo sapien
ttgttataaaaattcaacttctctgcacagtta

SEQ ID NO: 190908 - DNA, 33 bp, Homo sapien
ttgttataaaaattcagcttctctgcacagtta

SEQ ID NO: 190909 - DNA, 33 bp, Homo sapien
ccccaccccaatgtacaaaggacaaaacattct

SEQ ID NO: 190910 - DNA, 33 bp, Homo sapien
ccccaccccaatgtacgaaggacaaaacattct

SEQ ID NO: 190911 - DNA, 33 bp, Homo sapien
gaaatttaacaatcaactctttgcttatggagt

SEQ ID NO: 190912 - DNA, 33 bp, Homo sapien
gaaatttaacaatcaagtctttgcttatggagt

SEQ ID NO: 190913 - DNA, 33 bp, Homo sapien
aattagtgatgactaccatgacaagggcaacaa

SEQ ID NO: 190914 - DNA, 33 bp, Homo sapien
aattagtgatgactactatgacaagggcaacaa

SEQ ID NO: 190915 - DNA, 33 bp, Homo sapien
acctgcacccatcagacagagaatgcccctaac

SEQ ID NO: 190916 - DNA, 33 bp, Homo sapien
acctgcacccatcagatagagaatgcccctaac

SEQ ID NO: 190917 - DNA, 33 bp, Homo sapien
agctgtttgcagaatgcagcttaggttaccacc

SEQ ID NO: 190918 - DNA, 33 bp, Homo sapien
agctgtttgcagaatgtagcttaggttaccacc

SEQ ID NO: 190919 - DNA, 33 bp, Homo sapien
tgccatgctccagagacaaccttaatgcagtct

SEQ ID NO: 190920 - DNA, 33 bp, Homo sapien
tgccatgctccagagataaccttaatgcagtct

SEQ ID NO: 190921 - DNA, 33 bp, Homo sapien
gactgcatttttcttcaatgtctacagttccct

SEQ ID NO: 190922 - DNA, 33 bp, Homo sapien
gactgcatttttcttctatgtctacagttccct

SEQ ID NO: 190923 - DNA, 33 bp, Homo sapien
gaagagagagtgctagccaaaatgtcagagagc

SEQ ID NO: 190924 - DNA, 33 bp, Homo sapien
gaagagagagtgctagtcaaaatgtcagagagc

SEQ ID NO: 190925 - DNA, 33 bp, Homo sapien
atggggtgagtatttacgtaaatgtgacaattt

SEQ ID NO: 190926 - DNA, 33 bp, Homo sapien
atggggtgagtatttatgtaaatgtgacaattt

SEQ ID NO: 190927 - DNA, 33 bp, Homo sapien
tgatagattttcatcaaatttggaaaccttcta

SEQ ID NO: 190928 - DNA, 33 bp, Homo sapien
tgatagattttcatcacatttggaaaccttcta

SEQ ID NO: 190929 - DNA, 33 bp, Homo sapien
actgcctgcatttgcaacccttttctgacaact

SEQ ID NO: 190930 - DNA, 33 bp, Homo sapien
actgcctgcatttgcatcccttttctgacaact

SEQ ID NO: 190931 - DNA, 33 bp, Homo sapien
gtggtggaaagagcaccacactgagattacaaa

SEQ ID NO: 190932 - DNA, 33 bp, Homo sapien
gtggtggaaagagcactacactgagattacaaa

SEQ ID NO: 190933 - DNA, 33 bp, Homo sapien
ggaaaactgagtgaacaatcattaaaattagtg

SEQ ID NO: 190934 - DNA, 33 bp, Homo sapien
ggaaaactgagtgaacgatcattaaaattagtg

SEQ ID NO: 190935 - DNA, 33 bp, Homo sapien
tacatttctagatagccgagtttgtgtcctggg

SEQ ID NO: 190936 - DNA, 33 bp, Homo sapien
tacatttctagatagctgagtttgtgtcctggg

SEQ ID NO: 190937 - DNA, 33 bp, Homo sapien
ttttattgttgatgtcaatgatgatgatgggtg

SEQ ID NO: 190938 - DNA, 33 bp, Homo sapien
ttttattgttgatgtcgatgatgatgatgggtg

SEQ ID NO: 190939 - DNA, 33 bp, Homo sapien
gtcagccaatgtgttcactgcactttgacagac

SEQ ID NO: 190940 - DNA, 33 bp, Homo sapien
gtcagccaatgtgttcgctgcactttgacagac

SEQ ID NO: 190941 - DNA, 33 bp, Homo sapien
aaactctctgagaaaacgtgatagatattcttt

SEQ ID NO: 190942 - DNA, 33 bp, Homo sapien
aaactctctgagaaaaggtgatagatattcttt

SEQ ID NO: 190943 - DNA, 33 bp, Homo sapien
ctttgcatatagtagtaaagaaaacagacaagg

SEQ ID NO: 190944 - DNA, 33 bp, Homo sapien
ctttgcatatagtagttaagaaaacagacaagg

SEQ ID NO: 190945 - DNA, 33 bp, Homo sapien
actgagcccttccttgaaattatacctcactca

SEQ ID NO: 190946 - DNA, 33 bp, Homo sapien
actgagcccttccttggaattatacctcactca

SEQ ID NO: 190947 - DNA, 33 bp, Homo sapien
gaaaagaccattatcaacaagaagctggggaag

SEQ ID NO: 190948 - DNA, 33 bp, Homo sapien
gaaaagaccattatcatcaagaagctggggaag

SEQ ID NO: 190949 - DNA, 33 bp, Homo sapien
cctttcagactgcaagactgtaccaacagagat

SEQ ID NO: 190950 - DNA, 33 bp, Homo sapien
cctttcagactgcaaggctgtaccaacagagat

SEQ ID NO: 190951 - DNA, 33 bp, Homo sapien
gttcttggcttcatcacggaaagaattcaaagg

SEQ ID NO: 190952 - DNA, 33 bp, Homo sapien
gttcttggcttcatcatggaaagaattcaaagg

SEQ ID NO: 190953 - DNA, 33 bp, Homo sapien
gcttaaaatggctacacatcagttccatttata

SEQ ID NO: 190954 - DNA, 33 bp, Homo sapien
gcttaaaatggctacatatcagttccatttata

SEQ ID NO: 190955 - DNA, 33 bp, Homo sapien
tactattttttctgcccaaattatccttctctt

SEQ ID NO: 190956 - DNA, 33 bp, Homo sapien
tactattttttctgcctaaattatccttctctt

SEQ ID NO: 190957 - DNA, 33 bp, Homo sapien
tgctgagtgaaccccaaagagaataaatggagc

SEQ ID NO: 190958 - DNA, 33 bp, Homo sapien
tgctgagtgaaccccagagagaataaatggagc

SEQ ID NO: 190959 - DNA, 33 bp, Homo sapien
tctcagttttctcacaactgcattccctactct

SEQ ID NO: 190960 - DNA, 33 bp, Homo sapien
tctcagttttctcacacctgcattccctactct

SEQ ID NO: 190961 - DNA, 33 bp, Homo sapien
atggtattagtcaaaacaatggtagtcttggag

SEQ ID NO: 190962 - DNA, 33 bp, Homo sapien
atggtattagtcaaaataatggtagtcttggag

SEQ ID NO: 190963 - DNA, 33 bp, Homo sapien
tttatacagacaggtactaaagagtaaaatcat

SEQ ID NO: 190964 - DNA, 33 bp, Homo sapien
tttatacagacaggtagtaaagagtaaaatcat

SEQ ID NO: 190965 - DNA, 33 bp, Homo sapien
gcttcagagcaaccagaaggaggagaagaacac

SEQ ID NO: 190966 - DNA, 33 bp, Homo sapien
gcttcagagcaaccaggaggaggagaagaacac

SEQ ID NO: 190967 - DNA, 33 bp, Homo sapien
gaaggaactaaaaataataaatagccattctca

SEQ ID NO: 190968 - DNA, 33 bp, Homo sapien
gaaggaactaaaaatagtaaatagccattctca

SEQ ID NO: 190969 - DNA, 33 bp, Homo sapien
cctgccaggagtaaccaaggaagccaaccctga

SEQ ID NO: 190970 - DNA, 33 bp, Homo sapien
cctgccaggagtaaccgaggaagccaaccctga

SEQ ID NO: 190971 - DNA, 33 bp, Homo sapien
atgcctgtctatgtccagcaaacgtttctcttc

SEQ ID NO: 190972 - DNA, 33 bp, Homo sapien
atgcctgtctatgtccggcaaacgtttctcttc

SEQ ID NO: 190973 - DNA, 33 bp, Homo sapien
gagcaacatttgcacaacttaaagatgagagag

SEQ ID NO: 190974 - DNA, 33 bp, Homo sapien
gagcaacatttgcacagcttaaagatgagagag

SEQ ID NO: 190975 - DNA, 33 bp, Homo sapien
gcttctacattagacacgatcagccgaagaagg

SEQ ID NO: 190976 - DNA, 33 bp, Homo sapien
gcttctacattagacatgatcagccgaagaagg

SEQ ID NO: 190977 - DNA, 33 bp, Homo sapien
ctgtaatggtctctgagtaggcatttctgctag

SEQ ID NO: 190978 - DNA, 33 bp, Homo sapien
ctgtaatggtctctgattaggcatttctgctag

SEQ ID NO: 190979 - DNA, 33 bp, Homo sapien
gttcttcattacagacactggcaacaagcctaa

SEQ ID NO: 190980 - DNA, 33 bp, Homo sapien
gttcttcattacagaccctggcaacaagcctaa

SEQ ID NO: 190981 - DNA, 33 bp, Homo sapien
cactagatagtgtaataagaggctcaagttctc

SEQ ID NO: 190982 - DNA, 33 bp, Homo sapien
cactagatagtgtaattagaggctcaagttctc

SEQ ID NO: 190983 - DNA, 33 bp, Homo sapien
agggctgattatgttccaccaagtcactatgga

SEQ ID NO: 190984 - DNA, 33 bp, Homo sapien
agggctgattatgttctaccaagtcactatgga

SEQ ID NO: 190985 - DNA, 33 bp, Homo sapien
agtgctattcctttacgcttgaatgatacacag

SEQ ID NO: 190986 - DNA, 33 bp, Homo sapien
agtgctattcctttactcttgaatgatacacag

SEQ ID NO: 190987 - DNA, 33 bp, Homo sapien
taggtttttctgttcacaaaaatctagcatttt

SEQ ID NO: 190988 - DNA, 33 bp, Homo sapien
taggtttttctgttcataaaaatctagcatttt

SEQ ID NO: 190989 - DNA, 33 bp, Homo sapien
tggggtcaatgtcttccgaacaaatatgatctc

SEQ ID NO: 190990 - DNA, 33 bp, Homo sapien
tggggtcaatgtcttctgaacaaatatgatctc

SEQ ID NO: 190991 - DNA, 33 bp, Homo sapien
gtatagtttcaaggaagtaataagcagtagaag

SEQ ID NO: 190992 - DNA, 33 bp, Homo sapien
gtatagtttcaaggaattaataagcagtagaag

SEQ ID NO: 190993 - DNA, 33 bp, Homo sapien
gtttcagctgagcccacagagagttttggagtg

SEQ ID NO: 190994 - DNA, 33 bp, Homo sapien
gtttcagctgagcccagagagagttttggagtg

SEQ ID NO: 190995 - DNA, 33 bp, Homo sapien
acgtctgtataatccactagctgtcagcccaaa

SEQ ID NO: 190996 - DNA, 33 bp, Homo sapien
acgtctgtataatccattagctgtcagcccaaa

SEQ ID NO: 190997 - DNA, 33 bp, Homo sapien
gcctccatagaacttcacccacagaaccaaata

SEQ ID NO: 190998 - DNA, 33 bp, Homo sapien
gcctccatagaacttcgcccacagaaccaaata

SEQ ID NO: 190999 - DNA, 33 bp, Homo sapien
ttttgagcgactgattcaaagtgttgggagaat

SEQ ID NO: 191000 - DNA, 33 bp, Homo sapien
ttttgagcgactgattgaaagtgttgggagaat

SEQ ID NO: 191001 - DNA, 33 bp, Homo sapien
aaataaggtacacaataatccttccaagcaaag

SEQ ID NO: 191002 - DNA, 33 bp, Homo sapien
aaataaggtacacaatgatccttccaagcaaag

SEQ ID NO: 191003 - DNA, 33 bp, Homo sapien
tagagatacaaatctacggatgtggagcagttc

SEQ ID NO: 191004 - DNA, 33 bp, Homo sapien
tagagatacaaatctatggatgtggagcagttc

SEQ ID NO: 191005 - DNA, 33 bp, Homo sapien
aaaatctgacacaatacgtggtataatacatag

SEQ ID NO: 191006 - DNA, 33 bp, Homo sapien
aaaatctgacacaatatgtggtataatacatag

SEQ ID NO: 191007 - DNA, 33 bp, Homo sapien
tgatgtgttcccttacagaaagaaatcaccaaa

SEQ ID NO: 191008 - DNA, 33 bp, Homo sapien
tgatgtgttcccttactgaaagaaatcaccaaa

SEQ ID NO: 191009 - DNA, 33 bp, Homo sapien
tttgcatttccttgataacatgatgtggagcat

SEQ ID NO: 191010 - DNA, 33 bp, Homo sapien
tttgcatttccttgatgacatgatgtggagcat

SEQ ID NO: 191011 - DNA, 33 bp, Homo sapien
agaatctggaagttcaaggttcccaagcacatc

SEQ ID NO: 191012 - DNA, 33 bp, Homo sapien
agaatctggaagttcacggttcccaagcacatc

SEQ ID NO: 191013 - DNA, 33 bp, Homo sapien
agacagaaagcctggaccatgaaaaggagtaat

SEQ ID NO: 191014 - DNA, 33 bp, Homo sapien
agacagaaagcctggagcatgaaaaggagtaat

SEQ ID NO: 191015 - DNA, 33 bp, Homo sapien
gtccacagcaagaaagaaacacttggtttgagt

SEQ ID NO: 191016 - DNA, 33 bp, Homo sapien
gtccacagcaagaaagtaacacttggtttgagt

SEQ ID NO: 191017 - DNA, 33 bp, Homo sapien
tagctttacataattaccccaatcagaagtaga

SEQ ID NO: 191018 - DNA, 33 bp, Homo sapien
tagctttacataattatcccaatcagaagtaga

SEQ ID NO: 191019 - DNA, 33 bp, Homo sapien
catgaaattctagtaagccagtttccacacaaa

SEQ ID NO: 191020 - DNA, 33 bp, Homo sapien
catgaaattctagtaatccagtttccacacaaa

SEQ ID NO: 191021 - DNA, 33 bp, Homo sapien
gggttgatgtgagtacccttccaattcaatcaa

SEQ ID NO: 191022 - DNA, 33 bp, Homo sapien
gggttgatgtgagtactcttccaattcaatcaa

SEQ ID NO: 191023 - DNA, 33 bp, Homo sapien
aaatgtttcagctatcaataaatacaataagtt

SEQ ID NO: 191024 - DNA, 33 bp, Homo sapien
aaatgtttcagctatcgataaatacaataagtt

SEQ ID NO: 191025 - DNA, 33 bp, Homo sapien
ggaattggttatcaagaaatatattgcagacaa

SEQ ID NO: 191026 - DNA, 33 bp, Homo sapien
ggaattggttatcaaggaatatattgcagacaa

SEQ ID NO: 191027 - DNA, 33 bp, Homo sapien
atactgactccatgccaagttgcaataaaggaa

SEQ ID NO: 191028 - DNA, 33 bp, Homo sapien
atactgactccatgccgagttgcaataaaggaa

SEQ ID NO: 191029 - DNA, 33 bp, Homo sapien
tattccacaaaatcgggcactctcttttatttt

SEQ ID NO: 191030 - DNA, 33 bp, Homo sapien
tattccacaaaatcggtcactctcttttatttt

SEQ ID NO: 191031 - DNA, 33 bp, Homo sapien
acaaataaatgtgtagccaagttaaaatagtaa

SEQ ID NO: 191032 - DNA, 33 bp, Homo sapien
acaaataaatgtgtagtcaagttaaaatagtaa

SEQ ID NO: 191033 - DNA, 33 bp, Homo sapien
aatcagaaagaacaataagaaagctattaaaat

SEQ ID NO: 191034 - DNA, 33 bp, Homo sapien
aatcagaaagaacaattagaaagctattaaaat

SEQ ID NO: 191035 - DNA, 33 bp, Homo sapien
agattaagttgtacaacggttgtgtcttcccct

SEQ ID NO: 191036 - DNA, 33 bp, Homo sapien
agattaagttgtacaagggttgtgtcttcccct

SEQ ID NO: 191037 - DNA, 33 bp, Homo sapien
ctatctttctctattaaacatcctatattccct

SEQ ID NO: 191038 - DNA, 33 bp, Homo sapien
ctatctttctctattacacatcctatattccct

SEQ ID NO: 191039 - DNA, 33 bp, Homo sapien
agttcagaggatgttgaaaaaataaggactttt

SEQ ID NO: 191040 - DNA, 33 bp, Homo sapien
agttcagaggatgttggaaaaataaggactttt

SEQ ID NO: 191041 - DNA, 33 bp, Homo sapien
caacagtacaagtttgaaatgtaggtaaattgt

SEQ ID NO: 191042 - DNA, 33 bp, Homo sapien
caacagtacaagtttggaatgtaggtaaattgt

SEQ ID NO: 191043 - DNA, 33 bp, Homo sapien
tatttctacacaggtaggtttcacaggctatgc

SEQ ID NO: 191044 - DNA, 33 bp, Homo sapien
tatttctacacaggtatgtttcacaggctatgc

SEQ ID NO: 191045 - DNA, 33 bp, Homo sapien
cctttgaattacccacagaacaggttgagtacc

SEQ ID NO: 191046 - DNA, 33 bp, Homo sapien
cctttgaattacccacggaacaggttgagtacc

SEQ ID NO: 191047 - DNA, 33 bp, Homo sapien
agccagactacagtgaatactattgctcttctg

SEQ ID NO: 191048 - DNA, 33 bp, Homo sapien
agccagactacagtgattactattgctcttctg

SEQ ID NO: 191049 - DNA, 33 bp, Homo sapien
tccttcgtttttgtaactgaaacagatttgcag

SEQ ID NO: 191050 - DNA, 33 bp, Homo sapien
tccttcgtttttgtaattgaaacagatttgcag

SEQ ID NO: 191051 - DNA, 33 bp, Homo sapien
gcccacaaaatcagaaaggtgcaggctcaactc

SEQ ID NO: 191052 - DNA, 33 bp, Homo sapien
gcccacaaaatcagaacggtgcaggctcaactc

SEQ ID NO: 191053 - DNA, 33 bp, Homo sapien
tgaaagaaatataagtaaatttgaggaagggtg

SEQ ID NO: 191054 - DNA, 33 bp, Homo sapien
tgaaagaaatataagtgaatttgaggaagggtg

SEQ ID NO: 191055 - DNA, 33 bp, Homo sapien
ctaaatgaacactagacgaagttatctgaatga

SEQ ID NO: 191056 - DNA, 33 bp, Homo sapien
ctaaatgaacactagatgaagttatctgaatga

SEQ ID NO: 191057 - DNA, 33 bp, Homo sapien
tgccaaagctgagaaaaaagtcctgggaagcta

SEQ ID NO: 191058 - DNA, 33 bp, Homo sapien
tgccaaagctgagaaacaagtcctgggaagcta

SEQ ID NO: 191059 - DNA, 33 bp, Homo sapien
catgttagttttcccaagaatgcttccatggca

SEQ ID NO: 191060 - DNA, 33 bp, Homo sapien
catgttagttttcccatgaatgcttccatggca

SEQ ID NO: 191061 - DNA, 33 bp, Homo sapien
aaattaacagaggttaaactgaggaagagaaat

SEQ ID NO: 191062 - DNA, 33 bp, Homo sapien
aaattaacagaggttacactgaggaagagaaat

SEQ ID NO: 191063 - DNA, 33 bp, Homo sapien
gagtactggaatgtaacggtgaacaagaacttg

SEQ ID NO: 191064 - DNA, 33 bp, Homo sapien
gagtactggaatgtaatggtgaacaagaacttg

SEQ ID NO: 191065 - DNA, 33 bp, Homo sapien
ttgaattctttgtccaatagtttgcatatctca

SEQ ID NO: 191066 - DNA, 33 bp, Homo sapien
ttgaattctttgtccagtagtttgcatatctca

SEQ ID NO: 191067 - DNA, 33 bp, Homo sapien
actgctgggatagaccaggaagttcagtctgca

SEQ ID NO: 191068 - DNA, 33 bp, Homo sapien
actgctgggatagacctggaagttcagtctgca

SEQ ID NO: 191069 - DNA, 33 bp, Homo sapien
gaagataacatcatacacggattctatggttct

SEQ ID NO: 191070 - DNA, 33 bp, Homo sapien
gaagataacatcatactcggattctatggttct

SEQ ID NO: 191071 - DNA, 33 bp, Homo sapien
tccacttcaacagcacactaatttcatcttgag

SEQ ID NO: 191072 - DNA, 33 bp, Homo sapien
tccacttcaacagcaccctaatttcatcttgag

SEQ ID NO: 191073 - DNA, 33 bp, Homo sapien
ctggtctagaaaaccacactgagaaaaggagca

SEQ ID NO: 191074 - DNA, 33 bp, Homo sapien
ctggtctagaaaaccatactgagaaaaggagca

SEQ ID NO: 191075 - DNA, 33 bp, Homo sapien
ttctttctttggtgaaatcatggtactgtattt

SEQ ID NO: 191076 - DNA, 33 bp, Homo sapien
ttctttctttggtgaattcatggtactgtattt

SEQ ID NO: 191077 - DNA, 33 bp, Homo sapien
aatgggaaagcattccacgttcatgaattggaa

SEQ ID NO: 191078 - DNA, 33 bp, Homo sapien
aatgggaaagcattccgcgttcatgaattggaa

SEQ ID NO: 191079 - DNA, 33 bp, Homo sapien
catcttttctttggaaactgaaagcattttaat

SEQ ID NO: 191080 - DNA, 33 bp, Homo sapien
catcttttctttggaacctgaaagcattttaat

SEQ ID NO: 191081 - DNA, 33 bp, Homo sapien
gagcaaacctgatttaccaaaccaagccaacct

SEQ ID NO: 191082 - DNA, 33 bp, Homo sapien
gagcaaacctgatttagcaaaccaagccaacct

SEQ ID NO: 191083 - DNA, 33 bp, Homo sapien
cagggaggcaccaaagaaagctccaagaagggg

SEQ ID NO: 191084 - DNA, 33 bp, Homo sapien
cagggaggcaccaaaggaagctccaagaagggg

SEQ ID NO: 191085 - DNA, 33 bp, Homo sapien
tctggctaacttctcactcttaatgtctccatt

SEQ ID NO: 191086 - DNA, 33 bp, Homo sapien
tctggctaacttctcattcttaatgtctccatt

SEQ ID NO: 191087 - DNA, 33 bp, Homo sapien
gcaaacatgactgcaacgtaaacagccagtact

SEQ ID NO: 191088 - DNA, 33 bp, Homo sapien
gcaaacatgactgcaatgtaaacagccagtact

SEQ ID NO: 191089 - DNA, 33 bp, Homo sapien
acttgcaactgaatcacatgaactaatgtctgt

SEQ ID NO: 191090 - DNA, 33 bp, Homo sapien
acttgcaactgaatcatatgaactaatgtctgt

SEQ ID NO: 191091 - DNA, 33 bp, Homo sapien
gaagctggccagaatcaatgtctgactggagct

SEQ ID NO: 191092 - DNA, 33 bp, Homo sapien
gaagctggccagaatcgatgtctgactggagct

SEQ ID NO: 191093 - DNA, 33 bp, Homo sapien
ttacctcacccactaaatgaggattgaattcaa

SEQ ID NO: 191094 - DNA, 33 bp, Homo sapien
ttacctcacccactaattgaggattgaattcaa

SEQ ID NO: 191095 - DNA, 33 bp, Homo sapien
agaacaatgtgaaacaagaagtgtctagagatg

SEQ ID NO: 191096 - DNA, 33 bp, Homo sapien
agaacaatgtgaaacaggaagtgtctagagatg

SEQ ID NO: 191097 - DNA, 33 bp, Homo sapien
ggaagtgcctctcagtaaccacccttggagaac

SEQ ID NO: 191098 - DNA, 33 bp, Homo sapien
ggaagtgcctctcagtgaccacccttggagaac

SEQ ID NO: 191099 - DNA, 33 bp, Homo sapien
acgtttcctgtgttcaaatggggagatagtggt

SEQ ID NO: 191100 - DNA, 33 bp, Homo sapien
acgtttcctgtgttcagatggggagatagtggt

SEQ ID NO: 191101 - DNA, 33 bp, Homo sapien
tggaaggggtaagagcccagcaaagctgtagaa

SEQ ID NO: 191102 - DNA, 33 bp, Homo sapien
tggaaggggtaagagctcagcaaagctgtagaa

SEQ ID NO: 191103 - DNA, 33 bp, Homo sapien
ctcatcgcagtctcagacctttagtgcttgcac

SEQ ID NO: 191104 - DNA, 33 bp, Homo sapien
ctcatcgcagtctcaggcctttagtgcttgcac

SEQ ID NO: 191105 - DNA, 33 bp, Homo sapien
tttaattgaattacctcaataaagatcctatct

SEQ ID NO: 191106 - DNA, 33 bp, Homo sapien
tttaattgaattacctgaataaagatcctatct

SEQ ID NO: 191107 - DNA, 33 bp, Homo sapien
taatgtactgttatttaaaaagttagttttctg

SEQ ID NO: 191108 - DNA, 33 bp, Homo sapien
taatgtactgttattttaaaagttagttttctg

SEQ ID NO: 191109 - DNA, 33 bp, Homo sapien
gacagcagaagaacataaggataccctgtactt

SEQ ID NO: 191110 - DNA, 33 bp, Homo sapien
gacagcagaagaacatgaggataccctgtactt

SEQ ID NO: 191111 - DNA, 33 bp, Homo sapien
caggtgctctcatttccatagtgcccagtgctc

SEQ ID NO: 191112 - DNA, 33 bp, Homo sapien
caggtgctctcatttctatagtgcccagtgctc

SEQ ID NO: 191113 - DNA, 33 bp, Homo sapien
cccatctaaaaagcccactgactagtccaccag

SEQ ID NO: 191114 - DNA, 33 bp, Homo sapien
cccatctaaaaagcccgctgactagtccaccag

SEQ ID NO: 191115 - DNA, 33 bp, Homo sapien
gtattacaagggtaaacccatcagtgttgcagt

SEQ ID NO: 191116 - DNA, 33 bp, Homo sapien
gtattacaagggtaaatccatcagtgttgcagt

SEQ ID NO: 191117 - DNA, 33 bp, Homo sapien
tgatatatcaaaagtacctatcagacaataaac

SEQ ID NO: 191118 - DNA, 33 bp, Homo sapien
tgatatatcaaaagtagctatcagacaataaac

SEQ ID NO: 191119 - DNA, 33 bp, Homo sapien
tgctttgtcttattaacgcagagaactttctgg

SEQ ID NO: 191120 - DNA, 33 bp, Homo sapien
tgctttgtcttattaatgcagagaactttctgg

SEQ ID NO: 191121 - DNA, 33 bp, Homo sapien
ggggtagaggctccaccgaattatttttaaatc

SEQ ID NO: 191122 - DNA, 33 bp, Homo sapien
ggggtagaggctccactgaattatttttaaatc

SEQ ID NO: 191123 - DNA, 33 bp, Homo sapien
agcacttttctccaaccatgcattactctaaat

SEQ ID NO: 191124 - DNA, 33 bp, Homo sapien
agcacttttctccaactatgcattactctaaat

SEQ ID NO: 191125 - DNA, 33 bp, Homo sapien
aatataggagggatggcccatcagagaaaatca

SEQ ID NO: 191126 - DNA, 33 bp, Homo sapien
aatataggagggatggtccatcagagaaaatca

SEQ ID NO: 191127 - DNA, 33 bp, Homo sapien
tggcaacacataagtcacagtgatactcattga

SEQ ID NO: 191128 - DNA, 33 bp, Homo sapien
tggcaacacataagtcgcagtgatactcattga

SEQ ID NO: 191129 - DNA, 33 bp, Homo sapien
tacctttaccatacagaagaagctgcacttgag

SEQ ID NO: 191130 - DNA, 33 bp, Homo sapien
tacctttaccatacaggagaagctgcacttgag

SEQ ID NO: 191131 - DNA, 33 bp, Homo sapien
ctatttggatgatgggaacactagaagcccaaa

SEQ ID NO: 191132 - DNA, 33 bp, Homo sapien
ctatttggatgatgggtacactagaagcccaaa

SEQ ID NO: 191133 - DNA, 33 bp, Homo sapien
actttgctgttgtacacggactagctaaacaca

SEQ ID NO: 191134 - DNA, 33 bp, Homo sapien
actttgctgttgtacatggactagctaaacaca

SEQ ID NO: 191135 - DNA, 33 bp, Homo sapien
tgaagaattatcccagacatcgtgagaacacaa

SEQ ID NO: 191136 - DNA, 33 bp, Homo sapien
tgaagaattatcccaggcatcgtgagaacacaa

SEQ ID NO: 191137 - DNA, 33 bp, Homo sapien
atcatgagtaggtcaggctagcccgggcagcaa

SEQ ID NO: 191138 - DNA, 33 bp, Homo sapien
atcatgagtaggtcagtctagcccgggcagcaa

SEQ ID NO: 191139 - DNA, 33 bp, Homo sapien
tcaaaagtccatgcaagtctgtagctttgaatg

SEQ ID NO: 191140 - DNA, 33 bp, Homo sapien
tcaaaagtccatgcaattctgtagctttgaatg

SEQ ID NO: 191141 - DNA, 33 bp, Homo sapien
cacacagctgactatcgcatttatttcaggttt

SEQ ID NO: 191142 - DNA, 33 bp, Homo sapien
cacacagctgactatctcatttatttcaggttt

SEQ ID NO: 191143 - DNA, 33 bp, Homo sapien
ttctagtttaattccaccatggtttgagagaag

SEQ ID NO: 191144 - DNA, 33 bp, Homo sapien
ttctagtttaattccatcatggtttgagagaag

SEQ ID NO: 191145 - DNA, 33 bp, Homo sapien
attagtagttgcctcacattaagcagggggcag

SEQ ID NO: 191146 - DNA, 33 bp, Homo sapien
attagtagttgcctcatattaagcagggggcag

SEQ ID NO: 191147 - DNA, 33 bp, Homo sapien
actccctgaaaggagacggcattgtctgttctc

SEQ ID NO: 191148 - DNA, 33 bp, Homo sapien
actccctgaaaggagatggcattgtctgttctc

SEQ ID NO: 191149 - DNA, 33 bp, Homo sapien
tttaatgctgtccctgaacttggctggtcatgg

SEQ ID NO: 191150 - DNA, 33 bp, Homo sapien
tttaatgctgtccctggacttggctggtcatgg

SEQ ID NO: 191151 - DNA, 33 bp, Homo sapien
catcatagaggaaagaacttttggtatccactt

SEQ ID NO: 191152 - DNA, 33 bp, Homo sapien
catcatagaggaaagagcttttggtatccactt

SEQ ID NO: 191153 - DNA, 33 bp, Homo sapien
ggaacaacgattgggaatattctaaccagattt

SEQ ID NO: 191154 - DNA, 33 bp, Homo sapien
ggaacaacgattgggattattctaaccagattt

SEQ ID NO: 191155 - DNA, 33 bp, Homo sapien
agagaggaggagacttcaaaacacctacagatc

SEQ ID NO: 191156 - DNA, 33 bp, Homo sapien
agagaggaggagactttaaaacacctacagatc

SEQ ID NO: 191157 - DNA, 33 bp, Homo sapien
ttgccacaataaagccacataacaaacattaaa

SEQ ID NO: 191158 - DNA, 33 bp, Homo sapien
ttgccacaataaagccgcataacaaacattaaa

SEQ ID NO: 191159 - DNA, 33 bp, Homo sapien
caatattaattgcgtacagctctgtgctaaggt

SEQ ID NO: 191160 - DNA, 33 bp, Homo sapien
caatattaattgcgtagagctctgtgctaaggt

SEQ ID NO: 191161 - DNA, 33 bp, Homo sapien
tggcccttggcaccacagccttttggtttattg

SEQ ID NO: 191162 - DNA, 33 bp, Homo sapien
tggcccttggcaccacggccttttggtttattg

SEQ ID NO: 191163 - DNA, 33 bp, Homo sapien
ttaacaaaatggctcaacttaggttcaaggcgg

SEQ ID NO: 191164 - DNA, 33 bp, Homo sapien
ttaacaaaatggctcaccttaggttcaaggcgg

SEQ ID NO: 191165 - DNA, 33 bp, Homo sapien
cttaccttacatttaaaagagaacatcaatgtt

SEQ ID NO: 191166 - DNA, 33 bp, Homo sapien
cttaccttacatttaagagagaacatcaatgtt

SEQ ID NO: 191167 - DNA, 33 bp, Homo sapien
atacaatattactgcccatgtgtactgtgataa

SEQ ID NO: 191168 - DNA, 33 bp, Homo sapien
atacaatattactgccgatgtgtactgtgataa

SEQ ID NO: 191169 - DNA, 33 bp, Homo sapien
cctttggaatatttcaactttatgtccactggg

SEQ ID NO: 191170 - DNA, 33 bp, Homo sapien
cctttggaatatttcatctttatgtccactggg

SEQ ID NO: 191171 - DNA, 33 bp, Homo sapien
atcagatctgagggaaatcttgaaaaatatgtg

SEQ ID NO: 191172 - DNA, 33 bp, Homo sapien
atcagatctgagggaagtcttgaaaaatatgtg

SEQ ID NO: 191173 - DNA, 33 bp, Homo sapien
tgggaagcaatttgaaaccaaacatgagttcta

SEQ ID NO: 191174 - DNA, 33 bp, Homo sapien
tgggaagcaatttgaagccaaacatgagttcta

SEQ ID NO: 191175 - DNA, 33 bp, Homo sapien
caatcatcaccaatctaacaaatttgacctgaa

SEQ ID NO: 191176 - DNA, 33 bp, Homo sapien
caatcatcaccaatctgacaaatttgacctgaa

SEQ ID NO: 191177 - DNA, 33 bp, Homo sapien
ctttagaatttttgaaaacagattcaggtcaaa

SEQ ID NO: 191178 - DNA, 33 bp, Homo sapien
ctttagaatttttgaagacagattcaggtcaaa

SEQ ID NO: 191179 - DNA, 33 bp, Homo sapien
cttgaaacgcaagttgaatttggaagtttggct

SEQ ID NO: 191180 - DNA, 33 bp, Homo sapien
cttgaaacgcaagttgcatttggaagtttggct

SEQ ID NO: 191181 - DNA, 33 bp, Homo sapien
cacggtcaggcttaaccgaacttagagagggcg

SEQ ID NO: 191182 - DNA, 33 bp, Homo sapien
cacggtcaggcttaactgaacttagagagggcg

SEQ ID NO: 191183 - DNA, 33 bp, Homo sapien
gagtatgtgtatttccaacttctattaggcaca

SEQ ID NO: 191184 - DNA, 33 bp, Homo sapien
gagtatgtgtatttccgacttctattaggcaca

SEQ ID NO: 191185 - DNA, 33 bp, Homo sapien
gcttctaatgatcctcacctactggtattcatg

SEQ ID NO: 191186 - DNA, 33 bp, Homo sapien
gcttctaatgatcctctcctactggtattcatg

SEQ ID NO: 191187 - DNA, 33 bp, Homo sapien
acatgcaatgagggaaaatgggttgacaaattt

SEQ ID NO: 191188 - DNA, 33 bp, Homo sapien
acatgcaatgagggaagatgggttgacaaattt

SEQ ID NO: 191189 - DNA, 33 bp, Homo sapien
actatggcagaagagcaagctggactagtacca

SEQ ID NO: 191190 - DNA, 33 bp, Homo sapien
actatggcagaagagcgagctggactagtacca

SEQ ID NO: 191191 - DNA, 33 bp, Homo sapien
gacaggcatgaacaagaaatcataatgagtggt

SEQ ID NO: 191192 - DNA, 33 bp, Homo sapien
gacaggcatgaacaagcaatcataatgagtggt

SEQ ID NO: 191193 - DNA, 33 bp, Homo sapien
ctcaattggttccacactcttttcccctacttg

SEQ ID NO: 191194 - DNA, 33 bp, Homo sapien
ctcaattggttccacagtcttttcccctacttg

SEQ ID NO: 191195 - DNA, 33 bp, Homo sapien
actaaggaaacttatacagagtgctgcagcaat

SEQ ID NO: 191196 - DNA, 33 bp, Homo sapien
actaaggaaacttatatagagtgctgcagcaat

SEQ ID NO: 191197 - DNA, 33 bp, Homo sapien
ggtttcagctggggaaggtgaaaaggctttgga

SEQ ID NO: 191198 - DNA, 33 bp, Homo sapien
ggtttcagctggggaatgtgaaaaggctttgga

SEQ ID NO: 191199 - DNA, 33 bp, Homo sapien
ttgcttactcccactacccttcccagaggtaac

SEQ ID NO: 191200 - DNA, 33 bp, Homo sapien
ttgcttactcccactatccttcccagaggtaac

SEQ ID NO: 191201 - DNA, 33 bp, Homo sapien
atcactcatacatgaaagcatctgtaagtaatc

SEQ ID NO: 191202 - DNA, 33 bp, Homo sapien
atcactcatacatgaatgcatctgtaagtaatc

SEQ ID NO: 191203 - DNA, 33 bp, Homo sapien
agaagcaatactacaaataggtaaggaaaaaaa

SEQ ID NO: 191204 - DNA, 33 bp, Homo sapien
agaagcaatactacaactaggtaaggaaaaaaa

SEQ ID NO: 191205 - DNA, 33 bp, Homo sapien
ggatgttaaatctcataaattgtctggcttgag

SEQ ID NO: 191206 - DNA, 33 bp, Homo sapien
ggatgttaaatctcatgaattgtctggcttgag

SEQ ID NO: 191207 - DNA, 33 bp, Homo sapien
tctttgatagtctccaaaactaaactccaaagt

SEQ ID NO: 191208 - DNA, 33 bp, Homo sapien
tctttgatagtctccacaactaaactccaaagt

SEQ ID NO: 191209 - DNA, 33 bp, Homo sapien
caccattatgatataccggccttttctctgatg

SEQ ID NO: 191210 - DNA, 33 bp, Homo sapien
caccattatgatatactggccttttctctgatg

SEQ ID NO: 191211 - DNA, 33 bp, Homo sapien
agctgatatagttaaaagcaaatagattgtaaa

SEQ ID NO: 191212 - DNA, 33 bp, Homo sapien
agctgatatagttaaaggcaaatagattgtaaa

SEQ ID NO: 191213 - DNA, 33 bp, Homo sapien
tggccttggtaagaaaactggccttcatctttg

SEQ ID NO: 191214 - DNA, 33 bp, Homo sapien
tggccttggtaagaaagctggccttcatctttg

SEQ ID NO: 191215 - DNA, 33 bp, Homo sapien
tagtttctcaagcaagacaaggtaatgcacagg

SEQ ID NO: 191216 - DNA, 33 bp, Homo sapien
tagtttctcaagcaagccaaggtaatgcacagg

SEQ ID NO: 191217 - DNA, 33 bp, Homo sapien
actgttttctcttacccctgcagtcctcatacc

SEQ ID NO: 191218 - DNA, 33 bp, Homo sapien
actgttttctcttacctctgcagtcctcatacc

SEQ ID NO: 191219 - DNA, 33 bp, Homo sapien
ctcaaatgtgaatctaagtgtgtggaagtctac

SEQ ID NO: 191220 - DNA, 33 bp, Homo sapien
ctcaaatgtgaatctaggtgtgtggaagtctac

SEQ ID NO: 191221 - DNA, 33 bp, Homo sapien
tcaagtttgaaccccaataagcatcatgaatat

SEQ ID NO: 191222 - DNA, 33 bp, Homo sapien
tcaagtttgaaccccagtaagcatcatgaatat

SEQ ID NO: 191223 - DNA, 33 bp, Homo sapien
ttttcgaaatggtagacgaacactgaactcaaa

SEQ ID NO: 191224 - DNA, 33 bp, Homo sapien
ttttcgaaatggtagatgaacactgaactcaaa

SEQ ID NO: 191225 - DNA, 33 bp, Homo sapien
agtaaagtgaatatcacaatagggcaagtgatg

SEQ ID NO: 191226 - DNA, 33 bp, Homo sapien
agtaaagtgaatatcataatagggcaagtgatg

SEQ ID NO: 191227 - DNA, 33 bp, Homo sapien
tgctataacaaaactcaaagcatctaacaattc

SEQ ID NO: 191228 - DNA, 33 bp, Homo sapien
tgctataacaaaactcgaagcatctaacaattc

SEQ ID NO: 191229 - DNA, 33 bp, Homo sapien
gggtttcatttgcagaccttctagactatctct

SEQ ID NO: 191230 - DNA, 33 bp, Homo sapien
gggtttcatttgcagagcttctagactatctct

SEQ ID NO: 191231 - DNA, 33 bp, Homo sapien
gaaagtactgttgaaaacgttagacattctcct

SEQ ID NO: 191232 - DNA, 33 bp, Homo sapien
gaaagtactgttgaaagcgttagacattctcct

SEQ ID NO: 191233 - DNA, 33 bp, Homo sapien
aagttcatacagcttcacaaagattagatataa

SEQ ID NO: 191234 - DNA, 33 bp, Homo sapien
aagttcatacagcttcccaaagattagatataa

SEQ ID NO: 191235 - DNA, 33 bp, Homo sapien
agtttgctatattctaagatgtacttgcataag

SEQ ID NO: 191236 - DNA, 33 bp, Homo sapien
agtttgctatattctacgatgtacttgcataag

SEQ ID NO: 191237 - DNA, 33 bp, Homo sapien
tcatctaagttaccaacgcaaccatttgccaac

SEQ ID NO: 191238 - DNA, 33 bp, Homo sapien
tcatctaagttaccaaggcaaccatttgccaac

SEQ ID NO: 191239 - DNA, 33 bp, Homo sapien
ggactcacttgagatacaccaatcttccttatt

SEQ ID NO: 191240 - DNA, 33 bp, Homo sapien
ggactcacttgagatataccaatcttccttatt

SEQ ID NO: 191241 - DNA, 33 bp, Homo sapien
attaacatggaaaaacaaaaggccagcaataag

SEQ ID NO: 191242 - DNA, 33 bp, Homo sapien
attaacatggaaaaaccaaaggccagcaataag

SEQ ID NO: 191243 - DNA, 33 bp, Homo sapien
agttctgtgaaaaaaaactttggagaatttgat

SEQ ID NO: 191244 - DNA, 33 bp, Homo sapien
agttctgtgaaaaaaacctttggagaatttgat

SEQ ID NO: 191245 - DNA, 33 bp, Homo sapien
tctttagttttgtgcaaaatttgtatatgtcca

SEQ ID NO: 191246 - DNA, 33 bp, Homo sapien
tctttagttttgtgcagaatttgtatatgtcca

SEQ ID NO: 191247 - DNA, 33 bp, Homo sapien
atactggatgcagagaaaaggacaagaaaggtt

SEQ ID NO: 191248 - DNA, 33 bp, Homo sapien
atactggatgcagagagaaggacaagaaaggtt

SEQ ID NO: 191249 - DNA, 33 bp, Homo sapien
taatataatgaatagcagaattcttcaagcata

SEQ ID NO: 191250 - DNA, 33 bp, Homo sapien
taatataatgaatagctgaattcttcaagcata

SEQ ID NO: 191251 - DNA, 33 bp, Homo sapien
acatacacctcatgaaatggactgctgcaggtg

SEQ ID NO: 191252 - DNA, 33 bp, Homo sapien
acatacacctcatgaagtggactgctgcaggtg

SEQ ID NO: 191253 - DNA, 33 bp, Homo sapien
gcctctttggagcaccccgtttgacatcagaag

SEQ ID NO: 191254 - DNA, 33 bp, Homo sapien
gcctctttggagcacctcgtttgacatcagaag

SEQ ID NO: 191255 - DNA, 33 bp, Homo sapien
atccaagcataaggacacaagtctaccaagacc

SEQ ID NO: 191256 - DNA, 33 bp, Homo sapien
atccaagcataaggacgcaagtctaccaagacc

SEQ ID NO: 191257 - DNA, 33 bp, Homo sapien
aaatagtggcttctcacgcaatgacacagaacg

SEQ ID NO: 191258 - DNA, 33 bp, Homo sapien
aaatagtggcttctcatgcaatgacacagaacg

SEQ ID NO: 191259 - DNA, 33 bp, Homo sapien
taccgtaagaacctacagagccgacctggacag

SEQ ID NO: 191260 - DNA, 33 bp, Homo sapien
taccgtaagaacctacggagccgacctggacag

SEQ ID NO: 191261 - DNA, 33 bp, Homo sapien
agaactcagtgaggaacagagcactgaaagaat

SEQ ID NO: 191262 - DNA, 33 bp, Homo sapien
agaactcagtgaggaagagagcactgaaagaat

SEQ ID NO: 191263 - DNA, 33 bp, Homo sapien
gagtgaggactactgaactccacagattccttg

SEQ ID NO: 191264 - DNA, 33 bp, Homo sapien
gagtgaggactactgagctccacagattccttg

SEQ ID NO: 191265 - DNA, 33 bp, Homo sapien
tctgtatcttgcacaccggtggtcttccagggg

SEQ ID NO: 191266 - DNA, 33 bp, Homo sapien
tctgtatcttgcacactggtggtcttccagggg

SEQ ID NO: 191267 - DNA, 33 bp, Homo sapien
ggtgcctaagaggtcacatgttcctcctggtgt

SEQ ID NO: 191268 - DNA, 33 bp, Homo sapien
ggtgcctaagaggtcatatgttcctcctggtgt

SEQ ID NO: 191269 - DNA, 33 bp, Homo sapien
gcatcccaatgataaacacacactgcagtcttt

SEQ ID NO: 191270 - DNA, 33 bp, Homo sapien
gcatcccaatgataaagacacactgcagtcttt

SEQ ID NO: 191271 - DNA, 33 bp, Homo sapien
gcacaatgtcatcttaaacctatcaaatcggca

SEQ ID NO: 191272 - DNA, 33 bp, Homo sapien
gcacaatgtcatcttacacctatcaaatcggca

SEQ ID NO: 191273 - DNA, 33 bp, Homo sapien
agtaactattgacttcgacatagtttctttgag

SEQ ID NO: 191274 - DNA, 33 bp, Homo sapien
agtaactattgacttctacatagtttctttgag

SEQ ID NO: 191275 - DNA, 33 bp, Homo sapien
gtgtcaggatcagaccgcagtggcagcgactgg

SEQ ID NO: 191276 - DNA, 33 bp, Homo sapien
gtgtcaggatcagacctcagtggcagcgactgg

SEQ ID NO: 191277 - DNA, 33 bp, Homo sapien
tctgttattgatggacacttaaattaccgctat

SEQ ID NO: 191278 - DNA, 33 bp, Homo sapien
tctgttattgatggacgcttaaattaccgctat

SEQ ID NO: 191279 - DNA, 33 bp, Homo sapien
aagagtactaaaaaaaataccactatctgacaa

SEQ ID NO: 191280 - DNA, 33 bp, Homo sapien
aagagtactaaaaaaactaccactatctgacaa

SEQ ID NO: 191281 - DNA, 33 bp, Homo sapien
ttgcttctcaagtcaccaaagtcgattatatta

SEQ ID NO: 191282 - DNA, 33 bp, Homo sapien
ttgcttctcaagtcacgaaagtcgattatatta

SEQ ID NO: 191283 - DNA, 33 bp, Homo sapien
aacaattttagccatacaaaaacgtgcaaaaat

SEQ ID NO: 191284 - DNA, 33 bp, Homo sapien
aacaattttagccatataaaaacgtgcaaaaat

SEQ ID NO: 191285 - DNA, 33 bp, Homo sapien
gctttagaatttttcaaagtagcatataaacgt

SEQ ID NO: 191286 - DNA, 33 bp, Homo sapien
gctttagaatttttcagagtagcatataaacgt

SEQ ID NO: 191287 - DNA, 33 bp, Homo sapien
ggaagccaaggtaaaagaatactttgatgaaga

SEQ ID NO: 191288 - DNA, 33 bp, Homo sapien
ggaagccaaggtaaaataatactttgatgaaga

SEQ ID NO: 191289 - DNA, 33 bp, Homo sapien
gtcatcccgtcatcccaaagtgaagcaaagagg

SEQ ID NO: 191290 - DNA, 33 bp, Homo sapien
gtcatcccgtcatccctaagtgaagcaaagagg

SEQ ID NO: 191291 - DNA, 33 bp, Homo sapien
gtgttacagcttttaaagtggcacgtctggagt

SEQ ID NO: 191292 - DNA, 33 bp, Homo sapien
gtgttacagcttttaaggtggcacgtctggagt

SEQ ID NO: 191293 - DNA, 33 bp, Homo sapien
tgtacaaagctatcgaatcataaactagtggat

SEQ ID NO: 191294 - DNA, 33 bp, Homo sapien
tgtacaaagctatcgagtcataaactagtggat

SEQ ID NO: 191295 - DNA, 33 bp, Homo sapien
agcctggttggattggcagtttgtaaagtgcac

SEQ ID NO: 191296 - DNA, 33 bp, Homo sapien
agcctggttggattggtagtttgtaaagtgcac

SEQ ID NO: 191297 - DNA, 33 bp, Homo sapien
ttcttctgtcggttggaagtggtagttcatgcc

SEQ ID NO: 191298 - DNA, 33 bp, Homo sapien
ttcttctgtcggttgggagtggtagttcatgcc

SEQ ID NO: 191299 - DNA, 33 bp, Homo sapien
atgcttctttaggtcaaagtctctgtgattctt

SEQ ID NO: 191300 - DNA, 33 bp, Homo sapien
atgcttctttaggtcagagtctctgtgattctt

SEQ ID NO: 191301 - DNA, 33 bp, Homo sapien
tgatcagctgaattagaagaggttccatttggt

SEQ ID NO: 191302 - DNA, 33 bp, Homo sapien
tgatcagctgaattagtagaggttccatttggt

SEQ ID NO: 191303 - DNA, 33 bp, Homo sapien
tgctcactgaattaggcaatagtattgatttta

SEQ ID NO: 191304 - DNA, 33 bp, Homo sapien
tgctcactgaattaggtaatagtattgatttta

SEQ ID NO: 191305 - DNA, 33 bp, Homo sapien
agaaacataattgagaaacaaaaaagaataatg

SEQ ID NO: 191306 - DNA, 33 bp, Homo sapien
agaaacataattgagagacaaaaaagaataatg

SEQ ID NO: 191307 - DNA, 33 bp, Homo sapien
aaaacccattctaacactgacaacacaataaag

SEQ ID NO: 191308 - DNA, 33 bp, Homo sapien
aaaacccattctaacattgacaacacaataaag

SEQ ID NO: 191309 - DNA, 33 bp, Homo sapien
tacccttgattcaccaaataaccatctccacgg

SEQ ID NO: 191310 - DNA, 33 bp, Homo sapien
tacccttgattcaccagataaccatctccacgg

SEQ ID NO: 191311 - DNA, 33 bp, Homo sapien
agagttaatgatcaccaaaaagtcttcctacac

SEQ ID NO: 191312 - DNA, 33 bp, Homo sapien
agagttaatgatcaccgaaaagtcttcctacac

SEQ ID NO: 191313 - DNA, 33 bp, Homo sapien; identical to SEQ ID NO: 191311

SEQ ID NO: 191314 - DNA, 33 bp, Homo sapien; identical to SEQ ID NO: 191312

SEQ ID NO: 191315 - DNA, 33 bp, Homo sapien
tgagagtaaattcttacagagctgtgtctggtg

SEQ ID NO: 191316 - DNA, 33 bp, Homo sapien
tgagagtaaattcttatagagctgtgtctggtg

SEQ ID NO: 191317 - DNA, 33 bp, Homo sapien
caaactgaacctgaaagaatgcaaatggttcaa

SEQ ID NO: 191318 - DNA, 33 bp, Homo sapien
caaactgaacctgaaataatgcaaatggttcaa

SEQ ID NO: 191319 - DNA, 33 bp, Homo sapien
tgcactgaataagatacgaagccatttgagtac

SEQ ID NO: 191320 - DNA, 33 bp, Homo sapien
tgcactgaataagatatgaagccatttgagtac

SEQ ID NO: 191321 - DNA, 33 bp, Homo sapien
cattaatatgtagagcagcattaaggtataaca

SEQ ID NO: 191322 - DNA, 33 bp, Homo sapien
cattaatatgtagagcggcattaaggtataaca

SEQ ID NO: 191323 - DNA, 33 bp, Homo sapien
actggtggtaggtagaactgatagaagggtatg

SEQ ID NO: 191324 - DNA, 33 bp, Homo sapien
actggtggtaggtagagctgatagaagggtatg

SEQ ID NO: 191325 - DNA, 33 bp, Homo sapien
ccttttcatacgtgaaatcagaggtactgcatc

SEQ ID NO: 191326 - DNA, 33 bp, Homo sapien
ccttttcatacgtgaattcagaggtactgcatc

SEQ ID NO: 191327 - DNA, 33 bp, Homo sapien
gtatcccgttgctaaacaatgaggtcatgcttt

SEQ ID NO: 191328 - DNA, 33 bp, Homo sapien
gtatcccgttgctaaataatgaggtcatgcttt

SEQ ID NO: 191329 - DNA, 33 bp, Homo sapien
cagttggcacctgggcaacccagtatccagaac

SEQ ID NO: 191330 - DNA, 33 bp, Homo sapien
cagttggcacctgggcgacccagtatccagaac

SEQ ID NO: 191331 - DNA, 33 bp, Homo sapien
atattttgtttctgcacggcaacttcagccgct

SEQ ID NO: 191332 - DNA, 33 bp, Homo sapien
atattttgtttctgcatggcaacttcagccgct

SEQ ID NO: 191333 - DNA, 33 bp, Homo sapien
gtagttacggtagttacagcacaagtctcatta

SEQ ID NO: 191334 - DNA, 33 bp, Homo sapien
gtagttacggtagttatagcacaagtctcatta

SEQ ID NO: 191335 - DNA, 33 bp, Homo sapien
agccataactatctcgaaagttatcaagtccag

SEQ ID NO: 191336 - DNA, 33 bp, Homo sapien
agccataactatctcggaagttatcaagtccag

SEQ ID NO: 191337 - DNA, 33 bp, Homo sapien
cttcagcatcacatgaaacatccatttaacaaa

SEQ ID NO: 191338 - DNA, 33 bp, Homo sapien
cttcagcatcacatgatacatccatttaacaaa

SEQ ID NO: 191339 - DNA, 33 bp, Homo sapien
gtaaatcacatatccaatgaaaggacttgtatc

SEQ ID NO: 191340 - DNA, 33 bp, Homo sapien
gtaaatcacatatccagtgaaaggacttgtatc

SEQ ID NO: 191341 - DNA, 33 bp, Homo sapien
tttagagaaacttcacaatggtgtttttttgtt

SEQ ID NO: 191342 - DNA, 33 bp, Homo sapien
tttagagaaacttcacgatggtgtttttttgtt

SEQ ID NO: 191343 - DNA, 33 bp, Homo sapien
gattacccatgcaaaccggtggcagggagcaat

SEQ ID NO: 191344 - DNA, 33 bp, Homo sapien
gattacccatgcaaactggtggcagggagcaat

SEQ ID NO: 191345 - DNA, 33 bp, Homo sapien
aaataagaagtgttcaataagaaagtgtggagt

SEQ ID NO: 191346 - DNA, 33 bp, Homo sapien
aaataagaagtgttcagtaagaaagtgtggagt

SEQ ID NO: 191347 - DNA, 33 bp, Homo sapien
taatcaagagtacgcactaagtcaaagttacct

SEQ ID NO: 191348 - DNA, 33 bp, Homo sapien
taatcaagagtacgcagtaagtcaaagttacct

SEQ ID NO: 191349 - DNA, 33 bp, Homo sapien
tcaaaaaattagatcacactgtcaaaaagtgtg

SEQ ID NO: 191350 - DNA, 33 bp, Homo sapien
tcaaaaaattagatcagactgtcaaaaagtgtg

SEQ ID NO: 191351 - DNA, 33 bp, Homo sapien
ttagtaataaaacttacaagtgcatagccatta

SEQ ID NO: 191352 - DNA, 33 bp, Homo sapien
ttagtaataaaacttagaagtgcatagccatta

SEQ ID NO: 191353 - DNA, 33 bp, Homo sapien
gatgtctcctcctcaaacaaatcatagtcccca

SEQ ID NO: 191354 - DNA, 33 bp, Homo sapien
gatgtctcctcctcaatcaaatcatagtcccca

SEQ ID NO: 191355 - DNA, 33 bp, Homo sapien
ttgtgttccctgaatacgtcatgctgtttcata

SEQ ID NO: 191356 - DNA, 33 bp, Homo sapien
ttgtgttccctgaatatgtcatgctgtttcata

SEQ ID NO: 191357 - DNA, 33 bp, Homo sapien
ggaagctttagcaacactaactgggcattatga

SEQ ID NO: 191358 - DNA, 33 bp, Homo sapien
ggaagctttagcaacattaactgggcattatga

SEQ ID NO: 191359 - DNA, 33 bp, Homo sapien
tggtgaagtttggctacagtcattatcataatt

SEQ ID NO: 191360 - DNA, 33 bp, Homo sapien
tggtgaagtttggctatagtcattatcataatt

SEQ ID NO: 191361 - DNA, 33 bp, Homo sapien
agaagctagggtcaaaacgttgtcagtgtgaca

SEQ ID NO: 191362 - DNA, 33 bp, Homo sapien
agaagctagggtcaaagcgttgtcagtgtgaca

SEQ ID NO: 191363 - DNA, 33 bp, Homo sapien
gtagagttaatagatacaagcatgatctgcaaa

SEQ ID NO: 191364 - DNA, 33 bp, Homo sapien
gtagagttaatagatataagcatgatctgcaaa

SEQ ID NO: 191365 - DNA, 33 bp, Homo sapien
cttatattatttaggccgccgtgttggaaatgt

SEQ ID NO: 191366 - DNA, 33 bp, Homo sapien
cttatattatttaggctgccgtgttggaaatgt

SEQ ID NO: 191367 - DNA, 33 bp, Homo sapien
tgaggctgttgtattcaaaaccaattatttcat

SEQ ID NO: 191368 - DNA, 33 bp, Homo sapien
tgaggctgttgtattcgaaaccaattatttcat

SEQ ID NO: 191369 - DNA, 33 bp, Homo sapien
tggatgaaatggtccaacgaaggctacaagtga

SEQ ID NO: 191370 - DNA, 33 bp, Homo sapien
tggatgaaatggtccagcgaaggctacaagtga

SEQ ID NO: 191371 - DNA, 33 bp, Homo sapien
cgagctggagttagcccgaattggtttctgtcc

SEQ ID NO: 191372 - DNA, 33 bp, Homo sapien
cgagctggagttagcctgaattggtttctgtcc

SEQ ID NO: 191373 - DNA, 33 bp, Homo sapien
tgaggagctcaggttccaagtttccaagtgacg

SEQ ID NO: 191374 - DNA, 33 bp, Homo sapien
tgaggagctcaggttcgaagtttccaagtgacg

SEQ ID NO: 191375 - DNA, 33 bp, Homo sapien
acgtgcctcccattccagctatatttacatctt

SEQ ID NO: 191376 - DNA, 33 bp, Homo sapien
acgtgcctcccattccggctatatttacatctt

SEQ ID NO: 191377 - DNA, 33 bp, Homo sapien
ttggagccaaggttaaaatgaaaacaagcagtg

SEQ ID NO: 191378 - DNA, 33 bp, Homo sapien
ttggagccaaggttaagatgaaaacaagcagtg

SEQ ID NO: 191379 - DNA, 33 bp, Homo sapien
gtcttttggattcacactatgagcgataatagg

SEQ ID NO: 191380 - DNA, 33 bp, Homo sapien
gtcttttggattcacagtatgagcgataatagg

SEQ ID NO: 191381 - DNA, 33 bp, Homo sapien
gcccacctctaaatctcagacaaagtcacttac

SEQ ID NO: 191382 - DNA, 33 bp, Homo sapien
gcccacctctaaatctgagacaaagtcacttac

SEQ ID NO: 191383 - DNA, 33 bp, Homo sapien
aaacagcccatcaaaggcatcttaaagtcttaa

SEQ ID NO: 191384 - DNA, 33 bp, Homo sapien
aaacagcccatcaaagtcatcttaaagtcttaa

SEQ ID NO: 191385 - DNA, 33 bp, Homo sapien
gttggacttccctcagaatagggcatgcgctgt

SEQ ID NO: 191386 - DNA, 33 bp, Homo sapien
gttggacttccctcaggatagggcatgcgctgt

SEQ ID NO: 191387 - DNA, 33 bp, Homo sapien
ccgaatttttctaagccacaactttctgctgct

SEQ ID NO: 191388 - DNA, 33 bp, Homo sapien
ccgaatttttctaagctacaactttctgctgct

SEQ ID NO: 191389 - DNA, 33 bp, Homo sapien
agagctgagaagacaacataaaccactctcatt

SEQ ID NO: 191390 - DNA, 33 bp, Homo sapien
agagctgagaagacaatataaaccactctcatt

SEQ ID NO: 191391 - DNA, 33 bp, Homo sapien
tgtgccactaaatagaccacagaaaggacactt

SEQ ID NO: 191392 - DNA, 33 bp, Homo sapien
tgtgccactaaatagatcacagaaaggacactt

SEQ ID NO: 191393 - DNA, 33 bp, Homo sapien
atcctgggcagggtaacggtcatgtagttatgt

SEQ ID NO: 191394 - DNA, 33 bp, Homo sapien
atcctgggcagggtaatggtcatgtagttatgt

SEQ ID NO: 191395 - DNA, 33 bp, Homo sapien
caaagtctaccagctgacagcggactccagaga

SEQ ID NO: 191396 - DNA, 33 bp, Homo sapien
caaagtctaccagctgccagcggactccagaga

SEQ ID NO: 191397 - DNA, 33 bp, Homo sapien
agtatacatcttgcttaaactccttctgcaata

SEQ ID NO: 191398 - DNA, 33 bp, Homo sapien
agtatacatcttgcttgaactccttctgcaata

SEQ ID NO: 191399 - DNA, 33 bp, Homo sapien
tggaacatatgtgaaaaacatccatagactttg

SEQ ID NO: 191400 - DNA, 33 bp, Homo sapien
tggaacatatgtgaaacacatccatagactttg

SEQ ID NO: 191401 - DNA, 33 bp, Homo sapien
atggaactacctcacaagtttttagctgattta

SEQ ID NO: 191402 - DNA, 33 bp, Homo sapien
atggaactacctcacaggtttttagctgattta

SEQ ID NO: 191403 - DNA, 33 bp, Homo sapien
gtatttattagatgaccattgctccttttttta

SEQ ID NO: 191404 - DNA, 33 bp, Homo sapien
gtatttattagatgactattgctccttttttta

SEQ ID NO: 191405 - DNA, 33 bp, Homo sapien
tgtcctttctcaattaaacaaatgctgttaaaa

SEQ ID NO: 191406 - DNA, 33 bp, Homo sapien
tgtcctttctcaattacacaaatgctgttaaaa

SEQ ID NO: 191407 - DNA, 33 bp, Homo sapien
tcttattaaaggttgggattggtcctgtcatgt

SEQ ID NO: 191408 - DNA, 33 bp, Homo sapien
tcttattaaaggttggtattggtcctgtcatgt

SEQ ID NO: 191409 - DNA, 33 bp, Homo sapien
acatgatatctaagtaacaagttgtgtgttgcc

SEQ ID NO: 191410 - DNA, 33 bp, Homo sapien
acatgatatctaagtagcaagttgtgtgttgcc

SEQ ID NO: 191411 - DNA, 33 bp, Homo sapien
gttcattgagatgttacgagttattatctttca

SEQ ID NO: 191412 - DNA, 33 bp, Homo sapien
gttcattgagatgttatgagttattatctttca

SEQ ID NO: 191413 - DNA, 33 bp, Homo sapien
atgaacttttcctcaacggtttgatggatcaaa

SEQ ID NO: 191414 - DNA, 33 bp, Homo sapien
atgaacttttcctcaatggtttgatggatcaaa

SEQ ID NO: 191415 - DNA, 33 bp, Homo sapien
tgtgccaaaaaagaagcattagctcatttttcc

SEQ ID NO: 191416 - DNA, 33 bp, Homo sapien
tgtgccaaaaaagaagtattagctcatttttcc

SEQ ID NO: 191417 - DNA, 33 bp, Homo sapien
tcttgttgtttttttaacagctgaacactagaa

SEQ ID NO: 191418 - DNA, 33 bp, Homo sapien
tcttgttgtttttttagcagctgaacactagaa

SEQ ID NO: 191419 - DNA, 33 bp, Homo sapien
aacttgataagctaatcatctgggcttaccctt

SEQ ID NO: 191420 - DNA, 33 bp, Homo sapien
aacttgataagctaatgatctgggcttaccctt

SEQ ID NO: 191421 - DNA, 33 bp, Homo sapien
aagtagttttgaaatcaaaggaaggaatggttt

SEQ ID NO: 191422 - DNA, 33 bp, Homo sapien
aagtagttttgaaatccaaggaaggaatggttt

SEQ ID NO: 191423 - DNA, 33 bp, Homo sapien
catgtagatgctgtaaatgaagtcagtctcttt

SEQ ID NO: 191424 - DNA, 33 bp, Homo sapien
catgtagatgctgtaagtgaagtcagtctcttt

SEQ ID NO: 191425 - DNA, 33 bp, Homo sapien
accccaagcacctggcacggtatcctgcacata

SEQ ID NO: 191426 - DNA, 33 bp, Homo sapien
accccaagcacctggcgcggtatcctgcacata

SEQ ID NO: 191427 - DNA, 33 bp, Homo sapien
gtatttagatagcagtcaatgattcttgtgtgc

SEQ ID NO: 191428 - DNA, 33 bp, Homo sapien
gtatttagatagcagtgaatgattcttgtgtgc

SEQ ID NO: 191429 - DNA, 33 bp, Homo sapien
gccctgctgcccaataccagcagaattcactga

SEQ ID NO: 191430 - DNA, 33 bp, Homo sapien
gccctgctgcccaatatcagcagaattcactga

SEQ ID NO: 191431 - DNA, 33 bp, Homo sapien
tctgaggattaaaaaaatcatcctgtgttcttg

SEQ ID NO: 191432 - DNA, 33 bp, Homo sapien
tctgaggattaaaaaagtcatcctgtgttcttg

SEQ ID NO: 191433 - DNA, 33 bp, Homo sapien
tggtaacaggagaagacgcaaaaatagtaaaat

SEQ ID NO: 191434 - DNA, 33 bp, Homo sapien
tggtaacaggagaagatgcaaaaatagtaaaat

SEQ ID NO: 191435 - DNA, 33 bp, Homo sapien
agaactaagtagagaaatagcgtttagttatgc

SEQ ID NO: 191436 - DNA, 33 bp, Homo sapien
agaactaagtagagaagtagcgtttagttatgc

SEQ ID NO: 191437 - DNA, 33 bp, Homo sapien
ctttccttctgagaaccattaatccaaatcagg

SEQ ID NO: 191438 - DNA, 33 bp, Homo sapien
ctttccttctgagaacgattaatccaaatcagg

SEQ ID NO: 191439 - DNA, 33 bp, Homo sapien
atgatcttctgtttaacgtagatgttaatgtcc

SEQ ID NO: 191440 - DNA, 33 bp, Homo sapien
atgatcttctgtttaatgtagatgttaatgtcc

SEQ ID NO: 191441 - DNA, 33 bp, Homo sapien
tgttaggcatcatccaaactgaatccaaggaca

SEQ ID NO: 191442 - DNA, 33 bp, Homo sapien
tgttaggcatcatccacactgaatccaaggaca

SEQ ID NO: 191443 - DNA, 33 bp, Homo sapien
gcagccacaatagttacaattatgcaatgtact

SEQ ID NO: 191444 - DNA, 33 bp, Homo sapien
gcagccacaatagttagaattatgcaatgtact

SEQ ID NO: 191445 - DNA, 33 bp, Homo sapien
aagtaatgcataatacaataggctgatttgatc

SEQ ID NO: 191446 - DNA, 33 bp, Homo sapien
aagtaatgcataatacgataggctgatttgatc

SEQ ID NO: 191447 - DNA, 33 bp, Homo sapien
agcggtcctgcaggatcaaagtagactaaagca

SEQ ID NO: 191448 - DNA, 33 bp, Homo sapien
agcggtcctgcaggatgaaagtagactaaagca

SEQ ID NO: 191449 - DNA, 33 bp, Homo sapien
cttcagacacttaagcacaaccacctggctcta

SEQ ID NO: 191450 - DNA, 33 bp, Homo sapien
cttcagacacttaagcgcaaccacctggctcta

SEQ ID NO: 191451 - DNA, 33 bp, Homo sapien
aagaacactccatttaccaaagcaataaccaat

SEQ ID NO: 191452 - DNA, 33 bp, Homo sapien
aagaacactccatttatcaaagcaataaccaat

SEQ ID NO: 191453 - DNA, 33 bp, Homo sapien
accaacaggctcaagaccctggctcgacaggaa

SEQ ID NO: 191454 - DNA, 33 bp, Homo sapien
accaacaggctcaagatcctggctcgacaggaa

SEQ ID NO: 191455 - DNA, 33 bp, Homo sapien
atgaagccactgcaaaaagtgatgtaccaaaat

SEQ ID NO: 191456 - DNA, 33 bp, Homo sapien
atgaagccactgcaaagagtgatgtaccaaaat

SEQ ID NO: 191457 - DNA, 33 bp, Homo sapien
gtggtcagatttatgcctgtagaaaaaacaatc

SEQ ID NO: 191458 - DNA, 33 bp, Homo sapien
gtggtcagatttatgcttgtagaaaaaacaatc

SEQ ID NO: 191459 - DNA, 33 bp, Homo sapien
aataccctcgagagcacacattatgtaaaataa

SEQ ID NO: 191460 - DNA, 33 bp, Homo sapien
aataccctcgagagcatacattatgtaaaataa

SEQ ID NO: 191461 - DNA, 33 bp, Homo sapien
cttaatggtggaattcaaagtacctgtaaatct

SEQ ID NO: 191462 - DNA, 33 bp, Homo sapien
cttaatggtggaattcgaagtacctgtaaatct

SEQ ID NO: 191463 - DNA, 33 bp, Homo sapien
taaaggctgggctgaaaatgccaagtagagatg

SEQ ID NO: 191464 - DNA, 33 bp, Homo sapien
taaaggctgggctgaatatgccaagtagagatg

SEQ ID NO: 191465 - DNA, 33 bp, Homo sapien
atgataatttacacaaagccaactgttaatgaa

SEQ ID NO: 191466 - DNA, 33 bp, Homo sapien
atgataatttacacaatgccaactgttaatgaa

SEQ ID NO: 191467 - DNA, 33 bp, Homo sapien
gaaaattcaaagagaaagttccattccagcaaa

SEQ ID NO: 191468 - DNA, 33 bp, Homo sapien
gaaaattcaaagagaaggttccattccagcaaa

SEQ ID NO: 191469 - DNA, 33 bp, Homo sapien
ttctaagtgctgagaacgaggaagtgagcaaga

SEQ ID NO: 191470 - DNA, 33 bp, Homo sapien
ttctaagtgctgagaatgaggaagtgagcaaga

SEQ ID NO: 191471 - DNA, 33 bp, Homo sapien
gagagattgtctggcaatgatggtaataatgct

SEQ ID NO: 191472 - DNA, 33 bp, Homo sapien
gagagattgtctggcagtgatggtaataatgct

SEQ ID NO: 191473 - DNA, 33 bp, Homo sapien
gagggcttaagcagaaagtgtagagcttataaa

SEQ ID NO: 191474 - DNA, 33 bp, Homo sapien
gagggcttaagcagaaggtgtagagcttataaa

SEQ ID NO: 191475 - DNA, 33 bp, Homo sapien
agtgacacctgttataaggtgatacagtccact

SEQ ID NO: 191476 - DNA, 33 bp, Homo sapien
agtgacacctgttatacggtgatacagtccact

SEQ ID NO: 191477 - DNA, 33 bp, Homo sapien
ataagtgtcttctctccacattcagttattcag

SEQ ID NO: 191478 - DNA, 33 bp, Homo sapien
ataagtgtcttctctctacattcagttattcag

SEQ ID NO: 191479 - DNA, 33 bp, Homo sapien
gatgctatttgtgactcactgaattggttttat

SEQ ID NO: 191480 - DNA, 33 bp, Homo sapien
gatgctatttgtgacttactgaattggttttat

SEQ ID NO: 191481 - DNA, 33 bp, Homo sapien
taaacctattatttcacgtttggatactttggt

SEQ ID NO: 191482 - DNA, 33 bp, Homo sapien
taaacctattatttcatgtttggatactttggt

SEQ ID NO: 191483 - DNA, 33 bp, Homo sapien
ccagaggaactatagaaataattcctgatgcca

SEQ ID NO: 191484 - DNA, 33 bp, Homo sapien
ccagaggaactatagacataattcctgatgcca

SEQ ID NO: 191485 - DNA, 33 bp, Homo sapien
tgccacgtcttggtgcacttctccaagccaact

SEQ ID NO: 191486 - DNA, 33 bp, Homo sapien
tgccacgtcttggtgcgcttctccaagccaact

SEQ ID NO: 191487 - DNA, 33 bp, Homo sapien
caacaatatactcagacactgaagacaaggacc

SEQ ID NO: 191488 - DNA, 33 bp, Homo sapien
caacaatatactcagagactgaagacaaggacc

SEQ ID NO: 191489 - DNA, 33 bp, Homo sapien
ggggatgtaattcaacacatagtaggcaggtgt

SEQ ID NO: 191490 - DNA, 33 bp, Homo sapien
ggggatgtaattcaacccatagtaggcaggtgt

SEQ ID NO: 191491 - DNA, 33 bp, Homo sapien
gttctttaagccacccaagcagactattatatt

SEQ ID NO: 191492 - DNA, 33 bp, Homo sapien
gttctttaagccacccgagcagactattatatt

SEQ ID NO: 191493 - DNA, 33 bp, Homo sapien
tacagagtgaatcacacgtagtggttagttctc

SEQ ID NO: 191494 - DNA, 33 bp, Homo sapien
tacagagtgaatcacaggtagtggttagttctc

SEQ ID NO: 191495 - DNA, 33 bp, Homo sapien
tccatcaatagacgaacggataaacaaaacatg

SEQ ID NO: 191496 - DNA, 33 bp, Homo sapien
tccatcaatagacgaatggataaacaaaacatg

SEQ ID NO: 191497 - DNA, 33 bp, Homo sapien
tcaaaatgcataaaaacctaaacttgagaacta

SEQ ID NO: 191498 - DNA, 33 bp, Homo sapien
tcaaaatgcataaaaatctaaacttgagaacta

SEQ ID NO: 191499 - DNA, 33 bp, Homo sapien
gccttgtaataagtaccgaaattgggaagtgtg

SEQ ID NO: 191500 - DNA, 33 bp, Homo sapien
gccttgtaataagtactgaaattgggaagtgtg

SEQ ID NO: 191501 - DNA, 33 bp, Homo sapien
catgtataatattcaccgtaactagactgtaag

SEQ ID NO: 191502 - DNA, 33 bp, Homo sapien
catgtataatattcactgtaactagactgtaag

SEQ ID NO: 191503 - DNA, 33 bp, Homo sapien
ttgtttaaatatcacacgtaagatgggccaaaa

SEQ ID NO: 191504 - DNA, 33 bp, Homo sapien
ttgtttaaatatcacatgtaagatgggccaaaa

SEQ ID NO: 191505 - DNA, 33 bp, Homo sapien
tcctcaactcttttgaccctcacttttctccag

SEQ ID NO: 191506 - DNA, 33 bp, Homo sapien
tcctcaactcttttgatcctcacttttctccag

SEQ ID NO: 191507 - DNA, 33 bp, Homo sapien
tggtgggagagacctacgcagctccacccacaa

SEQ ID NO: 191508 - DNA, 33 bp, Homo sapien
tggtgggagagacctatgcagctccacccacaa

SEQ ID NO: 191509 - DNA, 33 bp, Homo sapien
ttcttccaagagcccacaacacttaatccagca

SEQ ID NO: 191510 - DNA, 33 bp, Homo sapien
ttcttccaagagcccataacacttaatccagca

SEQ ID NO: 191511 - DNA, 33 bp, Homo sapien
aggagggatgcagaataatcctttcagacaact

SEQ ID NO: 191512 - DNA, 33 bp, Homo sapien
aggagggatgcagaatgatcctttcagacaact

SEQ ID NO: 191513 - DNA, 33 bp, Homo sapien
gtttccataagtaaaaagagcttacatatcttt

SEQ ID NO: 191514 - DNA, 33 bp, Homo sapien
gtttccataagtaaaaggagcttacatatcttt

SEQ ID NO: 191515 - DNA, 33 bp, Homo sapien
cagtcagagaaaacaaatgaaagttccccaagt

SEQ ID NO: 191516 - DNA, 33 bp, Homo sapien
cagtcagagaaaacaactgaaagttccccaagt

SEQ ID NO: 191517 - DNA, 33 bp, Homo sapien
ctgggtgcctcaacagcccttgtttattcctat

SEQ ID NO: 191518 - DNA, 33 bp, Homo sapien
ctgggtgcctcaacagtccttgtttattcctat

SEQ ID NO: 191519 - DNA, 33 bp, Homo sapien
cagtgctaaataaaaacgagtcctggatttcaa

SEQ ID NO: 191520 - DNA, 33 bp, Homo sapien
cagtgctaaataaaaatgagtcctggatttcaa

SEQ ID NO: 191521 - DNA, 33 bp, Homo sapien
acatatgtattagtccaacggagagaaaaatgg

SEQ ID NO: 191522 - DNA, 33 bp, Homo sapien
acatatgtattagtccgacggagagaaaaatgg

SEQ ID NO: 191523 - DNA, 33 bp, Homo sapien
ggcagaagtgatgtcaacagacgttccctcaaa

SEQ ID NO: 191524 - DNA, 33 bp, Homo sapien
ggcagaagtgatgtcagcagacgttccctcaaa

SEQ ID NO: 191525 - DNA, 33 bp, Homo sapien
gataatctaacccaaaccattactttactgatg

SEQ ID NO: 191526 - DNA, 33 bp, Homo sapien
gataatctaacccaaatcattactttactgatg

SEQ ID NO: 191527 - DNA, 33 bp, Homo sapien
cttaacaaataatcaaatgcagctttagttctt

SEQ ID NO: 191528 - DNA, 33 bp, Homo sapien
cttaacaaataatcaattgcagctttagttctt

SEQ ID NO: 191529 - DNA, 33 bp, Homo sapien
gtaaaaatgtcgaaaacttgcagctaagaataa

SEQ ID NO: 191530 - DNA, 33 bp, Homo sapien
gtaaaaatgtcgaaaatttgcagctaagaataa

SEQ ID NO: 191531 - DNA, 33 bp, Homo sapien
gatatgtcaataggtacgcctaggaaaggcctc

SEQ ID NO: 191532 - DNA, 33 bp, Homo sapien
gatatgtcaataggtatgcctaggaaaggcctc

SEQ ID NO: 191533 - DNA, 33 bp, Homo sapien
agaggaaggtcttaaacgaatagcttcttgggt

SEQ ID NO: 191534 - DNA, 33 bp, Homo sapien
agaggaaggtcttaaaggaatagcttcttgggt

SEQ ID NO: 191535 - DNA, 33 bp, Homo sapien
gcaattctcctagtaacctcaagtccaaaaatc

SEQ ID NO: 191536 - DNA, 33 bp, Homo sapien
gcaattctcctagtaagctcaagtccaaaaatc

SEQ ID NO: 191537 - DNA, 33 bp, Homo sapien
gatgtcgtgtgaaaaggctataaaacaaaatta

SEQ ID NO: 191538 - DNA, 33 bp, Homo sapien
gatgtcgtgtgaaaagtctataaaacaaaatta

SEQ ID NO: 191539 - DNA, 33 bp, Homo sapien
taacctaaaacaaagggccttgattccttataa

SEQ ID NO: 191540 - DNA, 33 bp, Homo sapien
taacctaaaacaaaggtccttgattccttataa

SEQ ID NO: 191541 - DNA, 33 bp, Homo sapien
gtttgatgaataagcaagtaaagaagcaaagga

SEQ ID NO: 191542 - DNA, 33 bp, Homo sapien
gtttgatgaataagcaggtaaagaagcaaagga

SEQ ID NO: 191543 - DNA, 33 bp, Homo sapien
tttattgtcacataaaggtatctctctgagaca

SEQ ID NO: 191544 - DNA, 33 bp, Homo sapien
tttattgtcacataaatgtatctctctgagaca

SEQ ID NO: 191545 - DNA, 33 bp, Homo sapien
tcaagatcagttctaacgggcccaaccaagatc

SEQ ID NO: 191546 - DNA, 33 bp, Homo sapien
tcaagatcagttctaatgggcccaaccaagatc

SEQ ID NO: 191547 - DNA, 33 bp, Homo sapien
agtgtgtttcatttgaagattgagggaaagtgg

SEQ ID NO: 191548 - DNA, 33 bp, Homo sapien
agtgtgtttcatttgaggattgagggaaagtgg

SEQ ID NO: 191549 - DNA, 33 bp, Homo sapien
ttgagttcttgggccaccatcatttttcttaaa

SEQ ID NO: 191550 - DNA, 33 bp, Homo sapien
ttgagttcttgggccatcatcatttttcttaaa

SEQ ID NO: 191551 - DNA, 33 bp, Homo sapien
tgaccccaatcatatcacagttgtccctatgac

SEQ ID NO: 191552 - DNA, 33 bp, Homo sapien
tgaccccaatcatatctcagttgtccctatgac

SEQ ID NO: 191553 - DNA, 33 bp, Homo sapien
accacatgctcacctaactgcataccccattag

SEQ ID NO: 191554 - DNA, 33 bp, Homo sapien
accacatgctcacctatctgcataccccattag

SEQ ID NO: 191555 - DNA, 33 bp, Homo sapien
aagaaaagaagagatacggaggagagatttggg

SEQ ID NO: 191556 - DNA, 33 bp, Homo sapien
aagaaaagaagagatatggaggagagatttggg

SEQ ID NO: 191557 - DNA, 33 bp, Homo sapien
cagacctcactcaaggaacctgtcaggatcagt

SEQ ID NO: 191558 - DNA, 33 bp, Homo sapien
cagacctcactcaagggacctgtcaggatcagt

SEQ ID NO: 191559 - DNA, 33 bp, Homo sapien
ccaattagcaagcctcgcagcagcgcttaatta

SEQ ID NO: 191560 - DNA, 33 bp, Homo sapien
ccaattagcaagcctctcagcagcgcttaatta

SEQ ID NO: 191561 - DNA, 33 bp, Homo sapien
aaatatttccattacaagcaactttcttgtgtg

SEQ ID NO: 191562 - DNA, 33 bp, Homo sapien
aaatatttccattacaggcaactttcttgtgtg

SEQ ID NO: 191563 - DNA, 33 bp, Homo sapien
tctcagctacttctataaaatggggaaataata

SEQ ID NO: 191564 - DNA, 33 bp, Homo sapien
tctcagctacttctatgaaatggggaaataata

SEQ ID NO: 191565 - DNA, 33 bp, Homo sapien
aacacgtcaggccatacgtaagtttttcttcta

SEQ ID NO: 191566 - DNA, 33 bp, Homo sapien
aacacgtcaggccataggtaagtttttcttcta

SEQ ID NO: 191567 - DNA, 33 bp, Homo sapien
cataagccctgtaccaatgggtaacttgtggtt

SEQ ID NO: 191568 - DNA, 33 bp, Homo sapien
cataagccctgtaccagtgggtaacttgtggtt

SEQ ID NO: 191569 - DNA, 33 bp, Homo sapien
atattagatttacggtaaaactggagattctga

SEQ ID NO: 191570 - DNA, 33 bp, Homo sapien
atattagatttacggttaaactggagattctga

SEQ ID NO: 191571 - DNA, 33 bp, Homo sapien
tgttataactcaaaaacttagtgcaacttatct

SEQ ID NO: 191572 - DNA, 33 bp, Homo sapien
tgttataactcaaaaatttagtgcaacttatct

SEQ ID NO: 191573 - DNA, 33 bp, Homo sapien
ttctctaataaacctgaaaattaattgccatct

SEQ ID NO: 191574 - DNA, 33 bp, Homo sapien
ttctctaataaacctgcaaattaattgccatct

SEQ ID NO: 191575 - DNA, 33 bp, Homo sapien
taggatggaacattgcaagaaaactggcctgac

SEQ ID NO: 191576 - DNA, 33 bp, Homo sapien
taggatggaacattgcgagaaaactggcctgac

SEQ ID NO: 191577 - DNA, 33 bp, Homo sapien
agacactaatagtaaccacaataatagcttcct

SEQ ID NO: 191578 - DNA, 33 bp, Homo sapien
agacactaatagtaactacaataatagcttcct

SEQ ID NO: 191579 - DNA, 33 bp, Homo sapien
gtatcttaggattaccaaaataatatatgtggt

SEQ ID NO: 191580 - DNA, 33 bp, Homo sapien
gtatcttaggattaccgaaataatatatgtggt

SEQ ID NO: 191581 - DNA, 33 bp, Homo sapien
acacgggtagagtggtcacataatttatcatct

SEQ ID NO: 191582 - DNA, 33 bp, Homo sapien
acacgggtagagtggtgacataatttatcatct

SEQ ID NO: 191583 - DNA, 33 bp, Homo sapien
ttacataatcctggaaatgactatgaggtgaga

SEQ ID NO: 191584 - DNA, 33 bp, Homo sapien
ttacataatcctggaagtgactatgaggtgaga

SEQ ID NO: 191585 - DNA, 33 bp, Homo sapien
gggtaagctactgctacctatttctgaggttat

SEQ ID NO: 191586 - DNA, 33 bp, Homo sapien
gggtaagctactgctatctatttctgaggttat

SEQ ID NO: 191587 - DNA, 33 bp, Homo sapien
tccaattccatgcccccgcaaccccagtttcta

SEQ ID NO: 191588 - DNA, 33 bp, Homo sapien
tccaattccatgccccggcaaccccagtttcta

SEQ ID NO: 191589 - DNA, 33 bp, Homo sapien
caaataataaccaccaacaaaaatctcatttta

SEQ ID NO: 191590 - DNA, 33 bp, Homo sapien
caaataataaccaccaccaaaaatctcatttta

SEQ ID NO: 191591 - DNA, 33 bp, Homo sapien
tgatgcagaagcatgtaaattttggaggccatg

SEQ ID NO: 191592 - DNA, 33 bp, Homo sapien
tgatgcagaagcatgtgaattttggaggccatg

SEQ ID NO: 191593 - DNA, 33 bp, Homo sapien
gaggcattttttttaacaggcactactatacca

SEQ ID NO: 191594 - DNA, 33 bp, Homo sapien
gaggcattttttttaagaggcactactatacca

SEQ ID NO: 191595 - DNA, 33 bp, Homo sapien
taccacaatagccatggatatattcattcattt

SEQ ID NO: 191596 - DNA, 33 bp, Homo sapien
taccacaatagccatgtatatattcattcattt

SEQ ID NO: 191597 - DNA, 33 bp, Homo sapien
cagcacccaaacttacaactctgattctaaaat

SEQ ID NO: 191598 - DNA, 33 bp, Homo sapien
cagcacccaaacttacgactctgattctaaaat

SEQ ID NO: 191599 - DNA, 33 bp, Homo sapien
tttttggaactctgtgaaaaatatgctatgtgt

SEQ ID NO: 191600 - DNA, 33 bp, Homo sapien
tttttggaactctgtgcaaaatatgctatgtgt

SEQ ID NO: 191601 - DNA, 33 bp, Homo sapien
gagttccaaaaagttcacggacttcaggttaaa

SEQ ID NO: 191602 - DNA, 33 bp, Homo sapien
gagttccaaaaagttctcggacttcaggttaaa

SEQ ID NO: 191603 - DNA, 33 bp, Homo sapien
cacccgacctaaaagcgccacttgatactgatc

SEQ ID NO: 191604 - DNA, 33 bp, Homo sapien
cacccgacctaaaagctccacttgatactgatc

SEQ ID NO: 191605 - DNA, 33 bp, Homo sapien
ctatagtacatcagtcaccacaacaaatatcaa

SEQ ID NO: 191606 - DNA, 33 bp, Homo sapien
ctatagtacatcagtccccacaacaaatatcaa

SEQ ID NO: 191607 - DNA, 33 bp, Homo sapien
agaaacttaagcagaagtgggctgtggatttag

SEQ ID NO: 191608 - DNA, 33 bp, Homo sapien
agaaacttaagcagaattgggctgtggatttag

SEQ ID NO: 191609 - DNA, 33 bp, Homo sapien
tgccttttgtcaacaactgtttagtggctctgc

SEQ ID NO: 191610 - DNA, 33 bp, Homo sapien
tgccttttgtcaacaattgtttagtggctctgc

SEQ ID NO: 191611 - DNA, 33 bp, Homo sapien
cagctcctactcacaacgtccaggcccattttt

SEQ ID NO: 191612 - DNA, 33 bp, Homo sapien
cagctcctactcacaatgtccaggcccattttt

SEQ ID NO: 191613 - DNA, 33 bp, Homo sapien
ttcatgtgaaagagaaaaaaaggtgggtggtag

SEQ ID NO: 191614 - DNA, 33 bp, Homo sapien
ttcatgtgaaagagaataaaaggtgggtggtag

SEQ ID NO: 191615 - DNA, 33 bp, Homo sapien
aaattaaagaggatcacattgtcagacatattt

SEQ ID NO: 191616 - DNA, 33 bp, Homo sapien
aaattaaagaggatcatattgtcagacatattt

SEQ ID NO: 191617 - DNA, 33 bp, Homo sapien
actctctttctggagacggaggacttacaggca

SEQ ID NO: 191618 - DNA, 33 bp, Homo sapien
actctctttctggagatggaggacttacaggca

SEQ ID NO: 191619 - DNA, 33 bp, Homo sapien
cacagggtgaccatgcactctgtggcttccctg

SEQ ID NO: 191620 - DNA, 33 bp, Homo sapien
cacagggtgaccatgcgctctgtggcttccctg

SEQ ID NO: 191621 - DNA, 33 bp, Homo sapien
accacagcgtgggtcaaagagcaataactctgg

SEQ ID NO: 191622 - DNA, 33 bp, Homo sapien
accacagcgtgggtcagagagcaataactctgg

SEQ ID NO: 191623 - DNA, 33 bp, Homo sapien
agacaaaacctgccaaaagtgaaaatccatcct

SEQ ID NO: 191624 - DNA, 33 bp, Homo sapien
agacaaaacctgccaagagtgaaaatccatcct

SEQ ID NO: 191625 - DNA, 33 bp, Homo sapien
cctatgttatcaataacggcttaaacctgcaca

SEQ ID NO: 191626 - DNA, 33 bp, Homo sapien
cctatgttatcaataatggcttaaacctgcaca

SEQ ID NO: 191627 - DNA, 33 bp, Homo sapien
taaaaaagtaaaacaactctcatttggcaaatg

SEQ ID NO: 191628 - DNA, 33 bp, Homo sapien
taaaaaagtaaaacaagtctcatttggcaaatg

SEQ ID NO: 191629 - DNA, 33 bp, Homo sapien
aacctatttgatagtaagaaggccaagattcag

SEQ ID NO: 191630 - DNA, 33 bp, Homo sapien
aacctatttgatagtacgaaggccaagattcag

SEQ ID NO: 191631 - DNA, 33 bp, Homo sapien
agcttcaaaaattagaaaagactcttctgataa

SEQ ID NO: 191632 - DNA, 33 bp, Homo sapien
agcttcaaaaattagagaagactcttctgataa

SEQ ID NO: 191633 - DNA, 33 bp, Homo sapien
tactgaagagacagaaattaatgagagatccca

SEQ ID NO: 191634 - DNA, 33 bp, Homo sapien
tactgaagagacagaagttaatgagagatccca

SEQ ID NO: 191635 - DNA, 33 bp, Homo sapien
gtttaagtcgtaattcaccattttcatttcagc

SEQ ID NO: 191636 - DNA, 33 bp, Homo sapien
gtttaagtcgtaattctccattttcatttcagc

SEQ ID NO: 191637 - DNA, 33 bp, Homo sapien
atattagtcctttgtcagaaaaataatttgcaa

SEQ ID NO: 191638 - DNA, 33 bp, Homo sapien
atattagtcctttgtcggaaaaataatttgcaa

SEQ ID NO: 191639 - DNA, 33 bp, Homo sapien
ttagaatactcccacagtcacattattgaagaa

SEQ ID NO: 191640 - DNA, 33 bp, Homo sapien
ttagaatactcccacattcacattattgaagaa

SEQ ID NO: 191641 - DNA, 33 bp, Homo sapien
ttactctgccaatagcccagtctctacaatgag

SEQ ID NO: 191642 - DNA, 33 bp, Homo sapien
ttactctgccaatagcgcagtctctacaatgag

SEQ ID NO: 191643 - DNA, 33 bp, Homo sapien
gatcactgagatgggaactctgccctcaatgag

SEQ ID NO: 191644 - DNA, 33 bp, Homo sapien
gatcactgagatgggacctctgccctcaatgag

SEQ ID NO: 191645 - DNA, 33 bp, Homo sapien
aggtaatatactaggcacaagaacacatgacct

SEQ ID NO: 191646 - DNA, 33 bp, Homo sapien
aggtaatatactaggcgcaagaacacatgacct

SEQ ID NO: 191647 - DNA, 33 bp, Homo sapien
gctttgaacttcacacacttttagctgatgcac

SEQ ID NO: 191648 - DNA, 33 bp, Homo sapien
gctttgaacttcacacgcttttagctgatgcac

SEQ ID NO: 191649 - DNA, 33 bp, Homo sapien
acacacacacaaataacacagcttttctcacca

SEQ ID NO: 191650 - DNA, 33 bp, Homo sapien
acacacacacaaataagacagcttttctcacca

SEQ ID NO: 191651 - DNA, 33 bp, Homo sapien
cccagaatttccaaaacgtgtttgatttcagag

SEQ ID NO: 191652 - DNA, 33 bp, Homo sapien
cccagaatttccaaaatgtgtttgatttcagag

SEQ ID NO: 191653 - DNA, 33 bp, Homo sapien
gtaatcaagggaattgaattttggttctgacaa

SEQ ID NO: 191654 - DNA, 33 bp, Homo sapien
gtaatcaagggaattggattttggttctgacaa

SEQ ID NO: 191655 - DNA, 33 bp, Homo sapien
ttcaggtttaagatgaacaagttcttgggttct

SEQ ID NO: 191656 - DNA, 33 bp, Homo sapien
ttcaggtttaagatgatcaagttcttgggttct

SEQ ID NO: 191657 - DNA, 33 bp, Homo sapien
gacaatgcatttgaaaaccaagtgtgattcata

SEQ ID NO: 191658 - DNA, 33 bp, Homo sapien
gacaatgcatttgaaacccaagtgtgattcata

SEQ ID NO: 191659 - DNA, 33 bp, Homo sapien
ttgcaatgtaagaaaactgagtgaagtgaagaa

SEQ ID NO: 191660 - DNA, 33 bp, Homo sapien
ttgcaatgtaagaaaattgagtgaagtgaagaa

SEQ ID NO: 191661 - DNA, 33 bp, Homo sapien
tagcatggatacaaacaatcagaagagatccat

SEQ ID NO: 191662 - DNA, 33 bp, Homo sapien
tagcatggatacaaaccatcagaagagatccat

SEQ ID NO: 191663 - DNA, 33 bp, Homo sapien
ctttgaaggatagtccagaacaaaggatattaa

SEQ ID NO: 191664 - DNA, 33 bp, Homo sapien
ctttgaaggatagtcccgaacaaaggatattaa

SEQ ID NO: 191665 - DNA, 33 bp, Homo sapien
aagaggaactgatgcacatatactcatgttcat

SEQ ID NO: 191666 - DNA, 33 bp, Homo sapien
aagaggaactgatgcatatatactcatgttcat

SEQ ID NO: 191667 - DNA, 33 bp, Homo sapien
ggcctaagtgagaacactaacatgtattatgct

SEQ ID NO: 191668 - DNA, 33 bp, Homo sapien
ggcctaagtgagaacagtaacatgtattatgct

SEQ ID NO: 191669 - DNA, 33 bp, Homo sapien
gatgctgtgcacaccccatgtcttcatctccag

SEQ ID NO: 191670 - DNA, 33 bp, Homo sapien
gatgctgtgcacaccctatgtcttcatctccag

SEQ ID NO: 191671 - DNA, 33 bp, Homo sapien
ggatgtagtgaaaatcacaaggtttgcctaagg

SEQ ID NO: 191672 - DNA, 33 bp, Homo sapien
ggatgtagtgaaaatcgcaaggtttgcctaagg

SEQ ID NO: 191673 - DNA, 33 bp, Homo sapien
aatgtcagtacttttacgctcaggagttagtga

SEQ ID NO: 191674 - DNA, 33 bp, Homo sapien
aatgtcagtacttttatgctcaggagttagtga

SEQ ID NO: 191675 - DNA, 33 bp, Homo sapien
aggcttactgttctaacctagtggtaaaggtat

SEQ ID NO: 191676 - DNA, 33 bp, Homo sapien
aggcttactgttctaatctagtggtaaaggtat

SEQ ID NO: 191677 - DNA, 33 bp, Homo sapien
agtccctgaatctgtaacgcagcttgatttccc

SEQ ID NO: 191678 - DNA, 33 bp, Homo sapien
agtccctgaatctgtatcgcagcttgatttccc

SEQ ID NO: 191679 - DNA, 33 bp, Homo sapien
accagaaacgagaaccccaaactcatgccactt

SEQ ID NO: 191680 - DNA, 33 bp, Homo sapien
accagaaacgagaaccgcaaactcatgccactt

SEQ ID NO: 191681 - DNA, 33 bp, Homo sapien
ttctcatccaattttcacacccagttcctgcct

SEQ ID NO: 191682 - DNA, 33 bp, Homo sapien
ttctcatccaattttcccacccagttcctgcct

SEQ ID NO: 191683 - DNA, 33 bp, Homo sapien
cttttggcagaagctgaactagtgacaagatga

SEQ ID NO: 191684 - DNA, 33 bp, Homo sapien
cttttggcagaagctggactagtgacaagatga

SEQ ID NO: 191685 - DNA, 33 bp, Homo sapien
ttggttgaggagcaaaaacctggattaatttct

SEQ ID NO: 191686 - DNA, 33 bp, Homo sapien
ttggttgaggagcaaacacctggattaatttct

SEQ ID NO: 191687 - DNA, 33 bp, Homo sapien
caaaaacagaaaaaaacccacagtgagctctgt

SEQ ID NO: 191688 - DNA, 33 bp, Homo sapien
caaaaacagaaaaaaatccacagtgagctctgt

SEQ ID NO: 191689 - DNA, 33 bp, Homo sapien
tcactcctctttaataaggttacgtgtccaccc

SEQ ID NO: 191690 - DNA, 33 bp, Homo sapien
tcactcctctttaatagggttacgtgtccaccc

SEQ ID NO: 191691 - DNA, 33 bp, Homo sapien
tcattcaatcagatcacgttaaattattcatcc

SEQ ID NO: 191692 - DNA, 33 bp, Homo sapien
tcattcaatcagatcaggttaaattattcatcc

SEQ ID NO: 191693 - DNA, 33 bp, Homo sapien
aagaattgaacctgcaactctcagtccatgtca

SEQ ID NO: 191694 - DNA, 33 bp, Homo sapien
aagaattgaacctgcagctctcagtccatgtca

SEQ ID NO: 191695 - DNA, 33 bp, Homo sapien
caagcaagtgggtgaaaactgtcattatcccca

SEQ ID NO: 191696 - DNA, 33 bp, Homo sapien
caagcaagtgggtgaagactgtcattatcccca

SEQ ID NO: 191697 - DNA, 33 bp, Homo sapien
cttaatgttcttccaaccctctatttaatcact

SEQ ID NO: 191698 - DNA, 33 bp, Homo sapien
cttaatgttcttccaatcctctatttaatcact

SEQ ID NO: 191699 - DNA, 33 bp, Homo sapien
ctcgtgctagtgagtgcattcttgaggacttga

SEQ ID NO: 191700 - DNA, 33 bp, Homo sapien
ctcgtgctagtgagtgtattcttgaggacttga

SEQ ID NO: 191701 - DNA, 33 bp, Homo sapien
ggaaacagacttagaactgaatgccagtcatcc

SEQ ID NO: 191702 - DNA, 33 bp, Homo sapien
ggaaacagacttagaattgaatgccagtcatcc

SEQ ID NO: 191703 - DNA, 33 bp, Homo sapien
gtcagctcttgtaaccaatgtgacagtgccttt

SEQ ID NO: 191704 - DNA, 33 bp, Homo sapien
gtcagctcttgtaaccgatgtgacagtgccttt

SEQ ID NO: 191705 - DNA, 33 bp, Homo sapien
tcctattgcaccacgaataataacctggagttc

SEQ ID NO: 191706 - DNA, 33 bp, Homo sapien
tcctattgcaccacgagtaataacctggagttc

SEQ ID NO: 191707 - DNA, 33 bp, Homo sapien
tctatacggtgaaataatatgaaatgtttcaca

SEQ ID NO: 191708 - DNA, 33 bp, Homo sapien
tctatacggtgaaatagtatgaaatgtttcaca

SEQ ID NO: 191709 - DNA, 33 bp, Homo sapien
ggattgctgacatccaatatggactcccctgtt

SEQ ID NO: 191710 - DNA, 33 bp, Homo sapien
ggattgctgacatccagtatggactcccctgtt

SEQ ID NO: 191711 - DNA, 33 bp, Homo sapien
gaaataagtcatttcaaaggctgcagcttccct

SEQ ID NO: 191712 - DNA, 33 bp, Homo sapien
gaaataagtcatttcagaggctgcagcttccct

SEQ ID NO: 191713 - DNA, 33 bp, Homo sapien
tccttctcactcctacaactccacaaatggcag

SEQ ID NO: 191714 - DNA, 33 bp, Homo sapien
tccttctcactcctacgactccacaaatggcag

SEQ ID NO: 191715 - DNA, 33 bp, Homo sapien
aattcagaaacactaaataggtcaacataggaa

SEQ ID NO: 191716 - DNA, 33 bp, Homo sapien
aattcagaaacactaagtaggtcaacataggaa

SEQ ID NO: 191717 - DNA, 33 bp, Homo sapien
ggagactatttggctacgaaaagaggagctgct

SEQ ID NO: 191718 - DNA, 33 bp, Homo sapien
ggagactatttggctatgaaaagaggagctgct

SEQ ID NO: 191719 - DNA, 33 bp, Homo sapien
acagcatccagaatgaccttgtctaaatctaac

SEQ ID NO: 191720 - DNA, 33 bp, Homo sapien
acagcatccagaatgagcttgtctaaatctaac

SEQ ID NO: 191721 - DNA, 33 bp, Homo sapien
ctcccaagatgcttccagaaatcaagcacgctg

SEQ ID NO: 191722 - DNA, 33 bp, Homo sapien
ctcccaagatgcttccggaaatcaagcacgctg

SEQ ID NO: 191723 - DNA, 33 bp, Homo sapien
aatgatttattttcaccctgagcatgatgtttt

SEQ ID NO: 191724 - DNA, 33 bp, Homo sapien
aatgatttattttcactctgagcatgatgtttt

SEQ ID NO: 191725 - DNA, 33 bp, Homo sapien
aaacttacacccaacggagaatccacattgatg

SEQ ID NO: 191726 - DNA, 33 bp, Homo sapien
aaacttacacccaacgtagaatccacattgatg

SEQ ID NO: 191727 - DNA, 33 bp, Homo sapien
atgacatccagtagtaagattagtgatgattaa

SEQ ID NO: 191728 - DNA, 33 bp, Homo sapien
atgacatccagtagtaggattagtgatgattaa

SEQ ID NO: 191729 - DNA, 33 bp, Homo sapien
gtgaagctaatggctacacttaacagcagtcag

SEQ ID NO: 191730 - DNA, 33 bp, Homo sapien
gtgaagctaatggctatacttaacagcagtcag

SEQ ID NO: 191731 - DNA, 33 bp, Homo sapien
ctaagtgtttaggtgacaggcaaaagtcccaga

SEQ ID NO: 191732 - DNA, 33 bp, Homo sapien
ctaagtgtttaggtgataggcaaaagtcccaga

SEQ ID NO: 191733 - DNA, 33 bp, Homo sapien
atctgaatgagccacacgtatgcaatgacttac

SEQ ID NO: 191734 - DNA, 33 bp, Homo sapien
atctgaatgagccacaggtatgcaatgacttac

SEQ ID NO: 191735 - DNA, 33 bp, Homo sapien
aagaaatggaatgagaaatttcccaacctttga

SEQ ID NO: 191736 - DNA, 33 bp, Homo sapien
aagaaatggaatgagagatttcccaacctttga

SEQ ID NO: 191737 - DNA, 33 bp, Homo sapien
agaacttcgaaaacaaggtggtgttttattgtc

SEQ ID NO: 191738 - DNA, 33 bp, Homo sapien
agaacttcgaaaacaatgtggtgttttattgtc

SEQ ID NO: 191739 - DNA, 33 bp, Homo sapien
taaacaatttaattgcagatccccagcaattta

SEQ ID NO: 191740 - DNA, 33 bp, Homo sapien
taaacaatttaattgcggatccccagcaattta

SEQ ID NO: 191741 - DNA, 33 bp, Homo sapien
tactgccattaacatgaattgataaacttcaac

SEQ ID NO: 191742 - DNA, 33 bp, Homo sapien
tactgccattaacatgcattgataaacttcaac

SEQ ID NO: 191743 - DNA, 33 bp, Homo sapien
tctgaatgcttcatcacgatctgatcgtttttg

SEQ ID NO: 191744 - DNA, 33 bp, Homo sapien
tctgaatgcttcatcatgatctgatcgtttttg

SEQ ID NO: 191745 - DNA, 33 bp, Homo sapien
tctttgactcctactcaatcatgaatatctgag

SEQ ID NO: 191746 - DNA, 33 bp, Homo sapien
tctttgactcctactcgatcatgaatatctgag

SEQ ID NO: 191747 - DNA, 33 bp, Homo sapien
ttatattttaccataaccacaactactaccttg

SEQ ID NO: 191748 - DNA, 33 bp, Homo sapien
ttatattttaccataatcacaactactaccttg

SEQ ID NO: 191749 - DNA, 33 bp, Homo sapien
agtgcccatttttatacgaaacacagttgcatg

SEQ ID NO: 191750 - DNA, 33 bp, Homo sapien
agtgcccatttttatatgaaacacagttgcatg

SEQ ID NO: 191751 - DNA, 33 bp, Homo sapien
ccaaagagaatgcactcagaaggaattagaaga

SEQ ID NO: 191752 - DNA, 33 bp, Homo sapien
ccaaagagaatgcactgagaaggaattagaaga

SEQ ID NO: 191753 - DNA, 33 bp, Homo sapien
atcagaattttggaaaaacaggtctgttactta

SEQ ID NO: 191754 - DNA, 33 bp, Homo sapien
atcagaattttggaaatacaggtctgttactta

SEQ ID NO: 191755 - DNA, 33 bp, Homo sapien
ataggcgctataacacaggatgttctcagcctt

SEQ ID NO: 191756 - DNA, 33 bp, Homo sapien
ataggcgctataacacgggatgttctcagcctt

SEQ ID NO: 191757 - DNA, 33 bp, Homo sapien
ccctcacaaatccttcaaatgggcccttggact

SEQ ID NO: 191758 - DNA, 33 bp, Homo sapien
ccctcacaaatccttccaatgggcccttggact

SEQ ID NO: 191759 - DNA, 33 bp, Homo sapien
acctggcttttactgcaaaattgctctctactg

SEQ ID NO: 191760 - DNA, 33 bp, Homo sapien
acctggcttttactgccaaattgctctctactg

SEQ ID NO: 191761 - DNA, 33 bp, Homo sapien
gacaaatctttcaccaagctaaactaagtaaaa

SEQ ID NO: 191762 - DNA, 33 bp, Homo sapien
gacaaatctttcaccaggctaaactaagtaaaa

SEQ ID NO: 191763 - DNA, 33 bp, Homo sapien
tttatagatttttatgcactttgaaatgagagt

SEQ ID NO: 191764 - DNA, 33 bp, Homo sapien
tttatagatttttatgtactttgaaatgagagt

SEQ ID NO: 191765 - DNA, 33 bp, Homo sapien
ttattgcaaaagctcaagccattgaagagctcc

SEQ ID NO: 191766 - DNA, 33 bp, Homo sapien
ttattgcaaaagctcaggccattgaagagctcc

SEQ ID NO: 191767 - DNA, 33 bp, Homo sapien
aggggcacttgagatccgacagcttacattccc

SEQ ID NO: 191768 - DNA, 33 bp, Homo sapien
aggggcacttgagatctgacagcttacattccc

SEQ ID NO: 191769 - DNA, 33 bp, Homo sapien
gcttcatacaaaacaccgatacaaaatgaagaa

SEQ ID NO: 191770 - DNA, 33 bp, Homo sapien
gcttcatacaaaacactgatacaaaatgaagaa

SEQ ID NO: 191771 - DNA, 33 bp, Homo sapien
tgttgatactacaaaccgacctaagtctggatt

SEQ ID NO: 191772 - DNA, 33 bp, Homo sapien
tgttgatactacaaactgacctaagtctggatt

SEQ ID NO: 191773 - DNA, 33 bp, Homo sapien
atgtcataaacacaccaaatggtgcctattcac

SEQ ID NO: 191774 - DNA, 33 bp, Homo sapien
atgtcataaacacaccgaatggtgcctattcac

SEQ ID NO: 191775 - DNA, 33 bp, Homo sapien
attgtctatcttagtccctaaaaccgcctgtcc

SEQ ID NO: 191776 - DNA, 33 bp, Homo sapien
attgtctatcttagtcgctaaaaccgcctgtcc

SEQ ID NO: 191777 - DNA, 33 bp, Homo sapien
gatttgcaggataagaagcaactgtgtgaatac

SEQ ID NO: 191778 - DNA, 33 bp, Homo sapien
gatttgcaggataagaggcaactgtgtgaatac

SEQ ID NO: 191779 - DNA, 33 bp, Homo sapien
acctagtagtataacactgtgttcaagaatggc

SEQ ID NO: 191780 - DNA, 33 bp, Homo sapien
acctagtagtataacattgtgttcaagaatggc

SEQ ID NO: 191781 - DNA, 33 bp, Homo sapien
ctgacacacctaaaacaatctttggaatacacc

SEQ ID NO: 191782 - DNA, 33 bp, Homo sapien
ctgacacacctaaaacgatctttggaatacacc

SEQ ID NO: 191783 - DNA, 33 bp, Homo sapien
tcataacaatgtaccacgccaacatacaaaaat

SEQ ID NO: 191784 - DNA, 33 bp, Homo sapien
tcataacaatgtaccatgccaacatacaaaaat

SEQ ID NO: 191785 - DNA, 33 bp, Homo sapien
gttctccagctaaagaaactcatggggaggact

SEQ ID NO: 191786 - DNA, 33 bp, Homo sapien
gttctccagctaaagagactcatggggaggact

SEQ ID NO: 191787 - DNA, 33 bp, Homo sapien
tggttatttgcaaaagaaacctcaccatgcctc

SEQ ID NO: 191788 - DNA, 33 bp, Homo sapien
tggttatttgcaaaaggaacctcaccatgcctc

SEQ ID NO: 191789 - DNA, 33 bp, Homo sapien
ggccagcaggtaagtagacatcgttttgttagg

SEQ ID NO: 191790 - DNA, 33 bp, Homo sapien
ggccagcaggtaagtatacatcgttttgttagg

SEQ ID NO: 191791 - DNA, 33 bp, Homo sapien
aatgggctggagaaggaccaatcctaacagagg

SEQ ID NO: 191792 - DNA, 33 bp, Homo sapien
aatgggctggagaagggccaatcctaacagagg

SEQ ID NO: 191793 - DNA, 33 bp, Homo sapien
atgaagctgaagtttggagagatatgataactt

SEQ ID NO: 191794 - DNA, 33 bp, Homo sapien
atgaagctgaagtttgtagagatatgataactt

SEQ ID NO: 191795 - DNA, 33 bp, Homo sapien
ggagtgcatcctcaaacgggctccctgtgattc

SEQ ID NO: 191796 - DNA, 33 bp, Homo sapien
ggagtgcatcctcaaatgggctccctgtgattc

SEQ ID NO: 191797 - DNA, 33 bp, Homo sapien
ttattcacaaaagggcactaagagatgttaaat

SEQ ID NO: 191798 - DNA, 33 bp, Homo sapien
ttattcacaaaagggcgctaagagatgttaaat

SEQ ID NO: 191799 - DNA, 33 bp, Homo sapien
gcctggagagagataacagggcccagggctgac

SEQ ID NO: 191800 - DNA, 33 bp, Homo sapien
gcctggagagagataatagggcccagggctgac

SEQ ID NO: 191801 - DNA, 33 bp, Homo sapien
gggattgactgtgggacaaataactatgtcatg

SEQ ID NO: 191802 - DNA, 33 bp, Homo sapien
gggattgactgtgggataaataactatgtcatg

SEQ ID NO: 191803 - DNA, 33 bp, Homo sapien
gaggcactccagctggaaacattccaaccatcc

SEQ ID NO: 191804 - DNA, 33 bp, Homo sapien
gaggcactccagctgggaacattccaaccatcc

SEQ ID NO: 191805 - DNA, 33 bp, Homo sapien
tattcacaataatcaaattatgaaatcaaccta

SEQ ID NO: 191806 - DNA, 33 bp, Homo sapien
tattcacaataatcaagttatgaaatcaaccta

SEQ ID NO: 191807 - DNA, 33 bp, Homo sapien
tggacagagaatccccccggttaattcaattca

SEQ ID NO: 191808 - DNA, 33 bp, Homo sapien
tggacagagaatcccctcggttaattcaattca

SEQ ID NO: 191809 - DNA, 33 bp, Homo sapien
ttctgatttcaagaaaattgtgtttagctttag

SEQ ID NO: 191810 - DNA, 33 bp, Homo sapien
ttctgatttcaagaaatttgtgtttagctttag

SEQ ID NO: 191811 - DNA, 33 bp, Homo sapien
gaatccaggtcccgcccctgttgcaggcctgat

SEQ ID NO: 191812 - DNA, 33 bp, Homo sapien
gaatccaggtcccgcctctgttgcaggcctgat

SEQ ID NO: 191813 - DNA, 33 bp, Homo sapien
ttctcaacctcctggggatcttgttagaacgca

SEQ ID NO: 191814 - DNA, 33 bp, Homo sapien
ttctcaacctcctgggtatcttgttagaacgca

SEQ ID NO: 191815 - DNA, 33 bp, Homo sapien
ttagggtgtttttgcacagaatgatagagctgg

SEQ ID NO: 191816 - DNA, 33 bp, Homo sapien
ttagggtgtttttgcatagaatgatagagctgg

SEQ ID NO: 191817 - DNA, 33 bp, Homo sapien
ggaccctggagggaaacggaagagacaaggtgg

SEQ ID NO: 191818 - DNA, 33 bp, Homo sapien
ggaccctggagggaaatggaagagacaaggtgg

SEQ ID NO: 191819 - DNA, 33 bp, Homo sapien
aaggaagatcaggatcaagaagtcagctctggt

SEQ ID NO: 191820 - DNA, 33 bp, Homo sapien
aaggaagatcaggatcgagaagtcagctctggt

SEQ ID NO: 191821 - DNA, 33 bp, Homo sapien
aaggtacaataactcaccttgagacgtttataa

SEQ ID NO: 191822 - DNA, 33 bp, Homo sapien
aaggtacaataactcagcttgagacgtttataa

SEQ ID NO: 191823 - DNA, 33 bp, Homo sapien
accttcctttcgggggcatattatcatgtcaga

SEQ ID NO: 191824 - DNA, 33 bp, Homo sapien
accttcctttcggggggatattatcatgtcaga

SEQ ID NO: 191825 - DNA, 33 bp, Homo sapien
agccttatgaaaaacagaacttttcctgagacc

SEQ ID NO: 191826 - DNA, 33 bp, Homo sapien
agccttatgaaaaacataacttttcctgagacc

SEQ ID NO: 191827 - DNA, 33 bp, Homo sapien
caagaaatcctctataagtctgactttacaaac

SEQ ID NO: 191828 - DNA, 33 bp, Homo sapien
caagaaatcctctataggtctgactttacaaac

SEQ ID NO: 191829 - DNA, 33 bp, Homo sapien
gagtgagactaatgaacaaagtaagctaagcct

SEQ ID NO: 191830 - DNA, 33 bp, Homo sapien
gagtgagactaatgaataaagtaagctaagcct

SEQ ID NO: 191831 - DNA, 33 bp, Homo sapien
taagtgggaaggtgtcactgtgtgattcccaga

SEQ ID NO: 191832 - DNA, 33 bp, Homo sapien
taagtgggaaggtgtcgctgtgtgattcccaga

SEQ ID NO: 191833 - DNA, 33 bp, Homo sapien
aacagggggcagggaaccatctgacataacaac

SEQ ID NO: 191834 - DNA, 33 bp, Homo sapien
aacagggggcagggaatcatctgacataacaac

SEQ ID NO: 191835 - DNA, 33 bp, Homo sapien
gctgttactgtggaagaacaaaattagaggcaa

SEQ ID NO: 191836 - DNA, 33 bp, Homo sapien
gctgttactgtggaaggacaaaattagaggcaa

SEQ ID NO: 191837 - DNA, 33 bp, Homo sapien
gaaggaaaagaaagcacgttaagggattagaaa

SEQ ID NO: 191838 - DNA, 33 bp, Homo sapien
gaaggaaaagaaagcaggttaagggattagaaa

SEQ ID NO: 191839 - DNA, 33 bp, Homo sapien
atacatgagaaccccagaaggtcatccagtaaa

SEQ ID NO: 191840 - DNA, 33 bp, Homo sapien
atacatgagaaccccataaggtcatccagtaaa

SEQ ID NO: 191841 - DNA, 33 bp, Homo sapien
aaaccttatgataggcactgcagaatctccatg

SEQ ID NO: 191842 - DNA, 33 bp, Homo sapien
aaaccttatgataggcgctgcagaatctccatg

SEQ ID NO: 191843 - DNA, 33 bp, Homo sapien
atttactagctacttacgctaaccaccaaaacc

SEQ ID NO: 191844 - DNA, 33 bp, Homo sapien
atttactagctacttaggctaaccaccaaaacc

SEQ ID NO: 191845 - DNA, 33 bp, Homo sapien
ctgacaaccctagagacacaaagcttcatccag

SEQ ID NO: 191846 - DNA, 33 bp, Homo sapien
ctgacaaccctagagatacaaagcttcatccag

SEQ ID NO: 191847 - DNA, 33 bp, Homo sapien
tgaactttcctttgccgagagaactggactaca

SEQ ID NO: 191848 - DNA, 33 bp, Homo sapien
tgaactttcctttgcctagagaactggactaca

SEQ ID NO: 191849 - DNA, 33 bp, Homo sapien
atgacctgctcttcaacctcatcctgaaattgc

SEQ ID NO: 191850 - DNA, 33 bp, Homo sapien
atgacctgctcttcaatctcatcctgaaattgc

SEQ ID NO: 191851 - DNA, 33 bp, Homo sapien
gagttaagcctcaaaaatcacaggagctgtatg

SEQ ID NO: 191852 - DNA, 33 bp, Homo sapien
gagttaagcctcaaaagtcacaggagctgtatg

SEQ ID NO: 191853 - DNA, 33 bp, Homo sapien
gccttcatcgccctaacgctcacatggccacca

SEQ ID NO: 191854 - DNA, 33 bp, Homo sapien
gccttcatcgccctaatgctcacatggccacca

SEQ ID NO: 191855 - DNA, 33 bp, Homo sapien
aaataataatataacacgcttggttctcaaagt

SEQ ID NO: 191856 - DNA, 33 bp, Homo sapien
aaataataatataacatgcttggttctcaaagt

SEQ ID NO: 191857 - DNA, 33 bp, Homo sapien
aaaactcagctccttacacataaagaccacttt

SEQ ID NO: 191858 - DNA, 33 bp, Homo sapien
aaaactcagctccttatacataaagaccacttt

SEQ ID NO: 191859 - DNA, 33 bp, Homo sapien
ctgaggactgttaagacgaaaggacattggaac

SEQ ID NO: 191860 - DNA, 33 bp, Homo sapien
ctgaggactgttaagatgaaaggacattggaac

SEQ ID NO: 191861 - DNA, 33 bp, Homo sapien
ttgttcacatttattacagttggttaatccacc

SEQ ID NO: 191862 - DNA, 33 bp, Homo sapien
ttgttcacatttattagagttggttaatccacc

SEQ ID NO: 191863 - DNA, 33 bp, Homo sapien
gcagataaaagatttacggtcacttaagcattt

SEQ ID NO: 191864 - DNA, 33 bp, Homo sapien
gcagataaaagatttatggtcacttaagcattt

SEQ ID NO: 191865 - DNA, 33 bp, Homo sapien
tttaaagtacctaatacagcctggctcactgca

SEQ ID NO: 191866 - DNA, 33 bp, Homo sapien
tttaaagtacctaatatagcctggctcactgca

SEQ ID NO: 191867 - DNA, 33 bp, Homo sapien
cccttgctagttcccaaattgagtgtagtctgc

SEQ ID NO: 191868 - DNA, 33 bp, Homo sapien
cccttgctagttcccagattgagtgtagtctgc

SEQ ID NO: 191869 - DNA, 33 bp, Homo sapien
agtgtcttcccacaataagaaagtgggtggtcc

SEQ ID NO: 191870 - DNA, 33 bp, Homo sapien
agtgtcttcccacaatgagaaagtgggtggtcc

SEQ ID NO: 191871 - DNA, 33 bp, Homo sapien
tattaactttcccacaccggcctgggagctggc

SEQ ID NO: 191872 - DNA, 33 bp, Homo sapien
tattaactttcccacatcggcctgggagctggc

SEQ ID NO: 191873 - DNA, 33 bp, Homo sapien
gacagaatgaaaatcaactccccacaaggatat

SEQ ID NO: 191874 - DNA, 33 bp, Homo sapien
gacagaatgaaaatcagctccccacaaggatat

SEQ ID NO: 191875 - DNA, 33 bp, Homo sapien
taaatattcttctgccactaatccaccctttat

SEQ ID NO: 191876 - DNA, 33 bp, Homo sapien
taaatattcttctgccgctaatccaccctttat

SEQ ID NO: 191877 - DNA, 33 bp, Homo sapien
aaagatggaaggggaaaaggaagaagatgaagg

SEQ ID NO: 191878 - DNA, 33 bp, Homo sapien
aaagatggaaggggaagaggaagaagatgaagg

SEQ ID NO: 191879 - DNA, 33 bp, Homo sapien
catgacaatgcaccataagcgtttactattatg

SEQ ID NO: 191880 - DNA, 33 bp, Homo sapien
catgacaatgcaccatcagcgtttactattatg

SEQ ID NO: 191881 - DNA, 33 bp, Homo sapien
gcctaccaggttagaaatagataaaagacaaaa

SEQ ID NO: 191882 - DNA, 33 bp, Homo sapien
gcctaccaggttagaagtagataaaagacaaaa

SEQ ID NO: 191883 - DNA, 33 bp, Homo sapien
tgaaggggtcgaggaaagtttcacagagaaaga

SEQ ID NO: 191884 - DNA, 33 bp, Homo sapien
tgaaggggtcgaggaaggtttcacagagaaaga

SEQ ID NO: 191885 - DNA, 33 bp, Homo sapien
attctctcaactgagaataggcaaagcagacat

SEQ ID NO: 191886 - DNA, 33 bp, Homo sapien
attctctcaactgagagtaggcaaagcagacat

SEQ ID NO: 191887 - DNA, 33 bp, Homo sapien
gaggaaggttcccggaagacagggaggtaggaa

SEQ ID NO: 191888 - DNA, 33 bp, Homo sapien
gaggaaggttcccggaggacagggaggtaggaa

SEQ ID NO: 191889 - DNA, 33 bp, Homo sapien
tgctttttgccacgatcacttccaaaacacatc

SEQ ID NO: 191890 - DNA, 33 bp, Homo sapien
tgctttttgccacgatgacttccaaaacacatc

SEQ ID NO: 191891 - DNA, 33 bp, Homo sapien
taaaaatcctggaaacaaaaagaggcagtgtca

SEQ ID NO: 191892 - DNA, 33 bp, Homo sapien
taaaaatcctggaaacgaaaagaggcagtgtca

SEQ ID NO: 191893 - DNA, 33 bp, Homo sapien
cccacgccggccaacaccgaccaaatagttgga

SEQ ID NO: 191894 - DNA, 33 bp, Homo sapien
cccacgccggccaacatcgaccaaatagttgga

SEQ ID NO: 191895 - DNA, 33 bp, Homo sapien
tccctattactggtccaaagccctaggtttcat

SEQ ID NO: 191896 - DNA, 33 bp, Homo sapien
tccctattactggtccgaagccctaggtttcat

SEQ ID NO: 191897 - DNA, 33 bp, Homo sapien
agctttatctgtatccaaacagaggggaataaa

SEQ ID NO: 191898 - DNA, 33 bp, Homo sapien
agctttatctgtatccgaacagaggggaataaa

SEQ ID NO: 191899 - DNA, 33 bp, Homo sapien
ttttttgatttccaagaaagaagtctccaggcc

SEQ ID NO: 191900 - DNA, 33 bp, Homo sapien
ttttttgatttccaaggaagaagtctccaggcc

SEQ ID NO: 191901 - DNA, 33 bp, Homo sapien
ggtgctggaagccctacccagaacaactagatg

SEQ ID NO: 191902 - DNA, 33 bp, Homo sapien
ggtgctggaagccctagccagaacaactagatg

SEQ ID NO: 191903 - DNA, 33 bp, Homo sapien
aatgagatcacatctcactaaaaagctttgcac

SEQ ID NO: 191904 - DNA, 33 bp, Homo sapien
aatgagatcacatctcgctaaaaagctttgcac

SEQ ID NO: 191905 - DNA, 33 bp, Homo sapien
aggcaagcatttaatcaccaataaagtcattca

SEQ ID NO: 191906 - DNA, 33 bp, Homo sapien
aggcaagcatttaatcgccaataaagtcattca

SEQ ID NO: 191907 - DNA, 33 bp, Homo sapien
cagtaaggtccccaaccatatacagtgttctaa

SEQ ID NO: 191908 - DNA, 33 bp, Homo sapien
cagtaaggtccccaactatatacagtgttctaa

SEQ ID NO: 191909 - DNA, 33 bp, Homo sapien
tcacagtttaacataccaagactttcactatct

SEQ ID NO: 191910 - DNA, 33 bp, Homo sapien
tcacagtttaacatacgaagactttcactatct

SEQ ID NO: 191911 - DNA, 33 bp, Homo sapien
catgtctctttcagaaccttactcatctcttta

SEQ ID NO: 191912 - DNA, 33 bp, Homo sapien
catgtctctttcagaatcttactcatctcttta

SEQ ID NO: 191913 - DNA, 33 bp, Homo sapien
aagaaggctgaataaaaggaacaatgggtaatc

SEQ ID NO: 191914 - DNA, 33 bp, Homo sapien
aagaaggctgaataaagggaacaatgggtaatc

SEQ ID NO: 191915 - DNA, 33 bp, Homo sapien
ctgtgactcctactcaaaatggctgtattccat

SEQ ID NO: 191916 - DNA, 33 bp, Homo sapien
ctgtgactcctactcagaatggctgtattccat

SEQ ID NO: 191917 - DNA, 33 bp, Homo sapien
gcgcagggcgtaacacggtgaggggcctgaggg

SEQ ID NO: 191918 - DNA, 33 bp, Homo sapien
gcgcagggcgtaacactgtgaggggcctgaggg

SEQ ID NO: 191919 - DNA, 33 bp, Homo sapien
caccgtgggatacacaccttggctatttgtgga

SEQ ID NO: 191920 - DNA, 33 bp, Homo sapien
caccgtgggatacacagcttggctatttgtgga

SEQ ID NO: 191921 - DNA, 33 bp, Homo sapien
gccctgtaagatgtccggctttgaggcaagaga

SEQ ID NO: 191922 - DNA, 33 bp, Homo sapien
gccctgtaagatgtcctgctttgaggcaagaga

SEQ ID NO: 191923 - DNA, 33 bp, Homo sapien
ataaagacagaaatacagaccaatgaaaagaaa

SEQ ID NO: 191924 - DNA, 33 bp, Homo sapien
ataaagacagaaatacggaccaatgaaaagaaa

SEQ ID NO: 191925 - DNA, 33 bp, Homo sapien
agaccaatccacccaccgtgcaaatgcagagat

SEQ ID NO: 191926 - DNA, 33 bp, Homo sapien
agaccaatccacccactgtgcaaatgcagagat

SEQ ID NO: 191927 - DNA, 33 bp, Homo sapien
ttatgttattgtttcaaggtaacttttcttctt

SEQ ID NO: 191928 - DNA, 33 bp, Homo sapien
ttatgttattgtttcagggtaacttttcttctt

SEQ ID NO: 191929 - DNA, 33 bp, Homo sapien
taaggccttcctggaagtagcagggcacggtta

SEQ ID NO: 191930 - DNA, 33 bp, Homo sapien
taaggccttcctggaattagcagggcacggtta

SEQ ID NO: 191931 - DNA, 33 bp, Homo sapien
ttcctgtcacttaggaataccataggttttaga

SEQ ID NO: 191932 - DNA, 33 bp, Homo sapien
ttcctgtcacttaggagtaccataggttttaga

SEQ ID NO: 191933 - DNA, 33 bp, Homo sapien
ttattccatactgagaagagcttcctacataga

SEQ ID NO: 191934 - DNA, 33 bp, Homo sapien
ttattccatactgagaggagcttcctacataga

SEQ ID NO: 191935 - DNA, 33 bp, Homo sapien
ataagctcccatatgaccggaaactgaagacat

SEQ ID NO: 191936 - DNA, 33 bp, Homo sapien
ataagctcccatatgatcggaaactgaagacat

SEQ ID NO: 191937 - DNA, 33 bp, Homo sapien
gatctgcttggaagcacagagaaaaggaccatg

SEQ ID NO: 191938 - DNA, 33 bp, Homo sapien
gatctgcttggaagcatagagaaaaggaccatg

SEQ ID NO: 191939 - DNA, 33 bp, Homo sapien
ctgatctatccaacaccaggtctcatttcatct

SEQ ID NO: 191940 - DNA, 33 bp, Homo sapien
ctgatctatccaacactaggtctcatttcatct

SEQ ID NO: 191941 - DNA, 33 bp, Homo sapien
tatccaattattatgacgtgttaatcaaaagta

SEQ ID NO: 191942 - DNA, 33 bp, Homo sapien
tatccaattattatgaggtgttaatcaaaagta

SEQ ID NO: 191943 - DNA, 33 bp, Homo sapien
cagtcaagagatacctgaacagtctggccttgg

SEQ ID NO: 191944 - DNA, 33 bp, Homo sapien
cagtcaagagataccttaacagtctggccttgg

SEQ ID NO: 191945 - DNA, 33 bp, Homo sapien
cctgattcttccagacagagttagtctttctcc

SEQ ID NO: 191946 - DNA, 33 bp, Homo sapien
cctgattcttccagactgagttagtctttctcc

SEQ ID NO: 191947 - DNA, 33 bp, Homo sapien
gttctcagagataagaagatgatccttaaagaa

SEQ ID NO: 191948 - DNA, 33 bp, Homo sapien
gttctcagagataagatgatgatccttaaagaa

SEQ ID NO: 191949 - DNA, 33 bp, Homo sapien
aaaattacctaagaacagagacatagtgtctct

SEQ ID NO: 191950 - DNA, 33 bp, Homo sapien
aaaattacctaagaacggagacatagtgtctct

SEQ ID NO: 191951 - DNA, 33 bp, Homo sapien
tattacagatttaccacgtgcgagcttctattc

SEQ ID NO: 191952 - DNA, 33 bp, Homo sapien
tattacagatttaccatgtgcgagcttctattc

SEQ ID NO: 191953 - DNA, 33 bp, Homo sapien
tggcttttttctctgcccaagtgtggagagaaa

SEQ ID NO: 191954 - DNA, 33 bp, Homo sapien
tggcttttttctctgcgcaagtgtggagagaaa

SEQ ID NO: 191955 - DNA, 33 bp, Homo sapien
gaaaaagcaagtactacggaagcctaagtccat

SEQ ID NO: 191956 - DNA, 33 bp, Homo sapien
gaaaaagcaagtactagggaagcctaagtccat

SEQ ID NO: 191957 - DNA, 33 bp, Homo sapien
cacaacagttaacaaaagaacaaaagtgcacca

SEQ ID NO: 191958 - DNA, 33 bp, Homo sapien
cacaacagttaacaaaggaacaaaagtgcacca

SEQ ID NO: 191959 - DNA, 33 bp, Homo sapien
gaataacaatgttgcacattaacacatcttccc

SEQ ID NO: 191960 - DNA, 33 bp, Homo sapien
gaataacaatgttgcatattaacacatcttccc

SEQ ID NO: 191961 - DNA, 33 bp, Homo sapien
acagcaatctagaggaaagatgacagtctggac

SEQ ID NO: 191962 - DNA, 33 bp, Homo sapien
acagcaatctagaggacagatgacagtctggac

SEQ ID NO: 191963 - DNA, 33 bp, Homo sapien
ttactaatggattagacgtgtggaacaaggcac

SEQ ID NO: 191964 - DNA, 33 bp, Homo sapien
ttactaatggattagatgtgtggaacaaggcac

SEQ ID NO: 191965 - DNA, 33 bp, Homo sapien
atagagaaatgcactgaatttgaggtgtgaaag

SEQ ID NO: 191966 - DNA, 33 bp, Homo sapien
atagagaaatgcactgtatttgaggtgtgaaag

SEQ ID NO: 191967 - DNA, 33 bp, Homo sapien
aattacaccgccaatggatagtcttgagcatga

SEQ ID NO: 191968 - DNA, 33 bp, Homo sapien
aattacaccgccaatgtatagtcttgagcatga

SEQ ID NO: 191969 - DNA, 33 bp, Homo sapien
cttgctcatgtctgaaaagtttctacctaaaat

SEQ ID NO: 191970 - DNA, 33 bp, Homo sapien
cttgctcatgtctgaatagtttctacctaaaat

SEQ ID NO: 191971 - DNA, 33 bp, Homo sapien
gctcagctcaagagccacacctttcttgacacc

SEQ ID NO: 191972 - DNA, 33 bp, Homo sapien
gctcagctcaagagccgcacctttcttgacacc

SEQ ID NO: 191973 - DNA, 33 bp, Homo sapien
atatgtggatgaacaaaatgtggcctatgattt

SEQ ID NO: 191974 - DNA, 33 bp, Homo sapien
atatgtggatgaacaagatgtggcctatgattt

SEQ ID NO: 191975 - DNA, 33 bp, Homo sapien
taaatggtcatgtcacccttgttggaaatcatt

SEQ ID NO: 191976 - DNA, 33 bp, Homo sapien
taaatggtcatgtcactcttgttggaaatcatt

SEQ ID NO: 191977 - DNA, 33 bp, Homo sapien
tctcatcctccttatccaaatagacacaagccc

SEQ ID NO: 191978 - DNA, 33 bp, Homo sapien
tctcatcctccttatctaaatagacacaagccc

SEQ ID NO: 191979 - DNA, 33 bp, Homo sapien
gctgcaaccctgaaacaaagctctatttatttt

SEQ ID NO: 191980 - DNA, 33 bp, Homo sapien
gctgcaaccctgaaacgaagctctatttatttt

SEQ ID NO: 191981 - DNA, 33 bp, Homo sapien
gctagtgaaacaagaccatgacaagtcactggc

SEQ ID NO: 191982 - DNA, 33 bp, Homo sapien
gctagtgaaacaagacgatgacaagtcactggc

SEQ ID NO: 191983 - DNA, 33 bp, Homo sapien
gaggaggggcacactacgccggctcccatcctc

SEQ ID NO: 191984 - DNA, 33 bp, Homo sapien
gaggaggggcacactatgccggctcccatcctc

SEQ ID NO: 191985 - DNA, 33 bp, Homo sapien
tgaggttttcacatacactatatcctttgctct

SEQ ID NO: 191986 - DNA, 33 bp, Homo sapien
tgaggttttcacatacgctatatcctttgctct

SEQ ID NO: 191987 - DNA, 33 bp, Homo sapien
tatttactgcaaaggtaaaataagatgatgtag

SEQ ID NO: 191988 - DNA, 33 bp, Homo sapien
tatttactgcaaaggtcaaataagatgatgtag

SEQ ID NO: 191989 - DNA, 33 bp, Homo sapien
gttttcctctgtgttaagaacaacgctagggca

SEQ ID NO: 191990 - DNA, 33 bp, Homo sapien
gttttcctctgtgttaggaacaacgctagggca

SEQ ID NO: 191991 - DNA, 33 bp, Homo sapien
ctggtttcactgtaaaactaatttccttcctga

SEQ ID NO: 191992 - DNA, 33 bp, Homo sapien
ctggtttcactgtaaacctaatttccttcctga

SEQ ID NO: 191993 - DNA, 33 bp, Homo sapien
atgcctttaagcctaactcattgagaagagatt

SEQ ID NO: 191994 - DNA, 33 bp, Homo sapien
atgcctttaagcctaattcattgagaagagatt

SEQ ID NO: 191995 - DNA, 33 bp, Homo sapien
agcacatttgtgtctacatcgctttcccccacg

SEQ ID NO: 191996 - DNA, 33 bp, Homo sapien
agcacatttgtgtctatatcgctttcccccacg

SEQ ID NO: 191997 - DNA, 33 bp, Homo sapien
gaaataaaacttgacaccttgctttttttcact

SEQ ID NO: 191998 - DNA, 33 bp, Homo sapien
gaaataaaacttgacatcttgctttttttcact

SEQ ID NO: 191999 - DNA, 33 bp, Homo sapien
ttcccccacagaagcacgcctatggtttgccca

SEQ ID NO: 192000 - DNA, 33 bp, Homo sapien
ttcccccacagaagcaggcctatggtttgccca

SEQ ID NO: 192001 - DNA, 33 bp, Homo sapien
tcaaactcatatatgacaaggatgtcgaaacca

SEQ ID NO: 192002 - DNA, 33 bp, Homo sapien
tcaaactcatatatgataaggatgtcgaaacca

SEQ ID NO: 192003 - DNA, 33 bp, Homo sapien
tattgatgttctgtacactacttctactgatta

SEQ ID NO: 192004 - DNA, 33 bp, Homo sapien
tattgatgttctgtacgctacttctactgatta

SEQ ID NO: 192005 - DNA, 33 bp, Homo sapien
cacgctgttgcgacgaacgggagccgggccaga

SEQ ID NO: 192006 - DNA, 33 bp, Homo sapien
cacgctgttgcgacgagcgggagccgggccaga

SEQ ID NO: 192007 - DNA, 33 bp, Homo sapien
ttaataaatgagaaaactgacaaaagttaagtg

SEQ ID NO: 192008 - DNA, 33 bp, Homo sapien
ttaataaatgagaaaattgacaaaagttaagtg

SEQ ID NO: 192009 - DNA, 33 bp, Homo sapien
ccacagcaaaagcttcacacctcaatagcttcc

SEQ ID NO: 192010 - DNA, 33 bp, Homo sapien
ccacagcaaaagcttcgcacctcaatagcttcc

SEQ ID NO: 192011 - DNA, 33 bp, Homo sapien
gacttctacataataaaagtctggcagacttat

SEQ ID NO: 192012 - DNA, 33 bp, Homo sapien
gacttctacataataagagtctggcagacttat

SEQ ID NO: 192013 - DNA, 33 bp, Homo sapien
gagaagaaattcataacactacaaatcgccatg

SEQ ID NO: 192014 - DNA, 33 bp, Homo sapien
gagaagaaattcataatactacaaatcgccatg

SEQ ID NO: 192015 - DNA, 33 bp, Homo sapien
ggtaggtatgcttctagaattcaggaaacactt

SEQ ID NO: 192016 - DNA, 33 bp, Homo sapien
ggtaggtatgcttctataattcaggaaacactt

SEQ ID NO: 192017 - DNA, 33 bp, Homo sapien
ttgacctttaattctacggagattcagaattta

SEQ ID NO: 192018 - DNA, 33 bp, Homo sapien
ttgacctttaattctatggagattcagaattta

SEQ ID NO: 192019 - DNA, 33 bp, Homo sapien
atcactttgttcctatgagaagggccaggcgca

SEQ ID NO: 192020 - DNA, 33 bp, Homo sapien
atcactttgttcctattagaagggccaggcgca

SEQ ID NO: 192021 - DNA, 33 bp, Homo sapien
caaccagaattaaaaactattgctatgacacac

SEQ ID NO: 192022 - DNA, 33 bp, Homo sapien
caaccagaattaaaaattattgctatgacacac

SEQ ID NO: 192023 - DNA, 33 bp, Homo sapien
gatgtgtattccttgcaaaagaacaagcctgct

SEQ ID NO: 192024 - DNA, 33 bp, Homo sapien
gatgtgtattccttgcgaaagaacaagcctgct

SEQ ID NO: 192025 - DNA, 33 bp, Homo sapien
aaagaaaaggtgtaaaacagggaagatttgggc

SEQ ID NO: 192026 - DNA, 33 bp, Homo sapien
aaagaaaaggtgtaaagcagggaagatttgggc

SEQ ID NO: 192027 - DNA, 33 bp, Homo sapien
tgtacataagcaatgaactagctgaaaaagaaa

SEQ ID NO: 192028 - DNA, 33 bp, Homo sapien
tgtacataagcaatgagctagctgaaaaagaaa

SEQ ID NO: 192029 - DNA, 33 bp, Homo sapien
taaaggcttagggaaaagagtgtctgctgttct

SEQ ID NO: 192030 - DNA, 33 bp, Homo sapien
taaaggcttagggaaacgagtgtctgctgttct

SEQ ID NO: 192031 - DNA, 33 bp, Homo sapien
cctttggagatgaaaccggacttgtgtgtgggc

SEQ ID NO: 192032 - DNA, 33 bp, Homo sapien
cctttggagatgaaactggacttgtgtgtgggc

SEQ ID NO: 192033 - DNA, 33 bp, Homo sapien
cctacaagaactaatcccaccctgttttatgtc

SEQ ID NO: 192034 - DNA, 33 bp, Homo sapien
cctacaagaactaatctcaccctgttttatgtc

SEQ ID NO: 192035 - DNA, 33 bp, Homo sapien
ggttgtacggattaaacgagataaagctcccag

SEQ ID NO: 192036 - DNA, 33 bp, Homo sapien
ggttgtacggattaaatgagataaagctcccag

SEQ ID NO: 192037 - DNA, 33 bp, Homo sapien
aatatataacctttcacgcgtggcttttttcac

SEQ ID NO: 192038 - DNA, 33 bp, Homo sapien
aatatataacctttcatgcgtggcttttttcac

SEQ ID NO: 192039 - DNA, 33 bp, Homo sapien
aagtttttttgcaatgcatgtgatttccaaata

SEQ ID NO: 192040 - DNA, 33 bp, Homo sapien
aagtttttttgcaatgtatgtgatttccaaata

SEQ ID NO: 192041 - DNA, 33 bp, Homo sapien
aataattggagagacactctatgatcactgatt

SEQ ID NO: 192042 - DNA, 33 bp, Homo sapien
aataattggagagacattctatgatcactgatt

SEQ ID NO: 192043 - DNA, 33 bp, Homo sapien
tatatatgaaacagacactgacagtaacctctc

SEQ ID NO: 192044 - DNA, 33 bp, Homo sapien
tatatatgaaacagactctgacagtaacctctc

SEQ ID NO: 192045 - DNA, 33 bp, Homo sapien
agcggttatttattggaaaatctccactcaaaa

SEQ ID NO: 192046 - DNA, 33 bp, Homo sapien
agcggttatttattggcaaatctccactcaaaa

SEQ ID NO: 192047 - DNA, 33 bp, Homo sapien
atgcccttattgtgaaatatcatgaacttaata

SEQ ID NO: 192048 - DNA, 33 bp, Homo sapien
atgcccttattgtgaagtatcatgaacttaata

SEQ ID NO: 192049 - DNA, 33 bp, Homo sapien
aagaccacattcagagcccaaaagctgaaagaa

SEQ ID NO: 192050 - DNA, 33 bp, Homo sapien
aagaccacattcagaggccaaaagctgaaagaa

SEQ ID NO: 192051 - DNA, 33 bp, Homo sapien; identical to SEQ ID NO: 192049

SEQ ID NO: 192052 - DNA, 33 bp, Homo sapien; identical to SEQ ID NO: 192050

SEQ ID NO: 192053 - DNA, 33 bp, Homo sapien
aagatctctgcaataactgtagcacaacagaaa

SEQ ID NO: 192054 - DNA, 33 bp, Homo sapien
aagatctctgcaataattgtagcacaacagaaa

SEQ ID NO: 192055 - DNA, 33 bp, Homo sapien
gtcctcagcatcctgaatagttctacaggcatg

SEQ ID NO: 192056 - DNA, 33 bp, Homo sapien
gtcctcagcatcctgagtagttctacaggcatg

SEQ ID NO: 192057 - DNA, 33 bp, Homo sapien
atgtctgttgtcataaacaaatataaagatagt

SEQ ID NO: 192058 - DNA, 33 bp, Homo sapien
atgtctgttgtcataatcaaatataaagatagt

SEQ ID NO: 192059 - DNA, 33 bp, Homo sapien
aaagtctctaccctcaacaaattacattctagt

SEQ ID NO: 192060 - DNA, 33 bp, Homo sapien
aaagtctctaccctcatcaaattacattctagt

SEQ ID NO: 192061 - DNA, 33 bp, Homo sapien
ataactgtccttcctaaataatcatttttgtcc

SEQ ID NO: 192062 - DNA, 33 bp, Homo sapien
ataactgtccttcctagataatcatttttgtcc

SEQ ID NO: 192063 - DNA, 33 bp, Homo sapien
ttctcagccaggagcacgattggagtgtttaag

SEQ ID NO: 192064 - DNA, 33 bp, Homo sapien
ttctcagccaggagcatgattggagtgtttaag

SEQ ID NO: 192065 - DNA, 33 bp, Homo sapien
atgtatcagaattgcactcccttttaaggttaa

SEQ ID NO: 192066 - DNA, 33 bp, Homo sapien
atgtatcagaattgcattcccttttaaggttaa

SEQ ID NO: 192067 - DNA, 33 bp, Homo sapien
gaatgaagttcagacacatgaaggatagcagta

SEQ ID NO: 192068 - DNA, 33 bp, Homo sapien
gaatgaagttcagacatatgaaggatagcagta

SEQ ID NO: 192069 - DNA, 33 bp, Homo sapien
aaggtgagagaaaaaccgatgacatttcagccc

SEQ ID NO: 192070 - DNA, 33 bp, Homo sapien
aaggtgagagaaaaactgatgacatttcagccc

SEQ ID NO: 192071 - DNA, 33 bp, Homo sapien
agttgaggaaacagaccgaagataccaacaagg

SEQ ID NO: 192072 - DNA, 33 bp, Homo sapien
agttgaggaaacagactgaagataccaacaagg

SEQ ID NO: 192073 - DNA, 33 bp, Homo sapien
gtgtgatgcagatcccacagacctcgacttgcc

SEQ ID NO: 192074 - DNA, 33 bp, Homo sapien
gtgtgatgcagatcccgcagacctcgacttgcc

SEQ ID NO: 192075 - DNA, 33 bp, Homo sapien
cttctactgcacctgaagcacagatctagaaca

SEQ ID NO: 192076 - DNA, 33 bp, Homo sapien
cttctactgcacctgacgcacagatctagaaca

SEQ ID NO: 192077 - DNA, 33 bp, Homo sapien
tgtgtgttcaagtcaccggaagcatcttgctag

SEQ ID NO: 192078 - DNA, 33 bp, Homo sapien
tgtgtgttcaagtcactggaagcatcttgctag

SEQ ID NO: 192079 - DNA, 33 bp, Homo sapien
cagaccccatatcagacgcactgaatcggaaac

SEQ ID NO: 192080 - DNA, 33 bp, Homo sapien
cagaccccatatcagatgcactgaatcggaaac

SEQ ID NO: 192081 - DNA, 33 bp, Homo sapien
atttgttgacccacaacggatgttcaagtccac

SEQ ID NO: 192082 - DNA, 33 bp, Homo sapien
atttgttgacccacaatggatgttcaagtccac

SEQ ID NO: 192083 - DNA, 33 bp, Homo sapien
acctagataggtgctaagttttcattttgttaa

SEQ ID NO: 192084 - DNA, 33 bp, Homo sapien
acctagataggtgctacgttttcattttgttaa

SEQ ID NO: 192085 - DNA, 33 bp, Homo sapien
ctaatgttgggaagagaagcttaaaagatctga

SEQ ID NO: 192086 - DNA, 33 bp, Homo sapien
ctaatgttgggaagaggagcttaaaagatctga

SEQ ID NO: 192087 - DNA, 33 bp, Homo sapien
gggtgagaaagtgaaactggacaagagaagttg

SEQ ID NO: 192088 - DNA, 33 bp, Homo sapien
gggtgagaaagtgaaattggacaagagaagttg

SEQ ID NO: 192089 - DNA, 33 bp, Homo sapien
actctctttacatggccagtgtggcttcttcct

SEQ ID NO: 192090 - DNA, 33 bp, Homo sapien
actctctttacatggctagtgtggcttcttcct

SEQ ID NO: 192091 - DNA, 33 bp, Homo sapien
ggctatgaggtattgacgtcgtgtacacatcca

SEQ ID NO: 192092 - DNA, 33 bp, Homo sapien
ggctatgaggtattgatgtcgtgtacacatcca

SEQ ID NO: 192093 - DNA, 33 bp, Homo sapien
tccttggcttatctcaggaatctgcctcttggt

SEQ ID NO: 192094 - DNA, 33 bp, Homo sapien
tccttggcttatctcatgaatctgcctcttggt

SEQ ID NO: 192095 - DNA, 33 bp, Homo sapien
atactacctctcttgaacacaagcctccaggaa

SEQ ID NO: 192096 - DNA, 33 bp, Homo sapien
atactacctctcttgagcacaagcctccaggaa

SEQ ID NO: 192097 - DNA, 33 bp, Homo sapien
tggtttggcattgaaacgagaagttattatgta

SEQ ID NO: 192098 - DNA, 33 bp, Homo sapien
tggtttggcattgaaatgagaagttattatgta

SEQ ID NO: 192099 - DNA, 33 bp, Homo sapien
accagacaagctccacagcccattatttgggac

SEQ ID NO: 192100 - DNA, 33 bp, Homo sapien
accagacaagctccacggcccattatttgggac

SEQ ID NO: 192101 - DNA, 33 bp, Homo sapien
tcaattcagcttcagacaaatttgagtaaattt

SEQ ID NO: 192102 - DNA, 33 bp, Homo sapien
tcaattcagcttcagataaatttgagtaaattt

SEQ ID NO: 192103 - DNA, 33 bp, Homo sapien
ctgggaagtccaaaatcaaggcatggcagattt

SEQ ID NO: 192104 - DNA, 33 bp, Homo sapien
ctgggaagtccaaaatgaaggcatggcagattt

SEQ ID NO: 192105 - DNA, 33 bp, Homo sapien
tagcctgggcagagtacaaacagcaaacattta

SEQ ID NO: 192106 - DNA, 33 bp, Homo sapien
tagcctgggcagagtataaacagcaaacattta

SEQ ID NO: 192107 - DNA, 33 bp, Homo sapien
actgtcacctgaacagaccatcattcacctaat

SEQ ID NO: 192108 - DNA, 33 bp, Homo sapien
actgtcacctgaacagcccatcattcacctaat

SEQ ID NO: 192109 - DNA, 33 bp, Homo sapien
aagacagagattgaacaatgtctgggagattca

SEQ ID NO: 192110 - DNA, 33 bp, Homo sapien
aagacagagattgaacgatgtctgggagattca

SEQ ID NO: 192111 - DNA, 33 bp, Homo sapien
aatttatagtgctccaagtaggtcattaaataa

SEQ ID NO: 192112 - DNA, 33 bp, Homo sapien
aatttatagtgctccaggtaggtcattaaataa

SEQ ID NO: 192113 - DNA, 33 bp, Homo sapien
aaatgcaggatcacaccggattttacagctgac

SEQ ID NO: 192114 - DNA, 33 bp, Homo sapien
aaatgcaggatcacactggattttacagctgac

SEQ ID NO: 192115 - DNA, 33 bp, Homo sapien
ggatttaaacccaaacagtctggcgctcatccc

SEQ ID NO: 192116 - DNA, 33 bp, Homo sapien
ggatttaaacccaaacggtctggcgctcatccc

SEQ ID NO: 192117 - DNA, 33 bp, Homo sapien
gctgccgaagcgagcacgggagcgttattttca

SEQ ID NO: 192118 - DNA, 33 bp, Homo sapien
gctgccgaagcgagcatgggagcgttattttca

SEQ ID NO: 192119 - DNA, 33 bp, Homo sapien
agaatgctcaggagccaagggacaaattataag

SEQ ID NO: 192120 - DNA, 33 bp, Homo sapien
agaatgctcaggagccgagggacaaattataag

SEQ ID NO: 192121 - DNA, 33 bp, Homo sapien
taaaattggactaacaaaacctatattgggagg

SEQ ID NO: 192122 - DNA, 33 bp, Homo sapien
taaaattggactaacagaacctatattgggagg

SEQ ID NO: 192123 - DNA, 33 bp, Homo sapien
tgagtgcccagagaacagtaaggagggaagccc

SEQ ID NO: 192124 - DNA, 33 bp, Homo sapien
tgagtgcccagagaacggtaaggagggaagccc

SEQ ID NO: 192125 - DNA, 33 bp, Homo sapien
aaggcaagtgttgtgaagtgggacctaatggga

SEQ ID NO: 192126 - DNA, 33 bp, Homo sapien
aaggcaagtgttgtgaggtgggacctaatggga

SEQ ID NO: 192127 - DNA, 33 bp, Homo sapien
tactgcagttgatcaccggtcctatcctccctg

SEQ ID NO: 192128 - DNA, 33 bp, Homo sapien
tactgcagttgatcacgggtcctatcctccctg

SEQ ID NO: 192129 - DNA, 33 bp, Homo sapien
aaatattcattgttctcacttctactttgtcta

SEQ ID NO: 192130 - DNA, 33 bp, Homo sapien
aaatattcattgttctgacttctactttgtcta

SEQ ID NO: 192131 - DNA, 33 bp, Homo sapien
gctgtgtaccctttccactgaagtcctgaatat

SEQ ID NO: 192132 - DNA, 33 bp, Homo sapien
gctgtgtaccctttccgctgaagtcctgaatat

SEQ ID NO: 192133 - DNA, 33 bp, Homo sapien
ctccttcctcttggacactaagcctcccaaact

SEQ ID NO: 192134 - DNA, 33 bp, Homo sapien
ctccttcctcttggactctaagcctcccaaact

SEQ ID NO: 192135 - DNA, 33 bp, Homo sapien
gcttggggaatgtgtacgagtctgctggtgctg

SEQ ID NO: 192136 - DNA, 33 bp, Homo sapien
gcttggggaatgtgtatgagtctgctggtgctg

SEQ ID NO: 192137 - DNA, 33 bp, Homo sapien
cacagctgaggattcactacagcttggggaatg

SEQ ID NO: 192138 - DNA, 33 bp, Homo sapien
cacagctgaggattcattacagcttggggaatg

SEQ ID NO: 192139 - DNA, 33 bp, Homo sapien
ttctccctttataacaagctcctatactatgcc

SEQ ID NO: 192140 - DNA, 33 bp, Homo sapien
ttctccctttataacaggctcctatactatgcc

SEQ ID NO: 192141 - DNA, 33 bp, Homo sapien
gaagaggagtttggaaataaaagaggtgcacag

SEQ ID NO: 192142 - DNA, 33 bp, Homo sapien
gaagaggagtttggaagtaaaagaggtgcacag

SEQ ID NO: 192143 - DNA, 33 bp, Homo sapien
ctctcctaaaatggacgcacaactcttcctctc

SEQ ID NO: 192144 - DNA, 33 bp, Homo sapien
ctctcctaaaatggactcacaactcttcctctc

SEQ ID NO: 192145 - DNA, 33 bp, Homo sapien
gtagaacagaatttaactgaagtaagtcaggca

SEQ ID NO: 192146 - DNA, 33 bp, Homo sapien
gtagaacagaatttaagtgaagtaagtcaggca

SEQ ID NO: 192147 - DNA, 33 bp, Homo sapien
aaaaatgtaaactccaatcttagctgacaggtt

SEQ ID NO: 192148 - DNA, 33 bp, Homo sapien
aaaaatgtaaactccattcttagctgacaggtt

SEQ ID NO: 192149 - DNA, 33 bp, Homo sapien
tctctagagctgttcaatacagaagccactgtc

SEQ ID NO: 192150 - DNA, 33 bp, Homo sapien
tctctagagctgttcagtacagaagccactgtc

SEQ ID NO: 192151 - DNA, 33 bp, Homo sapien
tgttttgaggctcaaacgaaaaaatctgtggaa

SEQ ID NO: 192152 - DNA, 33 bp, Homo sapien
tgttttgaggctcaaatgaaaaaatctgtggaa

SEQ ID NO: 192153 - DNA, 33 bp, Homo sapien
cagatgttggcaaacaatgaccacaggcacatc

SEQ ID NO: 192154 - DNA, 33 bp, Homo sapien
cagatgttggcaaacagtgaccacaggcacatc

SEQ ID NO: 192155 - DNA, 33 bp, Homo sapien
aatctgcctaactcttcaaaatcccaggctccg

SEQ ID NO: 192156 - DNA, 33 bp, Homo sapien
aatctgcctaactctttaaaatcccaggctccg

SEQ ID NO: 192157 - DNA, 33 bp, Homo sapien
tctgagtcaagaagtgcaacattccatgtagag

SEQ ID NO: 192158 - DNA, 33 bp, Homo sapien
tctgagtcaagaagtgtaacattccatgtagag

SEQ ID NO: 192159 - DNA, 33 bp, Homo sapien
ttcaaggaaattgaaccgctaattaacatgact

SEQ ID NO: 192160 - DNA, 33 bp, Homo sapien
ttcaaggaaattgaactgctaattaacatgact

SEQ ID NO: 192161 - DNA, 33 bp, Homo sapien
agccattaagccaaaacaaggagtaaattgtga

SEQ ID NO: 192162 - DNA, 33 bp, Homo sapien
agccattaagccaaaataaggagtaaattgtga

SEQ ID NO: 192163 - DNA, 33 bp, Homo sapien
tttgatggtgaacaagacaaatgaatgatgctt

SEQ ID NO: 192164 - DNA, 33 bp, Homo sapien
tttgatggtgaacaaggcaaatgaatgatgctt

SEQ ID NO: 192165 - DNA, 33 bp, Homo sapien
ttaggcagcattgcagaaaaacaagttgtcaca

SEQ ID NO: 192166 - DNA, 33 bp, Homo sapien
ttaggcagcattgcagcaaaacaagttgtcaca

SEQ ID NO: 192167 - DNA, 33 bp, Homo sapien
ctgagctcttcttctgccactgtctattcctga

SEQ ID NO: 192168 - DNA, 33 bp, Homo sapien
ctgagctcttcttctggcactgtctattcctga

SEQ ID NO: 192169 - DNA, 33 bp, Homo sapien
atgaattcttgaaaacaatcgcttactattccc

SEQ ID NO: 192170 - DNA, 33 bp, Homo sapien
atgaattcttgaaaacgatcgcttactattccc

SEQ ID NO: 192171 - DNA, 33 bp, Homo sapien
tagtcctgcaacaattcaactccactagattgt

SEQ ID NO: 192172 - DNA, 33 bp, Homo sapien
tagtcctgcaacaattgaactccactagattgt

SEQ ID NO: 192173 - DNA, 33 bp, Homo sapien
atgtgttaggtactgaataagtagctttatata

SEQ ID NO: 192174 - DNA, 33 bp, Homo sapien
atgtgttaggtactgagtaagtagctttatata

SEQ ID NO: 192175 - DNA, 33 bp, Homo sapien
ctgtggcatctggggccataaatgtcttgctta

SEQ ID NO: 192176 - DNA, 33 bp, Homo sapien
ctgtggcatctggggctataaatgtcttgctta

SEQ ID NO: 192177 - DNA, 33 bp, Homo sapien
tgaaacaggttggaaacaattggcttttaaaga

SEQ ID NO: 192178 - DNA, 33 bp, Homo sapien
tgaaacaggttggaaataattggcttttaaaga

SEQ ID NO: 192179 - DNA, 33 bp, Homo sapien
atgaacagaaaactaaacaatgcgtgttattac

SEQ ID NO: 192180 - DNA, 33 bp, Homo sapien
atgaacagaaaactaatcaatgcgtgttattac

SEQ ID NO: 192181 - DNA, 33 bp, Homo sapien
gtgaaaaagtagatcccggagtacctcttgcaa

SEQ ID NO: 192182 - DNA, 33 bp, Homo sapien
gtgaaaaagtagatcctggagtacctcttgcaa

SEQ ID NO: 192183 - DNA, 33 bp, Homo sapien
catgaaagggtccctgcagattcccaggaatac

SEQ ID NO: 192184 - DNA, 33 bp, Homo sapien
catgaaagggtccctggagattcccaggaatac

SEQ ID NO: 192185 - DNA, 33 bp, Homo sapien
aagggaatgacaggcaagtgtgtacccccttct

SEQ ID NO: 192186 - DNA, 33 bp, Homo sapien
aagggaatgacaggcatgtgtgtacccccttct

SEQ ID NO: 192187 - DNA, 33 bp, Homo sapien
ctgactcattttctaccctttctctgagatttc

SEQ ID NO: 192188 - DNA, 33 bp, Homo sapien
ctgactcattttctacgctttctctgagatttc

SEQ ID NO: 192189 - DNA, 33 bp, Homo sapien
tcaagaggcatgctaaatctccattgttttctg

SEQ ID NO: 192190 - DNA, 33 bp, Homo sapien
tcaagaggcatgctaagtctccattgttttctg

SEQ ID NO: 192191 - DNA, 33 bp, Homo sapien
agatttctctcacctccagctaggttgcttttc

SEQ ID NO: 192192 - DNA, 33 bp, Homo sapien
agatttctctcacctctagctaggttgcttttc

SEQ ID NO: 192193 - DNA, 33 bp, Homo sapien
agttgtggctgcacaacaggaggaggaaagatt

SEQ ID NO: 192194 - DNA, 33 bp, Homo sapien
agttgtggctgcacaataggaggaggaaagatt

SEQ ID NO: 192195 - DNA, 33 bp, Homo sapien
attaatcccaccagtacgataactcctgtgttg

SEQ ID NO: 192196 - DNA, 33 bp, Homo sapien
attaatcccaccagtatgataactcctgtgttg

SEQ ID NO: 192197 - DNA, 33 bp, Homo sapien
accctgctggataagaagtctggttgtcaggga

SEQ ID NO: 192198 - DNA, 33 bp, Homo sapien
accctgctggataagaggtctggttgtcaggga

SEQ ID NO: 192199 - DNA, 33 bp, Homo sapien
gtcttgggccctttacaactgttccacctctat

SEQ ID NO: 192200 - DNA, 33 bp, Homo sapien
gtcttgggccctttaccactgttccacctctat

SEQ ID NO: 192201 - DNA, 33 bp, Homo sapien
agctctttatcaattcaattcctgagaagggcc

SEQ ID NO: 192202 - DNA, 33 bp, Homo sapien
agctctttatcaattctattcctgagaagggcc

SEQ ID NO: 192203 - DNA, 33 bp, Homo sapien
catcggggtttgaaaacaccactccagagcaca

SEQ ID NO: 192204 - DNA, 33 bp, Homo sapien
catcggggtttgaaaataccactccagagcaca

SEQ ID NO: 192205 - DNA, 33 bp, Homo sapien
tctccacagcaggttcccatcacccaactcaat

SEQ ID NO: 192206 - DNA, 33 bp, Homo sapien
tctccacagcaggttctcatcacccaactcaat

SEQ ID NO: 192207 - DNA, 33 bp, Homo sapien
gtgataaatatcacaaaacaaaccatagcaaaa

SEQ ID NO: 192208 - DNA, 33 bp, Homo sapien
gtgataaatatcacaagacaaaccatagcaaaa

SEQ ID NO: 192209 - DNA, 33 bp, Homo sapien
ttcttgccccctgtcaccagaagtagatctggc

SEQ ID NO: 192210 - DNA, 33 bp, Homo sapien
ttcttgccccctgtcatcagaagtagatctggc

SEQ ID NO: 192211 - DNA, 33 bp, Homo sapien
ccttacacagctggtacggtgggccgttgtcaa

SEQ ID NO: 192212 - DNA, 33 bp, Homo sapien
ccttacacagctggtatggtgggccgttgtcaa

SEQ ID NO: 192213 - DNA, 33 bp, Homo sapien
ctgaagcttcttccaaaataccaggatgactcc

SEQ ID NO: 192214 - DNA, 33 bp, Homo sapien
ctgaagcttcttccaacataccaggatgactcc

SEQ ID NO: 192215 - DNA, 33 bp, Homo sapien
agttcctactaaaaccaattagagataaaaacc

SEQ ID NO: 192216 - DNA, 33 bp, Homo sapien
agttcctactaaaacctattagagataaaaacc

SEQ ID NO: 192217 - DNA, 33 bp, Homo sapien
gcaagccccaacaccaaccagtttattggccct

SEQ ID NO: 192218 - DNA, 33 bp, Homo sapien
gcaagccccaacaccatccagtttattggccct

SEQ ID NO: 192219 - DNA, 33 bp, Homo sapien
gcttaaaaactcaggaagaatagggtcacccaa

SEQ ID NO: 192220 - DNA, 33 bp, Homo sapien
gcttaaaaactcaggacgaatagggtcacccaa

SEQ ID NO: 192221 - DNA, 33 bp, Homo sapien
tttggttctttttgaacagttgctaataatttt

SEQ ID NO: 192222 - DNA, 33 bp, Homo sapien
tttggttctttttgaagagttgctaataatttt

SEQ ID NO: 192223 - DNA, 33 bp, Homo sapien
ctgcttgtcctctccacaagtgaagataatatc

SEQ ID NO: 192224 - DNA, 33 bp, Homo sapien
ctgcttgtcctctccataagtgaagataatatc

SEQ ID NO: 192225 - DNA, 33 bp, Homo sapien
ggagccattatttgaaacttgaacaatggaaag

SEQ ID NO: 192226 - DNA, 33 bp, Homo sapien
ggagccattatttgaaccttgaacaatggaaag

SEQ ID NO: 192227 - DNA, 33 bp, Homo sapien
cttaaggagcctaaaacctaataggaaagaaaa

SEQ ID NO: 192228 - DNA, 33 bp, Homo sapien
cttaaggagcctaaaatctaataggaaagaaaa

SEQ ID NO: 192229 - DNA, 33 bp, Homo sapien
ctaccactggtgttctcagaaaggctctggccc

SEQ ID NO: 192230 - DNA, 33 bp, Homo sapien
ctaccactggtgttcttagaaaggctctggccc

SEQ ID NO: 192231 - DNA, 33 bp, Homo sapien
tctggaggtaaaaagacgtacttcacagaggaa

SEQ ID NO: 192232 - DNA, 33 bp, Homo sapien
tctggaggtaaaaagatgtacttcacagaggaa

SEQ ID NO: 192233 - DNA, 33 bp, Homo sapien
acaaggatcatataaaagtaatcatctcaattc

SEQ ID NO: 192234 - DNA, 33 bp, Homo sapien
acaaggatcatataaatgtaatcatctcaattc

SEQ ID NO: 192235 - DNA, 33 bp, Homo sapien
ctcagattctgtcttaagagttttccatctacc

SEQ ID NO: 192236 - DNA, 33 bp, Homo sapien
ctcagattctgtcttacgagttttccatctacc

SEQ ID NO: 192237 - DNA, 33 bp, Homo sapien
ctcttaaggcctttacaaggttggcagaagagt

SEQ ID NO: 192238 - DNA, 33 bp, Homo sapien
ctcttaaggcctttacgaggttggcagaagagt

SEQ ID NO: 192239 - DNA, 33 bp, Homo sapien
ttttaataaagcactccgaatatttcaaatgtg

SEQ ID NO: 192240 - DNA, 33 bp, Homo sapien
ttttaataaagcactctgaatatttcaaatgtg

SEQ ID NO: 192241 - DNA, 33 bp, Homo sapien
ccaggggacatcccagacgacagtgcagctttc

SEQ ID NO: 192242 - DNA, 33 bp, Homo sapien
ccaggggacatcccaggcgacagtgcagctttc

SEQ ID NO: 192243 - DNA, 33 bp, Homo sapien
tgtgtttggaatttcaaatggaagggatgtcgg

SEQ ID NO: 192244 - DNA, 33 bp, Homo sapien
tgtgtttggaatttcagatggaagggatgtcgg

SEQ ID NO: 192245 - DNA, 33 bp, Homo sapien
aatgatgccttacaccagaaaagcactttcccc

SEQ ID NO: 192246 - DNA, 33 bp, Homo sapien
aatgatgccttacaccggaaaagcactttcccc

SEQ ID NO: 192247 - DNA, 33 bp, Homo sapien
gatcttctgtttaagccgaagcctggggaaaga

SEQ ID NO: 192248 - DNA, 33 bp, Homo sapien
gatcttctgtttaagctgaagcctggggaaaga

SEQ ID NO: 192249 - DNA, 33 bp, Homo sapien
tgctatcagccacctagagtgttctaaattcat

SEQ ID NO: 192250 - DNA, 33 bp, Homo sapien
tgctatcagccacctatagtgttctaaattcat

SEQ ID NO: 192251 - DNA, 33 bp, Homo sapien
agtaaccttgtaatagaaaccttacctgcaccc

SEQ ID NO: 192252 - DNA, 33 bp, Homo sapien
agtaaccttgtaataggaaccttacctgcaccc

SEQ ID NO: 192253 - DNA, 33 bp, Homo sapien
tagggagggatgataaacttcattcacctattc

SEQ ID NO: 192254 - DNA, 33 bp, Homo sapien
tagggagggatgataagcttcattcacctattc

SEQ ID NO: 192255 - DNA, 33 bp, Homo sapien
gaagtgcttccttaaaaagttcaatatgaattg

SEQ ID NO: 192256 - DNA, 33 bp, Homo sapien
gaagtgcttccttaaagagttcaatatgaattg

SEQ ID NO: 192257 - DNA, 33 bp, Homo sapien
taattttttggtaagcacctgtcttgtgcctgg

SEQ ID NO: 192258 - DNA, 33 bp, Homo sapien
taattttttggtaagcgcctgtcttgtgcctgg

SEQ ID NO: 192259 - DNA, 33 bp, Homo sapien
gacacaacttgagtgcaacctttctatgtgact

SEQ ID NO: 192260 - DNA, 33 bp, Homo sapien
gacacaacttgagtgccacctttctatgtgact

SEQ ID NO: 192261 - DNA, 33 bp, Homo sapien
agactgagagacaaaaggtttcattgaactata

SEQ ID NO: 192262 - DNA, 33 bp, Homo sapien
agactgagagacaaaatgtttcattgaactata

SEQ ID NO: 192263 - DNA, 33 bp, Homo sapien
tgatatttttcttacacagatggtcatcacaga

SEQ ID NO: 192264 - DNA, 33 bp, Homo sapien
tgatatttttcttacatagatggtcatcacaga

SEQ ID NO: 192265 - DNA, 33 bp, Homo sapien
tctcctccaaggctccaggaaacaactgctttg

SEQ ID NO: 192266 - DNA, 33 bp, Homo sapien
tctcctccaaggctcccggaaacaactgctttg

SEQ ID NO: 192267 - DNA, 33 bp, Homo sapien
ggtgaggatatgaggaacataatacagagtaaa

SEQ ID NO: 192268 - DNA, 33 bp, Homo sapien
ggtgaggatatgaggagcataatacagagtaaa

SEQ ID NO: 192269 - DNA, 33 bp, Homo sapien
ttagaggtcttcatgaagttatacagattctga

SEQ ID NO: 192270 - DNA, 33 bp, Homo sapien
ttagaggtcttcatgaggttatacagattctga

SEQ ID NO: 192271 - DNA, 33 bp, Homo sapien
cttatcaaatgaaggaagttttgttgttgctgc

SEQ ID NO: 192272 - DNA, 33 bp, Homo sapien
cttatcaaatgaaggaggttttgttgttgctgc

SEQ ID NO: 192273 - DNA, 33 bp, Homo sapien
tcatttggttcatatccagggctccaggatgaa

SEQ ID NO: 192274 - DNA, 33 bp, Homo sapien
tcatttggttcatatcgagggctccaggatgaa

SEQ ID NO: 192275 - DNA, 33 bp, Homo sapien
tacaaaatgatttacaagtgatactctcacagt

SEQ ID NO: 192276 - DNA, 33 bp, Homo sapien
tacaaaatgatttacaggtgatactctcacagt

SEQ ID NO: 192277 - DNA, 33 bp, Homo sapien
actcataagagaacaaatcaggttaacacacat

SEQ ID NO: 192278 - DNA, 33 bp, Homo sapien
actcataagagaacaagtcaggttaacacacat

SEQ ID NO: 192279 - DNA, 33 bp, Homo sapien
cacatctgtcatcaaaagaggagagagcaacaa

SEQ ID NO: 192280 - DNA, 33 bp, Homo sapien
cacatctgtcatcaaaggaggagagagcaacaa

SEQ ID NO: 192281 - DNA, 33 bp, Homo sapien
gcgtaccatattcttccagcccaagatttgatt

SEQ ID NO: 192282 - DNA, 33 bp, Homo sapien
gcgtaccatattcttctagcccaagatttgatt

SEQ ID NO: 192283 - DNA, 33 bp, Homo sapien
aagtggactggaatccaagtctataccatctgg

SEQ ID NO: 192284 - DNA, 33 bp, Homo sapien
aagtggactggaatccgagtctataccatctgg

SEQ ID NO: 192285 - DNA, 33 bp, Homo sapien
tagttaagggaaaaataagtggatagatgggta

SEQ ID NO: 192286 - DNA, 33 bp, Homo sapien
tagttaagggaaaaatcagtggatagatgggta

SEQ ID NO: 192287 - DNA, 33 bp, Homo sapien
agagatccaaagaaacaaagcaaataccaccta

SEQ ID NO: 192288 - DNA, 33 bp, Homo sapien
agagatccaaagaaacgaagcaaataccaccta

SEQ ID NO: 192289 - DNA, 33 bp, Homo sapien
gtgcacatcggctcacaacgggaaatgtccaca

SEQ ID NO: 192290 - DNA, 33 bp, Homo sapien
gtgcacatcggctcaccacgggaaatgtccaca

SEQ ID NO: 192291 - DNA, 33 bp, Homo sapien
tttttttttgaaataaagattcaagtgcaagtt

SEQ ID NO: 192292 - DNA, 33 bp, Homo sapien
tttttttttgaaataatgattcaagtgcaagtt

SEQ ID NO: 192293 - DNA, 33 bp, Homo sapien
tggggagattctgccacgtctgatttgaattct

SEQ ID NO: 192294 - DNA, 33 bp, Homo sapien
tggggagattctgccatgtctgatttgaattct

SEQ ID NO: 192295 - DNA, 33 bp, Homo sapien
gaggaaaatgtagagaaaagtgatattccccct

SEQ ID NO: 192296 - DNA, 33 bp, Homo sapien
gaggaaaatgtagagagaagtgatattccccct

SEQ ID NO: 192297 - DNA, 33 bp, Homo sapien
acccagccttggaagacgtatgtcattatttct

SEQ ID NO: 192298 - DNA, 33 bp, Homo sapien
acccagccttggaagatgtatgtcattatttct

SEQ ID NO: 192299 - DNA, 33 bp, Homo sapien
aagatgcaccagagaaaccctaaggtcagctga

SEQ ID NO: 192300 - DNA, 33 bp, Homo sapien
aagatgcaccagagaagccctaaggtcagctga

SEQ ID NO: 192301 - DNA, 33 bp, Homo sapien
agccagtacccccaaagtcttccttatcaaagg

SEQ ID NO: 192302 - DNA, 33 bp, Homo sapien
agccagtacccccaaattcttccttatcaaagg

SEQ ID NO: 192303 - DNA, 33 bp, Homo sapien
tggaatggagttgcgacatctgtgggagaggaa

SEQ ID NO: 192304 - DNA, 33 bp, Homo sapien
tggaatggagttgcgagatctgtgggagaggaa

SEQ ID NO: 192305 - DNA, 33 bp, Homo sapien
agaacactaacaaatgcactgatttcaacctag

SEQ ID NO: 192306 - DNA, 33 bp, Homo sapien
agaacactaacaaatggactgatttcaacctag

SEQ ID NO: 192307 - DNA, 33 bp, Homo sapien
actgatcttttatttaggcttagcaactttttt

SEQ ID NO: 192308 - DNA, 33 bp, Homo sapien
actgatcttttatttatgcttagcaactttttt

SEQ ID NO: 192309 - DNA, 33 bp, Homo sapien
tgcagtagcagaggaactgtaggttgactctgg

SEQ ID NO: 192310 - DNA, 33 bp, Homo sapien
tgcagtagcagaggaattgtaggttgactctgg

SEQ ID NO: 192311 - DNA, 33 bp, Homo sapien
agtctctcttcctgataagcccttaaccccctg

SEQ ID NO: 192312 - DNA, 33 bp, Homo sapien
agtctctcttcctgatgagcccttaaccccctg

SEQ ID NO: 192313 - DNA, 33 bp, Homo sapien
ttggtctcacttctcagggttggatgaggggag

SEQ ID NO: 192314 - DNA, 33 bp, Homo sapien
ttggtctcacttctcatggttggatgaggggag

SEQ ID NO: 192315 - DNA, 33 bp, Homo sapien
cttctcttcaggcctcaatttctttgcctatac

SEQ ID NO: 192316 - DNA, 33 bp, Homo sapien
cttctcttcaggcctccatttctttgcctatac

SEQ ID NO: 192317 - DNA, 33 bp, Homo sapien
atttctttgcctatacaatgaagcagatgacac

SEQ ID NO: 192318 - DNA, 33 bp, Homo sapien
atttctttgcctatactatgaagcagatgacac

SEQ ID NO: 192319 - DNA, 33 bp, Homo sapien
atgctctagtgaaaaaaaattctgctccttcaa

SEQ ID NO: 192320 - DNA, 33 bp, Homo sapien
atgctctagtgaaaaacaattctgctccttcaa

SEQ ID NO: 192321 - DNA, 33 bp, Homo sapien
ataatttacatacaacaaaatgcatacacttta

SEQ ID NO: 192322 - DNA, 33 bp, Homo sapien
ataatttacatacaacgaaatgcatacacttta

SEQ ID NO: 192323 - DNA, 33 bp, Homo sapien
gatgggaaatactgaactggggagtaggtgggt

SEQ ID NO: 192324 - DNA, 33 bp, Homo sapien
gatgggaaatactgaattggggagtaggtgggt

SEQ ID NO: 192325 - DNA, 33 bp, Homo sapien
agggggctttagcaacaggacaaggtatgttgc

SEQ ID NO: 192326 - DNA, 33 bp, Homo sapien
agggggctttagcaacgggacaaggtatgttgc

SEQ ID NO: 192327 - DNA, 33 bp, Homo sapien
gtgtggctaaaatccacatctgatgttaaaaga

SEQ ID NO: 192328 - DNA, 33 bp, Homo sapien
gtgtggctaaaatccatatctgatgttaaaaga

SEQ ID NO: 192329 - DNA, 33 bp, Homo sapien
ttctgcattgggccataagcttagttaggacag

SEQ ID NO: 192330 - DNA, 33 bp, Homo sapien
ttctgcattgggccatgagcttagttaggacag

SEQ ID NO: 192331 - DNA, 33 bp, Homo sapien
tgttaactgttactaccactgttagctattatc

SEQ ID NO: 192332 - DNA, 33 bp, Homo sapien
tgttaactgttactactactgttagctattatc

SEQ ID NO: 192333 - DNA, 33 bp, Homo sapien
ttttctctctgccccaagcactgtttatgcaac

SEQ ID NO: 192334 - DNA, 33 bp, Homo sapien
ttttctctctgccccaggcactgtttatgcaac

SEQ ID NO: 192335 - DNA, 33 bp, Homo sapien
tgggatgtataaaaaacgacctgcataacatgg

SEQ ID NO: 192336 - DNA, 33 bp, Homo sapien
tgggatgtataaaaaaggacctgcataacatgg

SEQ ID NO: 192337 - DNA, 33 bp, Homo sapien
ttttttaacacttagccctttgcttctcttgaa

SEQ ID NO: 192338 - DNA, 33 bp, Homo sapien
ttttttaacacttagcgctttgcttctcttgaa

SEQ ID NO: 192339 - DNA, 33 bp, Homo sapien
gtctctactgagtaggaaaagtgggatggcagc

SEQ ID NO: 192340 - DNA, 33 bp, Homo sapien
gtctctactgagtagggaaagtgggatggcagc

SEQ ID NO: 192341 - DNA, 33 bp, Homo sapien
tcactgttgctgggcacccggactgagtctacc

SEQ ID NO: 192342 - DNA, 33 bp, Homo sapien
tcactgttgctgggcagccggactgagtctacc

SEQ ID NO: 192343 - DNA, 33 bp, Homo sapien
aatgaagataggaccccctctaattattcatag

SEQ ID NO: 192344 - DNA, 33 bp, Homo sapien
aatgaagataggaccctctctaattattcatag

SEQ ID NO: 192345 - DNA, 33 bp, Homo sapien
tctctgccaaaaaaaaagatttatctctacctt

SEQ ID NO: 192346 - DNA, 33 bp, Homo sapien
tctctgccaaaaaaaaggatttatctctacctt

SEQ ID NO: 192347 - DNA, 33 bp, Homo sapien
aaatgttaactacttaaattcagcagttttaaa

SEQ ID NO: 192348 - DNA, 33 bp, Homo sapien
aaatgttaactacttagattcagcagttttaaa

SEQ ID NO: 192349 - DNA, 33 bp, Homo sapien
gcatggaatcctgagggcagatacagatctact

SEQ ID NO: 192350 - DNA, 33 bp, Homo sapien
gcatggaatcctgaggtcagatacagatctact

SEQ ID NO: 192351 - DNA, 33 bp, Homo sapien
agaacggcacctcttaccagtactcatctccgg

SEQ ID NO: 192352 - DNA, 33 bp, Homo sapien
agaacggcacctcttagcagtactcatctccgg

SEQ ID NO: 192353 - DNA, 33 bp, Homo sapien
tgtttcttgggagatacaagttatagattggga

SEQ ID NO: 192354 - DNA, 33 bp, Homo sapien
tgtttcttgggagatagaagttatagattggga

SEQ ID NO: 192355 - DNA, 33 bp, Homo sapien
cttctgcagctccttccactaatgcatgcccag

SEQ ID NO: 192356 - DNA, 33 bp, Homo sapien
cttctgcagctccttctactaatgcatgcccag

SEQ ID NO: 192357 - DNA, 33 bp, Homo sapien
attttcttaaaatccacgcacatttgatttctc

SEQ ID NO: 192358 - DNA, 33 bp, Homo sapien
attttcttaaaatccatgcacatttgatttctc

SEQ ID NO: 192359 - DNA, 33 bp, Homo sapien
tacagccaaacagaaacgggttcaactcctact

SEQ ID NO: 192360 - DNA, 33 bp, Homo sapien
tacagccaaacagaaatgggttcaactcctact

SEQ ID NO: 192361 - DNA, 33 bp, Homo sapien
tgcccttcgttaagcacctctatcggccaacgt

SEQ ID NO: 192362 - DNA, 33 bp, Homo sapien
tgcccttcgttaagcatctctatcggccaacgt

SEQ ID NO: 192363 - DNA, 33 bp, Homo sapien
aagactatgatctgctaaacatgctgagagagg

SEQ ID NO: 192364 - DNA, 33 bp, Homo sapien
aagactatgatctgctcaacatgctgagagagg

SEQ ID NO: 192365 - DNA, 33 bp, Homo sapien
ggaaggagatgtgtataaaggggtaagcaagaa

SEQ ID NO: 192366 - DNA, 33 bp, Homo sapien
ggaaggagatgtgtatgaaggggtaagcaagaa

SEQ ID NO: 192367 - DNA, 33 bp, Homo sapien
aggtatcaaagtgctacggttttgaatttcctt

SEQ ID NO: 192368 - DNA, 33 bp, Homo sapien
aggtatcaaagtgctatggttttgaatttcctt

SEQ ID NO: 192369 - DNA, 33 bp, Homo sapien
cagctagctttttacaaatctccaaccttccaa

SEQ ID NO: 192370 - DNA, 33 bp, Homo sapien
cagctagctttttacacatctccaaccttccaa

SEQ ID NO: 192371 - DNA, 33 bp, Homo sapien
cctggtacaggcaacaactgcagagcggaaggg

SEQ ID NO: 192372 - DNA, 33 bp, Homo sapien
cctggtacaggcaacacctgcagagcggaaggg

SEQ ID NO: 192373 - DNA, 33 bp, Homo sapien
caagcctagaggaggaactatttggagccacta

SEQ ID NO: 192374 - DNA, 33 bp, Homo sapien
caagcctagaggaggagctatttggagccacta

SEQ ID NO: 192375 - DNA, 33 bp, Homo sapien
acaaagacgctctgtacccatcaggaatgtagt

SEQ ID NO: 192376 - DNA, 33 bp, Homo sapien
acaaagacgctctgtatccatcaggaatgtagt

SEQ ID NO: 192377 - DNA, 33 bp, Homo sapien
aatggcactaagagagaaattaagcttcacagg

SEQ ID NO: 192378 - DNA, 33 bp, Homo sapien
aatggcactaagagagcaattaagcttcacagg

SEQ ID NO: 192379 - DNA, 33 bp, Homo sapien
gtaactctctagggaacgcagtccagttctgtg

SEQ ID NO: 192380 - DNA, 33 bp, Homo sapien
gtaactctctagggaatgcagtccagttctgtg

SEQ ID NO: 192381 - DNA, 33 bp, Homo sapien
aagccctgaatactgacggctgtgcagctgcta

SEQ ID NO: 192382 - DNA, 33 bp, Homo sapien
aagccctgaatactgatggctgtgcagctgcta

SEQ ID NO: 192383 - DNA, 33 bp, Homo sapien
ttaatggctgatcaaacgggtaccatgacggtg

SEQ ID NO: 192384 - DNA, 33 bp, Homo sapien
ttaatggctgatcaaatgggtaccatgacggtg

SEQ ID NO: 192385 - DNA, 33 bp, Homo sapien
tctgcaagtgaccaaagctggaagcctctctca

SEQ ID NO: 192386 - DNA, 33 bp, Homo sapien
tctgcaagtgaccaaatctggaagcctctctca

SEQ ID NO: 192387 - DNA, 33 bp, Homo sapien
gcatacatccatttcacagacatctctgaacgt

SEQ ID NO: 192388 - DNA, 33 bp, Homo sapien
gcatacatccatttcatagacatctctgaacgt

SEQ ID NO: 192389 - DNA, 33 bp, Homo sapien
gaagaaggcaaatgcacagtgggcgccactaac

SEQ ID NO: 192390 - DNA, 33 bp, Homo sapien
gaagaaggcaaatgcagagtgggcgccactaac

SEQ ID NO: 192391 - DNA, 33 bp, Homo sapien
cagaaacgtttctcaactggcctctccctgtcc

SEQ ID NO: 192392 - DNA, 33 bp, Homo sapien
cagaaacgtttctcaagtggcctctccctgtcc

SEQ ID NO: 192393 - DNA, 33 bp, Homo sapien
tgtggggaataagtaactgagctagtctatgtg

SEQ ID NO: 192394 - DNA, 33 bp, Homo sapien
tgtggggaataagtaattgagctagtctatgtg

SEQ ID NO: 192395 - DNA, 33 bp, Homo sapien
tcaagttcaaccagacagcacatgctacccctt

SEQ ID NO: 192396 - DNA, 33 bp, Homo sapien
tcaagttcaaccagacggcacatgctacccctt

SEQ ID NO: 192397 - DNA, 33 bp, Homo sapien
gcaagcagagctggccaccttccaagagtctca

SEQ ID NO: 192398 - DNA, 33 bp, Homo sapien
gcaagcagagctggccgccttccaagagtctca

SEQ ID NO: 192399 - DNA, 33 bp, Homo sapien
atttgtggaattaagacggtgtcagagacaatt

SEQ ID NO: 192400 - DNA, 33 bp, Homo sapien
atttgtggaattaagatggtgtcagagacaatt

SEQ ID NO: 192401 - DNA, 33 bp, Homo sapien
ggccaggaggcccttccaagagagctgctgcca

SEQ ID NO: 192402 - DNA, 33 bp, Homo sapien
ggccaggaggcccttctaagagagctgctgcca

SEQ ID NO: 192403 - DNA, 33 bp, Homo sapien
ctagatcctttgcaaaatggaagtcttcaagca

SEQ ID NO: 192404 - DNA, 33 bp, Homo sapien
ctagatcctttgcaaagtggaagtcttcaagca

SEQ ID NO: 192405 - DNA, 33 bp, Homo sapien
tcatggctggtggaaaagtgtctttgtgcaggc

SEQ ID NO: 192406 - DNA, 33 bp, Homo sapien
tcatggctggtggaaacgtgtctttgtgcaggc

SEQ ID NO: 192407 - DNA, 33 bp, Homo sapien
aagagtaaatgaaagcagaaaggaactgacaac

SEQ ID NO: 192408 - DNA, 33 bp, Homo sapien
aagagtaaatgaaagcggaaaggaactgacaac

SEQ ID NO: 192409 - DNA, 33 bp, Homo sapien
acatcccaccagtagaaactcattcctttgagt

SEQ ID NO: 192410 - DNA, 33 bp, Homo sapien
acatcccaccagtagagactcattcctttgagt

SEQ ID NO: 192411 - DNA, 33 bp, Homo sapien
tccagacaggagggaaaagtctaacagttctgc

SEQ ID NO: 192412 - DNA, 33 bp, Homo sapien
tccagacaggagggaagagtctaacagttctgc

SEQ ID NO: 192413 - DNA, 33 bp, Homo sapien
tcttacatcgccaacacgaaggcctcccagagg

SEQ ID NO: 192414 - DNA, 33 bp, Homo sapien
tcttacatcgccaacaggaaggcctcccagagg

SEQ ID NO: 192415 - DNA, 33 bp, Homo sapien
gatttggcttcgaaaaagagtcagtaagaaata

SEQ ID NO: 192416 - DNA, 33 bp, Homo sapien
gatttggcttcgaaaaggagtcagtaagaaata

SEQ ID NO: 192417 - DNA, 33 bp, Homo sapien
ttcaattatggcctacagaatagtgttatgttc

SEQ ID NO: 192418 - DNA, 33 bp, Homo sapien
ttcaattatggcctactgaatagtgttatgttc

SEQ ID NO: 192419 - DNA, 33 bp, Homo sapien
atagataatgtggcccagaatatggccatagga

SEQ ID NO: 192420 - DNA, 33 bp, Homo sapien
atagataatgtggcccggaatatggccatagga

SEQ ID NO: 192421 - DNA, 33 bp, Homo sapien
actcttccagctttggaaatgcaaattccaata

SEQ ID NO: 192422 - DNA, 33 bp, Homo sapien
actcttccagctttggtaatgcaaattccaata

SEQ ID NO: 192423 - DNA, 33 bp, Homo sapien
tttctctcaacagtcccacgaggtacaaggcta

SEQ ID NO: 192424 - DNA, 33 bp, Homo sapien
tttctctcaacagtcctacgaggtacaaggcta

SEQ ID NO: 192425 - DNA, 33 bp, Homo sapien
actgtgagtagaattacgcaaggccagaaattg

SEQ ID NO: 192426 - DNA, 33 bp, Homo sapien
actgtgagtagaattatgcaaggccagaaattg

SEQ ID NO: 192427 - DNA, 33 bp, Homo sapien
aggtcaaagacacattaaaggaaaggctctatt

SEQ ID NO: 192428 - DNA, 33 bp, Homo sapien
aggtcaaagacacattgaaggaaaggctctatt

SEQ ID NO: 192429 - DNA, 33 bp, Homo sapien
caggcacagctgctcacggttaatgtgaggctt

SEQ ID NO: 192430 - DNA, 33 bp, Homo sapien
caggcacagctgctcatggttaatgtgaggctt

SEQ ID NO: 192431 - DNA, 33 bp, Homo sapien
ctcctgctttcttctaccaggaaagagatttga

SEQ ID NO: 192432 - DNA, 33 bp, Homo sapien
ctcctgctttcttctatcaggaaagagatttga

SEQ ID NO: 192433 - DNA, 33 bp, Homo sapien
aggccaagctaagggcagaaaagaaaggaatgg

SEQ ID NO: 192434 - DNA, 33 bp, Homo sapien
aggccaagctaagggcggaaaagaaaggaatgg

SEQ ID NO: 192435 - DNA, 33 bp, Homo sapien
cattcaaaccataacaaccagatgtttccagtt

SEQ ID NO: 192436 - DNA, 33 bp, Homo sapien
cattcaaaccataacagccagatgtttccagtt

SEQ ID NO: 192437 - DNA, 33 bp, Homo sapien
cctgattgctatacctaagcttatctctctgat

SEQ ID NO: 192438 - DNA, 33 bp, Homo sapien
cctgattgctatacctgagcttatctctctgat

SEQ ID NO: 192439 - DNA, 33 bp, Homo sapien
ctgcactcccttccaacgagttcagtgtcgtgg

SEQ ID NO: 192440 - DNA, 33 bp, Homo sapien
ctgcactcccttccaatgagttcagtgtcgtgg

SEQ ID NO: 192441 - DNA, 33 bp, Homo sapien
gtggtccaaagtctgacgagaaggcatgattaa

SEQ ID NO: 192442 - DNA, 33 bp, Homo sapien
gtggtccaaagtctgatgagaaggcatgattaa

SEQ ID NO: 192443 - DNA, 33 bp, Homo sapien
gatggaggaggaatcactaaactgttgaagcgc

SEQ ID NO: 192444 - DNA, 33 bp, Homo sapien
gatggaggaggaatcattaaactgttgaagcgc

SEQ ID NO: 192445 - DNA, 33 bp, Homo sapien
tgtcacagaggaagcactatatgaacctaggtt

SEQ ID NO: 192446 - DNA, 33 bp, Homo sapien
tgtcacagaggaagcattatatgaacctaggtt

SEQ ID NO: 192447 - DNA, 33 bp, Homo sapien
tctcaggttttcttaggattctaagcatattca

SEQ ID NO: 192448 - DNA, 33 bp, Homo sapien
tctcaggttttcttagtattctaagcatattca

SEQ ID NO: 192449 - DNA, 33 bp, Homo sapien
agccattggatttagaaacatctagacctgtat

SEQ ID NO: 192450 - DNA, 33 bp, Homo sapien
agccattggatttagagacatctagacctgtat

SEQ ID NO: 192451 - DNA, 33 bp, Homo sapien
gtagaacatattaggcaacaccctggaggatgt

SEQ ID NO: 192452 - DNA, 33 bp, Homo sapien
gtagaacatattaggcgacaccctggaggatgt

SEQ ID NO: 192453 - DNA, 33 bp, Homo sapien
agaatattaaaaaccaagatctgaggaatagat

SEQ ID NO: 192454 - DNA, 33 bp, Homo sapien
agaatattaaaaaccaggatctgaggaatagat

SEQ ID NO: 192455 - DNA, 33 bp, Homo sapien
cataattactgatcctcagaaattcctcactac

SEQ ID NO: 192456 - DNA, 33 bp, Homo sapien
cataattactgatccttagaaattcctcactac

SEQ ID NO: 192457 - DNA, 33 bp, Homo sapien
tggaaaatacagctggaaataaaggaaaatgga

SEQ ID NO: 192458 - DNA, 33 bp, Homo sapien
tggaaaatacagctgggaataaaggaaaatgga

SEQ ID NO: 192459 - DNA, 33 bp, Homo sapien
tcttgatcaagggtcaataaactaaagcctgct

SEQ ID NO: 192460 - DNA, 33 bp, Homo sapien
tcttgatcaagggtcagtaaactaaagcctgct

SEQ ID NO: 192461 - DNA, 33 bp, Homo sapien
tctgtgcctttggaaactggaccctttcaacat

SEQ ID NO: 192462 - DNA, 33 bp, Homo sapien
tctgtgcctttggaaattggaccctttcaacat

SEQ ID NO: 192463 - DNA, 33 bp, Homo sapien
ataacctgtttgccaggctgagttttatagcct

SEQ ID NO: 192464 - DNA, 33 bp, Homo sapien
ataacctgtttgccagtctgagttttatagcct

SEQ ID NO: 192465 - DNA, 33 bp, Homo sapien
tttgttcaacattaaacgacttttagcaatgag

SEQ ID NO: 192466 - DNA, 33 bp, Homo sapien
tttgttcaacattaaatgacttttagcaatgag

SEQ ID NO: 192467 - DNA, 33 bp, Homo sapien
ttacctttactttacaatcacttccattgttaa

SEQ ID NO: 192468 - DNA, 33 bp, Homo sapien
ttacctttactttacagtcacttccattgttaa

SEQ ID NO: 192469 - DNA, 33 bp, Homo sapien
gtagatttccctgacacggtaattggccttact

SEQ ID NO: 192470 - DNA, 33 bp, Homo sapien
gtagatttccctgacatggtaattggccttact

SEQ ID NO: 192471 - DNA, 33 bp, Homo sapien
aagttcccatttaaatcaagaaggagcaccatg

SEQ ID NO: 192472 - DNA, 33 bp, Homo sapien
aagttcccatttaaatgaagaaggagcaccatg

SEQ ID NO: 192473 - DNA, 33 bp, Homo sapien
tagggcaaaccaagaacgtacatggatggcact

SEQ ID NO: 192474 - DNA, 33 bp, Homo sapien
tagggcaaaccaagaaggtacatggatggcact

SEQ ID NO: 192475 - DNA, 33 bp, Homo sapien
aaatacgggtgatttgaacacaagtactgtgat

SEQ ID NO: 192476 - DNA, 33 bp, Homo sapien
aaatacgggtgatttggacacaagtactgtgat

SEQ ID NO: 192477 - DNA, 33 bp, Homo sapien
cacacccggctctcaccgcactttgaataacat

SEQ ID NO: 192478 - DNA, 33 bp, Homo sapien
cacacccggctctcactgcactttgaataacat

SEQ ID NO: 192479 - DNA, 33 bp, Homo sapien
acagaggaaatcaacactggtatgtacattttt

SEQ ID NO: 192480 - DNA, 33 bp, Homo sapien
acagaggaaatcaacattggtatgtacattttt

SEQ ID NO: 192481 - DNA, 33 bp, Homo sapien
ccttcaagcaaacataccctgcatcttctacat

SEQ ID NO: 192482 - DNA, 33 bp, Homo sapien
ccttcaagcaaacatatcctgcatcttctacat

SEQ ID NO: 192483 - DNA, 33 bp, Homo sapien
ccgtactgccaaaaaaaatctacaaattcaatg

SEQ ID NO: 192484 - DNA, 33 bp, Homo sapien
ccgtactgccaaaaaagatctacaaattcaatg

SEQ ID NO: 192485 - DNA, 33 bp, Homo sapien
tacaactattttcagacctctcaaggtggggct

SEQ ID NO: 192486 - DNA, 33 bp, Homo sapien
tacaactattttcagagctctcaaggtggggct

SEQ ID NO: 192487 - DNA, 33 bp, Homo sapien
aatagaatacagaagtcaatctgaaggtcatag

SEQ ID NO: 192488 - DNA, 33 bp, Homo sapien
aatagaatacagaagtgaatctgaaggtcatag

SEQ ID NO: 192489 - DNA, 33 bp, Homo sapien
aactgaaaatccgttaactcagtggctgcatgt

SEQ ID NO: 192490 - DNA, 33 bp, Homo sapien
aactgaaaatccgttatctcagtggctgcatgt

SEQ ID NO: 192491 - DNA, 33 bp, Homo sapien
attctattttcttccaaatatacgtaacacttt

SEQ ID NO: 192492 - DNA, 33 bp, Homo sapien
attctattttcttccatatatacgtaacacttt

SEQ ID NO: 192493 - DNA, 33 bp, Homo sapien
acgccaaatagaaaacagaagatcagctgttac

SEQ ID NO: 192494 - DNA, 33 bp, Homo sapien
acgccaaatagaaaacggaagatcagctgttac

SEQ ID NO: 192495 - DNA, 33 bp, Homo sapien
tatgcctgcaattccacgttggttgtgaatact

SEQ ID NO: 192496 - DNA, 33 bp, Homo sapien
tatgcctgcaattccatgttggttgtgaatact

SEQ ID NO: 192497 - DNA, 33 bp, Homo sapien
tcacctccaattcctacaccaactacatagaat

SEQ ID NO: 192498 - DNA, 33 bp, Homo sapien
tcacctccaattcctagaccaactacatagaat

SEQ ID NO: 192499 - DNA, 33 bp, Homo sapien
tagaatttttcacaaaactgaatggtattcatc

SEQ ID NO: 192500 - DNA, 33 bp, Homo sapien
tagaatttttcacaaagctgaatggtattcatc

SEQ ID NO: 192501 - DNA, 33 bp, Homo sapien
atctactgtgaatatcactagaacacaaaatag

SEQ ID NO: 192502 - DNA, 33 bp, Homo sapien
atctactgtgaatatctctagaacacaaaatag

SEQ ID NO: 192503 - DNA, 33 bp, Homo sapien
ctgtgcaatattaagaaaatagctttcacaaac

SEQ ID NO: 192504 - DNA, 33 bp, Homo sapien
ctgtgcaatattaagagaatagctttcacaaac

SEQ ID NO: 192505 - DNA, 33 bp, Homo sapien
gaaatgatgttttccactattttgtaatctttc

SEQ ID NO: 192506 - DNA, 33 bp, Homo sapien
gaaatgatgttttccagtattttgtaatctttc

SEQ ID NO: 192507 - DNA, 33 bp, Homo sapien
cgtatctattgtgtacagctttatgatgaatgg

SEQ ID NO: 192508 - DNA, 33 bp, Homo sapien
cgtatctattgtgtaccgctttatgatgaatgg

SEQ ID NO: 192509 - DNA, 33 bp, Homo sapien
gaatgaataaaggctacctacaaggggctcaga

SEQ ID NO: 192510 - DNA, 33 bp, Homo sapien
gaatgaataaaggctatctacaaggggctcaga

SEQ ID NO: 192511 - DNA, 33 bp, Homo sapien
ggtagtgtctgattgaaagtcctggaggcagtt

SEQ ID NO: 192512 - DNA, 33 bp, Homo sapien
ggtagtgtctgattgagagtcctggaggcagtt

SEQ ID NO: 192513 - DNA, 33 bp, Homo sapien
aaagcatgggcttgaaaggtttggagtcaaaat

SEQ ID NO: 192514 - DNA, 33 bp, Homo sapien
aaagcatgggcttgaatggtttggagtcaaaat

SEQ ID NO: 192515 - DNA, 33 bp, Homo sapien
tgtgattattctgaaaaccagtattggagtatc

SEQ ID NO: 192516 - DNA, 33 bp, Homo sapien
tgtgattattctgaaagccagtattggagtatc

SEQ ID NO: 192517 - DNA, 33 bp, Homo sapien
ttcctgaaataaataaaacagagctgtacaaaa

SEQ ID NO: 192518 - DNA, 33 bp, Homo sapien
ttcctgaaataaataagacagagctgtacaaaa

SEQ ID NO: 192519 - DNA, 33 bp, Homo sapien
atagacagacataaaaataggacactgggtctc

SEQ ID NO: 192520 - DNA, 33 bp, Homo sapien
atagacagacataaaagtaggacactgggtctc

SEQ ID NO: 192521 - DNA, 33 bp, Homo sapien
ctgacttgggcatactaaatgaacaaggcctag

SEQ ID NO: 192522 - DNA, 33 bp, Homo sapien
ctgacttgggcatactgaatgaacaaggcctag

SEQ ID NO: 192523 - DNA, 33 bp, Homo sapien
agtcagccactgcataataaacttgaaatattt

SEQ ID NO: 192524 - DNA, 33 bp, Homo sapien
agtcagccactgcatagtaaacttgaaatattt

SEQ ID NO: 192525 - DNA, 33 bp, Homo sapien
taggatcctggttccccgatcacatggtgaaac

SEQ ID NO: 192526 - DNA, 33 bp, Homo sapien
taggatcctggttccctgatcacatggtgaaac

SEQ ID NO: 192527 - DNA, 33 bp, Homo sapien
accttgtggctcaacacggctgctacactccag

SEQ ID NO: 192528 - DNA, 33 bp, Homo sapien
accttgtggctcaacatggctgctacactccag

SEQ ID NO: 192529 - DNA, 33 bp, Homo sapien
atatttgcataaacagcatagtatctagcagtt

SEQ ID NO: 192530 - DNA, 33 bp, Homo sapien
atatttgcataaacagtatagtatctagcagtt

SEQ ID NO: 192531 - DNA, 33 bp, Homo sapien
aaaccgacaaagttcccaattctatgaaattca

SEQ ID NO: 192532 - DNA, 33 bp, Homo sapien
aaaccgacaaagttcctaattctatgaaattca

SEQ ID NO: 192533 - DNA, 33 bp, Homo sapien
cagttaagattttcaccggctactttgcttccc

SEQ ID NO: 192534 - DNA, 33 bp, Homo sapien
cagttaagattttcactggctactttgcttccc

SEQ ID NO: 192535 - DNA, 33 bp, Homo sapien
gtgtggatttgactcacactaaaccaaatctat

SEQ ID NO: 192536 - DNA, 33 bp, Homo sapien
gtgtggatttgactcatactaaaccaaatctat

SEQ ID NO: 192537 - DNA, 33 bp, Homo sapien
gatttgacaaagaaaccaaggtattatatagac

SEQ ID NO: 192538 - DNA, 33 bp, Homo sapien
gatttgacaaagaaactaaggtattatatagac

SEQ ID NO: 192539 - DNA, 33 bp, Homo sapien
agaattacccagctgacgttgctcctttagcat

SEQ ID NO: 192540 - DNA, 33 bp, Homo sapien
agaattacccagctgatgttgctcctttagcat

SEQ ID NO: 192541 - DNA, 33 bp, Homo sapien
gaataaaacttgggcaataatgactgaattgac

SEQ ID NO: 192542 - DNA, 33 bp, Homo sapien
gaataaaacttgggcagtaatgactgaattgac

SEQ ID NO: 192543 - DNA, 33 bp, Homo sapien
gtggactctggaaaacacaagaaatatccattt

SEQ ID NO: 192544 - DNA, 33 bp, Homo sapien
gtggactctggaaaactcaagaaatatccattt

SEQ ID NO: 192545 - DNA, 33 bp, Homo sapien
tctagaaaatattccaatgcttcttatatccag

SEQ ID NO: 192546 - DNA, 33 bp, Homo sapien
tctagaaaatattccagtgcttcttatatccag

SEQ ID NO: 192547 - DNA, 33 bp, Homo sapien
tctccccagccaaaaaggaagtccaggtttctt

SEQ ID NO: 192548 - DNA, 33 bp, Homo sapien
tctccccagccaaaaatgaagtccaggtttctt

SEQ ID NO: 192549 - DNA, 33 bp, Homo sapien
ttctcacattagaagcactggcaagagatgttt

SEQ ID NO: 192550 - DNA, 33 bp, Homo sapien
ttctcacattagaagcgctggcaagagatgttt

SEQ ID NO: 192551 - DNA, 33 bp, Homo sapien
acttgatgcgaaccaacggtagacccgctcatc

SEQ ID NO: 192552 - DNA, 33 bp, Homo sapien
acttgatgcgaaccaatggtagacccgctcatc

SEQ ID NO: 192553 - DNA, 33 bp, Homo sapien
acagatagcaatgccaatccaaatagtctattt

SEQ ID NO: 192554 - DNA, 33 bp, Homo sapien
acagatagcaatgccagtccaaatagtctattt

SEQ ID NO: 192555 - DNA, 33 bp, Homo sapien
ttttaaaagttttcaacgtttctgtcaaaaaca

SEQ ID NO: 192556 - DNA, 33 bp, Homo sapien
ttttaaaagttttcaatgtttctgtcaaaaaca

SEQ ID NO: 192557 - DNA, 33 bp, Homo sapien
gttcaaaacaatgacagaatgaaagaaagtcga

SEQ ID NO: 192558 - DNA, 33 bp, Homo sapien
gttcaaaacaatgacataatgaaagaaagtcga

SEQ ID NO: 192559 - DNA, 33 bp, Homo sapien
ttactaagaaagcaaccgaggcccataaaggtt

SEQ ID NO: 192560 - DNA, 33 bp, Homo sapien
ttactaagaaagcaactgaggcccataaaggtt

SEQ ID NO: 192561 - DNA, 33 bp, Homo sapien
ggcaaagcacagaaaccaggaattgagaggcct

SEQ ID NO: 192562 - DNA, 33 bp, Homo sapien
ggcaaagcacagaaacgaggaattgagaggcct

SEQ ID NO: 192563 - DNA, 33 bp, Homo sapien
gttgtaattcagtgccaatgttacattctccct

SEQ ID NO: 192564 - DNA, 33 bp, Homo sapien
gttgtaattcagtgcccatgttacattctccct

SEQ ID NO: 192565 - DNA, 33 bp, Homo sapien
aacaaacacattttggcatatgggctgggctgg

SEQ ID NO: 192566 - DNA, 33 bp, Homo sapien
aacaaacacattttggtatatgggctgggctgg

SEQ ID NO: 192567 - DNA, 33 bp, Homo sapien
tattcttgaagttccacgaaatataaagataca

SEQ ID NO: 192568 - DNA, 33 bp, Homo sapien
tattcttgaagttccatgaaatataaagataca

SEQ ID NO: 192569 - DNA, 33 bp, Homo sapien
aaatgccaatcatatcactctggatcctagcaa

SEQ ID NO: 192570 - DNA, 33 bp, Homo sapien
aaatgccaatcatatcgctctggatcctagcaa

SEQ ID NO: 192571 - DNA, 33 bp, Homo sapien
attggcatttgagggaagataagcaccatactt

SEQ ID NO: 192572 - DNA, 33 bp, Homo sapien
attggcatttgagggatgataagcaccatactt

SEQ ID NO: 192573 - DNA, 33 bp, Homo sapien
aagtatgattgtcagaaggcaacttaattaaaa

SEQ ID NO: 192574 - DNA, 33 bp, Homo sapien
aagtatgattgtcagacggcaacttaattaaaa

SEQ ID NO: 192575 - DNA, 33 bp, Homo sapien
tgagcaaggctcataacaactgcaatctagtca

SEQ ID NO: 192576 - DNA, 33 bp, Homo sapien
tgagcaaggctcataataactgcaatctagtca

SEQ ID NO: 192577 - DNA, 33 bp, Homo sapien
catcacttttcaagacaactgtattaggcaatc

SEQ ID NO: 192578 - DNA, 33 bp, Homo sapien
catcacttttcaagacgactgtattaggcaatc

SEQ ID NO: 192579 - DNA, 33 bp, Homo sapien
ctgtctattgttcaaaacttctactaggatgtg

SEQ ID NO: 192580 - DNA, 33 bp, Homo sapien
ctgtctattgttcaaatcttctactaggatgtg

SEQ ID NO: 192581 - DNA, 33 bp, Homo sapien
agaaaatgagaccttcaagttcttgcagttaag

SEQ ID NO: 192582 - DNA, 33 bp, Homo sapien
agaaaatgagaccttcgagttcttgcagttaag

SEQ ID NO: 192583 - DNA, 33 bp, Homo sapien
atctctgatttctctaaggtcttatctatccca

SEQ ID NO: 192584 - DNA, 33 bp, Homo sapien
atctctgatttctctatggtcttatctatccca

SEQ ID NO: 192585 - DNA, 33 bp, Homo sapien
tcttcctctttgctaaagatggctttgggtggt

SEQ ID NO: 192586 - DNA, 33 bp, Homo sapien
tcttcctctttgctaaggatggctttgggtggt

SEQ ID NO: 192587 - DNA, 33 bp, Homo sapien
atatcctttcttcatacgctcataaatcccaat

SEQ ID NO: 192588 - DNA, 33 bp, Homo sapien
atatcctttcttcatatgctcataaatcccaat

SEQ ID NO: 192589 - DNA, 33 bp, Homo sapien
cagggagattacacataagaattgtccatgggc

SEQ ID NO: 192590 - DNA, 33 bp, Homo sapien
cagggagattacacatgagaattgtccatgggc

SEQ ID NO: 192591 - DNA, 33 bp, Homo sapien
tttgttttgttgttcaaagaagatgtatataaa

SEQ ID NO: 192592 - DNA, 33 bp, Homo sapien
tttgttttgttgttcagagaagatgtatataaa

SEQ ID NO: 192593 - DNA, 33 bp, Homo sapien
tcataaatttgaatagacatattacctctgttt

SEQ ID NO: 192594 - DNA, 33 bp, Homo sapien
tcataaatttgaatagtcatattacctctgttt

SEQ ID NO: 192595 - DNA, 33 bp, Homo sapien
tgactagctgagtaaaaggttatgactgcaaaa

SEQ ID NO: 192596 - DNA, 33 bp, Homo sapien
tgactagctgagtaaatggttatgactgcaaaa

SEQ ID NO: 192597 - DNA, 33 bp, Homo sapien
ccatcataaaacgtacaaaacagcttggaaata

SEQ ID NO: 192598 - DNA, 33 bp, Homo sapien
ccatcataaaacgtacgaaacagcttggaaata

SEQ ID NO: 192599 - DNA, 33 bp, Homo sapien
taatggaaagacaaaacttgaaccaagatatat

SEQ ID NO: 192600 - DNA, 33 bp, Homo sapien
taatggaaagacaaaagttgaaccaagatatat

SEQ ID NO: 192601 - DNA, 33 bp, Homo sapien
cttttagattctgtaaaggacacggtgaccaga

SEQ ID NO: 192602 - DNA, 33 bp, Homo sapien
cttttagattctgtaagggacacggtgaccaga

SEQ ID NO: 192603 - DNA, 33 bp, Homo sapien
gacatttctggatggtcaccaaaatttttgtag

SEQ ID NO: 192604 - DNA, 33 bp, Homo sapien
gacatttctggatggtgaccaaaatttttgtag

SEQ ID NO: 192605 - DNA, 33 bp, Homo sapien
caaacagcatcatgtaaaaaccattgactggtc

SEQ ID NO: 192606 - DNA, 33 bp, Homo sapien
caaacagcatcatgtacaaaccattgactggtc

SEQ ID NO: 192607 - DNA, 33 bp, Homo sapien
tggacccctaaagacacaattgccttcaatcgc

SEQ ID NO: 192608 - DNA, 33 bp, Homo sapien
tggacccctaaagacataattgccttcaatcgc

SEQ ID NO: 192609 - DNA, 33 bp, Homo sapien
caaacatacagttaggcagaagcaataaatgtt

SEQ ID NO: 192610 - DNA, 33 bp, Homo sapien
caaacatacagttaggtagaagcaataaatgtt

SEQ ID NO: 192611 - DNA, 33 bp, Homo sapien
ttctttttatgagaaccgttcatgtaaaagaat

SEQ ID NO: 192612 - DNA, 33 bp, Homo sapien
ttctttttatgagaactgttcatgtaaaagaat

SEQ ID NO: 192613 - DNA, 33 bp, Homo sapien
tgggatgacttactcacatctctgtgcttggct

SEQ ID NO: 192614 - DNA, 33 bp, Homo sapien
tgggatgacttactcatatctctgtgcttggct

SEQ ID NO: 192615 - DNA, 33 bp, Homo sapien
tatatagagcaaaaaaagagagcagaaacatta

SEQ ID NO: 192616 - DNA, 33 bp, Homo sapien
tatatagagcaaaaaacgagagcagaaacatta

SEQ ID NO: 192617 - DNA, 33 bp, Homo sapien
ttgaggttcttttcagcccattgctagttaagt

SEQ ID NO: 192618 - DNA, 33 bp, Homo sapien
ttgaggttcttttcagtccattgctagttaagt

SEQ ID NO: 192619 - DNA, 33 bp, Homo sapien
atatatggtaggtggacgtgattagcagataca

SEQ ID NO: 192620 - DNA, 33 bp, Homo sapien
atatatggtaggtggatgtgattagcagataca

SEQ ID NO: 192621 - DNA, 33 bp, Homo sapien
aagaaggaaatcacatgatgtacaaacgttgtt

SEQ ID NO: 192622 - DNA, 33 bp, Homo sapien
aagaaggaaatcacattatgtacaaacgttgtt

SEQ ID NO: 192623 - DNA, 33 bp, Homo sapien
tctcatctaagaaaacagcagtgcgggccgtga

SEQ ID NO: 192624 - DNA, 33 bp, Homo sapien
tctcatctaagaaaacggcagtgcgggccgtga

SEQ ID NO: 192625 - DNA, 33 bp, Homo sapien
atcaccgttgtacaatcagcaagattaaaatac

SEQ ID NO: 192626 - DNA, 33 bp, Homo sapien
atcaccgttgtacaatgagcaagattaaaatac

SEQ ID NO: 192627 - DNA, 33 bp, Homo sapien
aaacaagattaatgcaaagtcctacattcaggg

SEQ ID NO: 192628 - DNA, 33 bp, Homo sapien
aaacaagattaatgcagagtcctacattcaggg

SEQ ID NO: 192629 - DNA, 33 bp, Homo sapien
tgttgccacctagacactcttccaaattgatat

SEQ ID NO: 192630 - DNA, 33 bp, Homo sapien
tgttgccacctagacattcttccaaattgatat

SEQ ID NO: 192631 - DNA, 33 bp, Homo sapien
tataaagtattgtttgaacccagaacatacagc

SEQ ID NO: 192632 - DNA, 33 bp, Homo sapien
tataaagtattgtttggacccagaacatacagc

SEQ ID NO: 192633 - DNA, 33 bp, Homo sapien
atagaattttggaatacggagttgtggacttct

SEQ ID NO: 192634 - DNA, 33 bp, Homo sapien
atagaattttggaatatggagttgtggacttct

SEQ ID NO: 192635 - DNA, 33 bp, Homo sapien
tggagtagatgctttaaggaatggaaaaggtac

SEQ ID NO: 192636 - DNA, 33 bp, Homo sapien
tggagtagatgctttagggaatggaaaaggtac

SEQ ID NO: 192637 - DNA, 33 bp, Homo sapien
caatacaaagcctcaaacccacttggcattcgg

SEQ ID NO: 192638 - DNA, 33 bp, Homo sapien
caatacaaagcctcaatcccacttggcattcgg

SEQ ID NO: 192639 - DNA, 33 bp, Homo sapien
gagaatgcatagaacacgggctccaggctggag

SEQ ID NO: 192640 - DNA, 33 bp, Homo sapien
gagaatgcatagaacatgggctccaggctggag

SEQ ID NO: 192641 - DNA, 33 bp, Homo sapien
gcttcatgcaatacacaagacaaaatggttttg

SEQ ID NO: 192642 - DNA, 33 bp, Homo sapien
gcttcatgcaatacacgagacaaaatggttttg

SEQ ID NO: 192643 - DNA, 33 bp, Homo sapien
tcaacaggctgggaaacaagtggtgtatttttt

SEQ ID NO: 192644 - DNA, 33 bp, Homo sapien
tcaacaggctgggaaataagtggtgtatttttt

SEQ ID NO: 192645 - DNA, 33 bp, Homo sapien
ctgagaacattctaaccaggggtatgttaaaat

SEQ ID NO: 192646 - DNA, 33 bp, Homo sapien
ctgagaacattctaactaggggtatgttaaaat

SEQ ID NO: 192647 - DNA, 33 bp, Homo sapien
gaggccaattagcaaactgttgaatgctctgct

SEQ ID NO: 192648 - DNA, 33 bp, Homo sapien
gaggccaattagcaaattgttgaatgctctgct

SEQ ID NO: 192649 - DNA, 33 bp, Homo sapien
ggacacagagggtaagaagtctttgatgtggtg

SEQ ID NO: 192650 - DNA, 33 bp, Homo sapien
ggacacagagggtaagcagtctttgatgtggtg

SEQ ID NO: 192651 - DNA, 33 bp, Homo sapien
gacaactttcagataacatatagacatctctaa

SEQ ID NO: 192652 - DNA, 33 bp, Homo sapien
gacaactttcagataatatatagacatctctaa

SEQ ID NO: 192653 - DNA, 33 bp, Homo sapien
ttcctggtataaagacaagccatacagacaact

SEQ ID NO: 192654 - DNA, 33 bp, Homo sapien
ttcctggtataaagacgagccatacagacaact

SEQ ID NO: 192655 - DNA, 33 bp, Homo sapien
tcacttttcttcagcagctaagactttatagcc

SEQ ID NO: 192656 - DNA, 33 bp, Homo sapien
tcacttttcttcagcatctaagactttatagcc

SEQ ID NO: 192657 - DNA, 33 bp, Homo sapien
agagatagatcctggccgcatttggatatgaaa

SEQ ID NO: 192658 - DNA, 33 bp, Homo sapien
agagatagatcctggctgcatttggatatgaaa

SEQ ID NO: 192659 - DNA, 33 bp, Homo sapien
tcttaagtaaaccccaaatctaaaggcaaacag

SEQ ID NO: 192660 - DNA, 33 bp, Homo sapien
tcttaagtaaaccccagatctaaaggcaaacag

SEQ ID NO: 192661 - DNA, 33 bp, Homo sapien
ggaattctaagaaataagccttaaacagatcca

SEQ ID NO: 192662 - DNA, 33 bp, Homo sapien
ggaattctaagaaatacgccttaaacagatcca

SEQ ID NO: 192663 - DNA, 33 bp, Homo sapien
atttcttagaattccccagagcttgaaaatcta

SEQ ID NO: 192664 - DNA, 33 bp, Homo sapien
atttcttagaattcccgagagcttgaaaatcta

SEQ ID NO: 192665 - DNA, 33 bp, Homo sapien
atttaatttacagacccaagaggaagttaaaga

SEQ ID NO: 192666 - DNA, 33 bp, Homo sapien
atttaatttacagaccgaagaggaagttaaaga

SEQ ID NO: 192667 - DNA, 33 bp, Homo sapien
acagataaactgtaagaagaatagattcccaag

SEQ ID NO: 192668 - DNA, 33 bp, Homo sapien
acagataaactgtaaggagaatagattcccaag

SEQ ID NO: 192669 - DNA, 33 bp, Homo sapien
gaaatgcattggggctcagatgaccggaatagg

SEQ ID NO: 192670 - DNA, 33 bp, Homo sapien
gaaatgcattggggcttagatgaccggaatagg

SEQ ID NO: 192671 - DNA, 33 bp, Homo sapien
gccatacttcttcaccaactgctctccactcag

SEQ ID NO: 192672 - DNA, 33 bp, Homo sapien
gccatacttcttcacccactgctctccactcag

SEQ ID NO: 192673 - DNA, 33 bp, Homo sapien
gtgggataggcgtagtgaaaagaaagagggaat

SEQ ID NO: 192674 - DNA, 33 bp, Homo sapien
gtgggataggcgtagttaaaagaaagagggaat

SEQ ID NO: 192675 - DNA, 33 bp, Homo sapien
tggagtaacctacagacgttaacaacagcacaa

SEQ ID NO: 192676 - DNA, 33 bp, Homo sapien
tggagtaacctacagatgttaacaacagcacaa

SEQ ID NO: 192677 - DNA, 33 bp, Homo sapien
aaagaacagagctgaccggaactagagatttaa

SEQ ID NO: 192678 - DNA, 33 bp, Homo sapien
aaagaacagagctgactggaactagagatttaa

SEQ ID NO: 192679 - DNA, 33 bp, Homo sapien
gttagtcttccccaaacgaggagatgcacactg

SEQ ID NO: 192680 - DNA, 33 bp, Homo sapien
gttagtcttccccaaatgaggagatgcacactg

SEQ ID NO: 192681 - DNA, 33 bp, Homo sapien
tctgatgccagcttacagcaccactgacactgc

SEQ ID NO: 192682 - DNA, 33 bp, Homo sapien
tctgatgccagcttacggcaccactgacactgc

SEQ ID NO: 192683 - DNA, 33 bp, Homo sapien
ttgtgggaaaataaacagtgtctggcagtgtct

SEQ ID NO: 192684 - DNA, 33 bp, Homo sapien
ttgtgggaaaataaaccgtgtctggcagtgtct

SEQ ID NO: 192685 - DNA, 33 bp, Homo sapien
caaggattaggcaaaccctgaggacacaaaaga

SEQ ID NO: 192686 - DNA, 33 bp, Homo sapien
caaggattaggcaaacgctgaggacacaaaaga

SEQ ID NO: 192687 - DNA, 33 bp, Homo sapien
aaggagacacaggagaactttacaaattgtatt

SEQ ID NO: 192688 - DNA, 33 bp, Homo sapien
aaggagacacaggagagctttacaaattgtatt

SEQ ID NO: 192689 - DNA, 33 bp, Homo sapien
catgctgctggccctacgatgataagtagtggg

SEQ ID NO: 192690 - DNA, 33 bp, Homo sapien
catgctgctggccctatgatgataagtagtggg

SEQ ID NO: 192691 - DNA, 33 bp, Homo sapien
tattcttccagaataactagtaaagctagaatt

SEQ ID NO: 192692 - DNA, 33 bp, Homo sapien
tattcttccagaataagtagtaaagctagaatt

SEQ ID NO: 192693 - DNA, 33 bp, Homo sapien
ttggaatcccaaagggaaaggctagtctttgaa

SEQ ID NO: 192694 - DNA, 33 bp, Homo sapien
ttggaatcccaaaggggaaggctagtctttgaa

SEQ ID NO: 192695 - DNA, 33 bp, Homo sapien
cctttccctccgcctcacatgtacctggataga

SEQ ID NO: 192696 - DNA, 33 bp, Homo sapien
cctttccctccgcctctcatgtacctggataga

SEQ ID NO: 192697 - DNA, 33 bp, Homo sapien
ctcttaggatgcctggaaaaaagagattgctcc

SEQ ID NO: 192698 - DNA, 33 bp, Homo sapien
ctcttaggatgcctgggaaaaagagattgctcc

SEQ ID NO: 192699 - DNA, 33 bp, Homo sapien
gaggatccctcacaaacgactcctgagacccct

SEQ ID NO: 192700 - DNA, 33 bp, Homo sapien
gaggatccctcacaaatgactcctgagacccct

SEQ ID NO: 192701 - DNA, 33 bp, Homo sapien
aagagccttcgaagaccgtcactgggtggagca

SEQ ID NO: 192702 - DNA, 33 bp, Homo sapien
aagagccttcgaagactgtcactgggtggagca

SEQ ID NO: 192703 - DNA, 33 bp, Homo sapien
gacctaatcgtagtaacagtcaacacctgagct

SEQ ID NO: 192704 - DNA, 33 bp, Homo sapien
gacctaatcgtagtaatagtcaacacctgagct

SEQ ID NO: 192705 - DNA, 33 bp, Homo sapien
aattgaaggatgcaaaattgaagggcgtatcac

SEQ ID NO: 192706 - DNA, 33 bp, Homo sapien
aattgaaggatgcaaacttgaagggcgtatcac

SEQ ID NO: 192707 - DNA, 33 bp, Homo sapien
gctgttacactgtgaacgaatggcacaaaaaat

SEQ ID NO: 192708 - DNA, 33 bp, Homo sapien
gctgttacactgtgaatgaatggcacaaaaaat

SEQ ID NO: 192709 - DNA, 33 bp, Homo sapien
attattttatacagggcagtcagagtagtactc

SEQ ID NO: 192710 - DNA, 33 bp, Homo sapien
attattttatacagggtagtcagagtagtactc

SEQ ID NO: 192711 - DNA, 33 bp, Homo sapien
gctagatcatggtaaaggaagcacaggcatttc

SEQ ID NO: 192712 - DNA, 33 bp, Homo sapien
gctagatcatggtaaatgaagcacaggcatttc

SEQ ID NO: 192713 - DNA, 33 bp, Homo sapien
aatgctaaggaaagaaaggtagggtgagaacat

SEQ ID NO: 192714 - DNA, 33 bp, Homo sapien
aatgctaaggaaagaacggtagggtgagaacat

SEQ ID NO: 192715 - DNA, 33 bp, Homo sapien
tcagaatcttttattacatgaccacatctaata

SEQ ID NO: 192716 - DNA, 33 bp, Homo sapien
tcagaatcttttattatatgaccacatctaata

SEQ ID NO: 192717 - DNA, 33 bp, Homo sapien
cctaaatgaatgaccaagtaccctaaataaatg

SEQ ID NO: 192718 - DNA, 33 bp, Homo sapien
cctaaatgaatgaccaggtaccctaaataaatg

SEQ ID NO: 192719 - DNA, 33 bp, Homo sapien
gcagctagccaggtacaagacacatagtaggtg

SEQ ID NO: 192720 - DNA, 33 bp, Homo sapien
gcagctagccaggtacgagacacatagtaggtg

SEQ ID NO: 192721 - DNA, 33 bp, Homo sapien
aaccttcttaatttcacgatctcagtatcaaat

SEQ ID NO: 192722 - DNA, 33 bp, Homo sapien
aaccttcttaatttcatgatctcagtatcaaat

SEQ ID NO: 192723 - DNA, 33 bp, Homo sapien
taatgacttttattgaagattctgctatcttgg

SEQ ID NO: 192724 - DNA, 33 bp, Homo sapien
taatgacttttattgacgattctgctatcttgg

SEQ ID NO: 192725 - DNA, 33 bp, Homo sapien
gtggagaaaacagatagtaaacagtaatttcaa

SEQ ID NO: 192726 - DNA, 33 bp, Homo sapien
gtggagaaaacagatattaaacagtaatttcaa

SEQ ID NO: 192727 - DNA, 33 bp, Homo sapien
atatatacaactgatacgggtaggagatgggaa

SEQ ID NO: 192728 - DNA, 33 bp, Homo sapien
atatatacaactgatatgggtaggagatgggaa

SEQ ID NO: 192729 - DNA, 33 bp, Homo sapien
cctgccatctgcggacaacttgattgttaacca

SEQ ID NO: 192730 - DNA, 33 bp, Homo sapien
cctgccatctgcggacgacttgattgttaacca

SEQ ID NO: 192731 - DNA, 33 bp, Homo sapien
tggccaaagcaacacacatggccaacccagatt

SEQ ID NO: 192732 - DNA, 33 bp, Homo sapien
tggccaaagcaacacatatggccaacccagatt

SEQ ID NO: 192733 - DNA, 33 bp, Homo sapien
agaaatgcaagcaaccagggtaagtgtgtctta

SEQ ID NO: 192734 - DNA, 33 bp, Homo sapien
agaaatgcaagcaacccgggtaagtgtgtctta

SEQ ID NO: 192735 - DNA, 33 bp, Homo sapien
gctggagaaaagataccatcaacttataaatgg

SEQ ID NO: 192736 - DNA, 33 bp, Homo sapien
gctggagaaaagatactatcaacttataaatgg

SEQ ID NO: 192737 - DNA, 33 bp, Homo sapien
aacaagatattcaaaacactctattcactagaa

SEQ ID NO: 192738 - DNA, 33 bp, Homo sapien
aacaagatattcaaaagactctattcactagaa

SEQ ID NO: 192739 - DNA, 33 bp, Homo sapien
gaaaaagaaaccttcagagcagtttgtggagga

SEQ ID NO: 192740 - DNA, 33 bp, Homo sapien
gaaaaagaaaccttcatagcagtttgtggagga

SEQ ID NO: 192741 - DNA, 33 bp, Homo sapien
ggaatggagggagtgaagtgagcaaaccatgtg

SEQ ID NO: 192742 - DNA, 33 bp, Homo sapien
ggaatggagggagtgacgtgagcaaaccatgtg

SEQ ID NO: 192743 - DNA, 33 bp, Homo sapien
tcttcaagctttattgaaggattttgagtaaag

SEQ ID NO: 192744 - DNA, 33 bp, Homo sapien
tcttcaagctttattggaggattttgagtaaag

SEQ ID NO: 192745 - DNA, 33 bp, Homo sapien
agctctcctttgtccactctaggtgtttttcca

SEQ ID NO: 192746 - DNA, 33 bp, Homo sapien
agctctcctttgtccattctaggtgtttttcca

SEQ ID NO: 192747 - DNA, 33 bp, Homo sapien
tgatcaggctccgtccactctcagtctgggcga

SEQ ID NO: 192748 - DNA, 33 bp, Homo sapien
tgatcaggctccgtccgctctcagtctgggcga

SEQ ID NO: 192749 - DNA, 33 bp, Homo sapien
ttcaaacttaacccaaatgacgtcatagttgac

SEQ ID NO: 192750 - DNA, 33 bp, Homo sapien
ttcaaacttaacccaactgacgtcatagttgac

SEQ ID NO: 192751 - DNA, 33 bp, Homo sapien
attattgtactttaaccattgtaggctatagat

SEQ ID NO: 192752 - DNA, 33 bp, Homo sapien
attattgtactttaactattgtaggctatagat

SEQ ID NO: 192753 - DNA, 33 bp, Homo sapien
catggccaagtactgacgatagagcagagaaca

SEQ ID NO: 192754 - DNA, 33 bp, Homo sapien
catggccaagtactgaggatagagcagagaaca

SEQ ID NO: 192755 - DNA, 33 bp, Homo sapien
aggggcagactgggaaacttccctatatgcaaa

SEQ ID NO: 192756 - DNA, 33 bp, Homo sapien
aggggcagactgggaatcttccctatatgcaaa

SEQ ID NO: 192757 - DNA, 33 bp, Homo sapien
ttctttgcctctgtgaacttatactcagaaagg

SEQ ID NO: 192758 - DNA, 33 bp, Homo sapien
ttctttgcctctgtgaccttatactcagaaagg

SEQ ID NO: 192759 - DNA, 33 bp, Homo sapien
gggttcaagcacccctaaggcttctgaggagtc

SEQ ID NO: 192760 - DNA, 33 bp, Homo sapien
gggttcaagcacccctgaggcttctgaggagtc

SEQ ID NO: 192761 - DNA, 33 bp, Homo sapien
aatgatgctttcttcaatattcctgtgacagtc

SEQ ID NO: 192762 - DNA, 33 bp, Homo sapien
aatgatgctttcttcagtattcctgtgacagtc

SEQ ID NO: 192763 - DNA, 33 bp, Homo sapien
aagaacaaaggaaacacgaaaccagtcagacca

SEQ ID NO: 192764 - DNA, 33 bp, Homo sapien
aagaacaaaggaaacatgaaaccagtcagacca

SEQ ID NO: 192765 - DNA, 33 bp, Homo sapien
gttagcatcaatgtctcacagtgtaatcatgtc

SEQ ID NO: 192766 - DNA, 33 bp, Homo sapien
gttagcatcaatgtcttacagtgtaatcatgtc

SEQ ID NO: 192767 - DNA, 33 bp, Homo sapien
taggagagctcattaacagaaagtttgactgat

SEQ ID NO: 192768 - DNA, 33 bp, Homo sapien
taggagagctcattaatagaaagtttgactgat

SEQ ID NO: 192769 - DNA, 33 bp, Homo sapien
ggattaaaacagtcaacaatggtcaccggccct

SEQ ID NO: 192770 - DNA, 33 bp, Homo sapien
ggattaaaacagtcaagaatggtcaccggccct

SEQ ID NO: 192771 - DNA, 33 bp, Homo sapien
tccaagcaaagacttccccttgttatttagtgt

SEQ ID NO: 192772 - DNA, 33 bp, Homo sapien
tccaagcaaagacttctccttgttatttagtgt

SEQ ID NO: 192773 - DNA, 33 bp, Homo sapien
gggtgccaaatacacaaatacagaatctaagaa

SEQ ID NO: 192774 - DNA, 33 bp, Homo sapien
gggtgccaaatacacagatacagaatctaagaa

SEQ ID NO: 192775 - DNA, 33 bp, Homo sapien
taactagctctgggacagtaagtctctctctgg

SEQ ID NO: 192776 - DNA, 33 bp, Homo sapien
taactagctctgggacggtaagtctctctctgg

SEQ ID NO: 192777 - DNA, 33 bp, Homo sapien
tgttagctcctgccaaactggtcagcgcagcag

SEQ ID NO: 192778 - DNA, 33 bp, Homo sapien
tgttagctcctgccaacctggtcagcgcagcag

SEQ ID NO: 192779 - DNA, 33 bp, Homo sapien
aacctacaaagctttcgcattttctttcaacaa

SEQ ID NO: 192780 - DNA, 33 bp, Homo sapien
aacctacaaagctttctcattttctttcaacaa

SEQ ID NO: 192781 - DNA, 33 bp, Homo sapien
cagttgcactaacagaacctttgattcagttca

SEQ ID NO: 192782 - DNA, 33 bp, Homo sapien
cagttgcactaacagagcctttgattcagttca

SEQ ID NO: 192783 - DNA, 33 bp, Homo sapien
acaggcactagtctagcatttaaaattatgagt

SEQ ID NO: 192784 - DNA, 33 bp, Homo sapien
acaggcactagtctaggatttaaaattatgagt

SEQ ID NO: 192785 - DNA, 33 bp, Homo sapien
gagcaatgtaggtaccaaagaacctgtgcatgg

SEQ ID NO: 192786 - DNA, 33 bp, Homo sapien
gagcaatgtaggtaccgaagaacctgtgcatgg

SEQ ID NO: 192787 - DNA, 33 bp, Homo sapien
actgctgtgttttctccagttctgacagcaact

SEQ ID NO: 192788 - DNA, 33 bp, Homo sapien
actgctgtgttttctctagttctgacagcaact

SEQ ID NO: 192789 - DNA, 33 bp, Homo sapien
tcacaccagacaagaacagggctgcacaaatgc

SEQ ID NO: 192790 - DNA, 33 bp, Homo sapien
tcacaccagacaagaagagggctgcacaaatgc

SEQ ID NO: 192791 - DNA, 33 bp, Homo sapien
gattttatgatttaaaaaacaacatcacggagc

SEQ ID NO: 192792 - DNA, 33 bp, Homo sapien
gattttatgatttaaagaacaacatcacggagc

SEQ ID NO: 192793 - DNA, 33 bp, Homo sapien
cccccaggctggactccctaaagacagggctgg

SEQ ID NO: 192794 - DNA, 33 bp, Homo sapien
cccccaggctggactctctaaagacagggctgg

SEQ ID NO: 192795 - DNA, 33 bp, Homo sapien
ccagaggctgcagagacagtaacatggagaatt

SEQ ID NO: 192796 - DNA, 33 bp, Homo sapien
ccagaggctgcagagagagtaacatggagaatt

SEQ ID NO: 192797 - DNA, 33 bp, Homo sapien
ggagtatataagagaaaaacattgctttgtgtg

SEQ ID NO: 192798 - DNA, 33 bp, Homo sapien
ggagtatataagagaagaacattgctttgtgtg

SEQ ID NO: 192799 - DNA, 33 bp, Homo sapien
actgattactcctacaacatcagtcatatctta

SEQ ID NO: 192800 - DNA, 33 bp, Homo sapien
actgattactcctacatcatcagtcatatctta

SEQ ID NO: 192801 - DNA, 33 bp, Homo sapien
aagggacctacactaactctacacatgaatgag

SEQ ID NO: 192802 - DNA, 33 bp, Homo sapien
aagggacctacactaattctacacatgaatgag

SEQ ID NO: 192803 - DNA, 33 bp, Homo sapien
tgaagtattgttgtgacgattcaatggagtaat

SEQ ID NO: 192804 - DNA, 33 bp, Homo sapien
tgaagtattgttgtgaggattcaatggagtaat

SEQ ID NO: 192805 - DNA, 33 bp, Homo sapien
ttctagtctcagcttcactacttaatagctgca

SEQ ID NO: 192806 - DNA, 33 bp, Homo sapien
ttctagtctcagcttcgctacttaatagctgca

SEQ ID NO: 192807 - DNA, 33 bp, Homo sapien
aagttgtgtaaacccactggaatttattgatac

SEQ ID NO: 192808 - DNA, 33 bp, Homo sapien
aagttgtgtaaacccattggaatttattgatac

SEQ ID NO: 192809 - DNA, 33 bp, Homo sapien
gaaatgtaagcttaaaaaatttagtgccaggaa

SEQ ID NO: 192810 - DNA, 33 bp, Homo sapien
gaaatgtaagcttaaacaatttagtgccaggaa

SEQ ID NO: 192811 - DNA, 33 bp, Homo sapien
gagaccccgtctccacaaaagccaagaacacta

SEQ ID NO: 192812 - DNA, 33 bp, Homo sapien
gagaccccgtctccacgaaagccaagaacacta

SEQ ID NO: 192813 - DNA, 33 bp, Homo sapien
gaataagcagaaattcaactaagccaaatatat

SEQ ID NO: 192814 - DNA, 33 bp, Homo sapien
gaataagcagaaattctactaagccaaatatat

SEQ ID NO: 192815 - DNA, 33 bp, Homo sapien
atgaggggctcatttcactaccttagaatggcc

SEQ ID NO: 192816 - DNA, 33 bp, Homo sapien
atgaggggctcatttccctaccttagaatggcc

SEQ ID NO: 192817 - DNA, 33 bp, Homo sapien
gaggcccagacagaagaaagagagcttgttaag

SEQ ID NO: 192818 - DNA, 33 bp, Homo sapien
gaggcccagacagaaggaagagagcttgttaag

SEQ ID NO: 192819 - DNA, 33 bp, Homo sapien
tatgcaagtcttatcaaaaacactgtcacagaa

SEQ ID NO: 192820 - DNA, 33 bp, Homo sapien
tatgcaagtcttatcagaaacactgtcacagaa

SEQ ID NO: 192821 - DNA, 33 bp, Homo sapien
ggattgaattccaacaagagaagtgcagtttag

SEQ ID NO: 192822 - DNA, 33 bp, Homo sapien
ggattgaattccaacaggagaagtgcagtttag

SEQ ID NO: 192823 - DNA, 33 bp, Homo sapien
gaacgtgagtgtggtacaggtggcagcactagt

SEQ ID NO: 192824 - DNA, 33 bp, Homo sapien
gaacgtgagtgtggtagaggtggcagcactagt

SEQ ID NO: 192825 - DNA, 33 bp, Homo sapien
gttcctactgtacatgacaaggactctatgacc

SEQ ID NO: 192826 - DNA, 33 bp, Homo sapien
gttcctactgtacatggcaaggactctatgacc

SEQ ID NO: 192827 - DNA, 33 bp, Homo sapien
aggaggtccagaggaaagcaacatcagagccca

SEQ ID NO: 192828 - DNA, 33 bp, Homo sapien
aggaggtccagaggaaggcaacatcagagccca

SEQ ID NO: 192829 - DNA, 33 bp, Homo sapien
catgaagcacagggaactggcttggaaaacacc

SEQ ID NO: 192830 - DNA, 33 bp, Homo sapien
catgaagcacagggaattggcttggaaaacacc

SEQ ID NO: 192831 - DNA, 33 bp, Homo sapien
aagggcttacatttacacagggatggtgggatt

SEQ ID NO: 192832 - DNA, 33 bp, Homo sapien
aagggcttacatttacgcagggatggtgggatt

SEQ ID NO: 192833 - DNA, 33 bp, Homo sapien
ccaactgtgagtttaactgtgagcagatgcagg

SEQ ID NO: 192834 - DNA, 33 bp, Homo sapien
ccaactgtgagtttaattgtgagcagatgcagg

SEQ ID NO: 192835 - DNA, 33 bp, Homo sapien
gcccaggttagcttaacgagtgagggctatagg

SEQ ID NO: 192836 - DNA, 33 bp, Homo sapien
gcccaggttagcttaatgagtgagggctatagg

SEQ ID NO: 192837 - DNA, 33 bp, Homo sapien
tctggcctcatggtgacgtgtgtatctctctgc

SEQ ID NO: 192838 - DNA, 33 bp, Homo sapien
tctggcctcatggtgatgtgtgtatctctctgc

SEQ ID NO: 192839 - DNA, 33 bp, Homo sapien
tccagtttattggaaaactttctcagctaagag

SEQ ID NO: 192840 - DNA, 33 bp, Homo sapien
tccagtttattggaaatctttctcagctaagag

SEQ ID NO: 192841 - DNA, 33 bp, Homo sapien
ggtgctgtggcttttagagcttaatgagtacat

SEQ ID NO: 192842 - DNA, 33 bp, Homo sapien
ggtgctgtggcttttatagcttaatgagtacat

SEQ ID NO: 192843 - DNA, 33 bp, Homo sapien
aaaggcatttcagaaccctgactctttttccac

SEQ ID NO: 192844 - DNA, 33 bp, Homo sapien
aaaggcatttcagaactctgactctttttccac

SEQ ID NO: 192845 - DNA, 33 bp, Homo sapien
ggactggctagcctgaagtgaaagtgcattccc

SEQ ID NO: 192846 - DNA, 33 bp, Homo sapien
ggactggctagcctgacgtgaaagtgcattccc

SEQ ID NO: 192847 - DNA, 33 bp, Homo sapien
ctgccctcaaaaaaaacagtggctatccaatca

SEQ ID NO: 192848 - DNA, 33 bp, Homo sapien
ctgccctcaaaaaaaagagtggctatccaatca

SEQ ID NO: 192849 - DNA, 33 bp, Homo sapien
atctccaccttacgaacgaagaaactgtacctc

SEQ ID NO: 192850 - DNA, 33 bp, Homo sapien
atctccaccttacgaatgaagaaactgtacctc

SEQ ID NO: 192851 - DNA, 33 bp, Homo sapien
tgagagtaccttcttcagaaaataaccattggg

SEQ ID NO: 192852 - DNA, 33 bp, Homo sapien
tgagagtaccttcttcggaaaataaccattggg

SEQ ID NO: 192853 - DNA, 33 bp, Homo sapien
gaggctagaagtcaaaaatcataatgttgtcag

SEQ ID NO: 192854 - DNA, 33 bp, Homo sapien
gaggctagaagtcaaagatcataatgttgtcag

SEQ ID NO: 192855 - DNA, 33 bp, Homo sapien
cctcctactatgggaccggcatgaaatgaccca

SEQ ID NO: 192856 - DNA, 33 bp, Homo sapien
cctcctactatgggactggcatgaaatgaccca

SEQ ID NO: 192857 - DNA, 33 bp, Homo sapien
gagtcaagaacattcaaaactacttactctttg

SEQ ID NO: 192858 - DNA, 33 bp, Homo sapien
gagtcaagaacattcataactacttactctttg

SEQ ID NO: 192859 - DNA, 33 bp, Homo sapien
atgttgcttgtgaatcaatgtcttagtctgctc

SEQ ID NO: 192860 - DNA, 33 bp, Homo sapien
atgttgcttgtgaatcgatgtcttagtctgctc

SEQ ID NO: 192861 - DNA, 33 bp, Homo sapien
tcaagatgtttggctacgaatggagaaagaaaa

SEQ ID NO: 192862 - DNA, 33 bp, Homo sapien
tcaagatgtttggctatgaatggagaaagaaaa

SEQ ID NO: 192863 - DNA, 33 bp, Homo sapien
attttccacaaatagcagatgttccataaatgt

SEQ ID NO: 192864 - DNA, 33 bp, Homo sapien
attttccacaaatagctgatgttccataaatgt

SEQ ID NO: 192865 - DNA, 33 bp, Homo sapien
gggagttgtatgctgcaccatttaccctgctga

SEQ ID NO: 192866 - DNA, 33 bp, Homo sapien
gggagttgtatgctgcgccatttaccctgctga

SEQ ID NO: 192867 - DNA, 33 bp, Homo sapien
tccagcttgtgatgaggaaagagagatgttgag

SEQ ID NO: 192868 - DNA, 33 bp, Homo sapien
tccagcttgtgatgagtaaagagagatgttgag

SEQ ID NO: 192869 - DNA, 33 bp, Homo sapien
gaaataaagatgctagaccggggtactttgaag

SEQ ID NO: 192870 - DNA, 33 bp, Homo sapien
gaaataaagatgctagtccggggtactttgaag

SEQ ID NO: 192871 - DNA, 33 bp, Homo sapien
agccagttttcttccaatgagttccaaatgcag

SEQ ID NO: 192872 - DNA, 33 bp, Homo sapien
agccagttttcttccagtgagttccaaatgcag

SEQ ID NO: 192873 - DNA, 33 bp, Homo sapien
actagacaaagaaggacactttaggccaggcac

SEQ ID NO: 192874 - DNA, 33 bp, Homo sapien
actagacaaagaaggatactttaggccaggcac

SEQ ID NO: 192875 - DNA, 33 bp, Homo sapien
aatttgttattccccccactaggatgtaagttt

SEQ ID NO: 192876 - DNA, 33 bp, Homo sapien
aatttgttattcccccgactaggatgtaagttt

SEQ ID NO: 192877 - DNA, 33 bp, Homo sapien
ctgctctcatctcttacgtgtttaagggttcca

SEQ ID NO: 192878 - DNA, 33 bp, Homo sapien
ctgctctcatctcttatgtgtttaagggttcca

SEQ ID NO: 192879 - DNA, 33 bp, Homo sapien
aatggttctagatgcacagtcccatcacatccc

SEQ ID NO: 192880 - DNA, 33 bp, Homo sapien
aatggttctagatgcagagtcccatcacatccc

SEQ ID NO: 192881 - DNA, 33 bp, Homo sapien
aggagacagagaaaaccggaccaagaccatata

SEQ ID NO: 192882 - DNA, 33 bp, Homo sapien
aggagacagagaaaactggaccaagaccatata

SEQ ID NO: 192883 - DNA, 33 bp, Homo sapien
gtttggtatgactgggacacaagcggagagggt

SEQ ID NO: 192884 - DNA, 33 bp, Homo sapien
gtttggtatgactggggcacaagcggagagggt

SEQ ID NO: 192885 - DNA, 33 bp, Homo sapien
ttctgtgatcacctcaatgagaagtaagccctt

SEQ ID NO: 192886 - DNA, 33 bp, Homo sapien
ttctgtgatcacctcagtgagaagtaagccctt

SEQ ID NO: 192887 - DNA, 33 bp, Homo sapien
atggtgacagccccagactgctagaaaagccaa

SEQ ID NO: 192888 - DNA, 33 bp, Homo sapien
atggtgacagccccagtctgctagaaaagccaa

SEQ ID NO: 192889 - DNA, 33 bp, Homo sapien
ctctgcttagtgttcagctagtaattagacaga

SEQ ID NO: 192890 - DNA, 33 bp, Homo sapien
ctctgcttagtgttcatctagtaattagacaga

SEQ ID NO: 192891 - DNA, 33 bp, Homo sapien
taccacatattcaacaatggtcccacaagatta

SEQ ID NO: 192892 - DNA, 33 bp, Homo sapien
taccacatattcaacagtggtcccacaagatta

SEQ ID NO: 192893 - DNA, 33 bp, Homo sapien
catattaccatactgaatactgaaggcaactgt

SEQ ID NO: 192894 - DNA, 33 bp, Homo sapien
catattaccatactgagtactgaaggcaactgt

SEQ ID NO: 192895 - DNA, 33 bp, Homo sapien
atgggcctcagaccccgcctggagcttgagaaa

SEQ ID NO: 192896 - DNA, 33 bp, Homo sapien
atgggcctcagacccctcctggagcttgagaaa

SEQ ID NO: 192897 - DNA, 33 bp, Homo sapien
ttactagtgctgttcaagtatttctggctctgt

SEQ ID NO: 192898 - DNA, 33 bp, Homo sapien
ttactagtgctgttcatgtatttctggctctgt

SEQ ID NO: 192899 - DNA, 33 bp, Homo sapien
tctttctccctgactacccaattcactgctatc

SEQ ID NO: 192900 - DNA, 33 bp, Homo sapien
tctttctccctgactatccaattcactgctatc

SEQ ID NO: 192901 - DNA, 33 bp, Homo sapien
gccttgactttaaatccattttccacttaatct

SEQ ID NO: 192902 - DNA, 33 bp, Homo sapien
gccttgactttaaatctattttccacttaatct

SEQ ID NO: 192903 - DNA, 33 bp, Homo sapien
atatttttgtgatcataaaaccagctcaaggaa

SEQ ID NO: 192904 - DNA, 33 bp, Homo sapien
atatttttgtgatcatgaaaccagctcaaggaa

SEQ ID NO: 192905 - DNA, 33 bp, Homo sapien
gcttgcaaatacttacactatcacttaaggcaa

SEQ ID NO: 192906 - DNA, 33 bp, Homo sapien
gcttgcaaatacttacgctatcacttaaggcaa

SEQ ID NO: 192907 - DNA, 33 bp, Homo sapien
tcctgacaggtacagcaatttggaggtaggatc

SEQ ID NO: 192908 - DNA, 33 bp, Homo sapien
tcctgacaggtacagccatttggaggtaggatc

SEQ ID NO: 192909 - DNA, 33 bp, Homo sapien
ccatgtctgcaaggaactggaggaccgtctgcc

SEQ ID NO: 192910 - DNA, 33 bp, Homo sapien
ccatgtctgcaaggaattggaggaccgtctgcc

SEQ ID NO: 192911 - DNA, 33 bp, Homo sapien
gtagtattatgatgaacgaagatgaccagtcag

SEQ ID NO: 192912 - DNA, 33 bp, Homo sapien
gtagtattatgatgaatgaagatgaccagtcag

SEQ ID NO: 192913 - DNA, 33 bp, Homo sapien
aagacttctttgaatcacccattggttttggtg

SEQ ID NO: 192914 - DNA, 33 bp, Homo sapien
aagacttctttgaatcgcccattggttttggtg

SEQ ID NO: 192915 - DNA, 33 bp, Homo sapien
tacaaataaaactaataaggttcacaataagct

SEQ ID NO: 192916 - DNA, 33 bp, Homo sapien
tacaaataaaactaatgaggttcacaataagct

SEQ ID NO: 192917 - DNA, 33 bp, Homo sapien
acctgctctgcaatcaacttggtccatgctctg

SEQ ID NO: 192918 - DNA, 33 bp, Homo sapien
acctgctctgcaatcagcttggtccatgctctg

SEQ ID NO: 192919 - DNA, 33 bp, Homo sapien
atctatattgcattcacgttaccttaaattcta

SEQ ID NO: 192920 - DNA, 33 bp, Homo sapien
atctatattgcattcatgttaccttaaattcta

SEQ ID NO: 192921 - DNA, 33 bp, Homo sapien
agctgaaatcttaggccagttgcacagctttgc

SEQ ID NO: 192922 - DNA, 33 bp, Homo sapien
agctgaaatcttaggcgagttgcacagctttgc

SEQ ID NO: 192923 - DNA, 33 bp, Homo sapien
aagacagcaataagaaacaacagtgtcttaaaa

SEQ ID NO: 192924 - DNA, 33 bp, Homo sapien
aagacagcaataagaatcaacagtgtcttaaaa

SEQ ID NO: 192925 - DNA, 33 bp, Homo sapien
accatgacattacacaacaaccattatgcggtg

SEQ ID NO: 192926 - DNA, 33 bp, Homo sapien
accatgacattacacaccaaccattatgcggtg

SEQ ID NO: 192927 - DNA, 33 bp, Homo sapien
ttagttgcagttagaaatcaaagttgacaggtc

SEQ ID NO: 192928 - DNA, 33 bp, Homo sapien
ttagttgcagttagaattcaaagttgacaggtc

SEQ ID NO: 192929 - DNA, 33 bp, Homo sapien
ccagaaatatgcattcactactttgcttcttga

SEQ ID NO: 192930 - DNA, 33 bp, Homo sapien
ccagaaatatgcattcgctactttgcttcttga

SEQ ID NO: 192931 - DNA, 33 bp, Homo sapien
acgcctggcctttggcaagagtttttcctttgg

SEQ ID NO: 192932 - DNA, 33 bp, Homo sapien
acgcctggcctttggcgagagtttttcctttgg

SEQ ID NO: 192933 - DNA, 33 bp, Homo sapien
aagccctgtttattgaaaacatcatccattttc

SEQ ID NO: 192934 - DNA, 33 bp, Homo sapien
aagccctgtttattgagaacatcatccattttc

SEQ ID NO: 192935 - DNA, 33 bp, Homo sapien
aaaattgtcaaaaacactcaatagggctactgc

SEQ ID NO: 192936 - DNA, 33 bp, Homo sapien
aaaattgtcaaaaacagtcaatagggctactgc

SEQ ID NO: 192937 - DNA, 33 bp, Homo sapien
ttttctgtggcttgaaattatatagcatattaa

SEQ ID NO: 192938 - DNA, 33 bp, Homo sapien
ttttctgtggcttgaagttatatagcatattaa

SEQ ID NO: 192939 - DNA, 33 bp, Homo sapien
agtacttatttcctacaagcttcggattttatc

SEQ ID NO: 192940 - DNA, 33 bp, Homo sapien
agtacttatttcctacgagcttcggattttatc

SEQ ID NO: 192941 - DNA, 33 bp, Homo sapien
ctgaatatcttttacacagctgttagaaattag

SEQ ID NO: 192942 - DNA, 33 bp, Homo sapien
ctgaatatcttttacatagctgttagaaattag

SEQ ID NO: 192943 - DNA, 33 bp, Homo sapien
tggatagaaatatgacaaagttgggagtgcatt

SEQ ID NO: 192944 - DNA, 33 bp, Homo sapien
tggatagaaatatgaccaagttgggagtgcatt

SEQ ID NO: 192945 - DNA, 33 bp, Homo sapien
tatacaattgtgaagactacttactgttcattt

SEQ ID NO: 192946 - DNA, 33 bp, Homo sapien
tatacaattgtgaagattacttactgttcattt

SEQ ID NO: 192947 - DNA, 33 bp, Homo sapien
tcaaaaatcttcaccaataattaaaataggtca

SEQ ID NO: 192948 - DNA, 33 bp, Homo sapien
tcaaaaatcttcaccagtaattaaaataggtca

SEQ ID NO: 192949 - DNA, 33 bp, Homo sapien
tatgaaccacgaagcaatatacagttttaaagc

SEQ ID NO: 192950 - DNA, 33 bp, Homo sapien
tatgaaccacgaagcagtatacagttttaaagc

SEQ ID NO: 192951 - DNA, 33 bp, Homo sapien
atctgggtcaacttaacctggagttcagataat

SEQ ID NO: 192952 - DNA, 33 bp, Homo sapien
atctgggtcaacttaagctggagttcagataat

SEQ ID NO: 192953 - DNA, 33 bp, Homo sapien
agtttatttgactgtacatttgtcagaactcac

SEQ ID NO: 192954 - DNA, 33 bp, Homo sapien
agtttatttgactgtatatttgtcagaactcac

SEQ ID NO: 192955 - DNA, 33 bp, Homo sapien
cattaattttttaagccaggtggttagtatagc

SEQ ID NO: 192956 - DNA, 33 bp, Homo sapien
cattaattttttaagctaggtggttagtatagc

SEQ ID NO: 192957 - DNA, 33 bp, Homo sapien
tccttctaagtacctcactaatatggcaaaaat

SEQ ID NO: 192958 - DNA, 33 bp, Homo sapien
tccttctaagtacctcgctaatatggcaaaaat

SEQ ID NO: 192959 - DNA, 33 bp, Homo sapien
gaagggtagttaagaccgtagcatcaaagctag

SEQ ID NO: 192960 - DNA, 33 bp, Homo sapien
gaagggtagttaagactgtagcatcaaagctag

SEQ ID NO: 192961 - DNA, 33 bp, Homo sapien
aatttcaacttagttcaatcatggaccttatta

SEQ ID NO: 192962 - DNA, 33 bp, Homo sapien
aatttcaacttagttctatcatggaccttatta

SEQ ID NO: 192963 - DNA, 33 bp, Homo sapien
ttcttttaactgttaacatagtgaattttactg

SEQ ID NO: 192964 - DNA, 33 bp, Homo sapien
ttcttttaactgttaagatagtgaattttactg

SEQ ID NO: 192965 - DNA, 33 bp, Homo sapien
gtcagggaagtttgaactggttatctgatattg

SEQ ID NO: 192966 - DNA, 33 bp, Homo sapien
gtcagggaagtttgaattggttatctgatattg

SEQ ID NO: 192967 - DNA, 33 bp, Homo sapien
aatacaaaggattataagttttgacagcactta

SEQ ID NO: 192968 - DNA, 33 bp, Homo sapien
aatacaaaggattataggttttgacagcactta

SEQ ID NO: 192969 - DNA, 33 bp, Homo sapien
gtgtctttggacttgaagtgcctcctctgtggt

SEQ ID NO: 192970 - DNA, 33 bp, Homo sapien
gtgtctttggacttgaggtgcctcctctgtggt

SEQ ID NO: 192971 - DNA, 33 bp, Homo sapien
aacaccagatgagacaatggcatactgtgggac

SEQ ID NO: 192972 - DNA, 33 bp, Homo sapien
aacaccagatgagacagtggcatactgtgggac

SEQ ID NO: 192973 - DNA, 33 bp, Homo sapien
ctttcagacataggagaaaaaggatgctttaat

SEQ ID NO: 192974 - DNA, 33 bp, Homo sapien
ctttcagacataggaggaaaaggatgctttaat

SEQ ID NO: 192975 - DNA, 33 bp, Homo sapien
tttctccacataatcactactccttgaagctgt

SEQ ID NO: 192976 - DNA, 33 bp, Homo sapien
tttctccacataatcattactccttgaagctgt

SEQ ID NO: 192977 - DNA, 33 bp, Homo sapien
attttaaatgatataacagacgtgatttcccat

SEQ ID NO: 192978 - DNA, 33 bp, Homo sapien
attttaaatgatataatagacgtgatttcccat

SEQ ID NO: 192979 - DNA, 33 bp, Homo sapien
agaaatccaaacatacagtaacttaacaggaat

SEQ ID NO: 192980 - DNA, 33 bp, Homo sapien
agaaatccaaacatacggtaacttaacaggaat

SEQ ID NO: 192981 - DNA, 33 bp, Homo sapien
agaaaggccaggtctacgtcttccactgcaaac

SEQ ID NO: 192982 - DNA, 33 bp, Homo sapien
agaaaggccaggtctatgtcttccactgcaaac

SEQ ID NO: 192983 - DNA, 33 bp, Homo sapien
tgaacctctgctctgtcaaatgctggaatgcag

SEQ ID NO: 192984 - DNA, 33 bp, Homo sapien
tgaacctctgctctgtgaaatgctggaatgcag

SEQ ID NO: 192985 - DNA, 33 bp, Homo sapien
tccctctgatccagaaactaccagtggtctctg

SEQ ID NO: 192986 - DNA, 33 bp, Homo sapien
tccctctgatccagaagctaccagtggtctctg

SEQ ID NO: 192987 - DNA, 33 bp, Homo sapien
tgagtgacccagaaagaatatccagggctctaa

SEQ ID NO: 192988 - DNA, 33 bp, Homo sapien
tgagtgacccagaaaggatatccagggctctaa

SEQ ID NO: 192989 - DNA, 33 bp, Homo sapien
atagtctagatccaagaaactctgactccggtg

SEQ ID NO: 192990 - DNA, 33 bp, Homo sapien
atagtctagatccaagtaactctgactccggtg

SEQ ID NO: 192991 - DNA, 33 bp, Homo sapien
gtgcctttaaattccacagaaagggaagaaaaa

SEQ ID NO: 192992 - DNA, 33 bp, Homo sapien
gtgcctttaaattccagagaaagggaagaaaaa

SEQ ID NO: 192993 - DNA, 33 bp, Homo sapien
cacatggtaagaactcaaaagatgtttattgaa

SEQ ID NO: 192994 - DNA, 33 bp, Homo sapien
cacatggtaagaactcgaaagatgtttattgaa

SEQ ID NO: 192995 - DNA, 33 bp, Homo sapien
ccttttgaaaatctataaagtagaggctattac

SEQ ID NO: 192996 - DNA, 33 bp, Homo sapien
ccttttgaaaatctatgaagtagaggctattac

SEQ ID NO: 192997 - DNA, 33 bp, Homo sapien
gaaagtgtccggcacactatctgacacatattg

SEQ ID NO: 192998 - DNA, 33 bp, Homo sapien
gaaagtgtccggcacattatctgacacatattg

SEQ ID NO: 192999 - DNA, 33 bp, Homo sapien
ctaggacttaatactcaataaaggttttgttga

SEQ ID NO: 193000 - DNA, 33 bp, Homo sapien
ctaggacttaatactcgataaaggttttgttga

SEQ ID NO: 193001 - DNA, 33 bp, Homo sapien
gaccatgggaatcacaacaagtgaataataacc

SEQ ID NO: 193002 - DNA, 33 bp, Homo sapien
gaccatgggaatcacatcaagtgaataataacc

SEQ ID NO: 193003 - DNA, 33 bp, Homo sapien
ccctttaagagtgaagactggccgccaaactgg

SEQ ID NO: 193004 - DNA, 33 bp, Homo sapien
ccctttaagagtgaagcctggccgccaaactgg

SEQ ID NO: 193005 - DNA, 33 bp, Homo sapien
ccacttgccactagacaaaggaagtgtaccggg

SEQ ID NO: 193006 - DNA, 33 bp, Homo sapien
ccacttgccactagacgaaggaagtgtaccggg

SEQ ID NO: 193007 - DNA, 33 bp, Homo sapien
cgggtatcttgggaggaaaaggagaccctctgc

SEQ ID NO: 193008 - DNA, 33 bp, Homo sapien
cgggtatcttgggaggcaaaggagaccctctgc

SEQ ID NO: 193009 - DNA, 33 bp, Homo sapien
ctccgcaggtaaataactcaggactgagcagtt

SEQ ID NO: 193010 - DNA, 33 bp, Homo sapien
ctccgcaggtaaataagtcaggactgagcagtt

SEQ ID NO: 193011 - DNA, 33 bp, Homo sapien
tgatttgtcattgcaccgaaaaagggtcgaact

SEQ ID NO: 193012 - DNA, 33 bp, Homo sapien
tgatttgtcattgcactgaaaaagggtcgaact

SEQ ID NO: 193013 - DNA, 33 bp, Homo sapien
aagctgccattagctacagaaaggaaatgctct

SEQ ID NO: 193014 - DNA, 33 bp, Homo sapien
aagctgccattagctagagaaaggaaatgctct

SEQ ID NO: 193015 - DNA, 33 bp, Homo sapien
tcatttaatcttcacaacaacgtatgaggataa

SEQ ID NO: 193016 - DNA, 33 bp, Homo sapien
tcatttaatcttcacagcaacgtatgaggataa

SEQ ID NO: 193017 - DNA, 33 bp, Homo sapien
atcttctacatggttacaggcaaggaatagaaa

SEQ ID NO: 193018 - DNA, 33 bp, Homo sapien
atcttctacatggttataggcaaggaatagaaa

SEQ ID NO: 193019 - DNA, 33 bp, Homo sapien
acccagactggatcgccgccatctgtgtgtctg

SEQ ID NO: 193020 - DNA, 33 bp, Homo sapien
acccagactggatcgctgccatctgtgtgtctg

SEQ ID NO: 193021 - DNA, 33 bp, Homo sapien
ttgctcccctgacacaacctaaccactaccaca

SEQ ID NO: 193022 - DNA, 33 bp, Homo sapien
ttgctcccctgacacaccctaaccactaccaca

SEQ ID NO: 193023 - DNA, 33 bp, Homo sapien
tatttcatttgagcctcacaatagcctcacaaa

SEQ ID NO: 193024 - DNA, 33 bp, Homo sapien
tatttcatttgagcctgacaatagcctcacaaa

SEQ ID NO: 193025 - DNA, 33 bp, Homo sapien
tatatattgcttttcaacctatgggctttcctc

SEQ ID NO: 193026 - DNA, 33 bp, Homo sapien
tatatattgcttttcaccctatgggctttcctc

SEQ ID NO: 193027 - DNA, 33 bp, Homo sapien
cctcccacctgttataactcctggaagctgctt

SEQ ID NO: 193028 - DNA, 33 bp, Homo sapien
cctcccacctgttatacctcctggaagctgctt

SEQ ID NO: 193029 - DNA, 33 bp, Homo sapien
tgagaggcaactggctaaagtgtcaagaggagg

SEQ ID NO: 193030 - DNA, 33 bp, Homo sapien
tgagaggcaactggcttaagtgtcaagaggagg

SEQ ID NO: 193031 - DNA, 33 bp, Homo sapien
tgattgagtccatttagccacgttctctgctcc

SEQ ID NO: 193032 - DNA, 33 bp, Homo sapien
tgattgagtccatttatccacgttctctgctcc

SEQ ID NO: 193033 - DNA, 33 bp, Homo sapien
ccagatctcagggaaaaaagatacttgctttca

SEQ ID NO: 193034 - DNA, 33 bp, Homo sapien
ccagatctcagggaaagaagatacttgctttca

SEQ ID NO: 193035 - DNA, 33 bp, Homo sapien
agcaggtgcctccaaaagtcttactaagccaca

SEQ ID NO: 193036 - DNA, 33 bp, Homo sapien
agcaggtgcctccaaaggtcttactaagccaca

SEQ ID NO: 193037 - DNA, 33 bp, Homo sapien
tgctgaagcataaaataagcagccatgtcacct

SEQ ID NO: 193038 - DNA, 33 bp, Homo sapien
tgctgaagcataaaattagcagccatgtcacct

SEQ ID NO: 193039 - DNA, 33 bp, Homo sapien
aacacagacgcagggacccaatccccagaggct

SEQ ID NO: 193040 - DNA, 33 bp, Homo sapien
aacacagacgcagggatccaatccccagaggct

SEQ ID NO: 193041 - DNA, 33 bp, Homo sapien
gtttctactgaaaacaccggctgaagaaggcag

SEQ ID NO: 193042 - DNA, 33 bp, Homo sapien
gtttctactgaaaacatcggctgaagaaggcag

SEQ ID NO: 193043 - DNA, 33 bp, Homo sapien
aacatcagagcaaaagaaagagatggttcaggc

SEQ ID NO: 193044 - DNA, 33 bp, Homo sapien
aacatcagagcaaaagtaagagatggttcaggc

SEQ ID NO: 193045 - DNA, 33 bp, Homo sapien
tctcaaagcctcatccactgattccagcaatga

SEQ ID NO: 193046 - DNA, 33 bp, Homo sapien
tctcaaagcctcatccgctgattccagcaatga

SEQ ID NO: 193047 - DNA, 33 bp, Homo sapien
gtcaatcttgtcttcaatctaacttgtctaata

SEQ ID NO: 193048 - DNA, 33 bp, Homo sapien
gtcaatcttgtcttcagtctaacttgtctaata

SEQ ID NO: 193049 - DNA, 33 bp, Homo sapien
ataaaaacctcataccaactttgaaaaatacca

SEQ ID NO: 193050 - DNA, 33 bp, Homo sapien
ataaaaacctcataccgactttgaaaaatacca

SEQ ID NO: 193051 - DNA, 33 bp, Homo sapien
agaggtggctagaaacaagttggcagagtgggc

SEQ ID NO: 193052 - DNA, 33 bp, Homo sapien
agaggtggctagaaacgagttggcagagtgggc

SEQ ID NO: 193053 - DNA, 33 bp, Homo sapien
ccatgactgaagatttaaaaaaaaattaatgct

SEQ ID NO: 193054 - DNA, 33 bp, Homo sapien
ccatgactgaagattttaaaaaaaattaatgct

SEQ ID NO: 193055 - DNA, 33 bp, Homo sapien
tgacaacagtccacaaatcatgggattatttgg

SEQ ID NO: 193056 - DNA, 33 bp, Homo sapien
tgacaacagtccacaactcatgggattatttgg

SEQ ID NO: 193057 - DNA, 33 bp, Homo sapien
attaataggattgttacgtggattaaataaaac

SEQ ID NO: 193058 - DNA, 33 bp, Homo sapien
attaataggattgttatgtggattaaataaaac

SEQ ID NO: 193059 - DNA, 33 bp, Homo sapien
cagatgcctaattcaccactctatgacatctgt

SEQ ID NO: 193060 - DNA, 33 bp, Homo sapien
cagatgcctaattcactactctatgacatctgt

SEQ ID NO: 193061 - DNA, 33 bp, Homo sapien
gtgctcctggcctggacgagctggttcctagac

SEQ ID NO: 193062 - DNA, 33 bp, Homo sapien
gtgctcctggcctggatgagctggttcctagac

SEQ ID NO: 193063 - DNA, 33 bp, Homo sapien
tgtagaataatgatagacacagcaatgatatta

SEQ ID NO: 193064 - DNA, 33 bp, Homo sapien
tgtagaataatgatagccacagcaatgatatta

SEQ ID NO: 193065 - DNA, 33 bp, Homo sapien
tcttgtcatatgtaaaaagggaatcattgtggt

SEQ ID NO: 193066 - DNA, 33 bp, Homo sapien
tcttgtcatatgtaaagagggaatcattgtggt

SEQ ID NO: 193067 - DNA, 33 bp, Homo sapien
ctgctcaggctcagcaacagagaggttaatgag

SEQ ID NO: 193068 - DNA, 33 bp, Homo sapien
ctgctcaggctcagcagcagagaggttaatgag

SEQ ID NO: 193069 - DNA, 33 bp, Homo sapien
caagagtcctcaatcactgaacatgccacaggt

SEQ ID NO: 193070 - DNA, 33 bp, Homo sapien
caagagtcctcaatcattgaacatgccacaggt

SEQ ID NO: 193071 - DNA, 33 bp, Homo sapien
ataagtcaaaacctccaaattttaatgaaagct

SEQ ID NO: 193072 - DNA, 33 bp, Homo sapien
ataagtcaaaacctccgaattttaatgaaagct

SEQ ID NO: 193073 - DNA, 33 bp, Homo sapien
taaattaggttgaggaaactggttggaattttg

SEQ ID NO: 193074 - DNA, 33 bp, Homo sapien
taaattaggttgaggacactggttggaattttg

SEQ ID NO: 193075 - DNA, 33 bp, Homo sapien
aggcactgtagggcaaataggagtaagtaaaga

SEQ ID NO: 193076 - DNA, 33 bp, Homo sapien
aggcactgtagggcaagtaggagtaagtaaaga

SEQ ID NO: 193077 - DNA, 33 bp, Homo sapien
ttgaaaaagcctccaccagcttcatttaggaag

SEQ ID NO: 193078 - DNA, 33 bp, Homo sapien
ttgaaaaagcctccactagcttcatttaggaag

SEQ ID NO: 193079 - DNA, 33 bp, Homo sapien
ggctgtccattaagcacacttaaacacatgtac

SEQ ID NO: 193080 - DNA, 33 bp, Homo sapien
ggctgtccattaagcatacttaaacacatgtac

SEQ ID NO: 193081 - DNA, 33 bp, Homo sapien
tctgcaatctttctccaagaaatcccttctcta

SEQ ID NO: 193082 - DNA, 33 bp, Homo sapien
tctgcaatctttctccgagaaatcccttctcta

SEQ ID NO: 193083 - DNA, 33 bp, Homo sapien
acaccatagaattgtacagaaccttaggtatca

SEQ ID NO: 193084 - DNA, 33 bp, Homo sapien
acaccatagaattgtatagaaccttaggtatca

SEQ ID NO: 193085 - DNA, 33 bp, Homo sapien
tatgttgaagcgctgaactcgaatgtgactgtt

SEQ ID NO: 193086 - DNA, 33 bp, Homo sapien
tatgttgaagcgctgatctcgaatgtgactgtt

SEQ ID NO: 193087 - DNA, 33 bp, Homo sapien
atctcattggctcccccagaaggagaccagtgc

SEQ ID NO: 193088 - DNA, 33 bp, Homo sapien
atctcattggctccccgagaaggagaccagtgc

SEQ ID NO: 193089 - DNA, 33 bp, Homo sapien
tcaatttcaaataccacgtgtaaactgagacac

SEQ ID NO: 193090 - DNA, 33 bp, Homo sapien
tcaatttcaaataccatgtgtaaactgagacac

SEQ ID NO: 193091 - DNA, 33 bp, Homo sapien
gtcactcttcttgacaatggccttaaaataggg

SEQ ID NO: 193092 - DNA, 33 bp, Homo sapien
gtcactcttcttgacagtggccttaaaataggg

SEQ ID NO: 193093 - DNA, 33 bp, Homo sapien
cgtctcttctcttccactgcagatcaagggttc

SEQ ID NO: 193094 - DNA, 33 bp, Homo sapien
cgtctcttctcttccattgcagatcaagggttc

SEQ ID NO: 193095 - DNA, 33 bp, Homo sapien
agatcaagggttctcaaagtgacctgctgagcc

SEQ ID NO: 193096 - DNA, 33 bp, Homo sapien
agatcaagggttctcatagtgacctgctgagcc

SEQ ID NO: 193097 - DNA, 33 bp, Homo sapien
atgtgctaacagtggacggaagattcaggcttc

SEQ ID NO: 193098 - DNA, 33 bp, Homo sapien
atgtgctaacagtggatggaagattcaggcttc

SEQ ID NO: 193099 - DNA, 33 bp, Homo sapien
tgccctggacagcgcacctaagctcagcacatg

SEQ ID NO: 193100 - DNA, 33 bp, Homo sapien
tgccctggacagcgcagctaagctcagcacatg

SEQ ID NO: 193101 - DNA, 33 bp, Homo sapien
tggcaagccgcaatgacgctgcgcctcctacat

SEQ ID NO: 193102 - DNA, 33 bp, Homo sapien
tggcaagccgcaatgatgctgcgcctcctacat

SEQ ID NO: 193103 - DNA, 33 bp, Homo sapien
tattgatttccttggacgagcaaggtgtgtgtg

SEQ ID NO: 193104 - DNA, 33 bp, Homo sapien
tattgatttccttggatgagcaaggtgtgtgtg

SEQ ID NO: 193105 - DNA, 33 bp, Homo sapien
gtcggtctcctgaacaatgtactccaaaggtca

SEQ ID NO: 193106 - DNA, 33 bp, Homo sapien
gtcggtctcctgaacagtgtactccaaaggtca

SEQ ID NO: 193107 - DNA, 33 bp, Homo sapien
aaatgtccacactggaataaggggctttctggg

SEQ ID NO: 193108 - DNA, 33 bp, Homo sapien
aaatgtccacactggagtaaggggctttctggg

SEQ ID NO: 193109 - DNA, 33 bp, Homo sapien
catcggtgagaggaccactcaggcaggtgttgc

SEQ ID NO: 193110 - DNA, 33 bp, Homo sapien
catcggtgagaggaccgctcaggcaggtgttgc

SEQ ID NO: 193111 - DNA, 33 bp, Homo sapien
cacaggaaatgcataacaccagtgactcgaggc

SEQ ID NO: 193112 - DNA, 33 bp, Homo sapien
cacaggaaatgcataataccagtgactcgaggc

SEQ ID NO: 193113 - DNA, 33 bp, Homo sapien
cctgtaaatgccccagcagaaagcacttcaaag

SEQ ID NO: 193114 - DNA, 33 bp, Homo sapien
cctgtaaatgccccagtagaaagcacttcaaag

SEQ ID NO: 193115 - DNA, 33 bp, Homo sapien
tggatctgtgctgaggccataaaagacagagat

SEQ ID NO: 193116 - DNA, 33 bp, Homo sapien
tggatctgtgctgaggtcataaaagacagagat

SEQ ID NO: 193117 - DNA, 33 bp, Homo sapien
catttcgctgccttcaaagacccggatgtccta

SEQ ID NO: 193118 - DNA, 33 bp, Homo sapien
catttcgctgccttcagagacccggatgtccta

SEQ ID NO: 193119 - DNA, 33 bp, Homo sapien
ccaatccagttggccaagataagccacttccac

SEQ ID NO: 193120 - DNA, 33 bp, Homo sapien
ccaatccagttggccacgataagccacttccac

SEQ ID NO: 193121 - DNA, 33 bp, Homo sapien
ttcactgacagtcaccaagggttagtgtggagg

SEQ ID NO: 193122 - DNA, 33 bp, Homo sapien
ttcactgacagtcaccgagggttagtgtggagg

SEQ ID NO: 193123 - DNA, 33 bp, Homo sapien
cagactcatccattaaatgaggttggtgaagat

SEQ ID NO: 193124 - DNA, 33 bp, Homo sapien
cagactcatccattaagtgaggttggtgaagat

SEQ ID NO: 193125 - DNA, 33 bp, Homo sapien
ttcaacccctctgtccaccctgccaagctttgc

SEQ ID NO: 193126 - DNA, 33 bp, Homo sapien
ttcaacccctctgtccgccctgccaagctttgc

SEQ ID NO: 193127 - DNA, 33 bp, Homo sapien
tcctaagaaccaggggaatgaggagagcttcgg

SEQ ID NO: 193128 - DNA, 33 bp, Homo sapien
tcctaagaaccagggggatgaggagagcttcgg

SEQ ID NO: 193129 - DNA, 33 bp, Homo sapien
gcttaaaattggatgcagacccagaagattgta

SEQ ID NO: 193130 - DNA, 33 bp, Homo sapien
gcttaaaattggatgcggacccagaagattgta

SEQ ID NO: 193131 - DNA, 33 bp, Homo sapien
gagtgaggatctgctcaacaagccttgattaac

SEQ ID NO: 193132 - DNA, 33 bp, Homo sapien
gagtgaggatctgctcgacaagccttgattaac

SEQ ID NO: 193133 - DNA, 33 bp, Homo sapien
ttggggtctatggcacggcttcctggtggagtt

SEQ ID NO: 193134 - DNA, 33 bp, Homo sapien
ttggggtctatggcactgcttcctggtggagtt

SEQ ID NO: 193135 - DNA, 33 bp, Homo sapien
gagttaagctgctaacactcctgatttagctag

SEQ ID NO: 193136 - DNA, 33 bp, Homo sapien
gagttaagctgctaacgctcctgatttagctag

SEQ ID NO: 193137 - DNA, 33 bp, Homo sapien
tccagtggaagccatgacaagctccctgcagct

SEQ ID NO: 193138 - DNA, 33 bp, Homo sapien
tccagtggaagccatgtcaagctccctgcagct

SEQ ID NO: 193139 - DNA, 33 bp, Homo sapien
gtgaaagagacaggcgaacatccttgcccctac

SEQ ID NO: 193140 - DNA, 33 bp, Homo sapien
gtgaaagagacaggcggacatccttgcccctac

SEQ ID NO: 193141 - DNA, 33 bp, Homo sapien
ggctttaccatatccccgataccctgcgccatg

SEQ ID NO: 193142 - DNA, 33 bp, Homo sapien
ggctttaccatatccctgataccctgcgccatg

SEQ ID NO: 193143 - DNA, 33 bp, Homo sapien
agagctcccttcatgcaattaaagtatgactga

SEQ ID NO: 193144 - DNA, 33 bp, Homo sapien
agagctcccttcatgcgattaaagtatgactga

SEQ ID NO: 193145 - DNA, 33 bp, Homo sapien
atgactgagaagcagagagaaaggaaggaggcc

SEQ ID NO: 193146 - DNA, 33 bp, Homo sapien
atgactgagaagcagatagaaaggaaggaggcc

SEQ ID NO: 193147 - DNA, 33 bp, Homo sapien
gatccacagaaaatcactgatggctgatgattt

SEQ ID NO: 193148 - DNA, 33 bp, Homo sapien
gatccacagaaaatcattgatggctgatgattt

SEQ ID NO: 193149 - DNA, 33 bp, Homo sapien
gtgacttcatccagccccagctttcccatccag

SEQ ID NO: 193150 - DNA, 33 bp, Homo sapien
gtgacttcatccagccgcagctttcccatccag

SEQ ID NO: 193151 - DNA, 33 bp, Homo sapien
tttccaaccccaaagccctgatgtgtaaaatag

SEQ ID NO: 193152 - DNA, 33 bp, Homo sapien
tttccaaccccaaagctctgatgtgtaaaatag

SEQ ID NO: 193153 - DNA, 33 bp, Homo sapien
tagagcaatagtccaccggtgagcggggaggtc

SEQ ID NO: 193154 - DNA, 33 bp, Homo sapien
tagagcaatagtccactggtgagcggggaggtc

SEQ ID NO: 193155 - DNA, 33 bp, Homo sapien
gtggctggcccagcagaagtttacaagtatgac

SEQ ID NO: 193156 - DNA, 33 bp, Homo sapien
gtggctggcccagcaggagtttacaagtatgac

SEQ ID NO: 193157 - DNA, 33 bp, Homo sapien
ctgctgcatcgtatgacaattctgtgtttaacc

SEQ ID NO: 193158 - DNA, 33 bp, Homo sapien
ctgctgcatcgtatgataattctgtgtttaacc

SEQ ID NO: 193159 - DNA, 33 bp, Homo sapien
tgcatttaatccaactaacctactgaacatcat

SEQ ID NO: 193160 - DNA, 33 bp, Homo sapien
tgcatttaatccaactgacctactgaacatcat

SEQ ID NO: 193161 - DNA, 33 bp, Homo sapien
attatatcctgtacatgacttcaaaactgtgat

SEQ ID NO: 193162 - DNA, 33 bp, Homo sapien
attatatcctgtacattacttcaaaactgtgat

SEQ ID NO: 193163 - DNA, 33 bp, Homo sapien
ggctatatgggacagccaattgttcctagactt

SEQ ID NO: 193164 - DNA, 33 bp, Homo sapien
ggctatatgggacagctaattgttcctagactt

SEQ ID NO: 193165 - DNA, 33 bp, Homo sapien
actgagtgttgtccaggagtctgtaggctgatt

SEQ ID NO: 193166 - DNA, 33 bp, Homo sapien
actgagtgttgtccagtagtctgtaggctgatt

SEQ ID NO: 193167 - DNA, 33 bp, Homo sapien
ttttggaaccctgtgccccattgcactaagaag

SEQ ID NO: 193168 - DNA, 33 bp, Homo sapien
ttttggaaccctgtgctccattgcactaagaag

SEQ ID NO: 193169 - DNA, 33 bp, Homo sapien
tcaagaatacctgtacaacaccataaccacctg

SEQ ID NO: 193170 - DNA, 33 bp, Homo sapien
tcaagaatacctgtacgacaccataaccacctg

SEQ ID NO: 193171 - DNA, 33 bp, Homo sapien
gataatctcaatatagacctcgcatggagtaag

SEQ ID NO: 193172 - DNA, 33 bp, Homo sapien
gataatctcaatataggcctcgcatggagtaag

SEQ ID NO: 193173 - DNA, 33 bp, Homo sapien
aagcctctgaggaagaacaggatgatgcgatga

SEQ ID NO: 193174 - DNA, 33 bp, Homo sapien
aagcctctgaggaagaccaggatgatgcgatga

SEQ ID NO: 193175 - DNA, 33 bp, Homo sapien
gacttggccccgtcaacctatccagtgggggaa

SEQ ID NO: 193176 - DNA, 33 bp, Homo sapien
gacttggccccgtcaatctatccagtgggggaa

SEQ ID NO: 193177 - DNA, 33 bp, Homo sapien
ttcctccctactctacagcaagcagctccagca

SEQ ID NO: 193178 - DNA, 33 bp, Homo sapien
ttcctccctactctacggcaagcagctccagca

SEQ ID NO: 193179 - DNA, 33 bp, Homo sapien
agcaaaatggaatggaaagtatagagttcccac

SEQ ID NO: 193180 - DNA, 33 bp, Homo sapien
agcaaaatggaatggagagtatagagttcccac

SEQ ID NO: 193181 - DNA, 33 bp, Homo sapien
caggtttggattagaaagggctgaagctcattt

SEQ ID NO: 193182 - DNA, 33 bp, Homo sapien
caggtttggattagaaggggctgaagctcattt

SEQ ID NO: 193183 - DNA, 33 bp, Homo sapien
ttccatcccgctgacaataaacatcaatggtgg

SEQ ID NO: 193184 - DNA, 33 bp, Homo sapien
ttccatcccgctgacagtaaacatcaatggtgg

SEQ ID NO: 193185 - DNA, 33 bp, Homo sapien
caatgatggtatggaaagatgtccatgatgttt

SEQ ID NO: 193186 - DNA, 33 bp, Homo sapien
caatgatggtatggaaggatgtccatgatgttt

SEQ ID NO: 193187 - DNA, 33 bp, Homo sapien
ggtgttttcacatcggaagacactaattagggg

SEQ ID NO: 193188 - DNA, 33 bp, Homo sapien
ggtgttttcacatcgggagacactaattagggg

SEQ ID NO: 193189 - DNA, 33 bp, Homo sapien
cagcaggctagagagacacactgtgggctagaa

SEQ ID NO: 193190 - DNA, 33 bp, Homo sapien
cagcaggctagagagagacactgtgggctagaa

SEQ ID NO: 193191 - DNA, 33 bp, Homo sapien
tgtcttaccccagctacacagtgaaatcattta

SEQ ID NO: 193192 - DNA, 33 bp, Homo sapien
tgtcttaccccagctatacagtgaaatcattta

SEQ ID NO: 193193 - DNA, 33 bp, Homo sapien
tccagcagctggtcccaaagtgccaagccactg

SEQ ID NO: 193194 - DNA, 33 bp, Homo sapien
tccagcagctggtcccgaagtgccaagccactg

SEQ ID NO: 193195 - DNA, 33 bp, Homo sapien
tgcagtcatgagttacagaacaaaaaagaaaca

SEQ ID NO: 193196 - DNA, 33 bp, Homo sapien
tgcagtcatgagttactgaacaaaaaagaaaca

SEQ ID NO: 193197 - DNA, 33 bp, Homo sapien
ccttccagacattccaaaatgaattaaaacttc

SEQ ID NO: 193198 - DNA, 33 bp, Homo sapien
ccttccagacattccagaatgaattaaaacttc

SEQ ID NO: 193199 - DNA, 33 bp, Homo sapien
tgagatatccacacgaaaaaactttataatgtg

SEQ ID NO: 193200 - DNA, 33 bp, Homo sapien
tgagatatccacacgagaaaactttataatgtg

SEQ ID NO: 193201 - DNA, 33 bp, Homo sapien
aggggaaatgcttacgcaatcgctgtagagaaa

SEQ ID NO: 193202 - DNA, 33 bp, Homo sapien
aggggaaatgcttacgtaatcgctgtagagaaa

SEQ ID NO: 193203 - DNA, 33 bp, Homo sapien
cgtcatggacagagtcaaaaggctgccccacct

SEQ ID NO: 193204 - DNA, 33 bp, Homo sapien
cgtcatggacagagtcgaaaggctgccccacct

SEQ ID NO: 193205 - DNA, 33 bp, Homo sapien
cttcccggcaagccgaactagggtgaaaactgg

SEQ ID NO: 193206 - DNA, 33 bp, Homo sapien
cttcccggcaagccgagctagggtgaaaactgg

SEQ ID NO: 193207 - DNA, 33 bp, Homo sapien
tgattcacgtcgttacactagttggcttcacaa

SEQ ID NO: 193208 - DNA, 33 bp, Homo sapien
tgattcacgtcgttactctagttggcttcacaa

SEQ ID NO: 193209 - DNA, 33 bp, Homo sapien
gtctttgactctcaaaacttaaaaccacactca

SEQ ID NO: 193210 - DNA, 33 bp, Homo sapien
gtctttgactctcaaagcttaaaaccacactca

SEQ ID NO: 193211 - DNA, 33 bp, Homo sapien
aagaagtctgagtgcccaaaggaccactggggg

SEQ ID NO: 193212 - DNA, 33 bp, Homo sapien
aagaagtctgagtgccgaaaggaccactggggg

SEQ ID NO: 193213 - DNA, 33 bp, Homo sapien
atttgtaaaatggacaactggaaaaactaactt

SEQ ID NO: 193214 - DNA, 33 bp, Homo sapien
atttgtaaaatggacagctggaaaaactaactt

SEQ ID NO: 193215 - DNA, 33 bp, Homo sapien
ttttcctgacgagctcaagtgctccctctggtc

SEQ ID NO: 193216 - DNA, 33 bp, Homo sapien
ttttcctgacgagctctagtgctccctctggtc

SEQ ID NO: 193217 - DNA, 33 bp, Homo sapien
actaatgtgagtcatacagatggagtctcaggg

SEQ ID NO: 193218 - DNA, 33 bp, Homo sapien
actaatgtgagtcatatagatggagtctcaggg

SEQ ID NO: 193219 - DNA, 33 bp, Homo sapien
tggtgtacagactgaacaccagatccagaaagt

SEQ ID NO: 193220 - DNA, 33 bp, Homo sapien
tggtgtacagactgaagaccagatccagaaagt

SEQ ID NO: 193221 - DNA, 33 bp, Homo sapien
gaccttaaaattcctgacaacatgcctccaccc

SEQ ID NO: 193222 - DNA, 33 bp, Homo sapien
gaccttaaaattcctggcaacatgcctccaccc

SEQ ID NO: 193223 - DNA, 33 bp, Homo sapien
tagccatccaagcctacagaacttggctgtgag

SEQ ID NO: 193224 - DNA, 33 bp, Homo sapien
tagccatccaagcctatagaacttggctgtgag

SEQ ID NO: 193225 - DNA, 33 bp, Homo sapien
gttttttctggttcaactgggggaaatttggtt

SEQ ID NO: 193226 - DNA, 33 bp, Homo sapien
gttttttctggttcaattgggggaaatttggtt

SEQ ID NO: 193227 - DNA, 33 bp, Homo sapien
tctgactggtaagttccagttctgtggtaactc

SEQ ID NO: 193228 - DNA, 33 bp, Homo sapien
tctgactggtaagttctagttctgtggtaactc

SEQ ID NO: 193229 - DNA, 33 bp, Homo sapien
tctgggccttgcagaccgaataggggtgtgttt

SEQ ID NO: 193230 - DNA, 33 bp, Homo sapien
tctgggccttgcagactgaataggggtgtgttt

SEQ ID NO: 193231 - DNA, 33 bp, Homo sapien
tggtcttccttgcaggaaaataagtcccacgag

SEQ ID NO: 193232 - DNA, 33 bp, Homo sapien
tggtcttccttgcagggaaataagtcccacgag

SEQ ID NO: 193233 - DNA, 33 bp, Homo sapien
ttatgtgtttaaggaacattatcacaaagaaaa

SEQ ID NO: 193234 - DNA, 33 bp, Homo sapien
ttatgtgtttaaggaatattatcacaaagaaaa

SEQ ID NO: 193235 - DNA, 33 bp, Homo sapien
agtctctttacaaagaaggaatagtaatccatg

SEQ ID NO: 193236 - DNA, 33 bp, Homo sapien
agtctctttacaaagagggaatagtaatccatg

SEQ ID NO: 193237 - DNA, 33 bp, Homo sapien
aagcacaatgaaaggcccttgaaggtggttaag

SEQ ID NO: 193238 - DNA, 33 bp, Homo sapien
aagcacaatgaaaggcgcttgaaggtggttaag

SEQ ID NO: 193239 - DNA, 33 bp, Homo sapien
ttgaggagttggcatacaacaagaaataatgcc

SEQ ID NO: 193240 - DNA, 33 bp, Homo sapien
ttgaggagttggcatataacaagaaataatgcc

SEQ ID NO: 193241 - DNA, 33 bp, Homo sapien
atatttctttttatgcacattcattccctgagc

SEQ ID NO: 193242 - DNA, 33 bp, Homo sapien
atatttctttttatgctcattcattccctgagc

SEQ ID NO: 193243 - DNA, 33 bp, Homo sapien
tacatgaaaaaaagaactgatatgctggacttc

SEQ ID NO: 193244 - DNA, 33 bp, Homo sapien
tacatgaaaaaaagaattgatatgctggacttc

SEQ ID NO: 193245 - DNA, 33 bp, Homo sapien
aaccagtagaaaccgacgcacttgttcatatga

SEQ ID NO: 193246 - DNA, 33 bp, Homo sapien
aaccagtagaaaccgatgcacttgttcatatga

SEQ ID NO: 193247 - DNA, 33 bp, Homo sapien
atgcaattttgtgccaatctacatatagggcat

SEQ ID NO: 193248 - DNA, 33 bp, Homo sapien
atgcaattttgtgccattctacatatagggcat

SEQ ID NO: 193249 - DNA, 33 bp, Homo sapien
attttgataaacggaaaaaatgatgctctgtgg

SEQ ID NO: 193250 - DNA, 33 bp, Homo sapien
attttgataaacggaataaatgatgctctgtgg

SEQ ID NO: 193251 - DNA, 33 bp, Homo sapien
agtcacttccatattacgtgacctttattacaa

SEQ ID NO: 193252 - DNA, 33 bp, Homo sapien
agtcacttccatattatgtgacctttattacaa

SEQ ID NO: 193253 - DNA, 33 bp, Homo sapien
aatgaaaggaaagaaacccaatgcaaactagtt

SEQ ID NO: 193254 - DNA, 33 bp, Homo sapien
aatgaaaggaaagaaatccaatgcaaactagtt

SEQ ID NO: 193255 - DNA, 33 bp, Homo sapien
ctttaagcagaacactaaagtacacatcaagcc

SEQ ID NO: 193256 - DNA, 33 bp, Homo sapien
ctttaagcagaacactgaagtacacatcaagcc

SEQ ID NO: 193257 - DNA, 33 bp, Homo sapien
aaataagtatgttctacagatagtgtttctcaa

SEQ ID NO: 193258 - DNA, 33 bp, Homo sapien
aaataagtatgttctatagatagtgtttctcaa

SEQ ID NO: 193259 - DNA, 33 bp, Homo sapien
cattccgggaatgtgacggaaattgcatataca

SEQ ID NO: 193260 - DNA, 33 bp, Homo sapien
cattccgggaatgtgatggaaattgcatataca

SEQ ID NO: 193261 - DNA, 33 bp, Homo sapien
cctgcccatgcattgaacctaggccctgacgct

SEQ ID NO: 193262 - DNA, 33 bp, Homo sapien
cctgcccatgcattgaccctaggccctgacgct

SEQ ID NO: 193263 - DNA, 33 bp, Homo sapien
atttccaagcatcagcagcctgtggactcaagc

SEQ ID NO: 193264 - DNA, 33 bp, Homo sapien
atttccaagcatcagcggcctgtggactcaagc

SEQ ID NO: 193265 - DNA, 33 bp, Homo sapien
agtaggcaaaagagacacagattgaagcaatta

SEQ ID NO: 193266 - DNA, 33 bp, Homo sapien
agtaggcaaaagagacccagattgaagcaatta

SEQ ID NO: 193267 - DNA, 33 bp, Homo sapien
aacagagctgagccgaacgtggtacagctgccc

SEQ ID NO: 193268 - DNA, 33 bp, Homo sapien
aacagagctgagccgagcgtggtacagctgccc

SEQ ID NO: 193269 - DNA, 33 bp, Homo sapien
ttggtggccggagcataaatcaaagataaagtt

SEQ ID NO: 193270 - DNA, 33 bp, Homo sapien
ttggtggccggagcatgaatcaaagataaagtt

SEQ ID NO: 193271 - DNA, 33 bp, Homo sapien
ggtcagaaatttgggaatagtttacctaggtgg

SEQ ID NO: 193272 - DNA, 33 bp, Homo sapien
ggtcagaaatttgggagtagtttacctaggtgg

SEQ ID NO: 193273 - DNA, 33 bp, Homo sapien
catatatgaggtcttaagatgatgtcactaaat

SEQ ID NO: 193274 - DNA, 33 bp, Homo sapien
catatatgaggtcttaggatgatgtcactaaat

SEQ ID NO: 193275 - DNA, 33 bp, Homo sapien
aatttgttgagcacaactagtctctttattaac

SEQ ID NO: 193276 - DNA, 33 bp, Homo sapien
aatttgttgagcacaagtagtctctttattaac

SEQ ID NO: 193277 - DNA, 33 bp, Homo sapien
ctgagggtaggcaacaagtctaaatttatcctg

SEQ ID NO: 193278 - DNA, 33 bp, Homo sapien
ctgagggtaggcaacatgtctaaatttatcctg

SEQ ID NO: 193279 - DNA, 33 bp, Homo sapien
taaaaataaaacaacaagattgctgctacacca

SEQ ID NO: 193280 - DNA, 33 bp, Homo sapien
taaaaataaaacaacacgattgctgctacacca

SEQ ID NO: 193281 - DNA, 33 bp, Homo sapien
gatatttcccgagacaaaaaagagaaagaggtt

SEQ ID NO: 193282 - DNA, 33 bp, Homo sapien
gatatttcccgagacagaaaagagaaagaggtt

SEQ ID NO: 193283 - DNA, 33 bp, Homo sapien
cattttagactgtcaacctggatgttttcttga

SEQ ID NO: 193284 - DNA, 33 bp, Homo sapien
cattttagactgtcaatctggatgttttcttga

SEQ ID NO: 193285 - DNA, 33 bp, Homo sapien; identical to SEQ ID NO: 193283

SEQ ID NO: 193286 - DNA, 33 bp, Homo sapien; identical to SEQ ID NO: 193284

SEQ ID NO: 193287 - DNA, 33 bp, Homo sapien
caggccatccaagtcacataaggtggagtaatg

SEQ ID NO: 193288 - DNA, 33 bp, Homo sapien
caggccatccaagtcatataaggtggagtaatg

SEQ ID NO: 193289 - DNA, 33 bp, Homo sapien
cctcccaatcccgttacgttgacaattacattt

SEQ ID NO: 193290 - DNA, 33 bp, Homo sapien
cctcccaatcccgttatgttgacaattacattt

SEQ ID NO: 193291 - DNA, 33 bp, Homo sapien
gttcagtttctggtgacgccattttcttcttcc

SEQ ID NO: 193292 - DNA, 33 bp, Homo sapien
gttcagtttctggtgatgccattttcttcttcc

SEQ ID NO: 193293 - DNA, 33 bp, Homo sapien
agtgcctctagcataacattcctggccccttgc

SEQ ID NO: 193294 - DNA, 33 bp, Homo sapien
agtgcctctagcataatattcctggccccttgc

SEQ ID NO: 193295 - DNA, 33 bp, Homo sapien
tatagcaatggtccaccctcggtagcaattttt

SEQ ID NO: 193296 - DNA, 33 bp, Homo sapien
tatagcaatggtccactctcggtagcaattttt

SEQ ID NO: 193297 - DNA, 33 bp, Homo sapien
aaatcccactaaaaccaagatgacaaagtgacc

SEQ ID NO: 193298 - DNA, 33 bp, Homo sapien
aaatcccactaaaaccgagatgacaaagtgacc

SEQ ID NO: 193299 - DNA, 33 bp, Homo sapien
ttagcatgctaaacgacactcctaccagcgcca

SEQ ID NO: 193300 - DNA, 33 bp, Homo sapien
ttagcatgctaaacgatactcctaccagcgcca

SEQ ID NO: 193301 - DNA, 33 bp, Homo sapien
acaactattaacaggaaagcagcaatccccctt

SEQ ID NO: 193302 - DNA, 33 bp, Homo sapien
acaactattaacaggagagcagcaatccccctt

SEQ ID NO: 193303 - DNA, 33 bp, Homo sapien
gacattgatgcactaccacaaagcaatcaatat

SEQ ID NO: 193304 - DNA, 33 bp, Homo sapien
gacattgatgcactactacaaagcaatcaatat

SEQ ID NO: 193305 - DNA, 33 bp, Homo sapien
tgtagcagattgatgacggcaaaaactgttatg

SEQ ID NO: 193306 - DNA, 33 bp, Homo sapien
tgtagcagattgatgagggcaaaaactgttatg

SEQ ID NO: 193307 - DNA, 33 bp, Homo sapien
ggcgagaagatttcccaagcccaggaggtcaag

SEQ ID NO: 193308 - DNA, 33 bp, Homo sapien
ggcgagaagatttcccgagcccaggaggtcaag

SEQ ID NO: 193309 - DNA, 33 bp, Homo sapien
ggcacaagcaagggtcccagagatcagttcctc

SEQ ID NO: 193310 - DNA, 33 bp, Homo sapien
ggcacaagcaagggtctcagagatcagttcctc

SEQ ID NO: 193311 - DNA, 33 bp, Homo sapien
tatttcctgaatcttgcaatcactcatcatata

SEQ ID NO: 193312 - DNA, 33 bp, Homo sapien
tatttcctgaatcttgtaatcactcatcatata

SEQ ID NO: 193313 - DNA, 33 bp, Homo sapien
gtgtttttagggtgtacataagtggaatgatta

SEQ ID NO: 193314 - DNA, 33 bp, Homo sapien
gtgtttttagggtgtatataagtggaatgatta

SEQ ID NO: 193315 - DNA, 33 bp, Homo sapien
tttttattgctaaggaacatttcattgtatgga

SEQ ID NO: 193316 - DNA, 33 bp, Homo sapien
tttttattgctaaggagcatttcattgtatgga

SEQ ID NO: 193317 - DNA, 33 bp, Homo sapien
tatacactgcttctgacattttaggggggttgg

SEQ ID NO: 193318 - DNA, 33 bp, Homo sapien
tatacactgcttctgatattttaggggggttgg

SEQ ID NO: 193319 - DNA, 33 bp, Homo sapien
gaggtcaagttatggaaggcctgcaaaccttaa

SEQ ID NO: 193320 - DNA, 33 bp, Homo sapien
gaggtcaagttatggagggcctgcaaaccttaa

SEQ ID NO: 193321 - DNA, 33 bp, Homo sapien
caaaagctctaggaacaggctcaaggcactgaa

SEQ ID NO: 193322 - DNA, 33 bp, Homo sapien
caaaagctctaggaacgggctcaaggcactgaa

SEQ ID NO: 193323 - DNA, 33 bp, Homo sapien
agcactctcctggccacagcagctggtatctca

SEQ ID NO: 193324 - DNA, 33 bp, Homo sapien
agcactctcctggccatagcagctggtatctca

SEQ ID NO: 193325 - DNA, 33 bp, Homo sapien
taccagcactatcagacaatgtgccaagtctct

SEQ ID NO: 193326 - DNA, 33 bp, Homo sapien
taccagcactatcagataatgtgccaagtctct

SEQ ID NO: 193327 - DNA, 33 bp, Homo sapien
ccctagcataaacagcaactaaaatatttatac

SEQ ID NO: 193328 - DNA, 33 bp, Homo sapien
ccctagcataaacagcgactaaaatatttatac

SEQ ID NO: 193329 - DNA, 33 bp, Homo sapien
accaaggtaagcaagacggatagagttaaatct

SEQ ID NO: 193330 - DNA, 33 bp, Homo sapien
accaaggtaagcaagatggatagagttaaatct

SEQ ID NO: 193331 - DNA, 33 bp, Homo sapien
cataaaaaagggacacagcacatttcagaaatt

SEQ ID NO: 193332 - DNA, 33 bp, Homo sapien
cataaaaaagggacacggcacatttcagaaatt

SEQ ID NO: 193333 - DNA, 33 bp, Homo sapien
aatccatgaggtcataacaatacaaaaagagac

SEQ ID NO: 193334 - DNA, 33 bp, Homo sapien
aatccatgaggtcatagcaatacaaaaagagac

SEQ ID NO: 193335 - DNA, 33 bp, Homo sapien
tcactccgagcaccctaactgtgatgtctaaga

SEQ ID NO: 193336 - DNA, 33 bp, Homo sapien
tcactccgagcaccctgactgtgatgtctaaga

SEQ ID NO: 193337 - DNA, 33 bp, Homo sapien
aaggttcaaatccagaaagccaaatgaagtaaa

SEQ ID NO: 193338 - DNA, 33 bp, Homo sapien
aaggttcaaatccagagagccaaatgaagtaaa

SEQ ID NO: 193339 - DNA, 33 bp, Homo sapien
cgtagtgtagagtctcccaggaggtaaatgagt

SEQ ID NO: 193340 - DNA, 33 bp, Homo sapien
cgtagtgtagagtctctcaggaggtaaatgagt

SEQ ID NO: 193341 - DNA, 33 bp, Homo sapien
atcagtcaaataaaccaatcaaaagaagtagat

SEQ ID NO: 193342 - DNA, 33 bp, Homo sapien
atcagtcaaataaaccgatcaaaagaagtagat

SEQ ID NO: 193343 - DNA, 33 bp, Homo sapien
ctttaatgcatttggaactttagtatgtagtgt

SEQ ID NO: 193344 - DNA, 33 bp, Homo sapien
ctttaatgcatttggacctttagtatgtagtgt

SEQ ID NO: 193345 - DNA, 33 bp, Homo sapien
tagaatcagccgtttacccaaggagccctgatt

SEQ ID NO: 193346 - DNA, 33 bp, Homo sapien
tagaatcagccgtttatccaaggagccctgatt

SEQ ID NO: 193347 - DNA, 33 bp, Homo sapien
tgcgcagagcaatttacatacttcacaggcaaa

SEQ ID NO: 193348 - DNA, 33 bp, Homo sapien
tgcgcagagcaatttagatacttcacaggcaaa

SEQ ID NO: 193349 - DNA, 33 bp, Homo sapien
ttcctacttgtgtaaacgagagggggcagcagc

SEQ ID NO: 193350 - DNA, 33 bp, Homo sapien
ttcctacttgtgtaaatgagagggggcagcagc

SEQ ID NO: 193351 - DNA, 33 bp, Homo sapien
cttcatcatgtttggcacttttaatggcccatt

SEQ ID NO: 193352 - DNA, 33 bp, Homo sapien
cttcatcatgtttggcgcttttaatggcccatt

SEQ ID NO: 193353 - DNA, 33 bp, Homo sapien
atttgaaagagactaacacttgaaagagaggca

SEQ ID NO: 193354 - DNA, 33 bp, Homo sapien
atttgaaagagactaatacttgaaagagaggca

SEQ ID NO: 193355 - DNA, 33 bp, Homo sapien
acagtcaattgggtcaaacactactgagaggct

SEQ ID NO: 193356 - DNA, 33 bp, Homo sapien
acagtcaattgggtcagacactactgagaggct

SEQ ID NO: 193357 - DNA, 33 bp, Homo sapien
agactgttagttacaaggatgagaaagattata

SEQ ID NO: 193358 - DNA, 33 bp, Homo sapien
agactgttagttacaatgatgagaaagattata

SEQ ID NO: 193359 - DNA, 33 bp, Homo sapien
tctgtgtgatgtttcacatgtttatttcttgtc

SEQ ID NO: 193360 - DNA, 33 bp, Homo sapien
tctgtgtgatgtttcatatgtttatttcttgtc

SEQ ID NO: 193361 - DNA, 33 bp, Homo sapien
ccaagtcagaagagaaatcttgtgaggcaattc

SEQ ID NO: 193362 - DNA, 33 bp, Homo sapien
ccaagtcagaagagaagtcttgtgaggcaattc

SEQ ID NO: 193363 - DNA, 33 bp, Homo sapien
gcttctagaaccagcaaaatgattaagggtatg

SEQ ID NO: 193364 - DNA, 33 bp, Homo sapien
gcttctagaaccagcataatgattaagggtatg

SEQ ID NO: 193365 - DNA, 33 bp, Homo sapien
cccaattctatacccacttctttacctcaccac

SEQ ID NO: 193366 - DNA, 33 bp, Homo sapien
cccaattctatacccagttctttacctcaccac

SEQ ID NO: 193367 - DNA, 33 bp, Homo sapien
cttagataagccagataaacagagtgctgatag

SEQ ID NO: 193368 - DNA, 33 bp, Homo sapien
cttagataagccagatgaacagagtgctgatag

SEQ ID NO: 193369 - DNA, 33 bp, Homo sapien
gccatcattcccaatacgaagagaggcactacc

SEQ ID NO: 193370 - DNA, 33 bp, Homo sapien
gccatcattcccaatatgaagagaggcactacc

SEQ ID NO: 193371 - DNA, 33 bp, Homo sapien
aacagtggttactcacaaggcaatatttattat

SEQ ID NO: 193372 - DNA, 33 bp, Homo sapien
aacagtggttactcacgaggcaatatttattat

SEQ ID NO: 193373 - DNA, 33 bp, Homo sapien
cctggaaaaagtagaaatcaagaaatcacaaat

SEQ ID NO: 193374 - DNA, 33 bp, Homo sapien
cctggaaaaagtagaattcaagaaatcacaaat

SEQ ID NO: 193375 - DNA, 33 bp, Homo sapien
ctcttcatgtcaagaaaaacctctcaacaaact

SEQ ID NO: 193376 - DNA, 33 bp, Homo sapien
ctcttcatgtcaagaacaacctctcaacaaact

SEQ ID NO: 193377 - DNA, 33 bp, Homo sapien
ttgcaatatgatgacaatgcagacaaaacaggc

SEQ ID NO: 193378 - DNA, 33 bp, Homo sapien
ttgcaatatgatgacagtgcagacaaaacaggc

SEQ ID NO: 193379 - DNA, 33 bp, Homo sapien
catactttaaaagtgaagacgttagatgttgat

SEQ ID NO: 193380 - DNA, 33 bp, Homo sapien
catactttaaaagtgaggacgttagatgttgat

SEQ ID NO: 193381 - DNA, 33 bp, Homo sapien
gggataaatgggttaaaagcaagctggcagctc

SEQ ID NO: 193382 - DNA, 33 bp, Homo sapien
gggataaatgggttaagagcaagctggcagctc

SEQ ID NO: 193383 - DNA, 33 bp, Homo sapien
gcaatatcagagactacgcacttctggagaaat

SEQ ID NO: 193384 - DNA, 33 bp, Homo sapien
gcaatatcagagactatgcacttctggagaaat

SEQ ID NO: 193385 - DNA, 33 bp, Homo sapien
tttcatgtaacttccaagtagttcttacttcct

SEQ ID NO: 193386 - DNA, 33 bp, Homo sapien
tttcatgtaacttccacgtagttcttacttcct

SEQ ID NO: 193387 - DNA, 33 bp, Homo sapien
tgaagtattgaccagaataggagaaatagttag

SEQ ID NO: 193388 - DNA, 33 bp, Homo sapien
tgaagtattgaccagagtaggagaaatagttag

SEQ ID NO: 193389 - DNA, 33 bp, Homo sapien
atttcgttaggttaagcctgcaagtttcaaccc

SEQ ID NO: 193390 - DNA, 33 bp, Homo sapien
atttcgttaggttaaggctgcaagtttcaaccc

SEQ ID NO: 193391 - DNA, 33 bp, Homo sapien
aaatcatgaataaggacgtgccactatatttag

SEQ ID NO: 193392 - DNA, 33 bp, Homo sapien
aaatcatgaataaggatgtgccactatatttag

SEQ ID NO: 193393 - DNA, 33 bp, Homo sapien
ttctctacttcttctacatttttgctgactcta

SEQ ID NO: 193394 - DNA, 33 bp, Homo sapien
ttctctacttcttctatatttttgctgactcta

SEQ ID NO: 193395 - DNA, 33 bp, Homo sapien
tgagggaccacttgggacacaggaagcaatatg

SEQ ID NO: 193396 - DNA, 33 bp, Homo sapien
tgagggaccacttggggcacaggaagcaatatg

SEQ ID NO: 193397 - DNA, 33 bp, Homo sapien; identical to SEQ ID NO: 193395

SEQ ID NO: 193398 - DNA, 33 bp, Homo sapien; identical to SEQ ID NO: 193396

SEQ ID NO: 193399 - DNA, 33 bp, Homo sapien
atataaaagtctttgacggctttagtcctctat

SEQ ID NO: 193400 - DNA, 33 bp, Homo sapien
atataaaagtctttgatggctttagtcctctat

SEQ ID NO: 193401 - DNA, 33 bp, Homo sapien
atcgataaactgcttaaagtatggaacattaaa

SEQ ID NO: 193402 - DNA, 33 bp, Homo sapien
atcgataaactgcttagagtatggaacattaaa

SEQ ID NO: 193403 - DNA, 33 bp, Homo sapien
gaacctcactggaacacgtcactgtgatagcag

SEQ ID NO: 193404 - DNA, 33 bp, Homo sapien
gaacctcactggaacaggtcactgtgatagcag

SEQ ID NO: 193405 - DNA, 33 bp, Homo sapien
cactgatttatgtatccaccaccacaatcactt

SEQ ID NO: 193406 - DNA, 33 bp, Homo sapien
cactgatttatgtatctaccaccacaatcactt

SEQ ID NO: 193407 - DNA, 33 bp, Homo sapien
gggagggtcttacataaaaatgaatgcacaagc

SEQ ID NO: 193408 - DNA, 33 bp, Homo sapien
gggagggtcttacatacaaatgaatgcacaagc

SEQ ID NO: 193409 - DNA, 33 bp, Homo sapien
atcctctgggcttcaaataggtgtaaattttga

SEQ ID NO: 193410 - DNA, 33 bp, Homo sapien
atcctctgggcttcaattaggtgtaaattttga

SEQ ID NO: 193411 - DNA, 33 bp, Homo sapien
ctccagaaacttgccaatctacccataaaggct

SEQ ID NO: 193412 - DNA, 33 bp, Homo sapien
ctccagaaacttgccagtctacccataaaggct

SEQ ID NO: 193413 - DNA, 33 bp, Homo sapien
tggagttgtcatcaaactgctctccactctctt

SEQ ID NO: 193414 - DNA, 33 bp, Homo sapien
tggagttgtcatcaaattgctctccactctctt

SEQ ID NO: 193415 - DNA, 33 bp, Homo sapien
tttaaggatgtatctacgccactctgaccttca

SEQ ID NO: 193416 - DNA, 33 bp, Homo sapien
tttaaggatgtatctatgccactctgaccttca

SEQ ID NO: 193417 - DNA, 33 bp, Homo sapien
gaacgtaggcggtgaacacccaccaagacctca

SEQ ID NO: 193418 - DNA, 33 bp, Homo sapien
gaacgtaggcggtgaatacccaccaagacctca

SEQ ID NO: 193419 - DNA, 33 bp, Homo sapien
tggggaagctgtttcacgtctctgtacctcagt

SEQ ID NO: 193420 - DNA, 33 bp, Homo sapien
tggggaagctgtttcatgtctctgtacctcagt

SEQ ID NO: 193421 - DNA, 33 bp, Homo sapien
tattatgacacagttaacttatcctatactata

SEQ ID NO: 193422 - DNA, 33 bp, Homo sapien
tattatgacacagttatcttatcctatactata

SEQ ID NO: 193423 - DNA, 33 bp, Homo sapien
taaattatttggcgaagggaaactgcaagccca

SEQ ID NO: 193424 - DNA, 33 bp, Homo sapien
taaattatttggcgaatggaaactgcaagccca

SEQ ID NO: 193425 - DNA, 33 bp, Homo sapien
cttgggctatagcataaggctcactgagtagca

SEQ ID NO: 193426 - DNA, 33 bp, Homo sapien
cttgggctatagcatatggctcactgagtagca

SEQ ID NO: 193427 - DNA, 33 bp, Homo sapien
aggcggctgctagtcacgattttcctgaaccaa

SEQ ID NO: 193428 - DNA, 33 bp, Homo sapien
aggcggctgctagtcatgattttcctgaaccaa

SEQ ID NO: 193429 - DNA, 33 bp, Homo sapien
ctgcctaaaagcgtacagcctagatctgcctcc

SEQ ID NO: 193430 - DNA, 33 bp, Homo sapien
ctgcctaaaagcgtacggcctagatctgcctcc

SEQ ID NO: 193431 - DNA, 33 bp, Homo sapien
gtgatagctggaaaaacttaaatgctcttccct

SEQ ID NO: 193432 - DNA, 33 bp, Homo sapien
gtgatagctggaaaaagttaaatgctcttccct

SEQ ID NO: 193433 - DNA, 33 bp, Homo sapien
gtgtcagatgcttcaactggattattgctgttt

SEQ ID NO: 193434 - DNA, 33 bp, Homo sapien
gtgtcagatgcttcaattggattattgctgttt

SEQ ID NO: 193435 - DNA, 33 bp, Homo sapien
tcttttgcacatggagcatttggttagtactca

SEQ ID NO: 193436 - DNA, 33 bp, Homo sapien
tcttttgcacatggagtatttggttagtactca

SEQ ID NO: 193437 - DNA, 33 bp, Homo sapien
cctcttacaattctaagatccaatcatctttaa

SEQ ID NO: 193438 - DNA, 33 bp, Homo sapien
cctcttacaattctaatatccaatcatctttaa

SEQ ID NO: 193439 - DNA, 33 bp, Homo sapien
gactcggctctttcccactttctgcatttcctc

SEQ ID NO: 193440 - DNA, 33 bp, Homo sapien
gactcggctctttcccgctttctgcatttcctc

SEQ ID NO: 193441 - DNA, 33 bp, Homo sapien
catagaggatgatgaacgaaaagcttcgagacc

SEQ ID NO: 193442 - DNA, 33 bp, Homo sapien
catagaggatgatgaatgaaaagcttcgagacc

SEQ ID NO: 193443 - DNA, 33 bp, Homo sapien
gaatcttagacaccaactcattgtagatttaag

SEQ ID NO: 193444 - DNA, 33 bp, Homo sapien
gaatcttagacaccaattcattgtagatttaag

SEQ ID NO: 193445 - DNA, 33 bp, Homo sapien
taacctggccttctgcaatgggaagctttggga

SEQ ID NO: 193446 - DNA, 33 bp, Homo sapien
taacctggccttctgcgatgggaagctttggga

SEQ ID NO: 193447 - DNA, 33 bp, Homo sapien
gtctctttcaatcagaatcggtttctttggctt

SEQ ID NO: 193448 - DNA, 33 bp, Homo sapien
gtctctttcaatcagagtcggtttctttggctt

SEQ ID NO: 193449 - DNA, 33 bp, Homo sapien
gagccaagaagtgaaacagaatatggtctgatg

SEQ ID NO: 193450 - DNA, 33 bp, Homo sapien
gagccaagaagtgaaagagaatatggtctgatg

SEQ ID NO: 193451 - DNA, 33 bp, Homo sapien
acagggactaaacagacggggagagatgaataa

SEQ ID NO: 193452 - DNA, 33 bp, Homo sapien
acagggactaaacagatggggagagatgaataa

SEQ ID NO: 193453 - DNA, 33 bp, Homo sapien
cattcaacttagggtgaaagactgcaatgatag

SEQ ID NO: 193454 - DNA, 33 bp, Homo sapien
cattcaacttagggtgtaagactgcaatgatag

SEQ ID NO: 193455 - DNA, 33 bp, Homo sapien
ggcatcaaagatggtgaatcttttaaatccaag

SEQ ID NO: 193456 - DNA, 33 bp, Homo sapien
ggcatcaaagatggtgtatcttttaaatccaag

SEQ ID NO: 193457 - DNA, 33 bp, Homo sapien
tcttaaagctctgttcccatattaattattgtt

SEQ ID NO: 193458 - DNA, 33 bp, Homo sapien
tcttaaagctctgttcgcatattaattattgtt

SEQ ID NO: 193459 - DNA, 33 bp, Homo sapien
tcagctaaaagagacaaggtaggccacctcctg

SEQ ID NO: 193460 - DNA, 33 bp, Homo sapien
tcagctaaaagagacacggtaggccacctcctg

SEQ ID NO: 193461 - DNA, 33 bp, Homo sapien
caattttcctggggacagtagctgcaattcagg

SEQ ID NO: 193462 - DNA, 33 bp, Homo sapien
caattttcctggggactgtagctgcaattcagg

SEQ ID NO: 193463 - DNA, 33 bp, Homo sapien
aataggccaactgtcactattataaaatgtgct

SEQ ID NO: 193464 - DNA, 33 bp, Homo sapien
aataggccaactgtcagtattataaaatgtgct

SEQ ID NO: 193465 - DNA, 33 bp, Homo sapien
gtagggccagagaatgaagttagtatgggttgc

SEQ ID NO: 193466 - DNA, 33 bp, Homo sapien
gtagggccagagaatgcagttagtatgggttgc

SEQ ID NO: 193467 - DNA, 33 bp, Homo sapien
aatccccaaggctgtaacaagtatctctgctac

SEQ ID NO: 193468 - DNA, 33 bp, Homo sapien
aatccccaaggctgtatcaagtatctctgctac

SEQ ID NO: 193469 - DNA, 33 bp, Homo sapien
tgaagacttgagataaataggagtgatccaggt

SEQ ID NO: 193470 - DNA, 33 bp, Homo sapien
tgaagacttgagataagtaggagtgatccaggt

SEQ ID NO: 193471 - DNA, 33 bp, Homo sapien
tacacacatcctcttacgtacattaaataaatt

SEQ ID NO: 193472 - DNA, 33 bp, Homo sapien
tacacacatcctcttatgtacattaaataaatt

SEQ ID NO: 193473 - DNA, 33 bp, Homo sapien
ggtttctgggaatagacaacagtttaaagaaat

SEQ ID NO: 193474 - DNA, 33 bp, Homo sapien
ggtttctgggaatagagaacagtttaaagaaat

SEQ ID NO: 193475 - DNA, 33 bp, Homo sapien
gaggatcttccctgctaaagtttactctttgct

SEQ ID NO: 193476 - DNA, 33 bp, Homo sapien
gaggatcttccctgctgaagtttactctttgct

SEQ ID NO: 193477 - DNA, 33 bp, Homo sapien
atgcataaatgcaaataattcacactgataaat

SEQ ID NO: 193478 - DNA, 33 bp, Homo sapien
atgcataaatgcaaatcattcacactgataaat

SEQ ID NO: 193479 - DNA, 33 bp, Homo sapien
agtggagagcctttcccaaagcttggagaggag

SEQ ID NO: 193480 - DNA, 33 bp, Homo sapien
agtggagagcctttcctaaagcttggagaggag

SEQ ID NO: 193481 - DNA, 33 bp, Homo sapien
aaaagtaagcattggcacaaggctagcctggat

SEQ ID NO: 193482 - DNA, 33 bp, Homo sapien
aaaagtaagcattggcgcaaggctagcctggat

SEQ ID NO: 193483 - DNA, 33 bp, Homo sapien
tgatacttggcttcggacaaactgtaggttttg

SEQ ID NO: 193484 - DNA, 33 bp, Homo sapien
tgatacttggcttcgggcaaactgtaggttttg

SEQ ID NO: 193485 - DNA, 33 bp, Homo sapien
tctactaggtacatcactctctcagacaagact

SEQ ID NO: 193486 - DNA, 33 bp, Homo sapien
tctactaggtacatcattctctcagacaagact

SEQ ID NO: 193487 - DNA, 33 bp, Homo sapien
gcacccaccttataacaattaagtgagagaatt

SEQ ID NO: 193488 - DNA, 33 bp, Homo sapien
gcacccaccttataacgattaagtgagagaatt

SEQ ID NO: 193489 - DNA, 33 bp, Homo sapien
acagagtagactggataataccaagccattttt

SEQ ID NO: 193490 - DNA, 33 bp, Homo sapien
acagagtagactggattataccaagccattttt

SEQ ID NO: 193491 - DNA, 33 bp, Homo sapien
ccatgataggaaaacactaaatgattaaaaaca

SEQ ID NO: 193492 - DNA, 33 bp, Homo sapien
ccatgataggaaaacattaaatgattaaaaaca

SEQ ID NO: 193493 - DNA, 33 bp, Homo sapien
caagagttttccttcactcagcagtgctcagac

SEQ ID NO: 193494 - DNA, 33 bp, Homo sapien
caagagttttccttcagtcagcagtgctcagac

SEQ ID NO: 193495 - DNA, 33 bp, Homo sapien
tctgactgctgaactccactgatcacctctctc

SEQ ID NO: 193496 - DNA, 33 bp, Homo sapien
tctgactgctgaactctactgatcacctctctc

SEQ ID NO: 193497 - DNA, 33 bp, Homo sapien
cagaggggctgggacacgtaatcactcaggagt

SEQ ID NO: 193498 - DNA, 33 bp, Homo sapien
cagaggggctgggacatgtaatcactcaggagt

SEQ ID NO: 193499 - DNA, 33 bp, Homo sapien
atatagaaaatatatagagaaaaaccccaccaa

SEQ ID NO: 193500 - DNA, 33 bp, Homo sapien
atatagaaaatatatatagaaaaaccccaccaa

SEQ ID NO: 193501 - DNA, 33 bp, Homo sapien
atggaagaagaagaacaactaagctgcctctag

SEQ ID NO: 193502 - DNA, 33 bp, Homo sapien
atggaagaagaagaacgactaagctgcctctag

SEQ ID NO: 193503 - DNA, 33 bp, Homo sapien
tctattgataataaaaacgtaaacactgttaat

SEQ ID NO: 193504 - DNA, 33 bp, Homo sapien
tctattgataataaaagcgtaaacactgttaat

SEQ ID NO: 193505 - DNA, 33 bp, Homo sapien
acattgctgcactataaaaacatattcacaaac

SEQ ID NO: 193506 - DNA, 33 bp, Homo sapien
acattgctgcactatacaaacatattcacaaac

SEQ ID NO: 193507 - DNA, 33 bp, Homo sapien
ctttatgatgcctttaacagctcaatgcagcaa

SEQ ID NO: 193508 - DNA, 33 bp, Homo sapien
ctttatgatgcctttatcagctcaatgcagcaa

SEQ ID NO: 193509 - DNA, 33 bp, Homo sapien
tcccaactcagaaaaaaggaaattcatcaggca

SEQ ID NO: 193510 - DNA, 33 bp, Homo sapien
tcccaactcagaaaaagggaaattcatcaggca

SEQ ID NO: 193511 - DNA, 33 bp, Homo sapien
ctctcctctcctccacactattgtagcacactg

SEQ ID NO: 193512 - DNA, 33 bp, Homo sapien
ctctcctctcctccacgctattgtagcacactg

SEQ ID NO: 193513 - DNA, 33 bp, Homo sapien
attgaattacctgagacaacactaaaccagaca

SEQ ID NO: 193514 - DNA, 33 bp, Homo sapien
attgaattacctgagataacactaaaccagaca

SEQ ID NO: 193515 - DNA, 33 bp, Homo sapien
tcttcaccagaaagtaaaaaagtcatttgcaag

SEQ ID NO: 193516 - DNA, 33 bp, Homo sapien
tcttcaccagaaagtagaaaagtcatttgcaag

SEQ ID NO: 193517 - DNA, 33 bp, Homo sapien
agtttcctgtctggacactagaaataacaacaa

SEQ ID NO: 193518 - DNA, 33 bp, Homo sapien
agtttcctgtctggacgctagaaataacaacaa

SEQ ID NO: 193519 - DNA, 33 bp, Homo sapien
accataacaattagcacgtaacagttaccactt

SEQ ID NO: 193520 - DNA, 33 bp, Homo sapien
accataacaattagcatgtaacagttaccactt

SEQ ID NO: 193521 - DNA, 33 bp, Homo sapien
tcagttttcttatgtacgaagtgaaaataataa

SEQ ID NO: 193522 - DNA, 33 bp, Homo sapien
tcagttttcttatgtatgaagtgaaaataataa

SEQ ID NO: 193523 - DNA, 33 bp, Homo sapien
agaaacaaatatgctacagctggcttgtgacct

SEQ ID NO: 193524 - DNA, 33 bp, Homo sapien
agaaacaaatatgctatagctggcttgtgacct

SEQ ID NO: 193525 - DNA, 33 bp, Homo sapien
ccttccttggctggtaaattaagtagagaccag

SEQ ID NO: 193526 - DNA, 33 bp, Homo sapien
ccttccttggctggtagattaagtagagaccag

SEQ ID NO: 193527 - DNA, 33 bp, Homo sapien
cttttgttagctcttccaagtttgtggttttgt

SEQ ID NO: 193528 - DNA, 33 bp, Homo sapien
cttttgttagctcttctaagtttgtggttttgt

SEQ ID NO: 193529 - DNA, 33 bp, Homo sapien
acaggccaaatcgtcaatcagtctgtaggtgta

SEQ ID NO: 193530 - DNA, 33 bp, Homo sapien
acaggccaaatcgtcactcagtctgtaggtgta

SEQ ID NO: 193531 - DNA, 33 bp, Homo sapien
gtttcttttgcagtgcggaggttcttaaattta

SEQ ID NO: 193532 - DNA, 33 bp, Homo sapien
gtttcttttgcagtgctgaggttcttaaattta

SEQ ID NO: 193533 - DNA, 33 bp, Homo sapien
ataatacacatgtagaaaagtatggaaaataaa

SEQ ID NO: 193534 - DNA, 33 bp, Homo sapien
ataatacacatgtagagaagtatggaaaataaa

SEQ ID NO: 193535 - DNA, 33 bp, Homo sapien
aaaggaagttagtataagatacatctccattta

SEQ ID NO: 193536 - DNA, 33 bp, Homo sapien
aaaggaagttagtataggatacatctccattta

SEQ ID NO: 193537 - DNA, 33 bp, Homo sapien
ggaagatgtaattcagccagtattggcagcctg

SEQ ID NO: 193538 - DNA, 33 bp, Homo sapien
ggaagatgtaattcaggcagtattggcagcctg

SEQ ID NO: 193539 - DNA, 33 bp, Homo sapien
cacagcactatgctcactctccagtctttgccc

SEQ ID NO: 193540 - DNA, 33 bp, Homo sapien
cacagcactatgctcattctccagtctttgccc

SEQ ID NO: 193541 - DNA, 33 bp, Homo sapien
aagcaatggatgaaaacatctgcttagatagtg

SEQ ID NO: 193542 - DNA, 33 bp, Homo sapien
aagcaatggatgaaaatatctgcttagatagtg

SEQ ID NO: 193543 - DNA, 33 bp, Homo sapien
taggtggcaatcttaaatctgtagtgcagctgg

SEQ ID NO: 193544 - DNA, 33 bp, Homo sapien
taggtggcaatcttaagtctgtagtgcagctgg

SEQ ID NO: 193545 - DNA, 33 bp, Homo sapien
acctaaaaactgtagcaaagacccagaagcagc

SEQ ID NO: 193546 - DNA, 33 bp, Homo sapien
acctaaaaactgtagcgaagacccagaagcagc

SEQ ID NO: 193547 - DNA, 33 bp, Homo sapien
ctgctccctgccaccactctgagactactctcg

SEQ ID NO: 193548 - DNA, 33 bp, Homo sapien
ctgctccctgccaccattctgagactactctcg

SEQ ID NO: 193549 - DNA, 33 bp, Homo sapien
cagcaaacacaggtaaccgggtaaggtcatcgg

SEQ ID NO: 193550 - DNA, 33 bp, Homo sapien
cagcaaacacaggtaagcgggtaaggtcatcgg

SEQ ID NO: 193551 - DNA, 33 bp, Homo sapien
gcaatgccaacccgtacggaaatgatcccaagc

SEQ ID NO: 193552 - DNA, 33 bp, Homo sapien
gcaatgccaacccgtatggaaatgatcccaagc

SEQ ID NO: 193553 - DNA, 33 bp, Homo sapien
gacaagctcaagcccaagttgaaatgtctgatg

SEQ ID NO: 193554 - DNA, 33 bp, Homo sapien
gacaagctcaagcccaggttgaaatgtctgatg

SEQ ID NO: 193555 - DNA, 33 bp, Homo sapien
tctagcatttctacaaaactttccattgtcacc

SEQ ID NO: 193556 - DNA, 33 bp, Homo sapien
tctagcatttctacaacactttccattgtcacc

SEQ ID NO: 193557 - DNA, 33 bp, Homo sapien
agggatgagaaggcacactgaaaaccaagcaac

SEQ ID NO: 193558 - DNA, 33 bp, Homo sapien
agggatgagaaggcacgctgaaaaccaagcaac

SEQ ID NO: 193559 - DNA, 33 bp, Homo sapien
aaaatttaagtatttacagttactgagaagaaa

SEQ ID NO: 193560 - DNA, 33 bp, Homo sapien
aaaatttaagtatttagagttactgagaagaaa

SEQ ID NO: 193561 - DNA, 33 bp, Homo sapien
accagtctgggaagtacagtgagtcttcatctc

SEQ ID NO: 193562 - DNA, 33 bp, Homo sapien
accagtctgggaagtatagtgagtcttcatctc

SEQ ID NO: 193563 - DNA, 33 bp, Homo sapien
tcagccggggactcgacagggatgctttgcagg

SEQ ID NO: 193564 - DNA, 33 bp, Homo sapien
tcagccggggactcgatagggatgctttgcagg

SEQ ID NO: 193565 - DNA, 33 bp, Homo sapien
aaatgcctaacagtaacgagctacctgtataca

SEQ ID NO: 193566 - DNA, 33 bp, Homo sapien
aaatgcctaacagtaaggagctacctgtataca

SEQ ID NO: 193567 - DNA, 33 bp, Homo sapien
ctctatgatctagaaactggcccctagctatgt

SEQ ID NO: 193568 - DNA, 33 bp, Homo sapien
ctctatgatctagaaattggcccctagctatgt

SEQ ID NO: 193569 - DNA, 33 bp, Homo sapien
tgtcgtgacaattaaacgagttggtatacgtat

SEQ ID NO: 193570 - DNA, 33 bp, Homo sapien
tgtcgtgacaattaaatgagttggtatacgtat

SEQ ID NO: 193571 - DNA, 33 bp, Homo sapien
ctctgtaagtgttagcaacaagtcattttgctt

SEQ ID NO: 193572 - DNA, 33 bp, Homo sapien
ctctgtaagtgttagctacaagtcattttgctt

SEQ ID NO: 193573 - DNA, 33 bp, Homo sapien
tctattctctaattccgacaaaggcaccatgtg

SEQ ID NO: 193574 - DNA, 33 bp, Homo sapien
tctattctctaattcctacaaaggcaccatgtg

SEQ ID NO: 193575 - DNA, 33 bp, Homo sapien
tcactcaagttagggacggtaggtgtccaaaca

SEQ ID NO: 193576 - DNA, 33 bp, Homo sapien
tcactcaagttagggatggtaggtgtccaaaca

SEQ ID NO: 193577 - DNA, 33 bp, Homo sapien
aagcaaatttgaagagctaggcaaattatttca

SEQ ID NO: 193578 - DNA, 33 bp, Homo sapien
aagcaaatttgaagagttaggcaaattatttca

SEQ ID NO: 193579 - DNA, 33 bp, Homo sapien
tggagagaacttcacaatcagacagatctagat

SEQ ID NO: 193580 - DNA, 33 bp, Homo sapien
tggagagaacttcacagtcagacagatctagat

SEQ ID NO: 193581 - DNA, 33 bp, Homo sapien
aagcatccttcaagaacttcatcctgtttctgg

SEQ ID NO: 193582 - DNA, 33 bp, Homo sapien
aagcatccttcaagaatttcatcctgtttctgg

SEQ ID NO: 193583 - DNA, 33 bp, Homo sapien
aggaactcagagaaccaaaagaagacactaaaa

SEQ ID NO: 193584 - DNA, 33 bp, Homo sapien
aggaactcagagaaccgaaagaagacactaaaa

SEQ ID NO: 193585 - DNA, 33 bp, Homo sapien
gaatatgagtcaccaactgccttgctagtccaa

SEQ ID NO: 193586 - DNA, 33 bp, Homo sapien
gaatatgagtcaccaagtgccttgctagtccaa

SEQ ID NO: 193587 - DNA, 33 bp, Homo sapien
gccttccattaaatcacatcccacctggcgtct

SEQ ID NO: 193588 - DNA, 33 bp, Homo sapien
gccttccattaaatcatatcccacctggcgtct

SEQ ID NO: 193589 - DNA, 33 bp, Homo sapien
aagcacctctggtctacacgttatactaggagt

SEQ ID NO: 193590 - DNA, 33 bp, Homo sapien
aagcacctctggtctatacgttatactaggagt

SEQ ID NO: 193591 - DNA, 33 bp, Homo sapien
gatgatagtaatccccacccctccagagttgtt

SEQ ID NO: 193592 - DNA, 33 bp, Homo sapien
gatgatagtaatccccgcccctccagagttgtt

SEQ ID NO: 193593 - DNA, 33 bp, Homo sapien
tcctcgtacaatgagtaaccctttatctgacag

SEQ ID NO: 193594 - DNA, 33 bp, Homo sapien
tcctcgtacaatgagtcaccctttatctgacag

SEQ ID NO: 193595 - DNA, 33 bp, Homo sapien
aaagtaagaaagcatcaacattgccacctttcc

SEQ ID NO: 193596 - DNA, 33 bp, Homo sapien
aaagtaagaaagcatccacattgccacctttcc

SEQ ID NO: 193597 - DNA, 33 bp, Homo sapien
gggtttttctttccataaggctccaataaatct

SEQ ID NO: 193598 - DNA, 33 bp, Homo sapien
gggtttttctttccatgaggctccaataaatct

SEQ ID NO: 193599 - DNA, 33 bp, Homo sapien
gctcagctatttgttaaaaatgaaagaactgct

SEQ ID NO: 193600 - DNA, 33 bp, Homo sapien
gctcagctatttgttacaaatgaaagaactgct

SEQ ID NO: 193601 - DNA, 33 bp, Homo sapien
tctggagcacagggtacggatgtgagactgtta

SEQ ID NO: 193602 - DNA, 33 bp, Homo sapien
tctggagcacagggtatggatgtgagactgtta

SEQ ID NO: 193603 - DNA, 33 bp, Homo sapien
tcctgcactgggtttaagctagctgcagggacc

SEQ ID NO: 193604 - DNA, 33 bp, Homo sapien
tcctgcactgggtttaggctagctgcagggacc

SEQ ID NO: 193605 - DNA, 33 bp, Homo sapien
aatctcttggatatccaaaatgacttgactttt

SEQ ID NO: 193606 - DNA, 33 bp, Homo sapien
aatctcttggatatccgaaatgacttgactttt

SEQ ID NO: 193607 - DNA, 33 bp, Homo sapien
atggaaataaaagcaccggtatgtaagactacg

SEQ ID NO: 193608 - DNA, 33 bp, Homo sapien
atggaaataaaagcactggtatgtaagactacg

SEQ ID NO: 193609 - DNA, 33 bp, Homo sapien
tccttgtggaatctcaaccctctttctgctctg

SEQ ID NO: 193610 - DNA, 33 bp, Homo sapien
tccttgtggaatctcatccctctttctgctctg

SEQ ID NO: 193611 - DNA, 33 bp, Homo sapien
tcctagttgtcagtcactctaaggctgcatcag

SEQ ID NO: 193612 - DNA, 33 bp, Homo sapien
tcctagttgtcagtcattctaaggctgcatcag

SEQ ID NO: 193613 - DNA, 33 bp, Homo sapien
aacttcacccaaggcaagtgtactcccaacaca

SEQ ID NO: 193614 - DNA, 33 bp, Homo sapien
aacttcacccaaggcaggtgtactcccaacaca

SEQ ID NO: 193615 - DNA, 33 bp, Homo sapien
aacaggcggaaatgaaaagagcctatgaggcca

SEQ ID NO: 193616 - DNA, 33 bp, Homo sapien
aacaggcggaaatgaagagagcctatgaggcca

SEQ ID NO: 193617 - DNA, 33 bp, Homo sapien
tatagagtactttcacactaatagtacgcataa

SEQ ID NO: 193618 - DNA, 33 bp, Homo sapien
tatagagtactttcacgctaatagtacgcataa

SEQ ID NO: 193619 - DNA, 33 bp, Homo sapien
tgtgtcaccacagccaaagaaactcacacaggt

SEQ ID NO: 193620 - DNA, 33 bp, Homo sapien
tgtgtcaccacagccacagaaactcacacaggt

SEQ ID NO: 193621 - DNA, 33 bp, Homo sapien
gaagcagccaccagccaatgaatcacagaagcc

SEQ ID NO: 193622 - DNA, 33 bp, Homo sapien
gaagcagccaccagccgatgaatcacagaagcc

SEQ ID NO: 193623 - DNA, 33 bp, Homo sapien
caggggagttgtactgcagtgtttccagtctgc

SEQ ID NO: 193624 - DNA, 33 bp, Homo sapien
caggggagttgtactgtagtgtttccagtctgc

SEQ ID NO: 193625 - DNA, 33 bp, Homo sapien
gatgaatggctgattgcaaggctgattggagga

SEQ ID NO: 193626 - DNA, 33 bp, Homo sapien
gatgaatggctgattggaaggctgattggagga

SEQ ID NO: 193627 - DNA, 33 bp, Homo sapien
tgttttgtctgcacaaacaggctgttggtacct

SEQ ID NO: 193628 - DNA, 33 bp, Homo sapien
tgttttgtctgcacaaccaggctgttggtacct

SEQ ID NO: 193629 - DNA, 33 bp, Homo sapien
actcacagtgcgttaaagatccaactgtgaaca

SEQ ID NO: 193630 - DNA, 33 bp, Homo sapien
actcacagtgcgttaaggatccaactgtgaaca

SEQ ID NO: 193631 - DNA, 33 bp, Homo sapien
aaatgctgctcgataacggattttcttttacat

SEQ ID NO: 193632 - DNA, 33 bp, Homo sapien
aaatgctgctcgataatggattttcttttacat

SEQ ID NO: 193633 - DNA, 33 bp, Homo sapien
gggctactggagtcgcacgaaaaccagaaatgg

SEQ ID NO: 193634 - DNA, 33 bp, Homo sapien
gggctactggagtcgcccgaaaaccagaaatgg

SEQ ID NO: 193635 - DNA, 33 bp, Homo sapien
accgaagtgatgtccacatgcctgagcatcagg

SEQ ID NO: 193636 - DNA, 33 bp, Homo sapien
accgaagtgatgtccatatgcctgagcatcagg

SEQ ID NO: 193637 - DNA, 33 bp, Homo sapien
tttagaattgccctccaaggcccatgctttctt

SEQ ID NO: 193638 - DNA, 33 bp, Homo sapien
tttagaattgccctccgaggcccatgctttctt

SEQ ID NO: 193639 - DNA, 33 bp, Homo sapien
cattggggatatgaaaattcatgagatcatcag

SEQ ID NO: 193640 - DNA, 33 bp, Homo sapien
cattggggatatgaaagttcatgagatcatcag

SEQ ID NO: 193641 - DNA, 33 bp, Homo sapien
gccagaattaaccagaagtctgaaaggccaatg

SEQ ID NO: 193642 - DNA, 33 bp, Homo sapien
gccagaattaaccagaggtctgaaaggccaatg

SEQ ID NO: 193643 - DNA, 33 bp, Homo sapien
tgatttctgatttctccgaaaggaagtgttcca

SEQ ID NO: 193644 - DNA, 33 bp, Homo sapien
tgatttctgatttctctgaaaggaagtgttcca

SEQ ID NO: 193645 - DNA, 33 bp, Homo sapien
tttaagcatcactattcaaagcaaaatgctagg

SEQ ID NO: 193646 - DNA, 33 bp, Homo sapien
tttaagcatcactattgaaagcaaaatgctagg

SEQ ID NO: 193647 - DNA, 33 bp, Homo sapien
gactgattaggggagacaggtagtatattacag

SEQ ID NO: 193648 - DNA, 33 bp, Homo sapien
gactgattaggggagataggtagtatattacag

SEQ ID NO: 193649 - DNA, 33 bp, Homo sapien
agaacaatccccttcaatatgagatgatccttt

SEQ ID NO: 193650 - DNA, 33 bp, Homo sapien
agaacaatccccttcagtatgagatgatccttt

SEQ ID NO: 193651 - DNA, 33 bp, Homo sapien
tccagtaggtcctcatcaattgtgtcaccctgc

SEQ ID NO: 193652 - DNA, 33 bp, Homo sapien
tccagtaggtcctcattaattgtgtcaccctgc

SEQ ID NO: 193653 - DNA, 33 bp, Homo sapien
tcttgtgatatttagacggattttgagtttcac

SEQ ID NO: 193654 - DNA, 33 bp, Homo sapien
tcttgtgatatttagatggattttgagtttcac

SEQ ID NO: 193655 - DNA, 33 bp, Homo sapien
gagtttggagtagaacgacaatgcaaagattaa

SEQ ID NO: 193656 - DNA, 33 bp, Homo sapien
gagtttggagtagaactacaatgcaaagattaa

SEQ ID NO: 193657 - DNA, 33 bp, Homo sapien
acctacctgaaagttgcagcaagagaagactgc

SEQ ID NO: 193658 - DNA, 33 bp, Homo sapien
acctacctgaaagttggagcaagagaagactgc

SEQ ID NO: 193659 - DNA, 33 bp, Homo sapien
gattaaatgaattaacaaggaaaccctgcatta

SEQ ID NO: 193660 - DNA, 33 bp, Homo sapien
gattaaatgaattaacgaggaaaccctgcatta

SEQ ID NO: 193661 - DNA, 33 bp, Homo sapien
tgtcctcagaaaaacacacagacgagagaccca

SEQ ID NO: 193662 - DNA, 33 bp, Homo sapien
tgtcctcagaaaaacatacagacgagagaccca

SEQ ID NO: 193663 - DNA, 33 bp, Homo sapien
agtgcaaccactcttgcaggaaagcatatagtc

SEQ ID NO: 193664 - DNA, 33 bp, Homo sapien
agtgcaaccactcttgtaggaaagcatatagtc

SEQ ID NO: 193665 - DNA, 33 bp, Homo sapien
atcaaaaaggagaaaaacagtagacattcctga

SEQ ID NO: 193666 - DNA, 33 bp, Homo sapien
atcaaaaaggagaaaaccagtagacattcctga

SEQ ID NO: 193667 - DNA, 33 bp, Homo sapien
ggtttcctggtaaggacgatcatttcaatagca

SEQ ID NO: 193668 - DNA, 33 bp, Homo sapien
ggtttcctggtaaggatgatcatttcaatagca

SEQ ID NO: 193669 - DNA, 33 bp, Homo sapien
ttgatctgtcttcgatgaacagactcgttttgt

SEQ ID NO: 193670 - DNA, 33 bp, Homo sapien
ttgatctgtcttcgattaacagactcgttttgt

SEQ ID NO: 193671 - DNA, 33 bp, Homo sapien
catttttcctgccaacaagagtcattgaaaacc

SEQ ID NO: 193672 - DNA, 33 bp, Homo sapien
catttttcctgccaaccagagtcattgaaaacc

SEQ ID NO: 193673 - DNA, 33 bp, Homo sapien
aattggtaaccatgtaactcaattaggaggaca

SEQ ID NO: 193674 - DNA, 33 bp, Homo sapien
aattggtaaccatgtagctcaattaggaggaca

SEQ ID NO: 193675 - DNA, 33 bp, Homo sapien
gtgtcctttcgggttgaatgcgtcagaaaccgt

SEQ ID NO: 193676 - DNA, 33 bp, Homo sapien
gtgtcctttcgggttggatgcgtcagaaaccgt

SEQ ID NO: 193677 - DNA, 33 bp, Homo sapien
atacatttgaattggaacaccaagaaggaaagc

SEQ ID NO: 193678 - DNA, 33 bp, Homo sapien
atacatttgaattggagcaccaagaaggaaagc

SEQ ID NO: 193679 - DNA, 33 bp, Homo sapien
tctaaagtacttagaacaatttgtagcacagag

SEQ ID NO: 193680 - DNA, 33 bp, Homo sapien
tctaaagtacttagaataatttgtagcacagag

SEQ ID NO: 193681 - DNA, 33 bp, Homo sapien
agtctggaatcgttgaaagagttttacaagtgt

SEQ ID NO: 193682 - DNA, 33 bp, Homo sapien
agtctggaatcgttgatagagttttacaagtgt

SEQ ID NO: 193683 - DNA, 33 bp, Homo sapien
aatattttaatttacaataagtgcctgcttcaa

SEQ ID NO: 193684 - DNA, 33 bp, Homo sapien
aatattttaatttacagtaagtgcctgcttcaa

SEQ ID NO: 193685 - DNA, 33 bp, Homo sapien
attcactgtgtttgaacgcttcttctggcagat

SEQ ID NO: 193686 - DNA, 33 bp, Homo sapien
attcactgtgtttgaatgcttcttctggcagat

SEQ ID NO: 193687 - DNA, 33 bp, Homo sapien
tccctggcatgtagtacgtctcagtaaatagat

SEQ ID NO: 193688 - DNA, 33 bp, Homo sapien
tccctggcatgtagtaggtctcagtaaatagat

SEQ ID NO: 193689 - DNA, 33 bp, Homo sapien
atctatccagtaattaccctgaaggctattaca

SEQ ID NO: 193690 - DNA, 33 bp, Homo sapien
atctatccagtaattatcctgaaggctattaca

SEQ ID NO: 193691 - DNA, 33 bp, Homo sapien
cattggctgccacagaccatataatgtgttgac

SEQ ID NO: 193692 - DNA, 33 bp, Homo sapien
cattggctgccacagatcatataatgtgttgac

SEQ ID NO: 193693 - DNA, 33 bp, Homo sapien
aggggcaattgaagatcaattttctgtatctgg

SEQ ID NO: 193694 - DNA, 33 bp, Homo sapien
aggggcaattgaagatgaattttctgtatctgg

SEQ ID NO: 193695 - DNA, 33 bp, Homo sapien
tgttgagagtagttaaatggtggttgaaagttt

SEQ ID NO: 193696 - DNA, 33 bp, Homo sapien
tgttgagagtagttaagtggtggttgaaagttt

SEQ ID NO: 193697 - DNA, 33 bp, Homo sapien
cttcccaaatccaccacgaaccaatgctgtgag

SEQ ID NO: 193698 - DNA, 33 bp, Homo sapien
cttcccaaatccaccatgaaccaatgctgtgag

SEQ ID NO: 193699 - DNA, 33 bp, Homo sapien
agcagagggaaatcagaaaagacttcatgcaag

SEQ ID NO: 193700 - DNA, 33 bp, Homo sapien
agcagagggaaatcaggaaagacttcatgcaag

SEQ ID NO: 193701 - DNA, 33 bp, Homo sapien
ctacttccttttacacaatttcatatattttga

SEQ ID NO: 193702 - DNA, 33 bp, Homo sapien
ctacttccttttacacgatttcatatattttga

SEQ ID NO: 193703 - DNA, 33 bp, Homo sapien
aggtgctggagggccaatgaaaaatgttcgtaa

SEQ ID NO: 193704 - DNA, 33 bp, Homo sapien
aggtgctggagggccagtgaaaaatgttcgtaa

SEQ ID NO: 193705 - DNA, 33 bp, Homo sapien
gagccacgtgtaggaaaacaacgctgctctatt

SEQ ID NO: 193706 - DNA, 33 bp, Homo sapien
gagccacgtgtaggaagacaacgctgctctatt

SEQ ID NO: 193707 - DNA, 33 bp, Homo sapien
gatgaatcagataaaacgctcctgactcaatct

SEQ ID NO: 193708 - DNA, 33 bp, Homo sapien
gatgaatcagataaaatgctcctgactcaatct

SEQ ID NO: 193709 - DNA, 33 bp, Homo sapien
gaacataaaactcttaacagcaatataatttaa

SEQ ID NO: 193710 - DNA, 33 bp, Homo sapien
gaacataaaactcttatcagcaatataatttaa

SEQ ID NO: 193711 - DNA, 33 bp, Homo sapien
ttacttttccttcacaatctcttttactgcatc

SEQ ID NO: 193712 - DNA, 33 bp, Homo sapien
ttacttttccttcacattctcttttactgcatc

SEQ ID NO: 193713 - DNA, 33 bp, Homo sapien
caaatcgccagcaatcagagatgtttgaaatgt

SEQ ID NO: 193714 - DNA, 33 bp, Homo sapien
caaatcgccagcaatcggagatgtttgaaatgt

SEQ ID NO: 193715 - DNA, 33 bp, Homo sapien
atttatattcttccccagcagaagattggtaac

SEQ ID NO: 193716 - DNA, 33 bp, Homo sapien
atttatattcttccccggcagaagattggtaac

SEQ ID NO: 193717 - DNA, 33 bp, Homo sapien
ttaacaaaatggtggacaaaaattttgagacta

SEQ ID NO: 193718 - DNA, 33 bp, Homo sapien
ttaacaaaatggtggataaaaattttgagacta

SEQ ID NO: 193719 - DNA, 33 bp, Homo sapien
actggacagccaatggaaaaaaattaaattgca

SEQ ID NO: 193720 - DNA, 33 bp, Homo sapien
actggacagccaatggcaaaaaattaaattgca

SEQ ID NO: 193721 - DNA, 33 bp, Homo sapien
gtctactgcaaacaagaaagagtccatcaacag

SEQ ID NO: 193722 - DNA, 33 bp, Homo sapien
gtctactgcaaacaagcaagagtccatcaacag

SEQ ID NO: 193723 - DNA, 33 bp, Homo sapien
caatggtaagaaaacaccacaaggcttgtgaaa

SEQ ID NO: 193724 - DNA, 33 bp, Homo sapien
caatggtaagaaaacatcacaaggcttgtgaaa

SEQ ID NO: 193725 - DNA, 33 bp, Homo sapien
cctggggcaagtacaagccatagagatgaatgt

SEQ ID NO: 193726 - DNA, 33 bp, Homo sapien
cctggggcaagtacaatccatagagatgaatgt

SEQ ID NO: 193727 - DNA, 33 bp, Homo sapien
ttatgtgccctctttgaagctttctctgtcacc

SEQ ID NO: 193728 - DNA, 33 bp, Homo sapien
ttatgtgccctctttgcagctttctctgtcacc

SEQ ID NO: 193729 - DNA, 33 bp, Homo sapien
gagcacaaacagaccaagaaggttcccaggacc

SEQ ID NO: 193730 - DNA, 33 bp, Homo sapien
gagcacaaacagaccaggaaggttcccaggacc

SEQ ID NO: 193731 - DNA, 33 bp, Homo sapien
tccagagagaattggactcatgtcttgtctatc

SEQ ID NO: 193732 - DNA, 33 bp, Homo sapien
tccagagagaattggattcatgtcttgtctatc

SEQ ID NO: 193733 - DNA, 33 bp, Homo sapien
ttcaatatctctgcaaactttacacattttgta

SEQ ID NO: 193734 - DNA, 33 bp, Homo sapien
ttcaatatctctgcaagctttacacattttgta

SEQ ID NO: 193735 - DNA, 33 bp, Homo sapien
tctgtcaatttcactaataggtcggagaaaaaa

SEQ ID NO: 193736 - DNA, 33 bp, Homo sapien
tctgtcaatttcactagtaggtcggagaaaaaa

SEQ ID NO: 193737 - DNA, 33 bp, Homo sapien
cgccctagtttaagtactaatgcaatcatttgc

SEQ ID NO: 193738 - DNA, 33 bp, Homo sapien
cgccctagtttaagtattaatgcaatcatttgc

SEQ ID NO: 193739 - DNA, 33 bp, Homo sapien
acccttgtttgctcacggaaaagtttagaaaca

SEQ ID NO: 193740 - DNA, 33 bp, Homo sapien
acccttgtttgctcactgaaaagtttagaaaca

SEQ ID NO: 193741 - DNA, 33 bp, Homo sapien
aagatgagcttcttaaacttaatcaaagtatat

SEQ ID NO: 193742 - DNA, 33 bp, Homo sapien
aagatgagcttcttaatcttaatcaaagtatat

SEQ ID NO: 193743 - DNA, 33 bp, Homo sapien
cagctgcatggaaaggacaacaagcaagtagca

SEQ ID NO: 193744 - DNA, 33 bp, Homo sapien
cagctgcatggaaagggcaacaagcaagtagca

SEQ ID NO: 193745 - DNA, 33 bp, Homo sapien
gggcttgttaaagcacagatgactggagcttct

SEQ ID NO: 193746 - DNA, 33 bp, Homo sapien
gggcttgttaaagcacggatgactggagcttct

SEQ ID NO: 193747 - DNA, 33 bp, Homo sapien
atgtttctgtgatacccgaacacactctttcac

SEQ ID NO: 193748 - DNA, 33 bp, Homo sapien
atgtttctgtgatacctgaacacactctttcac

SEQ ID NO: 193749 - DNA, 33 bp, Homo sapien
catgtatattgagggacggctgtaactgttaga

SEQ ID NO: 193750 - DNA, 33 bp, Homo sapien
catgtatattgagggatggctgtaactgttaga

SEQ ID NO: 193751 - DNA, 33 bp, Homo sapien
agtacatctcttttgccaccatttcattgttcg

SEQ ID NO: 193752 - DNA, 33 bp, Homo sapien
agtacatctcttttgctaccatttcattgttcg

SEQ ID NO: 193753 - DNA, 33 bp, Homo sapien
cctcatgttggagcgacagggagagaaggagcc

SEQ ID NO: 193754 - DNA, 33 bp, Homo sapien
cctcatgttggagcgatagggagagaaggagcc

SEQ ID NO: 193755 - DNA, 33 bp, Homo sapien
cttgctcataggttcaagaaggatgaagaatgg

SEQ ID NO: 193756 - DNA, 33 bp, Homo sapien
cttgctcataggttcaggaaggatgaagaatgg

SEQ ID NO: 193757 - DNA, 33 bp, Homo sapien
tggaccatgttaatcaaatcagtttgttccaac

SEQ ID NO: 193758 - DNA, 33 bp, Homo sapien
tggaccatgttaatcagatcagtttgttccaac

SEQ ID NO: 193759 - DNA, 33 bp, Homo sapien
tgctcctaaatacagacggctcccaaatccata

SEQ ID NO: 193760 - DNA, 33 bp, Homo sapien
tgctcctaaatacagatggctcccaaatccata

SEQ ID NO: 193761 - DNA, 33 bp, Homo sapien
aaggattaaagggagaagtgactgagtaataaa

SEQ ID NO: 193762 - DNA, 33 bp, Homo sapien
aaggattaaagggagaggtgactgagtaataaa

SEQ ID NO: 193763 - DNA, 33 bp, Homo sapien
cagcattcctctttacaccagatgcagggccca

SEQ ID NO: 193764 - DNA, 33 bp, Homo sapien
cagcattcctctttacgccagatgcagggccca

SEQ ID NO: 193765 - DNA, 33 bp, Homo sapien
aaccaagagctgctgacaaagacggaagtagat

SEQ ID NO: 193766 - DNA, 33 bp, Homo sapien
aaccaagagctgctgataaagacggaagtagat

SEQ ID NO: 193767 - DNA, 33 bp, Homo sapien
atctctctgggctacaactaggccatctgttaa

SEQ ID NO: 193768 - DNA, 33 bp, Homo sapien
atctctctgggctacatctaggccatctgttaa

SEQ ID NO: 193769 - DNA, 33 bp, Homo sapien
aacaaaggcaggataacaagttgaagaggctgg

SEQ ID NO: 193770 - DNA, 33 bp, Homo sapien
aacaaaggcaggataataagttgaagaggctgg

SEQ ID NO: 193771 - DNA, 33 bp, Homo sapien
caaggggcttgccgtacatggatggaacatgga

SEQ ID NO: 193772 - DNA, 33 bp, Homo sapien
caaggggcttgccgtatatggatggaacatgga

SEQ ID NO: 193773 - DNA, 33 bp, Homo sapien
tgtaaggataggttaaactgccattcctaagca

SEQ ID NO: 193774 - DNA, 33 bp, Homo sapien
tgtaaggataggttaagctgccattcctaagca

SEQ ID NO: 193775 - DNA, 33 bp, Homo sapien
gaactcaagggagaaaactgggttacagacata

SEQ ID NO: 193776 - DNA, 33 bp, Homo sapien
gaactcaagggagaaacctgggttacagacata

SEQ ID NO: 193777 - DNA, 33 bp, Homo sapien
cacacagtctgtaatacaggtataaatgcagca

SEQ ID NO: 193778 - DNA, 33 bp, Homo sapien
cacacagtctgtaatataggtataaatgcagca

SEQ ID NO: 193779 - DNA, 33 bp, Homo sapien
ttcagaaaaactctgccgaagtagatgctgcat

SEQ ID NO: 193780 - DNA, 33 bp, Homo sapien
ttcagaaaaactctgctgaagtagatgctgcat

SEQ ID NO: 193781 - DNA, 33 bp, Homo sapien
cctgtacaatctggtaacacgttactttccata

SEQ ID NO: 193782 - DNA, 33 bp, Homo sapien
cctgtacaatctggtaccacgttactttccata

SEQ ID NO: 193783 - DNA, 33 bp, Homo sapien
tgttaatctgatgggacaatggagcacacgtgt

SEQ ID NO: 193784 - DNA, 33 bp, Homo sapien
tgttaatctgatgggataatggagcacacgtgt

SEQ ID NO: 193785 - DNA, 33 bp, Homo sapien
caatgccaattttagacgcaaatgtaagaatac

SEQ ID NO: 193786 - DNA, 33 bp, Homo sapien
caatgccaattttagatgcaaatgtaagaatac

SEQ ID NO: 193787 - DNA, 33 bp, Homo sapien
ttctgagacctgagaaacccaagttttgttgtt

SEQ ID NO: 193788 - DNA, 33 bp, Homo sapien
ttctgagacctgagaagcccaagttttgttgtt

SEQ ID NO: 193789 - DNA, 33 bp, Homo sapien
cctcaaggacacaaaaacctggaagagagatag

SEQ ID NO: 193790 - DNA, 33 bp, Homo sapien
cctcaaggacacaaaagcctggaagagagatag

SEQ ID NO: 193791 - DNA, 33 bp, Homo sapien
gaacacaggctgggaaaaggtatgttatatatt

SEQ ID NO: 193792 - DNA, 33 bp, Homo sapien
gaacacaggctgggaacaggtatgttatatatt

SEQ ID NO: 193793 - DNA, 33 bp, Homo sapien
acttcctggcttatagacgatcagcactcatgt

SEQ ID NO: 193794 - DNA, 33 bp, Homo sapien
acttcctggcttatagccgatcagcactcatgt

SEQ ID NO: 193795 - DNA, 33 bp, Homo sapien
agttaacaaatgtgaacaagggagaaggaaagc

SEQ ID NO: 193796 - DNA, 33 bp, Homo sapien
agttaacaaatgtgaagaagggagaaggaaagc

SEQ ID NO: 193797 - DNA, 33 bp, Homo sapien
caactaccatgtaaccaaagagaacagtaccag

SEQ ID NO: 193798 - DNA, 33 bp, Homo sapien
caactaccatgtaaccgaagagaacagtaccag

SEQ ID NO: 193799 - DNA, 33 bp, Homo sapien
gaagatcataacgataacccttacatttttttc

SEQ ID NO: 193800 - DNA, 33 bp, Homo sapien
gaagatcataacgataccccttacatttttttc

SEQ ID NO: 193801 - DNA, 33 bp, Homo sapien
ctcctcaaagctaaaaactgggtctgtgtaggg

SEQ ID NO: 193802 - DNA, 33 bp, Homo sapien
ctcctcaaagctaaaatctgggtctgtgtaggg

SEQ ID NO: 193803 - DNA, 33 bp, Homo sapien
taaaccaaaatcctatcaaggtgtagaacatga

SEQ ID NO: 193804 - DNA, 33 bp, Homo sapien
taaaccaaaatcctattaaggtgtagaacatga

SEQ ID NO: 193805 - DNA, 33 bp, Homo sapien
gaccaaccaaatgaccaaacagctaaccaatca

SEQ ID NO: 193806 - DNA, 33 bp, Homo sapien
gaccaaccaaatgaccgaacagctaaccaatca

SEQ ID NO: 193807 - DNA, 33 bp, Homo sapien
agcaattgccctgaccaatcccactatcttacc

SEQ ID NO: 193808 - DNA, 33 bp, Homo sapien
agcaattgccctgaccgatcccactatcttacc

SEQ ID NO: 193809 - DNA, 33 bp, Homo sapien
cactttgatagacaaacggcgtgtgactgtaga

SEQ ID NO: 193810 - DNA, 33 bp, Homo sapien
cactttgatagacaaatggcgtgtgactgtaga

SEQ ID NO: 193811 - DNA, 33 bp, Homo sapien
tgtgctaggaataataccaacagtaataaaagc

SEQ ID NO: 193812 - DNA, 33 bp, Homo sapien
tgtgctaggaataatatcaacagtaataaaagc

SEQ ID NO: 193813 - DNA, 33 bp, Homo sapien
accccagctcaaatccaacaattcctaagcagc

SEQ ID NO: 193814 - DNA, 33 bp, Homo sapien
accccagctcaaatccgacaattcctaagcagc

SEQ ID NO: 193815 - DNA, 33 bp, Homo sapien
tcccgggaagggactccgacatggaaagccacg

SEQ ID NO: 193816 - DNA, 33 bp, Homo sapien
tcccgggaagggactctgacatggaaagccacg

SEQ ID NO: 193817 - DNA, 33 bp, Homo sapien
taatatcatgtcaaataagagagccaataaaac

SEQ ID NO: 193818 - DNA, 33 bp, Homo sapien
taatatcatgtcaaatgagagagccaataaaac

SEQ ID NO: 193819 - DNA, 33 bp, Homo sapien
gccacatttttgtagcactccaatctgtccaca

SEQ ID NO: 193820 - DNA, 33 bp, Homo sapien
gccacatttttgtagcgctccaatctgtccaca

SEQ ID NO: 193821 - DNA, 33 bp, Homo sapien
taataacaatagctaactaacatgacctggtgc

SEQ ID NO: 193822 - DNA, 33 bp, Homo sapien
taataacaatagctaagtaacatgacctggtgc

SEQ ID NO: 193823 - DNA, 33 bp, Homo sapien
ctgcaaacgccccatacagggccaagttttggt

SEQ ID NO: 193824 - DNA, 33 bp, Homo sapien
ctgcaaacgccccatagagggccaagttttggt

SEQ ID NO: 193825 - DNA, 33 bp, Homo sapien
gcttcacgttgccacacggttctgggagatgag

SEQ ID NO: 193826 - DNA, 33 bp, Homo sapien
gcttcacgttgccacatggttctgggagatgag

SEQ ID NO: 193827 - DNA, 33 bp, Homo sapien
ttctcttgaaggcctggatgtcagagagtgagg

SEQ ID NO: 193828 - DNA, 33 bp, Homo sapien
ttctcttgaaggcctgtatgtcagagagtgagg

SEQ ID NO: 193829 - DNA, 33 bp, Homo sapien
catgcacaggaccttgcaaatacgatcaatgca

SEQ ID NO: 193830 - DNA, 33 bp, Homo sapien
catgcacaggaccttgtaaatacgatcaatgca

SEQ ID NO: 193831 - DNA, 33 bp, Homo sapien
tttgaagctctgatgaaacttatgaaaatagtg

SEQ ID NO: 193832 - DNA, 33 bp, Homo sapien
tttgaagctctgatgatacttatgaaaatagtg

SEQ ID NO: 193833 - DNA, 33 bp, Homo sapien
gcaagaaacaccaaacaagggatctttggacag

SEQ ID NO: 193834 - DNA, 33 bp, Homo sapien
gcaagaaacaccaaacgagggatctttggacag

SEQ ID NO: 193835 - DNA, 33 bp, Homo sapien
actctatcccaaatggccactgaaatattgaca

SEQ ID NO: 193836 - DNA, 33 bp, Homo sapien
actctatcccaaatggtcactgaaatattgaca

SEQ ID NO: 193837 - DNA, 33 bp, Homo sapien
acatgcagcaaattaaacacagacctaagatgg

SEQ ID NO: 193838 - DNA, 33 bp, Homo sapien
acatgcagcaaattaagcacagacctaagatgg

SEQ ID NO: 193839 - DNA, 33 bp, Homo sapien
cagcaataattatgcaagggaaaaagccacaga

SEQ ID NO: 193840 - DNA, 33 bp, Homo sapien
cagcaataattatgcatgggaaaaagccacaga

SEQ ID NO: 193841 - DNA, 33 bp, Homo sapien
aaccagataacacagagtattggacttgaatcc

SEQ ID NO: 193842 - DNA, 33 bp, Homo sapien
aaccagataacacagattattggacttgaatcc

SEQ ID NO: 193843 - DNA, 33 bp, Homo sapien
tctggtgggcattacacgtgaaagtgcttttta

SEQ ID NO: 193844 - DNA, 33 bp, Homo sapien
tctggtgggcattacatgtgaaagtgcttttta

SEQ ID NO: 193845 - DNA, 33 bp, Homo sapien
gctggctgcgtgcaagacccagtaatcgcccca

SEQ ID NO: 193846 - DNA, 33 bp, Homo sapien
gctggctgcgtgcaaggcccagtaatcgcccca

SEQ ID NO: 193847 - DNA, 33 bp, Homo sapien
aagaaaatcatgaaaactagcttcagcccctta

SEQ ID NO: 193848 - DNA, 33 bp, Homo sapien
aagaaaatcatgaaaattagcttcagcccctta

SEQ ID NO: 193849 - DNA, 33 bp, Homo sapien
ccggagcaggaggagacggatctggcagaggct

SEQ ID NO: 193850 - DNA, 33 bp, Homo sapien
ccggagcaggaggagatggatctggcagaggct

SEQ ID NO: 193851 - DNA, 33 bp, Homo sapien
ttggaggatgttacccccctgaagaagcaggta

SEQ ID NO: 193852 - DNA, 33 bp, Homo sapien
ttggaggatgttacccgcctgaagaagcaggta

SEQ ID NO: 193853 - DNA, 33 bp, Homo sapien
tttggtaggtaaatccactctctaacgtgctaa

SEQ ID NO: 193854 - DNA, 33 bp, Homo sapien
tttggtaggtaaatcctctctctaacgtgctaa

SEQ ID NO: 193855 - DNA, 33 bp, Homo sapien
ggcagcagcagccacaatgtaaccaacaggcag

SEQ ID NO: 193856 - DNA, 33 bp, Homo sapien
ggcagcagcagccacagtgtaaccaacaggcag

SEQ ID NO: 193857 - DNA, 33 bp, Homo sapien
tcatgtgggatgcttacgtcacaggatggggaa

SEQ ID NO: 193858 - DNA, 33 bp, Homo sapien
tcatgtgggatgcttatgtcacaggatggggaa

SEQ ID NO: 193859 - DNA, 33 bp, Homo sapien
ctgtgtgtgtacgcaaaccgctcgctccccgga

SEQ ID NO: 193860 - DNA, 33 bp, Homo sapien
ctgtgtgtgtacgcaagccgctcgctccccgga

SEQ ID NO: 193861 - DNA, 33 bp, Homo sapien
cctcaaccacagagtaaagtcgacaaagaagag

SEQ ID NO: 193862 - DNA, 33 bp, Homo sapien
cctcaaccacagagtagagtcgacaaagaagag

SEQ ID NO: 193863 - DNA, 33 bp, Homo sapien
agctgcctttccggaacagatgggactctccac

SEQ ID NO: 193864 - DNA, 33 bp, Homo sapien
agctgcctttccggaatagatgggactctccac

SEQ ID NO: 193865 - DNA, 33 bp, Homo sapien
catgttttgccaagatgaatttaggcattgact

SEQ ID NO: 193866 - DNA, 33 bp, Homo sapien
catgttttgccaagattaatttaggcattgact

SEQ ID NO: 193867 - DNA, 33 bp, Homo sapien
cccccaagtagctcacaatctcttatgtgtatg

SEQ ID NO: 193868 - DNA, 33 bp, Homo sapien
cccccaagtagctcacgatctcttatgtgtatg

SEQ ID NO: 193869 - DNA, 33 bp, Homo sapien
gaggccgtaatagaaacgtaggctgggtgttat

SEQ ID NO: 193870 - DNA, 33 bp, Homo sapien
gaggccgtaatagaaatgtaggctgggtgttat

SEQ ID NO: 193871 - DNA, 33 bp, Homo sapien
cgttatgaggattcaacgaattaacatttgtac

SEQ ID NO: 193872 - DNA, 33 bp, Homo sapien
cgttatgaggattcaatgaattaacatttgtac

SEQ ID NO: 193873 - DNA, 33 bp, Homo sapien
ccctcgccctagaatacgtcttcagtgatctgc

SEQ ID NO: 193874 - DNA, 33 bp, Homo sapien
ccctcgccctagaatatgtcttcagtgatctgc

SEQ ID NO: 193875 - DNA, 33 bp, Homo sapien
tcctttccagacaaaccattctgttcagtatgt

SEQ ID NO: 193876 - DNA, 33 bp, Homo sapien
tcctttccagacaaactattctgttcagtatgt

SEQ ID NO: 193877 - DNA, 33 bp, Homo sapien
cagctggtaaaagctcacaacatactgaacaga

SEQ ID NO: 193878 - DNA, 33 bp, Homo sapien
cagctggtaaaagctcgcaacatactgaacaga

SEQ ID NO: 193879 - DNA, 33 bp, Homo sapien
agggtgtggctgacacagaaactgctcagattt

SEQ ID NO: 193880 - DNA, 33 bp, Homo sapien
agggtgtggctgacacggaaactgctcagattt

SEQ ID NO: 193881 - DNA, 33 bp, Homo sapien
tgaattccaagcttcacatggactctgattctc

SEQ ID NO: 193882 - DNA, 33 bp, Homo sapien
tgaattccaagcttcagatggactctgattctc

SEQ ID NO: 193883 - DNA, 33 bp, Homo sapien
gaacacagaggtgagactagaaggccctcagcc

SEQ ID NO: 193884 - DNA, 33 bp, Homo sapien
gaacacagaggtgagattagaaggccctcagcc

SEQ ID NO: 193885 - DNA, 33 bp, Homo sapien
ccaaaaagacacctgcacttgtatattcatggc

SEQ ID NO: 193886 - DNA, 33 bp, Homo sapien
ccaaaaagacacctgcgcttgtatattcatggc

SEQ ID NO: 193887 - DNA, 33 bp, Homo sapien
cttttcacttcgggggccaattgtagaaaagaa

SEQ ID NO: 193888 - DNA, 33 bp, Homo sapien
cttttcacttcgggggtcaattgtagaaaagaa

SEQ ID NO: 193889 - DNA, 33 bp, Homo sapien
agactgctgaagctcacatcctgtctccaacac

SEQ ID NO: 193890 - DNA, 33 bp, Homo sapien
agactgctgaagctcatatcctgtctccaacac

SEQ ID NO: 193891 - DNA, 33 bp, Homo sapien
ctaaataatgtctctaaaaggaatggatgccta

SEQ ID NO: 193892 - DNA, 33 bp, Homo sapien
ctaaataatgtctctagaaggaatggatgccta

SEQ ID NO: 193893 - DNA, 33 bp, Homo sapien
atctaggatctgttacgcctccctctgcatgca

SEQ ID NO: 193894 - DNA, 33 bp, Homo sapien
atctaggatctgttactcctccctctgcatgca

SEQ ID NO: 193895 - DNA, 33 bp, Homo sapien
agaaagtggaagagaagccagcatgcgcaaaga

SEQ ID NO: 193896 - DNA, 33 bp, Homo sapien
agaaagtggaagagaatccagcatgcgcaaaga

SEQ ID NO: 193897 - DNA, 33 bp, Homo sapien
catcactttgctgaccacttgcagggccgttta

SEQ ID NO: 193898 - DNA, 33 bp, Homo sapien
catcactttgctgaccgcttgcagggccgttta

SEQ ID NO: 193899 - DNA, 33 bp, Homo sapien
aagacctttcacataaagcctgtgctaatattt

SEQ ID NO: 193900 - DNA, 33 bp, Homo sapien
aagacctttcacataatgcctgtgctaatattt

SEQ ID NO: 193901 - DNA, 33 bp, Homo sapien
ttgtctcagcaatgatcaagcgtagctcctcac

SEQ ID NO: 193902 - DNA, 33 bp, Homo sapien
ttgtctcagcaatgattaagcgtagctcctcac

SEQ ID NO: 193903 - DNA, 33 bp, Homo sapien
atcctgccggcaccaccgggtgtgaagtgagga

SEQ ID NO: 193904 - DNA, 33 bp, Homo sapien
atcctgccggcaccactgggtgtgaagtgagga

SEQ ID NO: 193905 - DNA, 33 bp, Homo sapien
ctattaaagaatatgacaggactctggataaac

SEQ ID NO: 193906 - DNA, 33 bp, Homo sapien
ctattaaagaatatgataggactctggataaac

SEQ ID NO: 193907 - DNA, 33 bp, Homo sapien
tgcagatttccaggaccatcttattggtgaagg

SEQ ID NO: 193908 - DNA, 33 bp, Homo sapien
tgcagatttccaggactatcttattggtgaagg

SEQ ID NO: 193909 - DNA, 33 bp, Homo sapien
tatcagcagaacaaccagcaccagaggcatttg

SEQ ID NO: 193910 - DNA, 33 bp, Homo sapien
tatcagcagaacaaccggcaccagaggcatttg

SEQ ID NO: 193911 - DNA, 33 bp, Homo sapien
accattccagagcccaacataaccagagaagag

SEQ ID NO: 193912 - DNA, 33 bp, Homo sapien
accattccagagcccagcataaccagagaagag

SEQ ID NO: 193913 - DNA, 33 bp, Homo sapien
agccatagtagaaagactagcgatcccagagtc

SEQ ID NO: 193914 - DNA, 33 bp, Homo sapien
agccatagtagaaagagtagcgatcccagagtc

SEQ ID NO: 193915 - DNA, 33 bp, Homo sapien
cagtatggtgcccttcaaacagttgttccagga

SEQ ID NO: 193916 - DNA, 33 bp, Homo sapien
cagtatggtgcccttcgaacagttgttccagga

SEQ ID NO: 193917 - DNA, 33 bp, Homo sapien
ttttccattcgtcagagatttctcttttctaag

SEQ ID NO: 193918 - DNA, 33 bp, Homo sapien
ttttccattcgtcagatatttctcttttctaag

SEQ ID NO: 193919 - DNA, 33 bp, Homo sapien
actatttgcttggcctcggaacccaaaggtact

SEQ ID NO: 193920 - DNA, 33 bp, Homo sapien
actatttgcttggccttggaacccaaaggtact

SEQ ID NO: 193921 - DNA, 33 bp, Homo sapien
acggagcagtttccaaagataagttctgcggta

SEQ ID NO: 193922 - DNA, 33 bp, Homo sapien
acggagcagtttccaaggataagttctgcggta

SEQ ID NO: 193923 - DNA, 33 bp, Homo sapien
gccaactttgtgtaaacgagaaataaactttta

SEQ ID NO: 193924 - DNA, 33 bp, Homo sapien
gccaactttgtgtaaatgagaaataaactttta

SEQ ID NO: 193925 - DNA, 33 bp, Homo sapien
taaatactcaagatgacggacaacttaaatatc

SEQ ID NO: 193926 - DNA, 33 bp, Homo sapien
taaatactcaagatgatggacaacttaaatatc

SEQ ID NO: 193927 - DNA, 33 bp, Homo sapien
aaaagaacgaaatttgcagcaacacggatggaa

SEQ ID NO: 193928 - DNA, 33 bp, Homo sapien
aaaagaacgaaatttgtagcaacacggatggaa

SEQ ID NO: 193929 - DNA, 33 bp, Homo sapien
ggagagggagctcatactagggctcaccctttc

SEQ ID NO: 193930 - DNA, 33 bp, Homo sapien
ggagagggagctcatagtagggctcaccctttc

SEQ ID NO: 193931 - DNA, 33 bp, Homo sapien
ctaaagaccatgtgaaagtattgctccggagag

SEQ ID NO: 193932 - DNA, 33 bp, Homo sapien
ctaaagaccatgtgaaggtattgctccggagag

SEQ ID NO: 193933 - DNA, 33 bp, Homo sapien
acatatacatatgcacaagcacagttataaact

SEQ ID NO: 193934 - DNA, 33 bp, Homo sapien
acatatacatatgcacgagcacagttataaact

SEQ ID NO: 193935 - DNA, 33 bp, Homo sapien
ccagcaggtctggataccttattcctgttctca

SEQ ID NO: 193936 - DNA, 33 bp, Homo sapien
ccagcaggtctggatatcttattcctgttctca

SEQ ID NO: 193937 - DNA, 33 bp, Homo sapien
tccctgacagcagaaggaagtctttccagtcaa

SEQ ID NO: 193938 - DNA, 33 bp, Homo sapien
tccctgacagcagaagtaagtctttccagtcaa

SEQ ID NO: 193939 - DNA, 33 bp, Homo sapien
agcatttcgcacatggcagaacttcaacgagtg

SEQ ID NO: 193940 - DNA, 33 bp, Homo sapien
agcatttcgcacatggtagaacttcaacgagtg

SEQ ID NO: 193941 - DNA, 33 bp, Homo sapien
tggatatgtgaatggaaaaattgaggaattata

SEQ ID NO: 193942 - DNA, 33 bp, Homo sapien
tggatatgtgaatggacaaattgaggaattata

SEQ ID NO: 193943 - DNA, 33 bp, Homo sapien
tcatttatccaggcaaagttactagggctatag

SEQ ID NO: 193944 - DNA, 33 bp, Homo sapien
tcatttatccaggcaatgttactagggctatag

SEQ ID NO: 193945 - DNA, 33 bp, Homo sapien
atacagtgacatcacgccgtgaggtagggcatc

SEQ ID NO: 193946 - DNA, 33 bp, Homo sapien
atacagtgacatcacgtcgtgaggtagggcatc

SEQ ID NO: 193947 - DNA, 33 bp, Homo sapien
atttttctaatgatgacaaaccacagtctgtct

SEQ ID NO: 193948 - DNA, 33 bp, Homo sapien
atttttctaatgatgagaaaccacagtctgtct

SEQ ID NO: 193949 - DNA, 33 bp, Homo sapien
gagggttatggaggtacggcagatcaactgcaa

SEQ ID NO: 193950 - DNA, 33 bp, Homo sapien
gagggttatggaggtatggcagatcaactgcaa

SEQ ID NO: 193951 - DNA, 33 bp, Homo sapien
ccacccaaaaggcttaaaggcttgtgaacaata

SEQ ID NO: 193952 - DNA, 33 bp, Homo sapien
ccacccaaaaggcttacaggcttgtgaacaata

SEQ ID NO: 193953 - DNA, 33 bp, Homo sapien
ccatcgtccaaaaaccaatgaggtctgaccttg

SEQ ID NO: 193954 - DNA, 33 bp, Homo sapien
ccatcgtccaaaaaccgatgaggtctgaccttg

SEQ ID NO: 193955 - DNA, 33 bp, Homo sapien
agccctgaatctgaccaagaggaaaataagtta

SEQ ID NO: 193956 - DNA, 33 bp, Homo sapien
agccctgaatctgaccgagaggaaaataagtta

SEQ ID NO: 193957 - DNA, 33 bp, Homo sapien
ttgctcctcagaaatacgttgtggccagtttcc

SEQ ID NO: 193958 - DNA, 33 bp, Homo sapien
ttgctcctcagaaatatgttgtggccagtttcc

SEQ ID NO: 193959 - DNA, 33 bp, Homo sapien
tgctttttcagtaaccccatcaaaggataagct

SEQ ID NO: 193960 - DNA, 33 bp, Homo sapien
tgctttttcagtaacctcatcaaaggataagct

SEQ ID NO: 193961 - DNA, 33 bp, Homo sapien
cgaggctgaataaacacggtagaggagtgaaaa

SEQ ID NO: 193962 - DNA, 33 bp, Homo sapien
cgaggctgaataaacatggtagaggagtgaaaa

SEQ ID NO: 193963 - DNA, 33 bp, Homo sapien
tcaatgaatacctgttaaaaagattcaaaggtc

SEQ ID NO: 193964 - DNA, 33 bp, Homo sapien
tcaatgaatacctgttgaaaagattcaaaggtc

SEQ ID NO: 193965 - DNA, 33 bp, Homo sapien
aagttctactaaccccaaatatgtacatggaaa

SEQ ID NO: 193966 - DNA, 33 bp, Homo sapien
aagttctactaaccccgaatatgtacatggaaa

SEQ ID NO: 193967 - DNA, 33 bp, Homo sapien
ggatcaggcattctaaatatgagttcaatctag

SEQ ID NO: 193968 - DNA, 33 bp, Homo sapien
ggatcaggcattctaattatgagttcaatctag

SEQ ID NO: 193969 - DNA, 33 bp, Homo sapien
caatgggacctctgccgatacaagctgaccatt

SEQ ID NO: 193970 - DNA, 33 bp, Homo sapien
caatgggacctctgcctatacaagctgaccatt

SEQ ID NO: 193971 - DNA, 33 bp, Homo sapien
ctctgggatactggcacgcactgatgggaacct

SEQ ID NO: 193972 - DNA, 33 bp, Homo sapien
ctctgggatactggcaggcactgatgggaacct

SEQ ID NO: 193973 - DNA, 33 bp, Homo sapien
agaaaaccaggcattcggaagcccctacagcag

SEQ ID NO: 193974 - DNA, 33 bp, Homo sapien
agaaaaccaggcattctgaagcccctacagcag

SEQ ID NO: 193975 - DNA, 33 bp, Homo sapien
ctatttccaatccaaactgatgtccagccacat

SEQ ID NO: 193976 - DNA, 33 bp, Homo sapien
ctatttccaatccaaattgatgtccagccacat

SEQ ID NO: 193977 - DNA, 33 bp, Homo sapien
gtgatggtaaacagaaaacaggccattgtgtca

SEQ ID NO: 193978 - DNA, 33 bp, Homo sapien
gtgatggtaaacagaatacaggccattgtgtca

SEQ ID NO: 193979 - DNA, 33 bp, Homo sapien
acttctgtgtgttttcaaaagttcaggcgtgca

SEQ ID NO: 193980 - DNA, 33 bp, Homo sapien
acttctgtgtgttttcgaaagttcaggcgtgca

SEQ ID NO: 193981 - DNA, 33 bp, Homo sapien
ttgaaatgattcctcactccttactttacaact

SEQ ID NO: 193982 - DNA, 33 bp, Homo sapien
ttgaaatgattcctcattccttactttacaact

SEQ ID NO: 193983 - DNA, 33 bp, Homo sapien
gacttgaatttccccaccaaagcaagttgggca

SEQ ID NO: 193984 - DNA, 33 bp, Homo sapien
gacttgaatttccccatcaaagcaagttgggca

SEQ ID NO: 193985 - DNA, 33 bp, Homo sapien
tgttaaagatgcaagaaggtggggaaaatgtct

SEQ ID NO: 193986 - DNA, 33 bp, Homo sapien
tgttaaagatgcaagatggtggggaaaatgtct

SEQ ID NO: 193987 - DNA, 33 bp, Homo sapien
atcctcattttcctcaatctctccaatctgctg

SEQ ID NO: 193988 - DNA, 33 bp, Homo sapien
atcctcattttcctcagtctctccaatctgctg

SEQ ID NO: 193989 - DNA, 33 bp, Homo sapien
gaaagtgacatattccaaacacacccactgcct

SEQ ID NO: 193990 - DNA, 33 bp, Homo sapien
gaaagtgacatattccgaacacacccactgcct

SEQ ID NO: 193991 - DNA, 33 bp, Homo sapien
tttcatcatcaaaaaacgcttgccttccctggc

SEQ ID NO: 193992 - DNA, 33 bp, Homo sapien
tttcatcatcaaaaaatgcttgccttccctggc

SEQ ID NO: 193993 - DNA, 33 bp, Homo sapien
agtcttatgagcgttcccttgtatgtaattttt

SEQ ID NO: 193994 - DNA, 33 bp, Homo sapien
agtcttatgagcgttctcttgtatgtaattttt

SEQ ID NO: 193995 - DNA, 33 bp, Homo sapien
cctgttacttcatcatcataattgaataacagc

SEQ ID NO: 193996 - DNA, 33 bp, Homo sapien
cctgttacttcatcatgataattgaataacagc

SEQ ID NO: 193997 - DNA, 33 bp, Homo sapien
ggccctggtttaagaaaggaatcaaaggcaggg

SEQ ID NO: 193998 - DNA, 33 bp, Homo sapien
ggccctggtttaagaagggaatcaaaggcaggg

SEQ ID NO: 193999 - DNA, 33 bp, Homo sapien
ctgcagactaacatggccaacagaaatgaggca

SEQ ID NO: 194000 - DNA, 33 bp, Homo sapien
ctgcagactaacatggtcaacagaaatgaggca

SEQ ID NO: 194001 - DNA, 33 bp, Homo sapien
tccacgaccgtgaatccgaccctgtccttctca

SEQ ID NO: 194002 - DNA, 33 bp, Homo sapien
tccacgaccgtgaatctgaccctgtccttctca

SEQ ID NO: 194003 - DNA, 33 bp, Homo sapien
ctgcacttactacactcaggcgaggcagcttgg

SEQ ID NO: 194004 - DNA, 33 bp, Homo sapien
ctgcacttactacactgaggcgaggcagcttgg

SEQ ID NO: 194005 - DNA, 33 bp, Homo sapien
caataatatttcagtccctggccttttcaaacc

SEQ ID NO: 194006 - DNA, 33 bp, Homo sapien
caataatatttcagtctctggccttttcaaacc

SEQ ID NO: 194007 - DNA, 33 bp, Homo sapien
cttacagtccaacttcaaccccaaggtgctttt

SEQ ID NO: 194008 - DNA, 33 bp, Homo sapien
cttacagtccaacttcgaccccaaggtgctttt

SEQ ID NO: 194009 - DNA, 33 bp, Homo sapien
acaccctattgttggaggaaaacacagtgaggt

SEQ ID NO: 194010 - DNA, 33 bp, Homo sapien
acaccctattgttggatgaaaacacagtgaggt

SEQ ID NO: 194011 - DNA, 33 bp, Homo sapien
gctggattctgtcccagtgaatttgagataaca

SEQ ID NO: 194012 - DNA, 33 bp, Homo sapien
gctggattctgtcccattgaatttgagataaca

SEQ ID NO: 194013 - DNA, 33 bp, Homo sapien
gtcttttcttattaaccatgcacatttctttta

SEQ ID NO: 194014 - DNA, 33 bp, Homo sapien
gtcttttcttattaacgatgcacatttctttta

SEQ ID NO: 194015 - DNA, 33 bp, Homo sapien
gagacctgagtaaaggacactgagtgcaaaggg

SEQ ID NO: 194016 - DNA, 33 bp, Homo sapien
gagacctgagtaaagggcactgagtgcaaaggg

SEQ ID NO: 194017 - DNA, 33 bp, Homo sapien
gaagcaaaggtcacaacctgggagttgcaactg

SEQ ID NO: 194018 - DNA, 33 bp, Homo sapien
gaagcaaaggtcacaatctgggagttgcaactg

SEQ ID NO: 194019 - DNA, 33 bp, Homo sapien
acttgagttgatttcaatcttcttaaacttgtt

SEQ ID NO: 194020 - DNA, 33 bp, Homo sapien
acttgagttgatttcagtcttcttaaacttgtt

SEQ ID NO: 194021 - DNA, 33 bp, Homo sapien
gatatcctgaagagacaaataacaagatgtgag

SEQ ID NO: 194022 - DNA, 33 bp, Homo sapien
gatatcctgaagagaccaataacaagatgtgag

SEQ ID NO: 194023 - DNA, 33 bp, Homo sapien
tctgcaggtggtttcaggtgaaatatcagcagt

SEQ ID NO: 194024 - DNA, 33 bp, Homo sapien
tctgcaggtggtttcatgtgaaatatcagcagt

SEQ ID NO: 194025 - DNA, 33 bp, Homo sapien
tccacactgcccactcaaagagcctctcctttc

SEQ ID NO: 194026 - DNA, 33 bp, Homo sapien
tccacactgcccactccaagagcctctcctttc

SEQ ID NO: 194027 - DNA, 33 bp, Homo sapien
atgttccagacacttgcagaagaccagtatagt

SEQ ID NO: 194028 - DNA, 33 bp, Homo sapien
atgttccagacacttggagaagaccagtatagt

SEQ ID NO: 194029 - DNA, 33 bp, Homo sapien
cagaggggaggacacaaaggaggcactctacag

SEQ ID NO: 194030 - DNA, 33 bp, Homo sapien
cagaggggaggacacagaggaggcactctacag

SEQ ID NO: 194031 - DNA, 33 bp, Homo sapien
gagtgtacaacataaacgtgaccaaaaaataat

SEQ ID NO: 194032 - DNA, 33 bp, Homo sapien
gagtgtacaacataaaggtgaccaaaaaataat

SEQ ID NO: 194033 - DNA, 33 bp, Homo sapien
tacagtctcagtgtcacgaatttccagttcagg

SEQ ID NO: 194034 - DNA, 33 bp, Homo sapien
tacagtctcagtgtcatgaatttccagttcagg

SEQ ID NO: 194035 - DNA, 33 bp, Homo sapien
tcttagaggacaattaactggtcagctgtctgt

SEQ ID NO: 194036 - DNA, 33 bp, Homo sapien
tcttagaggacaattacctggtcagctgtctgt

SEQ ID NO: 194037 - DNA, 33 bp, Homo sapien
ctctcgagggaggaaaagcatctaagagaaagg

SEQ ID NO: 194038 - DNA, 33 bp, Homo sapien
ctctcgagggaggaaaggcatctaagagaaagg

SEQ ID NO: 194039 - DNA, 33 bp, Homo sapien
gaggtggcaggtgttaagcatctccatgtaata

SEQ ID NO: 194040 - DNA, 33 bp, Homo sapien
gaggtggcaggtgttatgcatctccatgtaata

SEQ ID NO: 194041 - DNA, 33 bp, Homo sapien
tagaggcaggagagaaagggacaaatagctgct

SEQ ID NO: 194042 - DNA, 33 bp, Homo sapien
tagaggcaggagagaaggggacaaatagctgct

SEQ ID NO: 194043 - DNA, 33 bp, Homo sapien
tccttcaaaattttcaataacaaagcattgcag

SEQ ID NO: 194044 - DNA, 33 bp, Homo sapien
tccttcaaaattttcagtaacaaagcattgcag

SEQ ID NO: 194045 - DNA, 33 bp, Homo sapien
tgcaataaatgttccaccttctcttcacaaagg

SEQ ID NO: 194046 - DNA, 33 bp, Homo sapien
tgcaataaatgttccatcttctcttcacaaagg

SEQ ID NO: 194047 - DNA, 33 bp, Homo sapien
gtaataatcacattcaaaccttcgttgaataaa

SEQ ID NO: 194048 - DNA, 33 bp, Homo sapien
gtaataatcacattcacaccttcgttgaataaa

SEQ ID NO: 194049 - DNA, 33 bp, Homo sapien
tccagcctttcactacacccaaagatgagacac

SEQ ID NO: 194050 - DNA, 33 bp, Homo sapien
tccagcctttcactacgcccaaagatgagacac

SEQ ID NO: 194051 - DNA, 33 bp, Homo sapien
agtctgggctcttctaaccactgttgcaacctt

SEQ ID NO: 194052 - DNA, 33 bp, Homo sapien
agtctgggctcttctagccactgttgcaacctt

SEQ ID NO: 194053 - DNA, 33 bp, Homo sapien
gaacagtacactggtacagaggcttgaaaattg

SEQ ID NO: 194054 - DNA, 33 bp, Homo sapien
gaacagtacactggtatagaggcttgaaaattg

SEQ ID NO: 194055 - DNA, 33 bp, Homo sapien
atcttcacaacaaaccactatagttgcttcata

SEQ ID NO: 194056 - DNA, 33 bp, Homo sapien
atcttcacaacaaaccgctatagttgcttcata

SEQ ID NO: 194057 - DNA, 33 bp, Homo sapien
ggtgttttttaatctacgtttcatgagtgacta

SEQ ID NO: 194058 - DNA, 33 bp, Homo sapien
ggtgttttttaatctatgtttcatgagtgacta

SEQ ID NO: 194059 - DNA, 33 bp, Homo sapien
gttaacctggtaatctaacctcttttctgcatc

SEQ ID NO: 194060 - DNA, 33 bp, Homo sapien
gttaacctggtaatctgacctcttttctgcatc

SEQ ID NO: 194061 - DNA, 33 bp, Homo sapien
gatgactttgtaagaacaggctttggttggatt

SEQ ID NO: 194062 - DNA, 33 bp, Homo sapien
gatgactttgtaagaagaggctttggttggatt

SEQ ID NO: 194063 - DNA, 33 bp, Homo sapien
cttagtaaacatttgcggaaggatagcttccaa

SEQ ID NO: 194064 - DNA, 33 bp, Homo sapien
cttagtaaacatttgctgaaggatagcttccaa

SEQ ID NO: 194065 - DNA, 33 bp, Homo sapien
gctgaccgattgatagacagctattccatgtga

SEQ ID NO: 194066 - DNA, 33 bp, Homo sapien
gctgaccgattgataggcagctattccatgtga

SEQ ID NO: 194067 - DNA, 33 bp, Homo sapien
acaaatggcagaaggccgaattatatcatgatt

SEQ ID NO: 194068 - DNA, 33 bp, Homo sapien
acaaatggcagaaggctgaattatatcatgatt

SEQ ID NO: 194069 - DNA, 33 bp, Homo sapien
tttagtctttcctatcactggtttcatataaat

SEQ ID NO: 194070 - DNA, 33 bp, Homo sapien
tttagtctttcctatcgctggtttcatataaat

SEQ ID NO: 194071 - DNA, 33 bp, Homo sapien
tagcttgttccagagaagtcaagaaaagaggta

SEQ ID NO: 194072 - DNA, 33 bp, Homo sapien
tagcttgttccagagacgtcaagaaaagaggta

SEQ ID NO: 194073 - DNA, 33 bp, Homo sapien
aggtgcattctagatccacctctcattttgaga

SEQ ID NO: 194074 - DNA, 33 bp, Homo sapien
aggtgcattctagatctacctctcattttgaga

SEQ ID NO: 194075 - DNA, 33 bp, Homo sapien
agtgacatttagaccaatagttgatgctgatat

SEQ ID NO: 194076 - DNA, 33 bp, Homo sapien
agtgacatttagaccactagttgatgctgatat

SEQ ID NO: 194077 - DNA, 33 bp, Homo sapien
ataaagaaatacaaacagaagagcagagacaag

SEQ ID NO: 194078 - DNA, 33 bp, Homo sapien
ataaagaaatacaaaccgaagagcagagacaag

SEQ ID NO: 194079 - DNA, 33 bp, Homo sapien
aggggcctggaaggaacgacctagaaagtttgc

SEQ ID NO: 194080 - DNA, 33 bp, Homo sapien
aggggcctggaaggaatgacctagaaagtttgc

SEQ ID NO: 194081 - DNA, 33 bp, Homo sapien
cacagtcactgacctcaatccacttacaacaac

SEQ ID NO: 194082 - DNA, 33 bp, Homo sapien
cacagtcactgacctcgatccacttacaacaac

SEQ ID NO: 194083 - DNA, 33 bp, Homo sapien
ttcccctaaatctttcaacaactctcaaaggcc

SEQ ID NO: 194084 - DNA, 33 bp, Homo sapien
ttcccctaaatctttcgacaactctcaaaggcc

SEQ ID NO: 194085 - DNA, 33 bp, Homo sapien
agtatccatttggccccgaagtccgtttttgaa

SEQ ID NO: 194086 - DNA, 33 bp, Homo sapien
agtatccatttggccctgaagtccgtttttgaa

SEQ ID NO: 194087 - DNA, 33 bp, Homo sapien
atgaattcaatacaagaagttaaacttacacaa

SEQ ID NO: 194088 - DNA, 33 bp, Homo sapien
atgaattcaatacaaggagttaaacttacacaa

SEQ ID NO: 194089 - DNA, 33 bp, Homo sapien
agcaacagaacctcacaatgtgcaaaggtgcta

SEQ ID NO: 194090 - DNA, 33 bp, Homo sapien
agcaacagaacctcacgatgtgcaaaggtgcta

SEQ ID NO: 194091 - DNA, 33 bp, Homo sapien
gctggagcacctgcatcagagattgtgaatgag

SEQ ID NO: 194092 - DNA, 33 bp, Homo sapien
gctggagcacctgcatgagagattgtgaatgag

SEQ ID NO: 194093 - DNA, 33 bp, Homo sapien
tgctcaggaaaaaataaggtgcttcagaaatat

SEQ ID NO: 194094 - DNA, 33 bp, Homo sapien
tgctcaggaaaaaatatggtgcttcagaaatat

SEQ ID NO: 194095 - DNA, 33 bp, Homo sapien
ccaagtgaataagatccccgtcttgtaaggaat

SEQ ID NO: 194096 - DNA, 33 bp, Homo sapien
ccaagtgaataagatctccgtcttgtaaggaat

SEQ ID NO: 194097 - DNA, 33 bp, Homo sapien
agggcctggctttataaacaacattccctcaca

SEQ ID NO: 194098 - DNA, 33 bp, Homo sapien
agggcctggctttatacacaacattccctcaca

SEQ ID NO: 194099 - DNA, 33 bp, Homo sapien
agtggcctcttacagaaagatgcagacaaccca

SEQ ID NO: 194100 - DNA, 33 bp, Homo sapien
agtggcctcttacagagagatgcagacaaccca

SEQ ID NO: 194101 - DNA, 33 bp, Homo sapien
catcccaggttcttagcaaagggcatcactgga

SEQ ID NO: 194102 - DNA, 33 bp, Homo sapien
catcccaggttcttagtaaagggcatcactgga

SEQ ID NO: 194103 - DNA, 33 bp, Homo sapien
ttccttccatcttcccaaagctcaaaactatac

SEQ ID NO: 194104 - DNA, 33 bp, Homo sapien
ttccttccatcttcccgaagctcaaaactatac

SEQ ID NO: 194105 - DNA, 33 bp, Homo sapien
gtcatctcctagcttcaaaactggcctcttcca

SEQ ID NO: 194106 - DNA, 33 bp, Homo sapien
gtcatctcctagcttcgaaactggcctcttcca

SEQ ID NO: 194107 - DNA, 33 bp, Homo sapien
agcagacaatatagcacggggcctttggttctc

SEQ ID NO: 194108 - DNA, 33 bp, Homo sapien
agcagacaatatagcatggggcctttggttctc

SEQ ID NO: 194109 - DNA, 33 bp, Homo sapien
atgactccacctgagactaactgcgcctggccc

SEQ ID NO: 194110 - DNA, 33 bp, Homo sapien
atgactccacctgagagtaactgcgcctggccc

SEQ ID NO: 194111 - DNA, 33 bp, Homo sapien
gtgggggactccttgcaatgaactcaacttcag

SEQ ID NO: 194112 - DNA, 33 bp, Homo sapien
gtgggggactccttgccatgaactcaacttcag

SEQ ID NO: 194113 - DNA, 33 bp, Homo sapien
gtaacaggattttcacagtctccacggcagcgg

SEQ ID NO: 194114 - DNA, 33 bp, Homo sapien
gtaacaggattttcacggtctccacggcagcgg

SEQ ID NO: 194115 - DNA, 33 bp, Homo sapien
accattctgagagggcgagaccttgctggcaga

SEQ ID NO: 194116 - DNA, 33 bp, Homo sapien
accattctgagagggctagaccttgctggcaga

SEQ ID NO: 194117 - DNA, 33 bp, Homo sapien
gtcttctggatccatcactgagaattcaaagct

SEQ ID NO: 194118 - DNA, 33 bp, Homo sapien
gtcttctggatccatcgctgagaattcaaagct

SEQ ID NO: 194119 - DNA, 33 bp, Homo sapien
agaatctgaagcctacaacagtattttcaaggc

SEQ ID NO: 194120 - DNA, 33 bp, Homo sapien
agaatctgaagcctacgacagtattttcaaggc

SEQ ID NO: 194121 - DNA, 33 bp, Homo sapien
ttgtagtgcctctggaaggaaaaaaagagtttg

SEQ ID NO: 194122 - DNA, 33 bp, Homo sapien
ttgtagtgcctctggagggaaaaaaagagtttg

SEQ ID NO: 194123 - DNA, 33 bp, Homo sapien
aaaacatctcatttccaagtccataaacgctac

SEQ ID NO: 194124 - DNA, 33 bp, Homo sapien
aaaacatctcatttccgagtccataaacgctac

SEQ ID NO: 194125 - DNA, 33 bp, Homo sapien
cttagaggtccatgtaagtccatccaaactatg

SEQ ID NO: 194126 - DNA, 33 bp, Homo sapien
cttagaggtccatgtaggtccatccaaactatg

SEQ ID NO: 194127 - DNA, 33 bp, Homo sapien
gtgaataattaaatgacggggtgtttaaagcta

SEQ ID NO: 194128 - DNA, 33 bp, Homo sapien
gtgaataattaaatgatggggtgtttaaagcta

SEQ ID NO: 194129 - DNA, 33 bp, Homo sapien
caaaagtcaagagggaggcaaatcatcaagtac

SEQ ID NO: 194130 - DNA, 33 bp, Homo sapien
caaaagtcaagagggatgcaaatcatcaagtac

SEQ ID NO: 194131 - DNA, 33 bp, Homo sapien
tctttctattacctgaaatttgtatggtttcat

SEQ ID NO: 194132 - DNA, 33 bp, Homo sapien
tctttctattacctgagatttgtatggtttcat

SEQ ID NO: 194133 - DNA, 33 bp, Homo sapien
gcctcttcttggaatccacctttctgagccgag

SEQ ID NO: 194134 - DNA, 33 bp, Homo sapien
gcctcttcttggaatcgacctttctgagccgag

SEQ ID NO: 194135 - DNA, 33 bp, Homo sapien
aagacatacaacctaacaggaggagaaaaggaa

SEQ ID NO: 194136 - DNA, 33 bp, Homo sapien
aagacatacaacctaataggaggagaaaaggaa

SEQ ID NO: 194137 - DNA, 33 bp, Homo sapien
cacatagccagtttcccctttactgctcaccaa

SEQ ID NO: 194138 - DNA, 33 bp, Homo sapien
cacatagccagtttcctctttactgctcaccaa

SEQ ID NO: 194139 - DNA, 33 bp, Homo sapien
aaagctctaggtccaacactgtgcactgggatg

SEQ ID NO: 194140 - DNA, 33 bp, Homo sapien
aaagctctaggtccaatactgtgcactgggatg

SEQ ID NO: 194141 - DNA, 33 bp, Homo sapien
ggaccttttagttttccaccgctattcgtctag

SEQ ID NO: 194142 - DNA, 33 bp, Homo sapien
ggaccttttagttttctaccgctattcgtctag

SEQ ID NO: 194143 - DNA, 33 bp, Homo sapien
ataaaagatatacccaactaacatgatcaaaat

SEQ ID NO: 194144 - DNA, 33 bp, Homo sapien
ataaaagatatacccagctaacatgatcaaaat

SEQ ID NO: 194145 - DNA, 33 bp, Homo sapien
ctccacgctcaccagacggcgctgtgcagtgtt

SEQ ID NO: 194146 - DNA, 33 bp, Homo sapien
ctccacgctcaccagatggcgctgtgcagtgtt

SEQ ID NO: 194147 - DNA, 33 bp, Homo sapien
caaactgtataagacccgaatagacaaagaaaa

SEQ ID NO: 194148 - DNA, 33 bp, Homo sapien
caaactgtataagacctgaatagacaaagaaaa

SEQ ID NO: 194149 - DNA, 33 bp, Homo sapien
actccccggaaaatgaaacattgcagtgctttg

SEQ ID NO: 194150 - DNA, 33 bp, Homo sapien
actccccggaaaatgagacattgcagtgctttg

SEQ ID NO: 194151 - DNA, 33 bp, Homo sapien
gcatgaatcttgtgacaaggtcaaacttgaact

SEQ ID NO: 194152 - DNA, 33 bp, Homo sapien
gcatgaatcttgtgacgaggtcaaacttgaact

SEQ ID NO: 194153 - DNA, 33 bp, Homo sapien
agactgactgccttgcacacaggattaatatgt

SEQ ID NO: 194154 - DNA, 33 bp, Homo sapien
agactgactgccttgctcacaggattaatatgt

SEQ ID NO: 194155 - DNA, 33 bp, Homo sapien
ctaacccctgattatgcaagctaagcactgtac

SEQ ID NO: 194156 - DNA, 33 bp, Homo sapien
ctaacccctgattatgtaagctaagcactgtac

SEQ ID NO: 194157 - DNA, 33 bp, Homo sapien
aatcattgaatcgtacaccttaaatgggtgaat

SEQ ID NO: 194158 - DNA, 33 bp, Homo sapien
aatcattgaatcgtacgccttaaatgggtgaat

SEQ ID NO: 194159 - DNA, 33 bp, Homo sapien
tataccaggcacatacaggacactttgctggca

SEQ ID NO: 194160 - DNA, 33 bp, Homo sapien
tataccaggcacatacgggacactttgctggca

SEQ ID NO: 194161 - DNA, 33 bp, Homo sapien
ggtgaaggaccgcctgacaggataaaaactatg

SEQ ID NO: 194162 - DNA, 33 bp, Homo sapien
ggtgaaggaccgcctggcaggataaaaactatg

SEQ ID NO: 194163 - DNA, 33 bp, Homo sapien
gagctgttttacttcacgttggcagtttcaaac

SEQ ID NO: 194164 - DNA, 33 bp, Homo sapien
gagctgttttacttcatgttggcagtttcaaac

SEQ ID NO: 194165 - DNA, 33 bp, Homo sapien
gaaagtttggtgcagaagcctctggaagaaata

SEQ ID NO: 194166 - DNA, 33 bp, Homo sapien
gaaagtttggtgcagatgcctctggaagaaata

SEQ ID NO: 194167 - DNA, 33 bp, Homo sapien
gtgcaaacagtaaatgccattgagcaggttctc

SEQ ID NO: 194168 - DNA, 33 bp, Homo sapien
gtgcaaacagtaaatgtcattgagcaggttctc

SEQ ID NO: 194169 - DNA, 33 bp, Homo sapien
tcacaggtactacccaaattgctgtgaattaca

SEQ ID NO: 194170 - DNA, 33 bp, Homo sapien
tcacaggtactacccagattgctgtgaattaca

SEQ ID NO: 194171 - DNA, 33 bp, Homo sapien
gcacctagctaaaagacgacattttccagcctc

SEQ ID NO: 194172 - DNA, 33 bp, Homo sapien
gcacctagctaaaagatgacattttccagcctc

SEQ ID NO: 194173 - DNA, 33 bp, Homo sapien
tggagacaaaatattcacttaaacattctcaac

SEQ ID NO: 194174 - DNA, 33 bp, Homo sapien
tggagacaaaatattcgcttaaacattctcaac

SEQ ID NO: 194175 - DNA, 33 bp, Homo sapien
gcacagagtgtgagaaaagttgacagcgggagg

SEQ ID NO: 194176 - DNA, 33 bp, Homo sapien
gcacagagtgtgagaagagttgacagcgggagg

SEQ ID NO: 194177 - DNA, 33 bp, Homo sapien
gagagaaatggcccaactgcgacaggtataaat

SEQ ID NO: 194178 - DNA, 33 bp, Homo sapien
gagagaaatggcccaattgcgacaggtataaat

SEQ ID NO: 194179 - DNA, 33 bp, Homo sapien
agaaatatttgttgaccgaccatctgagcatgg

SEQ ID NO: 194180 - DNA, 33 bp, Homo sapien
agaaatatttgttgactgaccatctgagcatgg

SEQ ID NO: 194181 - DNA, 33 bp, Homo sapien
tggaggtctgaaaagcaaacatcctctgtaatt

SEQ ID NO: 194182 - DNA, 33 bp, Homo sapien
tggaggtctgaaaagccaacatcctctgtaatt

SEQ ID NO: 194183 - DNA, 33 bp, Homo sapien
gtgcaatgactttagaaaacataactaccatca

SEQ ID NO: 194184 - DNA, 33 bp, Homo sapien
gtgcaatgactttagagaacataactaccatca

SEQ ID NO: 194185 - DNA, 33 bp, Homo sapien
tttgtgctcagagctacgtagaagaaaggcagg

SEQ ID NO: 194186 - DNA, 33 bp, Homo sapien
tttgtgctcagagctatgtagaagaaaggcagg

SEQ ID NO: 194187 - DNA, 33 bp, Homo sapien
tgagatactgggtgtgaaagtgttctttaagaa

SEQ ID NO: 194188 - DNA, 33 bp, Homo sapien
tgagatactgggtgtggaagtgttctttaagaa

SEQ ID NO: 194189 - DNA, 33 bp, Homo sapien
tgtagtcccagctatgaaggaacctgaactggg

SEQ ID NO: 194190 - DNA, 33 bp, Homo sapien
tgtagtcccagctatgtaggaacctgaactggg

SEQ ID NO: 194191 - DNA, 33 bp, Homo sapien
acttttattttagatacgcgtgtacatatgcag

SEQ ID NO: 194192 - DNA, 33 bp, Homo sapien
acttttattttagatatgcgtgtacatatgcag

SEQ ID NO: 194193 - DNA, 33 bp, Homo sapien
tggggatgaataatgaagaactgaagaatgatt

SEQ ID NO: 194194 - DNA, 33 bp, Homo sapien
tggggatgaataatgaggaactgaagaatgatt

SEQ ID NO: 194195 - DNA, 33 bp, Homo sapien
taataaaaccagaaaaactcaacaattggccaa

SEQ ID NO: 194196 - DNA, 33 bp, Homo sapien
taataaaaccagaaaagctcaacaattggccaa

SEQ ID NO: 194197 - DNA, 33 bp, Homo sapien
ggccatcattatgcacaggcaatttatataact

SEQ ID NO: 194198 - DNA, 33 bp, Homo sapien
ggccatcattatgcactggcaatttatataact

SEQ ID NO: 194199 - DNA, 33 bp, Homo sapien
gtaggtgggaaagagaatatagtgtgatgaaaa

SEQ ID NO: 194200 - DNA, 33 bp, Homo sapien
gtaggtgggaaagagagtatagtgtgatgaaaa

SEQ ID NO: 194201 - DNA, 33 bp, Homo sapien
gagaggccacggcccaatgaaggagccggtaaa

SEQ ID NO: 194202 - DNA, 33 bp, Homo sapien
gagaggccacggcccagtgaaggagccggtaaa

SEQ ID NO: 194203 - DNA, 33 bp, Homo sapien
tccaattatcttcaaaacaactgaagggaagga

SEQ ID NO: 194204 - DNA, 33 bp, Homo sapien
tccaattatcttcaaagcaactgaagggaagga

SEQ ID NO: 194205 - DNA, 33 bp, Homo sapien
tcaccatgctcagctcaagttaatcaagtatgt

SEQ ID NO: 194206 - DNA, 33 bp, Homo sapien
tcaccatgctcagctcgagttaatcaagtatgt

SEQ ID NO: 194207 - DNA, 33 bp, Homo sapien
ggcaaactcatcttgccaagagccaaatacttg

SEQ ID NO: 194208 - DNA, 33 bp, Homo sapien
ggcaaactcatcttgctaagagccaaatacttg

SEQ ID NO: 194209 - DNA, 33 bp, Homo sapien
tattttaatactttgcacttctacataaatttt

SEQ ID NO: 194210 - DNA, 33 bp, Homo sapien
tattttaatactttgcgcttctacataaatttt

SEQ ID NO: 194211 - DNA, 33 bp, Homo sapien
tccaagaaacacataactgaagcatttacagat

SEQ ID NO: 194212 - DNA, 33 bp, Homo sapien
tccaagaaacacataattgaagcatttacagat

SEQ ID NO: 194213 - DNA, 33 bp, Homo sapien
ctctagggcttttctgaaagaagacaaagggca

SEQ ID NO: 194214 - DNA, 33 bp, Homo sapien
ctctagggcttttctggaagaagacaaagggca

SEQ ID NO: 194215 - DNA, 33 bp, Homo sapien
gagatgactccaactacgtggggttggatgaga

SEQ ID NO: 194216 - DNA, 33 bp, Homo sapien
gagatgactccaactatgtggggttggatgaga

SEQ ID NO: 194217 - DNA, 33 bp, Homo sapien
ctctcccaggaatataaaagtgggcggtctggt

SEQ ID NO: 194218 - DNA, 33 bp, Homo sapien
ctctcccaggaatatacaagtgggcggtctggt

SEQ ID NO: 194219 - DNA, 33 bp, Homo sapien
ctgagtttggagaggaaatacttcagctttatc

SEQ ID NO: 194220 - DNA, 33 bp, Homo sapien
ctgagtttggagaggagatacttcagctttatc

SEQ ID NO: 194221 - DNA, 33 bp, Homo sapien
gactgaggcctgctcaaaagtgggcactctcca

SEQ ID NO: 194222 - DNA, 33 bp, Homo sapien
gactgaggcctgctcacaagtgggcactctcca

SEQ ID NO: 194223 - DNA, 33 bp, Homo sapien
tgagttgcctgagagaaaccccatggcctgtaa

SEQ ID NO: 194224 - DNA, 33 bp, Homo sapien
tgagttgcctgagagagaccccatggcctgtaa

SEQ ID NO: 194225 - DNA, 33 bp, Homo sapien
caagctctccattccaagtgtacctccctacac

SEQ ID NO: 194226 - DNA, 33 bp, Homo sapien
caagctctccattccaggtgtacctccctacac

SEQ ID NO: 194227 - DNA, 33 bp, Homo sapien
gaaaatagggacgaccacagcaaagtgaattct

SEQ ID NO: 194228 - DNA, 33 bp, Homo sapien
gaaaatagggacgaccgcagcaaagtgaattct

SEQ ID NO: 194229 - DNA, 33 bp, Homo sapien
ttgctcagagtctcaccagcatgaaagcaaggt

SEQ ID NO: 194230 - DNA, 33 bp, Homo sapien
ttgctcagagtctcacgagcatgaaagcaaggt

SEQ ID NO: 194231 - DNA, 33 bp, Homo sapien
agaagtccaggcatgacgtagttgggttctttg

SEQ ID NO: 194232 - DNA, 33 bp, Homo sapien
agaagtccaggcatgatgtagttgggttctttg

SEQ ID NO: 194233 - DNA, 33 bp, Homo sapien
aagacctgtgaatgaaggacttagtcagtgagt

SEQ ID NO: 194234 - DNA, 33 bp, Homo sapien
aagacctgtgaatgaatgacttagtcagtgagt

SEQ ID NO: 194235 - DNA, 33 bp, Homo sapien
atgaatgaatgaagacaataaggacttgcaaac

SEQ ID NO: 194236 - DNA, 33 bp, Homo sapien
atgaatgaatgaagaccataaggacttgcaaac

SEQ ID NO: 194237 - DNA, 33 bp, Homo sapien
tcaccccagcctcaaccagagttagcaactccc

SEQ ID NO: 194238 - DNA, 33 bp, Homo sapien
tcaccccagcctcaacgagagttagcaactccc

SEQ ID NO: 194239 - DNA, 33 bp, Homo sapien
tctttatatttttagacgtggcttgttgtcact

SEQ ID NO: 194240 - DNA, 33 bp, Homo sapien
tctttatatttttagatgtggcttgttgtcact

SEQ ID NO: 194241 - DNA, 33 bp, Homo sapien
ggttgcagcaacagaacctactccctgctgcag

SEQ ID NO: 194242 - DNA, 33 bp, Homo sapien
ggttgcagcaacagaatctactccctgctgcag

SEQ ID NO: 194243 - DNA, 33 bp, Homo sapien
gttgacaattaaattaagagatgtggcccctgt

SEQ ID NO: 194244 - DNA, 33 bp, Homo sapien
gttgacaattaaattaggagatgtggcccctgt

SEQ ID NO: 194245 - DNA, 33 bp, Homo sapien
gtgcttccagtctaagaagaagtgggcaaacgc

SEQ ID NO: 194246 - DNA, 33 bp, Homo sapien
gtgcttccagtctaaggagaagtgggcaaacgc

SEQ ID NO: 194247 - DNA, 33 bp, Homo sapien
gcccatactatgtaaaaactcacctcctggatg

SEQ ID NO: 194248 - DNA, 33 bp, Homo sapien
gcccatactatgtaaacactcacctcctggatg

SEQ ID NO: 194249 - DNA, 33 bp, Homo sapien
agattccaccaaacccagagatgtaaaggagtc

SEQ ID NO: 194250 - DNA, 33 bp, Homo sapien
agattccaccaaacccggagatgtaaaggagtc

SEQ ID NO: 194251 - DNA, 33 bp, Homo sapien
cagaagcacaggaacaactgacagggaagacct

SEQ ID NO: 194252 - DNA, 33 bp, Homo sapien
cagaagcacaggaacagctgacagggaagacct

SEQ ID NO: 194253 - DNA, 33 bp, Homo sapien
ggtctgcccagggaaaaaaagacactgaagacc

SEQ ID NO: 194254 - DNA, 33 bp, Homo sapien
ggtctgcccagggaaagaaagacactgaagacc

SEQ ID NO: 194255 - DNA, 33 bp, Homo sapien
ctgaagaccattcagaaccccagaaatgtcaac

SEQ ID NO: 194256 - DNA, 33 bp, Homo sapien
ctgaagaccattcagatccccagaaatgtcaac

SEQ ID NO: 194257 - DNA, 33 bp, Homo sapien
caggtttgtttatcccacttctcgggaatccga

SEQ ID NO: 194258 - DNA, 33 bp, Homo sapien
caggtttgtttatcccgcttctcgggaatccga

SEQ ID NO: 194259 - DNA, 33 bp, Homo sapien
cctggtgttcgcctaacatctactcatccacat

SEQ ID NO: 194260 - DNA, 33 bp, Homo sapien
cctggtgttcgcctaatatctactcatccacat

SEQ ID NO: 194261 - DNA, 33 bp, Homo sapien
gcttggccttatgttacagtcattcttgcacat

SEQ ID NO: 194262 - DNA, 33 bp, Homo sapien
gcttggccttatgttatagtcattcttgcacat

SEQ ID NO: 194263 - DNA, 33 bp, Homo sapien
ccatttatttgggccacctgactatttccatca

SEQ ID NO: 194264 - DNA, 33 bp, Homo sapien
ccatttatttgggccatctgactatttccatca

SEQ ID NO: 194265 - DNA, 33 bp, Homo sapien
ggagtcatcctgtttacagcaacaagttggcaa

SEQ ID NO: 194266 - DNA, 33 bp, Homo sapien
ggagtcatcctgtttatagcaacaagttggcaa

SEQ ID NO: 194267 - DNA, 33 bp, Homo sapien
tattattctgcttatgaaaattcaccctgcaga

SEQ ID NO: 194268 - DNA, 33 bp, Homo sapien
tattattctgcttatggaaattcaccctgcaga

SEQ ID NO: 194269 - DNA, 33 bp, Homo sapien
aagcatttttctgttacccatctatcgaagcat

SEQ ID NO: 194270 - DNA, 33 bp, Homo sapien
aagcatttttctgttatccatctatcgaagcat

SEQ ID NO: 194271 - DNA, 33 bp, Homo sapien
ccagttgttttgaccccaagaccgaagcatttt

SEQ ID NO: 194272 - DNA, 33 bp, Homo sapien
ccagttgttttgaccctaagaccgaagcatttt

SEQ ID NO: 194273 - DNA, 33 bp, Homo sapien
agattctgaagtttagccatgtctgaagaatac

SEQ ID NO: 194274 - DNA, 33 bp, Homo sapien
agattctgaagtttagtcatgtctgaagaatac

SEQ ID NO: 194275 - DNA, 33 bp, Homo sapien
gcaagtggaggcaagaagtaagaaacccagcag

SEQ ID NO: 194276 - DNA, 33 bp, Homo sapien
gcaagtggaggcaagaggtaagaaacccagcag

SEQ ID NO: 194277 - DNA, 33 bp, Homo sapien
tctgctaccaagctcaaagaggttgctatcaga

SEQ ID NO: 194278 - DNA, 33 bp, Homo sapien
tctgctaccaagctcagagaggttgctatcaga

SEQ ID NO: 194279 - DNA, 33 bp, Homo sapien
tttgaatgaaaaatcacgtgatggtcctgggtt

SEQ ID NO: 194280 - DNA, 33 bp, Homo sapien
tttgaatgaaaaatcatgtgatggtcctgggtt

SEQ ID NO: 194281 - DNA, 33 bp, Homo sapien
gctcaaagtcacacaactggctgccagagcaag

SEQ ID NO: 194282 - DNA, 33 bp, Homo sapien
gctcaaagtcacacaagtggctgccagagcaag

SEQ ID NO: 194283 - DNA, 33 bp, Homo sapien
ccaggttgtgcaggctaaagtccttgctctggc

SEQ ID NO: 194284 - DNA, 33 bp, Homo sapien
ccaggttgtgcaggctgaagtccttgctctggc

SEQ ID NO: 194285 - DNA, 33 bp, Homo sapien
tatctattatttaacacccatcaactgccatct

SEQ ID NO: 194286 - DNA, 33 bp, Homo sapien
tatctattatttaacatccatcaactgccatct

SEQ ID NO: 194287 - DNA, 33 bp, Homo sapien
aactgctgataggccaaggatatcttttctggc

SEQ ID NO: 194288 - DNA, 33 bp, Homo sapien
aactgctgataggccagggatatcttttctggc

SEQ ID NO: 194289 - DNA, 33 bp, Homo sapien
catcttcttaattaaccggtgcattctgttttt

SEQ ID NO: 194290 - DNA, 33 bp, Homo sapien
catcttcttaattaactggtgcattctgttttt

SEQ ID NO: 194291 - DNA, 33 bp, Homo sapien
agagacaataaacacacaattgaagagcagtta

SEQ ID NO: 194292 - DNA, 33 bp, Homo sapien
agagacaataaacacataattgaagagcagtta

SEQ ID NO: 194293 - DNA, 33 bp, Homo sapien
ctgctgcaggcttccaatgaaaagaaggtgagg

SEQ ID NO: 194294 - DNA, 33 bp, Homo sapien
ctgctgcaggcttccagtgaaaagaaggtgagg

SEQ ID NO: 194295 - DNA, 33 bp, Homo sapien
aagagttttgtcaaacagaaagcactgaataaa

SEQ ID NO: 194296 - DNA, 33 bp, Homo sapien
aagagttttgtcaaacggaaagcactgaataaa

SEQ ID NO: 194297 - DNA, 33 bp, Homo sapien
taactctagcccaaaacgaccccattagtgaat

SEQ ID NO: 194298 - DNA, 33 bp, Homo sapien
taactctagcccaaaatgaccccattagtgaat

SEQ ID NO: 194299 - DNA, 33 bp, Homo sapien
gggcttagactttagaggttactggtcaggaag

SEQ ID NO: 194300 - DNA, 33 bp, Homo sapien
gggcttagactttagatgttactggtcaggaag

SEQ ID NO: 194301 - DNA, 33 bp, Homo sapien
acccatctgccctctccaagtgggtgccaaaca

SEQ ID NO: 194302 - DNA, 33 bp, Homo sapien
acccatctgccctctcgaagtgggtgccaaaca

SEQ ID NO: 194303 - DNA, 33 bp, Homo sapien
ttgtgtatttttttcactaaggctgcataataa

SEQ ID NO: 194304 - DNA, 33 bp, Homo sapien
ttgtgtatttttttcattaaggctgcataataa

SEQ ID NO: 194305 - DNA, 33 bp, Homo sapien
tgagacctgaggagacacacattaccaacaatc

SEQ ID NO: 194306 - DNA, 33 bp, Homo sapien
tgagacctgaggagacgcacattaccaacaatc

SEQ ID NO: 194307 - DNA, 33 bp, Homo sapien
aagctcgatattctagactaagactgaactaca

SEQ ID NO: 194308 - DNA, 33 bp, Homo sapien
aagctcgatattctaggctaagactgaactaca

SEQ ID NO: 194309 - DNA, 33 bp, Homo sapien
attgatttgatttgaacatggaaccaataaaga

SEQ ID NO: 194310 - DNA, 33 bp, Homo sapien
attgatttgatttgaagatggaaccaataaaga

SEQ ID NO: 194311 - DNA, 33 bp, Homo sapien
tgctttgcacagtgcccgaatcaaggtaggtac

SEQ ID NO: 194312 - DNA, 33 bp, Homo sapien
tgctttgcacagtgcctgaatcaaggtaggtac

SEQ ID NO: 194313 - DNA, 33 bp, Homo sapien
tagcacagtgcttcgcacaccttaggagctcaa

SEQ ID NO: 194314 - DNA, 33 bp, Homo sapien
tagcacagtgcttcgcgcaccttaggagctcaa

SEQ ID NO: 194315 - DNA, 33 bp, Homo sapien
gctatttcacctgaagacctcctgttacaatga

SEQ ID NO: 194316 - DNA, 33 bp, Homo sapien
gctatttcacctgaagtcctcctgttacaatga

SEQ ID NO: 194317 - DNA, 33 bp, Homo sapien
attgaagcacataaccaaagtcatcagcacagg

SEQ ID NO: 194318 - DNA, 33 bp, Homo sapien
attgaagcacataaccgaagtcatcagcacagg

SEQ ID NO: 194319 - DNA, 33 bp, Homo sapien
caggcagagagttcccactaggaaggaaagaga

SEQ ID NO: 194320 - DNA, 33 bp, Homo sapien
caggcagagagttcccgctaggaaggaaagaga

SEQ ID NO: 194321 - DNA, 33 bp, Homo sapien
tatctatgtgttcccaccagttagcaagtgctt

SEQ ID NO: 194322 - DNA, 33 bp, Homo sapien
tatctatgtgttcccatcagttagcaagtgctt

SEQ ID NO: 194323 - DNA, 33 bp, Homo sapien
tgtccttgcttagcacacctataatatcaggtt

SEQ ID NO: 194324 - DNA, 33 bp, Homo sapien
tgtccttgcttagcactcctataatatcaggtt

SEQ ID NO: 194325 - DNA, 33 bp, Homo sapien
tgcaagtaactggatcactgaacaagaataatt

SEQ ID NO: 194326 - DNA, 33 bp, Homo sapien
tgcaagtaactggatcgctgaacaagaataatt

SEQ ID NO: 194327 - DNA, 33 bp, Homo sapien
agcttggtggttgtgacaggtagagttctaaga

SEQ ID NO: 194328 - DNA, 33 bp, Homo sapien
agcttggtggttgtgataggtagagttctaaga

SEQ ID NO: 194329 - DNA, 33 bp, Homo sapien
gtatccacattgtctacactacctgcctgttag

SEQ ID NO: 194330 - DNA, 33 bp, Homo sapien
gtatccacattgtctatactacctgcctgttag

SEQ ID NO: 194331 - DNA, 33 bp, Homo sapien
aatatttataaaggcacgattgctttgctttta

SEQ ID NO: 194332 - DNA, 33 bp, Homo sapien
aatatttataaaggcatgattgctttgctttta

SEQ ID NO: 194333 - DNA, 33 bp, Homo sapien
ctgacatgactccttcaattgctaatcagtcct

SEQ ID NO: 194334 - DNA, 33 bp, Homo sapien
ctgacatgactccttcgattgctaatcagtcct

SEQ ID NO: 194335 - DNA, 33 bp, Homo sapien
tgccagctccctatgaagcctttcctaatctct

SEQ ID NO: 194336 - DNA, 33 bp, Homo sapien
tgccagctccctatgaggcctttcctaatctct

SEQ ID NO: 194337 - DNA, 33 bp, Homo sapien
ttcctcaggaaaaaaactgctagcggagaagat

SEQ ID NO: 194338 - DNA, 33 bp, Homo sapien
ttcctcaggaaaaaaattgctagcggagaagat

SEQ ID NO: 194339 - DNA, 33 bp, Homo sapien
tggtgtagcttacatacaaacattagaggtgtt

SEQ ID NO: 194340 - DNA, 33 bp, Homo sapien
tggtgtagcttacatataaacattagaggtgtt

SEQ ID NO: 194341 - DNA, 33 bp, Homo sapien
aattgcaggggagtaacttacaaagaagctgtt

SEQ ID NO: 194342 - DNA, 33 bp, Homo sapien
aattgcaggggagtaatttacaaagaagctgtt

SEQ ID NO: 194343 - DNA, 33 bp, Homo sapien
accacacataagtatagagcgcggagatggata

SEQ ID NO: 194344 - DNA, 33 bp, Homo sapien
accacacataagtatatagcgcggagatggata

SEQ ID NO: 194345 - DNA, 33 bp, Homo sapien
tcaggctctcaaacaacagtttcagaaaaaagt

SEQ ID NO: 194346 - DNA, 33 bp, Homo sapien
tcaggctctcaaacaagagtttcagaaaaaagt

SEQ ID NO: 194347 - DNA, 33 bp, Homo sapien
tcttcatgcccagaagcctctccaacagtcccc

SEQ ID NO: 194348 - DNA, 33 bp, Homo sapien
tcttcatgcccagaaggctctccaacagtcccc

SEQ ID NO: 194349 - DNA, 33 bp, Homo sapien
cttctgtgcaagataaaactgtattagtttggt

SEQ ID NO: 194350 - DNA, 33 bp, Homo sapien
cttctgtgcaagataacactgtattagtttggt

SEQ ID NO: 194351 - DNA, 33 bp, Homo sapien
cattacaatattacccagacgattacccaagac

SEQ ID NO: 194352 - DNA, 33 bp, Homo sapien
cattacaatattaccccgacgattacccaagac

SEQ ID NO: 194353 - DNA, 33 bp, Homo sapien
tgccatcatgtctggagaattttcatattttta

SEQ ID NO: 194354 - DNA, 33 bp, Homo sapien
tgccatcatgtctggataattttcatattttta

SEQ ID NO: 194355 - DNA, 33 bp, Homo sapien
gctttctaattccttacgccatctgctttcata

SEQ ID NO: 194356 - DNA, 33 bp, Homo sapien
gctttctaattccttatgccatctgctttcata

SEQ ID NO: 194357 - DNA, 33 bp, Homo sapien
cttaggagcaatttcaaagtctctcccttgtgt

SEQ ID NO: 194358 - DNA, 33 bp, Homo sapien
cttaggagcaatttcagagtctctcccttgtgt

SEQ ID NO: 194359 - DNA, 33 bp, Homo sapien
gttgttggtgacagcactcacaagggtctttat

SEQ ID NO: 194360 - DNA, 33 bp, Homo sapien
gttgttggtgacagcattcacaagggtctttat

SEQ ID NO: 194361 - DNA, 33 bp, Homo sapien
aagataacgacatagacgtgataaacatgatgt

SEQ ID NO: 194362 - DNA, 33 bp, Homo sapien
aagataacgacatagatgtgataaacatgatgt

SEQ ID NO: 194363 - DNA, 33 bp, Homo sapien
aaatcagccccgtctcaccaattaagaaaagat

SEQ ID NO: 194364 - DNA, 33 bp, Homo sapien
aaatcagccccgtctcgccaattaagaaaagat

SEQ ID NO: 194365 - DNA, 33 bp, Homo sapien
ggccttcatccaatacaataggtgtccttacaa

SEQ ID NO: 194366 - DNA, 33 bp, Homo sapien
ggccttcatccaatacgataggtgtccttacaa

SEQ ID NO: 194367 - DNA, 33 bp, Homo sapien
gcctgctagagtggtacagtcctgcagtgtcca

SEQ ID NO: 194368 - DNA, 33 bp, Homo sapien
gcctgctagagtggtatagtcctgcagtgtcca

SEQ ID NO: 194369 - DNA, 33 bp, Homo sapien
ttgccattactgcctcaaagggcccgccatgtg

SEQ ID NO: 194370 - DNA, 33 bp, Homo sapien
ttgccattactgcctcgaagggcccgccatgtg

SEQ ID NO: 194371 - DNA, 33 bp, Homo sapien
cctcccaggttggacacagcctatctctcatgc

SEQ ID NO: 194372 - DNA, 33 bp, Homo sapien
cctcccaggttggacatagcctatctctcatgc

SEQ ID NO: 194373 - DNA, 33 bp, Homo sapien
cagcaatgacagactcagagccataaacgggtc

SEQ ID NO: 194374 - DNA, 33 bp, Homo sapien
cagcaatgacagactcggagccataaacgggtc

SEQ ID NO: 194375 - DNA, 33 bp, Homo sapien
aactcagaatggccacaacggtgtcaaacagtg

SEQ ID NO: 194376 - DNA, 33 bp, Homo sapien
aactcagaatggccacgacggtgtcaaacagtg

SEQ ID NO: 194377 - DNA, 33 bp, Homo sapien
gatttgcaatctgttaacgagagcctactaagt

SEQ ID NO: 194378 - DNA, 33 bp, Homo sapien
gatttgcaatctgttagcgagagcctactaagt

SEQ ID NO: 194379 - DNA, 33 bp, Homo sapien
gtgcacaataaacatcacagactcggctactcc

SEQ ID NO: 194380 - DNA, 33 bp, Homo sapien
gtgcacaataaacatcgcagactcggctactcc

SEQ ID NO: 194381 - DNA, 33 bp, Homo sapien
tgtcatctctgtgtaaagacaatgactgccatc

SEQ ID NO: 194382 - DNA, 33 bp, Homo sapien
tgtcatctctgtgtaatgacaatgactgccatc

SEQ ID NO: 194383 - DNA, 33 bp, Homo sapien
gggtcagaccaacttacgctgacagccaagaaa

SEQ ID NO: 194384 - DNA, 33 bp, Homo sapien
gggtcagaccaacttatgctgacagccaagaaa

SEQ ID NO: 194385 - DNA, 33 bp, Homo sapien
acaacccaggctatggcaagaatggtgcagatc

SEQ ID NO: 194386 - DNA, 33 bp, Homo sapien
acaacccaggctatgggaagaatggtgcagatc

SEQ ID NO: 194387 - DNA, 33 bp, Homo sapien
tgtcatgacagagctacgtggtttaaaggagca

SEQ ID NO: 194388 - DNA, 33 bp, Homo sapien
tgtcatgacagagctatgtggtttaaaggagca

SEQ ID NO: 194389 - DNA, 33 bp, Homo sapien
tggtgcttgaccacacggtgaggagcatccgtt

SEQ ID NO: 194390 - DNA, 33 bp, Homo sapien
tggtgcttgaccacactgtgaggagcatccgtt

SEQ ID NO: 194391 - DNA, 33 bp, Homo sapien
acccagagagtgaaataattaccttctcccttc

SEQ ID NO: 194392 - DNA, 33 bp, Homo sapien
acccagagagtgaaatcattaccttctcccttc

SEQ ID NO: 194393 - DNA, 33 bp, Homo sapien
gtggcagcgagaatgaaaagtgtttattattgt

SEQ ID NO: 194394 - DNA, 33 bp, Homo sapien
gtggcagcgagaatgagaagtgtttattattgt

SEQ ID NO: 194395 - DNA, 33 bp, Homo sapien
taagggttgacttgagacagcgcttattgggaa

SEQ ID NO: 194396 - DNA, 33 bp, Homo sapien
taagggttgacttgaggcagcgcttattgggaa

SEQ ID NO: 194397 - DNA, 33 bp, Homo sapien
tgtgcccaggaccccaatgagaccacctctggg

SEQ ID NO: 194398 - DNA, 33 bp, Homo sapien
tgtgcccaggaccccagtgagaccacctctggg

SEQ ID NO: 194399 - DNA, 33 bp, Homo sapien
taaaaactctgggctaggtgcagtggttcacac

SEQ ID NO: 194400 - DNA, 33 bp, Homo sapien
taaaaactctgggctatgtgcagtggttcacac

SEQ ID NO: 194401 - DNA, 33 bp, Homo sapien
tgttcaccagattccacgtcatctgcctgtttc

SEQ ID NO: 194402 - DNA, 33 bp, Homo sapien
tgttcaccagattccaggtcatctgcctgtttc

SEQ ID NO: 194403 - DNA, 33 bp, Homo sapien
ccatgcatgctgtaaaagctcaattatttttgt

SEQ ID NO: 194404 - DNA, 33 bp, Homo sapien
ccatgcatgctgtaaaggctcaattatttttgt

SEQ ID NO: 194405 - DNA, 33 bp, Homo sapien
tatctagcccacaaaacatggtaccagttgaga

SEQ ID NO: 194406 - DNA, 33 bp, Homo sapien
tatctagcccacaaaatatggtaccagttgaga

SEQ ID NO: 194407 - DNA, 33 bp, Homo sapien
ctcctccttgagcacacagttgaagcttgcagg

SEQ ID NO: 194408 - DNA, 33 bp, Homo sapien
ctcctccttgagcacagagttgaagcttgcagg

SEQ ID NO: 194409 - DNA, 33 bp, Homo sapien
cgctcttccttctctcacttagctgtcagcagc

SEQ ID NO: 194410 - DNA, 33 bp, Homo sapien
cgctcttccttctctcccttagctgtcagcagc

SEQ ID NO: 194411 - DNA, 33 bp, Homo sapien
caacacagtccgtgggccatgttcctccatgca

SEQ ID NO: 194412 - DNA, 33 bp, Homo sapien
caacacagtccgtgggtcatgttcctccatgca

SEQ ID NO: 194413 - DNA, 33 bp, Homo sapien
ctggtggccttcctcacgccattcttgccacct

SEQ ID NO: 194414 - DNA, 33 bp, Homo sapien
ctggtggccttcctcatgccattcttgccacct

SEQ ID NO: 194415 - DNA, 33 bp, Homo sapien
ctaggccctgggagaccgcaagcactcagctcc

SEQ ID NO: 194416 - DNA, 33 bp, Homo sapien
ctaggccctgggagacggcaagcactcagctcc

SEQ ID NO: 194417 - DNA, 33 bp, Homo sapien
tctgaattaattgccccccgccttggctaccat

SEQ ID NO: 194418 - DNA, 33 bp, Homo sapien
tctgaattaattgccctccgccttggctaccat

SEQ ID NO: 194419 - DNA, 33 bp, Homo sapien
gcggctggagctctgcaagttaatgccctaatg

SEQ ID NO: 194420 - DNA, 33 bp, Homo sapien
gcggctggagctctgcgagttaatgccctaatg

SEQ ID NO: 194421 - DNA, 33 bp, Homo sapien
tggatgagtcgcttcacctcttggggccttgtt

SEQ ID NO: 194422 - DNA, 33 bp, Homo sapien
tggatgagtcgcttcatctcttggggccttgtt

SEQ ID NO: 194423 - DNA, 33 bp, Homo sapien
agctagacagggttcaagttcaaaccccagcac

SEQ ID NO: 194424 - DNA, 33 bp, Homo sapien
agctagacagggttcaggttcaaaccccagcac

SEQ ID NO: 194425 - DNA, 33 bp, Homo sapien
aggccacaaaaccctgaactccacaaagagagt

SEQ ID NO: 194426 - DNA, 33 bp, Homo sapien
aggccacaaaaccctggactccacaaagagagt

SEQ ID NO: 194427 - DNA, 33 bp, Homo sapien
ggctaaaggatagcacacaacatgaatagtgtt

SEQ ID NO: 194428 - DNA, 33 bp, Homo sapien
ggctaaaggatagcacgcaacatgaatagtgtt

SEQ ID NO: 194429 - DNA, 33 bp, Homo sapien
ggagtgatcacccacagatagaggccaagaccg

SEQ ID NO: 194430 - DNA, 33 bp, Homo sapien
ggagtgatcacccacatatagaggccaagaccg

SEQ ID NO: 194431 - DNA, 33 bp, Homo sapien
tggaaaatactcaaagacctatcaatggttgaa

SEQ ID NO: 194432 - DNA, 33 bp, Homo sapien
tggaaaatactcaaaggcctatcaatggttgaa

SEQ ID NO: 194433 - DNA, 33 bp, Homo sapien
taatgaaaaagtaagaataggccaacattgcac

SEQ ID NO: 194434 - DNA, 33 bp, Homo sapien
taatgaaaaagtaagagtaggccaacattgcac

SEQ ID NO: 194435 - DNA, 33 bp, Homo sapien
gaactgtgggaaataaccattgtttaagtcatc

SEQ ID NO: 194436 - DNA, 33 bp, Homo sapien
gaactgtgggaaataatcattgtttaagtcatc

SEQ ID NO: 194437 - DNA, 33 bp, Homo sapien
gatcatagcacatgtacatttggtgtcaggtga

SEQ ID NO: 194438 - DNA, 33 bp, Homo sapien
gatcatagcacatgtagatttggtgtcaggtga

SEQ ID NO: 194439 - DNA, 33 bp, Homo sapien
gacttcttttatagaagaagtctatgctctttt

SEQ ID NO: 194440 - DNA, 33 bp, Homo sapien
gacttcttttatagaataagtctatgctctttt

SEQ ID NO: 194441 - DNA, 33 bp, Homo sapien
ttctccttgaataactaactgttggaaacccca

SEQ ID NO: 194442 - DNA, 33 bp, Homo sapien
ttctccttgaataactgactgttggaaacccca

SEQ ID NO: 194443 - DNA, 33 bp, Homo sapien
gagggccggcattacacaagtactttcctggag

SEQ ID NO: 194444 - DNA, 33 bp, Homo sapien
gagggccggcattacataagtactttcctggag

SEQ ID NO: 194445 - DNA, 33 bp, Homo sapien
ctcaggactgggattcactccgcaggtgctggg

SEQ ID NO: 194446 - DNA, 33 bp, Homo sapien
ctcaggactgggattcgctccgcaggtgctggg

SEQ ID NO: 194447 - DNA, 33 bp, Homo sapien
ccaatacatagacacacgaaccagataaatggt

SEQ ID NO: 194448 - DNA, 33 bp, Homo sapien
ccaatacatagacacatgaaccagataaatggt

SEQ ID NO: 194449 - DNA, 33 bp, Homo sapien
catgaaaaatgcccaaagtgggacgaaaactca

SEQ ID NO: 194450 - DNA, 33 bp, Homo sapien
catgaaaaatgcccaacgtgggacgaaaactca

SEQ ID NO: 194451 - DNA, 33 bp, Homo sapien
ctatagaggggtataactggaggaaaggagacc

SEQ ID NO: 194452 - DNA, 33 bp, Homo sapien
ctatagaggggtataattggaggaaaggagacc

SEQ ID NO: 194453 - DNA, 33 bp, Homo sapien
ttgaaggcacaaagccggcaagaaccctctctg

SEQ ID NO: 194454 - DNA, 33 bp, Homo sapien
ttgaaggcacaaagcctgcaagaaccctctctg

SEQ ID NO: 194455 - DNA, 33 bp, Homo sapien
gatacaaccccataggaatagacagcatgtact

SEQ ID NO: 194456 - DNA, 33 bp, Homo sapien
gatacaaccccataggtatagacagcatgtact

SEQ ID NO: 194457 - DNA, 33 bp, Homo sapien
ttctcaggcaaatgtcaccagggtacccagact

SEQ ID NO: 194458 - DNA, 33 bp, Homo sapien
ttctcaggcaaatgtcgccagggtacccagact

SEQ ID NO: 194459 - DNA, 33 bp, Homo sapien
cagttccaccattccccacagcccactctgcac

SEQ ID NO: 194460 - DNA, 33 bp, Homo sapien
cagttccaccattccctacagcccactctgcac

SEQ ID NO: 194461 - DNA, 33 bp, Homo sapien
agtccttactgtgagcgagaagttcctaagtga

SEQ ID NO: 194462 - DNA, 33 bp, Homo sapien
agtccttactgtgagctagaagttcctaagtga

SEQ ID NO: 194463 - DNA, 33 bp, Homo sapien
tagagtcctcacagtacgtagagcagcacctgc

SEQ ID NO: 194464 - DNA, 33 bp, Homo sapien
tagagtcctcacagtatgtagagcagcacctgc

SEQ ID NO: 194465 - DNA, 33 bp, Homo sapien
aactgtatcattgctacacccaggtagtataac

SEQ ID NO: 194466 - DNA, 33 bp, Homo sapien
aactgtatcattgctatacccaggtagtataac

SEQ ID NO: 194467 - DNA, 33 bp, Homo sapien
aatatgtttcagagtacctttcaaggatatggc

SEQ ID NO: 194468 - DNA, 33 bp, Homo sapien
aatatgtttcagagtatctttcaaggatatggc

SEQ ID NO: 194469 - DNA, 33 bp, Homo sapien
gaatggcacctgttgcacctaagggtcatgtgg

SEQ ID NO: 194470 - DNA, 33 bp, Homo sapien
gaatggcacctgttgcgcctaagggtcatgtgg

SEQ ID NO: 194471 - DNA, 33 bp, Homo sapien
ctctacattcataacccatttttgtaaaaggga

SEQ ID NO: 194472 - DNA, 33 bp, Homo sapien
ctctacattcataacctatttttgtaaaaggga

SEQ ID NO: 194473 - DNA, 33 bp, Homo sapien
tttccttgaagttaagacaaccctgccagggcg

SEQ ID NO: 194474 - DNA, 33 bp, Homo sapien
tttccttgaagttaaggcaaccctgccagggcg

SEQ ID NO: 194475 - DNA, 33 bp, Homo sapien
tcttactacctgcatcaagccagaggccacaag

SEQ ID NO: 194476 - DNA, 33 bp, Homo sapien
tcttactacctgcatcgagccagaggccacaag

SEQ ID NO: 194477 - DNA, 33 bp, Homo sapien
gtggcacagccataaaacaaagcaagggaatga

SEQ ID NO: 194478 - DNA, 33 bp, Homo sapien
gtggcacagccataaagcaaagcaagggaatga

SEQ ID NO: 194479 - DNA, 33 bp, Homo sapien
tactgctctaggaaggcaggaaatgttgtaaga

SEQ ID NO: 194480 - DNA, 33 bp, Homo sapien
tactgctctaggaaggtaggaaatgttgtaaga

SEQ ID NO: 194481 - DNA, 33 bp, Homo sapien
agcatctggccccagcaaatgaccaagtgtttg

SEQ ID NO: 194482 - DNA, 33 bp, Homo sapien
agcatctggccccagcgaatgaccaagtgtttg

SEQ ID NO: 194483 - DNA, 33 bp, Homo sapien
tctcccaggattcacacagaagaaagttacatt

SEQ ID NO: 194484 - DNA, 33 bp, Homo sapien
tctcccaggattcacatagaagaaagttacatt

SEQ ID NO: 194485 - DNA, 33 bp, Homo sapien
ccaaagcaatgaggtgccaatggtaagttctca

SEQ ID NO: 194486 - DNA, 33 bp, Homo sapien
ccaaagcaatgaggtggcaatggtaagttctca

SEQ ID NO: 194487 - DNA, 33 bp, Homo sapien
ctgtttcaggactcacacagttatcccagggtt

SEQ ID NO: 194488 - DNA, 33 bp, Homo sapien
ctgtttcaggactcacgcagttatcccagggtt

SEQ ID NO: 194489 - DNA, 33 bp, Homo sapien
gtaaagacttggataacgctattctctctattt

SEQ ID NO: 194490 - DNA, 33 bp, Homo sapien
gtaaagacttggataatgctattctctctattt

SEQ ID NO: 194491 - DNA, 33 bp, Homo sapien
cccgagaactgtgctaggaggagggcgtgcctg

SEQ ID NO: 194492 - DNA, 33 bp, Homo sapien
cccgagaactgtgctatgaggagggcgtgcctg

SEQ ID NO: 194493 - DNA, 33 bp, Homo sapien
ttacagacctgtaataagctttccaacttccca

SEQ ID NO: 194494 - DNA, 33 bp, Homo sapien
ttacagacctgtaatatgctttccaacttccca

SEQ ID NO: 194495 - DNA, 33 bp, Homo sapien
ctcagatgagtgcttgaatagtagttttgtctt

SEQ ID NO: 194496 - DNA, 33 bp, Homo sapien
ctcagatgagtgcttggatagtagttttgtctt

SEQ ID NO: 194497 - DNA, 33 bp, Homo sapien
tttcagaaaacaagggcacgtgggcgatcttgg

SEQ ID NO: 194498 - DNA, 33 bp, Homo sapien
tttcagaaaacaagggtacgtgggcgatcttgg

SEQ ID NO: 194499 - DNA, 33 bp, Homo sapien
gtaaaaacaacaaaaaagaagaatcactgagca

SEQ ID NO: 194500 - DNA, 33 bp, Homo sapien
gtaaaaacaacaaaaaggaagaatcactgagca

SEQ ID NO: 194501 - DNA, 33 bp, Homo sapien
tccagagcaaggatccaagatagcacaaggcag

SEQ ID NO: 194502 - DNA, 33 bp, Homo sapien
tccagagcaaggatcccagatagcacaaggcag

SEQ ID NO: 194503 - DNA, 33 bp, Homo sapien
tcttctgtggtcaaaactggcattcaacaagtt

SEQ ID NO: 194504 - DNA, 33 bp, Homo sapien
tcttctgtggtcaaaagtggcattcaacaagtt

SEQ ID NO: 194505 - DNA, 33 bp, Homo sapien
aggaagtgcttcctaacggatgaaatgtgggag

SEQ ID NO: 194506 - DNA, 33 bp, Homo sapien
aggaagtgcttcctaatggatgaaatgtgggag

SEQ ID NO: 194507 - DNA, 33 bp, Homo sapien
atccatttcactgtgccctttcttagagagggg

SEQ ID NO: 194508 - DNA, 33 bp, Homo sapien
atccatttcactgtgctctttcttagagagggg

SEQ ID NO: 194509 - DNA, 33 bp, Homo sapien
gtgtggatcctttggaagcagtgccatgtgatg

SEQ ID NO: 194510 - DNA, 33 bp, Homo sapien
gtgtggatcctttggaggcagtgccatgtgatg

SEQ ID NO: 194511 - DNA, 33 bp, Homo sapien
gtaaaggtacatcaatcaccagactctctcctc

SEQ ID NO: 194512 - DNA, 33 bp, Homo sapien
gtaaaggtacatcaattaccagactctctcctc

SEQ ID NO: 194513 - DNA, 33 bp, Homo sapien
caatgtctttaccaaactggaagaccatagtgc

SEQ ID NO: 194514 - DNA, 33 bp, Homo sapien
caatgtctttaccaaattggaagaccatagtgc

SEQ ID NO: 194515 - DNA, 33 bp, Homo sapien
ggttttctatattccacgtcttctttcttgttt

SEQ ID NO: 194516 - DNA, 33 bp, Homo sapien
ggttttctatattccatgtcttctttcttgttt

SEQ ID NO: 194517 - DNA, 33 bp, Homo sapien
atccaatcagttagggccattaatagctaccaa

SEQ ID NO: 194518 - DNA, 33 bp, Homo sapien
atccaatcagttagggtcattaatagctaccaa

SEQ ID NO: 194519 - DNA, 33 bp, Homo sapien
gccatgcttgccattacctgctctgagaagaca

SEQ ID NO: 194520 - DNA, 33 bp, Homo sapien
gccatgcttgccattatctgctctgagaagaca

SEQ ID NO: 194521 - DNA, 33 bp, Homo sapien
tttaactgatcattgaactcaggcccattcaaa

SEQ ID NO: 194522 - DNA, 33 bp, Homo sapien
tttaactgatcattgagctcaggcccattcaaa

SEQ ID NO: 194523 - DNA, 33 bp, Homo sapien
tgcttctgtctgcaaccggcattgaaacataat

SEQ ID NO: 194524 - DNA, 33 bp, Homo sapien
tgcttctgtctgcaactggcattgaaacataat

SEQ ID NO: 194525 - DNA, 33 bp, Homo sapien
taggatacagtaagaagggccagatatcaccta

SEQ ID NO: 194526 - DNA, 33 bp, Homo sapien
taggatacagtaagaatggccagatatcaccta

SEQ ID NO: 194527 - DNA, 33 bp, Homo sapien
gttgttatcactttaacggagtgatcaaactta

SEQ ID NO: 194528 - DNA, 33 bp, Homo sapien
gttgttatcactttaatggagtgatcaaactta

SEQ ID NO: 194529 - DNA, 33 bp, Homo sapien
cctttggagtctaagccattggttccaacctcc

SEQ ID NO: 194530 - DNA, 33 bp, Homo sapien
cctttggagtctaagctattggttccaacctcc

SEQ ID NO: 194531 - DNA, 33 bp, Homo sapien
gtacgtagaatgcatgcataaaggaataattat

SEQ ID NO: 194532 - DNA, 33 bp, Homo sapien
gtacgtagaatgcatgtataaaggaataattat

SEQ ID NO: 194533 - DNA, 33 bp, Homo sapien
aactgaagccccttccaaacagctagcaccaac

SEQ ID NO: 194534 - DNA, 33 bp, Homo sapien
aactgaagccccttccgaacagctagcaccaac

SEQ ID NO: 194535 - DNA, 33 bp, Homo sapien
acaatgccctttatgacctagacttagaagtga

SEQ ID NO: 194536 - DNA, 33 bp, Homo sapien
acaatgccctttatgatctagacttagaagtga

SEQ ID NO: 194537 - DNA, 33 bp, Homo sapien
gttagccacgtcttacccctgcaaggctcacct

SEQ ID NO: 194538 - DNA, 33 bp, Homo sapien
gttagccacgtcttactcctgcaaggctcacct

SEQ ID NO: 194539 - DNA, 33 bp, Homo sapien
gaggagactgagtcacaaatgacacctcagccg

SEQ ID NO: 194540 - DNA, 33 bp, Homo sapien
gaggagactgagtcacgaatgacacctcagccg

SEQ ID NO: 194541 - DNA, 33 bp, Homo sapien
ttcaacgtggcggggacgtgacctgttaatgaa

SEQ ID NO: 194542 - DNA, 33 bp, Homo sapien
ttcaacgtggcggggatgtgacctgttaatgaa

SEQ ID NO: 194543 - DNA, 33 bp, Homo sapien
tcctgttgccataggaaggagctgggtgagata

SEQ ID NO: 194544 - DNA, 33 bp, Homo sapien
tcctgttgccataggagggagctgggtgagata

SEQ ID NO: 194545 - DNA, 33 bp, Homo sapien
ggccacagttttttgacctgaagagtggagccc

SEQ ID NO: 194546 - DNA, 33 bp, Homo sapien
ggccacagttttttgatctgaagagtggagccc

SEQ ID NO: 194547 - DNA, 33 bp, Homo sapien
gaaaacatgtctgtcccagccaagatcatatga

SEQ ID NO: 194548 - DNA, 33 bp, Homo sapien
gaaaacatgtctgtcctagccaagatcatatga

SEQ ID NO: 194549 - DNA, 33 bp, Homo sapien
gggaaaagtgcacaaacggacacaatgcacgcc

SEQ ID NO: 194550 - DNA, 33 bp, Homo sapien
gggaaaagtgcacaaatggacacaatgcacgcc

SEQ ID NO: 194551 - DNA, 33 bp, Homo sapien
cacagcacctacagtacagtcttgtgcaacaca

SEQ ID NO: 194552 - DNA, 33 bp, Homo sapien
cacagcacctacagtagagtcttgtgcaacaca

SEQ ID NO: 194553 - DNA, 33 bp, Homo sapien
cagaggtccatggccacactagctaggatcact

SEQ ID NO: 194554 - DNA, 33 bp, Homo sapien
cagaggtccatggccagactagctaggatcact

SEQ ID NO: 194555 - DNA, 33 bp, Homo sapien
gaaaatcctgtataacccaggagtctagaaaag

SEQ ID NO: 194556 - DNA, 33 bp, Homo sapien
gaaaatcctgtataactcaggagtctagaaaag

SEQ ID NO: 194557 - DNA, 33 bp, Homo sapien
aaaaaaaatctctgaacgtgactatcatatgaa

SEQ ID NO: 194558 - DNA, 33 bp, Homo sapien
aaaaaaaatctctgaatgtgactatcatatgaa

SEQ ID NO: 194559 - DNA, 33 bp, Homo sapien
tccctggcatacctggcatggccatagtggttt

SEQ ID NO: 194560 - DNA, 33 bp, Homo sapien
tccctggcatacctgggatggccatagtggttt

SEQ ID NO: 194561 - DNA, 33 bp, Homo sapien
ttcttcaaaactcagggaacttgaatttctgat

SEQ ID NO: 194562 - DNA, 33 bp, Homo sapien
ttcttcaaaactcaggtaacttgaatttctgat

SEQ ID NO: 194563 - DNA, 33 bp, Homo sapien
taacattgagaagaaaatgataaataaggctag

SEQ ID NO: 194564 - DNA, 33 bp, Homo sapien
taacattgagaagaaagtgataaataaggctag

SEQ ID NO: 194565 - DNA, 33 bp, Homo sapien
gactgcagtaagatccaactcataaaaaataag

SEQ ID NO: 194566 - DNA, 33 bp, Homo sapien
gactgcagtaagatccgactcataaaaaataag

SEQ ID NO: 194567 - DNA, 33 bp, Homo sapien
gctaaatcttggcatccctaccctttaggccag

SEQ ID NO: 194568 - DNA, 33 bp, Homo sapien
gctaaatcttggcatctctaccctttaggccag

SEQ ID NO: 194569 - DNA, 33 bp, Homo sapien
tagtaaaacaaacactaaatttgaatactgacc

SEQ ID NO: 194570 - DNA, 33 bp, Homo sapien
tagtaaaacaaacactgaatttgaatactgacc

SEQ ID NO: 194571 - DNA, 33 bp, Homo sapien
tggaaaaatttaacacagaaaatagatacaaga

SEQ ID NO: 194572 - DNA, 33 bp, Homo sapien
tggaaaaatttaacaccgaaaatagatacaaga

SEQ ID NO: 194573 - DNA, 33 bp, Homo sapien
atactccatcactaaactcctgggataactgag

SEQ ID NO: 194574 - DNA, 33 bp, Homo sapien
atactccatcactaaattcctgggataactgag

SEQ ID NO: 194575 - DNA, 33 bp, Homo sapien
taggcttctgcttatcagaccatatgtcttagt

SEQ ID NO: 194576 - DNA, 33 bp, Homo sapien
taggcttctgcttatcggaccatatgtcttagt

SEQ ID NO: 194577 - DNA, 33 bp, Homo sapien
gaaaccgtaggctaaacagggtgcaccttcctg

SEQ ID NO: 194578 - DNA, 33 bp, Homo sapien
gaaaccgtaggctaaatagggtgcaccttcctg

SEQ ID NO: 194579 - DNA, 33 bp, Homo sapien
accattaccaagaagcggctctaaataaccttc

SEQ ID NO: 194580 - DNA, 33 bp, Homo sapien
accattaccaagaagctgctctaaataaccttc

SEQ ID NO: 194581 - DNA, 33 bp, Homo sapien
ctaaccagtttctcaactctgtttgtaacatta

SEQ ID NO: 194582 - DNA, 33 bp, Homo sapien
ctaaccagtttctcaattctgtttgtaacatta

SEQ ID NO: 194583 - DNA, 33 bp, Homo sapien
attagctatttggcaaaatcagagcagagttca

SEQ ID NO: 194584 - DNA, 33 bp, Homo sapien
attagctatttggcaacatcagagcagagttca

SEQ ID NO: 194585 - DNA, 33 bp, Homo sapien
ggctgccaacacattgcaatttgagaagcatcc

SEQ ID NO: 194586 - DNA, 33 bp, Homo sapien
ggctgccaacacattgtaatttgagaagcatcc

SEQ ID NO: 194587 - DNA, 33 bp, Homo sapien
attttaagtatttcaccgaggaagtttagattt

SEQ ID NO: 194588 - DNA, 33 bp, Homo sapien
attttaagtatttcactgaggaagtttagattt

SEQ ID NO: 194589 - DNA, 33 bp, Homo sapien
ctcttcctagaacaaagagcttggtcttaatag

SEQ ID NO: 194590 - DNA, 33 bp, Homo sapien
ctcttcctagaacaaatagcttggtcttaatag

SEQ ID NO: 194591 - DNA, 33 bp, Homo sapien
aatgggttacaagcaacaatggatcacctccaa

SEQ ID NO: 194592 - DNA, 33 bp, Homo sapien
aatgggttacaagcaataatggatcacctccaa

SEQ ID NO: 194593 - DNA, 33 bp, Homo sapien
taacctgaaggtcacccgcttttccccagttac

SEQ ID NO: 194594 - DNA, 33 bp, Homo sapien
taacctgaaggtcaccggcttttccccagttac

SEQ ID NO: 194595 - DNA, 33 bp, Homo sapien
ggaagtcattagatgcacatgcttttgatagca

SEQ ID NO: 194596 - DNA, 33 bp, Homo sapien
ggaagtcattagatgcgcatgcttttgatagca

SEQ ID NO: 194597 - DNA, 33 bp, Homo sapien
atcaaaatggtttccacataaagaacactttgg

SEQ ID NO: 194598 - DNA, 33 bp, Homo sapien
atcaaaatggtttccatataaagaacactttgg

SEQ ID NO: 194599 - DNA, 33 bp, Homo sapien
ccgcacccggcttgcagatagtaattcttaatc

SEQ ID NO: 194600 - DNA, 33 bp, Homo sapien
ccgcacccggcttgcatatagtaattcttaatc

SEQ ID NO: 194601 - DNA, 33 bp, Homo sapien
aaattgattttcttccaatagcccgcatctgaa

SEQ ID NO: 194602 - DNA, 33 bp, Homo sapien
aaattgattttcttccgatagcccgcatctgaa

SEQ ID NO: 194603 - DNA, 33 bp, Homo sapien
atatttttaatttggaagtccacagtagtggga

SEQ ID NO: 194604 - DNA, 33 bp, Homo sapien
atatttttaatttggatgtccacagtagtggga

SEQ ID NO: 194605 - DNA, 33 bp, Homo sapien
aacagccacctccacaatattacctttgtgtcc

SEQ ID NO: 194606 - DNA, 33 bp, Homo sapien
aacagccacctccacagtattacctttgtgtcc

SEQ ID NO: 194607 - DNA, 33 bp, Homo sapien
tttctatcaagaaggaactctttttgcttccag

SEQ ID NO: 194608 - DNA, 33 bp, Homo sapien
tttctatcaagaaggatctctttttgcttccag

SEQ ID NO: 194609 - DNA, 33 bp, Homo sapien
ccattggcagattgtacaaaacacaaatgacaa

SEQ ID NO: 194610 - DNA, 33 bp, Homo sapien
ccattggcagattgtagaaaacacaaatgacaa

SEQ ID NO: 194611 - DNA, 33 bp, Homo sapien
tgacgtggtgagtcaactgcacagtcagacctg

SEQ ID NO: 194612 - DNA, 33 bp, Homo sapien
tgacgtggtgagtcaagtgcacagtcagacctg

SEQ ID NO: 194613 - DNA, 33 bp, Homo sapien
gcagttgtgacccaacagttaagtatttgtgta

SEQ ID NO: 194614 - DNA, 33 bp, Homo sapien
gcagttgtgacccaacggttaagtatttgtgta

SEQ ID NO: 194615 - DNA, 33 bp, Homo sapien
aacctttgtatgagcccattagctgcctcagct

SEQ ID NO: 194616 - DNA, 33 bp, Homo sapien
aacctttgtatgagcctattagctgcctcagct

SEQ ID NO: 194617 - DNA, 33 bp, Homo sapien
ctcttctataagcacaatcagaatggtcagaat

SEQ ID NO: 194618 - DNA, 33 bp, Homo sapien
ctcttctataagcacagtcagaatggtcagaat

SEQ ID NO: 194619 - DNA, 33 bp, Homo sapien
gccccgtcctcagtaccaacacctattcctgac

SEQ ID NO: 194620 - DNA, 33 bp, Homo sapien
gccccgtcctcagtactaacacctattcctgac

SEQ ID NO: 194621 - DNA, 33 bp, Homo sapien
agaaaagagcgtagaacatatatttgagacaga

SEQ ID NO: 194622 - DNA, 33 bp, Homo sapien
agaaaagagcgtagaagatatatttgagacaga

SEQ ID NO: 194623 - DNA, 33 bp, Homo sapien
ctcctttaacgttttacacttccaggtgtcaac

SEQ ID NO: 194624 - DNA, 33 bp, Homo sapien
ctcctttaacgttttatacttccaggtgtcaac

SEQ ID NO: 194625 - DNA, 33 bp, Homo sapien
ccctatgagttgtataagtgggtaaataagtag

SEQ ID NO: 194626 - DNA, 33 bp, Homo sapien
ccctatgagttgtataggtgggtaaataagtag

SEQ ID NO: 194627 - DNA, 33 bp, Homo sapien
ccttagtgataacccagtcacattttcagatag

SEQ ID NO: 194628 - DNA, 33 bp, Homo sapien
ccttagtgataacccattcacattttcagatag

SEQ ID NO: 194629 - DNA, 33 bp, Homo sapien
aggcacttagcatacaacaattaagatggaagt

SEQ ID NO: 194630 - DNA, 33 bp, Homo sapien
aggcacttagcatacagcaattaagatggaagt

SEQ ID NO: 194631 - DNA, 33 bp, Homo sapien
atgaatcagcttcacacgtccttgtctctctac

SEQ ID NO: 194632 - DNA, 33 bp, Homo sapien
atgaatcagcttcacaggtccttgtctctctac

SEQ ID NO: 194633 - DNA, 33 bp, Homo sapien
agtagtatggtaagccaaagagtggtagttctg

SEQ ID NO: 194634 - DNA, 33 bp, Homo sapien
agtagtatggtaagccgaagagtggtagttctg

SEQ ID NO: 194635 - DNA, 33 bp, Homo sapien
tggtaaattggtaaataacagttgttctgaaag

SEQ ID NO: 194636 - DNA, 33 bp, Homo sapien
tggtaaattggtaaatgacagttgttctgaaag

SEQ ID NO: 194637 - DNA, 33 bp, Homo sapien
gcaagaagcagaaagacagaagaaatcctgcag

SEQ ID NO: 194638 - DNA, 33 bp, Homo sapien
gcaagaagcagaaagagagaagaaatcctgcag

SEQ ID NO: 194639 - DNA, 33 bp, Homo sapien
ttgctttttcagaaaaaggtgagttggtaatga

SEQ ID NO: 194640 - DNA, 33 bp, Homo sapien
ttgctttttcagaaaagggtgagttggtaatga

SEQ ID NO: 194641 - DNA, 33 bp, Homo sapien
tattaagaggtgtgatcatagcgtactgcagcg

SEQ ID NO: 194642 - DNA, 33 bp, Homo sapien
tattaagaggtgtgattatagcgtactgcagcg

SEQ ID NO: 194643 - DNA, 33 bp, Homo sapien
actgcagttgactgaaacctgatgcaaaagtca

SEQ ID NO: 194644 - DNA, 33 bp, Homo sapien
actgcagttgactgaagcctgatgcaaaagtca

SEQ ID NO: 194645 - DNA, 33 bp, Homo sapien
tgttgaagatgactcaagtatggctaggtgtgt

SEQ ID NO: 194646 - DNA, 33 bp, Homo sapien
tgttgaagatgactcaggtatggctaggtgtgt

SEQ ID NO: 194647 - DNA, 33 bp, Homo sapien
atgtagctccactctaagcctgaaggtctgaga

SEQ ID NO: 194648 - DNA, 33 bp, Homo sapien
atgtagctccactctaggcctgaaggtctgaga

SEQ ID NO: 194649 - DNA, 33 bp, Homo sapien
aaagaagaggtcaacgaaagtatgataaactgc

SEQ ID NO: 194650 - DNA, 33 bp, Homo sapien
aaagaagaggtcaacggaagtatgataaactgc

SEQ ID NO: 194651 - DNA, 33 bp, Homo sapien
cattctaatcttctctaaaacataaaaaatttc

SEQ ID NO: 194652 - DNA, 33 bp, Homo sapien
cattctaatcttctctgaaacataaaaaatttc

SEQ ID NO: 194653 - DNA, 33 bp, Homo sapien
aacagcaatacacagaatctatagcacagaaca

SEQ ID NO: 194654 - DNA, 33 bp, Homo sapien
aacagcaatacacagactctatagcacagaaca

SEQ ID NO: 194655 - DNA, 33 bp, Homo sapien
cttccacattactaccacttccacttgttctgg

SEQ ID NO: 194656 - DNA, 33 bp, Homo sapien
cttccacattactacctcttccacttgttctgg

SEQ ID NO: 194657 - DNA, 33 bp, Homo sapien
aaataaattaggggacagattctcatgttggtt

SEQ ID NO: 194658 - DNA, 33 bp, Homo sapien
aaataaattaggggacggattctcatgttggtt

SEQ ID NO: 194659 - DNA, 33 bp, Homo sapien
atttggtgcttagaaacaattgtcccagacata

SEQ ID NO: 194660 - DNA, 33 bp, Homo sapien
atttggtgcttagaaagaattgtcccagacata

SEQ ID NO: 194661 - DNA, 33 bp, Homo sapien
tggtacaactctcatacatatcaggggactcaa

SEQ ID NO: 194662 - DNA, 33 bp, Homo sapien
tggtacaactctcatatatatcaggggactcaa

SEQ ID NO: 194663 - DNA, 33 bp, Homo sapien
ctgaataaataatccacgtaagagaggcaccct

SEQ ID NO: 194664 - DNA, 33 bp, Homo sapien
ctgaataaataatccatgtaagagaggcaccct

SEQ ID NO: 194665 - DNA, 33 bp, Homo sapien
tctgacatctcctgaaaacagggacaacttggt

SEQ ID NO: 194666 - DNA, 33 bp, Homo sapien
tctgacatctcctgaagacagggacaacttggt

SEQ ID NO: 194667 - DNA, 33 bp, Homo sapien
caaggcgcactttttccaggaagctttcctgga

SEQ ID NO: 194668 - DNA, 33 bp, Homo sapien
caaggcgcactttttctaggaagctttcctgga

SEQ ID NO: 194669 - DNA, 33 bp, Homo sapien
ccccttcccgatctaacaaatggcctttggtta

SEQ ID NO: 194670 - DNA, 33 bp, Homo sapien
ccccttcccgatctaagaaatggcctttggtta

SEQ ID NO: 194671 - DNA, 33 bp, Homo sapien
agggtggttccctttcaaagttgctattccaaa

SEQ ID NO: 194672 - DNA, 33 bp, Homo sapien
agggtggttccctttcgaagttgctattccaaa

SEQ ID NO: 194673 - DNA, 33 bp, Homo sapien
actggtttatgaagtacgtggcccccagggagc

SEQ ID NO: 194674 - DNA, 33 bp, Homo sapien
actggtttatgaagtatgtggcccccagggagc

SEQ ID NO: 194675 - DNA, 33 bp, Homo sapien
ctggcagcaatcctccaccatttgtatcttaag

SEQ ID NO: 194676 - DNA, 33 bp, Homo sapien
ctggcagcaatcctccgccatttgtatcttaag

SEQ ID NO: 194677 - DNA, 33 bp, Homo sapien; identical to SEQ ID NO: 194675

SEQ ID NO: 194678 - DNA, 33 bp, Homo sapien; identical to SEQ ID NO: 194676

SEQ ID NO: 194679 - DNA, 33 bp, Homo sapien
ccttgattttacagacacagtagctcagagagg

SEQ ID NO: 194680 - DNA, 33 bp, Homo sapien
ccttgattttacagacgcagtagctcagagagg

SEQ ID NO: 194681 - DNA, 33 bp, Homo sapien
cagctcggtgatctccagatgatggcttgaagg

SEQ ID NO: 194682 - DNA, 33 bp, Homo sapien
cagctcggtgatctccggatgatggcttgaagg

SEQ ID NO: 194683 - DNA, 33 bp, Homo sapien
ctcttcatacagtcccaggagaactgctgcaag

SEQ ID NO: 194684 - DNA, 33 bp, Homo sapien
ctcttcatacagtcccgggagaactgctgcaag

SEQ ID NO: 194685 - DNA, 33 bp, Homo sapien
gttcttctagtagttaggttgaaagtattatat

SEQ ID NO: 194686 - DNA, 33 bp, Homo sapien
gttcttctagtagttatgttgaaagtattatat

SEQ ID NO: 194687 - DNA, 33 bp, Homo sapien
tctaagtgaaagtaacaagaatgatgataaaga

SEQ ID NO: 194688 - DNA, 33 bp, Homo sapien
tctaagtgaaagtaaccagaatgatgataaaga

SEQ ID NO: 194689 - DNA, 33 bp, Homo sapien
aattcaatcagatggaaaaggtagtagagttac

SEQ ID NO: 194690 - DNA, 33 bp, Homo sapien
aattcaatcagatggacaaggtagtagagttac

SEQ ID NO: 194691 - DNA, 33 bp, Homo sapien
tgtcttatctgtcttacacgttttaacttaaat

SEQ ID NO: 194692 - DNA, 33 bp, Homo sapien
tgtcttatctgtcttatacgttttaacttaaat

SEQ ID NO: 194693 - DNA, 33 bp, Homo sapien
aggtcatacctagagacataaatgtgaaagagg

SEQ ID NO: 194694 - DNA, 33 bp, Homo sapien
aggtcatacctagagatataaatgtgaaagagg

SEQ ID NO: 194695 - DNA, 33 bp, Homo sapien
gaggacacccagcctaaagtgcgcagcagagag

SEQ ID NO: 194696 - DNA, 33 bp, Homo sapien
gaggacacccagcctacagtgcgcagcagagag

SEQ ID NO: 194697 - DNA, 33 bp, Homo sapien
aaggatctcaggatacaggggcctgaaagagga

SEQ ID NO: 194698 - DNA, 33 bp, Homo sapien
aaggatctcaggatacgggggcctgaaagagga

SEQ ID NO: 194699 - DNA, 33 bp, Homo sapien
agcagagactggctgacgcaggcttagttagaa

SEQ ID NO: 194700 - DNA, 33 bp, Homo sapien
agcagagactggctgatgcaggcttagttagaa

SEQ ID NO: 194701 - DNA, 33 bp, Homo sapien
tgcagttggtattcaccggtgtgaccctagtac

SEQ ID NO: 194702 - DNA, 33 bp, Homo sapien
tgcagttggtattcactggtgtgaccctagtac

SEQ ID NO: 194703 - DNA, 33 bp, Homo sapien
agtggtaatgagcaaaagctttggaacattctt

SEQ ID NO: 194704 - DNA, 33 bp, Homo sapien
agtggtaatgagcaaaggctttggaacattctt

SEQ ID NO: 194705 - DNA, 33 bp, Homo sapien
ctttaccttctccagtcaatcttttctgtggtc

SEQ ID NO: 194706 - DNA, 33 bp, Homo sapien
ctttaccttctccagtgaatcttttctgtggtc

SEQ ID NO: 194707 - DNA, 33 bp, Homo sapien
cttctgctcatctgggaacaccctaggattctc

SEQ ID NO: 194708 - DNA, 33 bp, Homo sapien
cttctgctcatctggggacaccctaggattctc

SEQ ID NO: 194709 - DNA, 33 bp, Homo sapien
tcagaagctaggaagacccgcagtagttttggt

SEQ ID NO: 194710 - DNA, 33 bp, Homo sapien
tcagaagctaggaagatccgcagtagttttggt

SEQ ID NO: 194711 - DNA, 33 bp, Homo sapien
aagtaaaaatcctagtaacaccaaaataaccag

SEQ ID NO: 194712 - DNA, 33 bp, Homo sapien
aagtaaaaatcctagtgacaccaaaataaccag

SEQ ID NO: 194713 - DNA, 33 bp, Homo sapien
ggtgacatgttccaacagttatgtcatttatct

SEQ ID NO: 194714 - DNA, 33 bp, Homo sapien
ggtgacatgttccaacggttatgtcatttatct

SEQ ID NO: 194715 - DNA, 33 bp, Homo sapien
gcacccagccacaacaaaagtattagggtccat

SEQ ID NO: 194716 - DNA, 33 bp, Homo sapien
gcacccagccacaacagaagtattagggtccat

SEQ ID NO: 194717 - DNA, 33 bp, Homo sapien
acatgtcttcattacaacacgtgtcacctgggt

SEQ ID NO: 194718 - DNA, 33 bp, Homo sapien
acatgtcttcattacagcacgtgtcacctgggt

SEQ ID NO: 194719 - DNA, 33 bp, Homo sapien
tatcccaaactggtccgcaggtatcttaggggt

SEQ ID NO: 194720 - DNA, 33 bp, Homo sapien
tatcccaaactggtcctcaggtatcttaggggt

SEQ ID NO: 194721 - DNA, 33 bp, Homo sapien
attgacttcagtatgacaaaagaaagtataaac

SEQ ID NO: 194722 - DNA, 33 bp, Homo sapien
attgacttcagtatgagaaaagaaagtataaac

SEQ ID NO: 194723 - DNA, 33 bp, Homo sapien
gaaaacagggctctaccacaaactacagtctga

SEQ ID NO: 194724 - DNA, 33 bp, Homo sapien
gaaaacagggctctactacaaactacagtctga

SEQ ID NO: 194725 - DNA, 33 bp, Homo sapien
ttgatctctgagacccaagtctgactgagccat

SEQ ID NO: 194726 - DNA, 33 bp, Homo sapien
ttgatctctgagacccgagtctgactgagccat

SEQ ID NO: 194727 - DNA, 33 bp, Homo sapien
agttttaattagcccaatggcagtaagtctatc

SEQ ID NO: 194728 - DNA, 33 bp, Homo sapien
agttttaattagcccagtggcagtaagtctatc

SEQ ID NO: 194729 - DNA, 33 bp, Homo sapien
tcttctggtagatgaggatttgtctctgctttc

SEQ ID NO: 194730 - DNA, 33 bp, Homo sapien
tcttctggtagatgagtatttgtctctgctttc

SEQ ID NO: 194731 - DNA, 33 bp, Homo sapien
ttgagtcttcagaacaaggaatcaggaagtctt

SEQ ID NO: 194732 - DNA, 33 bp, Homo sapien
ttgagtcttcagaacagggaatcaggaagtctt

SEQ ID NO: 194733 - DNA, 33 bp, Homo sapien
cccagcaatagcgagcagcagatccagctggtg

SEQ ID NO: 194734 - DNA, 33 bp, Homo sapien
cccagcaatagcgagcggcagatccagctggtg

SEQ ID NO: 194735 - DNA, 33 bp, Homo sapien
agccacatgtcttatacatgcattaattgggct

SEQ ID NO: 194736 - DNA, 33 bp, Homo sapien
agccacatgtcttatatatgcattaattgggct

SEQ ID NO: 194737 - DNA, 33 bp, Homo sapien
caagccgtgatatctacgaaaggttatcttatt

SEQ ID NO: 194738 - DNA, 33 bp, Homo sapien
caagccgtgatatctatgaaaggttatcttatt

SEQ ID NO: 194739 - DNA, 33 bp, Homo sapien
tcagctgatgtggctaaaacagagtctgtcgga

SEQ ID NO: 194740 - DNA, 33 bp, Homo sapien
tcagctgatgtggctagaacagagtctgtcgga

SEQ ID NO: 194741 - DNA, 33 bp, Homo sapien
gtagcaacagaatttccaggagagcaaaccaag

SEQ ID NO: 194742 - DNA, 33 bp, Homo sapien
gtagcaacagaatttctaggagagcaaaccaag

SEQ ID NO: 194743 - DNA, 33 bp, Homo sapien
ctttctcatcattccaaaaagaaactttgtacc

SEQ ID NO: 194744 - DNA, 33 bp, Homo sapien
ctttctcatcattccagaaagaaactttgtacc

SEQ ID NO: 194745 - DNA, 33 bp, Homo sapien
catagaagcatcttccgaatagcaactcatccc

SEQ ID NO: 194746 - DNA, 33 bp, Homo sapien
catagaagcatcttcctaatagcaactcatccc

SEQ ID NO: 194747 - DNA, 33 bp, Homo sapien
catgaagggcagaacacctttcattcttgaaaa

SEQ ID NO: 194748 - DNA, 33 bp, Homo sapien
catgaagggcagaacatctttcattcttgaaaa

SEQ ID NO: 194749 - DNA, 33 bp, Homo sapien
cgtctggagacctcaactgcagatttactaact

SEQ ID NO: 194750 - DNA, 33 bp, Homo sapien
cgtctggagacctcaattgcagatttactaact

SEQ ID NO: 194751 - DNA, 33 bp, Homo sapien
gagcctcaccttgcaccagaaggttgacgatga

SEQ ID NO: 194752 - DNA, 33 bp, Homo sapien
gagcctcaccttgcactagaaggttgacgatga

SEQ ID NO: 194753 - DNA, 33 bp, Homo sapien
aacccagatactgggcactttccttttaacctg

SEQ ID NO: 194754 - DNA, 33 bp, Homo sapien
aacccagatactgggcgctttccttttaacctg

SEQ ID NO: 194755 - DNA, 33 bp, Homo sapien
aggggagaaaactgaggccttcagagtgaaagc

SEQ ID NO: 194756 - DNA, 33 bp, Homo sapien
aggggagaaaactgagtccttcagagtgaaagc

SEQ ID NO: 194757 - DNA, 33 bp, Homo sapien
agaagaggtgtgacaaacgactggcacacagca

SEQ ID NO: 194758 - DNA, 33 bp, Homo sapien
agaagaggtgtgacaagcgactggcacacagca

SEQ ID NO: 194759 - DNA, 33 bp, Homo sapien
cacctgtgaaacaactaaatgatggagctggta

SEQ ID NO: 194760 - DNA, 33 bp, Homo sapien
cacctgtgaaacaactgaatgatggagctggta

SEQ ID NO: 194761 - DNA, 33 bp, Homo sapien
gaggacaggcatcccaaactgtggaaatgctcc

SEQ ID NO: 194762 - DNA, 33 bp, Homo sapien
gaggacaggcatcccatactgtggaaatgctcc

SEQ ID NO: 194763 - DNA, 33 bp, Homo sapien
accaggaatgtgctacccagagagcaaggaacc

SEQ ID NO: 194764 - DNA, 33 bp, Homo sapien
accaggaatgtgctacgcagagagcaaggaacc

SEQ ID NO: 194765 - DNA, 33 bp, Homo sapien
ttggcacaaaatcaaacctacttccaaccttat

SEQ ID NO: 194766 - DNA, 33 bp, Homo sapien
ttggcacaaaatcaaatctacttccaaccttat

SEQ ID NO: 194767 - DNA, 33 bp, Homo sapien
tattacatgataacaaaagaaaacatagcaaga

SEQ ID NO: 194768 - DNA, 33 bp, Homo sapien
tattacatgataacaagagaaaacatagcaaga

SEQ ID NO: 194769 - DNA, 33 bp, Homo sapien
ttagagatgcagaatgaatgtgcttcctgagcc

SEQ ID NO: 194770 - DNA, 33 bp, Homo sapien
ttagagatgcagaatggatgtgcttcctgagcc

SEQ ID NO: 194771 - DNA, 33 bp, Homo sapien
aaatagcaccatccacacaaatctatcagatgg

SEQ ID NO: 194772 - DNA, 33 bp, Homo sapien
aaatagcaccatccacgcaaatctatcagatgg

SEQ ID NO: 194773 - DNA, 33 bp, Homo sapien
ccagccacatggtagacgctcagcaagtgttgg

SEQ ID NO: 194774 - DNA, 33 bp, Homo sapien
ccagccacatggtagatgctcagcaagtgttgg

SEQ ID NO: 194775 - DNA, 33 bp, Homo sapien
caaattcaaaaggtacaaaggatccagagtgag

SEQ ID NO: 194776 - DNA, 33 bp, Homo sapien
caaattcaaaaggtacgaaggatccagagtgag

SEQ ID NO: 194777 - DNA, 33 bp, Homo sapien
caggttgtgcactgctcaaaagtacatagcctc

SEQ ID NO: 194778 - DNA, 33 bp, Homo sapien
caggttgtgcactgctgaaaagtacatagcctc

SEQ ID NO: 194779 - DNA, 33 bp, Homo sapien
tggcgaggatggaaaacaaaatgacttctgacc

SEQ ID NO: 194780 - DNA, 33 bp, Homo sapien
tggcgaggatggaaaagaaaatgacttctgacc

SEQ ID NO: 194781 - DNA, 33 bp, Homo sapien
gcagaagagcatcttaaaagaggatgggttgca

SEQ ID NO: 194782 - DNA, 33 bp, Homo sapien
gcagaagagcatcttacaagaggatgggttgca

SEQ ID NO: 194783 - DNA, 33 bp, Homo sapien
aattatgagtcctagaaagctgagaaatcgcat

SEQ ID NO: 194784 - DNA, 33 bp, Homo sapien
aattatgagtcctagagagctgagaaatcgcat

SEQ ID NO: 194785 - DNA, 33 bp, Homo sapien
ttcttggttaatgttaggaacagataacctgag

SEQ ID NO: 194786 - DNA, 33 bp, Homo sapien
ttcttggttaatgttatgaacagataacctgag

SEQ ID NO: 194787 - DNA, 33 bp, Homo sapien
cagttgaggccctcaaactcgccaggccttact

SEQ ID NO: 194788 - DNA, 33 bp, Homo sapien
cagttgaggccctcaatctcgccaggccttact

SEQ ID NO: 194789 - DNA, 33 bp, Homo sapien
ccctggagggactgccactacacataacaaagc

SEQ ID NO: 194790 - DNA, 33 bp, Homo sapien
ccctggagggactgccgctacacataacaaagc

SEQ ID NO: 194791 - DNA, 33 bp, Homo sapien
ttcatagatgaaacgacggagactaagagagta

SEQ ID NO: 194792 - DNA, 33 bp, Homo sapien
ttcatagatgaaacgatggagactaagagagta

SEQ ID NO: 194793 - DNA, 33 bp, Homo sapien
tcctcccacctcaacaccggaaagttctgggtt

SEQ ID NO: 194794 - DNA, 33 bp, Homo sapien
tcctcccacctcaacatcggaaagttctgggtt

SEQ ID NO: 194795 - DNA, 33 bp, Homo sapien
tcagactcttgatgccagagctagaaggaactt

SEQ ID NO: 194796 - DNA, 33 bp, Homo sapien
tcagactcttgatgccggagctagaaggaactt

SEQ ID NO: 194797 - DNA, 33 bp, Homo sapien
tccccaggctgctgaaacataaatgtctaggga

SEQ ID NO: 194798 - DNA, 33 bp, Homo sapien
tccccaggctgctgaaccataaatgtctaggga

SEQ ID NO: 194799 - DNA, 33 bp, Homo sapien
tcaggcatgggcaggccagtagtctgatttttc

SEQ ID NO: 194800 - DNA, 33 bp, Homo sapien
tcaggcatgggcaggcgagtagtctgatttttc

SEQ ID NO: 194801 - DNA, 33 bp, Homo sapien
ctctgccagcctgacacgtggtgctatcgggtt

SEQ ID NO: 194802 - DNA, 33 bp, Homo sapien
ctctgccagcctgacatgtggtgctatcgggtt

SEQ ID NO: 194803 - DNA, 33 bp, Homo sapien
tgaactttggtttatcaacaattccaattgccc

SEQ ID NO: 194804 - DNA, 33 bp, Homo sapien
tgaactttggtttatctacaattccaattgccc

SEQ ID NO: 194805 - DNA, 33 bp, Homo sapien
tctttgtgactcaagcccctaaccactaaatgc

SEQ ID NO: 194806 - DNA, 33 bp, Homo sapien
tctttgtgactcaagctcctaaccactaaatgc

SEQ ID NO: 194807 - DNA, 33 bp, Homo sapien
ctcctaggattgtaaaacctcaactcagtaccc

SEQ ID NO: 194808 - DNA, 33 bp, Homo sapien
ctcctaggattgtaaaccctcaactcagtaccc

SEQ ID NO: 194809 - DNA, 33 bp, Homo sapien
gagcaatcgtttatcacgcaatcactgtgcagg

SEQ ID NO: 194810 - DNA, 33 bp, Homo sapien
gagcaatcgtttatcatgcaatcactgtgcagg

SEQ ID NO: 194811 - DNA, 33 bp, Homo sapien
taaacgattgctctcacgattatgacttacagc

SEQ ID NO: 194812 - DNA, 33 bp, Homo sapien
taaacgattgctctcatgattatgacttacagc

SEQ ID NO: 194813 - DNA, 33 bp, Homo sapien
ctcaggattcaccctacacgttgcgttatcctc

SEQ ID NO: 194814 - DNA, 33 bp, Homo sapien
ctcaggattcaccctagacgttgcgttatcctc

SEQ ID NO: 194815 - DNA, 33 bp, Homo sapien
gcccttcaacccaaaacgttaattagaggataa

SEQ ID NO: 194816 - DNA, 33 bp, Homo sapien
gcccttcaacccaaaatgttaattagaggataa

SEQ ID NO: 194817 - DNA, 33 bp, Homo sapien
cgtttttagggactaacgcagaggaaactttat

SEQ ID NO: 194818 - DNA, 33 bp, Homo sapien
cgtttttagggactaatgcagaggaaactttat

SEQ ID NO: 194819 - DNA, 33 bp, Homo sapien
ctgggtaaaattccaaaagctgcattctccaat

SEQ ID NO: 194820 - DNA, 33 bp, Homo sapien
ctgggtaaaattccaagagctgcattctccaat

SEQ ID NO: 194821 - DNA, 33 bp, Homo sapien
ttttacatgttgatgacgtccaatttatctatt

SEQ ID NO: 194822 - DNA, 33 bp, Homo sapien
ttttacatgttgatgatgtccaatttatctatt

SEQ ID NO: 194823 - DNA, 33 bp, Homo sapien
tcagagctgatcaccacagttaagctgccatgt

SEQ ID NO: 194824 - DNA, 33 bp, Homo sapien
tcagagctgatcaccatagttaagctgccatgt

SEQ ID NO: 194825 - DNA, 33 bp, Homo sapien
gcctctgctgcagagacagtgttgagagggaat

SEQ ID NO: 194826 - DNA, 33 bp, Homo sapien
gcctctgctgcagagatagtgttgagagggaat

SEQ ID NO: 194827 - DNA, 33 bp, Homo sapien
tacaatcactcattgacgtgcccccgttccagc

SEQ ID NO: 194828 - DNA, 33 bp, Homo sapien
tacaatcactcattgatgtgcccccgttccagc

SEQ ID NO: 194829 - DNA, 33 bp, Homo sapien
tcacagatgcagagaagcccacagagtgcatca

SEQ ID NO: 194830 - DNA, 33 bp, Homo sapien
tcacagatgcagagaatcccacagagtgcatca

SEQ ID NO: 194831 - DNA, 33 bp, Homo sapien
tatagagtgacttgtacaaaattagagagctgg

SEQ ID NO: 194832 - DNA, 33 bp, Homo sapien
tatagagtgacttgtataaaattagagagctgg

SEQ ID NO: 194833 - DNA, 33 bp, Homo sapien
tggtcctgtgacagaagtcaggctaccctccac

SEQ ID NO: 194834 - DNA, 33 bp, Homo sapien
tggtcctgtgacagaattcaggctaccctccac

SEQ ID NO: 194835 - DNA, 33 bp, Homo sapien
ccttgactctgttgtacgaggcattcaggaagg

SEQ ID NO: 194836 - DNA, 33 bp, Homo sapien
ccttgactctgttgtatgaggcattcaggaagg

SEQ ID NO: 194837 - DNA, 33 bp, Homo sapien
ggacgccctcgtaagacgcctagaatatgcaga

SEQ ID NO: 194838 - DNA, 33 bp, Homo sapien
ggacgccctcgtaagatgcctagaatatgcaga

SEQ ID NO: 194839 - DNA, 33 bp, Homo sapien
catacctgggaagccaatggcatatgggaggga

SEQ ID NO: 194840 - DNA, 33 bp, Homo sapien
catacctgggaagccattggcatatgggaggga

SEQ ID NO: 194841 - DNA, 33 bp, Homo sapien
gataattgggtgaaggcagaaaggaaaacagaa

SEQ ID NO: 194842 - DNA, 33 bp, Homo sapien
gataattgggtgaaggtagaaaggaaaacagaa

SEQ ID NO: 194843 - DNA, 33 bp, Homo sapien
agtaaacctcttccaaacctcgctctaccagat

SEQ ID NO: 194844 - DNA, 33 bp, Homo sapien
agtaaacctcttccaatcctcgctctaccagat

SEQ ID NO: 194845 - DNA, 33 bp, Homo sapien
caaggcatcacaaagaccctctcatgcattttc

SEQ ID NO: 194846 - DNA, 33 bp, Homo sapien
caaggcatcacaaagagcctctcatgcattttc

SEQ ID NO: 194847 - DNA, 33 bp, Homo sapien
aaggccagaactattaacgatcattaaaatggc

SEQ ID NO: 194848 - DNA, 33 bp, Homo sapien
aaggccagaactattagcgatcattaaaatggc

SEQ ID NO: 194849 - DNA, 33 bp, Homo sapien
aaaactgaaggtaaagaaaacagatcagtggtt

SEQ ID NO: 194850 - DNA, 33 bp, Homo sapien
aaaactgaaggtaaaggaaacagatcagtggtt

SEQ ID NO: 194851 - DNA, 33 bp, Homo sapien
ggtgaagacatttatgcaaggtcacccagtaac

SEQ ID NO: 194852 - DNA, 33 bp, Homo sapien
ggtgaagacatttatgtaaggtcacccagtaac

SEQ ID NO: 194853 - DNA, 33 bp, Homo sapien
cttatgattataacatcacttgaaggcatcgaa

SEQ ID NO: 194854 - DNA, 33 bp, Homo sapien
cttatgattataacatgacttgaaggcatcgaa

SEQ ID NO: 194855 - DNA, 33 bp, Homo sapien
gcagtgacaataatcacgcagttatatcggaaa

SEQ ID NO: 194856 - DNA, 33 bp, Homo sapien
gcagtgacaataatcatgcagttatatcggaaa

SEQ ID NO: 194857 - DNA, 33 bp, Homo sapien
actttttccctgtatccctgtcttcacctccca

SEQ ID NO: 194858 - DNA, 33 bp, Homo sapien
actttttccctgtatctctgtcttcacctccca

SEQ ID NO: 194859 - DNA, 33 bp, Homo sapien
ctcaatgaattcaagcggctggtggtagtgata

SEQ ID NO: 194860 - DNA, 33 bp, Homo sapien
ctcaatgaattcaagctgctggtggtagtgata

SEQ ID NO: 194861 - DNA, 33 bp, Homo sapien
aaataatgaactggcacgaggctccattctttt

SEQ ID NO: 194862 - DNA, 33 bp, Homo sapien
aaataatgaactggcatgaggctccattctttt

SEQ ID NO: 194863 - DNA, 33 bp, Homo sapien
gagatcttggggtcatcatcagtccgattggcc

SEQ ID NO: 194864 - DNA, 33 bp, Homo sapien
gagatcttggggtcatgatcagtccgattggcc

SEQ ID NO: 194865 - DNA, 33 bp, Homo sapien
tgtggtaaataacctcaaatggtataggtcatt

SEQ ID NO: 194866 - DNA, 33 bp, Homo sapien
tgtggtaaataacctcgaatggtataggtcatt

SEQ ID NO: 194867 - DNA, 33 bp, Homo sapien
agtgttgcattttccaaatccctggagctctaa

SEQ ID NO: 194868 - DNA, 33 bp, Homo sapien
agtgttgcattttccagatccctggagctctaa

SEQ ID NO: 194869 - DNA, 33 bp, Homo sapien
aatggggttttgttgaagggaatgaatgcaaga

SEQ ID NO: 194870 - DNA, 33 bp, Homo sapien
aatggggttttgttgaggggaatgaatgcaaga

SEQ ID NO: 194871 - DNA, 33 bp, Homo sapien
gatatccacgattgtaacctgattttgactaaa

SEQ ID NO: 194872 - DNA, 33 bp, Homo sapien
gatatccacgattgtagcctgattttgactaaa

SEQ ID NO: 194873 - DNA, 33 bp, Homo sapien
gatagtggatgactggaccagaacccagaggct

SEQ ID NO: 194874 - DNA, 33 bp, Homo sapien
gatagtggatgactgggccagaacccagaggct

SEQ ID NO: 194875 - DNA, 33 bp, Homo sapien
gagacataaagagaacacaaggtagataaattc

SEQ ID NO: 194876 - DNA, 33 bp, Homo sapien
gagacataaagagaacgcaaggtagataaattc

SEQ ID NO: 194877 - DNA, 33 bp, Homo sapien
gagttggttcagaatcacccaaacaggccccag

SEQ ID NO: 194878 - DNA, 33 bp, Homo sapien
gagttggttcagaatcgcccaaacaggccccag

SEQ ID NO: 194879 - DNA, 33 bp, Homo sapien
ctgactttatttaaaacgatcaacagcccaaat

SEQ ID NO: 194880 - DNA, 33 bp, Homo sapien
ctgactttatttaaaatgatcaacagcccaaat

SEQ ID NO: 194881 - DNA, 33 bp, Homo sapien
tagaagctaaggtccaatcttcaccacatgacc

SEQ ID NO: 194882 - DNA, 33 bp, Homo sapien
tagaagctaaggtccagtcttcaccacatgacc

SEQ ID NO: 194883 - DNA, 33 bp, Homo sapien
tgcatagctaggaagtaaccaataatgaaacaa

SEQ ID NO: 194884 - DNA, 33 bp, Homo sapien
tgcatagctaggaagtgaccaataatgaaacaa

SEQ ID NO: 194885 - DNA, 33 bp, Homo sapien
tatgaggcctgagctacgggcaaaagacccctc

SEQ ID NO: 194886 - DNA, 33 bp, Homo sapien
tatgaggcctgagctatgggcaaaagacccctc

SEQ ID NO: 194887 - DNA, 33 bp, Homo sapien
gctgatgttgacagtgaaatgaatttgtcttcc

SEQ ID NO: 194888 - DNA, 33 bp, Homo sapien
gctgatgttgacagtggaatgaatttgtcttcc

SEQ ID NO: 194889 - DNA, 33 bp, Homo sapien
cccagactgctgttggaagacattttatgtgtg

SEQ ID NO: 194890 - DNA, 33 bp, Homo sapien
cccagactgctgttgggagacattttatgtgtg

SEQ ID NO: 194891 - DNA, 33 bp, Homo sapien
tctaccagctgcagccactaagtacaatgaccc

SEQ ID NO: 194892 - DNA, 33 bp, Homo sapien
tctaccagctgcagccgctaagtacaatgaccc

SEQ ID NO: 194893 - DNA, 33 bp, Homo sapien
caggctttttcctgtagagcagaggggtcgagc

SEQ ID NO: 194894 - DNA, 33 bp, Homo sapien
caggctttttcctgtatagcagaggggtcgagc

SEQ ID NO: 194895 - DNA, 33 bp, Homo sapien
atctccagggagaaagaaaggcaaggtattgat

SEQ ID NO: 194896 - DNA, 33 bp, Homo sapien
atctccagggagaaaggaaggcaaggtattgat

SEQ ID NO: 194897 - DNA, 33 bp, Homo sapien
tcatcaggcttgtagacggtatggcagatgagc

SEQ ID NO: 194898 - DNA, 33 bp, Homo sapien
tcatcaggcttgtagatggtatggcagatgagc

SEQ ID NO: 194899 - DNA, 33 bp, Homo sapien
aggattagggatcaccaagctatctgcatttat

SEQ ID NO: 194900 - DNA, 33 bp, Homo sapien
aggattagggatcaccgagctatctgcatttat

SEQ ID NO: 194901 - DNA, 33 bp, Homo sapien
tcatcccatcattccaatctgaaaggtgtttcg

SEQ ID NO: 194902 - DNA, 33 bp, Homo sapien
tcatcccatcattccagtctgaaaggtgtttcg

SEQ ID NO: 194903 - DNA, 33 bp, Homo sapien
taagacaacctgaggaagggttagaggagagct

SEQ ID NO: 194904 - DNA, 33 bp, Homo sapien
taagacaacctgaggaggggttagaggagagct

SEQ ID NO: 194905 - DNA, 33 bp, Homo sapien
acatggggagacgggaccaagaagcttcgcacg

SEQ ID NO: 194906 - DNA, 33 bp, Homo sapien
acatggggagacgggagcaagaagcttcgcacg

SEQ ID NO: 194907 - DNA, 33 bp, Homo sapien
ttcaattctgaattcacggggccttggatggtg

SEQ ID NO: 194908 - DNA, 33 bp, Homo sapien
ttcaattctgaattcatggggccttggatggtg

SEQ ID NO: 194909 - DNA, 33 bp, Homo sapien
tcagagaagtctactacgggagtccactgcagc

SEQ ID NO: 194910 - DNA, 33 bp, Homo sapien
tcagagaagtctactatgggagtccactgcagc

SEQ ID NO: 194911 - DNA, 33 bp, Homo sapien
taaggagcggctgtgaaaaagaatggaccctag

SEQ ID NO: 194912 - DNA, 33 bp, Homo sapien
taaggagcggctgtgagaaagaatggaccctag

SEQ ID NO: 194913 - DNA, 33 bp, Homo sapien
gttcttcttttcttcacgtgggtaatggcaaga

SEQ ID NO: 194914 - DNA, 33 bp, Homo sapien
gttcttcttttcttcatgtgggtaatggcaaga

SEQ ID NO: 194915 - DNA, 33 bp, Homo sapien
tggagacacacgatgacgcagctggaaggaggc

SEQ ID NO: 194916 - DNA, 33 bp, Homo sapien
tggagacacacgatgatgcagctggaaggaggc

SEQ ID NO: 194917 - DNA, 33 bp, Homo sapien
gccatcagacccaaacaaaccatgccaggagga

SEQ ID NO: 194918 - DNA, 33 bp, Homo sapien
gccatcagacccaaaccaaccatgccaggagga

SEQ ID NO: 194919 - DNA, 33 bp, Homo sapien
ctgaggccgggagaagacagtgcttctgcttct

SEQ ID NO: 194920 - DNA, 33 bp, Homo sapien
ctgaggccgggagaaggcagtgcttctgcttct

SEQ ID NO: 194921 - DNA, 33 bp, Homo sapien
gtgtcaacaaggcccagctcaacagctcccaag

SEQ ID NO: 194922 - DNA, 33 bp, Homo sapien
gtgtcaacaaggcccatctcaacagctcccaag

SEQ ID NO: 194923 - DNA, 33 bp, Homo sapien
ttggatctgttaatcaacctctccctggctccc

SEQ ID NO: 194924 - DNA, 33 bp, Homo sapien
ttggatctgttaatcagcctctccctggctccc

SEQ ID NO: 194925 - DNA, 33 bp, Homo sapien
aatgtcactctgtatcccataaacatatacaat

SEQ ID NO: 194926 - DNA, 33 bp, Homo sapien
aatgtcactctgtatctcataaacatatacaat

SEQ ID NO: 194927 - DNA, 33 bp, Homo sapien
tccagatacagtgtgaaagccagatagggcctt

SEQ ID NO: 194928 - DNA, 33 bp, Homo sapien
tccagatacagtgtgagagccagatagggcctt

SEQ ID NO: 194929 - DNA, 33 bp, Homo sapien
ccagtctgctgactacaaaaggattacagatga

SEQ ID NO: 194930 - DNA, 33 bp, Homo sapien
ccagtctgctgactacgaaaggattacagatga

SEQ ID NO: 194931 - DNA, 33 bp, Homo sapien
attttctagtctcccaacaaggttttccggaga

SEQ ID NO: 194932 - DNA, 33 bp, Homo sapien
attttctagtctcccagcaaggttttccggaga

SEQ ID NO: 194933 - DNA, 33 bp, Homo sapien
gtggaaagggcagatgaactgtcttaccccgta

SEQ ID NO: 194934 - DNA, 33 bp, Homo sapien
gtggaaagggcagatggactgtcttaccccgta

SEQ ID NO: 194935 - DNA, 33 bp, Homo sapien
aggaaggtttaaagcaccttgaatggagttcaa

SEQ ID NO: 194936 - DNA, 33 bp, Homo sapien
aggaaggtttaaagcagcttgaatggagttcaa

SEQ ID NO: 194937 - DNA, 33 bp, Homo sapien
ctgaggagatacattcacggaggggtttatgaa

SEQ ID NO: 194938 - DNA, 33 bp, Homo sapien
ctgaggagatacattcgcggaggggtttatgaa

SEQ ID NO: 194939 - DNA, 33 bp, Homo sapien
agggtgtgcactgtacaactcaaaggcaacagt

SEQ ID NO: 194940 - DNA, 33 bp, Homo sapien
agggtgtgcactgtacgactcaaaggcaacagt

SEQ ID NO: 194941 - DNA, 33 bp, Homo sapien
tccattcagcaggtacagagaatctgctttgag

SEQ ID NO: 194942 - DNA, 33 bp, Homo sapien
tccattcagcaggtacggagaatctgctttgag

SEQ ID NO: 194943 - DNA, 33 bp, Homo sapien
accgacataaactccaagcttcctgacatccct

SEQ ID NO: 194944 - DNA, 33 bp, Homo sapien
accgacataaactccaggcttcctgacatccct

SEQ ID NO: 194945 - DNA, 33 bp, Homo sapien
accaccactcagctccagattattgcagagctg

SEQ ID NO: 194946 - DNA, 33 bp, Homo sapien
accaccactcagctccggattattgcagagctg

SEQ ID NO: 194947 - DNA, 33 bp, Homo sapien
accttagtgcctccacaacacttgttaaatgca

SEQ ID NO: 194948 - DNA, 33 bp, Homo sapien
accttagtgcctccacgacacttgttaaatgca

SEQ ID NO: 194949 - DNA, 33 bp, Homo sapien
tgttacctgagggaccagagatcagaggacaca

SEQ ID NO: 194950 - DNA, 33 bp, Homo sapien
tgttacctgagggaccggagatcagaggacaca

SEQ ID NO: 194951 - DNA, 33 bp, Homo sapien
aacaggtttcccttccacaagtcccataaaatg

SEQ ID NO: 194952 - DNA, 33 bp, Homo sapien
aacaggtttcccttccgcaagtcccataaaatg

SEQ ID NO: 194953 - DNA, 33 bp, Homo sapien
tcagtgtggacgtgtcaattgaagagaaaaaag

SEQ ID NO: 194954 - DNA, 33 bp, Homo sapien
tcagtgtggacgtgtcgattgaagagaaaaaag

SEQ ID NO: 194955 - DNA, 33 bp, Homo sapien
agtatccagatatgagacccccttgtagaggcc

SEQ ID NO: 194956 - DNA, 33 bp, Homo sapien
agtatccagatatgaggcccccttgtagaggcc

SEQ ID NO: 194957 - DNA, 33 bp, Homo sapien
acatggacacctggcccccataggaggcctcac

SEQ ID NO: 194958 - DNA, 33 bp, Homo sapien
acatggacacctggccgccataggaggcctcac

SEQ ID NO: 194959 - DNA, 33 bp, Homo sapien
ttcattctcatccatcccatttacaacttaatc

SEQ ID NO: 194960 - DNA, 33 bp, Homo sapien
ttcattctcatccatctcatttacaacttaatc

SEQ ID NO: 194961 - DNA, 33 bp, Homo sapien
ttaatttgccttttacactcagtactttttcct

SEQ ID NO: 194962 - DNA, 33 bp, Homo sapien
ttaatttgccttttacgctcagtactttttcct

SEQ ID NO: 194963 - DNA, 33 bp, Homo sapien
tgttgacagctaatgcagcaggagactttcttt

SEQ ID NO: 194964 - DNA, 33 bp, Homo sapien
tgttgacagctaatgcggcaggagactttcttt

SEQ ID NO: 194965 - DNA, 33 bp, Homo sapien
ctgtcaacacgccagagcatggttcttgtccta

SEQ ID NO: 194966 - DNA, 33 bp, Homo sapien
ctgtcaacacgccagatcatggttcttgtccta

SEQ ID NO: 194967 - DNA, 33 bp, Homo sapien
tgctttacaggttccacgaatagaagtcttatc

SEQ ID NO: 194968 - DNA, 33 bp, Homo sapien
tgctttacaggttccatgaatagaagtcttatc

SEQ ID NO: 194969 - DNA, 33 bp, Homo sapien
tagccccaaaccaaccaatggaatgaaggacag

SEQ ID NO: 194970 - DNA, 33 bp, Homo sapien
tagccccaaaccaaccgatggaatgaaggacag

SEQ ID NO: 194971 - DNA, 33 bp, Homo sapien
tattctggagttcatgccataaagcctgcgtaa

SEQ ID NO: 194972 - DNA, 33 bp, Homo sapien
tattctggagttcatgtcataaagcctgcgtaa

SEQ ID NO: 194973 - DNA, 33 bp, Homo sapien
tgcctcacctcaaatccaagtctggagccaact

SEQ ID NO: 194974 - DNA, 33 bp, Homo sapien
tgcctcacctcaaatctaagtctggagccaact

SEQ ID NO: 194975 - DNA, 33 bp, Homo sapien
cacccgtttatttccacgtatatgtctcctccc

SEQ ID NO: 194976 - DNA, 33 bp, Homo sapien
cacccgtttatttccaggtatatgtctcctccc

SEQ ID NO: 194977 - DNA, 33 bp, Homo sapien
gagctgagccctctccaattcaggttaatcatg

SEQ ID NO: 194978 - DNA, 33 bp, Homo sapien
gagctgagccctctccgattcaggttaatcatg

SEQ ID NO: 194979 - DNA, 33 bp, Homo sapien
tttagatgtatgtgtacatatttgaagccaaaa

SEQ ID NO: 194980 - DNA, 33 bp, Homo sapien
tttagatgtatgtgtatatatttgaagccaaaa

SEQ ID NO: 194981 - DNA, 33 bp, Homo sapien
caatttttaactccgacgaaagccagaaccaga

SEQ ID NO: 194982 - DNA, 33 bp, Homo sapien
caatttttaactccgatgaaagccagaaccaga

SEQ ID NO: 194983 - DNA, 33 bp, Homo sapien
caacacagctaataaaatcatccaggagtagcc

SEQ ID NO: 194984 - DNA, 33 bp, Homo sapien
caacacagctaataaagtcatccaggagtagcc

SEQ ID NO: 194985 - DNA, 33 bp, Homo sapien
ttactgattgataggccattcaggaaacaaaga

SEQ ID NO: 194986 - DNA, 33 bp, Homo sapien
ttactgattgataggctattcaggaaacaaaga

SEQ ID NO: 194987 - DNA, 33 bp, Homo sapien
caaatgcctggccagcagagatcagaggcaaat

SEQ ID NO: 194988 - DNA, 33 bp, Homo sapien
caaatgcctggccagcggagatcagaggcaaat

SEQ ID NO: 194989 - DNA, 33 bp, Homo sapien
gactgactgactgactcaggttcttaaatgcct

SEQ ID NO: 194990 - DNA, 33 bp, Homo sapien
gactgactgactgacttaggttcttaaatgcct

SEQ ID NO: 194991 - DNA, 33 bp, Homo sapien
gcacgaatgagtgagacggagagaatggcatgg

SEQ ID NO: 194992 - DNA, 33 bp, Homo sapien
gcacgaatgagtgagatggagagaatggcatgg

SEQ ID NO: 194993 - DNA, 33 bp, Homo sapien
aaggcagctgtccaaccgcctcatttacttgtc

SEQ ID NO: 194994 - DNA, 33 bp, Homo sapien
aaggcagctgtccaactgcctcatttacttgtc

SEQ ID NO: 194995 - DNA, 33 bp, Homo sapien
ctcctaagtctcagggaagtcatttggggtggt

SEQ ID NO: 194996 - DNA, 33 bp, Homo sapien
ctcctaagtctcagggcagtcatttggggtggt

SEQ ID NO: 194997 - DNA, 33 bp, Homo sapien
ctgaatcctgaggaacactggctcctgcctcct

SEQ ID NO: 194998 - DNA, 33 bp, Homo sapien
ctgaatcctgaggaacgctggctcctgcctcct

SEQ ID NO: 194999 - DNA, 33 bp, Homo sapien
actttctgagtcaccacggaaagccattatctt

SEQ ID NO: 195000 - DNA, 33 bp, Homo sapien
actttctgagtcaccatggaaagccattatctt

SEQ ID NO: 195001 - DNA, 33 bp, Homo sapien
aggactagaaacacccaaagtgtcccacacaca

SEQ ID NO: 195002 - DNA, 33 bp, Homo sapien
aggactagaaacacccgaagtgtcccacacaca

SEQ ID NO: 195003 - DNA, 33 bp, Homo sapien
tatgctattacaaatacagttgtggacattttt

SEQ ID NO: 195004 - DNA, 33 bp, Homo sapien
tatgctattacaaatagagttgtggacattttt

SEQ ID NO: 195005 - DNA, 33 bp, Homo sapien
gaaaaatgagcggaaacagaattcgttctcata

SEQ ID NO: 195006 - DNA, 33 bp, Homo sapien
gaaaaatgagcggaaatagaattcgttctcata

SEQ ID NO: 195007 - DNA, 33 bp, Homo sapien
cacacaggggagtaaacacgtgatgagaacagg

SEQ ID NO: 195008 - DNA, 33 bp, Homo sapien
cacacaggggagtaaatacgtgatgagaacagg

SEQ ID NO: 195009 - DNA, 33 bp, Homo sapien
gtcaagtgagataatacgtgtgaaggttctttg

SEQ ID NO: 195010 - DNA, 33 bp, Homo sapien
gtcaagtgagataataggtgtgaaggttctttg

SEQ ID NO: 195011 - DNA, 33 bp, Homo sapien
attaagtaagctgcccaaaattccagagctaga

SEQ ID NO: 195012 - DNA, 33 bp, Homo sapien
attaagtaagctgccccaaattccagagctaga

SEQ ID NO: 195013 - DNA, 33 bp, Homo sapien
gtcagtctgaagatccaatggaagccaggaagg

SEQ ID NO: 195014 - DNA, 33 bp, Homo sapien
gtcagtctgaagatccgatggaagccaggaagg

SEQ ID NO: 195015 - DNA, 33 bp, Homo sapien
aggcgcctaccgtctgacaaccatagaagccac

SEQ ID NO: 195016 - DNA, 33 bp, Homo sapien
aggcgcctaccgtctgtcaaccatagaagccac

SEQ ID NO: 195017 - DNA, 33 bp, Homo sapien
gcaccaccacacaccacctacaatgctacactg

SEQ ID NO: 195018 - DNA, 33 bp, Homo sapien
gcaccaccacacaccagctacaatgctacactg

SEQ ID NO: 195019 - DNA, 33 bp, Homo sapien
gacagctttcccatccgcaggttacttgccatc

SEQ ID NO: 195020 - DNA, 33 bp, Homo sapien
gacagctttcccatcctcaggttacttgccatc

SEQ ID NO: 195021 - DNA, 33 bp, Homo sapien
agctgtggtcctgatgcaattgggtggacatgg

SEQ ID NO: 195022 - DNA, 33 bp, Homo sapien
agctgtggtcctgatgtaattgggtggacatgg

SEQ ID NO: 195023 - DNA, 33 bp, Homo sapien
caacaagacctccagacgtcagtgaaggaacaa

SEQ ID NO: 195024 - DNA, 33 bp, Homo sapien
caacaagacctccagatgtcagtgaaggaacaa

SEQ ID NO: 195025 - DNA, 33 bp, Homo sapien
ctgttccttgttctaacggaaagacatggaaga

SEQ ID NO: 195026 - DNA, 33 bp, Homo sapien
ctgttccttgttctaatggaaagacatggaaga

SEQ ID NO: 195027 - DNA, 33 bp, Homo sapien
tgggcccccaaagacaatagaccagctggtgac

SEQ ID NO: 195028 - DNA, 33 bp, Homo sapien
tgggcccccaaagacactagaccagctggtgac

SEQ ID NO: 195029 - DNA, 33 bp, Homo sapien
tgggatcattccgcggaaagtttgaccccaggc

SEQ ID NO: 195030 - DNA, 33 bp, Homo sapien
tgggatcattccgcgggaagtttgaccccaggc

SEQ ID NO: 195031 - DNA, 33 bp, Homo sapien
catgaccccaatgcccaacacagtgcccaaagc

SEQ ID NO: 195032 - DNA, 33 bp, Homo sapien
catgaccccaatgcccgacacagtgcccaaagc

SEQ ID NO: 195033 - DNA, 33 bp, Homo sapien
tggagagagcagagaacgggccgagtagaggag

SEQ ID NO: 195034 - DNA, 33 bp, Homo sapien
tggagagagcagagaatgggccgagtagaggag

SEQ ID NO: 195035 - DNA, 33 bp, Homo sapien
agtccaaacacctggcagactggtggtcccaag

SEQ ID NO: 195036 - DNA, 33 bp, Homo sapien
agtccaaacacctggccgactggtggtcccaag

SEQ ID NO: 195037 - DNA, 33 bp, Homo sapien
ggatgtttgctgagcaggttctaagtcctaatc

SEQ ID NO: 195038 - DNA, 33 bp, Homo sapien
ggatgtttgctgagcatgttctaagtcctaatc

SEQ ID NO: 195039 - DNA, 33 bp, Homo sapien
tctcaggctcttcatacggtgtctcaagcatgt

SEQ ID NO: 195040 - DNA, 33 bp, Homo sapien
tctcaggctcttcatagggtgtctcaagcatgt

SEQ ID NO: 195041 - DNA, 33 bp, Homo sapien
ttcatacagcggagtcaacataacattcatttg

SEQ ID NO: 195042 - DNA, 33 bp, Homo sapien
ttcatacagcggagtcgacataacattcatttg

SEQ ID NO: 195043 - DNA, 33 bp, Homo sapien
tattcattctgaaaaaaagattgtccaaactta

SEQ ID NO: 195044 - DNA, 33 bp, Homo sapien
tattcattctgaaaaatagattgtccaaactta

SEQ ID NO: 195045 - DNA, 33 bp, Homo sapien
agcgaataccaaattccaaataccgggaacctg

SEQ ID NO: 195046 - DNA, 33 bp, Homo sapien
agcgaataccaaattcgaaataccgggaacctg

SEQ ID NO: 195047 - DNA, 33 bp, Homo sapien
tgtgggggcagtttcacgagtaaaggcagcttc

SEQ ID NO: 195048 - DNA, 33 bp, Homo sapien
tgtgggggcagtttcatgagtaaaggcagcttc

SEQ ID NO: 195049 - DNA, 33 bp, Homo sapien
atttccatgtggagtgaagggagttttacagaa

SEQ ID NO: 195050 - DNA, 33 bp, Homo sapien
atttccatgtggagtggagggagttttacagaa

SEQ ID NO: 195051 - DNA, 33 bp, Homo sapien
tattgagtgcatggtagaggcaaagtactggtc

SEQ ID NO: 195052 - DNA, 33 bp, Homo sapien
tattgagtgcatggtataggcaaagtactggtc

SEQ ID NO: 195053 - DNA, 33 bp, Homo sapien
ataagatatgcgcttaaaaaagcttatgccgag

SEQ ID NO: 195054 - DNA, 33 bp, Homo sapien
ataagatatgcgcttagaaaagcttatgccgag

SEQ ID NO: 195055 - DNA, 33 bp, Homo sapien
attgaacagtgaggaaagaagacagagataaag

SEQ ID NO: 195056 - DNA, 33 bp, Homo sapien
attgaacagtgaggaaggaagacagagataaag

SEQ ID NO: 195057 - DNA, 33 bp, Homo sapien
tctacaaagactaagacagagatagcaatagca

SEQ ID NO: 195058 - DNA, 33 bp, Homo sapien
tctacaaagactaagatagagatagcaatagca

SEQ ID NO: 195059 - DNA, 33 bp, Homo sapien
cccattaaaaaacatcaagtagaggcacctaat

SEQ ID NO: 195060 - DNA, 33 bp, Homo sapien
cccattaaaaaacatcgagtagaggcacctaat

SEQ ID NO: 195061 - DNA, 33 bp, Homo sapien
gaaggaataggatgagaaaacaacattattctg

SEQ ID NO: 195062 - DNA, 33 bp, Homo sapien
gaaggaataggatgaggaaacaacattattctg

SEQ ID NO: 195063 - DNA, 33 bp, Homo sapien
tgtcattcactcagtaagtagcagagctagaag

SEQ ID NO: 195064 - DNA, 33 bp, Homo sapien
tgtcattcactcagtacgtagcagagctagaag

SEQ ID NO: 195065 - DNA, 33 bp, Homo sapien
ctgttgctcaagtgagaaattaagatggtaaat

SEQ ID NO: 195066 - DNA, 33 bp, Homo sapien
ctgttgctcaagtgaggaattaagatggtaaat

SEQ ID NO: 195067 - DNA, 33 bp, Homo sapien
ccatataaagtgccgaaagcatttcaagcagga

SEQ ID NO: 195068 - DNA, 33 bp, Homo sapien
ccatataaagtgccgagagcatttcaagcagga

SEQ ID NO: 195069 - DNA, 33 bp, Homo sapien
ccatttttctttacagactcaacagccaatgac

SEQ ID NO: 195070 - DNA, 33 bp, Homo sapien
ccatttttctttacagcctcaacagccaatgac

SEQ ID NO: 195071 - DNA, 33 bp, Homo sapien
caggaagacagcaaaccgggcctccctggagct

SEQ ID NO: 195072 - DNA, 33 bp, Homo sapien
caggaagacagcaaactgggcctccctggagct

SEQ ID NO: 195073 - DNA, 33 bp, Homo sapien
gtgtttatcttcataaccagatgacaggctcca

SEQ ID NO: 195074 - DNA, 33 bp, Homo sapien
gtgtttatcttcataatcagatgacaggctcca

SEQ ID NO: 195075 - DNA, 33 bp, Homo sapien
tccatgtccatatttcacttttctcatcatcgg

SEQ ID NO: 195076 - DNA, 33 bp, Homo sapien
tccatgtccatatttcgcttttctcatcatcgg

SEQ ID NO: 195077 - DNA, 33 bp, Homo sapien
aagcagcgaatcaacaagttgttccttaaagag

SEQ ID NO: 195078 - DNA, 33 bp, Homo sapien
aagcagcgaatcaacaggttgttccttaaagag

SEQ ID NO: 195079 - DNA, 33 bp, Homo sapien
tggcttccaaatgtccaaacagggtttctctcc

SEQ ID NO: 195080 - DNA, 33 bp, Homo sapien
tggcttccaaatgtccgaacagggtttctctcc

SEQ ID NO: 195081 - DNA, 33 bp, Homo sapien
ccagctgcctcatcagaagctccgtccagcata

SEQ ID NO: 195082 - DNA, 33 bp, Homo sapien
ccagctgcctcatcagcagctccgtccagcata

SEQ ID NO: 195083 - DNA, 33 bp, Homo sapien
cagaggcttatgatgcacgtcttcatcctcaca

SEQ ID NO: 195084 - DNA, 33 bp, Homo sapien
cagaggcttatgatgcgcgtcttcatcctcaca

SEQ ID NO: 195085 - DNA, 33 bp, Homo sapien
tcccaggggacagttacgttggtaggcagtggg

SEQ ID NO: 195086 - DNA, 33 bp, Homo sapien
tcccaggggacagttatgttggtaggcagtggg

SEQ ID NO: 195087 - DNA, 33 bp, Homo sapien
ttcttgaagatttgagcccttgggtcactgtcc

SEQ ID NO: 195088 - DNA, 33 bp, Homo sapien
ttcttgaagatttgagtccttgggtcactgtcc

SEQ ID NO: 195089 - DNA, 33 bp, Homo sapien
acacaaaaaagtaacaatggagacataacatct

SEQ ID NO: 195090 - DNA, 33 bp, Homo sapien
acacaaaaaagtaacagtggagacataacatct

SEQ ID NO: 195091 - DNA, 33 bp, Homo sapien
ttaagttcagggaagcccaggaagctagaattt

SEQ ID NO: 195092 - DNA, 33 bp, Homo sapien
ttaagttcagggaagctcaggaagctagaattt

SEQ ID NO: 195093 - DNA, 33 bp, Homo sapien
cgagatttattatgagaccatagtaattaagat

SEQ ID NO: 195094 - DNA, 33 bp, Homo sapien
cgagatttattatgaggccatagtaattaagat

SEQ ID NO: 195095 - DNA, 33 bp, Homo sapien
catacttgtaagtttgaagactcagtatctcaa

SEQ ID NO: 195096 - DNA, 33 bp, Homo sapien
catacttgtaagtttgtagactcagtatctcaa

SEQ ID NO: 195097 - DNA, 33 bp, Homo sapien
gagcttgttttgtgtacattggttttccatgta

SEQ ID NO: 195098 - DNA, 33 bp, Homo sapien
gagcttgttttgtgtatattggttttccatgta

SEQ ID NO: 195099 - DNA, 33 bp, Homo sapien
tagtgaggtgcaggacaacttcaagccacctaa

SEQ ID NO: 195100 - DNA, 33 bp, Homo sapien
tagtgaggtgcaggactacttcaagccacctaa

SEQ ID NO: 195101 - DNA, 33 bp, Homo sapien
aattttgaagaacctgacaagttatttgttcaa

SEQ ID NO: 195102 - DNA, 33 bp, Homo sapien
aattttgaagaacctgtcaagttatttgttcaa

SEQ ID NO: 195103 - DNA, 33 bp, Homo sapien
attcctcataggaaaagaaatgtcttgtttgaa

SEQ ID NO: 195104 - DNA, 33 bp, Homo sapien
attcctcataggaaaataaatgtcttgtttgaa

SEQ ID NO: 195105 - DNA, 33 bp, Homo sapien
atgttttccgttacaaatgaaagcttaacactg

SEQ ID NO: 195106 - DNA, 33 bp, Homo sapien
atgttttccgttacaagtgaaagcttaacactg

SEQ ID NO: 195107 - DNA, 33 bp, Homo sapien
gggagtatttcctcaacagaaatggagaagcct

SEQ ID NO: 195108 - DNA, 33 bp, Homo sapien
gggagtatttcctcaatagaaatggagaagcct

SEQ ID NO: 195109 - DNA, 33 bp, Homo sapien
cctttttctctcctgggcaatgcctatactgag

SEQ ID NO: 195110 - DNA, 33 bp, Homo sapien
cctttttctctcctggtcaatgcctatactgag

SEQ ID NO: 195111 - DNA, 33 bp, Homo sapien
aacataagccacaacaatcattttaccagagag

SEQ ID NO: 195112 - DNA, 33 bp, Homo sapien
aacataagccacaacagtcattttaccagagag

SEQ ID NO: 195113 - DNA, 33 bp, Homo sapien
ggaccctgtatcttaacctccttgttaagtttg

SEQ ID NO: 195114 - DNA, 33 bp, Homo sapien
ggaccctgtatcttaagctccttgttaagtttg

SEQ ID NO: 195115 - DNA, 33 bp, Homo sapien
tctttcggcggttagcaagtttaaagctcttcg

SEQ ID NO: 195116 - DNA, 33 bp, Homo sapien
tctttcggcggttagcgagtttaaagctcttcg

SEQ ID NO: 195117 - DNA, 33 bp, Homo sapien
agtattaaagaacagcactacactggatgtgac

SEQ ID NO: 195118 - DNA, 33 bp, Homo sapien
agtattaaagaacagcgctacactggatgtgac

SEQ ID NO: 195119 - DNA, 33 bp, Homo sapien
accactcaagtattgaagcagtataacgtcatg

SEQ ID NO: 195120 - DNA, 33 bp, Homo sapien
accactcaagtattgaggcagtataacgtcatg

SEQ ID NO: 195121 - DNA, 33 bp, Homo sapien
aagccttaatgttatacgtctcccaccaaagct

SEQ ID NO: 195122 - DNA, 33 bp, Homo sapien
aagccttaatgttatatgtctcccaccaaagct

SEQ ID NO: 195123 - DNA, 33 bp, Homo sapien
tgagagtcatactgaacatacttaagtttagag

SEQ ID NO: 195124 - DNA, 33 bp, Homo sapien
tgagagtcatactgaatatacttaagtttagag

SEQ ID NO: 195125 - DNA, 33 bp, Homo sapien
agagagagggcttggcaaggttccatctgagcc

SEQ ID NO: 195126 - DNA, 33 bp, Homo sapien
agagagagggcttggcgaggttccatctgagcc

SEQ ID NO: 195127 - DNA, 33 bp, Homo sapien
gctctccaagcccccacgtttacctcttatagc

SEQ ID NO: 195128 - DNA, 33 bp, Homo sapien
gctctccaagcccccatgtttacctcttatagc

SEQ ID NO: 195129 - DNA, 33 bp, Homo sapien
gcagaggaggtggtgaaggaagaagaggctcta

SEQ ID NO: 195130 - DNA, 33 bp, Homo sapien
gcagaggaggtggtgagggaagaagaggctcta

SEQ ID NO: 195131 - DNA, 33 bp, Homo sapien
aagtaacaatgccacccaccacatggggcagaa

SEQ ID NO: 195132 - DNA, 33 bp, Homo sapien
aagtaacaatgccacctaccacatggggcagaa

SEQ ID NO: 195133 - DNA, 33 bp, Homo sapien
aataaagacagaaaaaggcagacgagagagaca

SEQ ID NO: 195134 - DNA, 33 bp, Homo sapien
aataaagacagaaaaatgcagacgagagagaca

SEQ ID NO: 195135 - DNA, 33 bp, Homo sapien
gcctctggaccttctacccaattgttcttcatt

SEQ ID NO: 195136 - DNA, 33 bp, Homo sapien
gcctctggaccttctagccaattgttcttcatt

SEQ ID NO: 195137 - DNA, 33 bp, Homo sapien
ttattttgaaagatcactctggtagctgtgtgg

SEQ ID NO: 195138 - DNA, 33 bp, Homo sapien
ttattttgaaagatcattctggtagctgtgtgg

SEQ ID NO: 195139 - DNA, 33 bp, Homo sapien
tgtggcttatttgaagaaaatgcgtcctgccat

SEQ ID NO: 195140 - DNA, 33 bp, Homo sapien
tgtggcttatttgaagcaaatgcgtcctgccat

SEQ ID NO: 195141 - DNA, 33 bp, Homo sapien
ctgatacacagaagcacgttatcaacagaagga

SEQ ID NO: 195142 - DNA, 33 bp, Homo sapien
ctgatacacagaagcatgttatcaacagaagga

SEQ ID NO: 195143 - DNA, 33 bp, Homo sapien
acgtctcctcgtccacagagtcatttccttctt

SEQ ID NO: 195144 - DNA, 33 bp, Homo sapien
acgtctcctcgtccacggagtcatttccttctt

SEQ ID NO: 195145 - DNA, 33 bp, Homo sapien
acacctggcaatgatccctttgtactgagctgc

SEQ ID NO: 195146 - DNA, 33 bp, Homo sapien
acacctggcaatgatctctttgtactgagctgc

SEQ ID NO: 195147 - DNA, 33 bp, Homo sapien
gaaacttccttgaccacaccgtggagattggcc

SEQ ID NO: 195148 - DNA, 33 bp, Homo sapien
gaaacttccttgaccataccgtggagattggcc

SEQ ID NO: 195149 - DNA, 33 bp, Homo sapien
cagcagcctggcaagaacctcctctctggagac

SEQ ID NO: 195150 - DNA, 33 bp, Homo sapien
cagcagcctggcaagaccctcctctctggagac

SEQ ID NO: 195151 - DNA, 33 bp, Homo sapien
ttttctctctgtgtcccatacgaggattctgca

SEQ ID NO: 195152 - DNA, 33 bp, Homo sapien
ttttctctctgtgtcctatacgaggattctgca

SEQ ID NO: 195153 - DNA, 33 bp, Homo sapien
tttattgttaatgggaaggagcttcatagaggg

SEQ ID NO: 195154 - DNA, 33 bp, Homo sapien
tttattgttaatgggagggagcttcatagaggg

SEQ ID NO: 195155 - DNA, 33 bp, Homo sapien
acctagcagtgaaccagaggtaaagctcttttg

SEQ ID NO: 195156 - DNA, 33 bp, Homo sapien
acctagcagtgaaccataggtaaagctcttttg

SEQ ID NO: 195157 - DNA, 33 bp, Homo sapien
gctcctgggggcttgcaaaggtgctgaaaatgt

SEQ ID NO: 195158 - DNA, 33 bp, Homo sapien
gctcctgggggcttgcgaaggtgctgaaaatgt

SEQ ID NO: 195159 - DNA, 33 bp, Homo sapien
ggcgcaccttacagaacctttctccccatcatc

SEQ ID NO: 195160 - DNA, 33 bp, Homo sapien
ggcgcaccttacagaatctttctccccatcatc

SEQ ID NO: 195161 - DNA, 33 bp, Homo sapien
caagcaaaagtgagtacgattcttgaaagatgg

SEQ ID NO: 195162 - DNA, 33 bp, Homo sapien
caagcaaaagtgagtatgattcttgaaagatgg

SEQ ID NO: 195163 - DNA, 33 bp, Homo sapien
agctatgcccgaacacaaaagctgattcttaaa

SEQ ID NO: 195164 - DNA, 33 bp, Homo sapien
agctatgcccgaacacgaaagctgattcttaaa

SEQ ID NO: 195165 - DNA, 33 bp, Homo sapien
ttaaatgatgggagctaaacagcaggctggcag

SEQ ID NO: 195166 - DNA, 33 bp, Homo sapien
ttaaatgatgggagctgaacagcaggctggcag

SEQ ID NO: 195167 - DNA, 33 bp, Homo sapien
ctgaatcaacagagaaaacaggcctggcccagc

SEQ ID NO: 195168 - DNA, 33 bp, Homo sapien
ctgaatcaacagagaagacaggcctggcccagc

SEQ ID NO: 195169 - DNA, 33 bp, Homo sapien
tgcctgagtttccccaagagtagctcattcttt

SEQ ID NO: 195170 - DNA, 33 bp, Homo sapien
tgcctgagtttccccatgagtagctcattcttt

SEQ ID NO: 195171 - DNA, 33 bp, Homo sapien
cagacaactcatgtaaacctcacagtagtcttt

SEQ ID NO: 195172 - DNA, 33 bp, Homo sapien
cagacaactcatgtaatcctcacagtagtcttt

SEQ ID NO: 195173 - DNA, 33 bp, Homo sapien
tcttgtattctgactcaacccctgcagactgca

SEQ ID NO: 195174 - DNA, 33 bp, Homo sapien
tcttgtattctgactcgacccctgcagactgca

SEQ ID NO: 195175 - DNA, 33 bp, Homo sapien
tgtgcacatgcgtcgacggcagcctaagaccac

SEQ ID NO: 195176 - DNA, 33 bp, Homo sapien
tgtgcacatgcgtcgatggcagcctaagaccac

SEQ ID NO: 195177 - DNA, 33 bp, Homo sapien
tctggatcttgttttcaacattggttacatagg

SEQ ID NO: 195178 - DNA, 33 bp, Homo sapien
tctggatcttgttttcgacattggttacatagg

SEQ ID NO: 195179 - DNA, 33 bp, Homo sapien
gatccagaagttttccaatgttccagaagactc

SEQ ID NO: 195180 - DNA, 33 bp, Homo sapien
gatccagaagttttcctatgttccagaagactc

SEQ ID NO: 195181 - DNA, 33 bp, Homo sapien
cgatttcacttatataaagtttaaaaggcaagg

SEQ ID NO: 195182 - DNA, 33 bp, Homo sapien
cgatttcacttatatacagtttaaaaggcaagg

SEQ ID NO: 195183 - DNA, 33 bp, Homo sapien
tgttttgctgatccagcaggctatcaggagtag

SEQ ID NO: 195184 - DNA, 33 bp, Homo sapien
tgttttgctgatccagtaggctatcaggagtag

SEQ ID NO: 195185 - DNA, 33 bp, Homo sapien
ccccatcaggaaggaacgagctttcatacctag

SEQ ID NO: 195186 - DNA, 33 bp, Homo sapien
ccccatcaggaaggaatgagctttcatacctag

SEQ ID NO: 195187 - DNA, 33 bp, Homo sapien
acaattcatctgttcaggtgacaaatatttgtt

SEQ ID NO: 195188 - DNA, 33 bp, Homo sapien
acaattcatctgttcatgtgacaaatatttgtt

SEQ ID NO: 195189 - DNA, 33 bp, Homo sapien
tgtgtgggagaaacaggctggtaactgcctctt

SEQ ID NO: 195190 - DNA, 33 bp, Homo sapien
tgtgtgggagaaacagtctggtaactgcctctt

SEQ ID NO: 195191 - DNA, 33 bp, Homo sapien
gctacttggtagcacacagacttgggcctgagc

SEQ ID NO: 195192 - DNA, 33 bp, Homo sapien
gctacttggtagcacatagacttgggcctgagc

SEQ ID NO: 195193 - DNA, 33 bp, Homo sapien
ctggcgaagtggctgagaagtctcttttctagt

SEQ ID NO: 195194 - DNA, 33 bp, Homo sapien
ctggcgaagtggctgataagtctcttttctagt

SEQ ID NO: 195195 - DNA, 33 bp, Homo sapien
agtgtttgctgagacacgctatgtgacaggact

SEQ ID NO: 195196 - DNA, 33 bp, Homo sapien
agtgtttgctgagacatgctatgtgacaggact

SEQ ID NO: 195197 - DNA, 33 bp, Homo sapien
ccagcccaagagagaacgtggattttatgctca

SEQ ID NO: 195198 - DNA, 33 bp, Homo sapien
ccagcccaagagagaatgtggattttatgctca

SEQ ID NO: 195199 - DNA, 33 bp, Homo sapien
aaaaaaagataggtagaagatgagtgatggggc

SEQ ID NO: 195200 - DNA, 33 bp, Homo sapien
aaaaaaagataggtaggagatgagtgatggggc

SEQ ID NO: 195201 - DNA, 33 bp, Homo sapien
cttcatatgaatccagacaaacgtttctctcaa

SEQ ID NO: 195202 - DNA, 33 bp, Homo sapien
cttcatatgaatccaggcaaacgtttctctcaa

SEQ ID NO: 195203 - DNA, 33 bp, Homo sapien
gtgagaagggagctaacctgagcccctatgcct

SEQ ID NO: 195204 - DNA, 33 bp, Homo sapien
gtgagaagggagctaatctgagcccctatgcct

SEQ ID NO: 195205 - DNA, 33 bp, Homo sapien
gatttggattccccacccaagaaagcaagttac

SEQ ID NO: 195206 - DNA, 33 bp, Homo sapien
gatttggattccccactcaagaaagcaagttac

SEQ ID NO: 195207 - DNA, 33 bp, Homo sapien
ctcagtgcattgctgacgtaacttgctttcttg

SEQ ID NO: 195208 - DNA, 33 bp, Homo sapien
ctcagtgcattgctgatgtaacttgctttcttg

SEQ ID NO: 195209 - DNA, 33 bp, Homo sapien
caggagcttcgcatgcagaactcaagtgggtaa

SEQ ID NO: 195210 - DNA, 33 bp, Homo sapien
caggagcttcgcatgcggaactcaagtgggtaa

SEQ ID NO: 195211 - DNA, 33 bp, Homo sapien
aatctgatcttggataactgagctgattgtgac

SEQ ID NO: 195212 - DNA, 33 bp, Homo sapien
aatctgatcttggatacctgagctgattgtgac

SEQ ID NO: 195213 - DNA, 33 bp, Homo sapien
tctataagtgattacacaaattttggaacgact

SEQ ID NO: 195214 - DNA, 33 bp, Homo sapien
tctataagtgattacataaattttggaacgact

SEQ ID NO: 195215 - DNA, 33 bp, Homo sapien
accaggcttttttaagacatcactcagagcctt

SEQ ID NO: 195216 - DNA, 33 bp, Homo sapien
accaggcttttttaaggcatcactcagagcctt

SEQ ID NO: 195217 - DNA, 33 bp, Homo sapien
aggatggattggcaccccccaggtagaggactg

SEQ ID NO: 195218 - DNA, 33 bp, Homo sapien
aggatggattggcacctcccaggtagaggactg

SEQ ID NO: 195219 - DNA, 33 bp, Homo sapien
ctcttccttatcagaaacttctctctagaaagg

SEQ ID NO: 195220 - DNA, 33 bp, Homo sapien
ctcttccttatcagaatcttctctctagaaagg

SEQ ID NO: 195221 - DNA, 33 bp, Homo sapien
tgtttcagaaaaggaaaactcacgttacacatg

SEQ ID NO: 195222 - DNA, 33 bp, Homo sapien
tgtttcagaaaaggaagactcacgttacacatg

SEQ ID NO: 195223 - DNA, 33 bp, Homo sapien
tgtcctaactttttccacctggagagccctcag

SEQ ID NO: 195224 - DNA, 33 bp, Homo sapien
tgtcctaactttttccgcctggagagccctcag

SEQ ID NO: 195225 - DNA, 33 bp, Homo sapien
taggcttaacagcagacagagataaggagatta

SEQ ID NO: 195226 - DNA, 33 bp, Homo sapien
taggcttaacagcagagagagataaggagatta

SEQ ID NO: 195227 - DNA, 33 bp, Homo sapien
agatttttttctcttcactacagcgtgctccca

SEQ ID NO: 195228 - DNA, 33 bp, Homo sapien
agatttttttctcttctctacagcgtgctccca

SEQ ID NO: 195229 - DNA, 33 bp, Homo sapien
atgagctatgagagaacatctcccctcctgctg

SEQ ID NO: 195230 - DNA, 33 bp, Homo sapien
atgagctatgagagaatatctcccctcctgctg

SEQ ID NO: 195231 - DNA, 33 bp, Homo sapien
gtgcatctgctccaaaatggtagacagttacca

SEQ ID NO: 195232 - DNA, 33 bp, Homo sapien
gtgcatctgctccaaagtggtagacagttacca

SEQ ID NO: 195233 - DNA, 33 bp, Homo sapien
aacagaacctaattaacctccacgcttttagcc

SEQ ID NO: 195234 - DNA, 33 bp, Homo sapien
aacagaacctaattaagctccacgcttttagcc

SEQ ID NO: 195235 - DNA, 33 bp, Homo sapien
ggctgggggatataagaacttcactttgtcatc

SEQ ID NO: 195236 - DNA, 33 bp, Homo sapien
ggctgggggatataagcacttcactttgtcatc

SEQ ID NO: 195237 - DNA, 33 bp, Homo sapien
ggagctggccaaaaataaaggctaattgaaata

SEQ ID NO: 195238 - DNA, 33 bp, Homo sapien
ggagctggccaaaaatgaaggctaattgaaata

SEQ ID NO: 195239 - DNA, 33 bp, Homo sapien
cttatggcagctaccacatatcccaaggcaaat

SEQ ID NO: 195240 - DNA, 33 bp, Homo sapien
cttatggcagctaccatatatcccaaggcaaat

SEQ ID NO: 195241 - DNA, 33 bp, Homo sapien
gcttgctggcatggcaagtggacacacggctga

SEQ ID NO: 195242 - DNA, 33 bp, Homo sapien
gcttgctggcatggcaggtggacacacggctga

SEQ ID NO: 195243 - DNA, 33 bp, Homo sapien
gtcataagagctttggaactccagccttctctc

SEQ ID NO: 195244 - DNA, 33 bp, Homo sapien
gtcataagagctttgggactccagccttctctc

SEQ ID NO: 195245 - DNA, 33 bp, Homo sapien
ctgtatagaccaggtacgggctaaggcctattg

SEQ ID NO: 195246 - DNA, 33 bp, Homo sapien
ctgtatagaccaggtaggggctaaggcctattg

SEQ ID NO: 195247 - DNA, 33 bp, Homo sapien
cattccatgtacccaccctgatcatctgtacaa

SEQ ID NO: 195248 - DNA, 33 bp, Homo sapien
cattccatgtacccactctgatcatctgtacaa

SEQ ID NO: 195249 - DNA, 33 bp, Homo sapien
agagggaggagggagccgaaatatcctgaccag

SEQ ID NO: 195250 - DNA, 33 bp, Homo sapien
agagggaggagggagctgaaatatcctgaccag

SEQ ID NO: 195251 - DNA, 33 bp, Homo sapien
tgcccacttccgggagaaggtatgtgctgccct

SEQ ID NO: 195252 - DNA, 33 bp, Homo sapien
tgcccacttccgggagcaggtatgtgctgccct

SEQ ID NO: 195253 - DNA, 33 bp, Homo sapien
ctctatacccctgtaccgctttacctggttctt

SEQ ID NO: 195254 - DNA, 33 bp, Homo sapien
ctctatacccctgtactgctttacctggttctt

SEQ ID NO: 195255 - DNA, 33 bp, Homo sapien
gggacctggggaagaccacaactgagtaagaaa

SEQ ID NO: 195256 - DNA, 33 bp, Homo sapien
gggacctggggaagacgacaactgagtaagaaa

SEQ ID NO: 195257 - DNA, 33 bp, Homo sapien
ctgatttacactggatcaatatctgtctctccc

SEQ ID NO: 195258 - DNA, 33 bp, Homo sapien
ctgatttacactggatgaatatctgtctctccc

SEQ ID NO: 195259 - DNA, 33 bp, Homo sapien
ttgtcttttctctggcaataatgaccttcaggt

SEQ ID NO: 195260 - DNA, 33 bp, Homo sapien
ttgtcttttctctggcgataatgaccttcaggt

SEQ ID NO: 195261 - DNA, 33 bp, Homo sapien
ttgagagttcttcctacggtcaaagaaaaggga

SEQ ID NO: 195262 - DNA, 33 bp, Homo sapien
ttgagagttcttcctatggtcaaagaaaaggga

SEQ ID NO: 195263 - DNA, 33 bp, Homo sapien
gtttgggtctactggcaacaataaactatctcc

SEQ ID NO: 195264 - DNA, 33 bp, Homo sapien
gtttgggtctactggcgacaataaactatctcc

SEQ ID NO: 195265 - DNA, 33 bp, Homo sapien
gaatcaactcaaaacactgagaagttattacac

SEQ ID NO: 195266 - DNA, 33 bp, Homo sapien
gaatcaactcaaaacagtgagaagttattacac

SEQ ID NO: 195267 - DNA, 33 bp, Homo sapien
ggactttagcaaagccaaaaagcaatccagtga

SEQ ID NO: 195268 - DNA, 33 bp, Homo sapien
ggactttagcaaagccgaaaagcaatccagtga

SEQ ID NO: 195269 - DNA, 33 bp, Homo sapien
ctagcccctaatccaagatctccacgtaagcct

SEQ ID NO: 195270 - DNA, 33 bp, Homo sapien
ctagcccctaatccaatatctccacgtaagcct

SEQ ID NO: 195271 - DNA, 33 bp, Homo sapien
tgatgtatgtagagtacgtagacagtgcctggc

SEQ ID NO: 195272 - DNA, 33 bp, Homo sapien
tgatgtatgtagagtatgtagacagtgcctggc

SEQ ID NO: 195273 - DNA, 33 bp, Homo sapien
acctggtctcaaatggaacaaccaggaagattg

SEQ ID NO: 195274 - DNA, 33 bp, Homo sapien
acctggtctcaaatgggacaaccaggaagattg

SEQ ID NO: 195275 - DNA, 33 bp, Homo sapien
cactttctatgcctccactaacataatccatac

SEQ ID NO: 195276 - DNA, 33 bp, Homo sapien
cactttctatgcctccgctaacataatccatac

SEQ ID NO: 195277 - DNA, 33 bp, Homo sapien
ggatttcatttcctccacagtgtctactttcct

SEQ ID NO: 195278 - DNA, 33 bp, Homo sapien
ggatttcatttcctccgcagtgtctactttcct

SEQ ID NO: 195279 - DNA, 33 bp, Homo sapien
ctctgtctttgccttcaccgttttccctgtagg

SEQ ID NO: 195280 - DNA, 33 bp, Homo sapien
ctctgtctttgccttcgccgttttccctgtagg

SEQ ID NO: 195281 - DNA, 33 bp, Homo sapien
cacagttgtcaaacacgaatttcgcctaaagcc

SEQ ID NO: 195282 - DNA, 33 bp, Homo sapien
cacagttgtcaaacactaatttcgcctaaagcc

SEQ ID NO: 195283 - DNA, 33 bp, Homo sapien
aaagtttctaactgtaaattcctcaccaggact

SEQ ID NO: 195284 - DNA, 33 bp, Homo sapien
aaagtttctaactgtatattcctcaccaggact

SEQ ID NO: 195285 - DNA, 33 bp, Homo sapien
acaagcatactccatcaatagttggataaactg

SEQ ID NO: 195286 - DNA, 33 bp, Homo sapien
acaagcatactccatcgatagttggataaactg

SEQ ID NO: 195287 - DNA, 33 bp, Homo sapien
tacttctgcccatatgaaaccttctactcatct

SEQ ID NO: 195288 - DNA, 33 bp, Homo sapien
tacttctgcccatatggaaccttctactcatct

SEQ ID NO: 195289 - DNA, 33 bp, Homo sapien
acagggtccaagtcagaaaggaccttgactatc

SEQ ID NO: 195290 - DNA, 33 bp, Homo sapien
acagggtccaagtcaggaaggaccttgactatc

SEQ ID NO: 195291 - DNA, 33 bp, Homo sapien
gtgcttccttctcagaagtccaattcacagaga

SEQ ID NO: 195292 - DNA, 33 bp, Homo sapien
gtgcttccttctcagaggtccaattcacagaga

SEQ ID NO: 195293 - DNA, 33 bp, Homo sapien
atttggctggggagcactgagggacctcctggc

SEQ ID NO: 195294 - DNA, 33 bp, Homo sapien
atttggctggggagcattgagggacctcctggc

SEQ ID NO: 195295 - DNA, 33 bp, Homo sapien
gagagatgagctggaccagaatggtatcagtgg

SEQ ID NO: 195296 - DNA, 33 bp, Homo sapien
gagagatgagctggactagaatggtatcagtgg

SEQ ID NO: 195297 - DNA, 33 bp, Homo sapien
agggtattttacgggaactctataaagcaggaa

SEQ ID NO: 195298 - DNA, 33 bp, Homo sapien
agggtattttacgggacctctataaagcaggaa

SEQ ID NO: 195299 - DNA, 33 bp, Homo sapien
attcctgagctaggacaaggcccagttctgata

SEQ ID NO: 195300 - DNA, 33 bp, Homo sapien
attcctgagctaggacgaggcccagttctgata

SEQ ID NO: 195301 - DNA, 33 bp, Homo sapien
tggtgtaagagtcaggcatcaggtgccaccagg

SEQ ID NO: 195302 - DNA, 33 bp, Homo sapien
tggtgtaagagtcaggtatcaggtgccaccagg

SEQ ID NO: 195303 - DNA, 33 bp, Homo sapien
ataacatgcatatcaaacacatacttttgtcca

SEQ ID NO: 195304 - DNA, 33 bp, Homo sapien
ataacatgcatatcaatcacatacttttgtcca

SEQ ID NO: 195305 - DNA, 33 bp, Homo sapien
ccctgatggccttaaaatgaagtgggctctctg

SEQ ID NO: 195306 - DNA, 33 bp, Homo sapien
ccctgatggccttaaactgaagtgggctctctg

SEQ ID NO: 195307 - DNA, 33 bp, Homo sapien
gcgtagagcattaaccaatgtgacctagactgt

SEQ ID NO: 195308 - DNA, 33 bp, Homo sapien
gcgtagagcattaaccgatgtgacctagactgt

SEQ ID NO: 195309 - DNA, 33 bp, Homo sapien
ctcttcatagtctgaaacctggagggagcaaaa

SEQ ID NO: 195310 - DNA, 33 bp, Homo sapien
ctcttcatagtctgaatcctggagggagcaaaa

SEQ ID NO: 195311 - DNA, 33 bp, Homo sapien
cctgtattcgggaaaacgctggtgtgaccagat

SEQ ID NO: 195312 - DNA, 33 bp, Homo sapien
cctgtattcgggaaaatgctggtgtgaccagat

SEQ ID NO: 195313 - DNA, 33 bp, Homo sapien
agcaaggccagttaaacgtttgccaggcctcgt

SEQ ID NO: 195314 - DNA, 33 bp, Homo sapien
agcaaggccagttaaaggtttgccaggcctcgt

SEQ ID NO: 195315 - DNA, 33 bp, Homo sapien
tgtttaccaaaagaccactggatgtcataattg

SEQ ID NO: 195316 - DNA, 33 bp, Homo sapien
tgtttaccaaaagaccgctggatgtcataattg

SEQ ID NO: 195317 - DNA, 33 bp, Homo sapien
aatcaggatatataaaatgttccttgcattcca

SEQ ID NO: 195318 - DNA, 33 bp, Homo sapien
aatcaggatatataaactgttccttgcattcca

SEQ ID NO: 195319 - DNA, 33 bp, Homo sapien
tgtcctttttagtgtaagtattgcagcctccaa

SEQ ID NO: 195320 - DNA, 33 bp, Homo sapien
tgtcctttttagtgtaggtattgcagcctccaa

SEQ ID NO: 195321 - DNA, 33 bp, Homo sapien
agctttagttaatgtacgtcacttgattcttac

SEQ ID NO: 195322 - DNA, 33 bp, Homo sapien
agctttagttaatgtatgtcacttgattcttac

SEQ ID NO: 195323 - DNA, 33 bp, Homo sapien
cactcatgctaggtgacatgttatcagactgaa

SEQ ID NO: 195324 - DNA, 33 bp, Homo sapien
cactcatgctaggtgatatgttatcagactgaa

SEQ ID NO: 195325 - DNA, 33 bp, Homo sapien
tagaatctaccaaacacgtcaacagtcaactct

SEQ ID NO: 195326 - DNA, 33 bp, Homo sapien
tagaatctaccaaacatgtcaacagtcaactct

SEQ ID NO: 195327 - DNA, 33 bp, Homo sapien
actgggatatctacacggaacaagggcttccca

SEQ ID NO: 195328 - DNA, 33 bp, Homo sapien
actgggatatctacactgaacaagggcttccca

SEQ ID NO: 195329 - DNA, 33 bp, Homo sapien
tggaaaaattagggctcaatctgggagttctgt

SEQ ID NO: 195330 - DNA, 33 bp, Homo sapien
tggaaaaattagggctgaatctgggagttctgt

SEQ ID NO: 195331 - DNA, 33 bp, Homo sapien
ctaagaagcctatacaatcatacttcagagata

SEQ ID NO: 195332 - DNA, 33 bp, Homo sapien
ctaagaagcctatacagtcatacttcagagata

SEQ ID NO: 195333 - DNA, 33 bp, Homo sapien
aagcgaatctccacacacaattttccctcaaat

SEQ ID NO: 195334 - DNA, 33 bp, Homo sapien
aagcgaatctccacacgcaattttccctcaaat

SEQ ID NO: 195335 - DNA, 33 bp, Homo sapien
taagtaagacacgtgaacgctaggaaaagcagg

SEQ ID NO: 195336 - DNA, 33 bp, Homo sapien
taagtaagacacgtgagcgctaggaaaagcagg

SEQ ID NO: 195337 - DNA, 33 bp, Homo sapien
gttcagctgaggtctagccttaatctgatctcc

SEQ ID NO: 195338 - DNA, 33 bp, Homo sapien
gttcagctgaggtctatccttaatctgatctcc

SEQ ID NO: 195339 - DNA, 33 bp, Homo sapien
agaggagtaaagggaaatcctctcaaagggcag

SEQ ID NO: 195340 - DNA, 33 bp, Homo sapien
agaggagtaaagggaagtcctctcaaagggcag

SEQ ID NO: 195341 - DNA, 33 bp, Homo sapien
caaaattgcactaaaaaatgccccaggggagcc

SEQ ID NO: 195342 - DNA, 33 bp, Homo sapien
caaaattgcactaaaagatgccccaggggagcc

SEQ ID NO: 195343 - DNA, 33 bp, Homo sapien
ctcatttggtcctcataataaccctacaagtta

SEQ ID NO: 195344 - DNA, 33 bp, Homo sapien
ctcatttggtcctcatcataaccctacaagtta

SEQ ID NO: 195345 - DNA, 33 bp, Homo sapien
taagagaggagaagagaaaacggtcaggaggca

SEQ ID NO: 195346 - DNA, 33 bp, Homo sapien
taagagaggagaagagcaaacggtcaggaggca

SEQ ID NO: 195347 - DNA, 33 bp, Homo sapien
ggcatgtggaagttcaactccgcgccggaagca

SEQ ID NO: 195348 - DNA, 33 bp, Homo sapien
ggcatgtggaagttcatctccgcgccggaagca

SEQ ID NO: 195349 - DNA, 33 bp, Homo sapien
ccagcagcgacgacacaacagaatctcagcggc

SEQ ID NO: 195350 - DNA, 33 bp, Homo sapien
ccagcagcgacgacacgacagaatctcagcggc

SEQ ID NO: 195351 - DNA, 33 bp, Homo sapien
tacctggactttcagactagccattctgtcaat

SEQ ID NO: 195352 - DNA, 33 bp, Homo sapien
tacctggactttcagagtagccattctgtcaat

SEQ ID NO: 195353 - DNA, 33 bp, Homo sapien
actgttctccaacttacgcttgtgtccatatgt

SEQ ID NO: 195354 - DNA, 33 bp, Homo sapien
actgttctccaacttatgcttgtgtccatatgt

SEQ ID NO: 195355 - DNA, 33 bp, Homo sapien
tgtttacctgtaacatcactcaacctccactga

SEQ ID NO: 195356 - DNA, 33 bp, Homo sapien
tgtttacctgtaacatgactcaacctccactga

SEQ ID NO: 195357 - DNA, 33 bp, Homo sapien
gggacaaagacagacacatttcaaaagtaccac

SEQ ID NO: 195358 - DNA, 33 bp, Homo sapien
gggacaaagacagacatatttcaaaagtaccac

SEQ ID NO: 195359 - DNA, 33 bp, Homo sapien
ttaaacgaaataaacaatgtggttcctcagtca

SEQ ID NO: 195360 - DNA, 33 bp, Homo sapien
ttaaacgaaataaacagtgtggttcctcagtca

SEQ ID NO: 195361 - DNA, 33 bp, Homo sapien
tttggccaatatatagcaaacgaccagcatcct

SEQ ID NO: 195362 - DNA, 33 bp, Homo sapien
tttggccaatatatagtaaacgaccagcatcct

SEQ ID NO: 195363 - DNA, 33 bp, Homo sapien
agcctgtggctttaccaccaagttcaggaatgt

SEQ ID NO: 195364 - DNA, 33 bp, Homo sapien
agcctgtggctttaccgccaagttcaggaatgt

SEQ ID NO: 195365 - DNA, 33 bp, Homo sapien
gaactacattttgttacataaatcaccactcag

SEQ ID NO: 195366 - DNA, 33 bp, Homo sapien
gaactacattttgttatataaatcaccactcag

SEQ ID NO: 195367 - DNA, 33 bp, Homo sapien
agttctcaggggctccactaaggtgtgtgcaat

SEQ ID NO: 195368 - DNA, 33 bp, Homo sapien
agttctcaggggctccgctaaggtgtgtgcaat

SEQ ID NO: 195369 - DNA, 33 bp, Homo sapien
gcttatcatgctgtacgcaatactatccagaaa

SEQ ID NO: 195370 - DNA, 33 bp, Homo sapien
gcttatcatgctgtactcaatactatccagaaa

SEQ ID NO: 195371 - DNA, 33 bp, Homo sapien
ggctaaggggaggttacgaagcatcttcaaagc

SEQ ID NO: 195372 - DNA, 33 bp, Homo sapien
ggctaaggggaggttatgaagcatcttcaaagc

SEQ ID NO: 195373 - DNA, 33 bp, Homo sapien
gaatgcatcgatcctccagagaagttatttcaa

SEQ ID NO: 195374 - DNA, 33 bp, Homo sapien
gaatgcatcgatcctctagagaagttatttcaa

SEQ ID NO: 195375 - DNA, 33 bp, Homo sapien
ccagccagtctcctggaccaagagctggctttg

SEQ ID NO: 195376 - DNA, 33 bp, Homo sapien
ccagccagtctcctgggccaagagctggctttg

SEQ ID NO: 195377 - DNA, 33 bp, Homo sapien
gcaggggagggaagccaagtgaaccctccacac

SEQ ID NO: 195378 - DNA, 33 bp, Homo sapien
gcaggggagggaagccgagtgaaccctccacac

SEQ ID NO: 195379 - DNA, 33 bp, Homo sapien
agggttgggcgtcaatcaggagctgaggatgtt

SEQ ID NO: 195380 - DNA, 33 bp, Homo sapien
agggttgggcgtcaattaggagctgaggatgtt

SEQ ID NO: 195381 - DNA, 33 bp, Homo sapien
ggccaggccacaatacccaataacccttgtttt

SEQ ID NO: 195382 - DNA, 33 bp, Homo sapien
ggccaggccacaatactcaataacccttgtttt

SEQ ID NO: 195383 - DNA, 33 bp, Homo sapien
agcagagcttatgccacgtcagggtttgtgaca

SEQ ID NO: 195384 - DNA, 33 bp, Homo sapien
agcagagcttatgccaggtcagggtttgtgaca

SEQ ID NO: 195385 - DNA, 33 bp, Homo sapien
ctcttgtctgcttccccgattataagctccatg

SEQ ID NO: 195386 - DNA, 33 bp, Homo sapien
ctcttgtctgcttccctgattataagctccatg

SEQ ID NO: 195387 - DNA, 33 bp, Homo sapien
tggttggagttctgtacagtgttgagtttccga

SEQ ID NO: 195388 - DNA, 33 bp, Homo sapien
tggttggagttctgtatagtgttgagtttccga

SEQ ID NO: 195389 - DNA, 33 bp, Homo sapien
gccacttcctgggcccaacgtaaaggtgccttg

SEQ ID NO: 195390 - DNA, 33 bp, Homo sapien
gccacttcctgggcccgacgtaaaggtgccttg

SEQ ID NO: 195391 - DNA, 33 bp, Homo sapien
tctaccaggatgacaaacagtttgtggacatgc

SEQ ID NO: 195392 - DNA, 33 bp, Homo sapien
tctaccaggatgacaagcagtttgtggacatgc

SEQ ID NO: 195393 - DNA, 33 bp, Homo sapien
atgctggcccacatcaaagtaatctcaacactt

SEQ ID NO: 195394 - DNA, 33 bp, Homo sapien
atgctggcccacatcacagtaatctcaacactt

SEQ ID NO: 195395 - DNA, 33 bp, Homo sapien
acaccacaccagggacaggatcttgagccattc

SEQ ID NO: 195396 - DNA, 33 bp, Homo sapien
acaccacaccagggacgggatcttgagccattc

SEQ ID NO: 195397 - DNA, 33 bp, Homo sapien
cagataacagtgagaggccctgaatttcacacc

SEQ ID NO: 195398 - DNA, 33 bp, Homo sapien
cagataacagtgagagtccctgaatttcacacc

SEQ ID NO: 195399 - DNA, 33 bp, Homo sapien
atgtaataaaaggaaactgaattgtacacttaa

SEQ ID NO: 195400 - DNA, 33 bp, Homo sapien
atgtaataaaaggaaattgaattgtacacttaa

SEQ ID NO: 195401 - DNA, 33 bp, Homo sapien
aggaagacagatgccccccaaaaagaagaaaaa

SEQ ID NO: 195402 - DNA, 33 bp, Homo sapien
aggaagacagatgccctccaaaaagaagaaaaa

SEQ ID NO: 195403 - DNA, 33 bp, Homo sapien
ctggacggaaatgtaaagggaatgaaggaaagc

SEQ ID NO: 195404 - DNA, 33 bp, Homo sapien
ctggacggaaatgtaatgggaatgaaggaaagc

SEQ ID NO: 195405 - DNA, 33 bp, Homo sapien
agggcaaacgcttcccaacatcccccgtggcgg

SEQ ID NO: 195406 - DNA, 33 bp, Homo sapien
agggcaaacgcttcccgacatcccccgtggcgg

SEQ ID NO: 195407 - DNA, 33 bp, Homo sapien
ctcagctgctgaaatgaagtcaactgcagtgtt

SEQ ID NO: 195408 - DNA, 33 bp, Homo sapien
ctcagctgctgaaatggagtcaactgcagtgtt

SEQ ID NO: 195409 - DNA, 33 bp, Homo sapien
ttgccaggaacatgaccgaggcctgcacagtga

SEQ ID NO: 195410 - DNA, 33 bp, Homo sapien
ttgccaggaacatgactgaggcctgcacagtga

SEQ ID NO: 195411 - DNA, 33 bp, Homo sapien
agtataatggtaagaaatgtaagcgtgtcagat

SEQ ID NO: 195412 - DNA, 33 bp, Homo sapien
agtataatggtaagaactgtaagcgtgtcagat

SEQ ID NO: 195413 - DNA, 33 bp, Homo sapien
gattctgtttttagaacggaagcataacagatc

SEQ ID NO: 195414 - DNA, 33 bp, Homo sapien
gattctgtttttagaatggaagcataacagatc

SEQ ID NO: 195415 - DNA, 33 bp, Homo sapien
tttgcagacataattaaggtcctaagtcagttg

SEQ ID NO: 195416 - DNA, 33 bp, Homo sapien
tttgcagacataattagggtcctaagtcagttg

SEQ ID NO: 195417 - DNA, 33 bp, Homo sapien
ggtggtagaaaacataataacagccgtgcacgg

SEQ ID NO: 195418 - DNA, 33 bp, Homo sapien
ggtggtagaaaacatagtaacagccgtgcacgg

SEQ ID NO: 195419 - DNA, 33 bp, Homo sapien
tctaacattttgtgaaccctttgacactgccgt

SEQ ID NO: 195420 - DNA, 33 bp, Homo sapien
tctaacattttgtgaatcctttgacactgccgt

SEQ ID NO: 195421 - DNA, 33 bp, Homo sapien
tgtctaccattgggaccggagacacatcttgta

SEQ ID NO: 195422 - DNA, 33 bp, Homo sapien
tgtctaccattgggactggagacacatcttgta

SEQ ID NO: 195423 - DNA, 33 bp, Homo sapien
ggatcagtcaagctcaaagcaagattgaataac

SEQ ID NO: 195424 - DNA, 33 bp, Homo sapien
ggatcagtcaagctcagagcaagattgaataac

SEQ ID NO: 195425 - DNA, 33 bp, Homo sapien
ccaaccctgctgccaacttagacaacactcttt

SEQ ID NO: 195426 - DNA, 33 bp, Homo sapien
ccaaccctgctgccaatttagacaacactcttt

SEQ ID NO: 195427 - DNA, 33 bp, Homo sapien
agtctggctgtcaatacgcacagcagttatgga

SEQ ID NO: 195428 - DNA, 33 bp, Homo sapien
agtctggctgtcaataggcacagcagttatgga

SEQ ID NO: 195429 - DNA, 33 bp, Homo sapien
ggctttaggcttgaacaggcagaaaactatggg

SEQ ID NO: 195430 - DNA, 33 bp, Homo sapien
ggctttaggcttgaacgggcagaaaactatggg

SEQ ID NO: 195431 - DNA, 33 bp, Homo sapien
gataaatcagaagtaacagagccatacaataaa

SEQ ID NO: 195432 - DNA, 33 bp, Homo sapien
gataaatcagaagtaatagagccatacaataaa

SEQ ID NO: 195433 - DNA, 33 bp, Homo sapien
tagttaatttaggagacgtaattgttttaaatt

SEQ ID NO: 195434 - DNA, 33 bp, Homo sapien
tagttaatttaggagatgtaattgttttaaatt

SEQ ID NO: 195435 - DNA, 33 bp, Homo sapien
ataatactttaactcaaattacaatcaaatgtg

SEQ ID NO: 195436 - DNA, 33 bp, Homo sapien
ataatactttaactcatattacaatcaaatgtg

SEQ ID NO: 195437 - DNA, 33 bp, Homo sapien
ctagtcaatctgcagacacttttattgattctt

SEQ ID NO: 195438 - DNA, 33 bp, Homo sapien
ctagtcaatctgcagagacttttattgattctt

SEQ ID NO: 195439 - DNA, 33 bp, Homo sapien
ccaaccttaataaacaagtgccacactctaatt

SEQ ID NO: 195440 - DNA, 33 bp, Homo sapien
ccaaccttaataaacaggtgccacactctaatt

SEQ ID NO: 195441 - DNA, 33 bp, Homo sapien
caggaacagagccccaaatatcacatgctctca

SEQ ID NO: 195442 - DNA, 33 bp, Homo sapien
caggaacagagccccagatatcacatgctctca

SEQ ID NO: 195443 - DNA, 33 bp, Homo sapien
cagttactaattatgacgactttgtactgggat

SEQ ID NO: 195444 - DNA, 33 bp, Homo sapien
cagttactaattatgatgactttgtactgggat

SEQ ID NO: 195445 - DNA, 33 bp, Homo sapien
ctgtatagtgttaggaaagctcaatgttagatt

SEQ ID NO: 195446 - DNA, 33 bp, Homo sapien
ctgtatagtgttaggagagctcaatgttagatt

SEQ ID NO: 195447 - DNA, 33 bp, Homo sapien
agatgcacttccctccccacattggtgactcct

SEQ ID NO: 195448 - DNA, 33 bp, Homo sapien
agatgcacttccctcctcacattggtgactcct

SEQ ID NO: 195449 - DNA, 33 bp, Homo sapien
aaataacttttgctaggatctgaatgttggcgt

SEQ ID NO: 195450 - DNA, 33 bp, Homo sapien
aaataacttttgctagtatctgaatgttggcgt

SEQ ID NO: 195451 - DNA, 33 bp, Homo sapien
aaatgtaaaacaaagccgctcttttctcaccaa

SEQ ID NO: 195452 - DNA, 33 bp, Homo sapien
aaatgtaaaacaaagctgctcttttctcaccaa

SEQ ID NO: 195453 - DNA, 33 bp, Homo sapien
ataagcacttgatatgaattatctcactcagcc

SEQ ID NO: 195454 - DNA, 33 bp, Homo sapien
ataagcacttgatatgtattatctcactcagcc

SEQ ID NO: 195455 - DNA, 33 bp, Homo sapien
cattcctggcctgtatcaaaaattttaaaggga

SEQ ID NO: 195456 - DNA, 33 bp, Homo sapien
cattcctggcctgtattaaaaattttaaaggga

SEQ ID NO: 195457 - DNA, 33 bp, Homo sapien
atgacaattctcactcacatgaaatggatcaaa

SEQ ID NO: 195458 - DNA, 33 bp, Homo sapien
atgacaattctcactcgcatgaaatggatcaaa

SEQ ID NO: 195459 - DNA, 33 bp, Homo sapien
ccgcattcaccgtcgcaattggagacatgattg

SEQ ID NO: 195460 - DNA, 33 bp, Homo sapien
ccgcattcaccgtcgcgattggagacatgattg

SEQ ID NO: 195461 - DNA, 33 bp, Homo sapien
tgataacaacatagataagtcatccttgggtct

SEQ ID NO: 195462 - DNA, 33 bp, Homo sapien
tgataacaacatagattagtcatccttgggtct

SEQ ID NO: 195463 - DNA, 33 bp, Homo sapien
gatacagagtcacacaatccaagatgcaggcag

SEQ ID NO: 195464 - DNA, 33 bp, Homo sapien
gatacagagtcacacagtccaagatgcaggcag

SEQ ID NO: 195465 - DNA, 33 bp, Homo sapien
aatgcacctgctgacagagaatccccattagca

SEQ ID NO: 195466 - DNA, 33 bp, Homo sapien
aatgcacctgctgacatagaatccccattagca

SEQ ID NO: 195467 - DNA, 33 bp, Homo sapien
ccatgcccagactccaatcaatcttctattgat

SEQ ID NO: 195468 - DNA, 33 bp, Homo sapien
ccatgcccagactccagtcaatcttctattgat

SEQ ID NO: 195469 - DNA, 33 bp, Homo sapien
gagcggaaagcagctcaaaggcacagtgaaggc

SEQ ID NO: 195470 - DNA, 33 bp, Homo sapien
gagcggaaagcagctcgaaggcacagtgaaggc

SEQ ID NO: 195471 - DNA, 33 bp, Homo sapien
ctaatcatccaatgctcaagaaacaacttctac

SEQ ID NO: 195472 - DNA, 33 bp, Homo sapien
ctaatcatccaatgctgaagaaacaacttctac

SEQ ID NO: 195473 - DNA, 33 bp, Homo sapien
aactcagagtcggaacagagaaaggtggactgg

SEQ ID NO: 195474 - DNA, 33 bp, Homo sapien
aactcagagtcggaacggagaaaggtggactgg

SEQ ID NO: 195475 - DNA, 33 bp, Homo sapien
tctgctttctctgagaaataggaagctcagtag

SEQ ID NO: 195476 - DNA, 33 bp, Homo sapien
tctgctttctctgagagataggaagctcagtag

SEQ ID NO: 195477 - DNA, 33 bp, Homo sapien
tttcagaagtctctcaatgaattttactcatct

SEQ ID NO: 195478 - DNA, 33 bp, Homo sapien
tttcagaagtctctcagtgaattttactcatct

SEQ ID NO: 195479 - DNA, 33 bp, Homo sapien
gcatcatcagtgttacagggaagtcactagaaa

SEQ ID NO: 195480 - DNA, 33 bp, Homo sapien
gcatcatcagtgttacggggaagtcactagaaa

SEQ ID NO: 195481 - DNA, 33 bp, Homo sapien
aaagtggaaactgagactcagacacatagagtt

SEQ ID NO: 195482 - DNA, 33 bp, Homo sapien
aaagtggaaactgagattcagacacatagagtt

SEQ ID NO: 195483 - DNA, 33 bp, Homo sapien
aatcacaagcatttgcagagtgggagaggaaac

SEQ ID NO: 195484 - DNA, 33 bp, Homo sapien
aatcacaagcatttgcggagtgggagaggaaac

SEQ ID NO: 195485 - DNA, 33 bp, Homo sapien
ggtgcctgccgtgcagcaaagggagtccgtaat

SEQ ID NO: 195486 - DNA, 33 bp, Homo sapien
ggtgcctgccgtgcagtaaagggagtccgtaat

SEQ ID NO: 195487 - DNA, 33 bp, Homo sapien
ggccacatcagtgtcacagagcttctctggtgc

SEQ ID NO: 195488 - DNA, 33 bp, Homo sapien
ggccacatcagtgtcatagagcttctctggtgc

SEQ ID NO: 195489 - DNA, 33 bp, Homo sapien
tccggaggcagtgcaaatatcttaagagcaccc

SEQ ID NO: 195490 - DNA, 33 bp, Homo sapien
tccggaggcagtgcaagtatcttaagagcaccc

SEQ ID NO: 195491 - DNA, 33 bp, Homo sapien
gggtctcaaatatgaacgcttccaagctgttgg

SEQ ID NO: 195492 - DNA, 33 bp, Homo sapien
gggtctcaaatatgaatgcttccaagctgttgg

SEQ ID NO: 195493 - DNA, 33 bp, Homo sapien
aaccttcacacaagtacattctctcccatacac

SEQ ID NO: 195494 - DNA, 33 bp, Homo sapien
aaccttcacacaagtatattctctcccatacac

SEQ ID NO: 195495 - DNA, 33 bp, Homo sapien
acagccatgatttcaacttccacatcaactacg

SEQ ID NO: 195496 - DNA, 33 bp, Homo sapien
acagccatgatttcaatttccacatcaactacg

SEQ ID NO: 195497 - DNA, 33 bp, Homo sapien
tgccagtcttcttcaaccaggccgagcgccgag

SEQ ID NO: 195498 - DNA, 33 bp, Homo sapien
tgccagtcttcttcaatcaggccgagcgccgag

SEQ ID NO: 195499 - DNA, 33 bp, Homo sapien
tctgcctctgtgggtcaaaagtcagctcgtgct

SEQ ID NO: 195500 - DNA, 33 bp, Homo sapien
tctgcctctgtgggtcgaaagtcagctcgtgct

SEQ ID NO: 195501 - DNA, 33 bp, Homo sapien
agcagtaaacgaggaaatgaaccacagttacat

SEQ ID NO: 195502 - DNA, 33 bp, Homo sapien
agcagtaaacgaggaagtgaaccacagttacat

SEQ ID NO: 195503 - DNA, 33 bp, Homo sapien
aagttattctggagaaaaaccaatgagttcacc

SEQ ID NO: 195504 - DNA, 33 bp, Homo sapien
aagttattctggagaagaaccaatgagttcacc

SEQ ID NO: 195505 - DNA, 33 bp, Homo sapien
aggtgtaaaatagacacatcggtgagggtatat

SEQ ID NO: 195506 - DNA, 33 bp, Homo sapien
aggtgtaaaatagacatatcggtgagggtatat

SEQ ID NO: 195507 - DNA, 33 bp, Homo sapien
atgaagggtccgctctcaagcattttagctagc

SEQ ID NO: 195508 - DNA, 33 bp, Homo sapien
atgaagggtccgctcttaagcattttagctagc

SEQ ID NO: 195509 - DNA, 33 bp, Homo sapien
gtttgttttgctttcactcagttccaggcacag

SEQ ID NO: 195510 - DNA, 33 bp, Homo sapien
gtttgttttgctttcattcagttccaggcacag

SEQ ID NO: 195511 - DNA, 33 bp, Homo sapien
aagaatggagacggcacgaactgtcttttctcc

SEQ ID NO: 195512 - DNA, 33 bp, Homo sapien
aagaatggagacggcatgaactgtcttttctcc

SEQ ID NO: 195513 - DNA, 33 bp, Homo sapien
taagggagtcaaatgaatacaacagccctggac

SEQ ID NO: 195514 - DNA, 33 bp, Homo sapien
taagggagtcaaatgattacaacagccctggac

SEQ ID NO: 195515 - DNA, 33 bp, Homo sapien
gcaacagtggaggaccaagagaacagacacaat

SEQ ID NO: 195516 - DNA, 33 bp, Homo sapien
gcaacagtggaggaccgagagaacagacacaat

SEQ ID NO: 195517 - DNA, 33 bp, Homo sapien
ggcagcactctaggtgaacgaactttaggcagc

SEQ ID NO: 195518 - DNA, 33 bp, Homo sapien
ggcagcactctaggtgcacgaactttaggcagc

SEQ ID NO: 195519 - DNA, 33 bp, Homo sapien
gcttggaagaaaggaaattcagaacctggcctg

SEQ ID NO: 195520 - DNA, 33 bp, Homo sapien
gcttggaagaaaggaacttcagaacctggcctg

SEQ ID NO: 195521 - DNA, 33 bp, Homo sapien
ctctacatatgcagggaaatgtttatcttgctc

SEQ ID NO: 195522 - DNA, 33 bp, Homo sapien
ctctacatatgcaggggaatgtttatcttgctc

SEQ ID NO: 195523 - DNA, 33 bp, Homo sapien
gtggaggcggaacagggagtcaaaagggtggac

SEQ ID NO: 195524 - DNA, 33 bp, Homo sapien
gtggaggcggaacaggtagtcaaaagggtggac

SEQ ID NO: 195525 - DNA, 33 bp, Homo sapien
ggaagacacagagacaaaaaaggaacacttgga

SEQ ID NO: 195526 - DNA, 33 bp, Homo sapien
ggaagacacagagacagaaaaggaacacttgga

SEQ ID NO: 195527 - DNA, 33 bp, Homo sapien
gctttagaatttacaccatccttccaaatcgta

SEQ ID NO: 195528 - DNA, 33 bp, Homo sapien
gctttagaatttacactatccttccaaatcgta

SEQ ID NO: 195529 - DNA, 33 bp, Homo sapien
gttgaatttgagggaaaagagatgactaagaca

SEQ ID NO: 195530 - DNA, 33 bp, Homo sapien
gttgaatttgagggaagagagatgactaagaca

SEQ ID NO: 195531 - DNA, 33 bp, Homo sapien
gacttcctgaaaccaacccttagatccataagg

SEQ ID NO: 195532 - DNA, 33 bp, Homo sapien
gacttcctgaaaccaatccttagatccataagg

SEQ ID NO: 195533 - DNA, 33 bp, Homo sapien
gagacgagataagtgacggtcatatggccaggg

SEQ ID NO: 195534 - DNA, 33 bp, Homo sapien
gagacgagataagtgatggtcatatggccaggg

SEQ ID NO: 195535 - DNA, 33 bp, Homo sapien
ctgagatggcctgttcgcatgtatgtgcctgtc

SEQ ID NO: 195536 - DNA, 33 bp, Homo sapien
ctgagatggcctgttctcatgtatgtgcctgtc

SEQ ID NO: 195537 - DNA, 33 bp, Homo sapien
tcccgaggcaatgggaagtgtttaaagtttttt

SEQ ID NO: 195538 - DNA, 33 bp, Homo sapien
tcccgaggcaatgggaggtgtttaaagtttttt

SEQ ID NO: 195539 - DNA, 33 bp, Homo sapien
gtcgactcctttaaaaaaaacacatcgaagata

SEQ ID NO: 195540 - DNA, 33 bp, Homo sapien
gtcgactcctttaaaagaaacacatcgaagata

SEQ ID NO: 195541 - DNA, 33 bp, Homo sapien
agcgtatctgtctcccacaattctaaccaaacc

SEQ ID NO: 195542 - DNA, 33 bp, Homo sapien
agcgtatctgtctcccccaattctaaccaaacc

SEQ ID NO: 195543 - DNA, 33 bp, Homo sapien
tatgccttgaatcacaaaagtttttaattatgg

SEQ ID NO: 195544 - DNA, 33 bp, Homo sapien
tatgccttgaatcacagaagtttttaattatgg

SEQ ID NO: 195545 - DNA, 33 bp, Homo sapien
ttagtatacaaagccaacaaatgcctgctagag

SEQ ID NO: 195546 - DNA, 33 bp, Homo sapien
ttagtatacaaagccagcaaatgcctgctagag

SEQ ID NO: 195547 - DNA, 33 bp, Homo sapien
ggggagagaaagggaacagtattcaaagagcat

SEQ ID NO: 195548 - DNA, 33 bp, Homo sapien
ggggagagaaagggaagagtattcaaagagcat

SEQ ID NO: 195549 - DNA, 33 bp, Homo sapien
ttctaacagccagtacacacactgtttcatttt

SEQ ID NO: 195550 - DNA, 33 bp, Homo sapien
ttctaacagccagtacgcacactgtttcatttt

SEQ ID NO: 195551 - DNA, 33 bp, Homo sapien
cacaggtatactgtctaaagagctctcggtaaa

SEQ ID NO: 195552 - DNA, 33 bp, Homo sapien
cacaggtatactgtctgaagagctctcggtaaa

SEQ ID NO: 195553 - DNA, 33 bp, Homo sapien
tatgcttttgcttgcccaaatcttttgatctta

SEQ ID NO: 195554 - DNA, 33 bp, Homo sapien
tatgcttttgcttgcctaaatcttttgatctta

SEQ ID NO: 195555 - DNA, 33 bp, Homo sapien
aaaaactgtatcacaactgaccttacaactgct

SEQ ID NO: 195556 - DNA, 33 bp, Homo sapien
aaaaactgtatcacaattgaccttacaactgct

SEQ ID NO: 195557 - DNA, 33 bp, Homo sapien
ttaaaggtccttaagaaccaccaatgatgaaag

SEQ ID NO: 195558 - DNA, 33 bp, Homo sapien
ttaaaggtccttaagagccaccaatgatgaaag

SEQ ID NO: 195559 - DNA, 33 bp, Homo sapien
tcttccctaaagaccaagtaccattagacttcc

SEQ ID NO: 195560 - DNA, 33 bp, Homo sapien
tcttccctaaagaccatgtaccattagacttcc

SEQ ID NO: 195561 - DNA, 33 bp, Homo sapien
gctctgtcttgatccacccagaatgagaagtac

SEQ ID NO: 195562 - DNA, 33 bp, Homo sapien
gctctgtcttgatccagccagaatgagaagtac

SEQ ID NO: 195563 - DNA, 33 bp, Homo sapien
cccagatccagagatacgcaccgcgctttgttg

SEQ ID NO: 195564 - DNA, 33 bp, Homo sapien
cccagatccagagatatgcaccgcgctttgttg

SEQ ID NO: 195565 - DNA, 33 bp, Homo sapien
caccacgcctggccaaaaagaagttcttaaata

SEQ ID NO: 195566 - DNA, 33 bp, Homo sapien
caccacgcctggccaagaagaagttcttaaata

SEQ ID NO: 195567 - DNA, 33 bp, Homo sapien
tacagaggaggacacaagttcagaagctaaggg

SEQ ID NO: 195568 - DNA, 33 bp, Homo sapien
tacagaggaggacacaggttcagaagctaaggg

SEQ ID NO: 195569 - DNA, 33 bp, Homo sapien
attatcaaagttgctccctcaagacctttagtt

SEQ ID NO: 195570 - DNA, 33 bp, Homo sapien
attatcaaagttgctctctcaagacctttagtt

SEQ ID NO: 195571 - DNA, 33 bp, Homo sapien
attcaagaggaaagagcattgaaaagagcacag

SEQ ID NO: 195572 - DNA, 33 bp, Homo sapien
attcaagaggaaagaggattgaaaagagcacag

SEQ ID NO: 195573 - DNA, 33 bp, Homo sapien
gggcactttttagttgcaatcaggcacttgacc

SEQ ID NO: 195574 - DNA, 33 bp, Homo sapien
gggcactttttagttgtaatcaggcacttgacc

SEQ ID NO: 195575 - DNA, 33 bp, Homo sapien
agaatatctaacaatacatcatctgcatcaaaa

SEQ ID NO: 195576 - DNA, 33 bp, Homo sapien
agaatatctaacaatatatcatctgcatcaaaa

SEQ ID NO: 195577 - DNA, 33 bp, Homo sapien
atagtcacattgtcaaaggtcaaagacaaagaa

SEQ ID NO: 195578 - DNA, 33 bp, Homo sapien
atagtcacattgtcaagggtcaaagacaaagaa

SEQ ID NO: 195579 - DNA, 33 bp, Homo sapien
caccacagccagcttcaatctacatcttttaaa

SEQ ID NO: 195580 - DNA, 33 bp, Homo sapien
caccacagccagcttcgatctacatcttttaaa

SEQ ID NO: 195581 - DNA, 33 bp, Homo sapien
ctgagagacaaaggcactgattactggaaatgt

SEQ ID NO: 195582 - DNA, 33 bp, Homo sapien
ctgagagacaaaggcattgattactggaaatgt

SEQ ID NO: 195583 - DNA, 33 bp, Homo sapien
catcctgaagtcagccaatccaccgcgctgata

SEQ ID NO: 195584 - DNA, 33 bp, Homo sapien
catcctgaagtcagccgatccaccgcgctgata

SEQ ID NO: 195585 - DNA, 33 bp, Homo sapien
tgatttgtatcctgccagcctctttatgaattc

SEQ ID NO: 195586 - DNA, 33 bp, Homo sapien
tgatttgtatcctgccggcctctttatgaattc

SEQ ID NO: 195587 - DNA, 33 bp, Homo sapien
ctagacaagcaggtgcagatgaagacatcacag

SEQ ID NO: 195588 - DNA, 33 bp, Homo sapien
ctagacaagcaggtgcggatgaagacatcacag

SEQ ID NO: 195589 - DNA, 33 bp, Homo sapien
cacctgcttgtctagcccattgtggttcccatg

SEQ ID NO: 195590 - DNA, 33 bp, Homo sapien
cacctgcttgtctagctcattgtggttcccatg

SEQ ID NO: 195591 - DNA, 33 bp, Homo sapien
attatgctaagtaaaaaaattagacataaaagt

SEQ ID NO: 195592 - DNA, 33 bp, Homo sapien
attatgctaagtaaaagaattagacataaaagt

SEQ ID NO: 195593 - DNA, 33 bp, Homo sapien
tgaaaagcaatgctgaatacccagtgtgagcag

SEQ ID NO: 195594 - DNA, 33 bp, Homo sapien
tgaaaagcaatgctgagtacccagtgtgagcag

SEQ ID NO: 195595 - DNA, 33 bp, Homo sapien
ctacagccaagagtacaaacttggtttcaaaat

SEQ ID NO: 195596 - DNA, 33 bp, Homo sapien
ctacagccaagagtacgaacttggtttcaaaat

SEQ ID NO: 195597 - DNA, 33 bp, Homo sapien
atctttggggccaaaaaaaggccaacatgacag

SEQ ID NO: 195598 - DNA, 33 bp, Homo sapien
atctttggggccaaaacaaggccaacatgacag

SEQ ID NO: 195599 - DNA, 33 bp, Homo sapien
ggaatgttactcagaacagaaagaaatgagctc

SEQ ID NO: 195600 - DNA, 33 bp, Homo sapien
ggaatgttactcagaatagaaagaaatgagctc

SEQ ID NO: 195601 - DNA, 33 bp, Homo sapien
aaataatgtgcattcaaaattcctccgtgtctt

SEQ ID NO: 195602 - DNA, 33 bp, Homo sapien
aaataatgtgcattcacaattcctccgtgtctt

SEQ ID NO: 195603 - DNA, 33 bp, Homo sapien
cccgtttctcagaggacgacaccaaggccagag

SEQ ID NO: 195604 - DNA, 33 bp, Homo sapien
cccgtttctcagaggatgacaccaaggccagag

SEQ ID NO: 195605 - DNA, 33 bp, Homo sapien
tttttctcatgaagcaatctggacatgggcatc

SEQ ID NO: 195606 - DNA, 33 bp, Homo sapien
tttttctcatgaagcagtctggacatgggcatc

SEQ ID NO: 195607 - DNA, 33 bp, Homo sapien
atgtttttatcttctcaatcccacagagctccc

SEQ ID NO: 195608 - DNA, 33 bp, Homo sapien
atgtttttatcttctcgatcccacagagctccc

SEQ ID NO: 195609 - DNA, 33 bp, Homo sapien
aaaacccaggagccaaactggtgcaaacaacca

SEQ ID NO: 195610 - DNA, 33 bp, Homo sapien
aaaacccaggagccaagctggtgcaaacaacca

SEQ ID NO: 195611 - DNA, 33 bp, Homo sapien
cctgcatccattttataagccaaactctcagtg

SEQ ID NO: 195612 - DNA, 33 bp, Homo sapien
cctgcatccattttatgagccaaactctcagtg

SEQ ID NO: 195613 - DNA, 33 bp, Homo sapien
ccctctctggaagaaaacattctgaagtcaaag

SEQ ID NO: 195614 - DNA, 33 bp, Homo sapien
ccctctctggaagaaagcattctgaagtcaaag

SEQ ID NO: 195615 - DNA, 33 bp, Homo sapien
tgctgcagtgaacatacgcgtggatgtattttt

SEQ ID NO: 195616 - DNA, 33 bp, Homo sapien
tgctgcagtgaacatatgcgtggatgtattttt

SEQ ID NO: 195617 - DNA, 33 bp, Homo sapien
ttgttttattcattcaaccacactgtgtcttga

SEQ ID NO: 195618 - DNA, 33 bp, Homo sapien
ttgttttattcattcagccacactgtgtcttga

SEQ ID NO: 195619 - DNA, 33 bp, Homo sapien
ctggtgtcaacacacaatagggctcacaggtat

SEQ ID NO: 195620 - DNA, 33 bp, Homo sapien
ctggtgtcaacacacagtagggctcacaggtat

SEQ ID NO: 195621 - DNA, 33 bp, Homo sapien
cagactttccaaaatacgcttaagggtctggcc

SEQ ID NO: 195622 - DNA, 33 bp, Homo sapien
cagactttccaaaatatgcttaagggtctggcc

SEQ ID NO: 195623 - DNA, 33 bp, Homo sapien
tcatctttgttatttaactttgtttcacgtagg

SEQ ID NO: 195624 - DNA, 33 bp, Homo sapien
tcatctttgttatttacctttgtttcacgtagg

SEQ ID NO: 195625 - DNA, 33 bp, Homo sapien
cacactcatacatttacacgtgctttcatactc

SEQ ID NO: 195626 - DNA, 33 bp, Homo sapien
cacactcatacatttatacgtgctttcatactc

SEQ ID NO: 195627 - DNA, 33 bp, Homo sapien
actaatacaattatcaccccaagagataagtgc

SEQ ID NO: 195628 - DNA, 33 bp, Homo sapien
actaatacaattatcatcccaagagataagtgc

SEQ ID NO: 195629 - DNA, 33 bp, Homo sapien
ggagaatggcggccagaagaagacatatgacat

SEQ ID NO: 195630 - DNA, 33 bp, Homo sapien
ggagaatggcggccaggagaagacatatgacat

SEQ ID NO: 195631 - DNA, 33 bp, Homo sapien
gtcctgctgatgcagaaggggtctggctcctgc

SEQ ID NO: 195632 - DNA, 33 bp, Homo sapien
gtcctgctgatgcagagggggtctggctcctgc

SEQ ID NO: 195633 - DNA, 33 bp, Homo sapien
gagactgtatagtgagccacatggcatggagtg

SEQ ID NO: 195634 - DNA, 33 bp, Homo sapien
gagactgtatagtgaggcacatggcatggagtg

SEQ ID NO: 195635 - DNA, 33 bp, Homo sapien
tttttagagaagaaacagacttcacccttgctt

SEQ ID NO: 195636 - DNA, 33 bp, Homo sapien
tttttagagaagaaaccgacttcacccttgctt

SEQ ID NO: 195637 - DNA, 33 bp, Homo sapien
agtcacatcgcgctgtcaaatcactttgggaac

SEQ ID NO: 195638 - DNA, 33 bp, Homo sapien
agtcacatcgcgctgtgaaatcactttgggaac

SEQ ID NO: 195639 - DNA, 33 bp, Homo sapien
ctcactatggaataaccgagccccttcctccac

SEQ ID NO: 195640 - DNA, 33 bp, Homo sapien
ctcactatggaataactgagccccttcctccac

SEQ ID NO: 195641 - DNA, 33 bp, Homo sapien
ccagccctttccacaccgtgcacacgtgaagat

SEQ ID NO: 195642 - DNA, 33 bp, Homo sapien
ccagccctttccacactgtgcacacgtgaagat

SEQ ID NO: 195643 - DNA, 33 bp, Homo sapien
gagtgcactcagatcaaaggacatgggaggggc

SEQ ID NO: 195644 - DNA, 33 bp, Homo sapien
gagtgcactcagatcagaggacatgggaggggc

SEQ ID NO: 195645 - DNA, 33 bp, Homo sapien
caacaattgtccatcaaggtagtgaaaacaggg

SEQ ID NO: 195646 - DNA, 33 bp, Homo sapien
caacaattgtccatcagggtagtgaaaacaggg

SEQ ID NO: 195647 - DNA, 33 bp, Homo sapien
atgctggctggattagaaaaagcacctgagcca

SEQ ID NO: 195648 - DNA, 33 bp, Homo sapien
atgctggctggattaggaaaagcacctgagcca

SEQ ID NO: 195649 - DNA, 33 bp, Homo sapien
cgagatgattcccaataaacattggatgaggct

SEQ ID NO: 195650 - DNA, 33 bp, Homo sapien
cgagatgattcccaatgaacattggatgaggct

SEQ ID NO: 195651 - DNA, 33 bp, Homo sapien
tagggtggaataccacacagccgtcagaagtaa

SEQ ID NO: 195652 - DNA, 33 bp, Homo sapien
tagggtggaataccacgcagccgtcagaagtaa

SEQ ID NO: 195653 - DNA, 33 bp, Homo sapien
tatttttgcttttacacgcaagtagggagacag

SEQ ID NO: 195654 - DNA, 33 bp, Homo sapien
tatttttgcttttacatgcaagtagggagacag

SEQ ID NO: 195655 - DNA, 33 bp, Homo sapien
cggggaggggccacaacgtttgtgcttgactcc

SEQ ID NO: 195656 - DNA, 33 bp, Homo sapien
cggggaggggccacaatgtttgtgcttgactcc

SEQ ID NO: 195657 - DNA, 33 bp, Homo sapien
gaattaggggaagcaaaggaagtcccgtcccca

SEQ ID NO: 195658 - DNA, 33 bp, Homo sapien
gaattaggggaagcaagggaagtcccgtcccca

SEQ ID NO: 195659 - DNA, 33 bp, Homo sapien
aagtgaaaggatgtgacgtttagttttcttttc

SEQ ID NO: 195660 - DNA, 33 bp, Homo sapien
aagtgaaaggatgtgatgtttagttttcttttc

SEQ ID NO: 195661 - DNA, 33 bp, Homo sapien
ctagtgtctcttgttacgctctttctgtccctg

SEQ ID NO: 195662 - DNA, 33 bp, Homo sapien
ctagtgtctcttgttatgctctttctgtccctg

SEQ ID NO: 195663 - DNA, 33 bp, Homo sapien
ctagaagtagaagaacagtatcaaaaggtacgt

SEQ ID NO: 195664 - DNA, 33 bp, Homo sapien
ctagaagtagaagaaccgtatcaaaaggtacgt

SEQ ID NO: 195665 - DNA, 33 bp, Homo sapien
aagatataacccttgacctccaaaggttatagt

SEQ ID NO: 195666 - DNA, 33 bp, Homo sapien
aagatataacccttgatctccaaaggttatagt

SEQ ID NO: 195667 - DNA, 33 bp, Homo sapien
gacttttgctttggaaaattggtcctggaagtt

SEQ ID NO: 195668 - DNA, 33 bp, Homo sapien
gacttttgctttggaagattggtcctggaagtt

SEQ ID NO: 195669 - DNA, 33 bp, Homo sapien
gaatccttgaggtcaacgacaccaggacagctc

SEQ ID NO: 195670 - DNA, 33 bp, Homo sapien
gaatccttgaggtcaatgacaccaggacagctc

SEQ ID NO: 195671 - DNA, 33 bp, Homo sapien
gtagggtgaatggctacgtagttggggaacctc

SEQ ID NO: 195672 - DNA, 33 bp, Homo sapien
gtagggtgaatggctatgtagttggggaacctc

SEQ ID NO: 195673 - DNA, 33 bp, Homo sapien
tgtgcttatgttgctacgtctttgttattccat

SEQ ID NO: 195674 - DNA, 33 bp, Homo sapien
tgtgcttatgttgctatgtctttgttattccat

SEQ ID NO: 195675 - DNA, 33 bp, Homo sapien
atggatttgcctctcaagggcgtctgggtgagg

SEQ ID NO: 195676 - DNA, 33 bp, Homo sapien
atggatttgcctctcaggggcgtctgggtgagg

SEQ ID NO: 195677 - DNA, 33 bp, Homo sapien
tgtcctcctgtgacacaccatcctctgccacct

SEQ ID NO: 195678 - DNA, 33 bp, Homo sapien
tgtcctcctgtgacacgccatcctctgccacct

SEQ ID NO: 195679 - DNA, 33 bp, Homo sapien
gggtggggaacactggaaagtggggagcagatt

SEQ ID NO: 195680 - DNA, 33 bp, Homo sapien
gggtggggaacactgggaagtggggagcagatt

SEQ ID NO: 195681 - DNA, 33 bp, Homo sapien
tgcctgcacactggcactgagcattgagctgag

SEQ ID NO: 195682 - DNA, 33 bp, Homo sapien
tgcctgcacactggcattgagcattgagctgag

SEQ ID NO: 195683 - DNA, 33 bp, Homo sapien
gctgaggccttgatgaacacaccttcctcaggc

SEQ ID NO: 195684 - DNA, 33 bp, Homo sapien
gctgaggccttgatgagcacaccttcctcaggc

SEQ ID NO: 195685 - DNA, 33 bp, Homo sapien
gcaggtgcatgattacaatccacgatttatagt

SEQ ID NO: 195686 - DNA, 33 bp, Homo sapien
gcaggtgcatgattaccatccacgatttatagt

SEQ ID NO: 195687 - DNA, 33 bp, Homo sapien
gcaccgccccagttcaaaagggcttcataaaga

SEQ ID NO: 195688 - DNA, 33 bp, Homo sapien
gcaccgccccagttcagaagggcttcataaaga

SEQ ID NO: 195689 - DNA, 33 bp, Homo sapien
ggccctgggtggtaaaatcagcccttcctccag

SEQ ID NO: 195690 - DNA, 33 bp, Homo sapien
ggccctgggtggtaaagtcagcccttcctccag

SEQ ID NO: 195691 - DNA, 33 bp, Homo sapien
gggctcccaagtcttacctgaatgtcattgtta

SEQ ID NO: 195692 - DNA, 33 bp, Homo sapien
gggctcccaagtcttatctgaatgtcattgtta

SEQ ID NO: 195693 - DNA, 33 bp, Homo sapien
gtgcaaatctgtatgccccgtggacacagccaa

SEQ ID NO: 195694 - DNA, 33 bp, Homo sapien
gtgcaaatctgtatgctccgtggacacagccaa

SEQ ID NO: 195695 - DNA, 33 bp, Homo sapien
ggaagtagaaaataaaagggtacaggtcagtgt

SEQ ID NO: 195696 - DNA, 33 bp, Homo sapien
ggaagtagaaaataaaggggtacaggtcagtgt

SEQ ID NO: 195697 - DNA, 33 bp, Homo sapien
aaaatgtcattggtgcagagttcattcgtgccc

SEQ ID NO: 195698 - DNA, 33 bp, Homo sapien
aaaatgtcattggtgcggagttcattcgtgccc

SEQ ID NO: 195699 - DNA, 33 bp, Homo sapien
tgcagttcttgtatcacccatacagggaagggt

SEQ ID NO: 195700 - DNA, 33 bp, Homo sapien
tgcagttcttgtatcatccatacagggaagggt

SEQ ID NO: 195701 - DNA, 33 bp, Homo sapien
gggctgtctccatccaacaacaacaaaaaaaat

SEQ ID NO: 195702 - DNA, 33 bp, Homo sapien
gggctgtctccatccatcaacaacaaaaaaaat

SEQ ID NO: 195703 - DNA, 33 bp, Homo sapien
ggccctcaatgatacccctgtgctgagggcctg

SEQ ID NO: 195704 - DNA, 33 bp, Homo sapien
ggccctcaatgatacctctgtgctgagggcctg

SEQ ID NO: 195705 - DNA, 33 bp, Homo sapien
aagatggaagtgaaaaataggagattctgagtg

SEQ ID NO: 195706 - DNA, 33 bp, Homo sapien
aagatggaagtgaaaagtaggagattctgagtg

SEQ ID NO: 195707 - DNA, 33 bp, Homo sapien
gctcaattgtttcctcaaaaatcagcatcctca

SEQ ID NO: 195708 - DNA, 33 bp, Homo sapien
gctcaattgtttcctcgaaaatcagcatcctca

SEQ ID NO: 195709 - DNA, 33 bp, Homo sapien
ttttatagacgagaaaaaaaagtcacagagctt

SEQ ID NO: 195710 - DNA, 33 bp, Homo sapien
ttttatagacgagaaagaaaagtcacagagctt

SEQ ID NO: 195711 - DNA, 33 bp, Homo sapien
tggcaccaacgggacacataaatgtctttcagc

SEQ ID NO: 195712 - DNA, 33 bp, Homo sapien
tggcaccaacgggacagataaatgtctttcagc

SEQ ID NO: 195713 - DNA, 33 bp, Homo sapien
acttcagagagtgctaagaagataaggtgagag

SEQ ID NO: 195714 - DNA, 33 bp, Homo sapien
acttcagagagtgctaggaagataaggtgagag

SEQ ID NO: 195715 - DNA, 33 bp, Homo sapien
tagagtgccacagacaatattatgacaatttgc

SEQ ID NO: 195716 - DNA, 33 bp, Homo sapien
tagagtgccacagacagtattatgacaatttgc

SEQ ID NO: 195717 - DNA, 33 bp, Homo sapien
ctggaggggaagaggacatactgcagagcttgg

SEQ ID NO: 195718 - DNA, 33 bp, Homo sapien
ctggaggggaagaggagatactgcagagcttgg

SEQ ID NO: 195719 - DNA, 33 bp, Homo sapien
caatctggctattgaaatgtaaacacagaagta

SEQ ID NO: 195720 - DNA, 33 bp, Homo sapien
caatctggctattgaagtgtaaacacagaagta

SEQ ID NO: 195721 - DNA, 33 bp, Homo sapien
attaaatatttgtttacgacatccgtttctatg

SEQ ID NO: 195722 - DNA, 33 bp, Homo sapien
attaaatatttgtttatgacatccgtttctatg

SEQ ID NO: 195723 - DNA, 33 bp, Homo sapien
gtcccaagtatgcaaaatctatagcaggggatg

SEQ ID NO: 195724 - DNA, 33 bp, Homo sapien
gtcccaagtatgcaaagtctatagcaggggatg

SEQ ID NO: 195725 - DNA, 33 bp, Homo sapien
agcttttgatttccgacgaaaaaggagaaaata

SEQ ID NO: 195726 - DNA, 33 bp, Homo sapien
agcttttgatttccgatgaaaaaggagaaaata

SEQ ID NO: 195727 - DNA, 33 bp, Homo sapien
caggagggaacatggaactcattgcatccatgc

SEQ ID NO: 195728 - DNA, 33 bp, Homo sapien
caggagggaacatggacctcattgcatccatgc

SEQ ID NO: 195729 - DNA, 33 bp, Homo sapien
ccaggatctttgtaaaagcattttgtatgccat

SEQ ID NO: 195730 - DNA, 33 bp, Homo sapien
ccaggatctttgtaaaggcattttgtatgccat

SEQ ID NO: 195731 - DNA, 33 bp, Homo sapien
tctagtaggcccacggcagtaaggcaacaccca

SEQ ID NO: 195732 - DNA, 33 bp, Homo sapien
tctagtaggcccacggtagtaaggcaacaccca

SEQ ID NO: 195733 - DNA, 33 bp, Homo sapien
ggctggattttaagccgcatttgtcagagttaa

SEQ ID NO: 195734 - DNA, 33 bp, Homo sapien
ggctggattttaagcctcatttgtcagagttaa

SEQ ID NO: 195735 - DNA, 33 bp, Homo sapien
ctcactgctctgcccactggatgcacctgagtc

SEQ ID NO: 195736 - DNA, 33 bp, Homo sapien
ctcactgctctgcccagtggatgcacctgagtc

SEQ ID NO: 195737 - DNA, 33 bp, Homo sapien
aaggaaatcaagatataaacagatgattgcaat

SEQ ID NO: 195738 - DNA, 33 bp, Homo sapien
aaggaaatcaagatatgaacagatgattgcaat

SEQ ID NO: 195739 - DNA, 33 bp, Homo sapien
acaatcgagggggataaggtgaacaatccctca

SEQ ID NO: 195740 - DNA, 33 bp, Homo sapien
acaatcgagggggatagggtgaacaatccctca

SEQ ID NO: 195741 - DNA, 33 bp, Homo sapien
cagacaccccaccttcacattgagagctgtagc

SEQ ID NO: 195742 - DNA, 33 bp, Homo sapien
cagacaccccaccttcgcattgagagctgtagc

SEQ ID NO: 195743 - DNA, 33 bp, Homo sapien
catacagacttggggaaggcacagataagtaca

SEQ ID NO: 195744 - DNA, 33 bp, Homo sapien
catacagacttggggagggcacagataagtaca

SEQ ID NO: 195745 - DNA, 33 bp, Homo sapien
ttcatgcagccttatacataatagccaaacctg

SEQ ID NO: 195746 - DNA, 33 bp, Homo sapien
ttcatgcagccttatatataatagccaaacctg

SEQ ID NO: 195747 - DNA, 33 bp, Homo sapien
ggaatgggaattctcacacatacaaggatgctg

SEQ ID NO: 195748 - DNA, 33 bp, Homo sapien
ggaatgggaattctcatacatacaaggatgctg

SEQ ID NO: 195749 - DNA, 33 bp, Homo sapien
gcaggtggactctttaaagctattctgttctgc

SEQ ID NO: 195750 - DNA, 33 bp, Homo sapien
gcaggtggactctttacagctattctgttctgc

SEQ ID NO: 195751 - DNA, 33 bp, Homo sapien
ttgtgcccttatcacccgcaagctctgagatgc

SEQ ID NO: 195752 - DNA, 33 bp, Homo sapien
ttgtgcccttatcacctgcaagctctgagatgc

SEQ ID NO: 195753 - DNA, 33 bp, Homo sapien
cccatcacttagacagaaaactgggcaaagctg

SEQ ID NO: 195754 - DNA, 33 bp, Homo sapien
cccatcacttagacaggaaactgggcaaagctg

SEQ ID NO: 195755 - DNA, 33 bp, Homo sapien
caagatctgtgagtgacgtaaagctttctggta

SEQ ID NO: 195756 - DNA, 33 bp, Homo sapien
caagatctgtgagtgatgtaaagctttctggta

SEQ ID NO: 195757 - DNA, 33 bp, Homo sapien
gggaaggtggcaagcaggcaggccatgtcatca

SEQ ID NO: 195758 - DNA, 33 bp, Homo sapien
gggaaggtggcaagcatgcaggccatgtcatca

SEQ ID NO: 195759 - DNA, 33 bp, Homo sapien
atttctacgggacctcacgagcagcataactaa

SEQ ID NO: 195760 - DNA, 33 bp, Homo sapien
atttctacgggacctcgcgagcagcataactaa

SEQ ID NO: 195761 - DNA, 33 bp, Homo sapien
tattactcaaataaacagacctatcatttgaac

SEQ ID NO: 195762 - DNA, 33 bp, Homo sapien
tattactcaaataaacggacctatcatttgaac

SEQ ID NO: 195763 - DNA, 33 bp, Homo sapien
acacacatatctaatcacacccatttttgtctt

SEQ ID NO: 195764 - DNA, 33 bp, Homo sapien
acacacatatctaatcgcacccatttttgtctt

SEQ ID NO: 195765 - DNA, 33 bp, Homo sapien
aatgcaaatcatcaggacaagcatttgtgacat

SEQ ID NO: 195766 - DNA, 33 bp, Homo sapien
aatgcaaatcatcaggccaagcatttgtgacat

SEQ ID NO: 195767 - DNA, 33 bp, Homo sapien
agccgcctcgacaaccaaaggagctgtcaacat

SEQ ID NO: 195768 - DNA, 33 bp, Homo sapien
agccgcctcgacaaccgaaggagctgtcaacat

SEQ ID NO: 195769 - DNA, 33 bp, Homo sapien
catctctgccgtcaaacgcacctctctgtccca

SEQ ID NO: 195770 - DNA, 33 bp, Homo sapien
catctctgccgtcaaatgcacctctctgtccca

SEQ ID NO: 195771 - DNA, 33 bp, Homo sapien
ggtccatctgatcacacactagtgtcgttagcc

SEQ ID NO: 195772 - DNA, 33 bp, Homo sapien
ggtccatctgatcacagactagtgtcgttagcc

SEQ ID NO: 195773 - DNA, 33 bp, Homo sapien
ctgggctttgctggacacgctttctgtcgtgca

SEQ ID NO: 195774 - DNA, 33 bp, Homo sapien
ctgggctttgctggacgcgctttctgtcgtgca

SEQ ID NO: 195775 - DNA, 33 bp, Homo sapien
taaccgatcaatctgcaatcacagctgctttcc

SEQ ID NO: 195776 - DNA, 33 bp, Homo sapien
taaccgatcaatctgcgatcacagctgctttcc

SEQ ID NO: 195777 - DNA, 33 bp, Homo sapien
ccagcagcatgacctcccttgacttctctgagc

SEQ ID NO: 195778 - DNA, 33 bp, Homo sapien
ccagcagcatgacctcgcttgacttctctgagc

SEQ ID NO: 195779 - DNA, 33 bp, Homo sapien
taatacagaacataacagccattacctgggcta

SEQ ID NO: 195780 - DNA, 33 bp, Homo sapien
taatacagaacataacggccattacctgggcta

SEQ ID NO: 195781 - DNA, 33 bp, Homo sapien
tgacagcaacgcctcgccccgcctgccggctcc

SEQ ID NO: 195782 - DNA, 33 bp, Homo sapien
tgacagcaacgcctcgtcccgcctgccggctcc

SEQ ID NO: 195783 - DNA, 33 bp, Homo sapien
acatatatgaagtacccacaaggtgccaggcac

SEQ ID NO: 195784 - DNA, 33 bp, Homo sapien
acatatatgaagtacctacaaggtgccaggcac

SEQ ID NO: 195785 - DNA, 33 bp, Homo sapien
ggacatctttgcagaacttccaggctgtgggta

SEQ ID NO: 195786 - DNA, 33 bp, Homo sapien
ggacatctttgcagaatttccaggctgtgggta

SEQ ID NO: 195787 - DNA, 33 bp, Homo sapien
gtgatgagtagcacaactattcaggagaggtgg

SEQ ID NO: 195788 - DNA, 33 bp, Homo sapien
gtgatgagtagcacaagtattcaggagaggtgg

SEQ ID NO: 195789 - DNA, 33 bp, Homo sapien
tatttcaatctttcagacattcatgtttcgttc

SEQ ID NO: 195790 - DNA, 33 bp, Homo sapien
tatttcaatctttcagccattcatgtttcgttc

SEQ ID NO: 195791 - DNA, 33 bp, Homo sapien
actattctagtaggaaactgactcttaaaaact

SEQ ID NO: 195792 - DNA, 33 bp, Homo sapien
actattctagtaggaacctgactcttaaaaact

SEQ ID NO: 195793 - DNA, 33 bp, Homo sapien
gtggagggaggtagacaggctagaagaaggcaa

SEQ ID NO: 195794 - DNA, 33 bp, Homo sapien
gtggagggaggtagaccggctagaagaaggcaa

SEQ ID NO: 195795 - DNA, 33 bp, Homo sapien
ttgatgacagatctcaagaaaatgcgttttgga

SEQ ID NO: 195796 - DNA, 33 bp, Homo sapien
ttgatgacagatctcaggaaaatgcgttttgga

SEQ ID NO: 195797 - DNA, 33 bp, Homo sapien
acacggaaatgtcagcagcaactctctgggtga

SEQ ID NO: 195798 - DNA, 33 bp, Homo sapien
acacggaaatgtcagcggcaactctctgggtga

SEQ ID NO: 195799 - DNA, 33 bp, Homo sapien
cctagccctggctggaaataagagcctcaacct

SEQ ID NO: 195800 - DNA, 33 bp, Homo sapien
cctagccctggctggagataagagcctcaacct

SEQ ID NO: 195801 - DNA, 33 bp, Homo sapien; identical to SEQ ID NO: 195799

SEQ ID NO: 195802 - DNA, 33 bp, Homo sapien; identical to SEQ ID NO: 195800

SEQ ID NO: 195803 - DNA, 33 bp, Homo sapien
taaattcttacagggccaggcagtaattaagtg

SEQ ID NO: 195804 - DNA, 33 bp, Homo sapien
taaattcttacagggctaggcagtaattaagtg

SEQ ID NO: 195805 - DNA, 33 bp, Homo sapien
cactcaggcaacaaacaaatttgcacttattct

SEQ ID NO: 195806 - DNA, 33 bp, Homo sapien
cactcaggcaacaaacgaatttgcacttattct

SEQ ID NO: 195807 - DNA, 33 bp, Homo sapien
atagcagcccgttgaagttatgtcctccatcct

SEQ ID NO: 195808 - DNA, 33 bp, Homo sapien
atagcagcccgttgaatttatgtcctccatcct

SEQ ID NO: 195809 - DNA, 33 bp, Homo sapien
cttgcctcattcaaggacaaacattttctttaa

SEQ ID NO: 195810 - DNA, 33 bp, Homo sapien
cttgcctcattcaagggcaaacattttctttaa

SEQ ID NO: 195811 - DNA, 33 bp, Homo sapien
gaccaacttacatcacaaggtagctctcaagcc

SEQ ID NO: 195812 - DNA, 33 bp, Homo sapien
gaccaacttacatcacgaggtagctctcaagcc

SEQ ID NO: 195813 - DNA, 33 bp, Homo sapien
aatgggcctgatacatgagaaaaggagagtgga

SEQ ID NO: 195814 - DNA, 33 bp, Homo sapien
aatgggcctgatacattagaaaaggagagtgga

SEQ ID NO: 195815 - DNA, 33 bp, Homo sapien
catccttcatccttcaaatcccaactcaaatgt

SEQ ID NO: 195816 - DNA, 33 bp, Homo sapien
catccttcatccttcagatcccaactcaaatgt

SEQ ID NO: 195817 - DNA, 33 bp, Homo sapien
ttccatttgattcaagaccgctgaaggcagaat

SEQ ID NO: 195818 - DNA, 33 bp, Homo sapien
ttccatttgattcaaggccgctgaaggcagaat

SEQ ID NO: 195819 - DNA, 33 bp, Homo sapien
gtttgacttagatgtaagattcaatctctcctt

SEQ ID NO: 195820 - DNA, 33 bp, Homo sapien
gtttgacttagatgtaggattcaatctctcctt

SEQ ID NO: 195821 - DNA, 33 bp, Homo sapien
cccagtaggaactgtacatggttctgtatcagg

SEQ ID NO: 195822 - DNA, 33 bp, Homo sapien
cccagtaggaactgtagatggttctgtatcagg

SEQ ID NO: 195823 - DNA, 33 bp, Homo sapien
cagctggaagcaaactcaatgagccctgagtcc

SEQ ID NO: 195824 - DNA, 33 bp, Homo sapien
cagctggaagcaaacttaatgagccctgagtcc

SEQ ID NO: 195825 - DNA, 33 bp, Homo sapien
acaaaaattcccaacccaggtgcaaatgaatgt

SEQ ID NO: 195826 - DNA, 33 bp, Homo sapien
acaaaaattcccaaccgaggtgcaaatgaatgt

SEQ ID NO: 195827 - DNA, 33 bp, Homo sapien
gatatttgtaagttgccattgcacatttaatta

SEQ ID NO: 195828 - DNA, 33 bp, Homo sapien
gatatttgtaagttgctattgcacatttaatta

SEQ ID NO: 195829 - DNA, 33 bp, Homo sapien
aatgtgtggataaataactgcatagcaacatga

SEQ ID NO: 195830 - DNA, 33 bp, Homo sapien
aatgtgtggataaatatctgcatagcaacatga

SEQ ID NO: 195831 - DNA, 33 bp, Homo sapien
ctgtcaaaatcccagcacaattttatggaactt

SEQ ID NO: 195832 - DNA, 33 bp, Homo sapien
ctgtcaaaatcccagcgcaattttatggaactt

SEQ ID NO: 195833 - DNA, 33 bp, Homo sapien
gactgagaagcagtgaccagtaaggcagaagaa

SEQ ID NO: 195834 - DNA, 33 bp, Homo sapien
gactgagaagcagtgatcagtaaggcagaagaa

SEQ ID NO: 195835 - DNA, 33 bp, Homo sapien
cacctgagctgagtagaagctgcctgccatcag

SEQ ID NO: 195836 - DNA, 33 bp, Homo sapien
cacctgagctgagtaggagctgcctgccatcag

SEQ ID NO: 195837 - DNA, 33 bp, Homo sapien
tactactagctaacaccgaccgagtactgcctg

SEQ ID NO: 195838 - DNA, 33 bp, Homo sapien
tactactagctaacactgaccgagtactgcctg

SEQ ID NO: 195839 - DNA, 33 bp, Homo sapien
caagctgagagacaaaaccctcacattgattca

SEQ ID NO: 195840 - DNA, 33 bp, Homo sapien
caagctgagagacaaagccctcacattgattca

SEQ ID NO: 195841 - DNA, 33 bp, Homo sapien
aatatgtacttctcaccgtattaccatgtaggc

SEQ ID NO: 195842 - DNA, 33 bp, Homo sapien
aatatgtacttctcactgtattaccatgtaggc

SEQ ID NO: 195843 - DNA, 33 bp, Homo sapien
tcctctcctgcattacagggatgactgcattac

SEQ ID NO: 195844 - DNA, 33 bp, Homo sapien
tcctctcctgcattacggggatgactgcattac

SEQ ID NO: 195845 - DNA, 33 bp, Homo sapien
acatccaattttcagaaagcgtggaggctgcag

SEQ ID NO: 195846 - DNA, 33 bp, Homo sapien
acatccaattttcagagagcgtggaggctgcag

SEQ ID NO: 195847 - DNA, 33 bp, Homo sapien
tttctctcttgataaggccgcggctacgtctga

SEQ ID NO: 195848 - DNA, 33 bp, Homo sapien
tttctctcttgataagtccgcggctacgtctga

SEQ ID NO: 195849 - DNA, 33 bp, Homo sapien
attgtctcctcaatacaggccctcaaaataggc

SEQ ID NO: 195850 - DNA, 33 bp, Homo sapien
attgtctcctcaatacgggccctcaaaataggc

SEQ ID NO: 195851 - DNA, 33 bp, Homo sapien
attctgttggtgaaagcaatttgtgtggccagc

SEQ ID NO: 195852 - DNA, 33 bp, Homo sapien
attctgttggtgaaagtaatttgtgtggccagc

SEQ ID NO: 195853 - DNA, 33 bp, Homo sapien
cacagataggagctctaaaagtaaggtggctca

SEQ ID NO: 195854 - DNA, 33 bp, Homo sapien
cacagataggagctctgaaagtaaggtggctca

SEQ ID NO: 195855 - DNA, 33 bp, Homo sapien
ggaatattgtccttgacaggaaacaagcaaagt

SEQ ID NO: 195856 - DNA, 33 bp, Homo sapien
ggaatattgtccttgataggaaacaagcaaagt

SEQ ID NO: 195857 - DNA, 33 bp, Homo sapien
agacacattaatatgaaaagtgctgtgcaaggc

SEQ ID NO: 195858 - DNA, 33 bp, Homo sapien
agacacattaatatgacaagtgctgtgcaaggc

SEQ ID NO: 195859 - DNA, 33 bp, Homo sapien
agaaatcagctatttcaacctccaacccagagc

SEQ ID NO: 195860 - DNA, 33 bp, Homo sapien
agaaatcagctatttccacctccaacccagagc

SEQ ID NO: 195861 - DNA, 33 bp, Homo sapien
tgacagggttgagcaccggaggctacctgaacc

SEQ ID NO: 195862 - DNA, 33 bp, Homo sapien
tgacagggttgagcactggaggctacctgaacc

SEQ ID NO: 195863 - DNA, 33 bp, Homo sapien
acgctggaaagcacaacgtgggttgaaactggt

SEQ ID NO: 195864 - DNA, 33 bp, Homo sapien
acgctggaaagcacaatgtgggttgaaactggt

SEQ ID NO: 195865 - DNA, 33 bp, Homo sapien
cttttggtgacggcacaaatttccttgtcttgg

SEQ ID NO: 195866 - DNA, 33 bp, Homo sapien
cttttggtgacggcaccaatttccttgtcttgg

SEQ ID NO: 195867 - DNA, 33 bp, Homo sapien
caacagagattcatacagagaccttaatgtggc

SEQ ID NO: 195868 - DNA, 33 bp, Homo sapien
caacagagattcatactgagaccttaatgtggc

SEQ ID NO: 195869 - DNA, 33 bp, Homo sapien
gtagcaagctagagaaacaaccagggaacacag

SEQ ID NO: 195870 - DNA, 33 bp, Homo sapien
gtagcaagctagagaagcaaccagggaacacag

SEQ ID NO: 195871 - DNA, 33 bp, Homo sapien
ttgtgttccctaataaaggagtagcacagagga

SEQ ID NO: 195872 - DNA, 33 bp, Homo sapien
ttgtgttccctaataacggagtagcacagagga

SEQ ID NO: 195873 - DNA, 33 bp, Homo sapien
agctgtctgcggccaaatgcaactgattgttca

SEQ ID NO: 195874 - DNA, 33 bp, Homo sapien
agctgtctgcggccaagtgcaactgattgttca

SEQ ID NO: 195875 - DNA, 33 bp, Homo sapien
tggtcattaacccataacactttcaggttgtgc

SEQ ID NO: 195876 - DNA, 33 bp, Homo sapien
tggtcattaacccatagcactttcaggttgtgc

SEQ ID NO: 195877 - DNA, 33 bp, Homo sapien
gacagaaaccgccatcacctccaagggctcatc

SEQ ID NO: 195878 - DNA, 33 bp, Homo sapien
gacagaaaccgccatcgcctccaagggctcatc

SEQ ID NO: 195879 - DNA, 33 bp, Homo sapien
caccagaagaccaggacgaagtgatttttctct

SEQ ID NO: 195880 - DNA, 33 bp, Homo sapien
caccagaagaccaggatgaagtgatttttctct

SEQ ID NO: 195881 - DNA, 33 bp, Homo sapien
atggccataacaattacattacactgtctctgc

SEQ ID NO: 195882 - DNA, 33 bp, Homo sapien
atggccataacaattatattacactgtctctgc

SEQ ID NO: 195883 - DNA, 33 bp, Homo sapien
ctcactgagtttcatactaaacaggcgagggaa

SEQ ID NO: 195884 - DNA, 33 bp, Homo sapien
ctcactgagtttcatattaaacaggcgagggaa

SEQ ID NO: 195885 - DNA, 33 bp, Homo sapien
ctggaatcctcttcccagatggtaagttgccta

SEQ ID NO: 195886 - DNA, 33 bp, Homo sapien
ctggaatcctcttcccggatggtaagttgccta

SEQ ID NO: 195887 - DNA, 33 bp, Homo sapien
gcctggctttgaaacacggtgctatcccctagc

SEQ ID NO: 195888 - DNA, 33 bp, Homo sapien
gcctggctttgaaacatggtgctatcccctagc

SEQ ID NO: 195889 - DNA, 33 bp, Homo sapien
aaggaaaaattgaagaactgctgcaggaaattg

SEQ ID NO: 195890 - DNA, 33 bp, Homo sapien
aaggaaaaattgaagacctgctgcaggaaattg

SEQ ID NO: 195891 - DNA, 33 bp, Homo sapien
tcttcctcagcctcgaatcccaccatgacccac

SEQ ID NO: 195892 - DNA, 33 bp, Homo sapien
tcttcctcagcctcgagtcccaccatgacccac

SEQ ID NO: 195893 - DNA, 33 bp, Homo sapien
gaattgacactacagccgctgcatgattttgcc

SEQ ID NO: 195894 - DNA, 33 bp, Homo sapien
gaattgacactacagcggctgcatgattttgcc

SEQ ID NO: 195895 - DNA, 33 bp, Homo sapien
cttccactctttcatcaaagtgtaatcatttga

SEQ ID NO: 195896 - DNA, 33 bp, Homo sapien
cttccactctttcatcgaagtgtaatcatttga

SEQ ID NO: 195897 - DNA, 33 bp, Homo sapien
aaccagtatatttcaacgacctctcacccctgg

SEQ ID NO: 195898 - DNA, 33 bp, Homo sapien
aaccagtatatttcaatgacctctcacccctgg

SEQ ID NO: 195899 - DNA, 33 bp, Homo sapien
gatggcaacactgagcaaggatttggtgatggt

SEQ ID NO: 195900 - DNA, 33 bp, Homo sapien
gatggcaacactgagcgaggatttggtgatggt

SEQ ID NO: 195901 - DNA, 33 bp, Homo sapien
cctctagcctctaccactggaatacagtcataa

SEQ ID NO: 195902 - DNA, 33 bp, Homo sapien
cctctagcctctaccattggaatacagtcataa

SEQ ID NO: 195903 - DNA, 33 bp, Homo sapien
cccagtgtgtcatcaaatattatcttcctctat

SEQ ID NO: 195904 - DNA, 33 bp, Homo sapien
cccagtgtgtcatcaagtattatcttcctctat

SEQ ID NO: 195905 - DNA, 33 bp, Homo sapien
ccctatcttaaaatctaaattcccaagtggtgt

SEQ ID NO: 195906 - DNA, 33 bp, Homo sapien
ccctatcttaaaatctgaattcccaagtggtgt

SEQ ID NO: 195907 - DNA, 33 bp, Homo sapien
ggctcacatgaaattaagagtgcaaaatcatct

SEQ ID NO: 195908 - DNA, 33 bp, Homo sapien
ggctcacatgaaattatgagtgcaaaatcatct

SEQ ID NO: 195909 - DNA, 33 bp, Homo sapien
atcaggtggaatggtccctcctcttctgacctc

SEQ ID NO: 195910 - DNA, 33 bp, Homo sapien
atcaggtggaatggtctctcctcttctgacctc

SEQ ID NO: 195911 - DNA, 33 bp, Homo sapien
ctataacttgggatgagaataataacagttctg

SEQ ID NO: 195912 - DNA, 33 bp, Homo sapien
ctataacttgggatgataataataacagttctg

SEQ ID NO: 195913 - DNA, 33 bp, Homo sapien
gatttgtgttactcacagaaaagtatgaaccta

SEQ ID NO: 195914 - DNA, 33 bp, Homo sapien
gatttgtgttactcacggaaaagtatgaaccta

SEQ ID NO: 195915 - DNA, 33 bp, Homo sapien
ttctcccacagacctacagagtggatagaggtg

SEQ ID NO: 195916 - DNA, 33 bp, Homo sapien
ttctcccacagacctagagagtggatagaggtg

SEQ ID NO: 195917 - DNA, 33 bp, Homo sapien
aagaaggcttacatcaaagcaaatgaatggacc

SEQ ID NO: 195918 - DNA, 33 bp, Homo sapien
aagaaggcttacatcagagcaaatgaatggacc

SEQ ID NO: 195919 - DNA, 33 bp, Homo sapien
gaaaatgatagaggaactgccagagtgcactct

SEQ ID NO: 195920 - DNA, 33 bp, Homo sapien
gaaaatgatagaggaagtgccagagtgcactct

SEQ ID NO: 195921 - DNA, 33 bp, Homo sapien
gctaagacagactctcaacatgactctcagagg

SEQ ID NO: 195922 - DNA, 33 bp, Homo sapien
gctaagacagactctcgacatgactctcagagg

SEQ ID NO: 195923 - DNA, 33 bp, Homo sapien
cagaggcccgaggaaacgctggcctccagtcag

SEQ ID NO: 195924 - DNA, 33 bp, Homo sapien
cagaggcccgaggaaatgctggcctccagtcag

SEQ ID NO: 195925 - DNA, 33 bp, Homo sapien
atatgtctagtgacacaatggagcaacacgcac

SEQ ID NO: 195926 - DNA, 33 bp, Homo sapien
atatgtctagtgacacgatggagcaacacgcac

SEQ ID NO: 195927 - DNA, 33 bp, Homo sapien
agaacaattgagttagaatagattgcattaccc

SEQ ID NO: 195928 - DNA, 33 bp, Homo sapien
agaacaattgagttagtatagattgcattaccc

SEQ ID NO: 195929 - DNA, 33 bp, Homo sapien
ttcccctttcctaccacgtgaggtcaccgtgag

SEQ ID NO: 195930 - DNA, 33 bp, Homo sapien
ttcccctttcctaccatgtgaggtcaccgtgag

SEQ ID NO: 195931 - DNA, 33 bp, Homo sapien
agattccatgtctggtaaagacctatttcctgg

SEQ ID NO: 195932 - DNA, 33 bp, Homo sapien
agattccatgtctggtgaagacctatttcctgg

SEQ ID NO: 195933 - DNA, 33 bp, Homo sapien
ggtgactttggaactgaataatgggtagatatg

SEQ ID NO: 195934 - DNA, 33 bp, Homo sapien
ggtgactttggaactggataatgggtagatatg

SEQ ID NO: 195935 - DNA, 33 bp, Homo sapien
aacttacgagcaatgaaatagcatatttggctg

SEQ ID NO: 195936 - DNA, 33 bp, Homo sapien
aacttacgagcaatgacatagcatatttggctg

SEQ ID NO: 195937 - DNA, 33 bp, Homo sapien
tggttgttccctaaacaggagaggaaatttcag

SEQ ID NO: 195938 - DNA, 33 bp, Homo sapien
tggttgttccctaaactggagaggaaatttcag

SEQ ID NO: 195939 - DNA, 33 bp, Homo sapien
aaaatgttggcttacacagtgcggaaaaaaact

SEQ ID NO: 195940 - DNA, 33 bp, Homo sapien
aaaatgttggcttacatagtgcggaaaaaaact

SEQ ID NO: 195941 - DNA, 33 bp, Homo sapien
attgaggtaaacacgacgaaaagtgattgaaat

SEQ ID NO: 195942 - DNA, 33 bp, Homo sapien
attgaggtaaacacgatgaaaagtgattgaaat

SEQ ID NO: 195943 - DNA, 33 bp, Homo sapien
agacaaggctttcagcactaaatgacatacttt

SEQ ID NO: 195944 - DNA, 33 bp, Homo sapien
agacaaggctttcagcgctaaatgacatacttt

SEQ ID NO: 195945 - DNA, 33 bp, Homo sapien
tagcatgaaaccccgaagcttctcctccaggag

SEQ ID NO: 195946 - DNA, 33 bp, Homo sapien
tagcatgaaaccccgaggcttctcctccaggag

SEQ ID NO: 195947 - DNA, 33 bp, Homo sapien
cgaggtgcgtatgacaagagcttccaaacagct

SEQ ID NO: 195948 - DNA, 33 bp, Homo sapien
cgaggtgcgtatgacaggagcttccaaacagct

SEQ ID NO: 195949 - DNA, 33 bp, Homo sapien
atgtagagacactacactatttcactgatcctc

SEQ ID NO: 195950 - DNA, 33 bp, Homo sapien
atgtagagacactacattatttcactgatcctc

SEQ ID NO: 195951 - DNA, 33 bp, Homo sapien
gcagctgagaactgcgacctgaagacttaagtc

SEQ ID NO: 195952 - DNA, 33 bp, Homo sapien
gcagctgagaactgcggcctgaagacttaagtc

SEQ ID NO: 195953 - DNA, 33 bp, Homo sapien
gaccaactactgttcaagatacttaataagtat

SEQ ID NO: 195954 - DNA, 33 bp, Homo sapien
gaccaactactgttcaggatacttaataagtat

SEQ ID NO: 195955 - DNA, 33 bp, Homo sapien
gcacacctcaatcttacgtccgttgtcaaattt

SEQ ID NO: 195956 - DNA, 33 bp, Homo sapien
gcacacctcaatcttatgtccgttgtcaaattt

SEQ ID NO: 195957 - DNA, 33 bp, Homo sapien
ttcagcgtattttccaagagagctcccttgccc

SEQ ID NO: 195958 - DNA, 33 bp, Homo sapien
ttcagcgtattttccaggagagctcccttgccc

SEQ ID NO: 195959 - DNA, 33 bp, Homo sapien
ccaggaatggctctgcaagggtttctgtggctt

SEQ ID NO: 195960 - DNA, 33 bp, Homo sapien
ccaggaatggctctgcgagggtttctgtggctt

SEQ ID NO: 195961 - DNA, 33 bp, Homo sapien
tgagcagaattatggaagaagaccctcagctga

SEQ ID NO: 195962 - DNA, 33 bp, Homo sapien
tgagcagaattatggaggaagaccctcagctga

SEQ ID NO: 195963 - DNA, 33 bp, Homo sapien
gggaattcagagaccaaccccattctccagcag

SEQ ID NO: 195964 - DNA, 33 bp, Homo sapien
gggaattcagagaccacccccattctccagcag

SEQ ID NO: 195965 - DNA, 33 bp, Homo sapien
ggcagcaacaccccaccgagaagaacccagtgc

SEQ ID NO: 195966 - DNA, 33 bp, Homo sapien
ggcagcaacaccccactgagaagaacccagtgc

SEQ ID NO: 195967 - DNA, 33 bp, Homo sapien
aatttctagattacgaacaaagccagggaatct

SEQ ID NO: 195968 - DNA, 33 bp, Homo sapien
aatttctagattacgagcaaagccagggaatct

SEQ ID NO: 195969 - DNA, 33 bp, Homo sapien
ggactcataaacaagaagggagcaggcagacag

SEQ ID NO: 195970 - DNA, 33 bp, Homo sapien
ggactcataaacaagaggggagcaggcagacag

SEQ ID NO: 195971 - DNA, 33 bp, Homo sapien
acaaattaaatagcaccacaaggaagtgatcag

SEQ ID NO: 195972 - DNA, 33 bp, Homo sapien
acaaattaaatagcactacaaggaagtgatcag

SEQ ID NO: 195973 - DNA, 33 bp, Homo sapien
catttctttgttcccacatctggtcataggctg

SEQ ID NO: 195974 - DNA, 33 bp, Homo sapien
catttctttgttcccatatctggtcataggctg

SEQ ID NO: 195975 - DNA, 33 bp, Homo sapien
acatggacttctctgacacaacttcagcaactt

SEQ ID NO: 195976 - DNA, 33 bp, Homo sapien
acatggacttctctgatacaacttcagcaactt

SEQ ID NO: 195977 - DNA, 33 bp, Homo sapien
gggggatatgacttgaagaagattaacaccctg

SEQ ID NO: 195978 - DNA, 33 bp, Homo sapien
gggggatatgacttgatgaagattaacaccctg

SEQ ID NO: 195979 - DNA, 33 bp, Homo sapien
tatgggttgagagcccagaagagaaatccagac

SEQ ID NO: 195980 - DNA, 33 bp, Homo sapien
tatgggttgagagcccggaagagaaatccagac

SEQ ID NO: 195981 - DNA, 33 bp, Homo sapien
tcttcatcctacgtgacgttttgtgaagctctc

SEQ ID NO: 195982 - DNA, 33 bp, Homo sapien
tcttcatcctacgtgatgttttgtgaagctctc

SEQ ID NO: 195983 - DNA, 33 bp, Homo sapien
tgctttcctgattgtcaaattcctcttacttga

SEQ ID NO: 195984 - DNA, 33 bp, Homo sapien
tgctttcctgattgtcgaattcctcttacttga

SEQ ID NO: 195985 - DNA, 33 bp, Homo sapien
gggcaaggtctaccacagctaccaaggtcttcc

SEQ ID NO: 195986 - DNA, 33 bp, Homo sapien
gggcaaggtctaccacggctaccaaggtcttcc

SEQ ID NO: 195987 - DNA, 33 bp, Homo sapien
cctgcctgccatagaccgagtgtgtgtcttccc

SEQ ID NO: 195988 - DNA, 33 bp, Homo sapien
cctgcctgccatagactgagtgtgtgtcttccc

SEQ ID NO: 195989 - DNA, 33 bp, Homo sapien
ctgggcaagggtttgcacagaagagagatggag

SEQ ID NO: 195990 - DNA, 33 bp, Homo sapien
ctgggcaagggtttgcgcagaagagagatggag

SEQ ID NO: 195991 - DNA, 33 bp, Homo sapien
cagtggtggctccagacacacagctcgggcctg

SEQ ID NO: 195992 - DNA, 33 bp, Homo sapien
cagtggtggctccagatacacagctcgggcctg

SEQ ID NO: 195993 - DNA, 33 bp, Homo sapien
ggaaatcactatgaacggatatgaagtggtttt

SEQ ID NO: 195994 - DNA, 33 bp, Homo sapien
ggaaatcactatgaactgatatgaagtggtttt

SEQ ID NO: 195995 - DNA, 33 bp, Homo sapien
aaagactgaaagcaaaatgaaacatatgaatct

SEQ ID NO: 195996 - DNA, 33 bp, Homo sapien
aaagactgaaagcaaagtgaaacatatgaatct

SEQ ID NO: 195997 - DNA, 33 bp, Homo sapien
cgctctgcttgacggacgaagagccatcactga

SEQ ID NO: 195998 - DNA, 33 bp, Homo sapien
cgctctgcttgacggatgaagagccatcactga

SEQ ID NO: 195999 - DNA, 33 bp, Homo sapien
aagtcattgtcccggccgatgcctctgtgtgag

SEQ ID NO: 196000 - DNA, 33 bp, Homo sapien
aagtcattgtcccggctgatgcctctgtgtgag

SEQ ID NO: 196001 - DNA, 33 bp, Homo sapien
aaggctcgttgtgaaaaagaaagcacccagggc

SEQ ID NO: 196002 - DNA, 33 bp, Homo sapien
aaggctcgttgtgaaagagaaagcacccagggc

SEQ ID NO: 196003 - DNA, 33 bp, Homo sapien
gaaaattagtctattacgaggcgagaaagacta

SEQ ID NO: 196004 - DNA, 33 bp, Homo sapien
gaaaattagtctattatgaggcgagaaagacta

SEQ ID NO: 196005 - DNA, 33 bp, Homo sapien
taacagtctatgatgaaccatgattgtaccact

SEQ ID NO: 196006 - DNA, 33 bp, Homo sapien
taacagtctatgatgagccatgattgtaccact

SEQ ID NO: 196007 - DNA, 33 bp, Homo sapien
tgacaccttaccagcccggatcaaagctcagga

SEQ ID NO: 196008 - DNA, 33 bp, Homo sapien
tgacaccttaccagcctggatcaaagctcagga

SEQ ID NO: 196009 - DNA, 33 bp, Homo sapien
attaggctccgatcagactaggggcaaccaggg

SEQ ID NO: 196010 - DNA, 33 bp, Homo sapien
attaggctccgatcagcctaggggcaaccaggg

SEQ ID NO: 196011 - DNA, 33 bp, Homo sapien
gtgtctggaatcacaacacttgagctcaagttc

SEQ ID NO: 196012 - DNA, 33 bp, Homo sapien
gtgtctggaatcacaagacttgagctcaagttc

SEQ ID NO: 196013 - DNA, 33 bp, Homo sapien
gccccaagcttcctccaaaatcgaggctctgat

SEQ ID NO: 196014 - DNA, 33 bp, Homo sapien
gccccaagcttcctcccaaatcgaggctctgat

SEQ ID NO: 196015 - DNA, 33 bp, Homo sapien
agggcaaagagcatgacctgaaaactggctgtg

SEQ ID NO: 196016 - DNA, 33 bp, Homo sapien
agggcaaagagcatgatctgaaaactggctgtg

SEQ ID NO: 196017 - DNA, 33 bp, Homo sapien
acttacaccgcttaaccggagccctcagagcct

SEQ ID NO: 196018 - DNA, 33 bp, Homo sapien
acttacaccgcttaactggagccctcagagcct

SEQ ID NO: 196019 - DNA, 33 bp, Homo sapien
cgggaatcgtacaagcactcttgataaacagca

SEQ ID NO: 196020 - DNA, 33 bp, Homo sapien
cgggaatcgtacaagcgctcttgataaacagca

SEQ ID NO: 196021 - DNA, 33 bp, Homo sapien
tgcaagcccctagaccaataccacagtctgtgt

SEQ ID NO: 196022 - DNA, 33 bp, Homo sapien
tgcaagcccctagacccataccacagtctgtgt

SEQ ID NO: 196023 - DNA, 33 bp, Homo sapien
tctccacttttatcacaaggcctttgatctgct

SEQ ID NO: 196024 - DNA, 33 bp, Homo sapien
tctccacttttatcacgaggcctttgatctgct

SEQ ID NO: 196025 - DNA, 33 bp, Homo sapien
ctccatatcaatggtaggaaggcggcggtttct

SEQ ID NO: 196026 - DNA, 33 bp, Homo sapien
ctccatatcaatggtatgaaggcggcggtttct

SEQ ID NO: 196027 - DNA, 33 bp, Homo sapien
gagaagtaaacccataaaaaacgtgatgatgca

SEQ ID NO: 196028 - DNA, 33 bp, Homo sapien
gagaagtaaacccatacaaaacgtgatgatgca

SEQ ID NO: 196029 - DNA, 33 bp, Homo sapien
ccccattttatactcccacacaactgtatatga

SEQ ID NO: 196030 - DNA, 33 bp, Homo sapien
ccccattttatactcctacacaactgtatatga

SEQ ID NO: 196031 - DNA, 33 bp, Homo sapien
acactagagttccagaaatgtgggttcaagttc

SEQ ID NO: 196032 - DNA, 33 bp, Homo sapien
acactagagttccagagatgtgggttcaagttc

SEQ ID NO: 196033 - DNA, 33 bp, Homo sapien
acccatacggtcactacgattagccctatttgg

SEQ ID NO: 196034 - DNA, 33 bp, Homo sapien
acccatacggtcactatgattagccctatttgg

SEQ ID NO: 196035 - DNA, 33 bp, Homo sapien
ggcctgcattcattcaaatttttgtgttggacc

SEQ ID NO: 196036 - DNA, 33 bp, Homo sapien
ggcctgcattcattcagatttttgtgttggacc

SEQ ID NO: 196037 - DNA, 33 bp, Homo sapien
cccacccatgaatcgccgagggtggcaagcagg

SEQ ID NO: 196038 - DNA, 33 bp, Homo sapien
cccacccatgaatcgctgagggtggcaagcagg

SEQ ID NO: 196039 - DNA, 33 bp, Homo sapien
cccatcctagcttcccacattcatctcacactg

SEQ ID NO: 196040 - DNA, 33 bp, Homo sapien
cccatcctagcttccctcattcatctcacactg

SEQ ID NO: 196041 - DNA, 33 bp, Homo sapien
caccctcttgaactaaacccttgtaaatacgat

SEQ ID NO: 196042 - DNA, 33 bp, Homo sapien
caccctcttgaactaagcccttgtaaatacgat

SEQ ID NO: 196043 - DNA, 33 bp, Homo sapien
agggaaagtagaagacagggaagtcgaaagaga

SEQ ID NO: 196044 - DNA, 33 bp, Homo sapien
agggaaagtagaagacggggaagtcgaaagaga

SEQ ID NO: 196045 - DNA, 33 bp, Homo sapien
agctgctccttttgcaatgacagctccgtctgc

SEQ ID NO: 196046 - DNA, 33 bp, Homo sapien
agctgctccttttgcagtgacagctccgtctgc

SEQ ID NO: 196047 - DNA, 33 bp, Homo sapien
gctggtgaggtcaagacactgggctgaatgcaa

SEQ ID NO: 196048 - DNA, 33 bp, Homo sapien
gctggtgaggtcaagatactgggctgaatgcaa

SEQ ID NO: 196049 - DNA, 33 bp, Homo sapien
gctagaagttaacgtcaaaccgtagtagacaga

SEQ ID NO: 196050 - DNA, 33 bp, Homo sapien
gctagaagttaacgtccaaccgtagtagacaga

SEQ ID NO: 196051 - DNA, 33 bp, Homo sapien
gccctttgcccaaatcaccttccccaggtatgc

SEQ ID NO: 196052 - DNA, 33 bp, Homo sapien
gccctttgcccaaatcgccttccccaggtatgc

SEQ ID NO: 196053 - DNA, 33 bp, Homo sapien
tccaattgaacagtacactttcatttatagagt

SEQ ID NO: 196054 - DNA, 33 bp, Homo sapien
tccaattgaacagtacgctttcatttatagagt

SEQ ID NO: 196055 - DNA, 33 bp, Homo sapien
ggaagcccttcaaaaacaggactgatttctacc

SEQ ID NO: 196056 - DNA, 33 bp, Homo sapien
ggaagcccttcaaaaataggactgatttctacc

SEQ ID NO: 196057 - DNA, 33 bp, Homo sapien
ctcatgatgtcccattaaaacgctagtggggga

SEQ ID NO: 196058 - DNA, 33 bp, Homo sapien
ctcatgatgtcccattgaaacgctagtggggga

SEQ ID NO: 196059 - DNA, 33 bp, Homo sapien
acggtcttcgccttcaaggaatttcttttgctg

SEQ ID NO: 196060 - DNA, 33 bp, Homo sapien
acggtcttcgccttcagggaatttcttttgctg

SEQ ID NO: 196061 - DNA, 33 bp, Homo sapien
cttcagatgggcccaactaaaagggaacctgag

SEQ ID NO: 196062 - DNA, 33 bp, Homo sapien
cttcagatgggcccaattaaaagggaacctgag

SEQ ID NO: 196063 - DNA, 33 bp, Homo sapien
aggaagtagaggagaaccattctgccaggctaa

SEQ ID NO: 196064 - DNA, 33 bp, Homo sapien
aggaagtagaggagaatcattctgccaggctaa

SEQ ID NO: 196065 - DNA, 33 bp, Homo sapien
tagtctcctttccccactcttgccacccatttt

SEQ ID NO: 196066 - DNA, 33 bp, Homo sapien
tagtctcctttccccagtcttgccacccatttt

SEQ ID NO: 196067 - DNA, 33 bp, Homo sapien
ccatgtttgtaaatacacggacctgagtattcc

SEQ ID NO: 196068 - DNA, 33 bp, Homo sapien
ccatgtttgtaaatacgcggacctgagtattcc

SEQ ID NO: 196069 - DNA, 33 bp, Homo sapien
gtctgtttctcctttcactcttgtaacctccct

SEQ ID NO: 196070 - DNA, 33 bp, Homo sapien
gtctgtttctcctttcgctcttgtaacctccct

SEQ ID NO: 196071 - DNA, 33 bp, Homo sapien
gagagagaaagtggaaagaaacaaaatgaacag

SEQ ID NO: 196072 - DNA, 33 bp, Homo sapien
gagagagaaagtggaaggaaacaaaatgaacag

SEQ ID NO: 196073 - DNA, 33 bp, Homo sapien
cttaggcctctcatcaaagcaaagtctgtaaag

SEQ ID NO: 196074 - DNA, 33 bp, Homo sapien
cttaggcctctcatcagagcaaagtctgtaaag

SEQ ID NO: 196075 - DNA, 33 bp, Homo sapien
accatgacctttggcagtataggtacatacata

SEQ ID NO: 196076 - DNA, 33 bp, Homo sapien
accatgacctttggcattataggtacatacata

SEQ ID NO: 196077 - DNA, 33 bp, Homo sapien
ggccaacagggaatgacaaactgaggttcctgt

SEQ ID NO: 196078 - DNA, 33 bp, Homo sapien
ggccaacagggaatgagaaactgaggttcctgt

SEQ ID NO: 196079 - DNA, 33 bp, Homo sapien
cagttggttatgatgcggactaaatgtgatata

SEQ ID NO: 196080 - DNA, 33 bp, Homo sapien
cagttggttatgatgctgactaaatgtgatata

SEQ ID NO: 196081 - DNA, 33 bp, Homo sapien
agtctccaggtaggagaaatactggcatctgaa

SEQ ID NO: 196082 - DNA, 33 bp, Homo sapien
agtctccaggtaggagcaatactggcatctgaa

SEQ ID NO: 196083 - DNA, 33 bp, Homo sapien
ggagctctgtgccatgccaaaggaggagacgag

SEQ ID NO: 196084 - DNA, 33 bp, Homo sapien
ggagctctgtgccatgtcaaaggaggagacgag

SEQ ID NO: 196085 - DNA, 33 bp, Homo sapien
atcaaatcctactcccacgtgttgctgaattcc

SEQ ID NO: 196086 - DNA, 33 bp, Homo sapien
atcaaatcctactcccccgtgttgctgaattcc

SEQ ID NO: 196087 - DNA, 33 bp, Homo sapien
cctgcgtttcttgggccctgccaaactgtactg

SEQ ID NO: 196088 - DNA, 33 bp, Homo sapien
cctgcgtttcttgggctctgccaaactgtactg

SEQ ID NO: 196089 - DNA, 33 bp, Homo sapien
gactttcaagagtcaacgggcaacatggagctc

SEQ ID NO: 196090 - DNA, 33 bp, Homo sapien
gactttcaagagtcaatgggcaacatggagctc

SEQ ID NO: 196091 - DNA, 33 bp, Homo sapien
ggagtccagtcgttagcaggagttctggaggag

SEQ ID NO: 196092 - DNA, 33 bp, Homo sapien
ggagtccagtcgttagtaggagttctggaggag

SEQ ID NO: 196093 - DNA, 33 bp, Homo sapien
tccctccatgctactaacacccgagtggccgaa

SEQ ID NO: 196094 - DNA, 33 bp, Homo sapien
tccctccatgctactatcacccgagtggccgaa

SEQ ID NO: 196095 - DNA, 33 bp, Homo sapien
gaagggctggacctcaagagctctcagtggagc

SEQ ID NO: 196096 - DNA, 33 bp, Homo sapien
gaagggctggacctcaggagctctcagtggagc

SEQ ID NO: 196097 - DNA, 33 bp, Homo sapien
ctcaggtccaatgccggcctcaaagtcaaaaaa

SEQ ID NO: 196098 - DNA, 33 bp, Homo sapien
ctcaggtccaatgccgtcctcaaagtcaaaaaa

SEQ ID NO: 196099 - DNA, 33 bp, Homo sapien
ccatctttaggtagaaagtcactagaaagactc

SEQ ID NO: 196100 - DNA, 33 bp, Homo sapien
ccatctttaggtagaaggtcactagaaagactc

SEQ ID NO: 196101 - DNA, 33 bp, Homo sapien
agggatgggtttgaaacgtctccaaaagaagag

SEQ ID NO: 196102 - DNA, 33 bp, Homo sapien
agggatgggtttgaaatgtctccaaaagaagag

SEQ ID NO: 196103 - DNA, 33 bp, Homo sapien
tgaggtctgcagggccagaattacagaaatcct

SEQ ID NO: 196104 - DNA, 33 bp, Homo sapien
tgaggtctgcagggccggaattacagaaatcct

SEQ ID NO: 196105 - DNA, 33 bp, Homo sapien
agttctgtccagaaaacgcacagtaaactgggt

SEQ ID NO: 196106 - DNA, 33 bp, Homo sapien
agttctgtccagaaaatgcacagtaaactgggt

SEQ ID NO: 196107 - DNA, 33 bp, Homo sapien
gctttcccacctccaacatgagccaacagccca

SEQ ID NO: 196108 - DNA, 33 bp, Homo sapien
gctttcccacctccaagatgagccaacagccca

SEQ ID NO: 196109 - DNA, 33 bp, Homo sapien
acctattgttagcagaatcattttcactctttt

SEQ ID NO: 196110 - DNA, 33 bp, Homo sapien
acctattgttagcagagtcattttcactctttt

SEQ ID NO: 196111 - DNA, 33 bp, Homo sapien
tggaaaaagtgggataaaagtctatacagagtg

SEQ ID NO: 196112 - DNA, 33 bp, Homo sapien
tggaaaaagtgggatagaagtctatacagagtg

SEQ ID NO: 196113 - DNA, 33 bp, Homo sapien
tcctgtgaggccagaagagagtctgaagcaagt

SEQ ID NO: 196114 - DNA, 33 bp, Homo sapien
tcctgtgaggccagaatagagtctgaagcaagt

SEQ ID NO: 196115 - DNA, 33 bp, Homo sapien
cctaacagcattataaagttgatcctatttttc

SEQ ID NO: 196116 - DNA, 33 bp, Homo sapien
cctaacagcattataaggttgatcctatttttc

SEQ ID NO: 196117 - DNA, 33 bp, Homo sapien
ttgcttcccttcctgccatatgtttgagctttt

SEQ ID NO: 196118 - DNA, 33 bp, Homo sapien
ttgcttcccttcctgctatatgtttgagctttt

SEQ ID NO: 196119 - DNA, 33 bp, Homo sapien
aggacagagatttcataacattcctgagccacc

SEQ ID NO: 196120 - DNA, 33 bp, Homo sapien
aggacagagatttcatgacattcctgagccacc

SEQ ID NO: 196121 - DNA, 33 bp, Homo sapien
ctactgagatttagtcacagtcaaaagaaagaa

SEQ ID NO: 196122 - DNA, 33 bp, Homo sapien
ctactgagatttagtcgcagtcaaaagaaagaa

SEQ ID NO: 196123 - DNA, 33 bp, Homo sapien
aaaaaaatcttgcctgaaattgaaggcaggttg

SEQ ID NO: 196124 - DNA, 33 bp, Homo sapien
aaaaaaatcttgcctgtaattgaaggcaggttg

SEQ ID NO: 196125 - DNA, 33 bp, Homo sapien
gtttaggatcttctccacccactgtgctgtgca

SEQ ID NO: 196126 - DNA, 33 bp, Homo sapien
gtttaggatcttctccgcccactgtgctgtgca

SEQ ID NO: 196127 - DNA, 33 bp, Homo sapien
agggttcctctgtagactcattatgcacaaggg

SEQ ID NO: 196128 - DNA, 33 bp, Homo sapien
agggttcctctgtagattcattatgcacaaggg

SEQ ID NO: 196129 - DNA, 33 bp, Homo sapien
cgactctaatttactacgtaatcttgagcctct

SEQ ID NO: 196130 - DNA, 33 bp, Homo sapien
cgactctaatttactatgtaatcttgagcctct

SEQ ID NO: 196131 - DNA, 33 bp, Homo sapien
ctccctcctcagtctcaaatgttagtaggatct

SEQ ID NO: 196132 - DNA, 33 bp, Homo sapien
ctccctcctcagtctcgaatgttagtaggatct

SEQ ID NO: 196133 - DNA, 33 bp, Homo sapien
agactataaaatgccccgaaggcaaagcctggg

SEQ ID NO: 196134 - DNA, 33 bp, Homo sapien
agactataaaatgccctgaaggcaaagcctggg

SEQ ID NO: 196135 - DNA, 33 bp, Homo sapien
gggtgagggggcctaactggagagcatgcgtca

SEQ ID NO: 196136 - DNA, 33 bp, Homo sapien
gggtgagggggcctaattggagagcatgcgtca

SEQ ID NO: 196137 - DNA, 33 bp, Homo sapien
actcccatctccatcaactagggtcaaaagtga

SEQ ID NO: 196138 - DNA, 33 bp, Homo sapien
actcccatctccatcagctagggtcaaaagtga

SEQ ID NO: 196139 - DNA, 33 bp, Homo sapien
tacctcaactggatacagagatacactgtgttc

SEQ ID NO: 196140 - DNA, 33 bp, Homo sapien
tacctcaactggatacggagatacactgtgttc

SEQ ID NO: 196141 - DNA, 33 bp, Homo sapien
cttattgtaaacaattgaagtgcagggaagtag

SEQ ID NO: 196142 - DNA, 33 bp, Homo sapien
cttattgtaaacaatttaagtgcagggaagtag

SEQ ID NO: 196143 - DNA, 33 bp, Homo sapien
ttgcctgggtttgtaccctactctgcctcctac

SEQ ID NO: 196144 - DNA, 33 bp, Homo sapien
ttgcctgggtttgtacgctactctgcctcctac

SEQ ID NO: 196145 - DNA, 33 bp, Homo sapien
tacacaaaatgacccaatgctgttttcttaggg

SEQ ID NO: 196146 - DNA, 33 bp, Homo sapien
tacacaaaatgacccagtgctgttttcttaggg

SEQ ID NO: 196147 - DNA, 33 bp, Homo sapien
tctcatcctcttaacacagacatggaaagatgc

SEQ ID NO: 196148 - DNA, 33 bp, Homo sapien
tctcatcctcttaacatagacatggaaagatgc

SEQ ID NO: 196149 - DNA, 33 bp, Homo sapien
tgaaaatgtgtcatggccaatttctaggaaaca

SEQ ID NO: 196150 - DNA, 33 bp, Homo sapien
tgaaaatgtgtcatggtcaatttctaggaaaca

SEQ ID NO: 196151 - DNA, 33 bp, Homo sapien
caggtaactgtgttgcagataacagtgttcaga

SEQ ID NO: 196152 - DNA, 33 bp, Homo sapien
caggtaactgtgttgcggataacagtgttcaga

SEQ ID NO: 196153 - DNA, 33 bp, Homo sapien
ttttgagcctataggacatctcatactgcaaag

SEQ ID NO: 196154 - DNA, 33 bp, Homo sapien
ttttgagcctataggatatctcatactgcaaag

SEQ ID NO: 196155 - DNA, 33 bp, Homo sapien
tatcatctttggagtaactttttagcaaaatac

SEQ ID NO: 196156 - DNA, 33 bp, Homo sapien
tatcatctttggagtagctttttagcaaaatac

SEQ ID NO: 196157 - DNA, 33 bp, Homo sapien
attgctaactgaccaaaaatagtattctcactg

SEQ ID NO: 196158 - DNA, 33 bp, Homo sapien
attgctaactgaccaacaatagtattctcactg

SEQ ID NO: 196159 - DNA, 33 bp, Homo sapien
gacaatatagttcaaaagcctaagaaatgttta

SEQ ID NO: 196160 - DNA, 33 bp, Homo sapien
gacaatatagttcaaaggcctaagaaatgttta

SEQ ID NO: 196161 - DNA, 33 bp, Homo sapien
atagttaaaagcctagaaaacaacatatgagtg

SEQ ID NO: 196162 - DNA, 33 bp, Homo sapien
atagttaaaagcctagtaaacaacatatgagtg

SEQ ID NO: 196163 - DNA, 33 bp, Homo sapien
cttatatcatgactaccgactaaaatccttagt

SEQ ID NO: 196164 - DNA, 33 bp, Homo sapien
cttatatcatgactactgactaaaatccttagt

SEQ ID NO: 196165 - DNA, 33 bp, Homo sapien
cataccaggtaataaacaaatgccgattccctt

SEQ ID NO: 196166 - DNA, 33 bp, Homo sapien
cataccaggtaataaagaaatgccgattccctt

SEQ ID NO: 196167 - DNA, 33 bp, Homo sapien
tctttagaattcgacaagaaaggaaagctttat

SEQ ID NO: 196168 - DNA, 33 bp, Homo sapien
tctttagaattcgacaggaaaggaaagctttat

SEQ ID NO: 196169 - DNA, 33 bp, Homo sapien
tgcttgtttggactaacgtgcataggataacaa

SEQ ID NO: 196170 - DNA, 33 bp, Homo sapien
tgcttgtttggactaatgtgcataggataacaa

SEQ ID NO: 196171 - DNA, 33 bp, Homo sapien
tgtgtgtgataaactaagtggattgctaattct

SEQ ID NO: 196172 - DNA, 33 bp, Homo sapien
tgtgtgtgataaactaggtggattgctaattct

SEQ ID NO: 196173 - DNA, 33 bp, Homo sapien
tttattagcagtcaaacaatgttacctattaaa

SEQ ID NO: 196174 - DNA, 33 bp, Homo sapien
tttattagcagtcaaagaatgttacctattaaa

SEQ ID NO: 196175 - DNA, 33 bp, Homo sapien
attaaacttggttaaaatgtaagtcttactcta

SEQ ID NO: 196176 - DNA, 33 bp, Homo sapien
attaaacttggttaaagtgtaagtcttactcta

SEQ ID NO: 196177 - DNA, 33 bp, Homo sapien
ccttttcttttttcgactaagtctcgctttgtc

SEQ ID NO: 196178 - DNA, 33 bp, Homo sapien
ccttttcttttttcgattaagtctcgctttgtc

SEQ ID NO: 196179 - DNA, 33 bp, Homo sapien
gagtaagaaggaagcaatctttttatgttggtt

SEQ ID NO: 196180 - DNA, 33 bp, Homo sapien
gagtaagaaggaagcagtctttttatgttggtt

SEQ ID NO: 196181 - DNA, 33 bp, Homo sapien
cttcaaacgtaatcctaacaggcaggcaccgtg

SEQ ID NO: 196182 - DNA, 33 bp, Homo sapien
cttcaaacgtaatcctgacaggcaggcaccgtg

SEQ ID NO: 196183 - DNA, 33 bp, Homo sapien
aataacaacatttgcacactaatgtgaatgatt

SEQ ID NO: 196184 - DNA, 33 bp, Homo sapien
aataacaacatttgcagactaatgtgaatgatt

SEQ ID NO: 196185 - DNA, 33 bp, Homo sapien
gagtgcctcttgttgacaaacattgagaaggtg

SEQ ID NO: 196186 - DNA, 33 bp, Homo sapien
gagtgcctcttgttgagaaacattgagaaggtg

SEQ ID NO: 196187 - DNA, 33 bp, Homo sapien
gcaggacgacgaaagcaaggaagaggaggatgt

SEQ ID NO: 196188 - DNA, 33 bp, Homo sapien
gcaggacgacgaaagcgaggaagaggaggatgt

SEQ ID NO: 196189 - DNA, 33 bp, Homo sapien
taaggccaagaagtacaagtgacatttggagaa

SEQ ID NO: 196190 - DNA, 33 bp, Homo sapien
taaggccaagaagtacgagtgacatttggagaa

SEQ ID NO: 196191 - DNA, 33 bp, Homo sapien
ctgatctttgcccctaacatttccaatagagaa

SEQ ID NO: 196192 - DNA, 33 bp, Homo sapien
ctgatctttgcccctagcatttccaatagagaa

SEQ ID NO: 196193 - DNA, 33 bp, Homo sapien
atgtgtgagaatgtaacataaataaaggaatga

SEQ ID NO: 196194 - DNA, 33 bp, Homo sapien
atgtgtgagaatgtaagataaataaaggaatga

SEQ ID NO: 196195 - DNA, 33 bp, Homo sapien
aaagttggaaccattacaggaacgatagtaaaa

SEQ ID NO: 196196 - DNA, 33 bp, Homo sapien
aaagttggaaccattataggaacgatagtaaaa

SEQ ID NO: 196197 - DNA, 33 bp, Homo sapien
ttcagaatcactgttaaaatgggaggatagcat

SEQ ID NO: 196198 - DNA, 33 bp, Homo sapien
ttcagaatcactgttacaatgggaggatagcat

SEQ ID NO: 196199 - DNA, 33 bp, Homo sapien
ttagctcagaaggctcacttactttgggcattt

SEQ ID NO: 196200 - DNA, 33 bp, Homo sapien
ttagctcagaaggctcgcttactttgggcattt

SEQ ID NO: 196201 - DNA, 33 bp, Homo sapien
gcaccttactcattaaaaacataatcaatccga

SEQ ID NO: 196202 - DNA, 33 bp, Homo sapien
gcaccttactcattaacaacataatcaatccga

SEQ ID NO: 196203 - DNA, 33 bp, Homo sapien
tcttcaccacttccaacaataagagcaactgaa

SEQ ID NO: 196204 - DNA, 33 bp, Homo sapien
tcttcaccacttccaataataagagcaactgaa

SEQ ID NO: 196205 - DNA, 33 bp, Homo sapien
cagtacaaagagtaacaccaggcctacctggac

SEQ ID NO: 196206 - DNA, 33 bp, Homo sapien
cagtacaaagagtaaccccaggcctacctggac

SEQ ID NO: 196207 - DNA, 33 bp, Homo sapien
ggagaggctggtttgacgtgtgggaagtagcct

SEQ ID NO: 196208 - DNA, 33 bp, Homo sapien
ggagaggctggtttgatgtgtgggaagtagcct

SEQ ID NO: 196209 - DNA, 33 bp, Homo sapien
cactctattcacaacgcatgtgtccctgctgag

SEQ ID NO: 196210 - DNA, 33 bp, Homo sapien
cactctattcacaacgtatgtgtccctgctgag

SEQ ID NO: 196211 - DNA, 33 bp, Homo sapien
gttcacaaaaaggagacctgctacggtgtgact

SEQ ID NO: 196212 - DNA, 33 bp, Homo sapien
gttcacaaaaaggagatctgctacggtgtgact

SEQ ID NO: 196213 - DNA, 33 bp, Homo sapien
gctcctgagcctatgaagggaaccaggaaggac

SEQ ID NO: 196214 - DNA, 33 bp, Homo sapien
gctcctgagcctatgatgggaaccaggaaggac

SEQ ID NO: 196215 - DNA, 33 bp, Homo sapien
gaggtgactgccatagcagaagagcattggaca

SEQ ID NO: 196216 - DNA, 33 bp, Homo sapien
gaggtgactgccatagtagaagagcattggaca

SEQ ID NO: 196217 - DNA, 33 bp, Homo sapien
ggagagaccaggaaaacccctgggagcagaggc

SEQ ID NO: 196218 - DNA, 33 bp, Homo sapien
ggagagaccaggaaaatccctgggagcagaggc

SEQ ID NO: 196219 - DNA, 33 bp, Homo sapien
agttcacctgtgtctaccttctcgtctttttcc

SEQ ID NO: 196220 - DNA, 33 bp, Homo sapien
agttcacctgtgtctatcttctcgtctttttcc

SEQ ID NO: 196221 - DNA, 33 bp, Homo sapien
ttgcatttccatttcacgcccagttctgggcct

SEQ ID NO: 196222 - DNA, 33 bp, Homo sapien
ttgcatttccatttcatgcccagttctgggcct

SEQ ID NO: 196223 - DNA, 33 bp, Homo sapien
ttggtttctctagcaaaattatgaatcatcatc

SEQ ID NO: 196224 - DNA, 33 bp, Homo sapien
ttggtttctctagcaagattatgaatcatcatc

SEQ ID NO: 196225 - DNA, 33 bp, Homo sapien
tggggcttcttcccaccgtcattattgatgtcc

SEQ ID NO: 196226 - DNA, 33 bp, Homo sapien
tggggcttcttcccactgtcattattgatgtcc

SEQ ID NO: 196227 - DNA, 33 bp, Homo sapien
aacaaggcagttaccaacttcagaacaaaatga

SEQ ID NO: 196228 - DNA, 33 bp, Homo sapien
aacaaggcagttaccaccttcagaacaaaatga

SEQ ID NO: 196229 - DNA, 33 bp, Homo sapien
ctcagaatgattttccacaaggtcactctctcc

SEQ ID NO: 196230 - DNA, 33 bp, Homo sapien
ctcagaatgattttccgcaaggtcactctctcc

SEQ ID NO: 196231 - DNA, 33 bp, Homo sapien
gctgcaattaggcgacacattcaataatcagaa

SEQ ID NO: 196232 - DNA, 33 bp, Homo sapien
gctgcaattaggcgacgcattcaataatcagaa

SEQ ID NO: 196233 - DNA, 33 bp, Homo sapien
agggtgaactgaggagaccacacttatatcagc

SEQ ID NO: 196234 - DNA, 33 bp, Homo sapien
agggtgaactgaggaggccacacttatatcagc

SEQ ID NO: 196235 - DNA, 33 bp, Homo sapien
caagggaagcagagaccataaattcagacacca

SEQ ID NO: 196236 - DNA, 33 bp, Homo sapien
caagggaagcagagacgataaattcagacacca

SEQ ID NO: 196237 - DNA, 33 bp, Homo sapien
taaagagaggtccacccgcattctagggctttg

SEQ ID NO: 196238 - DNA, 33 bp, Homo sapien
taaagagaggtccacctgcattctagggctttg

SEQ ID NO: 196239 - DNA, 33 bp, Homo sapien
agtgacagagactaaacaacattctagaaacca

SEQ ID NO: 196240 - DNA, 33 bp, Homo sapien
agtgacagagactaaagaacattctagaaacca

SEQ ID NO: 196241 - DNA, 33 bp, Homo sapien
ctaagcatctgaaagcaaaagggaaattgtgac

SEQ ID NO: 196242 - DNA, 33 bp, Homo sapien
ctaagcatctgaaagcgaaagggaaattgtgac

SEQ ID NO: 196243 - DNA, 33 bp, Homo sapien
tgttgttaaaacagccacttggctctgtcgctg

SEQ ID NO: 196244 - DNA, 33 bp, Homo sapien
tgttgttaaaacagccgcttggctctgtcgctg

SEQ ID NO: 196245 - DNA, 33 bp, Homo sapien
ttcacactctcgagcccaccaagccaataaagt

SEQ ID NO: 196246 - DNA, 33 bp, Homo sapien
ttcacactctcgagccgaccaagccaataaagt

SEQ ID NO: 196247 - DNA, 33 bp, Homo sapien
aaatcagtctcatttacgcctcacgacaagcct

SEQ ID NO: 196248 - DNA, 33 bp, Homo sapien
aaatcagtctcatttatgcctcacgacaagcct

SEQ ID NO: 196249 - DNA, 33 bp, Homo sapien
ggctcacggatcataacaggcagtccaggcctc

SEQ ID NO: 196250 - DNA, 33 bp, Homo sapien
ggctcacggatcataataggcagtccaggcctc

SEQ ID NO: 196251 - DNA, 33 bp, Homo sapien
ctcctggttctgcctcaagctgtcaatccaaat

SEQ ID NO: 196252 - DNA, 33 bp, Homo sapien
ctcctggttctgcctcgagctgtcaatccaaat

SEQ ID NO: 196253 - DNA, 33 bp, Homo sapien
cccttacctccttgcaaggccgattgtaactta

SEQ ID NO: 196254 - DNA, 33 bp, Homo sapien
cccttacctccttgcagggccgattgtaactta

SEQ ID NO: 196255 - DNA, 33 bp, Homo sapien
gtgggacaactcgtccacccgtgaaccaccatg

SEQ ID NO: 196256 - DNA, 33 bp, Homo sapien
gtgggacaactcgtccgcccgtgaaccaccatg

SEQ ID NO: 196257 - DNA, 33 bp, Homo sapien
ggtctctccaactccaaaacccgagctctctga

SEQ ID NO: 196258 - DNA, 33 bp, Homo sapien
ggtctctccaactccagaacccgagctctctga

SEQ ID NO: 196259 - DNA, 33 bp, Homo sapien
tttggtcttaaccttaagttatcaattggttca

SEQ ID NO: 196260 - DNA, 33 bp, Homo sapien
tttggtcttaaccttaggttatcaattggttca

SEQ ID NO: 196261 - DNA, 33 bp, Homo sapien
aacttacagttttaataaatcagatcactgcca

SEQ ID NO: 196262 - DNA, 33 bp, Homo sapien
aacttacagttttaatgaatcagatcactgcca

SEQ ID NO: 196263 - DNA, 33 bp, Homo sapien
atttcataagaacaaaatggatggcgaggagaa

SEQ ID NO: 196264 - DNA, 33 bp, Homo sapien
atttcataagaacaaagtggatggcgaggagaa

SEQ ID NO: 196265 - DNA, 33 bp, Homo sapien
atactacaatacctgacgtgattggagcaaaat

SEQ ID NO: 196266 - DNA, 33 bp, Homo sapien
atactacaatacctgatgtgattggagcaaaat

SEQ ID NO: 196267 - DNA, 33 bp, Homo sapien
aaatgaccggaagccaagtggcttaaaacagca

SEQ ID NO: 196268 - DNA, 33 bp, Homo sapien
aaatgaccggaagccaggtggcttaaaacagca

SEQ ID NO: 196269 - DNA, 33 bp, Homo sapien
tgtgctcctcctctcaagatcctttgacttaat

SEQ ID NO: 196270 - DNA, 33 bp, Homo sapien
tgtgctcctcctctcaggatcctttgacttaat

SEQ ID NO: 196271 - DNA, 33 bp, Homo sapien
agacaaaatagcccagaacagtgattttcaaac

SEQ ID NO: 196272 - DNA, 33 bp, Homo sapien
agacaaaatagcccaggacagtgattttcaaac

SEQ ID NO: 196273 - DNA, 33 bp, Homo sapien
ctactctgagtagctgcaggtgctcctagaggg

SEQ ID NO: 196274 - DNA, 33 bp, Homo sapien
ctactctgagtagctgtaggtgctcctagaggg

SEQ ID NO: 196275 - DNA, 33 bp, Homo sapien
gtgcggctttgagacaacacaacctcttgaaga

SEQ ID NO: 196276 - DNA, 33 bp, Homo sapien
gtgcggctttgagacagcacaacctcttgaaga

SEQ ID NO: 196277 - DNA, 33 bp, Homo sapien
ggcagaggaacagatgcaatgagctccgggatg

SEQ ID NO: 196278 - DNA, 33 bp, Homo sapien
ggcagaggaacagatggaatgagctccgggatg

SEQ ID NO: 196279 - DNA, 33 bp, Homo sapien
ggggctcctgggaccacggctaaagatatattt

SEQ ID NO: 196280 - DNA, 33 bp, Homo sapien
ggggctcctgggaccatggctaaagatatattt

SEQ ID NO: 196281 - DNA, 33 bp, Homo sapien
tttttcttataccgtgaaaaataaatgtgaagt

SEQ ID NO: 196282 - DNA, 33 bp, Homo sapien
tttttcttataccgtgcaaaataaatgtgaagt

SEQ ID NO: 196283 - DNA, 33 bp, Homo sapien
agtacacgcatattcaaaacacattagctactg

SEQ ID NO: 196284 - DNA, 33 bp, Homo sapien
agtacacgcatattcagaacacattagctactg

SEQ ID NO: 196285 - DNA, 33 bp, Homo sapien
tgagggccaaaggaaacgacctgtgaactccaa

SEQ ID NO: 196286 - DNA, 33 bp, Homo sapien
tgagggccaaaggaaatgacctgtgaactccaa

SEQ ID NO: 196287 - DNA, 33 bp, Homo sapien
ttaagatgaagtgccaatggcaaggtaattatc

SEQ ID NO: 196288 - DNA, 33 bp, Homo sapien
ttaagatgaagtgccattggcaaggtaattatc

SEQ ID NO: 196289 - DNA, 33 bp, Homo sapien
gggacgttcgcatctcactttccctagagatgg

SEQ ID NO: 196290 - DNA, 33 bp, Homo sapien
gggacgttcgcatctcgctttccctagagatgg

SEQ ID NO: 196291 - DNA, 33 bp, Homo sapien
gtgccttactttcccacaaaataggagacatac

SEQ ID NO: 196292 - DNA, 33 bp, Homo sapien
gtgccttactttcccataaaataggagacatac

SEQ ID NO: 196293 - DNA, 33 bp, Homo sapien
ggcaggtccagagccaatctctgtaggatgtgg

SEQ ID NO: 196294 - DNA, 33 bp, Homo sapien
ggcaggtccagagccagtctctgtaggatgtgg

SEQ ID NO: 196295 - DNA, 33 bp, Homo sapien
gaaaccacaggcaaagccaggctagtctccggc

SEQ ID NO: 196296 - DNA, 33 bp, Homo sapien
gaaaccacaggcaaagtcaggctagtctccggc

SEQ ID NO: 196297 - DNA, 33 bp, Homo sapien
gctcagttctgaagccacctatagcacacttag

SEQ ID NO: 196298 - DNA, 33 bp, Homo sapien
gctcagttctgaagccgcctatagcacacttag

SEQ ID NO: 196299 - DNA, 33 bp, Homo sapien
atcaacagagtagatacgcagaaaagaagctct

SEQ ID NO: 196300 - DNA, 33 bp, Homo sapien
atcaacagagtagatatgcagaaaagaagctct

SEQ ID NO: 196301 - DNA, 33 bp, Homo sapien
tgttcttttccttcacagtctgtaattatggca

SEQ ID NO: 196302 - DNA, 33 bp, Homo sapien
tgttcttttccttcaccgtctgtaattatggca

SEQ ID NO: 196303 - DNA, 33 bp, Homo sapien
ttcccatacccaagacaggtcaaagcatgtaca

SEQ ID NO: 196304 - DNA, 33 bp, Homo sapien
ttcccatacccaagaccggtcaaagcatgtaca

SEQ ID NO: 196305 - DNA, 33 bp, Homo sapien
acaactgtaaaactgcagacaatagctccctgg

SEQ ID NO: 196306 - DNA, 33 bp, Homo sapien
acaactgtaaaactgcggacaatagctccctgg

SEQ ID NO: 196307 - DNA, 33 bp, Homo sapien
agaaagtgctgcccaactgcattaggccacaag

SEQ ID NO: 196308 - DNA, 33 bp, Homo sapien
agaaagtgctgcccaagtgcattaggccacaag

SEQ ID NO: 196309 - DNA, 33 bp, Homo sapien
ccaccggctgtccaagcacagacatttgtcagc

SEQ ID NO: 196310 - DNA, 33 bp, Homo sapien
ccaccggctgtccaagtacagacatttgtcagc

SEQ ID NO: 196311 - DNA, 33 bp, Homo sapien
gtgactcaatttggaaatgagatgaaaagttgc

SEQ ID NO: 196312 - DNA, 33 bp, Homo sapien
gtgactcaatttggaagtgagatgaaaagttgc

SEQ ID NO: 196313 - DNA, 33 bp, Homo sapien
agaaaaaaaagtctgcacgtgtgtctgcacaca

SEQ ID NO: 196314 - DNA, 33 bp, Homo sapien
agaaaaaaaagtctgcgcgtgtgtctgcacaca

SEQ ID NO: 196315 - DNA, 33 bp, Homo sapien
gtgggtatcagagaaaaatgagaccaaggatga

SEQ ID NO: 196316 - DNA, 33 bp, Homo sapien
gtgggtatcagagaaagatgagaccaaggatga

SEQ ID NO: 196317 - DNA, 33 bp, Homo sapien
tgctgcagtaaacttacgtgtccatatgtcttt

SEQ ID NO: 196318 - DNA, 33 bp, Homo sapien
tgctgcagtaaacttatgtgtccatatgtcttt

SEQ ID NO: 196319 - DNA, 33 bp, Homo sapien
taaatggaaataagtggagttggtggagatgaa

SEQ ID NO: 196320 - DNA, 33 bp, Homo sapien
taaatggaaataagtgtagttggtggagatgaa

SEQ ID NO: 196321 - DNA, 33 bp, Homo sapien
gcattaattgagaggacacaggtgaagtagcat

SEQ ID NO: 196322 - DNA, 33 bp, Homo sapien
gcattaattgagaggatacaggtgaagtagcat

SEQ ID NO: 196323 - DNA, 33 bp, Homo sapien
acatgttaggagtggcaagattactaaatcaac

SEQ ID NO: 196324 - DNA, 33 bp, Homo sapien
acatgttaggagtggcgagattactaaatcaac

SEQ ID NO: 196325 - DNA, 33 bp, Homo sapien
agatcacactcagctcgcaggctactcctttag

SEQ ID NO: 196326 - DNA, 33 bp, Homo sapien
agatcacactcagctctcaggctactcctttag

SEQ ID NO: 196327 - DNA, 33 bp, Homo sapien
ggcaggcagaataagacagagtctgctgggact

SEQ ID NO: 196328 - DNA, 33 bp, Homo sapien
ggcaggcagaataagagagagtctgctgggact

SEQ ID NO: 196329 - DNA, 33 bp, Homo sapien
ttccttatttcgtatcaccctctagttccttca

SEQ ID NO: 196330 - DNA, 33 bp, Homo sapien
ttccttatttcgtatcgccctctagttccttca

SEQ ID NO: 196331 - DNA, 33 bp, Homo sapien
aggaaacagggactaaatgagctaagttatgca

SEQ ID NO: 196332 - DNA, 33 bp, Homo sapien
aggaaacagggactaactgagctaagttatgca

SEQ ID NO: 196333 - DNA, 33 bp, Homo sapien
gctttttctttctctcaccaagttctgcccaca

SEQ ID NO: 196334 - DNA, 33 bp, Homo sapien
gctttttctttctctcgccaagttctgcccaca

SEQ ID NO: 196335 - DNA, 33 bp, Homo sapien
taagcaacaagagagaaggggagcagtatcagg

SEQ ID NO: 196336 - DNA, 33 bp, Homo sapien
taagcaacaagagagagggggagcagtatcagg

SEQ ID NO: 196337 - DNA, 33 bp, Homo sapien
atgaaggaaagctcaacaatgaccaagtaggta

SEQ ID NO: 196338 - DNA, 33 bp, Homo sapien
atgaaggaaagctcaagaatgaccaagtaggta

SEQ ID NO: 196339 - DNA, 33 bp, Homo sapien
agacactgatttagtaactctgggataggactg

SEQ ID NO: 196340 - DNA, 33 bp, Homo sapien
agacactgatttagtacctctgggataggactg

SEQ ID NO: 196341 - DNA, 33 bp, Homo sapien
cttctttaactgtgccacttatagtacctaaat

SEQ ID NO: 196342 - DNA, 33 bp, Homo sapien
cttctttaactgtgcctcttatagtacctaaat

SEQ ID NO: 196343 - DNA, 33 bp, Homo sapien
acattggaagtagagcaatgggggtcagaaagg

SEQ ID NO: 196344 - DNA, 33 bp, Homo sapien
acattggaagtagagcgatgggggtcagaaagg

SEQ ID NO: 196345 - DNA, 33 bp, Homo sapien
ttattttaacagaggaagaaactatcaggtaac

SEQ ID NO: 196346 - DNA, 33 bp, Homo sapien
ttattttaacagaggaggaaactatcaggtaac

SEQ ID NO: 196347 - DNA, 33 bp, Homo sapien
atgtgaacactacccacaaacatcttaccatgc

SEQ ID NO: 196348 - DNA, 33 bp, Homo sapien
atgtgaacactacccataaacatcttaccatgc

SEQ ID NO: 196349 - DNA, 33 bp, Homo sapien
tgaattgaaaacagtacatgccgagataaaatg

SEQ ID NO: 196350 - DNA, 33 bp, Homo sapien
tgaattgaaaacagtagatgccgagataaaatg

SEQ ID NO: 196351 - DNA, 33 bp, Homo sapien
catacaaggcaggaaacaagcaaagttcaggat

SEQ ID NO: 196352 - DNA, 33 bp, Homo sapien
catacaaggcaggaaataagcaaagttcaggat

SEQ ID NO: 196353 - DNA, 33 bp, Homo sapien
ccccttcatccggccaactttaactcagctcca

SEQ ID NO: 196354 - DNA, 33 bp, Homo sapien
ccccttcatccggccagctttaactcagctcca

SEQ ID NO: 196355 - DNA, 33 bp, Homo sapien
gtccagccatccatcccattctctacatgactc

SEQ ID NO: 196356 - DNA, 33 bp, Homo sapien
gtccagccatccatcctattctctacatgactc

SEQ ID NO: 196357 - DNA, 33 bp, Homo sapien
ctgtctttatttgttaggatcaccatatgaacg

SEQ ID NO: 196358 - DNA, 33 bp, Homo sapien
ctgtctttatttgttatgatcaccatatgaacg

SEQ ID NO: 196359 - DNA, 33 bp, Homo sapien
ccgaatccaaacaaccaatgaacagcagaatag

SEQ ID NO: 196360 - DNA, 33 bp, Homo sapien
ccgaatccaaacaaccgatgaacagcagaatag

SEQ ID NO: 196361 - DNA, 33 bp, Homo sapien
acaaaaggtgcaaagaaaactaagatgcagtct

SEQ ID NO: 196362 - DNA, 33 bp, Homo sapien
acaaaaggtgcaaagagaactaagatgcagtct

SEQ ID NO: 196363 - DNA, 33 bp, Homo sapien
tgacctttcaaaacgacaattcaaaatagctgt

SEQ ID NO: 196364 - DNA, 33 bp, Homo sapien
tgacctttcaaaacgagaattcaaaatagctgt

SEQ ID NO: 196365 - DNA, 33 bp, Homo sapien; identical to SEQ ID NO: 196363

SEQ ID NO: 196366 - DNA, 33 bp, Homo sapien; identical to SEQ ID NO: 196364

SEQ ID NO: 196367 - DNA, 33 bp, Homo sapien
attctgcattgcaatacggggcactttggagtc

SEQ ID NO: 196368 - DNA, 33 bp, Homo sapien
attctgcattgcaatatggggcactttggagtc

SEQ ID NO: 196369 - DNA, 33 bp, Homo sapien
acctctggtttaggcccgccctctggatattag

SEQ ID NO: 196370 - DNA, 33 bp, Homo sapien
acctctggtttaggcctgccctctggatattag

SEQ ID NO: 196371 - DNA, 33 bp, Homo sapien
tgtttggagccacaaaagtcacctctggtttag

SEQ ID NO: 196372 - DNA, 33 bp, Homo sapien
tgtttggagccacaaacgtcacctctggtttag

SEQ ID NO: 196373 - DNA, 33 bp, Homo sapien
gagatagttcctcccaagttaccaggcaatgct

SEQ ID NO: 196374 - DNA, 33 bp, Homo sapien
gagatagttcctcccaggttaccaggcaatgct

SEQ ID NO: 196375 - DNA, 33 bp, Homo sapien
ccacagggaagcaaacagtcctacttctgtcct

SEQ ID NO: 196376 - DNA, 33 bp, Homo sapien
ccacagggaagcaaacggtcctacttctgtcct

SEQ ID NO: 196377 - DNA, 33 bp, Homo sapien
tgaggaagtgaaactcagataaattaaattcag

SEQ ID NO: 196378 - DNA, 33 bp, Homo sapien
tgaggaagtgaaactcggataaattaaattcag

SEQ ID NO: 196379 - DNA, 33 bp, Homo sapien
ttatttgaggatgccaggagaaaatgccatgca

SEQ ID NO: 196380 - DNA, 33 bp, Homo sapien
ttatttgaggatgccatgagaaaatgccatgca

SEQ ID NO: 196381 - DNA, 33 bp, Homo sapien
ggaattaaagctaaaaaccagatctcctgctct

SEQ ID NO: 196382 - DNA, 33 bp, Homo sapien
ggaattaaagctaaaatccagatctcctgctct

SEQ ID NO: 196383 - DNA, 33 bp, Homo sapien
attggaaatagactgaaggacaggacagagaac

SEQ ID NO: 196384 - DNA, 33 bp, Homo sapien
attggaaatagactgacggacaggacagagaac

SEQ ID NO: 196385 - DNA, 33 bp, Homo sapien
cccaggagatcaaagcacaagtaatgggtcttt

SEQ ID NO: 196386 - DNA, 33 bp, Homo sapien
cccaggagatcaaagcgcaagtaatgggtcttt

SEQ ID NO: 196387 - DNA, 33 bp, Homo sapien
cggagcaggggaatgcaatggtgagattgggta

SEQ ID NO: 196388 - DNA, 33 bp, Homo sapien
cggagcaggggaatgcgatggtgagattgggta

SEQ ID NO: 196389 - DNA, 33 bp, Homo sapien
gtcagtcttgctagtgaaagatgaagatgagac

SEQ ID NO: 196390 - DNA, 33 bp, Homo sapien
gtcagtcttgctagtggaagatgaagatgagac

SEQ ID NO: 196391 - DNA, 33 bp, Homo sapien
gctgcctaatgaggaacaatatgatacggcaca

SEQ ID NO: 196392 - DNA, 33 bp, Homo sapien
gctgcctaatgaggaataatatgatacggcaca

SEQ ID NO: 196393 - DNA, 33 bp, Homo sapien
gtacacatctgcaaaacgacaccatctttaggt

SEQ ID NO: 196394 - DNA, 33 bp, Homo sapien
gtacacatctgcaaaatgacaccatctttaggt

SEQ ID NO: 196395 - DNA, 33 bp, Homo sapien
taccattagctcctctaaaccatctgcgacaca

SEQ ID NO: 196396 - DNA, 33 bp, Homo sapien
taccattagctcctctgaaccatctgcgacaca

SEQ ID NO: 196397 - DNA, 33 bp, Homo sapien
aagaaattgctcattaaatgtttgctcaactga

SEQ ID NO: 196398 - DNA, 33 bp, Homo sapien
aagaaattgctcattagatgtttgctcaactga

SEQ ID NO: 196399 - DNA, 33 bp, Homo sapien
catctcttcagtgtccagcacaatgcattctag

SEQ ID NO: 196400 - DNA, 33 bp, Homo sapien
catctcttcagtgtccggcacaatgcattctag

SEQ ID NO: 196401 - DNA, 33 bp, Homo sapien
cttattaatgcagggccgagagatactgtgagt

SEQ ID NO: 196402 - DNA, 33 bp, Homo sapien
cttattaatgcagggctgagagatactgtgagt

SEQ ID NO: 196403 - DNA, 33 bp, Homo sapien
ggaagagtaaccaggacggtagtgggccttccc

SEQ ID NO: 196404 - DNA, 33 bp, Homo sapien
ggaagagtaaccaggatggtagtgggccttccc

SEQ ID NO: 196405 - DNA, 33 bp, Homo sapien
ggcacagaacaagttcaagttctggaatgacgt

SEQ ID NO: 196406 - DNA, 33 bp, Homo sapien
ggcacagaacaagttcgagttctggaatgacgt

SEQ ID NO: 196407 - DNA, 33 bp, Homo sapien
caaatggcaggtgcacaaaactcccagggaaag

SEQ ID NO: 196408 - DNA, 33 bp, Homo sapien
caaatggcaggtgcacgaaactcccagggaaag

SEQ ID NO: 196409 - DNA, 33 bp, Homo sapien
gatttgaacttcatcagcaacttagctgcgagt

SEQ ID NO: 196410 - DNA, 33 bp, Homo sapien
gatttgaacttcatcatcaacttagctgcgagt

SEQ ID NO: 196411 - DNA, 33 bp, Homo sapien
cagagtgcagggcagactcataagggtattctt

SEQ ID NO: 196412 - DNA, 33 bp, Homo sapien
cagagtgcagggcagagtcataagggtattctt

SEQ ID NO: 196413 - DNA, 33 bp, Homo sapien
ttgtagcaatgcaaatcaactccactctgtcag

SEQ ID NO: 196414 - DNA, 33 bp, Homo sapien
ttgtagcaatgcaaatgaactccactctgtcag

SEQ ID NO: 196415 - DNA, 33 bp, Homo sapien
tcagttcatttgaccccatagaaacacagcttc

SEQ ID NO: 196416 - DNA, 33 bp, Homo sapien
tcagttcatttgaccctatagaaacacagcttc

SEQ ID NO: 196417 - DNA, 33 bp, Homo sapien
attctcagtgtcaacacagtaatcaggctcacc

SEQ ID NO: 196418 - DNA, 33 bp, Homo sapien
attctcagtgtcaacatagtaatcaggctcacc

SEQ ID NO: 196419 - DNA, 33 bp, Homo sapien
taacctgttggcctatcagttttccctcttgta

SEQ ID NO: 196420 - DNA, 33 bp, Homo sapien
taacctgttggcctattagttttccctcttgta

SEQ ID NO: 196421 - DNA, 33 bp, Homo sapien
gaacacaagcagattaacataaatcagtgggtt

SEQ ID NO: 196422 - DNA, 33 bp, Homo sapien
gaacacaagcagattatcataaatcagtgggtt

SEQ ID NO: 196423 - DNA, 33 bp, Homo sapien
aaaggaggagaaaccaatgagtccgtagtctag

SEQ ID NO: 196424 - DNA, 33 bp, Homo sapien
aaaggaggagaaaccagtgagtccgtagtctag

SEQ ID NO: 196425 - DNA, 33 bp, Homo sapien
gaggatgcattctaaaatctagcttgattgaca

SEQ ID NO: 196426 - DNA, 33 bp, Homo sapien
gaggatgcattctaaattctagcttgattgaca

SEQ ID NO: 196427 - DNA, 33 bp, Homo sapien
gttcaagttaaagagcaatacggtcttaaggat

SEQ ID NO: 196428 - DNA, 33 bp, Homo sapien
gttcaagttaaagagcgatacggtcttaaggat

SEQ ID NO: 196429 - DNA, 33 bp, Homo sapien
gcttcattagcttacacgtgcaaactggaggta

SEQ ID NO: 196430 - DNA, 33 bp, Homo sapien
gcttcattagcttacatgtgcaaactggaggta

SEQ ID NO: 196431 - DNA, 33 bp, Homo sapien
cacctacccagagcccagcttcattagcttaca

SEQ ID NO: 196432 - DNA, 33 bp, Homo sapien
cacctacccagagcccggcttcattagcttaca

SEQ ID NO: 196433 - DNA, 33 bp, Homo sapien
tcacagtgttaactcccagaaaaactgctctca

SEQ ID NO: 196434 - DNA, 33 bp, Homo sapien
tcacagtgttaactcctagaaaaactgctctca

SEQ ID NO: 196435 - DNA, 33 bp, Homo sapien
gtgtgacgggagcaaacctttccatggccattc

SEQ ID NO: 196436 - DNA, 33 bp, Homo sapien
gtgtgacgggagcaaatctttccatggccattc

SEQ ID NO: 196437 - DNA, 33 bp, Homo sapien
cattgtgtgaccatcacagtgtgtgcttacaca

SEQ ID NO: 196438 - DNA, 33 bp, Homo sapien
cattgtgtgaccatcatagtgtgtgcttacaca

SEQ ID NO: 196439 - DNA, 33 bp, Homo sapien
gacaacctagacgaaccgaaaagcactagtggt

SEQ ID NO: 196440 - DNA, 33 bp, Homo sapien
gacaacctagacgaactgaaaagcactagtggt

SEQ ID NO: 196441 - DNA, 33 bp, Homo sapien
ctgacacaaagtaggaactcaataattagaatc

SEQ ID NO: 196442 - DNA, 33 bp, Homo sapien
ctgacacaaagtaggagctcaataattagaatc

SEQ ID NO: 196443 - DNA, 33 bp, Homo sapien
tgactctgcggacaaaaatgactaggtgaggtg

SEQ ID NO: 196444 - DNA, 33 bp, Homo sapien
tgactctgcggacaaagatgactaggtgaggtg

SEQ ID NO: 196445 - DNA, 33 bp, Homo sapien
cagaaggatgtaagagacacagaaaggaacagg

SEQ ID NO: 196446 - DNA, 33 bp, Homo sapien
cagaaggatgtaagaggcacagaaaggaacagg

SEQ ID NO: 196447 - DNA, 33 bp, Homo sapien
ttagtattccttactcacagccttgcgtcttta

SEQ ID NO: 196448 - DNA, 33 bp, Homo sapien
ttagtattccttactcgcagccttgcgtcttta

SEQ ID NO: 196449 - DNA, 33 bp, Homo sapien
gtggctgctcagtggacgatggaccttccaggg

SEQ ID NO: 196450 - DNA, 33 bp, Homo sapien
gtggctgctcagtggatgatggaccttccaggg

SEQ ID NO: 196451 - DNA, 33 bp, Homo sapien
cttcctccggctgaaacgcttccctccttctct

SEQ ID NO: 196452 - DNA, 33 bp, Homo sapien
cttcctccggctgaaatgcttccctccttctct

SEQ ID NO: 196453 - DNA, 33 bp, Homo sapien
tccttgtcgcctgtcaaattcctacttgtctat

SEQ ID NO: 196454 - DNA, 33 bp, Homo sapien
tccttgtcgcctgtcagattcctacttgtctat

SEQ ID NO: 196455 - DNA, 33 bp, Homo sapien
cacaaagtgcaggcacactacaggaattatatt

SEQ ID NO: 196456 - DNA, 33 bp, Homo sapien
cacaaagtgcaggcacgctacaggaattatatt

SEQ ID NO: 196457 - DNA, 33 bp, Homo sapien
gagggcaagaagagaggaggttggaacagcgca

SEQ ID NO: 196458 - DNA, 33 bp, Homo sapien
gagggcaagaagagagtaggttggaacagcgca

SEQ ID NO: 196459 - DNA, 33 bp, Homo sapien
ttattttcttcacagcagaaatcatgacctgaa

SEQ ID NO: 196460 - DNA, 33 bp, Homo sapien
ttattttcttcacagcggaaatcatgacctgaa

SEQ ID NO: 196461 - DNA, 33 bp, Homo sapien
ctctggctcattataccgctttattttcttcac

SEQ ID NO: 196462 - DNA, 33 bp, Homo sapien
ctctggctcattatactgctttattttcttcac

SEQ ID NO: 196463 - DNA, 33 bp, Homo sapien
tacttttctgcagttaaatttactccacatcaa

SEQ ID NO: 196464 - DNA, 33 bp, Homo sapien
tacttttctgcagttatatttactccacatcaa

SEQ ID NO: 196465 - DNA, 33 bp, Homo sapien
ttgcgtcccatatgaacgcggtaaagaatgcta

SEQ ID NO: 196466 - DNA, 33 bp, Homo sapien
ttgcgtcccatatgaatgcggtaaagaatgcta

SEQ ID NO: 196467 - DNA, 33 bp, Homo sapien
cctgttgggcagcctcgaggtacaggctctgtt

SEQ ID NO: 196468 - DNA, 33 bp, Homo sapien
cctgttgggcagcctctaggtacaggctctgtt

SEQ ID NO: 196469 - DNA, 33 bp, Homo sapien
acctgagccatccttaagttttcttaccttaca

SEQ ID NO: 196470 - DNA, 33 bp, Homo sapien
acctgagccatccttaggttttcttaccttaca

SEQ ID NO: 196471 - DNA, 33 bp, Homo sapien
ctcatttaattttgcacgacaacacatttttac

SEQ ID NO: 196472 - DNA, 33 bp, Homo sapien
ctcatttaattttgcatgacaacacatttttac

SEQ ID NO: 196473 - DNA, 33 bp, Homo sapien
aggtcttgagaacaaaaagaagtgggatgcaga

SEQ ID NO: 196474 - DNA, 33 bp, Homo sapien
aggtcttgagaacaaacagaagtgggatgcaga

SEQ ID NO: 196475 - DNA, 33 bp, Homo sapien
atactctaacgtcaaacagaaatggttttggtt

SEQ ID NO: 196476 - DNA, 33 bp, Homo sapien
atactctaacgtcaaatagaaatggttttggtt

SEQ ID NO: 196477 - DNA, 33 bp, Homo sapien
attcatgtgggggttccatgggccaaacactta

SEQ ID NO: 196478 - DNA, 33 bp, Homo sapien
attcatgtgggggttctatgggccaaacactta

SEQ ID NO: 196479 - DNA, 33 bp, Homo sapien
ttctttcctgaaactccatcccctcccagcata

SEQ ID NO: 196480 - DNA, 33 bp, Homo sapien
ttctttcctgaaactctatcccctcccagcata

SEQ ID NO: 196481 - DNA, 33 bp, Homo sapien
taggtcctttgcatgacagtagtggggctgtcc

SEQ ID NO: 196482 - DNA, 33 bp, Homo sapien
taggtcctttgcatgatagtagtggggctgtcc

SEQ ID NO: 196483 - DNA, 33 bp, Homo sapien
ttgttacctttgcctcgaggccacagtgggagg

SEQ ID NO: 196484 - DNA, 33 bp, Homo sapien
ttgttacctttgcctctaggccacagtgggagg

SEQ ID NO: 196485 - DNA, 33 bp, Homo sapien
ttgcagttcacgctaccatcttgaaacaaaatg

SEQ ID NO: 196486 - DNA, 33 bp, Homo sapien
ttgcagttcacgctactatcttgaaacaaaatg

SEQ ID NO: 196487 - DNA, 33 bp, Homo sapien
gctagagtatcatcaacgtgtgccttaagttca

SEQ ID NO: 196488 - DNA, 33 bp, Homo sapien
gctagagtatcatcaatgtgtgccttaagttca

SEQ ID NO: 196489 - DNA, 33 bp, Homo sapien
caagcctgcagcactgaatgtgtgtcagtgatt

SEQ ID NO: 196490 - DNA, 33 bp, Homo sapien
caagcctgcagcactggatgtgtgtcagtgatt

SEQ ID NO: 196491 - DNA, 33 bp, Homo sapien
tgttccaaaggatgaccgtagagagacaagtta

SEQ ID NO: 196492 - DNA, 33 bp, Homo sapien
tgttccaaaggatgactgtagagagacaagtta

SEQ ID NO: 196493 - DNA, 33 bp, Homo sapien
agtaatgtttgagctgcaatattggattagaag

SEQ ID NO: 196494 - DNA, 33 bp, Homo sapien
agtaatgtttgagctgtaatattggattagaag

SEQ ID NO: 196495 - DNA, 33 bp, Homo sapien
gctgaagtcttaacaactgtgacctgctttgtt

SEQ ID NO: 196496 - DNA, 33 bp, Homo sapien
gctgaagtcttaacaattgtgacctgctttgtt

SEQ ID NO: 196497 - DNA, 33 bp, Homo sapien
acttacatttggaggacccatctcacataaaag

SEQ ID NO: 196498 - DNA, 33 bp, Homo sapien
acttacatttggaggagccatctcacataaaag

SEQ ID NO: 196499 - DNA, 33 bp, Homo sapien
ccccatctgccaacacgatcgatcatacccctt

SEQ ID NO: 196500 - DNA, 33 bp, Homo sapien
ccccatctgccaacactatcgatcatacccctt

SEQ ID NO: 196501 - DNA, 33 bp, Homo sapien
taaaattcttgggttcacatgagtcgggatatc

SEQ ID NO: 196502 - DNA, 33 bp, Homo sapien
taaaattcttgggttcgcatgagtcgggatatc

SEQ ID NO: 196503 - DNA, 33 bp, Homo sapien
tttgaaaagaaggaagaagactatgccactctt

SEQ ID NO: 196504 - DNA, 33 bp, Homo sapien
tttgaaaagaaggaagcagactatgccactctt

SEQ ID NO: 196505 - DNA, 33 bp, Homo sapien
tgaggccagactccacagacttccaggggcact

SEQ ID NO: 196506 - DNA, 33 bp, Homo sapien
tgaggccagactccacggacttccaggggcact

SEQ ID NO: 196507 - DNA, 33 bp, Homo sapien
atggcagacacgttcacaatggtggactggaga

SEQ ID NO: 196508 - DNA, 33 bp, Homo sapien
atggcagacacgttcataatggtggactggaga

SEQ ID NO: 196509 - DNA, 33 bp, Homo sapien
taccaaaataactgcaacgtggtgtgtaagtgg

SEQ ID NO: 196510 - DNA, 33 bp, Homo sapien
taccaaaataactgcagcgtggtgtgtaagtgg

SEQ ID NO: 196511 - DNA, 33 bp, Homo sapien
caatcaagcaagagaaattccgccactaccgta

SEQ ID NO: 196512 - DNA, 33 bp, Homo sapien
caatcaagcaagagaagttccgccactaccgta

SEQ ID NO: 196513 - DNA, 33 bp, Homo sapien
ttactttactgggcacaaacctagtggagagag

SEQ ID NO: 196514 - DNA, 33 bp, Homo sapien
ttactttactgggcacgaacctagtggagagag

SEQ ID NO: 196515 - DNA, 33 bp, Homo sapien
agtgatctgtgctccaaaataaaattaccaaaa

SEQ ID NO: 196516 - DNA, 33 bp, Homo sapien
agtgatctgtgctccacaataaaattaccaaaa

SEQ ID NO: 196517 - DNA, 33 bp, Homo sapien
aatcaaaatcaatctacgtttcctccttagttg

SEQ ID NO: 196518 - DNA, 33 bp, Homo sapien
aatcaaaatcaatctatgtttcctccttagttg

SEQ ID NO: 196519 - DNA, 33 bp, Homo sapien
aactaggcagtagagaatactgtttcagcactt

SEQ ID NO: 196520 - DNA, 33 bp, Homo sapien
aactaggcagtagagagtactgtttcagcactt

SEQ ID NO: 196521 - DNA, 33 bp, Homo sapien
atcttgcagtaattaaaactaactgccagtgca

SEQ ID NO: 196522 - DNA, 33 bp, Homo sapien
atcttgcagtaattaagactaactgccagtgca

SEQ ID NO: 196523 - DNA, 33 bp, Homo sapien
ctttgtttagggggccacttttgctcttgcaca

SEQ ID NO: 196524 - DNA, 33 bp, Homo sapien
ctttgtttagggggcctcttttgctcttgcaca

SEQ ID NO: 196525 - DNA, 33 bp, Homo sapien
tgttaaatttgagatgcatatgggctatctaag

SEQ ID NO: 196526 - DNA, 33 bp, Homo sapien
tgttaaatttgagatgtatatgggctatctaag

SEQ ID NO: 196527 - DNA, 33 bp, Homo sapien
ctggcctttgataggtaaagggacaggcccttc

SEQ ID NO: 196528 - DNA, 33 bp, Homo sapien
ctggcctttgataggtgaagggacaggcccttc

SEQ ID NO: 196529 - DNA, 33 bp, Homo sapien
ccccaggttctgtaaactcttgagtcttgtcct

SEQ ID NO: 196530 - DNA, 33 bp, Homo sapien
ccccaggttctgtaaattcttgagtcttgtcct

SEQ ID NO: 196531 - DNA, 33 bp, Homo sapien
cattcctggtttttccactaaccagctctgcct

SEQ ID NO: 196532 - DNA, 33 bp, Homo sapien
cattcctggtttttccgctaaccagctctgcct

SEQ ID NO: 196533 - DNA, 33 bp, Homo sapien
aaaaggagagaatggacgttgaactaaactgag

SEQ ID NO: 196534 - DNA, 33 bp, Homo sapien
aaaaggagagaatggatgttgaactaaactgag

SEQ ID NO: 196535 - DNA, 33 bp, Homo sapien
ttctgtaatatgaaaaatagattgactaataaa

SEQ ID NO: 196536 - DNA, 33 bp, Homo sapien
ttctgtaatatgaaaagtagattgactaataaa

SEQ ID NO: 196537 - DNA, 33 bp, Homo sapien
tggaggactaacttgcaatttttgttaaataag

SEQ ID NO: 196538 - DNA, 33 bp, Homo sapien
tggaggactaacttgcgatttttgttaaataag

SEQ ID NO: 196539 - DNA, 33 bp, Homo sapien
gtgaaagctatgaaaacttcttgaagatttagc

SEQ ID NO: 196540 - DNA, 33 bp, Homo sapien
gtgaaagctatgaaaatttcttgaagatttagc

SEQ ID NO: 196541 - DNA, 33 bp, Homo sapien
ttctatgattgaatacagatacgaagaactttc

SEQ ID NO: 196542 - DNA, 33 bp, Homo sapien
ttctatgattgaataccgatacgaagaactttc

SEQ ID NO: 196543 - DNA, 33 bp, Homo sapien
aggggtattttctagcccagagatgacatatcc

SEQ ID NO: 196544 - DNA, 33 bp, Homo sapien
aggggtattttctagctcagagatgacatatcc

SEQ ID NO: 196545 - DNA, 33 bp, Homo sapien
aaaatgagataaaataggtttgctcttgtgttt

SEQ ID NO: 196546 - DNA, 33 bp, Homo sapien
aaaatgagataaaatatgtttgctcttgtgttt

SEQ ID NO: 196547 - DNA, 33 bp, Homo sapien
atctgaaaacactttacaggtcagggatgcaga

SEQ ID NO: 196548 - DNA, 33 bp, Homo sapien
atctgaaaacactttataggtcagggatgcaga

SEQ ID NO: 196549 - DNA, 33 bp, Homo sapien
gcaatgaagtccagcaacttactaatgactgta

SEQ ID NO: 196550 - DNA, 33 bp, Homo sapien
gcaatgaagtccagcagcttactaatgactgta

SEQ ID NO: 196551 - DNA, 33 bp, Homo sapien
ctttgataaatttacaagccctctacaactgtt

SEQ ID NO: 196552 - DNA, 33 bp, Homo sapien
ctttgataaatttacaggccctctacaactgtt

SEQ ID NO: 196553 - DNA, 33 bp, Homo sapien
caggaccctttaccaacgcttttctcaatcatt

SEQ ID NO: 196554 - DNA, 33 bp, Homo sapien
caggaccctttaccaatgcttttctcaatcatt

SEQ ID NO: 196555 - DNA, 33 bp, Homo sapien
ttctgcggttagaatacgtacaaactcgtaggc

SEQ ID NO: 196556 - DNA, 33 bp, Homo sapien
ttctgcggttagaatatgtacaaactcgtaggc

SEQ ID NO: 196557 - DNA, 33 bp, Homo sapien
ctctgaaatcccaaataagcagtcaaataaaag

SEQ ID NO: 196558 - DNA, 33 bp, Homo sapien
ctctgaaatcccaaatgagcagtcaaataaaag

SEQ ID NO: 196559 - DNA, 33 bp, Homo sapien
ttgatgctctggctagaaggtgctaaaacataa

SEQ ID NO: 196560 - DNA, 33 bp, Homo sapien
ttgatgctctggctaggaggtgctaaaacataa

SEQ ID NO: 196561 - DNA, 33 bp, Homo sapien
gacactaaaatttatcaattgctggcatcccac

SEQ ID NO: 196562 - DNA, 33 bp, Homo sapien
gacactaaaatttatcgattgctggcatcccac

SEQ ID NO: 196563 - DNA, 33 bp, Homo sapien
gaacaaattagcaagcaaacagtgagtgttgcc

SEQ ID NO: 196564 - DNA, 33 bp, Homo sapien
gaacaaattagcaagccaacagtgagtgttgcc

SEQ ID NO: 196565 - DNA, 33 bp, Homo sapien
caagaatgaacaccgcagaggttcagccgtctc

SEQ ID NO: 196566 - DNA, 33 bp, Homo sapien
caagaatgaacaccgcggaggttcagccgtctc

SEQ ID NO: 196567 - DNA, 33 bp, Homo sapien
tgcaagccaggaccataagaaacttatctcttt

SEQ ID NO: 196568 - DNA, 33 bp, Homo sapien
tgcaagccaggaccatgagaaacttatctcttt

SEQ ID NO: 196569 - DNA, 33 bp, Homo sapien
acagctgataagcctcgcctgtttgcttgcttt

SEQ ID NO: 196570 - DNA, 33 bp, Homo sapien
acagctgataagcctctcctgtttgcttgcttt

SEQ ID NO: 196571 - DNA, 33 bp, Homo sapien
gaactcttgtccccaaatgtaattccttgcttc

SEQ ID NO: 196572 - DNA, 33 bp, Homo sapien
gaactcttgtccccaagtgtaattccttgcttc

SEQ ID NO: 196573 - DNA, 33 bp, Homo sapien
tgaccaaaactcttaagaattgaacctgataca

SEQ ID NO: 196574 - DNA, 33 bp, Homo sapien
tgaccaaaactcttaataattgaacctgataca

SEQ ID NO: 196575 - DNA, 33 bp, Homo sapien
tcttcttgttgatgtcaatttccaagtactctg

SEQ ID NO: 196576 - DNA, 33 bp, Homo sapien
tcttcttgttgatgtcgatttccaagtactctg

SEQ ID NO: 196577 - DNA, 33 bp, Homo sapien
gtcctgctctatctaactggagaaatcccagct

SEQ ID NO: 196578 - DNA, 33 bp, Homo sapien
gtcctgctctatctaattggagaaatcccagct

SEQ ID NO: 196579 - DNA, 33 bp, Homo sapien
gctgatggaacccacaaagataccaaccgattt

SEQ ID NO: 196580 - DNA, 33 bp, Homo sapien
gctgatggaacccacacagataccaaccgattt

SEQ ID NO: 196581 - DNA, 33 bp, Homo sapien
actagggtaggtatacacagtaattaacatcac

SEQ ID NO: 196582 - DNA, 33 bp, Homo sapien
actagggtaggtatacgcagtaattaacatcac

SEQ ID NO: 196583 - DNA, 33 bp, Homo sapien
ctccccagggcaaacccgacaatgggtattaag

SEQ ID NO: 196584 - DNA, 33 bp, Homo sapien
ctccccagggcaaacctgacaatgggtattaag

SEQ ID NO: 196585 - DNA, 33 bp, Homo sapien
ggattcctacttaaccaattgtatctgttatca

SEQ ID NO: 196586 - DNA, 33 bp, Homo sapien
ggattcctacttaaccgattgtatctgttatca

SEQ ID NO: 196587 - DNA, 33 bp, Homo sapien
gacactctaggaagaacgggcacacctgacacc

SEQ ID NO: 196588 - DNA, 33 bp, Homo sapien
gacactctaggaagaatgggcacacctgacacc

SEQ ID NO: 196589 - DNA, 33 bp, Homo sapien
atggtgagatagagacagaaacagataaaaaga

SEQ ID NO: 196590 - DNA, 33 bp, Homo sapien
atggtgagatagagacggaaacagataaaaaga

SEQ ID NO: 196591 - DNA, 33 bp, Homo sapien
tccttttggcataacaaggtgcttcgcgctcat

SEQ ID NO: 196592 - DNA, 33 bp, Homo sapien
tccttttggcataacagggtgcttcgcgctcat

SEQ ID NO: 196593 - DNA, 33 bp, Homo sapien
aggagttagcagtctaaaaggacggcactgaaa

SEQ ID NO: 196594 - DNA, 33 bp, Homo sapien
aggagttagcagtctataaggacggcactgaaa

SEQ ID NO: 196595 - DNA, 33 bp, Homo sapien
gtgctcggcggcctgacgaatcaagtgcgtgct

SEQ ID NO: 196596 - DNA, 33 bp, Homo sapien
gtgctcggcggcctgatgaatcaagtgcgtgct

SEQ ID NO: 196597 - DNA, 33 bp, Homo sapien
aggacattacagagaaataaattgcatggcaat

SEQ ID NO: 196598 - DNA, 33 bp, Homo sapien
aggacattacagagaagtaaattgcatggcaat

SEQ ID NO: 196599 - DNA, 33 bp, Homo sapien
tgtggtcttatttgcacagtacagtgagctgta

SEQ ID NO: 196600 - DNA, 33 bp, Homo sapien
tgtggtcttatttgcatagtacagtgagctgta

SEQ ID NO: 196601 - DNA, 33 bp, Homo sapien
aattgaaagcagttaacccaatactgaaagccc

SEQ ID NO: 196602 - DNA, 33 bp, Homo sapien
aattgaaagcagttaatccaatactgaaagccc

SEQ ID NO: 196603 - DNA, 33 bp, Homo sapien
cctacttctcccacaaagcaaaccacctcacct

SEQ ID NO: 196604 - DNA, 33 bp, Homo sapien
cctacttctcccacaaggcaaaccacctcacct

SEQ ID NO: 196605 - DNA, 33 bp, Homo sapien
tcaactattatgattaagatttgaacagacgca

SEQ ID NO: 196606 - DNA, 33 bp, Homo sapien
tcaactattatgattaggatttgaacagacgca

SEQ ID NO: 196607 - DNA, 33 bp, Homo sapien
ttgagcaggttgaatgcagtctttgcatgtact

SEQ ID NO: 196608 - DNA, 33 bp, Homo sapien
ttgagcaggttgaatgtagtctttgcatgtact

SEQ ID NO: 196609 - DNA, 33 bp, Homo sapien
aggactcactgcaggacgtgtaattcctccagc

SEQ ID NO: 196610 - DNA, 33 bp, Homo sapien
aggactcactgcaggatgtgtaattcctccagc

SEQ ID NO: 196611 - DNA, 33 bp, Homo sapien
tacaaggagggacaacaagaaggactcactgca

SEQ ID NO: 196612 - DNA, 33 bp, Homo sapien
tacaaggagggacaacgagaaggactcactgca

SEQ ID NO: 196613 - DNA, 33 bp, Homo sapien
ttctcaatgacccaatcagtcaaggagcaactg

SEQ ID NO: 196614 - DNA, 33 bp, Homo sapien
ttctcaatgacccaattagtcaaggagcaactg

SEQ ID NO: 196615 - DNA, 33 bp, Homo sapien
attttattgaagtcatcagaggccggtttgtca

SEQ ID NO: 196616 - DNA, 33 bp, Homo sapien
attttattgaagtcattagaggccggtttgtca

SEQ ID NO: 196617 - DNA, 33 bp, Homo sapien
gcaggtaggaagacaaattggcacagtctcttt

SEQ ID NO: 196618 - DNA, 33 bp, Homo sapien
gcaggtaggaagacaagttggcacagtctcttt

SEQ ID NO: 196619 - DNA, 33 bp, Homo sapien
tggttttcaggacaataaatgtgcaaacactcg

SEQ ID NO: 196620 - DNA, 33 bp, Homo sapien
tggttttcaggacaatgaatgtgcaaacactcg

SEQ ID NO: 196621 - DNA, 33 bp, Homo sapien
tttcaactccgtcaatcacttagcatcaaatga

SEQ ID NO: 196622 - DNA, 33 bp, Homo sapien
tttcaactccgtcaattacttagcatcaaatga

SEQ ID NO: 196623 - DNA, 33 bp, Homo sapien
tgccagtgttgttggcactttcgatccagagtg

SEQ ID NO: 196624 - DNA, 33 bp, Homo sapien
tgccagtgttgttggcgctttcgatccagagtg

SEQ ID NO: 196625 - DNA, 33 bp, Homo sapien
ttagcataggcttcacaacagaatccaaggaga

SEQ ID NO: 196626 - DNA, 33 bp, Homo sapien
ttagcataggcttcaccacagaatccaaggaga

SEQ ID NO: 196627 - DNA, 33 bp, Homo sapien
ctgctaaatatatccccggagtgctttgctttc

SEQ ID NO: 196628 - DNA, 33 bp, Homo sapien
ctgctaaatatatccctggagtgctttgctttc

SEQ ID NO: 196629 - DNA, 33 bp, Homo sapien
ggctttattatccttcaatgttgtcagctcaat

SEQ ID NO: 196630 - DNA, 33 bp, Homo sapien
ggctttattatccttcgatgttgtcagctcaat

SEQ ID NO: 196631 - DNA, 33 bp, Homo sapien
aacacattagagaaacagatattaagggcaaaa

SEQ ID NO: 196632 - DNA, 33 bp, Homo sapien
aacacattagagaaacggatattaagggcaaaa

SEQ ID NO: 196633 - DNA, 33 bp, Homo sapien
aaccatcacaaacagaaccttccattagtcaga

SEQ ID NO: 196634 - DNA, 33 bp, Homo sapien
aaccatcacaaacagagccttccattagtcaga

SEQ ID NO: 196635 - DNA, 33 bp, Homo sapien
gagatgttgtcttataagagagtcgtatttcag

SEQ ID NO: 196636 - DNA, 33 bp, Homo sapien
gagatgttgtcttatatgagagtcgtatttcag

SEQ ID NO: 196637 - DNA, 33 bp, Homo sapien
tatgagacagtggagaacattttgtaaacaaaa

SEQ ID NO: 196638 - DNA, 33 bp, Homo sapien
tatgagacagtggagaccattttgtaaacaaaa

SEQ ID NO: 196639 - DNA, 33 bp, Homo sapien
aattctccatgaaagaccttactaatttgtcag

SEQ ID NO: 196640 - DNA, 33 bp, Homo sapien
aattctccatgaaagatcttactaatttgtcag

SEQ ID NO: 196641 - DNA, 33 bp, Homo sapien
ttaaaacttttaggagaatatcttcgtgaactt

SEQ ID NO: 196642 - DNA, 33 bp, Homo sapien
ttaaaacttttaggaggatatcttcgtgaactt

SEQ ID NO: 196643 - DNA, 33 bp, Homo sapien
aaaaagcaacctatcaacgtaggaaacagataa

SEQ ID NO: 196644 - DNA, 33 bp, Homo sapien
aaaaagcaacctatcagcgtaggaaacagataa

SEQ ID NO: 196645 - DNA, 33 bp, Homo sapien
ccagaggcaatgtgataacagaaacaaaggaca

SEQ ID NO: 196646 - DNA, 33 bp, Homo sapien
ccagaggcaatgtgatgacagaaacaaaggaca

SEQ ID NO: 196647 - DNA, 33 bp, Homo sapien
gctccactgttcgaaaactccaaagacctactt

SEQ ID NO: 196648 - DNA, 33 bp, Homo sapien
gctccactgttcgaaacctccaaagacctactt

SEQ ID NO: 196649 - DNA, 33 bp, Homo sapien
actcaagacactttgaaggaagtacatcaaata

SEQ ID NO: 196650 - DNA, 33 bp, Homo sapien
actcaagacactttgagggaagtacatcaaata

SEQ ID NO: 196651 - DNA, 33 bp, Homo sapien
ctggaacagattaagaatcaatataaggcacat

SEQ ID NO: 196652 - DNA, 33 bp, Homo sapien
ctggaacagattaagattcaatataaggcacat

SEQ ID NO: 196653 - DNA, 33 bp, Homo sapien
ccaacaggctcttaccagcaaaaacagaagcca

SEQ ID NO: 196654 - DNA, 33 bp, Homo sapien
ccaacaggctcttacccgcaaaaacagaagcca

SEQ ID NO: 196655 - DNA, 33 bp, Homo sapien
gacttcacagtataaaattgtttcgctttttcg

SEQ ID NO: 196656 - DNA, 33 bp, Homo sapien
gacttcacagtataaagttgtttcgctttttcg

SEQ ID NO: 196657 - DNA, 33 bp, Homo sapien
tgcttcctcattgctgcagacagtgacagtcta

SEQ ID NO: 196658 - DNA, 33 bp, Homo sapien
tgcttcctcattgctggagacagtgacagtcta

SEQ ID NO: 196659 - DNA, 33 bp, Homo sapien
caaatcaatctggaaaatgtcaatctaggtgat

SEQ ID NO: 196660 - DNA, 33 bp, Homo sapien
caaatcaatctggaaactgtcaatctaggtgat

SEQ ID NO: 196661 - DNA, 33 bp, Homo sapien
gccttgtcaatgttgacgacaggcataaaactg

SEQ ID NO: 196662 - DNA, 33 bp, Homo sapien
gccttgtcaatgttgatgacaggcataaaactg

SEQ ID NO: 196663 - DNA, 33 bp, Homo sapien
cagtgggttattaaaacggatggcaggctccac

SEQ ID NO: 196664 - DNA, 33 bp, Homo sapien
cagtgggttattaaaatggatggcaggctccac

SEQ ID NO: 196665 - DNA, 33 bp, Homo sapien
atacagcagggtttaaagtaatcattgtttgaa

SEQ ID NO: 196666 - DNA, 33 bp, Homo sapien
atacagcagggtttaaggtaatcattgtttgaa

SEQ ID NO: 196667 - DNA, 33 bp, Homo sapien
aactctatagggaggaaaatctcagataaaatg

SEQ ID NO: 196668 - DNA, 33 bp, Homo sapien
aactctatagggaggacaatctcagataaaatg

SEQ ID NO: 196669 - DNA, 33 bp, Homo sapien
ggctgctaactcaccaatctgccagcggagcag

SEQ ID NO: 196670 - DNA, 33 bp, Homo sapien
ggctgctaactcaccagtctgccagcggagcag

SEQ ID NO: 196671 - DNA, 33 bp, Homo sapien
cacttatttgaggactaaaaatgaaatgactga

SEQ ID NO: 196672 - DNA, 33 bp, Homo sapien
cacttatttgaggactgaaaatgaaatgactga

SEQ ID NO: 196673 - DNA, 33 bp, Homo sapien
gtagaaaaaataccaacgctgaaaactcagagt

SEQ ID NO: 196674 - DNA, 33 bp, Homo sapien
gtagaaaaaataccaatgctgaaaactcagagt

SEQ ID NO: 196675 - DNA, 33 bp, Homo sapien
catctcttctattcctcaaatatcatacaagtg

SEQ ID NO: 196676 - DNA, 33 bp, Homo sapien
catctcttctattcctgaaatatcatacaagtg

SEQ ID NO: 196677 - DNA, 33 bp, Homo sapien
ggtagacttgtggacaaaaggcagataggaagt

SEQ ID NO: 196678 - DNA, 33 bp, Homo sapien
ggtagacttgtggacagaaggcagataggaagt

SEQ ID NO: 196679 - DNA, 33 bp, Homo sapien
agatatcagccatctacggtatggaagtaggca

SEQ ID NO: 196680 - DNA, 33 bp, Homo sapien
agatatcagccatctatggtatggaagtaggca

SEQ ID NO: 196681 - DNA, 33 bp, Homo sapien
tcatcaacctgtaaccagcaaaaggttccagct

SEQ ID NO: 196682 - DNA, 33 bp, Homo sapien
tcatcaacctgtaaccggcaaaaggttccagct

SEQ ID NO: 196683 - DNA, 33 bp, Homo sapien
ggagacagagctgagactatggagatgccaagg

SEQ ID NO: 196684 - DNA, 33 bp, Homo sapien
ggagacagagctgagagtatggagatgccaagg

SEQ ID NO: 196685 - DNA, 33 bp, Homo sapien
agaggtagagccagaaagattttttcctatcta

SEQ ID NO: 196686 - DNA, 33 bp, Homo sapien
agaggtagagccagaatgattttttcctatcta

SEQ ID NO: 196687 - DNA, 33 bp, Homo sapien
acattccagaggccacaagggctttcatgctct

SEQ ID NO: 196688 - DNA, 33 bp, Homo sapien
acattccagaggccacgagggctttcatgctct

SEQ ID NO: 196689 - DNA, 33 bp, Homo sapien
tgtaatttgctctctaagagatctaatcctgtt

SEQ ID NO: 196690 - DNA, 33 bp, Homo sapien
tgtaatttgctctctaggagatctaatcctgtt

SEQ ID NO: 196691 - DNA, 33 bp, Homo sapien
attcatttcgggtaaaagtcatgttaacttaga

SEQ ID NO: 196692 - DNA, 33 bp, Homo sapien
attcatttcgggtaaaggtcatgttaacttaga

SEQ ID NO: 196693 - DNA, 33 bp, Homo sapien
ttacagggaataagcaacagttgaggaatacat

SEQ ID NO: 196694 - DNA, 33 bp, Homo sapien
ttacagggaataagcagcagttgaggaatacat

SEQ ID NO: 196695 - DNA, 33 bp, Homo sapien
tactacaacttatgaccgcttcatcttcataac

SEQ ID NO: 196696 - DNA, 33 bp, Homo sapien
tactacaacttatgactgcttcatcttcataac

SEQ ID NO: 196697 - DNA, 33 bp, Homo sapien
tttctttgcagactcaaattttatcagttcatg

SEQ ID NO: 196698 - DNA, 33 bp, Homo sapien
tttctttgcagactcagattttatcagttcatg

SEQ ID NO: 196699 - DNA, 33 bp, Homo sapien
acgtactttgcaactagattgtgtgtatttgaa

SEQ ID NO: 196700 - DNA, 33 bp, Homo sapien
acgtactttgcaactatattgtgtgtatttgaa

SEQ ID NO: 196701 - DNA, 33 bp, Homo sapien
tttttgctttaagttcagctctcaaaatcattt

SEQ ID NO: 196702 - DNA, 33 bp, Homo sapien
tttttgctttaagttcggctctcaaaatcattt

SEQ ID NO: 196703 - DNA, 33 bp, Homo sapien
tagatctaaacacagcgaagaaaggactagtgc

SEQ ID NO: 196704 - DNA, 33 bp, Homo sapien
tagatctaaacacagctaagaaaggactagtgc

SEQ ID NO: 196705 - DNA, 33 bp, Homo sapien
tcactctcctctcgccactgtgagcagaagtaa

SEQ ID NO: 196706 - DNA, 33 bp, Homo sapien
tcactctcctctcgcctctgtgagcagaagtaa

SEQ ID NO: 196707 - DNA, 33 bp, Homo sapien
tagagaattgcaaattaaaacaatgagttacca

SEQ ID NO: 196708 - DNA, 33 bp, Homo sapien
tagagaattgcaaattgaaacaatgagttacca

SEQ ID NO: 196709 - DNA, 33 bp, Homo sapien
tatgtgggggcagcagacacatggatactctct

SEQ ID NO: 196710 - DNA, 33 bp, Homo sapien
tatgtgggggcagcaggcacatggatactctct

SEQ ID NO: 196711 - DNA, 33 bp, Homo sapien
ttgaggagtaggaaaaaagtcttacagaaatga

SEQ ID NO: 196712 - DNA, 33 bp, Homo sapien
ttgaggagtaggaaaagagtcttacagaaatga

SEQ ID NO: 196713 - DNA, 33 bp, Homo sapien
gacgcctcagttacagcagaaaatcccaaatga

SEQ ID NO: 196714 - DNA, 33 bp, Homo sapien
gacgcctcagttacagtagaaaatcccaaatga

SEQ ID NO: 196715 - DNA, 33 bp, Homo sapien
ctcacggggcctccaacagtatcctgggttgtt

SEQ ID NO: 196716 - DNA, 33 bp, Homo sapien
ctcacggggcctccaagagtatcctgggttgtt

SEQ ID NO: 196717 - DNA, 33 bp, Homo sapien
caaatggcctgcaatggagtgttcggtaagggt

SEQ ID NO: 196718 - DNA, 33 bp, Homo sapien
caaatggcctgcaatgtagtgttcggtaagggt

SEQ ID NO: 196719 - DNA, 33 bp, Homo sapien
ctatgattgtccaggccatggttatgtggccac

SEQ ID NO: 196720 - DNA, 33 bp, Homo sapien
ctatgattgtccaggctatggttatgtggccac

SEQ ID NO: 196721 - DNA, 33 bp, Homo sapien
atggactccccttcacagaggtattgcagagga

SEQ ID NO: 196722 - DNA, 33 bp, Homo sapien
atggactccccttcacggaggtattgcagagga

SEQ ID NO: 196723 - DNA, 33 bp, Homo sapien
atccgttccaaatcaccattgtaacgacgtctg

SEQ ID NO: 196724 - DNA, 33 bp, Homo sapien
atccgttccaaatcacgattgtaacgacgtctg

SEQ ID NO: 196725 - DNA, 33 bp, Homo sapien
tccttcatttattcacacatattgactgagcct

SEQ ID NO: 196726 - DNA, 33 bp, Homo sapien
tccttcatttattcactcatattgactgagcct

SEQ ID NO: 196727 - DNA, 33 bp, Homo sapien
agtaggtaggggactgaagaaagaagttccagg

SEQ ID NO: 196728 - DNA, 33 bp, Homo sapien
agtaggtaggggactgcagaaagaagttccagg

SEQ ID NO: 196729 - DNA, 33 bp, Homo sapien
caagacatcggtatcaggggcaactagtccaag

SEQ ID NO: 196730 - DNA, 33 bp, Homo sapien
caagacatcggtatcatgggcaactagtccaag

SEQ ID NO: 196731 - DNA, 33 bp, Homo sapien
gagagaatcctgtcagcacaagcctggcgtcgt

SEQ ID NO: 196732 - DNA, 33 bp, Homo sapien
gagagaatcctgtcagtacaagcctggcgtcgt

SEQ ID NO: 196733 - DNA, 33 bp, Homo sapien
agcagctgacccgcagaaatgtcctaaagctgg

SEQ ID NO: 196734 - DNA, 33 bp, Homo sapien
agcagctgacccgcagcaatgtcctaaagctgg

SEQ ID NO: 196735 - DNA, 33 bp, Homo sapien
gcacaaaaacaaccagaatgggagagctacttt

SEQ ID NO: 196736 - DNA, 33 bp, Homo sapien
gcacaaaaacaaccaggatgggagagctacttt

SEQ ID NO: 196737 - DNA, 33 bp, Homo sapien
ataggggagaagataaggggggaatgaataggc

SEQ ID NO: 196738 - DNA, 33 bp, Homo sapien
ataggggagaagataatgggggaatgaataggc

SEQ ID NO: 196739 - DNA, 33 bp, Homo sapien
atctttccaaatcaagacataaatactttctca

SEQ ID NO: 196740 - DNA, 33 bp, Homo sapien
atctttccaaatcaaggcataaatactttctca

SEQ ID NO: 196741 - DNA, 33 bp, Homo sapien
accactatgaaaaacactgtggaaattccttaa

SEQ ID NO: 196742 - DNA, 33 bp, Homo sapien
accactatgaaaaacagtgtggaaattccttaa

SEQ ID NO: 196743 - DNA, 33 bp, Homo sapien
tatatatatatatctcacagtttctttatccac

SEQ ID NO: 196744 - DNA, 33 bp, Homo sapien
tatatatatatatctcgcagtttctttatccac

SEQ ID NO: 196745 - DNA, 33 bp, Homo sapien
tgcattcattttttaacacagctcagaggtcat

SEQ ID NO: 196746 - DNA, 33 bp, Homo sapien
tgcattcattttttaagacagctcagaggtcat

SEQ ID NO: 196747 - DNA, 33 bp, Homo sapien
taacaacttgtcttataacctcatcagagtata

SEQ ID NO: 196748 - DNA, 33 bp, Homo sapien
taacaacttgtcttatgacctcatcagagtata

SEQ ID NO: 196749 - DNA, 33 bp, Homo sapien
ttctctcctgcgctatcaaagtatgtttatgat

SEQ ID NO: 196750 - DNA, 33 bp, Homo sapien
ttctctcctgcgctatgaaagtatgtttatgat

SEQ ID NO: 196751 - DNA, 33 bp, Homo sapien
aagcaacatacggcccagatttgctgggagatc

SEQ ID NO: 196752 - DNA, 33 bp, Homo sapien
aagcaacatacggcccggatttgctgggagatc

SEQ ID NO: 196753 - DNA, 33 bp, Homo sapien
attcagatatttagaaagcatttattaggtgta

SEQ ID NO: 196754 - DNA, 33 bp, Homo sapien
attcagatatttagaaggcatttattaggtgta

SEQ ID NO: 196755 - DNA, 33 bp, Homo sapien
agctcagagtacacgcacacatcctacgccagc

SEQ ID NO: 196756 - DNA, 33 bp, Homo sapien
agctcagagtacacgcgcacatcctacgccagc

SEQ ID NO: 196757 - DNA, 33 bp, Homo sapien
ctgccgcaatttagataagcatgagatctccac

SEQ ID NO: 196758 - DNA, 33 bp, Homo sapien
ctgccgcaatttagatgagcatgagatctccac

SEQ ID NO: 196759 - DNA, 33 bp, Homo sapien
tctttgctaattccaacgtctgagtctgtttct

SEQ ID NO: 196760 - DNA, 33 bp, Homo sapien
tctttgctaattccaatgtctgagtctgtttct

SEQ ID NO: 196761 - DNA, 33 bp, Homo sapien
tcaataaaataaattacggtagccaacagtgct

SEQ ID NO: 196762 - DNA, 33 bp, Homo sapien
tcaataaaataaattatggtagccaacagtgct

SEQ ID NO: 196763 - DNA, 33 bp, Homo sapien
ctacctttattgaggaaccactaacgagtccca

SEQ ID NO: 196764 - DNA, 33 bp, Homo sapien
ctacctttattgaggacccactaacgagtccca

SEQ ID NO: 196765 - DNA, 33 bp, Homo sapien
tctaaactcctcaatagaaggctgttttaacat

SEQ ID NO: 196766 - DNA, 33 bp, Homo sapien
tctaaactcctcaatataaggctgttttaacat

SEQ ID NO: 196767 - DNA, 33 bp, Homo sapien
ggattgaaacagtcaaaaaaacttgctcgagat

SEQ ID NO: 196768 - DNA, 33 bp, Homo sapien
ggattgaaacagtcaagaaaacttgctcgagat

SEQ ID NO: 196769 - DNA, 33 bp, Homo sapien
ggttcttctgcactccacacttcagcagttgtg

SEQ ID NO: 196770 - DNA, 33 bp, Homo sapien
ggttcttctgcactccgcacttcagcagttgtg

SEQ ID NO: 196771 - DNA, 33 bp, Homo sapien
ttaaaaaattcaaatacaacttgtggcagcaat

SEQ ID NO: 196772 - DNA, 33 bp, Homo sapien
ttaaaaaattcaaatataacttgtggcagcaat

SEQ ID NO: 196773 - DNA, 33 bp, Homo sapien
tgtcggagatgaggaacgtttttagaaaattga

SEQ ID NO: 196774 - DNA, 33 bp, Homo sapien
tgtcggagatgaggaatgtttttagaaaattga

SEQ ID NO: 196775 - DNA, 33 bp, Homo sapien
acttttgctgatgtcaatcttaactgcaggact

SEQ ID NO: 196776 - DNA, 33 bp, Homo sapien
acttttgctgatgtcagtcttaactgcaggact

SEQ ID NO: 196777 - DNA, 33 bp, Homo sapien
gttcacaggtcgataaaccaataaattaggtcg

SEQ ID NO: 196778 - DNA, 33 bp, Homo sapien
gttcacaggtcgataagccaataaattaggtcg

SEQ ID NO: 196779 - DNA, 33 bp, Homo sapien
gggcaaacagggcaataaaagcaagagtggagg

SEQ ID NO: 196780 - DNA, 33 bp, Homo sapien
gggcaaacagggcaatgaaagcaagagtggagg

SEQ ID NO: 196781 - DNA, 33 bp, Homo sapien
gcatacctagcatttaagccatgcaaagggatg

SEQ ID NO: 196782 - DNA, 33 bp, Homo sapien
gcatacctagcatttaggccatgcaaagggatg

SEQ ID NO: 196783 - DNA, 33 bp, Homo sapien
cccttggatgttttgaagcttgcccttggtgct

SEQ ID NO: 196784 - DNA, 33 bp, Homo sapien
cccttggatgttttgaggcttgcccttggtgct

SEQ ID NO: 196785 - DNA, 33 bp, Homo sapien
actttcagctggtaataagaaatgagagaagta

SEQ ID NO: 196786 - DNA, 33 bp, Homo sapien
actttcagctggtaatgagaaatgagagaagta

SEQ ID NO: 196787 - DNA, 33 bp, Homo sapien
tatctacctcacaaaaaatgttgtctggattaa

SEQ ID NO: 196788 - DNA, 33 bp, Homo sapien
tatctacctcacaaaatatgttgtctggattaa

SEQ ID NO: 196789 - DNA, 33 bp, Homo sapien
aacagaaattcaacaaaaggtccctgaagagct

SEQ ID NO: 196790 - DNA, 33 bp, Homo sapien
aacagaaattcaacaagaggtccctgaagagct

SEQ ID NO: 196791 - DNA, 33 bp, Homo sapien
ggcagtttgtccaccaagaaggagctagaactg

SEQ ID NO: 196792 - DNA, 33 bp, Homo sapien
ggcagtttgtccaccatgaaggagctagaactg

SEQ ID NO: 196793 - DNA, 33 bp, Homo sapien
acaaatgtgaaatcaacgatgactccaaagatt

SEQ ID NO: 196794 - DNA, 33 bp, Homo sapien
acaaatgtgaaatcaatgatgactccaaagatt

SEQ ID NO: 196795 - DNA, 33 bp, Homo sapien
cactccagcctggtcacacttaaacagacaaac

SEQ ID NO: 196796 - DNA, 33 bp, Homo sapien
cactccagcctggtcatacttaaacagacaaac

SEQ ID NO: 196797 - DNA, 33 bp, Homo sapien
gcttaagaaactataaattaagagggcaaacca

SEQ ID NO: 196798 - DNA, 33 bp, Homo sapien
gcttaagaaactataacttaagagggcaaacca

SEQ ID NO: 196799 - DNA, 33 bp, Homo sapien
tctacattgaacgacacgaaccctctggctact

SEQ ID NO: 196800 - DNA, 33 bp, Homo sapien
tctacattgaacgacatgaaccctctggctact

SEQ ID NO: 196801 - DNA, 33 bp, Homo sapien
acattgacgaacattccgaaagggcttggcagg

SEQ ID NO: 196802 - DNA, 33 bp, Homo sapien
acattgacgaacattctgaaagggcttggcagg

SEQ ID NO: 196803 - DNA, 33 bp, Homo sapien
ctagaaataacccggtcaagagaaatgcacaac

SEQ ID NO: 196804 - DNA, 33 bp, Homo sapien
ctagaaataacccggttaagagaaatgcacaac

SEQ ID NO: 196805 - DNA, 33 bp, Homo sapien
taaaatgtcatggctaagtcagatgattagttt

SEQ ID NO: 196806 - DNA, 33 bp, Homo sapien
taaaatgtcatggctatgtcagatgattagttt

SEQ ID NO: 196807 - DNA, 33 bp, Homo sapien
ctccatagcaaaataaatgagtgtatataaaaa

SEQ ID NO: 196808 - DNA, 33 bp, Homo sapien
ctccatagcaaaataagtgagtgtatataaaaa

SEQ ID NO: 196809 - DNA, 33 bp, Homo sapien
acacatatttgcgttcaccacatacagtacaca

SEQ ID NO: 196810 - DNA, 33 bp, Homo sapien
acacatatttgcgttcgccacatacagtacaca

SEQ ID NO: 196811 - DNA, 33 bp, Homo sapien
ctaaccagtgctacacagaacagagaacagcca

SEQ ID NO: 196812 - DNA, 33 bp, Homo sapien
ctaaccagtgctacacggaacagagaacagcca

SEQ ID NO: 196813 - DNA, 33 bp, Homo sapien
cagatattgactacaccatttaatcagttctga

SEQ ID NO: 196814 - DNA, 33 bp, Homo sapien
cagatattgactacacgatttaatcagttctga

SEQ ID NO: 196815 - DNA, 33 bp, Homo sapien
cataacaggaagtccaagcatatccatgtgaaa

SEQ ID NO: 196816 - DNA, 33 bp, Homo sapien
cataacaggaagtccacgcatatccatgtgaaa

SEQ ID NO: 196817 - DNA, 33 bp, Homo sapien
taagatacaaagaataacacccagtcttactaa

SEQ ID NO: 196818 - DNA, 33 bp, Homo sapien
taagatacaaagaatagcacccagtcttactaa

SEQ ID NO: 196819 - DNA, 33 bp, Homo sapien
agattagatactacccaaagctgatacacaacc

SEQ ID NO: 196820 - DNA, 33 bp, Homo sapien
agattagatactacccgaagctgatacacaacc

SEQ ID NO: 196821 - DNA, 33 bp, Homo sapien
cttcccccaacactgcggagtgaataaaacaca

SEQ ID NO: 196822 - DNA, 33 bp, Homo sapien
cttcccccaacactgctgagtgaataaaacaca

SEQ ID NO: 196823 - DNA, 33 bp, Homo sapien
catgtatcatgcagagaacccctgtcaaatggt

SEQ ID NO: 196824 - DNA, 33 bp, Homo sapien
catgtatcatgcagagtacccctgtcaaatggt

SEQ ID NO: 196825 - DNA, 33 bp, Homo sapien
acttggctaggggctaaaagaatgcaggtgatg

SEQ ID NO: 196826 - DNA, 33 bp, Homo sapien
acttggctaggggctagaagaatgcaggtgatg

SEQ ID NO: 196827 - DNA, 33 bp, Homo sapien
tcccctgtcaattttcacctagtatagggtcag

SEQ ID NO: 196828 - DNA, 33 bp, Homo sapien
tcccctgtcaattttctcctagtatagggtcag

SEQ ID NO: 196829 - DNA, 33 bp, Homo sapien
tggtttttaaatggtacaactggaatttattct

SEQ ID NO: 196830 - DNA, 33 bp, Homo sapien
tggtttttaaatggtataactggaatttattct

SEQ ID NO: 196831 - DNA, 33 bp, Homo sapien
tgcaggctctaaaggaaaattccaaaactgcaa

SEQ ID NO: 196832 - DNA, 33 bp, Homo sapien
tgcaggctctaaaggagaattccaaaactgcaa

SEQ ID NO: 196833 - DNA, 33 bp, Homo sapien
tgcacccagccggtaacagagtattttaaaata

SEQ ID NO: 196834 - DNA, 33 bp, Homo sapien
tgcacccagccggtaatagagtattttaaaata

SEQ ID NO: 196835 - DNA, 33 bp, Homo sapien
tatgagaccaatcatcacatgtccttgatgcag

SEQ ID NO: 196836 - DNA, 33 bp, Homo sapien
tatgagaccaatcatcgcatgtccttgatgcag

SEQ ID NO: 196837 - DNA, 33 bp, Homo sapien
ctctccatcaaacgcactctgcccactacttat

SEQ ID NO: 196838 - DNA, 33 bp, Homo sapien
ctctccatcaaacgcattctgcccactacttat

SEQ ID NO: 196839 - DNA, 33 bp, Homo sapien
cctctttctggtatcactgagctcacgtactgg

SEQ ID NO: 196840 - DNA, 33 bp, Homo sapien
cctctttctggtatcattgagctcacgtactgg

SEQ ID NO: 196841 - DNA, 33 bp, Homo sapien
tcaagacctgctggaacgcctgattaaaagcat

SEQ ID NO: 196842 - DNA, 33 bp, Homo sapien
tcaagacctgctggaatgcctgattaaaagcat

SEQ ID NO: 196843 - DNA, 33 bp, Homo sapien
acagccatcgcctggaatacttttgatttattc

SEQ ID NO: 196844 - DNA, 33 bp, Homo sapien
acagccatcgcctggattacttttgatttattc

SEQ ID NO: 196845 - DNA, 33 bp, Homo sapien
cccctttgaaaatccaatgaaaactatagaata

SEQ ID NO: 196846 - DNA, 33 bp, Homo sapien
cccctttgaaaatccagtgaaaactatagaata

SEQ ID NO: 196847 - DNA, 33 bp, Homo sapien
tgctttctgcctttcaatcgccactcaggataa

SEQ ID NO: 196848 - DNA, 33 bp, Homo sapien
tgctttctgcctttcagtcgccactcaggataa

SEQ ID NO: 196849 - DNA, 33 bp, Homo sapien
agaccctttccatccaacatagcggacacttgc

SEQ ID NO: 196850 - DNA, 33 bp, Homo sapien
agaccctttccatccagcatagcggacacttgc

SEQ ID NO: 196851 - DNA, 33 bp, Homo sapien
gtgaaaagcctcataaatggttttgatagttcc

SEQ ID NO: 196852 - DNA, 33 bp, Homo sapien
gtgaaaagcctcataagtggttttgatagttcc

SEQ ID NO: 196853 - DNA, 33 bp, Homo sapien
tctgaagtggggcgtacgaagcttccttgctca

SEQ ID NO: 196854 - DNA, 33 bp, Homo sapien
tctgaagtggggcgtatgaagcttccttgctca

SEQ ID NO: 196855 - DNA, 33 bp, Homo sapien
ccgttaacctacaagacgtcaccatgggcaggg

SEQ ID NO: 196856 - DNA, 33 bp, Homo sapien
ccgttaacctacaagatgtcaccatgggcaggg

SEQ ID NO: 196857 - DNA, 33 bp, Homo sapien
aggctattgaccaaaacgtgatgtgctctccag

SEQ ID NO: 196858 - DNA, 33 bp, Homo sapien
aggctattgaccaaaatgtgatgtgctctccag

SEQ ID NO: 196859 - DNA, 33 bp, Homo sapien
ctaaactcattaaggaacctgctttgaagatga

SEQ ID NO: 196860 - DNA, 33 bp, Homo sapien
ctaaactcattaaggagcctgctttgaagatga

SEQ ID NO: 196861 - DNA, 33 bp, Homo sapien
gagagtcatgaatgtgcacacttaatggtctca

SEQ ID NO: 196862 - DNA, 33 bp, Homo sapien
gagagtcatgaatgtgtacacttaatggtctca

SEQ ID NO: 196863 - DNA, 33 bp, Homo sapien
gataattttgtcagtaccctttttgtatatgtg

SEQ ID NO: 196864 - DNA, 33 bp, Homo sapien
gataattttgtcagtatcctttttgtatatgtg

SEQ ID NO: 196865 - DNA, 33 bp, Homo sapien
tgactttcagtatgaccggaaaatggagaaacg

SEQ ID NO: 196866 - DNA, 33 bp, Homo sapien
tgactttcagtatgactggaaaatggagaaacg

SEQ ID NO: 196867 - DNA, 33 bp, Homo sapien
tccattgtcagccttccgaaaggacttgagatt

SEQ ID NO: 196868 - DNA, 33 bp, Homo sapien
tccattgtcagccttctgaaaggacttgagatt

SEQ ID NO: 196869 - DNA, 33 bp, Homo sapien
ttaaatatgggacaacgaacaaaaatattttca

SEQ ID NO: 196870 - DNA, 33 bp, Homo sapien
ttaaatatgggacaactaacaaaaatattttca

SEQ ID NO: 196871 - DNA, 33 bp, Homo sapien
ttgtatttagtgtgccccatgactagctgttca

SEQ ID NO: 196872 - DNA, 33 bp, Homo sapien
ttgtatttagtgtgcctcatgactagctgttca

SEQ ID NO: 196873 - DNA, 33 bp, Homo sapien
aacacagaacagcttccagagaatacctcccct

SEQ ID NO: 196874 - DNA, 33 bp, Homo sapien
aacacagaacagcttctagagaatacctcccct

SEQ ID NO: 196875 - DNA, 33 bp, Homo sapien
aagaaagggttctttacgagtagactcaacttc

SEQ ID NO: 196876 - DNA, 33 bp, Homo sapien
aagaaagggttctttatgagtagactcaacttc

SEQ ID NO: 196877 - DNA, 33 bp, Homo sapien
cctccctcattctcaaggactttggaaatttaa

SEQ ID NO: 196878 - DNA, 33 bp, Homo sapien
cctccctcattctcaatgactttggaaatttaa

SEQ ID NO: 196879 - DNA, 33 bp, Homo sapien
tagttggggaagtaaacgttctgggaatatgaa

SEQ ID NO: 196880 - DNA, 33 bp, Homo sapien
tagttggggaagtaaatgttctgggaatatgaa

SEQ ID NO: 196881 - DNA, 33 bp, Homo sapien
taatacctatcaaaaacgttgaaagtgttcaca

SEQ ID NO: 196882 - DNA, 33 bp, Homo sapien
taatacctatcaaaaatgttgaaagtgttcaca

SEQ ID NO: 196883 - DNA, 33 bp, Homo sapien
gcgactggctgccgaaatgggattcccaatacc

SEQ ID NO: 196884 - DNA, 33 bp, Homo sapien
gcgactggctgccgaactgggattcccaatacc

SEQ ID NO: 196885 - DNA, 33 bp, Homo sapien
atcagaccactaattaacgagattgcaattatt

SEQ ID NO: 196886 - DNA, 33 bp, Homo sapien
atcagaccactaattagcgagattgcaattatt

SEQ ID NO: 196887 - DNA, 33 bp, Homo sapien
ttttacaaagcttgcacgtcaaggacacatatt

SEQ ID NO: 196888 - DNA, 33 bp, Homo sapien
ttttacaaagcttgcatgtcaaggacacatatt

SEQ ID NO: 196889 - DNA, 33 bp, Homo sapien
cctgctgtggttttacggcaacaccgtggagct

SEQ ID NO: 196890 - DNA, 33 bp, Homo sapien
cctgctgtggttttactgcaacaccgtggagct

SEQ ID NO: 196891 - DNA, 33 bp, Homo sapien
taaaggcttatactgacacctttagaaatgaaa

SEQ ID NO: 196892 - DNA, 33 bp, Homo sapien
taaaggcttatactgagacctttagaaatgaaa

SEQ ID NO: 196893 - DNA, 33 bp, Homo sapien
tatttgttgttgaggcactctcaggaataagat

SEQ ID NO: 196894 - DNA, 33 bp, Homo sapien
tatttgttgttgaggcgctctcaggaataagat

SEQ ID NO: 196895 - DNA, 33 bp, Homo sapien
agtgtgtgaatgagtccatgaaacctctgaaat

SEQ ID NO: 196896 - DNA, 33 bp, Homo sapien
agtgtgtgaatgagtctatgaaacctctgaaat

SEQ ID NO: 196897 - DNA, 33 bp, Homo sapien
tatgtattattaactgcataaaagcgttgtcat

SEQ ID NO: 196898 - DNA, 33 bp, Homo sapien
tatgtattattaactgtataaaagcgttgtcat

SEQ ID NO: 196899 - DNA, 33 bp, Homo sapien
acttgatttgtaaatgcagcctattgtcttatt

SEQ ID NO: 196900 - DNA, 33 bp, Homo sapien
acttgatttgtaaatggagcctattgtcttatt

SEQ ID NO: 196901 - DNA, 33 bp, Homo sapien
ctagggtctcttctctaaaggtctaagcagggg

SEQ ID NO: 196902 - DNA, 33 bp, Homo sapien
ctagggtctcttctctgaaggtctaagcagggg

SEQ ID NO: 196903 - DNA, 33 bp, Homo sapien
tttgttttcagatgcccagacaagactcagctt

SEQ ID NO: 196904 - DNA, 33 bp, Homo sapien
tttgttttcagatgcctagacaagactcagctt

SEQ ID NO: 196905 - DNA, 33 bp, Homo sapien
agtgtgtttcatcctcacacgtataaacacaca

SEQ ID NO: 196906 - DNA, 33 bp, Homo sapien
agtgtgtttcatcctcgcacgtataaacacaca

SEQ ID NO: 196907 - DNA, 33 bp, Homo sapien
ctactttgcctcgacaagaagcagtggaagaga

SEQ ID NO: 196908 - DNA, 33 bp, Homo sapien
ctactttgcctcgacaggaagcagtggaagaga

SEQ ID NO: 196909 - DNA, 33 bp, Homo sapien
tctcccacatctatccccagtttttaatcatcc

SEQ ID NO: 196910 - DNA, 33 bp, Homo sapien
tctcccacatctatcctcagtttttaatcatcc

SEQ ID NO: 196911 - DNA, 33 bp, Homo sapien
tcccagtgtccgtaccacgcctgtgctttgcta

SEQ ID NO: 196912 - DNA, 33 bp, Homo sapien
tcccagtgtccgtaccgcgcctgtgctttgcta

SEQ ID NO: 196913 - DNA, 33 bp, Homo sapien
tacactgaggacagaacaggagccaaggcagta

SEQ ID NO: 196914 - DNA, 33 bp, Homo sapien
tacactgaggacagaataggagccaaggcagta

SEQ ID NO: 196915 - DNA, 33 bp, Homo sapien
aggtaattcagacaaactgaaaactttacttta

SEQ ID NO: 196916 - DNA, 33 bp, Homo sapien
aggtaattcagacaaattgaaaactttacttta

SEQ ID NO: 196917 - DNA, 33 bp, Homo sapien
tggattattaaggcacaaaaatgtctgcagtaa

SEQ ID NO: 196918 - DNA, 33 bp, Homo sapien
tggattattaaggcaccaaaatgtctgcagtaa

SEQ ID NO: 196919 - DNA, 33 bp, Homo sapien
atctcaatagtggagtaaaaaggtgtggacgtt

SEQ ID NO: 196920 - DNA, 33 bp, Homo sapien
atctcaatagtggagtgaaaaggtgtggacgtt

SEQ ID NO: 196921 - DNA, 33 bp, Homo sapien
ggcgtgcagatacagcaaggaaaagactccatg

SEQ ID NO: 196922 - DNA, 33 bp, Homo sapien
ggcgtgcagatacagcgaggaaaagactccatg

SEQ ID NO: 196923 - DNA, 33 bp, Homo sapien
tcaggcaaaagagagggattagtaatagcccaa

SEQ ID NO: 196924 - DNA, 33 bp, Homo sapien
tcaggcaaaagagaggtattagtaatagcccaa

SEQ ID NO: 196925 - DNA, 33 bp, Homo sapien
cagctcttaaaaagaaaaatgctacagatttat

SEQ ID NO: 196926 - DNA, 33 bp, Homo sapien
cagctcttaaaaagaacaatgctacagatttat

SEQ ID NO: 196927 - DNA, 33 bp, Homo sapien
tggggcaatagcattacggtgtggtttgcaagt

SEQ ID NO: 196928 - DNA, 33 bp, Homo sapien
tggggcaatagcattatggtgtggtttgcaagt

SEQ ID NO: 196929 - DNA, 33 bp, Homo sapien
catttagggataagaaatacagacctgatctat

SEQ ID NO: 196930 - DNA, 33 bp, Homo sapien
catttagggataagaagtacagacctgatctat

SEQ ID NO: 196931 - DNA, 33 bp, Homo sapien
atgctttcaaaatttaaaaatgttgataaatgg

SEQ ID NO: 196932 - DNA, 33 bp, Homo sapien
atgctttcaaaatttacaaatgttgataaatgg

SEQ ID NO: 196933 - DNA, 33 bp, Homo sapien
gtttctgaccctctcaatccctagactatgagt

SEQ ID NO: 196934 - DNA, 33 bp, Homo sapien
gtttctgaccctctcactccctagactatgagt

SEQ ID NO: 196935 - DNA, 33 bp, Homo sapien
catttgaggtgattacaagggctgtagaagaca

SEQ ID NO: 196936 - DNA, 33 bp, Homo sapien
catttgaggtgattacgagggctgtagaagaca

SEQ ID NO: 196937 - DNA, 33 bp, Homo sapien
gaacttcaggaatgaaatagcaacaattcaagg

SEQ ID NO: 196938 - DNA, 33 bp, Homo sapien
gaacttcaggaatgaactagcaacaattcaagg

SEQ ID NO: 196939 - DNA, 33 bp, Homo sapien
caacatagtctttaaacctgtcacaaaaatggg

SEQ ID NO: 196940 - DNA, 33 bp, Homo sapien
caacatagtctttaaatctgtcacaaaaatggg

SEQ ID NO: 196941 - DNA, 33 bp, Homo sapien
aatgaagttttctgtggaatgtgaaatataaag

SEQ ID NO: 196942 - DNA, 33 bp, Homo sapien
aatgaagttttctgtgtaatgtgaaatataaag

SEQ ID NO: 196943 - DNA, 33 bp, Homo sapien
ctttttcaacctccaccggggctgcggactagt

SEQ ID NO: 196944 - DNA, 33 bp, Homo sapien
ctttttcaacctccactggggctgcggactagt

SEQ ID NO: 196945 - DNA, 33 bp, Homo sapien
atctacacattgataaacctccaatttacatat

SEQ ID NO: 196946 - DNA, 33 bp, Homo sapien
atctacacattgataaccctccaatttacatat

SEQ ID NO: 196947 - DNA, 33 bp, Homo sapien
gagagactaattatgacgaatgttttcaaggga

SEQ ID NO: 196948 - DNA, 33 bp, Homo sapien
gagagactaattatgatgaatgttttcaaggga

SEQ ID NO: 196949 - DNA, 33 bp, Homo sapien
tccagcaccaccaacaaaaaaaagccctcaaga

SEQ ID NO: 196950 - DNA, 33 bp, Homo sapien
tccagcaccaccaacataaaaaagccctcaaga

SEQ ID NO: 196951 - DNA, 33 bp, Homo sapien
aacataataaaactacagaagtctaatttttgc

SEQ ID NO: 196952 - DNA, 33 bp, Homo sapien
aacataataaaactacggaagtctaatttttgc

SEQ ID NO: 196953 - DNA, 33 bp, Homo sapien
aacggcatcttgcgagcagtgaaggtagtaact

SEQ ID NO: 196954 - DNA, 33 bp, Homo sapien
aacggcatcttgcgagtagtgaaggtagtaact

SEQ ID NO: 196955 - DNA, 33 bp, Homo sapien
ttctcccaatttgtcaggcccaaagccttgaag

SEQ ID NO: 196956 - DNA, 33 bp, Homo sapien
ttctcccaatttgtcatgcccaaagccttgaag

SEQ ID NO: 196957 - DNA, 33 bp, Homo sapien
ttattctgcctcttccactagaacatatatgcc

SEQ ID NO: 196958 - DNA, 33 bp, Homo sapien
ttattctgcctcttccgctagaacatatatgcc

SEQ ID NO: 196959 - DNA, 33 bp, Homo sapien
attcatgctgtcagagaaagttattgccagcat

SEQ ID NO: 196960 - DNA, 33 bp, Homo sapien
attcatgctgtcagaggaagttattgccagcat

SEQ ID NO: 196961 - DNA, 33 bp, Homo sapien
cctctactttttattcacatcgaattgcagacc

SEQ ID NO: 196962 - DNA, 33 bp, Homo sapien
cctctactttttattcgcatcgaattgcagacc

SEQ ID NO: 196963 - DNA, 33 bp, Homo sapien
tccatgaggcatttacgaggaggcaaaacgatg

SEQ ID NO: 196964 - DNA, 33 bp, Homo sapien
tccatgaggcatttactaggaggcaaaacgatg

SEQ ID NO: 196965 - DNA, 33 bp, Homo sapien
tattcctttgaaaaaccaggtaaatagcaagat

SEQ ID NO: 196966 - DNA, 33 bp, Homo sapien
tattcctttgaaaaactaggtaaatagcaagat

SEQ ID NO: 196967 - DNA, 33 bp, Homo sapien
aatctctgtcctgcgaatcctctgctttaaaat

SEQ ID NO: 196968 - DNA, 33 bp, Homo sapien
aatctctgtcctgcgattcctctgctttaaaat

SEQ ID NO: 196969 - DNA, 33 bp, Homo sapien
ctacctatctattatacgtcttccagccttttg

SEQ ID NO: 196970 - DNA, 33 bp, Homo sapien
ctacctatctattatatgtcttccagccttttg

SEQ ID NO: 196971 - DNA, 33 bp, Homo sapien
atacagaagatgtttcaaggactattgagctac

SEQ ID NO: 196972 - DNA, 33 bp, Homo sapien
atacagaagatgtttcgaggactattgagctac

SEQ ID NO: 196973 - DNA, 33 bp, Homo sapien
agcattgcctcctctcagaagatcagacttctg

SEQ ID NO: 196974 - DNA, 33 bp, Homo sapien
agcattgcctcctctcggaagatcagacttctg

SEQ ID NO: 196975 - DNA, 33 bp, Homo sapien
gtggactttatctttacgcgatatgtgttggga

SEQ ID NO: 196976 - DNA, 33 bp, Homo sapien
gtggactttatctttaggcgatatgtgttggga

SEQ ID NO: 196977 - DNA, 33 bp, Homo sapien
atacaccataaaaagaagtgcatataaaaactg

SEQ ID NO: 196978 - DNA, 33 bp, Homo sapien
atacaccataaaaagaggtgcatataaaaactg

SEQ ID NO: 196979 - DNA, 33 bp, Homo sapien
cattgctgatatagtcaccaaaaaagtttggca

SEQ ID NO: 196980 - DNA, 33 bp, Homo sapien
cattgctgatatagtccccaaaaaagtttggca

SEQ ID NO: 196981 - DNA, 33 bp, Homo sapien
tctatcatacttgaaaggggtataagggaattg

SEQ ID NO: 196982 - DNA, 33 bp, Homo sapien
tctatcatacttgaaatgggtataagggaattg

SEQ ID NO: 196983 - DNA, 33 bp, Homo sapien
gaatatgctttaaaataaaaatgctatggatta

SEQ ID NO: 196984 - DNA, 33 bp, Homo sapien
gaatatgctttaaaatgaaaatgctatggatta

SEQ ID NO: 196985 - DNA, 33 bp, Homo sapien
caaatcaaagcaagaacgattgtgccattttag

SEQ ID NO: 196986 - DNA, 33 bp, Homo sapien
caaatcaaagcaagaatgattgtgccattttag

SEQ ID NO: 196987 - DNA, 33 bp, Homo sapien
catttgcagaagccccactgcctcgaagaaaga

SEQ ID NO: 196988 - DNA, 33 bp, Homo sapien
catttgcagaagccccgctgcctcgaagaaaga

SEQ ID NO: 196989 - DNA, 33 bp, Homo sapien
aacatacaagacatggaaatgtagattaagtcc

SEQ ID NO: 196990 - DNA, 33 bp, Homo sapien
aacatacaagacatggcaatgtagattaagtcc

SEQ ID NO: 196991 - DNA, 33 bp, Homo sapien
gagcactattttcccaagcttctaaaattacca

SEQ ID NO: 196992 - DNA, 33 bp, Homo sapien
gagcactattttcccaggcttctaaaattacca

SEQ ID NO: 196993 - DNA, 33 bp, Homo sapien
gactgtttttataggcaacatctacctgtgggt

SEQ ID NO: 196994 - DNA, 33 bp, Homo sapien
gactgtttttataggctacatctacctgtgggt

SEQ ID NO: 196995 - DNA, 33 bp, Homo sapien
catcttctccagaaacaagcacataaacatatt

SEQ ID NO: 196996 - DNA, 33 bp, Homo sapien
catcttctccagaaacgagcacataaacatatt

SEQ ID NO: 196997 - DNA, 33 bp, Homo sapien
aagaagatagcagagacaaaatattcaatatac

SEQ ID NO: 196998 - DNA, 33 bp, Homo sapien
aagaagatagcagagataaaatattcaatatac

SEQ ID NO: 196999 - DNA, 33 bp, Homo sapien
aaataggaagagataaaggtcactatatggccg

SEQ ID NO: 197000 - DNA, 33 bp, Homo sapien
aaataggaagagataagggtcactatatggccg

SEQ ID NO: 197001 - DNA, 33 bp, Homo sapien
gggccacctcttcacccctgtgtagtttctcct

SEQ ID NO: 197002 - DNA, 33 bp, Homo sapien
gggccacctcttcacctctgtgtagtttctcct

SEQ ID NO: 197003 - DNA, 33 bp, Homo sapien
ggccactgcctatgtaacctcttttgcctcatt

SEQ ID NO: 197004 - DNA, 33 bp, Homo sapien
ggccactgcctatgtagcctcttttgcctcatt

SEQ ID NO: 197005 - DNA, 33 bp, Homo sapien
agtggaagagtagagaaaggagcctgactgcag

SEQ ID NO: 197006 - DNA, 33 bp, Homo sapien
agtggaagagtagagacaggagcctgactgcag

SEQ ID NO: 197007 - DNA, 33 bp, Homo sapien
tatctactagcaagggacactaagcaaaagaaa

SEQ ID NO: 197008 - DNA, 33 bp, Homo sapien
tatctactagcaaggggcactaagcaaaagaaa

SEQ ID NO: 197009 - DNA, 33 bp, Homo sapien
agctgtgcctggaaccaagagataaatgcataa

SEQ ID NO: 197010 - DNA, 33 bp, Homo sapien
agctgtgcctggaaccgagagataaatgcataa

SEQ ID NO: 197011 - DNA, 33 bp, Homo sapien
gaaagaatcatggctgaaacacagaggagggga

SEQ ID NO: 197012 - DNA, 33 bp, Homo sapien
gaaagaatcatggctgcaacacagaggagggga

SEQ ID NO: 197013 - DNA, 33 bp, Homo sapien
tgcttcctgtcagatcagagtgcaactcaagtg

SEQ ID NO: 197014 - DNA, 33 bp, Homo sapien
tgcttcctgtcagatcggagtgcaactcaagtg

SEQ ID NO: 197015 - DNA, 33 bp, Homo sapien
tggaaaatatctttggacaactcatttttcctt

SEQ ID NO: 197016 - DNA, 33 bp, Homo sapien
tggaaaatatctttgggcaactcatttttcctt

SEQ ID NO: 197017 - DNA, 33 bp, Homo sapien
tgggatcaccatcatacaggcttttgttcacca

SEQ ID NO: 197018 - DNA, 33 bp, Homo sapien
tgggatcaccatcatataggcttttgttcacca

SEQ ID NO: 197019 - DNA, 33 bp, Homo sapien
ctatgcaaaagaagtacagatgcttggaagggt

SEQ ID NO: 197020 - DNA, 33 bp, Homo sapien
ctatgcaaaagaagtatagatgcttggaagggt

SEQ ID NO: 197021 - DNA, 33 bp, Homo sapien
catctgaaagtccttaagtccatgaaactacac

SEQ ID NO: 197022 - DNA, 33 bp, Homo sapien
catctgaaagtccttacgtccatgaaactacac

SEQ ID NO: 197023 - DNA, 33 bp, Homo sapien
ctctaaaaaagaagcacggatttcattctccaa

SEQ ID NO: 197024 - DNA, 33 bp, Homo sapien
ctctaaaaaagaagcatggatttcattctccaa

SEQ ID NO: 197025 - DNA, 33 bp, Homo sapien
cattcagctcatctacactcccctctggtcaaa

SEQ ID NO: 197026 - DNA, 33 bp, Homo sapien
cattcagctcatctactctcccctctggtcaaa

SEQ ID NO: 197027 - DNA, 33 bp, Homo sapien
gtcgcttctaatgagaaataatgatgtcaaggt

SEQ ID NO: 197028 - DNA, 33 bp, Homo sapien
gtcgcttctaatgagagataatgatgtcaaggt

SEQ ID NO: 197029 - DNA, 33 bp, Homo sapien
taatacttttcctttcaagaggtggagcttaat

SEQ ID NO: 197030 - DNA, 33 bp, Homo sapien
taatacttttcctttccagaggtggagcttaat

SEQ ID NO: 197031 - DNA, 33 bp, Homo sapien
atagaactaaagattgcaatttgttggagttaa

SEQ ID NO: 197032 - DNA, 33 bp, Homo sapien
atagaactaaagattgtaatttgttggagttaa

SEQ ID NO: 197033 - DNA, 33 bp, Homo sapien
aatgtccaggttcagcactagaccatggactgt

SEQ ID NO: 197034 - DNA, 33 bp, Homo sapien
aatgtccaggttcagcgctagaccatggactgt

SEQ ID NO: 197035 - DNA, 33 bp, Homo sapien
aaaatgtttccacagcaaatttatactttgatc

SEQ ID NO: 197036 - DNA, 33 bp, Homo sapien
aaaatgtttccacagcgaatttatactttgatc

SEQ ID NO: 197037 - DNA, 33 bp, Homo sapien
cattcatttattcatccagctattcacttaccc

SEQ ID NO: 197038 - DNA, 33 bp, Homo sapien
cattcatttattcatctagctattcacttaccc

SEQ ID NO: 197039 - DNA, 33 bp, Homo sapien
acatagttatatctatcaaggtcacccactccc

SEQ ID NO: 197040 - DNA, 33 bp, Homo sapien
acatagttatatctattaaggtcacccactccc

SEQ ID NO: 197041 - DNA, 33 bp, Homo sapien
aacatggtaattagaaggttggatttgaattga

SEQ ID NO: 197042 - DNA, 33 bp, Homo sapien
aacatggtaattagaatgttggatttgaattga

SEQ ID NO: 197043 - DNA, 33 bp, Homo sapien
tcaaccggcagctccaagaaacaaggtcatcta

SEQ ID NO: 197044 - DNA, 33 bp, Homo sapien
tcaaccggcagctccaggaaacaaggtcatcta

SEQ ID NO: 197045 - DNA, 33 bp, Homo sapien
agaattaaattgcataactgtgaacagacactt

SEQ ID NO: 197046 - DNA, 33 bp, Homo sapien
agaattaaattgcatacctgtgaacagacactt

SEQ ID NO: 197047 - DNA, 33 bp, Homo sapien
atatgttccacagaaacgctaccaaaagcagta

SEQ ID NO: 197048 - DNA, 33 bp, Homo sapien
atatgttccacagaaatgctaccaaaagcagta

SEQ ID NO: 197049 - DNA, 33 bp, Homo sapien
ggaatacgtccagggacagaactgggaaaaatc

SEQ ID NO: 197050 - DNA, 33 bp, Homo sapien
ggaatacgtccagggatagaactgggaaaaatc

SEQ ID NO: 197051 - DNA, 33 bp, Homo sapien
cagccatgcagatgacaggctgaaaggtttggt

SEQ ID NO: 197052 - DNA, 33 bp, Homo sapien
cagccatgcagatgacgggctgaaaggtttggt

SEQ ID NO: 197053 - DNA, 33 bp, Homo sapien
tctccctcgtagccaaagaatgtgatttttctg

SEQ ID NO: 197054 - DNA, 33 bp, Homo sapien
tctccctcgtagccaacgaatgtgatttttctg

SEQ ID NO: 197055 - DNA, 33 bp, Homo sapien
ttaacacactatgagaaactaagacaggaatat

SEQ ID NO: 197056 - DNA, 33 bp, Homo sapien
ttaacacactatgagatactaagacaggaatat

SEQ ID NO: 197057 - DNA, 33 bp, Homo sapien
aattccgttggtgagacagctaactagagtcaa

SEQ ID NO: 197058 - DNA, 33 bp, Homo sapien
aattccgttggtgagagagctaactagagtcaa

SEQ ID NO: 197059 - DNA, 33 bp, Homo sapien
taaaggaataaaaagcacttggaatagccatta

SEQ ID NO: 197060 - DNA, 33 bp, Homo sapien
taaaggaataaaaagcgcttggaatagccatta

SEQ ID NO: 197061 - DNA, 33 bp, Homo sapien
agtggtgttgctgcaacattaaagtaaaagttt

SEQ ID NO: 197062 - DNA, 33 bp, Homo sapien
agtggtgttgctgcaatattaaagtaaaagttt

SEQ ID NO: 197063 - DNA, 33 bp, Homo sapien
gaaccaataagaaataaccacaattctaaactc

SEQ ID NO: 197064 - DNA, 33 bp, Homo sapien
gaaccaataagaaatagccacaattctaaactc

SEQ ID NO: 197065 - DNA, 33 bp, Homo sapien
caaacctcctcttgccagaattgttgagataat

SEQ ID NO: 197066 - DNA, 33 bp, Homo sapien
caaacctcctcttgccggaattgttgagataat

SEQ ID NO: 197067 - DNA, 33 bp, Homo sapien
tagtaacaatcctctaaataaggtgggtatgat

SEQ ID NO: 197068 - DNA, 33 bp, Homo sapien
tagtaacaatcctctatataaggtgggtatgat

SEQ ID NO: 197069 - DNA, 33 bp, Homo sapien
tgcttccttcaaaatgcatttcagtgtttgaga

SEQ ID NO: 197070 - DNA, 33 bp, Homo sapien
tgcttccttcaaaatggatttcagtgtttgaga

SEQ ID NO: 197071 - DNA, 33 bp, Homo sapien
gaatgaccatattctaagtgtctactatgagtc

SEQ ID NO: 197072 - DNA, 33 bp, Homo sapien
gaatgaccatattctaggtgtctactatgagtc

SEQ ID NO: 197073 - DNA, 33 bp, Homo sapien
tatctgggggcgcatagacaatcacgcacatac

SEQ ID NO: 197074 - DNA, 33 bp, Homo sapien
tatctgggggcgcatatacaatcacgcacatac

SEQ ID NO: 197075 - DNA, 33 bp, Homo sapien
catacgatcacgagtacatcagagaaaactctt

SEQ ID NO: 197076 - DNA, 33 bp, Homo sapien
catacgatcacgagtatatcagagaaaactctt

SEQ ID NO: 197077 - DNA, 33 bp, Homo sapien
taagagacagacatgaaggtgctcacctgtagt

SEQ ID NO: 197078 - DNA, 33 bp, Homo sapien
taagagacagacatgatggtgctcacctgtagt

SEQ ID NO: 197079 - DNA, 33 bp, Homo sapien
tgaagagtctcagcacagtgaaattcatcatag

SEQ ID NO: 197080 - DNA, 33 bp, Homo sapien
tgaagagtctcagcacggtgaaattcatcatag

SEQ ID NO: 197081 - DNA, 33 bp, Homo sapien
cagcaaattaaagtgcacctacagaggagtaat

SEQ ID NO: 197082 - DNA, 33 bp, Homo sapien
cagcaaattaaagtgcccctacagaggagtaat

SEQ ID NO: 197083 - DNA, 33 bp, Homo sapien
cttttctgtctctatccagagtggtgtgcctag

SEQ ID NO: 197084 - DNA, 33 bp, Homo sapien
cttttctgtctctatcgagagtggtgtgcctag

SEQ ID NO: 197085 - DNA, 33 bp, Homo sapien
tgggacttactggggacagcacttttcagaagc

SEQ ID NO: 197086 - DNA, 33 bp, Homo sapien
tgggacttactggggatagcacttttcagaagc

SEQ ID NO: 197087 - DNA, 33 bp, Homo sapien
tattatcccaactagacgatcagttcccaatga

SEQ ID NO: 197088 - DNA, 33 bp, Homo sapien
tattatcccaactagatgatcagttcccaatga

SEQ ID NO: 197089 - DNA, 33 bp, Homo sapien
gaagggatttcctgaaagtgaagcagttgggga

SEQ ID NO: 197090 - DNA, 33 bp, Homo sapien
gaagggatttcctgaaggtgaagcagttgggga

SEQ ID NO: 197091 - DNA, 33 bp, Homo sapien
ggaagaaatattttaacgcttatcagtacagaa

SEQ ID NO: 197092 - DNA, 33 bp, Homo sapien
ggaagaaatattttaatgcttatcagtacagaa

SEQ ID NO: 197093 - DNA, 33 bp, Homo sapien
ggacacaaacagcccaaacaacatatcctcaac

SEQ ID NO: 197094 - DNA, 33 bp, Homo sapien
ggacacaaacagcccatacaacatatcctcaac

SEQ ID NO: 197095 - DNA, 33 bp, Homo sapien
atgtttgataacatagccacctctttctgactt

SEQ ID NO: 197096 - DNA, 33 bp, Homo sapien
atgtttgataacataggcacctctttctgactt

SEQ ID NO: 197097 - DNA, 33 bp, Homo sapien
cagatgctgctgttaacacatggaacacactct

SEQ ID NO: 197098 - DNA, 33 bp, Homo sapien
cagatgctgctgttaatacatggaacacactct

SEQ ID NO: 197099 - DNA, 33 bp, Homo sapien
gctccttaattagcagacataagattctttcct

SEQ ID NO: 197100 - DNA, 33 bp, Homo sapien
gctccttaattagcaggcataagattctttcct

SEQ ID NO: 197101 - DNA, 33 bp, Homo sapien
ttcactcgtacttttcaataagaatttttatga

SEQ ID NO: 197102 - DNA, 33 bp, Homo sapien
ttcactcgtacttttcgataagaatttttatga

SEQ ID NO: 197103 - DNA, 33 bp, Homo sapien
tgttaggcaatctcacagacctggggctttgct

SEQ ID NO: 197104 - DNA, 33 bp, Homo sapien
tgttaggcaatctcacggacctggggctttgct

SEQ ID NO: 197105 - DNA, 33 bp, Homo sapien
tcatagattggcaatactatatggcactttatg

SEQ ID NO: 197106 - DNA, 33 bp, Homo sapien
tcatagattggcaatattatatggcactttatg

SEQ ID NO: 197107 - DNA, 33 bp, Homo sapien
ctctgagcaatcataaccatttgaaactagcag

SEQ ID NO: 197108 - DNA, 33 bp, Homo sapien
ctctgagcaatcataagcatttgaaactagcag

SEQ ID NO: 197109 - DNA, 33 bp, Homo sapien
taattttcttctaaatcaaatgttgacatatat

SEQ ID NO: 197110 - DNA, 33 bp, Homo sapien
taattttcttctaaatgaaatgttgacatatat

SEQ ID NO: 197111 - DNA, 33 bp, Homo sapien
caagcaggcccagttacaggacagtgcctttct

SEQ ID NO: 197112 - DNA, 33 bp, Homo sapien
caagcaggcccagttataggacagtgcctttct

SEQ ID NO: 197113 - DNA, 33 bp, Homo sapien
attttagggaaggggacatcattggagtttttt

SEQ ID NO: 197114 - DNA, 33 bp, Homo sapien
attttagggaaggggagatcattggagtttttt

SEQ ID NO: 197115 - DNA, 33 bp, Homo sapien
atgtgtagatttgtaaacagactcaagtacttg

SEQ ID NO: 197116 - DNA, 33 bp, Homo sapien
atgtgtagatttgtaagcagactcaagtacttg

SEQ ID NO: 197117 - DNA, 33 bp, Homo sapien
aaagctgtcattacaacaatatacgagcttggg

SEQ ID NO: 197118 - DNA, 33 bp, Homo sapien
aaagctgtcattacaataatatacgagcttggg

SEQ ID NO: 197119 - DNA, 33 bp, Homo sapien
cttactccaactctaacggactgattggggctt

SEQ ID NO: 197120 - DNA, 33 bp, Homo sapien
cttactccaactctaatggactgattggggctt

SEQ ID NO: 197121 - DNA, 33 bp, Homo sapien
taagcttgagtcttcccccatctttcctgctaa

SEQ ID NO: 197122 - DNA, 33 bp, Homo sapien
taagcttgagtcttcctccatctttcctgctaa

SEQ ID NO: 197123 - DNA, 33 bp, Homo sapien
gaatttatctcccaaacgaacagtgccgttttt

SEQ ID NO: 197124 - DNA, 33 bp, Homo sapien
gaatttatctcccaaaggaacagtgccgttttt

SEQ ID NO: 197125 - DNA, 33 bp, Homo sapien
tgaatttattcaggccccttccttttaaatcct

SEQ ID NO: 197126 - DNA, 33 bp, Homo sapien
tgaatttattcaggcctcttccttttaaatcct

SEQ ID NO: 197127 - DNA, 33 bp, Homo sapien
accaactgcaggcctgaatacatggtactcagt

SEQ ID NO: 197128 - DNA, 33 bp, Homo sapien
accaactgcaggcctggatacatggtactcagt

SEQ ID NO: 197129 - DNA, 33 bp, Homo sapien
tacacaacaaagatacaaaacacatatgcagta

SEQ ID NO: 197130 - DNA, 33 bp, Homo sapien
tacacaacaaagatacgaaacacatatgcagta

SEQ ID NO: 197131 - DNA, 33 bp, Homo sapien
gccaaagtgaggcttcccatagacatacacaac

SEQ ID NO: 197132 - DNA, 33 bp, Homo sapien
gccaaagtgaggcttctcatagacatacacaac

SEQ ID NO: 197133 - DNA, 33 bp, Homo sapien
caccaatgctgcttcacattaattactggcaat

SEQ ID NO: 197134 - DNA, 33 bp, Homo sapien
caccaatgctgcttcatattaattactggcaat

SEQ ID NO: 197135 - DNA, 33 bp, Homo sapien
tcctatgtgttctaacaacagccagttcacaac

SEQ ID NO: 197136 - DNA, 33 bp, Homo sapien
tcctatgtgttctaacgacagccagttcacaac

SEQ ID NO: 197137 - DNA, 33 bp, Homo sapien
atcttagtggtcttaaaagataattggtgggta

SEQ ID NO: 197138 - DNA, 33 bp, Homo sapien
atcttagtggtcttaacagataattggtgggta

SEQ ID NO: 197139 - DNA, 33 bp, Homo sapien
aaataggaattaaactcacctgaggagcagaag

SEQ ID NO: 197140 - DNA, 33 bp, Homo sapien
aaataggaattaaacttacctgaggagcagaag

SEQ ID NO: 197141 - DNA, 33 bp, Homo sapien
ggattttgctcttttacggacagcttagtagat

SEQ ID NO: 197142 - DNA, 33 bp, Homo sapien
ggattttgctcttttatggacagcttagtagat

SEQ ID NO: 197143 - DNA, 33 bp, Homo sapien
tacaacttactctgcaaggctatcataaggact

SEQ ID NO: 197144 - DNA, 33 bp, Homo sapien
tacaacttactctgcagggctatcataaggact

SEQ ID NO: 197145 - DNA, 33 bp, Homo sapien
gaagcggagcttcaagaaaaggagtattctagc

SEQ ID NO: 197146 - DNA, 33 bp, Homo sapien
gaagcggagcttcaaggaaaggagtattctagc

SEQ ID NO: 197147 - DNA, 33 bp, Homo sapien
aagatactttggagaacctatatggagagaaaa

SEQ ID NO: 197148 - DNA, 33 bp, Homo sapien
aagatactttggagaagctatatggagagaaaa

SEQ ID NO: 197149 - DNA, 33 bp, Homo sapien
ttcagaaggactaaaaagagtttctgtgacctg

SEQ ID NO: 197150 - DNA, 33 bp, Homo sapien
ttcagaaggactaaaaggagtttctgtgacctg

SEQ ID NO: 197151 - DNA, 33 bp, Homo sapien
tcaggaaattatattgaaattgtctgcttgtta

SEQ ID NO: 197152 - DNA, 33 bp, Homo sapien
tcaggaaattatattggaattgtctgcttgtta

SEQ ID NO: 197153 - DNA, 33 bp, Homo sapien
ttcctaaagttctgaaatccttgaccatcgaag

SEQ ID NO: 197154 - DNA, 33 bp, Homo sapien
ttcctaaagttctgaagtccttgaccatcgaag

SEQ ID NO: 197155 - DNA, 33 bp, Homo sapien
gacactagtaagccaaataagatgaggactgag

SEQ ID NO: 197156 - DNA, 33 bp, Homo sapien
gacactagtaagccaagtaagatgaggactgag

SEQ ID NO: 197157 - DNA, 33 bp, Homo sapien
attatgagtgtagaaacgttggtgcaggaaata

SEQ ID NO: 197158 - DNA, 33 bp, Homo sapien
attatgagtgtagaaatgttggtgcaggaaata

SEQ ID NO: 197159 - DNA, 33 bp, Homo sapien
ttcatatgtgttaaaactatttctgcggactgt

SEQ ID NO: 197160 - DNA, 33 bp, Homo sapien
ttcatatgtgttaaaattatttctgcggactgt

SEQ ID NO: 197161 - DNA, 33 bp, Homo sapien
cccttagtaaggggaaaagcagtaaacacatac

SEQ ID NO: 197162 - DNA, 33 bp, Homo sapien
cccttagtaaggggaagagcagtaaacacatac

SEQ ID NO: 197163 - DNA, 33 bp, Homo sapien
acctagaaaacagcaccgtcatgtggaaaacca

SEQ ID NO: 197164 - DNA, 33 bp, Homo sapien
acctagaaaacagcacggtcatgtggaaaacca

SEQ ID NO: 197165 - DNA, 33 bp, Homo sapien
tctttccatggcatgaacttccccatgtcacca

SEQ ID NO: 197166 - DNA, 33 bp, Homo sapien
tctttccatggcatgagcttccccatgtcacca

SEQ ID NO: 197167 - DNA, 33 bp, Homo sapien
agaagtgccagaatcggcaattctaagagaaaa

SEQ ID NO: 197168 - DNA, 33 bp, Homo sapien
agaagtgccagaatcgtcaattctaagagaaaa

SEQ ID NO: 197169 - DNA, 33 bp, Homo sapien
gatagatttccatcaacgaataatttagtaaca

SEQ ID NO: 197170 - DNA, 33 bp, Homo sapien
gatagatttccatcaatgaataatttagtaaca

SEQ ID NO: 197171 - DNA, 33 bp, Homo sapien
aaaggaaaggcagtaacgaaatggcagttgggg

SEQ ID NO: 197172 - DNA, 33 bp, Homo sapien
aaaggaaaggcagtaaggaaatggcagttgggg

SEQ ID NO: 197173 - DNA, 33 bp, Homo sapien
tgttatcagaatggaacttatcagtagagaaaa

SEQ ID NO: 197174 - DNA, 33 bp, Homo sapien
tgttatcagaatggaagttatcagtagagaaaa

SEQ ID NO: 197175 - DNA, 33 bp, Homo sapien
ctcagaggttgaagacacattatatctcctcct

SEQ ID NO: 197176 - DNA, 33 bp, Homo sapien
ctcagaggttgaagacgcattatatctcctcct

SEQ ID NO: 197177 - DNA, 33 bp, Homo sapien
agtgtagtggtacttcaaaaaattgaaaacata

SEQ ID NO: 197178 - DNA, 33 bp, Homo sapien
agtgtagtggtacttccaaaaattgaaaacata

SEQ ID NO: 197179 - DNA, 33 bp, Homo sapien
ggaaccaaaactggtaaacagggactgctcatc

SEQ ID NO: 197180 - DNA, 33 bp, Homo sapien
ggaaccaaaactggtagacagggactgctcatc

SEQ ID NO: 197181 - DNA, 33 bp, Homo sapien
cctcactcgctggtagaaataggctcattatct

SEQ ID NO: 197182 - DNA, 33 bp, Homo sapien
cctcactcgctggtaggaataggctcattatct

SEQ ID NO: 197183 - DNA, 33 bp, Homo sapien
gcaaatagttctaaaactcgtttgcaaattcag

SEQ ID NO: 197184 - DNA, 33 bp, Homo sapien
gcaaatagttctaaaattcgtttgcaaattcag

SEQ ID NO: 197185 - DNA, 33 bp, Homo sapien
gcagctttcttccaaccgatctgggccaaaaca

SEQ ID NO: 197186 - DNA, 33 bp, Homo sapien
gcagctttcttccaacggatctgggccaaaaca

SEQ ID NO: 197187 - DNA, 33 bp, Homo sapien
atcagattgccttgtcaagagtgagcttattct

SEQ ID NO: 197188 - DNA, 33 bp, Homo sapien
atcagattgccttgtctagagtgagcttattct

SEQ ID NO: 197189 - DNA, 33 bp, Homo sapien
gttttaaatcctttcacccatccatcaagcatt

SEQ ID NO: 197190 - DNA, 33 bp, Homo sapien
gttttaaatcctttcatccatccatcaagcatt

SEQ ID NO: 197191 - DNA, 33 bp, Homo sapien
ctgatcttcaccttgggatcttgatgtttaata

SEQ ID NO: 197192 - DNA, 33 bp, Homo sapien
ctgatcttcaccttggtatcttgatgtttaata

SEQ ID NO: 197193 - DNA, 33 bp, Homo sapien
gtaccagagggcctcaccagtggcaggtgctcc

SEQ ID NO: 197194 - DNA, 33 bp, Homo sapien
gtaccagagggcctcatcagtggcaggtgctcc

SEQ ID NO: 197195 - DNA, 33 bp, Homo sapien
gggttactggagacagaagggtacttagcattt

SEQ ID NO: 197196 - DNA, 33 bp, Homo sapien
gggttactggagacaggagggtacttagcattt

SEQ ID NO: 197197 - DNA, 33 bp, Homo sapien
tgtgactgaagaacaaactcaagagtaaagaca

SEQ ID NO: 197198 - DNA, 33 bp, Homo sapien
tgtgactgaagaacaagctcaagagtaaagaca

SEQ ID NO: 197199 - DNA, 33 bp, Homo sapien
actagaaacttcttccactacactttccattca

SEQ ID NO: 197200 - DNA, 33 bp, Homo sapien
actagaaacttcttccgctacactttccattca

SEQ ID NO: 197201 - DNA, 33 bp, Homo sapien
agatgggattctcaaaaagctgaagcagaagga

SEQ ID NO: 197202 - DNA, 33 bp, Homo sapien
agatgggattctcaaacagctgaagcagaagga

SEQ ID NO: 197203 - DNA, 33 bp, Homo sapien
aggatctcagaaaataccaagttagcaaaggtg

SEQ ID NO: 197204 - DNA, 33 bp, Homo sapien
aggatctcagaaaatatcaagttagcaaaggtg

SEQ ID NO: 197205 - DNA, 33 bp, Homo sapien
cctgaaagtttatggaacggtgaggccttgtct

SEQ ID NO: 197206 - DNA, 33 bp, Homo sapien
cctgaaagtttatggatcggtgaggccttgtct

SEQ ID NO: 197207 - DNA, 33 bp, Homo sapien
tgacctaaatgtatacaagtccaatgtttagac

SEQ ID NO: 197208 - DNA, 33 bp, Homo sapien
tgacctaaatgtatacgagtccaatgtttagac

SEQ ID NO: 197209 - DNA, 33 bp, Homo sapien
ctatattacaactacaatcatctttcaaaaata

SEQ ID NO: 197210 - DNA, 33 bp, Homo sapien
ctatattacaactacagtcatctttcaaaaata

SEQ ID NO: 197211 - DNA, 33 bp, Homo sapien
aagattgaactcagaaagaccaatttgttgaca

SEQ ID NO: 197212 - DNA, 33 bp, Homo sapien
aagattgaactcagaaggaccaatttgttgaca

SEQ ID NO: 197213 - DNA, 33 bp, Homo sapien
ttttgtcttacatgtacggtaactcaggcctca

SEQ ID NO: 197214 - DNA, 33 bp, Homo sapien
ttttgtcttacatgtatggtaactcaggcctca

SEQ ID NO: 197215 - DNA, 33 bp, Homo sapien
cagaagagaataaaagcagcaaaaataatgtga

SEQ ID NO: 197216 - DNA, 33 bp, Homo sapien
cagaagagaataaaaggagcaaaaataatgtga

SEQ ID NO: 197217 - DNA, 33 bp, Homo sapien
gagcatggtagctctacgtgttgggtggtttgg

SEQ ID NO: 197218 - DNA, 33 bp, Homo sapien
gagcatggtagctctatgtgttgggtggtttgg

SEQ ID NO: 197219 - DNA, 33 bp, Homo sapien
aaattgaaccaaagacccacaagttctcttcta

SEQ ID NO: 197220 - DNA, 33 bp, Homo sapien
aaattgaaccaaagacgcacaagttctcttcta

SEQ ID NO: 197221 - DNA, 33 bp, Homo sapien
aaatcctatcaagagcaatgtgagcttggaagc

SEQ ID NO: 197222 - DNA, 33 bp, Homo sapien
aaatcctatcaagagcgatgtgagcttggaagc

SEQ ID NO: 197223 - DNA, 33 bp, Homo sapien
ggatggagctcagcaacgtcacaggggtgggct

SEQ ID NO: 197224 - DNA, 33 bp, Homo sapien
ggatggagctcagcaatgtcacaggggtgggct

SEQ ID NO: 197225 - DNA, 33 bp, Homo sapien
aagtctcaagaagcatgagccaagtgaatttat

SEQ ID NO: 197226 - DNA, 33 bp, Homo sapien
aagtctcaagaagcattagccaagtgaatttat

SEQ ID NO: 197227 - DNA, 33 bp, Homo sapien
ttggctttactattacagaacctgtcaagaatc

SEQ ID NO: 197228 - DNA, 33 bp, Homo sapien
ttggctttactattacggaacctgtcaagaatc

SEQ ID NO: 197229 - DNA, 33 bp, Homo sapien
ccacattccaacatgtaaactgagaagcagaga

SEQ ID NO: 197230 - DNA, 33 bp, Homo sapien
ccacattccaacatgtgaactgagaagcagaga

SEQ ID NO: 197231 - DNA, 33 bp, Homo sapien
tgtcagcaatccctgacggtcctgtcttgtagc

SEQ ID NO: 197232 - DNA, 33 bp, Homo sapien
tgtcagcaatccctgatggtcctgtcttgtagc

SEQ ID NO: 197233 - DNA, 33 bp, Homo sapien
aggctagaagtccagaatcaaagtgccagcaaa

SEQ ID NO: 197234 - DNA, 33 bp, Homo sapien
aggctagaagtccagattcaaagtgccagcaaa

SEQ ID NO: 197235 - DNA, 33 bp, Homo sapien
aaatatgtggctttaacatgggtttcttctgtt

SEQ ID NO: 197236 - DNA, 33 bp, Homo sapien
aaatatgtggctttaatatgggtttcttctgtt

SEQ ID NO: 197237 - DNA, 33 bp, Homo sapien
tgcacactttaaacaacggcaccaggatccatt

SEQ ID NO: 197238 - DNA, 33 bp, Homo sapien
tgcacactttaaacaatggcaccaggatccatt

SEQ ID NO: 197239 - DNA, 33 bp, Homo sapien
ttcatttcatagtccaacctcaaccaattcacc

SEQ ID NO: 197240 - DNA, 33 bp, Homo sapien
ttcatttcatagtccagcctcaaccaattcacc

SEQ ID NO: 197241 - DNA, 33 bp, Homo sapien
taaagagttcacaggtaaatgaaaggaaatcag

SEQ ID NO: 197242 - DNA, 33 bp, Homo sapien
taaagagttcacaggtgaatgaaaggaaatcag

SEQ ID NO: 197243 - DNA, 33 bp, Homo sapien
acaggaggaggacagaatacctttgatttcatt

SEQ ID NO: 197244 - DNA, 33 bp, Homo sapien
acaggaggaggacagattacctttgatttcatt

SEQ ID NO: 197245 - DNA, 33 bp, Homo sapien
acatctttgtacactacgcgaagggagtaggat

SEQ ID NO: 197246 - DNA, 33 bp, Homo sapien
acatctttgtacactatgcgaagggagtaggat

SEQ ID NO: 197247 - DNA, 33 bp, Homo sapien
aaagggtacaaagtgccgatcatgtagaatgaa

SEQ ID NO: 197248 - DNA, 33 bp, Homo sapien
aaagggtacaaagtgctgatcatgtagaatgaa

SEQ ID NO: 197249 - DNA, 33 bp, Homo sapien
ccaacatggtcaaaaggcctctgcctcatatca

SEQ ID NO: 197250 - DNA, 33 bp, Homo sapien
ccaacatggtcaaaagtcctctgcctcatatca

SEQ ID NO: 197251 - DNA, 33 bp, Homo sapien
aagtcatctttgcaccaccttgtaccacatgag

SEQ ID NO: 197252 - DNA, 33 bp, Homo sapien
aagtcatctttgcacctccttgtaccacatgag

SEQ ID NO: 197253 - DNA, 33 bp, Homo sapien
tccaaagcctgtggtacgtaaagacttgtgagg

SEQ ID NO: 197254 - DNA, 33 bp, Homo sapien
tccaaagcctgtggtatgtaaagacttgtgagg

SEQ ID NO: 197255 - DNA, 33 bp, Homo sapien
aacttttatttagagccgcacttctcaaacttt

SEQ ID NO: 197256 - DNA, 33 bp, Homo sapien
aacttttatttagagctgcacttctcaaacttt

SEQ ID NO: 197257 - DNA, 33 bp, Homo sapien
ttcctacatgataccactgaaagtcattgtcaa

SEQ ID NO: 197258 - DNA, 33 bp, Homo sapien
ttcctacatgataccattgaaagtcattgtcaa

SEQ ID NO: 197259 - DNA, 33 bp, Homo sapien
aaacaattgttttgcacctctaaacttcaccta

SEQ ID NO: 197260 - DNA, 33 bp, Homo sapien
aaacaattgttttgcatctctaaacttcaccta

SEQ ID NO: 197261 - DNA, 33 bp, Homo sapien
aaccggagctggaagacggtaagtttggagagc

SEQ ID NO: 197262 - DNA, 33 bp, Homo sapien
aaccggagctggaagatggtaagtttggagagc

SEQ ID NO: 197263 - DNA, 33 bp, Homo sapien
gggattggaacaagataacctgtatgggccacc

SEQ ID NO: 197264 - DNA, 33 bp, Homo sapien
gggattggaacaagatgacctgtatgggccacc

SEQ ID NO: 197265 - DNA, 33 bp, Homo sapien
tataaacctgttgaagaatatgtgggtagtttc

SEQ ID NO: 197266 - DNA, 33 bp, Homo sapien
tataaacctgttgaaggatatgtgggtagtttc

SEQ ID NO: 197267 - DNA, 33 bp, Homo sapien
ttgtttttctctggccactttcaaagattattt

SEQ ID NO: 197268 - DNA, 33 bp, Homo sapien
ttgtttttctctggccgctttcaaagattattt

SEQ ID NO: 197269 - DNA, 33 bp, Homo sapien
gttttctactgtttgcccaagatgtaagcacag

SEQ ID NO: 197270 - DNA, 33 bp, Homo sapien
gttttctactgtttgctcaagatgtaagcacag

SEQ ID NO: 197271 - DNA, 33 bp, Homo sapien
ccttgagaacagccacaagagtatgcaaggtca

SEQ ID NO: 197272 - DNA, 33 bp, Homo sapien
ccttgagaacagccacgagagtatgcaaggtca

SEQ ID NO: 197273 - DNA, 33 bp, Homo sapien
caagcatccttcctcacagtcaagtttctcaga

SEQ ID NO: 197274 - DNA, 33 bp, Homo sapien
caagcatccttcctcatagtcaagtttctcaga

SEQ ID NO: 197275 - DNA, 33 bp, Homo sapien
ctaatccaagccatggccaatgtacagaaactt

SEQ ID NO: 197276 - DNA, 33 bp, Homo sapien
ctaatccaagccatggtcaatgtacagaaactt

SEQ ID NO: 197277 - DNA, 33 bp, Homo sapien
cagctgatgggtgtgcaactttaaaggcaccgt

SEQ ID NO: 197278 - DNA, 33 bp, Homo sapien
cagctgatgggtgtgcgactttaaaggcaccgt

SEQ ID NO: 197279 - DNA, 33 bp, Homo sapien
cactgtctgtaggcaggccttaaggtattgtgg

SEQ ID NO: 197280 - DNA, 33 bp, Homo sapien
cactgtctgtaggcagtccttaaggtattgtgg

SEQ ID NO: 197281 - DNA, 33 bp, Homo sapien
gctaaactatccagaaatcagtccactttaaat

SEQ ID NO: 197282 - DNA, 33 bp, Homo sapien
gctaaactatccagaagtcagtccactttaaat

SEQ ID NO: 197283 - DNA, 33 bp, Homo sapien
ccttgcggacttcaacgcaaaaaatgaaatgat

SEQ ID NO: 197284 - DNA, 33 bp, Homo sapien
ccttgcggacttcaactcaaaaaatgaaatgat

SEQ ID NO: 197285 - DNA, 33 bp, Homo sapien
tgtaactccctgagcccggaattggtttcctaa

SEQ ID NO: 197286 - DNA, 33 bp, Homo sapien
tgtaactccctgagcctggaattggtttcctaa

SEQ ID NO: 197287 - DNA, 33 bp, Homo sapien
ccctcggtatgtgatacgtgatcccttttcttg

SEQ ID NO: 197288 - DNA, 33 bp, Homo sapien
ccctcggtatgtgataggtgatcccttttcttg

SEQ ID NO: 197289 - DNA, 33 bp, Homo sapien
accgtcatagatagtaagtggcaaagagcatga

SEQ ID NO: 197290 - DNA, 33 bp, Homo sapien
accgtcatagatagtaggtggcaaagagcatga

SEQ ID NO: 197291 - DNA, 33 bp, Homo sapien
gcagaccaagcgcttacatacacacatgctgtg

SEQ ID NO: 197292 - DNA, 33 bp, Homo sapien
gcagaccaagcgcttatatacacacatgctgtg

SEQ ID NO: 197293 - DNA, 33 bp, Homo sapien
tgatgttgggcaagttaaaatctctgtgcttca

SEQ ID NO: 197294 - DNA, 33 bp, Homo sapien
tgatgttgggcaagttcaaatctctgtgcttca

SEQ ID NO: 197295 - DNA, 33 bp, Homo sapien
gtatttacctccaacacctttgagaatctaata

SEQ ID NO: 197296 - DNA, 33 bp, Homo sapien
gtatttacctccaacagctttgagaatctaata

SEQ ID NO: 197297 - DNA, 33 bp, Homo sapien
ccgaggacctactacacacgtgatttcagagtg

SEQ ID NO: 197298 - DNA, 33 bp, Homo sapien
ccgaggacctactacatacgtgatttcagagtg

SEQ ID NO: 197299 - DNA, 33 bp, Homo sapien
gaagctggcttttgtaagttaaagtcactcttt

SEQ ID NO: 197300 - DNA, 33 bp, Homo sapien
gaagctggcttttgtaggttaaagtcactcttt

SEQ ID NO: 197301 - DNA, 33 bp, Homo sapien
atgatgagtgaatgcaaaatcaggattagtagt

SEQ ID NO: 197302 - DNA, 33 bp, Homo sapien
atgatgagtgaatgcagaatcaggattagtagt

SEQ ID NO: 197303 - DNA, 33 bp, Homo sapien
ctcagaggaagactcaagagactgtgattcaga

SEQ ID NO: 197304 - DNA, 33 bp, Homo sapien
ctcagaggaagactcaggagactgtgattcaga

SEQ ID NO: 197305 - DNA, 33 bp, Homo sapien
ccctcaaaaagatccacgcaggttttggagtca

SEQ ID NO: 197306 - DNA, 33 bp, Homo sapien
ccctcaaaaagatccatgcaggttttggagtca

SEQ ID NO: 197307 - DNA, 33 bp, Homo sapien
gaaaataaggtcccagcaaagtcaatgggttag

SEQ ID NO: 197308 - DNA, 33 bp, Homo sapien
gaaaataaggtcccaggaaagtcaatgggttag

SEQ ID NO: 197309 - DNA, 33 bp, Homo sapien
acagcttctaccgagaaaaaaggcaaggctttt

SEQ ID NO: 197310 - DNA, 33 bp, Homo sapien
acagcttctaccgagagaaaaggcaaggctttt

SEQ ID NO: 197311 - DNA, 33 bp, Homo sapien
catctccaaattgtgaggctagaagagccatga

SEQ ID NO: 197312 - DNA, 33 bp, Homo sapien
catctccaaattgtgatgctagaagagccatga

SEQ ID NO: 197313 - DNA, 33 bp, Homo sapien
tataacactagtacccaatgccatgcactgact

SEQ ID NO: 197314 - DNA, 33 bp, Homo sapien
tataacactagtacccgatgccatgcactgact

SEQ ID NO: 197315 - DNA, 33 bp, Homo sapien
ggctttatgtactatccatatgctgacaactcc

SEQ ID NO: 197316 - DNA, 33 bp, Homo sapien
ggctttatgtactatcgatatgctgacaactcc

SEQ ID NO: 197317 - DNA, 33 bp, Homo sapien
gctccagcttggtagaaaattgggcttcttttc

SEQ ID NO: 197318 - DNA, 33 bp, Homo sapien
gctccagcttggtagagaattgggcttcttttc

SEQ ID NO: 197319 - DNA, 33 bp, Homo sapien
gcttcttttctgaatagccatagtgaagttaca

SEQ ID NO: 197320 - DNA, 33 bp, Homo sapien
gcttcttttctgaatatccatagtgaagttaca

SEQ ID NO: 197321 - DNA, 33 bp, Homo sapien
ctttgtaatctgaacaatggtttccaagcctgg

SEQ ID NO: 197322 - DNA, 33 bp, Homo sapien
ctttgtaatctgaacagtggtttccaagcctgg

SEQ ID NO: 197323 - DNA, 33 bp, Homo sapien
aacatttctttatgcaactatgagcaaatggga

SEQ ID NO: 197324 - DNA, 33 bp, Homo sapien
aacatttctttatgcagctatgagcaaatggga

SEQ ID NO: 197325 - DNA, 33 bp, Homo sapien
tgcgacccttagagaacgcaggaaattcaccac

SEQ ID NO: 197326 - DNA, 33 bp, Homo sapien
tgcgacccttagagaatgcaggaaattcaccac

SEQ ID NO: 197327 - DNA, 33 bp, Homo sapien
caaggacagaaggtgaataagaatccaaatatt

SEQ ID NO: 197328 - DNA, 33 bp, Homo sapien
caaggacagaaggtgagtaagaatccaaatatt

SEQ ID NO: 197329 - DNA, 33 bp, Homo sapien
taaagagcaatggtgacctagaaaagacagatc

SEQ ID NO: 197330 - DNA, 33 bp, Homo sapien
taaagagcaatggtgagctagaaaagacagatc

SEQ ID NO: 197331 - DNA, 33 bp, Homo sapien
tcacatattaggtgctcaacaaatgtttaataa

SEQ ID NO: 197332 - DNA, 33 bp, Homo sapien
tcacatattaggtgctgaacaaatgtttaataa

SEQ ID NO: 197333 - DNA, 33 bp, Homo sapien
tgtgttttccttctcaccatgtgtgcgtgttag

SEQ ID NO: 197334 - DNA, 33 bp, Homo sapien
tgtgttttccttctcatcatgtgtgcgtgttag

SEQ ID NO: 197335 - DNA, 33 bp, Homo sapien
atttgcctgtatgctccattttctggcccttcc

SEQ ID NO: 197336 - DNA, 33 bp, Homo sapien
atttgcctgtatgctctattttctggcccttcc

SEQ ID NO: 197337 - DNA, 33 bp, Homo sapien
ggaaagtgcaattgagcacttgagagaggctgt

SEQ ID NO: 197338 - DNA, 33 bp, Homo sapien
ggaaagtgcaattgagtacttgagagaggctgt

SEQ ID NO: 197339 - DNA, 33 bp, Homo sapien
caggctttcagtgggaataaagtaaagcaacac

SEQ ID NO: 197340 - DNA, 33 bp, Homo sapien
caggctttcagtgggagtaaagtaaagcaacac

SEQ ID NO: 197341 - DNA, 33 bp, Homo sapien
gaggcaggaagagctacggtgggagttgagcct

SEQ ID NO: 197342 - DNA, 33 bp, Homo sapien
gaggcaggaagagctatggtgggagttgagcct

SEQ ID NO: 197343 - DNA, 33 bp, Homo sapien
ggcaggggtcagtgcactcattcagcaagtatt

SEQ ID NO: 197344 - DNA, 33 bp, Homo sapien
ggcaggggtcagtgcattcattcagcaagtatt

SEQ ID NO: 197345 - DNA, 33 bp, Homo sapien
gaccaagggcctcacaactagtgaacaagggaa

SEQ ID NO: 197346 - DNA, 33 bp, Homo sapien
gaccaagggcctcacagctagtgaacaagggaa

SEQ ID NO: 197347 - DNA, 33 bp, Homo sapien
aaactcctagtgcagcaatgtccagccgaatgt

SEQ ID NO: 197348 - DNA, 33 bp, Homo sapien
aaactcctagtgcagcgatgtccagccgaatgt

SEQ ID NO: 197349 - DNA, 33 bp, Homo sapien
aatatggtatgacaaaaagagatttccagttta

SEQ ID NO: 197350 - DNA, 33 bp, Homo sapien
aatatggtatgacaaagagagatttccagttta

SEQ ID NO: 197351 - DNA, 33 bp, Homo sapien
tgctgtttaggtttcccgatgtttttatgtggc

SEQ ID NO: 197352 - DNA, 33 bp, Homo sapien
tgctgtttaggtttcctgatgtttttatgtggc

SEQ ID NO: 197353 - DNA, 33 bp, Homo sapien
agcatatgccttcagaagagagttcccctattt

SEQ ID NO: 197354 - DNA, 33 bp, Homo sapien
agcatatgccttcagaggagagttcccctattt

SEQ ID NO: 197355 - DNA, 33 bp, Homo sapien
ctcaatagatggcccaaaagaagtgtctggatt

SEQ ID NO: 197356 - DNA, 33 bp, Homo sapien
ctcaatagatggcccagaagaagtgtctggatt

SEQ ID NO: 197357 - DNA, 33 bp, Homo sapien
gtgggtgaagggccagcaaggtttgtctatggc

SEQ ID NO: 197358 - DNA, 33 bp, Homo sapien
gtgggtgaagggccagtaaggtttgtctatggc

SEQ ID NO: 197359 - DNA, 33 bp, Homo sapien
tagctaagtatccataagctggttatagcagtg

SEQ ID NO: 197360 - DNA, 33 bp, Homo sapien
tagctaagtatccataggctggttatagcagtg

SEQ ID NO: 197361 - DNA, 33 bp, Homo sapien
caagagattccgaatcaagccactgttcaagag

SEQ ID NO: 197362 - DNA, 33 bp, Homo sapien
caagagattccgaatcgagccactgttcaagag

SEQ ID NO: 197363 - DNA, 33 bp, Homo sapien
taaatattctggtctccatttgcatatttctaa

SEQ ID NO: 197364 - DNA, 33 bp, Homo sapien
taaatattctggtctctatttgcatatttctaa

SEQ ID NO: 197365 - DNA, 33 bp, Homo sapien
tcaaagccgttagttgaaggctaaatattctgg

SEQ ID NO: 197366 - DNA, 33 bp, Homo sapien
tcaaagccgttagttggaggctaaatattctgg

SEQ ID NO: 197367 - DNA, 33 bp, Homo sapien
acgtgccatagatccaaccctcgctggtgctgg

SEQ ID NO: 197368 - DNA, 33 bp, Homo sapien
acgtgccatagatccacccctcgctggtgctgg

SEQ ID NO: 197369 - DNA, 33 bp, Homo sapien
aaaagtggaggtatatcagaagcagtgctgatc

SEQ ID NO: 197370 - DNA, 33 bp, Homo sapien
aaaagtggaggtatatgagaagcagtgctgatc

SEQ ID NO: 197371 - DNA, 33 bp, Homo sapien
tcagatgcttcttgctcagaacagtggagggag

SEQ ID NO: 197372 - DNA, 33 bp, Homo sapien
tcagatgcttcttgctgagaacagtggagggag

SEQ ID NO: 197373 - DNA, 33 bp, Homo sapien
tgtgaagtgctggcccacgctaaggaaactgga

SEQ ID NO: 197374 - DNA, 33 bp, Homo sapien
tgtgaagtgctggcccgcgctaaggaaactgga

SEQ ID NO: 197375 - DNA, 33 bp, Homo sapien
caaatgctactcctacaaagagcagccgtagca

SEQ ID NO: 197376 - DNA, 33 bp, Homo sapien
caaatgctactcctaccaagagcagccgtagca

SEQ ID NO: 197377 - DNA, 33 bp, Homo sapien
gcccattccattactgccacggggagatagtat

SEQ ID NO: 197378 - DNA, 33 bp, Homo sapien
gcccattccattactggcacggggagatagtat

SEQ ID NO: 197379 - DNA, 33 bp, Homo sapien
gcacccttgctgctgtaaacaggaggcaaacaa

SEQ ID NO: 197380 - DNA, 33 bp, Homo sapien
gcacccttgctgctgtcaacaggaggcaaacaa

SEQ ID NO: 197381 - DNA, 33 bp, Homo sapien
actgtcctcagagtcaggtggccttccccccac

SEQ ID NO: 197382 - DNA, 33 bp, Homo sapien
actgtcctcagagtcatgtggccttccccccac

SEQ ID NO: 197383 - DNA, 33 bp, Homo sapien
aaggatgggttttaaaagcagatattaggtcca

SEQ ID NO: 197384 - DNA, 33 bp, Homo sapien
aaggatgggttttaaacgcagatattaggtcca

SEQ ID NO: 197385 - DNA, 33 bp, Homo sapien
agtgaccaggtgaaaaatgagacattcagtgca

SEQ ID NO: 197386 - DNA, 33 bp, Homo sapien
agtgaccaggtgaaaattgagacattcagtgca

SEQ ID NO: 197387 - DNA, 33 bp, Homo sapien
gaagatatcactctaaacttttatttcaaggca

SEQ ID NO: 197388 - DNA, 33 bp, Homo sapien
gaagatatcactctaagcttttatttcaaggca

SEQ ID NO: 197389 - DNA, 33 bp, Homo sapien
tgtttctataaagacacggaaactttgcaaata

SEQ ID NO: 197390 - DNA, 33 bp, Homo sapien
tgtttctataaagacatggaaactttgcaaata

SEQ ID NO: 197391 - DNA, 33 bp, Homo sapien
agagaacctggttcaaactcaattgcaatcttt

SEQ ID NO: 197392 - DNA, 33 bp, Homo sapien
agagaacctggttcaagctcaattgcaatcttt

SEQ ID NO: 197393 - DNA, 33 bp, Homo sapien
atttacattgcaagaggattcatcagaaggatc

SEQ ID NO: 197394 - DNA, 33 bp, Homo sapien
atttacattgcaagagtattcatcagaaggatc

SEQ ID NO: 197395 - DNA, 33 bp, Homo sapien
aattatcatagaaaaacaaacaaaacgacagca

SEQ ID NO: 197396 - DNA, 33 bp, Homo sapien
aattatcatagaaaaagaaacaaaacgacagca

SEQ ID NO: 197397 - DNA, 33 bp, Homo sapien
gtgagaaagaagaggcactagtctaaaaggctg

SEQ ID NO: 197398 - DNA, 33 bp, Homo sapien
gtgagaaagaagaggcgctagtctaaaaggctg

SEQ ID NO: 197399 - DNA, 33 bp, Homo sapien
ctgtctcatctctccccgcaatgcagcctttta

SEQ ID NO: 197400 - DNA, 33 bp, Homo sapien
ctgtctcatctctcccggcaatgcagcctttta

SEQ ID NO: 197401 - DNA, 33 bp, Homo sapien
ggaaaaagattgtaaacgcagatgaaataactt

SEQ ID NO: 197402 - DNA, 33 bp, Homo sapien
ggaaaaagattgtaaatgcagatgaaataactt

SEQ ID NO: 197403 - DNA, 33 bp, Homo sapien
agtcaatggaaactccaagaagggaccagaagt

SEQ ID NO: 197404 - DNA, 33 bp, Homo sapien
agtcaatggaaactccgagaagggaccagaagt

SEQ ID NO: 197405 - DNA, 33 bp, Homo sapien
ctctaacctttcctgacgcaggtcctgagaact

SEQ ID NO: 197406 - DNA, 33 bp, Homo sapien
ctctaacctttcctgatgcaggtcctgagaact

SEQ ID NO: 197407 - DNA, 33 bp, Homo sapien
cccacattttagttcacccatattcttgaggcg

SEQ ID NO: 197408 - DNA, 33 bp, Homo sapien
cccacattttagttcagccatattcttgaggcg

SEQ ID NO: 197409 - DNA, 33 bp, Homo sapien
tgcttgacttccattaacatttttttcagagat

SEQ ID NO: 197410 - DNA, 33 bp, Homo sapien
tgcttgacttccattagcatttttttcagagat

SEQ ID NO: 197411 - DNA, 33 bp, Homo sapien
gactgattaggatagacaggaaagggcaaattt

SEQ ID NO: 197412 - DNA, 33 bp, Homo sapien
gactgattaggatagataggaaagggcaaattt

SEQ ID NO: 197413 - DNA, 33 bp, Homo sapien
tatacaactctaagaacggccagattgttgagg

SEQ ID NO: 197414 - DNA, 33 bp, Homo sapien
tatacaactctaagaatggccagattgttgagg

SEQ ID NO: 197415 - DNA, 33 bp, Homo sapien
cattaaaacctaatcacctttactcctctcaat

SEQ ID NO: 197416 - DNA, 33 bp, Homo sapien
cattaaaacctaatcatctttactcctctcaat

SEQ ID NO: 197417 - DNA, 33 bp, Homo sapien
aggcctgagtttcatacggaaagggctgtgttt

SEQ ID NO: 197418 - DNA, 33 bp, Homo sapien
aggcctgagtttcatatggaaagggctgtgttt

SEQ ID NO: 197419 - DNA, 33 bp, Homo sapien
agagagatttcaacgaagtagtggagttgaaaa

SEQ ID NO: 197420 - DNA, 33 bp, Homo sapien
agagagatttcaacgaggtagtggagttgaaaa

SEQ ID NO: 197421 - DNA, 33 bp, Homo sapien
catgtgatatggaagaaaggtcagtgggcaggg

SEQ ID NO: 197422 - DNA, 33 bp, Homo sapien
catgtgatatggaagagaggtcagtgggcaggg

SEQ ID NO: 197423 - DNA, 33 bp, Homo sapien
aagttgtactcagaagcaaaaacaaagaggaag

SEQ ID NO: 197424 - DNA, 33 bp, Homo sapien
aagttgtactcagaaggaaaaacaaagaggaag

SEQ ID NO: 197425 - DNA, 33 bp, Homo sapien
agcaaagcatcaaaaaatcctgttccatttgag

SEQ ID NO: 197426 - DNA, 33 bp, Homo sapien
agcaaagcatcaaaaactcctgttccatttgag

SEQ ID NO: 197427 - DNA, 33 bp, Homo sapien
tcctgtacttactacccctatgacacttgtgtt

SEQ ID NO: 197428 - DNA, 33 bp, Homo sapien
tcctgtacttactacctctatgacacttgtgtt

SEQ ID NO: 197429 - DNA, 33 bp, Homo sapien
attaataatcagaagaaggccaattaaaaccac

SEQ ID NO: 197430 - DNA, 33 bp, Homo sapien
attaataatcagaagatggccaattaaaaccac

SEQ ID NO: 197431 - DNA, 33 bp, Homo sapien
ggctgcctcgccgccccgacttcccagcgccgg

SEQ ID NO: 197432 - DNA, 33 bp, Homo sapien
ggctgcctcgccgcccggacttcccagcgccgg

SEQ ID NO: 197433 - DNA, 33 bp, Homo sapien
taataagggcaattcgcatttctcataccattt

SEQ ID NO: 197434 - DNA, 33 bp, Homo sapien
taataagggcaattcgtatttctcataccattt

SEQ ID NO: 197435 - DNA, 33 bp, Homo sapien
ctggataacagaagagaatgggagtgacatgtt

SEQ ID NO: 197436 - DNA, 33 bp, Homo sapien
ctggataacagaagaggatgggagtgacatgtt

SEQ ID NO: 197437 - DNA, 33 bp, Homo sapien
ctggatggatatgacaataacaatgacatcact

SEQ ID NO: 197438 - DNA, 33 bp, Homo sapien
ctggatggatatgacagtaacaatgacatcact

SEQ ID NO: 197439 - DNA, 33 bp, Homo sapien
tcttagttcaaaagcacaattgtaaaatcccaa

SEQ ID NO: 197440 - DNA, 33 bp, Homo sapien
tcttagttcaaaagcataattgtaaaatcccaa

SEQ ID NO: 197441 - DNA, 33 bp, Homo sapien
tgacataatcttaatacaagtgaggtactagaa

SEQ ID NO: 197442 - DNA, 33 bp, Homo sapien
tgacataatcttaatagaagtgaggtactagaa

SEQ ID NO: 197443 - DNA, 33 bp, Homo sapien
aaaaggactttggttgaaattatccaaattatg

SEQ ID NO: 197444 - DNA, 33 bp, Homo sapien
aaaaggactttggttggaattatccaaattatg

SEQ ID NO: 197445 - DNA, 33 bp, Homo sapien
agcaatgcttttattcacctcctcaacaggcaa

SEQ ID NO: 197446 - DNA, 33 bp, Homo sapien
agcaatgcttttattcccctcctcaacaggcaa

SEQ ID NO: 197447 - DNA, 33 bp, Homo sapien
gtttgaagttatcacaataagtactcaaatatg

SEQ ID NO: 197448 - DNA, 33 bp, Homo sapien
gtttgaagttatcacagtaagtactcaaatatg

SEQ ID NO: 197449 - DNA, 33 bp, Homo sapien
tgtatttacttgaagacaataattgagctttct

SEQ ID NO: 197450 - DNA, 33 bp, Homo sapien
tgtatttacttgaagataataattgagctttct

SEQ ID NO: 197451 - DNA, 33 bp, Homo sapien
tccaaaccatatcatacagtaaatacaaaagtc

SEQ ID NO: 197452 - DNA, 33 bp, Homo sapien
tccaaaccatatcatagagtaaatacaaaagtc

SEQ ID NO: 197453 - DNA, 33 bp, Homo sapien
aaaatgacatacaaggaactgcatgaaagacgt

SEQ ID NO: 197454 - DNA, 33 bp, Homo sapien
aaaatgacatacaagggactgcatgaaagacgt

SEQ ID NO: 197455 - DNA, 33 bp, Homo sapien
gtttgaccttaacgcaccagttttctcttcgtg

SEQ ID NO: 197456 - DNA, 33 bp, Homo sapien
gtttgaccttaacgcatcagttttctcttcgtg

SEQ ID NO: 197457 - DNA, 33 bp, Homo sapien
ccatcgatcctgaagacaaatggcatcaaagag

SEQ ID NO: 197458 - DNA, 33 bp, Homo sapien
ccatcgatcctgaagataaatggcatcaaagag

SEQ ID NO: 197459 - DNA, 33 bp, Homo sapien
taatcaaggtaaaatcacagtgcttgatttatg

SEQ ID NO: 197460 - DNA, 33 bp, Homo sapien
taatcaaggtaaaatcgcagtgcttgatttatg

SEQ ID NO: 197461 - DNA, 33 bp, Homo sapien
ttcacacctttgcccgcatttgtccttctaggg

SEQ ID NO: 197462 - DNA, 33 bp, Homo sapien
ttcacacctttgcccggatttgtccttctaggg

SEQ ID NO: 197463 - DNA, 33 bp, Homo sapien
tcctctggttaaatcccatctctttcttggctg

SEQ ID NO: 197464 - DNA, 33 bp, Homo sapien
tcctctggttaaatcctatctctttcttggctg

SEQ ID NO: 197465 - DNA, 33 bp, Homo sapien
gttaggatttaacgtacgagtttagggaagaca

SEQ ID NO: 197466 - DNA, 33 bp, Homo sapien
gttaggatttaacgtatgagtttagggaagaca

SEQ ID NO: 197467 - DNA, 33 bp, Homo sapien
agaagagttcacctaaaaacttccttagctctg

SEQ ID NO: 197468 - DNA, 33 bp, Homo sapien
agaagagttcacctaacaacttccttagctctg

SEQ ID NO: 197469 - DNA, 33 bp, Homo sapien
caaatcataagaaaaaagctggaaatgcattct

SEQ ID NO: 197470 - DNA, 33 bp, Homo sapien
caaatcataagaaaaaggctggaaatgcattct

SEQ ID NO: 197471 - DNA, 33 bp, Homo sapien
ttcagaacacattttcaaggtgaggacagccta

SEQ ID NO: 197472 - DNA, 33 bp, Homo sapien
ttcagaacacattttcgaggtgaggacagccta

SEQ ID NO: 197473 - DNA, 33 bp, Homo sapien
taagtgattcagttcacgtcaaacaacatttca

SEQ ID NO: 197474 - DNA, 33 bp, Homo sapien
taagtgattcagttcatgtcaaacaacatttca

SEQ ID NO: 197475 - DNA, 33 bp, Homo sapien
ggattcttacccccaaagcaactctttactatc

SEQ ID NO: 197476 - DNA, 33 bp, Homo sapien
ggattcttacccccaaggcaactctttactatc

SEQ ID NO: 197477 - DNA, 33 bp, Homo sapien
tattcaaaagcaaaaaataatctgccaattaga

SEQ ID NO: 197478 - DNA, 33 bp, Homo sapien
tattcaaaagcaaaaagtaatctgccaattaga

SEQ ID NO: 197479 - DNA, 33 bp, Homo sapien
gccaaaaccaaaaagcactgtcatgttacatta

SEQ ID NO: 197480 - DNA, 33 bp, Homo sapien
gccaaaaccaaaaagcgctgtcatgttacatta

SEQ ID NO: 197481 - DNA, 33 bp, Homo sapien
ggcacaatttagtctcaatttaatgtaacatga

SEQ ID NO: 197482 - DNA, 33 bp, Homo sapien
ggcacaatttagtctcgatttaatgtaacatga

SEQ ID NO: 197483 - DNA, 33 bp, Homo sapien
ttgtgcctatcctttaccactatcactcactca

SEQ ID NO: 197484 - DNA, 33 bp, Homo sapien
ttgtgcctatcctttatcactatcactcactca

SEQ ID NO: 197485 - DNA, 33 bp, Homo sapien
atcaaaaaattccctgaaattgatggcaaacaa

SEQ ID NO: 197486 - DNA, 33 bp, Homo sapien
atcaaaaaattccctgtaattgatggcaaacaa

SEQ ID NO: 197487 - DNA, 33 bp, Homo sapien
catacaatggtaataactctcatgtccttttat

SEQ ID NO: 197488 - DNA, 33 bp, Homo sapien
catacaatggtaataagtctcatgtccttttat

SEQ ID NO: 197489 - DNA, 33 bp, Homo sapien
attgtcttcctgtttaaactgcaaactctacgt

SEQ ID NO: 197490 - DNA, 33 bp, Homo sapien
attgtcttcctgtttagactgcaaactctacgt

SEQ ID NO: 197491 - DNA, 33 bp, Homo sapien
gaaagaaagagtttgcagagtttcttattatat

SEQ ID NO: 197492 - DNA, 33 bp, Homo sapien
gaaagaaagagtttgcggagtttcttattatat

SEQ ID NO: 197493 - DNA, 33 bp, Homo sapien
gtacacacacaaaatgaacaaatagtgggaaga

SEQ ID NO: 197494 - DNA, 33 bp, Homo sapien
gtacacacacaaaatgcacaaatagtgggaaga

SEQ ID NO: 197495 - DNA, 33 bp, Homo sapien
aattgatcattattggacaggattatatttaat

SEQ ID NO: 197496 - DNA, 33 bp, Homo sapien
aattgatcattattgggcaggattatatttaat

SEQ ID NO: 197497 - DNA, 33 bp, Homo sapien
acagatatctccagaagaacccggagctcagtt

SEQ ID NO: 197498 - DNA, 33 bp, Homo sapien
acagatatctccagaataacccggagctcagtt

SEQ ID NO: 197499 - DNA, 33 bp, Homo sapien
acaaactgcacactagaagctttctgaacactt

SEQ ID NO: 197500 - DNA, 33 bp, Homo sapien
acaaactgcacactaggagctttctgaacactt

SEQ ID NO: 197501 - DNA, 33 bp, Homo sapien
cttacatctgtcaacactggatatttttagtgg

SEQ ID NO: 197502 - DNA, 33 bp, Homo sapien
cttacatctgtcaacattggatatttttagtgg

SEQ ID NO: 197503 - DNA, 33 bp, Homo sapien
gctgtacttgtaatgaagcggatggtaactcat

SEQ ID NO: 197504 - DNA, 33 bp, Homo sapien
gctgtacttgtaatgaggcggatggtaactcat

SEQ ID NO: 197505 - DNA, 33 bp, Homo sapien
aataagaaactaagaacaatttttttgcaggaa

SEQ ID NO: 197506 - DNA, 33 bp, Homo sapien
aataagaaactaagaataatttttttgcaggaa

SEQ ID NO: 197507 - DNA, 33 bp, Homo sapien
ccattaactcgaaattcaatgggaagtggtaga

SEQ ID NO: 197508 - DNA, 33 bp, Homo sapien
ccattaactcgaaattgaatgggaagtggtaga

SEQ ID NO: 197509 - DNA, 33 bp, Homo sapien
tgggaagtggtagacactgctgtccctatggtt

SEQ ID NO: 197510 - DNA, 33 bp, Homo sapien
tgggaagtggtagacattgctgtccctatggtt

SEQ ID NO: 197511 - DNA, 33 bp, Homo sapien
gatgaaagtataatacaaataactgagaaaacc

SEQ ID NO: 197512 - DNA, 33 bp, Homo sapien
gatgaaagtataatacgaataactgagaaaacc

SEQ ID NO: 197513 - DNA, 33 bp, Homo sapien
acctgaagttcaaaaacttacagtaacagctac

SEQ ID NO: 197514 - DNA, 33 bp, Homo sapien
acctgaagttcaaaaatttacagtaacagctac

SEQ ID NO: 197515 - DNA, 33 bp, Homo sapien
tctcgttgagtcaaggcatcaaaaaagtttgta

SEQ ID NO: 197516 - DNA, 33 bp, Homo sapien
tctcgttgagtcaaggtatcaaaaaagtttgta

SEQ ID NO: 197517 - DNA, 33 bp, Homo sapien
catcattgtgaccctacactgaaatccagctca

SEQ ID NO: 197518 - DNA, 33 bp, Homo sapien
catcattgtgaccctatactgaaatccagctca

SEQ ID NO: 197519 - DNA, 33 bp, Homo sapien
cagcagagacattgaggataccattggcatcaa

SEQ ID NO: 197520 - DNA, 33 bp, Homo sapien
cagcagagacattgagtataccattggcatcaa

SEQ ID NO: 197521 - DNA, 33 bp, Homo sapien; identical to SEQ ID NO: 197519

SEQ ID NO: 197522 - DNA, 33 bp, Homo sapien; identical to SEQ ID NO: 197520

SEQ ID NO: 197523 - DNA, 33 bp, Homo sapien; identical to SEQ ID NO: 197519

SEQ ID NO: 197524 - DNA, 33 bp, Homo sapien; identical to SEQ ID NO: 197520

SEQ ID NO: 197525 - DNA, 33 bp, Homo sapien
aactatgaaaggagacaaaaatttgtgacaaag

SEQ ID NO: 197526 - DNA, 33 bp, Homo sapien
aactatgaaaggagacgaaaatttgtgacaaag

SEQ ID NO: 197527 - DNA, 33 bp, Homo sapien
acaaaagaactacagaacttggcaatttacaac

SEQ ID NO: 197528 - DNA, 33 bp, Homo sapien
acaaaagaactacagagcttggcaatttacaac

SEQ ID NO: 197529 - DNA, 33 bp, Homo sapien
atagttaactgtctcacagagtttttctttttt

SEQ ID NO: 197530 - DNA, 33 bp, Homo sapien
atagttaactgtctcatagagtttttctttttt

SEQ ID NO: 197531 - DNA, 33 bp, Homo sapien
ggtgtttggggcataccgctaccatagtgcaca

SEQ ID NO: 197532 - DNA, 33 bp, Homo sapien
ggtgtttggggcatactgctaccatagtgcaca

SEQ ID NO: 197533 - DNA, 33 bp, Homo sapien
ctcattgcaccctcgacctcaccaattcaagag

SEQ ID NO: 197534 - DNA, 33 bp, Homo sapien
ctcattgcaccctcgatctcaccaattcaagag

SEQ ID NO: 197535 - DNA, 33 bp, Homo sapien
tttcagacatctgggaatcaatacagtgcctag

SEQ ID NO: 197536 - DNA, 33 bp, Homo sapien
tttcagacatctgggagtcaatacagtgcctag

SEQ ID NO: 197537 - DNA, 33 bp, Homo sapien
aaaatcacagatagtaaaaatttggcaacctat

SEQ ID NO: 197538 - DNA, 33 bp, Homo sapien
aaaatcacagatagtacaaatttggcaacctat

SEQ ID NO: 197539 - DNA, 33 bp, Homo sapien
ccaggagtaaccactacctagacttctaacagc

SEQ ID NO: 197540 - DNA, 33 bp, Homo sapien
ccaggagtaaccactatctagacttctaacagc

SEQ ID NO: 197541 - DNA, 33 bp, Homo sapien
gggaacagtgaaaaacaaagtcctgaatgaggt

SEQ ID NO: 197542 - DNA, 33 bp, Homo sapien
gggaacagtgaaaaacgaagtcctgaatgaggt

SEQ ID NO: 197543 - DNA, 33 bp, Homo sapien
tagcattttgccacccaaggctaggcaaactag

SEQ ID NO: 197544 - DNA, 33 bp, Homo sapien
tagcattttgccacccgaggctaggcaaactag

SEQ ID NO: 197545 - DNA, 33 bp, Homo sapien
tcatctgtacctgcctaacatttacagtgggaa

SEQ ID NO: 197546 - DNA, 33 bp, Homo sapien
tcatctgtacctgcctgacatttacagtgggaa

SEQ ID NO: 197547 - DNA, 33 bp, Homo sapien
agagaaaatatctgaaacttgtatttgctcaaa

SEQ ID NO: 197548 - DNA, 33 bp, Homo sapien
agagaaaatatctgaagcttgtatttgctcaaa

SEQ ID NO: 197549 - DNA, 33 bp, Homo sapien
aggtgaccacttaggactaggggatgatcactg

SEQ ID NO: 197550 - DNA, 33 bp, Homo sapien
aggtgaccacttaggattaggggatgatcactg

SEQ ID NO: 197551 - DNA, 33 bp, Homo sapien
ctgggccttcacaatgaattataatcatttcag

SEQ ID NO: 197552 - DNA, 33 bp, Homo sapien
ctgggccttcacaatggattataatcatttcag

SEQ ID NO: 197553 - DNA, 33 bp, Homo sapien
aggtggttagaatagacgatacagaaatcgctt

SEQ ID NO: 197554 - DNA, 33 bp, Homo sapien
aggtggttagaatagatgatacagaaatcgctt

SEQ ID NO: 197555 - DNA, 33 bp, Homo sapien
ctcggaagacctttctaactctggcattctaga

SEQ ID NO: 197556 - DNA, 33 bp, Homo sapien
ctcggaagacctttctgactctggcattctaga

SEQ ID NO: 197557 - DNA, 33 bp, Homo sapien
tagtgatggagaaaccagctcagaggggttagt

SEQ ID NO: 197558 - DNA, 33 bp, Homo sapien
tagtgatggagaaaccggctcagaggggttagt

SEQ ID NO: 197559 - DNA, 33 bp, Homo sapien
tttaggaaatcattaaaaagtgcagtgaagaca

SEQ ID NO: 197560 - DNA, 33 bp, Homo sapien
tttaggaaatcattaataagtgcagtgaagaca

SEQ ID NO: 197561 - DNA, 33 bp, Homo sapien
agtggacaatgttaaaacaaatgccactgagtg

SEQ ID NO: 197562 - DNA, 33 bp, Homo sapien
agtggacaatgttaaaccaaatgccactgagtg

SEQ ID NO: 197563 - DNA, 33 bp, Homo sapien
tgataaataaatggtaagccatgttgttgttaa

SEQ ID NO: 197564 - DNA, 33 bp, Homo sapien
tgataaataaatggtaggccatgttgttgttaa

SEQ ID NO: 197565 - DNA, 33 bp, Homo sapien
tagcaagtcaggaaaccgaaaataatgatgcta

SEQ ID NO: 197566 - DNA, 33 bp, Homo sapien
tagcaagtcaggaaactgaaaataatgatgcta

SEQ ID NO: 197567 - DNA, 33 bp, Homo sapien
aagcatgattggggttaaacatctgccaccatc

SEQ ID NO: 197568 - DNA, 33 bp, Homo sapien
aagcatgattggggttgaacatctgccaccatc

SEQ ID NO: 197569 - DNA, 33 bp, Homo sapien
tattaatgccagcaaacagtctttataggatga

SEQ ID NO: 197570 - DNA, 33 bp, Homo sapien
tattaatgccagcaaagagtctttataggatga

SEQ ID NO: 197571 - DNA, 33 bp, Homo sapien
atctagatcctgcatacaaagagctcactctga

SEQ ID NO: 197572 - DNA, 33 bp, Homo sapien
atctagatcctgcatagaaagagctcactctga

SEQ ID NO: 197573 - DNA, 33 bp, Homo sapien
ctatattcccctccatcaaattaatctctgtct

SEQ ID NO: 197574 - DNA, 33 bp, Homo sapien
ctatattcccctccatgaaattaatctctgtct

SEQ ID NO: 197575 - DNA, 33 bp, Homo sapien
tggggctgaaagatgaagtaaatgtaacccaaa

SEQ ID NO: 197576 - DNA, 33 bp, Homo sapien
tggggctgaaagatgacgtaaatgtaacccaaa

SEQ ID NO: 197577 - DNA, 33 bp, Homo sapien
ttgtatgttaattataccccaaaaaatcttgtt

SEQ ID NO: 197578 - DNA, 33 bp, Homo sapien
ttgtatgttaattatatcccaaaaaatcttgtt

SEQ ID NO: 197579 - DNA, 33 bp, Homo sapien
tgtcatcttttgttaacgttttgctctaaaacc

SEQ ID NO: 197580 - DNA, 33 bp, Homo sapien
tgtcatcttttgttaatgttttgctctaaaacc

SEQ ID NO: 197581 - DNA, 33 bp, Homo sapien
ttaaaagacttttacaatgactttgacccagga

SEQ ID NO: 197582 - DNA, 33 bp, Homo sapien
ttaaaagacttttacagtgactttgacccagga

SEQ ID NO: 197583 - DNA, 33 bp, Homo sapien
ttctcctttgtaaaatcaaaatatgagattaag

SEQ ID NO: 197584 - DNA, 33 bp, Homo sapien
ttctcctttgtaaaatgaaaatatgagattaag

SEQ ID NO: 197585 - DNA, 33 bp, Homo sapien
ctctgatgtgaatgaacaagaagtgctctgagc

SEQ ID NO: 197586 - DNA, 33 bp, Homo sapien
ctctgatgtgaatgaataagaagtgctctgagc

SEQ ID NO: 197587 - DNA, 33 bp, Homo sapien
tttctctctgcttccacgtctctcacaaatctg

SEQ ID NO: 197588 - DNA, 33 bp, Homo sapien
tttctctctgcttccatgtctctcacaaatctg

SEQ ID NO: 197589 - DNA, 33 bp, Homo sapien
ctggttctgttagtgtaaagccaccagactgac

SEQ ID NO: 197590 - DNA, 33 bp, Homo sapien
ctggttctgttagtgtgaagccaccagactgac

SEQ ID NO: 197591 - DNA, 33 bp, Homo sapien
ggttgatacgacttgaatacccaaggctgagag

SEQ ID NO: 197592 - DNA, 33 bp, Homo sapien
ggttgatacgacttgagtacccaaggctgagag

SEQ ID NO: 197593 - DNA, 33 bp, Homo sapien
gaaggagccatacgaaagaagattcaatggaga

SEQ ID NO: 197594 - DNA, 33 bp, Homo sapien
gaaggagccatacgaaggaagattcaatggaga

SEQ ID NO: 197595 - DNA, 33 bp, Homo sapien
cagctaaacagattagaaaaggcttcatgaaga

SEQ ID NO: 197596 - DNA, 33 bp, Homo sapien
cagctaaacagattaggaaaggcttcatgaaga

SEQ ID NO: 197597 - DNA, 33 bp, Homo sapien
accttcagaaagcatacgtttacaaggagaaat

SEQ ID NO: 197598 - DNA, 33 bp, Homo sapien
accttcagaaagcatatgtttacaaggagaaat

SEQ ID NO: 197599 - DNA, 33 bp, Homo sapien
ccacataatgtccagcactatctggagacactg

SEQ ID NO: 197600 - DNA, 33 bp, Homo sapien
ccacataatgtccagctctatctggagacactg

SEQ ID NO: 197601 - DNA, 33 bp, Homo sapien
aaacaaaaaatgaacaaagtcaacttctgagtg

SEQ ID NO: 197602 - DNA, 33 bp, Homo sapien
aaacaaaaaatgaacagagtcaacttctgagtg

SEQ ID NO: 197603 - DNA, 33 bp, Homo sapien
tggatgagcaccagccagaaaatttagaggtgg

SEQ ID NO: 197604 - DNA, 33 bp, Homo sapien
tggatgagcaccagccggaaaatttagaggtgg

SEQ ID NO: 197605 - DNA, 33 bp, Homo sapien
ctttttcttgttgaacacgaatgcctccacctc

SEQ ID NO: 197606 - DNA, 33 bp, Homo sapien
ctttttcttgttgaacgcgaatgcctccacctc

SEQ ID NO: 197607 - DNA, 33 bp, Homo sapien
agtagtaatcaataaccccagaattcagagact

SEQ ID NO: 197608 - DNA, 33 bp, Homo sapien
agtagtaatcaataactccagaattcagagact

SEQ ID NO: 197609 - DNA, 33 bp, Homo sapien
tgatgttataccaaatcagaatatcaagttact

SEQ ID NO: 197610 - DNA, 33 bp, Homo sapien
tgatgttataccaaatgagaatatcaagttact

SEQ ID NO: 197611 - DNA, 33 bp, Homo sapien
gttgtcagtcaataaacgccacatattcaatta

SEQ ID NO: 197612 - DNA, 33 bp, Homo sapien
gttgtcagtcaataaatgccacatattcaatta

SEQ ID NO: 197613 - DNA, 33 bp, Homo sapien
caatgggcaaggatacaggaaggagtgaagaat

SEQ ID NO: 197614 - DNA, 33 bp, Homo sapien
caatgggcaaggatacgggaaggagtgaagaat

SEQ ID NO: 197615 - DNA, 33 bp, Homo sapien
cccagacaataatactgagacaccatcttttcc

SEQ ID NO: 197616 - DNA, 33 bp, Homo sapien
cccagacaataatacttagacaccatcttttcc

SEQ ID NO: 197617 - DNA, 33 bp, Homo sapien
ggatttggatggatagccctcgtgatcggacta

SEQ ID NO: 197618 - DNA, 33 bp, Homo sapien
ggatttggatggataggcctcgtgatcggacta

SEQ ID NO: 197619 - DNA, 33 bp, Homo sapien
agtgggcctagagatccgaaagaggcggtagtc

SEQ ID NO: 197620 - DNA, 33 bp, Homo sapien
agtgggcctagagatctgaaagaggcggtagtc

SEQ ID NO: 197621 - DNA, 33 bp, Homo sapien
ccagtcaatatatttgcaatttgcattttaata

SEQ ID NO: 197622 - DNA, 33 bp, Homo sapien
ccagtcaatatatttgtaatttgcattttaata

SEQ ID NO: 197623 - DNA, 33 bp, Homo sapien
aaggaatttgaagaaactaaagtagttattgta

SEQ ID NO: 197624 - DNA, 33 bp, Homo sapien
aaggaatttgaagaaattaaagtagttattgta

SEQ ID NO: 197625 - DNA, 33 bp, Homo sapien
ctgtgcccggtcttcacgtatgcattttttaaa

SEQ ID NO: 197626 - DNA, 33 bp, Homo sapien
ctgtgcccggtcttcatgtatgcattttttaaa

SEQ ID NO: 197627 - DNA, 33 bp, Homo sapien
tagtattagattataagtggagcaacaatattt

SEQ ID NO: 197628 - DNA, 33 bp, Homo sapien
tagtattagattataattggagcaacaatattt

SEQ ID NO: 197629 - DNA, 33 bp, Homo sapien
aggacatatttaatgaacaatttgttttccaat

SEQ ID NO: 197630 - DNA, 33 bp, Homo sapien
aggacatatttaatgagcaatttgttttccaat

SEQ ID NO: 197631 - DNA, 33 bp, Homo sapien
gatcagaaaagctttacgaaagagctggcgtga

SEQ ID NO: 197632 - DNA, 33 bp, Homo sapien
gatcagaaaagctttatgaaagagctggcgtga

SEQ ID NO: 197633 - DNA, 33 bp, Homo sapien
ctctgcagtgacatttgaaaggtgtcttaagag

SEQ ID NO: 197634 - DNA, 33 bp, Homo sapien
ctctgcagtgacattttaaaggtgtcttaagag

SEQ ID NO: 197635 - DNA, 33 bp, Homo sapien
atcttgccattagacaatcagaaacctgtgtag

SEQ ID NO: 197636 - DNA, 33 bp, Homo sapien
atcttgccattagacagtcagaaacctgtgtag

SEQ ID NO: 197637 - DNA, 33 bp, Homo sapien
gaccgaggagactccacgtgaaaagcactaaga

SEQ ID NO: 197638 - DNA, 33 bp, Homo sapien
gaccgaggagactccatgtgaaaagcactaaga

SEQ ID NO: 197639 - DNA, 33 bp, Homo sapien
gcaggtatgccaaacacgaaacaactcttcttg

SEQ ID NO: 197640 - DNA, 33 bp, Homo sapien
gcaggtatgccaaacatgaaacaactcttcttg

SEQ ID NO: 197641 - DNA, 33 bp, Homo sapien
tgcaatgggtgacaacactaatgatccttgaga

SEQ ID NO: 197642 - DNA, 33 bp, Homo sapien
tgcaatgggtgacaacgctaatgatccttgaga

SEQ ID NO: 197643 - DNA, 33 bp, Homo sapien
gattactgtcaatccccacttgttttcttttct

SEQ ID NO: 197644 - DNA, 33 bp, Homo sapien
gattactgtcaatccctacttgttttcttttct

SEQ ID NO: 197645 - DNA, 33 bp, Homo sapien
tgccactatgtaagcaaccatatttccaactcc

SEQ ID NO: 197646 - DNA, 33 bp, Homo sapien
tgccactatgtaagcagccatatttccaactcc

SEQ ID NO: 197647 - DNA, 33 bp, Homo sapien
tcactagaaaacccataatctccttgagtccca

SEQ ID NO: 197648 - DNA, 33 bp, Homo sapien
tcactagaaaacccattatctccttgagtccca

SEQ ID NO: 197649 - DNA, 33 bp, Homo sapien
attaggacggaaaaacagatatgcaatggaatg

SEQ ID NO: 197650 - DNA, 33 bp, Homo sapien
attaggacggaaaaactgatatgcaatggaatg

SEQ ID NO: 197651 - DNA, 33 bp, Homo sapien
tcctgtggcaggaaaactggtcaatcttaagca

SEQ ID NO: 197652 - DNA, 33 bp, Homo sapien
tcctgtggcaggaaaagtggtcaatcttaagca

SEQ ID NO: 197653 - DNA, 33 bp, Homo sapien
tttgagtgatgggtacaaaaaagagtaccaggt

SEQ ID NO: 197654 - DNA, 33 bp, Homo sapien
tttgagtgatgggtacgaaaaagagtaccaggt

SEQ ID NO: 197655 - DNA, 33 bp, Homo sapien
ctgagcactggaacacaatggcaatgtgaaacc

SEQ ID NO: 197656 - DNA, 33 bp, Homo sapien
ctgagcactggaacacgatggcaatgtgaaacc

SEQ ID NO: 197657 - DNA, 33 bp, Homo sapien
ctaaccacagtcttgcacttccagaagtttcca

SEQ ID NO: 197658 - DNA, 33 bp, Homo sapien
ctaaccacagtcttgcccttccagaagtttcca

SEQ ID NO: 197659 - DNA, 33 bp, Homo sapien
gggtattacatctgacaacagtgtagaggatgc

SEQ ID NO: 197660 - DNA, 33 bp, Homo sapien
gggtattacatctgacgacagtgtagaggatgc

SEQ ID NO: 197661 - DNA, 33 bp, Homo sapien
tttaatcagcccaaaagccttattattattccc

SEQ ID NO: 197662 - DNA, 33 bp, Homo sapien
tttaatcagcccaaaatccttattattattccc

SEQ ID NO: 197663 - DNA, 33 bp, Homo sapien
cagctattatgtaaaacgaatattggtgctgtg

SEQ ID NO: 197664 - DNA, 33 bp, Homo sapien
cagctattatgtaaaatgaatattggtgctgtg

SEQ ID NO: 197665 - DNA, 33 bp, Homo sapien
gcttctaagtagaataactcttagaaaactagt

SEQ ID NO: 197666 - DNA, 33 bp, Homo sapien
gcttctaagtagaatacctcttagaaaactagt

SEQ ID NO: 197667 - DNA, 33 bp, Homo sapien
ctagtatgcgatacaaaattactaactataacc

SEQ ID NO: 197668 - DNA, 33 bp, Homo sapien
ctagtatgcgatacaatattactaactataacc

SEQ ID NO: 197669 - DNA, 33 bp, Homo sapien
cccaggactggttgaccggtggtttattcacag

SEQ ID NO: 197670 - DNA, 33 bp, Homo sapien
cccaggactggttgactggtggtttattcacag

SEQ ID NO: 197671 - DNA, 33 bp, Homo sapien
atggctctggctgctacgtgaacggtttggaag

SEQ ID NO: 197672 - DNA, 33 bp, Homo sapien
atggctctggctgctatgtgaacggtttggaag

SEQ ID NO: 197673 - DNA, 33 bp, Homo sapien
gagctcaggagatccacgcttttcttgttcaaa

SEQ ID NO: 197674 - DNA, 33 bp, Homo sapien
gagctcaggagatccatgcttttcttgttcaaa

SEQ ID NO: 197675 - DNA, 33 bp, Homo sapien
tgcatggtagaagtccaagatttggcaaaaaga

SEQ ID NO: 197676 - DNA, 33 bp, Homo sapien
tgcatggtagaagtccgagatttggcaaaaaga

SEQ ID NO: 197677 - DNA, 33 bp, Homo sapien
tccacagttgcaagacagagaaaggagaagaag

SEQ ID NO: 197678 - DNA, 33 bp, Homo sapien
tccacagttgcaagacggagaaaggagaagaag

SEQ ID NO: 197679 - DNA, 33 bp, Homo sapien
gaacacctaagaggaaagatggttaacagacca

SEQ ID NO: 197680 - DNA, 33 bp, Homo sapien
gaacacctaagaggaaggatggttaacagacca

SEQ ID NO: 197681 - DNA, 33 bp, Homo sapien
agccaaaggattcagacagttttaagccagtta

SEQ ID NO: 197682 - DNA, 33 bp, Homo sapien
agccaaaggattcagagagttttaagccagtta

SEQ ID NO: 197683 - DNA, 33 bp, Homo sapien
gagaatttatacaaagactttcatttttcctag

SEQ ID NO: 197684 - DNA, 33 bp, Homo sapien
gagaatttatacaaagtctttcatttttcctag

SEQ ID NO: 197685 - DNA, 33 bp, Homo sapien
ccaaatcacattgacaataagtggcaaaccaat

SEQ ID NO: 197686 - DNA, 33 bp, Homo sapien
ccaaatcacattgacagtaagtggcaaaccaat

SEQ ID NO: 197687 - DNA, 33 bp, Homo sapien
tatattttggcttgtcaaaaagcaggaacaagt

SEQ ID NO: 197688 - DNA, 33 bp, Homo sapien
tatattttggcttgtcgaaaagcaggaacaagt

SEQ ID NO: 197689 - DNA, 33 bp, Homo sapien
tcaaacctttgggctacgttgtataactgcact

SEQ ID NO: 197690 - DNA, 33 bp, Homo sapien
tcaaacctttgggctatgttgtataactgcact

SEQ ID NO: 197691 - DNA, 33 bp, Homo sapien
ttgaacagaccaggaaaataatcaaaccatagg

SEQ ID NO: 197692 - DNA, 33 bp, Homo sapien
ttgaacagaccaggaagataatcaaaccatagg

SEQ ID NO: 197693 - DNA, 33 bp, Homo sapien
ggagatgccggataaacagtttctgatttcttt

SEQ ID NO: 197694 - DNA, 33 bp, Homo sapien
ggagatgccggataaatagtttctgatttcttt

SEQ ID NO: 197695 - DNA, 33 bp, Homo sapien
catacatttgctggaaatggaataaaaatacac

SEQ ID NO: 197696 - DNA, 33 bp, Homo sapien
catacatttgctggaagtggaataaaaatacac

SEQ ID NO: 197697 - DNA, 33 bp, Homo sapien
gaaaagttgacaacaaccaaaacaccaaataac

SEQ ID NO: 197698 - DNA, 33 bp, Homo sapien
gaaaagttgacaacaatcaaaacaccaaataac

SEQ ID NO: 197699 - DNA, 33 bp, Homo sapien
aagcaatgtgggaaaaggtagttagaaccataa

SEQ ID NO: 197700 - DNA, 33 bp, Homo sapien
aagcaatgtgggaaaatgtagttagaaccataa

SEQ ID NO: 197701 - DNA, 33 bp, Homo sapien
ttgtataatttgtaaacatcaatgctgatgcca

SEQ ID NO: 197702 - DNA, 33 bp, Homo sapien
ttgtataatttgtaaatatcaatgctgatgcca

SEQ ID NO: 197703 - DNA, 33 bp, Homo sapien
ttgctcttcaagttgaccttttatgatgtcttt

SEQ ID NO: 197704 - DNA, 33 bp, Homo sapien
ttgctcttcaagttgatcttttatgatgtcttt

SEQ ID NO: 197705 - DNA, 33 bp, Homo sapien
ttcccagcggcctttacaattgatgaaagtggg

SEQ ID NO: 197706 - DNA, 33 bp, Homo sapien
ttcccagcggcctttataattgatgaaagtggg

SEQ ID NO: 197707 - DNA, 33 bp, Homo sapien
ggattagaagaacctacgtatcagccgggcgca

SEQ ID NO: 197708 - DNA, 33 bp, Homo sapien
ggattagaagaacctatgtatcagccgggcgca

SEQ ID NO: 197709 - DNA, 33 bp, Homo sapien
caagaagacatcctggaagatgtggtttcatct

SEQ ID NO: 197710 - DNA, 33 bp, Homo sapien
caagaagacatcctgggagatgtggtttcatct

SEQ ID NO: 197711 - DNA, 33 bp, Homo sapien
aggtggagagtgatcaatctttcccaaaatgag

SEQ ID NO: 197712 - DNA, 33 bp, Homo sapien
aggtggagagtgatcagtctttcccaaaatgag

SEQ ID NO: 197713 - DNA, 33 bp, Homo sapien
aataaaatcatgagccaatacttcacagcagga

SEQ ID NO: 197714 - DNA, 33 bp, Homo sapien
aataaaatcatgagccgatacttcacagcagga

SEQ ID NO: 197715 - DNA, 33 bp, Homo sapien
ctgtaatttccccccaactctgagtctgagctc

SEQ ID NO: 197716 - DNA, 33 bp, Homo sapien
ctgtaatttccccccagctctgagtctgagctc

SEQ ID NO: 197717 - DNA, 33 bp, Homo sapien
agaatattcagacaatcacagacacaatggcct

SEQ ID NO: 197718 - DNA, 33 bp, Homo sapien
agaatattcagacaatgacagacacaatggcct

SEQ ID NO: 197719 - DNA, 33 bp, Homo sapien
tgcacttgaaagtagacctatcttggccgggcg

SEQ ID NO: 197720 - DNA, 33 bp, Homo sapien
tgcacttgaaagtagagctatcttggccgggcg

SEQ ID NO: 197721 - DNA, 33 bp, Homo sapien
tccatatccatggctcagacaaaaagccacatg

SEQ ID NO: 197722 - DNA, 33 bp, Homo sapien
tccatatccatggctcggacaaaaagccacatg

SEQ ID NO: 197723 - DNA, 33 bp, Homo sapien
aggattggcatgaaaagttaaagcttatagata

SEQ ID NO: 197724 - DNA, 33 bp, Homo sapien
aggattggcatgaaaatttaaagcttatagata

SEQ ID NO: 197725 - DNA, 33 bp, Homo sapien
attgatactaacaggaaagattgcctcagttgc

SEQ ID NO: 197726 - DNA, 33 bp, Homo sapien
attgatactaacaggagagattgcctcagttgc

SEQ ID NO: 197727 - DNA, 33 bp, Homo sapien
tacagcaggagggattaaagtcatcctagttcc

SEQ ID NO: 197728 - DNA, 33 bp, Homo sapien
tacagcaggagggatttaagtcatcctagttcc

SEQ ID NO: 197729 - DNA, 33 bp, Homo sapien
cacaggtttaagcacagagtaagcacttagtga

SEQ ID NO: 197730 - DNA, 33 bp, Homo sapien
cacaggtttaagcacatagtaagcacttagtga

SEQ ID NO: 197731 - DNA, 33 bp, Homo sapien
caactctgaacacctcccttctctcacacccat

SEQ ID NO: 197732 - DNA, 33 bp, Homo sapien
caactctgaacacctctcttctctcacacccat

SEQ ID NO: 197733 - DNA, 33 bp, Homo sapien
atttagtttgtttgacaaggtcatgttttccta

SEQ ID NO: 197734 - DNA, 33 bp, Homo sapien
atttagtttgtttgacgaggtcatgttttccta

SEQ ID NO: 197735 - DNA, 33 bp, Homo sapien
tacctgaaaagccttcacaaaaagaataagcac

SEQ ID NO: 197736 - DNA, 33 bp, Homo sapien
tacctgaaaagccttcccaaaaagaataagcac

SEQ ID NO: 197737 - DNA, 33 bp, Homo sapien
gcacagtgttaagcacacaatatgccctcaaaa

SEQ ID NO: 197738 - DNA, 33 bp, Homo sapien
gcacagtgttaagcacgcaatatgccctcaaaa

SEQ ID NO: 197739 - DNA, 33 bp, Homo sapien
tagttactgcgttttcacttaaatcttaccatt

SEQ ID NO: 197740 - DNA, 33 bp, Homo sapien
tagttactgcgttttcgcttaaatcttaccatt

SEQ ID NO: 197741 - DNA, 33 bp, Homo sapien
aatacaaatcaaaccaacttcatgttcattaaa

SEQ ID NO: 197742 - DNA, 33 bp, Homo sapien
aatacaaatcaaaccagcttcatgttcattaaa

SEQ ID NO: 197743 - DNA, 33 bp, Homo sapien
tcaactctagctggaaagtaacaattcactgag

SEQ ID NO: 197744 - DNA, 33 bp, Homo sapien
tcaactctagctggaacgtaacaattcactgag

SEQ ID NO: 197745 - DNA, 33 bp, Homo sapien
tcattagtacagtcacaataatccactgaccgt

SEQ ID NO: 197746 - DNA, 33 bp, Homo sapien
tcattagtacagtcacgataatccactgaccgt

SEQ ID NO: 197747 - DNA, 33 bp, Homo sapien
atgccgtgctagacaccggcttttttttttatg

SEQ ID NO: 197748 - DNA, 33 bp, Homo sapien
atgccgtgctagacactggcttttttttttatg

SEQ ID NO: 197749 - DNA, 33 bp, Homo sapien
tagttggtggggaagccaggatacactcttacg

SEQ ID NO: 197750 - DNA, 33 bp, Homo sapien
tagttggtggggaagctaggatacactcttacg

SEQ ID NO: 197751 - DNA, 33 bp, Homo sapien
cccacactaccaataaaagcagctgtgcagtag

SEQ ID NO: 197752 - DNA, 33 bp, Homo sapien
cccacactaccaataagagcagctgtgcagtag

SEQ ID NO: 197753 - DNA, 33 bp, Homo sapien
gtgatcattggtaacacataaacaaattggtat

SEQ ID NO: 197754 - DNA, 33 bp, Homo sapien
gtgatcattggtaacatataaacaaattggtat

SEQ ID NO: 197755 - DNA, 33 bp, Homo sapien
ttaacttcacaaacctcaggatgcaaattttgg

SEQ ID NO: 197756 - DNA, 33 bp, Homo sapien
ttaacttcacaaacctgaggatgcaaattttgg

SEQ ID NO: 197757 - DNA, 33 bp, Homo sapien
tatagtagcatgattacggttcattgtaacatc

SEQ ID NO: 197758 - DNA, 33 bp, Homo sapien
tatagtagcatgattatggttcattgtaacatc

SEQ ID NO: 197759 - DNA, 33 bp, Homo sapien
tggattaaggtcttaacgagggatgtctgcttg

SEQ ID NO: 197760 - DNA, 33 bp, Homo sapien
tggattaaggtcttaatgagggatgtctgcttg

SEQ ID NO: 197761 - DNA, 33 bp, Homo sapien
attcccatttctcagacgacaaaacgaagaggt

SEQ ID NO: 197762 - DNA, 33 bp, Homo sapien
attcccatttctcagatgacaaaacgaagaggt

SEQ ID NO: 197763 - DNA, 33 bp, Homo sapien
ttctgaatatctgtctcaccactagaaaatatt

SEQ ID NO: 197764 - DNA, 33 bp, Homo sapien
ttctgaatatctgtctgaccactagaaaatatt

SEQ ID NO: 197765 - DNA, 33 bp, Homo sapien
gggtgaccaacaagcaatgcaactcagttttgg

SEQ ID NO: 197766 - DNA, 33 bp, Homo sapien
gggtgaccaacaagcagtgcaactcagttttgg

SEQ ID NO: 197767 - DNA, 33 bp, Homo sapien
ggaaatagttggattccataagaagttggatag

SEQ ID NO: 197768 - DNA, 33 bp, Homo sapien
ggaaatagttggattctataagaagttggatag

SEQ ID NO: 197769 - DNA, 33 bp, Homo sapien
atgtctgatttctgacactggttctgtagcatt

SEQ ID NO: 197770 - DNA, 33 bp, Homo sapien
atgtctgatttctgaccctggttctgtagcatt

SEQ ID NO: 197771 - DNA, 33 bp, Homo sapien
tatgttatgttatgcacgttaggtgttagaaga

SEQ ID NO: 197772 - DNA, 33 bp, Homo sapien
tatgttatgttatgcatgttaggtgttagaaga

SEQ ID NO: 197773 - DNA, 33 bp, Homo sapien
aaggctcactggagaccatccaatacaatcagc

SEQ ID NO: 197774 - DNA, 33 bp, Homo sapien
aaggctcactggagactatccaatacaatcagc

SEQ ID NO: 197775 - DNA, 33 bp, Homo sapien
gaaccaaatttgaaaacggtagcaggaataagc

SEQ ID NO: 197776 - DNA, 33 bp, Homo sapien
gaaccaaatttgaaaatggtagcaggaataagc

SEQ ID NO: 197777 - DNA, 33 bp, Homo sapien
tacatgttcttacccacgctttacaaaagagca

SEQ ID NO: 197778 - DNA, 33 bp, Homo sapien
tacatgttcttacccatgctttacaaaagagca

SEQ ID NO: 197779 - DNA, 33 bp, Homo sapien
aaggactaagtgtggcaccaaggtttgccttta

SEQ ID NO: 197780 - DNA, 33 bp, Homo sapien
aaggactaagtgtggcgccaaggtttgccttta

SEQ ID NO: 197781 - DNA, 33 bp, Homo sapien
atggaaggacaagacaaacccacaatctactaa

SEQ ID NO: 197782 - DNA, 33 bp, Homo sapien
atggaaggacaagacagacccacaatctactaa

SEQ ID NO: 197783 - DNA, 33 bp, Homo sapien
tctccggaaatccttaagtgcattttggagata

SEQ ID NO: 197784 - DNA, 33 bp, Homo sapien
tctccggaaatccttatgtgcattttggagata

SEQ ID NO: 197785 - DNA, 33 bp, Homo sapien
aggaagaggcgctggaaggagacgggtccctgg

SEQ ID NO: 197786 - DNA, 33 bp, Homo sapien
aggaagaggcgctggagggagacgggtccctgg

SEQ ID NO: 197787 - DNA, 33 bp, Homo sapien
aatcctatgcaggcatgaagttagaagctacct

SEQ ID NO: 197788 - DNA, 33 bp, Homo sapien
aatcctatgcaggcattaagttagaagctacct

SEQ ID NO: 197789 - DNA, 33 bp, Homo sapien
ggtctgagctgtgggaactccttagtgtatttc

SEQ ID NO: 197790 - DNA, 33 bp, Homo sapien
ggtctgagctgtgggatctccttagtgtatttc

SEQ ID NO: 197791 - DNA, 33 bp, Homo sapien
caaccttaatatgtcaaataaaagtaaatgcaa

SEQ ID NO: 197792 - DNA, 33 bp, Homo sapien
caaccttaatatgtcacataaaagtaaatgcaa

SEQ ID NO: 197793 - DNA, 33 bp, Homo sapien
tagagaaggcctgcacccctgagcaaattgtat

SEQ ID NO: 197794 - DNA, 33 bp, Homo sapien
tagagaaggcctgcactcctgagcaaattgtat

SEQ ID NO: 197795 - DNA, 33 bp, Homo sapien
agcactcactgggtcacctgaacacccgcctct

SEQ ID NO: 197796 - DNA, 33 bp, Homo sapien
agcactcactgggtcatctgaacacccgcctct

SEQ ID NO: 197797 - DNA, 33 bp, Homo sapien
tacaggcaaactgtacaacaaagatgatgctat

SEQ ID NO: 197798 - DNA, 33 bp, Homo sapien
tacaggcaaactgtacgacaaagatgatgctat

SEQ ID NO: 197799 - DNA, 33 bp, Homo sapien
agcaagggtggttctcaacactgtttcaaacag

SEQ ID NO: 197800 - DNA, 33 bp, Homo sapien
agcaagggtggttctccacactgtttcaaacag

SEQ ID NO: 197801 - DNA, 33 bp, Homo sapien
gagaagtgctagaaccagaagtggctactctcc

SEQ ID NO: 197802 - DNA, 33 bp, Homo sapien
gagaagtgctagaaccggaagtggctactctcc

SEQ ID NO: 197803 - DNA, 33 bp, Homo sapien
agcaaggagggctgaaaaacgacaatgttcttt

SEQ ID NO: 197804 - DNA, 33 bp, Homo sapien
agcaaggagggctgaagaacgacaatgttcttt

SEQ ID NO: 197805 - DNA, 33 bp, Homo sapien
aaaaaactttagtcaacatctcgtgtttcattt

SEQ ID NO: 197806 - DNA, 33 bp, Homo sapien
aaaaaactttagtcaatatctcgtgtttcattt

SEQ ID NO: 197807 - DNA, 33 bp, Homo sapien
ttcccccatatatgtacacgaacacccaccagg

SEQ ID NO: 197808 - DNA, 33 bp, Homo sapien
ttcccccatatatgtatacgaacacccaccagg

SEQ ID NO: 197809 - DNA, 33 bp, Homo sapien
aaagttacaatagcaacaagtactccccagttc

SEQ ID NO: 197810 - DNA, 33 bp, Homo sapien
aaagttacaatagcaagaagtactccccagttc

SEQ ID NO: 197811 - DNA, 33 bp, Homo sapien
aagaaaatgaaaaataaaacggcaacagcaaaa

SEQ ID NO: 197812 - DNA, 33 bp, Homo sapien
aagaaaatgaaaaatagaacggcaacagcaaaa

SEQ ID NO: 197813 - DNA, 33 bp, Homo sapien
gagccaggtggtctaacagcagatacaaggccc

SEQ ID NO: 197814 - DNA, 33 bp, Homo sapien
gagccaggtggtctaagagcagatacaaggccc

SEQ ID NO: 197815 - DNA, 33 bp, Homo sapien
ccacccagaactgacactggctatggtgcagga

SEQ ID NO: 197816 - DNA, 33 bp, Homo sapien
ccacccagaactgacattggctatggtgcagga

SEQ ID NO: 197817 - DNA, 33 bp, Homo sapien
tccatgatttggaaacgaagagattcgctcctg

SEQ ID NO: 197818 - DNA, 33 bp, Homo sapien
tccatgatttggaaactaagagattcgctcctg

SEQ ID NO: 197819 - DNA, 33 bp, Homo sapien
acttcagctttaccgacgctctttttatctggc

SEQ ID NO: 197820 - DNA, 33 bp, Homo sapien
acttcagctttaccgatgctctttttatctggc

SEQ ID NO: 197821 - DNA, 33 bp, Homo sapien
ctacctttctccgtgcaaaaatcaatacacagg

SEQ ID NO: 197822 - DNA, 33 bp, Homo sapien
ctacctttctccgtgctaaaatcaatacacagg

SEQ ID NO: 197823 - DNA, 33 bp, Homo sapien
tattaatagtggggaaaagtttgataactatga

SEQ ID NO: 197824 - DNA, 33 bp, Homo sapien
tattaatagtggggaagagtttgataactatga

SEQ ID NO: 197825 - DNA, 33 bp, Homo sapien
aaggagtgcttcctacaatcatgcagaggaaat

SEQ ID NO: 197826 - DNA, 33 bp, Homo sapien
aaggagtgcttcctaccatcatgcagaggaaat

SEQ ID NO: 197827 - DNA, 33 bp, Homo sapien
caattttctccaataacagtttgcaaccattct

SEQ ID NO: 197828 - DNA, 33 bp, Homo sapien
caattttctccaataagagtttgcaaccattct

SEQ ID NO: 197829 - DNA, 33 bp, Homo sapien
gtggccagaaaaacaaacccaagagcagaaagt

SEQ ID NO: 197830 - DNA, 33 bp, Homo sapien
gtggccagaaaaacaagcccaagagcagaaagt

SEQ ID NO: 197831 - DNA, 33 bp, Homo sapien
gttgggaggtaggcatcaaccagaccacacaga

SEQ ID NO: 197832 - DNA, 33 bp, Homo sapien
gttgggaggtaggcatgaaccagaccacacaga

SEQ ID NO: 197833 - DNA, 33 bp, Homo sapien
aggatttatagatgaaatgtggcattggctgag

SEQ ID NO: 197834 - DNA, 33 bp, Homo sapien
aggatttatagatgaagtgtggcattggctgag

SEQ ID NO: 197835 - DNA, 33 bp, Homo sapien
acaaaagcccaaactccaggcaacagctgaaga

SEQ ID NO: 197836 - DNA, 33 bp, Homo sapien
acaaaagcccaaactcgaggcaacagctgaaga

SEQ ID NO: 197837 - DNA, 33 bp, Homo sapien
agtgatcaggatgaaaggctgccatcaataata

SEQ ID NO: 197838 - DNA, 33 bp, Homo sapien
agtgatcaggatgaaatgctgccatcaataata

SEQ ID NO: 197839 - DNA, 33 bp, Homo sapien
tctggacaggactacaagttaaccattcccatt

SEQ ID NO: 197840 - DNA, 33 bp, Homo sapien
tctggacaggactacatgttaaccattcccatt

SEQ ID NO: 197841 - DNA, 33 bp, Homo sapien
ctctgttactgttgaacatttgctaggcttcca

SEQ ID NO: 197842 - DNA, 33 bp, Homo sapien
ctctgttactgttgaatatttgctaggcttcca

SEQ ID NO: 197843 - DNA, 33 bp, Homo sapien
acaatagctgagagaaatatacctacaattatt

SEQ ID NO: 197844 - DNA, 33 bp, Homo sapien
acaatagctgagagaagtatacctacaattatt

SEQ ID NO: 197845 - DNA, 33 bp, Homo sapien
tacttaattaacagaagtggcaggtggttggaa

SEQ ID NO: 197846 - DNA, 33 bp, Homo sapien
tacttaattaacagaattggcaggtggttggaa

SEQ ID NO: 197847 - DNA, 33 bp, Homo sapien
aaacaacacaaatacaggaaagccatttactcc

SEQ ID NO: 197848 - DNA, 33 bp, Homo sapien
aaacaacacaaatacatgaaagccatttactcc

SEQ ID NO: 197849 - DNA, 33 bp, Homo sapien
gagactggttgaataacgggaaggttaaatgca

SEQ ID NO: 197850 - DNA, 33 bp, Homo sapien
gagactggttgaataatgggaaggttaaatgca

SEQ ID NO: 197851 - DNA, 33 bp, Homo sapien
atgcagtattttcttgcagagtatgaaccttgc

SEQ ID NO: 197852 - DNA, 33 bp, Homo sapien
atgcagtattttcttgtagagtatgaaccttgc

SEQ ID NO: 197853 - DNA, 33 bp, Homo sapien
gtatttgtgaagtggaaatgcagtattttcttg

SEQ ID NO: 197854 - DNA, 33 bp, Homo sapien
gtatttgtgaagtggatatgcagtattttcttg

SEQ ID NO: 197855 - DNA, 33 bp, Homo sapien
agatgatgaaggctcaaactaaagcagtctgta

SEQ ID NO: 197856 - DNA, 33 bp, Homo sapien
agatgatgaaggctcagactaaagcagtctgta

SEQ ID NO: 197857 - DNA, 33 bp, Homo sapien
acacattcgaactgcaagtagcatctctaaaca

SEQ ID NO: 197858 - DNA, 33 bp, Homo sapien
acacattcgaactgcatgtagcatctctaaaca

SEQ ID NO: 197859 - DNA, 33 bp, Homo sapien
cacgtacccactatgaccagaacgagctctctt

SEQ ID NO: 197860 - DNA, 33 bp, Homo sapien
cacgtacccactatgatcagaacgagctctctt

SEQ ID NO: 197861 - DNA, 33 bp, Homo sapien
aaagtttgagaaccgacgtccagtgaagtagac

SEQ ID NO: 197862 - DNA, 33 bp, Homo sapien
aaagtttgagaaccgatgtccagtgaagtagac

SEQ ID NO: 197863 - DNA, 33 bp, Homo sapien
tgggtacgttacttcacgaaaccctcagggaag

SEQ ID NO: 197864 - DNA, 33 bp, Homo sapien
tgggtacgttacttcatgaaaccctcagggaag

SEQ ID NO: 197865 - DNA, 33 bp, Homo sapien
tctgcagcatttccagacagaagatacttgtga

SEQ ID NO: 197866 - DNA, 33 bp, Homo sapien
tctgcagcatttccaggcagaagatacttgtga

SEQ ID NO: 197867 - DNA, 33 bp, Homo sapien
ctaaaggtagagaactaaaccagctttttgatg

SEQ ID NO: 197868 - DNA, 33 bp, Homo sapien
ctaaaggtagagaactgaaccagctttttgatg

SEQ ID NO: 197869 - DNA, 33 bp, Homo sapien
tgctctttctgctttaaatattgaagtcctctt

SEQ ID NO: 197870 - DNA, 33 bp, Homo sapien
tgctctttctgctttacatattgaagtcctctt

SEQ ID NO: 197871 - DNA, 33 bp, Homo sapien
tattcacaaatgaccaactaacttggggatcag

SEQ ID NO: 197872 - DNA, 33 bp, Homo sapien
tattcacaaatgaccagctaacttggggatcag

SEQ ID NO: 197873 - DNA, 33 bp, Homo sapien
gcagttgagataataacatttttgcctcattac

SEQ ID NO: 197874 - DNA, 33 bp, Homo sapien
gcagttgagataataatatttttgcctcattac

SEQ ID NO: 197875 - DNA, 33 bp, Homo sapien
gtattatttcaagatggaagtccccttattgag

SEQ ID NO: 197876 - DNA, 33 bp, Homo sapien
gtattatttcaagatgtaagtccccttattgag

SEQ ID NO: 197877 - DNA, 33 bp, Homo sapien
atttcacaggcccatcaactatatgagagttct

SEQ ID NO: 197878 - DNA, 33 bp, Homo sapien
atttcacaggcccatcgactatatgagagttct

SEQ ID NO: 197879 - DNA, 33 bp, Homo sapien
gagccataaagatagcacaagctagtaccaagc

SEQ ID NO: 197880 - DNA, 33 bp, Homo sapien
gagccataaagatagcgcaagctagtaccaagc

SEQ ID NO: 197881 - DNA, 33 bp, Homo sapien
acaggattgagcaataagagaacagctaggtat

SEQ ID NO: 197882 - DNA, 33 bp, Homo sapien
acaggattgagcaatacgagaacagctaggtat

SEQ ID NO: 197883 - DNA, 33 bp, Homo sapien
agaagggtcctgattacagacagtcggtttcgc

SEQ ID NO: 197884 - DNA, 33 bp, Homo sapien
agaagggtcctgattatagacagtcggtttcgc

SEQ ID NO: 197885 - DNA, 33 bp, Homo sapien
aactgatgtcagtgacaaaggagctgtctttca

SEQ ID NO: 197886 - DNA, 33 bp, Homo sapien
aactgatgtcagtgacgaaggagctgtctttca

SEQ ID NO: 197887 - DNA, 33 bp, Homo sapien
cacaccaatctgtgcaaaggccaaaataaaatt

SEQ ID NO: 197888 - DNA, 33 bp, Homo sapien
cacaccaatctgtgcagaggccaaaataaaatt

SEQ ID NO: 197889 - DNA, 33 bp, Homo sapien
acatacaatttacctacacaacaagcctacaca

SEQ ID NO: 197890 - DNA, 33 bp, Homo sapien
acatacaatttacctatacaacaagcctacaca

SEQ ID NO: 197891 - DNA, 33 bp, Homo sapien
tcaacctgcattgtaactcagctagcagcagga

SEQ ID NO: 197892 - DNA, 33 bp, Homo sapien
tcaacctgcattgtaattcagctagcagcagga

SEQ ID NO: 197893 - DNA, 33 bp, Homo sapien
gttacttgtagtaaccaaactacactacactag

SEQ ID NO: 197894 - DNA, 33 bp, Homo sapien
gttacttgtagtaacccaactacactacactag

SEQ ID NO: 197895 - DNA, 33 bp, Homo sapien
tcatatacctattagtgacctgtatctcttctt

SEQ ID NO: 197896 - DNA, 33 bp, Homo sapien
tcatatacctattagttacctgtatctcttctt

SEQ ID NO: 197897 - DNA, 33 bp, Homo sapien
tttcaccaactcttcaacctgtaaaaggaccgc

SEQ ID NO: 197898 - DNA, 33 bp, Homo sapien
tttcaccaactcttcagcctgtaaaaggaccgc

SEQ ID NO: 197899 - DNA, 33 bp, Homo sapien
aaactatttattcagaagccataactgaccatg

SEQ ID NO: 197900 - DNA, 33 bp, Homo sapien
aaactatttattcagaggccataactgaccatg

SEQ ID NO: 197901 - DNA, 33 bp, Homo sapien
tcaccttgtcaaaaccaattgaatgactctggc

SEQ ID NO: 197902 - DNA, 33 bp, Homo sapien
tcaccttgtcaaaacccattgaatgactctggc

SEQ ID NO: 197903 - DNA, 33 bp, Homo sapien
agcctcaaatacccaaccaagatgtttcctgag

SEQ ID NO: 197904 - DNA, 33 bp, Homo sapien
agcctcaaatacccaatcaagatgtttcctgag

SEQ ID NO: 197905 - DNA, 33 bp, Homo sapien
gggtctcctgttgccaagattccagaggtctgt

SEQ ID NO: 197906 - DNA, 33 bp, Homo sapien
gggtctcctgttgccaggattccagaggtctgt

SEQ ID NO: 197907 - DNA, 33 bp, Homo sapien
ttatcaatgaatgacaactacctatgtgttctt

SEQ ID NO: 197908 - DNA, 33 bp, Homo sapien
ttatcaatgaatgacagctacctatgtgttctt

SEQ ID NO: 197909 - DNA, 33 bp, Homo sapien
ctgccttaaccaatgacagtccaccacaaaaga

SEQ ID NO: 197910 - DNA, 33 bp, Homo sapien
ctgccttaaccaatgatagtccaccacaaaaga

SEQ ID NO: 197911 - DNA, 33 bp, Homo sapien
agcagagcacatctccccacatatacaagcatt

SEQ ID NO: 197912 - DNA, 33 bp, Homo sapien
agcagagcacatctcctcacatatacaagcatt

SEQ ID NO: 197913 - DNA, 33 bp, Homo sapien
cccctttccagcttcaaattatcccacctttcc

SEQ ID NO: 197914 - DNA, 33 bp, Homo sapien
cccctttccagcttcatattatcccacctttcc

SEQ ID NO: 197915 - DNA, 33 bp, Homo sapien
aaaataaacattttgcagaaatttatggaggtt

SEQ ID NO: 197916 - DNA, 33 bp, Homo sapien
aaaataaacattttgcggaaatttatggaggtt

SEQ ID NO: 197917 - DNA, 33 bp, Homo sapien
cttccggtttcttccactaaagcattcacctcc

SEQ ID NO: 197918 - DNA, 33 bp, Homo sapien
cttccggtttcttccattaaagcattcacctcc

SEQ ID NO: 197919 - DNA, 33 bp, Homo sapien
agccttaactgctgggaatttgagaagtctcag

SEQ ID NO: 197920 - DNA, 33 bp, Homo sapien
agccttaactgctgggcatttgagaagtctcag

SEQ ID NO: 197921 - DNA, 33 bp, Homo sapien
cttcactggcccctacaaaatgttaactaatct

SEQ ID NO: 197922 - DNA, 33 bp, Homo sapien
cttcactggcccctaccaaatgttaactaatct

SEQ ID NO: 197923 - DNA, 33 bp, Homo sapien
aactatttatctcaatgatcttgaaatcctttt

SEQ ID NO: 197924 - DNA, 33 bp, Homo sapien
aactatttatctcaattatcttgaaatcctttt

SEQ ID NO: 197925 - DNA, 33 bp, Homo sapien
aaaactttttagaaacaacacaagctctggaga

SEQ ID NO: 197926 - DNA, 33 bp, Homo sapien
aaaactttttagaaactacacaagctctggaga

SEQ ID NO: 197927 - DNA, 33 bp, Homo sapien
ggagaccataaaggaaaatggaatgattactaa

SEQ ID NO: 197928 - DNA, 33 bp, Homo sapien
ggagaccataaaggaagatggaatgattactaa

SEQ ID NO: 197929 - DNA, 33 bp, Homo sapien
atcttccccgactgaacggcaaggggcattagt

SEQ ID NO: 197930 - DNA, 33 bp, Homo sapien
atcttccccgactgaatggcaaggggcattagt

SEQ ID NO: 197931 - DNA, 33 bp, Homo sapien
tctaggagaaaataaccgaaaatagcgcctctc

SEQ ID NO: 197932 - DNA, 33 bp, Homo sapien
tctaggagaaaataactgaaaatagcgcctctc

SEQ ID NO: 197933 - DNA, 33 bp, Homo sapien
gtacatgggggtatgaagttgacgattcagcct

SEQ ID NO: 197934 - DNA, 33 bp, Homo sapien
gtacatgggggtatgacgttgacgattcagcct

SEQ ID NO: 197935 - DNA, 33 bp, Homo sapien
agcccactgctctacaaggtcatcatgtcccct

SEQ ID NO: 197936 - DNA, 33 bp, Homo sapien
agcccactgctctacagggtcatcatgtcccct

SEQ ID NO: 197937 - DNA, 33 bp, Homo sapien
aatccaccaatgacaaaaatcaaaagctcatca

SEQ ID NO: 197938 - DNA, 33 bp, Homo sapien
aatccaccaatgacaagaatcaaaagctcatca

SEQ ID NO: 197939 - DNA, 33 bp, Homo sapien
aggaacaatgaagtaaaaaatgctctgatgaaa

SEQ ID NO: 197940 - DNA, 33 bp, Homo sapien
aggaacaatgaagtaagaaatgctctgatgaaa

SEQ ID NO: 197941 - DNA, 33 bp, Homo sapien
ctcttgctccaccttcaaccttcaaaattttaa

SEQ ID NO: 197942 - DNA, 33 bp, Homo sapien
ctcttgctccaccttctaccttcaaaattttaa

SEQ ID NO: 197943 - DNA, 33 bp, Homo sapien
atggcaatggtgattccagattgtctctcctgg

SEQ ID NO: 197944 - DNA, 33 bp, Homo sapien
atggcaatggtgattctagattgtctctcctgg

SEQ ID NO: 197945 - DNA, 33 bp, Homo sapien
caactcttagattttcacatttgaagctattgt

SEQ ID NO: 197946 - DNA, 33 bp, Homo sapien
caactcttagattttcgcatttgaagctattgt

SEQ ID NO: 197947 - DNA, 33 bp, Homo sapien
tagttcaggctggtcaacagtgttatttaaatt

SEQ ID NO: 197948 - DNA, 33 bp, Homo sapien
tagttcaggctggtcatcagtgttatttaaatt

SEQ ID NO: 197949 - DNA, 33 bp, Homo sapien
gaatgacagtatcgtgcacaactttatgctaat

SEQ ID NO: 197950 - DNA, 33 bp, Homo sapien
gaatgacagtatcgtgtacaactttatgctaat

SEQ ID NO: 197951 - DNA, 33 bp, Homo sapien
tcattttctgtcactacgagttcttccaggctc

SEQ ID NO: 197952 - DNA, 33 bp, Homo sapien
tcattttctgtcactatgagttcttccaggctc

SEQ ID NO: 197953 - DNA, 33 bp, Homo sapien
ttatttatgattgcaaaaatttgaaagcaaaca

SEQ ID NO: 197954 - DNA, 33 bp, Homo sapien
ttatttatgattgcaagaatttgaaagcaaaca

SEQ ID NO: 197955 - DNA, 33 bp, Homo sapien
agattttatctacctcaagggtcctatccagca

SEQ ID NO: 197956 - DNA, 33 bp, Homo sapien
agattttatctacctcgagggtcctatccagca

SEQ ID NO: 197957 - DNA, 33 bp, Homo sapien
tagccacaatagaagaggggatgagtgtcttag

SEQ ID NO: 197958 - DNA, 33 bp, Homo sapien
tagccacaatagaagatgggatgagtgtcttag

SEQ ID NO: 197959 - DNA, 33 bp, Homo sapien
caatatttcaagagaacccttgtctcaaagaaa

SEQ ID NO: 197960 - DNA, 33 bp, Homo sapien
caatatttcaagagaatccttgtctcaaagaaa

SEQ ID NO: 197961 - DNA, 33 bp, Homo sapien
gagcaataacaaatgcaaatcagagaaccattt

SEQ ID NO: 197962 - DNA, 33 bp, Homo sapien
gagcaataacaaatgcgaatcagagaaccattt

SEQ ID NO: 197963 - DNA, 33 bp, Homo sapien
accgtatttcatgttgcatatttatgaagactg

SEQ ID NO: 197964 - DNA, 33 bp, Homo sapien
accgtatttcatgttgtatatttatgaagactg

SEQ ID NO: 197965 - DNA, 33 bp, Homo sapien
aaattaaatctctgaggataccgagagcccaga

SEQ ID NO: 197966 - DNA, 33 bp, Homo sapien
aaattaaatctctgagtataccgagagcccaga

SEQ ID NO: 197967 - DNA, 33 bp, Homo sapien
agtgtaaaatgaatgaaaaatgttggattaaaa

SEQ ID NO: 197968 - DNA, 33 bp, Homo sapien
agtgtaaaatgaatgagaaatgttggattaaaa

SEQ ID NO: 197969 - DNA, 33 bp, Homo sapien
gaataccagattgttacaaaatttcaagcatct

SEQ ID NO: 197970 - DNA, 33 bp, Homo sapien
gaataccagattgttataaaatttcaagcatct

SEQ ID NO: 197971 - DNA, 33 bp, Homo sapien
tcagctagcttttggaactcccacaaagatatt

SEQ ID NO: 197972 - DNA, 33 bp, Homo sapien
tcagctagcttttggatctcccacaaagatatt

SEQ ID NO: 197973 - DNA, 33 bp, Homo sapien
ggaaaaaaaatcacaactgagaggactcagcag

SEQ ID NO: 197974 - DNA, 33 bp, Homo sapien
ggaaaaaaaatcacaattgagaggactcagcag

SEQ ID NO: 197975 - DNA, 33 bp, Homo sapien
atccagaagccataacgaacttaaacaaattta

SEQ ID NO: 197976 - DNA, 33 bp, Homo sapien
atccagaagccataactaacttaaacaaattta

SEQ ID NO: 197977 - DNA, 33 bp, Homo sapien
ataaacaatgaaattacggcagaaataaataaa

SEQ ID NO: 197978 - DNA, 33 bp, Homo sapien
ataaacaatgaaattatggcagaaataaataaa

SEQ ID NO: 197979 - DNA, 33 bp, Homo sapien
aatagtactttagagacaatcaaatcccacccc

SEQ ID NO: 197980 - DNA, 33 bp, Homo sapien
aatagtactttagagataatcaaatcccacccc

SEQ ID NO: 197981 - DNA, 33 bp, Homo sapien
aaattctacaactagacctggttggatcagtat

SEQ ID NO: 197982 - DNA, 33 bp, Homo sapien
aaattctacaactagagctggttggatcagtat

SEQ ID NO: 197983 - DNA, 33 bp, Homo sapien
tttggtgtcaattgaaactaccagtattctaat

SEQ ID NO: 197984 - DNA, 33 bp, Homo sapien
tttggtgtcaattgaacctaccagtattctaat

SEQ ID NO: 197985 - DNA, 33 bp, Homo sapien
gctatgtaacaaatgcagaagtgtggtagcata

SEQ ID NO: 197986 - DNA, 33 bp, Homo sapien
gctatgtaacaaatgccgaagtgtggtagcata

SEQ ID NO: 197987 - DNA, 33 bp, Homo sapien
atccttgatatacccacgtcaatcttacaaaag

SEQ ID NO: 197988 - DNA, 33 bp, Homo sapien
atccttgatatacccatgtcaatcttacaaaag

SEQ ID NO: 197989 - DNA, 33 bp, Homo sapien
tcagtgccaatgaaaaacagttaaggcaactca

SEQ ID NO: 197990 - DNA, 33 bp, Homo sapien
tcagtgccaatgaaaagcagttaaggcaactca

SEQ ID NO: 197991 - DNA, 33 bp, Homo sapien
gtttcagggtctacctcaagcttagttcagttc

SEQ ID NO: 197992 - DNA, 33 bp, Homo sapien
gtttcagggtctaccttaagcttagttcagttc

SEQ ID NO: 197993 - DNA, 33 bp, Homo sapien
gaaaacaaacggagaccgctacctggctgggaa

SEQ ID NO: 197994 - DNA, 33 bp, Homo sapien
gaaaacaaacggagactgctacctggctgggaa

SEQ ID NO: 197995 - DNA, 33 bp, Homo sapien
aaccgagttctaaagcaaataaggacttttcca

SEQ ID NO: 197996 - DNA, 33 bp, Homo sapien
aaccgagttctaaagcgaataaggacttttcca

SEQ ID NO: 197997 - DNA, 33 bp, Homo sapien
cagaactataagctcccctattctcagagttgg

SEQ ID NO: 197998 - DNA, 33 bp, Homo sapien
cagaactataagctcctctattctcagagttgg

SEQ ID NO: 197999 - DNA, 33 bp, Homo sapien
tacattggatgcagaacgtctgggaaacacact

SEQ ID NO: 198000 - DNA, 33 bp, Homo sapien
tacattggatgcagaatgtctgggaaacacact

SEQ ID NO: 198001 - DNA, 33 bp, Homo sapien
aatgacccagaaaataccaggcttcatacatga

SEQ ID NO: 198002 - DNA, 33 bp, Homo sapien
aatgacccagaaaatatcaggcttcatacatga

SEQ ID NO: 198003 - DNA, 33 bp, Homo sapien
agttatcctggccttcactgttacaaagcttct

SEQ ID NO: 198004 - DNA, 33 bp, Homo sapien
agttatcctggccttccctgttacaaagcttct

SEQ ID NO: 198005 - DNA, 33 bp, Homo sapien
ctgagtatttcctctacagcgatcataggacat

SEQ ID NO: 198006 - DNA, 33 bp, Homo sapien
ctgagtatttcctctatagcgatcataggacat

SEQ ID NO: 198007 - DNA, 33 bp, Homo sapien
gagctatgtctttgtgaactatttcatgcccaa

SEQ ID NO: 198008 - DNA, 33 bp, Homo sapien
gagctatgtctttgtggactatttcatgcccaa

SEQ ID NO: 198009 - DNA, 33 bp, Homo sapien
tccataacactgctgccaggcacaatgtcataa

SEQ ID NO: 198010 - DNA, 33 bp, Homo sapien
tccataacactgctgcgaggcacaatgtcataa

SEQ ID NO: 198011 - DNA, 33 bp, Homo sapien
ggcctgtgaggatgaacgctgtcacgaggctgg

SEQ ID NO: 198012 - DNA, 33 bp, Homo sapien
ggcctgtgaggatgaatgctgtcacgaggctgg

SEQ ID NO: 198013 - DNA, 33 bp, Homo sapien
caggaagtggaaaaaacagagctgagccacgca

SEQ ID NO: 198014 - DNA, 33 bp, Homo sapien
caggaagtggaaaaaatagagctgagccacgca

SEQ ID NO: 198015 - DNA, 33 bp, Homo sapien
ctacttctgtgacgcaccgcccatcctgaaact

SEQ ID NO: 198016 - DNA, 33 bp, Homo sapien
ctacttctgtgacgcatcgcccatcctgaaact

SEQ ID NO: 198017 - DNA, 33 bp, Homo sapien
tgtgtatagtatgaaacaggatcgagactaatt

SEQ ID NO: 198018 - DNA, 33 bp, Homo sapien
tgtgtatagtatgaaataggatcgagactaatt

SEQ ID NO: 198019 - DNA, 33 bp, Homo sapien
ctgtggaaggagatagccctgccgcttggggac

SEQ ID NO: 198020 - DNA, 33 bp, Homo sapien
ctgtggaaggagatagtcctgccgcttggggac

SEQ ID NO: 198021 - DNA, 33 bp, Homo sapien
gaatgtaggtttacaacttgcacacacggagac

SEQ ID NO: 198022 - DNA, 33 bp, Homo sapien
gaatgtaggtttacaatttgcacacacggagac

SEQ ID NO: 198023 - DNA, 33 bp, Homo sapien
gccttcctggaatcaggatttgtaccttagagg

SEQ ID NO: 198024 - DNA, 33 bp, Homo sapien
gccttcctggaatcagtatttgtaccttagagg

SEQ ID NO: 198025 - DNA, 33 bp, Homo sapien; identical to SEQ ID NO: 198023

SEQ ID NO: 198026 - DNA, 33 bp, Homo sapien; identical to SEQ ID NO: 198024

SEQ ID NO: 198027 - DNA, 33 bp, Homo sapien
caccttgatgtcaagacaagctgggattctgta

SEQ ID NO: 198028 - DNA, 33 bp, Homo sapien
caccttgatgtcaagagaagctgggattctgta

SEQ ID NO: 198029 - DNA, 33 bp, Homo sapien
ctgagacaggaaaaacaggaccaatgtaagaag

SEQ ID NO: 198030 - DNA, 33 bp, Homo sapien
ctgagacaggaaaaacgggaccaatgtaagaag

SEQ ID NO: 198031 - DNA, 33 bp, Homo sapien
ttcctctaaaactgacacgtttaatatgttttc

SEQ ID NO: 198032 - DNA, 33 bp, Homo sapien
ttcctctaaaactgacgcgtttaatatgttttc

SEQ ID NO: 198033 - DNA, 33 bp, Homo sapien
agatatactcaaattaacaacacttaggtgctg

SEQ ID NO: 198034 - DNA, 33 bp, Homo sapien
agatatactcaaattagcaacacttaggtgctg

SEQ ID NO: 198035 - DNA, 33 bp, Homo sapien
ttggtcaacgaatacaaaattacagctgaatag

SEQ ID NO: 198036 - DNA, 33 bp, Homo sapien
ttggtcaacgaatacacaattacagctgaatag

SEQ ID NO: 198037 - DNA, 33 bp, Homo sapien
atttactactacataccaaagcattttatatcc

SEQ ID NO: 198038 - DNA, 33 bp, Homo sapien
atttactactacatacgaaagcattttatatcc

SEQ ID NO: 198039 - DNA, 33 bp, Homo sapien
tctttcttcaaacccacattctccaggtaaagg

SEQ ID NO: 198040 - DNA, 33 bp, Homo sapien
tctttcttcaaacccagattctccaggtaaagg

SEQ ID NO: 198041 - DNA, 33 bp, Homo sapien
cagtgagtttcatcaacgtaggtgttgttgcgc

SEQ ID NO: 198042 - DNA, 33 bp, Homo sapien
cagtgagtttcatcaatgtaggtgttgttgcgc

SEQ ID NO: 198043 - DNA, 33 bp, Homo sapien
gagtgaggatgcacgaaaacagataaagacagg

SEQ ID NO: 198044 - DNA, 33 bp, Homo sapien
gagtgaggatgcacgagaacagataaagacagg

SEQ ID NO: 198045 - DNA, 33 bp, Homo sapien
taaatgtgtatgtgggaaccaacgagttctagc

SEQ ID NO: 198046 - DNA, 33 bp, Homo sapien
taaatgtgtatgtgggtaccaacgagttctagc

SEQ ID NO: 198047 - DNA, 33 bp, Homo sapien
aatgtgaactggctaacatgtaatgaccttttc

SEQ ID NO: 198048 - DNA, 33 bp, Homo sapien
aatgtgaactggctaagatgtaatgaccttttc

SEQ ID NO: 198049 - DNA, 33 bp, Homo sapien
gctgtgacacaaactacgctggcggtgtaagat

SEQ ID NO: 198050 - DNA, 33 bp, Homo sapien
gctgtgacacaaactatgctggcggtgtaagat

SEQ ID NO: 198051 - DNA, 33 bp, Homo sapien
aaactttattctgacaagagcattctaaaacct

SEQ ID NO: 198052 - DNA, 33 bp, Homo sapien
aaactttattctgacaggagcattctaaaacct

SEQ ID NO: 198053 - DNA, 33 bp, Homo sapien
tactattactttcctaagcctccaccatgagaa

SEQ ID NO: 198054 - DNA, 33 bp, Homo sapien
tactattactttcctacgcctccaccatgagaa

SEQ ID NO: 198055 - DNA, 33 bp, Homo sapien
gccattcgttgggtcacgagttcttgtcctgtg

SEQ ID NO: 198056 - DNA, 33 bp, Homo sapien
gccattcgttgggtcatgagttcttgtcctgtg

SEQ ID NO: 198057 - DNA, 33 bp, Homo sapien
aaaatagaaaatgctgaaacaaggcaagcaaaa

SEQ ID NO: 198058 - DNA, 33 bp, Homo sapien
aaaatagaaaatgctgtaacaaggcaagcaaaa

SEQ ID NO: 198059 - DNA, 33 bp, Homo sapien
tatctaatgtcttttcccatttacctccctgga

SEQ ID NO: 198060 - DNA, 33 bp, Homo sapien
tatctaatgtcttttctcatttacctccctgga

SEQ ID NO: 198061 - DNA, 33 bp, Homo sapien
aaatgaaagtgtgaaacaagcttcacataaaat

SEQ ID NO: 198062 - DNA, 33 bp, Homo sapien
aaatgaaagtgtgaaagaagcttcacataaaat

SEQ ID NO: 198063 - DNA, 33 bp, Homo sapien
gggtagctgcctaataaagcatcaggagattga

SEQ ID NO: 198064 - DNA, 33 bp, Homo sapien
gggtagctgcctaatatagcatcaggagattga

SEQ ID NO: 198065 - DNA, 33 bp, Homo sapien
cttgtttgttccttggaatttcacacatcatgc

SEQ ID NO: 198066 - DNA, 33 bp, Homo sapien
cttgtttgttccttgggatttcacacatcatgc

SEQ ID NO: 198067 - DNA, 33 bp, Homo sapien
tgtctccctctacataccatgctgacctctgtg

SEQ ID NO: 198068 - DNA, 33 bp, Homo sapien
tgtctccctctacatatcatgctgacctctgtg

SEQ ID NO: 198069 - DNA, 33 bp, Homo sapien
gtagaggtttatcaacaattcttggtcccacag

SEQ ID NO: 198070 - DNA, 33 bp, Homo sapien
gtagaggtttatcaaccattcttggtcccacag

SEQ ID NO: 198071 - DNA, 33 bp, Homo sapien
gataaagattcttacccgatatgctataatgtt

SEQ ID NO: 198072 - DNA, 33 bp, Homo sapien
gataaagattcttacctgatatgctataatgtt

SEQ ID NO: 198073 - DNA, 33 bp, Homo sapien
acactcccactcggccaatcatccattcagttc

SEQ ID NO: 198074 - DNA, 33 bp, Homo sapien
acactcccactcggccgatcatccattcagttc

SEQ ID NO: 198075 - DNA, 33 bp, Homo sapien
aaagcttaggttggtacgcactttagaaagtat

SEQ ID NO: 198076 - DNA, 33 bp, Homo sapien
aaagcttaggttggtatgcactttagaaagtat

SEQ ID NO: 198077 - DNA, 33 bp, Homo sapien
atgtgataacgtacgccgagggagcctaatcag

SEQ ID NO: 198078 - DNA, 33 bp, Homo sapien
atgtgataacgtacgctgagggagcctaatcag

SEQ ID NO: 198079 - DNA, 33 bp, Homo sapien
ataccctgcactagtagaacagcaaactaacac

SEQ ID NO: 198080 - DNA, 33 bp, Homo sapien
ataccctgcactagtataacagcaaactaacac

SEQ ID NO: 198081 - DNA, 33 bp, Homo sapien
gttggatgggctaagaaaacagagaacataatt

SEQ ID NO: 198082 - DNA, 33 bp, Homo sapien
gttggatgggctaagagaacagagaacataatt

SEQ ID NO: 198083 - DNA, 33 bp, Homo sapien
tgttacagtggtgggcactaaaataaattggat

SEQ ID NO: 198084 - DNA, 33 bp, Homo sapien
tgttacagtggtgggcgctaaaataaattggat

SEQ ID NO: 198085 - DNA, 33 bp, Homo sapien
gcactgaatcaggaaacacacagaagttgctgg

SEQ ID NO: 198086 - DNA, 33 bp, Homo sapien
gcactgaatcaggaaatacacagaagttgctgg

SEQ ID NO: 198087 - DNA, 33 bp, Homo sapien
aggcttgatctacaagaaggcaatctattgaag

SEQ ID NO: 198088 - DNA, 33 bp, Homo sapien
aggcttgatctacaaggaggcaatctattgaag

SEQ ID NO: 198089 - DNA, 33 bp, Homo sapien
aaccagttcttcccaaatggtaacccagagggg

SEQ ID NO: 198090 - DNA, 33 bp, Homo sapien
aaccagttcttcccaagtggtaacccagagggg

SEQ ID NO: 198091 - DNA, 33 bp, Homo sapien
atatgtctaatggatccgaagaggtagtaaatt

SEQ ID NO: 198092 - DNA, 33 bp, Homo sapien
atatgtctaatggatcggaagaggtagtaaatt

SEQ ID NO: 198093 - DNA, 33 bp, Homo sapien
gcccagctgaccgggaagatgccagtgagttcc

SEQ ID NO: 198094 - DNA, 33 bp, Homo sapien
gcccagctgaccgggaggatgccagtgagttcc

SEQ ID NO: 198095 - DNA, 33 bp, Homo sapien
tatttccgatcattcactaaagtatctgaaaac

SEQ ID NO: 198096 - DNA, 33 bp, Homo sapien
tatttccgatcattcattaaagtatctgaaaac

SEQ ID NO: 198097 - DNA, 33 bp, Homo sapien
agtcctgtatatgtgacagaaaaacattgttga

SEQ ID NO: 198098 - DNA, 33 bp, Homo sapien
agtcctgtatatgtgagagaaaaacattgttga

SEQ ID NO: 198099 - DNA, 33 bp, Homo sapien
gctagaattaataacacggggcagactgcagaa

SEQ ID NO: 198100 - DNA, 33 bp, Homo sapien
gctagaattaataacatggggcagactgcagaa

SEQ ID NO: 198101 - DNA, 33 bp, Homo sapien
tgctcggcaatgacacgctttccagatgcattg

SEQ ID NO: 198102 - DNA, 33 bp, Homo sapien
tgctcggcaatgacactctttccagatgcattg

SEQ ID NO: 198103 - DNA, 33 bp, Homo sapien
ttcgactcatggaaggaatgctttgtaaaggca

SEQ ID NO: 198104 - DNA, 33 bp, Homo sapien
ttcgactcatggaagggatgctttgtaaaggca

SEQ ID NO: 198105 - DNA, 33 bp, Homo sapien
gacaccaaagtctaaacaccaatgtcaagttct

SEQ ID NO: 198106 - DNA, 33 bp, Homo sapien
gacaccaaagtctaaataccaatgtcaagttct

SEQ ID NO: 198107 - DNA, 33 bp, Homo sapien
ttttttttccactgagcattagattttcaagtt

SEQ ID NO: 198108 - DNA, 33 bp, Homo sapien
ttttttttccactgaggattagattttcaagtt

SEQ ID NO: 198109 - DNA, 33 bp, Homo sapien
gaaggcctgagtagaacaaaaacactaagaaag

SEQ ID NO: 198110 - DNA, 33 bp, Homo sapien
gaaggcctgagtagaataaaaacactaagaaag

SEQ ID NO: 198111 - DNA, 33 bp, Homo sapien
ggtgtgtgttatcaaaattgttaccttgtttaa

SEQ ID NO: 198112 - DNA, 33 bp, Homo sapien
ggtgtgtgttatcaaagttgttaccttgtttaa

SEQ ID NO: 198113 - DNA, 33 bp, Homo sapien
tctaattcaggatttaagtcttctattgatctt

SEQ ID NO: 198114 - DNA, 33 bp, Homo sapien
tctaattcaggatttatgtcttctattgatctt

SEQ ID NO: 198115 - DNA, 33 bp, Homo sapien
tgtatttcacttgcaacatttcactgaccttaa

SEQ ID NO: 198116 - DNA, 33 bp, Homo sapien
tgtatttcacttgcaatatttcactgaccttaa

SEQ ID NO: 198117 - DNA, 33 bp, Homo sapien
tcttccagttccataactctaggacttgttgga

SEQ ID NO: 198118 - DNA, 33 bp, Homo sapien
tcttccagttccataattctaggacttgttgga

SEQ ID NO: 198119 - DNA, 33 bp, Homo sapien
aatgccagcctttcacagatacgctaaaggaaa

SEQ ID NO: 198120 - DNA, 33 bp, Homo sapien
aatgccagcctttcacggatacgctaaaggaaa

SEQ ID NO: 198121 - DNA, 33 bp, Homo sapien
atgaatgaatgacttaactttttcctatctttt

SEQ ID NO: 198122 - DNA, 33 bp, Homo sapien
atgaatgaatgacttatctttttcctatctttt

SEQ ID NO: 198123 - DNA, 33 bp, Homo sapien
atttccttaacaaaaactcagattgctattaac

SEQ ID NO: 198124 - DNA, 33 bp, Homo sapien
atttccttaacaaaaattcagattgctattaac

SEQ ID NO: 198125 - DNA, 33 bp, Homo sapien
aggaagtttcctgaccaatgtaaggagatggct

SEQ ID NO: 198126 - DNA, 33 bp, Homo sapien
aggaagtttcctgaccgatgtaaggagatggct

SEQ ID NO: 198127 - DNA, 33 bp, Homo sapien
agatatttatgattggcaggagaagtaagaagg

SEQ ID NO: 198128 - DNA, 33 bp, Homo sapien
agatatttatgattggtaggagaagtaagaagg

SEQ ID NO: 198129 - DNA, 33 bp, Homo sapien
atagtagacactgaagcataagccacaggaaaa

SEQ ID NO: 198130 - DNA, 33 bp, Homo sapien
atagtagacactgaaggataagccacaggaaaa

SEQ ID NO: 198131 - DNA, 33 bp, Homo sapien
tttagagtgtaaggcccgatgggaaaaatggac

SEQ ID NO: 198132 - DNA, 33 bp, Homo sapien
tttagagtgtaaggcctgatgggaaaaatggac

SEQ ID NO: 198133 - DNA, 33 bp, Homo sapien
cataactgaaaatttacactcagtgaacaactc

SEQ ID NO: 198134 - DNA, 33 bp, Homo sapien
cataactgaaaatttatactcagtgaacaactc

SEQ ID NO: 198135 - DNA, 33 bp, Homo sapien
ctcgattgtggtgatgccatcaaggatgtttac

SEQ ID NO: 198136 - DNA, 33 bp, Homo sapien
ctcgattgtggtgatggcatcaaggatgtttac

SEQ ID NO: 198137 - DNA, 33 bp, Homo sapien
catgacctgcagtgtaagtatagaaaccacagc

SEQ ID NO: 198138 - DNA, 33 bp, Homo sapien
catgacctgcagtgtaggtatagaaaccacagc

SEQ ID NO: 198139 - DNA, 33 bp, Homo sapien
tgtaagtaataagtacaaatatggactctggtc

SEQ ID NO: 198140 - DNA, 33 bp, Homo sapien
tgtaagtaataagtacgaatatggactctggtc

SEQ ID NO: 198141 - DNA, 33 bp, Homo sapien
ttttcaatatagatgtcaaggatgattttctag

SEQ ID NO: 198142 - DNA, 33 bp, Homo sapien
ttttcaatatagatgtgaaggatgattttctag

SEQ ID NO: 198143 - DNA, 33 bp, Homo sapien
agctacaattcagagacgtttataatgtttttc

SEQ ID NO: 198144 - DNA, 33 bp, Homo sapien
agctacaattcagagatgtttataatgtttttc

SEQ ID NO: 198145 - DNA, 33 bp, Homo sapien
cctcagaggcaagagacaccaaagcaggaaaaa

SEQ ID NO: 198146 - DNA, 33 bp, Homo sapien
cctcagaggcaagagagaccaaagcaggaaaaa

SEQ ID NO: 198147 - DNA, 33 bp, Homo sapien
catgatgcttggactacagtaacagtgtgcact

SEQ ID NO: 198148 - DNA, 33 bp, Homo sapien
catgatgcttggactatagtaacagtgtgcact

SEQ ID NO: 198149 - DNA, 33 bp, Homo sapien
aatcaaggagataaaacctgtttcaccttctat

SEQ ID NO: 198150 - DNA, 33 bp, Homo sapien
aatcaaggagataaaatctgtttcaccttctat

SEQ ID NO: 198151 - DNA, 33 bp, Homo sapien
acccaaagaactgtacggataactttgattgaa

SEQ ID NO: 198152 - DNA, 33 bp, Homo sapien
acccaaagaactgtactgataactttgattgaa

SEQ ID NO: 198153 - DNA, 33 bp, Homo sapien
tatgaattcagccttacccttggcatctttctt

SEQ ID NO: 198154 - DNA, 33 bp, Homo sapien
tatgaattcagccttatccttggcatctttctt

SEQ ID NO: 198155 - DNA, 33 bp, Homo sapien
tgtggtggcacctaaaagcttggagacaccagg

SEQ ID NO: 198156 - DNA, 33 bp, Homo sapien
tgtggtggcacctaaacgcttggagacaccagg

SEQ ID NO: 198157 - DNA, 33 bp, Homo sapien
aaataactgaataaaaaccctcttactgcctga

SEQ ID NO: 198158 - DNA, 33 bp, Homo sapien
aaataactgaataaaacccctcttactgcctga

SEQ ID NO: 198159 - DNA, 33 bp, Homo sapien
ttctctttgtctatcacctgtagcctatgacat

SEQ ID NO: 198160 - DNA, 33 bp, Homo sapien
ttctctttgtctatcatctgtagcctatgacat

SEQ ID NO: 198161 - DNA, 33 bp, Homo sapien
gggagctgcaagtgctaaaggctttggacctgc

SEQ ID NO: 198162 - DNA, 33 bp, Homo sapien
gggagctgcaagtgctgaaggctttggacctgc

SEQ ID NO: 198163 - DNA, 33 bp, Homo sapien
caaagacctatcttgacgtaacaacataacatt

SEQ ID NO: 198164 - DNA, 33 bp, Homo sapien
caaagacctatcttgatgtaacaacataacatt

SEQ ID NO: 198165 - DNA, 33 bp, Homo sapien
agtgttattggtatgacgataaaacaatgtgtg

SEQ ID NO: 198166 - DNA, 33 bp, Homo sapien
agtgttattggtatgatgataaaacaatgtgtg

SEQ ID NO: 198167 - DNA, 33 bp, Homo sapien
ctattctatgcaaatcccacaattcattcattt

SEQ ID NO: 198168 - DNA, 33 bp, Homo sapien
ctattctatgcaaatcgcacaattcattcattt

SEQ ID NO: 198169 - DNA, 33 bp, Homo sapien
atagtggaatggcagagatcaatgaaggacaga

SEQ ID NO: 198170 - DNA, 33 bp, Homo sapien
atagtggaatggcagatatcaatgaaggacaga

SEQ ID NO: 198171 - DNA, 33 bp, Homo sapien
ccaaggatgcctaaaacgtaaactcccactgtg

SEQ ID NO: 198172 - DNA, 33 bp, Homo sapien
ccaaggatgcctaaaatgtaaactcccactgtg

SEQ ID NO: 198173 - DNA, 33 bp, Homo sapien; identical to SEQ ID NO: 198171

SEQ ID NO: 198174 - DNA, 33 bp, Homo sapien; identical to SEQ ID NO: 198172

SEQ ID NO: 198175 - DNA, 33 bp, Homo sapien
gatctacaattcacaccggctttatgttgagac

SEQ ID NO: 198176 - DNA, 33 bp, Homo sapien
gatctacaattcacactggctttatgttgagac

SEQ ID NO: 198177 - DNA, 33 bp, Homo sapien
taaaatatttttgaagcctaattttctacaact

SEQ ID NO: 198178 - DNA, 33 bp, Homo sapien
taaaatatttttgaaggctaattttctacaact

SEQ ID NO: 198179 - DNA, 33 bp, Homo sapien
cttagctgctagttaacaaaggatactgcattg

SEQ ID NO: 198180 - DNA, 33 bp, Homo sapien
cttagctgctagttaataaaggatactgcattg

SEQ ID NO: 198181 - DNA, 33 bp, Homo sapien
agttctatggaattaaactgtgaaactttcttt

SEQ ID NO: 198182 - DNA, 33 bp, Homo sapien
agttctatggaattaacctgtgaaactttcttt

SEQ ID NO: 198183 - DNA, 33 bp, Homo sapien
agagctagagagagaacgaggaaaggatggaga

SEQ ID NO: 198184 - DNA, 33 bp, Homo sapien
agagctagagagagaatgaggaaaggatggaga

SEQ ID NO: 198185 - DNA, 33 bp, Homo sapien
gactaagatgtctctacggaacaggactaagca

SEQ ID NO: 198186 - DNA, 33 bp, Homo sapien
gactaagatgtctctagggaacaggactaagca

SEQ ID NO: 198187 - DNA, 33 bp, Homo sapien
tgtttatcaattcaggcatttcccaatatggtt

SEQ ID NO: 198188 - DNA, 33 bp, Homo sapien
tgtttatcaattcagggatttcccaatatggtt

SEQ ID NO: 198189 - DNA, 33 bp, Homo sapien
gttacatcctagaaagcaaggcaattactgatc

SEQ ID NO: 198190 - DNA, 33 bp, Homo sapien
gttacatcctagaaaggaaggcaattactgatc

SEQ ID NO: 198191 - DNA, 33 bp, Homo sapien
attgatgatctgtttaaatgttctgttcaggaa

SEQ ID NO: 198192 - DNA, 33 bp, Homo sapien
attgatgatctgtttagatgttctgttcaggaa

SEQ ID NO: 198193 - DNA, 33 bp, Homo sapien
aaaaaagattacaaccaccaacatgtgggagct

SEQ ID NO: 198194 - DNA, 33 bp, Homo sapien
aaaaaagattacaaccgccaacatgtgggagct

SEQ ID NO: 198195 - DNA, 33 bp, Homo sapien
catacatcttagcatagaataggtcagaatgtt

SEQ ID NO: 198196 - DNA, 33 bp, Homo sapien
catacatcttagcatataataggtcagaatgtt

SEQ ID NO: 198197 - DNA, 33 bp, Homo sapien
tgataacttgttaacaactgattttttaagtca

SEQ ID NO: 198198 - DNA, 33 bp, Homo sapien
tgataacttgttaacacctgattttttaagtca

SEQ ID NO: 198199 - DNA, 33 bp, Homo sapien
accagccccatccaaaaatagacaagtgaaata

SEQ ID NO: 198200 - DNA, 33 bp, Homo sapien
accagccccatccaaatatagacaagtgaaata

SEQ ID NO: 198201 - DNA, 33 bp, Homo sapien
actatcaaaaagagaacggataactgttggaga

SEQ ID NO: 198202 - DNA, 33 bp, Homo sapien
actatcaaaaagagaagggataactgttggaga

SEQ ID NO: 198203 - DNA, 33 bp, Homo sapien
gctgcccagagtatgacactttgttacagctat

SEQ ID NO: 198204 - DNA, 33 bp, Homo sapien
gctgcccagagtatgatactttgttacagctat

SEQ ID NO: 198205 - DNA, 33 bp, Homo sapien
caggaggaaccacctacgctgacatcttgattt

SEQ ID NO: 198206 - DNA, 33 bp, Homo sapien
caggaggaaccacctatgctgacatcttgattt

SEQ ID NO: 198207 - DNA, 33 bp, Homo sapien
tggaagctggatgagacggacaagttatggaag

SEQ ID NO: 198208 - DNA, 33 bp, Homo sapien
tggaagctggatgagatggacaagttatggaag

SEQ ID NO: 198209 - DNA, 33 bp, Homo sapien
ataactttgagcattaaaaacttccaaactgca

SEQ ID NO: 198210 - DNA, 33 bp, Homo sapien
ataactttgagcattataaacttccaaactgca

SEQ ID NO: 198211 - DNA, 33 bp, Homo sapien
atgtacagaaacagcaatcttactacctcagta

SEQ ID NO: 198212 - DNA, 33 bp, Homo sapien
atgtacagaaacagcagtcttactacctcagta

SEQ ID NO: 198213 - DNA, 33 bp, Homo sapien
ttatggccactgcagcagatagatattcacaat

SEQ ID NO: 198214 - DNA, 33 bp, Homo sapien
ttatggccactgcagctgatagatattcacaat

SEQ ID NO: 198215 - DNA, 33 bp, Homo sapien
aatgatcttcaagtcaatatttttaagctaata

SEQ ID NO: 198216 - DNA, 33 bp, Homo sapien
aatgatcttcaagtcagtatttttaagctaata

SEQ ID NO: 198217 - DNA, 33 bp, Homo sapien
tcatatataaacaaggaatcactttcctacaaa

SEQ ID NO: 198218 - DNA, 33 bp, Homo sapien
tcatatataaacaagggatcactttcctacaaa

SEQ ID NO: 198219 - DNA, 33 bp, Homo sapien
cagactgctgaggaaacagtacataggtgtgtg

SEQ ID NO: 198220 - DNA, 33 bp, Homo sapien
cagactgctgaggaaatagtacataggtgtgtg

SEQ ID NO: 198221 - DNA, 33 bp, Homo sapien; identical to SEQ ID NO: 198219

SEQ ID NO: 198222 - DNA, 33 bp, Homo sapien; identical to SEQ ID NO: 198220

SEQ ID NO: 198223 - DNA, 33 bp, Homo sapien
tatttcactatgtcaaccttattatttcttcta

SEQ ID NO: 198224 - DNA, 33 bp, Homo sapien
tatttcactatgtcaatcttattatttcttcta

SEQ ID NO: 198225 - DNA, 33 bp, Homo sapien
tgtttgcacatgtttaacctagaaaagcctatt

SEQ ID NO: 198226 - DNA, 33 bp, Homo sapien
tgtttgcacatgtttagcctagaaaagcctatt

SEQ ID NO: 198227 - DNA, 33 bp, Homo sapien
catggaggttactgtcaagtacaggatttaaaa

SEQ ID NO: 198228 - DNA, 33 bp, Homo sapien
catggaggttactgtccagtacaggatttaaaa

SEQ ID NO: 198229 - DNA, 33 bp, Homo sapien
ccattgttagaatgacacaaactgaacctcctg

SEQ ID NO: 198230 - DNA, 33 bp, Homo sapien
ccattgttagaatgacgcaaactgaacctcctg

SEQ ID NO: 198231 - DNA, 33 bp, Homo sapien
aatgcaaatcaaaactaaaaaccataatgagat

SEQ ID NO: 198232 - DNA, 33 bp, Homo sapien
aatgcaaatcaaaactcaaaaccataatgagat

SEQ ID NO: 198233 - DNA, 33 bp, Homo sapien
tgggacactcacggacgcaaagaaaaaggatgg

SEQ ID NO: 198234 - DNA, 33 bp, Homo sapien
tgggacactcacggactcaaagaaaaaggatgg

SEQ ID NO: 198235 - DNA, 33 bp, Homo sapien
ataattagactgagaaattaaaatgtgctttta

SEQ ID NO: 198236 - DNA, 33 bp, Homo sapien
ataattagactgagaatttaaaatgtgctttta

SEQ ID NO: 198237 - DNA, 33 bp, Homo sapien
acacccaactccaaccagctctggccttctatg

SEQ ID NO: 198238 - DNA, 33 bp, Homo sapien
acacccaactccaaccggctctggccttctatg

SEQ ID NO: 198239 - DNA, 33 bp, Homo sapien
aattatgcagtaaacactacacttaactgcctt

SEQ ID NO: 198240 - DNA, 33 bp, Homo sapien
aattatgcagtaaacattacacttaactgcctt

SEQ ID NO: 198241 - DNA, 33 bp, Homo sapien
atatgtatatcctgaaacacataaaagttgttt

SEQ ID NO: 198242 - DNA, 33 bp, Homo sapien
atatgtatatcctgaatcacataaaagttgttt

SEQ ID NO: 198243 - DNA, 33 bp, Homo sapien
ctgtaaagagtgtaagcatggatcaaaaagcat

SEQ ID NO: 198244 - DNA, 33 bp, Homo sapien
ctgtaaagagtgtaaggatggatcaaaaagcat

SEQ ID NO: 198245 - DNA, 33 bp, Homo sapien
actcactccttcacaaagcaacatatctcacca

SEQ ID NO: 198246 - DNA, 33 bp, Homo sapien
actcactccttcacaaggcaacatatctcacca

SEQ ID NO: 198247 - DNA, 33 bp, Homo sapien
tataaggagaaaaacaatggtgagatatgttgc

SEQ ID NO: 198248 - DNA, 33 bp, Homo sapien
tataaggagaaaaacactggtgagatatgttgc

SEQ ID NO: 198249 - DNA, 33 bp, Homo sapien
ggaaattcagaatagaagagcacttcctcaacc

SEQ ID NO: 198250 - DNA, 33 bp, Homo sapien
ggaaattcagaatagaggagcacttcctcaacc

SEQ ID NO: 198251 - DNA, 33 bp, Homo sapien
atgcacttctgaggaaactatcagttttatggc

SEQ ID NO: 198252 - DNA, 33 bp, Homo sapien
atgcacttctgaggaagctatcagttttatggc

SEQ ID NO: 198253 - DNA, 33 bp, Homo sapien
ctatctttgtgactggaaggtagtcaaacattt

SEQ ID NO: 198254 - DNA, 33 bp, Homo sapien
ctatctttgtgactgggaggtagtcaaacattt

SEQ ID NO: 198255 - DNA, 33 bp, Homo sapien
gctatgttgccatctggagcccactgctttata

SEQ ID NO: 198256 - DNA, 33 bp, Homo sapien
gctatgttgccatctgtagcccactgctttata

SEQ ID NO: 198257 - DNA, 33 bp, Homo sapien
aggacaagctgctgagaaaatagtacatggggg

SEQ ID NO: 198258 - DNA, 33 bp, Homo sapien
aggacaagctgctgaggaaatagtacatggggg

SEQ ID NO: 198259 - DNA, 33 bp, Homo sapien
tgatagttctgtgatgaaaataatttgggaata

SEQ ID NO: 198260 - DNA, 33 bp, Homo sapien
tgatagttctgtgatggaaataatttgggaata

SEQ ID NO: 198261 - DNA, 33 bp, Homo sapien
gaactatcacaaataacgcctagagtatttctt

SEQ ID NO: 198262 - DNA, 33 bp, Homo sapien
gaactatcacaaataatgcctagagtatttctt

SEQ ID NO: 198263 - DNA, 33 bp, Homo sapien
tttttaaaagtgttaccctacctctgccgattc

SEQ ID NO: 198264 - DNA, 33 bp, Homo sapien
tttttaaaagtgttactctacctctgccgattc

SEQ ID NO: 198265 - DNA, 33 bp, Homo sapien
gtgatgaagctataacaaaaaccagagagtgat

SEQ ID NO: 198266 - DNA, 33 bp, Homo sapien
gtgatgaagctataacgaaaaccagagagtgat

SEQ ID NO: 198267 - DNA, 33 bp, Homo sapien
gattgtgttcagttcacactttcatgcacccat

SEQ ID NO: 198268 - DNA, 33 bp, Homo sapien
gattgtgttcagttcatactttcatgcacccat

SEQ ID NO: 198269 - DNA, 33 bp, Homo sapien
atcctgatcaatttagaatccaacacccgagtc

SEQ ID NO: 198270 - DNA, 33 bp, Homo sapien
atcctgatcaatttagtatccaacacccgagtc

SEQ ID NO: 198271 - DNA, 33 bp, Homo sapien
aattataacatgcacagggtgttattatttggg

SEQ ID NO: 198272 - DNA, 33 bp, Homo sapien
aattataacatgcacatggtgttattatttggg

SEQ ID NO: 198273 - DNA, 33 bp, Homo sapien
attctctacagagggaactcatttatcagccgt

SEQ ID NO: 198274 - DNA, 33 bp, Homo sapien
attctctacagagggatctcatttatcagccgt

SEQ ID NO: 198275 - DNA, 33 bp, Homo sapien
cacagtgatgcagaaactgttaatttgcttgat

SEQ ID NO: 198276 - DNA, 33 bp, Homo sapien
cacagtgatgcagaaagtgttaatttgcttgat

SEQ ID NO: 198277 - DNA, 33 bp, Homo sapien
ttgcttgatcatttgcagaccatttatcttttc

SEQ ID NO: 198278 - DNA, 33 bp, Homo sapien
ttgcttgatcatttgccgaccatttatcttttc

SEQ ID NO: 198279 - DNA, 33 bp, Homo sapien
cacattttttcttgtacagtagtagcattaggg

SEQ ID NO: 198280 - DNA, 33 bp, Homo sapien
cacattttttcttgtatagtagtagcattaggg

SEQ ID NO: 198281 - DNA, 33 bp, Homo sapien
aagccaaatttcccaacgcagtgaccatacact

SEQ ID NO: 198282 - DNA, 33 bp, Homo sapien
aagccaaatttcccaatgcagtgaccatacact

SEQ ID NO: 198283 - DNA, 33 bp, Homo sapien
tcactcagtatcatgacagcagtaaaggcagat

SEQ ID NO: 198284 - DNA, 33 bp, Homo sapien
tcactcagtatcatgatagcagtaaaggcagat

SEQ ID NO: 198285 - DNA, 33 bp, Homo sapien
gagtgacactgacttcccctttttcaagttgta

SEQ ID NO: 198286 - DNA, 33 bp, Homo sapien
gagtgacactgacttctcctttttcaagttgta

SEQ ID NO: 198287 - DNA, 33 bp, Homo sapien
actttgaccaatcataacagttctttcatggct

SEQ ID NO: 198288 - DNA, 33 bp, Homo sapien
actttgaccaatcatagcagttctttcatggct

SEQ ID NO: 198289 - DNA, 33 bp, Homo sapien
aacattccagaaataacttaccattctagatac

SEQ ID NO: 198290 - DNA, 33 bp, Homo sapien
aacattccagaaataatttaccattctagatac

SEQ ID NO: 198291 - DNA, 33 bp, Homo sapien
gtgattcatggaaggaagttgaaaaatcagcat

SEQ ID NO: 198292 - DNA, 33 bp, Homo sapien
gtgattcatggaaggaggttgaaaaatcagcat

SEQ ID NO: 198293 - DNA, 33 bp, Homo sapien
cagccttgaatatatacacacatagtttacata

SEQ ID NO: 198294 - DNA, 33 bp, Homo sapien
cagccttgaatatatagacacatagtttacata

SEQ ID NO: 198295 - DNA, 33 bp, Homo sapien
gcttgacaaatgaatcaaaagaactcaagaaag

SEQ ID NO: 198296 - DNA, 33 bp, Homo sapien
gcttgacaaatgaatcgaaagaactcaagaaag

SEQ ID NO: 198297 - DNA, 33 bp, Homo sapien
ccagaaatagagattacggtacaaggataatgc

SEQ ID NO: 198298 - DNA, 33 bp, Homo sapien
ccagaaatagagattatggtacaaggataatgc

SEQ ID NO: 198299 - DNA, 33 bp, Homo sapien
actaaacgcgtagtaaccaagacttcatttttt

SEQ ID NO: 198300 - DNA, 33 bp, Homo sapien
actaaacgcgtagtaatcaagacttcatttttt

SEQ ID NO: 198301 - DNA, 33 bp, Homo sapien
cacttatttcatttaactgccaccacccagtga

SEQ ID NO: 198302 - DNA, 33 bp, Homo sapien
cacttatttcatttaattgccaccacccagtga

SEQ ID NO: 198303 - DNA, 33 bp, Homo sapien
ttctaatgctaagtacagagaagagtacatagc

SEQ ID NO: 198304 - DNA, 33 bp, Homo sapien
ttctaatgctaagtacggagaagagtacatagc

SEQ ID NO: 198305 - DNA, 33 bp, Homo sapien
agcttatgagaaataaagtgaggttaaggcaca

SEQ ID NO: 198306 - DNA, 33 bp, Homo sapien
agcttatgagaaataaggtgaggttaaggcaca

SEQ ID NO: 198307 - DNA, 33 bp, Homo sapien
gagttggaacacgcaacgtaagggaagtaagta

SEQ ID NO: 198308 - DNA, 33 bp, Homo sapien
gagttggaacacgcaatgtaagggaagtaagta

SEQ ID NO: 198309 - DNA, 33 bp, Homo sapien
atctacttgctgcttacgcccttatttcaaatg

SEQ ID NO: 198310 - DNA, 33 bp, Homo sapien
atctacttgctgcttatgcccttatttcaaatg

SEQ ID NO: 198311 - DNA, 33 bp, Homo sapien
cttcacatgtcctcagccgagggttggttcaaa

SEQ ID NO: 198312 - DNA, 33 bp, Homo sapien
cttcacatgtcctcagtcgagggttggttcaaa

SEQ ID NO: 198313 - DNA, 33 bp, Homo sapien
cacagttgttatagtaccaagcctcattatctt

SEQ ID NO: 198314 - DNA, 33 bp, Homo sapien
cacagttgttatagtatcaagcctcattatctt

SEQ ID NO: 198315 - DNA, 33 bp, Homo sapien
tcttttgtgactccaacgtcatcaaccattaca

SEQ ID NO: 198316 - DNA, 33 bp, Homo sapien
tcttttgtgactccaatgtcatcaaccattaca

SEQ ID NO: 198317 - DNA, 33 bp, Homo sapien
gttctgggaaagttgactagaagcacaaaaaat

SEQ ID NO: 198318 - DNA, 33 bp, Homo sapien
gttctgggaaagttgattagaagcacaaaaaat

SEQ ID NO: 198319 - DNA, 33 bp, Homo sapien
ctggatctgtgacacaagttgtaaacacaggtt

SEQ ID NO: 198320 - DNA, 33 bp, Homo sapien
ctggatctgtgacacaggttgtaaacacaggtt

SEQ ID NO: 198321 - DNA, 33 bp, Homo sapien
tgtgttgcaagtcttaccatttcttgacatctc

SEQ ID NO: 198322 - DNA, 33 bp, Homo sapien
tgtgttgcaagtcttatcatttcttgacatctc

SEQ ID NO: 198323 - DNA, 33 bp, Homo sapien
gtctgagattttcctaaccgatctttccatttt

SEQ ID NO: 198324 - DNA, 33 bp, Homo sapien
gtctgagattttcctacccgatctttccatttt

SEQ ID NO: 198325 - DNA, 33 bp, Homo sapien
tacttgttaaagctaacactgccgataattata

SEQ ID NO: 198326 - DNA, 33 bp, Homo sapien
tacttgttaaagctaatactgccgataattata

SEQ ID NO: 198327 - DNA, 33 bp, Homo sapien
acaatattaaaaatgaacatagcaataaacttt

SEQ ID NO: 198328 - DNA, 33 bp, Homo sapien
acaatattaaaaatgagcatagcaataaacttt

SEQ ID NO: 198329 - DNA, 33 bp, Homo sapien
gaagtcatactgtcttaaaatgagggcacatga

SEQ ID NO: 198330 - DNA, 33 bp, Homo sapien
gaagtcatactgtcttgaaatgagggcacatga

SEQ ID NO: 198331 - DNA, 33 bp, Homo sapien
cataaataggtacataagattcaactgcataga

SEQ ID NO: 198332 - DNA, 33 bp, Homo sapien
cataaataggtacataggattcaactgcataga

SEQ ID NO: 198333 - DNA, 33 bp, Homo sapien
gatttcttatatgtgacataggggtgtctggtt

SEQ ID NO: 198334 - DNA, 33 bp, Homo sapien
gatttcttatatgtgagataggggtgtctggtt

SEQ ID NO: 198335 - DNA, 33 bp, Homo sapien
taatcaattgtttcaaagtcaaaatgcatactg

SEQ ID NO: 198336 - DNA, 33 bp, Homo sapien
taatcaattgtttcaaggtcaaaatgcatactg

SEQ ID NO: 198337 - DNA, 33 bp, Homo sapien
acacatttttggtgtaagctgtcttattcctat

SEQ ID NO: 198338 - DNA, 33 bp, Homo sapien
acacatttttggtgtaggctgtcttattcctat

SEQ ID NO: 198339 - DNA, 33 bp, Homo sapien
attttctctgtgccaacgttttgctctttcccc

SEQ ID NO: 198340 - DNA, 33 bp, Homo sapien
attttctctgtgccaatgttttgctctttcccc

SEQ ID NO: 198341 - DNA, 33 bp, Homo sapien
aatctaaaaatgaaccaaaaccatacaaaaaaa

SEQ ID NO: 198342 - DNA, 33 bp, Homo sapien
aatctaaaaatgaaccgaaaccatacaaaaaaa

SEQ ID NO: 198343 - DNA, 33 bp, Homo sapien
acggctttctcacctaaactcagaagtgccaaa

SEQ ID NO: 198344 - DNA, 33 bp, Homo sapien
acggctttctcacctatactcagaagtgccaaa

SEQ ID NO: 198345 - DNA, 33 bp, Homo sapien
gcttcacattctgaaacagttcttcaaatctcg

SEQ ID NO: 198346 - DNA, 33 bp, Homo sapien
gcttcacattctgaaatagttcttcaaatctcg

SEQ ID NO: 198347 - DNA, 33 bp, Homo sapien
aatttggaaagttacaataatacatacatcatt

SEQ ID NO: 198348 - DNA, 33 bp, Homo sapien
aatttggaaagttacattaatacatacatcatt

SEQ ID NO: 198349 - DNA, 33 bp, Homo sapien
ttgcaaaaactagtggcagagccaggattcaaa

SEQ ID NO: 198350 - DNA, 33 bp, Homo sapien
ttgcaaaaactagtggtagagccaggattcaaa

SEQ ID NO: 198351 - DNA, 33 bp, Homo sapien
aggctagactggaacaatggtgtaagagagatt

SEQ ID NO: 198352 - DNA, 33 bp, Homo sapien
aggctagactggaacagtggtgtaagagagatt

SEQ ID NO: 198353 - DNA, 33 bp, Homo sapien
atgacaattacagtataaatcacatacacaaat

SEQ ID NO: 198354 - DNA, 33 bp, Homo sapien
atgacaattacagtattaatcacatacacaaat

SEQ ID NO: 198355 - DNA, 33 bp, Homo sapien
ttgctgaatgagtgaacggttaggtgaattcat

SEQ ID NO: 198356 - DNA, 33 bp, Homo sapien
ttgctgaatgagtgaatggttaggtgaattcat

SEQ ID NO: 198357 - DNA, 33 bp, Homo sapien
acaagtgggagctacacggaaaggtattcaatc

SEQ ID NO: 198358 - DNA, 33 bp, Homo sapien
acaagtgggagctacatggaaaggtattcaatc

SEQ ID NO: 198359 - DNA, 33 bp, Homo sapien
aaggacaaaagggctacctacagaatgaagttt

SEQ ID NO: 198360 - DNA, 33 bp, Homo sapien
aaggacaaaagggctatctacagaatgaagttt

SEQ ID NO: 198361 - DNA, 33 bp, Homo sapien
gtgaaattgtgagtcacctagcctaaattttcc

SEQ ID NO: 198362 - DNA, 33 bp, Homo sapien
gtgaaattgtgagtcatctagcctaaattttcc

SEQ ID NO: 198363 - DNA, 33 bp, Homo sapien
tattagctgacaatgacccctccttccatggcc

SEQ ID NO: 198364 - DNA, 33 bp, Homo sapien
tattagctgacaatgagccctccttccatggcc

SEQ ID NO: 198365 - DNA, 33 bp, Homo sapien
attttctgtggaagcaatagatgctcttatttg

SEQ ID NO: 198366 - DNA, 33 bp, Homo sapien
attttctgtggaagcagtagatgctcttatttg

SEQ ID NO: 198367 - DNA, 33 bp, Homo sapien
ttgctctggagatactaagcacactactggatt

SEQ ID NO: 198368 - DNA, 33 bp, Homo sapien
ttgctctggagatactgagcacactactggatt

SEQ ID NO: 198369 - DNA, 33 bp, Homo sapien
tggaagaagaaacaagcaagaactccacggatt

SEQ ID NO: 198370 - DNA, 33 bp, Homo sapien
tggaagaagaaacaaggaagaactccacggatt

SEQ ID NO: 198371 - DNA, 33 bp, Homo sapien
aaggcatttcatagacactaacttgcaggcagt

SEQ ID NO: 198372 - DNA, 33 bp, Homo sapien
aaggcatttcatagacgctaacttgcaggcagt

SEQ ID NO: 198373 - DNA, 33 bp, Homo sapien
atattaaaattcctccacctataaatagaaaga

SEQ ID NO: 198374 - DNA, 33 bp, Homo sapien
atattaaaattcctccgcctataaatagaaaga

SEQ ID NO: 198375 - DNA, 33 bp, Homo sapien
agggggagaacgtcacacagataatggtcaatg

SEQ ID NO: 198376 - DNA, 33 bp, Homo sapien
agggggagaacgtcacgcagataatggtcaatg

SEQ ID NO: 198377 - DNA, 33 bp, Homo sapien
gtaaagagccagcagggaacactcttggctttc

SEQ ID NO: 198378 - DNA, 33 bp, Homo sapien
gtaaagagccagcaggtaacactcttggctttc

SEQ ID NO: 198379 - DNA, 33 bp, Homo sapien
tgagcgacctcggggaaggtacataagcttgag

SEQ ID NO: 198380 - DNA, 33 bp, Homo sapien
tgagcgacctcggggagggtacataagcttgag

SEQ ID NO: 198381 - DNA, 33 bp, Homo sapien
aaccactggagatacacaaaagggagacattta

SEQ ID NO: 198382 - DNA, 33 bp, Homo sapien
aaccactggagatacagaaaagggagacattta

SEQ ID NO: 198383 - DNA, 33 bp, Homo sapien
gggtgttggttcagtgcaatgtgttggccttgg

SEQ ID NO: 198384 - DNA, 33 bp, Homo sapien
gggtgttggttcagtggaatgtgttggccttgg

SEQ ID NO: 198385 - DNA, 33 bp, Homo sapien
gttatagtataacaaaactccatatattcatca

SEQ ID NO: 198386 - DNA, 33 bp, Homo sapien
gttatagtataacaaacctccatatattcatca

SEQ ID NO: 198387 - DNA, 33 bp, Homo sapien
tttggatgtatttaaaccttccaggctgctttt

SEQ ID NO: 198388 - DNA, 33 bp, Homo sapien
tttggatgtatttaaatcttccaggctgctttt

SEQ ID NO: 198389 - DNA, 33 bp, Homo sapien
gactccctgaaaactgcaggaagaagtgagaag

SEQ ID NO: 198390 - DNA, 33 bp, Homo sapien
gactccctgaaaactgtaggaagaagtgagaag

SEQ ID NO: 198391 - DNA, 33 bp, Homo sapien
tagtttctcttttgtcaagtttagctaacaatt

SEQ ID NO: 198392 - DNA, 33 bp, Homo sapien
tagtttctcttttgtcgagtttagctaacaatt

SEQ ID NO: 198393 - DNA, 33 bp, Homo sapien
ctttgtaagttgtcaaaaaggtactgggcttaa

SEQ ID NO: 198394 - DNA, 33 bp, Homo sapien
ctttgtaagttgtcaagaaggtactgggcttaa

SEQ ID NO: 198395 - DNA, 33 bp, Homo sapien
ctaagatgaagattcaaattaaagtgatttctt

SEQ ID NO: 198396 - DNA, 33 bp, Homo sapien
ctaagatgaagattcacattaaagtgatttctt

SEQ ID NO: 198397 - DNA, 33 bp, Homo sapien
ttttaagggatgtaaaaatgttgggtggaggtg

SEQ ID NO: 198398 - DNA, 33 bp, Homo sapien
ttttaagggatgtaaagatgttgggtggaggtg

SEQ ID NO: 198399 - DNA, 33 bp, Homo sapien
ctgtggattgggattcaagctgggattccagtc

SEQ ID NO: 198400 - DNA, 33 bp, Homo sapien
ctgtggattgggattcgagctgggattccagtc

SEQ ID NO: 198401 - DNA, 33 bp, Homo sapien
tgaaaaaaaaatcatcacaaaagcaatctgatt

SEQ ID NO: 198402 - DNA, 33 bp, Homo sapien
tgaaaaaaaaatcatcgcaaaagcaatctgatt

SEQ ID NO: 198403 - DNA, 33 bp, Homo sapien
acgcggagaatgctggaaagaataaaaccataa

SEQ ID NO: 198404 - DNA, 33 bp, Homo sapien
acgcggagaatgctgggaagaataaaaccataa

SEQ ID NO: 198405 - DNA, 33 bp, Homo sapien
tcatttatttctcacaataccttcataaatcag

SEQ ID NO: 198406 - DNA, 33 bp, Homo sapien
tcatttatttctcacagtaccttcataaatcag

SEQ ID NO: 198407 - DNA, 33 bp, Homo sapien
aaaacgtgagatcacaactcaaaaaatcaattt

SEQ ID NO: 198408 - DNA, 33 bp, Homo sapien
aaaacgtgagatcacagctcaaaaaatcaattt

SEQ ID NO: 198409 - DNA, 33 bp, Homo sapien
acatagtactttacaacagagcaggaaataaaa

SEQ ID NO: 198410 - DNA, 33 bp, Homo sapien
acatagtactttacaatagagcaggaaataaaa

SEQ ID NO: 198411 - DNA, 33 bp, Homo sapien
agtccagatggctaatcaaaactcatacttgta

SEQ ID NO: 198412 - DNA, 33 bp, Homo sapien
agtccagatggctaatgaaaactcatacttgta

SEQ ID NO: 198413 - DNA, 33 bp, Homo sapien
aggaaataatgaagaaagattctttgctgtcta

SEQ ID NO: 198414 - DNA, 33 bp, Homo sapien
aggaaataatgaagaatgattctttgctgtcta

SEQ ID NO: 198415 - DNA, 33 bp, Homo sapien
gtgctacacaaagatacgctaaaacaaaacaat

SEQ ID NO: 198416 - DNA, 33 bp, Homo sapien
gtgctacacaaagatatgctaaaacaaaacaat

SEQ ID NO: 198417 - DNA, 33 bp, Homo sapien
atgatcaggacagagccgaggtaagtttgagtt

SEQ ID NO: 198418 - DNA, 33 bp, Homo sapien
atgatcaggacagagctgaggtaagtttgagtt

SEQ ID NO: 198419 - DNA, 33 bp, Homo sapien
atttctccccatttcccaaaacttcagaagtta

SEQ ID NO: 198420 - DNA, 33 bp, Homo sapien
atttctccccatttccgaaaacttcagaagtta

SEQ ID NO: 198421 - DNA, 33 bp, Homo sapien
cctatctgaaatttacgcagtgtcagggtgata

SEQ ID NO: 198422 - DNA, 33 bp, Homo sapien
cctatctgaaatttactcagtgtcagggtgata

SEQ ID NO: 198423 - DNA, 33 bp, Homo sapien
gagttccatgccagaaagtggtactaggaaagg

SEQ ID NO: 198424 - DNA, 33 bp, Homo sapien
gagttccatgccagaatgtggtactaggaaagg

SEQ ID NO: 198425 - DNA, 33 bp, Homo sapien
atggataatcatacctcagactggatcacttat

SEQ ID NO: 198426 - DNA, 33 bp, Homo sapien
atggataatcatacctgagactggatcacttat

SEQ ID NO: 198427 - DNA, 33 bp, Homo sapien
agatacaggtccataacggaaaacacaaagatg

SEQ ID NO: 198428 - DNA, 33 bp, Homo sapien
agatacaggtccataatggaaaacacaaagatg

SEQ ID NO: 198429 - DNA, 33 bp, Homo sapien
ttatgatacaagaaaaactcattgctatgaatc

SEQ ID NO: 198430 - DNA, 33 bp, Homo sapien
ttatgatacaagaaaatctcattgctatgaatc

SEQ ID NO: 198431 - DNA, 33 bp, Homo sapien
tgtatttgatctggaaactctatttgtaagtaa

SEQ ID NO: 198432 - DNA, 33 bp, Homo sapien
tgtatttgatctggaatctctatttgtaagtaa

SEQ ID NO: 198433 - DNA, 33 bp, Homo sapien
agtgttctaaaatttcacgatgatgtatgtatc

SEQ ID NO: 198434 - DNA, 33 bp, Homo sapien
agtgttctaaaatttcgcgatgatgtatgtatc

SEQ ID NO: 198435 - DNA, 33 bp, Homo sapien
aggttgtgttctgctacagaaggaatagttaat

SEQ ID NO: 198436 - DNA, 33 bp, Homo sapien
aggttgtgttctgctagagaaggaatagttaat

SEQ ID NO: 198437 - DNA, 33 bp, Homo sapien
gggtgtggaaaagccaacatctatgactctagg

SEQ ID NO: 198438 - DNA, 33 bp, Homo sapien
gggtgtggaaaagccagcatctatgactctagg

SEQ ID NO: 198439 - DNA, 33 bp, Homo sapien
catatggtatgagatacgagtcaagaaatatta

SEQ ID NO: 198440 - DNA, 33 bp, Homo sapien
catatggtatgagatatgagtcaagaaatatta

SEQ ID NO: 198441 - DNA, 33 bp, Homo sapien
gtgagatggtgcgcacagtgacgggattccatg

SEQ ID NO: 198442 - DNA, 33 bp, Homo sapien
gtgagatggtgcgcacggtgacgggattccatg

SEQ ID NO: 198443 - DNA, 33 bp, Homo sapien
gccctttccctccccaagtattcttcctgatcc

SEQ ID NO: 198444 - DNA, 33 bp, Homo sapien
gccctttccctccccaggtattcttcctgatcc

SEQ ID NO: 198445 - DNA, 33 bp, Homo sapien
tgggatggggaaaggcaacatttcagtagcagc

SEQ ID NO: 198446 - DNA, 33 bp, Homo sapien
tgggatggggaaaggcgacatttcagtagcagc

SEQ ID NO: 198447 - DNA, 33 bp, Homo sapien
agcaatgacaaacaagcctccctgtctttccaa

SEQ ID NO: 198448 - DNA, 33 bp, Homo sapien
agcaatgacaaacaagtctccctgtctttccaa

SEQ ID NO: 198449 - DNA, 33 bp, Homo sapien
gagggcaatagctgaacggaagatgggctgcct

SEQ ID NO: 198450 - DNA, 33 bp, Homo sapien
gagggcaatagctgaatggaagatgggctgcct

SEQ ID NO: 198451 - DNA, 33 bp, Homo sapien
ctcaaaaaggagagacggaactttctaaaacta

SEQ ID NO: 198452 - DNA, 33 bp, Homo sapien
ctcaaaaaggagagactgaactttctaaaacta

SEQ ID NO: 198453 - DNA, 33 bp, Homo sapien
tgttttcagtcattcacgttaatctagaagtct

SEQ ID NO: 198454 - DNA, 33 bp, Homo sapien
tgttttcagtcattcatgttaatctagaagtct

SEQ ID NO: 198455 - DNA, 33 bp, Homo sapien
tacaatatatcatcataaactatagtcattgtg

SEQ ID NO: 198456 - DNA, 33 bp, Homo sapien
tacaatatatcatcattaactatagtcattgtg

SEQ ID NO: 198457 - DNA, 33 bp, Homo sapien
ctctgggttgatggagacactaaagtatatcat

SEQ ID NO: 198458 - DNA, 33 bp, Homo sapien
ctctgggttgatggagccactaaagtatatcat

SEQ ID NO: 198459 - DNA, 33 bp, Homo sapien
accagaaaaactatcaaagagactggcagtgtt

SEQ ID NO: 198460 - DNA, 33 bp, Homo sapien
accagaaaaactatcacagagactggcagtgtt

SEQ ID NO: 198461 - DNA, 33 bp, Homo sapien
gtctctccttcctataagggtcacctctagcac

SEQ ID NO: 198462 - DNA, 33 bp, Homo sapien
gtctctccttcctataggggtcacctctagcac

SEQ ID NO: 198463 - DNA, 33 bp, Homo sapien
gacaatgcgcaggaaccaagaactgttctggtg

SEQ ID NO: 198464 - DNA, 33 bp, Homo sapien
gacaatgcgcaggaacgaagaactgttctggtg

SEQ ID NO: 198465 - DNA, 33 bp, Homo sapien
gcttcccatttcatcacgacttctctccaccgc

SEQ ID NO: 198466 - DNA, 33 bp, Homo sapien
gcttcccatttcatcatgacttctctccaccgc

SEQ ID NO: 198467 - DNA, 33 bp, Homo sapien
aaaacgttgccactgacgagtcccaaaactaac

SEQ ID NO: 198468 - DNA, 33 bp, Homo sapien
aaaacgttgccactgatgagtcccaaaactaac

SEQ ID NO: 198469 - DNA, 33 bp, Homo sapien
gaatactatgggattacggctaaaagatggtca

SEQ ID NO: 198470 - DNA, 33 bp, Homo sapien
gaatactatgggattatggctaaaagatggtca

SEQ ID NO: 198471 - DNA, 33 bp, Homo sapien
acactctgctacaaaaagctcaactagtacgcc

SEQ ID NO: 198472 - DNA, 33 bp, Homo sapien
acactctgctacaaaacgctcaactagtacgcc

SEQ ID NO: 198473 - DNA, 33 bp, Homo sapien
gatttcataatttggaagtactgatcaatcagc

SEQ ID NO: 198474 - DNA, 33 bp, Homo sapien
gatttcataatttggaggtactgatcaatcagc

SEQ ID NO: 198475 - DNA, 33 bp, Homo sapien
atcaaatctaaacttggagggcctaactaagag

SEQ ID NO: 198476 - DNA, 33 bp, Homo sapien
atcaaatctaaacttgtagggcctaactaagag

SEQ ID NO: 198477 - DNA, 33 bp, Homo sapien
gcttttctatttacaacaatacaggtcaaaaaa

SEQ ID NO: 198478 - DNA, 33 bp, Homo sapien
gcttttctatttacaagaatacaggtcaaaaaa

SEQ ID NO: 198479 - DNA, 33 bp, Homo sapien
gcctctgctaatcctaaaatgaggtatggaact

SEQ ID NO: 198480 - DNA, 33 bp, Homo sapien
gcctctgctaatcctacaatgaggtatggaact

SEQ ID NO: 198481 - DNA, 33 bp, Homo sapien
actgattgctagggtaagggttcttttgagtat

SEQ ID NO: 198482 - DNA, 33 bp, Homo sapien
actgattgctagggtaggggttcttttgagtat

SEQ ID NO: 198483 - DNA, 33 bp, Homo sapien
catttgttctattcaaagtcattaaggttaaat

SEQ ID NO: 198484 - DNA, 33 bp, Homo sapien
catttgttctattcaacgtcattaaggttaaat

SEQ ID NO: 198485 - DNA, 33 bp, Homo sapien
agaccacaaagagaacaagaaagatagccagtg

SEQ ID NO: 198486 - DNA, 33 bp, Homo sapien
agaccacaaagagaacgagaaagatagccagtg

SEQ ID NO: 198487 - DNA, 33 bp, Homo sapien
ttctaagtgctgaatccattgggagtgaacaaa

SEQ ID NO: 198488 - DNA, 33 bp, Homo sapien
ttctaagtgctgaatctattgggagtgaacaaa

SEQ ID NO: 198489 - DNA, 33 bp, Homo sapien
gggctatccgccaagaagcagttttaaagggtc

SEQ ID NO: 198490 - DNA, 33 bp, Homo sapien
gggctatccgccaagaggcagttttaaagggtc

SEQ ID NO: 198491 - DNA, 33 bp, Homo sapien
ccttcctttactcacaactgtcttggtaaattc

SEQ ID NO: 198492 - DNA, 33 bp, Homo sapien
ccttcctttactcacagctgtcttggtaaattc

SEQ ID NO: 198493 - DNA, 33 bp, Homo sapien
ttcatctaacacgaggccctagtgccaggagac

SEQ ID NO: 198494 - DNA, 33 bp, Homo sapien
ttcatctaacacgaggtcctagtgccaggagac

SEQ ID NO: 198495 - DNA, 33 bp, Homo sapien
atctttgggaacagaccgatatactgtttgcag

SEQ ID NO: 198496 - DNA, 33 bp, Homo sapien
atctttgggaacagactgatatactgtttgcag

SEQ ID NO: 198497 - DNA, 33 bp, Homo sapien
gatgagtactgagaacagggagacttgtgccct

SEQ ID NO: 198498 - DNA, 33 bp, Homo sapien
gatgagtactgagaactgggagacttgtgccct

SEQ ID NO: 198499 - DNA, 33 bp, Homo sapien
ctataagtattgtgtgcactgtaattctgcaca

SEQ ID NO: 198500 - DNA, 33 bp, Homo sapien
ctataagtattgtgtgtactgtaattctgcaca

SEQ ID NO: 198501 - DNA, 33 bp, Homo sapien
ctctgccacttgtaggaagatggggaacatttg

SEQ ID NO: 198502 - DNA, 33 bp, Homo sapien
ctctgccacttgtagggagatggggaacatttg

SEQ ID NO: 198503 - DNA, 33 bp, Homo sapien
cagcagtcctgcgacacagggagagcagctacc

SEQ ID NO: 198504 - DNA, 33 bp, Homo sapien
cagcagtcctgcgacatagggagagcagctacc

SEQ ID NO: 198505 - DNA, 33 bp, Homo sapien
agggtcctgtatctctaaatgtgaaaacttcca

SEQ ID NO: 198506 - DNA, 33 bp, Homo sapien
agggtcctgtatctctgaatgtgaaaacttcca

SEQ ID NO: 198507 - DNA, 33 bp, Homo sapien
cagggaattttgacatcatgggaacaggtagcc

SEQ ID NO: 198508 - DNA, 33 bp, Homo sapien
cagggaattttgacattatgggaacaggtagcc

SEQ ID NO: 198509 - DNA, 33 bp, Homo sapien
gtcctgcctgtctttaagtaccttgaccctggt

SEQ ID NO: 198510 - DNA, 33 bp, Homo sapien
gtcctgcctgtctttatgtaccttgaccctggt

SEQ ID NO: 198511 - DNA, 33 bp, Homo sapien
gcttccatcctgggaaagaacacaacttgggac

SEQ ID NO: 198512 - DNA, 33 bp, Homo sapien
gcttccatcctgggaatgaacacaacttgggac

SEQ ID NO: 198513 - DNA, 33 bp, Homo sapien
catggccttgacatcacgggtgctcagaacgct

SEQ ID NO: 198514 - DNA, 33 bp, Homo sapien
catggccttgacatcatgggtgctcagaacgct

SEQ ID NO: 198515 - DNA, 33 bp, Homo sapien
caggtcagctttgctcaaattttgttttcattt

SEQ ID NO: 198516 - DNA, 33 bp, Homo sapien
caggtcagctttgctctaattttgttttcattt

SEQ ID NO: 198517 - DNA, 33 bp, Homo sapien
agttttctgagctcaccggcttctttcttccag

SEQ ID NO: 198518 - DNA, 33 bp, Homo sapien
agttttctgagctcactggcttctttcttccag

SEQ ID NO: 198519 - DNA, 33 bp, Homo sapien
agtctgcttggtctcaatctataaattctcaag

SEQ ID NO: 198520 - DNA, 33 bp, Homo sapien
agtctgcttggtctcagtctataaattctcaag

SEQ ID NO: 198521 - DNA, 33 bp, Homo sapien
ctgggccctccaagcacgaggagagaaataagg

SEQ ID NO: 198522 - DNA, 33 bp, Homo sapien
ctgggccctccaagcatgaggagagaaataagg

SEQ ID NO: 198523 - DNA, 33 bp, Homo sapien
aataggctttggtatggataacaagaggtggcc

SEQ ID NO: 198524 - DNA, 33 bp, Homo sapien
aataggctttggtatgtataacaagaggtggcc

SEQ ID NO: 198525 - DNA, 33 bp, Homo sapien
ccatattccctaacaccaaaggctgctgccatg

SEQ ID NO: 198526 - DNA, 33 bp, Homo sapien
ccatattccctaacactaaaggctgctgccatg

SEQ ID NO: 198527 - DNA, 33 bp, Homo sapien
ggcttttgctctccaactactctaaagacactg

SEQ ID NO: 198528 - DNA, 33 bp, Homo sapien
ggcttttgctctccaagtactctaaagacactg

SEQ ID NO: 198529 - DNA, 33 bp, Homo sapien
aaaaagaaatgttccactgagggcagacaatct

SEQ ID NO: 198530 - DNA, 33 bp, Homo sapien
aaaaagaaatgttccattgagggcagacaatct

SEQ ID NO: 198531 - DNA, 33 bp, Homo sapien
tttactttacttgttcaaactatgtacatatat

SEQ ID NO: 198532 - DNA, 33 bp, Homo sapien
tttactttacttgttcgaactatgtacatatat

SEQ ID NO: 198533 - DNA, 33 bp, Homo sapien
gtatatatataccacaaacattcacacaattac

SEQ ID NO: 198534 - DNA, 33 bp, Homo sapien
gtatatatataccacagacattcacacaattac

SEQ ID NO: 198535 - DNA, 33 bp, Homo sapien
ctacctaaatatcaagaccaggattttctacct

SEQ ID NO: 198536 - DNA, 33 bp, Homo sapien
ctacctaaatatcaaggccaggattttctacct

SEQ ID NO: 198537 - DNA, 33 bp, Homo sapien
caggactgaactgcaactcttggtgatttttag

SEQ ID NO: 198538 - DNA, 33 bp, Homo sapien
caggactgaactgcaattcttggtgatttttag

SEQ ID NO: 198539 - DNA, 33 bp, Homo sapien
aacttggaaatttagcagagatttgcaagcaaa

SEQ ID NO: 198540 - DNA, 33 bp, Homo sapien
aacttggaaatttagctgagatttgcaagcaaa

SEQ ID NO: 198541 - DNA, 33 bp, Homo sapien
tgtgaagtagcatctcactgtacttttgatttg

SEQ ID NO: 198542 - DNA, 33 bp, Homo sapien
tgtgaagtagcatctcgctgtacttttgatttg

SEQ ID NO: 198543 - DNA, 33 bp, Homo sapien
tcaatatttgcatttcaaagagaattctgaaaa

SEQ ID NO: 198544 - DNA, 33 bp, Homo sapien
tcaatatttgcatttcgaagagaattctgaaaa

SEQ ID NO: 198545 - DNA, 33 bp, Homo sapien
gagaaggatggtctaaagaagtatacgaggaaa

SEQ ID NO: 198546 - DNA, 33 bp, Homo sapien
gagaaggatggtctaaggaagtatacgaggaaa

SEQ ID NO: 198547 - DNA, 33 bp, Homo sapien
ccagcaatctcatttcaaggtatatctccaaaa

SEQ ID NO: 198548 - DNA, 33 bp, Homo sapien
ccagcaatctcatttcgaggtatatctccaaaa

SEQ ID NO: 198549 - DNA, 33 bp, Homo sapien
cacaagtttccaccatcatacctacccatctac

SEQ ID NO: 198550 - DNA, 33 bp, Homo sapien
cacaagtttccaccattatacctacccatctac

SEQ ID NO: 198551 - DNA, 33 bp, Homo sapien
gtcttgttctctgtatcactgaccactatttga

SEQ ID NO: 198552 - DNA, 33 bp, Homo sapien
gtcttgttctctgtattactgaccactatttga

SEQ ID NO: 198553 - DNA, 33 bp, Homo sapien
agacagagctgtatcacagtcacgttttatgtg

SEQ ID NO: 198554 - DNA, 33 bp, Homo sapien
agacagagctgtatcagagtcacgttttatgtg

SEQ ID NO: 198555 - DNA, 33 bp, Homo sapien
agttccaatcttgctccacttcaagctctgttt

SEQ ID NO: 198556 - DNA, 33 bp, Homo sapien
agttccaatcttgctctacttcaagctctgttt

SEQ ID NO: 198557 - DNA, 33 bp, Homo sapien
catcggcacctctagacggctaggagataatac

SEQ ID NO: 198558 - DNA, 33 bp, Homo sapien
catcggcacctctagatggctaggagataatac

SEQ ID NO: 198559 - DNA, 33 bp, Homo sapien
cagtgtcattagcggcaattcactaaatcaaac

SEQ ID NO: 198560 - DNA, 33 bp, Homo sapien
cagtgtcattagcggcgattcactaaatcaaac

SEQ ID NO: 198561 - DNA, 33 bp, Homo sapien
ctttccgctgccttcccaatgatagtgttgggt

SEQ ID NO: 198562 - DNA, 33 bp, Homo sapien
ctttccgctgccttcctaatgatagtgttgggt

SEQ ID NO: 198563 - DNA, 33 bp, Homo sapien
catgctcagagagatcaagatgactcggggctt

SEQ ID NO: 198564 - DNA, 33 bp, Homo sapien
catgctcagagagatcgagatgactcggggctt

SEQ ID NO: 198565 - DNA, 33 bp, Homo sapien
attgggcttgggctacaaggctccttctcactt

SEQ ID NO: 198566 - DNA, 33 bp, Homo sapien
attgggcttgggctacgaggctccttctcactt

SEQ ID NO: 198567 - DNA, 33 bp, Homo sapien
ggtgcggcggtgcagacggagacctgggcagaa

SEQ ID NO: 198568 - DNA, 33 bp, Homo sapien
ggtgcggcggtgcagatggagacctgggcagaa

SEQ ID NO: 198569 - DNA, 33 bp, Homo sapien
gcagaaggaatagcacaagcaagtagggcaaat

SEQ ID NO: 198570 - DNA, 33 bp, Homo sapien
gcagaaggaatagcacgagcaagtagggcaaat

SEQ ID NO: 198571 - DNA, 33 bp, Homo sapien
ggagccctgaggtctgcaacaaccatctcctgc

SEQ ID NO: 198572 - DNA, 33 bp, Homo sapien
ggagccctgaggtctggaacaaccatctcctgc

SEQ ID NO: 198573 - DNA, 33 bp, Homo sapien
gctgagataaatgggacatgtgatattgctttg

SEQ ID NO: 198574 - DNA, 33 bp, Homo sapien
gctgagataaatgggatatgtgatattgctttg

SEQ ID NO: 198575 - DNA, 33 bp, Homo sapien
ggaaaggatatgctcacactcttgcttgttcag

SEQ ID NO: 198576 - DNA, 33 bp, Homo sapien
ggaaaggatatgctcagactcttgcttgttcag

SEQ ID NO: 198577 - DNA, 33 bp, Homo sapien
tgagcacaggtgccaacggtgacaagactggca

SEQ ID NO: 198578 - DNA, 33 bp, Homo sapien
tgagcacaggtgccaatggtgacaagactggca

SEQ ID NO: 198579 - DNA, 33 bp, Homo sapien
tcttttttctcatgtacagaggagactcagggc

SEQ ID NO: 198580 - DNA, 33 bp, Homo sapien
tcttttttctcatgtatagaggagactcagggc

SEQ ID NO: 198581 - DNA, 33 bp, Homo sapien
agcctttctaggaccacgcaaaagcttctcatt

SEQ ID NO: 198582 - DNA, 33 bp, Homo sapien
agcctttctaggaccatgcaaaagcttctcatt

SEQ ID NO: 198583 - DNA, 33 bp, Homo sapien
ttcttattcaagaggacgaaaactcccagtcct

SEQ ID NO: 198584 - DNA, 33 bp, Homo sapien
ttcttattcaagaggatgaaaactcccagtcct

SEQ ID NO: 198585 - DNA, 33 bp, Homo sapien
tatagccatgttacagaatgggtaagtgagata

SEQ ID NO: 198586 - DNA, 33 bp, Homo sapien
tatagccatgttacaggatgggtaagtgagata

SEQ ID NO: 198587 - DNA, 33 bp, Homo sapien
gaggtatgagatacagaaagcatggtgagaaaa

SEQ ID NO: 198588 - DNA, 33 bp, Homo sapien
gaggtatgagatacaggaagcatggtgagaaaa

SEQ ID NO: 198589 - DNA, 33 bp, Homo sapien
atttgtgagcttctgcaaatattctattcctaa

SEQ ID NO: 198590 - DNA, 33 bp, Homo sapien
atttgtgagcttctgcgaatattctattcctaa

SEQ ID NO: 198591 - DNA, 33 bp, Homo sapien
atgatgatacatggacgcactgctttgattaca

SEQ ID NO: 198592 - DNA, 33 bp, Homo sapien
atgatgatacatggactcactgctttgattaca

SEQ ID NO: 198593 - DNA, 33 bp, Homo sapien
atgctgccttggatagaacttggtagcattgga

SEQ ID NO: 198594 - DNA, 33 bp, Homo sapien
atgctgccttggatagtacttggtagcattgga

SEQ ID NO: 198595 - DNA, 33 bp, Homo sapien
gaagcaaagcatagaaaagtgaatgtctttggc

SEQ ID NO: 198596 - DNA, 33 bp, Homo sapien
gaagcaaagcatagaagagtgaatgtctttggc

SEQ ID NO: 198597 - DNA, 33 bp, Homo sapien
ctccttgacggatgcacatgaaaggtagtgcct

SEQ ID NO: 198598 - DNA, 33 bp, Homo sapien
ctccttgacggatgcatatgaaaggtagtgcct

SEQ ID NO: 198599 - DNA, 33 bp, Homo sapien
tgtctggttgtcaggaagggacatggtatctcg

SEQ ID NO: 198600 - DNA, 33 bp, Homo sapien
tgtctggttgtcaggacgggacatggtatctcg

SEQ ID NO: 198601 - DNA, 33 bp, Homo sapien
tggtgatgaagtaacaaacttggaaacaagtga

SEQ ID NO: 198602 - DNA, 33 bp, Homo sapien
tggtgatgaagtaacagacttggaaacaagtga

SEQ ID NO: 198603 - DNA, 33 bp, Homo sapien
gagagggggactggacagaacagaaaggcctat

SEQ ID NO: 198604 - DNA, 33 bp, Homo sapien
gagagggggactggacggaacagaaaggcctat

SEQ ID NO: 198605 - DNA, 33 bp, Homo sapien
tcataagtagttttcacgtaactggagatccct

SEQ ID NO: 198606 - DNA, 33 bp, Homo sapien
tcataagtagttttcatgtaactggagatccct

SEQ ID NO: 198607 - DNA, 33 bp, Homo sapien
tcactaaatgtctgagaaaatgaaatgggaatg

SEQ ID NO: 198608 - DNA, 33 bp, Homo sapien
tcactaaatgtctgagcaaatgaaatgggaatg

SEQ ID NO: 198609 - DNA, 33 bp, Homo sapien
tggcctcgggatcaaaaccattcagagaagtcc

SEQ ID NO: 198610 - DNA, 33 bp, Homo sapien
tggcctcgggatcaaagccattcagagaagtcc

SEQ ID NO: 198611 - DNA, 33 bp, Homo sapien
ctacacaatcacgaggccacgtggagacgctga

SEQ ID NO: 198612 - DNA, 33 bp, Homo sapien
ctacacaatcacgaggtcacgtggagacgctga

SEQ ID NO: 198613 - DNA, 33 bp, Homo sapien
ctggtaacaatctcagcctattcaaattactaa

SEQ ID NO: 198614 - DNA, 33 bp, Homo sapien
ctggtaacaatctcagtctattcaaattactaa

SEQ ID NO: 198615 - DNA, 33 bp, Homo sapien
tcaaatgctctataaccggtggcagccaaaagc

SEQ ID NO: 198616 - DNA, 33 bp, Homo sapien
tcaaatgctctataactggtggcagccaaaagc

SEQ ID NO: 198617 - DNA, 33 bp, Homo sapien
agatgatggacagagaagtgacgtggaaaaagc

SEQ ID NO: 198618 - DNA, 33 bp, Homo sapien
agatgatggacagagaggtgacgtggaaaaagc

SEQ ID NO: 198619 - DNA, 33 bp, Homo sapien
acttttccacctacacagtctttatgcttgaaa

SEQ ID NO: 198620 - DNA, 33 bp, Homo sapien
acttttccacctacacggtctttatgcttgaaa

SEQ ID NO: 198621 - DNA, 33 bp, Homo sapien
tacacaggttttgcaacagcctcgacttgggct

SEQ ID NO: 198622 - DNA, 33 bp, Homo sapien
tacacaggttttgcaagagcctcgacttgggct

SEQ ID NO: 198623 - DNA, 33 bp, Homo sapien
ccttgccgaagatcaacgtggccatagctgttt

SEQ ID NO: 198624 - DNA, 33 bp, Homo sapien
ccttgccgaagatcaatgtggccatagctgttt

SEQ ID NO: 198625 - DNA, 33 bp, Homo sapien
agaataggatcttacacacctccagcgacccag

SEQ ID NO: 198626 - DNA, 33 bp, Homo sapien
agaataggatcttacatacctccagcgacccag

SEQ ID NO: 198627 - DNA, 33 bp, Homo sapien
ggtcttctaggcttgaaatcttgcagtccctct

SEQ ID NO: 198628 - DNA, 33 bp, Homo sapien
ggtcttctaggcttgagatcttgcagtccctct

SEQ ID NO: 198629 - DNA, 33 bp, Homo sapien
tttagaatagcaattaccagttccaatatcccc

SEQ ID NO: 198630 - DNA, 33 bp, Homo sapien
tttagaatagcaattatcagttccaatatcccc

SEQ ID NO: 198631 - DNA, 33 bp, Homo sapien
ccctgtgctacgcaaccgctctccacacagggc

SEQ ID NO: 198632 - DNA, 33 bp, Homo sapien
ccctgtgctacgcaactgctctccacacagggc

SEQ ID NO: 198633 - DNA, 33 bp, Homo sapien
cattttacattcgtggaaaaatatccaagtggg

SEQ ID NO: 198634 - DNA, 33 bp, Homo sapien
cattttacattcgtggcaaaatatccaagtggg

SEQ ID NO: 198635 - DNA, 33 bp, Homo sapien
aggaattttgtgtctagatgggttgctcccatc

SEQ ID NO: 198636 - DNA, 33 bp, Homo sapien
aggaattttgtgtctatatgggttgctcccatc

SEQ ID NO: 198637 - DNA, 33 bp, Homo sapien
ttgtactgaaggaaaacatagtgagacactcaa

SEQ ID NO: 198638 - DNA, 33 bp, Homo sapien
ttgtactgaaggaaaatatagtgagacactcaa

SEQ ID NO: 198639 - DNA, 33 bp, Homo sapien
tccatacacatagcaacgagagacccagtaagt

SEQ ID NO: 198640 - DNA, 33 bp, Homo sapien
tccatacacatagcaatgagagacccagtaagt

SEQ ID NO: 198641 - DNA, 33 bp, Homo sapien
gagataaggctctggaagaaaaccttgaaggaa

SEQ ID NO: 198642 - DNA, 33 bp, Homo sapien
gagataaggctctggaggaaaaccttgaaggaa

SEQ ID NO: 198643 - DNA, 33 bp, Homo sapien
agtgagttaaagtgaaccgtttgctgacccaaa

SEQ ID NO: 198644 - DNA, 33 bp, Homo sapien
agtgagttaaagtgaatcgtttgctgacccaaa

SEQ ID NO: 198645 - DNA, 33 bp, Homo sapien
tcacaggttgaacgacacatcccagtttgcctg

SEQ ID NO: 198646 - DNA, 33 bp, Homo sapien
tcacaggttgaacgacgcatcccagtttgcctg

SEQ ID NO: 198647 - DNA, 33 bp, Homo sapien
gaggtctggaattagaaccatcgacttccccag

SEQ ID NO: 198648 - DNA, 33 bp, Homo sapien
gaggtctggaattagagccatcgacttccccag

SEQ ID NO: 198649 - DNA, 33 bp, Homo sapien
ttcttcatgcagcacaatcctcagtgtctagca

SEQ ID NO: 198650 - DNA, 33 bp, Homo sapien
ttcttcatgcagcacattcctcagtgtctagca

SEQ ID NO: 198651 - DNA, 33 bp, Homo sapien
gcagaatccagaggaaaactgtgtttaaaacat

SEQ ID NO: 198652 - DNA, 33 bp, Homo sapien
gcagaatccagaggaacactgtgtttaaaacat

SEQ ID NO: 198653 - DNA, 33 bp, Homo sapien
gaggagataggacaaacgtaagtagctgtaatg

SEQ ID NO: 198654 - DNA, 33 bp, Homo sapien
gaggagataggacaaatgtaagtagctgtaatg

SEQ ID NO: 198655 - DNA, 33 bp, Homo sapien
agtgtggccacagaacagaggtagattgtaagt

SEQ ID NO: 198656 - DNA, 33 bp, Homo sapien
agtgtggccacagaaccgaggtagattgtaagt

SEQ ID NO: 198657 - DNA, 33 bp, Homo sapien
agtgcaaattccctcacctggcatagaaaacct

SEQ ID NO: 198658 - DNA, 33 bp, Homo sapien
agtgcaaattccctcagctggcatagaaaacct

SEQ ID NO: 198659 - DNA, 33 bp, Homo sapien
tccctcctgcttttgacgtttctattttcaggg

SEQ ID NO: 198660 - DNA, 33 bp, Homo sapien
tccctcctgcttttgaggtttctattttcaggg

SEQ ID NO: 198661 - DNA, 33 bp, Homo sapien
gcaggtctctggcagacagcgactggggcctgg

SEQ ID NO: 198662 - DNA, 33 bp, Homo sapien
gcaggtctctggcagagagcgactggggcctgg

SEQ ID NO: 198663 - DNA, 33 bp, Homo sapien
ccattcccaaagctcagatcagcagaggagtca

SEQ ID NO: 198664 - DNA, 33 bp, Homo sapien
ccattcccaaagctcatatcagcagaggagtca

SEQ ID NO: 198665 - DNA, 33 bp, Homo sapien
taggcctataagccaaccttccagaagagaaac

SEQ ID NO: 198666 - DNA, 33 bp, Homo sapien
taggcctataagccaagcttccagaagagaaac

SEQ ID NO: 198667 - DNA, 33 bp, Homo sapien
accttgctgagctggcactactctctcctctag

SEQ ID NO: 198668 - DNA, 33 bp, Homo sapien
accttgctgagctggcgctactctctcctctag

SEQ ID NO: 198669 - DNA, 33 bp, Homo sapien
catatgcaaagataacaagacatggagtccaga

SEQ ID NO: 198670 - DNA, 33 bp, Homo sapien
catatgcaaagataacgagacatggagtccaga

SEQ ID NO: 198671 - DNA, 33 bp, Homo sapien
gagggagtctatcacaatatacctgggactttc

SEQ ID NO: 198672 - DNA, 33 bp, Homo sapien
gagggagtctatcacagtatacctgggactttc

SEQ ID NO: 198673 - DNA, 33 bp, Homo sapien
cttcatttgagagagacctccaagtgcagtgga

SEQ ID NO: 198674 - DNA, 33 bp, Homo sapien
cttcatttgagagagagctccaagtgcagtgga

SEQ ID NO: 198675 - DNA, 33 bp, Homo sapien
ctcatgtggataagcacagaggaacaaaggggt

SEQ ID NO: 198676 - DNA, 33 bp, Homo sapien
ctcatgtggataagcagagaggaacaaaggggt

SEQ ID NO: 198677 - DNA, 33 bp, Homo sapien
gtgcaaatgccaccgacggtcccaggcagagct

SEQ ID NO: 198678 - DNA, 33 bp, Homo sapien
gtgcaaatgccaccgatggtcccaggcagagct

SEQ ID NO: 198679 - DNA, 33 bp, Homo sapien
ggttgtcaggaacacaaatctctctgcactctg

SEQ ID NO: 198680 - DNA, 33 bp, Homo sapien
ggttgtcaggaacacacatctctctgcactctg

SEQ ID NO: 198681 - DNA, 33 bp, Homo sapien
aatggagatgcgaaccacttgtgccattagaca

SEQ ID NO: 198682 - DNA, 33 bp, Homo sapien
aatggagatgcgaaccgcttgtgccattagaca

SEQ ID NO: 198683 - DNA, 33 bp, Homo sapien
caccagggcaatttccaaaccgctttttacaaa

SEQ ID NO: 198684 - DNA, 33 bp, Homo sapien
caccagggcaatttccgaaccgctttttacaaa

SEQ ID NO: 198685 - DNA, 33 bp, Homo sapien
ttgagctgtgctaaccacctttggaagcttatc

SEQ ID NO: 198686 - DNA, 33 bp, Homo sapien
ttgagctgtgctaaccgcctttggaagcttatc

SEQ ID NO: 198687 - DNA, 33 bp, Homo sapien
ctccatctaagaaatacgtacaaagcacctgcg

SEQ ID NO: 198688 - DNA, 33 bp, Homo sapien
ctccatctaagaaataggtacaaagcacctgcg

SEQ ID NO: 198689 - DNA, 33 bp, Homo sapien
gaggtagcaaagtgcaaccatgttctcacttga

SEQ ID NO: 198690 - DNA, 33 bp, Homo sapien
gaggtagcaaagtgcatccatgttctcacttga

SEQ ID NO: 198691 - DNA, 33 bp, Homo sapien
caaatgagtgttgtgcacttaaggaaattggct

SEQ ID NO: 198692 - DNA, 33 bp, Homo sapien
caaatgagtgttgtgcccttaaggaaattggct

SEQ ID NO: 198693 - DNA, 33 bp, Homo sapien
tcctgaccttagacaagccattagcatctctga

SEQ ID NO: 198694 - DNA, 33 bp, Homo sapien
tcctgaccttagacaatccattagcatctctga

SEQ ID NO: 198695 - DNA, 33 bp, Homo sapien
cacacactgcaatctcactagagcttaagacct

SEQ ID NO: 198696 - DNA, 33 bp, Homo sapien
cacacactgcaatctcgctagagcttaagacct

SEQ ID NO: 198697 - DNA, 33 bp, Homo sapien
ggaccctctgatacccacagggagcttggcctg

SEQ ID NO: 198698 - DNA, 33 bp, Homo sapien
ggaccctctgatacccgcagggagcttggcctg

SEQ ID NO: 198699 - DNA, 33 bp, Homo sapien
cagactgaattctactaaccaacattgattgga

SEQ ID NO: 198700 - DNA, 33 bp, Homo sapien
cagactgaattctactgaccaacattgattgga

SEQ ID NO: 198701 - DNA, 33 bp, Homo sapien
gaaaccaaggtaaagaagtggagtggcatttgc

SEQ ID NO: 198702 - DNA, 33 bp, Homo sapien
gaaaccaaggtaaagaggtggagtggcatttgc

SEQ ID NO: 198703 - DNA, 33 bp, Homo sapien
taaagctcaaaggacaacatcctggaaaagcac

SEQ ID NO: 198704 - DNA, 33 bp, Homo sapien
taaagctcaaaggacagcatcctggaaaagcac

SEQ ID NO: 198705 - DNA, 33 bp, Homo sapien
gagggggctgtagaacaaaagggcagagtctgg

SEQ ID NO: 198706 - DNA, 33 bp, Homo sapien
gagggggctgtagaacgaaagggcagagtctgg

SEQ ID NO: 198707 - DNA, 33 bp, Homo sapien
tggaaggcatggaaggaaaagtcagagagaggc

SEQ ID NO: 198708 - DNA, 33 bp, Homo sapien
tggaaggcatggaagggaaagtcagagagaggc

SEQ ID NO: 198709 - DNA, 33 bp, Homo sapien
agtctcagaggatgagaaagattctgctagatg

SEQ ID NO: 198710 - DNA, 33 bp, Homo sapien
agtctcagaggatgagtaagattctgctagatg

SEQ ID NO: 198711 - DNA, 33 bp, Homo sapien
ggagaagcctggtgccaggaacaagctaggagt

SEQ ID NO: 198712 - DNA, 33 bp, Homo sapien
ggagaagcctggtgccgggaacaagctaggagt

SEQ ID NO: 198713 - DNA, 33 bp, Homo sapien
ggggtgccctgacttgaaaacactaatactgct

SEQ ID NO: 198714 - DNA, 33 bp, Homo sapien
ggggtgccctgacttgtaaacactaatactgct

SEQ ID NO: 198715 - DNA, 33 bp, Homo sapien
tgtgtcctgaaggccagctaagaggtcaaaaat

SEQ ID NO: 198716 - DNA, 33 bp, Homo sapien
tgtgtcctgaaggccatctaagaggtcaaaaat

SEQ ID NO: 198717 - DNA, 33 bp, Homo sapien
agtcatacgtggtccaaaagtaatgagattaga

SEQ ID NO: 198718 - DNA, 33 bp, Homo sapien
agtcatacgtggtccacaagtaatgagattaga

SEQ ID NO: 198719 - DNA, 33 bp, Homo sapien
gcactttctaaacatacagtcatccttcagtgc

SEQ ID NO: 198720 - DNA, 33 bp, Homo sapien
gcactttctaaacatatagtcatccttcagtgc

SEQ ID NO: 198721 - DNA, 33 bp, Homo sapien
tttctcttcactcccaactaaaacgtaagctca

SEQ ID NO: 198722 - DNA, 33 bp, Homo sapien
tttctcttcactcccagctaaaacgtaagctca

SEQ ID NO: 198723 - DNA, 33 bp, Homo sapien
tgattagtccagatgacgctctggtatgatcca

SEQ ID NO: 198724 - DNA, 33 bp, Homo sapien
tgattagtccagatgatgctctggtatgatcca

SEQ ID NO: 198725 - DNA, 33 bp, Homo sapien
agttgttgcccattaccgataaggaaaagctgg

SEQ ID NO: 198726 - DNA, 33 bp, Homo sapien
agttgttgcccattactgataaggaaaagctgg

SEQ ID NO: 198727 - DNA, 33 bp, Homo sapien
gagatgagctagccgacggtgacaaagccagtt

SEQ ID NO: 198728 - DNA, 33 bp, Homo sapien
gagatgagctagccgatggtgacaaagccagtt

SEQ ID NO: 198729 - DNA, 33 bp, Homo sapien
agtcgtggcagatgtcccgtccttaccccacat

SEQ ID NO: 198730 - DNA, 33 bp, Homo sapien
agtcgtggcagatgtctcgtccttaccccacat

SEQ ID NO: 198731 - DNA, 33 bp, Homo sapien
tccatcccagctcctacagaaatggctgcggca

SEQ ID NO: 198732 - DNA, 33 bp, Homo sapien
tccatcccagctcctatagaaatggctgcggca

SEQ ID NO: 198733 - DNA, 33 bp, Homo sapien
ctcctggccaacatgacgtaggttccccagggt

SEQ ID NO: 198734 - DNA, 33 bp, Homo sapien
ctcctggccaacatgaggtaggttccccagggt

SEQ ID NO: 198735 - DNA, 33 bp, Homo sapien
ttttgtattaccatcacacgagataggtgtgtt

SEQ ID NO: 198736 - DNA, 33 bp, Homo sapien
ttttgtattaccatcatacgagataggtgtgtt

SEQ ID NO: 198737 - DNA, 33 bp, Homo sapien
gatatactgcgcagccaagcagggacataaaat

SEQ ID NO: 198738 - DNA, 33 bp, Homo sapien
gatatactgcgcagccgagcagggacataaaat

SEQ ID NO: 198739 - DNA, 33 bp, Homo sapien
aggtagagtgtgggtgcacggaaagagatatcg

SEQ ID NO: 198740 - DNA, 33 bp, Homo sapien
aggtagagtgtgggtgtacggaaagagatatcg

SEQ ID NO: 198741 - DNA, 33 bp, Homo sapien
atccttcactccctccactccaattcccatagc

SEQ ID NO: 198742 - DNA, 33 bp, Homo sapien
atccttcactccctccgctccaattcccatagc

SEQ ID NO: 198743 - DNA, 33 bp, Homo sapien
tttaacatttatggggcacattttaatgagact

SEQ ID NO: 198744 - DNA, 33 bp, Homo sapien
tttaacatttatggggtacattttaatgagact

SEQ ID NO: 198745 - DNA, 33 bp, Homo sapien
gggaccatcacaaggaagtttttagaaatatag

SEQ ID NO: 198746 - DNA, 33 bp, Homo sapien
gggaccatcacaaggaggtttttagaaatatag

SEQ ID NO: 198747 - DNA, 33 bp, Homo sapien
ttcccagtctttgcaccgacctgacacaacttg

SEQ ID NO: 198748 - DNA, 33 bp, Homo sapien
ttcccagtctttgcactgacctgacacaacttg

SEQ ID NO: 198749 - DNA, 33 bp, Homo sapien
gagaatgaaccacagcaatggataggaaagtgc

SEQ ID NO: 198750 - DNA, 33 bp, Homo sapien
gagaatgaaccacagcgatggataggaaagtgc

SEQ ID NO: 198751 - DNA, 33 bp, Homo sapien
gtggaatgtcaggaaacacttcaaaattgcaat

SEQ ID NO: 198752 - DNA, 33 bp, Homo sapien
gtggaatgtcaggaaagacttcaaaattgcaat

SEQ ID NO: 198753 - DNA, 33 bp, Homo sapien
ggcaatttggaaaacccgaaaggcaggagacct

SEQ ID NO: 198754 - DNA, 33 bp, Homo sapien
ggcaatttggaaaacctgaaaggcaggagacct

SEQ ID NO: 198755 - DNA, 33 bp, Homo sapien
tccgttactcttacggccaaatgatagtaaaat

SEQ ID NO: 198756 - DNA, 33 bp, Homo sapien
tccgttactcttacggtcaaatgatagtaaaat

SEQ ID NO: 198757 - DNA, 33 bp, Homo sapien
cccggacctatgcaacgggaggctctaatctct

SEQ ID NO: 198758 - DNA, 33 bp, Homo sapien
cccggacctatgcaactggaggctctaatctct

SEQ ID NO: 198759 - DNA, 33 bp, Homo sapien
aagagtgtgtccaggcactagaatcaggttgca

SEQ ID NO: 198760 - DNA, 33 bp, Homo sapien
aagagtgtgtccaggcgctagaatcaggttgca

SEQ ID NO: 198761 - DNA, 33 bp, Homo sapien
ctttataaaatggagacagaaatgctacctatg

SEQ ID NO: 198762 - DNA, 33 bp, Homo sapien
ctttataaaatggagatagaaatgctacctatg

SEQ ID NO: 198763 - DNA, 33 bp, Homo sapien
tttaattcttatagcaaccttgaagcaggtgga

SEQ ID NO: 198764 - DNA, 33 bp, Homo sapien
tttaattcttatagcagccttgaagcaggtgga

SEQ ID NO: 198765 - DNA, 33 bp, Homo sapien
ttgtttcttgagcagacctagtggccgtgctgg

SEQ ID NO: 198766 - DNA, 33 bp, Homo sapien
ttgtttcttgagcagagctagtggccgtgctgg

SEQ ID NO: 198767 - DNA, 33 bp, Homo sapien
agggtttgcagaactccctccaggtgtgaggag

SEQ ID NO: 198768 - DNA, 33 bp, Homo sapien
agggtttgcagaactctctccaggtgtgaggag

SEQ ID NO: 198769 - DNA, 33 bp, Homo sapien
tcctttacccaaaaccaaactctgatatcaggg

SEQ ID NO: 198770 - DNA, 33 bp, Homo sapien
tcctttacccaaaaccgaactctgatatcaggg

SEQ ID NO: 198771 - DNA, 33 bp, Homo sapien
tcagcatgcatttatcaagccccgactctgtcc

SEQ ID NO: 198772 - DNA, 33 bp, Homo sapien
tcagcatgcatttatcgagccccgactctgtcc

SEQ ID NO: 198773 - DNA, 33 bp, Homo sapien
catcttattattcagacattctactacaggtgt

SEQ ID NO: 198774 - DNA, 33 bp, Homo sapien
catcttattattcagagattctactacaggtgt

SEQ ID NO: 198775 - DNA, 33 bp, Homo sapien
aaatacactggactggaatagagacaccgggct

SEQ ID NO: 198776 - DNA, 33 bp, Homo sapien
aaatacactggactggtatagagacaccgggct

SEQ ID NO: 198777 - DNA, 33 bp, Homo sapien
ggaagaccgtctcccgcataacacctgcatcca

SEQ ID NO: 198778 - DNA, 33 bp, Homo sapien
ggaagaccgtctcccgtataacacctgcatcca

SEQ ID NO: 198779 - DNA, 33 bp, Homo sapien
gccttttgtaccatgacggacctgatttaattt

SEQ ID NO: 198780 - DNA, 33 bp, Homo sapien
gccttttgtaccatgatggacctgatttaattt

SEQ ID NO: 198781 - DNA, 33 bp, Homo sapien
ttgtaatgcttacaggcatgatgcttagtactt

SEQ ID NO: 198782 - DNA, 33 bp, Homo sapien
ttgtaatgcttacaggtatgatgcttagtactt

SEQ ID NO: 198783 - DNA, 33 bp, Homo sapien
tggtttaaaaaaatcacgttttctcatcttaaa

SEQ ID NO: 198784 - DNA, 33 bp, Homo sapien
tggtttaaaaaaatcaggttttctcatcttaaa

SEQ ID NO: 198785 - DNA, 33 bp, Homo sapien
caaatgatacccgtgacagcaagatttcaaaaa

SEQ ID NO: 198786 - DNA, 33 bp, Homo sapien
caaatgatacccgtgagagcaagatttcaaaaa

SEQ ID NO: 198787 - DNA, 33 bp, Homo sapien
tttctccaagacaaaactccaaggcaccacacc

SEQ ID NO: 198788 - DNA, 33 bp, Homo sapien
tttctccaagacaaaattccaaggcaccacacc

SEQ ID NO: 198789 - DNA, 33 bp, Homo sapien
ctgagaactttaacgaactacacactttccaat

SEQ ID NO: 198790 - DNA, 33 bp, Homo sapien
ctgagaactttaacgagctacacactttccaat

SEQ ID NO: 198791 - DNA, 33 bp, Homo sapien
taaaagtagagtcttacagtagtcatcaaataa

SEQ ID NO: 198792 - DNA, 33 bp, Homo sapien
taaaagtagagtcttatagtagtcatcaaataa

SEQ ID NO: 198793 - DNA, 33 bp, Homo sapien
agctctcagaagcataagtgaaaagtctgtctg

SEQ ID NO: 198794 - DNA, 33 bp, Homo sapien
agctctcagaagcataggtgaaaagtctgtctg

SEQ ID NO: 198795 - DNA, 33 bp, Homo sapien
tattccagagattatcaagcctttaaagggtgg

SEQ ID NO: 198796 - DNA, 33 bp, Homo sapien
tattccagagattatcgagcctttaaagggtgg

SEQ ID NO: 198797 - DNA, 33 bp, Homo sapien
atgttctcagggttgaagtgagggcagctgagc

SEQ ID NO: 198798 - DNA, 33 bp, Homo sapien
atgttctcagggttgaggtgagggcagctgagc

SEQ ID NO: 198799 - DNA, 33 bp, Homo sapien
gaacttttttgaggcccagtttaaaatccacta

SEQ ID NO: 198800 - DNA, 33 bp, Homo sapien
gaacttttttgaggcctagtttaaaatccacta

SEQ ID NO: 198801 - DNA, 33 bp, Homo sapien
tctgttgtggcacttactaaactatgtgtgctt

SEQ ID NO: 198802 - DNA, 33 bp, Homo sapien
tctgttgtggcacttattaaactatgtgtgctt

SEQ ID NO: 198803 - DNA, 33 bp, Homo sapien
tgggattctcagtaaacggtaggcaatcttttc

SEQ ID NO: 198804 - DNA, 33 bp, Homo sapien
tgggattctcagtaaatggtaggcaatcttttc

SEQ ID NO: 198805 - DNA, 33 bp, Homo sapien
tctatgttgcctcctgaagcaattattcttttt

SEQ ID NO: 198806 - DNA, 33 bp, Homo sapien
tctatgttgcctcctggagcaattattcttttt

SEQ ID NO: 198807 - DNA, 33 bp, Homo sapien
ttagtagtaagtgttccatgtaattttacttta

SEQ ID NO: 198808 - DNA, 33 bp, Homo sapien
ttagtagtaagtgttcgatgtaattttacttta

SEQ ID NO: 198809 - DNA, 33 bp, Homo sapien
tctgacagaagtgacacctggctaactaatcaa

SEQ ID NO: 198810 - DNA, 33 bp, Homo sapien
tctgacagaagtgacatctggctaactaatcaa

SEQ ID NO: 198811 - DNA, 33 bp, Homo sapien
ctatggcaaaccgaacaattttagtggacaata

SEQ ID NO: 198812 - DNA, 33 bp, Homo sapien
ctatggcaaaccgaacgattttagtggacaata

SEQ ID NO: 198813 - DNA, 33 bp, Homo sapien
aaaaatctaaaaatcaatatcatggatttccca

SEQ ID NO: 198814 - DNA, 33 bp, Homo sapien
aaaaatctaaaaatcagtatcatggatttccca

SEQ ID NO: 198815 - DNA, 33 bp, Homo sapien
tcgcatctaccccataagagcttaggacagtca

SEQ ID NO: 198816 - DNA, 33 bp, Homo sapien
tcgcatctaccccataggagcttaggacagtca

SEQ ID NO: 198817 - DNA, 33 bp, Homo sapien
atgtggcttagaattacctcaatctattttatg

SEQ ID NO: 198818 - DNA, 33 bp, Homo sapien
atgtggcttagaattatctcaatctattttatg

SEQ ID NO: 198819 - DNA, 33 bp, Homo sapien
tttcacattttagaaaagagtagtgtgtgttga

SEQ ID NO: 198820 - DNA, 33 bp, Homo sapien
tttcacattttagaaaggagtagtgtgtgttga

SEQ ID NO: 198821 - DNA, 33 bp, Homo sapien
taacattacagaattcaatttcttctaaaactt

SEQ ID NO: 198822 - DNA, 33 bp, Homo sapien
taacattacagaattccatttcttctaaaactt

SEQ ID NO: 198823 - DNA, 33 bp, Homo sapien
agaacaacaatatgaccaagggggagcaaagca

SEQ ID NO: 198824 - DNA, 33 bp, Homo sapien
agaacaacaatatgactaagggggagcaaagca

SEQ ID NO: 198825 - DNA, 33 bp, Homo sapien
cttccattctcccatcaaatgttcatctctcta

SEQ ID NO: 198826 - DNA, 33 bp, Homo sapien
cttccattctcccatcgaatgttcatctctcta

SEQ ID NO: 198827 - DNA, 33 bp, Homo sapien
aatactgtcagcagaaggttatctccaagataa

SEQ ID NO: 198828 - DNA, 33 bp, Homo sapien
aatactgtcagcagaatgttatctccaagataa

SEQ ID NO: 198829 - DNA, 33 bp, Homo sapien
ctgacaatataagaaacgagtgggcaactgatg

SEQ ID NO: 198830 - DNA, 33 bp, Homo sapien
ctgacaatataagaaaggagtgggcaactgatg

SEQ ID NO: 198831 - DNA, 33 bp, Homo sapien
gtttacacagatatgggcagagtaaagagatca

SEQ ID NO: 198832 - DNA, 33 bp, Homo sapien
gtttacacagatatggtcagagtaaagagatca

SEQ ID NO: 198833 - DNA, 33 bp, Homo sapien
agagagaggccccaaaaggtaactcattccttc

SEQ ID NO: 198834 - DNA, 33 bp, Homo sapien
agagagaggccccaaatggtaactcattccttc

SEQ ID NO: 198835 - DNA, 33 bp, Homo sapien
gtgctatctcttgagcaaattcctgggaactat

SEQ ID NO: 198836 - DNA, 33 bp, Homo sapien
gtgctatctcttgagcgaattcctgggaactat

SEQ ID NO: 198837 - DNA, 33 bp, Homo sapien
ccccttgttctaagggccacctcgtttttgctc

SEQ ID NO: 198838 - DNA, 33 bp, Homo sapien
ccccttgttctaagggtcacctcgtttttgctc

SEQ ID NO: 198839 - DNA, 33 bp, Homo sapien
ttattcatctttttatcactctttgcaccttta

SEQ ID NO: 198840 - DNA, 33 bp, Homo sapien
ttattcatctttttattactctttgcaccttta

SEQ ID NO: 198841 - DNA, 33 bp, Homo sapien
cttcagtctatcaaaaacacatcaagtacacag

SEQ ID NO: 198842 - DNA, 33 bp, Homo sapien
cttcagtctatcaaaagcacatcaagtacacag

SEQ ID NO: 198843 - DNA, 33 bp, Homo sapien
taatcacacggaattgaactgcttaaatacatg

SEQ ID NO: 198844 - DNA, 33 bp, Homo sapien
taatcacacggaattggactgcttaaatacatg

SEQ ID NO: 198845 - DNA, 33 bp, Homo sapien
gcttaaatacatgtgcaccttcacatatgtatc

SEQ ID NO: 198846 - DNA, 33 bp, Homo sapien
gcttaaatacatgtgcgccttcacatatgtatc

SEQ ID NO: 198847 - DNA, 33 bp, Homo sapien
gtcagtcaaattaatgcaggaatggtgagggct

SEQ ID NO: 198848 - DNA, 33 bp, Homo sapien
gtcagtcaaattaatgtaggaatggtgagggct

SEQ ID NO: 198849 - DNA, 33 bp, Homo sapien
ttttctcgaaatttgaaacaagataggagatga

SEQ ID NO: 198850 - DNA, 33 bp, Homo sapien
ttttctcgaaatttgagacaagataggagatga

SEQ ID NO: 198851 - DNA, 33 bp, Homo sapien
aaccctatgtcatctaaattttcttctatgtta

SEQ ID NO: 198852 - DNA, 33 bp, Homo sapien
aaccctatgtcatctagattttcttctatgtta

SEQ ID NO: 198853 - DNA, 33 bp, Homo sapien
tcattcttctagcaaaacgagaaagagctagga

SEQ ID NO: 198854 - DNA, 33 bp, Homo sapien
tcattcttctagcaaagcgagaaagagctagga

SEQ ID NO: 198855 - DNA, 33 bp, Homo sapien
tttattctctgggatcagactttctagttcctc

SEQ ID NO: 198856 - DNA, 33 bp, Homo sapien
tttattctctgggatcggactttctagttcctc

SEQ ID NO: 198857 - DNA, 33 bp, Homo sapien
tatttttgggaactctaaagttgagtcaagggt

SEQ ID NO: 198858 - DNA, 33 bp, Homo sapien
tatttttgggaactctgaagttgagtcaagggt

SEQ ID NO: 198859 - DNA, 33 bp, Homo sapien
aggtgactcatgatgacatcagtacaatggtga

SEQ ID NO: 198860 - DNA, 33 bp, Homo sapien
aggtgactcatgatgagatcagtacaatggtga

SEQ ID NO: 198861 - DNA, 33 bp, Homo sapien
tctgaagtcttctatcactttgatttctagcat

SEQ ID NO: 198862 - DNA, 33 bp, Homo sapien
tctgaagtcttctatccctttgatttctagcat

SEQ ID NO: 198863 - DNA, 33 bp, Homo sapien
tgctcagtcttaaacacaatttgggaccgaggg

SEQ ID NO: 198864 - DNA, 33 bp, Homo sapien
tgctcagtcttaaacataatttgggaccgaggg

SEQ ID NO: 198865 - DNA, 33 bp, Homo sapien
actaattttgtacttacgatgttgtcggacaga

SEQ ID NO: 198866 - DNA, 33 bp, Homo sapien
actaattttgtacttatgatgttgtcggacaga

SEQ ID NO: 198867 - DNA, 33 bp, Homo sapien
cagaataagatgacttaaacacagtaggaaagg

SEQ ID NO: 198868 - DNA, 33 bp, Homo sapien
cagaataagatgacttcaacacagtaggaaagg

SEQ ID NO: 198869 - DNA, 33 bp, Homo sapien
cctgacaaggagttaacatccaaagtttacaag

SEQ ID NO: 198870 - DNA, 33 bp, Homo sapien
cctgacaaggagttaatatccaaagtttacaag

SEQ ID NO: 198871 - DNA, 33 bp, Homo sapien
ctcaaatgtctcgctaaagaaaataataagcaa

SEQ ID NO: 198872 - DNA, 33 bp, Homo sapien
ctcaaatgtctcgctatagaaaataataagcaa

SEQ ID NO: 198873 - DNA, 33 bp, Homo sapien
actatactgtactgtaagagaatgcaaggataa

SEQ ID NO: 198874 - DNA, 33 bp, Homo sapien
actatactgtactgtaggagaatgcaaggataa

SEQ ID NO: 198875 - DNA, 33 bp, Homo sapien
ataaggctgcaagcaacatttataacttccttc

SEQ ID NO: 198876 - DNA, 33 bp, Homo sapien
ataaggctgcaagcaatatttataacttccttc

SEQ ID NO: 198877 - DNA, 33 bp, Homo sapien
ttcctgaggcctcagacggtgtaaactcacaga

SEQ ID NO: 198878 - DNA, 33 bp, Homo sapien
ttcctgaggcctcagatggtgtaaactcacaga

SEQ ID NO: 198879 - DNA, 33 bp, Homo sapien
aaggaactattcttagccagttttctacctctt

SEQ ID NO: 198880 - DNA, 33 bp, Homo sapien
aaggaactattcttaggcagttttctacctctt

SEQ ID NO: 198881 - DNA, 33 bp, Homo sapien
aatgaggaatcagagacgtggttgtgtatgtgt

SEQ ID NO: 198882 - DNA, 33 bp, Homo sapien
aatgaggaatcagagatgtggttgtgtatgtgt

SEQ ID NO: 198883 - DNA, 33 bp, Homo sapien
tttgtgaagtcaatcactgagtatcaaattacg

SEQ ID NO: 198884 - DNA, 33 bp, Homo sapien
tttgtgaagtcaatcattgagtatcaaattacg

SEQ ID NO: 198885 - DNA, 33 bp, Homo sapien
tttgagcaagataaaaaaatcaaagttctcagt

SEQ ID NO: 198886 - DNA, 33 bp, Homo sapien
tttgagcaagataaaacaatcaaagttctcagt

SEQ ID NO: 198887 - DNA, 33 bp, Homo sapien
agcactgccaagtaaacaggacctggacagggc

SEQ ID NO: 198888 - DNA, 33 bp, Homo sapien
agcactgccaagtaaagaggacctggacagggc

SEQ ID NO: 198889 - DNA, 33 bp, Homo sapien
ctaatagatgcaactgaagccctgtccaggtcc

SEQ ID NO: 198890 - DNA, 33 bp, Homo sapien
ctaatagatgcaactggagccctgtccaggtcc

SEQ ID NO: 198891 - DNA, 33 bp, Homo sapien
gagggcaaaagaacaccactgtttctcagggat

SEQ ID NO: 198892 - DNA, 33 bp, Homo sapien
gagggcaaaagaacactactgtttctcagggat

SEQ ID NO: 198893 - DNA, 33 bp, Homo sapien
aggaaccactaggcaaaaataaggtcctgtagt

SEQ ID NO: 198894 - DNA, 33 bp, Homo sapien
aggaaccactaggcaagaataaggtcctgtagt

SEQ ID NO: 198895 - DNA, 33 bp, Homo sapien
gacctccagtaatgaaccccttatctagcctga

SEQ ID NO: 198896 - DNA, 33 bp, Homo sapien
gacctccagtaatgaatcccttatctagcctga

SEQ ID NO: 198897 - DNA, 33 bp, Homo sapien
aaccttccatgttacaatctcacatacatctgc

SEQ ID NO: 198898 - DNA, 33 bp, Homo sapien
aaccttccatgttacagtctcacatacatctgc

SEQ ID NO: 198899 - DNA, 33 bp, Homo sapien
tatttctgttggtaacaaagtctcaggcactgc

SEQ ID NO: 198900 - DNA, 33 bp, Homo sapien
tatttctgttggtaacgaagtctcaggcactgc

SEQ ID NO: 198901 - DNA, 33 bp, Homo sapien
aagttttatcacttacaagttttatcatctgtt

SEQ ID NO: 198902 - DNA, 33 bp, Homo sapien
aagttttatcacttactagttttatcatctgtt

SEQ ID NO: 198903 - DNA, 33 bp, Homo sapien
atctcagtctttatacaaagctcaattttgttt

SEQ ID NO: 198904 - DNA, 33 bp, Homo sapien
atctcagtctttataccaagctcaattttgttt

SEQ ID NO: 198905 - DNA, 33 bp, Homo sapien
gcaatccatattaagaacctagaaagtgccaag

SEQ ID NO: 198906 - DNA, 33 bp, Homo sapien
gcaatccatattaagatcctagaaagtgccaag

SEQ ID NO: 198907 - DNA, 33 bp, Homo sapien
gattattcttatgcccaaaagtgatggcaagac

SEQ ID NO: 198908 - DNA, 33 bp, Homo sapien
gattattcttatgcccgaaagtgatggcaagac

SEQ ID NO: 198909 - DNA, 33 bp, Homo sapien
aacattgctgagtgaacgaaaaaatgaataaac

SEQ ID NO: 198910 - DNA, 33 bp, Homo sapien
aacattgctgagtgaaggaaaaaatgaataaac

SEQ ID NO: 198911 - DNA, 33 bp, Homo sapien
agagatgccacaagaccattcccaaaattggac

SEQ ID NO: 198912 - DNA, 33 bp, Homo sapien
agagatgccacaagactattcccaaaattggac

SEQ ID NO: 198913 - DNA, 33 bp, Homo sapien
aaaacagactaatacaaggacattaactgctaa

SEQ ID NO: 198914 - DNA, 33 bp, Homo sapien
aaaacagactaatacagggacattaactgctaa

SEQ ID NO: 198915 - DNA, 33 bp, Homo sapien
aagctgcatggtaatcacaaagcaagaaactgt

SEQ ID NO: 198916 - DNA, 33 bp, Homo sapien
aagctgcatggtaatcgcaaagcaagaaactgt

SEQ ID NO: 198917 - DNA, 33 bp, Homo sapien
ctgtgttctcgagtaagcactcctaatgctact

SEQ ID NO: 198918 - DNA, 33 bp, Homo sapien
ctgtgttctcgagtaatcactcctaatgctact

SEQ ID NO: 198919 - DNA, 33 bp, Homo sapien
tatcacacaaggatatgaacactgataaggtca

SEQ ID NO: 198920 - DNA, 33 bp, Homo sapien
tatcacacaaggatattaacactgataaggtca

SEQ ID NO: 198921 - DNA, 33 bp, Homo sapien
agaaaccctgatttacaacattaatatctttca

SEQ ID NO: 198922 - DNA, 33 bp, Homo sapien
agaaaccctgatttaccacattaatatctttca

SEQ ID NO: 198923 - DNA, 33 bp, Homo sapien
aatgttcttcttctgaaggatcccaaggctaaa

SEQ ID NO: 198924 - DNA, 33 bp, Homo sapien
aatgttcttcttctgagggatcccaaggctaaa

SEQ ID NO: 198925 - DNA, 33 bp, Homo sapien
gcatttgtacaaatccaaagtctctggcccatg

SEQ ID NO: 198926 - DNA, 33 bp, Homo sapien
gcatttgtacaaatccgaagtctctggcccatg

SEQ ID NO: 198927 - DNA, 33 bp, Homo sapien
tttaaaaaggtaagcaaaggtcacatttgtaga

SEQ ID NO: 198928 - DNA, 33 bp, Homo sapien
tttaaaaaggtaagcacaggtcacatttgtaga

SEQ ID NO: 198929 - DNA, 33 bp, Homo sapien
tttaaatgtgtctaaggcagaagatccagtttg

SEQ ID NO: 198930 - DNA, 33 bp, Homo sapien
tttaaatgtgtctaagtcagaagatccagtttg

SEQ ID NO: 198931 - DNA, 33 bp, Homo sapien
acacactagaggaagacaatactaatttggaga

SEQ ID NO: 198932 - DNA, 33 bp, Homo sapien
acacactagaggaagagaatactaatttggaga

SEQ ID NO: 198933 - DNA, 33 bp, Homo sapien
tgtatttttacagaacaagaaaagcactgaaac

SEQ ID NO: 198934 - DNA, 33 bp, Homo sapien
tgtatttttacagaacgagaaaagcactgaaac

SEQ ID NO: 198935 - DNA, 33 bp, Homo sapien
aactgtaatttgcctcacattcattgattccca

SEQ ID NO: 198936 - DNA, 33 bp, Homo sapien
aactgtaatttgcctcgcattcattgattccca

SEQ ID NO: 198937 - DNA, 33 bp, Homo sapien
gtttctccatgttggccagtttgtttatgacca

SEQ ID NO: 198938 - DNA, 33 bp, Homo sapien
gtttctccatgttggctagtttgtttatgacca

SEQ ID NO: 198939 - DNA, 33 bp, Homo sapien
tcactaagcttcaaacgagactacttctccaca

SEQ ID NO: 198940 - DNA, 33 bp, Homo sapien
tcactaagcttcaaactagactacttctccaca

SEQ ID NO: 198941 - DNA, 33 bp, Homo sapien
aacacacacctcgggcacaaacattagttgtta

SEQ ID NO: 198942 - DNA, 33 bp, Homo sapien
aacacacacctcgggcgcaaacattagttgtta

SEQ ID NO: 198943 - DNA, 33 bp, Homo sapien
ttcattagtattattacgagcattatgtcaggt

SEQ ID NO: 198944 - DNA, 33 bp, Homo sapien
ttcattagtattattatgagcattatgtcaggt

SEQ ID NO: 198945 - DNA, 33 bp, Homo sapien
gaattcccttggcagacgtggtacttgaatggc

SEQ ID NO: 198946 - DNA, 33 bp, Homo sapien
gaattcccttggcagatgtggtacttgaatggc

SEQ ID NO: 198947 - DNA, 33 bp, Homo sapien
tcagattgtatcaaccaaatccaaaaacacccc

SEQ ID NO: 198948 - DNA, 33 bp, Homo sapien
tcagattgtatcaacccaatccaaaaacacccc

SEQ ID NO: 198949 - DNA, 33 bp, Homo sapien
ggacagagtagatagaaaggcaaggaaacacca

SEQ ID NO: 198950 - DNA, 33 bp, Homo sapien
ggacagagtagatagagaggcaaggaaacacca

SEQ ID NO: 198951 - DNA, 33 bp, Homo sapien
atgcgaggtgttcactcacccactggaaatcac

SEQ ID NO: 198952 - DNA, 33 bp, Homo sapien
atgcgaggtgttcacttacccactggaaatcac

SEQ ID NO: 198953 - DNA, 33 bp, Homo sapien
gaatcatcccagttcacgtgtgttttctgtatt

SEQ ID NO: 198954 - DNA, 33 bp, Homo sapien
gaatcatcccagttcaggtgtgttttctgtatt

SEQ ID NO: 198955 - DNA, 33 bp, Homo sapien
tatgtaccaccaataacgagttaatatctggta

SEQ ID NO: 198956 - DNA, 33 bp, Homo sapien
tatgtaccaccaataatgagttaatatctggta

SEQ ID NO: 198957 - DNA, 33 bp, Homo sapien
accaccacgatggaccagcagttagaggccttc

SEQ ID NO: 198958 - DNA, 33 bp, Homo sapien
accaccacgatggaccggcagttagaggccttc

SEQ ID NO: 198959 - DNA, 33 bp, Homo sapien
agggccgggctggcccaacagcacacatggaga

SEQ ID NO: 198960 - DNA, 33 bp, Homo sapien
agggccgggctggcccgacagcacacatggaga

SEQ ID NO: 198961 - DNA, 33 bp, Homo sapien
tgcagggccttctttcaaggaggtggcagaggg

SEQ ID NO: 198962 - DNA, 33 bp, Homo sapien
tgcagggccttctttcgaggaggtggcagaggg

SEQ ID NO: 198963 - DNA, 33 bp, Homo sapien
aaaggcagactctccacgccgccagtgaaatgg

SEQ ID NO: 198964 - DNA, 33 bp, Homo sapien
aaaggcagactctccaggccgccagtgaaatgg

SEQ ID NO: 198965 - DNA, 33 bp, Homo sapien
acatttcaagttcccacattgacgtggctggtc

SEQ ID NO: 198966 - DNA, 33 bp, Homo sapien
acatttcaagttcccatattgacgtggctggtc

SEQ ID NO: 198967 - DNA, 33 bp, Homo sapien
cctcagataatctccacgactctttcctgtccc

SEQ ID NO: 198968 - DNA, 33 bp, Homo sapien
cctcagataatctccatgactctttcctgtccc

SEQ ID NO: 198969 - DNA, 33 bp, Homo sapien
ggtgtttcaaggcctacgaagagcatatgtggg

SEQ ID NO: 198970 - DNA, 33 bp, Homo sapien
ggtgtttcaaggcctatgaagagcatatgtggg

SEQ ID NO: 198971 - DNA, 33 bp, Homo sapien
ctaaatttctatcctgaagttcataaacatgtg

SEQ ID NO: 198972 - DNA, 33 bp, Homo sapien
ctaaatttctatcctgcagttcataaacatgtg

SEQ ID NO: 198973 - DNA, 33 bp, Homo sapien
tttctccttggcagacgctgaactccaattttt

SEQ ID NO: 198974 - DNA, 33 bp, Homo sapien
tttctccttggcagactctgaactccaattttt

SEQ ID NO: 198975 - DNA, 33 bp, Homo sapien
ctgctatgataattaacgttctccggtggctca

SEQ ID NO: 198976 - DNA, 33 bp, Homo sapien
ctgctatgataattaatgttctccggtggctca

SEQ ID NO: 198977 - DNA, 33 bp, Homo sapien
attccagatgtgtaagaagtttcaaacatggat

SEQ ID NO: 198978 - DNA, 33 bp, Homo sapien
attccagatgtgtaagcagtttcaaacatggat

SEQ ID NO: 198979 - DNA, 33 bp, Homo sapien
acaggcactcaataaaaggccttgtttattaaa

SEQ ID NO: 198980 - DNA, 33 bp, Homo sapien
acaggcactcaataaagggccttgtttattaaa

SEQ ID NO: 198981 - DNA, 33 bp, Homo sapien
cgctggaataatttgaccggctgtgaagtgcaa

SEQ ID NO: 198982 - DNA, 33 bp, Homo sapien
cgctggaataatttgatcggctgtgaagtgcaa

SEQ ID NO: 198983 - DNA, 33 bp, Homo sapien
tatctgtgattctaaactattcgttttcttact

SEQ ID NO: 198984 - DNA, 33 bp, Homo sapien
tatctgtgattctaaattattcgttttcttact

SEQ ID NO: 198985 - DNA, 33 bp, Homo sapien
accataaggtccccaacgcagtcaatggaattg

SEQ ID NO: 198986 - DNA, 33 bp, Homo sapien
accataaggtccccaatgcagtcaatggaattg

SEQ ID NO: 198987 - DNA, 33 bp, Homo sapien
aaagcatacaaatgaccgcctcaaaactgattt

SEQ ID NO: 198988 - DNA, 33 bp, Homo sapien
aaagcatacaaatgactgcctcaaaactgattt

SEQ ID NO: 198989 - DNA, 33 bp, Homo sapien
aagtatctcttagaaactagagtgtccaaactg

SEQ ID NO: 198990 - DNA, 33 bp, Homo sapien
aagtatctcttagaaattagagtgtccaaactg

SEQ ID NO: 198991 - DNA, 33 bp, Homo sapien
cgtgtgcttgaacatcaatgatggccctgcttt

SEQ ID NO: 198992 - DNA, 33 bp, Homo sapien
cgtgtgcttgaacatcgatgatggccctgcttt

SEQ ID NO: 198993 - DNA, 33 bp, Homo sapien
ctgagccaggctctaaatgctttccatggctta

SEQ ID NO: 198994 - DNA, 33 bp, Homo sapien
ctgagccaggctctaagtgctttccatggctta

SEQ ID NO: 198995 - DNA, 33 bp, Homo sapien
attcccagcctgtttacatggaagatctcatgt

SEQ ID NO: 198996 - DNA, 33 bp, Homo sapien
attcccagcctgtttagatggaagatctcatgt

SEQ ID NO: 198997 - DNA, 33 bp, Homo sapien
accttttgctggtcccaaatgtcctgttgcttt

SEQ ID NO: 198998 - DNA, 33 bp, Homo sapien
accttttgctggtcccgaatgtcctgttgcttt

SEQ ID NO: 198999 - DNA, 33 bp, Homo sapien
acgtgaactgacatatgaccgaatgcctgaata

SEQ ID NO: 199000 - DNA, 33 bp, Homo sapien
acgtgaactgacatattaccgaatgcctgaata

SEQ ID NO: 199001 - DNA, 33 bp, Homo sapien
taattgcggtctttgccattacttttaatgaca

SEQ ID NO: 199002 - DNA, 33 bp, Homo sapien
taattgcggtctttgctattacttttaatgaca

SEQ ID NO: 199003 - DNA, 33 bp, Homo sapien
accttcaggtatttacagactgttatgtggaag

SEQ ID NO: 199004 - DNA, 33 bp, Homo sapien
accttcaggtatttacggactgttatgtggaag

SEQ ID NO: 199005 - DNA, 33 bp, Homo sapien
tgattgtcagcatgccaaaagatcactggtctc

SEQ ID NO: 199006 - DNA, 33 bp, Homo sapien
tgattgtcagcatgccgaaagatcactggtctc

SEQ ID NO: 199007 - DNA, 33 bp, Homo sapien
ccggggaaaatggctgaaacattccacaggtga

SEQ ID NO: 199008 - DNA, 33 bp, Homo sapien
ccggggaaaatggctggaacattccacaggtga

SEQ ID NO: 199009 - DNA, 33 bp, Homo sapien
ccctgatgaatcttaacatgttccaggtttcca

SEQ ID NO: 199010 - DNA, 33 bp, Homo sapien
ccctgatgaatcttaatatgttccaggtttcca

SEQ ID NO: 199011 - DNA, 33 bp, Homo sapien
accatctcttgactaccatttgtcttcagcaat

SEQ ID NO: 199012 - DNA, 33 bp, Homo sapien
accatctcttgactactatttgtcttcagcaat

SEQ ID NO: 199013 - DNA, 33 bp, Homo sapien
caactccacatgagccacttcagctccaacaca

SEQ ID NO: 199014 - DNA, 33 bp, Homo sapien
caactccacatgagcctcttcagctccaacaca

SEQ ID NO: 199015 - DNA, 33 bp, Homo sapien
tcttaccgtcaagttacgagtttcctagagacc

SEQ ID NO: 199016 - DNA, 33 bp, Homo sapien
tcttaccgtcaagttatgagtttcctagagacc

SEQ ID NO: 199017 - DNA, 33 bp, Homo sapien
ttctagttactcccacagcaagagctccttcaa

SEQ ID NO: 199018 - DNA, 33 bp, Homo sapien
ttctagttactcccacggcaagagctccttcaa

SEQ ID NO: 199019 - DNA, 33 bp, Homo sapien
tgctagcctaataggaaaccacagttaacagtc

SEQ ID NO: 199020 - DNA, 33 bp, Homo sapien
tgctagcctaataggagaccacagttaacagtc

SEQ ID NO: 199021 - DNA, 33 bp, Homo sapien
cagaaaagatcttgaacatggttttgatacttg

SEQ ID NO: 199022 - DNA, 33 bp, Homo sapien
cagaaaagatcttgaatatggttttgatacttg

SEQ ID NO: 199023 - DNA, 33 bp, Homo sapien
gacacgtctctgataccggcctttctcctccta

SEQ ID NO: 199024 - DNA, 33 bp, Homo sapien
gacacgtctctgatactggcctttctcctccta

SEQ ID NO: 199025 - DNA, 33 bp, Homo sapien
ttacaggattgagtaacaaagaaccaagaagtc

SEQ ID NO: 199026 - DNA, 33 bp, Homo sapien
ttacaggattgagtaagaaagaaccaagaagtc

SEQ ID NO: 199027 - DNA, 33 bp, Homo sapien
gatattgacatggtatcaaatgacctgaccatc

SEQ ID NO: 199028 - DNA, 33 bp, Homo sapien
gatattgacatggtattaaatgacctgaccatc

SEQ ID NO: 199029 - DNA, 33 bp, Homo sapien
gtcacttctaaagtaacgtaacgctgtctgtta

SEQ ID NO: 199030 - DNA, 33 bp, Homo sapien
gtcacttctaaagtaatgtaacgctgtctgtta

SEQ ID NO: 199031 - DNA, 33 bp, Homo sapien
aacacacctgtcttcacccagagatggtatctc

SEQ ID NO: 199032 - DNA, 33 bp, Homo sapien
aacacacctgtcttcatccagagatggtatctc

SEQ ID NO: 199033 - DNA, 33 bp, Homo sapien
actgccatgaaaatcaaagtccacaggaagtat

SEQ ID NO: 199034 - DNA, 33 bp, Homo sapien
actgccatgaaaatcagagtccacaggaagtat

SEQ ID NO: 199035 - DNA, 33 bp, Homo sapien
ctatgaacctaacccaagtatgaagcctaaggt

SEQ ID NO: 199036 - DNA, 33 bp, Homo sapien
ctatgaacctaacccaggtatgaagcctaaggt

SEQ ID NO: 199037 - DNA, 33 bp, Homo sapien
ggtggaagtgaggaaccaagacctgagtgttta

SEQ ID NO: 199038 - DNA, 33 bp, Homo sapien
ggtggaagtgaggaacgaagacctgagtgttta

SEQ ID NO: 199039 - DNA, 33 bp, Homo sapien
tcattctggaaactcacgtctaagactaggaaa

SEQ ID NO: 199040 - DNA, 33 bp, Homo sapien
tcattctggaaactcatgtctaagactaggaaa

SEQ ID NO: 199041 - DNA, 33 bp, Homo sapien
ctagctaaagagacagcatatcagggaatgatc

SEQ ID NO: 199042 - DNA, 33 bp, Homo sapien
ctagctaaagagacaggatatcagggaatgatc

SEQ ID NO: 199043 - DNA, 33 bp, Homo sapien
atatatttctgcactaaagctaatttctagtca

SEQ ID NO: 199044 - DNA, 33 bp, Homo sapien
atatatttctgcactagagctaatttctagtca

SEQ ID NO: 199045 - DNA, 33 bp, Homo sapien
tatttcctgccagagccgaggaagctgtatcct

SEQ ID NO: 199046 - DNA, 33 bp, Homo sapien
tatttcctgccagagctgaggaagctgtatcct

SEQ ID NO: 199047 - DNA, 33 bp, Homo sapien
cacttgtttctcattagcaaactgcaggatgtc

SEQ ID NO: 199048 - DNA, 33 bp, Homo sapien
cacttgtttctcattatcaaactgcaggatgtc

SEQ ID NO: 199049 - DNA, 33 bp, Homo sapien
tcctgagtaatgcaacaaatacactggaggggg

SEQ ID NO: 199050 - DNA, 33 bp, Homo sapien
tcctgagtaatgcaacgaatacactggaggggg

SEQ ID NO: 199051 - DNA, 33 bp, Homo sapien
cacatttctgaagatccgatcctggagaagggt

SEQ ID NO: 199052 - DNA, 33 bp, Homo sapien
cacatttctgaagatctgatcctggagaagggt

SEQ ID NO: 199053 - DNA, 33 bp, Homo sapien
ttgaaaagaaaaaggactccatcaggaaagaat

SEQ ID NO: 199054 - DNA, 33 bp, Homo sapien
ttgaaaagaaaaaggagtccatcaggaaagaat

SEQ ID NO: 199055 - DNA, 33 bp, Homo sapien
aaagctatcaacaggacgggcacagtgcacagt

SEQ ID NO: 199056 - DNA, 33 bp, Homo sapien
aaagctatcaacaggatgggcacagtgcacagt

SEQ ID NO: 199057 - DNA, 33 bp, Homo sapien
gatcactttgtacttacgtatacccattatatt

SEQ ID NO: 199058 - DNA, 33 bp, Homo sapien
gatcactttgtacttatgtatacccattatatt

SEQ ID NO: 199059 - DNA, 33 bp, Homo sapien
ggctgagccttcttgcagagggtattccggttg

SEQ ID NO: 199060 - DNA, 33 bp, Homo sapien
ggctgagccttcttgcggagggtattccggttg

SEQ ID NO: 199061 - DNA, 33 bp, Homo sapien
taggaacgtggtgacaactcttgccatgcttcg

SEQ ID NO: 199062 - DNA, 33 bp, Homo sapien
taggaacgtggtgacagctcttgccatgcttcg

SEQ ID NO: 199063 - DNA, 33 bp, Homo sapien
tggaagaaaaacaaataagaatgcatagcctag

SEQ ID NO: 199064 - DNA, 33 bp, Homo sapien
tggaagaaaaacaaatgagaatgcatagcctag

SEQ ID NO: 199065 - DNA, 33 bp, Homo sapien
ctttgtcatccaggccagagaccaatgatgtga

SEQ ID NO: 199066 - DNA, 33 bp, Homo sapien
ctttgtcatccaggccggagaccaatgatgtga

SEQ ID NO: 199067 - DNA, 33 bp, Homo sapien
tggcaagaggaaagaacgagaaattggggacag

SEQ ID NO: 199068 - DNA, 33 bp, Homo sapien
tggcaagaggaaagaatgagaaattggggacag

SEQ ID NO: 199069 - DNA, 33 bp, Homo sapien
caagtggcctcatagaaatcctgcccctttgct

SEQ ID NO: 199070 - DNA, 33 bp, Homo sapien
caagtggcctcatagacatcctgcccctttgct

SEQ ID NO: 199071 - DNA, 33 bp, Homo sapien
agtctaatctcaggcacgtatgagctgagtgaa

SEQ ID NO: 199072 - DNA, 33 bp, Homo sapien
agtctaatctcaggcatgtatgagctgagtgaa

SEQ ID NO: 199073 - DNA, 33 bp, Homo sapien
gtgaacagcaacccagcacctagctgtgcagaa

SEQ ID NO: 199074 - DNA, 33 bp, Homo sapien
gtgaacagcaacccagtacctagctgtgcagaa

SEQ ID NO: 199075 - DNA, 33 bp, Homo sapien
gccgtactatgggggacgcagcttgtagcactg

SEQ ID NO: 199076 - DNA, 33 bp, Homo sapien
gccgtactatgggggatgcagcttgtagcactg

SEQ ID NO: 199077 - DNA, 33 bp, Homo sapien
ggtgagtacatctgtaaacataaagtcccttct

SEQ ID NO: 199078 - DNA, 33 bp, Homo sapien
ggtgagtacatctgtagacataaagtcccttct

SEQ ID NO: 199079 - DNA, 33 bp, Homo sapien
ctcagactcccagaaaatccactctatcctatg

SEQ ID NO: 199080 - DNA, 33 bp, Homo sapien
ctcagactcccagaaagtccactctatcctatg

SEQ ID NO: 199081 - DNA, 33 bp, Homo sapien
gggctgcacgctgaacaaaagcagggcgagctg

SEQ ID NO: 199082 - DNA, 33 bp, Homo sapien
gggctgcacgctgaacgaaagcagggcgagctg

SEQ ID NO: 199083 - DNA, 33 bp, Homo sapien
gtcttcacacctggcaagaacgcgaccaccgcc

SEQ ID NO: 199084 - DNA, 33 bp, Homo sapien
gtcttcacacctggcaggaacgcgaccaccgcc

SEQ ID NO: 199085 - DNA, 33 bp, Homo sapien
ataggatttggtacaactgattgcatgatggaa

SEQ ID NO: 199086 - DNA, 33 bp, Homo sapien
ataggatttggtacaattgattgcatgatggaa

SEQ ID NO: 199087 - DNA, 33 bp, Homo sapien
tttctctctccccccacaaaaaagcagaaagcg

SEQ ID NO: 199088 - DNA, 33 bp, Homo sapien
tttctctctccccccataaaaaagcagaaagcg

SEQ ID NO: 199089 - DNA, 33 bp, Homo sapien
ctgttaccatagcaatcagaaagtctcttccag

SEQ ID NO: 199090 - DNA, 33 bp, Homo sapien
ctgttaccatagcaatgagaaagtctcttccag

SEQ ID NO: 199091 - DNA, 33 bp, Homo sapien
agaaaaaagtgaagtactaatccatgctacaac

SEQ ID NO: 199092 - DNA, 33 bp, Homo sapien
agaaaaaagtgaagtattaatccatgctacaac

SEQ ID NO: 199093 - DNA, 33 bp, Homo sapien
acctctgcatccagcaaaagagttttcctttct

SEQ ID NO: 199094 - DNA, 33 bp, Homo sapien
acctctgcatccagcagaagagttttcctttct

SEQ ID NO: 199095 - DNA, 33 bp, Homo sapien
ggacttcagcctcggacggtctccaccagctcc

SEQ ID NO: 199096 - DNA, 33 bp, Homo sapien
ggacttcagcctcggatggtctccaccagctcc

SEQ ID NO: 199097 - DNA, 33 bp, Homo sapien
ggacattaacacagaaagagagactggagagag

SEQ ID NO: 199098 - DNA, 33 bp, Homo sapien
ggacattaacacagaaggagagactggagagag

SEQ ID NO: 199099 - DNA, 33 bp, Homo sapien
atgaatatgtataaacactgagagtcagacagg

SEQ ID NO: 199100 - DNA, 33 bp, Homo sapien
atgaatatgtataaacgctgagagtcagacagg

SEQ ID NO: 199101 - DNA, 33 bp, Homo sapien
ccgcccatcatctgccagcctctgttgtggtcc

SEQ ID NO: 199102 - DNA, 33 bp, Homo sapien
ccgcccatcatctgccggcctctgttgtggtcc

SEQ ID NO: 199103 - DNA, 33 bp, Homo sapien
agaaccagtcaggcgaagtgtggcttataatcc

SEQ ID NO: 199104 - DNA, 33 bp, Homo sapien
agaaccagtcaggcgaggtgtggcttataatcc

SEQ ID NO: 199105 - DNA, 33 bp, Homo sapien
cacctgaattcttcaaagaccctgcgttccggg

SEQ ID NO: 199106 - DNA, 33 bp, Homo sapien
cacctgaattcttcaaggaccctgcgttccggg

SEQ ID NO: 199107 - DNA, 33 bp, Homo sapien
tttggggacagggaaaagaattgatgtcagatg

SEQ ID NO: 199108 - DNA, 33 bp, Homo sapien
tttggggacagggaaaggaattgatgtcagatg

SEQ ID NO: 199109 - DNA, 33 bp, Homo sapien
tcttcattcccattagaactctagaaaaacaga

SEQ ID NO: 199110 - DNA, 33 bp, Homo sapien
tcttcattcccattaggactctagaaaaacaga

SEQ ID NO: 199111 - DNA, 33 bp, Homo sapien
gttcatatgatttctcaaggactaaccaccctc

SEQ ID NO: 199112 - DNA, 33 bp, Homo sapien
gttcatatgatttctcgaggactaaccaccctc

SEQ ID NO: 199113 - DNA, 33 bp, Homo sapien
ctaagaacagaagatacgcttccacaacagaga

SEQ ID NO: 199114 - DNA, 33 bp, Homo sapien
ctaagaacagaagatatgcttccacaacagaga

SEQ ID NO: 199115 - DNA, 33 bp, Homo sapien
caactcaagaatgttcaatcagcaagacccaac

SEQ ID NO: 199116 - DNA, 33 bp, Homo sapien
caactcaagaatgttccatcagcaagacccaac

SEQ ID NO: 199117 - DNA, 33 bp, Homo sapien
tagtgtatttcacacaaagttttgtaccctaca

SEQ ID NO: 199118 - DNA, 33 bp, Homo sapien
tagtgtatttcacacagagttttgtaccctaca

SEQ ID NO: 199119 - DNA, 33 bp, Homo sapien
ttatttaatgcttctcaaaggcctcatggtttt

SEQ ID NO: 199120 - DNA, 33 bp, Homo sapien
ttatttaatgcttctcgaaggcctcatggtttt

SEQ ID NO: 199121 - DNA, 33 bp, Homo sapien
ttagtggaccttcaaacgtctttcaacagatgt

SEQ ID NO: 199122 - DNA, 33 bp, Homo sapien
ttagtggaccttcaaatgtctttcaacagatgt

SEQ ID NO: 199123 - DNA, 33 bp, Homo sapien
aggagccggtgagtccaaagggaccagaactcc

SEQ ID NO: 199124 - DNA, 33 bp, Homo sapien
aggagccggtgagtccgaagggaccagaactcc

SEQ ID NO: 199125 - DNA, 33 bp, Homo sapien
acggccataaatgcccagagattagcggagaag

SEQ ID NO: 199126 - DNA, 33 bp, Homo sapien
acggccataaatgcccggagattagcggagaag

SEQ ID NO: 199127 - DNA, 33 bp, Homo sapien
cattaaatatgttaaccgtgagtttttcatata

SEQ ID NO: 199128 - DNA, 33 bp, Homo sapien
cattaaatatgttaactgtgagtttttcatata

SEQ ID NO: 199129 - DNA, 33 bp, Homo sapien
gcaactacatctgttacccaaaagcagagcatg

SEQ ID NO: 199130 - DNA, 33 bp, Homo sapien
gcaactacatctgttatccaaaagcagagcatg

SEQ ID NO: 199131 - DNA, 33 bp, Homo sapien
tttatggtacaggtgaaaaacgctaggtgattc

SEQ ID NO: 199132 - DNA, 33 bp, Homo sapien
tttatggtacaggtgagaaacgctaggtgattc

SEQ ID NO: 199133 - DNA, 33 bp, Homo sapien
cttgcaaataggactccccttcaactttaggtg

SEQ ID NO: 199134 - DNA, 33 bp, Homo sapien
cttgcaaataggactctccttcaactttaggtg

SEQ ID NO: 199135 - DNA, 33 bp, Homo sapien
tgatactgcaccgctcaaggatttaactaatga

SEQ ID NO: 199136 - DNA, 33 bp, Homo sapien
tgatactgcaccgctcgaggatttaactaatga

SEQ ID NO: 199137 - DNA, 33 bp, Homo sapien
ttcctgctaagactacagacacacaatctgtgt

SEQ ID NO: 199138 - DNA, 33 bp, Homo sapien
ttcctgctaagactacggacacacaatctgtgt

SEQ ID NO: 199139 - DNA, 33 bp, Homo sapien
ggttctggaaaccccacgtacagccagcaaaaa

SEQ ID NO: 199140 - DNA, 33 bp, Homo sapien
ggttctggaaaccccatgtacagccagcaaaaa

SEQ ID NO: 199141 - DNA, 33 bp, Homo sapien
gccagggatgtagtcacgttttattgattgctc

SEQ ID NO: 199142 - DNA, 33 bp, Homo sapien
gccagggatgtagtcatgttttattgattgctc

SEQ ID NO: 199143 - DNA, 33 bp, Homo sapien
ctcagagacctgttgcgccactatttttttttt

SEQ ID NO: 199144 - DNA, 33 bp, Homo sapien
ctcagagacctgttgctccactatttttttttt

SEQ ID NO: 199145 - DNA, 33 bp, Homo sapien
agcgcagcttctggaaaaggctgtcggggtttg

SEQ ID NO: 199146 - DNA, 33 bp, Homo sapien
agcgcagcttctggaagaggctgtcggggtttg

SEQ ID NO: 199147 - DNA, 33 bp, Homo sapien
ttgctattaaaaacaacgagcctctgaactttt

SEQ ID NO: 199148 - DNA, 33 bp, Homo sapien
ttgctattaaaaacaatgagcctctgaactttt

SEQ ID NO: 199149 - DNA, 33 bp, Homo sapien
agctttctatcttttccacattggtcagctcct

SEQ ID NO: 199150 - DNA, 33 bp, Homo sapien
agctttctatcttttctacattggtcagctcct

SEQ ID NO: 199151 - DNA, 33 bp, Homo sapien
cactggccggcccacaaaatgagtatggtgagc

SEQ ID NO: 199152 - DNA, 33 bp, Homo sapien
cactggccggcccacagaatgagtatggtgagc

SEQ ID NO: 199153 - DNA, 33 bp, Homo sapien
acctgccaatttgtctcacctttcaactgggaa

SEQ ID NO: 199154 - DNA, 33 bp, Homo sapien
acctgccaatttgtcttacctttcaactgggaa

SEQ ID NO: 199155 - DNA, 33 bp, Homo sapien
ttgtttttttggctgccatcgtaaaccttagca

SEQ ID NO: 199156 - DNA, 33 bp, Homo sapien
ttgtttttttggctgctatcgtaaaccttagca

SEQ ID NO: 199157 - DNA, 33 bp, Homo sapien
cccttgcattcgtccaaaagaaggcaggacccc

SEQ ID NO: 199158 - DNA, 33 bp, Homo sapien
cccttgcattcgtccagaagaaggcaggacccc

SEQ ID NO: 199159 - DNA, 33 bp, Homo sapien
atagtaagtgctcaataaattccaaactgaact

SEQ ID NO: 199160 - DNA, 33 bp, Homo sapien
atagtaagtgctcaatgaattccaaactgaact

SEQ ID NO: 199161 - DNA, 33 bp, Homo sapien
gtacagaggatattcaatgaaagtatgcttcct

SEQ ID NO: 199162 - DNA, 33 bp, Homo sapien
gtacagaggatattcagtgaaagtatgcttcct

SEQ ID NO: 199163 - DNA, 33 bp, Homo sapien
cccccctgctgtcactcaggagcctgccatcct

SEQ ID NO: 199164 - DNA, 33 bp, Homo sapien
cccccctgctgtcacttaggagcctgccatcct

SEQ ID NO: 199165 - DNA, 33 bp, Homo sapien
aatatcagtattcccacgaaacaatgagaaaaa

SEQ ID NO: 199166 - DNA, 33 bp, Homo sapien
aatatcagtattcccatgaaacaatgagaaaaa

SEQ ID NO: 199167 - DNA, 33 bp, Homo sapien
gggacctgagctctcacagatgtactaggaaga

SEQ ID NO: 199168 - DNA, 33 bp, Homo sapien
gggacctgagctctcatagatgtactaggaaga

SEQ ID NO: 199169 - DNA, 33 bp, Homo sapien
taaaatgcacaagcacaaggttgtatttaccat

SEQ ID NO: 199170 - DNA, 33 bp, Homo sapien
taaaatgcacaagcacgaggttgtatttaccat

SEQ ID NO: 199171 - DNA, 33 bp, Homo sapien
tgtattttccacttaaagcacatgtcagtgtgg

SEQ ID NO: 199172 - DNA, 33 bp, Homo sapien
tgtattttccacttaaggcacatgtcagtgtgg

SEQ ID NO: 199173 - DNA, 33 bp, Homo sapien
taataaaggtggaaaaaggatgtggcagctaca

SEQ ID NO: 199174 - DNA, 33 bp, Homo sapien
taataaaggtggaaaagggatgtggcagctaca

SEQ ID NO: 199175 - DNA, 33 bp, Homo sapien
cagccataatcaagaacatcaggcttgaccagt

SEQ ID NO: 199176 - DNA, 33 bp, Homo sapien
cagccataatcaagaatatcaggcttgaccagt

SEQ ID NO: 199177 - DNA, 33 bp, Homo sapien
attcatctatctgtccaagtttgagaagcactg

SEQ ID NO: 199178 - DNA, 33 bp, Homo sapien
attcatctatctgtccgagtttgagaagcactg

SEQ ID NO: 199179 - DNA, 33 bp, Homo sapien
ctccatcagtgcaacacaaattcactgagaaaa

SEQ ID NO: 199180 - DNA, 33 bp, Homo sapien
ctccatcagtgcaacataaattcactgagaaaa

SEQ ID NO: 199181 - DNA, 33 bp, Homo sapien
aaacggcttttgaaaacctcttatctaagttgt

SEQ ID NO: 199182 - DNA, 33 bp, Homo sapien
aaacggcttttgaaaatctcttatctaagttgt

SEQ ID NO: 199183 - DNA, 33 bp, Homo sapien
ttcagagaacaagacccgctggaaagagtctag

SEQ ID NO: 199184 - DNA, 33 bp, Homo sapien
ttcagagaacaagacctgctggaaagagtctag

SEQ ID NO: 199185 - DNA, 33 bp, Homo sapien
tgattgtggtggcaataaaacctacaggctgac

SEQ ID NO: 199186 - DNA, 33 bp, Homo sapien
tgattgtggtggcaattaaacctacaggctgac

SEQ ID NO: 199187 - DNA, 33 bp, Homo sapien
cctttattgtctaggaagattgaatcaaaggag

SEQ ID NO: 199188 - DNA, 33 bp, Homo sapien
cctttattgtctaggatgattgaatcaaaggag

SEQ ID NO: 199189 - DNA, 33 bp, Homo sapien
aagagggtgtcagagaccgtcaggactgaggcc

SEQ ID NO: 199190 - DNA, 33 bp, Homo sapien
aagagggtgtcagagatcgtcaggactgaggcc

SEQ ID NO: 199191 - DNA, 33 bp, Homo sapien
ctgaccaaattccgcaacctaagggcagagggg

SEQ ID NO: 199192 - DNA, 33 bp, Homo sapien
ctgaccaaattccgcatcctaagggcagagggg

SEQ ID NO: 199193 - DNA, 33 bp, Homo sapien
ctgccttgttcccagagacaagagtgcacccct

SEQ ID NO: 199194 - DNA, 33 bp, Homo sapien
ctgccttgttcccagatacaagagtgcacccct

SEQ ID NO: 199195 - DNA, 33 bp, Homo sapien
acaatctcttatgcaccgaagaatatatacgtc

SEQ ID NO: 199196 - DNA, 33 bp, Homo sapien
acaatctcttatgcactgaagaatatatacgtc

SEQ ID NO: 199197 - DNA, 33 bp, Homo sapien
gtcctgggtctgagcaacgcctcctcctgtgtg

SEQ ID NO: 199198 - DNA, 33 bp, Homo sapien
gtcctgggtctgagcaccgcctcctcctgtgtg

SEQ ID NO: 199199 - DNA, 33 bp, Homo sapien
tcattttataggttaagaagctgagactcagag

SEQ ID NO: 199200 - DNA, 33 bp, Homo sapien
tcattttataggttaataagctgagactcagag

SEQ ID NO: 199201 - DNA, 33 bp, Homo sapien
gactcaggctattgtcacctcctccacaaagtc

SEQ ID NO: 199202 - DNA, 33 bp, Homo sapien
gactcaggctattgtcgcctcctccacaaagtc

SEQ ID NO: 199203 - DNA, 33 bp, Homo sapien
tcgtccttactgaaaccatgaggctcgttgagg

SEQ ID NO: 199204 - DNA, 33 bp, Homo sapien
tcgtccttactgaaactatgaggctcgttgagg

SEQ ID NO: 199205 - DNA, 33 bp, Homo sapien
agtccgggttaaaatacgtgggtctcagctcag

SEQ ID NO: 199206 - DNA, 33 bp, Homo sapien
agtccgggttaaaatatgtgggtctcagctcag

SEQ ID NO: 199207 - DNA, 33 bp, Homo sapien
tacaacctcagtgaacaagccactgggccaggg

SEQ ID NO: 199208 - DNA, 33 bp, Homo sapien
tacaacctcagtgaacgagccactgggccaggg

SEQ ID NO: 199209 - DNA, 33 bp, Homo sapien
taattagtaattataaaagatcccgactagaaa

SEQ ID NO: 199210 - DNA, 33 bp, Homo sapien
taattagtaattataacagatcccgactagaaa

SEQ ID NO: 199211 - DNA, 33 bp, Homo sapien
ttgggttgtcggagtacgattaggtggaatttg

SEQ ID NO: 199212 - DNA, 33 bp, Homo sapien
ttgggttgtcggagtatgattaggtggaatttg

SEQ ID NO: 199213 - DNA, 33 bp, Homo sapien
aggcaaacaggcataaactgaccaggtctttgt

SEQ ID NO: 199214 - DNA, 33 bp, Homo sapien
aggcaaacaggcataagctgaccaggtctttgt

SEQ ID NO: 199215 - DNA, 33 bp, Homo sapien
ctcctacctccgcgaaacatattgtagcggagg

SEQ ID NO: 199216 - DNA, 33 bp, Homo sapien
ctcctacctccgcgaaccatattgtagcggagg

SEQ ID NO: 199217 - DNA, 33 bp, Homo sapien
aaaagagctatacaaaaagtggaccccccaggc

SEQ ID NO: 199218 - DNA, 33 bp, Homo sapien
aaaagagctatacaaagagtggaccccccaggc

SEQ ID NO: 199219 - DNA, 33 bp, Homo sapien
aggggcccagaagctcaacactgcctatccaag

SEQ ID NO: 199220 - DNA, 33 bp, Homo sapien
aggggcccagaagctcgacactgcctatccaag

SEQ ID NO: 199221 - DNA, 33 bp, Homo sapien
tgaagataacctgacacgcttttaaatatttca

SEQ ID NO: 199222 - DNA, 33 bp, Homo sapien
tgaagataacctgacatgcttttaaatatttca

SEQ ID NO: 199223 - DNA, 33 bp, Homo sapien
tgtctgtccacgcttaacatttccatctcttct

SEQ ID NO: 199224 - DNA, 33 bp, Homo sapien
tgtctgtccacgcttagcatttccatctcttct

SEQ ID NO: 199225 - DNA, 33 bp, Homo sapien
cagtgctgagcacaccactttccagaataataa

SEQ ID NO: 199226 - DNA, 33 bp, Homo sapien
cagtgctgagcacaccgctttccagaataataa

SEQ ID NO: 199227 - DNA, 33 bp, Homo sapien
cctgtgggatcctacacctccaagcctgctcag

SEQ ID NO: 199228 - DNA, 33 bp, Homo sapien
cctgtgggatcctacatctccaagcctgctcag

SEQ ID NO: 199229 - DNA, 33 bp, Homo sapien
attgcttttgcattataaactactaacccggca

SEQ ID NO: 199230 - DNA, 33 bp, Homo sapien
attgcttttgcattatgaactactaacccggca

SEQ ID NO: 199231 - DNA, 33 bp, Homo sapien
agtcattggatagtaaataaaagtccacccttg

SEQ ID NO: 199232 - DNA, 33 bp, Homo sapien
agtcattggatagtaattaaaagtccacccttg

SEQ ID NO: 199233 - DNA, 33 bp, Homo sapien
gggtttcgaggtatgaactgagtcacgctgccc

SEQ ID NO: 199234 - DNA, 33 bp, Homo sapien
gggtttcgaggtatgatctgagtcacgctgccc

SEQ ID NO: 199235 - DNA, 33 bp, Homo sapien
tgacccactgactgacggataaaaatggatttt

SEQ ID NO: 199236 - DNA, 33 bp, Homo sapien
tgacccactgactgactgataaaaatggatttt

SEQ ID NO: 199237 - DNA, 33 bp, Homo sapien
atggcatcctgagagcggaaacagtgactgaaa

SEQ ID NO: 199238 - DNA, 33 bp, Homo sapien
atggcatcctgagagctgaaacagtgactgaaa

SEQ ID NO: 199239 - DNA, 33 bp, Homo sapien
attattcatggatacactcaacatttattgaac

SEQ ID NO: 199240 - DNA, 33 bp, Homo sapien
attattcatggatacattcaacatttattgaac

SEQ ID NO: 199241 - DNA, 33 bp, Homo sapien
gtgggtagtgttatccacattctgaggaggaag

SEQ ID NO: 199242 - DNA, 33 bp, Homo sapien
gtgggtagtgttatccgcattctgaggaggaag

SEQ ID NO: 199243 - DNA, 33 bp, Homo sapien
agttttttgcttagaaattatctctgtttccag

SEQ ID NO: 199244 - DNA, 33 bp, Homo sapien
agttttttgcttagaagttatctctgtttccag

SEQ ID NO: 199245 - DNA, 33 bp, Homo sapien
ttaaatctcccttgaaaagaaaatgctgcttat

SEQ ID NO: 199246 - DNA, 33 bp, Homo sapien
ttaaatctcccttgaagagaaaatgctgcttat

SEQ ID NO: 199247 - DNA, 33 bp, Homo sapien
gtattaagcagctcatcaataaacaaatgaatg

SEQ ID NO: 199248 - DNA, 33 bp, Homo sapien
gtattaagcagctcatgaataaacaaatgaatg

SEQ ID NO: 199249 - DNA, 33 bp, Homo sapien
gaatttttgccttcccaagcttccattttagac

SEQ ID NO: 199250 - DNA, 33 bp, Homo sapien
gaatttttgccttcccgagcttccattttagac

SEQ ID NO: 199251 - DNA, 33 bp, Homo sapien
ggctttgggtttgatccaggtctggttctgttg

SEQ ID NO: 199252 - DNA, 33 bp, Homo sapien
ggctttgggtttgatcgaggtctggttctgttg

SEQ ID NO: 199253 - DNA, 33 bp, Homo sapien
cattttgataaaagcacacattgtggaatgaat

SEQ ID NO: 199254 - DNA, 33 bp, Homo sapien
cattttgataaaagcatacattgtggaatgaat

SEQ ID NO: 199255 - DNA, 33 bp, Homo sapien
aaacccaggaaccagactctgagggctgcatac

SEQ ID NO: 199256 - DNA, 33 bp, Homo sapien
aaacccaggaaccagattctgagggctgcatac

SEQ ID NO: 199257 - DNA, 33 bp, Homo sapien
tgttacctgtggaatacacctggttacaagcgt

SEQ ID NO: 199258 - DNA, 33 bp, Homo sapien
tgttacctgtggaatatacctggttacaagcgt

SEQ ID NO: 199259 - DNA, 33 bp, Homo sapien
acacttggccactaagcaggaagtcctggcagg

SEQ ID NO: 199260 - DNA, 33 bp, Homo sapien
acacttggccactaagtaggaagtcctggcagg

SEQ ID NO: 199261 - DNA, 33 bp, Homo sapien
tgcggcagtgaacagaacattcttgttggttgc

SEQ ID NO: 199262 - DNA, 33 bp, Homo sapien
tgcggcagtgaacagagcattcttgttggttgc

SEQ ID NO: 199263 - DNA, 33 bp, Homo sapien
aatcaggcttctccagaaactccctcatctctg

SEQ ID NO: 199264 - DNA, 33 bp, Homo sapien
aatcaggcttctccaggaactccctcatctctg

SEQ ID NO: 199265 - DNA, 33 bp, Homo sapien
gaccccagctggtttccattttcttagactagc

SEQ ID NO: 199266 - DNA, 33 bp, Homo sapien
gaccccagctggtttctattttcttagactagc

SEQ ID NO: 199267 - DNA, 33 bp, Homo sapien
actgaggcatagagaccaataggagacgctctc

SEQ ID NO: 199268 - DNA, 33 bp, Homo sapien
actgaggcatagagactaataggagacgctctc

SEQ ID NO: 199269 - DNA, 33 bp, Homo sapien
ttggaattatctgagaggtctgaaaaacctgac

SEQ ID NO: 199270 - DNA, 33 bp, Homo sapien
ttggaattatctgagatgtctgaaaaacctgac

SEQ ID NO: 199271 - DNA, 33 bp, Homo sapien
agctgcgagtggctctcaacttttgctgtatat

SEQ ID NO: 199272 - DNA, 33 bp, Homo sapien
agctgcgagtggctcttaacttttgctgtatat

SEQ ID NO: 199273 - DNA, 33 bp, Homo sapien
atgatgcgataggcacagagataagaattttat

SEQ ID NO: 199274 - DNA, 33 bp, Homo sapien
atgatgcgataggcaccgagataagaattttat

SEQ ID NO: 199275 - DNA, 33 bp, Homo sapien
acattaggctcaaggacagaagggacatactta

SEQ ID NO: 199276 - DNA, 33 bp, Homo sapien
acattaggctcaaggatagaagggacatactta

SEQ ID NO: 199277 - DNA, 33 bp, Homo sapien
atcatgacttttgtagaactaggctgctttcac

SEQ ID NO: 199278 - DNA, 33 bp, Homo sapien
atcatgacttttgtaggactaggctgctttcac

SEQ ID NO: 199279 - DNA, 33 bp, Homo sapien
ggaagagtaggaaactaagcaagtggaaaacaa

SEQ ID NO: 199280 - DNA, 33 bp, Homo sapien
ggaagagtaggaaactgagcaagtggaaaacaa

SEQ ID NO: 199281 - DNA, 33 bp, Homo sapien
aaaaataataagcctaccttatctctctacatg

SEQ ID NO: 199282 - DNA, 33 bp, Homo sapien
aaaaataataagcctatcttatctctctacatg

SEQ ID NO: 199283 - DNA, 33 bp, Homo sapien
atcccctattcccttacaaaatcaaactcctta

SEQ ID NO: 199284 - DNA, 33 bp, Homo sapien
atcccctattcccttagaaaatcaaactcctta

SEQ ID NO: 199285 - DNA, 33 bp, Homo sapien
gtgtgggcaaacagcaaaacagtggaagttgca

SEQ ID NO: 199286 - DNA, 33 bp, Homo sapien
gtgtgggcaaacagcacaacagtggaagttgca

SEQ ID NO: 199287 - DNA, 33 bp, Homo sapien
tcccgagcatcaataaagtgtgtcatgatgtaa

SEQ ID NO: 199288 - DNA, 33 bp, Homo sapien
tcccgagcatcaataacgtgtgtcatgatgtaa

SEQ ID NO: 199289 - DNA, 33 bp, Homo sapien
ttgaggcatatttactaaagccaaccgctggac

SEQ ID NO: 199290 - DNA, 33 bp, Homo sapien
ttgaggcatatttactgaagccaaccgctggac

SEQ ID NO: 199291 - DNA, 33 bp, Homo sapien
cttttccttatccagcaatgacttacctcttac

SEQ ID NO: 199292 - DNA, 33 bp, Homo sapien
cttttccttatccagcgatgacttacctcttac

SEQ ID NO: 199293 - DNA, 33 bp, Homo sapien
ttctgcatatgaacaaattcaaactgtctgtga

SEQ ID NO: 199294 - DNA, 33 bp, Homo sapien
ttctgcatatgaacaacttcaaactgtctgtga

SEQ ID NO: 199295 - DNA, 33 bp, Homo sapien
accagcaagggcctccaagagggcgcagacctg

SEQ ID NO: 199296 - DNA, 33 bp, Homo sapien
accagcaagggcctccgagagggcgcagacctg

SEQ ID NO: 199297 - DNA, 33 bp, Homo sapien
taatgtgagcccaacacgaaggcagagctgcca

SEQ ID NO: 199298 - DNA, 33 bp, Homo sapien
taatgtgagcccaacatgaaggcagagctgcca

SEQ ID NO: 199299 - DNA, 33 bp, Homo sapien
atgaaagtaacacctacatcatggcattactgg

SEQ ID NO: 199300 - DNA, 33 bp, Homo sapien
atgaaagtaacacctatatcatggcattactgg

SEQ ID NO: 199301 - DNA, 33 bp, Homo sapien
aggaaaattctgtcaaaaggaaatgggattact

SEQ ID NO: 199302 - DNA, 33 bp, Homo sapien
aggaaaattctgtcaagaggaaatgggattact

SEQ ID NO: 199303 - DNA, 33 bp, Homo sapien
tgatagcaccagagacaaaaaaagtgccagggg

SEQ ID NO: 199304 - DNA, 33 bp, Homo sapien
tgatagcaccagagacgaaaaaagtgccagggg

SEQ ID NO: 199305 - DNA, 33 bp, Homo sapien
gggccagttccaaaaaagtagagccctgatgac

SEQ ID NO: 199306 - DNA, 33 bp, Homo sapien
gggccagttccaaaaaggtagagccctgatgac

SEQ ID NO: 199307 - DNA, 33 bp, Homo sapien
tgtctcttccggtagacagcagtaaagcctgat

SEQ ID NO: 199308 - DNA, 33 bp, Homo sapien
tgtctcttccggtagatagcagtaaagcctgat

SEQ ID NO: 199309 - DNA, 33 bp, Homo sapien
aagcattaccactacaaacatggcagcatttgg

SEQ ID NO: 199310 - DNA, 33 bp, Homo sapien
aagcattaccactacagacatggcagcatttgg

SEQ ID NO: 199311 - DNA, 33 bp, Homo sapien
ataatgccactgagtaagcactcaaaaaatagg

SEQ ID NO: 199312 - DNA, 33 bp, Homo sapien
ataatgccactgagtaggcactcaaaaaatagg

SEQ ID NO: 199313 - DNA, 33 bp, Homo sapien
aggcacactggtccaagtgtctagttactttgt

SEQ ID NO: 199314 - DNA, 33 bp, Homo sapien
aggcacactggtccaattgtctagttactttgt

SEQ ID NO: 199315 - DNA, 33 bp, Homo sapien
atggtcaggtcgtcctcaaaagtttgctcctcc

SEQ ID NO: 199316 - DNA, 33 bp, Homo sapien
atggtcaggtcgtccttaaaagtttgctcctcc

SEQ ID NO: 199317 - DNA, 33 bp, Homo sapien
gaaaactaattcctcactccccatctttcttgc

SEQ ID NO: 199318 - DNA, 33 bp, Homo sapien
gaaaactaattcctcattccccatctttcttgc

SEQ ID NO: 199319 - DNA, 33 bp, Homo sapien
aggaactaccatgtaaactgctgtgcacttagc

SEQ ID NO: 199320 - DNA, 33 bp, Homo sapien
aggaactaccatgtaatctgctgtgcacttagc

SEQ ID NO: 199321 - DNA, 33 bp, Homo sapien
aaggttttgcatgaaactccaaggctttaaata

SEQ ID NO: 199322 - DNA, 33 bp, Homo sapien
aaggttttgcatgaaattccaaggctttaaata

SEQ ID NO: 199323 - DNA, 33 bp, Homo sapien
gatgaactgtctacaaagtcacaatattatgat

SEQ ID NO: 199324 - DNA, 33 bp, Homo sapien
gatgaactgtctacaatgtcacaatattatgat

SEQ ID NO: 199325 - DNA, 33 bp, Homo sapien
gctgaatgcagcctaaatggagacattcactcc

SEQ ID NO: 199326 - DNA, 33 bp, Homo sapien
gctgaatgcagcctaattggagacattcactcc

SEQ ID NO: 199327 - DNA, 33 bp, Homo sapien
cttctttattgtagacaaaactttctaaggcct

SEQ ID NO: 199328 - DNA, 33 bp, Homo sapien
cttctttattgtagacgaaactttctaaggcct

SEQ ID NO: 199329 - DNA, 33 bp, Homo sapien
tctgagtctgctgttcactgttggagccagggg

SEQ ID NO: 199330 - DNA, 33 bp, Homo sapien
tctgagtctgctgttcgctgttggagccagggg

SEQ ID NO: 199331 - DNA, 33 bp, Homo sapien
gcatttaggaagtagcagacaataggcagggta

SEQ ID NO: 199332 - DNA, 33 bp, Homo sapien
gcatttaggaagtagcggacaataggcagggta

SEQ ID NO: 199333 - DNA, 33 bp, Homo sapien
gggtgcaatactgaagaagaccctcactcccag

SEQ ID NO: 199334 - DNA, 33 bp, Homo sapien
gggtgcaatactgaaggagaccctcactcccag

SEQ ID NO: 199335 - DNA, 33 bp, Homo sapien
ctttgccttccttagaccttcacgctggtcctt

SEQ ID NO: 199336 - DNA, 33 bp, Homo sapien
ctttgccttccttagatcttcacgctggtcctt

SEQ ID NO: 199337 - DNA, 33 bp, Homo sapien
agaaagatggatattaaatatgccacacatcag

SEQ ID NO: 199338 - DNA, 33 bp, Homo sapien
agaaagatggatattagatatgccacacatcag

SEQ ID NO: 199339 - DNA, 33 bp, Homo sapien
gataaccatcataaacagcacaaatggaacaaa

SEQ ID NO: 199340 - DNA, 33 bp, Homo sapien
gataaccatcataaacggcacaaatggaacaaa

SEQ ID NO: 199341 - DNA, 33 bp, Homo sapien
gcaaggtagcatcaccagaatttgcgctgagag

SEQ ID NO: 199342 - DNA, 33 bp, Homo sapien
gcaaggtagcatcaccggaatttgcgctgagag

SEQ ID NO: 199343 - DNA, 33 bp, Homo sapien
gcaggggcagggaacaatctgggagaaaggtct

SEQ ID NO: 199344 - DNA, 33 bp, Homo sapien
gcaggggcagggaacagtctgggagaaaggtct

SEQ ID NO: 199345 - DNA, 33 bp, Homo sapien
tactgaaatttgaagccctttctccaacatttc

SEQ ID NO: 199346 - DNA, 33 bp, Homo sapien
tactgaaatttgaagctctttctccaacatttc

SEQ ID NO: 199347 - DNA, 33 bp, Homo sapien
tttgtgcccagagtcaacaagtcaggcaactaa

SEQ ID NO: 199348 - DNA, 33 bp, Homo sapien
tttgtgcccagagtcagcaagtcaggcaactaa

SEQ ID NO: 199349 - DNA, 33 bp, Homo sapien
tgtcctggctcttgaacggttctacctctcact

SEQ ID NO: 199350 - DNA, 33 bp, Homo sapien
tgtcctggctcttgaatggttctacctctcact

SEQ ID NO: 199351 - DNA, 33 bp, Homo sapien
cgcgtagcctaccttcactcatctagatacatc

SEQ ID NO: 199352 - DNA, 33 bp, Homo sapien
cgcgtagcctaccttcgctcatctagatacatc

SEQ ID NO: 199353 - DNA, 33 bp, Homo sapien
aaagcagtgagtaagacgcaccccttcctgctc

SEQ ID NO: 199354 - DNA, 33 bp, Homo sapien
aaagcagtgagtaagatgcaccccttcctgctc

SEQ ID NO: 199355 - DNA, 33 bp, Homo sapien
acttgaattaatgcagaagagaagagaggccat

SEQ ID NO: 199356 - DNA, 33 bp, Homo sapien
acttgaattaatgcaggagagaagagaggccat

SEQ ID NO: 199357 - DNA, 33 bp, Homo sapien
gggcatggactaacagaagaaatggaaggtggg

SEQ ID NO: 199358 - DNA, 33 bp, Homo sapien
gggcatggactaacaggagaaatggaaggtggg

SEQ ID NO: 199359 - DNA, 33 bp, Homo sapien
gcaaactcagttctaccaattgctagttggggc

SEQ ID NO: 199360 - DNA, 33 bp, Homo sapien
gcaaactcagttctactaattgctagttggggc

SEQ ID NO: 199361 - DNA, 33 bp, Homo sapien
cctgtggtactactgaatattagatcttattct

SEQ ID NO: 199362 - DNA, 33 bp, Homo sapien
cctgtggtactactgactattagatcttattct

SEQ ID NO: 199363 - DNA, 33 bp, Homo sapien
gagtctgatttgttgccgaatatcccttttcaa

SEQ ID NO: 199364 - DNA, 33 bp, Homo sapien
gagtctgatttgttgctgaatatcccttttcaa

SEQ ID NO: 199365 - DNA, 33 bp, Homo sapien
ttttgataagcagaaaagaagaggagcagaaaa

SEQ ID NO: 199366 - DNA, 33 bp, Homo sapien
ttttgataagcagaaatgaagaggagcagaaaa

SEQ ID NO: 199367 - DNA, 33 bp, Homo sapien
ttggcagggactactccatcaaaagacattgca

SEQ ID NO: 199368 - DNA, 33 bp, Homo sapien
ttggcagggactactctatcaaaagacattgca

SEQ ID NO: 199369 - DNA, 33 bp, Homo sapien
tagttttatttcctgcgacttcttcatcttggc

SEQ ID NO: 199370 - DNA, 33 bp, Homo sapien
tagttttatttcctgctacttcttcatcttggc

SEQ ID NO: 199371 - DNA, 33 bp, Homo sapien
acattctgaagtgagacagcagttaggctgagc

SEQ ID NO: 199372 - DNA, 33 bp, Homo sapien
acattctgaagtgagagagcagttaggctgagc

SEQ ID NO: 199373 - DNA, 33 bp, Homo sapien
cttgtgcaagctcaataagaacagggactgact

SEQ ID NO: 199374 - DNA, 33 bp, Homo sapien
cttgtgcaagctcaatgagaacagggactgact

SEQ ID NO: 199375 - DNA, 33 bp, Homo sapien
gggaggtttgtgaatacctttgcctgggcagag

SEQ ID NO: 199376 - DNA, 33 bp, Homo sapien
gggaggtttgtgaatatctttgcctgggcagag

SEQ ID NO: 199377 - DNA, 33 bp, Homo sapien
ttgcaccaatctgtacagcaaagccaaaaaaga

SEQ ID NO: 199378 - DNA, 33 bp, Homo sapien
ttgcaccaatctgtacggcaaagccaaaaaaga

SEQ ID NO: 199379 - DNA, 33 bp, Homo sapien
ggatagagatcaggagaagcactggtaatacag

SEQ ID NO: 199380 - DNA, 33 bp, Homo sapien
ggatagagatcaggaggagcactggtaatacag

SEQ ID NO: 199381 - DNA, 33 bp, Homo sapien
tccttctctagcaataagacctagcatgactca

SEQ ID NO: 199382 - DNA, 33 bp, Homo sapien
tccttctctagcaataggacctagcatgactca

SEQ ID NO: 199383 - DNA, 33 bp, Homo sapien
tgggtattagagaagacgagggagaaagtacag

SEQ ID NO: 199384 - DNA, 33 bp, Homo sapien
tgggtattagagaagatgagggagaaagtacag

SEQ ID NO: 199385 - DNA, 33 bp, Homo sapien
actgatgtctccaacactaattcattaccacgt

SEQ ID NO: 199386 - DNA, 33 bp, Homo sapien
actgatgtctccaacattaattcattaccacgt

SEQ ID NO: 199387 - DNA, 33 bp, Homo sapien
ttttgtcaacctgttccaagaaaataatcctaa

SEQ ID NO: 199388 - DNA, 33 bp, Homo sapien
ttttgtcaacctgttctaagaaaataatcctaa

SEQ ID NO: 199389 - DNA, 33 bp, Homo sapien
aatgagtgacagaacaaggatctgattcctggc

SEQ ID NO: 199390 - DNA, 33 bp, Homo sapien
aatgagtgacagaacagggatctgattcctggc

SEQ ID NO: 199391 - DNA, 33 bp, Homo sapien
aaacccaaggttatacaaagcgctcagagcagg

SEQ ID NO: 199392 - DNA, 33 bp, Homo sapien
aaacccaaggttatacgaagcgctcagagcagg

SEQ ID NO: 199393 - DNA, 33 bp, Homo sapien
ggctgaaggaggggacgcgcagttgtgggtaac

SEQ ID NO: 199394 - DNA, 33 bp, Homo sapien
ggctgaaggaggggactcgcagttgtgggtaac

SEQ ID NO: 199395 - DNA, 33 bp, Homo sapien
ctcctggcctgtaataaattcttagttaatatt

SEQ ID NO: 199396 - DNA, 33 bp, Homo sapien
ctcctggcctgtaatacattcttagttaatatt

SEQ ID NO: 199397 - DNA, 33 bp, Homo sapien
gctgcttttgtacacacggtttcctctacttcc

SEQ ID NO: 199398 - DNA, 33 bp, Homo sapien
gctgcttttgtacacatggtttcctctacttcc

SEQ ID NO: 199399 - DNA, 33 bp, Homo sapien
acagccagcaattgcccgagggaagagtgtggg

SEQ ID NO: 199400 - DNA, 33 bp, Homo sapien
acagccagcaattgcctgagggaagagtgtggg

SEQ ID NO: 199401 - DNA, 33 bp, Homo sapien
ccctatggagctcttacccttgagtgtatctag

SEQ ID NO: 199402 - DNA, 33 bp, Homo sapien
ccctatggagctcttatccttgagtgtatctag

SEQ ID NO: 199403 - DNA, 33 bp, Homo sapien
ctgccatatctagctgcaggaaggacttctata

SEQ ID NO: 199404 - DNA, 33 bp, Homo sapien
ctgccatatctagctggaggaaggacttctata

SEQ ID NO: 199405 - DNA, 33 bp, Homo sapien
taacctatcagttaggaataatacgagcattac

SEQ ID NO: 199406 - DNA, 33 bp, Homo sapien
taacctatcagttagggataatacgagcattac

SEQ ID NO: 199407 - DNA, 33 bp, Homo sapien
gcaagtaactgggaaaaagagaaacagagccag

SEQ ID NO: 199408 - DNA, 33 bp, Homo sapien
gcaagtaactgggaaatagagaaacagagccag

SEQ ID NO: 199409 - DNA, 33 bp, Homo sapien
tccgggtgccttttcaataagtcacttatttct

SEQ ID NO: 199410 - DNA, 33 bp, Homo sapien
tccgggtgccttttcagtaagtcacttatttct

SEQ ID NO: 199411 - DNA, 33 bp, Homo sapien
atttttctccctgcaaacctacaagtacatgct

SEQ ID NO: 199412 - DNA, 33 bp, Homo sapien
atttttctccctgcaagcctacaagtacatgct

SEQ ID NO: 199413 - DNA, 33 bp, Homo sapien
atcaggggggcaagagaatctgtcaaagatcag

SEQ ID NO: 199414 - DNA, 33 bp, Homo sapien
atcaggggggcaagagcatctgtcaaagatcag

SEQ ID NO: 199415 - DNA, 33 bp, Homo sapien
tgcctttcctttccccagctgtgaaaacacttc

SEQ ID NO: 199416 - DNA, 33 bp, Homo sapien
tgcctttcctttccccggctgtgaaaacacttc

SEQ ID NO: 199417 - DNA, 33 bp, Homo sapien
ataagtagtgaggaaacaggctcagagaggtta

SEQ ID NO: 199418 - DNA, 33 bp, Homo sapien
ataagtagtgaggaaataggctcagagaggtta

SEQ ID NO: 199419 - DNA, 33 bp, Homo sapien
cagagtgtttgcaggaaaatatctgtcaatcaa

SEQ ID NO: 199420 - DNA, 33 bp, Homo sapien
cagagtgtttgcaggagaatatctgtcaatcaa

SEQ ID NO: 199421 - DNA, 33 bp, Homo sapien
cattgtgtagactctgaaaagttattgtaattg

SEQ ID NO: 199422 - DNA, 33 bp, Homo sapien
cattgtgtagactctggaaagttattgtaattg

SEQ ID NO: 199423 - DNA, 33 bp, Homo sapien
agaggctgacctgaaaccaacaattacaataac

SEQ ID NO: 199424 - DNA, 33 bp, Homo sapien
agaggctgacctgaaatcaacaattacaataac

SEQ ID NO: 199425 - DNA, 33 bp, Homo sapien
tagaggaggcaggaacgctcacatacacatcgg

SEQ ID NO: 199426 - DNA, 33 bp, Homo sapien
tagaggaggcaggaactctcacatacacatcgg

SEQ ID NO: 199427 - DNA, 33 bp, Homo sapien
tcttgggactgcaaaaagttgatgcactggaat

SEQ ID NO: 199428 - DNA, 33 bp, Homo sapien
tcttgggactgcaaaaggttgatgcactggaat

SEQ ID NO: 199429 - DNA, 33 bp, Homo sapien
tgagattgcttgcttagctgtccctgagaattg

SEQ ID NO: 199430 - DNA, 33 bp, Homo sapien
tgagattgcttgcttatctgtccctgagaattg

SEQ ID NO: 199431 - DNA, 33 bp, Homo sapien
acatactacatggccaatctatgtgctttatat

SEQ ID NO: 199432 - DNA, 33 bp, Homo sapien
acatactacatggccagtctatgtgctttatat

SEQ ID NO: 199433 - DNA, 33 bp, Homo sapien
actgctttgacctataatatacagtggatataa

SEQ ID NO: 199434 - DNA, 33 bp, Homo sapien
actgctttgacctatagtatacagtggatataa

SEQ ID NO: 199435 - DNA, 33 bp, Homo sapien
gagttcacaaagatcagcatgaaaagggaaaac

SEQ ID NO: 199436 - DNA, 33 bp, Homo sapien
gagttcacaaagatcatcatgaaaagggaaaac

SEQ ID NO: 199437 - DNA, 33 bp, Homo sapien
aactgcatcagtcaaactgtctcccattttatt

SEQ ID NO: 199438 - DNA, 33 bp, Homo sapien
aactgcatcagtcaaattgtctcccattttatt

SEQ ID NO: 199439 - DNA, 33 bp, Homo sapien
ggtctacatacagccacattacctgtagctact

SEQ ID NO: 199440 - DNA, 33 bp, Homo sapien
ggtctacatacagccagattacctgtagctact

SEQ ID NO: 199441 - DNA, 33 bp, Homo sapien
tgtagaccaatcaaaacgaagcgcttgggcata

SEQ ID NO: 199442 - DNA, 33 bp, Homo sapien
tgtagaccaatcaaaatgaagcgcttgggcata

SEQ ID NO: 199443 - DNA, 33 bp, Homo sapien
atttttatcaccatttaaaatctcaggtatatt

SEQ ID NO: 199444 - DNA, 33 bp, Homo sapien
atttttatcaccatttcaaatctcaggtatatt

SEQ ID NO: 199445 - DNA, 33 bp, Homo sapien
ggaagattctccttgacatgattattcctcaag

SEQ ID NO: 199446 - DNA, 33 bp, Homo sapien
ggaagattctccttgatatgattattcctcaag

SEQ ID NO: 199447 - DNA, 33 bp, Homo sapien
gtgacctcaaaattgaacctaagccaacagcta

SEQ ID NO: 199448 - DNA, 33 bp, Homo sapien
gtgacctcaaaattgagcctaagccaacagcta

SEQ ID NO: 199449 - DNA, 33 bp, Homo sapien
tttggggtaaaagtcactcagggactcattctg

SEQ ID NO: 199450 - DNA, 33 bp, Homo sapien
tttggggtaaaagtcattcagggactcattctg

SEQ ID NO: 199451 - DNA, 33 bp, Homo sapien
ctgagtattggaggcagaatgagaattttgatg

SEQ ID NO: 199452 - DNA, 33 bp, Homo sapien
ctgagtattggaggcataatgagaattttgatg

SEQ ID NO: 199453 - DNA, 33 bp, Homo sapien
acttctcaaaaattatcaaacctgacagtggct

SEQ ID NO: 199454 - DNA, 33 bp, Homo sapien
acttctcaaaaattatgaaacctgacagtggct

SEQ ID NO: 199455 - DNA, 33 bp, Homo sapien
agtcatatgcacaacaaaaagttggctttcttg

SEQ ID NO: 199456 - DNA, 33 bp, Homo sapien
agtcatatgcacaacagaaagttggctttcttg

SEQ ID NO: 199457 - DNA, 33 bp, Homo sapien
ggaggagaggaggaaacgccgcattggttccag

SEQ ID NO: 199458 - DNA, 33 bp, Homo sapien
ggaggagaggaggaaatgccgcattggttccag

SEQ ID NO: 199459 - DNA, 33 bp, Homo sapien
gcctgtaagtcactcaatagccctctgggtttt

SEQ ID NO: 199460 - DNA, 33 bp, Homo sapien
gcctgtaagtcactcagtagccctctgggtttt

SEQ ID NO: 199461 - DNA, 33 bp, Homo sapien
ggaacttggtcctgggaatacaagatcaataag

SEQ ID NO: 199462 - DNA, 33 bp, Homo sapien
ggaacttggtcctggggatacaagatcaataag

SEQ ID NO: 199463 - DNA, 33 bp, Homo sapien
caagtttgggccttacaagtttgatattgagta

SEQ ID NO: 199464 - DNA, 33 bp, Homo sapien
caagtttgggccttaccagtttgatattgagta

SEQ ID NO: 199465 - DNA, 33 bp, Homo sapien
ctaagctgggaattgaaccatgaacccaggctg

SEQ ID NO: 199466 - DNA, 33 bp, Homo sapien
ctaagctgggaattgagccatgaacccaggctg

SEQ ID NO: 199467 - DNA, 33 bp, Homo sapien
tttggcgaggcagttcacacggtaagtggggac

SEQ ID NO: 199468 - DNA, 33 bp, Homo sapien
tttggcgaggcagttcgcacggtaagtggggac

SEQ ID NO: 199469 - DNA, 33 bp, Homo sapien
ccaggtttgatgaagcaataggacttaaacagc

SEQ ID NO: 199470 - DNA, 33 bp, Homo sapien
ccaggtttgatgaagcgataggacttaaacagc

SEQ ID NO: 199471 - DNA, 33 bp, Homo sapien
gaggctcttaaatatcacttctataactttccc

SEQ ID NO: 199472 - DNA, 33 bp, Homo sapien
gaggctcttaaatatcgcttctataactttccc

SEQ ID NO: 199473 - DNA, 33 bp, Homo sapien
ccatgctcatgtgcacgcaactggtctgatggg

SEQ ID NO: 199474 - DNA, 33 bp, Homo sapien
ccatgctcatgtgcactcaactggtctgatggg

SEQ ID NO: 199475 - DNA, 33 bp, Homo sapien
ctcaccctccctgcagactaagaaggctctcag

SEQ ID NO: 199476 - DNA, 33 bp, Homo sapien
ctcaccctccctgcagtctaagaaggctctcag

SEQ ID NO: 199477 - DNA, 33 bp, Homo sapien
gagggaaggctgtgaagcaggggcaatttcctt

SEQ ID NO: 199478 - DNA, 33 bp, Homo sapien
gagggaaggctgtgaatcaggggcaatttcctt

SEQ ID NO: 199479 - DNA, 33 bp, Homo sapien
tctcatagtagatctacaaggtaactcagctct

SEQ ID NO: 199480 - DNA, 33 bp, Homo sapien
tctcatagtagatctataaggtaactcagctct

SEQ ID NO: 199481 - DNA, 33 bp, Homo sapien
agagagaagtagggcaaccaaattgctttcaca

SEQ ID NO: 199482 - DNA, 33 bp, Homo sapien
agagagaagtagggcagccaaattgctttcaca

SEQ ID NO: 199483 - DNA, 33 bp, Homo sapien
gttacattccacaaagcctctttctatttaata

SEQ ID NO: 199484 - DNA, 33 bp, Homo sapien
gttacattccacaaaggctctttctatttaata

SEQ ID NO: 199485 - DNA, 33 bp, Homo sapien
cacagtgtcactgtaacgtacctaataggagga

SEQ ID NO: 199486 - DNA, 33 bp, Homo sapien
cacagtgtcactgtaatgtacctaataggagga

SEQ ID NO: 199487 - DNA, 33 bp, Homo sapien
ccattccctctccccacgttccttcagatcagt

SEQ ID NO: 199488 - DNA, 33 bp, Homo sapien
ccattccctctccccatgttccttcagatcagt

SEQ ID NO: 199489 - DNA, 33 bp, Homo sapien
ggacaaaccatctctacattttgtaacagcaaa

SEQ ID NO: 199490 - DNA, 33 bp, Homo sapien
ggacaaaccatctctatattttgtaacagcaaa

SEQ ID NO: 199491 - DNA, 33 bp, Homo sapien
tgatatttgctacaacagaagaatcatgcacat

SEQ ID NO: 199492 - DNA, 33 bp, Homo sapien
tgatatttgctacaacggaagaatcatgcacat

SEQ ID NO: 199493 - DNA, 33 bp, Homo sapien
ttgtccttgttactaacagctttgatcctaact

SEQ ID NO: 199494 - DNA, 33 bp, Homo sapien
ttgtccttgttactaatagctttgatcctaact

SEQ ID NO: 199495 - DNA, 33 bp, Homo sapien
gtgtcactttagctgcaaactctaggatggcat

SEQ ID NO: 199496 - DNA, 33 bp, Homo sapien
gtgtcactttagctgcgaactctaggatggcat

SEQ ID NO: 199497 - DNA, 33 bp, Homo sapien
atatctaaacaatgaaactttctaaatgctttt

SEQ ID NO: 199498 - DNA, 33 bp, Homo sapien
atatctaaacaatgaacctttctaaatgctttt

SEQ ID NO: 199499 - DNA, 33 bp, Homo sapien
ttgaaaggtatgaaaacctaagttgatgttaaa

SEQ ID NO: 199500 - DNA, 33 bp, Homo sapien
ttgaaaggtatgaaaatctaagttgatgttaaa

SEQ ID NO: 199501 - DNA, 33 bp, Homo sapien
tattcctcactgcagccagaactaccaaggttt

SEQ ID NO: 199502 - DNA, 33 bp, Homo sapien
tattcctcactgcagctagaactaccaaggttt

SEQ ID NO: 199503 - DNA, 33 bp, Homo sapien
gttccttgttgcaaaccggcaagtacaataatg

SEQ ID NO: 199504 - DNA, 33 bp, Homo sapien
gttccttgttgcaaacgggcaagtacaataatg

SEQ ID NO: 199505 - DNA, 33 bp, Homo sapien
ccctcagctaaggaagcctgctgaagataggaa

SEQ ID NO: 199506 - DNA, 33 bp, Homo sapien
ccctcagctaaggaaggctgctgaagataggaa

SEQ ID NO: 199507 - DNA, 33 bp, Homo sapien
tggattgaggtggtagccaggggatgaagcaat

SEQ ID NO: 199508 - DNA, 33 bp, Homo sapien
tggattgaggtggtagtcaggggatgaagcaat

SEQ ID NO: 199509 - DNA, 33 bp, Homo sapien
cttactccttgaaaaagaagtgagtgagcctaa

SEQ ID NO: 199510 - DNA, 33 bp, Homo sapien
cttactccttgaaaaataagtgagtgagcctaa

SEQ ID NO: 199511 - DNA, 33 bp, Homo sapien
accacgtagtatcaaagaggatagattcactgc

SEQ ID NO: 199512 - DNA, 33 bp, Homo sapien
accacgtagtatcaaataggatagattcactgc

SEQ ID NO: 199513 - DNA, 33 bp, Homo sapien
gtcccatatatgaccccgctcctgacaaaggca

SEQ ID NO: 199514 - DNA, 33 bp, Homo sapien
gtcccatatatgaccctgctcctgacaaaggca

SEQ ID NO: 199515 - DNA, 33 bp, Homo sapien
gttgctggcattttgacgttggtttgatgggtt

SEQ ID NO: 199516 - DNA, 33 bp, Homo sapien
gttgctggcattttgatgttggtttgatgggtt

SEQ ID NO: 199517 - DNA, 33 bp, Homo sapien
cccagaacaagtaggacgagacaggagtctcta

SEQ ID NO: 199518 - DNA, 33 bp, Homo sapien
cccagaacaagtaggatgagacaggagtctcta

SEQ ID NO: 199519 - DNA, 33 bp, Homo sapien
gtggtaaaaaccagttcagagaaatttgtagat

SEQ ID NO: 199520 - DNA, 33 bp, Homo sapien
gtggtaaaaaccagttgagagaaatttgtagat

SEQ ID NO: 199521 - DNA, 33 bp, Homo sapien
gggctgctccaccttcaagcgcttaattagttt

SEQ ID NO: 199522 - DNA, 33 bp, Homo sapien
gggctgctccaccttcgagcgcttaattagttt

SEQ ID NO: 199523 - DNA, 33 bp, Homo sapien
aatggctctgttgcaaagctcggctcgttaaca

SEQ ID NO: 199524 - DNA, 33 bp, Homo sapien
aatggctctgttgcaaggctcggctcgttaaca

SEQ ID NO: 199525 - DNA, 33 bp, Homo sapien
tattaattccaacagggcaactcttagcatact

SEQ ID NO: 199526 - DNA, 33 bp, Homo sapien
tattaattccaacaggtcaactcttagcatact

SEQ ID NO: 199527 - DNA, 33 bp, Homo sapien
atgaaaaccaagctgaggtaggcatgaaagtta

SEQ ID NO: 199528 - DNA, 33 bp, Homo sapien
atgaaaaccaagctgatgtaggcatgaaagtta

SEQ ID NO: 199529 - DNA, 33 bp, Homo sapien
agagaacgaccaagtaagatgacaagataaaaa

SEQ ID NO: 199530 - DNA, 33 bp, Homo sapien
agagaacgaccaagtacgatgacaagataaaaa

SEQ ID NO: 199531 - DNA, 33 bp, Homo sapien
tctgtctggcattttgcagggtatttgaggctg

SEQ ID NO: 199532 - DNA, 33 bp, Homo sapien
tctgtctggcattttgtagggtatttgaggctg

SEQ ID NO: 199533 - DNA, 33 bp, Homo sapien
ttagaaagccactcaacttatccatattacact

SEQ ID NO: 199534 - DNA, 33 bp, Homo sapien
ttagaaagccactcaatttatccatattacact

SEQ ID NO: 199535 - DNA, 33 bp, Homo sapien
cttaagagttgagtaccgatgtccaaaggtaga

SEQ ID NO: 199536 - DNA, 33 bp, Homo sapien
cttaagagttgagtactgatgtccaaaggtaga

SEQ ID NO: 199537 - DNA, 33 bp, Homo sapien
gcattgtctcaaaactaagctttaaatattata

SEQ ID NO: 199538 - DNA, 33 bp, Homo sapien
gcattgtctcaaaactgagctttaaatattata

SEQ ID NO: 199539 - DNA, 33 bp, Homo sapien
aaacacgggaaaataacgcactccaaagtcaga

SEQ ID NO: 199540 - DNA, 33 bp, Homo sapien
aaacacgggaaaataatgcactccaaagtcaga

SEQ ID NO: 199541 - DNA, 33 bp, Homo sapien
attttcccgtgttttacgttggccttgttgttt

SEQ ID NO: 199542 - DNA, 33 bp, Homo sapien
attttcccgtgttttatgttggccttgttgttt

SEQ ID NO: 199543 - DNA, 33 bp, Homo sapien
aaccaagattcagttacgacacaataaaataat

SEQ ID NO: 199544 - DNA, 33 bp, Homo sapien
aaccaagattcagttaggacacaataaaataat

SEQ ID NO: 199545 - DNA, 33 bp, Homo sapien
tcttgctgtggtccaacgggccatgctttcctt

SEQ ID NO: 199546 - DNA, 33 bp, Homo sapien
tcttgctgtggtccaatgggccatgctttcctt

SEQ ID NO: 199547 - DNA, 33 bp, Homo sapien
tctgcctctaccacccaactctatgaagcaaag

SEQ ID NO: 199548 - DNA, 33 bp, Homo sapien
tctgcctctaccacccgactctatgaagcaaag

SEQ ID NO: 199549 - DNA, 33 bp, Homo sapien
aaatgttaagctataccggaagtgggttgtgga

SEQ ID NO: 199550 - DNA, 33 bp, Homo sapien
aaatgttaagctatactggaagtgggttgtgga

SEQ ID NO: 199551 - DNA, 33 bp, Homo sapien
ggaatttgctagtagaactatcagtaaaatgaa

SEQ ID NO: 199552 - DNA, 33 bp, Homo sapien
ggaatttgctagtagacctatcagtaaaatgaa

SEQ ID NO: 199553 - DNA, 33 bp, Homo sapien
aaggatggtgggtagacgaatgccagaatgatg

SEQ ID NO: 199554 - DNA, 33 bp, Homo sapien
aaggatggtgggtagatgaatgccagaatgatg

SEQ ID NO: 199555 - DNA, 33 bp, Homo sapien
atacaatgtttcagtgagtacacagtcaacacc

SEQ ID NO: 199556 - DNA, 33 bp, Homo sapien
atacaatgtttcagtgcgtacacagtcaacacc

SEQ ID NO: 199557 - DNA, 33 bp, Homo sapien
gctgctcactcccttacgaatagctgtgatggg

SEQ ID NO: 199558 - DNA, 33 bp, Homo sapien
gctgctcactcccttatgaatagctgtgatggg

SEQ ID NO: 199559 - DNA, 33 bp, Homo sapien
tcagatatctgacaacagtatactatgaagtat

SEQ ID NO: 199560 - DNA, 33 bp, Homo sapien
tcagatatctgacaaccgtatactatgaagtat

SEQ ID NO: 199561 - DNA, 33 bp, Homo sapien
gatgaacacctcttctcaagaaaggaaggacca

SEQ ID NO: 199562 - DNA, 33 bp, Homo sapien
gatgaacacctcttctgaagaaaggaaggacca

SEQ ID NO: 199563 - DNA, 33 bp, Homo sapien
tccttttaagtctaaaccaatagaaagcccatt

SEQ ID NO: 199564 - DNA, 33 bp, Homo sapien
tccttttaagtctaaagcaatagaaagcccatt

SEQ ID NO: 199565 - DNA, 33 bp, Homo sapien
gggaatgaatattgaacgggcaaccgcaatctc

SEQ ID NO: 199566 - DNA, 33 bp, Homo sapien
gggaatgaatattgaatgggcaaccgcaatctc

SEQ ID NO: 199567 - DNA, 33 bp, Homo sapien
gcttggataggtagaaagtggtaagatcgcgaa

SEQ ID NO: 199568 - DNA, 33 bp, Homo sapien
gcttggataggtagaaggtggtaagatcgcgaa

SEQ ID NO: 199569 - DNA, 33 bp, Homo sapien
tgcgtattgagatgacacctgcaagaaggagat

SEQ ID NO: 199570 - DNA, 33 bp, Homo sapien
tgcgtattgagatgacgcctgcaagaaggagat

SEQ ID NO: 199571 - DNA, 33 bp, Homo sapien
caaatttgcagacccacgcatacctccaggtgt

SEQ ID NO: 199572 - DNA, 33 bp, Homo sapien
caaatttgcagacccaggcatacctccaggtgt

SEQ ID NO: 199573 - DNA, 33 bp, Homo sapien
ctgtgctgatatacacagcctataaaatggttt

SEQ ID NO: 199574 - DNA, 33 bp, Homo sapien
ctgtgctgatatacacggcctataaaatggttt

SEQ ID NO: 199575 - DNA, 33 bp, Homo sapien
ttggagacctagatacaaacaccattaattttg

SEQ ID NO: 199576 - DNA, 33 bp, Homo sapien
ttggagacctagatacgaacaccattaattttg

SEQ ID NO: 199577 - DNA, 33 bp, Homo sapien
tgtatcgggcaaccacaggagatctgtaaaaca

SEQ ID NO: 199578 - DNA, 33 bp, Homo sapien
tgtatcgggcaaccacgggagatctgtaaaaca

SEQ ID NO: 199579 - DNA, 33 bp, Homo sapien
atcccccaaacttggaccatctataatcgtcca

SEQ ID NO: 199580 - DNA, 33 bp, Homo sapien
atcccccaaacttggatcatctataatcgtcca

SEQ ID NO: 199581 - DNA, 33 bp, Homo sapien
actacagttcctttatcagggctgctgttggca

SEQ ID NO: 199582 - DNA, 33 bp, Homo sapien
actacagttcctttatgagggctgctgttggca

SEQ ID NO: 199583 - DNA, 33 bp, Homo sapien
tttcttttaggaaacaacttgtccacactccat

SEQ ID NO: 199584 - DNA, 33 bp, Homo sapien
tttcttttaggaaacagcttgtccacactccat

SEQ ID NO: 199585 - DNA, 33 bp, Homo sapien
tcaaaaattctgagagaagcatgagattctatg

SEQ ID NO: 199586 - DNA, 33 bp, Homo sapien
tcaaaaattctgagaggagcatgagattctatg

SEQ ID NO: 199587 - DNA, 33 bp, Homo sapien
acagataattactaagaacagactgtgccattg

SEQ ID NO: 199588 - DNA, 33 bp, Homo sapien
acagataattactaaggacagactgtgccattg

SEQ ID NO: 199589 - DNA, 33 bp, Homo sapien
tttaataaatctccaaagtgattctgatgtaag

SEQ ID NO: 199590 - DNA, 33 bp, Homo sapien
tttaataaatctccaatgtgattctgatgtaag

SEQ ID NO: 199591 - DNA, 33 bp, Homo sapien
agatttggaagacacaacatcacttctacacta

SEQ ID NO: 199592 - DNA, 33 bp, Homo sapien
agatttggaagacacagcatcacttctacacta

SEQ ID NO: 199593 - DNA, 33 bp, Homo sapien
attgactctggcacaaagtgatgaactagacta

SEQ ID NO: 199594 - DNA, 33 bp, Homo sapien
attgactctggcacaacgtgatgaactagacta

SEQ ID NO: 199595 - DNA, 33 bp, Homo sapien
gcaccgaggtagtgcacctaacctaaattagga

SEQ ID NO: 199596 - DNA, 33 bp, Homo sapien
gcaccgaggtagtgcatctaacctaaattagga

SEQ ID NO: 199597 - DNA, 33 bp, Homo sapien
tgatttgtgtggaaaacgaagaaatgaggttgg

SEQ ID NO: 199598 - DNA, 33 bp, Homo sapien
tgatttgtgtggaaaatgaagaaatgaggttgg

SEQ ID NO: 199599 - DNA, 33 bp, Homo sapien
taactcaatcaataggaatatgctaaacaccta

SEQ ID NO: 199600 - DNA, 33 bp, Homo sapien
taactcaatcaataggtatatgctaaacaccta

SEQ ID NO: 199601 - DNA, 33 bp, Homo sapien
tcctcttcaaatccacacaaatgataatgtgac

SEQ ID NO: 199602 - DNA, 33 bp, Homo sapien
tcctcttcaaatccacgcaaatgataatgtgac

SEQ ID NO: 199603 - DNA, 33 bp, Homo sapien
ataactaaatgaaataacatgatacatataggg

SEQ ID NO: 199604 - DNA, 33 bp, Homo sapien
ataactaaatgaaataccatgatacatataggg

SEQ ID NO: 199605 - DNA, 33 bp, Homo sapien
tagagcctctagagaaatccttatttttttgct

SEQ ID NO: 199606 - DNA, 33 bp, Homo sapien
tagagcctctagagaagtccttatttttttgct

SEQ ID NO: 199607 - DNA, 33 bp, Homo sapien
attaaaatgaaagctgaaagtatgagtgctgct

SEQ ID NO: 199608 - DNA, 33 bp, Homo sapien
attaaaatgaaagctgcaagtatgagtgctgct

SEQ ID NO: 199609 - DNA, 33 bp, Homo sapien
gaaaaggttctgacacaaggtgaggtttttatc

SEQ ID NO: 199610 - DNA, 33 bp, Homo sapien
gaaaaggttctgacacgaggtgaggtttttatc

SEQ ID NO: 199611 - DNA, 33 bp, Homo sapien
tcagccagcagaacccaaaactctgaattttcc

SEQ ID NO: 199612 - DNA, 33 bp, Homo sapien
tcagccagcagaacccgaaactctgaattttcc

SEQ ID NO: 199613 - DNA, 33 bp, Homo sapien
gcatcatttctaaaacaagaaggataacattac

SEQ ID NO: 199614 - DNA, 33 bp, Homo sapien
gcatcatttctaaaacgagaaggataacattac

SEQ ID NO: 199615 - DNA, 33 bp, Homo sapien
ttaggttaactcatggcattctgcgaccagtgt

SEQ ID NO: 199616 - DNA, 33 bp, Homo sapien
ttaggttaactcatggtattctgcgaccagtgt

SEQ ID NO: 199617 - DNA, 33 bp, Homo sapien
ttaaaaaatgtctgaccaaatgaaaagcttata

SEQ ID NO: 199618 - DNA, 33 bp, Homo sapien
ttaaaaaatgtctgactaaatgaaaagcttata

SEQ ID NO: 199619 - DNA, 33 bp, Homo sapien
cactgccctgaatcacagattggtcataaagga

SEQ ID NO: 199620 - DNA, 33 bp, Homo sapien
cactgccctgaatcacggattggtcataaagga

SEQ ID NO: 199621 - DNA, 33 bp, Homo sapien
acattagtgcttaatacgtactgaatgagcaca

SEQ ID NO: 199622 - DNA, 33 bp, Homo sapien
acattagtgcttaatatgtactgaatgagcaca

SEQ ID NO: 199623 - DNA, 33 bp, Homo sapien
atatccagctgaaagcaaggttatatccctctg

SEQ ID NO: 199624 - DNA, 33 bp, Homo sapien
atatccagctgaaagcgaggttatatccctctg

SEQ ID NO: 199625 - DNA, 33 bp, Homo sapien
ttgtgtatcaggagacaggatgtttttgagaca

SEQ ID NO: 199626 - DNA, 33 bp, Homo sapien
ttgtgtatcaggagacgggatgtttttgagaca

SEQ ID NO: 199627 - DNA, 33 bp, Homo sapien
agacagatcagtaagacaatcggagtagtgctt

SEQ ID NO: 199628 - DNA, 33 bp, Homo sapien
agacagatcagtaagataatcggagtagtgctt

SEQ ID NO: 199629 - DNA, 33 bp, Homo sapien
gaaatatgaatgactcaacattgacaaagctca

SEQ ID NO: 199630 - DNA, 33 bp, Homo sapien
gaaatatgaatgactccacattgacaaagctca

SEQ ID NO: 199631 - DNA, 33 bp, Homo sapien
ataagcaggatgagcccggagagacatggcaga

SEQ ID NO: 199632 - DNA, 33 bp, Homo sapien
ataagcaggatgagcctggagagacatggcaga

SEQ ID NO: 199633 - DNA, 33 bp, Homo sapien
tgagaagtaatcatcaagtagcagtgaatcagg

SEQ ID NO: 199634 - DNA, 33 bp, Homo sapien
tgagaagtaatcatcaggtagcagtgaatcagg

SEQ ID NO: 199635 - DNA, 33 bp, Homo sapien
tctcaggcttgctaaaatggaagtttcacaagc

SEQ ID NO: 199636 - DNA, 33 bp, Homo sapien
tctcaggcttgctaaattggaagtttcacaagc

SEQ ID NO: 199637 - DNA, 33 bp, Homo sapien
tgatcagacacactcacggtttggaaaatcaag

SEQ ID NO: 199638 - DNA, 33 bp, Homo sapien
tgatcagacacactcatggtttggaaaatcaag

SEQ ID NO: 199639 - DNA, 33 bp, Homo sapien
gttttctccataaatcaaaaagaagaaaggcat

SEQ ID NO: 199640 - DNA, 33 bp, Homo sapien
gttttctccataaatcgaaaagaagaaaggcat

SEQ ID NO: 199641 - DNA, 33 bp, Homo sapien
ggaatatccagagacaaattttttttccccagg

SEQ ID NO: 199642 - DNA, 33 bp, Homo sapien
ggaatatccagagacagattttttttccccagg

SEQ ID NO: 199643 - DNA, 33 bp, Homo sapien
ggtcaacccattgaatgaaggcctagcaggaaa

SEQ ID NO: 199644 - DNA, 33 bp, Homo sapien
ggtcaacccattgaattaaggcctagcaggaaa

SEQ ID NO: 199645 - DNA, 33 bp, Homo sapien
ttgttcagagtcaaaacgtaggacctagatctg

SEQ ID NO: 199646 - DNA, 33 bp, Homo sapien
ttgttcagagtcaaaatgtaggacctagatctg

SEQ ID NO: 199647 - DNA, 33 bp, Homo sapien
cacaacaataaaacgacgctgtataaaagtgct

SEQ ID NO: 199648 - DNA, 33 bp, Homo sapien
cacaacaataaaacgatgctgtataaaagtgct

SEQ ID NO: 199649 - DNA, 33 bp, Homo sapien
tggtgacatcttcatacagttgtaagtggtcaa

SEQ ID NO: 199650 - DNA, 33 bp, Homo sapien
tggtgacatcttcatatagttgtaagtggtcaa

SEQ ID NO: 199651 - DNA, 33 bp, Homo sapien
acttcttaactttccccgctccagtctagtctt

SEQ ID NO: 199652 - DNA, 33 bp, Homo sapien
acttcttaactttccctgctccagtctagtctt

SEQ ID NO: 199653 - DNA, 33 bp, Homo sapien
tgataagaaggcactagaactctagtctaataa

SEQ ID NO: 199654 - DNA, 33 bp, Homo sapien
tgataagaaggcactataactctagtctaataa

SEQ ID NO: 199655 - DNA, 33 bp, Homo sapien
aacctcagactgttaccgagctacatagggagg

SEQ ID NO: 199656 - DNA, 33 bp, Homo sapien
aacctcagactgttactgagctacatagggagg

SEQ ID NO: 199657 - DNA, 33 bp, Homo sapien
atgcattaaaacttcaagtccctccctatgtag

SEQ ID NO: 199658 - DNA, 33 bp, Homo sapien
atgcattaaaacttcatgtccctccctatgtag

SEQ ID NO: 199659 - DNA, 33 bp, Homo sapien
agtaggggtttggagagagtggattaagcattc

SEQ ID NO: 199660 - DNA, 33 bp, Homo sapien
agtaggggtttggagatagtggattaagcattc

SEQ ID NO: 199661 - DNA, 33 bp, Homo sapien
aacaaagtaccctcacaaaacaggtaggaagag

SEQ ID NO: 199662 - DNA, 33 bp, Homo sapien
aacaaagtaccctcacgaaacaggtaggaagag

SEQ ID NO: 199663 - DNA, 33 bp, Homo sapien
attgcagagatgctgaacttgatgacttcaagc

SEQ ID NO: 199664 - DNA, 33 bp, Homo sapien
attgcagagatgctgaccttgatgacttcaagc

SEQ ID NO: 199665 - DNA, 33 bp, Homo sapien
gccatcaaagaatcacaaatttctaatccctag

SEQ ID NO: 199666 - DNA, 33 bp, Homo sapien
gccatcaaagaatcacgaatttctaatccctag

SEQ ID NO: 199667 - DNA, 33 bp, Homo sapien
cattgccttttgagataatcaaaatggagctga

SEQ ID NO: 199668 - DNA, 33 bp, Homo sapien
cattgccttttgagatcatcaaaatggagctga

SEQ ID NO: 199669 - DNA, 33 bp, Homo sapien
ggtacattttgaaacccaaccattatatcctta

SEQ ID NO: 199670 - DNA, 33 bp, Homo sapien
ggtacattttgaaacctaaccattatatcctta

SEQ ID NO: 199671 - DNA, 33 bp, Homo sapien
cttgcataaatcagataatcatagcacttatta

SEQ ID NO: 199672 - DNA, 33 bp, Homo sapien
cttgcataaatcagatcatcatagcacttatta

SEQ ID NO: 199673 - DNA, 33 bp, Homo sapien
aagtcctgttcatgggaaacacagcccttttac

SEQ ID NO: 199674 - DNA, 33 bp, Homo sapien
aagtcctgttcatggggaacacagcccttttac

SEQ ID NO: 199675 - DNA, 33 bp, Homo sapien
agaggaccaaagctgcagaagctgggtgagaga

SEQ ID NO: 199676 - DNA, 33 bp, Homo sapien
agaggaccaaagctgcggaagctgggtgagaga

SEQ ID NO: 199677 - DNA, 33 bp, Homo sapien
agctttggtcctctgccgatgtcctcctgtatg

SEQ ID NO: 199678 - DNA, 33 bp, Homo sapien
agctttggtcctctgctgatgtcctcctgtatg

SEQ ID NO: 199679 - DNA, 33 bp, Homo sapien
ctagtgctcaagaagaccgagggaagggcaggt

SEQ ID NO: 199680 - DNA, 33 bp, Homo sapien
ctagtgctcaagaagagcgagggaagggcaggt

SEQ ID NO: 199681 - DNA, 33 bp, Homo sapien
atcattactaatagaacaggctgacatcaagtg

SEQ ID NO: 199682 - DNA, 33 bp, Homo sapien
atcattactaatagaataggctgacatcaagtg

SEQ ID NO: 199683 - DNA, 33 bp, Homo sapien
attagatctcattagaacaaaggatgcttccta

SEQ ID NO: 199684 - DNA, 33 bp, Homo sapien
attagatctcattagagcaaaggatgcttccta

SEQ ID NO: 199685 - DNA, 33 bp, Homo sapien
tttccaatgcttgtcaattctgcctttaatttc

SEQ ID NO: 199686 - DNA, 33 bp, Homo sapien
tttccaatgcttgtcagttctgcctttaatttc

SEQ ID NO: 199687 - DNA, 33 bp, Homo sapien
gtccaagctaagataaatggctcaggtattagt

SEQ ID NO: 199688 - DNA, 33 bp, Homo sapien
gtccaagctaagataagtggctcaggtattagt

SEQ ID NO: 199689 - DNA, 33 bp, Homo sapien
agaaaagtcctgtgacagaatcccagccctgct

SEQ ID NO: 199690 - DNA, 33 bp, Homo sapien
agaaaagtcctgtgacggaatcccagccctgct

SEQ ID NO: 199691 - DNA, 33 bp, Homo sapien
gaaactgcaatgtaaaattatggtcacaaagca

SEQ ID NO: 199692 - DNA, 33 bp, Homo sapien
gaaactgcaatgtaaagttatggtcacaaagca

SEQ ID NO: 199693 - DNA, 33 bp, Homo sapien
aacaaaagtctctggaagtgttgtctatattta

SEQ ID NO: 199694 - DNA, 33 bp, Homo sapien
aacaaaagtctctggaggtgttgtctatattta

SEQ ID NO: 199695 - DNA, 33 bp, Homo sapien
ggtgtgttttattcacaacaatcctcagaagtg

SEQ ID NO: 199696 - DNA, 33 bp, Homo sapien
ggtgtgttttattcaccacaatcctcagaagtg

SEQ ID NO: 199697 - DNA, 33 bp, Homo sapien
tggacttggagatggagagtgagtacacggaga

SEQ ID NO: 199698 - DNA, 33 bp, Homo sapien
tggacttggagatggatagtgagtacacggaga

SEQ ID NO: 199699 - DNA, 33 bp, Homo sapien
gagagattttgaggaaatggctcatacagttgt

SEQ ID NO: 199700 - DNA, 33 bp, Homo sapien
gagagattttgaggaactggctcatacagttgt

SEQ ID NO: 199701 - DNA, 33 bp, Homo sapien
ggctccacttaggttacatgaccatccctgtga

SEQ ID NO: 199702 - DNA, 33 bp, Homo sapien
ggctccacttaggttatatgaccatccctgtga

SEQ ID NO: 199703 - DNA, 33 bp, Homo sapien
tctgaccgtacttctaccctgaggcagagagct

SEQ ID NO: 199704 - DNA, 33 bp, Homo sapien
tctgaccgtacttctagcctgaggcagagagct

SEQ ID NO: 199705 - DNA, 33 bp, Homo sapien
tcagcctctcagccaacatcgttccaatgcaca

SEQ ID NO: 199706 - DNA, 33 bp, Homo sapien
tcagcctctcagccaatatcgttccaatgcaca

SEQ ID NO: 199707 - DNA, 33 bp, Homo sapien
atacaatggggcctgacgtggggaaaggactct

SEQ ID NO: 199708 - DNA, 33 bp, Homo sapien
atacaatggggcctgaggtggggaaaggactct

SEQ ID NO: 199709 - DNA, 33 bp, Homo sapien
gcaacagcaataacaacgtctttaacaacagac

SEQ ID NO: 199710 - DNA, 33 bp, Homo sapien
gcaacagcaataacaatgtctttaacaacagac

SEQ ID NO: 199711 - DNA, 33 bp, Homo sapien
aaagatttcttatgaacagcgtcctgtctccta

SEQ ID NO: 199712 - DNA, 33 bp, Homo sapien
aaagatttcttatgaatagcgtcctgtctccta

SEQ ID NO: 199713 - DNA, 33 bp, Homo sapien
aaggccagagataaggaaacaccataaaaactc

SEQ ID NO: 199714 - DNA, 33 bp, Homo sapien
aaggccagagataaggtaacaccataaaaactc

SEQ ID NO: 199715 - DNA, 33 bp, Homo sapien
ccaccatgttatgcagaccaatcaacagctgtt

SEQ ID NO: 199716 - DNA, 33 bp, Homo sapien
ccaccatgttatgcaggccaatcaacagctgtt

SEQ ID NO: 199717 - DNA, 33 bp, Homo sapien
gaggaaactaaagatacgtattatttgcgagca

SEQ ID NO: 199718 - DNA, 33 bp, Homo sapien
gaggaaactaaagatatgtattatttgcgagca

SEQ ID NO: 199719 - DNA, 33 bp, Homo sapien
gcaaaggagaccagacaacatctcttcagcagc

SEQ ID NO: 199720 - DNA, 33 bp, Homo sapien
gcaaaggagaccagacgacatctcttcagcagc

SEQ ID NO: 199721 - DNA, 33 bp, Homo sapien
tctgttgtagctactacgcagaattgtagtgtg

SEQ ID NO: 199722 - DNA, 33 bp, Homo sapien
tctgttgtagctactatgcagaattgtagtgtg

SEQ ID NO: 199723 - DNA, 33 bp, Homo sapien
cccgaatggagagctaacaattaccattcacca

SEQ ID NO: 199724 - DNA, 33 bp, Homo sapien
cccgaatggagagctagcaattaccattcacca

SEQ ID NO: 199725 - DNA, 33 bp, Homo sapien
catttgaagtgacataagatttgaatggatgcc

SEQ ID NO: 199726 - DNA, 33 bp, Homo sapien
catttgaagtgacatacgatttgaatggatgcc

SEQ ID NO: 199727 - DNA, 33 bp, Homo sapien
caaggtcaatgttaacggagggagatcgacact

SEQ ID NO: 199728 - DNA, 33 bp, Homo sapien
caaggtcaatgttaactgagggagatcgacact

SEQ ID NO: 199729 - DNA, 33 bp, Homo sapien
tatcttcagtacccagaaatcagggtcacttgc

SEQ ID NO: 199730 - DNA, 33 bp, Homo sapien
tatcttcagtacccaggaatcagggtcacttgc

SEQ ID NO: 199731 - DNA, 33 bp, Homo sapien
gaaagcttcctgaggaaaaggactcttgaactt

SEQ ID NO: 199732 - DNA, 33 bp, Homo sapien
gaaagcttcctgaggagaaggactcttgaactt

SEQ ID NO: 199733 - DNA, 33 bp, Homo sapien
aatatgcgttctccccaagtaaattgctgctaa

SEQ ID NO: 199734 - DNA, 33 bp, Homo sapien
aatatgcgttctccccgagtaaattgctgctaa

SEQ ID NO: 199735 - DNA, 33 bp, Homo sapien
tttaatagggccttgacaaacagttgttgaacg

SEQ ID NO: 199736 - DNA, 33 bp, Homo sapien
tttaatagggccttgagaaacagttgttgaacg

SEQ ID NO: 199737 - DNA, 33 bp, Homo sapien
aactgtgtgagctccaagagggtgcattggcat

SEQ ID NO: 199738 - DNA, 33 bp, Homo sapien
aactgtgtgagctccacgagggtgcattggcat

SEQ ID NO: 199739 - DNA, 33 bp, Homo sapien
tctgagtccaggaagacagagaatcaaaaaaat

SEQ ID NO: 199740 - DNA, 33 bp, Homo sapien
tctgagtccaggaagagagagaatcaaaaaaat

SEQ ID NO: 199741 - DNA, 33 bp, Homo sapien
cagcaattgcttaataaatgtataacccaaata

SEQ ID NO: 199742 - DNA, 33 bp, Homo sapien
cagcaattgcttaatagatgtataacccaaata

SEQ ID NO: 199743 - DNA, 33 bp, Homo sapien
ttgcactggttctaataactatggcacgttaag

SEQ ID NO: 199744 - DNA, 33 bp, Homo sapien
ttgcactggttctaatgactatggcacgttaag

SEQ ID NO: 199745 - DNA, 33 bp, Homo sapien
acctccaggataaaaggctcttccacagagaaa

SEQ ID NO: 199746 - DNA, 33 bp, Homo sapien
acctccaggataaaagtctcttccacagagaaa

SEQ ID NO: 199747 - DNA, 33 bp, Homo sapien
tcactccttctgtgagacccaatctagggactg

SEQ ID NO: 199748 - DNA, 33 bp, Homo sapien
tcactccttctgtgaggcccaatctagggactg

SEQ ID NO: 199749 - DNA, 33 bp, Homo sapien
cttttttcatttgccagtcaaaggcttgagtcc

SEQ ID NO: 199750 - DNA, 33 bp, Homo sapien
cttttttcatttgccattcaaaggcttgagtcc

SEQ ID NO: 199751 - DNA, 33 bp, Homo sapien
ctggtctatgcaagcaacatatattttctcatt

SEQ ID NO: 199752 - DNA, 33 bp, Homo sapien
ctggtctatgcaagcagcatatattttctcatt

SEQ ID NO: 199753 - DNA, 33 bp, Homo sapien
atattccagggtctacactatccatcagtttct

SEQ ID NO: 199754 - DNA, 33 bp, Homo sapien
atattccagggtctaccctatccatcagtttct

SEQ ID NO: 199755 - DNA, 33 bp, Homo sapien
attttaaaatattttgaaaccagctctaagtaa

SEQ ID NO: 199756 - DNA, 33 bp, Homo sapien
attttaaaatattttggaaccagctctaagtaa

SEQ ID NO: 199757 - DNA, 33 bp, Homo sapien
acatttcacttgctgaacttatattatatacaa

SEQ ID NO: 199758 - DNA, 33 bp, Homo sapien
acatttcacttgctgagcttatattatatacaa

SEQ ID NO: 199759 - DNA, 33 bp, Homo sapien
gctagaagaatgacaagagtgtatttggaaaac

SEQ ID NO: 199760 - DNA, 33 bp, Homo sapien
gctagaagaatgacaatagtgtatttggaaaac

SEQ ID NO: 199761 - DNA, 33 bp, Homo sapien
gaggaaggaagtttaccgatatatggtctatct

SEQ ID NO: 199762 - DNA, 33 bp, Homo sapien
gaggaaggaagtttactgatatatggtctatct

SEQ ID NO: 199763 - DNA, 33 bp, Homo sapien
ttgaccactccaagacgataaagtggattgttc

SEQ ID NO: 199764 - DNA, 33 bp, Homo sapien
ttgaccactccaagactataaagtggattgttc

SEQ ID NO: 199765 - DNA, 33 bp, Homo sapien
ggcaagaggcagattacgaaaggacagcacaag

SEQ ID NO: 199766 - DNA, 33 bp, Homo sapien
ggcaagaggcagattatgaaaggacagcacaag

SEQ ID NO: 199767 - DNA, 33 bp, Homo sapien
gtagatagctgattgaataacaccacttcctaa

SEQ ID NO: 199768 - DNA, 33 bp, Homo sapien
gtagatagctgattgagtaacaccacttcctaa

SEQ ID NO: 199769 - DNA, 33 bp, Homo sapien
ctttaaatgtaaagacacagtaagttaaaggtg

SEQ ID NO: 199770 - DNA, 33 bp, Homo sapien
ctttaaatgtaaagacgcagtaagttaaaggtg

SEQ ID NO: 199771 - DNA, 33 bp, Homo sapien
gtttgagtgcctttcaaaactcatggctataag

SEQ ID NO: 199772 - DNA, 33 bp, Homo sapien
gtttgagtgcctttcacaactcatggctataag

SEQ ID NO: 199773 - DNA, 33 bp, Homo sapien
atgtatcagtcattcactcttattgctgagtaa

SEQ ID NO: 199774 - DNA, 33 bp, Homo sapien
atgtatcagtcattcattcttattgctgagtaa

SEQ ID NO: 199775 - DNA, 33 bp, Homo sapien
atgaagccttgcgaggcattaggaaacaagtcc

SEQ ID NO: 199776 - DNA, 33 bp, Homo sapien
atgaagccttgcgagggattaggaaacaagtcc

SEQ ID NO: 199777 - DNA, 33 bp, Homo sapien
caatgtctaggcagaccgaaaagctcacggaag

SEQ ID NO: 199778 - DNA, 33 bp, Homo sapien
caatgtctaggcagactgaaaagctcacggaag

SEQ ID NO: 199779 - DNA, 33 bp, Homo sapien
acagatttgaagagaaataggatcattcatact

SEQ ID NO: 199780 - DNA, 33 bp, Homo sapien
acagatttgaagagaattaggatcattcatact

SEQ ID NO: 199781 - DNA, 33 bp, Homo sapien
ttttaggacttttcacaagttattgcagaacaa

SEQ ID NO: 199782 - DNA, 33 bp, Homo sapien
ttttaggacttttcacgagttattgcagaacaa

SEQ ID NO: 199783 - DNA, 33 bp, Homo sapien
catggaattattgtaaatctcctgttggttggg

SEQ ID NO: 199784 - DNA, 33 bp, Homo sapien
catggaattattgtaagtctcctgttggttggg

SEQ ID NO: 199785 - DNA, 33 bp, Homo sapien
ccctgatttcacaagaaggttcagagctctgca

SEQ ID NO: 199786 - DNA, 33 bp, Homo sapien
ccctgatttcacaagatggttcagagctctgca

SEQ ID NO: 199787 - DNA, 33 bp, Homo sapien
taaataagaaattacactcacttttgattccat

SEQ ID NO: 199788 - DNA, 33 bp, Homo sapien
taaataagaaattacagtcacttttgattccat

SEQ ID NO: 199789 - DNA, 33 bp, Homo sapien
tatctcgatgtaaatacgggcttaccctgtttt

SEQ ID NO: 199790 - DNA, 33 bp, Homo sapien
tatctcgatgtaaatatgggcttaccctgtttt

SEQ ID NO: 199791 - DNA, 33 bp, Homo sapien
ttccaggaaagattcacatcaactcaccaaatg

SEQ ID NO: 199792 - DNA, 33 bp, Homo sapien
ttccaggaaagattcatatcaactcaccaaatg

SEQ ID NO: 199793 - DNA, 33 bp, Homo sapien
tccactaagatgtagaaaaagacttatttgtaa

SEQ ID NO: 199794 - DNA, 33 bp, Homo sapien
tccactaagatgtagagaaagacttatttgtaa

SEQ ID NO: 199795 - DNA, 33 bp, Homo sapien
gtttctgctgaaccaacctacctgctcccaaag

SEQ ID NO: 199796 - DNA, 33 bp, Homo sapien
gtttctgctgaaccaatctacctgctcccaaag

SEQ ID NO: 199797 - DNA, 33 bp, Homo sapien
ttggaaagtctttgaaactctaaagttaataag

SEQ ID NO: 199798 - DNA, 33 bp, Homo sapien
ttggaaagtctttgaacctctaaagttaataag

SEQ ID NO: 199799 - DNA, 33 bp, Homo sapien
ctggctcataaccccaatgaagtagctgtggtc

SEQ ID NO: 199800 - DNA, 33 bp, Homo sapien
ctggctcataaccccagtgaagtagctgtggtc

SEQ ID NO: 199801 - DNA, 33 bp, Homo sapien
tcagcctgctgcctaggatagaactgtggtttc

SEQ ID NO: 199802 - DNA, 33 bp, Homo sapien
tcagcctgctgcctagtatagaactgtggtttc

SEQ ID NO: 199803 - DNA, 33 bp, Homo sapien
tggatcaatgtaaatcaaccactcctgaaacac

SEQ ID NO: 199804 - DNA, 33 bp, Homo sapien
tggatcaatgtaaatcgaccactcctgaaacac

SEQ ID NO: 199805 - DNA, 33 bp, Homo sapien
agaaaacataactgccaacaaagaaatatgtgt

SEQ ID NO: 199806 - DNA, 33 bp, Homo sapien
agaaaacataactgccgacaaagaaatatgtgt

SEQ ID NO: 199807 - DNA, 33 bp, Homo sapien
gctctaaagagaaaccacaaaacattggaaggg

SEQ ID NO: 199808 - DNA, 33 bp, Homo sapien
gctctaaagagaaaccgcaaaacattggaaggg

SEQ ID NO: 199809 - DNA, 33 bp, Homo sapien
ttcactcttttggcctcaaatcctcaaccatct

SEQ ID NO: 199810 - DNA, 33 bp, Homo sapien
ttcactcttttggccttaaatcctcaaccatct

SEQ ID NO: 199811 - DNA, 33 bp, Homo sapien
ctttgcccaggtcactcaacttgaaaggaacag

SEQ ID NO: 199812 - DNA, 33 bp, Homo sapien
ctttgcccaggtcacttaacttgaaaggaacag

SEQ ID NO: 199813 - DNA, 33 bp, Homo sapien
agttgaaatggccaaactgctgctgtactataa

SEQ ID NO: 199814 - DNA, 33 bp, Homo sapien
agttgaaatggccaaattgctgctgtactataa

SEQ ID NO: 199815 - DNA, 33 bp, Homo sapien
ctacatggtatagcccaatacgcacttaggcta

SEQ ID NO: 199816 - DNA, 33 bp, Homo sapien
ctacatggtatagcccgatacgcacttaggcta

SEQ ID NO: 199817 - DNA, 33 bp, Homo sapien
cgtcttgtactcataaactatcacacaccccaa

SEQ ID NO: 199818 - DNA, 33 bp, Homo sapien
cgtcttgtactcataagctatcacacaccccaa

SEQ ID NO: 199819 - DNA, 33 bp, Homo sapien
tagctgaagctgacagaccttatagcttataaa

SEQ ID NO: 199820 - DNA, 33 bp, Homo sapien
tagctgaagctgacagtccttatagcttataaa

SEQ ID NO: 199821 - DNA, 33 bp, Homo sapien
aaagctctgacttgagaagattggttcagattt

SEQ ID NO: 199822 - DNA, 33 bp, Homo sapien
aaagctctgacttgaggagattggttcagattt

SEQ ID NO: 199823 - DNA, 33 bp, Homo sapien
tatcattgccaagtgaagttctatgtgcttgga

SEQ ID NO: 199824 - DNA, 33 bp, Homo sapien
tatcattgccaagtgatgttctatgtgcttgga

SEQ ID NO: 199825 - DNA, 33 bp, Homo sapien
atcattgccctaaacagaatctgtcttacggct

SEQ ID NO: 199826 - DNA, 33 bp, Homo sapien
atcattgccctaaacataatctgtcttacggct

SEQ ID NO: 199827 - DNA, 33 bp, Homo sapien
ccccccacaaatagtgcactgaaaggcaagaaa

SEQ ID NO: 199828 - DNA, 33 bp, Homo sapien
ccccccacaaatagtgtactgaaaggcaagaaa

SEQ ID NO: 199829 - DNA, 33 bp, Homo sapien
aaaataagtttcctgaagtacaatttacatatg

SEQ ID NO: 199830 - DNA, 33 bp, Homo sapien
aaaataagtttcctgaggtacaatttacatatg

SEQ ID NO: 199831 - DNA, 33 bp, Homo sapien
ggatcctcagcatctcacaatggggacaagtca

SEQ ID NO: 199832 - DNA, 33 bp, Homo sapien
ggatcctcagcatctctcaatggggacaagtca

SEQ ID NO: 199833 - DNA, 33 bp, Homo sapien
tgttactcctacccccaaaagatatacaaactc

SEQ ID NO: 199834 - DNA, 33 bp, Homo sapien
tgttactcctaccccccaaagatatacaaactc

SEQ ID NO: 199835 - DNA, 33 bp, Homo sapien
gaggtaagatgaataaacacaattgagccagta

SEQ ID NO: 199836 - DNA, 33 bp, Homo sapien
gaggtaagatgaataagcacaattgagccagta

SEQ ID NO: 199837 - DNA, 33 bp, Homo sapien
aatgtggcaccaactacgtggagtatactttct

SEQ ID NO: 199838 - DNA, 33 bp, Homo sapien
aatgtggcaccaactatgtggagtatactttct

SEQ ID NO: 199839 - DNA, 33 bp, Homo sapien
gttttaatgcaagtaaatgttggactagagcgg

SEQ ID NO: 199840 - DNA, 33 bp, Homo sapien
gttttaatgcaagtaagtgttggactagagcgg

SEQ ID NO: 199841 - DNA, 33 bp, Homo sapien
tacaaagacactattacagagggggacaatgag

SEQ ID NO: 199842 - DNA, 33 bp, Homo sapien
tacaaagacactattatagagggggacaatgag

SEQ ID NO: 199843 - DNA, 33 bp, Homo sapien
cacttggctaatatacaaggaggattctatcag

SEQ ID NO: 199844 - DNA, 33 bp, Homo sapien
cacttggctaatatacgaggaggattctatcag

SEQ ID NO: 199845 - DNA, 33 bp, Homo sapien
ttcctgaaaatgggaacaatggctaaatcacag

SEQ ID NO: 199846 - DNA, 33 bp, Homo sapien
ttcctgaaaatgggaataatggctaaatcacag

SEQ ID NO: 199847 - DNA, 33 bp, Homo sapien
atttttcgtgctgacacaacacacaaataaaat

SEQ ID NO: 199848 - DNA, 33 bp, Homo sapien
atttttcgtgctgacataacacacaaataaaat

SEQ ID NO: 199849 - DNA, 33 bp, Homo sapien
cttagagctacttacaaaaaagtaatgtttatg

SEQ ID NO: 199850 - DNA, 33 bp, Homo sapien
cttagagctacttacacaaaagtaatgtttatg

SEQ ID NO: 199851 - DNA, 33 bp, Homo sapien
gagactttgagaggtaaagtgatgtgcttaagg

SEQ ID NO: 199852 - DNA, 33 bp, Homo sapien
gagactttgagaggtagagtgatgtgcttaagg

SEQ ID NO: 199853 - DNA, 33 bp, Homo sapien
taggtatcgaatagagcaaaggcacatccttct

SEQ ID NO: 199854 - DNA, 33 bp, Homo sapien
taggtatcgaatagagtaaaggcacatccttct

SEQ ID NO: 199855 - DNA, 33 bp, Homo sapien
taagtgatttaccagccccttatctagactctg

SEQ ID NO: 199856 - DNA, 33 bp, Homo sapien
taagtgatttaccagctccttatctagactctg

SEQ ID NO: 199857 - DNA, 33 bp, Homo sapien
gactctgtaatttataaaactggcaaagggcat

SEQ ID NO: 199858 - DNA, 33 bp, Homo sapien
gactctgtaatttatacaactggcaaagggcat

SEQ ID NO: 199859 - DNA, 33 bp, Homo sapien
aattaatttcaaatgaataaaaggacttaagac

SEQ ID NO: 199860 - DNA, 33 bp, Homo sapien
aattaatttcaaatgactaaaaggacttaagac

SEQ ID NO: 199861 - DNA, 33 bp, Homo sapien
atagctttatagcaaaatctgaaattgggaagt

SEQ ID NO: 199862 - DNA, 33 bp, Homo sapien
atagctttatagcaaactctgaaattgggaagt

SEQ ID NO: 199863 - DNA, 33 bp, Homo sapien
agatcctactcagagacgaagctttaagacatg

SEQ ID NO: 199864 - DNA, 33 bp, Homo sapien
agatcctactcagagaggaagctttaagacatg

SEQ ID NO: 199865 - DNA, 33 bp, Homo sapien
tccaagttcttgaaaaaatttgataggcaacta

SEQ ID NO: 199866 - DNA, 33 bp, Homo sapien
tccaagttcttgaaaagatttgataggcaacta

SEQ ID NO: 199867 - DNA, 33 bp, Homo sapien
aggaatccatttgaaagagcagaccctcttgct

SEQ ID NO: 199868 - DNA, 33 bp, Homo sapien
aggaatccatttgaaatagcagaccctcttgct

SEQ ID NO: 199869 - DNA, 33 bp, Homo sapien
atgtaactgtgaaagacccatctgagacattct

SEQ ID NO: 199870 - DNA, 33 bp, Homo sapien
atgtaactgtgaaagatccatctgagacattct

SEQ ID NO: 199871 - DNA, 33 bp, Homo sapien
gcagaaataactgcaacggagatttaatttgca

SEQ ID NO: 199872 - DNA, 33 bp, Homo sapien
gcagaaataactgcaatggagatttaatttgca

SEQ ID NO: 199873 - DNA, 33 bp, Homo sapien
ttgaattcgtcacccaataacaagctgtgaagt

SEQ ID NO: 199874 - DNA, 33 bp, Homo sapien
ttgaattcgtcacccattaacaagctgtgaagt

SEQ ID NO: 199875 - DNA, 33 bp, Homo sapien
ccctccttccaccatccgataagccccagtgtg

SEQ ID NO: 199876 - DNA, 33 bp, Homo sapien
ccctccttccaccatctgataagccccagtgtg

SEQ ID NO: 199877 - DNA, 33 bp, Homo sapien
aaaaatatcactttaacattgatacacaactca

SEQ ID NO: 199878 - DNA, 33 bp, Homo sapien
aaaaatatcactttaatattgatacacaactca

SEQ ID NO: 199879 - DNA, 33 bp, Homo sapien
aataattttgcattagaaggagcaagattacaa

SEQ ID NO: 199880 - DNA, 33 bp, Homo sapien
aataattttgcattaggaggagcaagattacaa

SEQ ID NO: 199881 - DNA, 33 bp, Homo sapien
ctccacagatgggtcaaaagaaaggatgggaca

SEQ ID NO: 199882 - DNA, 33 bp, Homo sapien
ctccacagatgggtcagaagaaaggatgggaca

SEQ ID NO: 199883 - DNA, 33 bp, Homo sapien
aagctgctctcactacaacaaacgaaagggtgg

SEQ ID NO: 199884 - DNA, 33 bp, Homo sapien
aagctgctctcactacgacaaacgaaagggtgg

SEQ ID NO: 199885 - DNA, 33 bp, Homo sapien
aaaaacatatttacataagaattagtgatgccc

SEQ ID NO: 199886 - DNA, 33 bp, Homo sapien
aaaaacatatttacattagaattagtgatgccc

SEQ ID NO: 199887 - DNA, 33 bp, Homo sapien
cctcattctggctttaaatataattgaggacaa

SEQ ID NO: 199888 - DNA, 33 bp, Homo sapien
cctcattctggctttagatataattgaggacaa

SEQ ID NO: 199889 - DNA, 33 bp, Homo sapien
attaaaatgtatctaaacagtatgcaaaacagt

SEQ ID NO: 199890 - DNA, 33 bp, Homo sapien
attaaaatgtatctaatcagtatgcaaaacagt

SEQ ID NO: 199891 - DNA, 33 bp, Homo sapien
atgcctggagactctccagtaagtccaatatct

SEQ ID NO: 199892 - DNA, 33 bp, Homo sapien
atgcctggagactctctagtaagtccaatatct

SEQ ID NO: 199893 - DNA, 33 bp, Homo sapien
tacctaatgatgctgacgggaagtgacccaatt

SEQ ID NO: 199894 - DNA, 33 bp, Homo sapien
tacctaatgatgctgatgggaagtgacccaatt

SEQ ID NO: 199895 - DNA, 33 bp, Homo sapien
atatgcactccaataaccataatggaagtcaga

SEQ ID NO: 199896 - DNA, 33 bp, Homo sapien
atatgcactccaataatcataatggaagtcaga

SEQ ID NO: 199897 - DNA, 33 bp, Homo sapien
cagtgcaaagctattacgtgatacctaatggca

SEQ ID NO: 199898 - DNA, 33 bp, Homo sapien
cagtgcaaagctattatgtgatacctaatggca

SEQ ID NO: 199899 - DNA, 33 bp, Homo sapien
aagaagaaagagaagacgtggtctatttacgga

SEQ ID NO: 199900 - DNA, 33 bp, Homo sapien
aagaagaaagagaagatgtggtctatttacgga

SEQ ID NO: 199901 - DNA, 33 bp, Homo sapien
actggcaaagcagatacatacctgttcataggg

SEQ ID NO: 199902 - DNA, 33 bp, Homo sapien
actggcaaagcagatatatacctgttcataggg

SEQ ID NO: 199903 - DNA, 33 bp, Homo sapien
gaaatagccattattaccattgtttctaaaaga

SEQ ID NO: 199904 - DNA, 33 bp, Homo sapien
gaaatagccattattatcattgtttctaaaaga

SEQ ID NO: 199905 - DNA, 33 bp, Homo sapien
agtgccttgatctaggcaagtgtgatttccctt

SEQ ID NO: 199906 - DNA, 33 bp, Homo sapien
agtgccttgatctaggtaagtgtgatttccctt

SEQ ID NO: 199907 - DNA, 33 bp, Homo sapien
tactggttctctaacacggtttagccagtgggc

SEQ ID NO: 199908 - DNA, 33 bp, Homo sapien
tactggttctctaacatggtttagccagtgggc

SEQ ID NO: 199909 - DNA, 33 bp, Homo sapien
tgattgtgctgtacccaaggatcatccagggat

SEQ ID NO: 199910 - DNA, 33 bp, Homo sapien
tgattgtgctgtacccgaggatcatccagggat

SEQ ID NO: 199911 - DNA, 33 bp, Homo sapien
ggagtgaacctggaatcaagaacagtgtagaag

SEQ ID NO: 199912 - DNA, 33 bp, Homo sapien
ggagtgaacctggaattaagaacagtgtagaag

SEQ ID NO: 199913 - DNA, 33 bp, Homo sapien
gacatagcatgtgtcaccagttccttttttttc

SEQ ID NO: 199914 - DNA, 33 bp, Homo sapien
gacatagcatgtgtcagcagttccttttttttc

SEQ ID NO: 199915 - DNA, 33 bp, Homo sapien
tctttctgtgtcctaacctcatccacaaaacag

SEQ ID NO: 199916 - DNA, 33 bp, Homo sapien
tctttctgtgtcctaagctcatccacaaaacag

SEQ ID NO: 199917 - DNA, 33 bp, Homo sapien
aggtaacttgtagctaaccttctggtcttaatc

SEQ ID NO: 199918 - DNA, 33 bp, Homo sapien
aggtaacttgtagctatccttctggtcttaatc

SEQ ID NO: 199919 - DNA, 33 bp, Homo sapien
cacctaagtgctgacaacttctgactgtctgga

SEQ ID NO: 199920 - DNA, 33 bp, Homo sapien
cacctaagtgctgacaccttctgactgtctgga

SEQ ID NO: 199921 - DNA, 33 bp, Homo sapien
tatttcaaaacagacccacattggcaaattaaa

SEQ ID NO: 199922 - DNA, 33 bp, Homo sapien
tatttcaaaacagacctacattggcaaattaaa

SEQ ID NO: 199923 - DNA, 33 bp, Homo sapien
gccatgctctccccacaccggcacctttacata

SEQ ID NO: 199924 - DNA, 33 bp, Homo sapien
gccatgctctccccactccggcacctttacata

SEQ ID NO: 199925 - DNA, 33 bp, Homo sapien
gagatcttggtatatacgtcttgcctcaagctc

SEQ ID NO: 199926 - DNA, 33 bp, Homo sapien
gagatcttggtatatatgtcttgcctcaagctc

SEQ ID NO: 199927 - DNA, 33 bp, Homo sapien
aattaagatgttcttccaagtatggactgtcct

SEQ ID NO: 199928 - DNA, 33 bp, Homo sapien
aattaagatgttcttctaagtatggactgtcct

SEQ ID NO: 199929 - DNA, 33 bp, Homo sapien
tgcaaagtgaatcaaccgtaactgccttgttca

SEQ ID NO: 199930 - DNA, 33 bp, Homo sapien
tgcaaagtgaatcaactgtaactgccttgttca

SEQ ID NO: 199931 - DNA, 33 bp, Homo sapien
tggcatcacattggaacctctcaagtggtggca

SEQ ID NO: 199932 - DNA, 33 bp, Homo sapien
tggcatcacattggaatctctcaagtggtggca

SEQ ID NO: 199933 - DNA, 33 bp, Homo sapien
accgacaactgattacactaattacatgtccag

SEQ ID NO: 199934 - DNA, 33 bp, Homo sapien
accgacaactgattacgctaattacatgtccag

SEQ ID NO: 199935 - DNA, 33 bp, Homo sapien
tgagtctgtgatctatcaacctgcaaacatatt

SEQ ID NO: 199936 - DNA, 33 bp, Homo sapien
tgagtctgtgatctattaacctgcaaacatatt

SEQ ID NO: 199937 - DNA, 33 bp, Homo sapien
tgtagtactgtagtcccgagagatacaggaagt

SEQ ID NO: 199938 - DNA, 33 bp, Homo sapien
tgtagtactgtagtcctgagagatacaggaagt

SEQ ID NO: 199939 - DNA, 33 bp, Homo sapien
tagtttccagtttccaaaccaaatttgaaggca

SEQ ID NO: 199940 - DNA, 33 bp, Homo sapien
tagtttccagtttccagaccaaatttgaaggca

SEQ ID NO: 199941 - DNA, 33 bp, Homo sapien
atgactctaagtcacaaataagtggatattttt

SEQ ID NO: 199942 - DNA, 33 bp, Homo sapien
atgactctaagtcacatataagtggatattttt

SEQ ID NO: 199943 - DNA, 33 bp, Homo sapien
tatatgaaatatttgaaccacatttgttacctt

SEQ ID NO: 199944 - DNA, 33 bp, Homo sapien
tatatgaaatatttgagccacatttgttacctt

SEQ ID NO: 199945 - DNA, 33 bp, Homo sapien
tattctaggaacttgaaaatatcaataaatatg

SEQ ID NO: 199946 - DNA, 33 bp, Homo sapien
tattctaggaacttgacaatatcaataaatatg

SEQ ID NO: 199947 - DNA, 33 bp, Homo sapien
ttaatgtctcatgccaaggttgtacatttgtta

SEQ ID NO: 199948 - DNA, 33 bp, Homo sapien
ttaatgtctcatgccagggttgtacatttgtta

SEQ ID NO: 199949 - DNA, 33 bp, Homo sapien
aagaacaggtatgtcacgtggtgaaagtaagac

SEQ ID NO: 199950 - DNA, 33 bp, Homo sapien
aagaacaggtatgtcatgtggtgaaagtaagac

SEQ ID NO: 199951 - DNA, 33 bp, Homo sapien
cagtttgagaaacaggaaattaaggaaacaaga

SEQ ID NO: 199952 - DNA, 33 bp, Homo sapien
cagtttgagaaacagggaattaaggaaacaaga

SEQ ID NO: 199953 - DNA, 33 bp, Homo sapien
aaaattttcactgtctcaacactttaccactat

SEQ ID NO: 199954 - DNA, 33 bp, Homo sapien
aaaattttcactgtctgaacactttaccactat

SEQ ID NO: 199955 - DNA, 33 bp, Homo sapien
gcacccaatcttgacaataagtaaagctattga

SEQ ID NO: 199956 - DNA, 33 bp, Homo sapien
gcacccaatcttgacagtaagtaaagctattga

SEQ ID NO: 199957 - DNA, 33 bp, Homo sapien
atgagggagctgcacagatctttatcccatact

SEQ ID NO: 199958 - DNA, 33 bp, Homo sapien
atgagggagctgcacatatctttatcccatact

SEQ ID NO: 199959 - DNA, 33 bp, Homo sapien
tcataaatttaaaaacaaagtgacatatgttac

SEQ ID NO: 199960 - DNA, 33 bp, Homo sapien
tcataaatttaaaaacgaagtgacatatgttac

SEQ ID NO: 199961 - DNA, 33 bp, Homo sapien
cgttccgaatatacttcaaatctttcactatga

SEQ ID NO: 199962 - DNA, 33 bp, Homo sapien
cgttccgaatatactttaaatctttcactatga

SEQ ID NO: 199963 - DNA, 33 bp, Homo sapien
aatttaaattctgaaaactggctggttgaatgt

SEQ ID NO: 199964 - DNA, 33 bp, Homo sapien
aatttaaattctgaaacctggctggttgaatgt

SEQ ID NO: 199965 - DNA, 33 bp, Homo sapien
ttcatttaggttcagccataacatctgtttcag

SEQ ID NO: 199966 - DNA, 33 bp, Homo sapien
ttcatttaggttcagctataacatctgtttcag

SEQ ID NO: 199967 - DNA, 33 bp, Homo sapien
agaagaatcagactcaaacaattcactcttcac

SEQ ID NO: 199968 - DNA, 33 bp, Homo sapien
agaagaatcagactcagacaattcactcttcac

SEQ ID NO: 199969 - DNA, 33 bp, Homo sapien
tgaacatggcaagaggcatcatccataaaaaat

SEQ ID NO: 199970 - DNA, 33 bp, Homo sapien
tgaacatggcaagaggtatcatccataaaaaat

SEQ ID NO: 199971 - DNA, 33 bp, Homo sapien
taaaagaattaaagatcagctttcctatgaagg

SEQ ID NO: 199972 - DNA, 33 bp, Homo sapien
taaaagaattaaagatgagctttcctatgaagg

SEQ ID NO: 199973 - DNA, 33 bp, Homo sapien
aaatgaattttggtacaccatgtaggtagctgt

SEQ ID NO: 199974 - DNA, 33 bp, Homo sapien
aaatgaattttggtacgccatgtaggtagctgt

SEQ ID NO: 199975 - DNA, 33 bp, Homo sapien
actcttaggactctacaatttttttgtttgttt

SEQ ID NO: 199976 - DNA, 33 bp, Homo sapien
actcttaggactctaccatttttttgtttgttt

SEQ ID NO: 199977 - DNA, 33 bp, Homo sapien
ctttatgtgtacaacactcctctttagccctca

SEQ ID NO: 199978 - DNA, 33 bp, Homo sapien
ctttatgtgtacaacattcctctttagccctca

SEQ ID NO: 199979 - DNA, 33 bp, Homo sapien
ccagcagccacatgaacgtcctataaagcctct

SEQ ID NO: 199980 - DNA, 33 bp, Homo sapien
ccagcagccacatgaatgtcctataaagcctct

SEQ ID NO: 199981 - DNA, 33 bp, Homo sapien
ggggagtggatttagacgctttcttagattctt

SEQ ID NO: 199982 - DNA, 33 bp, Homo sapien
ggggagtggatttagatgctttcttagattctt

SEQ ID NO: 199983 - DNA, 33 bp, Homo sapien
aatagaagtctgtgtacaacttggcctaaaatt

SEQ ID NO: 199984 - DNA, 33 bp, Homo sapien
aatagaagtctgtgtataacttggcctaaaatt

SEQ ID NO: 199985 - DNA, 33 bp, Homo sapien
gccacactgtttattcagaaaatctccacagag

SEQ ID NO: 199986 - DNA, 33 bp, Homo sapien
gccacactgtttattcggaaaatctccacagag

SEQ ID NO: 199987 - DNA, 33 bp, Homo sapien
taaaaaagtttctctcaagggcaggacttaata

SEQ ID NO: 199988 - DNA, 33 bp, Homo sapien
taaaaaagtttctctcgagggcaggacttaata

SEQ ID NO: 199989 - DNA, 33 bp, Homo sapien
tcttgtgatggattcaatattttcgatttgttc

SEQ ID NO: 199990 - DNA, 33 bp, Homo sapien
tcttgtgatggattcagtattttcgatttgttc

SEQ ID NO: 199991 - DNA, 33 bp, Homo sapien
cagggtattccaacaaacattagtccaggcaaa

SEQ ID NO: 199992 - DNA, 33 bp, Homo sapien
cagggtattccaacaagcattagtccaggcaaa

SEQ ID NO: 199993 - DNA, 33 bp, Homo sapien
tagctaatagcatgggaatatgcacagttcagt

SEQ ID NO: 199994 - DNA, 33 bp, Homo sapien
tagctaatagcatggggatatgcacagttcagt

SEQ ID NO: 199995 - DNA, 33 bp, Homo sapien
ggccttaggccatcaaagcatttagatacattt

SEQ ID NO: 199996 - DNA, 33 bp, Homo sapien
ggccttaggccatcaaggcatttagatacattt

SEQ ID NO: 199997 - DNA, 33 bp, Homo sapien
gatggcctaagttaaaattggggaattagcttg

SEQ ID NO: 199998 - DNA, 33 bp, Homo sapien
gatggcctaagttaaagttggggaattagcttg

SEQ ID NO: 199999 - DNA, 33 bp, Homo sapien
cctctctactttcatcaagatcaaactgagtct

SEQ ID NO: 200000 - DNA, 33 bp, Homo sapien
cctctctactttcatcgagatcaaactgagtct

SEQ ID NO: 200001 - DNA, 33 bp, Homo sapien
ctcctttaagcacaaccctcactcccatttttc

SEQ ID NO: 200002 - DNA, 33 bp, Homo sapien
ctcctttaagcacaactctcactcccatttttc

SEQ ID NO: 200003 - DNA, 33 bp, Homo sapien
ttaaagttcatacagcaccaaaaaagagcccgc

SEQ ID NO: 200004 - DNA, 33 bp, Homo sapien
ttaaagttcatacagcgccaaaaaagagcccgc

SEQ ID NO: 200005 - DNA, 33 bp, Homo sapien
cacttagttatatcaccctggcaaaatgaacac

SEQ ID NO: 200006 - DNA, 33 bp, Homo sapien
cacttagttatatcactctggcaaaatgaacac

SEQ ID NO: 200007 - DNA, 33 bp, Homo sapien
tagctgcccagggctacgattcacatctggaat

SEQ ID NO: 200008 - DNA, 33 bp, Homo sapien
tagctgcccagggctatgattcacatctggaat

SEQ ID NO: 200009 - DNA, 33 bp, Homo sapien
tttaaccaatacatcacgtccagctataaaaag

SEQ ID NO: 200010 - DNA, 33 bp, Homo sapien
tttaaccaatacatcatgtccagctataaaaag

SEQ ID NO: 200011 - DNA, 33 bp, Homo sapien
aaaattgctagtctcactatggacaattctgag

SEQ ID NO: 200012 - DNA, 33 bp, Homo sapien
aaaattgctagtctcagtatggacaattctgag

SEQ ID NO: 200013 - DNA, 33 bp, Homo sapien
ctttgtctgtaaaagacgtaagggcatagggca

SEQ ID NO: 200014 - DNA, 33 bp, Homo sapien
ctttgtctgtaaaagaggtaagggcatagggca

SEQ ID NO: 200015 - DNA, 33 bp, Homo sapien
atgacagagcttcaaaaaccaaagatgaaacga

SEQ ID NO: 200016 - DNA, 33 bp, Homo sapien
atgacagagcttcaaagaccaaagatgaaacga

SEQ ID NO: 200017 - DNA, 33 bp, Homo sapien
ttaatattaggtgaaactggtacaaggcatatg

SEQ ID NO: 200018 - DNA, 33 bp, Homo sapien
ttaatattaggtgaaattggtacaaggcatatg

SEQ ID NO: 200019 - DNA, 33 bp, Homo sapien
gatagtagaaacaagaaaaaagacattgattga

SEQ ID NO: 200020 - DNA, 33 bp, Homo sapien
gatagtagaaacaagataaaagacattgattga

SEQ ID NO: 200021 - DNA, 33 bp, Homo sapien
aagtagctgccaataacgagtacccagccttga

SEQ ID NO: 200022 - DNA, 33 bp, Homo sapien
aagtagctgccaataatgagtacccagccttga

SEQ ID NO: 200023 - DNA, 33 bp, Homo sapien
tacagagagaactagaaaatatatgagcgtgaa

SEQ ID NO: 200024 - DNA, 33 bp, Homo sapien
tacagagagaactagagaatatatgagcgtgaa

SEQ ID NO: 200025 - DNA, 33 bp, Homo sapien
catggacactgaacaccaggaaaaataagggga

SEQ ID NO: 200026 - DNA, 33 bp, Homo sapien
catggacactgaacactaggaaaaataagggga

SEQ ID NO: 200027 - DNA, 33 bp, Homo sapien
atggaggctgagaacacgcacgtcttacaagtt

SEQ ID NO: 200028 - DNA, 33 bp, Homo sapien
atggaggctgagaacatgcacgtcttacaagtt

SEQ ID NO: 200029 - DNA, 33 bp, Homo sapien
gcctcttgccttcccaatgaaatcctcggcccc

SEQ ID NO: 200030 - DNA, 33 bp, Homo sapien
gcctcttgccttcccagtgaaatcctcggcccc

SEQ ID NO: 200031 - DNA, 33 bp, Homo sapien
ctttgattgtatggcaacctcttattctattgt

SEQ ID NO: 200032 - DNA, 33 bp, Homo sapien
ctttgattgtatggcatcctcttattctattgt

SEQ ID NO: 200033 - DNA, 33 bp, Homo sapien
tctcggaggcttgttacaatagagcaccgacga

SEQ ID NO: 200034 - DNA, 33 bp, Homo sapien
tctcggaggcttgttataatagagcaccgacga

SEQ ID NO: 200035 - DNA, 33 bp, Homo sapien
tatgattcctaaccataagcaagggcctctaat

SEQ ID NO: 200036 - DNA, 33 bp, Homo sapien
tatgattcctaaccatgagcaagggcctctaat

SEQ ID NO: 200037 - DNA, 33 bp, Homo sapien
cttacaggagcacagagaaggggcaccctacac

SEQ ID NO: 200038 - DNA, 33 bp, Homo sapien
cttacaggagcacagataaggggcaccctacac

SEQ ID NO: 200039 - DNA, 33 bp, Homo sapien
gttttctctttgataaaatgaggtagcaatttc

SEQ ID NO: 200040 - DNA, 33 bp, Homo sapien
gttttctctttgataagatgaggtagcaatttc

SEQ ID NO: 200041 - DNA, 33 bp, Homo sapien
tacaaattgcaaataacaggtttcatcaagaat

SEQ ID NO: 200042 - DNA, 33 bp, Homo sapien
tacaaattgcaaataataggtttcatcaagaat

SEQ ID NO: 200043 - DNA, 33 bp, Homo sapien
aagaacatgaactgagaccttgactcattaact

SEQ ID NO: 200044 - DNA, 33 bp, Homo sapien
aagaacatgaactgaggccttgactcattaact

SEQ ID NO: 200045 - DNA, 33 bp, Homo sapien
agtgtttttttgtacaaagtgagcatgcaataa

SEQ ID NO: 200046 - DNA, 33 bp, Homo sapien
agtgtttttttgtacagagtgagcatgcaataa

SEQ ID NO: 200047 - DNA, 33 bp, Homo sapien
gatgaggacctccgtaaaattgctctccctcta

SEQ ID NO: 200048 - DNA, 33 bp, Homo sapien
gatgaggacctccgtataattgctctccctcta

SEQ ID NO: 200049 - DNA, 33 bp, Homo sapien
tgtagttagaactaaaaattgaagataggagca

SEQ ID NO: 200050 - DNA, 33 bp, Homo sapien
tgtagttagaactaaagattgaagataggagca

SEQ ID NO: 200051 - DNA, 33 bp, Homo sapien
cagagtcttctcaaacaaaatttgcattccagg

SEQ ID NO: 200052 - DNA, 33 bp, Homo sapien
cagagtcttctcaaaccaaatttgcattccagg

SEQ ID NO: 200053 - DNA, 33 bp, Homo sapien
ctaataatgtatttggaaagttgttcacatggt

SEQ ID NO: 200054 - DNA, 33 bp, Homo sapien
ctaataatgtatttgggaagttgttcacatggt

SEQ ID NO: 200055 - DNA, 33 bp, Homo sapien
ataatatatcttaagcacttagaacagtgttta

SEQ ID NO: 200056 - DNA, 33 bp, Homo sapien
ataatatatcttaagcgcttagaacagtgttta

SEQ ID NO: 200057 - DNA, 33 bp, Homo sapien
gagagacagcttatacgcatgaattggaagact

SEQ ID NO: 200058 - DNA, 33 bp, Homo sapien
gagagacagcttatactcatgaattggaagact

SEQ ID NO: 200059 - DNA, 33 bp, Homo sapien
tgattgtgcgatctcacctggggaaccatgctt

SEQ ID NO: 200060 - DNA, 33 bp, Homo sapien
tgattgtgcgatctcatctggggaaccatgctt

SEQ ID NO: 200061 - DNA, 33 bp, Homo sapien
ctcagccagagcaaaaatgcttttcaaaatctt

SEQ ID NO: 200062 - DNA, 33 bp, Homo sapien
ctcagccagagcaaaactgcttttcaaaatctt

SEQ ID NO: 200063 - DNA, 33 bp, Homo sapien
aaatcctcagctctaacggtgtgcttttgctct

SEQ ID NO: 200064 - DNA, 33 bp, Homo sapien
aaatcctcagctctaatggtgtgcttttgctct

SEQ ID NO: 200065 - DNA, 33 bp, Homo sapien
gaggctcctgagcccccgacacctgcagtgtga

SEQ ID NO: 200066 - DNA, 33 bp, Homo sapien
gaggctcctgagcccctgacacctgcagtgtga

SEQ ID NO: 200067 - DNA, 33 bp, Homo sapien
gaatgcatagtgtgaaatgaagtcaagaagtga

SEQ ID NO: 200068 - DNA, 33 bp, Homo sapien
gaatgcatagtgtgaagtgaagtcaagaagtga

SEQ ID NO: 200069 - DNA, 33 bp, Homo sapien
attcatgacaactccaatgaaccagcctagctc

SEQ ID NO: 200070 - DNA, 33 bp, Homo sapien
attcatgacaactccagtgaaccagcctagctc

SEQ ID NO: 200071 - DNA, 33 bp, Homo sapien
cacacccaccagcatcactagtgcttttcatcc

SEQ ID NO: 200072 - DNA, 33 bp, Homo sapien
cacacccaccagcatcgctagtgcttttcatcc

SEQ ID NO: 200073 - DNA, 33 bp, Homo sapien
tgagcaaaaggtatataagtctttctgcactat

SEQ ID NO: 200074 - DNA, 33 bp, Homo sapien
tgagcaaaaggtatatgagtctttctgcactat

SEQ ID NO: 200075 - DNA, 33 bp, Homo sapien
ttcataggaaatgcacacataagtatttaaaag

SEQ ID NO: 200076 - DNA, 33 bp, Homo sapien
ttcataggaaatgcacgcataagtatttaaaag

SEQ ID NO: 200077 - DNA, 33 bp, Homo sapien
tcagtataaggtgagacaagaaatgaattagag

SEQ ID NO: 200078 - DNA, 33 bp, Homo sapien
tcagtataaggtgagagaagaaatgaattagag

SEQ ID NO: 200079 - DNA, 33 bp, Homo sapien
aaataacctaatcaaccggcttcaaactgacat

SEQ ID NO: 200080 - DNA, 33 bp, Homo sapien
aaataacctaatcaactggcttcaaactgacat

SEQ ID NO: 200081 - DNA, 33 bp, Homo sapien
atgcaaatattataaaatcaggttatgggatgt

SEQ ID NO: 200082 - DNA, 33 bp, Homo sapien
atgcaaatattataaattcaggttatgggatgt

SEQ ID NO: 200083 - DNA, 33 bp, Homo sapien
tgaaaatataattaaaaccattgattcccttcc

SEQ ID NO: 200084 - DNA, 33 bp, Homo sapien
tgaaaatataattaaagccattgattcccttcc

SEQ ID NO: 200085 - DNA, 33 bp, Homo sapien
tcatcctcacttttgaagcaatggggagttcaa

SEQ ID NO: 200086 - DNA, 33 bp, Homo sapien
tcatcctcacttttgaggcaatggggagttcaa

SEQ ID NO: 200087 - DNA, 33 bp, Homo sapien
gagaattactaagaaaagagtgatggccaaaga

SEQ ID NO: 200088 - DNA, 33 bp, Homo sapien
gagaattactaagaaaggagtgatggccaaaga

SEQ ID NO: 200089 - DNA, 33 bp, Homo sapien
tcatatctattcaatccctgttctgctctactt

SEQ ID NO: 200090 - DNA, 33 bp, Homo sapien
tcatatctattcaatctctgttctgctctactt

SEQ ID NO: 200091 - DNA, 33 bp, Homo sapien
ggtatcacattcttgaaagctgtaggaaggatc

SEQ ID NO: 200092 - DNA, 33 bp, Homo sapien
ggtatcacattcttgagagctgtaggaaggatc

SEQ ID NO: 200093 - DNA, 33 bp, Homo sapien
gtgctggctctaatacaaatttactacgtggat

SEQ ID NO: 200094 - DNA, 33 bp, Homo sapien
gtgctggctctaatacgaatttactacgtggat

SEQ ID NO: 200095 - DNA, 33 bp, Homo sapien
atgcaccacatatgaaaaacgaggcagcctttt

SEQ ID NO: 200096 - DNA, 33 bp, Homo sapien
atgcaccacatatgaataacgaggcagcctttt

SEQ ID NO: 200097 - DNA, 33 bp, Homo sapien
acaggcaaataaggaaattatggtgtgggctac

SEQ ID NO: 200098 - DNA, 33 bp, Homo sapien
acaggcaaataaggaagttatggtgtgggctac

SEQ ID NO: 200099 - DNA, 33 bp, Homo sapien
tcactgcgtccaaaaaatcatttagtctgaggc

SEQ ID NO: 200100 - DNA, 33 bp, Homo sapien
tcactgcgtccaaaaagtcatttagtctgaggc

SEQ ID NO: 200101 - DNA, 33 bp, Homo sapien
tggatgctgactcttccactcacaagctaagca

SEQ ID NO: 200102 - DNA, 33 bp, Homo sapien
tggatgctgactcttctactcacaagctaagca

SEQ ID NO: 200103 - DNA, 33 bp, Homo sapien
ggcagatctgagtgtgaatatagatccaccatc

SEQ ID NO: 200104 - DNA, 33 bp, Homo sapien
ggcagatctgagtgtgcatatagatccaccatc

SEQ ID NO: 200105 - DNA, 33 bp, Homo sapien
tggtttgctggttagcggcagaaatttgcactt

SEQ ID NO: 200106 - DNA, 33 bp, Homo sapien
tggtttgctggttagctgcagaaatttgcactt

SEQ ID NO: 200107 - DNA, 33 bp, Homo sapien
taatccagtactggtaactttttattaaatgtt

SEQ ID NO: 200108 - DNA, 33 bp, Homo sapien
taatccagtactggtagctttttattaaatgtt

SEQ ID NO: 200109 - DNA, 33 bp, Homo sapien
ccttttttaagaataaattatctccagacaaac

SEQ ID NO: 200110 - DNA, 33 bp, Homo sapien
ccttttttaagaataacttatctccagacaaac

SEQ ID NO: 200111 - DNA, 33 bp, Homo sapien
tcttatatatggccataagcaagctctcaacag

SEQ ID NO: 200112 - DNA, 33 bp, Homo sapien
tcttatatatggccatgagcaagctctcaacag

SEQ ID NO: 200113 - DNA, 33 bp, Homo sapien
aacagcataactggaaaaccaaagaaagaaatt

SEQ ID NO: 200114 - DNA, 33 bp, Homo sapien
aacagcataactggaagaccaaagaaagaaatt

SEQ ID NO: 200115 - DNA, 33 bp, Homo sapien
ctctttcagttacgaaagcatctggcctgtgtc

SEQ ID NO: 200116 - DNA, 33 bp, Homo sapien
ctctttcagttacgaatgcatctggcctgtgtc

SEQ ID NO: 200117 - DNA, 33 bp, Homo sapien
gggaataattgtcacaagtatctactaaaacaa

SEQ ID NO: 200118 - DNA, 33 bp, Homo sapien
gggaataattgtcacacgtatctactaaaacaa

SEQ ID NO: 200119 - DNA, 33 bp, Homo sapien
ttggagaaatgaaaataaaccaggagaatggaa

SEQ ID NO: 200120 - DNA, 33 bp, Homo sapien
ttggagaaatgaaaatgaaccaggagaatggaa

SEQ ID NO: 200121 - DNA, 33 bp, Homo sapien
acaactttttgatgataaacctcattataaact

SEQ ID NO: 200122 - DNA, 33 bp, Homo sapien
acaactttttgatgattaacctcattataaact

SEQ ID NO: 200123 - DNA, 33 bp, Homo sapien
ggctctagcttcaaaacagtctaagagcatcta

SEQ ID NO: 200124 - DNA, 33 bp, Homo sapien
ggctctagcttcaaaatagtctaagagcatcta

SEQ ID NO: 200125 - DNA, 33 bp, Homo sapien
tgaagccctctcatccaggactggttgtgagca

SEQ ID NO: 200126 - DNA, 33 bp, Homo sapien
tgaagccctctcatccgggactggttgtgagca

SEQ ID NO: 200127 - DNA, 33 bp, Homo sapien
aggtggcactacgtgacctagatttgaccaatg

SEQ ID NO: 200128 - DNA, 33 bp, Homo sapien
aggtggcactacgtgatctagatttgaccaatg

SEQ ID NO: 200129 - DNA, 33 bp, Homo sapien
agagactttaatgagacgttgaaaaagaaatgc

SEQ ID NO: 200130 - DNA, 33 bp, Homo sapien
agagactttaatgagatgttgaaaaagaaatgc

SEQ ID NO: 200131 - DNA, 33 bp, Homo sapien
agagccaccttggtccaaaatgaagaatgcaga

SEQ ID NO: 200132 - DNA, 33 bp, Homo sapien
agagccaccttggtccgaaatgaagaatgcaga

SEQ ID NO: 200133 - DNA, 33 bp, Homo sapien
ctgctttctcctttgaaatctccttgatgcctt

SEQ ID NO: 200134 - DNA, 33 bp, Homo sapien
ctgctttctcctttgagatctccttgatgcctt

SEQ ID NO: 200135 - DNA, 33 bp, Homo sapien
attaattcaagaatcacaactagctggtaaagt

SEQ ID NO: 200136 - DNA, 33 bp, Homo sapien
attaattcaagaatcataactagctggtaaagt

SEQ ID NO: 200137 - DNA, 33 bp, Homo sapien
ccattaataccagcacaataactttttattaaa

SEQ ID NO: 200138 - DNA, 33 bp, Homo sapien
ccattaataccagcacgataactttttattaaa

SEQ ID NO: 200139 - DNA, 33 bp, Homo sapien
ctcatttaatactggcaagagtatgcgaataga

SEQ ID NO: 200140 - DNA, 33 bp, Homo sapien
ctcatttaatactggcgagagtatgcgaataga

SEQ ID NO: 200141 - DNA, 33 bp, Homo sapien
ctctaaggcctaaacacgtcattaagttcctta

SEQ ID NO: 200142 - DNA, 33 bp, Homo sapien
ctctaaggcctaaacatgtcattaagttcctta

SEQ ID NO: 200143 - DNA, 33 bp, Homo sapien
catagatgggttgtaacaaaaaattacacagga

SEQ ID NO: 200144 - DNA, 33 bp, Homo sapien
catagatgggttgtaagaaaaaattacacagga

SEQ ID NO: 200145 - DNA, 33 bp, Homo sapien
acagacttagtacagacagaaggtaaataccat

SEQ ID NO: 200146 - DNA, 33 bp, Homo sapien
acagacttagtacagagagaaggtaaataccat

SEQ ID NO: 200147 - DNA, 33 bp, Homo sapien
taaagtctgtgaaataagagacgtaggaagcct

SEQ ID NO: 200148 - DNA, 33 bp, Homo sapien
taaagtctgtgaaataggagacgtaggaagcct

SEQ ID NO: 200149 - DNA, 33 bp, Homo sapien
gaatctgattgctaggaaacagtccgttgtgaa

SEQ ID NO: 200150 - DNA, 33 bp, Homo sapien
gaatctgattgctagggaacagtccgttgtgaa

SEQ ID NO: 200151 - DNA, 33 bp, Homo sapien
ttgggcagatttcagcacattaagttacatttt

SEQ ID NO: 200152 - DNA, 33 bp, Homo sapien
ttgggcagatttcagcgcattaagttacatttt

SEQ ID NO: 200153 - DNA, 33 bp, Homo sapien
acctggaaacatatgaccttttagtgtatgatg

SEQ ID NO: 200154 - DNA, 33 bp, Homo sapien
acctggaaacatatgagcttttagtgtatgatg

SEQ ID NO: 200155 - DNA, 33 bp, Homo sapien
tgttaatgttgatcaaactctaaccatatgcta

SEQ ID NO: 200156 - DNA, 33 bp, Homo sapien
tgttaatgttgatcaagctctaaccatatgcta

SEQ ID NO: 200157 - DNA, 33 bp, Homo sapien
gtaataattaacaagcggaataggcaacctaca

SEQ ID NO: 200158 - DNA, 33 bp, Homo sapien
gtaataattaacaagctgaataggcaacctaca

SEQ ID NO: 200159 - DNA, 33 bp, Homo sapien
cattgcatacagagagaaaatgatgattcaaat

SEQ ID NO: 200160 - DNA, 33 bp, Homo sapien
cattgcatacagagaggaaatgatgattcaaat

SEQ ID NO: 200161 - DNA, 33 bp, Homo sapien
gtgtatacttgtgaggccatgagcatgattaag

SEQ ID NO: 200162 - DNA, 33 bp, Homo sapien
gtgtatacttgtgagggcatgagcatgattaag

SEQ ID NO: 200163 - DNA, 33 bp, Homo sapien
atgagtttctttgatcactggctatgctcttcc

SEQ ID NO: 200164 - DNA, 33 bp, Homo sapien
atgagtttctttgatccctggctatgctcttcc

SEQ ID NO: 200165 - DNA, 33 bp, Homo sapien
gattcggacattgtccagcgtgagtaaagctta

SEQ ID NO: 200166 - DNA, 33 bp, Homo sapien
gattcggacattgtccggcgtgagtaaagctta

SEQ ID NO: 200167 - DNA, 33 bp, Homo sapien
cttatgtttttaatgcaaattcattcagcttca

SEQ ID NO: 200168 - DNA, 33 bp, Homo sapien
cttatgtttttaatgcgaattcattcagcttca

SEQ ID NO: 200169 - DNA, 33 bp, Homo sapien
gggagaaaatattgtacagcatattcactagct

SEQ ID NO: 200170 - DNA, 33 bp, Homo sapien
gggagaaaatattgtatagcatattcactagct

SEQ ID NO: 200171 - DNA, 33 bp, Homo sapien
atgtggaaagatcccaacttttggagctaccaa

SEQ ID NO: 200172 - DNA, 33 bp, Homo sapien
atgtggaaagatcccaccttttggagctaccaa

SEQ ID NO: 200173 - DNA, 33 bp, Homo sapien
tgctaagcctttgagacagaaaaagcaaaacaa

SEQ ID NO: 200174 - DNA, 33 bp, Homo sapien
tgctaagcctttgagatagaaaaagcaaaacaa

SEQ ID NO: 200175 - DNA, 33 bp, Homo sapien
gacctaaagtaaagaacgtcagcagtggcattt

SEQ ID NO: 200176 - DNA, 33 bp, Homo sapien
gacctaaagtaaagaaggtcagcagtggcattt

SEQ ID NO: 200177 - DNA, 33 bp, Homo sapien
atgagcaagaagttagacccgactggccctcgg

SEQ ID NO: 200178 - DNA, 33 bp, Homo sapien
atgagcaagaagttagtcccgactggccctcgg

SEQ ID NO: 200179 - DNA, 33 bp, Homo sapien
gtgaccttacaggatcagaaacaggagaattgt

SEQ ID NO: 200180 - DNA, 33 bp, Homo sapien
gtgaccttacaggatcggaaacaggagaattgt

SEQ ID NO: 200181 - DNA, 33 bp, Homo sapien
cccctggccttcacttaaaagggatgcagagcc

SEQ ID NO: 200182 - DNA, 33 bp, Homo sapien
cccctggccttcactttaaagggatgcagagcc

SEQ ID NO: 200183 - DNA, 33 bp, Homo sapien
ttttctgtaagaatcagcctgacagagccctat

SEQ ID NO: 200184 - DNA, 33 bp, Homo sapien
ttttctgtaagaatcatcctgacagagccctat

SEQ ID NO: 200185 - DNA, 33 bp, Homo sapien
tgtagcatcgacacaagaaggttttaaagctca

SEQ ID NO: 200186 - DNA, 33 bp, Homo sapien
tgtagcatcgacacaataaggttttaaagctca

SEQ ID NO: 200187 - DNA, 33 bp, Homo sapien
aatttggatttgaatcaagttagttccgacagt

SEQ ID NO: 200188 - DNA, 33 bp, Homo sapien
aatttggatttgaatcgagttagttccgacagt

SEQ ID NO: 200189 - DNA, 33 bp, Homo sapien
caggagaacatgatacaaacttcacagtcaatt

SEQ ID NO: 200190 - DNA, 33 bp, Homo sapien
caggagaacatgatacgaacttcacagtcaatt

SEQ ID NO: 200191 - DNA, 33 bp, Homo sapien
cattttgcacatcctccatattccctggcccat

SEQ ID NO: 200192 - DNA, 33 bp, Homo sapien
cattttgcacatcctcgatattccctggcccat

SEQ ID NO: 200193 - DNA, 33 bp, Homo sapien
ttataaatgggaacacactgtatttgtttatct

SEQ ID NO: 200194 - DNA, 33 bp, Homo sapien
ttataaatgggaacacgctgtatttgtttatct

SEQ ID NO: 200195 - DNA, 33 bp, Homo sapien
gattgtttggttgggcaaaaccacgatcttttc

SEQ ID NO: 200196 - DNA, 33 bp, Homo sapien
gattgtttggttgggctaaaccacgatcttttc

SEQ ID NO: 200197 - DNA, 33 bp, Homo sapien
tcgtgggcagggcataccgtacccatctcccaa

SEQ ID NO: 200198 - DNA, 33 bp, Homo sapien
tcgtgggcagggcatagcgtacccatctcccaa

SEQ ID NO: 200199 - DNA, 33 bp, Homo sapien
ggcacttcacggtgacacattctcaggatgaga

SEQ ID NO: 200200 - DNA, 33 bp, Homo sapien
ggcacttcacggtgacgcattctcaggatgaga

SEQ ID NO: 200201 - DNA, 33 bp, Homo sapien
agcaggaggccaggggaaaacaagaggcagccc

SEQ ID NO: 200202 - DNA, 33 bp, Homo sapien
agcaggaggccagggggaaacaagaggcagccc

SEQ ID NO: 200203 - DNA, 33 bp, Homo sapien
tggggtaaaggtccccacaatcaagtcacagaa

SEQ ID NO: 200204 - DNA, 33 bp, Homo sapien
tggggtaaaggtccccgcaatcaagtcacagaa

SEQ ID NO: 200205 - DNA, 33 bp, Homo sapien
aagagcattaccttaccggactgattcatattc

SEQ ID NO: 200206 - DNA, 33 bp, Homo sapien
aagagcattaccttactggactgattcatattc

SEQ ID NO: 200207 - DNA, 33 bp, Homo sapien
agatattccacaaattcaagaagtcctgacagg

SEQ ID NO: 200208 - DNA, 33 bp, Homo sapien
agatattccacaaattgaagaagtcctgacagg

SEQ ID NO: 200209 - DNA, 33 bp, Homo sapien
aatagcctctaattaacgcttctccatttcagg

SEQ ID NO: 200210 - DNA, 33 bp, Homo sapien
aatagcctctaattaatgcttctccatttcagg

SEQ ID NO: 200211 - DNA, 33 bp, Homo sapien
cttctcattgggataaatgcgtcatattatcgc

SEQ ID NO: 200212 - DNA, 33 bp, Homo sapien
cttctcattgggataactgcgtcatattatcgc

SEQ ID NO: 200213 - DNA, 33 bp, Homo sapien
tcctttctacaacataccgaggtttcctagctt

SEQ ID NO: 200214 - DNA, 33 bp, Homo sapien
tcctttctacaacatatcgaggtttcctagctt

SEQ ID NO: 200215 - DNA, 33 bp, Homo sapien
ataaacaaaaactgacgcagaaggaaaatcggc

SEQ ID NO: 200216 - DNA, 33 bp, Homo sapien
ataaacaaaaactgactcagaaggaaaatcggc

SEQ ID NO: 200217 - DNA, 33 bp, Homo sapien
tctagttctagataaaagacaggatggtataca

SEQ ID NO: 200218 - DNA, 33 bp, Homo sapien
tctagttctagataaaggacaggatggtataca

SEQ ID NO: 200219 - DNA, 33 bp, Homo sapien
ataccactgaaagctacaggcagtatgtgattc

SEQ ID NO: 200220 - DNA, 33 bp, Homo sapien
ataccactgaaagctataggcagtatgtgattc

SEQ ID NO: 200221 - DNA, 33 bp, Homo sapien
aggcattcaaacagaaactgaaagtatagctct

SEQ ID NO: 200222 - DNA, 33 bp, Homo sapien
aggcattcaaacagaagctgaaagtatagctct

SEQ ID NO: 200223 - DNA, 33 bp, Homo sapien
cagagaatccataagaaactgagaattctgagt

SEQ ID NO: 200224 - DNA, 33 bp, Homo sapien
cagagaatccataagagactgagaattctgagt

SEQ ID NO: 200225 - DNA, 33 bp, Homo sapien
tcaagtttgcagatgaaatatcatgggacttcc

SEQ ID NO: 200226 - DNA, 33 bp, Homo sapien
tcaagtttgcagatgacatatcatgggacttcc

SEQ ID NO: 200227 - DNA, 33 bp, Homo sapien
gaggctgcagaccagagggaagggctgatcctc

SEQ ID NO: 200228 - DNA, 33 bp, Homo sapien
gaggctgcagaccagatggaagggctgatcctc

SEQ ID NO: 200229 - DNA, 33 bp, Homo sapien
agagaactattgaacactgtattgtgatatagt

SEQ ID NO: 200230 - DNA, 33 bp, Homo sapien
agagaactattgaacattgtattgtgatatagt

SEQ ID NO: 200231 - DNA, 33 bp, Homo sapien
agaacagagaaggctacactttgcactcagaat

SEQ ID NO: 200232 - DNA, 33 bp, Homo sapien
agaacagagaaggctatactttgcactcagaat

SEQ ID NO: 200233 - DNA, 33 bp, Homo sapien
agcttttgactcttaacccatgggatgcaagtt

SEQ ID NO: 200234 - DNA, 33 bp, Homo sapien
agcttttgactcttaatccatgggatgcaagtt

SEQ ID NO: 200235 - DNA, 33 bp, Homo sapien
gtatgtcttccaaaaaggataacaaatctttga

SEQ ID NO: 200236 - DNA, 33 bp, Homo sapien
gtatgtcttccaaaaatgataacaaatctttga

SEQ ID NO: 200237 - DNA, 33 bp, Homo sapien
agcctctaccacatagaagataaaatatccaat

SEQ ID NO: 200238 - DNA, 33 bp, Homo sapien
agcctctaccacataggagataaaatatccaat

SEQ ID NO: 200239 - DNA, 33 bp, Homo sapien
ctggaaaatccgttacagaggaaatatttgaga

SEQ ID NO: 200240 - DNA, 33 bp, Homo sapien
ctggaaaatccgttacggaggaaatatttgaga

SEQ ID NO: 200241 - DNA, 33 bp, Homo sapien
gtgctcatgtggttgcaattaagccaaagccca

SEQ ID NO: 200242 - DNA, 33 bp, Homo sapien
gtgctcatgtggttgcgattaagccaaagccca

SEQ ID NO: 200243 - DNA, 33 bp, Homo sapien
caagagtgaacacagaaagatctgttaggagga

SEQ ID NO: 200244 - DNA, 33 bp, Homo sapien
caagagtgaacacagagagatctgttaggagga

SEQ ID NO: 200245 - DNA, 33 bp, Homo sapien
agattgaggctctcacactaggatgtcttcagc

SEQ ID NO: 200246 - DNA, 33 bp, Homo sapien
agattgaggctctcacgctaggatgtcttcagc

SEQ ID NO: 200247 - DNA, 33 bp, Homo sapien
gggaactggactgaaaccaacatataaccgttt

SEQ ID NO: 200248 - DNA, 33 bp, Homo sapien
gggaactggactgaaatcaacatataaccgttt

SEQ ID NO: 200249 - DNA, 33 bp, Homo sapien
ttctgaccctatactcccatcagtaaacatttt

SEQ ID NO: 200250 - DNA, 33 bp, Homo sapien
ttctgaccctatactctcatcagtaaacatttt

SEQ ID NO: 200251 - DNA, 33 bp, Homo sapien
tatttataaactccacacactagctaatatctg

SEQ ID NO: 200252 - DNA, 33 bp, Homo sapien
tatttataaactccacgcactagctaatatctg

SEQ ID NO: 200253 - DNA, 33 bp, Homo sapien
caaaggctgtcccccaaatgtacctagaaatag

SEQ ID NO: 200254 - DNA, 33 bp, Homo sapien
caaaggctgtcccccagatgtacctagaaatag

SEQ ID NO: 200255 - DNA, 33 bp, Homo sapien
agagtcacagcttaaactacaggtttgcctata

SEQ ID NO: 200256 - DNA, 33 bp, Homo sapien
agagtcacagcttaaattacaggtttgcctata

SEQ ID NO: 200257 - DNA, 33 bp, Homo sapien
attgtatcacatggaacgaccagggctgacctg

SEQ ID NO: 200258 - DNA, 33 bp, Homo sapien
attgtatcacatggaatgaccagggctgacctg

SEQ ID NO: 200259 - DNA, 33 bp, Homo sapien
cagttctagttgtacaaagtcccttctctggct

SEQ ID NO: 200260 - DNA, 33 bp, Homo sapien
cagttctagttgtacagagtcccttctctggct

SEQ ID NO: 200261 - DNA, 33 bp, Homo sapien
gacaaggacatcctcacagcaagtgaacagggt

SEQ ID NO: 200262 - DNA, 33 bp, Homo sapien
gacaaggacatcctcatagcaagtgaacagggt

SEQ ID NO: 200263 - DNA, 33 bp, Homo sapien
cttgaaaacttactcccccttcaaagatcagga

SEQ ID NO: 200264 - DNA, 33 bp, Homo sapien
cttgaaaacttactcctccttcaaagatcagga

SEQ ID NO: 200265 - DNA, 33 bp, Homo sapien
ccttggctatttctcacatatactctccacatg

SEQ ID NO: 200266 - DNA, 33 bp, Homo sapien
ccttggctatttctcagatatactctccacatg

SEQ ID NO: 200267 - DNA, 33 bp, Homo sapien
aataaatgaagaaatcagagcaatgtcaggctg

SEQ ID NO: 200268 - DNA, 33 bp, Homo sapien
aataaatgaagaaatcggagcaatgtcaggctg

SEQ ID NO: 200269 - DNA, 33 bp, Homo sapien
ggaattaaagaaacaaaagtgagcaacacagaa

SEQ ID NO: 200270 - DNA, 33 bp, Homo sapien
ggaattaaagaaacaacagtgagcaacacagaa

SEQ ID NO: 200271 - DNA, 33 bp, Homo sapien
gggaggaaagttgcttcaaatttggaaaaattt

SEQ ID NO: 200272 - DNA, 33 bp, Homo sapien
gggaggaaagttgcttgaaatttggaaaaattt

SEQ ID NO: 200273 - DNA, 33 bp, Homo sapien
agctgacaattctccacgtaggtttctgcttcc

SEQ ID NO: 200274 - DNA, 33 bp, Homo sapien
agctgacaattctccatgtaggtttctgcttcc

SEQ ID NO: 200275 - DNA, 33 bp, Homo sapien
gctccctaaaccattacgctcactgctaaacct

SEQ ID NO: 200276 - DNA, 33 bp, Homo sapien
gctccctaaaccattatgctcactgctaaacct

SEQ ID NO: 200277 - DNA, 33 bp, Homo sapien
taaacactactcctccccaagttattaagaatc

SEQ ID NO: 200278 - DNA, 33 bp, Homo sapien
taaacactactcctcctcaagttattaagaatc

SEQ ID NO: 200279 - DNA, 33 bp, Homo sapien
aacttcaatgcttgccaggaaaatcttatcttg

SEQ ID NO: 200280 - DNA, 33 bp, Homo sapien
aacttcaatgcttgccgggaaaatcttatcttg

SEQ ID NO: 200281 - DNA, 33 bp, Homo sapien
tccaaggtcaaatgacgggttttccatctggga

SEQ ID NO: 200282 - DNA, 33 bp, Homo sapien
tccaaggtcaaatgactggttttccatctggga

SEQ ID NO: 200283 - DNA, 33 bp, Homo sapien
gaactgtaccaaggagacatacagagattaatg

SEQ ID NO: 200284 - DNA, 33 bp, Homo sapien
gaactgtaccaaggaggcatacagagattaatg

SEQ ID NO: 200285 - DNA, 33 bp, Homo sapien
tcacatggcaaactgtaaaatgctaccagatat

SEQ ID NO: 200286 - DNA, 33 bp, Homo sapien
tcacatggcaaactgtcaaatgctaccagatat

SEQ ID NO: 200287 - DNA, 33 bp, Homo sapien
cattcagtaggtgaagcagctagtccagctgct

SEQ ID NO: 200288 - DNA, 33 bp, Homo sapien
cattcagtaggtgaagtagctagtccagctgct

SEQ ID NO: 200289 - DNA, 33 bp, Homo sapien
aattctgttaataacaacttaatcattgaggaa

SEQ ID NO: 200290 - DNA, 33 bp, Homo sapien
aattctgttaataacagcttaatcattgaggaa

SEQ ID NO: 200291 - DNA, 33 bp, Homo sapien
gagaacaggtataacacctggcacatagtggga

SEQ ID NO: 200292 - DNA, 33 bp, Homo sapien
gagaacaggtataacagctggcacatagtggga

SEQ ID NO: 200293 - DNA, 33 bp, Homo sapien
atctctttcattccaaacttgcagcattcttcc

SEQ ID NO: 200294 - DNA, 33 bp, Homo sapien
atctctttcattccaatcttgcagcattcttcc

SEQ ID NO: 200295 - DNA, 33 bp, Homo sapien
tgtggataaaaagctacgctgtgagaagttaaa

SEQ ID NO: 200296 - DNA, 33 bp, Homo sapien
tgtggataaaaagctatgctgtgagaagttaaa

SEQ ID NO: 200297 - DNA, 33 bp, Homo sapien
gaacaataaggcctaacgctacagtcagcgtcc

SEQ ID NO: 200298 - DNA, 33 bp, Homo sapien
gaacaataaggcctaatgctacagtcagcgtcc

SEQ ID NO: 200299 - DNA, 33 bp, Homo sapien
gaaaagatagttcacaacaaagatataaactca

SEQ ID NO: 200300 - DNA, 33 bp, Homo sapien
gaaaagatagttcacatcaaagatataaactca

SEQ ID NO: 200301 - DNA, 33 bp, Homo sapien
gacctcagaatgacaaaacatcagtatggttgt

SEQ ID NO: 200302 - DNA, 33 bp, Homo sapien
gacctcagaatgacaagacatcagtatggttgt

SEQ ID NO: 200303 - DNA, 33 bp, Homo sapien
ttgtatctgattatcaataagtttagttgctgc

SEQ ID NO: 200304 - DNA, 33 bp, Homo sapien
ttgtatctgattatcagtaagtttagttgctgc

SEQ ID NO: 200305 - DNA, 33 bp, Homo sapien
agctggcagtgccttaacctaaaagaaagcatc

SEQ ID NO: 200306 - DNA, 33 bp, Homo sapien
agctggcagtgccttatcctaaaagaaagcatc

SEQ ID NO: 200307 - DNA, 33 bp, Homo sapien
tacaagtgtagacttaactcttcctaaaatgtc

SEQ ID NO: 200308 - DNA, 33 bp, Homo sapien
tacaagtgtagacttagctcttcctaaaatgtc

SEQ ID NO: 200309 - DNA, 33 bp, Homo sapien
gactctgtgactgcaaaacttctaggctctctg

SEQ ID NO: 200310 - DNA, 33 bp, Homo sapien
gactctgtgactgcaatacttctaggctctctg

SEQ ID NO: 200311 - DNA, 33 bp, Homo sapien
aaggcttactccacaaccatacaacaagtaaat

SEQ ID NO: 200312 - DNA, 33 bp, Homo sapien
aaggcttactccacaatcatacaacaagtaaat

SEQ ID NO: 200313 - DNA, 33 bp, Homo sapien
ttgggaagttgtctggccattgtgtgggaggga

SEQ ID NO: 200314 - DNA, 33 bp, Homo sapien
ttgggaagttgtctggtcattgtgtgggaggga

SEQ ID NO: 200315 - DNA, 33 bp, Homo sapien
atttcatatgaaaaaaaggatcaagatggtgaa

SEQ ID NO: 200316 - DNA, 33 bp, Homo sapien
atttcatatgaaaaaagggatcaagatggtgaa

SEQ ID NO: 200317 - DNA, 33 bp, Homo sapien
gagagagagagagaaaccacattcaataacttt

SEQ ID NO: 200318 - DNA, 33 bp, Homo sapien
gagagagagagagaaagcacattcaataacttt

SEQ ID NO: 200319 - DNA, 33 bp, Homo sapien
agaacacactgaaggagtatagatgaactcatc

SEQ ID NO: 200320 - DNA, 33 bp, Homo sapien
agaacacactgaaggattatagatgaactcatc

SEQ ID NO: 200321 - DNA, 33 bp, Homo sapien
gctatggccacttttacggtaaggcagtgtatt

SEQ ID NO: 200322 - DNA, 33 bp, Homo sapien
gctatggccacttttatggtaaggcagtgtatt

SEQ ID NO: 200323 - DNA, 33 bp, Homo sapien
gttcaggtagaaaaaaatggtatctagagcagt

SEQ ID NO: 200324 - DNA, 33 bp, Homo sapien
gttcaggtagaaaaaagtggtatctagagcagt

SEQ ID NO: 200325 - DNA, 33 bp, Homo sapien
cagggactttttcctaaaccacattaccagtag

SEQ ID NO: 200326 - DNA, 33 bp, Homo sapien
cagggactttttcctagaccacattaccagtag

SEQ ID NO: 200327 - DNA, 33 bp, Homo sapien
gtcattctttgaccagcagacaaatgccagaga

SEQ ID NO: 200328 - DNA, 33 bp, Homo sapien
gtcattctttgaccagtagacaaatgccagaga

SEQ ID NO: 200329 - DNA, 33 bp, Homo sapien
aaacaactatctctcacaaataaaggcagagtt

SEQ ID NO: 200330 - DNA, 33 bp, Homo sapien
aaacaactatctctcagaaataaaggcagagtt

SEQ ID NO: 200331 - DNA, 33 bp, Homo sapien
cacatcaaatgggtaaagaacgtcatgagttgg

SEQ ID NO: 200332 - DNA, 33 bp, Homo sapien
cacatcaaatgggtaaggaacgtcatgagttgg

SEQ ID NO: 200333 - DNA, 33 bp, Homo sapien
ctccttgagggcaggagcaagactcatgtttat

SEQ ID NO: 200334 - DNA, 33 bp, Homo sapien
ctccttgagggcaggatcaagactcatgtttat

SEQ ID NO: 200335 - DNA, 33 bp, Homo sapien
caaagattcccaggtacgtttaattcatgctga

SEQ ID NO: 200336 - DNA, 33 bp, Homo sapien
caaagattcccaggtatgtttaattcatgctga

SEQ ID NO: 200337 - DNA, 33 bp, Homo sapien
gattggaggcagcagacaaacgcaaagaccaca

SEQ ID NO: 200338 - DNA, 33 bp, Homo sapien
gattggaggcagcagagaaacgcaaagaccaca

SEQ ID NO: 200339 - DNA, 33 bp, Homo sapien
gagaggccaaagagcaccagtggaggattttga

SEQ ID NO: 200340 - DNA, 33 bp, Homo sapien
gagaggccaaagagcatcagtggaggattttga

SEQ ID NO: 200341 - DNA, 33 bp, Homo sapien
agaaaagacagcggctcaagtcaatggtgggcg

SEQ ID NO: 200342 - DNA, 33 bp, Homo sapien
agaaaagacagcggcttaagtcaatggtgggcg

SEQ ID NO: 200343 - DNA, 33 bp, Homo sapien
tcctgtacccagtagacgctttaataaacacgc

SEQ ID NO: 200344 - DNA, 33 bp, Homo sapien
tcctgtacccagtagatgctttaataaacacgc

SEQ ID NO: 200345 - DNA, 33 bp, Homo sapien
ttctgtgctcaacatacctgtacttaaaaaaaa

SEQ ID NO: 200346 - DNA, 33 bp, Homo sapien
ttctgtgctcaacatatctgtacttaaaaaaaa

SEQ ID NO: 200347 - DNA, 33 bp, Homo sapien
atgtgcgagagaggagacaaattgcactgaaca

SEQ ID NO: 200348 - DNA, 33 bp, Homo sapien
atgtgcgagagaggagtcaaattgcactgaaca

SEQ ID NO: 200349 - DNA, 33 bp, Homo sapien
gagagtaaataccgagcgtaaaaaatgaatata

SEQ ID NO: 200350 - DNA, 33 bp, Homo sapien
gagagtaaataccgagtgtaaaaaatgaatata

SEQ ID NO: 200351 - DNA, 33 bp, Homo sapien
ccccccctctggaaacaagtctcttagacagat

SEQ ID NO: 200352 - DNA, 33 bp, Homo sapien
ccccccctctggaaaccagtctcttagacagat

SEQ ID NO: 200353 - DNA, 33 bp, Homo sapien
aacgactgaggaactagcatagactaaggagac

SEQ ID NO: 200354 - DNA, 33 bp, Homo sapien
aacgactgaggaactatcatagactaaggagac

SEQ ID NO: 200355 - DNA, 33 bp, Homo sapien
ggaagagttgcaaagacgggacagatagttcag

SEQ ID NO: 200356 - DNA, 33 bp, Homo sapien
ggaagagttgcaaagatgggacagatagttcag

SEQ ID NO: 200357 - DNA, 33 bp, Homo sapien
atttcaccagatgacacaaaactgtgattatcc

SEQ ID NO: 200358 - DNA, 33 bp, Homo sapien
atttcaccagatgacataaaactgtgattatcc

SEQ ID NO: 200359 - DNA, 33 bp, Homo sapien
tgaaggcccacagaaacttgatttgagttttag

SEQ ID NO: 200360 - DNA, 33 bp, Homo sapien
tgaaggcccacagaaatttgatttgagttttag

SEQ ID NO: 200361 - DNA, 33 bp, Homo sapien
gggtcactccacagtacaaaatgtagccctgag

SEQ ID NO: 200362 - DNA, 33 bp, Homo sapien
gggtcactccacagtataaaatgtagccctgag

SEQ ID NO: 200363 - DNA, 33 bp, Homo sapien
gttgtgaagaattgagcagtttcatgaatctga

SEQ ID NO: 200364 - DNA, 33 bp, Homo sapien
gttgtgaagaattgagtagtttcatgaatctga

SEQ ID NO: 200365 - DNA, 33 bp, Homo sapien
ggtttagagctcatcacaattatttatttcttc

SEQ ID NO: 200366 - DNA, 33 bp, Homo sapien
ggtttagagctcatcagaattatttatttcttc

SEQ ID NO: 200367 - DNA, 33 bp, Homo sapien
cacaggattgaccttcacaatgatgtgtacctg

SEQ ID NO: 200368 - DNA, 33 bp, Homo sapien
cacaggattgaccttcgcaatgatgtgtacctg

SEQ ID NO: 200369 - DNA, 33 bp, Homo sapien
gggaagaaggaggataagtatagaaaaaccctg

SEQ ID NO: 200370 - DNA, 33 bp, Homo sapien
gggaagaaggaggataggtatagaaaaaccctg

SEQ ID NO: 200371 - DNA, 33 bp, Homo sapien
tacattaatgaaagaaaaaatgggttgcattga

SEQ ID NO: 200372 - DNA, 33 bp, Homo sapien
tacattaatgaaagaacaaatgggttgcattga

SEQ ID NO: 200373 - DNA, 33 bp, Homo sapien
ctcagaaactcaatcaaggtcttcctgtatctc

SEQ ID NO: 200374 - DNA, 33 bp, Homo sapien
ctcagaaactcaatcagggtcttcctgtatctc

SEQ ID NO: 200375 - DNA, 33 bp, Homo sapien
ccttcagcgacttgcaatagtggctcttactaa

SEQ ID NO: 200376 - DNA, 33 bp, Homo sapien
ccttcagcgacttgcagtagtggctcttactaa

SEQ ID NO: 200377 - DNA, 33 bp, Homo sapien
tgatgctgagtgaacacggtcaagttagtgggc

SEQ ID NO: 200378 - DNA, 33 bp, Homo sapien
tgatgctgagtgaacatggtcaagttagtgggc

SEQ ID NO: 200379 - DNA, 33 bp, Homo sapien
aagtaacatttggttacagaagtcatgacccat

SEQ ID NO: 200380 - DNA, 33 bp, Homo sapien
aagtaacatttggttatagaagtcatgacccat

SEQ ID NO: 200381 - DNA, 33 bp, Homo sapien
ccagggtagctgccaacggagggaccagctgtg

SEQ ID NO: 200382 - DNA, 33 bp, Homo sapien
ccagggtagctgccaatggagggaccagctgtg

SEQ ID NO: 200383 - DNA, 33 bp, Homo sapien
taaaaggactgagctacatgatccgtaagatcc

SEQ ID NO: 200384 - DNA, 33 bp, Homo sapien
taaaaggactgagctagatgatccgtaagatcc

SEQ ID NO: 200385 - DNA, 33 bp, Homo sapien
tgaatcacggaaaagaagcggccattaagagct

SEQ ID NO: 200386 - DNA, 33 bp, Homo sapien
tgaatcacggaaaagaggcggccattaagagct

SEQ ID NO: 200387 - DNA, 33 bp, Homo sapien
gtgttttacaaatgaaaggtatagcctaagtga

SEQ ID NO: 200388 - DNA, 33 bp, Homo sapien
gtgttttacaaatgaagggtatagcctaagtga

SEQ ID NO: 200389 - DNA, 33 bp, Homo sapien
gtgacttccgggacaaagtgataaaggtattat

SEQ ID NO: 200390 - DNA, 33 bp, Homo sapien
gtgacttccgggacaaggtgataaaggtattat

SEQ ID NO: 200391 - DNA, 33 bp, Homo sapien
actacattcttaaggaaacttctattccaaaat

SEQ ID NO: 200392 - DNA, 33 bp, Homo sapien
actacattcttaaggagacttctattccaaaat

SEQ ID NO: 200393 - DNA, 33 bp, Homo sapien
tgatcccagctgaaaacagccatagaagagcct

SEQ ID NO: 200394 - DNA, 33 bp, Homo sapien
tgatcccagctgaaaatagccatagaagagcct

SEQ ID NO: 200395 - DNA, 33 bp, Homo sapien
acaacaacaacgacaactaaaaaactttgcaca

SEQ ID NO: 200396 - DNA, 33 bp, Homo sapien
acaacaacaacgacaattaaaaaactttgcaca

SEQ ID NO: 200397 - DNA, 33 bp, Homo sapien
ctttgctctgctgagaactgcccagaggggtta

SEQ ID NO: 200398 - DNA, 33 bp, Homo sapien
ctttgctctgctgagacctgcccagaggggtta

SEQ ID NO: 200399 - DNA, 33 bp, Homo sapien
gcagagcaaaggtgaccaaaccattctttagta

SEQ ID NO: 200400 - DNA, 33 bp, Homo sapien
gcagagcaaaggtgactaaaccattctttagta

SEQ ID NO: 200401 - DNA, 33 bp, Homo sapien
gcccatgagccaagcaatctcaaattttatacc

SEQ ID NO: 200402 - DNA, 33 bp, Homo sapien
gcccatgagccaagcagtctcaaattttatacc

SEQ ID NO: 200403 - DNA, 33 bp, Homo sapien
cagcaacttgatccaaactgtggtctgcaaata

SEQ ID NO: 200404 - DNA, 33 bp, Homo sapien
cagcaacttgatccaagctgtggtctgcaaata

SEQ ID NO: 200405 - DNA, 33 bp, Homo sapien
tttaaatggcctaacacattgcaaagctttttt

SEQ ID NO: 200406 - DNA, 33 bp, Homo sapien
tttaaatggcctaacagattgcaaagctttttt

SEQ ID NO: 200407 - DNA, 33 bp, Homo sapien
acagaactcgaggagtaaagagctatgtccagt

SEQ ID NO: 200408 - DNA, 33 bp, Homo sapien
acagaactcgaggagtcaagagctatgtccagt

SEQ ID NO: 200409 - DNA, 33 bp, Homo sapien
accttcagcaatctggaactctgacggctggtt

SEQ ID NO: 200410 - DNA, 33 bp, Homo sapien
accttcagcaatctgggactctgacggctggtt

SEQ ID NO: 200411 - DNA, 33 bp, Homo sapien
tatcaagcacacatgcaaaagagctggttgcta

SEQ ID NO: 200412 - DNA, 33 bp, Homo sapien
tatcaagcacacatgcgaaagagctggttgcta

SEQ ID NO: 200413 - DNA, 33 bp, Homo sapien
agacatctctttgaggcagtccgaaggcatctg

SEQ ID NO: 200414 - DNA, 33 bp, Homo sapien
agacatctctttgaggtagtccgaaggcatctg

SEQ ID NO: 200415 - DNA, 33 bp, Homo sapien
caggaggcagcccttaacatttctgcctttaga

SEQ ID NO: 200416 - DNA, 33 bp, Homo sapien
caggaggcagcccttaccatttctgcctttaga

SEQ ID NO: 200417 - DNA, 33 bp, Homo sapien
actgaaagcagacaataaaactgtattagaact

SEQ ID NO: 200418 - DNA, 33 bp, Homo sapien
actgaaagcagacaatgaaactgtattagaact

SEQ ID NO: 200419 - DNA, 33 bp, Homo sapien
gaaattcatatcagacggatgggcgcttggtgc

SEQ ID NO: 200420 - DNA, 33 bp, Homo sapien
gaaattcatatcagactgatgggcgcttggtgc

SEQ ID NO: 200421 - DNA, 33 bp, Homo sapien
acttgccattgtgctacggttgtctactatatt

SEQ ID NO: 200422 - DNA, 33 bp, Homo sapien
acttgccattgtgctatggttgtctactatatt

SEQ ID NO: 200423 - DNA, 33 bp, Homo sapien
tactgtatcttttaaaagttagatgcacaaata

SEQ ID NO: 200424 - DNA, 33 bp, Homo sapien
tactgtatcttttaaatgttagatgcacaaata

SEQ ID NO: 200425 - DNA, 33 bp, Homo sapien
cttgaacatggaataaccaaatgtagctggctc

SEQ ID NO: 200426 - DNA, 33 bp, Homo sapien
cttgaacatggaataagcaaatgtagctggctc

SEQ ID NO: 200427 - DNA, 33 bp, Homo sapien
tataagaattgtccaactgcctagaatatgact

SEQ ID NO: 200428 - DNA, 33 bp, Homo sapien
tataagaattgtccaattgcctagaatatgact

SEQ ID NO: 200429 - DNA, 33 bp, Homo sapien
tgtacataaacccagaagataccacagcaggaa

SEQ ID NO: 200430 - DNA, 33 bp, Homo sapien
tgtacataaacccagaggataccacagcaggaa

SEQ ID NO: 200431 - DNA, 33 bp, Homo sapien
tccaggccatggcaaactacaagctgcaggcca

SEQ ID NO: 200432 - DNA, 33 bp, Homo sapien
tccaggccatggcaaagtacaagctgcaggcca

SEQ ID NO: 200433 - DNA, 33 bp, Homo sapien
tgataggaacacagcactgagaatcagtaaacc

SEQ ID NO: 200434 - DNA, 33 bp, Homo sapien
tgataggaacacagcattgagaatcagtaaacc

SEQ ID NO: 200435 - DNA, 33 bp, Homo sapien
ccagcagtgttacaaacgtcctccctaaacaca

SEQ ID NO: 200436 - DNA, 33 bp, Homo sapien
ccagcagtgttacaaatgtcctccctaaacaca

SEQ ID NO: 200437 - DNA, 33 bp, Homo sapien
cgaacgtacagttgtcaaaatcagtaacatcat

SEQ ID NO: 200438 - DNA, 33 bp, Homo sapien
cgaacgtacagttgtctaaatcagtaacatcat

SEQ ID NO: 200439 - DNA, 33 bp, Homo sapien
ttgagcagaaggtacactctccctgcagcgtca

SEQ ID NO: 200440 - DNA, 33 bp, Homo sapien
ttgagcagaaggtacattctccctgcagcgtca

SEQ ID NO: 200441 - DNA, 33 bp, Homo sapien
tttctaaatcagtatactaggcagaaccaacac

SEQ ID NO: 200442 - DNA, 33 bp, Homo sapien
tttctaaatcagtatattaggcagaaccaacac

SEQ ID NO: 200443 - DNA, 33 bp, Homo sapien
taacagttcacttaggcaatcaggcttgaggat

SEQ ID NO: 200444 - DNA, 33 bp, Homo sapien
taacagttcacttaggtaatcaggcttgaggat

SEQ ID NO: 200445 - DNA, 33 bp, Homo sapien
atattgggtcatgtagacgcaactaaattgcat

SEQ ID NO: 200446 - DNA, 33 bp, Homo sapien
atattgggtcatgtaggcgcaactaaattgcat

SEQ ID NO: 200447 - DNA, 33 bp, Homo sapien
gagggctggactaggaaatcctctaaaacccca

SEQ ID NO: 200448 - DNA, 33 bp, Homo sapien
gagggctggactaggagatcctctaaaacccca

SEQ ID NO: 200449 - DNA, 33 bp, Homo sapien
tcggctgaaaggtctgcattcagaagccaggct

SEQ ID NO: 200450 - DNA, 33 bp, Homo sapien
tcggctgaaaggtctgtattcagaagccaggct

SEQ ID NO: 200451 - DNA, 33 bp, Homo sapien
tccctgaaacttctcaatgaatttctggttgct

SEQ ID NO: 200452 - DNA, 33 bp, Homo sapien
tccctgaaacttctcattgaatttctggttgct

SEQ ID NO: 200453 - DNA, 33 bp, Homo sapien
tatttttggtctgtgaaacaaatcgtattcttg

SEQ ID NO: 200454 - DNA, 33 bp, Homo sapien
tatttttggtctgtgacacaaatcgtattcttg

SEQ ID NO: 200455 - DNA, 33 bp, Homo sapien
tcacctatgtgaggacggtagcattgattggga

SEQ ID NO: 200456 - DNA, 33 bp, Homo sapien
tcacctatgtgaggactgtagcattgattggga

SEQ ID NO: 200457 - DNA, 33 bp, Homo sapien
tctcactcattccttcacccactctccactgac

SEQ ID NO: 200458 - DNA, 33 bp, Homo sapien
tctcactcattccttcgcccactctccactgac

SEQ ID NO: 200459 - DNA, 33 bp, Homo sapien
aacagccactagaaaacgtaatgacacttaaaa

SEQ ID NO: 200460 - DNA, 33 bp, Homo sapien
aacagccactagaaaatgtaatgacacttaaaa

SEQ ID NO: 200461 - DNA, 33 bp, Homo sapien
catccaacattgctgtcaaagcacatttttagc

SEQ ID NO: 200462 - DNA, 33 bp, Homo sapien
catccaacattgctgtgaaagcacatttttagc

SEQ ID NO: 200463 - DNA, 33 bp, Homo sapien
gctgggattttatgcccggcaagctcggagctt

SEQ ID NO: 200464 - DNA, 33 bp, Homo sapien
gctgggattttatgcctggcaagctcggagctt

SEQ ID NO: 200465 - DNA, 33 bp, Homo sapien
ctaatggtagatgacaactatacacaatcagtg

SEQ ID NO: 200466 - DNA, 33 bp, Homo sapien
ctaatggtagatgacagctatacacaatcagtg

SEQ ID NO: 200467 - DNA, 33 bp, Homo sapien
atgaatgaatactttgaaatttgatgttgaatg

SEQ ID NO: 200468 - DNA, 33 bp, Homo sapien
atgaatgaatactttgcaatttgatgttgaatg

SEQ ID NO: 200469 - DNA, 33 bp, Homo sapien
tcagtgtacagagccaagcaatagacgtagata

SEQ ID NO: 200470 - DNA, 33 bp, Homo sapien
tcagtgtacagagccaggcaatagacgtagata

SEQ ID NO: 200471 - DNA, 33 bp, Homo sapien
tatccccgttattaagcaaggcatgactgtata

SEQ ID NO: 200472 - DNA, 33 bp, Homo sapien
tatccccgttattaaggaaggcatgactgtata

SEQ ID NO: 200473 - DNA, 33 bp, Homo sapien
ctatgatattcacaaccgtaaaatcacctaagg

SEQ ID NO: 200474 - DNA, 33 bp, Homo sapien
ctatgatattcacaactgtaaaatcacctaagg

SEQ ID NO: 200475 - DNA, 33 bp, Homo sapien
tcatatttagcctataacctgcctgaggctgtt

SEQ ID NO: 200476 - DNA, 33 bp, Homo sapien
tcatatttagcctatatcctgcctgaggctgtt

SEQ ID NO: 200477 - DNA, 33 bp, Homo sapien
gataaccattaggaaaccaatttgcatcagaca

SEQ ID NO: 200478 - DNA, 33 bp, Homo sapien
gataaccattaggaaatcaatttgcatcagaca

SEQ ID NO: 200479 - DNA, 33 bp, Homo sapien
tgatctctgagaaaacagaaagattggcctaac

SEQ ID NO: 200480 - DNA, 33 bp, Homo sapien
tgatctctgagaaaacggaaagattggcctaac

SEQ ID NO: 200481 - DNA, 33 bp, Homo sapien
gcaggcagaaaaggccaagagtcagaaggtgct

SEQ ID NO: 200482 - DNA, 33 bp, Homo sapien
gcaggcagaaaaggccgagagtcagaaggtgct

SEQ ID NO: 200483 - DNA, 33 bp, Homo sapien
gagtgatcacatttgccgattcccaagacataa

SEQ ID NO: 200484 - DNA, 33 bp, Homo sapien
gagtgatcacatttgctgattcccaagacataa

SEQ ID NO: 200485 - DNA, 33 bp, Homo sapien
ccgaggtgaactcacaaaatcctagaagcttag

SEQ ID NO: 200486 - DNA, 33 bp, Homo sapien
ccgaggtgaactcacagaatcctagaagcttag

SEQ ID NO: 200487 - DNA, 33 bp, Homo sapien
atgtaggctgggaaacaatgaggcccaggacag

SEQ ID NO: 200488 - DNA, 33 bp, Homo sapien
atgtaggctgggaaacgatgaggcccaggacag

SEQ ID NO: 200489 - DNA, 33 bp, Homo sapien
gctgctccattcttacacaaaaggtaacactct

SEQ ID NO: 200490 - DNA, 33 bp, Homo sapien
gctgctccattcttacgcaaaaggtaacactct

SEQ ID NO: 200491 - DNA, 33 bp, Homo sapien
ttttgattcctaagcacctttgagtaccagttt

SEQ ID NO: 200492 - DNA, 33 bp, Homo sapien
ttttgattcctaagcagctttgagtaccagttt

SEQ ID NO: 200493 - DNA, 33 bp, Homo sapien
gttgtgcctaataacaactggccggaaacactt

SEQ ID NO: 200494 - DNA, 33 bp, Homo sapien
gttgtgcctaataacagctggccggaaacactt

SEQ ID NO: 200495 - DNA, 33 bp, Homo sapien
tctgtatgttcacctgcatctttgtgaaccctt

SEQ ID NO: 200496 - DNA, 33 bp, Homo sapien
tctgtatgttcacctgtatctttgtgaaccctt

SEQ ID NO: 200497 - DNA, 33 bp, Homo sapien
tgaccagtgatgaatgacaggatatgaaacagt

SEQ ID NO: 200498 - DNA, 33 bp, Homo sapien
tgaccagtgatgaatgccaggatatgaaacagt

SEQ ID NO: 200499 - DNA, 33 bp, Homo sapien
tggccaggatctcctaccttctcctgatcccct

SEQ ID NO: 200500 - DNA, 33 bp, Homo sapien
tggccaggatctcctatcttctcctgatcccct

SEQ ID NO: 200501 - DNA, 33 bp, Homo sapien
cagcccaggattaaagccctcacagatagggac

SEQ ID NO: 200502 - DNA, 33 bp, Homo sapien
cagcccaggattaaaggcctcacagatagggac

SEQ ID NO: 200503 - DNA, 33 bp, Homo sapien
cacccccgagtcaagcaaaaccttgattcaccc

SEQ ID NO: 200504 - DNA, 33 bp, Homo sapien
cacccccgagtcaagcgaaaccttgattcaccc

SEQ ID NO: 200505 - DNA, 33 bp, Homo sapien
gagaatttaatcaagggcaacgaaccatgagac

SEQ ID NO: 200506 - DNA, 33 bp, Homo sapien
gagaatttaatcaaggtcaacgaaccatgagac

SEQ ID NO: 200507 - DNA, 33 bp, Homo sapien
cactcttgcttcttgcaaacccaatcaatgctt

SEQ ID NO: 200508 - DNA, 33 bp, Homo sapien
cactcttgcttcttgcgaacccaatcaatgctt

SEQ ID NO: 200509 - DNA, 33 bp, Homo sapien
acacaagattgtaggacggatcaacctcagctc

SEQ ID NO: 200510 - DNA, 33 bp, Homo sapien
acacaagattgtaggagggatcaacctcagctc

SEQ ID NO: 200511 - DNA, 33 bp, Homo sapien
ccttgcaaatgaatgaagtagttaaaaaacact

SEQ ID NO: 200512 - DNA, 33 bp, Homo sapien
ccttgcaaatgaatgaggtagttaaaaaacact

SEQ ID NO: 200513 - DNA, 33 bp, Homo sapien
aatattccaacaggagccattcagataaacaaa

SEQ ID NO: 200514 - DNA, 33 bp, Homo sapien
aatattccaacaggagtcattcagataaacaaa

SEQ ID NO: 200515 - DNA, 33 bp, Homo sapien
tagaggggataaattacggaagaatgatatata

SEQ ID NO: 200516 - DNA, 33 bp, Homo sapien
tagaggggataaattatggaagaatgatatata

SEQ ID NO: 200517 - DNA, 33 bp, Homo sapien
aatccctctaacataccgaagaaaaataatttc

SEQ ID NO: 200518 - DNA, 33 bp, Homo sapien
aatccctctaacatactgaagaaaaataatttc

SEQ ID NO: 200519 - DNA, 33 bp, Homo sapien
atttgggatcatccaaagacaagtgggaagctt

SEQ ID NO: 200520 - DNA, 33 bp, Homo sapien
atttgggatcatccaatgacaagtgggaagctt

SEQ ID NO: 200521 - DNA, 33 bp, Homo sapien
tgctcgatgcttcacggaagtaattgcttgtaa

SEQ ID NO: 200522 - DNA, 33 bp, Homo sapien
tgctcgatgcttcacgtaagtaattgcttgtaa

SEQ ID NO: 200523 - DNA, 33 bp, Homo sapien
catacagtcaacattcactaactgagtaggtgt

SEQ ID NO: 200524 - DNA, 33 bp, Homo sapien
catacagtcaacattcgctaactgagtaggtgt

SEQ ID NO: 200525 - DNA, 33 bp, Homo sapien
tcagggagcggtacaaggtgctaagtatgtctt

SEQ ID NO: 200526 - DNA, 33 bp, Homo sapien
tcagggagcggtacaatgtgctaagtatgtctt

SEQ ID NO: 200527 - DNA, 33 bp, Homo sapien
aataaaattgggtatacggtacagccccagtag

SEQ ID NO: 200528 - DNA, 33 bp, Homo sapien
aataaaattgggtatatggtacagccccagtag

SEQ ID NO: 200529 - DNA, 33 bp, Homo sapien
gaggactgtacgtatgcagcaggcccgtgagct

SEQ ID NO: 200530 - DNA, 33 bp, Homo sapien
gaggactgtacgtatggagcaggcccgtgagct

SEQ ID NO: 200531 - DNA, 33 bp, Homo sapien
ccggtggtcctaactaaccctgtctccttgcca

SEQ ID NO: 200532 - DNA, 33 bp, Homo sapien
ccggtggtcctaactagccctgtctccttgcca

SEQ ID NO: 200533 - DNA, 33 bp, Homo sapien
gcctccctgtttgcaccaacaggtctgccacaa

SEQ ID NO: 200534 - DNA, 33 bp, Homo sapien
gcctccctgtttgcactaacaggtctgccacaa

SEQ ID NO: 200535 - DNA, 33 bp, Homo sapien
gcagacctgccttagacgaaggagaatccagtg

SEQ ID NO: 200536 - DNA, 33 bp, Homo sapien
gcagacctgccttagatgaaggagaatccagtg

SEQ ID NO: 200537 - DNA, 33 bp, Homo sapien
tcagccttagcatgagccccggagcatcagtgt

SEQ ID NO: 200538 - DNA, 33 bp, Homo sapien
tcagccttagcatgagtcccggagcatcagtgt

SEQ ID NO: 200539 - DNA, 33 bp, Homo sapien
agagagactgtttgaaataagcctgattcataa

SEQ ID NO: 200540 - DNA, 33 bp, Homo sapien
agagagactgtttgaattaagcctgattcataa

SEQ ID NO: 200541 - DNA, 33 bp, Homo sapien
ccatccaatcactcatcaagcatttcatgaaca

SEQ ID NO: 200542 - DNA, 33 bp, Homo sapien
ccatccaatcactcattaagcatttcatgaaca

SEQ ID NO: 200543 - DNA, 33 bp, Homo sapien
tctacctaatcgtccacccatccagtcatccat

SEQ ID NO: 200544 - DNA, 33 bp, Homo sapien
tctacctaatcgtccatccatccagtcatccat

SEQ ID NO: 200545 - DNA, 33 bp, Homo sapien
tgaggcttgctgtggactcagagaggagactta

SEQ ID NO: 200546 - DNA, 33 bp, Homo sapien
tgaggcttgctgtggattcagagaggagactta

SEQ ID NO: 200547 - DNA, 33 bp, Homo sapien
cttttaaatcagataccaacgacccattactga

SEQ ID NO: 200548 - DNA, 33 bp, Homo sapien
cttttaaatcagatactaacgacccattactga

SEQ ID NO: 200549 - DNA, 33 bp, Homo sapien
tccgtgagccaggaccaggtcacatctctcagc

SEQ ID NO: 200550 - DNA, 33 bp, Homo sapien
tccgtgagccaggaccgggtcacatctctcagc

SEQ ID NO: 200551 - DNA, 33 bp, Homo sapien
cctcctctgccttctaccatgccagtttaaaag

SEQ ID NO: 200552 - DNA, 33 bp, Homo sapien
cctcctctgccttctatcatgccagtttaaaag

SEQ ID NO: 200553 - DNA, 33 bp, Homo sapien
tctttctcattttaaacggacggccactagttg

SEQ ID NO: 200554 - DNA, 33 bp, Homo sapien
tctttctcattttaaatggacggccactagttg

SEQ ID NO: 200555 - DNA, 33 bp, Homo sapien
aatctaataaaagcaaaaatctgaatgttaccc

SEQ ID NO: 200556 - DNA, 33 bp, Homo sapien
aatctaataaaagcaacaatctgaatgttaccc

SEQ ID NO: 200557 - DNA, 33 bp, Homo sapien
cctctgaagacagaacagtgaaagtcctaagtt

SEQ ID NO: 200558 - DNA, 33 bp, Homo sapien
cctctgaagacagaacggtgaaagtcctaagtt

SEQ ID NO: 200559 - DNA, 33 bp, Homo sapien
aaagaagtgagctatagaattaggaatgtattg

SEQ ID NO: 200560 - DNA, 33 bp, Homo sapien
aaagaagtgagctatataattaggaatgtattg

SEQ ID NO: 200561 - DNA, 33 bp, Homo sapien
ggaagtgtcatgtagaatatggctcagctgcag

SEQ ID NO: 200562 - DNA, 33 bp, Homo sapien
ggaagtgtcatgtagactatggctcagctgcag

SEQ ID NO: 200563 - DNA, 33 bp, Homo sapien
atatcaaatgggccaaaaaaaatgtatcttgga

SEQ ID NO: 200564 - DNA, 33 bp, Homo sapien
atatcaaatgggccaacaaaaatgtatcttgga

SEQ ID NO: 200565 - DNA, 33 bp, Homo sapien
gacgtaggcacaagaacctcctagaatggaagt

SEQ ID NO: 200566 - DNA, 33 bp, Homo sapien
gacgtaggcacaagaatctcctagaatggaagt

SEQ ID NO: 200567 - DNA, 33 bp, Homo sapien
caggatgttaactgaagaatctaagccaaggga

SEQ ID NO: 200568 - DNA, 33 bp, Homo sapien
caggatgttaactgaataatctaagccaaggga

SEQ ID NO: 200569 - DNA, 33 bp, Homo sapien
caatgagatgtagtcaataaccagagttaaatg

SEQ ID NO: 200570 - DNA, 33 bp, Homo sapien
caatgagatgtagtcagtaaccagagttaaatg

SEQ ID NO: 200571 - DNA, 33 bp, Homo sapien
ataaaatggattttcccctttcccactttatgt

SEQ ID NO: 200572 - DNA, 33 bp, Homo sapien
ataaaatggattttcctctttcccactttatgt

SEQ ID NO: 200573 - DNA, 33 bp, Homo sapien
gccagaccttattctcaatgcataatgtacacg

SEQ ID NO: 200574 - DNA, 33 bp, Homo sapien
gccagaccttattctcgatgcataatgtacacg

SEQ ID NO: 200575 - DNA, 33 bp, Homo sapien
ctgttctgtaaagtaaagataaaaacacctatc

SEQ ID NO: 200576 - DNA, 33 bp, Homo sapien
ctgttctgtaaagtaaggataaaaacacctatc

SEQ ID NO: 200577 - DNA, 33 bp, Homo sapien
tacatatagtcatttacatccacccataagtga

SEQ ID NO: 200578 - DNA, 33 bp, Homo sapien
tacatatagtcatttatatccacccataagtga

SEQ ID NO: 200579 - DNA, 33 bp, Homo sapien
ctcatgttatacttacaaagtttagaatcgcaa

SEQ ID NO: 200580 - DNA, 33 bp, Homo sapien
ctcatgttatacttacgaagtttagaatcgcaa

SEQ ID NO: 200581 - DNA, 33 bp, Homo sapien
gaaagtttctgacatacggaagaggaacaaaaa

SEQ ID NO: 200582 - DNA, 33 bp, Homo sapien
gaaagtttctgacatatggaagaggaacaaaaa

SEQ ID NO: 200583 - DNA, 33 bp, Homo sapien
aggttcagtggcccacaaggttccagcatccaa

SEQ ID NO: 200584 - DNA, 33 bp, Homo sapien
aggttcagtggcccacgaggttccagcatccaa

SEQ ID NO: 200585 - DNA, 33 bp, Homo sapien
ataataaaggaatgacaatatactgttaatgaa

SEQ ID NO: 200586 - DNA, 33 bp, Homo sapien
ataataaaggaatgacgatatactgttaatgaa

SEQ ID NO: 200587 - DNA, 33 bp, Homo sapien
aaccctgatgaaacagaaaattattttaatatg

SEQ ID NO: 200588 - DNA, 33 bp, Homo sapien
aaccctgatgaaacaggaaattattttaatatg

SEQ ID NO: 200589 - DNA, 33 bp, Homo sapien
gacaagaaatgcaaaccgcttttacaccatttt

SEQ ID NO: 200590 - DNA, 33 bp, Homo sapien
gacaagaaatgcaaactgcttttacaccatttt

SEQ ID NO: 200591 - DNA, 33 bp, Homo sapien
gtgactgtgtaggagacgtcacttgtttttctc

SEQ ID NO: 200592 - DNA, 33 bp, Homo sapien
gtgactgtgtaggagaggtcacttgtttttctc

SEQ ID NO: 200593 - DNA, 33 bp, Homo sapien
tttccataactgaaaactgaggcaagattatta

SEQ ID NO: 200594 - DNA, 33 bp, Homo sapien
tttccataactgaaaagtgaggcaagattatta

SEQ ID NO: 200595 - DNA, 33 bp, Homo sapien
tccttctgtttcatcaccttatcacaataattg

SEQ ID NO: 200596 - DNA, 33 bp, Homo sapien
tccttctgtttcatcatcttatcacaataattg

SEQ ID NO: 200597 - DNA, 33 bp, Homo sapien
tgtggtattttactacagtagccctagcaaatg

SEQ ID NO: 200598 - DNA, 33 bp, Homo sapien
tgtggtattttactacggtagccctagcaaatg

SEQ ID NO: 200599 - DNA, 33 bp, Homo sapien
tgctgtgttcaagtaaaccttatttgacttaat

SEQ ID NO: 200600 - DNA, 33 bp, Homo sapien
tgctgtgttcaagtaatccttatttgacttaat

SEQ ID NO: 200601 - DNA, 33 bp, Homo sapien
catcacttctgttaaaatactgttactgctgtc

SEQ ID NO: 200602 - DNA, 33 bp, Homo sapien
catcacttctgttaaattactgttactgctgtc

SEQ ID NO: 200603 - DNA, 33 bp, Homo sapien
tgatggatatgtaactcagctgcagtcatcatc

SEQ ID NO: 200604 - DNA, 33 bp, Homo sapien
tgatggatatgtaacttagctgcagtcatcatc

SEQ ID NO: 200605 - DNA, 33 bp, Homo sapien
tttagcttcaggtacaggattaatactttttga

SEQ ID NO: 200606 - DNA, 33 bp, Homo sapien
tttagcttcaggtacatgattaatactttttga

SEQ ID NO: 200607 - DNA, 33 bp, Homo sapien
ttttgagatatctccaaactgctttcgacaatg

SEQ ID NO: 200608 - DNA, 33 bp, Homo sapien
ttttgagatatctccatactgctttcgacaatg

SEQ ID NO: 200609 - DNA, 33 bp, Homo sapien
atgtctctccacagacaaatggttaaagtatgg

SEQ ID NO: 200610 - DNA, 33 bp, Homo sapien
atgtctctccacagacgaatggttaaagtatgg

SEQ ID NO: 200611 - DNA, 33 bp, Homo sapien
attgatcatggtactcccttctcaaaatcctgc

SEQ ID NO: 200612 - DNA, 33 bp, Homo sapien
attgatcatggtactctcttctcaaaatcctgc

SEQ ID NO: 200613 - DNA, 33 bp, Homo sapien
atcattgtcctttcaggagagaatttgaaatga

SEQ ID NO: 200614 - DNA, 33 bp, Homo sapien
atcattgtcctttcagtagagaatttgaaatga

SEQ ID NO: 200615 - DNA, 33 bp, Homo sapien
gatttacagagtgtacccttacctttccgacct

SEQ ID NO: 200616 - DNA, 33 bp, Homo sapien
gatttacagagtgtacgcttacctttccgacct

SEQ ID NO: 200617 - DNA, 33 bp, Homo sapien
ggcatctacttcatgcccctcaaaggcaaacct

SEQ ID NO: 200618 - DNA, 33 bp, Homo sapien
ggcatctacttcatgctcctcaaaggcaaacct

SEQ ID NO: 200619 - DNA, 33 bp, Homo sapien
tagatggtggatagcaaacaatgctaacgtgta

SEQ ID NO: 200620 - DNA, 33 bp, Homo sapien
tagatggtggatagcagacaatgctaacgtgta

SEQ ID NO: 200621 - DNA, 33 bp, Homo sapien
tgcgtgagagacactacatgaaattgggccttg

SEQ ID NO: 200622 - DNA, 33 bp, Homo sapien
tgcgtgagagacactagatgaaattgggccttg

SEQ ID NO: 200623 - DNA, 33 bp, Homo sapien
ctggagtgcagcaacacggtcataactcactgc

SEQ ID NO: 200624 - DNA, 33 bp, Homo sapien
ctggagtgcagcaacatggtcataactcactgc

SEQ ID NO: 200625 - DNA, 33 bp, Homo sapien
gaagttttcaaatgtaaattctggaatcagtct

SEQ ID NO: 200626 - DNA, 33 bp, Homo sapien
gaagttttcaaatgtagattctggaatcagtct

SEQ ID NO: 200627 - DNA, 33 bp, Homo sapien
ttgtgatatatgcacaaacagaaagttttattt

SEQ ID NO: 200628 - DNA, 33 bp, Homo sapien
ttgtgatatatgcacatacagaaagttttattt

SEQ ID NO: 200629 - DNA, 33 bp, Homo sapien
atagtgatattggtacagcttaaataagaataa

SEQ ID NO: 200630 - DNA, 33 bp, Homo sapien
atagtgatattggtacggcttaaataagaataa

SEQ ID NO: 200631 - DNA, 33 bp, Homo sapien
aatctcaccaactacaccagattctctagggat

SEQ ID NO: 200632 - DNA, 33 bp, Homo sapien
aatctcaccaactacatcagattctctagggat

SEQ ID NO: 200633 - DNA, 33 bp, Homo sapien
cttttccacatttttcccctaaactatgccaag

SEQ ID NO: 200634 - DNA, 33 bp, Homo sapien
cttttccacatttttctcctaaactatgccaag

SEQ ID NO: 200635 - DNA, 33 bp, Homo sapien
ttacatttcgtgaggaaaataaagccctatctt

SEQ ID NO: 200636 - DNA, 33 bp, Homo sapien
ttacatttcgtgaggagaataaagccctatctt

SEQ ID NO: 200637 - DNA, 33 bp, Homo sapien
ccgtgatgataggtaccagaatgcacgagagac

SEQ ID NO: 200638 - DNA, 33 bp, Homo sapien
ccgtgatgataggtactagaatgcacgagagac

SEQ ID NO: 200639 - DNA, 33 bp, Homo sapien
tacaggtcttctattccagcagttttctttcct

SEQ ID NO: 200640 - DNA, 33 bp, Homo sapien
tacaggtcttctattctagcagttttctttcct

SEQ ID NO: 200641 - DNA, 33 bp, Homo sapien
acagtaggataagggaaaccacatctctttgta

SEQ ID NO: 200642 - DNA, 33 bp, Homo sapien
acagtaggataagggagaccacatctctttgta

SEQ ID NO: 200643 - DNA, 33 bp, Homo sapien
cattcagagttatggaacagaaaattgaaagtg

SEQ ID NO: 200644 - DNA, 33 bp, Homo sapien
cattcagagttatggaccagaaaattgaaagtg

SEQ ID NO: 200645 - DNA, 33 bp, Homo sapien
aggacaagaaagggtgaaagagtggccaaactg

SEQ ID NO: 200646 - DNA, 33 bp, Homo sapien
aggacaagaaagggtggaagagtggccaaactg

SEQ ID NO: 200647 - DNA, 33 bp, Homo sapien
agtttcttggctactcaatgacaatatgcattc

SEQ ID NO: 200648 - DNA, 33 bp, Homo sapien
agtttcttggctactcgatgacaatatgcattc

SEQ ID NO: 200649 - DNA, 33 bp, Homo sapien
ttatttaacattggacagactttttcttgtata

SEQ ID NO: 200650 - DNA, 33 bp, Homo sapien
ttatttaacattggacggactttttcttgtata

SEQ ID NO: 200651 - DNA, 33 bp, Homo sapien
atagagaattttaacacagaattttcccaaagc

SEQ ID NO: 200652 - DNA, 33 bp, Homo sapien
atagagaattttaacagagaattttcccaaagc

SEQ ID NO: 200653 - DNA, 33 bp, Homo sapien
ttcttctgtcaaaggacatcattatagtaccaa

SEQ ID NO: 200654 - DNA, 33 bp, Homo sapien
ttcttctgtcaaaggatatcattatagtaccaa

SEQ ID NO: 200655 - DNA, 33 bp, Homo sapien
tgtcgatcttaaacccaaagcatagagaaatgg

SEQ ID NO: 200656 - DNA, 33 bp, Homo sapien
tgtcgatcttaaacccgaagcatagagaaatgg

SEQ ID NO: 200657 - DNA, 33 bp, Homo sapien
tagggtatcaggtctacgattttaagggtgaaa

SEQ ID NO: 200658 - DNA, 33 bp, Homo sapien
tagggtatcaggtctatgattttaagggtgaaa

SEQ ID NO: 200659 - DNA, 33 bp, Homo sapien
ttgtctaggtgctttgcaatataaaaagagtaa

SEQ ID NO: 200660 - DNA, 33 bp, Homo sapien
ttgtctaggtgctttgtaatataaaaagagtaa

SEQ ID NO: 200661 - DNA, 33 bp, Homo sapien
tgaccacattctaagcagaaagaaaaaggaagg

SEQ ID NO: 200662 - DNA, 33 bp, Homo sapien
tgaccacattctaagcggaaagaaaaaggaagg

SEQ ID NO: 200663 - DNA, 33 bp, Homo sapien
ccaactgagttgtttcactttagagaacattct

SEQ ID NO: 200664 - DNA, 33 bp, Homo sapien
ccaactgagttgtttccctttagagaacattct

SEQ ID NO: 200665 - DNA, 33 bp, Homo sapien
atagtggagcaattaactggaaatcttaacaaa

SEQ ID NO: 200666 - DNA, 33 bp, Homo sapien
atagtggagcaattaagtggaaatcttaacaaa

SEQ ID NO: 200667 - DNA, 33 bp, Homo sapien
aggaaccccccatacaatgattatgatgcgtgt

SEQ ID NO: 200668 - DNA, 33 bp, Homo sapien
aggaaccccccatacattgattatgatgcgtgt

SEQ ID NO: 200669 - DNA, 33 bp, Homo sapien
aacttaggtagagagacgtgaattcatagcaca

SEQ ID NO: 200670 - DNA, 33 bp, Homo sapien
aacttaggtagagagatgtgaattcatagcaca

SEQ ID NO: 200671 - DNA, 33 bp, Homo sapien
ttgacttcagccctacagagaaaataatacctc

SEQ ID NO: 200672 - DNA, 33 bp, Homo sapien
ttgacttcagccctacggagaaaataatacctc

SEQ ID NO: 200673 - DNA, 33 bp, Homo sapien
tgattcacagattttacgaataatgatgataga

SEQ ID NO: 200674 - DNA, 33 bp, Homo sapien
tgattcacagattttatgaataatgatgataga

SEQ ID NO: 200675 - DNA, 33 bp, Homo sapien
acttataatgcccacaagtaaataattcaatcc

SEQ ID NO: 200676 - DNA, 33 bp, Homo sapien
acttataatgcccacaggtaaataattcaatcc

SEQ ID NO: 200677 - DNA, 33 bp, Homo sapien
atttcttcatctgcccacacccaagaattgctt

SEQ ID NO: 200678 - DNA, 33 bp, Homo sapien
atttcttcatctgcccgcacccaagaattgctt

SEQ ID NO: 200679 - DNA, 33 bp, Homo sapien
aaaaaggaatcgactgcagagacgggaggattt

SEQ ID NO: 200680 - DNA, 33 bp, Homo sapien
aaaaaggaatcgactggagagacgggaggattt

SEQ ID NO: 200681 - DNA, 33 bp, Homo sapien
agacaaggactcaaaaaagagaatggagtagac

SEQ ID NO: 200682 - DNA, 33 bp, Homo sapien
agacaaggactcaaaagagagaatggagtagac

SEQ ID NO: 200683 - DNA, 33 bp, Homo sapien
tgatagtattcagagaccttctggattagtgaa

SEQ ID NO: 200684 - DNA, 33 bp, Homo sapien
tgatagtattcagagatcttctggattagtgaa

SEQ ID NO: 200685 - DNA, 33 bp, Homo sapien
aaagaaaattttcaaaagcaagccaccatatat

SEQ ID NO: 200686 - DNA, 33 bp, Homo sapien
aaagaaaattttcaaaggcaagccaccatatat

SEQ ID NO: 200687 - DNA, 33 bp, Homo sapien
atgctgttattcccacaatgagaaggcaaattg

SEQ ID NO: 200688 - DNA, 33 bp, Homo sapien
atgctgttattcccaccatgagaaggcaaattg

SEQ ID NO: 200689 - DNA, 33 bp, Homo sapien
tgcaggtccagtgttacaacttagtcaagcagt

SEQ ID NO: 200690 - DNA, 33 bp, Homo sapien
tgcaggtccagtgttataacttagtcaagcagt

SEQ ID NO: 200691 - DNA, 33 bp, Homo sapien
aaatgatttcaaggaaatagaatccatgaaacc

SEQ ID NO: 200692 - DNA, 33 bp, Homo sapien
aaatgatttcaaggaactagaatccatgaaacc

SEQ ID NO: 200693 - DNA, 33 bp, Homo sapien
aagaaaaaggagagaccgaaatgatttcaagga

SEQ ID NO: 200694 - DNA, 33 bp, Homo sapien
aagaaaaaggagagactgaaatgatttcaagga

SEQ ID NO: 200695 - DNA, 33 bp, Homo sapien
gaaagtactggaataacggagccagaaaaccat

SEQ ID NO: 200696 - DNA, 33 bp, Homo sapien
gaaagtactggaataatggagccagaaaaccat

SEQ ID NO: 200697 - DNA, 33 bp, Homo sapien
atttaagatttaaagacgtgtaacagaagtgaa

SEQ ID NO: 200698 - DNA, 33 bp, Homo sapien
atttaagatttaaagatgtgtaacagaagtgaa

SEQ ID NO: 200699 - DNA, 33 bp, Homo sapien
ttatgagtaattgctaataaaagcctatgtgcc

SEQ ID NO: 200700 - DNA, 33 bp, Homo sapien
ttatgagtaattgctactaaaagcctatgtgcc

SEQ ID NO: 200701 - DNA, 33 bp, Homo sapien
accagaagcaattttaagtgttatttgcacttt

SEQ ID NO: 200702 - DNA, 33 bp, Homo sapien
accagaagcaattttaggtgttatttgcacttt

SEQ ID NO: 200703 - DNA, 33 bp, Homo sapien
ggatgcataaattaacacctcattttgcatctt

SEQ ID NO: 200704 - DNA, 33 bp, Homo sapien
ggatgcataaattaacgcctcattttgcatctt

SEQ ID NO: 200705 - DNA, 33 bp, Homo sapien
ggagtgtaaaacagaactgcatccccaacagaa

SEQ ID NO: 200706 - DNA, 33 bp, Homo sapien
ggagtgtaaaacagaagtgcatccccaacagaa

SEQ ID NO: 200707 - DNA, 33 bp, Homo sapien
ctttcattttgggctacccagtgagtgtgaaat

SEQ ID NO: 200708 - DNA, 33 bp, Homo sapien
ctttcattttgggctatccagtgagtgtgaaat

SEQ ID NO: 200709 - DNA, 33 bp, Homo sapien
taaatggtatcagacagtaagtatcaatctaca

SEQ ID NO: 200710 - DNA, 33 bp, Homo sapien
taaatggtatcagacattaagtatcaatctaca

SEQ ID NO: 200711 - DNA, 33 bp, Homo sapien
atatggctaagtattacgatgtgaagaaacttg

SEQ ID NO: 200712 - DNA, 33 bp, Homo sapien
atatggctaagtattatgatgtgaagaaacttg

SEQ ID NO: 200713 - DNA, 33 bp, Homo sapien
ttactcctatttagcacctccctaagaaatgaa

SEQ ID NO: 200714 - DNA, 33 bp, Homo sapien
ttactcctatttagcagctccctaagaaatgaa

SEQ ID NO: 200715 - DNA, 33 bp, Homo sapien
taggtagcatggaaaaaggtagcagtatgacaa

SEQ ID NO: 200716 - DNA, 33 bp, Homo sapien
taggtagcatggaaaatggtagcagtatgacaa

SEQ ID NO: 200717 - DNA, 33 bp, Homo sapien
aatattctcaacaagacgccaacgatccatgtc

SEQ ID NO: 200718 - DNA, 33 bp, Homo sapien
aatattctcaacaagatgccaacgatccatgtc

SEQ ID NO: 200719 - DNA, 33 bp, Homo sapien
agcttaaagtctatcagaacataagacattcca

SEQ ID NO: 200720 - DNA, 33 bp, Homo sapien
agcttaaagtctatcataacataagacattcca

SEQ ID NO: 200721 - DNA, 33 bp, Homo sapien
ggtgtagcaatgagtgcagcaatgtgtgtaggt

SEQ ID NO: 200722 - DNA, 33 bp, Homo sapien
ggtgtagcaatgagtgtagcaatgtgtgtaggt

SEQ ID NO: 200723 - DNA, 33 bp, Homo sapien
tcttgcgtatattccaatatagactctaagtcc

SEQ ID NO: 200724 - DNA, 33 bp, Homo sapien
tcttgcgtatattccagtatagactctaagtcc

SEQ ID NO: 200725 - DNA, 33 bp, Homo sapien
atgggtttggaaacaacgtcatctaaggaattg

SEQ ID NO: 200726 - DNA, 33 bp, Homo sapien
atgggtttggaaacaatgtcatctaaggaattg

SEQ ID NO: 200727 - DNA, 33 bp, Homo sapien
aatcttggatacactcaagctctcccaaaaata

SEQ ID NO: 200728 - DNA, 33 bp, Homo sapien
aatcttggatacactctagctctcccaaaaata

SEQ ID NO: 200729 - DNA, 33 bp, Homo sapien
agttagaaaaccacgaagaccagagagatgggg

SEQ ID NO: 200730 - DNA, 33 bp, Homo sapien
agttagaaaaccacgaggaccagagagatgggg

SEQ ID NO: 200731 - DNA, 33 bp, Homo sapien
ttgcttccttccgcaacgttgattctgccaatt

SEQ ID NO: 200732 - DNA, 33 bp, Homo sapien
ttgcttccttccgcaatgttgattctgccaatt

SEQ ID NO: 200733 - DNA, 33 bp, Homo sapien
agacatgagcctgtccaccagaaaataaaatta

SEQ ID NO: 200734 - DNA, 33 bp, Homo sapien
agacatgagcctgtccgccagaaaataaaatta

SEQ ID NO: 200735 - DNA, 33 bp, Homo sapien
ctccttttagctaaaaatctgctcaaccactgt

SEQ ID NO: 200736 - DNA, 33 bp, Homo sapien
ctccttttagctaaaactctgctcaaccactgt

SEQ ID NO: 200737 - DNA, 33 bp, Homo sapien
aggttcctttcaaatacaatgcgggggaagatt

SEQ ID NO: 200738 - DNA, 33 bp, Homo sapien
aggttcctttcaaatataatgcgggggaagatt

SEQ ID NO: 200739 - DNA, 33 bp, Homo sapien
ctccttggcttgtagacgactcttttccctgtg

SEQ ID NO: 200740 - DNA, 33 bp, Homo sapien
ctccttggcttgtagatgactcttttccctgtg

SEQ ID NO: 200741 - DNA, 33 bp, Homo sapien
ggtgtgtagcctcgcaatgaccacccttcccag

SEQ ID NO: 200742 - DNA, 33 bp, Homo sapien
ggtgtgtagcctcgcagtgaccacccttcccag

SEQ ID NO: 200743 - DNA, 33 bp, Homo sapien
ggaaggtcaacttgcaaaataaaccttttaatt

SEQ ID NO: 200744 - DNA, 33 bp, Homo sapien
ggaaggtcaacttgcataataaaccttttaatt

SEQ ID NO: 200745 - DNA, 33 bp, Homo sapien
aattatctcttagctacgttctaattggcttgt

SEQ ID NO: 200746 - DNA, 33 bp, Homo sapien
aattatctcttagctatgttctaattggcttgt

SEQ ID NO: 200747 - DNA, 33 bp, Homo sapien
tacctgtggtcacctgcagtcagcaaatattga

SEQ ID NO: 200748 - DNA, 33 bp, Homo sapien
tacctgtggtcacctgtagtcagcaaatattga

SEQ ID NO: 200749 - DNA, 33 bp, Homo sapien
gaagaatccaggttcacggccttacctttagat

SEQ ID NO: 200750 - DNA, 33 bp, Homo sapien
gaagaatccaggttcatggccttacctttagat

SEQ ID NO: 200751 - DNA, 33 bp, Homo sapien
tctgtcactggacttaaggttcatcctgaatcc

SEQ ID NO: 200752 - DNA, 33 bp, Homo sapien
tctgtcactggacttagggttcatcctgaatcc

SEQ ID NO: 200753 - DNA, 33 bp, Homo sapien
gacaaatatataataaagtgtatttgacatccc

SEQ ID NO: 200754 - DNA, 33 bp, Homo sapien
gacaaatatataataacgtgtatttgacatccc

SEQ ID NO: 200755 - DNA, 33 bp, Homo sapien
aattattccctgcaacaactctgtgaaacaaaa

SEQ ID NO: 200756 - DNA, 33 bp, Homo sapien
aattattccctgcaacgactctgtgaaacaaaa

SEQ ID NO: 200757 - DNA, 33 bp, Homo sapien
ctttaacacaaacccacgactcaaactccagat

SEQ ID NO: 200758 - DNA, 33 bp, Homo sapien
ctttaacacaaacccatgactcaaactccagat

SEQ ID NO: 200759 - DNA, 33 bp, Homo sapien
tgtgttaaaggtggaaccctgggcaggtagaag

SEQ ID NO: 200760 - DNA, 33 bp, Homo sapien
tgtgttaaaggtggaatcctgggcaggtagaag

SEQ ID NO: 200761 - DNA, 33 bp, Homo sapien
ggacatgctgctcagggcaacaagaaagctgca

SEQ ID NO: 200762 - DNA, 33 bp, Homo sapien
ggacatgctgctcaggtcaacaagaaagctgca

SEQ ID NO: 200763 - DNA, 33 bp, Homo sapien
catgtgctagaaaaagaagcagcattttgaggg

SEQ ID NO: 200764 - DNA, 33 bp, Homo sapien
catgtgctagaaaaagcagcagcattttgaggg

SEQ ID NO: 200765 - DNA, 33 bp, Homo sapien
aacacatcaagaggtacgaaagactcatattgg

SEQ ID NO: 200766 - DNA, 33 bp, Homo sapien
aacacatcaagaggtatgaaagactcatattgg

SEQ ID NO: 200767 - DNA, 33 bp, Homo sapien
gtcacatggcaatagaacctgtgactttggccc

SEQ ID NO: 200768 - DNA, 33 bp, Homo sapien
gtcacatggcaatagatcctgtgactttggccc

SEQ ID NO: 200769 - DNA, 33 bp, Homo sapien
aaagttgttggtttaaaatttctctgatacaaa

SEQ ID NO: 200770 - DNA, 33 bp, Homo sapien
aaagttgttggtttaacatttctctgatacaaa

SEQ ID NO: 200771 - DNA, 33 bp, Homo sapien
ccttcaactcaaacaacaggttctagtcttcta

SEQ ID NO: 200772 - DNA, 33 bp, Homo sapien
ccttcaactcaaacaataggttctagtcttcta

SEQ ID NO: 200773 - DNA, 33 bp, Homo sapien
aatctatcatctcagacagggaacaggagtacc

SEQ ID NO: 200774 - DNA, 33 bp, Homo sapien
aatctatcatctcagatagggaacaggagtacc

SEQ ID NO: 200775 - DNA, 33 bp, Homo sapien
aaattctcccaatatccccagttcagtttcctg

SEQ ID NO: 200776 - DNA, 33 bp, Homo sapien
aaattctcccaatatctccagttcagtttcctg

SEQ ID NO: 200777 - DNA, 33 bp, Homo sapien
ggttaaacatggcttgcaagttagaggtaatga

SEQ ID NO: 200778 - DNA, 33 bp, Homo sapien
ggttaaacatggcttggaagttagaggtaatga

SEQ ID NO: 200779 - DNA, 33 bp, Homo sapien
ctctcttatggtgtaaacttcactgcacgggta

SEQ ID NO: 200780 - DNA, 33 bp, Homo sapien
ctctcttatggtgtaagcttcactgcacgggta

SEQ ID NO: 200781 - DNA, 33 bp, Homo sapien
tagcagggaagacagactaaacacagaactgga

SEQ ID NO: 200782 - DNA, 33 bp, Homo sapien
tagcagggaagacagattaaacacagaactgga

SEQ ID NO: 200783 - DNA, 33 bp, Homo sapien
tgggtccctgggggaaactttctggagtgcaga

SEQ ID NO: 200784 - DNA, 33 bp, Homo sapien
tgggtccctgggggaatctttctggagtgcaga

SEQ ID NO: 200785 - DNA, 33 bp, Homo sapien
ctgcaaaatggggttacatctagtgcctagttc

SEQ ID NO: 200786 - DNA, 33 bp, Homo sapien
ctgcaaaatggggttatatctagtgcctagttc

SEQ ID NO: 200787 - DNA, 33 bp, Homo sapien
caggagacacatatacaaagaataatcatagtt

SEQ ID NO: 200788 - DNA, 33 bp, Homo sapien
caggagacacatataccaagaataatcatagtt

SEQ ID NO: 200789 - DNA, 33 bp, Homo sapien
aaatatacaacttaggaacacacattcctgtta

SEQ ID NO: 200790 - DNA, 33 bp, Homo sapien
aaatatacaacttaggtacacacattcctgtta

SEQ ID NO: 200791 - DNA, 33 bp, Homo sapien
agataccccatcttccacaagaatgaaagccat

SEQ ID NO: 200792 - DNA, 33 bp, Homo sapien
agataccccatcttccgcaagaatgaaagccat

SEQ ID NO: 200793 - DNA, 33 bp, Homo sapien
gagtggtatttccagaacgctcgttatccaccg

SEQ ID NO: 200794 - DNA, 33 bp, Homo sapien
gagtggtatttccagaccgctcgttatccaccg

SEQ ID NO: 200795 - DNA, 33 bp, Homo sapien
ctttgctaaaagaatgaaactttctgagcaggt

SEQ ID NO: 200796 - DNA, 33 bp, Homo sapien
ctttgctaaaagaatggaactttctgagcaggt

SEQ ID NO: 200797 - DNA, 33 bp, Homo sapien
tattgttgaattgacacatttatttgctgggcc

SEQ ID NO: 200798 - DNA, 33 bp, Homo sapien
tattgttgaattgacatatttatttgctgggcc

SEQ ID NO: 200799 - DNA, 33 bp, Homo sapien
agtgctttatatttacactgtctcatgagatgc

SEQ ID NO: 200800 - DNA, 33 bp, Homo sapien
agtgctttatatttacgctgtctcatgagatgc

SEQ ID NO: 200801 - DNA, 33 bp, Homo sapien
gcttccaacaggcctaccagatattttagaacc

SEQ ID NO: 200802 - DNA, 33 bp, Homo sapien
gcttccaacaggcctatcagatattttagaacc

SEQ ID NO: 200803 - DNA, 33 bp, Homo sapien
taattggtttgttcctcaccgtttcacagatgc

SEQ ID NO: 200804 - DNA, 33 bp, Homo sapien
taattggtttgttccttaccgtttcacagatgc

SEQ ID NO: 200805 - DNA, 33 bp, Homo sapien
aactggcccagagaaacaaaggtggcctggtag

SEQ ID NO: 200806 - DNA, 33 bp, Homo sapien
aactggcccagagaaagaaaggtggcctggtag

SEQ ID NO: 200807 - DNA, 33 bp, Homo sapien
cttgccttaattttcgacagccattaaattctc

SEQ ID NO: 200808 - DNA, 33 bp, Homo sapien
cttgccttaattttcggcagccattaaattctc

SEQ ID NO: 200809 - DNA, 33 bp, Homo sapien
tttagcttgcaactcaaatgatcacacaaatgc

SEQ ID NO: 200810 - DNA, 33 bp, Homo sapien
tttagcttgcaactcacatgatcacacaaatgc

SEQ ID NO: 200811 - DNA, 33 bp, Homo sapien
aagatggcttgaggtacgaatctatacaggcct

SEQ ID NO: 200812 - DNA, 33 bp, Homo sapien
aagatggcttgaggtatgaatctatacaggcct

SEQ ID NO: 200813 - DNA, 33 bp, Homo sapien
ggaacctttcctaaccaactggctacacattgt

SEQ ID NO: 200814 - DNA, 33 bp, Homo sapien
ggaacctttcctaaccgactggctacacattgt

SEQ ID NO: 200815 - DNA, 33 bp, Homo sapien
gagacctagaatgtcaaaaacttgccagggggc

SEQ ID NO: 200816 - DNA, 33 bp, Homo sapien
gagacctagaatgtcagaaacttgccagggggc

SEQ ID NO: 200817 - DNA, 33 bp, Homo sapien
tatgggcgtcattgaacgtgagataggtctctt

SEQ ID NO: 200818 - DNA, 33 bp, Homo sapien
tatgggcgtcattgaatgtgagataggtctctt

SEQ ID NO: 200819 - DNA, 33 bp, Homo sapien
gggagttacagaagtacggtagtgctggctttt

SEQ ID NO: 200820 - DNA, 33 bp, Homo sapien
gggagttacagaagtatggtagtgctggctttt

SEQ ID NO: 200821 - DNA, 33 bp, Homo sapien
gtaaacatatagcacaagtaccctttaaagaag

SEQ ID NO: 200822 - DNA, 33 bp, Homo sapien
gtaaacatatagcacaggtaccctttaaagaag

SEQ ID NO: 200823 - DNA, 33 bp, Homo sapien
caccaaatgatatacccgctttttaaatgtacc

SEQ ID NO: 200824 - DNA, 33 bp, Homo sapien
caccaaatgatatacctgctttttaaatgtacc

SEQ ID NO: 200825 - DNA, 33 bp, Homo sapien
tgggccaaagactcacaaaattcatcatctctt

SEQ ID NO: 200826 - DNA, 33 bp, Homo sapien
tgggccaaagactcacgaaattcatcatctctt

SEQ ID NO: 200827 - DNA, 33 bp, Homo sapien
gcatttggcaatctcaccaaacacagggtcaag

SEQ ID NO: 200828 - DNA, 33 bp, Homo sapien
gcatttggcaatctcatcaaacacagggtcaag

SEQ ID NO: 200829 - DNA, 33 bp, Homo sapien
cgccttcctctttaagcctgcaagaaccctagt

SEQ ID NO: 200830 - DNA, 33 bp, Homo sapien
cgccttcctctttaagtctgcaagaaccctagt

SEQ ID NO: 200831 - DNA, 33 bp, Homo sapien
ctcgtacacactggccacaaacaccgttaccct

SEQ ID NO: 200832 - DNA, 33 bp, Homo sapien
ctcgtacacactggccgcaaacaccgttaccct

SEQ ID NO: 200833 - DNA, 33 bp, Homo sapien
aagtccctcactatccaagctttaggctgctaa

SEQ ID NO: 200834 - DNA, 33 bp, Homo sapien
aagtccctcactatccgagctttaggctgctaa

SEQ ID NO: 200835 - DNA, 33 bp, Homo sapien
gtgatagggctgggacaaccttcttagccagcc

SEQ ID NO: 200836 - DNA, 33 bp, Homo sapien
gtgatagggctgggacgaccttcttagccagcc

SEQ ID NO: 200837 - DNA, 33 bp, Homo sapien
tatgctgactgtttaacagaagcaaggagcagg

SEQ ID NO: 200838 - DNA, 33 bp, Homo sapien
tatgctgactgtttaatagaagcaaggagcagg

SEQ ID NO: 200839 - DNA, 33 bp, Homo sapien
ggcaactgaaaggaacccaatggcagcgacccc

SEQ ID NO: 200840 - DNA, 33 bp, Homo sapien
ggcaactgaaaggaactcaatggcagcgacccc

SEQ ID NO: 200841 - DNA, 33 bp, Homo sapien
tggcagcgaccccaaagacgttgcttcagccac

SEQ ID NO: 200842 - DNA, 33 bp, Homo sapien
tggcagcgaccccaaatacgttgcttcagccac

SEQ ID NO: 200843 - DNA, 33 bp, Homo sapien
aaggacacagtttctacactcaagaggcttgca

SEQ ID NO: 200844 - DNA, 33 bp, Homo sapien
aaggacacagtttctagactcaagaggcttgca

SEQ ID NO: 200845 - DNA, 33 bp, Homo sapien
cgatctagacctaatacaacaccgctccgccag

SEQ ID NO: 200846 - DNA, 33 bp, Homo sapien
cgatctagacctaatagaacaccgctccgccag

SEQ ID NO: 200847 - DNA, 33 bp, Homo sapien
cgttgatgactccaaaactgagttcttctttga

SEQ ID NO: 200848 - DNA, 33 bp, Homo sapien
cgttgatgactccaaagctgagttcttctttga

SEQ ID NO: 200849 - DNA, 33 bp, Homo sapien
tctttgaaatcttccaatgctgagtaaaggaaa

SEQ ID NO: 200850 - DNA, 33 bp, Homo sapien
tctttgaaatcttccagtgctgagtaaaggaaa

SEQ ID NO: 200851 - DNA, 33 bp, Homo sapien
atgagactcagagacaccaaataatctttcctt

SEQ ID NO: 200852 - DNA, 33 bp, Homo sapien
atgagactcagagacatcaaataatctttcctt

SEQ ID NO: 200853 - DNA, 33 bp, Homo sapien
gccttgcaaggaaggaccttgcaacacgcagcc

SEQ ID NO: 200854 - DNA, 33 bp, Homo sapien
gccttgcaaggaaggatcttgcaacacgcagcc

SEQ ID NO: 200855 - DNA, 33 bp, Homo sapien
cttgcaacacgcagcccgagaagaacctttcaa

SEQ ID NO: 200856 - DNA, 33 bp, Homo sapien
cttgcaacacgcagcctgagaagaacctttcaa

SEQ ID NO: 200857 - DNA, 33 bp, Homo sapien
taatttaaaagacaaacacgttcacagacatac

SEQ ID NO: 200858 - DNA, 33 bp, Homo sapien
taatttaaaagacaaatacgttcacagacatac

SEQ ID NO: 200859 - DNA, 33 bp, Homo sapien
ataaaggaaggataaaaacactcttcactttgc

SEQ ID NO: 200860 - DNA, 33 bp, Homo sapien
ataaaggaaggataaagacactcttcactttgc

SEQ ID NO: 200861 - DNA, 33 bp, Homo sapien
ggtgaatatgaactcaatgagatgacagcccag

SEQ ID NO: 200862 - DNA, 33 bp, Homo sapien
ggtgaatatgaactcagtgagatgacagcccag

SEQ ID NO: 200863 - DNA, 33 bp, Homo sapien
actctgatagcggagaacttgtactcacccccc

SEQ ID NO: 200864 - DNA, 33 bp, Homo sapien
actctgatagcggagagcttgtactcacccccc

SEQ ID NO: 200865 - DNA, 33 bp, Homo sapien
acccttgtcaaaaatcacatggccatatttaag

SEQ ID NO: 200866 - DNA, 33 bp, Homo sapien
acccttgtcaaaaatctcatggccatatttaag

SEQ ID NO: 200867 - DNA, 33 bp, Homo sapien
cttactgaaagctacaaaataccagtgaaaata

SEQ ID NO: 200868 - DNA, 33 bp, Homo sapien
cttactgaaagctacagaataccagtgaaaata

SEQ ID NO: 200869 - DNA, 33 bp, Homo sapien
tcactttacagcaaaaaaaatggagcaacggac

SEQ ID NO: 200870 - DNA, 33 bp, Homo sapien
tcactttacagcaaaagaaatggagcaacggac

SEQ ID NO: 200871 - DNA, 33 bp, Homo sapien
caaatatcaagacgacacattgtaaccaaagca

SEQ ID NO: 200872 - DNA, 33 bp, Homo sapien
caaatatcaagacgacgcattgtaaccaaagca

SEQ ID NO: 200873 - DNA, 33 bp, Homo sapien
aaattaacgtgtctcacaaaggaactgtttaaa

SEQ ID NO: 200874 - DNA, 33 bp, Homo sapien
aaattaacgtgtctcataaaggaactgtttaaa

SEQ ID NO: 200875 - DNA, 33 bp, Homo sapien
gaatcactttccaaaaggcactgcttacacaga

SEQ ID NO: 200876 - DNA, 33 bp, Homo sapien
gaatcactttccaaaatgcactgcttacacaga

SEQ ID NO: 200877 - DNA, 33 bp, Homo sapien
aaatatgaaaacaatccgaatatccatcaaatg

SEQ ID NO: 200878 - DNA, 33 bp, Homo sapien
aaatatgaaaacaatctgaatatccatcaaatg

SEQ ID NO: 200879 - DNA, 33 bp, Homo sapien
gaataaatggtaactaagtcatttatggggcct

SEQ ID NO: 200880 - DNA, 33 bp, Homo sapien
gaataaatggtaactaggtcatttatggggcct

SEQ ID NO: 200881 - DNA, 33 bp, Homo sapien
aatgacttccagaaaactgtgtatctggaatca

SEQ ID NO: 200882 - DNA, 33 bp, Homo sapien
aatgacttccagaaaattgtgtatctggaatca

SEQ ID NO: 200883 - DNA, 33 bp, Homo sapien
agttgaacacaaaactcagaaactcttgggagc

SEQ ID NO: 200884 - DNA, 33 bp, Homo sapien
agttgaacacaaaacttagaaactcttgggagc

SEQ ID NO: 200885 - DNA, 33 bp, Homo sapien
gagtttatccatctccactagattttctagttt

SEQ ID NO: 200886 - DNA, 33 bp, Homo sapien
gagtttatccatctccgctagattttctagttt

SEQ ID NO: 200887 - DNA, 33 bp, Homo sapien
ttcccaatccaccctaatagcagaagacaaaga

SEQ ID NO: 200888 - DNA, 33 bp, Homo sapien
ttcccaatccaccctagtagcagaagacaaaga

SEQ ID NO: 200889 - DNA, 33 bp, Homo sapien; identical to SEQ ID NO: 200887

SEQ ID NO: 200890 - DNA, 33 bp, Homo sapien; identical to SEQ ID NO: 200888

SEQ ID NO: 200891 - DNA, 33 bp, Homo sapien
tgaaaaccttctacaacgaacgacttctaagac

SEQ ID NO: 200892 - DNA, 33 bp, Homo sapien
tgaaaaccttctacaatgaacgacttctaagac

SEQ ID NO: 200893 - DNA, 33 bp, Homo sapien
ctcccctattattgcacgaatagtgtaccagca

SEQ ID NO: 200894 - DNA, 33 bp, Homo sapien
ctcccctattattgcatgaatagtgtaccagca

SEQ ID NO: 200895 - DNA, 33 bp, Homo sapien
aataaggagctaaatccaaaatatacaagaaac

SEQ ID NO: 200896 - DNA, 33 bp, Homo sapien
aataaggagctaaatcgaaaatatacaagaaac

SEQ ID NO: 200897 - DNA, 33 bp, Homo sapien
aaaaataaatggcatccaagaaacaggggatcc

SEQ ID NO: 200898 - DNA, 33 bp, Homo sapien
aaaaataaatggcatctaagaaacaggggatcc

SEQ ID NO: 200899 - DNA, 33 bp, Homo sapien
ggtatggccacaggaccgataagcaggttagta

SEQ ID NO: 200900 - DNA, 33 bp, Homo sapien
ggtatggccacaggactgataagcaggttagta

SEQ ID NO: 200901 - DNA, 33 bp, Homo sapien
caggataaaacctgtacctaaatcacaaaggca

SEQ ID NO: 200902 - DNA, 33 bp, Homo sapien
caggataaaacctgtatctaaatcacaaaggca

SEQ ID NO: 200903 - DNA, 33 bp, Homo sapien
aaaccattaaaggaaacgctgatagatctaatt

SEQ ID NO: 200904 - DNA, 33 bp, Homo sapien
aaaccattaaaggaaatgctgatagatctaatt

SEQ ID NO: 200905 - DNA, 33 bp, Homo sapien
aagagctctggaaacccagtgagaaggatctgg

SEQ ID NO: 200906 - DNA, 33 bp, Homo sapien
aagagctctggaaacctagtgagaaggatctgg

SEQ ID NO: 200907 - DNA, 33 bp, Homo sapien
ccctcatgggagtttacagtcaagtgaggaaag

SEQ ID NO: 200908 - DNA, 33 bp, Homo sapien
ccctcatgggagtttatagtcaagtgaggaaag

SEQ ID NO: 200909 - DNA, 33 bp, Homo sapien
acttaaaatccaaacaactttgcctctaagaat

SEQ ID NO: 200910 - DNA, 33 bp, Homo sapien
acttaaaatccaaacagctttgcctctaagaat

SEQ ID NO: 200911 - DNA, 33 bp, Homo sapien
atgttattaaacatgcagaacgtagcttgtttt

SEQ ID NO: 200912 - DNA, 33 bp, Homo sapien
atgttattaaacatgcggaacgtagcttgtttt

SEQ ID NO: 200913 - DNA, 33 bp, Homo sapien
cgtgacttgactcaacacttaagtttctgctat

SEQ ID NO: 200914 - DNA, 33 bp, Homo sapien
cgtgacttgactcaacgcttaagtttctgctat

SEQ ID NO: 200915 - DNA, 33 bp, Homo sapien
tgtcggtacaaatcaacgataaaaacaaaatct

SEQ ID NO: 200916 - DNA, 33 bp, Homo sapien
tgtcggtacaaatcaatgataaaaacaaaatct

SEQ ID NO: 200917 - DNA, 33 bp, Homo sapien
ggttggtcagctacagaacagaggaagagagac

SEQ ID NO: 200918 - DNA, 33 bp, Homo sapien
ggttggtcagctacagcacagaggaagagagac

SEQ ID NO: 200919 - DNA, 33 bp, Homo sapien
cagtatgtgttattgacgccaattatcacatct

SEQ ID NO: 200920 - DNA, 33 bp, Homo sapien
cagtatgtgttattgaggccaattatcacatct

SEQ ID NO: 200921 - DNA, 33 bp, Homo sapien
ttcaagccaaaattcaatgaactcctaatggcg

SEQ ID NO: 200922 - DNA, 33 bp, Homo sapien
ttcaagccaaaattcagtgaactcctaatggcg

SEQ ID NO: 200923 - DNA, 33 bp, Homo sapien
attggccaggcacggcaaatcacatctataatc

SEQ ID NO: 200924 - DNA, 33 bp, Homo sapien
attggccaggcacggcgaatcacatctataatc

SEQ ID NO: 200925 - DNA, 33 bp, Homo sapien
tgttaatgaacaaatcgaaagtcacaaaattgt

SEQ ID NO: 200926 - DNA, 33 bp, Homo sapien
tgttaatgaacaaatctaaagtcacaaaattgt

SEQ ID NO: 200927 - DNA, 33 bp, Homo sapien
gcatgaacagaatgccacacaggtgaagactgg

SEQ ID NO: 200928 - DNA, 33 bp, Homo sapien
gcatgaacagaatgccgcacaggtgaagactgg

SEQ ID NO: 200929 - DNA, 33 bp, Homo sapien
tttagatactgtacaacgctgttcaggaaaaaa

SEQ ID NO: 200930 - DNA, 33 bp, Homo sapien
tttagatactgtacaatgctgttcaggaaaaaa

SEQ ID NO: 200931 - DNA, 33 bp, Homo sapien
aagtgtgaactttacaatcagacaaatctgggt

SEQ ID NO: 200932 - DNA, 33 bp, Homo sapien
aagtgtgaactttacagtcagacaaatctgggt

SEQ ID NO: 200933 - DNA, 33 bp, Homo sapien
ccttgccaggcaaggtcaagggagttgtgtttt

SEQ ID NO: 200934 - DNA, 33 bp, Homo sapien
ccttgccaggcaaggtgaagggagttgtgtttt

SEQ ID NO: 200935 - DNA, 33 bp, Homo sapien
taatgcaggagtctccaaccttgacccccgggg

SEQ ID NO: 200936 - DNA, 33 bp, Homo sapien
taatgcaggagtctccgaccttgacccccgggg

SEQ ID NO: 200937 - DNA, 33 bp, Homo sapien
ttggactttaaaaataaaatatgtggtctttta

SEQ ID NO: 200938 - DNA, 33 bp, Homo sapien
ttggactttaaaaatataatatgtggtctttta

SEQ ID NO: 200939 - DNA, 33 bp, Homo sapien
ggaagaccagtttgaccgaagtggcggttccaa

SEQ ID NO: 200940 - DNA, 33 bp, Homo sapien
ggaagaccagtttgactgaagtggcggttccaa

SEQ ID NO: 200941 - DNA, 33 bp, Homo sapien
ttttccatatcaaggccctgctttggcatcgaa

SEQ ID NO: 200942 - DNA, 33 bp, Homo sapien
ttttccatatcaaggctctgctttggcatcgaa

SEQ ID NO: 200943 - DNA, 33 bp, Homo sapien
ctccaaggtacaattacacatctcccataccac

SEQ ID NO: 200944 - DNA, 33 bp, Homo sapien
ctccaaggtacaattagacatctcccataccac

SEQ ID NO: 200945 - DNA, 33 bp, Homo sapien
ggcaaaaaatgcagtaataaagcaaatgtgact

SEQ ID NO: 200946 - DNA, 33 bp, Homo sapien
ggcaaaaaatgcagtagtaaagcaaatgtgact

SEQ ID NO: 200947 - DNA, 33 bp, Homo sapien
gaaaatccaaaagcctcaaaatttagtaagggt

SEQ ID NO: 200948 - DNA, 33 bp, Homo sapien
gaaaatccaaaagcctgaaaatttagtaagggt

SEQ ID NO: 200949 - DNA, 33 bp, Homo sapien
tttgatcatacacatccagaagtcactttttat

SEQ ID NO: 200950 - DNA, 33 bp, Homo sapien
tttgatcatacacatctagaagtcactttttat

SEQ ID NO: 200951 - DNA, 33 bp, Homo sapien
ttggtgttacttcagacggttattcatgtttac

SEQ ID NO: 200952 - DNA, 33 bp, Homo sapien
ttggtgttacttcagatggttattcatgtttac

SEQ ID NO: 200953 - DNA, 33 bp, Homo sapien
gtattcatcaattatacggttgttttaatgtat

SEQ ID NO: 200954 - DNA, 33 bp, Homo sapien
gtattcatcaattatatggttgttttaatgtat

SEQ ID NO: 200955 - DNA, 33 bp, Homo sapien
tccacatagtgctttacggaacgttaacttttt

SEQ ID NO: 200956 - DNA, 33 bp, Homo sapien
tccacatagtgctttatggaacgttaacttttt

SEQ ID NO: 200957 - DNA, 33 bp, Homo sapien
tctttctctataaacacctcagttgtgctgttg

SEQ ID NO: 200958 - DNA, 33 bp, Homo sapien
tctttctctataaacatctcagttgtgctgttg

SEQ ID NO: 200959 - DNA, 33 bp, Homo sapien
ttaccttagaatgccaaatacgctgtcgggttg

SEQ ID NO: 200960 - DNA, 33 bp, Homo sapien
ttaccttagaatgccagatacgctgtcgggttg

SEQ ID NO: 200961 - DNA, 33 bp, Homo sapien
cagactcagtttcaggaacagcctggactactt

SEQ ID NO: 200962 - DNA, 33 bp, Homo sapien
cagactcagtttcagggacagcctggactactt

SEQ ID NO: 200963 - DNA, 33 bp, Homo sapien
ggctgaattttcagagaaatgcttgcagcttcc

SEQ ID NO: 200964 - DNA, 33 bp, Homo sapien
ggctgaattttcagaggaatgcttgcagcttcc

SEQ ID NO: 200965 - DNA, 33 bp, Homo sapien
ccagaggaaattggccaaagctcatttccatgt

SEQ ID NO: 200966 - DNA, 33 bp, Homo sapien
ccagaggaaattggccgaagctcatttccatgt

SEQ ID NO: 200967 - DNA, 33 bp, Homo sapien
atgctatttcttccaaaaggatggtctcgcgag

SEQ ID NO: 200968 - DNA, 33 bp, Homo sapien
atgctatttcttccaacaggatggtctcgcgag

SEQ ID NO: 200969 - DNA, 33 bp, Homo sapien
aacttgtcttaaagaacgatccagaggccctct

SEQ ID NO: 200970 - DNA, 33 bp, Homo sapien
aacttgtcttaaagaatgatccagaggccctct

SEQ ID NO: 200971 - DNA, 33 bp, Homo sapien
tttcaaagaaagacaacgaagtcataagtaaaa

SEQ ID NO: 200972 - DNA, 33 bp, Homo sapien
tttcaaagaaagacaatgaagtcataagtaaaa

SEQ ID NO: 200973 - DNA, 33 bp, Homo sapien
cctactgagtacacgaagatctcttggcctctc

SEQ ID NO: 200974 - DNA, 33 bp, Homo sapien
cctactgagtacacgaggatctcttggcctctc

SEQ ID NO: 200975 - DNA, 33 bp, Homo sapien
gactgatttggaaagaccatcataatatacttc

SEQ ID NO: 200976 - DNA, 33 bp, Homo sapien
gactgatttggaaagatcatcataatatacttc

SEQ ID NO: 200977 - DNA, 33 bp, Homo sapien
gtgtgtctccctgtgcagatgtgtgtggatgtg

SEQ ID NO: 200978 - DNA, 33 bp, Homo sapien
gtgtgtctccctgtgcggatgtgtgtggatgtg

SEQ ID NO: 200979 - DNA, 33 bp, Homo sapien
ctcagaggcgccgtcaagaagaaatcaaagaag

SEQ ID NO: 200980 - DNA, 33 bp, Homo sapien
ctcagaggcgccgtcaggaagaaatcaaagaag

SEQ ID NO: 200981 - DNA, 33 bp, Homo sapien
gcaccgttaggattcacagtgtaattctgagac

SEQ ID NO: 200982 - DNA, 33 bp, Homo sapien
gcaccgttaggattcatagtgtaattctgagac

SEQ ID NO: 200983 - DNA, 33 bp, Homo sapien
agaataaccttgggaacacatttaactatgctt

SEQ ID NO: 200984 - DNA, 33 bp, Homo sapien
agaataaccttgggaagacatttaactatgctt

SEQ ID NO: 200985 - DNA, 33 bp, Homo sapien
catccaaaccaaatgaacagatatcccaggacg

SEQ ID NO: 200986 - DNA, 33 bp, Homo sapien
catccaaaccaaatgagcagatatcccaggacg

SEQ ID NO: 200987 - DNA, 33 bp, Homo sapien
ccttgggttcttcaccaatgatagtgacagtat

SEQ ID NO: 200988 - DNA, 33 bp, Homo sapien
ccttgggttcttcaccgatgatagtgacagtat

SEQ ID NO: 200989 - DNA, 33 bp, Homo sapien
cctcccggcagtgcccaatgaatgcatgatgac

SEQ ID NO: 200990 - DNA, 33 bp, Homo sapien
cctcccggcagtgcccgatgaatgcatgatgac

SEQ ID NO: 200991 - DNA, 33 bp, Homo sapien
ggtcaggtcgattaacagtgaacgcagaaggcc

SEQ ID NO: 200992 - DNA, 33 bp, Homo sapien
ggtcaggtcgattaacggtgaacgcagaaggcc

SEQ ID NO: 200993 - DNA, 33 bp, Homo sapien
acaagcgtttcctgaacacttgaccaaaacggt

SEQ ID NO: 200994 - DNA, 33 bp, Homo sapien
acaagcgtttcctgaatacttgaccaaaacggt

SEQ ID NO: 200995 - DNA, 33 bp, Homo sapien
aatgggtccacaggaacgcaagtctggtaatca

SEQ ID NO: 200996 - DNA, 33 bp, Homo sapien
aatgggtccacaggaatgcaagtctggtaatca

SEQ ID NO: 200997 - DNA, 33 bp, Homo sapien
tgagactgtctctgtaaaaccaaactcactgca

SEQ ID NO: 200998 - DNA, 33 bp, Homo sapien
tgagactgtctctgtacaaccaaactcactgca

SEQ ID NO: 200999 - DNA, 33 bp, Homo sapien
tctacgcaaaccatcacgtaacatatttgctga

SEQ ID NO: 201000 - DNA, 33 bp, Homo sapien
tctacgcaaaccatcatgtaacatatttgctga

SEQ ID NO: 201001 - DNA, 33 bp, Homo sapien
tgttaagtgtttagaagagtaactagtaacata

SEQ ID NO: 201002 - DNA, 33 bp, Homo sapien
tgttaagtgtttagaatagtaactagtaacata

SEQ ID NO: 201003 - DNA, 33 bp, Homo sapien
aactaactccacagaagaaataaaatggctcat

SEQ ID NO: 201004 - DNA, 33 bp, Homo sapien
aactaactccacagaataaataaaatggctcat

SEQ ID NO: 201005 - DNA, 33 bp, Homo sapien
atatccacaaggcacacaacaaatcctgagacc

SEQ ID NO: 201006 - DNA, 33 bp, Homo sapien
atatccacaaggcacagaacaaatcctgagacc

SEQ ID NO: 201007 - DNA, 33 bp, Homo sapien
atctgttaatcatggacaccttcaattgctcag

SEQ ID NO: 201008 - DNA, 33 bp, Homo sapien
atctgttaatcatggataccttcaattgctcag

SEQ ID NO: 201009 - DNA, 33 bp, Homo sapien
agactgaaggcaaggaaatcaatcaggatgctg

SEQ ID NO: 201010 - DNA, 33 bp, Homo sapien
agactgaaggcaaggagatcaatcaggatgctg

SEQ ID NO: 201011 - DNA, 33 bp, Homo sapien
ttatatcaggaaagcactcataaagtgattttt

SEQ ID NO: 201012 - DNA, 33 bp, Homo sapien
ttatatcaggaaagcattcataaagtgattttt

SEQ ID NO: 201013 - DNA, 33 bp, Homo sapien
ttttactttacaaatagagcagtacctcatatt

SEQ ID NO: 201014 - DNA, 33 bp, Homo sapien
ttttactttacaaatatagcagtacctcatatt

SEQ ID NO: 201015 - DNA, 33 bp, Homo sapien
agtacttggtgtggacacttaaaaactctttag

SEQ ID NO: 201016 - DNA, 33 bp, Homo sapien
agtacttggtgtggacgcttaaaaactctttag

SEQ ID NO: 201017 - DNA, 33 bp, Homo sapien
tcagaaactcaaaatgcagatgtgtctgaagaa

SEQ ID NO: 201018 - DNA, 33 bp, Homo sapien
tcagaaactcaaaatggagatgtgtctgaagaa

SEQ ID NO: 201019 - DNA, 33 bp, Homo sapien
gcatactcggcctccacgtgttatttttcatgt

SEQ ID NO: 201020 - DNA, 33 bp, Homo sapien
gcatactcggcctccatgtgttatttttcatgt

SEQ ID NO: 201021 - DNA, 33 bp, Homo sapien
ctacaaacatcttggcaacgtgtaactaagact

SEQ ID NO: 201022 - DNA, 33 bp, Homo sapien
ctacaaacatcttggcgacgtgtaactaagact

SEQ ID NO: 201023 - DNA, 33 bp, Homo sapien
atctccactgatcacacatccaaatgccttttt

SEQ ID NO: 201024 - DNA, 33 bp, Homo sapien
atctccactgatcacatatccaaatgccttttt

SEQ ID NO: 201025 - DNA, 33 bp, Homo sapien
ccagacacccgccgcaggtcgcagtccgcccag

SEQ ID NO: 201026 - DNA, 33 bp, Homo sapien
ccagacacccgccgcatgtcgcagtccgcccag

SEQ ID NO: 201027 - DNA, 33 bp, Homo sapien
tgagccatctgttccaatgctgcaaggaaaatc

SEQ ID NO: 201028 - DNA, 33 bp, Homo sapien
tgagccatctgttccagtgctgcaaggaaaatc

SEQ ID NO: 201029 - DNA, 33 bp, Homo sapien
gtcctgcattagtctacggcaattagctgtaca

SEQ ID NO: 201030 - DNA, 33 bp, Homo sapien
gtcctgcattagtctatggcaattagctgtaca

SEQ ID NO: 201031 - DNA, 33 bp, Homo sapien
tttaattgggtttctcaaggtatctaaaagact

SEQ ID NO: 201032 - DNA, 33 bp, Homo sapien
tttaattgggtttctcgaggtatctaaaagact

SEQ ID NO: 201033 - DNA, 33 bp, Homo sapien
cagaatttagtgagaaacctatgcacacagtgt

SEQ ID NO: 201034 - DNA, 33 bp, Homo sapien
cagaatttagtgagaagcctatgcacacagtgt

SEQ ID NO: 201035 - DNA, 33 bp, Homo sapien
gtatttcccactcttacctcttattgctcttat

SEQ ID NO: 201036 - DNA, 33 bp, Homo sapien
gtatttcccactcttagctcttattgctcttat

SEQ ID NO: 201037 - DNA, 33 bp, Homo sapien
gcataagctgccagccacttgtcttggtagggg

SEQ ID NO: 201038 - DNA, 33 bp, Homo sapien
gcataagctgccagccgcttgtcttggtagggg

SEQ ID NO: 201039 - DNA, 33 bp, Homo sapien
agaaatttgtcataaaaactatccaaatatgct

SEQ ID NO: 201040 - DNA, 33 bp, Homo sapien
agaaatttgtcataaacactatccaaatatgct

SEQ ID NO: 201041 - DNA, 33 bp, Homo sapien
cagcacatagcaaggaaaactggatgacgtcta

SEQ ID NO: 201042 - DNA, 33 bp, Homo sapien
cagcacatagcaaggataactggatgacgtcta

SEQ ID NO: 201043 - DNA, 33 bp, Homo sapien
ccactggctttaagtccaagatgtttatcgagt

SEQ ID NO: 201044 - DNA, 33 bp, Homo sapien
ccactggctttaagtctaagatgtttatcgagt

SEQ ID NO: 201045 - DNA, 33 bp, Homo sapien
tgggctgcagctgttgaatttccagacacaaac

SEQ ID NO: 201046 - DNA, 33 bp, Homo sapien
tgggctgcagctgttgtatttccagacacaaac

SEQ ID NO: 201047 - DNA, 33 bp, Homo sapien
ctgttctcaacacccacatacctcaactcctca

SEQ ID NO: 201048 - DNA, 33 bp, Homo sapien
ctgttctcaacacccagatacctcaactcctca

SEQ ID NO: 201049 - DNA, 33 bp, Homo sapien
agagccttaggagagagtcaaccacgggaaaag

SEQ ID NO: 201050 - DNA, 33 bp, Homo sapien
agagccttaggagagattcaaccacgggaaaag

SEQ ID NO: 201051 - DNA, 33 bp, Homo sapien
tacctgctggaaaccacgaacattaacttagag

SEQ ID NO: 201052 - DNA, 33 bp, Homo sapien
tacctgctggaaaccatgaacattaacttagag

SEQ ID NO: 201053 - DNA, 33 bp, Homo sapien
attccttaggatctacacaaccttggatctgga

SEQ ID NO: 201054 - DNA, 33 bp, Homo sapien
attccttaggatctacgcaaccttggatctgga

SEQ ID NO: 201055 - DNA, 33 bp, Homo sapien
ggaaaacttcattgtcacgtaacatagtgagac

SEQ ID NO: 201056 - DNA, 33 bp, Homo sapien
ggaaaacttcattgtcgcgtaacatagtgagac

SEQ ID NO: 201057 - DNA, 33 bp, Homo sapien
atcagacagcaccgatcaggatcagtaagtggc

SEQ ID NO: 201058 - DNA, 33 bp, Homo sapien
atcagacagcaccgatgaggatcagtaagtggc

SEQ ID NO: 201059 - DNA, 33 bp, Homo sapien
attgtaatcatggatgcattccacatggagtct

SEQ ID NO: 201060 - DNA, 33 bp, Homo sapien
attgtaatcatggatgtattccacatggagtct

SEQ ID NO: 201061 - DNA, 33 bp, Homo sapien
agatgggagcaaaagcagaaaaatgagaaagag

SEQ ID NO: 201062 - DNA, 33 bp, Homo sapien
agatgggagcaaaagcggaaaaatgagaaagag

SEQ ID NO: 201063 - DNA, 33 bp, Homo sapien
atccggctgagcaatacgctttcactcccactt

SEQ ID NO: 201064 - DNA, 33 bp, Homo sapien
atccggctgagcaatatgctttcactcccactt

SEQ ID NO: 201065 - DNA, 33 bp, Homo sapien
acacagggccctctgaccatgggctctaaatca

SEQ ID NO: 201066 - DNA, 33 bp, Homo sapien
acacagggccctctgatcatgggctctaaatca

SEQ ID NO: 201067 - DNA, 33 bp, Homo sapien
tccttcttacctctccacagaatcaacttcttt

SEQ ID NO: 201068 - DNA, 33 bp, Homo sapien
tccttcttacctctccgcagaatcaacttcttt

SEQ ID NO: 201069 - DNA, 33 bp, Homo sapien
ctagaaataataataaataatgctcaacaagta

SEQ ID NO: 201070 - DNA, 33 bp, Homo sapien
ctagaaataataataagtaatgctcaacaagta

SEQ ID NO: 201071 - DNA, 33 bp, Homo sapien
gtttccctggatcaaacgagaggaacaaggaaa

SEQ ID NO: 201072 - DNA, 33 bp, Homo sapien
gtttccctggatcaaatgagaggaacaaggaaa

SEQ ID NO: 201073 - DNA, 33 bp, Homo sapien
ggaatgtgacagctgaaaaacatggatcagcgt

SEQ ID NO: 201074 - DNA, 33 bp, Homo sapien
ggaatgtgacagctgagaaacatggatcagcgt

SEQ ID NO: 201075 - DNA, 33 bp, Homo sapien
tataattcagacttgacgccagaccaaactgat

SEQ ID NO: 201076 - DNA, 33 bp, Homo sapien
tataattcagacttgatgccagaccaaactgat

SEQ ID NO: 201077 - DNA, 33 bp, Homo sapien
aatagaatgtacttcaccaagttccaatgagga

SEQ ID NO: 201078 - DNA, 33 bp, Homo sapien
aatagaatgtacttcatcaagttccaatgagga

SEQ ID NO: 201079 - DNA, 33 bp, Homo sapien
taagtttagtgctagaaatggtaagaatgatta

SEQ ID NO: 201080 - DNA, 33 bp, Homo sapien
taagtttagtgctagagatggtaagaatgatta

SEQ ID NO: 201081 - DNA, 33 bp, Homo sapien
attcataaatatgcaacattacacctgtaggaa

SEQ ID NO: 201082 - DNA, 33 bp, Homo sapien
attcataaatatgcaagattacacctgtaggaa

SEQ ID NO: 201083 - DNA, 33 bp, Homo sapien
caaaagaaattcatacagtaaagaaatggaggg

SEQ ID NO: 201084 - DNA, 33 bp, Homo sapien
caaaagaaattcatacggtaaagaaatggaggg

SEQ ID NO: 201085 - DNA, 33 bp, Homo sapien
ccccagatgtagcaccaccactgttctcctcag

SEQ ID NO: 201086 - DNA, 33 bp, Homo sapien
ccccagatgtagcaccgccactgttctcctcag

SEQ ID NO: 201087 - DNA, 33 bp, Homo sapien
gtggcatgagagctgacgctacgactgaatgga

SEQ ID NO: 201088 - DNA, 33 bp, Homo sapien
gtggcatgagagctgatgctacgactgaatgga

SEQ ID NO: 201089 - DNA, 33 bp, Homo sapien
ccttctgccacatttcaacccagtaagaaggcc

SEQ ID NO: 201090 - DNA, 33 bp, Homo sapien
ccttctgccacatttcgacccagtaagaaggcc

SEQ ID NO: 201091 - DNA, 33 bp, Homo sapien
attttctgacactaagcccaatgatttgctctt

SEQ ID NO: 201092 - DNA, 33 bp, Homo sapien
attttctgacactaagtccaatgatttgctctt

SEQ ID NO: 201093 - DNA, 33 bp, Homo sapien
taccaaaatgagttcaatactttatgtccactc

SEQ ID NO: 201094 - DNA, 33 bp, Homo sapien
taccaaaatgagttcactactttatgtccactc

SEQ ID NO: 201095 - DNA, 33 bp, Homo sapien
tcttcatgctgcaacaaggcatcgcccggtgga

SEQ ID NO: 201096 - DNA, 33 bp, Homo sapien
tcttcatgctgcaacacggcatcgcccggtgga

SEQ ID NO: 201097 - DNA, 33 bp, Homo sapien
aggaccagacggtagccgaagcccaggagagcc

SEQ ID NO: 201098 - DNA, 33 bp, Homo sapien
aggaccagacggtagctgaagcccaggagagcc

SEQ ID NO: 201099 - DNA, 33 bp, Homo sapien
tacaccaggaagctacacatgtaagaaagcctg

SEQ ID NO: 201100 - DNA, 33 bp, Homo sapien
tacaccaggaagctacgcatgtaagaaagcctg

SEQ ID NO: 201101 - DNA, 33 bp, Homo sapien
gctgggattattcagacagttaaccctgtttct

SEQ ID NO: 201102 - DNA, 33 bp, Homo sapien
gctgggattattcagagagttaaccctgtttct

SEQ ID NO: 201103 - DNA, 33 bp, Homo sapien
gtcattatctgctttcaacaaatgagtaaactc

SEQ ID NO: 201104 - DNA, 33 bp, Homo sapien
gtcattatctgctttcgacaaatgagtaaactc

SEQ ID NO: 201105 - DNA, 33 bp, Homo sapien
gtcccacttctcaatacggttacattggagctt

SEQ ID NO: 201106 - DNA, 33 bp, Homo sapien
gtcccacttctcaatatggttacattggagctt

SEQ ID NO: 201107 - DNA, 33 bp, Homo sapien
tgcatcatgacctggcagatgacatcacatgat

SEQ ID NO: 201108 - DNA, 33 bp, Homo sapien
tgcatcatgacctggcggatgacatcacatgat

SEQ ID NO: 201109 - DNA, 33 bp, Homo sapien
ccccattctagctggacagttcatatggcctct

SEQ ID NO: 201110 - DNA, 33 bp, Homo sapien
ccccattctagctggatagttcatatggcctct

SEQ ID NO: 201111 - DNA, 33 bp, Homo sapien
cattttctaccaggcaaaaagtattctctcaat

SEQ ID NO: 201112 - DNA, 33 bp, Homo sapien
cattttctaccaggcagaaagtattctctcaat

SEQ ID NO: 201113 - DNA, 33 bp, Homo sapien
tgtgctgttgcaccacacatgcttttgcttggg

SEQ ID NO: 201114 - DNA, 33 bp, Homo sapien
tgtgctgttgcaccacgcatgcttttgcttggg

SEQ ID NO: 201115 - DNA, 33 bp, Homo sapien
tcagagaaggtaagggccatgtctttcttggtt

SEQ ID NO: 201116 - DNA, 33 bp, Homo sapien
tcagagaaggtaaggggcatgtctttcttggtt

SEQ ID NO: 201117 - DNA, 33 bp, Homo sapien
caaggagaatggcaagacacttcaggcacaaag

SEQ ID NO: 201118 - DNA, 33 bp, Homo sapien
caaggagaatggcaaggcacttcaggcacaaag

SEQ ID NO: 201119 - DNA, 33 bp, Homo sapien
aattgcagataaacaacggcattttcaaaagtg

SEQ ID NO: 201120 - DNA, 33 bp, Homo sapien
aattgcagataaacaatggcattttcaaaagtg

SEQ ID NO: 201121 - DNA, 33 bp, Homo sapien
tgaaaacacagtttgcaaccatgatagtaacta

SEQ ID NO: 201122 - DNA, 33 bp, Homo sapien
tgaaaacacagtttgccaccatgatagtaacta

SEQ ID NO: 201123 - DNA, 33 bp, Homo sapien
ccactgtggtgtaataacagctactctcttgaa

SEQ ID NO: 201124 - DNA, 33 bp, Homo sapien
ccactgtggtgtaatagcagctactctcttgaa

SEQ ID NO: 201125 - DNA, 33 bp, Homo sapien
atttgatgctcttagacgatttttctcatggga

SEQ ID NO: 201126 - DNA, 33 bp, Homo sapien
atttgatgctcttagatgatttttctcatggga

SEQ ID NO: 201127 - DNA, 33 bp, Homo sapien
ttacctttttgtagtcagacagacattgaagaa

SEQ ID NO: 201128 - DNA, 33 bp, Homo sapien
ttacctttttgtagtcggacagacattgaagaa

SEQ ID NO: 201129 - DNA, 33 bp, Homo sapien
gccaaactgggactgacagaaagatccagggct

SEQ ID NO: 201130 - DNA, 33 bp, Homo sapien
gccaaactgggactgatagaaagatccagggct

SEQ ID NO: 201131 - DNA, 33 bp, Homo sapien
gggcaaaaaaggaagcagaaatttcaatcctag

SEQ ID NO: 201132 - DNA, 33 bp, Homo sapien
gggcaaaaaaggaagcggaaatttcaatcctag

SEQ ID NO: 201133 - DNA, 33 bp, Homo sapien
gctatgtgacctcagaaaagttcttttattttc

SEQ ID NO: 201134 - DNA, 33 bp, Homo sapien
gctatgtgacctcagacaagttcttttattttc

SEQ ID NO: 201135 - DNA, 33 bp, Homo sapien
tgaactcttgggctcaacaacatctctagctgc

SEQ ID NO: 201136 - DNA, 33 bp, Homo sapien
tgaactcttgggctcagcaacatctctagctgc

SEQ ID NO: 201137 - DNA, 33 bp, Homo sapien
agattccttgacatgacgactcaccttccaaag

SEQ ID NO: 201138 - DNA, 33 bp, Homo sapien
agattccttgacatgatgactcaccttccaaag

SEQ ID NO: 201139 - DNA, 33 bp, Homo sapien
aacttggtccttccaaatgagaactttttatgg

SEQ ID NO: 201140 - DNA, 33 bp, Homo sapien
aacttggtccttccaattgagaactttttatgg

SEQ ID NO: 201141 - DNA, 33 bp, Homo sapien
taccttcctacccctcaatgtgaatctgacttc

SEQ ID NO: 201142 - DNA, 33 bp, Homo sapien
taccttcctacccctcgatgtgaatctgacttc

SEQ ID NO: 201143 - DNA, 33 bp, Homo sapien
aggagagcttacggctccaaagccaagggggac

SEQ ID NO: 201144 - DNA, 33 bp, Homo sapien
aggagagcttacggcttcaaagccaagggggac

SEQ ID NO: 201145 - DNA, 33 bp, Homo sapien
ataagggcgacttgaaatcacacgctgcagtac

SEQ ID NO: 201146 - DNA, 33 bp, Homo sapien
ataagggcgacttgaactcacacgctgcagtac

SEQ ID NO: 201147 - DNA, 33 bp, Homo sapien
tagtgtgtgtgataaacgcttagtgaagatgga

SEQ ID NO: 201148 - DNA, 33 bp, Homo sapien
tagtgtgtgtgataaatgcttagtgaagatgga

SEQ ID NO: 201149 - DNA, 33 bp, Homo sapien
ctcttcgtgtcttctaaccacaaacttaatgcc

SEQ ID NO: 201150 - DNA, 33 bp, Homo sapien
ctcttcgtgtcttctacccacaaacttaatgcc

SEQ ID NO: 201151 - DNA, 33 bp, Homo sapien
ttaagccatacctgaacgcctgacacactgaaa

SEQ ID NO: 201152 - DNA, 33 bp, Homo sapien
ttaagccatacctgaatgcctgacacactgaaa

SEQ ID NO: 201153 - DNA, 33 bp, Homo sapien
ctgaaaaggctagataatacaagtttgttgctt

SEQ ID NO: 201154 - DNA, 33 bp, Homo sapien
ctgaaaaggctagatattacaagtttgttgctt

SEQ ID NO: 201155 - DNA, 33 bp, Homo sapien
aaaaaactgagcatatgagttttctcttgctgt

SEQ ID NO: 201156 - DNA, 33 bp, Homo sapien
aaaaaactgagcatattagttttctcttgctgt

SEQ ID NO: 201157 - DNA, 33 bp, Homo sapien
tgttgggacggggcaccgctatgtggtccagat

SEQ ID NO: 201158 - DNA, 33 bp, Homo sapien
tgttgggacggggcactgctatgtggtccagat

SEQ ID NO: 201159 - DNA, 33 bp, Homo sapien
gccagacgcgaaaggtcacatattatacgattc

SEQ ID NO: 201160 - DNA, 33 bp, Homo sapien
gccagacgcgaaaggttacatattatacgattc

SEQ ID NO: 201161 - DNA, 33 bp, Homo sapien
actttatcaaccacaccgcttagagacaggact

SEQ ID NO: 201162 - DNA, 33 bp, Homo sapien
actttatcaaccacactgcttagagacaggact

SEQ ID NO: 201163 - DNA, 33 bp, Homo sapien
gtggttgataaagtcgaccagggattactgtga

SEQ ID NO: 201164 - DNA, 33 bp, Homo sapien
gtggttgataaagtcggccagggattactgtga

SEQ ID NO: 201165 - DNA, 33 bp, Homo sapien
tttctcaaattctaaaagatgtgatagtagtta

SEQ ID NO: 201166 - DNA, 33 bp, Homo sapien
tttctcaaattctaaatgatgtgatagtagtta

SEQ ID NO: 201167 - DNA, 33 bp, Homo sapien
taaagtatagtagctaaaggagtgccgggaaca

SEQ ID NO: 201168 - DNA, 33 bp, Homo sapien
taaagtatagtagctacaggagtgccgggaaca

SEQ ID NO: 201169 - DNA, 33 bp, Homo sapien
agtacagaggtaaaaagaaagactttggagcca

SEQ ID NO: 201170 - DNA, 33 bp, Homo sapien
agtacagaggtaaaaataaagactttggagcca

SEQ ID NO: 201171 - DNA, 33 bp, Homo sapien
ccaatactgtgtgggaaatagttcctccacatc

SEQ ID NO: 201172 - DNA, 33 bp, Homo sapien
ccaatactgtgtgggagatagttcctccacatc

SEQ ID NO: 201173 - DNA, 33 bp, Homo sapien
ttttagttctcttacaatctgcccctgcaatat

SEQ ID NO: 201174 - DNA, 33 bp, Homo sapien
ttttagttctcttacagtctgcccctgcaatat

SEQ ID NO: 201175 - DNA, 33 bp, Homo sapien
taaatccgaggcaatacaggttctcaactccca

SEQ ID NO: 201176 - DNA, 33 bp, Homo sapien
taaatccgaggcaatagaggttctcaactccca

SEQ ID NO: 201177 - DNA, 33 bp, Homo sapien
caccggcctagtgtcacgctccaagagaccaca

SEQ ID NO: 201178 - DNA, 33 bp, Homo sapien
caccggcctagtgtcatgctccaagagaccaca

SEQ ID NO: 201179 - DNA, 33 bp, Homo sapien
cctcaggttttgatcccagaccaccttttcttc

SEQ ID NO: 201180 - DNA, 33 bp, Homo sapien
cctcaggttttgatcctagaccaccttttcttc

SEQ ID NO: 201181 - DNA, 33 bp, Homo sapien
tctagagacgcatgaccggcagtcatcatcttc

SEQ ID NO: 201182 - DNA, 33 bp, Homo sapien
tctagagacgcatgacgggcagtcatcatcttc

SEQ ID NO: 201183 - DNA, 33 bp, Homo sapien
tgaaatggtcctgaaaattaggtatcatgtttt

SEQ ID NO: 201184 - DNA, 33 bp, Homo sapien
tgaaatggtcctgaaagttaggtatcatgtttt

SEQ ID NO: 201185 - DNA, 33 bp, Homo sapien
tcctctgccctcttcaatatttctattttgtgg

SEQ ID NO: 201186 - DNA, 33 bp, Homo sapien
tcctctgccctcttcattatttctattttgtgg

SEQ ID NO: 201187 - DNA, 33 bp, Homo sapien
tatttctattttgtggcccaagacagtggctcc

SEQ ID NO: 201188 - DNA, 33 bp, Homo sapien
tatttctattttgtggtccaagacagtggctcc

SEQ ID NO: 201189 - DNA, 33 bp, Homo sapien
attccaagctaccctcaaaggactaaggcttgc

SEQ ID NO: 201190 - DNA, 33 bp, Homo sapien
attccaagctaccctcgaaggactaaggcttgc

SEQ ID NO: 201191 - DNA, 33 bp, Homo sapien
gttcagaccataacaaacagagtgaaataaggg

SEQ ID NO: 201192 - DNA, 33 bp, Homo sapien
gttcagaccataacaagcagagtgaaataaggg

SEQ ID NO: 201193 - DNA, 33 bp, Homo sapien
aaatatcctgaaaaccaaaagattataccaata

SEQ ID NO: 201194 - DNA, 33 bp, Homo sapien
aaatatcctgaaaaccgaaagattataccaata

SEQ ID NO: 201195 - DNA, 33 bp, Homo sapien
tcctattacctagtcaaattctgaggaaatggg

SEQ ID NO: 201196 - DNA, 33 bp, Homo sapien
tcctattacctagtcagattctgaggaaatggg

SEQ ID NO: 201197 - DNA, 33 bp, Homo sapien
caatacatcaggaagacacgatgttattagcac

SEQ ID NO: 201198 - DNA, 33 bp, Homo sapien
caatacatcaggaagatacgatgttattagcac

SEQ ID NO: 201199 - DNA, 33 bp, Homo sapien
ctacaacatatatctccgacttttactccttct

SEQ ID NO: 201200 - DNA, 33 bp, Homo sapien
ctacaacatatatctctgacttttactccttct

SEQ ID NO: 201201 - DNA, 33 bp, Homo sapien
cgcaaagggagttggacggaaatctcagatggt

SEQ ID NO: 201202 - DNA, 33 bp, Homo sapien
cgcaaagggagttggatggaaatctcagatggt

SEQ ID NO: 201203 - DNA, 33 bp, Homo sapien
gaggaaacccaggaccaagaaagtgtggggctt

SEQ ID NO: 201204 - DNA, 33 bp, Homo sapien
gaggaaacccaggaccgagaaagtgtggggctt

SEQ ID NO: 201205 - DNA, 33 bp, Homo sapien
taacggacagaagcccaaaaatggatgaggctc

SEQ ID NO: 201206 - DNA, 33 bp, Homo sapien
taacggacagaagcccgaaaatggatgaggctc

SEQ ID NO: 201207 - DNA, 33 bp, Homo sapien
attaatgaggggaaagccagggcgtaactcagg

SEQ ID NO: 201208 - DNA, 33 bp, Homo sapien
attaatgaggggaaagtcagggcgtaactcagg

SEQ ID NO: 201209 - DNA, 33 bp, Homo sapien
gaactctgaggttttgcaatggatgtcattaga

SEQ ID NO: 201210 - DNA, 33 bp, Homo sapien
gaactctgaggttttgtaatggatgtcattaga

SEQ ID NO: 201211 - DNA, 33 bp, Homo sapien
cacagacacaagagaacagcctttacacatgac

SEQ ID NO: 201212 - DNA, 33 bp, Homo sapien
cacagacacaagagaatagcctttacacatgac

SEQ ID NO: 201213 - DNA, 33 bp, Homo sapien
ccagaatcctctccaacatgggccaatcgcctg

SEQ ID NO: 201214 - DNA, 33 bp, Homo sapien
ccagaatcctctccaatatgggccaatcgcctg

SEQ ID NO: 201215 - DNA, 33 bp, Homo sapien
cactgactgtgcgatacagaggcgcatgcaagc

SEQ ID NO: 201216 - DNA, 33 bp, Homo sapien
cactgactgtgcgatatagaggcgcatgcaagc

SEQ ID NO: 201217 - DNA, 33 bp, Homo sapien
agagaaaaatggacctaacagaagtcatgatag

SEQ ID NO: 201218 - DNA, 33 bp, Homo sapien
agagaaaaatggacctcacagaagtcatgatag

SEQ ID NO: 201219 - DNA, 33 bp, Homo sapien
cctgaagatcctagccaacggattaataaaaac

SEQ ID NO: 201220 - DNA, 33 bp, Homo sapien
cctgaagatcctagcccacggattaataaaaac

SEQ ID NO: 201221 - DNA, 33 bp, Homo sapien
gagtctcgccctcataatacctcctacttagcc

SEQ ID NO: 201222 - DNA, 33 bp, Homo sapien
gagtctcgccctcatagtacctcctacttagcc

SEQ ID NO: 201223 - DNA, 33 bp, Homo sapien
ctctgtgcctctttcacggactctttgcttcct

SEQ ID NO: 201224 - DNA, 33 bp, Homo sapien
ctctgtgcctctttcatggactctttgcttcct

SEQ ID NO: 201225 - DNA, 33 bp, Homo sapien
tgactgtaagatcttcaactaaaaacaaaattc

SEQ ID NO: 201226 - DNA, 33 bp, Homo sapien
tgactgtaagatcttctactaaaaacaaaattc

SEQ ID NO: 201227 - DNA, 33 bp, Homo sapien
gcgactagctgtgtacgaggctctgggaacaca

SEQ ID NO: 201228 - DNA, 33 bp, Homo sapien
gcgactagctgtgtactaggctctgggaacaca

SEQ ID NO: 201229 - DNA, 33 bp, Homo sapien
gtatattgatgagcccacagagtctgactgtac

SEQ ID NO: 201230 - DNA, 33 bp, Homo sapien
gtatattgatgagcccgcagagtctgactgtac

SEQ ID NO: 201231 - DNA, 33 bp, Homo sapien
ccgtagattattactccatcatttcctccattg

SEQ ID NO: 201232 - DNA, 33 bp, Homo sapien
ccgtagattattactctatcatttcctccattg

SEQ ID NO: 201233 - DNA, 33 bp, Homo sapien
ctggggttgccatggacacatatttcctagtgg

SEQ ID NO: 201234 - DNA, 33 bp, Homo sapien
ctggggttgccatggagacatatttcctagtgg

SEQ ID NO: 201235 - DNA, 33 bp, Homo sapien
accataaagtggagaccgaagccatcatatttg

SEQ ID NO: 201236 - DNA, 33 bp, Homo sapien
accataaagtggagactgaagccatcatatttg

SEQ ID NO: 201237 - DNA, 33 bp, Homo sapien
ttgggaaagtaagttgcaacacaatcatggagg

SEQ ID NO: 201238 - DNA, 33 bp, Homo sapien
ttgggaaagtaagttggaacacaatcatggagg

SEQ ID NO: 201239 - DNA, 33 bp, Homo sapien
aagcccaagattcaaaacatagaaaaatagagt

SEQ ID NO: 201240 - DNA, 33 bp, Homo sapien
aagcccaagattcaaagcatagaaaaatagagt

SEQ ID NO: 201241 - DNA, 33 bp, Homo sapien
ccaactgaaaatatcaagtgattaaaaattaat

SEQ ID NO: 201242 - DNA, 33 bp, Homo sapien
ccaactgaaaatatcaggtgattaaaaattaat

SEQ ID NO: 201243 - DNA, 33 bp, Homo sapien
tcacatagtatacagacgatggtcaagagcact

SEQ ID NO: 201244 - DNA, 33 bp, Homo sapien
tcacatagtatacagatgatggtcaagagcact

SEQ ID NO: 201245 - DNA, 33 bp, Homo sapien
ggaagcatctccccccacaggaggctcggccag

SEQ ID NO: 201246 - DNA, 33 bp, Homo sapien
ggaagcatctccccccgcaggaggctcggccag

SEQ ID NO: 201247 - DNA, 33 bp, Homo sapien
tcgaaactttgtgaacaatgtccacaccatgct

SEQ ID NO: 201248 - DNA, 33 bp, Homo sapien
tcgaaactttgtgaacgatgtccacaccatgct

SEQ ID NO: 201249 - DNA, 33 bp, Homo sapien
ctaacatacatatgcaagatgcttcactcaaca

SEQ ID NO: 201250 - DNA, 33 bp, Homo sapien
ctaacatacatatgcaggatgcttcactcaaca

SEQ ID NO: 201251 - DNA, 33 bp, Homo sapien
tgagttaggtgcaagaaaccaatcttcaggaag

SEQ ID NO: 201252 - DNA, 33 bp, Homo sapien
tgagttaggtgcaagagaccaatcttcaggaag

SEQ ID NO: 201253 - DNA, 33 bp, Homo sapien
atccagaacaggatacactttgggatcaaccat

SEQ ID NO: 201254 - DNA, 33 bp, Homo sapien
atccagaacaggatacgctttgggatcaaccat

SEQ ID NO: 201255 - DNA, 33 bp, Homo sapien
gctttcaggggaacccaagctaagaaagttagt

SEQ ID NO: 201256 - DNA, 33 bp, Homo sapien
gctttcaggggaacccgagctaagaaagttagt

SEQ ID NO: 201257 - DNA, 33 bp, Homo sapien
ggtcagagagcacttacagccaggaagtgtttg

SEQ ID NO: 201258 - DNA, 33 bp, Homo sapien
ggtcagagagcacttatagccaggaagtgtttg

SEQ ID NO: 201259 - DNA, 33 bp, Homo sapien
cagagagcccttaaacaccggatcacacctggg

SEQ ID NO: 201260 - DNA, 33 bp, Homo sapien
cagagagcccttaaacgccggatcacacctggg

SEQ ID NO: 201261 - DNA, 33 bp, Homo sapien
ggtagaatttgaactgaatttggatgtttcggt

SEQ ID NO: 201262 - DNA, 33 bp, Homo sapien
ggtagaatttgaactggatttggatgtttcggt

SEQ ID NO: 201263 - DNA, 33 bp, Homo sapien
ttgacagcagtgaaaaacaacagtttaacagca

SEQ ID NO: 201264 - DNA, 33 bp, Homo sapien
ttgacagcagtgaaaaccaacagtttaacagca

SEQ ID NO: 201265 - DNA, 33 bp, Homo sapien
gatgctggaccaaccacgatagatgcttccttt

SEQ ID NO: 201266 - DNA, 33 bp, Homo sapien
gatgctggaccaaccatgatagatgcttccttt

SEQ ID NO: 201267 - DNA, 33 bp, Homo sapien
tgttacatcggactacactctaggaagaagtat

SEQ ID NO: 201268 - DNA, 33 bp, Homo sapien
tgttacatcggactacgctctaggaagaagtat

SEQ ID NO: 201269 - DNA, 33 bp, Homo sapien
acctttatagttcaaacgctcttcggttctgtg

SEQ ID NO: 201270 - DNA, 33 bp, Homo sapien
acctttatagttcaaatgctcttcggttctgtg

SEQ ID NO: 201271 - DNA, 33 bp, Homo sapien
gttctgtgaaaagaagccttacatcatcccatg

SEQ ID NO: 201272 - DNA, 33 bp, Homo sapien
gttctgtgaaaagaagtcttacatcatcccatg

SEQ ID NO: 201273 - DNA, 33 bp, Homo sapien
ttcatagaaacactgaataaaatagtggctaac

SEQ ID NO: 201274 - DNA, 33 bp, Homo sapien
ttcatagaaacactgagtaaaatagtggctaac

SEQ ID NO: 201275 - DNA, 33 bp, Homo sapien
atttgtattcagagaagtctaagacaaatggtc

SEQ ID NO: 201276 - DNA, 33 bp, Homo sapien
atttgtattcagagaattctaagacaaatggtc

SEQ ID NO: 201277 - DNA, 33 bp, Homo sapien
taggcaggaggttagacgagaaacttccaaaaa

SEQ ID NO: 201278 - DNA, 33 bp, Homo sapien
taggcaggaggttagatgagaaacttccaaaaa

SEQ ID NO: 201279 - DNA, 33 bp, Homo sapien
cccatgagagtaaagacgtagctagataaacac

SEQ ID NO: 201280 - DNA, 33 bp, Homo sapien
cccatgagagtaaagatgtagctagataaacac

SEQ ID NO: 201281 - DNA, 33 bp, Homo sapien
taaagtgttgtagtgactaagaaggtaagtttg

SEQ ID NO: 201282 - DNA, 33 bp, Homo sapien
taaagtgttgtagtgattaagaaggtaagtttg

SEQ ID NO: 201283 - DNA, 33 bp, Homo sapien
tctacctgtggctctccaccaattgttactctc

SEQ ID NO: 201284 - DNA, 33 bp, Homo sapien
tctacctgtggctctctaccaattgttactctc

SEQ ID NO: 201285 - DNA, 33 bp, Homo sapien
ttgcagtctgacaaaacacctttgccttcatgc

SEQ ID NO: 201286 - DNA, 33 bp, Homo sapien
ttgcagtctgacaaaagacctttgccttcatgc

SEQ ID NO: 201287 - DNA, 33 bp, Homo sapien; identical to SEQ ID NO: 201285

SEQ ID NO: 201288 - DNA, 33 bp, Homo sapien; identical to SEQ ID NO: 201286

SEQ ID NO: 201289 - DNA, 33 bp, Homo sapien
ctgtgtgtcccagttgcatgcacgtttatttcc

SEQ ID NO: 201290 - DNA, 33 bp, Homo sapien
ctgtgtgtcccagttgtatgcacgtttatttcc

SEQ ID NO: 201291 - DNA, 33 bp, Homo sapien
gtgccctcttcaagtacgctacagctaagaagg

SEQ ID NO: 201292 - DNA, 33 bp, Homo sapien
gtgccctcttcaagtaggctacagctaagaagg

SEQ ID NO: 201293 - DNA, 33 bp, Homo sapien
ctcatgtgggggcctgaatagagttcttccaaa

SEQ ID NO: 201294 - DNA, 33 bp, Homo sapien
ctcatgtgggggcctgcatagagttcttccaaa

SEQ ID NO: 201295 - DNA, 33 bp, Homo sapien
gatgcctgatgaaaggaatccagtagcaagaat

SEQ ID NO: 201296 - DNA, 33 bp, Homo sapien
gatgcctgatgaaagggatccagtagcaagaat

SEQ ID NO: 201297 - DNA, 33 bp, Homo sapien
gcttctatcatcctaaatacaccttcagtaaat

SEQ ID NO: 201298 - DNA, 33 bp, Homo sapien
gcttctatcatcctaagtacaccttcagtaaat

SEQ ID NO: 201299 - DNA, 33 bp, Homo sapien
aattactgccttagacccagggacttttggata

SEQ ID NO: 201300 - DNA, 33 bp, Homo sapien
aattactgccttagactcagggacttttggata

SEQ ID NO: 201301 - DNA, 33 bp, Homo sapien
ggttaaaggttcttgaccccaacatttatttct

SEQ ID NO: 201302 - DNA, 33 bp, Homo sapien
ggttaaaggttcttgatcccaacatttatttct

SEQ ID NO: 201303 - DNA, 33 bp, Homo sapien
acagatgctgtagtatcaactgattacatggtg

SEQ ID NO: 201304 - DNA, 33 bp, Homo sapien
acagatgctgtagtattaactgattacatggtg

SEQ ID NO: 201305 - DNA, 33 bp, Homo sapien
gcacactagatttgtgcatagaaaactttcaga

SEQ ID NO: 201306 - DNA, 33 bp, Homo sapien
gcacactagatttgtgtatagaaaactttcaga

SEQ ID NO: 201307 - DNA, 33 bp, Homo sapien
ggtctggtgtaaggtccagagcttgccatcaag

SEQ ID NO: 201308 - DNA, 33 bp, Homo sapien
ggtctggtgtaaggtctagagcttgccatcaag

SEQ ID NO: 201309 - DNA, 33 bp, Homo sapien
ccagaacctttccccccggctttctgccaagcc

SEQ ID NO: 201310 - DNA, 33 bp, Homo sapien
ccagaacctttccccctggctttctgccaagcc

SEQ ID NO: 201311 - DNA, 33 bp, Homo sapien
ggatttctcagttaaaaagggagtgtgtgtgtg

SEQ ID NO: 201312 - DNA, 33 bp, Homo sapien
ggatttctcagttaaagagggagtgtgtgtgtg

SEQ ID NO: 201313 - DNA, 33 bp, Homo sapien
cccagagcaatgccacaataaaaataggaacca

SEQ ID NO: 201314 - DNA, 33 bp, Homo sapien
cccagagcaatgccacgataaaaataggaacca

SEQ ID NO: 201315 - DNA, 33 bp, Homo sapien
tcaaatctggtgactacagcatccctgatggtc

SEQ ID NO: 201316 - DNA, 33 bp, Homo sapien
tcaaatctggtgactatagcatccctgatggtc

SEQ ID NO: 201317 - DNA, 33 bp, Homo sapien
ggctgcagattccctgaacactattcagcatca

SEQ ID NO: 201318 - DNA, 33 bp, Homo sapien
ggctgcagattccctggacactattcagcatca

SEQ ID NO: 201319 - DNA, 33 bp, Homo sapien
tggatcatggagccaacagagtggactaagaag

SEQ ID NO: 201320 - DNA, 33 bp, Homo sapien
tggatcatggagccaagagagtggactaagaag

SEQ ID NO: 201321 - DNA, 33 bp, Homo sapien
gactaagaagccacgaaaaaggcatgaaggaaa

SEQ ID NO: 201322 - DNA, 33 bp, Homo sapien
gactaagaagccacgagaaaggcatgaaggaaa

SEQ ID NO: 201323 - DNA, 33 bp, Homo sapien
tgtgttggggcacagaaatgagtagtacatagt

SEQ ID NO: 201324 - DNA, 33 bp, Homo sapien
tgtgttggggcacagagatgagtagtacatagt

SEQ ID NO: 201325 - DNA, 33 bp, Homo sapien
tgagtgaggccgagaccgaaagcaagccccaga

SEQ ID NO: 201326 - DNA, 33 bp, Homo sapien
tgagtgaggccgagactgaaagcaagccccaga

SEQ ID NO: 201327 - DNA, 33 bp, Homo sapien
gttgggaaacactgacacattggcggaagagta

SEQ ID NO: 201328 - DNA, 33 bp, Homo sapien
gttgggaaacactgacgcattggcggaagagta

SEQ ID NO: 201329 - DNA, 33 bp, Homo sapien
gtctactaaattaagcagaagagttctacagca

SEQ ID NO: 201330 - DNA, 33 bp, Homo sapien
gtctactaaattaagcggaagagttctacagca

SEQ ID NO: 201331 - DNA, 33 bp, Homo sapien
aaataacagtaggaaccgctacctcagaggcgg

SEQ ID NO: 201332 - DNA, 33 bp, Homo sapien
aaataacagtaggaactgctacctcagaggcgg

SEQ ID NO: 201333 - DNA, 33 bp, Homo sapien
tagtggattaatgtgaccgcctattgtctttgg

SEQ ID NO: 201334 - DNA, 33 bp, Homo sapien
tagtggattaatgtgatcgcctattgtctttgg

SEQ ID NO: 201335 - DNA, 33 bp, Homo sapien
ataagatgtttgacaaggcttttagagaagacg

SEQ ID NO: 201336 - DNA, 33 bp, Homo sapien
ataagatgtttgacaatgcttttagagaagacg

SEQ ID NO: 201337 - DNA, 33 bp, Homo sapien
atgaacaaagcaataacaagaatcaagatgcaa

SEQ ID NO: 201338 - DNA, 33 bp, Homo sapien
atgaacaaagcaataataagaatcaagatgcaa

SEQ ID NO: 201339 - DNA, 33 bp, Homo sapien
caatcatattggaggaactaatttttcataata

SEQ ID NO: 201340 - DNA, 33 bp, Homo sapien
caatcatattggaggacctaatttttcataata

SEQ ID NO: 201341 - DNA, 33 bp, Homo sapien
aaatcatttttggcagaacttatcttgtgagac

SEQ ID NO: 201342 - DNA, 33 bp, Homo sapien
aaatcatttttggcaggacttatcttgtgagac

SEQ ID NO: 201343 - DNA, 33 bp, Homo sapien
cattatcttctgagtacagtttttaccttgctt

SEQ ID NO: 201344 - DNA, 33 bp, Homo sapien
cattatcttctgagtatagtttttaccttgctt

SEQ ID NO: 201345 - DNA, 33 bp, Homo sapien
cctatagaaataataaagcagagtctcctaggc

SEQ ID NO: 201346 - DNA, 33 bp, Homo sapien
cctatagaaataataaggcagagtctcctaggc

SEQ ID NO: 201347 - DNA, 33 bp, Homo sapien
tatagctgagaagcacaaagaattctggcccag

SEQ ID NO: 201348 - DNA, 33 bp, Homo sapien
tatagctgagaagcacgaagaattctggcccag

SEQ ID NO: 201349 - DNA, 33 bp, Homo sapien
tgctccaggccataacaatttcacaggctacac

SEQ ID NO: 201350 - DNA, 33 bp, Homo sapien
tgctccaggccataacgatttcacaggctacac

SEQ ID NO: 201351 - DNA, 33 bp, Homo sapien
ggttgccagaggagaaaaagcacctagcacatt

SEQ ID NO: 201352 - DNA, 33 bp, Homo sapien
ggttgccagaggagaacaagcacctagcacatt

SEQ ID NO: 201353 - DNA, 33 bp, Homo sapien
gtgaccttgggcaagcgattcaacctctttgtg

SEQ ID NO: 201354 - DNA, 33 bp, Homo sapien
gtgaccttgggcaagctattcaacctctttgtg

SEQ ID NO: 201355 - DNA, 33 bp, Homo sapien
gacttgaactccagaacatggattgtggagtag

SEQ ID NO: 201356 - DNA, 33 bp, Homo sapien
gacttgaactccagaatatggattgtggagtag

SEQ ID NO: 201357 - DNA, 33 bp, Homo sapien
aaactgatatgggaaacgaggggatagacatga

SEQ ID NO: 201358 - DNA, 33 bp, Homo sapien
aaactgatatgggaaatgaggggatagacatga

SEQ ID NO: 201359 - DNA, 33 bp, Homo sapien
atcacttgtcaaatcaaaggcagagccaaggct

SEQ ID NO: 201360 - DNA, 33 bp, Homo sapien
atcacttgtcaaatcagaggcagagccaaggct

SEQ ID NO: 201361 - DNA, 33 bp, Homo sapien
gaagatataatcagtgcacctatttgtcctcct

SEQ ID NO: 201362 - DNA, 33 bp, Homo sapien
gaagatataatcagtgtacctatttgtcctcct

SEQ ID NO: 201363 - DNA, 33 bp, Homo sapien
tctatcggccttgttacctggcattcagtgctt

SEQ ID NO: 201364 - DNA, 33 bp, Homo sapien
tctatcggccttgttatctggcattcagtgctt

SEQ ID NO: 201365 - DNA, 33 bp, Homo sapien
attaaaacatctagaaaacaaagggataattcc

SEQ ID NO: 201366 - DNA, 33 bp, Homo sapien
attaaaacatctagaagacaaagggataattcc

SEQ ID NO: 201367 - DNA, 33 bp, Homo sapien
attaacttaggacctcagaagcaaattgagact

SEQ ID NO: 201368 - DNA, 33 bp, Homo sapien
attaacttaggacctcggaagcaaattgagact

SEQ ID NO: 201369 - DNA, 33 bp, Homo sapien
agtgtgtccgccatcacccaaatctgaatacat

SEQ ID NO: 201370 - DNA, 33 bp, Homo sapien
agtgtgtccgccatcatccaaatctgaatacat

SEQ ID NO: 201371 - DNA, 33 bp, Homo sapien
ccagttaaagacaccaaagaacttgtgcatagg

SEQ ID NO: 201372 - DNA, 33 bp, Homo sapien
ccagttaaagacaccagagaacttgtgcatagg

SEQ ID NO: 201373 - DNA, 33 bp, Homo sapien
tgtaagtgggaaagaaaacttcgataggctgct

SEQ ID NO: 201374 - DNA, 33 bp, Homo sapien
tgtaagtgggaaagaagacttcgataggctgct

SEQ ID NO: 201375 - DNA, 33 bp, Homo sapien
gtcacttcaaggaaaacaaccaacagtgtttgt

SEQ ID NO: 201376 - DNA, 33 bp, Homo sapien
gtcacttcaaggaaaataaccaacagtgtttgt

SEQ ID NO: 201377 - DNA, 33 bp, Homo sapien
tgagaaactgtcaagcagacacagatactgatt

SEQ ID NO: 201378 - DNA, 33 bp, Homo sapien
tgagaaactgtcaagcggacacagatactgatt

SEQ ID NO: 201379 - DNA, 33 bp, Homo sapien
ttacatcttccaaaacaatttggttagatgagt

SEQ ID NO: 201380 - DNA, 33 bp, Homo sapien
ttacatcttccaaaacgatttggttagatgagt

SEQ ID NO: 201381 - DNA, 33 bp, Homo sapien
ttcatctctcaagatccagctctagactttcaa

SEQ ID NO: 201382 - DNA, 33 bp, Homo sapien
ttcatctctcaagatcgagctctagactttcaa

SEQ ID NO: 201383 - DNA, 33 bp, Homo sapien
ttctccgggtgctgcacgtccattgacagtaat

SEQ ID NO: 201384 - DNA, 33 bp, Homo sapien
ttctccgggtgctgcatgtccattgacagtaat

SEQ ID NO: 201385 - DNA, 33 bp, Homo sapien
acacatggctcagagaatcagccctgagatgtt

SEQ ID NO: 201386 - DNA, 33 bp, Homo sapien
acacatggctcagagattcagccctgagatgtt

SEQ ID NO: 201387 - DNA, 33 bp, Homo sapien
ctggagaataacacacccaaacactggaggaca

SEQ ID NO: 201388 - DNA, 33 bp, Homo sapien
ctggagaataacacactcaaacactggaggaca

SEQ ID NO: 201389 - DNA, 33 bp, Homo sapien
gaatacaaatgcttgccgcaaaaccgagcatca

SEQ ID NO: 201390 - DNA, 33 bp, Homo sapien
gaatacaaatgcttgctgcaaaaccgagcatca

SEQ ID NO: 201391 - DNA, 33 bp, Homo sapien
tttatggcccataagaagtcagtggaagtcatt

SEQ ID NO: 201392 - DNA, 33 bp, Homo sapien
tttatggcccataagatgtcagtggaagtcatt

SEQ ID NO: 201393 - DNA, 33 bp, Homo sapien
gacttgacagaactacagcacataagaattaac

SEQ ID NO: 201394 - DNA, 33 bp, Homo sapien
gacttgacagaactactgcacataagaattaac

SEQ ID NO: 201395 - DNA, 33 bp, Homo sapien
tgcctccctgtgtcagacgattacagagaagaa

SEQ ID NO: 201396 - DNA, 33 bp, Homo sapien
tgcctccctgtgtcaggcgattacagagaagaa

SEQ ID NO: 201397 - DNA, 33 bp, Homo sapien
ttgttttctccttttacagcgatgttgctggaa

SEQ ID NO: 201398 - DNA, 33 bp, Homo sapien
ttgttttctccttttagagcgatgttgctggaa

SEQ ID NO: 201399 - DNA, 33 bp, Homo sapien
ttttatgcccagggaaagtttttgctcaagctt

SEQ ID NO: 201400 - DNA, 33 bp, Homo sapien
ttttatgcccagggaaggtttttgctcaagctt

SEQ ID NO: 201401 - DNA, 33 bp, Homo sapien
tattacataaacggccacatcaacatatctgct

SEQ ID NO: 201402 - DNA, 33 bp, Homo sapien
tattacataaacggccgcatcaacatatctgct

SEQ ID NO: 201403 - DNA, 33 bp, Homo sapien
ggactccttcatcagacgtaggtgagcaatagt

SEQ ID NO: 201404 - DNA, 33 bp, Homo sapien
ggactccttcatcagatgtaggtgagcaatagt

SEQ ID NO: 201405 - DNA, 33 bp, Homo sapien
actctgtagtgcgtcaataaccctcgttttcct

SEQ ID NO: 201406 - DNA, 33 bp, Homo sapien
actctgtagtgcgtcagtaaccctcgttttcct

SEQ ID NO: 201407 - DNA, 33 bp, Homo sapien
gggactaggaggtctaaggtagcggcatgtgga

SEQ ID NO: 201408 - DNA, 33 bp, Homo sapien
gggactaggaggtctagggtagcggcatgtgga

SEQ ID NO: 201409 - DNA, 33 bp, Homo sapien
aggcattttaaggaaaccgatcttggtgtgttc

SEQ ID NO: 201410 - DNA, 33 bp, Homo sapien
aggcattttaaggaaatcgatcttggtgtgttc

SEQ ID NO: 201411 - DNA, 33 bp, Homo sapien
tgtcttgtatctcttgcaggatgtattagtcag

SEQ ID NO: 201412 - DNA, 33 bp, Homo sapien
tgtcttgtatctcttgtaggatgtattagtcag

SEQ ID NO: 201413 - DNA, 33 bp, Homo sapien
cttttggaattggaacccatatcagttatctta

SEQ ID NO: 201414 - DNA, 33 bp, Homo sapien
cttttggaattggaactcatatcagttatctta

SEQ ID NO: 201415 - DNA, 33 bp, Homo sapien
atactaactatatgtacgcagaaatgctcaaat

SEQ ID NO: 201416 - DNA, 33 bp, Homo sapien
atactaactatatgtatgcagaaatgctcaaat

SEQ ID NO: 201417 - DNA, 33 bp, Homo sapien
tcttttggaagatatgacaatcctagaactgcg

SEQ ID NO: 201418 - DNA, 33 bp, Homo sapien
tcttttggaagatatggcaatcctagaactgcg

SEQ ID NO: 201419 - DNA, 33 bp, Homo sapien
aaaatatatgaaagcaatactagaaaaagtgag

SEQ ID NO: 201420 - DNA, 33 bp, Homo sapien
aaaatatatgaaagcagtactagaaaaagtgag

SEQ ID NO: 201421 - DNA, 33 bp, Homo sapien
tatgcaaactctaggaccttcatttagctctaa

SEQ ID NO: 201422 - DNA, 33 bp, Homo sapien
tatgcaaactctaggatcttcatttagctctaa

SEQ ID NO: 201423 - DNA, 33 bp, Homo sapien
gcctctttcaaaactacctttctatgaagtgaa

SEQ ID NO: 201424 - DNA, 33 bp, Homo sapien
gcctctttcaaaactagctttctatgaagtgaa

SEQ ID NO: 201425 - DNA, 33 bp, Homo sapien
tggcagcaagcactcaatagccatcaagactgc

SEQ ID NO: 201426 - DNA, 33 bp, Homo sapien
tggcagcaagcactcagtagccatcaagactgc

SEQ ID NO: 201427 - DNA, 33 bp, Homo sapien
aggtagtgcgtgatcaccaccaaacagttagaa

SEQ ID NO: 201428 - DNA, 33 bp, Homo sapien
aggtagtgcgtgatcatcaccaaacagttagaa

SEQ ID NO: 201429 - DNA, 33 bp, Homo sapien
acctgagaaatagctacagcagacaacccagag

SEQ ID NO: 201430 - DNA, 33 bp, Homo sapien
acctgagaaatagctatagcagacaacccagag

SEQ ID NO: 201431 - DNA, 33 bp, Homo sapien
gtgggtgcctaaaagacatttgataaatgggtt

SEQ ID NO: 201432 - DNA, 33 bp, Homo sapien
gtgggtgcctaaaagatatttgataaatgggtt

SEQ ID NO: 201433 - DNA, 33 bp, Homo sapien
caggggagttacgtggaagttatgaaggaacgg

SEQ ID NO: 201434 - DNA, 33 bp, Homo sapien
caggggagttacgtgggagttatgaaggaacgg

SEQ ID NO: 201435 - DNA, 33 bp, Homo sapien
tgggtctctgagttcacaccgtagactgccttc

SEQ ID NO: 201436 - DNA, 33 bp, Homo sapien
tgggtctctgagttcataccgtagactgccttc

SEQ ID NO: 201437 - DNA, 33 bp, Homo sapien
ccatagagatcagtaaatgggctcttgggtgag

SEQ ID NO: 201438 - DNA, 33 bp, Homo sapien
ccatagagatcagtaagtgggctcttgggtgag

SEQ ID NO: 201439 - DNA, 33 bp, Homo sapien
gcatggtgaacaagcaatgatggtttatcaatt

SEQ ID NO: 201440 - DNA, 33 bp, Homo sapien
gcatggtgaacaagcagtgatggtttatcaatt

SEQ ID NO: 201441 - DNA, 33 bp, Homo sapien
gaaacccagtggtgcactaaatatctataagga

SEQ ID NO: 201442 - DNA, 33 bp, Homo sapien
gaaacccagtggtgcattaaatatctataagga

SEQ ID NO: 201443 - DNA, 33 bp, Homo sapien
tctcaagcatctaacacgacactggtttggttt

SEQ ID NO: 201444 - DNA, 33 bp, Homo sapien
tctcaagcatctaacatgacactggtttggttt

SEQ ID NO: 201445 - DNA, 33 bp, Homo sapien
atgggaaagtgccctgaagcgatcaattttgca

SEQ ID NO: 201446 - DNA, 33 bp, Homo sapien
atgggaaagtgccctggagcgatcaattttgca

SEQ ID NO: 201447 - DNA, 33 bp, Homo sapien
aagggacctgggagagaatataacttaatccat

SEQ ID NO: 201448 - DNA, 33 bp, Homo sapien
aagggacctgggagagcatataacttaatccat

SEQ ID NO: 201449 - DNA, 33 bp, Homo sapien
gagaagctgcgaagacaaaatattttcacagat

SEQ ID NO: 201450 - DNA, 33 bp, Homo sapien
gagaagctgcgaagacgaaatattttcacagat

SEQ ID NO: 201451 - DNA, 33 bp, Homo sapien
tcagtttcttcataaaaaaacactggtgaaaca

SEQ ID NO: 201452 - DNA, 33 bp, Homo sapien
tcagtttcttcataaacaaacactggtgaaaca

SEQ ID NO: 201453 - DNA, 33 bp, Homo sapien
tggcttctgcttcctagagattccagctaacac

SEQ ID NO: 201454 - DNA, 33 bp, Homo sapien
tggcttctgcttcctatagattccagctaacac

SEQ ID NO: 201455 - DNA, 33 bp, Homo sapien
caggtctaacatgtgcaagggagcaggaagagc

SEQ ID NO: 201456 - DNA, 33 bp, Homo sapien
caggtctaacatgtgcgagggagcaggaagagc

SEQ ID NO: 201457 - DNA, 33 bp, Homo sapien
cattgaggaaatcaaggaactcctttgtcttca

SEQ ID NO: 201458 - DNA, 33 bp, Homo sapien
cattgaggaaatcaagtaactcctttgtcttca

SEQ ID NO: 201459 - DNA, 33 bp, Homo sapien
tggtgttgttctgagacggtagtgtgctgttgc

SEQ ID NO: 201460 - DNA, 33 bp, Homo sapien
tggtgttgttctgagatggtagtgtgctgttgc

SEQ ID NO: 201461 - DNA, 33 bp, Homo sapien
caaaaaagggtttctacaggcagaattcgagcc

SEQ ID NO: 201462 - DNA, 33 bp, Homo sapien
caaaaaagggtttctagaggcagaattcgagcc

SEQ ID NO: 201463 - DNA, 33 bp, Homo sapien
agcctgaagaaaataacgtaattttaggttgat

SEQ ID NO: 201464 - DNA, 33 bp, Homo sapien
agcctgaagaaaataatgtaattttaggttgat

SEQ ID NO: 201465 - DNA, 33 bp, Homo sapien
tcttgcacggatttaacaatttttgcctttaat

SEQ ID NO: 201466 - DNA, 33 bp, Homo sapien
tcttgcacggatttaataatttttgcctttaat

SEQ ID NO: 201467 - DNA, 33 bp, Homo sapien
atttcaggcatccataacagagcttaatggaag

SEQ ID NO: 201468 - DNA, 33 bp, Homo sapien
atttcaggcatccatagcagagcttaatggaag

SEQ ID NO: 201469 - DNA, 33 bp, Homo sapien
aaccagctgcagagggaattatgtgtttatctc

SEQ ID NO: 201470 - DNA, 33 bp, Homo sapien
aaccagctgcagagggtattatgtgtttatctc

SEQ ID NO: 201471 - DNA, 33 bp, Homo sapien
aggatcttcttgggaaatcctggaaaatgttga

SEQ ID NO: 201472 - DNA, 33 bp, Homo sapien
aggatcttcttgggaagtcctggaaaatgttga

SEQ ID NO: 201473 - DNA, 33 bp, Homo sapien
attgcttctctgccaacgtacaggaggcaaaga

SEQ ID NO: 201474 - DNA, 33 bp, Homo sapien
attgcttctctgccaatgtacaggaggcaaaga

SEQ ID NO: 201475 - DNA, 33 bp, Homo sapien
tctctgccagcattgacgatttctttggagatg

SEQ ID NO: 201476 - DNA, 33 bp, Homo sapien
tctctgccagcattgatgatttctttggagatg

SEQ ID NO: 201477 - DNA, 33 bp, Homo sapien
tgaattctaggaatcactagagatactatggaa

SEQ ID NO: 201478 - DNA, 33 bp, Homo sapien
tgaattctaggaatcagtagagatactatggaa

SEQ ID NO: 201479 - DNA, 33 bp, Homo sapien
agttcagaggcaggtaaacaggtaaggaagcca

SEQ ID NO: 201480 - DNA, 33 bp, Homo sapien
agttcagaggcaggtagacaggtaaggaagcca

SEQ ID NO: 201481 - DNA, 33 bp, Homo sapien
cttcaagaggggataaattacatggatcctgtc

SEQ ID NO: 201482 - DNA, 33 bp, Homo sapien
cttcaagaggggataatttacatggatcctgtc

SEQ ID NO: 201483 - DNA, 33 bp, Homo sapien
gaacttaccttagacccagttgtcaggaatctt

SEQ ID NO: 201484 - DNA, 33 bp, Homo sapien
gaacttaccttagaccgagttgtcaggaatctt

SEQ ID NO: 201485 - DNA, 33 bp, Homo sapien
taatcgaaaccgttgggactatcaccgccttct

SEQ ID NO: 201486 - DNA, 33 bp, Homo sapien
taatcgaaaccgttggtactatcaccgccttct

SEQ ID NO: 201487 - DNA, 33 bp, Homo sapien
tctgcaacccacagagaaaggaaactgaagacc

SEQ ID NO: 201488 - DNA, 33 bp, Homo sapien
tctgcaacccacagaggaaggaaactgaagacc

SEQ ID NO: 201489 - DNA, 33 bp, Homo sapien
ttgaacattatgggaaatcattggaggagttta

SEQ ID NO: 201490 - DNA, 33 bp, Homo sapien
ttgaacattatgggaagtcattggaggagttta

SEQ ID NO: 201491 - DNA, 33 bp, Homo sapien
cctctgaagtaagctccaatgatggttaaacct

SEQ ID NO: 201492 - DNA, 33 bp, Homo sapien
cctctgaagtaagctctaatgatggttaaacct

SEQ ID NO: 201493 - DNA, 33 bp, Homo sapien
aatatctgctgaagaactgaaggataaagtgtc

SEQ ID NO: 201494 - DNA, 33 bp, Homo sapien
aatatctgctgaagaattgaaggataaagtgtc

SEQ ID NO: 201495 - DNA, 33 bp, Homo sapien
gtgatccagatttaaactccagttccttgtttt

SEQ ID NO: 201496 - DNA, 33 bp, Homo sapien
gtgatccagatttaaattccagttccttgtttt

SEQ ID NO: 201497 - DNA, 33 bp, Homo sapien
aagcctctttgctttacgaatttgttgtaaact

SEQ ID NO: 201498 - DNA, 33 bp, Homo sapien
aagcctctttgctttatgaatttgttgtaaact

SEQ ID NO: 201499 - DNA, 33 bp, Homo sapien
cgtctgcaatcggttgcatggagaaagtctgcc

SEQ ID NO: 201500 - DNA, 33 bp, Homo sapien
cgtctgcaatcggttgtatggagaaagtctgcc

SEQ ID NO: 201501 - DNA, 33 bp, Homo sapien
atcatgcgtctttcaacggctttgctagtatca

SEQ ID NO: 201502 - DNA, 33 bp, Homo sapien
atcatgcgtctttcaatggctttgctagtatca

SEQ ID NO: 201503 - DNA, 33 bp, Homo sapien
ggtgggagataaacagaacgtgtcatggaaagg

SEQ ID NO: 201504 - DNA, 33 bp, Homo sapien
ggtgggagataaacaggacgtgtcatggaaagg

SEQ ID NO: 201505 - DNA, 33 bp, Homo sapien
cttttaagcatctgaacggtggaagaggctgaa

SEQ ID NO: 201506 - DNA, 33 bp, Homo sapien
cttttaagcatctgaatggtggaagaggctgaa

SEQ ID NO: 201507 - DNA, 33 bp, Homo sapien
gaccctgatttctaaccacaaaatctcagagga

SEQ ID NO: 201508 - DNA, 33 bp, Homo sapien
gaccctgatttctaacgacaaaatctcagagga

SEQ ID NO: 201509 - DNA, 33 bp, Homo sapien
acattggccgtctttcccatcttctctccttgg

SEQ ID NO: 201510 - DNA, 33 bp, Homo sapien
acattggccgtctttctcatcttctctccttgg

SEQ ID NO: 201511 - DNA, 33 bp, Homo sapien
cctccccgctcaccacacagagtggtaaacagg

SEQ ID NO: 201512 - DNA, 33 bp, Homo sapien
cctccccgctcaccacgcagagtggtaaacagg

SEQ ID NO: 201513 - DNA, 33 bp, Homo sapien
ggtgagcggggaggaccattctgcctaactagg

SEQ ID NO: 201514 - DNA, 33 bp, Homo sapien
ggtgagcggggaggactattctgcctaactagg

SEQ ID NO: 201515 - DNA, 33 bp, Homo sapien
gaaaaaccatgtccacacgatgtctattatatc

SEQ ID NO: 201516 - DNA, 33 bp, Homo sapien
gaaaaaccatgtccacgcgatgtctattatatc

SEQ ID NO: 201517 - DNA, 33 bp, Homo sapien
cataggaaaccagatgcagcaatcagtttattg

SEQ ID NO: 201518 - DNA, 33 bp, Homo sapien
cataggaaaccagatggagcaatcagtttattg

SEQ ID NO: 201519 - DNA, 33 bp, Homo sapien
taagcctggccccacaactagcttcttctgggc

SEQ ID NO: 201520 - DNA, 33 bp, Homo sapien
taagcctggccccacacctagcttcttctgggc

SEQ ID NO: 201521 - DNA, 33 bp, Homo sapien
ggaaagctgttaatgcagattttcagtaaaaga

SEQ ID NO: 201522 - DNA, 33 bp, Homo sapien
ggaaagctgttaatgcggattttcagtaaaaga

SEQ ID NO: 201523 - DNA, 33 bp, Homo sapien
ccctacttttactgtcacgaactttatccatga

SEQ ID NO: 201524 - DNA, 33 bp, Homo sapien
ccctacttttactgtcgcgaactttatccatga

SEQ ID NO: 201525 - DNA, 33 bp, Homo sapien
ggccgaggttggcagaccacttaagctcaggag

SEQ ID NO: 201526 - DNA, 33 bp, Homo sapien
ggccgaggttggcagatcacttaagctcaggag

SEQ ID NO: 201527 - DNA, 33 bp, Homo sapien
tatctctgtgctagacactataataagaacgtc

SEQ ID NO: 201528 - DNA, 33 bp, Homo sapien
tatctctgtgctagactctataataagaacgtc

SEQ ID NO: 201529 - DNA, 33 bp, Homo sapien
aaagttaattctctatgagtcaggtctccagag

SEQ ID NO: 201530 - DNA, 33 bp, Homo sapien
aaagttaattctctattagtcaggtctccagag

SEQ ID NO: 201531 - DNA, 33 bp, Homo sapien
taaaaggttgtgatacgaacaaagtgatcgcac

SEQ ID NO: 201532 - DNA, 33 bp, Homo sapien
taaaaggttgtgatactaacaaagtgatcgcac

SEQ ID NO: 201533 - DNA, 33 bp, Homo sapien
cttcatttgaaagtgggcatttataggcacacg

SEQ ID NO: 201534 - DNA, 33 bp, Homo sapien
cttcatttgaaagtggtcatttataggcacacg

SEQ ID NO: 201535 - DNA, 33 bp, Homo sapien
catggcaaaacaacaacatgaggtcccacggat

SEQ ID NO: 201536 - DNA, 33 bp, Homo sapien
catggcaaaacaacaatatgaggtcccacggat

SEQ ID NO: 201537 - DNA, 33 bp, Homo sapien
agacaatagccatgtgaaagaattctcagaact

SEQ ID NO: 201538 - DNA, 33 bp, Homo sapien
agacaatagccatgtggaagaattctcagaact

SEQ ID NO: 201539 - DNA, 33 bp, Homo sapien
tatccattttcaaggacggctgttttggagaaa

SEQ ID NO: 201540 - DNA, 33 bp, Homo sapien
tatccattttcaaggatggctgttttggagaaa

SEQ ID NO: 201541 - DNA, 33 bp, Homo sapien
catttcttccatcatcgaagtatgccccagtca

SEQ ID NO: 201542 - DNA, 33 bp, Homo sapien
catttcttccatcatctaagtatgccccagtca

SEQ ID NO: 201543 - DNA, 33 bp, Homo sapien
aacttcagaacctaaaagacagctctgatgtta

SEQ ID NO: 201544 - DNA, 33 bp, Homo sapien
aacttcagaacctaaaggacagctctgatgtta

SEQ ID NO: 201545 - DNA, 33 bp, Homo sapien
ttttttctcatgataaacctccttgtgaagagt

SEQ ID NO: 201546 - DNA, 33 bp, Homo sapien
ttttttctcatgataaccctccttgtgaagagt

SEQ ID NO: 201547 - DNA, 33 bp, Homo sapien
ataagtatacatttcaagtcatctgggcctctg

SEQ ID NO: 201548 - DNA, 33 bp, Homo sapien
ataagtatacatttcaggtcatctgggcctctg

SEQ ID NO: 201549 - DNA, 33 bp, Homo sapien
ggacataagcatggacaaaagctacatgactaa

SEQ ID NO: 201550 - DNA, 33 bp, Homo sapien
ggacataagcatggacgaaagctacatgactaa

SEQ ID NO: 201551 - DNA, 33 bp, Homo sapien
tggcaggtaacagacaaaatgagaaccaagtga

SEQ ID NO: 201552 - DNA, 33 bp, Homo sapien
tggcaggtaacagacagaatgagaaccaagtga

SEQ ID NO: 201553 - DNA, 33 bp, Homo sapien
catggaaagttgaagacggtatacataagctgt

SEQ ID NO: 201554 - DNA, 33 bp, Homo sapien
catggaaagttgaagatggtatacataagctgt

SEQ ID NO: 201555 - DNA, 33 bp, Homo sapien
actatttacaaaaacacagtgataactttcctt

SEQ ID NO: 201556 - DNA, 33 bp, Homo sapien
actatttacaaaaacatagtgataactttcctt

SEQ ID NO: 201557 - DNA, 33 bp, Homo sapien
aagaattatagttgttaaaaagcacctgacacc

SEQ ID NO: 201558 - DNA, 33 bp, Homo sapien
aagaattatagttgttgaaaagcacctgacacc

SEQ ID NO: 201559 - DNA, 33 bp, Homo sapien
tcagccatcaccaggaagactgcactaaacctt

SEQ ID NO: 201560 - DNA, 33 bp, Homo sapien
tcagccatcaccaggaggactgcactaaacctt

SEQ ID NO: 201561 - DNA, 33 bp, Homo sapien
ggatcattctatatcacatttgccaagaggtgc

SEQ ID NO: 201562 - DNA, 33 bp, Homo sapien
ggatcattctatatcagatttgccaagaggtgc

SEQ ID NO: 201563 - DNA, 33 bp, Homo sapien
atcacccaatgttatccagctgaaaatggtact

SEQ ID NO: 201564 - DNA, 33 bp, Homo sapien
atcacccaatgttatctagctgaaaatggtact

SEQ ID NO: 201565 - DNA, 33 bp, Homo sapien
atttcctcttgctataaccacaaatgtcattct

SEQ ID NO: 201566 - DNA, 33 bp, Homo sapien
atttcctcttgctatatccacaaatgtcattct

SEQ ID NO: 201567 - DNA, 33 bp, Homo sapien
ttggagccctgctctagcaactctcagaaagag

SEQ ID NO: 201568 - DNA, 33 bp, Homo sapien
ttggagccctgctctatcaactctcagaaagag

SEQ ID NO: 201569 - DNA, 33 bp, Homo sapien
cactaaagggctcctgaaacacggggctgtaat

SEQ ID NO: 201570 - DNA, 33 bp, Homo sapien
cactaaagggctcctggaacacggggctgtaat

SEQ ID NO: 201571 - DNA, 33 bp, Homo sapien
gaattctgggagaagacgcaatttgagtttagg

SEQ ID NO: 201572 - DNA, 33 bp, Homo sapien
gaattctgggagaagatgcaatttgagtttagg

SEQ ID NO: 201573 - DNA, 33 bp, Homo sapien
tttgataaatggccaaagaaaacacacatgagc

SEQ ID NO: 201574 - DNA, 33 bp, Homo sapien
tttgataaatggccaaggaaaacacacatgagc

SEQ ID NO: 201575 - DNA, 33 bp, Homo sapien
tgttttaagatgaaaagaattatgccaaaaatc

SEQ ID NO: 201576 - DNA, 33 bp, Homo sapien
tgttttaagatgaaaataattatgccaaaaatc

SEQ ID NO: 201577 - DNA, 33 bp, Homo sapien
tctctttcccttgacacacacgtgctcagattt

SEQ ID NO: 201578 - DNA, 33 bp, Homo sapien
tctctttcccttgacatacacgtgctcagattt

SEQ ID NO: 201579 - DNA, 33 bp, Homo sapien
actttaaggtaggtcacgtactctggaagaagg

SEQ ID NO: 201580 - DNA, 33 bp, Homo sapien
actttaaggtaggtcatgtactctggaagaagg

SEQ ID NO: 201581 - DNA, 33 bp, Homo sapien
cagttgcctaatcgatcgaaagagggcatcgga

SEQ ID NO: 201582 - DNA, 33 bp, Homo sapien
cagttgcctaatcgatggaaagagggcatcgga

SEQ ID NO: 201583 - DNA, 33 bp, Homo sapien
ctgcatgaattatccaggatttgaatttttaaa

SEQ ID NO: 201584 - DNA, 33 bp, Homo sapien
ctgcatgaattatccatgatttgaatttttaaa

SEQ ID NO: 201585 - DNA, 33 bp, Homo sapien
aaaatcactttccaagacctgctagttctatct

SEQ ID NO: 201586 - DNA, 33 bp, Homo sapien
aaaatcactttccaagccctgctagttctatct

SEQ ID NO: 201587 - DNA, 33 bp, Homo sapien
tctacagagcacatcacactgcggacctcatcg

SEQ ID NO: 201588 - DNA, 33 bp, Homo sapien
tctacagagcacatcatactgcggacctcatcg

SEQ ID NO: 201589 - DNA, 33 bp, Homo sapien
ctttggaatgtcggatcaggaaaagcctcgctg

SEQ ID NO: 201590 - DNA, 33 bp, Homo sapien
ctttggaatgtcggattaggaaaagcctcgctg

SEQ ID NO: 201591 - DNA, 33 bp, Homo sapien
gctgcaggaaggaacacgatacaattttggtta

SEQ ID NO: 201592 - DNA, 33 bp, Homo sapien
gctgcaggaaggaacaggatacaattttggtta

SEQ ID NO: 201593 - DNA, 33 bp, Homo sapien
tcagacggacattggaacccctgtcaggatcag

SEQ ID NO: 201594 - DNA, 33 bp, Homo sapien
tcagacggacattggagcccctgtcaggatcag

SEQ ID NO: 201595 - DNA, 33 bp, Homo sapien
ttataatatgtgcacacgaaagcagacactttc

SEQ ID NO: 201596 - DNA, 33 bp, Homo sapien
ttataatatgtgcacaggaaagcagacactttc

SEQ ID NO: 201597 - DNA, 33 bp, Homo sapien
atttcaaaattccatgccagggctaaacgacct

SEQ ID NO: 201598 - DNA, 33 bp, Homo sapien
atttcaaaattccatgtcagggctaaacgacct

SEQ ID NO: 201599 - DNA, 33 bp, Homo sapien
tttgaaattcaaaaaccgcgaatggcctctttg

SEQ ID NO: 201600 - DNA, 33 bp, Homo sapien
tttgaaattcaaaaactgcgaatggcctctttg

SEQ ID NO: 201601 - DNA, 33 bp, Homo sapien
aaaaagctgcgtatacacggagacacatactgg

SEQ ID NO: 201602 - DNA, 33 bp, Homo sapien
aaaaagctgcgtatacgcggagacacatactgg

SEQ ID NO: 201603 - DNA, 33 bp, Homo sapien
tacagacccaggaaaaatatctctgacagtaag

SEQ ID NO: 201604 - DNA, 33 bp, Homo sapien
tacagacccaggaaaagtatctctgacagtaag

SEQ ID NO: 201605 - DNA, 33 bp, Homo sapien
gctgactgatccaacacgcctgtattggtgatg

SEQ ID NO: 201606 - DNA, 33 bp, Homo sapien
gctgactgatccaacatgcctgtattggtgatg

SEQ ID NO: 201607 - DNA, 33 bp, Homo sapien
cttatcacattctaccgaatccggaatttctca

SEQ ID NO: 201608 - DNA, 33 bp, Homo sapien
cttatcacattctacctaatccggaatttctca

SEQ ID NO: 201609 - DNA, 33 bp, Homo sapien
gggcacatgattctgacgtgtacagaaaacaca

SEQ ID NO: 201610 - DNA, 33 bp, Homo sapien
gggcacatgattctgatgtgtacagaaaacaca

SEQ ID NO: 201611 - DNA, 33 bp, Homo sapien
caaatgaaaattaacaaaagagataatcagctg

SEQ ID NO: 201612 - DNA, 33 bp, Homo sapien
caaatgaaaattaacagaagagataatcagctg

SEQ ID NO: 201613 - DNA, 33 bp, Homo sapien
tggggacagagaagtacgtggcggagaggctgc

SEQ ID NO: 201614 - DNA, 33 bp, Homo sapien
tggggacagagaagtatgtggcggagaggctgc

SEQ ID NO: 201615 - DNA, 33 bp, Homo sapien
ctatattctctggacaccctcaagccactgata

SEQ ID NO: 201616 - DNA, 33 bp, Homo sapien
ctatattctctggacatcctcaagccactgata

SEQ ID NO: 201617 - DNA, 33 bp, Homo sapien
atcccagtgactaagaacaaaggtgggacatgc

SEQ ID NO: 201618 - DNA, 33 bp, Homo sapien
atcccagtgactaagaccaaaggtgggacatgc

SEQ ID NO: 201619 - DNA, 33 bp, Homo sapien
tcggagtaaccagtgaataagtaccatccacga

SEQ ID NO: 201620 - DNA, 33 bp, Homo sapien
tcggagtaaccagtgagtaagtaccatccacga

SEQ ID NO: 201621 - DNA, 33 bp, Homo sapien
tgaagcccatgcaaaacgctgcctttgggatgc

SEQ ID NO: 201622 - DNA, 33 bp, Homo sapien
tgaagcccatgcaaaatgctgcctttgggatgc

SEQ ID NO: 201623 - DNA, 33 bp, Homo sapien
gagccatctgtgcccaagaatgctgttggagga

SEQ ID NO: 201624 - DNA, 33 bp, Homo sapien
gagccatctgtgcccacgaatgctgttggagga

SEQ ID NO: 201625 - DNA, 33 bp, Homo sapien
ctgcaaacaagatgccacctatggagaaaggaa

SEQ ID NO: 201626 - DNA, 33 bp, Homo sapien
ctgcaaacaagatgccgcctatggagaaaggaa

SEQ ID NO: 201627 - DNA, 33 bp, Homo sapien
gccctgcattttgtccacaacgtagttaacttg

SEQ ID NO: 201628 - DNA, 33 bp, Homo sapien
gccctgcattttgtccgcaacgtagttaacttg

SEQ ID NO: 201629 - DNA, 33 bp, Homo sapien
tcaggagaccaggaaacgtttatggtatgaatt

SEQ ID NO: 201630 - DNA, 33 bp, Homo sapien
tcaggagaccaggaaaggtttatggtatgaatt

SEQ ID NO: 201631 - DNA, 33 bp, Homo sapien
aacctgcatgggtacaaccccaatctaaaataa

SEQ ID NO: 201632 - DNA, 33 bp, Homo sapien
aacctgcatgggtacacccccaatctaaaataa

SEQ ID NO: 201633 - DNA, 33 bp, Homo sapien
attgcgttttgaggccaacatacagtgtggatg

SEQ ID NO: 201634 - DNA, 33 bp, Homo sapien
attgcgttttgaggccgacatacagtgtggatg

SEQ ID NO: 201635 - DNA, 33 bp, Homo sapien
ctccttaatcaacttacgcctagtgctccacta

SEQ ID NO: 201636 - DNA, 33 bp, Homo sapien
ctccttaatcaacttatgcctagtgctccacta

SEQ ID NO: 201637 - DNA, 33 bp, Homo sapien
tcgttctcatcaagccagctaaagtcgagtgcc

SEQ ID NO: 201638 - DNA, 33 bp, Homo sapien
tcgttctcatcaagcctgctaaagtcgagtgcc

SEQ ID NO: 201639 - DNA, 33 bp, Homo sapien
caacagaaggcaaaacaaactagcaaacatata

SEQ ID NO: 201640 - DNA, 33 bp, Homo sapien
caacagaaggcaaaactaactagcaaacatata

SEQ ID NO: 201641 - DNA, 33 bp, Homo sapien
ggtagcaaaacggatacgttaagtaggtgtttg

SEQ ID NO: 201642 - DNA, 33 bp, Homo sapien
ggtagcaaaacggatatgttaagtaggtgtttg

SEQ ID NO: 201643 - DNA, 33 bp, Homo sapien
taacttattcctcttacagctacaagtttgtat

SEQ ID NO: 201644 - DNA, 33 bp, Homo sapien
taacttattcctcttatagctacaagtttgtat

SEQ ID NO: 201645 - DNA, 33 bp, Homo sapien
cccacaaccccagacccgatctgttttctgtca

SEQ ID NO: 201646 - DNA, 33 bp, Homo sapien
cccacaaccccagacctgatctgttttctgtca

SEQ ID NO: 201647 - DNA, 33 bp, Homo sapien
gtttcctttcatcctgcatggatcctggcaaac

SEQ ID NO: 201648 - DNA, 33 bp, Homo sapien
gtttcctttcatcctgtatggatcctggcaaac

SEQ ID NO: 201649 - DNA, 33 bp, Homo sapien
aaggcagttttgctgccaggcccttcctggaag

SEQ ID NO: 201650 - DNA, 33 bp, Homo sapien
aaggcagttttgctgctaggcccttcctggaag

SEQ ID NO: 201651 - DNA, 33 bp, Homo sapien
ctggtgctgccttaaacgacaacagcaggtgca

SEQ ID NO: 201652 - DNA, 33 bp, Homo sapien
ctggtgctgccttaaatgacaacagcaggtgca

SEQ ID NO: 201653 - DNA, 33 bp, Homo sapien
aacctggcccctgcaaatactctgcttcctgac

SEQ ID NO: 201654 - DNA, 33 bp, Homo sapien
aacctggcccctgcaagtactctgcttcctgac

SEQ ID NO: 201655 - DNA, 33 bp, Homo sapien
tattgaattccacagcaaacagtcttttctttt

SEQ ID NO: 201656 - DNA, 33 bp, Homo sapien
tattgaattccacagcgaacagtcttttctttt

SEQ ID NO: 201657 - DNA, 33 bp, Homo sapien
tcgaaggagcccacaagataaatcaaggggcag

SEQ ID NO: 201658 - DNA, 33 bp, Homo sapien
tcgaaggagcccacaatataaatcaaggggcag

SEQ ID NO: 201659 - DNA, 33 bp, Homo sapien
ctatacttggaaaggaaacagcttttttgaaat

SEQ ID NO: 201660 - DNA, 33 bp, Homo sapien
ctatacttggaaaggagacagcttttttgaaat

SEQ ID NO: 201661 - DNA, 33 bp, Homo sapien
gttgtgaaagtgtgaccgagtgaggaataagtc

SEQ ID NO: 201662 - DNA, 33 bp, Homo sapien
gttgtgaaagtgtgactgagtgaggaataagtc

SEQ ID NO: 201663 - DNA, 33 bp, Homo sapien
ttgagaagcttggaagcataactgagctaggag

SEQ ID NO: 201664 - DNA, 33 bp, Homo sapien
ttgagaagcttggaagtataactgagctaggag

SEQ ID NO: 201665 - DNA, 33 bp, Homo sapien
ttacaaaggtgagagacgtggatatgttcagag

SEQ ID NO: 201666 - DNA, 33 bp, Homo sapien
ttacaaaggtgagagatgtggatatgttcagag

SEQ ID NO: 201667 - DNA, 33 bp, Homo sapien
attgggcattgaataccacagactctatgctaa

SEQ ID NO: 201668 - DNA, 33 bp, Homo sapien
attgggcattgaatactacagactctatgctaa

SEQ ID NO: 201669 - DNA, 33 bp, Homo sapien
cagtgcctttctggtagcatgaatcagcaaagc

SEQ ID NO: 201670 - DNA, 33 bp, Homo sapien
cagtgcctttctggtatcatgaatcagcaaagc

SEQ ID NO: 201671 - DNA, 33 bp, Homo sapien
gagaataacctagacaacagcttttacaccccc

SEQ ID NO: 201672 - DNA, 33 bp, Homo sapien
gagaataacctagacagcagcttttacaccccc

SEQ ID NO: 201673 - DNA, 33 bp, Homo sapien
gccccatgtctggtgacgctgcatctgtgcacc

SEQ ID NO: 201674 - DNA, 33 bp, Homo sapien
gccccatgtctggtgatgctgcatctgtgcacc

SEQ ID NO: 201675 - DNA, 33 bp, Homo sapien
gcctagatacgtaaccacaatccaaccagaggg

SEQ ID NO: 201676 - DNA, 33 bp, Homo sapien
gcctagatacgtaaccgcaatccaaccagaggg

SEQ ID NO: 201677 - DNA, 33 bp, Homo sapien
ttacattcttcacaacactcaccactctttgac

SEQ ID NO: 201678 - DNA, 33 bp, Homo sapien
ttacattcttcacaacgctcaccactctttgac

SEQ ID NO: 201679 - DNA, 33 bp, Homo sapien
ggcagaggaggcgataactgttggtagggtggc

SEQ ID NO: 201680 - DNA, 33 bp, Homo sapien
ggcagaggaggcgatagctgttggtagggtggc

SEQ ID NO: 201681 - DNA, 33 bp, Homo sapien
agataaagaggcaacaaccaaggcctccctgac

SEQ ID NO: 201682 - DNA, 33 bp, Homo sapien
agataaagaggcaacagccaaggcctccctgac

SEQ ID NO: 201683 - DNA, 33 bp, Homo sapien
gggtatccccatgccaacagaggagaggtgttt

SEQ ID NO: 201684 - DNA, 33 bp, Homo sapien
gggtatccccatgccagcagaggagaggtgttt

SEQ ID NO: 201685 - DNA, 33 bp, Homo sapien
agaaggattgaagggcaagattattttctttcc

SEQ ID NO: 201686 - DNA, 33 bp, Homo sapien
agaaggattgaagggccagattattttctttcc

SEQ ID NO: 201687 - DNA, 33 bp, Homo sapien
tctcagaggagtgtacaatgagctcctagaagc

SEQ ID NO: 201688 - DNA, 33 bp, Homo sapien
tctcagaggagtgtacgatgagctcctagaagc

SEQ ID NO: 201689 - DNA, 33 bp, Homo sapien
acaaatgagagacaaaagaaccaactcaaaaat

SEQ ID NO: 201690 - DNA, 33 bp, Homo sapien
acaaatgagagacaaaggaaccaactcaaaaat

SEQ ID NO: 201691 - DNA, 33 bp, Homo sapien
atctaccacagggagaagactgggctccgagaa

SEQ ID NO: 201692 - DNA, 33 bp, Homo sapien
atctaccacagggagaggactgggctccgagaa

SEQ ID NO: 201693 - DNA, 33 bp, Homo sapien
tagcaccagcagaaaacgatctttacaattctc

SEQ ID NO: 201694 - DNA, 33 bp, Homo sapien
tagcaccagcagaaaatgatctttacaattctc

SEQ ID NO: 201695 - DNA, 33 bp, Homo sapien
taatcagcttcgtcaacgtatgttaatttactg

SEQ ID NO: 201696 - DNA, 33 bp, Homo sapien
taatcagcttcgtcaatgtatgttaatttactg

SEQ ID NO: 201697 - DNA, 33 bp, Homo sapien
tatgtatttcataacaaccactgagcaattcac

SEQ ID NO: 201698 - DNA, 33 bp, Homo sapien
tatgtatttcataacagccactgagcaattcac

SEQ ID NO: 201699 - DNA, 33 bp, Homo sapien
agctgtattattagggatttaggtcagtcaatg

SEQ ID NO: 201700 - DNA, 33 bp, Homo sapien
agctgtattattagggttttaggtcagtcaatg

SEQ ID NO: 201701 - DNA, 33 bp, Homo sapien
gaatatccagaggtgacgaccaagcattagtat

SEQ ID NO: 201702 - DNA, 33 bp, Homo sapien
gaatatccagaggtgatgaccaagcattagtat

SEQ ID NO: 201703 - DNA, 33 bp, Homo sapien
tctgcagtgttctcaaccttgtcccctctgcag

SEQ ID NO: 201704 - DNA, 33 bp, Homo sapien
tctgcagtgttctcaatcttgtcccctctgcag

SEQ ID NO: 201705 - DNA, 33 bp, Homo sapien
gcaacttatttgctaaattacgtctcagattct

SEQ ID NO: 201706 - DNA, 33 bp, Homo sapien
gcaacttatttgctaagttacgtctcagattct

SEQ ID NO: 201707 - DNA, 33 bp, Homo sapien
tatgggagcatgcactaaaatacacgggacttt

SEQ ID NO: 201708 - DNA, 33 bp, Homo sapien
tatgggagcatgcactcaaatacacgggacttt

SEQ ID NO: 201709 - DNA, 33 bp, Homo sapien
aggggtgtggactagacggtctctgaatatttt

SEQ ID NO: 201710 - DNA, 33 bp, Homo sapien
aggggtgtggactagatggtctctgaatatttt

SEQ ID NO: 201711 - DNA, 33 bp, Homo sapien
tcattgtgacccttcaagttttcagatgagaaa

SEQ ID NO: 201712 - DNA, 33 bp, Homo sapien
tcattgtgacccttcaggttttcagatgagaaa

SEQ ID NO: 201713 - DNA, 33 bp, Homo sapien
tgttatcagggagacaccttggtctgggaatat

SEQ ID NO: 201714 - DNA, 33 bp, Homo sapien
tgttatcagggagacatcttggtctgggaatat

SEQ ID NO: 201715 - DNA, 33 bp, Homo sapien
tctatttccttaattacaaaatgcagataagaa

SEQ ID NO: 201716 - DNA, 33 bp, Homo sapien
tctatttccttaattataaaatgcagataagaa

SEQ ID NO: 201717 - DNA, 33 bp, Homo sapien
ttcgaggagattactcaagttagcagcagaact

SEQ ID NO: 201718 - DNA, 33 bp, Homo sapien
ttcgaggagattactccagttagcagcagaact

SEQ ID NO: 201719 - DNA, 33 bp, Homo sapien
caaataggcataatcactactgttttgcaattt

SEQ ID NO: 201720 - DNA, 33 bp, Homo sapien
caaataggcataatcattactgttttgcaattt

SEQ ID NO: 201721 - DNA, 33 bp, Homo sapien
gacacatagaaaccacaccgaaaacatggttga

SEQ ID NO: 201722 - DNA, 33 bp, Homo sapien
gacacatagaaaccacgccgaaaacatggttga

SEQ ID NO: 201723 - DNA, 33 bp, Homo sapien
ggggtctgtgtttaaccgtatcttccctaaggc

SEQ ID NO: 201724 - DNA, 33 bp, Homo sapien
ggggtctgtgtttaacggtatcttccctaaggc

SEQ ID NO: 201725 - DNA, 33 bp, Homo sapien
cctagtagctcagatacagttcaacctcctgca

SEQ ID NO: 201726 - DNA, 33 bp, Homo sapien
cctagtagctcagatagagttcaacctcctgca

SEQ ID NO: 201727 - DNA, 33 bp, Homo sapien
ttctgattagggagaaagttgctacaaccagca

SEQ ID NO: 201728 - DNA, 33 bp, Homo sapien
ttctgattagggagaacgttgctacaaccagca

SEQ ID NO: 201729 - DNA, 33 bp, Homo sapien
cgcactgaagcagggcagagagaaggaggatgc

SEQ ID NO: 201730 - DNA, 33 bp, Homo sapien
cgcactgaagcagggcggagagaaggaggatgc

SEQ ID NO: 201731 - DNA, 33 bp, Homo sapien
aaaacagcgaaggaacagtagagatggtttgct

SEQ ID NO: 201732 - DNA, 33 bp, Homo sapien
aaaacagcgaaggaacggtagagatggtttgct

SEQ ID NO: 201733 - DNA, 33 bp, Homo sapien
tcttagccaaatgcggcacaactttaaaccgat

SEQ ID NO: 201734 - DNA, 33 bp, Homo sapien
tcttagccaaatgcggtacaactttaaaccgat

SEQ ID NO: 201735 - DNA, 33 bp, Homo sapien
agaatgttcctggaacacggccgaggagtatta

SEQ ID NO: 201736 - DNA, 33 bp, Homo sapien
agaatgttcctggaacgcggccgaggagtatta

SEQ ID NO: 201737 - DNA, 33 bp, Homo sapien
tgaggagccactattacccccatttcaaatcaa

SEQ ID NO: 201738 - DNA, 33 bp, Homo sapien
tgaggagccactattatccccatttcaaatcaa

SEQ ID NO: 201739 - DNA, 33 bp, Homo sapien
cctgaaagtgcaaatcacgccacaccttaatag

SEQ ID NO: 201740 - DNA, 33 bp, Homo sapien
cctgaaagtgcaaatcgcgccacaccttaatag

SEQ ID NO: 201741 - DNA, 33 bp, Homo sapien
tcagttagttgttcagcacctgttagctatagt

SEQ ID NO: 201742 - DNA, 33 bp, Homo sapien
tcagttagttgttcagtacctgttagctatagt

SEQ ID NO: 201743 - DNA, 33 bp, Homo sapien
gtgtgtaatttcactgaacttttagagaccagt

SEQ ID NO: 201744 - DNA, 33 bp, Homo sapien
gtgtgtaatttcactggacttttagagaccagt

SEQ ID NO: 201745 - DNA, 33 bp, Homo sapien
taatagaataagcataacccatactcaaggagg

SEQ ID NO: 201746 - DNA, 33 bp, Homo sapien
taatagaataagcatagcccatactcaaggagg

SEQ ID NO: 201747 - DNA, 33 bp, Homo sapien
gtcccagggaagagaaaaaagccctgcttaaat

SEQ ID NO: 201748 - DNA, 33 bp, Homo sapien
gtcccagggaagagaagaaagccctgcttaaat

SEQ ID NO: 201749 - DNA, 33 bp, Homo sapien
atgcagatattcaccaaggaactggaacgttct

SEQ ID NO: 201750 - DNA, 33 bp, Homo sapien
atgcagatattcaccagggaactggaacgttct

SEQ ID NO: 201751 - DNA, 33 bp, Homo sapien
tttcagtctaatgaacactcagctcttgggcaa

SEQ ID NO: 201752 - DNA, 33 bp, Homo sapien
tttcagtctaatgaacgctcagctcttgggcaa

SEQ ID NO: 201753 - DNA, 33 bp, Homo sapien
agagccttcacatcaactgccatgcagatgagt

SEQ ID NO: 201754 - DNA, 33 bp, Homo sapien
agagccttcacatcaattgccatgcagatgagt

SEQ ID NO: 201755 - DNA, 33 bp, Homo sapien
atggactgtcagcagcagatagaccaagcaggc

SEQ ID NO: 201756 - DNA, 33 bp, Homo sapien
atggactgtcagcagcggatagaccaagcaggc

SEQ ID NO: 201757 - DNA, 33 bp, Homo sapien
tcaaggcctaaggcgcacaagttcctgttccta

SEQ ID NO: 201758 - DNA, 33 bp, Homo sapien
tcaaggcctaaggcgcgcaagttcctgttccta

SEQ ID NO: 201759 - DNA, 33 bp, Homo sapien
ccagggtgaaaagaagcccatcaggagtccata

SEQ ID NO: 201760 - DNA, 33 bp, Homo sapien
ccagggtgaaaagaagtccatcaggagtccata

SEQ ID NO: 201761 - DNA, 33 bp, Homo sapien
gccacaaaactggaaaagtggccagtctgagtg

SEQ ID NO: 201762 - DNA, 33 bp, Homo sapien
gccacaaaactggaaacgtggccagtctgagtg

SEQ ID NO: 201763 - DNA, 33 bp, Homo sapien
aatatgtcttgtaatcaaactttcctcttcatc

SEQ ID NO: 201764 - DNA, 33 bp, Homo sapien
aatatgtcttgtaatccaactttcctcttcatc

SEQ ID NO: 201765 - DNA, 33 bp, Homo sapien
ctggcccaagcagagacaggataaagtcaagac

SEQ ID NO: 201766 - DNA, 33 bp, Homo sapien
ctggcccaagcagagagaggataaagtcaagac

SEQ ID NO: 201767 - DNA, 33 bp, Homo sapien
atattaataagattcccagttattcatatgcac

SEQ ID NO: 201768 - DNA, 33 bp, Homo sapien
atattaataagattcctagttattcatatgcac

SEQ ID NO: 201769 - DNA, 33 bp, Homo sapien
tctgcaaaaaaaaaagccacattgagatttaga

SEQ ID NO: 201770 - DNA, 33 bp, Homo sapien
tctgcaaaaaaaaaaggcacattgagatttaga

SEQ ID NO: 201771 - DNA, 33 bp, Homo sapien
ggatcatggtgaatcaatcaatacatttagaag

SEQ ID NO: 201772 - DNA, 33 bp, Homo sapien
ggatcatggtgaatcagtcaatacatttagaag

SEQ ID NO: 201773 - DNA, 33 bp, Homo sapien
gatgttcactcttgccacttgcattcagcatag

SEQ ID NO: 201774 - DNA, 33 bp, Homo sapien
gatgttcactcttgccgcttgcattcagcatag

SEQ ID NO: 201775 - DNA, 33 bp, Homo sapien
gtagaaaaacttttacaatggaggatttcagtg

SEQ ID NO: 201776 - DNA, 33 bp, Homo sapien
gtagaaaaacttttacgatggaggatttcagtg

SEQ ID NO: 201777 - DNA, 33 bp, Homo sapien
ggatatgttgtgttcaatagtctgagttgttag

SEQ ID NO: 201778 - DNA, 33 bp, Homo sapien
ggatatgttgtgttcagtagtctgagttgttag

SEQ ID NO: 201779 - DNA, 33 bp, Homo sapien
gggattacccagaaaccgataacagattttaat

SEQ ID NO: 201780 - DNA, 33 bp, Homo sapien
gggattacccagaaactgataacagattttaat

SEQ ID NO: 201781 - DNA, 33 bp, Homo sapien
tcctgcggtactcaggacatcaaaggggattac

SEQ ID NO: 201782 - DNA, 33 bp, Homo sapien
tcctgcggtactcagggcatcaaaggggattac

SEQ ID NO: 201783 - DNA, 33 bp, Homo sapien
agaatggcaagaaggcaagcagcttcaggcctc

SEQ ID NO: 201784 - DNA, 33 bp, Homo sapien
agaatggcaagaaggccagcagcttcaggcctc

SEQ ID NO: 201785 - DNA, 33 bp, Homo sapien
tattaaagtcatttaaacccagacaggactgag

SEQ ID NO: 201786 - DNA, 33 bp, Homo sapien
tattaaagtcatttaagcccagacaggactgag

SEQ ID NO: 201787 - DNA, 33 bp, Homo sapien
agagtgggaaatgaccgcggacggaggcaaggg

SEQ ID NO: 201788 - DNA, 33 bp, Homo sapien
agagtgggaaatgacctcggacggaggcaaggg

SEQ ID NO: 201789 - DNA, 33 bp, Homo sapien
ggaagcaatttgacaacgaggtgaaaattgcca

SEQ ID NO: 201790 - DNA, 33 bp, Homo sapien
ggaagcaatttgacaatgaggtgaaaattgcca

SEQ ID NO: 201791 - DNA, 33 bp, Homo sapien
cactggctcagggaaacgtctgcaaggaactgg

SEQ ID NO: 201792 - DNA, 33 bp, Homo sapien
cactggctcagggaaatgtctgcaaggaactgg

SEQ ID NO: 201793 - DNA, 33 bp, Homo sapien
tcagctcaaaaagccaaagggacagagagaaca

SEQ ID NO: 201794 - DNA, 33 bp, Homo sapien
tcagctcaaaaagccacagggacagagagaaca

SEQ ID NO: 201795 - DNA, 33 bp, Homo sapien
gaacatttgacactccaaaggagaacttccaat

SEQ ID NO: 201796 - DNA, 33 bp, Homo sapien
gaacatttgacactccgaaggagaacttccaat

SEQ ID NO: 201797 - DNA, 33 bp, Homo sapien
attcttggttagacgcaaagccttggtatctca

SEQ ID NO: 201798 - DNA, 33 bp, Homo sapien
attcttggttagacgctaagccttggtatctca

SEQ ID NO: 201799 - DNA, 33 bp, Homo sapien
catccgcgcagctacaaaaatccttgatggtgc

SEQ ID NO: 201800 - DNA, 33 bp, Homo sapien
catccgcgcagctacagaaatccttgatggtgc

SEQ ID NO: 201801 - DNA, 33 bp, Homo sapien
attgcagcagctcgtcaaatagcggggtggctg

SEQ ID NO: 201802 - DNA, 33 bp, Homo sapien
attgcagcagctcgtcgaatagcggggtggctg

SEQ ID NO: 201803 - DNA, 33 bp, Homo sapien
gaatggtagtgtgtcaccagcctttagtgagtg

SEQ ID NO: 201804 - DNA, 33 bp, Homo sapien
gaatggtagtgtgtcatcagcctttagtgagtg

SEQ ID NO: 201805 - DNA, 33 bp, Homo sapien
tccaccctttttcttccatgcatttgttttgct

SEQ ID NO: 201806 - DNA, 33 bp, Homo sapien
tccaccctttttcttctatgcatttgttttgct

SEQ ID NO: 201807 - DNA, 33 bp, Homo sapien
aatagtcatagttgccacacactgtgcaatcca

SEQ ID NO: 201808 - DNA, 33 bp, Homo sapien
aatagtcatagttgccgcacactgtgcaatcca

SEQ ID NO: 201809 - DNA, 33 bp, Homo sapien
aggtaaatgatgcaaacgttaattataaagcca

SEQ ID NO: 201810 - DNA, 33 bp, Homo sapien
aggtaaatgatgcaaatgttaattataaagcca

SEQ ID NO: 201811 - DNA, 33 bp, Homo sapien
gccctgtttctctccaagcaaaagcgccaggaa

SEQ ID NO: 201812 - DNA, 33 bp, Homo sapien
gccctgtttctctccaggcaaaagcgccaggaa

SEQ ID NO: 201813 - DNA, 33 bp, Homo sapien
tgtcacagttcctcaaaggcattgctcttttct

SEQ ID NO: 201814 - DNA, 33 bp, Homo sapien
tgtcacagttcctcaagggcattgctcttttct

SEQ ID NO: 201815 - DNA, 33 bp, Homo sapien
tcccatttccctctgacggcttctagataacta

SEQ ID NO: 201816 - DNA, 33 bp, Homo sapien
tcccatttccctctgatggcttctagataacta

SEQ ID NO: 201817 - DNA, 33 bp, Homo sapien
ccaacaaaccttgtcaatctcctttgtcctttg

SEQ ID NO: 201818 - DNA, 33 bp, Homo sapien
ccaacaaaccttgtcagtctcctttgtcctttg

SEQ ID NO: 201819 - DNA, 33 bp, Homo sapien
acactttctgttgagaagctagttgtttgcaat

SEQ ID NO: 201820 - DNA, 33 bp, Homo sapien
acactttctgttgagaggctagttgtttgcaat

SEQ ID NO: 201821 - DNA, 33 bp, Homo sapien
agtgttgttgatgtgacagacatgaaagaaccc

SEQ ID NO: 201822 - DNA, 33 bp, Homo sapien
agtgttgttgatgtgatagacatgaaagaaccc

SEQ ID NO: 201823 - DNA, 33 bp, Homo sapien
aagccggctgggggcacggtggaattgccatgt

SEQ ID NO: 201824 - DNA, 33 bp, Homo sapien
aagccggctgggggcatggtggaattgccatgt

SEQ ID NO: 201825 - DNA, 33 bp, Homo sapien
aacaactgatcatgagcaaaaatcacaaaccac

SEQ ID NO: 201826 - DNA, 33 bp, Homo sapien
aacaactgatcatgaggaaaaatcacaaaccac

SEQ ID NO: 201827 - DNA, 33 bp, Homo sapien
gcaaggaactgaatgacactttcactctggaag

SEQ ID NO: 201828 - DNA, 33 bp, Homo sapien
gcaaggaactgaatgatactttcactctggaag

SEQ ID NO: 201829 - DNA, 33 bp, Homo sapien
tgaattttgacaatcacatattcctgcatagtc

SEQ ID NO: 201830 - DNA, 33 bp, Homo sapien
tgaattttgacaatcatatattcctgcatagtc

SEQ ID NO: 201831 - DNA, 33 bp, Homo sapien
gactccagagacaaaacctgcagccactacatg

SEQ ID NO: 201832 - DNA, 33 bp, Homo sapien
gactccagagacaaaatctgcagccactacatg

SEQ ID NO: 201833 - DNA, 33 bp, Homo sapien
gcacagaaataagaaaagctgcattgaagagag

SEQ ID NO: 201834 - DNA, 33 bp, Homo sapien
gcacagaaataagaaacgctgcattgaagagag

SEQ ID NO: 201835 - DNA, 33 bp, Homo sapien
tatgattacacacagtcaatataatacaaatca

SEQ ID NO: 201836 - DNA, 33 bp, Homo sapien
tatgattacacacagtgaatataatacaaatca

SEQ ID NO: 201837 - DNA, 33 bp, Homo sapien
ttacaatctgttggcaatgaaggccatgatgga

SEQ ID NO: 201838 - DNA, 33 bp, Homo sapien
ttacaatctgttggcagtgaaggccatgatgga

SEQ ID NO: 201839 - DNA, 33 bp, Homo sapien
aataggcctgatatagacaaataaattctatgg

SEQ ID NO: 201840 - DNA, 33 bp, Homo sapien
aataggcctgatataggcaaataaattctatgg

SEQ ID NO: 201841 - DNA, 33 bp, Homo sapien
gtaaataggctcattacgtttccaagaacccag

SEQ ID NO: 201842 - DNA, 33 bp, Homo sapien
gtaaataggctcattatgtttccaagaacccag

SEQ ID NO: 201843 - DNA, 33 bp, Homo sapien
tgcataggcttgccacaggcattagaagtgggg

SEQ ID NO: 201844 - DNA, 33 bp, Homo sapien
tgcataggcttgccacgggcattagaagtgggg

SEQ ID NO: 201845 - DNA, 33 bp, Homo sapien
aggttgttgattctaacagaactccttgaaatc

SEQ ID NO: 201846 - DNA, 33 bp, Homo sapien
aggttgttgattctaatagaactccttgaaatc

SEQ ID NO: 201847 - DNA, 33 bp, Homo sapien
ttttaacaaacatggacctaataagtgcttagc

SEQ ID NO: 201848 - DNA, 33 bp, Homo sapien
ttttaacaaacatggagctaataagtgcttagc

SEQ ID NO: 201849 - DNA, 33 bp, Homo sapien
caaaatatgcaatagaaaagtgacagtcattgt

SEQ ID NO: 201850 - DNA, 33 bp, Homo sapien
caaaatatgcaatagagaagtgacagtcattgt

SEQ ID NO: 201851 - DNA, 33 bp, Homo sapien
agaactctaaaagtcaaggaagctcagtgccac

SEQ ID NO: 201852 - DNA, 33 bp, Homo sapien
agaactctaaaagtcagggaagctcagtgccac

SEQ ID NO: 201853 - DNA, 33 bp, Homo sapien
aggatgacgactcccacaaagagggtaaaggaa

SEQ ID NO: 201854 - DNA, 33 bp, Homo sapien
aggatgacgactcccagaaagagggtaaaggaa

SEQ ID NO: 201855 - DNA, 33 bp, Homo sapien
acctgcttacactcaacggagagaaagcactca

SEQ ID NO: 201856 - DNA, 33 bp, Homo sapien
acctgcttacactcaatggagagaaagcactca

SEQ ID NO: 201857 - DNA, 33 bp, Homo sapien
agcactcatcccctaacgttatcatttctctct

SEQ ID NO: 201858 - DNA, 33 bp, Homo sapien
agcactcatcccctaatgttatcatttctctct

SEQ ID NO: 201859 - DNA, 33 bp, Homo sapien
caatgagagtgactgaaatgatggcagagtgag

SEQ ID NO: 201860 - DNA, 33 bp, Homo sapien
caatgagagtgactgagatgatggcagagtgag

SEQ ID NO: 201861 - DNA, 33 bp, Homo sapien
cgatgggtcatttgtaaggtagttttaggatag

SEQ ID NO: 201862 - DNA, 33 bp, Homo sapien
cgatgggtcatttgtagggtagttttaggatag

SEQ ID NO: 201863 - DNA, 33 bp, Homo sapien
aagtgtgttaaagcccaaatccaatagtgttaa

SEQ ID NO: 201864 - DNA, 33 bp, Homo sapien
aagtgtgttaaagcccgaatccaatagtgttaa

SEQ ID NO: 201865 - DNA, 33 bp, Homo sapien
ggcaattgtgaggtcacaaaaaattgtagaaag

SEQ ID NO: 201866 - DNA, 33 bp, Homo sapien
ggcaattgtgaggtcataaaaaattgtagaaag

SEQ ID NO: 201867 - DNA, 33 bp, Homo sapien
gaaaccacaaagagaactgctctgagggcatcc

SEQ ID NO: 201868 - DNA, 33 bp, Homo sapien
gaaaccacaaagagaagtgctctgagggcatcc

SEQ ID NO: 201869 - DNA, 33 bp, Homo sapien
catacttcgtagaggacggaatgaatactttcc

SEQ ID NO: 201870 - DNA, 33 bp, Homo sapien
catacttcgtagaggatggaatgaatactttcc

SEQ ID NO: 201871 - DNA, 33 bp, Homo sapien
cttgtgtcccaaattaaccatcttcatcaggtc

SEQ ID NO: 201872 - DNA, 33 bp, Homo sapien
cttgtgtcccaaattagccatcttcatcaggtc

SEQ ID NO: 201873 - DNA, 33 bp, Homo sapien
gagatgctcaagttcacattcttcttgagaaca

SEQ ID NO: 201874 - DNA, 33 bp, Homo sapien
gagatgctcaagttcagattcttcttgagaaca

SEQ ID NO: 201875 - DNA, 33 bp, Homo sapien
atcatggctgtatatgccaagctctctggcact

SEQ ID NO: 201876 - DNA, 33 bp, Homo sapien
atcatggctgtatatgtcaagctctctggcact

SEQ ID NO: 201877 - DNA, 33 bp, Homo sapien
ggttctgaccatggaaccacaagaacgactaga

SEQ ID NO: 201878 - DNA, 33 bp, Homo sapien
ggttctgaccatggaagcacaagaacgactaga

SEQ ID NO: 201879 - DNA, 33 bp, Homo sapien
ttgggccattacaaaacgtttatcctggtgatt

SEQ ID NO: 201880 - DNA, 33 bp, Homo sapien
ttgggccattacaaaatgtttatcctggtgatt

SEQ ID NO: 201881 - DNA, 33 bp, Homo sapien
caaacaatttaagacccattgatttgtatccat

SEQ ID NO: 201882 - DNA, 33 bp, Homo sapien
caaacaatttaagacctattgatttgtatccat

SEQ ID NO: 201883 - DNA, 33 bp, Homo sapien
ttcagaaggacaaataacattctacccatatct

SEQ ID NO: 201884 - DNA, 33 bp, Homo sapien
ttcagaaggacaaatagcattctacccatatct

SEQ ID NO: 201885 - DNA, 33 bp, Homo sapien
atgaaaaggagtggtacgaaatagcaaagttaa

SEQ ID NO: 201886 - DNA, 33 bp, Homo sapien
atgaaaaggagtggtatgaaatagcaaagttaa

SEQ ID NO: 201887 - DNA, 33 bp, Homo sapien
ttgcttctcactcaaactagcagaacaaacaat

SEQ ID NO: 201888 - DNA, 33 bp, Homo sapien
ttgcttctcactcaaattagcagaacaaacaat

SEQ ID NO: 201889 - DNA, 33 bp, Homo sapien
tgtagcagactttttacgaactggaaaataaag

SEQ ID NO: 201890 - DNA, 33 bp, Homo sapien
tgtagcagactttttatgaactggaaaataaag

SEQ ID NO: 201891 - DNA, 33 bp, Homo sapien
acccctgtttatcagaaagctcccctccacctt

SEQ ID NO: 201892 - DNA, 33 bp, Homo sapien
acccctgtttatcagacagctcccctccacctt

SEQ ID NO: 201893 - DNA, 33 bp, Homo sapien
gtacctcgagcaatacaaccttagggcatatac

SEQ ID NO: 201894 - DNA, 33 bp, Homo sapien
gtacctcgagcaatacgaccttagggcatatac

SEQ ID NO: 201895 - DNA, 33 bp, Homo sapien
cgatgcagtaggtaagcacgaaattagaggggg

SEQ ID NO: 201896 - DNA, 33 bp, Homo sapien
cgatgcagtaggtaagtacgaaattagaggggg

SEQ ID NO: 201897 - DNA, 33 bp, Homo sapien
gctaagtggatttcaacggctaacctcaaatgt

SEQ ID NO: 201898 - DNA, 33 bp, Homo sapien
gctaagtggatttcaatggctaacctcaaatgt

SEQ ID NO: 201899 - DNA, 33 bp, Homo sapien
agctgtagctgacagaacagaaggaacacggca

SEQ ID NO: 201900 - DNA, 33 bp, Homo sapien
agctgtagctgacagagcagaaggaacacggca

SEQ ID NO: 201901 - DNA, 33 bp, Homo sapien
ctccaactttataggacgataatgaaggaagat

SEQ ID NO: 201902 - DNA, 33 bp, Homo sapien
ctccaactttataggatgataatgaaggaagat

SEQ ID NO: 201903 - DNA, 33 bp, Homo sapien
ttcatgtcatggaatccagtgggcaactccctc

SEQ ID NO: 201904 - DNA, 33 bp, Homo sapien
ttcatgtcatggaatctagtgggcaactccctc

SEQ ID NO: 201905 - DNA, 33 bp, Homo sapien
gcgtgttttgaagggcaatttgggagtttgagt

SEQ ID NO: 201906 - DNA, 33 bp, Homo sapien
gcgtgttttgaagggcgatttgggagtttgagt

SEQ ID NO: 201907 - DNA, 33 bp, Homo sapien
tctaaaatatgtggtcagaacgatacataaatt

SEQ ID NO: 201908 - DNA, 33 bp, Homo sapien
tctaaaatatgtggtcggaacgatacataaatt

SEQ ID NO: 201909 - DNA, 33 bp, Homo sapien
agtgaattaatcacaaggacaaagctaggaaat

SEQ ID NO: 201910 - DNA, 33 bp, Homo sapien
agtgaattaatcacaatgacaaagctaggaaat

SEQ ID NO: 201911 - DNA, 33 bp, Homo sapien
atttcctggagcatatcaagtgtctgccaattg

SEQ ID NO: 201912 - DNA, 33 bp, Homo sapien
atttcctggagcatattaagtgtctgccaattg

SEQ ID NO: 201913 - DNA, 33 bp, Homo sapien
ttgtttattatctacactagtatgcaatttatt

SEQ ID NO: 201914 - DNA, 33 bp, Homo sapien
ttgtttattatctacattagtatgcaatttatt

SEQ ID NO: 201915 - DNA, 33 bp, Homo sapien
tgcctgaagtcgaaaaaggttgtgtgtaatacc

SEQ ID NO: 201916 - DNA, 33 bp, Homo sapien
tgcctgaagtcgaaaacggttgtgtgtaatacc

SEQ ID NO: 201917 - DNA, 33 bp, Homo sapien
caggagtgtatatgcaatcgcctactctcaact

SEQ ID NO: 201918 - DNA, 33 bp, Homo sapien
caggagtgtatatgcagtcgcctactctcaact

SEQ ID NO: 201919 - DNA, 33 bp, Homo sapien
attccaatattaaggagtaggtgagcaaatgag

SEQ ID NO: 201920 - DNA, 33 bp, Homo sapien
attccaatattaaggattaggtgagcaaatgag

SEQ ID NO: 201921 - DNA, 33 bp, Homo sapien
tgatttattcctcttaaatagacagatagacca

SEQ ID NO: 201922 - DNA, 33 bp, Homo sapien
tgatttattcctcttacatagacagatagacca

SEQ ID NO: 201923 - DNA, 33 bp, Homo sapien
tcataaagtgtaaacaagagacacaggctggga

SEQ ID NO: 201924 - DNA, 33 bp, Homo sapien
tcataaagtgtaaacacgagacacaggctggga

SEQ ID NO: 201925 - DNA, 33 bp, Homo sapien
aagccgataaaagtcccaatacagaaccacacc

SEQ ID NO: 201926 - DNA, 33 bp, Homo sapien
aagccgataaaagtccgaatacagaaccacacc

SEQ ID NO: 201927 - DNA, 33 bp, Homo sapien
agaaaaaaggaaaaagcacaggattgcaaatgt

SEQ ID NO: 201928 - DNA, 33 bp, Homo sapien
agaaaaaaggaaaaagtacaggattgcaaatgt

SEQ ID NO: 201929 - DNA, 33 bp, Homo sapien
ttgcttgaaatgctaacccttgccttcctacac

SEQ ID NO: 201930 - DNA, 33 bp, Homo sapien
ttgcttgaaatgctaatccttgccttcctacac

SEQ ID NO: 201931 - DNA, 33 bp, Homo sapien
tttctagaaggttatcagaaaatctatcaagtt

SEQ ID NO: 201932 - DNA, 33 bp, Homo sapien
tttctagaaggttatcggaaaatctatcaagtt

SEQ ID NO: 201933 - DNA, 33 bp, Homo sapien
tgtctcagggtagagcacatgatacagcccaga

SEQ ID NO: 201934 - DNA, 33 bp, Homo sapien
tgtctcagggtagagcgcatgatacagcccaga

SEQ ID NO: 201935 - DNA, 33 bp, Homo sapien
acaaatgtgagaaagcccatctgaaagcaccat

SEQ ID NO: 201936 - DNA, 33 bp, Homo sapien
acaaatgtgagaaagctcatctgaaagcaccat

SEQ ID NO: 201937 - DNA, 33 bp, Homo sapien
atctagccactatcaaatgatataaaaatatga

SEQ ID NO: 201938 - DNA, 33 bp, Homo sapien
atctagccactatcaactgatataaaaatatga

SEQ ID NO: 201939 - DNA, 33 bp, Homo sapien
cagtgtgttcctgggaaggattctggcccagaa

SEQ ID NO: 201940 - DNA, 33 bp, Homo sapien
cagtgtgttcctgggagggattctggcccagaa

SEQ ID NO: 201941 - DNA, 33 bp, Homo sapien
aggacagagtgaactgaacaggattaaatcaaa

SEQ ID NO: 201942 - DNA, 33 bp, Homo sapien
aggacagagtgaactggacaggattaaatcaaa

SEQ ID NO: 201943 - DNA, 33 bp, Homo sapien
tcacccctcaagacacacttcgactgactgccc

SEQ ID NO: 201944 - DNA, 33 bp, Homo sapien
tcacccctcaagacacgcttcgactgactgccc

SEQ ID NO: 201945 - DNA, 33 bp, Homo sapien
tcaaggagtttagccacgacatcctgagcaagc

SEQ ID NO: 201946 - DNA, 33 bp, Homo sapien
tcaaggagtttagccatgacatcctgagcaagc

SEQ ID NO: 201947 - DNA, 33 bp, Homo sapien
tttctgatattcagaaatgagataaatggcagg

SEQ ID NO: 201948 - DNA, 33 bp, Homo sapien
tttctgatattcagaagtgagataaatggcagg

SEQ ID NO: 201949 - DNA, 33 bp, Homo sapien
aagaggagcagctgacaaagttcccatagtgga

SEQ ID NO: 201950 - DNA, 33 bp, Homo sapien
aagaggagcagctgacgaagttcccatagtgga

SEQ ID NO: 201951 - DNA, 33 bp, Homo sapien
tggcagcagaaatgtaagtcagcctctctagat

SEQ ID NO: 201952 - DNA, 33 bp, Homo sapien
tggcagcagaaatgtaggtcagcctctctagat

SEQ ID NO: 201953 - DNA, 33 bp, Homo sapien
cacatttacagagttcaagattgtgaaatatat

SEQ ID NO: 201954 - DNA, 33 bp, Homo sapien
cacatttacagagttctagattgtgaaatatat

SEQ ID NO: 201955 - DNA, 33 bp, Homo sapien
atcaacctggactagacgttcttcttggaaagt

SEQ ID NO: 201956 - DNA, 33 bp, Homo sapien
atcaacctggactagatgttcttcttggaaagt

SEQ ID NO: 201957 - DNA, 33 bp, Homo sapien
ataaattcagatgtccgagttacctgctttgga

SEQ ID NO: 201958 - DNA, 33 bp, Homo sapien
ataaattcagatgtcctagttacctgctttgga

SEQ ID NO: 201959 - DNA, 33 bp, Homo sapien
gtctccatcttaaacaaatcactggataagaac

SEQ ID NO: 201960 - DNA, 33 bp, Homo sapien
gtctccatcttaaacacatcactggataagaac

SEQ ID NO: 201961 - DNA, 33 bp, Homo sapien
aaactttatgctcctacgatcaactcctcctcc

SEQ ID NO: 201962 - DNA, 33 bp, Homo sapien
aaactttatgctcctatgatcaactcctcctcc

SEQ ID NO: 201963 - DNA, 33 bp, Homo sapien
tcacaaatagagagaactgagaaggaggatatg

SEQ ID NO: 201964 - DNA, 33 bp, Homo sapien
tcacaaatagagagaattgagaaggaggatatg

SEQ ID NO: 201965 - DNA, 33 bp, Homo sapien
gcattgctattctgaacgggtgaactcataaac

SEQ ID NO: 201966 - DNA, 33 bp, Homo sapien
gcattgctattctgaatgggtgaactcataaac

SEQ ID NO: 201967 - DNA, 33 bp, Homo sapien
agctgacatttatcaccgtattctctcctgact

SEQ ID NO: 201968 - DNA, 33 bp, Homo sapien
agctgacatttatcactgtattctctcctgact

SEQ ID NO: 201969 - DNA, 33 bp, Homo sapien
tggaatgagagtcaaaacataagaacgcaaggt

SEQ ID NO: 201970 - DNA, 33 bp, Homo sapien
tggaatgagagtcaaagcataagaacgcaaggt

SEQ ID NO: 201971 - DNA, 33 bp, Homo sapien
ccataaaaccccttgcaaaagtggatatttaaa

SEQ ID NO: 201972 - DNA, 33 bp, Homo sapien
ccataaaaccccttgcgaaagtggatatttaaa

SEQ ID NO: 201973 - DNA, 33 bp, Homo sapien
catagctccagggtcacgagaggtacaccctgc

SEQ ID NO: 201974 - DNA, 33 bp, Homo sapien
catagctccagggtcatgagaggtacaccctgc

SEQ ID NO: 201975 - DNA, 33 bp, Homo sapien
cgccaaacaggacacacgtttccaaggtaattt

SEQ ID NO: 201976 - DNA, 33 bp, Homo sapien
cgccaaacaggacacaggtttccaaggtaattt

SEQ ID NO: 201977 - DNA, 33 bp, Homo sapien
aaccttttgtgccagaagtattctaatatccag

SEQ ID NO: 201978 - DNA, 33 bp, Homo sapien
aaccttttgtgccagaggtattctaatatccag

SEQ ID NO: 201979 - DNA, 33 bp, Homo sapien
agggttgcaacttgtacggattagaaaaaaagg

SEQ ID NO: 201980 - DNA, 33 bp, Homo sapien
agggttgcaacttgtatggattagaaaaaaagg

SEQ ID NO: 201981 - DNA, 33 bp, Homo sapien
ttgaatgattctaaacaacacactatgggaaca

SEQ ID NO: 201982 - DNA, 33 bp, Homo sapien
ttgaatgattctaaactacacactatgggaaca

SEQ ID NO: 201983 - DNA, 33 bp, Homo sapien
agggagtctaaactcgcacacttcctcctttcc

SEQ ID NO: 201984 - DNA, 33 bp, Homo sapien
agggagtctaaactcgtacacttcctcctttcc

SEQ ID NO: 201985 - DNA, 33 bp, Homo sapien
atttaaggttatgcagccagtttccttgtgctg

SEQ ID NO: 201986 - DNA, 33 bp, Homo sapien
atttaaggttatgcagtcagtttccttgtgctg

SEQ ID NO: 201987 - DNA, 33 bp, Homo sapien
taaccaacgttaatgacaagttgcttaaaacat

SEQ ID NO: 201988 - DNA, 33 bp, Homo sapien
taaccaacgttaatgataagttgcttaaaacat

SEQ ID NO: 201989 - DNA, 33 bp, Homo sapien
gctaagagggtattaaaaaaacacacataaact

SEQ ID NO: 201990 - DNA, 33 bp, Homo sapien
gctaagagggtattaagaaaacacacataaact

SEQ ID NO: 201991 - DNA, 33 bp, Homo sapien
taattcaactaaagtacgactccaataacagtt

SEQ ID NO: 201992 - DNA, 33 bp, Homo sapien
taattcaactaaagtatgactccaataacagtt

SEQ ID NO: 201993 - DNA, 33 bp, Homo sapien
gctagagttagacccacaaccagattaccgagg

SEQ ID NO: 201994 - DNA, 33 bp, Homo sapien
gctagagttagacccagaaccagattaccgagg

SEQ ID NO: 201995 - DNA, 33 bp, Homo sapien
tcaagtggaccagaaaaaaagtcaaggaggtgc

SEQ ID NO: 201996 - DNA, 33 bp, Homo sapien
tcaagtggaccagaaacaaagtcaaggaggtgc

SEQ ID NO: 201997 - DNA, 33 bp, Homo sapien
cctgatacagttctccaaatctgctgcaaatac

SEQ ID NO: 201998 - DNA, 33 bp, Homo sapien
cctgatacagttctcccaatctgctgcaaatac

SEQ ID NO: 201999 - DNA, 33 bp, Homo sapien
atctgagattttacccaacaaaagacacgagac

SEQ ID NO: 202000 - DNA, 33 bp, Homo sapien
atctgagattttaccccacaaaagacacgagac

SEQ ID NO: 202001 - DNA, 33 bp, Homo sapien
tcttctaaaaacaagacgagaagaacaaagcac

SEQ ID NO: 202002 - DNA, 33 bp, Homo sapien
tcttctaaaaacaagatgagaagaacaaagcac

SEQ ID NO: 202003 - DNA, 33 bp, Homo sapien
gttaaacataggttaacgcatttcaaatctgaa

SEQ ID NO: 202004 - DNA, 33 bp, Homo sapien
gttaaacataggttaatgcatttcaaatctgaa

SEQ ID NO: 202005 - DNA, 33 bp, Homo sapien
tgtagacccttgttgtaaaatagcaaaatgttt

SEQ ID NO: 202006 - DNA, 33 bp, Homo sapien
tgtagacccttgttgtgaaatagcaaaatgttt

SEQ ID NO: 202007 - DNA, 33 bp, Homo sapien
aactttcatcatttcaagcaatattacttcact

SEQ ID NO: 202008 - DNA, 33 bp, Homo sapien
aactttcatcatttcaggcaatattacttcact

SEQ ID NO: 202009 - DNA, 33 bp, Homo sapien
gattgagttactgtagaccacttttctatcctt

SEQ ID NO: 202010 - DNA, 33 bp, Homo sapien
gattgagttactgtagtccacttttctatcctt

SEQ ID NO: 202011 - DNA, 33 bp, Homo sapien
gatgtgacgactatgaagatgaagagttttatg

SEQ ID NO: 202012 - DNA, 33 bp, Homo sapien
gatgtgacgactatgaggatgaagagttttatg

SEQ ID NO: 202013 - DNA, 33 bp, Homo sapien
aaggaagagcacacacaatggtaatggttaaac

SEQ ID NO: 202014 - DNA, 33 bp, Homo sapien
aaggaagagcacacacgatggtaatggttaaac

SEQ ID NO: 202015 - DNA, 33 bp, Homo sapien
atgcttctctttggaaacctcatcccatttggc

SEQ ID NO: 202016 - DNA, 33 bp, Homo sapien
atgcttctctttggaagcctcatcccatttggc

SEQ ID NO: 202017 - DNA, 33 bp, Homo sapien
tttacaaggtgactacactgttctagtccatct

SEQ ID NO: 202018 - DNA, 33 bp, Homo sapien
tttacaaggtgactacgctgttctagtccatct

SEQ ID NO: 202019 - DNA, 33 bp, Homo sapien
ttcttaggtgacttttcggagaagattagggaa

SEQ ID NO: 202020 - DNA, 33 bp, Homo sapien
ttcttaggtgactttttggagaagattagggaa

SEQ ID NO: 202021 - DNA, 33 bp, Homo sapien
ggcaataaggagactaataattcactttatcgc

SEQ ID NO: 202022 - DNA, 33 bp, Homo sapien
ggcaataaggagactagtaattcactttatcgc

SEQ ID NO: 202023 - DNA, 33 bp, Homo sapien
taatctcttatgtgtgaaagtctttaaatcttc

SEQ ID NO: 202024 - DNA, 33 bp, Homo sapien
taatctcttatgtgtggaagtctttaaatcttc

SEQ ID NO: 202025 - DNA, 33 bp, Homo sapien
ttcaagccattccaccacctgtctcttctgaag

SEQ ID NO: 202026 - DNA, 33 bp, Homo sapien
ttcaagccattccaccgcctgtctcttctgaag

SEQ ID NO: 202027 - DNA, 33 bp, Homo sapien
ctctggtgattggggaagtaagagccatcgctc

SEQ ID NO: 202028 - DNA, 33 bp, Homo sapien
ctctggtgattggggaggtaagagccatcgctc

SEQ ID NO: 202029 - DNA, 33 bp, Homo sapien
gaggaaggacagaaacaagttgggataagatgt

SEQ ID NO: 202030 - DNA, 33 bp, Homo sapien
gaggaaggacagaaacgagttgggataagatgt

SEQ ID NO: 202031 - DNA, 33 bp, Homo sapien
ataaccactcagacacagagcaagacttgagag

SEQ ID NO: 202032 - DNA, 33 bp, Homo sapien
ataaccactcagacacggagcaagacttgagag

SEQ ID NO: 202033 - DNA, 33 bp, Homo sapien
tctcagtgggtatgaacgtgcaatcattagcaa

SEQ ID NO: 202034 - DNA, 33 bp, Homo sapien
tctcagtgggtatgaatgtgcaatcattagcaa

SEQ ID NO: 202035 - DNA, 33 bp, Homo sapien
ttgagcttagagctggaaacacaaaattgggta

SEQ ID NO: 202036 - DNA, 33 bp, Homo sapien
ttgagcttagagctgggaacacaaaattgggta

SEQ ID NO: 202037 - DNA, 33 bp, Homo sapien
aaccagggatataagaggaacaagagatactgt

SEQ ID NO: 202038 - DNA, 33 bp, Homo sapien
aaccagggatataagatgaacaagagatactgt

SEQ ID NO: 202039 - DNA, 33 bp, Homo sapien
tgaaacacagatctggaattggaatgtaggtct

SEQ ID NO: 202040 - DNA, 33 bp, Homo sapien
tgaaacacagatctgggattggaatgtaggtct

SEQ ID NO: 202041 - DNA, 33 bp, Homo sapien
gcagctagggaagggcaagatagagaactgcct

SEQ ID NO: 202042 - DNA, 33 bp, Homo sapien
gcagctagggaagggccagatagagaactgcct

SEQ ID NO: 202043 - DNA, 33 bp, Homo sapien
gggctcagatttcatcaagtcctctttatcaag

SEQ ID NO: 202044 - DNA, 33 bp, Homo sapien
gggctcagatttcatccagtcctctttatcaag

SEQ ID NO: 202045 - DNA, 33 bp, Homo sapien
gatgatgtttgaggagacagaaaactagccaag

SEQ ID NO: 202046 - DNA, 33 bp, Homo sapien
gatgatgtttgaggaggcagaaaactagccaag

SEQ ID NO: 202047 - DNA, 33 bp, Homo sapien
aagaagcatattctacacgctgtgcctttttgc

SEQ ID NO: 202048 - DNA, 33 bp, Homo sapien
aagaagcatattctacccgctgtgcctttttgc

SEQ ID NO: 202049 - DNA, 33 bp, Homo sapien
atagggctacattgaaaatcagataagctttat

SEQ ID NO: 202050 - DNA, 33 bp, Homo sapien
atagggctacattgaagatcagataagctttat

SEQ ID NO: 202051 - DNA, 33 bp, Homo sapien
acaataaagagatgggaaataaaaatgatgaca

SEQ ID NO: 202052 - DNA, 33 bp, Homo sapien
acaataaagagatgggtaataaaaatgatgaca

SEQ ID NO: 202053 - DNA, 33 bp, Homo sapien
taacagaatctttaaacgggattgtgtgaactg

SEQ ID NO: 202054 - DNA, 33 bp, Homo sapien
taacagaatctttaaatgggattgtgtgaactg

SEQ ID NO: 202055 - DNA, 33 bp, Homo sapien
ttctagtagggtaagggaaagtgtgaatattaa

SEQ ID NO: 202056 - DNA, 33 bp, Homo sapien
ttctagtagggtaaggtaaagtgtgaatattaa

SEQ ID NO: 202057 - DNA, 33 bp, Homo sapien
gggtagctgatggcaaatgggaatgaaggtaat

SEQ ID NO: 202058 - DNA, 33 bp, Homo sapien
gggtagctgatggcaagtgggaatgaaggtaat

SEQ ID NO: 202059 - DNA, 33 bp, Homo sapien
aaataaggactggagaaagaaattctgtttcaa

SEQ ID NO: 202060 - DNA, 33 bp, Homo sapien
aaataaggactggagagagaaattctgtttcaa

SEQ ID NO: 202061 - DNA, 33 bp, Homo sapien
tgtacagggtcgctacaatcaaaaacatgattg

SEQ ID NO: 202062 - DNA, 33 bp, Homo sapien
tgtacagggtcgctaccatcaaaaacatgattg

SEQ ID NO: 202063 - DNA, 33 bp, Homo sapien
ctgaaattctagttcacaacatcaagtgtttta

SEQ ID NO: 202064 - DNA, 33 bp, Homo sapien
ctgaaattctagttcataacatcaagtgtttta

SEQ ID NO: 202065 - DNA, 33 bp, Homo sapien
acagtagttaaaaggcacaatgtaggtgagcat

SEQ ID NO: 202066 - DNA, 33 bp, Homo sapien
acagtagttaaaaggcgcaatgtaggtgagcat

SEQ ID NO: 202067 - DNA, 33 bp, Homo sapien; identical to SEQ ID NO: 202065

SEQ ID NO: 202068 - DNA, 33 bp, Homo sapien; identical to SEQ ID NO: 202066

SEQ ID NO: 202069 - DNA, 33 bp, Homo sapien
ccagtgctaaggtataactgtggaatagggtcc

SEQ ID NO: 202070 - DNA, 33 bp, Homo sapien
ccagtgctaaggtatagctgtggaatagggtcc

SEQ ID NO: 202071 - DNA, 33 bp, Homo sapien
cagagactccctaaccactaaaagctgagagtt

SEQ ID NO: 202072 - DNA, 33 bp, Homo sapien
cagagactccctaaccgctaaaagctgagagtt

SEQ ID NO: 202073 - DNA, 33 bp, Homo sapien
tacccactgcagccacaaagtaggtgcccagag

SEQ ID NO: 202074 - DNA, 33 bp, Homo sapien
tacccactgcagccacgaagtaggtgcccagag

SEQ ID NO: 202075 - DNA, 33 bp, Homo sapien
aatgcccggccaattacaacacactctgttact

SEQ ID NO: 202076 - DNA, 33 bp, Homo sapien
aatgcccggccaattataacacactctgttact

SEQ ID NO: 202077 - DNA, 33 bp, Homo sapien
atgaagctatcagatccaagtatttgaggagaa

SEQ ID NO: 202078 - DNA, 33 bp, Homo sapien
atgaagctatcagatcgaagtatttgaggagaa

SEQ ID NO: 202079 - DNA, 33 bp, Homo sapien
gaaaaggcaaagctaaaacattggcattagatc

SEQ ID NO: 202080 - DNA, 33 bp, Homo sapien
gaaaaggcaaagctaagacattggcattagatc

SEQ ID NO: 202081 - DNA, 33 bp, Homo sapien
cttcttatttctcaccaagctcttccaatttga

SEQ ID NO: 202082 - DNA, 33 bp, Homo sapien
cttcttatttctcaccgagctcttccaatttga

SEQ ID NO: 202083 - DNA, 33 bp, Homo sapien
atttttaaggaatgaaatagtgccatttgtagc

SEQ ID NO: 202084 - DNA, 33 bp, Homo sapien
atttttaaggaatgaagtagtgccatttgtagc

SEQ ID NO: 202085 - DNA, 33 bp, Homo sapien
actctgtgttgattcactgaaattttgaacata

SEQ ID NO: 202086 - DNA, 33 bp, Homo sapien
actctgtgttgattcattgaaattttgaacata

SEQ ID NO: 202087 - DNA, 33 bp, Homo sapien
catccgaatagaaataaatcttcaaaagacgcc

SEQ ID NO: 202088 - DNA, 33 bp, Homo sapien
catccgaatagaaatacatcttcaaaagacgcc

SEQ ID NO: 202089 - DNA, 33 bp, Homo sapien
aagccaactgccttgacacatgccttgaacaac

SEQ ID NO: 202090 - DNA, 33 bp, Homo sapien
aagccaactgccttgatacatgccttgaacaac

SEQ ID NO: 202091 - DNA, 33 bp, Homo sapien
tttgcattttaaactccgaactagaataatagg

SEQ ID NO: 202092 - DNA, 33 bp, Homo sapien
tttgcattttaaactctgaactagaataatagg

SEQ ID NO: 202093 - DNA, 33 bp, Homo sapien
tagccttggtgcagaacgtccccaaagcccatc

SEQ ID NO: 202094 - DNA, 33 bp, Homo sapien
tagccttggtgcagaaggtccccaaagcccatc

SEQ ID NO: 202095 - DNA, 33 bp, Homo sapien
gtctgccggcatgacactctttctcctattaat

SEQ ID NO: 202096 - DNA, 33 bp, Homo sapien
gtctgccggcatgacattctttctcctattaat

SEQ ID NO: 202097 - DNA, 33 bp, Homo sapien
ttatgatggaaccctacgaaagtgcagccttgt

SEQ ID NO: 202098 - DNA, 33 bp, Homo sapien
ttatgatggaaccctatgaaagtgcagccttgt

SEQ ID NO: 202099 - DNA, 33 bp, Homo sapien
agcagagagagaacaccgaggaagaaagactag

SEQ ID NO: 202100 - DNA, 33 bp, Homo sapien
agcagagagagaacacggaggaagaaagactag

SEQ ID NO: 202101 - DNA, 33 bp, Homo sapien
cattcattaggtgcaccggaccacttttcactg

SEQ ID NO: 202102 - DNA, 33 bp, Homo sapien
cattcattaggtgcactggaccacttttcactg

SEQ ID NO: 202103 - DNA, 33 bp, Homo sapien
ttgtgccattcatttcagaaaagtcacggccca

SEQ ID NO: 202104 - DNA, 33 bp, Homo sapien
ttgtgccattcatttcggaaaagtcacggccca

SEQ ID NO: 202105 - DNA, 33 bp, Homo sapien
gaggctccgggagagcaaagagaatagggtctg

SEQ ID NO: 202106 - DNA, 33 bp, Homo sapien
gaggctccgggagagcgaagagaatagggtctg

SEQ ID NO: 202107 - DNA, 33 bp, Homo sapien
tggccaaatacaccctaaatattgacacaggtg

SEQ ID NO: 202108 - DNA, 33 bp, Homo sapien
tggccaaatacaccctgaatattgacacaggtg

SEQ ID NO: 202109 - DNA, 33 bp, Homo sapien
gcagaggacacatcgcgcctcggttaaaaaaag

SEQ ID NO: 202110 - DNA, 33 bp, Homo sapien
gcagaggacacatcgctcctcggttaaaaaaag

SEQ ID NO: 202111 - DNA, 33 bp, Homo sapien
ggctttttcagatgtacaatatgctcggtttgg

SEQ ID NO: 202112 - DNA, 33 bp, Homo sapien
ggctttttcagatgtagaatatgctcggtttgg

SEQ ID NO: 202113 - DNA, 33 bp, Homo sapien
catctcaaactgaaaaggtaaaacatagatctc

SEQ ID NO: 202114 - DNA, 33 bp, Homo sapien
catctcaaactgaaaatgtaaaacatagatctc

SEQ ID NO: 202115 - DNA, 33 bp, Homo sapien
tcctcaatcctgagcacgtcctgctagattttc

SEQ ID NO: 202116 - DNA, 33 bp, Homo sapien
tcctcaatcctgagcatgtcctgctagattttc

SEQ ID NO: 202117 - DNA, 33 bp, Homo sapien
tcttcaccacctgcataaaatagagcttccaac

SEQ ID NO: 202118 - DNA, 33 bp, Homo sapien
tcttcaccacctgcatgaaatagagcttccaac

SEQ ID NO: 202119 - DNA, 33 bp, Homo sapien
ttttcatgtctgtttcccatttttcatttgaac

SEQ ID NO: 202120 - DNA, 33 bp, Homo sapien
ttttcatgtctgtttctcatttttcatttgaac

SEQ ID NO: 202121 - DNA, 33 bp, Homo sapien
aaggaaaaagcatcccccgcaggcagtgagaga

SEQ ID NO: 202122 - DNA, 33 bp, Homo sapien
aaggaaaaagcatccctcgcaggcagtgagaga

SEQ ID NO: 202123 - DNA, 33 bp, Homo sapien
tctcagtccaaactctcacccaccatattgtat

SEQ ID NO: 202124 - DNA, 33 bp, Homo sapien
tctcagtccaaactcttacccaccatattgtat

SEQ ID NO: 202125 - DNA, 33 bp, Homo sapien
catcagccatcgtcaccgaggttccacaggtga

SEQ ID NO: 202126 - DNA, 33 bp, Homo sapien
catcagccatcgtcactgaggttccacaggtga

SEQ ID NO: 202127 - DNA, 33 bp, Homo sapien
ctatgtgacctggaaccctccactatacacaaa

SEQ ID NO: 202128 - DNA, 33 bp, Homo sapien
ctatgtgacctggaactctccactatacacaaa

SEQ ID NO: 202129 - DNA, 33 bp, Homo sapien
aaaaataatatttcaaagagccattgccagaaa

SEQ ID NO: 202130 - DNA, 33 bp, Homo sapien
aaaaataatatttcaacgagccattgccagaaa

SEQ ID NO: 202131 - DNA, 33 bp, Homo sapien
ttatttaatctctctacgtgtcatgtataaaat

SEQ ID NO: 202132 - DNA, 33 bp, Homo sapien
ttatttaatctctctatgtgtcatgtataaaat

SEQ ID NO: 202133 - DNA, 33 bp, Homo sapien
gtctgcattgctgccaccattatctttccaagc

SEQ ID NO: 202134 - DNA, 33 bp, Homo sapien
gtctgcattgctgccagcattatctttccaagc

SEQ ID NO: 202135 - DNA, 33 bp, Homo sapien
aatctttaaaatgttgcaaaatgaggtggtctg

SEQ ID NO: 202136 - DNA, 33 bp, Homo sapien
aatctttaaaatgttggaaaatgaggtggtctg

SEQ ID NO: 202137 - DNA, 33 bp, Homo sapien
ccattaagacaaagagccaaaggactgtgcatg

SEQ ID NO: 202138 - DNA, 33 bp, Homo sapien
ccattaagacaaagaggcaaaggactgtgcatg

SEQ ID NO: 202139 - DNA, 33 bp, Homo sapien
aactgtaaaagatgtacgccactgaacagcgtt

SEQ ID NO: 202140 - DNA, 33 bp, Homo sapien
aactgtaaaagatgtatgccactgaacagcgtt

SEQ ID NO: 202141 - DNA, 33 bp, Homo sapien
tgaaaataagcacatgaaggagcacaacataat

SEQ ID NO: 202142 - DNA, 33 bp, Homo sapien
tgaaaataagcacatggaggagcacaacataat

SEQ ID NO: 202143 - DNA, 33 bp, Homo sapien
tggggaatcaaattaaacctcagttagccataa

SEQ ID NO: 202144 - DNA, 33 bp, Homo sapien
tggggaatcaaattaagcctcagttagccataa

SEQ ID NO: 202145 - DNA, 33 bp, Homo sapien
gtatgagccacgtctaaaatagtccttaacatt

SEQ ID NO: 202146 - DNA, 33 bp, Homo sapien
gtatgagccacgtctagaatagtccttaacatt

SEQ ID NO: 202147 - DNA, 33 bp, Homo sapien
agcatgatctctttcaatatactccaaaagatg

SEQ ID NO: 202148 - DNA, 33 bp, Homo sapien
agcatgatctctttcagtatactccaaaagatg

SEQ ID NO: 202149 - DNA, 33 bp, Homo sapien
gcctactctccataccaacagggctcagtaacc

SEQ ID NO: 202150 - DNA, 33 bp, Homo sapien
gcctactctccataccgacagggctcagtaacc

SEQ ID NO: 202151 - DNA, 33 bp, Homo sapien
agtcccacagttttgcacatggttttcaggttc

SEQ ID NO: 202152 - DNA, 33 bp, Homo sapien
agtcccacagttttgcgcatggttttcaggttc

SEQ ID NO: 202153 - DNA, 33 bp, Homo sapien
agtcacctggaagccaagattagatgggcaagg

SEQ ID NO: 202154 - DNA, 33 bp, Homo sapien
agtcacctggaagccaggattagatgggcaagg

SEQ ID NO: 202155 - DNA, 33 bp, Homo sapien
atgttctatcaatcaaatggctttccctctcca

SEQ ID NO: 202156 - DNA, 33 bp, Homo sapien
atgttctatcaatcaactggctttccctctcca

SEQ ID NO: 202157 - DNA, 33 bp, Homo sapien
aaaataccgttaatagacatactaactgcagac

SEQ ID NO: 202158 - DNA, 33 bp, Homo sapien
aaaataccgttaatagtcatactaactgcagac

SEQ ID NO: 202159 - DNA, 33 bp, Homo sapien
aacagtagcagcaaagacttctcattttttaaa

SEQ ID NO: 202160 - DNA, 33 bp, Homo sapien
aacagtagcagcaaaggcttctcattttttaaa

SEQ ID NO: 202161 - DNA, 33 bp, Homo sapien
ttgtcactgttagcctaaagattttcttctcat

SEQ ID NO: 202162 - DNA, 33 bp, Homo sapien
ttgtcactgttagcctgaagattttcttctcat

SEQ ID NO: 202163 - DNA, 33 bp, Homo sapien
atggtagagctgataaaggagctgatagggagc

SEQ ID NO: 202164 - DNA, 33 bp, Homo sapien
atggtagagctgataagggagctgatagggagc

SEQ ID NO: 202165 - DNA, 33 bp, Homo sapien
ttaagaatttgttacaggatgcctgtcagaaac

SEQ ID NO: 202166 - DNA, 33 bp, Homo sapien
ttaagaatttgttacatgatgcctgtcagaaac

SEQ ID NO: 202167 - DNA, 33 bp, Homo sapien
atcccatactgttcagccacccattttcttgag

SEQ ID NO: 202168 - DNA, 33 bp, Homo sapien
atcccatactgttcaggcacccattttcttgag

SEQ ID NO: 202169 - DNA, 33 bp, Homo sapien
ataaaagagagagaaaaacaacttgcagctttg

SEQ ID NO: 202170 - DNA, 33 bp, Homo sapien
ataaaagagagagaaagacaacttgcagctttg

SEQ ID NO: 202171 - DNA, 33 bp, Homo sapien
tgttgttggacagagaatcccttaatagcagca

SEQ ID NO: 202172 - DNA, 33 bp, Homo sapien
tgttgttggacagagactcccttaatagcagca

SEQ ID NO: 202173 - DNA, 33 bp, Homo sapien
actcaatcactacaataatgtgcttatgaattt

SEQ ID NO: 202174 - DNA, 33 bp, Homo sapien
actcaatcactacaatcatgtgcttatgaattt

SEQ ID NO: 202175 - DNA, 33 bp, Homo sapien
agtgattgagtattcacctgtaagatagtgaca

SEQ ID NO: 202176 - DNA, 33 bp, Homo sapien
agtgattgagtattcatctgtaagatagtgaca

SEQ ID NO: 202177 - DNA, 33 bp, Homo sapien
atacactgctttttcaaatcaattttcaaaatg

SEQ ID NO: 202178 - DNA, 33 bp, Homo sapien
atacactgctttttcagatcaattttcaaaatg

SEQ ID NO: 202179 - DNA, 33 bp, Homo sapien
gcgtatcaaatcatgacggaaataaccaacact

SEQ ID NO: 202180 - DNA, 33 bp, Homo sapien
gcgtatcaaatcatgatggaaataaccaacact

SEQ ID NO: 202181 - DNA, 33 bp, Homo sapien
tttgatgttcaacttacacattttttgttgctt

SEQ ID NO: 202182 - DNA, 33 bp, Homo sapien
tttgatgttcaacttatacattttttgttgctt

SEQ ID NO: 202183 - DNA, 33 bp, Homo sapien
tatattacattctgtccatttccacagccactg

SEQ ID NO: 202184 - DNA, 33 bp, Homo sapien
tatattacattctgtctatttccacagccactg

SEQ ID NO: 202185 - DNA, 33 bp, Homo sapien
tggtagtatgacaaaaaataagatgacgttctt

SEQ ID NO: 202186 - DNA, 33 bp, Homo sapien
tggtagtatgacaaaagataagatgacgttctt

SEQ ID NO: 202187 - DNA, 33 bp, Homo sapien
aacgcttcctgaatccaatatcaaatccatcac

SEQ ID NO: 202188 - DNA, 33 bp, Homo sapien
aacgcttcctgaatccgatatcaaatccatcac

SEQ ID NO: 202189 - DNA, 33 bp, Homo sapien
gattgtatgtatattacgtttgggaaaatgctt

SEQ ID NO: 202190 - DNA, 33 bp, Homo sapien
gattgtatgtatattatgtttgggaaaatgctt

SEQ ID NO: 202191 - DNA, 33 bp, Homo sapien
attaatcacttattggaaccagtaattctctag

SEQ ID NO: 202192 - DNA, 33 bp, Homo sapien
attaatcacttattgggaccagtaattctctag

SEQ ID NO: 202193 - DNA, 33 bp, Homo sapien
gtagtagtagttcacacacagtgagtgacacgt

SEQ ID NO: 202194 - DNA, 33 bp, Homo sapien
gtagtagtagttcacagacagtgagtgacacgt

SEQ ID NO: 202195 - DNA, 33 bp, Homo sapien
aatggttataatgatgccagaaaggggggcaag

SEQ ID NO: 202196 - DNA, 33 bp, Homo sapien
aatggttataatgatgtcagaaaggggggcaag

SEQ ID NO: 202197 - DNA, 33 bp, Homo sapien
cctatcttcttcctatcaggacacataaccatc

SEQ ID NO: 202198 - DNA, 33 bp, Homo sapien
cctatcttcttcctatgaggacacataaccatc

SEQ ID NO: 202199 - DNA, 33 bp, Homo sapien
gaggggaaggacttacacagagcagagaaacat

SEQ ID NO: 202200 - DNA, 33 bp, Homo sapien
gaggggaaggacttacgcagagcagagaaacat

SEQ ID NO: 202201 - DNA, 33 bp, Homo sapien
atccaaggtgtcaggaccatagcctttcaatct

SEQ ID NO: 202202 - DNA, 33 bp, Homo sapien
atccaaggtgtcaggatcatagcctttcaatct

SEQ ID NO: 202203 - DNA, 33 bp, Homo sapien
ttctggcacatacccaacacgggctggagacag

SEQ ID NO: 202204 - DNA, 33 bp, Homo sapien
ttctggcacatacccagcacgggctggagacag

SEQ ID NO: 202205 - DNA, 33 bp, Homo sapien
caaaacaaacagagcgacatggggacagctggg

SEQ ID NO: 202206 - DNA, 33 bp, Homo sapien
caaaacaaacagagcggcatggggacagctggg

SEQ ID NO: 202207 - DNA, 33 bp, Homo sapien
ggctgaccttaactgcaagcctcaaatggaccc

SEQ ID NO: 202208 - DNA, 33 bp, Homo sapien
ggctgaccttaactgccagcctcaaatggaccc

SEQ ID NO: 202209 - DNA, 33 bp, Homo sapien
tttttgtttccaacaacggaaggtgagcctaca

SEQ ID NO: 202210 - DNA, 33 bp, Homo sapien
tttttgtttccaacaatggaaggtgagcctaca

SEQ ID NO: 202211 - DNA, 33 bp, Homo sapien
tccccttccaaatagcagccctaagcactacag

SEQ ID NO: 202212 - DNA, 33 bp, Homo sapien
tccccttccaaatagcggccctaagcactacag

SEQ ID NO: 202213 - DNA, 33 bp, Homo sapien
ttatgcttggattctaataagaagaatagtggg

SEQ ID NO: 202214 - DNA, 33 bp, Homo sapien
ttatgcttggattctagtaagaagaatagtggg

SEQ ID NO: 202215 - DNA, 33 bp, Homo sapien
tctgctaagaaaaccaacctccagtgctcactg

SEQ ID NO: 202216 - DNA, 33 bp, Homo sapien
tctgctaagaaaaccatcctccagtgctcactg

SEQ ID NO: 202217 - DNA, 33 bp, Homo sapien
cagagaacgaatggagcaccctactggtcttct

SEQ ID NO: 202218 - DNA, 33 bp, Homo sapien
cagagaacgaatggagtaccctactggtcttct

SEQ ID NO: 202219 - DNA, 33 bp, Homo sapien
acttacagtgtttcaaatggatatggctgtgtc

SEQ ID NO: 202220 - DNA, 33 bp, Homo sapien
acttacagtgtttcaactggatatggctgtgtc

SEQ ID NO: 202221 - DNA, 33 bp, Homo sapien
agaaaactaataaaaactccatgctttaacttc

SEQ ID NO: 202222 - DNA, 33 bp, Homo sapien
agaaaactaataaaaattccatgctttaacttc

SEQ ID NO: 202223 - DNA, 33 bp, Homo sapien
gcctatctatctaacaactctgacaacagaaga

SEQ ID NO: 202224 - DNA, 33 bp, Homo sapien
gcctatctatctaacacctctgacaacagaaga

SEQ ID NO: 202225 - DNA, 33 bp, Homo sapien
tgcttcaggagttcacaattggctaaaacttta

SEQ ID NO: 202226 - DNA, 33 bp, Homo sapien
tgcttcaggagttcactattggctaaaacttta

SEQ ID NO: 202227 - DNA, 33 bp, Homo sapien
atcctaatgtggtgtacggtttcatcaaagttt

SEQ ID NO: 202228 - DNA, 33 bp, Homo sapien
atcctaatgtggtgtatggtttcatcaaagttt

SEQ ID NO: 202229 - DNA, 33 bp, Homo sapien
gctcatctcttagccacgatttctcagaaaaca

SEQ ID NO: 202230 - DNA, 33 bp, Homo sapien
gctcatctcttagccaggatttctcagaaaaca

SEQ ID NO: 202231 - DNA, 33 bp, Homo sapien
atcttaaaaaacagaactcacaagagccaaaat

SEQ ID NO: 202232 - DNA, 33 bp, Homo sapien
atcttaaaaaacagaattcacaagagccaaaat

SEQ ID NO: 202233 - DNA, 33 bp, Homo sapien
agggatattcagtaagcctggtgtggggaaagc

SEQ ID NO: 202234 - DNA, 33 bp, Homo sapien
agggatattcagtaagtctggtgtggggaaagc

SEQ ID NO: 202235 - DNA, 33 bp, Homo sapien
tatttcatttgacgtacatagtcactgcatgta

SEQ ID NO: 202236 - DNA, 33 bp, Homo sapien
tatttcatttgacgtagatagtcactgcatgta

SEQ ID NO: 202237 - DNA, 33 bp, Homo sapien
tgaagcaggctatggaataaaagaaacaacaaa

SEQ ID NO: 202238 - DNA, 33 bp, Homo sapien
tgaagcaggctatggattaaaagaaacaacaaa

SEQ ID NO: 202239 - DNA, 33 bp, Homo sapien
acaatggagtatcatacgagtaagaagaaatct

SEQ ID NO: 202240 - DNA, 33 bp, Homo sapien
acaatggagtatcatatgagtaagaagaaatct

SEQ ID NO: 202241 - DNA, 33 bp, Homo sapien
atcttgcagtcctaaaaagaactgaggagataa

SEQ ID NO: 202242 - DNA, 33 bp, Homo sapien
atcttgcagtcctaaagagaactgaggagataa

SEQ ID NO: 202243 - DNA, 33 bp, Homo sapien
atgagagactgacagcagatggatgggtaaatg

SEQ ID NO: 202244 - DNA, 33 bp, Homo sapien
atgagagactgacagccgatggatgggtaaatg

SEQ ID NO: 202245 - DNA, 33 bp, Homo sapien
cctcaaaaggatggtcaagggttcgcaatcttt

SEQ ID NO: 202246 - DNA, 33 bp, Homo sapien
cctcaaaaggatggtcgagggttcgcaatcttt

SEQ ID NO: 202247 - DNA, 33 bp, Homo sapien
acgtttcagagggagaaaaatgctacagttgat

SEQ ID NO: 202248 - DNA, 33 bp, Homo sapien
acgtttcagagggagagaaatgctacagttgat

SEQ ID NO: 202249 - DNA, 33 bp, Homo sapien
gtcactcactattcccagaagagcctgtgtttt

SEQ ID NO: 202250 - DNA, 33 bp, Homo sapien
gtcactcactattcccggaagagcctgtgtttt

SEQ ID NO: 202251 - DNA, 33 bp, Homo sapien
gcttaaaaagtaaataagtgaagctcaggctag

SEQ ID NO: 202252 - DNA, 33 bp, Homo sapien
gcttaaaaagtaaataggtgaagctcaggctag

SEQ ID NO: 202253 - DNA, 33 bp, Homo sapien
acacctgcccttgaagcaggctaggataatacc

SEQ ID NO: 202254 - DNA, 33 bp, Homo sapien
acacctgcccttgaagtaggctaggataatacc

SEQ ID NO: 202255 - DNA, 33 bp, Homo sapien
aggtccatgcagctacaagggaagctcagcagg

SEQ ID NO: 202256 - DNA, 33 bp, Homo sapien
aggtccatgcagctacgagggaagctcagcagg

SEQ ID NO: 202257 - DNA, 33 bp, Homo sapien
tcatgagagattttgaagcttaaaaatgtagtg

SEQ ID NO: 202258 - DNA, 33 bp, Homo sapien
tcatgagagattttgaggcttaaaaatgtagtg

SEQ ID NO: 202259 - DNA, 33 bp, Homo sapien
ccacttagctaatgaacagatactggatgagac

SEQ ID NO: 202260 - DNA, 33 bp, Homo sapien
ccacttagctaatgaatagatactggatgagac

SEQ ID NO: 202261 - DNA, 33 bp, Homo sapien
tccaggctagttcatacactaactcttcaaggt

SEQ ID NO: 202262 - DNA, 33 bp, Homo sapien
tccaggctagttcatatactaactcttcaaggt

SEQ ID NO: 202263 - DNA, 33 bp, Homo sapien
cagtaggctggctacactgaggctgagaatcag

SEQ ID NO: 202264 - DNA, 33 bp, Homo sapien
cagtaggctggctacattgaggctgagaatcag

SEQ ID NO: 202265 - DNA, 33 bp, Homo sapien
tcattaactccaatgcagcaaaggtaacaaatc

SEQ ID NO: 202266 - DNA, 33 bp, Homo sapien
tcattaactccaatgcggcaaaggtaacaaatc

SEQ ID NO: 202267 - DNA, 33 bp, Homo sapien
atcaactgttataaccagactgtgactacggca

SEQ ID NO: 202268 - DNA, 33 bp, Homo sapien
atcaactgttataaccggactgtgactacggca

SEQ ID NO: 202269 - DNA, 33 bp, Homo sapien
atccattcctgggagagaactaatctgaaaagt

SEQ ID NO: 202270 - DNA, 33 bp, Homo sapien
atccattcctgggagataactaatctgaaaagt

SEQ ID NO: 202271 - DNA, 33 bp, Homo sapien
ccagctgcctggtgtacggtctgctgagccctc

SEQ ID NO: 202272 - DNA, 33 bp, Homo sapien
ccagctgcctggtgtatggtctgctgagccctc

SEQ ID NO: 202273 - DNA, 33 bp, Homo sapien
gcacggttaccagccaccctctttctgtagaat

SEQ ID NO: 202274 - DNA, 33 bp, Homo sapien
gcacggttaccagccatcctctttctgtagaat

SEQ ID NO: 202275 - DNA, 33 bp, Homo sapien
tatcctttagttttacacttctcagcctagaat

SEQ ID NO: 202276 - DNA, 33 bp, Homo sapien
tatcctttagttttacgcttctcagcctagaat

SEQ ID NO: 202277 - DNA, 33 bp, Homo sapien
caagattagggacacactgtaggtttgtcagcg

SEQ ID NO: 202278 - DNA, 33 bp, Homo sapien
caagattagggacacattgtaggtttgtcagcg

SEQ ID NO: 202279 - DNA, 33 bp, Homo sapien
cttacattgtaaatgcccctgtagccaaagtac

SEQ ID NO: 202280 - DNA, 33 bp, Homo sapien
cttacattgtaaatgctcctgtagccaaagtac

SEQ ID NO: 202281 - DNA, 33 bp, Homo sapien
ctgtatttgtagagaaattaacagcactctcta

SEQ ID NO: 202282 - DNA, 33 bp, Homo sapien
ctgtatttgtagagaagttaacagcactctcta

SEQ ID NO: 202283 - DNA, 33 bp, Homo sapien
gccccccaaagagtcactcacatcaaagatctt

SEQ ID NO: 202284 - DNA, 33 bp, Homo sapien
gccccccaaagagtcattcacatcaaagatctt

SEQ ID NO: 202285 - DNA, 33 bp, Homo sapien
tagggcgcgagagaaacagtggaatcaaggatg

SEQ ID NO: 202286 - DNA, 33 bp, Homo sapien
tagggcgcgagagaaagagtggaatcaaggatg

SEQ ID NO: 202287 - DNA, 33 bp, Homo sapien
caatagcgtttaaaagcatgatataggatttat

SEQ ID NO: 202288 - DNA, 33 bp, Homo sapien
caatagcgtttaaaagtatgatataggatttat

SEQ ID NO: 202289 - DNA, 33 bp, Homo sapien
ggatggatgattgacacattcaacgtgattcaa

SEQ ID NO: 202290 - DNA, 33 bp, Homo sapien
ggatggatgattgacagattcaacgtgattcaa

SEQ ID NO: 202291 - DNA, 33 bp, Homo sapien
agaagaaattttgccactgaagtacaggcccca

SEQ ID NO: 202292 - DNA, 33 bp, Homo sapien
agaagaaattttgccattgaagtacaggcccca

SEQ ID NO: 202293 - DNA, 33 bp, Homo sapien
ttcttccttatagttcacacagaaacatgactc

SEQ ID NO: 202294 - DNA, 33 bp, Homo sapien
ttcttccttatagttcgcacagaaacatgactc

SEQ ID NO: 202295 - DNA, 33 bp, Homo sapien
aactcattaatcctcaaagaaaaacaactcaaa

SEQ ID NO: 202296 - DNA, 33 bp, Homo sapien
aactcattaatcctcagagaaaaacaactcaaa

SEQ ID NO: 202297 - DNA, 33 bp, Homo sapien
tgaataactctgaatcaatgtttacagccagat

SEQ ID NO: 202298 - DNA, 33 bp, Homo sapien
tgaataactctgaatctatgtttacagccagat

SEQ ID NO: 202299 - DNA, 33 bp, Homo sapien
caaagtttagtgaaagactcagacataatagca

SEQ ID NO: 202300 - DNA, 33 bp, Homo sapien
caaagtttagtgaaaggctcagacataatagca

SEQ ID NO: 202301 - DNA, 33 bp, Homo sapien
cacctcctcactcaaccccagtccttgttattg

SEQ ID NO: 202302 - DNA, 33 bp, Homo sapien
cacctcctcactcaactccagtccttgttattg

SEQ ID NO: 202303 - DNA, 33 bp, Homo sapien
aaaagtgattggacacaaattgaaaaatatctt

SEQ ID NO: 202304 - DNA, 33 bp, Homo sapien
aaaagtgattggacacgaattgaaaaatatctt

SEQ ID NO: 202305 - DNA, 33 bp, Homo sapien
gagttctaaatccagccacaagttcttcaaccc

SEQ ID NO: 202306 - DNA, 33 bp, Homo sapien
gagttctaaatccagctacaagttcttcaaccc

SEQ ID NO: 202307 - DNA, 33 bp, Homo sapien
ccctgacccaaactccagagtgctaacctaaca

SEQ ID NO: 202308 - DNA, 33 bp, Homo sapien
ccctgacccaaactccggagtgctaacctaaca

SEQ ID NO: 202309 - DNA, 33 bp, Homo sapien
aagtaatgacaaatgaatcacagctaactaaaa

SEQ ID NO: 202310 - DNA, 33 bp, Homo sapien
aagtaatgacaaatgagtcacagctaactaaaa

SEQ ID NO: 202311 - DNA, 33 bp, Homo sapien
ctgtgaaatagacaaactattctttctctgacc

SEQ ID NO: 202312 - DNA, 33 bp, Homo sapien
ctgtgaaatagacaaattattctttctctgacc

SEQ ID NO: 202313 - DNA, 33 bp, Homo sapien
agcatatataggaatacgttgttaatggaatac

SEQ ID NO: 202314 - DNA, 33 bp, Homo sapien
agcatatataggaataggttgttaatggaatac

SEQ ID NO: 202315 - DNA, 33 bp, Homo sapien
gtgaaacaaatataccagaaaagcaaagttact

SEQ ID NO: 202316 - DNA, 33 bp, Homo sapien
gtgaaacaaatatacctgaaaagcaaagttact

SEQ ID NO: 202317 - DNA, 33 bp, Homo sapien
tctggagtcgaacgcccaaaaccaccgatgaac

SEQ ID NO: 202318 - DNA, 33 bp, Homo sapien
tctggagtcgaacgccgaaaaccaccgatgaac

SEQ ID NO: 202319 - DNA, 33 bp, Homo sapien
gtttcctctaacacagcacatggcacacactgg

SEQ ID NO: 202320 - DNA, 33 bp, Homo sapien
gtttcctctaacacagtacatggcacacactgg

SEQ ID NO: 202321 - DNA, 33 bp, Homo sapien
aatagttctgggcttaaaaatgtcaatactttt

SEQ ID NO: 202322 - DNA, 33 bp, Homo sapien
aatagttctgggcttagaaatgtcaatactttt

SEQ ID NO: 202323 - DNA, 33 bp, Homo sapien
aagcacagtcagtgaacggagacagctatggtg

SEQ ID NO: 202324 - DNA, 33 bp, Homo sapien
aagcacagtcagtgaatggagacagctatggtg

SEQ ID NO: 202325 - DNA, 33 bp, Homo sapien
cctctgactccctctacgactgaggagaaagga

SEQ ID NO: 202326 - DNA, 33 bp, Homo sapien
cctctgactccctctatgactgaggagaaagga

SEQ ID NO: 202327 - DNA, 33 bp, Homo sapien
aaccctgcagttggaaagggagaagccttactc

SEQ ID NO: 202328 - DNA, 33 bp, Homo sapien
aaccctgcagttggaaggggagaagccttactc

SEQ ID NO: 202329 - DNA, 33 bp, Homo sapien
tcttgcataagaaaaacgatggagagattcaga

SEQ ID NO: 202330 - DNA, 33 bp, Homo sapien
tcttgcataagaaaaatgatggagagattcaga

SEQ ID NO: 202331 - DNA, 33 bp, Homo sapien
tcctgaatcccccttacagctttagtgagtctg

SEQ ID NO: 202332 - DNA, 33 bp, Homo sapien
tcctgaatcccccttatagctttagtgagtctg

SEQ ID NO: 202333 - DNA, 33 bp, Homo sapien
cttgtattactacagcaatggattccacagtcc

SEQ ID NO: 202334 - DNA, 33 bp, Homo sapien
cttgtattactacagcgatggattccacagtcc

SEQ ID NO: 202335 - DNA, 33 bp, Homo sapien
gcaacactgagaaataaaccttcattatgttga

SEQ ID NO: 202336 - DNA, 33 bp, Homo sapien
gcaacactgagaaatagaccttcattatgttga

SEQ ID NO: 202337 - DNA, 33 bp, Homo sapien
gttaaaataaatgagacgttacgtagatgctga

SEQ ID NO: 202338 - DNA, 33 bp, Homo sapien
gttaaaataaatgagatgttacgtagatgctga

SEQ ID NO: 202339 - DNA, 33 bp, Homo sapien
atgggagagaaatggaaagaattctctgagatg

SEQ ID NO: 202340 - DNA, 33 bp, Homo sapien
atgggagagaaatggagagaattctctgagatg

SEQ ID NO: 202341 - DNA, 33 bp, Homo sapien
aatgacagttttcaaacgaaatgtctggccaga

SEQ ID NO: 202342 - DNA, 33 bp, Homo sapien
aatgacagttttcaaatgaaatgtctggccaga

SEQ ID NO: 202343 - DNA, 33 bp, Homo sapien
attatatatgctgccaaaaaatggtataataat

SEQ ID NO: 202344 - DNA, 33 bp, Homo sapien
attatatatgctgccagaaaatggtataataat

SEQ ID NO: 202345 - DNA, 33 bp, Homo sapien
ttagtcatacaaggaagggggaagaacgactgg

SEQ ID NO: 202346 - DNA, 33 bp, Homo sapien
ttagtcatacaaggaatggggaagaacgactgg

SEQ ID NO: 202347 - DNA, 33 bp, Homo sapien
tcatctgattactacacggaaaatatgtgtttg

SEQ ID NO: 202348 - DNA, 33 bp, Homo sapien
tcatctgattactacatggaaaatatgtgtttg

SEQ ID NO: 202349 - DNA, 33 bp, Homo sapien
gtgacctctagccaacgcttcgtttaataacct

SEQ ID NO: 202350 - DNA, 33 bp, Homo sapien
gtgacctctagccaactcttcgtttaataacct

SEQ ID NO: 202351 - DNA, 33 bp, Homo sapien
ctgaagcctgagaaaacaggccttgcttgaggc

SEQ ID NO: 202352 - DNA, 33 bp, Homo sapien
ctgaagcctgagaaaataggccttgcttgaggc

SEQ ID NO: 202353 - DNA, 33 bp, Homo sapien
tgtgctaggaaattgacgttttcacgccagtgg

SEQ ID NO: 202354 - DNA, 33 bp, Homo sapien
tgtgctaggaaattgatgttttcacgccagtgg

SEQ ID NO: 202355 - DNA, 33 bp, Homo sapien
aaaacacacacattctaaatggatgtcttgggt

SEQ ID NO: 202356 - DNA, 33 bp, Homo sapien
aaaacacacacattctgaatggatgtcttgggt

SEQ ID NO: 202357 - DNA, 33 bp, Homo sapien
caggtgtctgattaaaacaacttactgagtaca

SEQ ID NO: 202358 - DNA, 33 bp, Homo sapien
caggtgtctgattaaatcaacttactgagtaca

SEQ ID NO: 202359 - DNA, 33 bp, Homo sapien
tatcctgagaatcatacagccactggagagaga

SEQ ID NO: 202360 - DNA, 33 bp, Homo sapien
tatcctgagaatcatagagccactggagagaga

SEQ ID NO: 202361 - DNA, 33 bp, Homo sapien
tagagcacttggaaaacgcaagcccaaccctca

SEQ ID NO: 202362 - DNA, 33 bp, Homo sapien
tagagcacttggaaaatgcaagcccaaccctca

SEQ ID NO: 202363 - DNA, 33 bp, Homo sapien
tcacaatctaggagacacgtgaaggtcaacgtc

SEQ ID NO: 202364 - DNA, 33 bp, Homo sapien
tcacaatctaggagacgcgtgaaggtcaacgtc

SEQ ID NO: 202365 - DNA, 33 bp, Homo sapien
cattctcctttaaaaacttgaatcgacatagcc

SEQ ID NO: 202366 - DNA, 33 bp, Homo sapien
cattctcctttaaaaatttgaatcgacatagcc

SEQ ID NO: 202367 - DNA, 33 bp, Homo sapien
ttaaccccacggtacacattcagaaacatctct

SEQ ID NO: 202368 - DNA, 33 bp, Homo sapien
ttaaccccacggtacatattcagaaacatctct

SEQ ID NO: 202369 - DNA, 33 bp, Homo sapien
atggcctcatgccagacgttgaatggttgaatg

SEQ ID NO: 202370 - DNA, 33 bp, Homo sapien
atggcctcatgccagatgttgaatggttgaatg

SEQ ID NO: 202371 - DNA, 33 bp, Homo sapien
ggaacacctttatgtccaccttcttccatcgtg

SEQ ID NO: 202372 - DNA, 33 bp, Homo sapien
ggaacacctttatgtctaccttcttccatcgtg

SEQ ID NO: 202373 - DNA, 33 bp, Homo sapien
acagcccagtatttccaattcttctcactccat

SEQ ID NO: 202374 - DNA, 33 bp, Homo sapien
acagcccagtatttcctattcttctcactccat

SEQ ID NO: 202375 - DNA, 33 bp, Homo sapien
ggtggcacatttcttaacacagacatggaaata

SEQ ID NO: 202376 - DNA, 33 bp, Homo sapien
ggtggcacatttcttagcacagacatggaaata

SEQ ID NO: 202377 - DNA, 33 bp, Homo sapien
tgtagatccttcttcccactgagtttctcccat

SEQ ID NO: 202378 - DNA, 33 bp, Homo sapien
tgtagatccttcttcctactgagtttctcccat

SEQ ID NO: 202379 - DNA, 33 bp, Homo sapien
caagttatttatagaacgaatgtgcctcaatat

SEQ ID NO: 202380 - DNA, 33 bp, Homo sapien
caagttatttatagaaggaatgtgcctcaatat

SEQ ID NO: 202381 - DNA, 33 bp, Homo sapien
ctgtacaagaagtacacatctcttccggtctgt

SEQ ID NO: 202382 - DNA, 33 bp, Homo sapien
ctgtacaagaagtacatatctcttccggtctgt

SEQ ID NO: 202383 - DNA, 33 bp, Homo sapien
caggagagaggggcaccaaggctttatgatttg

SEQ ID NO: 202384 - DNA, 33 bp, Homo sapien
caggagagaggggcacgaaggctttatgatttg

SEQ ID NO: 202385 - DNA, 33 bp, Homo sapien
gagaagcaggatattcacacggtcttagcgaat

SEQ ID NO: 202386 - DNA, 33 bp, Homo sapien
gagaagcaggatattcgcacggtcttagcgaat

SEQ ID NO: 202387 - DNA, 33 bp, Homo sapien
ttccagaacttgactcaaatttaacatgagttg

SEQ ID NO: 202388 - DNA, 33 bp, Homo sapien
ttccagaacttgactcgaatttaacatgagttg

SEQ ID NO: 202389 - DNA, 33 bp, Homo sapien
caatgccaagcctgtacgaggtacttaataaat

SEQ ID NO: 202390 - DNA, 33 bp, Homo sapien
caatgccaagcctgtatgaggtacttaataaat

SEQ ID NO: 202391 - DNA, 33 bp, Homo sapien
gtctattttattgtcaactcttcttccacagct

SEQ ID NO: 202392 - DNA, 33 bp, Homo sapien
gtctattttattgtcagctcttcttccacagct

SEQ ID NO: 202393 - DNA, 33 bp, Homo sapien
ccaagctcctcaatagcatttttaagcattcat

SEQ ID NO: 202394 - DNA, 33 bp, Homo sapien
ccaagctcctcaatagtatttttaagcattcat

SEQ ID NO: 202395 - DNA, 33 bp, Homo sapien
tctcagatggaaatgaagaattttggggaaact

SEQ ID NO: 202396 - DNA, 33 bp, Homo sapien
tctcagatggaaatgaggaattttggggaaact

SEQ ID NO: 202397 - DNA, 33 bp, Homo sapien
tcttctcaaatgccaccgatggaagagagaagt

SEQ ID NO: 202398 - DNA, 33 bp, Homo sapien
tcttctcaaatgccactgatggaagagagaagt

SEQ ID NO: 202399 - DNA, 33 bp, Homo sapien
gtgtaacaggtaccaaatgcagttgactattta

SEQ ID NO: 202400 - DNA, 33 bp, Homo sapien
gtgtaacaggtaccaagtgcagttgactattta

SEQ ID NO: 202401 - DNA, 33 bp, Homo sapien
gtgtgtagctgagaggaattagaagatcattct

SEQ ID NO: 202402 - DNA, 33 bp, Homo sapien
gtgtgtagctgagaggtattagaagatcattct

SEQ ID NO: 202403 - DNA, 33 bp, Homo sapien
cactttcttaagtagaaccctcctacacggaat

SEQ ID NO: 202404 - DNA, 33 bp, Homo sapien
cactttcttaagtagatccctcctacacggaat

SEQ ID NO: 202405 - DNA, 33 bp, Homo sapien
gaattattatgaaccaacaactcctatgtatat

SEQ ID NO: 202406 - DNA, 33 bp, Homo sapien
gaattattatgaaccagcaactcctatgtatat

SEQ ID NO: 202407 - DNA, 33 bp, Homo sapien
gtaaaagtaaaggtcaacaacatgggaatggct

SEQ ID NO: 202408 - DNA, 33 bp, Homo sapien
gtaaaagtaaaggtcagcaacatgggaatggct

SEQ ID NO: 202409 - DNA, 33 bp, Homo sapien
atcagggaaactttgaaaatgagacattaccag

SEQ ID NO: 202410 - DNA, 33 bp, Homo sapien
atcagggaaactttgagaatgagacattaccag

SEQ ID NO: 202411 - DNA, 33 bp, Homo sapien
atagatatgtgtcatgaactaaatacttatatt

SEQ ID NO: 202412 - DNA, 33 bp, Homo sapien
atagatatgtgtcatggactaaatacttatatt

SEQ ID NO: 202413 - DNA, 33 bp, Homo sapien
gccacatcactcttgtcaaggggtggtgtgctc

SEQ ID NO: 202414 - DNA, 33 bp, Homo sapien
gccacatcactcttgttaaggggtggtgtgctc

SEQ ID NO: 202415 - DNA, 33 bp, Homo sapien
gataaaacaaatgtgacgaaatattaacagtag

SEQ ID NO: 202416 - DNA, 33 bp, Homo sapien
gataaaacaaatgtgatgaaatattaacagtag

SEQ ID NO: 202417 - DNA, 33 bp, Homo sapien
cctcatgatctacagtaaaagaaagtgagtgga

SEQ ID NO: 202418 - DNA, 33 bp, Homo sapien
cctcatgatctacagtgaaagaaagtgagtgga

SEQ ID NO: 202419 - DNA, 33 bp, Homo sapien
agaaagtcaaaatgtacctcagtatctatttct

SEQ ID NO: 202420 - DNA, 33 bp, Homo sapien
agaaagtcaaaatgtatctcagtatctatttct

SEQ ID NO: 202421 - DNA, 33 bp, Homo sapien
atactagagaggaacacgaaggctaagttgtac

SEQ ID NO: 202422 - DNA, 33 bp, Homo sapien
atactagagaggaacatgaaggctaagttgtac

SEQ ID NO: 202423 - DNA, 33 bp, Homo sapien
tgctcttaataatcacactttctttgaaatcct

SEQ ID NO: 202424 - DNA, 33 bp, Homo sapien
tgctcttaataatcacgctttctttgaaatcct

SEQ ID NO: 202425 - DNA, 33 bp, Homo sapien
tgctactcagaaaaaaagattcacttcaaatta

SEQ ID NO: 202426 - DNA, 33 bp, Homo sapien
tgctactcagaaaaaacgattcacttcaaatta

SEQ ID NO: 202427 - DNA, 33 bp, Homo sapien
atgccctttcatgttaagtttgtgtgagttgag

SEQ ID NO: 202428 - DNA, 33 bp, Homo sapien
atgccctttcatgttaggtttgtgtgagttgag

SEQ ID NO: 202429 - DNA, 33 bp, Homo sapien
gaaatatgactgataactgaacaggggaaaaga

SEQ ID NO: 202430 - DNA, 33 bp, Homo sapien
gaaatatgactgataattgaacaggggaaaaga

SEQ ID NO: 202431 - DNA, 33 bp, Homo sapien
aaatatagataattgacagaagaaaagcaaaac

SEQ ID NO: 202432 - DNA, 33 bp, Homo sapien
aaatatagataattgagagaagaaaagcaaaac

SEQ ID NO: 202433 - DNA, 33 bp, Homo sapien
gggagaaaatgtctgcaaaacatatatccgatg

SEQ ID NO: 202434 - DNA, 33 bp, Homo sapien
gggagaaaatgtctgcgaaacatatatccgatg

SEQ ID NO: 202435 - DNA, 33 bp, Homo sapien
tgaaatatcactacacacctacttgaatggcta

SEQ ID NO: 202436 - DNA, 33 bp, Homo sapien
tgaaatatcactacacgcctacttgaatggcta

SEQ ID NO: 202437 - DNA, 33 bp, Homo sapien
ttatctgagtgtatgaaggtagctcagttataa

SEQ ID NO: 202438 - DNA, 33 bp, Homo sapien
ttatctgagtgtatgacggtagctcagttataa

SEQ ID NO: 202439 - DNA, 33 bp, Homo sapien
agtgaatatgccatcacgctggtttataaatct

SEQ ID NO: 202440 - DNA, 33 bp, Homo sapien
agtgaatatgccatcatgctggtttataaatct

SEQ ID NO: 202441 - DNA, 33 bp, Homo sapien
aagagatgtatttcaaaatgcgaaattaacagt

SEQ ID NO: 202442 - DNA, 33 bp, Homo sapien
aagagatgtatttcaagatgcgaaattaacagt

SEQ ID NO: 202443 - DNA, 33 bp, Homo sapien
attgaacgtgaggccccccagccttcaaaggca

SEQ ID NO: 202444 - DNA, 33 bp, Homo sapien
attgaacgtgaggccctccagccttcaaaggca

SEQ ID NO: 202445 - DNA, 33 bp, Homo sapien
gcctacaagtaattcacaatactacagaagaac

SEQ ID NO: 202446 - DNA, 33 bp, Homo sapien
gcctacaagtaattcataatactacagaagaac

SEQ ID NO: 202447 - DNA, 33 bp, Homo sapien
tccctgctgtgaacacaatttctacaatcctag

SEQ ID NO: 202448 - DNA, 33 bp, Homo sapien
tccctgctgtgaacacgatttctacaatcctag

SEQ ID NO: 202449 - DNA, 33 bp, Homo sapien
tttcatgcgatctagcactatcatataaagaca

SEQ ID NO: 202450 - DNA, 33 bp, Homo sapien
tttcatgcgatctagcgctatcatataaagaca

SEQ ID NO: 202451 - DNA, 33 bp, Homo sapien
gtaatgccactatgaaaaattgcatgtaagtct

SEQ ID NO: 202452 - DNA, 33 bp, Homo sapien
gtaatgccactatgaacaattgcatgtaagtct

SEQ ID NO: 202453 - DNA, 33 bp, Homo sapien
gcaaaggcagtttcaacatgtcccacaaagact

SEQ ID NO: 202454 - DNA, 33 bp, Homo sapien
gcaaaggcagtttcaatatgtcccacaaagact

SEQ ID NO: 202455 - DNA, 33 bp, Homo sapien
tgctacactgagtttcgccatatgcctctacaa

SEQ ID NO: 202456 - DNA, 33 bp, Homo sapien
tgctacactgagtttctccatatgcctctacaa

SEQ ID NO: 202457 - DNA, 33 bp, Homo sapien
aacagatgatgcacccagcctacccgaaacttg

SEQ ID NO: 202458 - DNA, 33 bp, Homo sapien
aacagatgatgcacccggcctacccgaaacttg

SEQ ID NO: 202459 - DNA, 33 bp, Homo sapien
tagtaagatgagctccgcaagaagaaatacaaa

SEQ ID NO: 202460 - DNA, 33 bp, Homo sapien
tagtaagatgagctcctcaagaagaaatacaaa

SEQ ID NO: 202461 - DNA, 33 bp, Homo sapien
cacctacctactacacactagatttctttaacc

SEQ ID NO: 202462 - DNA, 33 bp, Homo sapien
cacctacctactacacgctagatttctttaacc

SEQ ID NO: 202463 - DNA, 33 bp, Homo sapien
ggtgtgaagagaggaacagctcagtgaggttgg

SEQ ID NO: 202464 - DNA, 33 bp, Homo sapien
ggtgtgaagagaggaagagctcagtgaggttgg

SEQ ID NO: 202465 - DNA, 33 bp, Homo sapien
tttttaatgataaaaccggggctctgagatgct

SEQ ID NO: 202466 - DNA, 33 bp, Homo sapien
tttttaatgataaaactggggctctgagatgct

SEQ ID NO: 202467 - DNA, 33 bp, Homo sapien
tactcactgaaaggtcaaagtgattgataatga

SEQ ID NO: 202468 - DNA, 33 bp, Homo sapien
tactcactgaaaggtccaagtgattgataatga

SEQ ID NO: 202469 - DNA, 33 bp, Homo sapien
tttcttgtaagaattacaatgtttgcctctact

SEQ ID NO: 202470 - DNA, 33 bp, Homo sapien
tttcttgtaagaattataatgtttgcctctact

SEQ ID NO: 202471 - DNA, 33 bp, Homo sapien
gatcaaaagccaaacacggaggcgaacttgtct

SEQ ID NO: 202472 - DNA, 33 bp, Homo sapien
gatcaaaagccaaacagggaggcgaacttgtct

SEQ ID NO: 202473 - DNA, 33 bp, Homo sapien
ctagttttccttgtatcagaaccagactcatgg

SEQ ID NO: 202474 - DNA, 33 bp, Homo sapien
ctagttttccttgtatgagaaccagactcatgg

SEQ ID NO: 202475 - DNA, 33 bp, Homo sapien
tattttgggcagaaacaacccagaaactacccc

SEQ ID NO: 202476 - DNA, 33 bp, Homo sapien
tattttgggcagaaaccacccagaaactacccc

SEQ ID NO: 202477 - DNA, 33 bp, Homo sapien
gaccaatggaatgaaagacagagcccagaaata

SEQ ID NO: 202478 - DNA, 33 bp, Homo sapien
gaccaatggaatgaaatacagagcccagaaata

SEQ ID NO: 202479 - DNA, 33 bp, Homo sapien
gtcctcttcctgtcccccaaaattaaaccagaa

SEQ ID NO: 202480 - DNA, 33 bp, Homo sapien
gtcctcttcctgtccctcaaaattaaaccagaa

SEQ ID NO: 202481 - DNA, 33 bp, Homo sapien
ttttaaggactgggtaggactgactgccatgtg

SEQ ID NO: 202482 - DNA, 33 bp, Homo sapien
ttttaaggactgggtatgactgactgccatgtg

SEQ ID NO: 202483 - DNA, 33 bp, Homo sapien
tcaagttcaatgtttaacgccctgccctctact

SEQ ID NO: 202484 - DNA, 33 bp, Homo sapien
tcaagttcaatgtttagcgccctgccctctact

SEQ ID NO: 202485 - DNA, 33 bp, Homo sapien
gcacattgatgccgtaaaagaatggattctaag

SEQ ID NO: 202486 - DNA, 33 bp, Homo sapien
gcacattgatgccgtagaagaatggattctaag

SEQ ID NO: 202487 - DNA, 33 bp, Homo sapien
tccttgctacatctacaaatagcatcgcttgac

SEQ ID NO: 202488 - DNA, 33 bp, Homo sapien
tccttgctacatctacgaatagcatcgcttgac

SEQ ID NO: 202489 - DNA, 33 bp, Homo sapien
gcaactgaaaaaatcacggtttcagactttgca

SEQ ID NO: 202490 - DNA, 33 bp, Homo sapien
gcaactgaaaaaatcatggtttcagactttgca

SEQ ID NO: 202491 - DNA, 33 bp, Homo sapien
taagtcaccgtacaccccgaaattcacagcgga

SEQ ID NO: 202492 - DNA, 33 bp, Homo sapien
taagtcaccgtacacctcgaaattcacagcgga

SEQ ID NO: 202493 - DNA, 33 bp, Homo sapien
catacacagttcatcactgatccaaacgtcgtt

SEQ ID NO: 202494 - DNA, 33 bp, Homo sapien
catacacagttcatcattgatccaaacgtcgtt

SEQ ID NO: 202495 - DNA, 33 bp, Homo sapien
ggattagaagggctgaagttcactgaatcccaa

SEQ ID NO: 202496 - DNA, 33 bp, Homo sapien
ggattagaagggctgaggttcactgaatcccaa

SEQ ID NO: 202497 - DNA, 33 bp, Homo sapien
accgagatcctacacacacagtgttggcaatgt

SEQ ID NO: 202498 - DNA, 33 bp, Homo sapien
accgagatcctacacagacagtgttggcaatgt

SEQ ID NO: 202499 - DNA, 33 bp, Homo sapien
cctgtcaatgtctagaaatgatccgaacacata

SEQ ID NO: 202500 - DNA, 33 bp, Homo sapien
cctgtcaatgtctagagatgatccgaacacata

SEQ ID NO: 202501 - DNA, 33 bp, Homo sapien
tggcagacatgtgggaccagggaagggcactga

SEQ ID NO: 202502 - DNA, 33 bp, Homo sapien
tggcagacatgtgggatcagggaagggcactga

SEQ ID NO: 202503 - DNA, 33 bp, Homo sapien
catgtgctaactattcaaaatgtctatgcctgc

SEQ ID NO: 202504 - DNA, 33 bp, Homo sapien
catgtgctaactattccaaatgtctatgcctgc

SEQ ID NO: 202505 - DNA, 33 bp, Homo sapien
gcaggtgctgtgtcaagagagctgtctcattgt

SEQ ID NO: 202506 - DNA, 33 bp, Homo sapien
gcaggtgctgtgtcaatagagctgtctcattgt

SEQ ID NO: 202507 - DNA, 33 bp, Homo sapien
tgagatcttgctgtaccgctacttgcattggaa

SEQ ID NO: 202508 - DNA, 33 bp, Homo sapien
tgagatcttgctgtacggctacttgcattggaa

SEQ ID NO: 202509 - DNA, 33 bp, Homo sapien
gctgatgacagaaaggaacatcaaagagagtca

SEQ ID NO: 202510 - DNA, 33 bp, Homo sapien
gctgatgacagaaagggacatcaaagagagtca

SEQ ID NO: 202511 - DNA, 33 bp, Homo sapien
gagcttaaatgtcccccgatgccaacgattgag

SEQ ID NO: 202512 - DNA, 33 bp, Homo sapien
gagcttaaatgtcccctgatgccaacgattgag

SEQ ID NO: 202513 - DNA, 33 bp, Homo sapien
cgatagaatctgggtaacaagtctagaactcac

SEQ ID NO: 202514 - DNA, 33 bp, Homo sapien
cgatagaatctgggtaccaagtctagaactcac

SEQ ID NO: 202515 - DNA, 33 bp, Homo sapien
tttaaaggtccatctccaaatacagttacattc

SEQ ID NO: 202516 - DNA, 33 bp, Homo sapien
tttaaaggtccatctctaaatacagttacattc

SEQ ID NO: 202517 - DNA, 33 bp, Homo sapien
ggaagtaatctcaatacgtaagagttataagaa

SEQ ID NO: 202518 - DNA, 33 bp, Homo sapien
ggaagtaatctcaataggtaagagttataagaa

SEQ ID NO: 202519 - DNA, 33 bp, Homo sapien
ctcatcatctgtgccacgctggataaaactctc

SEQ ID NO: 202520 - DNA, 33 bp, Homo sapien
ctcatcatctgtgccatgctggataaaactctc

SEQ ID NO: 202521 - DNA, 33 bp, Homo sapien
atctgtgtgatgagaaaaacaacagccaccact

SEQ ID NO: 202522 - DNA, 33 bp, Homo sapien
atctgtgtgatgagaagaacaacagccaccact

SEQ ID NO: 202523 - DNA, 33 bp, Homo sapien
gtagccaagtgctttacaagcgttatctaattt

SEQ ID NO: 202524 - DNA, 33 bp, Homo sapien
gtagccaagtgctttataagcgttatctaattt

SEQ ID NO: 202525 - DNA, 33 bp, Homo sapien
actgtacgtgagagacccttttctctgctaatc

SEQ ID NO: 202526 - DNA, 33 bp, Homo sapien
actgtacgtgagagactcttttctctgctaatc

SEQ ID NO: 202527 - DNA, 33 bp, Homo sapien
tgtgcaaccagtgataccttcgtcttctagcat

SEQ ID NO: 202528 - DNA, 33 bp, Homo sapien
tgtgcaaccagtgatatcttcgtcttctagcat

SEQ ID NO: 202529 - DNA, 33 bp, Homo sapien
gactttcatctcttctaaaggcaacacaaagtc

SEQ ID NO: 202530 - DNA, 33 bp, Homo sapien
gactttcatctcttctcaaggcaacacaaagtc

SEQ ID NO: 202531 - DNA, 33 bp, Homo sapien
aatggaattactgtcacgaaaagaagcagaggc

SEQ ID NO: 202532 - DNA, 33 bp, Homo sapien
aatggaattactgtcatgaaaagaagcagaggc

SEQ ID NO: 202533 - DNA, 33 bp, Homo sapien
gagagcactgccttgaagttggccgcgtgtgcc

SEQ ID NO: 202534 - DNA, 33 bp, Homo sapien
gagagcactgccttgaggttggccgcgtgtgcc

SEQ ID NO: 202535 - DNA, 33 bp, Homo sapien
agggccagtgaaagagccaacaagaagcttcaa

SEQ ID NO: 202536 - DNA, 33 bp, Homo sapien
agggccagtgaaagaggcaacaagaagcttcaa

SEQ ID NO: 202537 - DNA, 33 bp, Homo sapien
tgtcatccctcaaccccgacatggctcatgccc

SEQ ID NO: 202538 - DNA, 33 bp, Homo sapien
tgtcatccctcaaccctgacatggctcatgccc

SEQ ID NO: 202539 - DNA, 33 bp, Homo sapien
ctttttttccttaataaatcagaagaacatcct

SEQ ID NO: 202540 - DNA, 33 bp, Homo sapien
ctttttttccttaatagatcagaagaacatcct

SEQ ID NO: 202541 - DNA, 33 bp, Homo sapien
tgagagcaggccttcccctttaccatttgggca

SEQ ID NO: 202542 - DNA, 33 bp, Homo sapien
tgagagcaggccttcctctttaccatttgggca

SEQ ID NO: 202543 - DNA, 33 bp, Homo sapien
aactctaggtccttgacacataaatgctggaga

SEQ ID NO: 202544 - DNA, 33 bp, Homo sapien
aactctaggtccttgatacataaatgctggaga

SEQ ID NO: 202545 - DNA, 33 bp, Homo sapien
gagggggacacatgaacgattctggcaccatcc

SEQ ID NO: 202546 - DNA, 33 bp, Homo sapien
gagggggacacatgaatgattctggcaccatcc

SEQ ID NO: 202547 - DNA, 33 bp, Homo sapien
atcctaaatcactttacggtggaacggactctc

SEQ ID NO: 202548 - DNA, 33 bp, Homo sapien
atcctaaatcactttatggtggaacggactctc

SEQ ID NO: 202549 - DNA, 33 bp, Homo sapien
ggcgtcattctgtgcaaggttatttaactttgc

SEQ ID NO: 202550 - DNA, 33 bp, Homo sapien
ggcgtcattctgtgcatggttatttaactttgc

SEQ ID NO: 202551 - DNA, 33 bp, Homo sapien
tggggtgacaaaaaaacgactgtgacaccctgc

SEQ ID NO: 202552 - DNA, 33 bp, Homo sapien
tggggtgacaaaaaaatgactgtgacaccctgc

SEQ ID NO: 202553 - DNA, 33 bp, Homo sapien
atgagaatataaattacattcatcaggctacac

SEQ ID NO: 202554 - DNA, 33 bp, Homo sapien
atgagaatataaattagattcatcaggctacac

SEQ ID NO: 202555 - DNA, 33 bp, Homo sapien
tttattagatgaacaccggatatctcttatagg

SEQ ID NO: 202556 - DNA, 33 bp, Homo sapien
tttattagatgaacactggatatctcttatagg

SEQ ID NO: 202557 - DNA, 33 bp, Homo sapien
cagctccatggacacaataaatgcaatatttaa

SEQ ID NO: 202558 - DNA, 33 bp, Homo sapien
cagctccatggacacagtaaatgcaatatttaa

SEQ ID NO: 202559 - DNA, 33 bp, Homo sapien
ctgcaggttattaacacgtgtcaatcaaaggtg

SEQ ID NO: 202560 - DNA, 33 bp, Homo sapien
ctgcaggttattaacaggtgtcaatcaaaggtg

SEQ ID NO: 202561 - DNA, 33 bp, Homo sapien
ctgctgcccttgattgacaaaactgatgaaaaa

SEQ ID NO: 202562 - DNA, 33 bp, Homo sapien
ctgctgcccttgattggcaaaactgatgaaaaa

SEQ ID NO: 202563 - DNA, 33 bp, Homo sapien
agtgtgagagaaagacaaagctgttctcttcct

SEQ ID NO: 202564 - DNA, 33 bp, Homo sapien
agtgtgagagaaagacgaagctgttctcttcct

SEQ ID NO: 202565 - DNA, 33 bp, Homo sapien
aagaaagaaagctggaagaaggttgcagattat

SEQ ID NO: 202566 - DNA, 33 bp, Homo sapien
aagaaagaaagctggaggaaggttgcagattat

SEQ ID NO: 202567 - DNA, 33 bp, Homo sapien
gttgagagaatcctatcagttgattcataaaaa

SEQ ID NO: 202568 - DNA, 33 bp, Homo sapien
gttgagagaatcctatgagttgattcataaaaa

SEQ ID NO: 202569 - DNA, 33 bp, Homo sapien
tcatagtagactggccaaagcatgaactcttga

SEQ ID NO: 202570 - DNA, 33 bp, Homo sapien
tcatagtagactggccgaagcatgaactcttga

SEQ ID NO: 202571 - DNA, 33 bp, Homo sapien
caaaatgaaatccacagagaataatagaaggga

SEQ ID NO: 202572 - DNA, 33 bp, Homo sapien
caaaatgaaatccacatagaataatagaaggga

SEQ ID NO: 202573 - DNA, 33 bp, Homo sapien
ctttcctcatttaccccacaaggaaaatggcat

SEQ ID NO: 202574 - DNA, 33 bp, Homo sapien
ctttcctcatttacccgacaaggaaaatggcat

SEQ ID NO: 202575 - DNA, 33 bp, Homo sapien
tggggctgaatcctcacggaatccctgggaacc

SEQ ID NO: 202576 - DNA, 33 bp, Homo sapien
tggggctgaatcctcatggaatccctgggaacc

SEQ ID NO: 202577 - DNA, 33 bp, Homo sapien
actcgacaaatgcttacgaagctttgactgtgt

SEQ ID NO: 202578 - DNA, 33 bp, Homo sapien
actcgacaaatgcttaggaagctttgactgtgt

SEQ ID NO: 202579 - DNA, 33 bp, Homo sapien
tgtctgctgttgagaacgaaggattactgagct

SEQ ID NO: 202580 - DNA, 33 bp, Homo sapien
tgtctgctgttgagaatgaaggattactgagct

SEQ ID NO: 202581 - DNA, 33 bp, Homo sapien
gtgggcagtgttaatcaagggatgctggctgga

SEQ ID NO: 202582 - DNA, 33 bp, Homo sapien
gtgggcagtgttaatccagggatgctggctgga

SEQ ID NO: 202583 - DNA, 33 bp, Homo sapien
aagaaacctgcaggaacctctctaatggacctt

SEQ ID NO: 202584 - DNA, 33 bp, Homo sapien
aagaaacctgcaggaatctctctaatggacctt

SEQ ID NO: 202585 - DNA, 33 bp, Homo sapien
gaattcccagaacctacgccaagagaccagcca

SEQ ID NO: 202586 - DNA, 33 bp, Homo sapien
gaattcccagaacctatgccaagagaccagcca

SEQ ID NO: 202587 - DNA, 33 bp, Homo sapien
gaaacactcgtttcgcgactatgaaggatttct

SEQ ID NO: 202588 - DNA, 33 bp, Homo sapien
gaaacactcgtttcgctactatgaaggatttct

SEQ ID NO: 202589 - DNA, 33 bp, Homo sapien
aggctaatttcttaaccattttgtcatattagc

SEQ ID NO: 202590 - DNA, 33 bp, Homo sapien
aggctaatttcttaactattttgtcatattagc

SEQ ID NO: 202591 - DNA, 33 bp, Homo sapien
catttaattgtaatgacgtaaaggtgattatga

SEQ ID NO: 202592 - DNA, 33 bp, Homo sapien
catttaattgtaatgatgtaaaggtgattatga

SEQ ID NO: 202593 - DNA, 33 bp, Homo sapien
tcctgagtttaacaccacaatgacccgtgtgtt

SEQ ID NO: 202594 - DNA, 33 bp, Homo sapien
tcctgagtttaacaccgcaatgacccgtgtgtt

SEQ ID NO: 202595 - DNA, 33 bp, Homo sapien
gtaagatttagaggtccgaagctaggtaaccta

SEQ ID NO: 202596 - DNA, 33 bp, Homo sapien
gtaagatttagaggtctgaagctaggtaaccta

SEQ ID NO: 202597 - DNA, 33 bp, Homo sapien
atggtgatggtcattcaaagagattaccacaac

SEQ ID NO: 202598 - DNA, 33 bp, Homo sapien
atggtgatggtcattcgaagagattaccacaac

SEQ ID NO: 202599 - DNA, 33 bp, Homo sapien
ctggaaacctcgtatacaggaaaatgaaaaaat

SEQ ID NO: 202600 - DNA, 33 bp, Homo sapien
ctggaaacctcgtatataggaaaatgaaaaaat

SEQ ID NO: 202601 - DNA, 33 bp, Homo sapien
tcttttttattatggcaaatgagagtgatatct

SEQ ID NO: 202602 - DNA, 33 bp, Homo sapien
tcttttttattatggcgaatgagagtgatatct

SEQ ID NO: 202603 - DNA, 33 bp, Homo sapien
gatgtcaactccttcacgtagcctttcatgatt

SEQ ID NO: 202604 - DNA, 33 bp, Homo sapien
gatgtcaactccttcatgtagcctttcatgatt

SEQ ID NO: 202605 - DNA, 33 bp, Homo sapien
catactaaaccaacaacggtcttgaaaggtagc

SEQ ID NO: 202606 - DNA, 33 bp, Homo sapien
catactaaaccaacaatggtcttgaaaggtagc

SEQ ID NO: 202607 - DNA, 33 bp, Homo sapien
tgtgtatgttgaagcactgaactgtgaatctta

SEQ ID NO: 202608 - DNA, 33 bp, Homo sapien
tgtgtatgttgaagcattgaactgtgaatctta

SEQ ID NO: 202609 - DNA, 33 bp, Homo sapien
taggtcctacctacaaatcaagatggtcaaacg

SEQ ID NO: 202610 - DNA, 33 bp, Homo sapien
taggtcctacctacaattcaagatggtcaaacg

SEQ ID NO: 202611 - DNA, 33 bp, Homo sapien
atctcccatctacccaacctagtgcaggaggga

SEQ ID NO: 202612 - DNA, 33 bp, Homo sapien
atctcccatctacccagcctagtgcaggaggga

SEQ ID NO: 202613 - DNA, 33 bp, Homo sapien
tttgctcatctgaaaccgggataataacagctg

SEQ ID NO: 202614 - DNA, 33 bp, Homo sapien
tttgctcatctgaaactgggataataacagctg

SEQ ID NO: 202615 - DNA, 33 bp, Homo sapien
cctgtctgtgaatgatcataaaattttggattg

SEQ ID NO: 202616 - DNA, 33 bp, Homo sapien
cctgtctgtgaatgattataaaattttggattg

SEQ ID NO: 202617 - DNA, 33 bp, Homo sapien
aatgtgggcttacaaacgatttacatgtaattc

SEQ ID NO: 202618 - DNA, 33 bp, Homo sapien
aatgtgggcttacaaatgatttacatgtaattc

SEQ ID NO: 202619 - DNA, 33 bp, Homo sapien
tagggacaggagagaacgctggctttactgtag

SEQ ID NO: 202620 - DNA, 33 bp, Homo sapien
tagggacaggagagaatgctggctttactgtag

SEQ ID NO: 202621 - DNA, 33 bp, Homo sapien
ttatttctcagaaacaaggaaaatcagtttatc

SEQ ID NO: 202622 - DNA, 33 bp, Homo sapien
ttatttctcagaaacatggaaaatcagtttatc

SEQ ID NO: 202623 - DNA, 33 bp, Homo sapien
ggaccaaagggatacaccaagtgctggagtgaa

SEQ ID NO: 202624 - DNA, 33 bp, Homo sapien
ggaccaaagggatacatcaagtgctggagtgaa

SEQ ID NO: 202625 - DNA, 33 bp, Homo sapien
catgtgccattatatcacttaattacagctgtg

SEQ ID NO: 202626 - DNA, 33 bp, Homo sapien
catgtgccattatatcgcttaattacagctgtg

SEQ ID NO: 202627 - DNA, 33 bp, Homo sapien
agtagacttctatgaacggtgtgttgaacaaat

SEQ ID NO: 202628 - DNA, 33 bp, Homo sapien
agtagacttctatgaatggtgtgttgaacaaat

SEQ ID NO: 202629 - DNA, 33 bp, Homo sapien
atcatcagatgtatgacgaaaatggttaaatgt

SEQ ID NO: 202630 - DNA, 33 bp, Homo sapien
atcatcagatgtatgatgaaaatggttaaatgt

SEQ ID NO: 202631 - DNA, 33 bp, Homo sapien
acattacacttacttaagaacagctatatagcc

SEQ ID NO: 202632 - DNA, 33 bp, Homo sapien
acattacacttacttacgaacagctatatagcc

SEQ ID NO: 202633 - DNA, 33 bp, Homo sapien
aattgcagaaaggtcacattttaagagagagag

SEQ ID NO: 202634 - DNA, 33 bp, Homo sapien
aattgcagaaaggtcatattttaagagagagag

SEQ ID NO: 202635 - DNA, 33 bp, Homo sapien
agaagcagagctaaaaaccaatctaggagcact

SEQ ID NO: 202636 - DNA, 33 bp, Homo sapien
agaagcagagctaaaagccaatctaggagcact

SEQ ID NO: 202637 - DNA, 33 bp, Homo sapien
gaggacactagttcaccgtctttgtttttgagt

SEQ ID NO: 202638 - DNA, 33 bp, Homo sapien
gaggacactagttcactgtctttgtttttgagt

SEQ ID NO: 202639 - DNA, 33 bp, Homo sapien
gggagttgtgattcaccggtatggacaccacag

SEQ ID NO: 202640 - DNA, 33 bp, Homo sapien
gggagttgtgattcactggtatggacaccacag

SEQ ID NO: 202641 - DNA, 33 bp, Homo sapien
gcggtgaagacagacaatggttaggccactgaa

SEQ ID NO: 202642 - DNA, 33 bp, Homo sapien
gcggtgaagacagacactggttaggccactgaa

SEQ ID NO: 202643 - DNA, 33 bp, Homo sapien
atggttgtgatccaaacagcctactatgacaaa

SEQ ID NO: 202644 - DNA, 33 bp, Homo sapien
atggttgtgatccaaagagcctactatgacaaa

SEQ ID NO: 202645 - DNA, 33 bp, Homo sapien
acagcctttcataagccctagattgtggcaaag

SEQ ID NO: 202646 - DNA, 33 bp, Homo sapien
acagcctttcataagctctagattgtggcaaag

SEQ ID NO: 202647 - DNA, 33 bp, Homo sapien
caacatgttgatgaacacaagcagtaattgaga

SEQ ID NO: 202648 - DNA, 33 bp, Homo sapien
caacatgttgatgaacgcaagcagtaattgaga

SEQ ID NO: 202649 - DNA, 33 bp, Homo sapien
ctgtttggtgagggtcgcttttcccctcctctt

SEQ ID NO: 202650 - DNA, 33 bp, Homo sapien
ctgtttggtgagggtctcttttcccctcctctt

SEQ ID NO: 202651 - DNA, 33 bp, Homo sapien
attcattaaataattgaaaatggctccaacaaa

SEQ ID NO: 202652 - DNA, 33 bp, Homo sapien
attcattaaataattggaaatggctccaacaaa

SEQ ID NO: 202653 - DNA, 33 bp, Homo sapien
tacctaactagccttcactcacattttaaccct

SEQ ID NO: 202654 - DNA, 33 bp, Homo sapien
tacctaactagccttcgctcacattttaaccct

SEQ ID NO: 202655 - DNA, 33 bp, Homo sapien
ttagaaatcagagaagacttttcctttgagtaa

SEQ ID NO: 202656 - DNA, 33 bp, Homo sapien
ttagaaatcagagaagccttttcctttgagtaa

SEQ ID NO: 202657 - DNA, 33 bp, Homo sapien
ttgacctgagattggaaaaaaaaatccagcagc

SEQ ID NO: 202658 - DNA, 33 bp, Homo sapien
ttgacctgagattggacaaaaaaatccagcagc

SEQ ID NO: 202659 - DNA, 33 bp, Homo sapien
tattcagcactaaggcaagtacacacctgtttg

SEQ ID NO: 202660 - DNA, 33 bp, Homo sapien
tattcagcactaaggcgagtacacacctgtttg

SEQ ID NO: 202661 - DNA, 33 bp, Homo sapien
atctcatgcagaaaaaatgctgcaacaccactg

SEQ ID NO: 202662 - DNA, 33 bp, Homo sapien
atctcatgcagaaaaagtgctgcaacaccactg

SEQ ID NO: 202663 - DNA, 33 bp, Homo sapien
gtgtcttttagcaggagattcatatgcatttca

SEQ ID NO: 202664 - DNA, 33 bp, Homo sapien
gtgtcttttagcaggatattcatatgcatttca

SEQ ID NO: 202665 - DNA, 33 bp, Homo sapien
gggctgatctgtcctgaagactgtccctcactg

SEQ ID NO: 202666 - DNA, 33 bp, Homo sapien
gggctgatctgtcctgcagactgtccctcactg

SEQ ID NO: 202667 - DNA, 33 bp, Homo sapien
aaagcagaggtctctcgcaattctagctattca

SEQ ID NO: 202668 - DNA, 33 bp, Homo sapien
aaagcagaggtctctctcaattctagctattca

SEQ ID NO: 202669 - DNA, 33 bp, Homo sapien
atggagtttcaagaagaagccgcagcttacatt

SEQ ID NO: 202670 - DNA, 33 bp, Homo sapien
atggagtttcaagaagtagccgcagcttacatt

SEQ ID NO: 202671 - DNA, 33 bp, Homo sapien
ttgatgaagtaaggaccggaaaggaaaagaggt

SEQ ID NO: 202672 - DNA, 33 bp, Homo sapien
ttgatgaagtaaggactggaaaggaaaagaggt

SEQ ID NO: 202673 - DNA, 33 bp, Homo sapien
ggtgagaccaaattgaaaacctcatctttaagc

SEQ ID NO: 202674 - DNA, 33 bp, Homo sapien
ggtgagaccaaattgataacctcatctttaagc

SEQ ID NO: 202675 - DNA, 33 bp, Homo sapien
aaaaaatatccacagaagtttcaagattttcgt

SEQ ID NO: 202676 - DNA, 33 bp, Homo sapien
aaaaaatatccacagaggtttcaagattttcgt

SEQ ID NO: 202677 - DNA, 33 bp, Homo sapien
tttgcatatcccagttaaaaagaatacttctga

SEQ ID NO: 202678 - DNA, 33 bp, Homo sapien
tttgcatatcccagttgaaaagaatacttctga

SEQ ID NO: 202679 - DNA, 33 bp, Homo sapien
tcttctgcttctcagacgaggaggtgataattg

SEQ ID NO: 202680 - DNA, 33 bp, Homo sapien
tcttctgcttctcagatgaggaggtgataattg

SEQ ID NO: 202681 - DNA, 33 bp, Homo sapien
gaggatttgcaagtaccacgttctatattctgg

SEQ ID NO: 202682 - DNA, 33 bp, Homo sapien
gaggatttgcaagtactacgttctatattctgg

SEQ ID NO: 202683 - DNA, 33 bp, Homo sapien
tttgaaatgcagagtgccacatttagatacagc

SEQ ID NO: 202684 - DNA, 33 bp, Homo sapien
tttgaaatgcagagtgtcacatttagatacagc

SEQ ID NO: 202685 - DNA, 33 bp, Homo sapien
ctcggtgatagttgaagaattgattacagggga

SEQ ID NO: 202686 - DNA, 33 bp, Homo sapien
ctcggtgatagttgaataattgattacagggga

SEQ ID NO: 202687 - DNA, 33 bp, Homo sapien
gagtgtttggatatagacctttactgcacccgg

SEQ ID NO: 202688 - DNA, 33 bp, Homo sapien
gagtgtttggatatagtcctttactgcacccgg

SEQ ID NO: 202689 - DNA, 33 bp, Homo sapien
gtgtttcaaacagagaaaatttagtgaggagaa

SEQ ID NO: 202690 - DNA, 33 bp, Homo sapien
gtgtttcaaacagagataatttagtgaggagaa

SEQ ID NO: 202691 - DNA, 33 bp, Homo sapien
tgagctaccacattggacactatatgcaaattt

SEQ ID NO: 202692 - DNA, 33 bp, Homo sapien
tgagctaccacattggccactatatgcaaattt

SEQ ID NO: 202693 - DNA, 33 bp, Homo sapien
gatatcaattaaaaaaatgtactgatggcatca

SEQ ID NO: 202694 - DNA, 33 bp, Homo sapien
gatatcaattaaaaaattgtactgatggcatca

SEQ ID NO: 202695 - DNA, 33 bp, Homo sapien
agacctcagtgagcgtaacgagtcagaaatggg

SEQ ID NO: 202696 - DNA, 33 bp, Homo sapien
agacctcagtgagcgtgacgagtcagaaatggg

SEQ ID NO: 202697 - DNA, 33 bp, Homo sapien
aagaccctagaacttacgctaacaaatggtaaa

SEQ ID NO: 202698 - DNA, 33 bp, Homo sapien
aagaccctagaacttatgctaacaaatggtaaa

SEQ ID NO: 202699 - DNA, 33 bp, Homo sapien
tatggtgctctttctacgacaggaatctgatca

SEQ ID NO: 202700 - DNA, 33 bp, Homo sapien
tatggtgctctttctatgacaggaatctgatca

SEQ ID NO: 202701 - DNA, 33 bp, Homo sapien
gggaatcgggtcatccgatctgtaatctgctgc

SEQ ID NO: 202702 - DNA, 33 bp, Homo sapien
gggaatcgggtcatcctatctgtaatctgctgc

SEQ ID NO: 202703 - DNA, 33 bp, Homo sapien
ctgaggtcatgtcaagcatgaataacgtgcgtc

SEQ ID NO: 202704 - DNA, 33 bp, Homo sapien
ctgaggtcatgtcaagtatgaataacgtgcgtc

SEQ ID NO: 202705 - DNA, 33 bp, Homo sapien
gattgatagactgagacgataataaaaatgaat

SEQ ID NO: 202706 - DNA, 33 bp, Homo sapien
gattgatagactgagatgataataaaaatgaat

SEQ ID NO: 202707 - DNA, 33 bp, Homo sapien
gagccagtgctgcaacagatagagtgtggcatc

SEQ ID NO: 202708 - DNA, 33 bp, Homo sapien
gagccagtgctgcaacggatagagtgtggcatc

SEQ ID NO: 202709 - DNA, 33 bp, Homo sapien
tgatgaggaagctgaaacttcgatgattaggcc

SEQ ID NO: 202710 - DNA, 33 bp, Homo sapien
tgatgaggaagctgaaccttcgatgattaggcc

SEQ ID NO: 202711 - DNA, 33 bp, Homo sapien
tcactcttatttttccacattcctatgagcaaa

SEQ ID NO: 202712 - DNA, 33 bp, Homo sapien
tcactcttatttttccgcattcctatgagcaaa

SEQ ID NO: 202713 - DNA, 33 bp, Homo sapien
tggaggctggaagttcgaagcccagttgtttgc

SEQ ID NO: 202714 - DNA, 33 bp, Homo sapien
tggaggctggaagttctaagcccagttgtttgc

SEQ ID NO: 202715 - DNA, 33 bp, Homo sapien
ggcgtcgtgtgaagaccgaggccggattggagc

SEQ ID NO: 202716 - DNA, 33 bp, Homo sapien
ggcgtcgtgtgaagactgaggccggattggagc

SEQ ID NO: 202717 - DNA, 33 bp, Homo sapien
gacagatattagaggaacaacaaatgaagacca

SEQ ID NO: 202718 - DNA, 33 bp, Homo sapien
gacagatattagaggagcaacaaatgaagacca

SEQ ID NO: 202719 - DNA, 33 bp, Homo sapien
aagcaagggcagaatacaagcaaatcccaaggt

SEQ ID NO: 202720 - DNA, 33 bp, Homo sapien
aagcaagggcagaatataagcaaatcccaaggt

SEQ ID NO: 202721 - DNA, 33 bp, Homo sapien
accttctccctctaaacgtctgtcactgatgtc

SEQ ID NO: 202722 - DNA, 33 bp, Homo sapien
accttctccctctaaatgtctgtcactgatgtc

SEQ ID NO: 202723 - DNA, 33 bp, Homo sapien
aaaggatctctagcacagtattttcaaataagg

SEQ ID NO: 202724 - DNA, 33 bp, Homo sapien
aaaggatctctagcacggtattttcaaataagg

SEQ ID NO: 202725 - DNA, 33 bp, Homo sapien
ttttgattctaatcagcaagttgaaaaggatgc

SEQ ID NO: 202726 - DNA, 33 bp, Homo sapien
ttttgattctaatcaggaagttgaaaaggatgc

SEQ ID NO: 202727 - DNA, 33 bp, Homo sapien
cctagcaagacgctaaactaacatgggtaagac

SEQ ID NO: 202728 - DNA, 33 bp, Homo sapien
cctagcaagacgctaagctaacatgggtaagac

SEQ ID NO: 202729 - DNA, 33 bp, Homo sapien
ttctatttgcctttcaggatcttataaccattc

SEQ ID NO: 202730 - DNA, 33 bp, Homo sapien
ttctatttgcctttcatgatcttataaccattc

SEQ ID NO: 202731 - DNA, 33 bp, Homo sapien
attgagttttgcaaacaaagtcagagataatgt

SEQ ID NO: 202732 - DNA, 33 bp, Homo sapien
attgagttttgcaaacgaagtcagagataatgt

SEQ ID NO: 202733 - DNA, 33 bp, Homo sapien
tttcatgaaggtttcactacataggcctgatgt

SEQ ID NO: 202734 - DNA, 33 bp, Homo sapien
tttcatgaaggtttcattacataggcctgatgt

SEQ ID NO: 202735 - DNA, 33 bp, Homo sapien
taagagacatgtttaacgttttgaaaattatac

SEQ ID NO: 202736 - DNA, 33 bp, Homo sapien
taagagacatgtttaaggttttgaaaattatac

SEQ ID NO: 202737 - DNA, 33 bp, Homo sapien
caacagcccctttacacaaaattgacttcttgt

SEQ ID NO: 202738 - DNA, 33 bp, Homo sapien
caacagcccctttacagaaaattgacttcttgt

SEQ ID NO: 202739 - DNA, 33 bp, Homo sapien
tacttctactcacagaagagaaaattggtctgg

SEQ ID NO: 202740 - DNA, 33 bp, Homo sapien
tacttctactcacagatgagaaaattggtctgg

SEQ ID NO: 202741 - DNA, 33 bp, Homo sapien
caactaagttctatcaccacttttcatctggag

SEQ ID NO: 202742 - DNA, 33 bp, Homo sapien
caactaagttctatcatcacttttcatctggag

SEQ ID NO: 202743 - DNA, 33 bp, Homo sapien
ccccttttagatcatgaaaatcacagacacatt

SEQ ID NO: 202744 - DNA, 33 bp, Homo sapien
ccccttttagatcatgcaaatcacagacacatt

SEQ ID NO: 202745 - DNA, 33 bp, Homo sapien
attgtatgttcatcaccgtactgttcacaatag

SEQ ID NO: 202746 - DNA, 33 bp, Homo sapien
attgtatgttcatcactgtactgttcacaatag

SEQ ID NO: 202747 - DNA, 33 bp, Homo sapien
atgctaagcaaatttcacctagatttttagcaa

SEQ ID NO: 202748 - DNA, 33 bp, Homo sapien
atgctaagcaaatttcccctagatttttagcaa

SEQ ID NO: 202749 - DNA, 33 bp, Homo sapien
tttctaacaaatgacacgaaatagctaaattta

SEQ ID NO: 202750 - DNA, 33 bp, Homo sapien
tttctaacaaatgacatgaaatagctaaattta

SEQ ID NO: 202751 - DNA, 33 bp, Homo sapien
agacacaaatccttagcactgtgttccagttgc

SEQ ID NO: 202752 - DNA, 33 bp, Homo sapien
agacacaaatccttagtactgtgttccagttgc

SEQ ID NO: 202753 - DNA, 33 bp, Homo sapien
atgccatatgttatcaactgtttgtttttccta

SEQ ID NO: 202754 - DNA, 33 bp, Homo sapien
atgccatatgttatcacctgtttgtttttccta

SEQ ID NO: 202755 - DNA, 33 bp, Homo sapien
tacttgctttgtgtataaagtctcacttctgtg

SEQ ID NO: 202756 - DNA, 33 bp, Homo sapien
tacttgctttgtgtatgaagtctcacttctgtg

SEQ ID NO: 202757 - DNA, 33 bp, Homo sapien
aggccagggatcattaacatatacactgatgca

SEQ ID NO: 202758 - DNA, 33 bp, Homo sapien
aggccagggatcattagcatatacactgatgca

SEQ ID NO: 202759 - DNA, 33 bp, Homo sapien
gtcactacctggctcaagtcgtttgaagcccct

SEQ ID NO: 202760 - DNA, 33 bp, Homo sapien
gtcactacctggctcaggtcgtttgaagcccct

SEQ ID NO: 202761 - DNA, 33 bp, Homo sapien
ggcagaaaggctgctgcattaggacggagggga

SEQ ID NO: 202762 - DNA, 33 bp, Homo sapien
ggcagaaaggctgctggattaggacggagggga

SEQ ID NO: 202763 - DNA, 33 bp, Homo sapien
ttgaaaatcctctcacacttcctatgacaactc

SEQ ID NO: 202764 - DNA, 33 bp, Homo sapien
ttgaaaatcctctcacgcttcctatgacaactc

SEQ ID NO: 202765 - DNA, 33 bp, Homo sapien
acaaacagcttgaatcacaaatgagaaggcttg

SEQ ID NO: 202766 - DNA, 33 bp, Homo sapien
acaaacagcttgaatcgcaaatgagaaggcttg

SEQ ID NO: 202767 - DNA, 33 bp, Homo sapien
agaggtagcaattctccctgggagtaaacacaa

SEQ ID NO: 202768 - DNA, 33 bp, Homo sapien
agaggtagcaattctctctgggagtaaacacaa

SEQ ID NO: 202769 - DNA, 33 bp, Homo sapien
cacaaccaaagctagacggtgccaccttacgtc

SEQ ID NO: 202770 - DNA, 33 bp, Homo sapien
cacaaccaaagctagatggtgccaccttacgtc

SEQ ID NO: 202771 - DNA, 33 bp, Homo sapien
catcagcccatgtgtacagaaatcagtcaggcc

SEQ ID NO: 202772 - DNA, 33 bp, Homo sapien
catcagcccatgtgtagagaaatcagtcaggcc

SEQ ID NO: 202773 - DNA, 33 bp, Homo sapien
caaatggcaaagtccacgttctctggcagggct

SEQ ID NO: 202774 - DNA, 33 bp, Homo sapien
caaatggcaaagtccatgttctctggcagggct

SEQ ID NO: 202775 - DNA, 33 bp, Homo sapien
ataaaatgaaagcactcaactagacaatttcca

SEQ ID NO: 202776 - DNA, 33 bp, Homo sapien
ataaaatgaaagcactgaactagacaatttcca

SEQ ID NO: 202777 - DNA, 33 bp, Homo sapien
gctaaaggacgatgggaacttgctcatgaccag

SEQ ID NO: 202778 - DNA, 33 bp, Homo sapien
gctaaaggacgatggggacttgctcatgaccag

SEQ ID NO: 202779 - DNA, 33 bp, Homo sapien
atgtatccatcccagaataattttaaggttaat

SEQ ID NO: 202780 - DNA, 33 bp, Homo sapien
atgtatccatcccagagtaattttaaggttaat

SEQ ID NO: 202781 - DNA, 33 bp, Homo sapien
ctggctgtatggatgcaccccttatggcagaaa

SEQ ID NO: 202782 - DNA, 33 bp, Homo sapien
ctggctgtatggatgcgccccttatggcagaaa

SEQ ID NO: 202783 - DNA, 33 bp, Homo sapien
tcaattcacggttcaacgttctcctcccccact

SEQ ID NO: 202784 - DNA, 33 bp, Homo sapien
tcaattcacggttcaatgttctcctcccccact

SEQ ID NO: 202785 - DNA, 33 bp, Homo sapien
tcagttggagataatacggtcctccagagaggg

SEQ ID NO: 202786 - DNA, 33 bp, Homo sapien
tcagttggagataatatggtcctccagagaggg

SEQ ID NO: 202787 - DNA, 33 bp, Homo sapien
aagctgagttacagagcacttcacataccaggc

SEQ ID NO: 202788 - DNA, 33 bp, Homo sapien
aagctgagttacagaggacttcacataccaggc

SEQ ID NO: 202789 - DNA, 33 bp, Homo sapien
agggaacaatcgagctaagaccaggaagcattt

SEQ ID NO: 202790 - DNA, 33 bp, Homo sapien
agggaacaatcgagctgagaccaggaagcattt

SEQ ID NO: 202791 - DNA, 33 bp, Homo sapien
acacgtctgcccactacgtcctttgctgccaaa

SEQ ID NO: 202792 - DNA, 33 bp, Homo sapien
acacgtctgcccactatgtcctttgctgccaaa

SEQ ID NO: 202793 - DNA, 33 bp, Homo sapien
gcaaattcaaaagcccacagaattcaggcagga

SEQ ID NO: 202794 - DNA, 33 bp, Homo sapien
gcaaattcaaaagcccgcagaattcaggcagga

SEQ ID NO: 202795 - DNA, 33 bp, Homo sapien
cacccgtgaaagagagaatgacaaagctggagg

SEQ ID NO: 202796 - DNA, 33 bp, Homo sapien
cacccgtgaaagagaggatgacaaagctggagg

SEQ ID NO: 202797 - DNA, 33 bp, Homo sapien
cagattggaaaaccacggatggaagagctgtct

SEQ ID NO: 202798 - DNA, 33 bp, Homo sapien
cagattggaaaaccactgatggaagagctgtct

SEQ ID NO: 202799 - DNA, 33 bp, Homo sapien
tatccttctaagacagacccattgtgatgccag

SEQ ID NO: 202800 - DNA, 33 bp, Homo sapien
tatccttctaagacaggcccattgtgatgccag

SEQ ID NO: 202801 - DNA, 33 bp, Homo sapien
ccttggaacctcatcacggatgttctgtgtgct

SEQ ID NO: 202802 - DNA, 33 bp, Homo sapien
ccttggaacctcatcatggatgttctgtgtgct

SEQ ID NO: 202803 - DNA, 33 bp, Homo sapien
gccacacctaaggatcaataccgaaggaggctc

SEQ ID NO: 202804 - DNA, 33 bp, Homo sapien
gccacacctaaggatctataccgaaggaggctc

SEQ ID NO: 202805 - DNA, 33 bp, Homo sapien
ttttaatgatttcatacctttgcaaggatcagt

SEQ ID NO: 202806 - DNA, 33 bp, Homo sapien
ttttaatgatttcatatctttgcaaggatcagt

SEQ ID NO: 202807 - DNA, 33 bp, Homo sapien
caatttaaatagaaagacttcagaccaacgatt

SEQ ID NO: 202808 - DNA, 33 bp, Homo sapien
caatttaaatagaaaggcttcagaccaacgatt

SEQ ID NO: 202809 - DNA, 33 bp, Homo sapien
ggaaacttactagaaacgctgaatctcaatcct

SEQ ID NO: 202810 - DNA, 33 bp, Homo sapien
ggaaacttactagaaatgctgaatctcaatcct

SEQ ID NO: 202811 - DNA, 33 bp, Homo sapien
acttaaactatatcaaaattgagagcataagga

SEQ ID NO: 202812 - DNA, 33 bp, Homo sapien
acttaaactatatcaacattgagagcataagga

SEQ ID NO: 202813 - DNA, 33 bp, Homo sapien
tcccttactacctttgaagctataccccccata

SEQ ID NO: 202814 - DNA, 33 bp, Homo sapien
tcccttactacctttgcagctataccccccata

SEQ ID NO: 202815 - DNA, 33 bp, Homo sapien
tcagattctgcaaccaaaatctcttaatatccc

SEQ ID NO: 202816 - DNA, 33 bp, Homo sapien
tcagattctgcaaccataatctcttaatatccc

SEQ ID NO: 202817 - DNA, 33 bp, Homo sapien
acaaagcagaccctcaccttgtttttcacaagt

SEQ ID NO: 202818 - DNA, 33 bp, Homo sapien
acaaagcagaccctcatcttgtttttcacaagt

SEQ ID NO: 202819 - DNA, 33 bp, Homo sapien
aaatcagagaaataggaagttacagtttgttat

SEQ ID NO: 202820 - DNA, 33 bp, Homo sapien
aaatcagagaaataggcagttacagtttgttat

SEQ ID NO: 202821 - DNA, 33 bp, Homo sapien
aggagcaatgctggccagagaaacagataattc

SEQ ID NO: 202822 - DNA, 33 bp, Homo sapien
aggagcaatgctggccggagaaacagataattc

SEQ ID NO: 202823 - DNA, 33 bp, Homo sapien
gtgctatactagcaaccgtggatgatgtggaaa

SEQ ID NO: 202824 - DNA, 33 bp, Homo sapien
gtgctatactagcaactgtggatgatgtggaaa

SEQ ID NO: 202825 - DNA, 33 bp, Homo sapien
tttgcagttagatgtacagaaatgcttacgaag

SEQ ID NO: 202826 - DNA, 33 bp, Homo sapien
tttgcagttagatgtatagaaatgcttacgaag

SEQ ID NO: 202827 - DNA, 33 bp, Homo sapien
ttgcatccttgatgaccagaggcattgctattt

SEQ ID NO: 202828 - DNA, 33 bp, Homo sapien
ttgcatccttgatgacgagaggcattgctattt

SEQ ID NO: 202829 - DNA, 33 bp, Homo sapien
acattgataaaaaacacgatcacagtttaacta

SEQ ID NO: 202830 - DNA, 33 bp, Homo sapien
acattgataaaaaacatgatcacagtttaacta

SEQ ID NO: 202831 - DNA, 33 bp, Homo sapien
tgaccagacaataagagctaagcccatagtaat

SEQ ID NO: 202832 - DNA, 33 bp, Homo sapien
tgaccagacaataagatctaagcccatagtaat

SEQ ID NO: 202833 - DNA, 33 bp, Homo sapien
aaagacgttaattaggcaaaccatccaggtcat

SEQ ID NO: 202834 - DNA, 33 bp, Homo sapien
aaagacgttaattaggtaaaccatccaggtcat

SEQ ID NO: 202835 - DNA, 33 bp, Homo sapien
atcactgccttggacacagtgtttccccaggaa

SEQ ID NO: 202836 - DNA, 33 bp, Homo sapien
atcactgccttggacatagtgtttccccaggaa

SEQ ID NO: 202837 - DNA, 33 bp, Homo sapien
acacctttttgattgaactttgacaggcctttc

SEQ ID NO: 202838 - DNA, 33 bp, Homo sapien
acacctttttgattgacctttgacaggcctttc

SEQ ID NO: 202839 - DNA, 33 bp, Homo sapien
tgtttaatatgctttccagcacgttcttctagt

SEQ ID NO: 202840 - DNA, 33 bp, Homo sapien
tgtttaatatgctttctagcacgttcttctagt

SEQ ID NO: 202841 - DNA, 33 bp, Homo sapien
catgaatctgaccaaaaaaaaccttcagaaagt

SEQ ID NO: 202842 - DNA, 33 bp, Homo sapien
catgaatctgaccaaacaaaaccttcagaaagt

SEQ ID NO: 202843 - DNA, 33 bp, Homo sapien
ggcacctcagagatggaaaactagggaggaatg

SEQ ID NO: 202844 - DNA, 33 bp, Homo sapien
ggcacctcagagatgggaaactagggaggaatg

SEQ ID NO: 202845 - DNA, 33 bp, Homo sapien
tctaaatattcacgaaacactcttgccatctcc

SEQ ID NO: 202846 - DNA, 33 bp, Homo sapien
tctaaatattcacgaaccactcttgccatctcc

SEQ ID NO: 202847 - DNA, 33 bp, Homo sapien
taaaatgaagaaatagcaatcccatcatgaaga

SEQ ID NO: 202848 - DNA, 33 bp, Homo sapien
taaaatgaagaaatagtaatcccatcatgaaga

SEQ ID NO: 202849 - DNA, 33 bp, Homo sapien
ttcttgaggcttccatgacaccatgttccctgg

SEQ ID NO: 202850 - DNA, 33 bp, Homo sapien
ttcttgaggcttccattacaccatgttccctgg

SEQ ID NO: 202851 - DNA, 33 bp, Homo sapien
tcaaaatggcaccactaaaaagcaaggttagaa

SEQ ID NO: 202852 - DNA, 33 bp, Homo sapien
tcaaaatggcaccactgaaaagcaaggttagaa

SEQ ID NO: 202853 - DNA, 33 bp, Homo sapien
cactccgccacagccaactgcatcattcctggc

SEQ ID NO: 202854 - DNA, 33 bp, Homo sapien
cactccgccacagccacctgcatcattcctggc

SEQ ID NO: 202855 - DNA, 33 bp, Homo sapien
gaccgcatttcctccccaccatgatggaaggtc

SEQ ID NO: 202856 - DNA, 33 bp, Homo sapien
gaccgcatttcctccctaccatgatggaaggtc

SEQ ID NO: 202857 - DNA, 33 bp, Homo sapien
agcagccataagaaaccgacatctctcctgatc

SEQ ID NO: 202858 - DNA, 33 bp, Homo sapien
agcagccataagaaacggacatctctcctgatc

SEQ ID NO: 202859 - DNA, 33 bp, Homo sapien
ctctgggggagtgtcacgtcaaggcaaactctg

SEQ ID NO: 202860 - DNA, 33 bp, Homo sapien
ctctgggggagtgtcatgtcaaggcaaactctg

SEQ ID NO: 202861 - DNA, 33 bp, Homo sapien
aagggctgcagtctccaaagtcttcagctgtcc

SEQ ID NO: 202862 - DNA, 33 bp, Homo sapien
aagggctgcagtctccgaagtcttcagctgtcc

SEQ ID NO: 202863 - DNA, 33 bp, Homo sapien
ggggcttgggtggacaccgggaatgacacacac

SEQ ID NO: 202864 - DNA, 33 bp, Homo sapien
ggggcttgggtggacatcgggaatgacacacac

SEQ ID NO: 202865 - DNA, 33 bp, Homo sapien
tacacatgggtcatgaacattatggaaacactc

SEQ ID NO: 202866 - DNA, 33 bp, Homo sapien
tacacatgggtcatgagcattatggaaacactc

SEQ ID NO: 202867 - DNA, 33 bp, Homo sapien
aagacctggggtcccgaaaactacaggatagag

SEQ ID NO: 202868 - DNA, 33 bp, Homo sapien
aagacctggggtcccggaaactacaggatagag

SEQ ID NO: 202869 - DNA, 33 bp, Homo sapien
tgaaagaaggagagaacaactcggaaaacttct

SEQ ID NO: 202870 - DNA, 33 bp, Homo sapien
tgaaagaaggagagaagaactcggaaaacttct

SEQ ID NO: 202871 - DNA, 33 bp, Homo sapien
gcccttccatcaagaaacctagtgctgtggtct

SEQ ID NO: 202872 - DNA, 33 bp, Homo sapien
gcccttccatcaagaagcctagtgctgtggtct

SEQ ID NO: 202873 - DNA, 33 bp, Homo sapien
gaaacagactcatagcaactgatgtcttgccta

SEQ ID NO: 202874 - DNA, 33 bp, Homo sapien
gaaacagactcatagcgactgatgtcttgccta

SEQ ID NO: 202875 - DNA, 33 bp, Homo sapien
aatggtggttaccaaaatctaggaaaggtagta

SEQ ID NO: 202876 - DNA, 33 bp, Homo sapien
aatggtggttaccaaagtctaggaaaggtagta

SEQ ID NO: 202877 - DNA, 33 bp, Homo sapien
agagccaagaaatccacgctggacagcttaagg

SEQ ID NO: 202878 - DNA, 33 bp, Homo sapien
agagccaagaaatccatgctggacagcttaagg

SEQ ID NO: 202879 - DNA, 33 bp, Homo sapien
cgatcagtcatttctccccctaatctgtcaagg

SEQ ID NO: 202880 - DNA, 33 bp, Homo sapien
cgatcagtcatttctctccctaatctgtcaagg

SEQ ID NO: 202881 - DNA, 33 bp, Homo sapien
tgcaagtggctttctccattacctagattgcta

SEQ ID NO: 202882 - DNA, 33 bp, Homo sapien
tgcaagtggctttctctattacctagattgcta

SEQ ID NO: 202883 - DNA, 33 bp, Homo sapien
atttgaagacaactagaattccccatatagaca

SEQ ID NO: 202884 - DNA, 33 bp, Homo sapien
atttgaagacaactagcattccccatatagaca

SEQ ID NO: 202885 - DNA, 33 bp, Homo sapien
gaaatggaatgtgtgccctcttttgcatcttgc

SEQ ID NO: 202886 - DNA, 33 bp, Homo sapien
gaaatggaatgtgtgctctcttttgcatcttgc

SEQ ID NO: 202887 - DNA, 33 bp, Homo sapien
ttgtttcaggttggtacgcttattagagggggg

SEQ ID NO: 202888 - DNA, 33 bp, Homo sapien
ttgtttcaggttggtatgcttattagagggggg

SEQ ID NO: 202889 - DNA, 33 bp, Homo sapien
ggaaaaactatcaagcaagatagagtgatggaa

SEQ ID NO: 202890 - DNA, 33 bp, Homo sapien
ggaaaaactatcaagcgagatagagtgatggaa

SEQ ID NO: 202891 - DNA, 33 bp, Homo sapien
ttgataataacaattacgagcctaaaaacctat

SEQ ID NO: 202892 - DNA, 33 bp, Homo sapien
ttgataataacaattatgagcctaaaaacctat

SEQ ID NO: 202893 - DNA, 33 bp, Homo sapien
acacaaaacaaattgaaaaacagttggcagatt

SEQ ID NO: 202894 - DNA, 33 bp, Homo sapien
acacaaaacaaattgagaaacagttggcagatt

SEQ ID NO: 202895 - DNA, 33 bp, Homo sapien
aagatgggctctgtacaagaacttgcagtttaa

SEQ ID NO: 202896 - DNA, 33 bp, Homo sapien
aagatgggctctgtacgagaacttgcagtttaa

SEQ ID NO: 202897 - DNA, 33 bp, Homo sapien
ggcattctgggaagaccccaagataaataatcc

SEQ ID NO: 202898 - DNA, 33 bp, Homo sapien
ggcattctgggaagactccaagataaataatcc

SEQ ID NO: 202899 - DNA, 33 bp, Homo sapien
caaaacttagaaaatcacacactctgttggaag

SEQ ID NO: 202900 - DNA, 33 bp, Homo sapien
caaaacttagaaaatcgcacactctgttggaag

SEQ ID NO: 202901 - DNA, 33 bp, Homo sapien
ttagtgtgaggctgtacgtttacctggctggga

SEQ ID NO: 202902 - DNA, 33 bp, Homo sapien
ttagtgtgaggctgtatgtttacctggctggga

SEQ ID NO: 202903 - DNA, 33 bp, Homo sapien
ttaaattcccagtctaataattccaacatatct

SEQ ID NO: 202904 - DNA, 33 bp, Homo sapien
ttaaattcccagtctagtaattccaacatatct

SEQ ID NO: 202905 - DNA, 33 bp, Homo sapien
cagagggaatttctcacctttcagacagaagaa

SEQ ID NO: 202906 - DNA, 33 bp, Homo sapien
cagagggaatttctcatctttcagacagaagaa

SEQ ID NO: 202907 - DNA, 33 bp, Homo sapien
atacactccttacctcactgttcccacaataag

SEQ ID NO: 202908 - DNA, 33 bp, Homo sapien
atacactccttacctcgctgttcccacaataag

SEQ ID NO: 202909 - DNA, 33 bp, Homo sapien
ctgtggaaatgctgcaaataactttaaatcaac

SEQ ID NO: 202910 - DNA, 33 bp, Homo sapien
ctgtggaaatgctgcacataactttaaatcaac

SEQ ID NO: 202911 - DNA, 33 bp, Homo sapien
agacccttcgttgacccgcagcattgaacagga

SEQ ID NO: 202912 - DNA, 33 bp, Homo sapien
agacccttcgttgaccggcagcattgaacagga

SEQ ID NO: 202913 - DNA, 33 bp, Homo sapien
ctattgccacctcatgacatgaactatcaatgc

SEQ ID NO: 202914 - DNA, 33 bp, Homo sapien
ctattgccacctcatgtcatgaactatcaatgc

SEQ ID NO: 202915 - DNA, 33 bp, Homo sapien
gcagtccatcactgaccgaaatgttaggcagtg

SEQ ID NO: 202916 - DNA, 33 bp, Homo sapien
gcagtccatcactgactgaaatgttaggcagtg

SEQ ID NO: 202917 - DNA, 33 bp, Homo sapien
cagtattcagtagtcaagtgttgtacaagtttg

SEQ ID NO: 202918 - DNA, 33 bp, Homo sapien
cagtattcagtagtcacgtgttgtacaagtttg

SEQ ID NO: 202919 - DNA, 33 bp, Homo sapien
tctgataatcacacaacgaaaccatctaatgac

SEQ ID NO: 202920 - DNA, 33 bp, Homo sapien
tctgataatcacacaatgaaaccatctaatgac

SEQ ID NO: 202921 - DNA, 33 bp, Homo sapien
agcctttgcttgtataacatctgctgacacccc

SEQ ID NO: 202922 - DNA, 33 bp, Homo sapien
agcctttgcttgtatagcatctgctgacacccc

SEQ ID NO: 202923 - DNA, 33 bp, Homo sapien
taaatctaacagagaccgtcctcctgaccaaaa

SEQ ID NO: 202924 - DNA, 33 bp, Homo sapien
taaatctaacagagacggtcctcctgaccaaaa

SEQ ID NO: 202925 - DNA, 33 bp, Homo sapien
tgcatggagtgtctcgaagtctctttcttatgc

SEQ ID NO: 202926 - DNA, 33 bp, Homo sapien
tgcatggagtgtctcgcagtctctttcttatgc

SEQ ID NO: 202927 - DNA, 33 bp, Homo sapien
ctgggtatcttcttcagataaagtggatctagt

SEQ ID NO: 202928 - DNA, 33 bp, Homo sapien
ctgggtatcttcttcatataaagtggatctagt

SEQ ID NO: 202929 - DNA, 33 bp, Homo sapien
tggtcaagtggattccaacgccccagagaagca

SEQ ID NO: 202930 - DNA, 33 bp, Homo sapien
tggtcaagtggattccgacgccccagagaagca

SEQ ID NO: 202931 - DNA, 33 bp, Homo sapien
tagaacagacagtgtcaaggctcgggctccaag

SEQ ID NO: 202932 - DNA, 33 bp, Homo sapien
tagaacagacagtgtcgaggctcgggctccaag

SEQ ID NO: 202933 - DNA, 33 bp, Homo sapien
tgtgtatccagctctgcagctgatgatggataa

SEQ ID NO: 202934 - DNA, 33 bp, Homo sapien
tgtgtatccagctctgtagctgatgatggataa

SEQ ID NO: 202935 - DNA, 33 bp, Homo sapien
aggaccagggctggtacgagtgcaaagtgctca

SEQ ID NO: 202936 - DNA, 33 bp, Homo sapien
aggaccagggctggtatgagtgcaaagtgctca

SEQ ID NO: 202937 - DNA, 33 bp, Homo sapien
cccaggccgggcacccaactctccagggcagca

SEQ ID NO: 202938 - DNA, 33 bp, Homo sapien
cccaggccgggcacccgactctccagggcagca

SEQ ID NO: 202939 - DNA, 33 bp, Homo sapien
agagagtcagaccgagacaccggaatggggaat

SEQ ID NO: 202940 - DNA, 33 bp, Homo sapien
agagagtcagaccgaggcaccggaatggggaat

SEQ ID NO: 202941 - DNA, 33 bp, Homo sapien
gcacattttctattgaagcaagtgacatttaga

SEQ ID NO: 202942 - DNA, 33 bp, Homo sapien
gcacattttctattgaggcaagtgacatttaga

SEQ ID NO: 202943 - DNA, 33 bp, Homo sapien
gtatctgatatacataccattcctggatatatt

SEQ ID NO: 202944 - DNA, 33 bp, Homo sapien
gtatctgatatacatagcattcctggatatatt

SEQ ID NO: 202945 - DNA, 33 bp, Homo sapien
tactgactttttggaaatacaaaacaatagtct

SEQ ID NO: 202946 - DNA, 33 bp, Homo sapien
tactgactttttggaattacaaaacaatagtct

SEQ ID NO: 202947 - DNA, 33 bp, Homo sapien
gctgcaccctgcaatgaatgggatttgggtaga

SEQ ID NO: 202948 - DNA, 33 bp, Homo sapien
gctgcaccctgcaatggatgggatttgggtaga

SEQ ID NO: 202949 - DNA, 33 bp, Homo sapien
acctgcctacatctcaaaaatttggcaagactg

SEQ ID NO: 202950 - DNA, 33 bp, Homo sapien
acctgcctacatctcagaaatttggcaagactg

SEQ ID NO: 202951 - DNA, 33 bp, Homo sapien
aggacttggcgttcacaaagctcaatatgtgtt

SEQ ID NO: 202952 - DNA, 33 bp, Homo sapien
aggacttggcgttcacgaagctcaatatgtgtt

SEQ ID NO: 202953 - DNA, 33 bp, Homo sapien
atcataatcatgagacaagataacaagtatcaa

SEQ ID NO: 202954 - DNA, 33 bp, Homo sapien
atcataatcatgagacgagataacaagtatcaa

SEQ ID NO: 202955 - DNA, 33 bp, Homo sapien
tccacttcatgccaaccggtgaacattctgggg

SEQ ID NO: 202956 - DNA, 33 bp, Homo sapien
tccacttcatgccaactggtgaacattctgggg

SEQ ID NO: 202957 - DNA, 33 bp, Homo sapien
tttgcttaagtgaagaagtcatacaaatacctg

SEQ ID NO: 202958 - DNA, 33 bp, Homo sapien
tttgcttaagtgaagacgtcatacaaatacctg

SEQ ID NO: 202959 - DNA, 33 bp, Homo sapien
tgggagaccctcgatgcaggtttgtggagggaa

SEQ ID NO: 202960 - DNA, 33 bp, Homo sapien
tgggagaccctcgatggaggtttgtggagggaa

SEQ ID NO: 202961 - DNA, 33 bp, Homo sapien
agcctaaaatttgagaaggcagaaagtactatg

SEQ ID NO: 202962 - DNA, 33 bp, Homo sapien
agcctaaaatttgagatggcagaaagtactatg

SEQ ID NO: 202963 - DNA, 33 bp, Homo sapien
aaggaagctatctccacaggaagcatgtggggt

SEQ ID NO: 202964 - DNA, 33 bp, Homo sapien
aaggaagctatctccataggaagcatgtggggt

SEQ ID NO: 202965 - DNA, 33 bp, Homo sapien
ccaactctggccttgacgttttctataaattca

SEQ ID NO: 202966 - DNA, 33 bp, Homo sapien
ccaactctggccttgatgttttctataaattca

SEQ ID NO: 202967 - DNA, 33 bp, Homo sapien
ggatatgaaatgcaaacgggcaaagttaggcat

SEQ ID NO: 202968 - DNA, 33 bp, Homo sapien
ggatatgaaatgcaaatgggcaaagttaggcat

SEQ ID NO: 202969 - DNA, 33 bp, Homo sapien
caaaagcagctggaccagagcatctttactatt

SEQ ID NO: 202970 - DNA, 33 bp, Homo sapien
caaaagcagctggaccggagcatctttactatt

SEQ ID NO: 202971 - DNA, 33 bp, Homo sapien
ttggcaattttccccacgatactagtgataaga

SEQ ID NO: 202972 - DNA, 33 bp, Homo sapien
ttggcaattttccccatgatactagtgataaga

SEQ ID NO: 202973 - DNA, 33 bp, Homo sapien
aaagcgctagtgcgagcaggggaagctgtccag

SEQ ID NO: 202974 - DNA, 33 bp, Homo sapien
aaagcgctagtgcgagtaggggaagctgtccag

SEQ ID NO: 202975 - DNA, 33 bp, Homo sapien
tctctcacctttttacacaccctatcagcctga

SEQ ID NO: 202976 - DNA, 33 bp, Homo sapien
tctctcacctttttacgcaccctatcagcctga

SEQ ID NO: 202977 - DNA, 33 bp, Homo sapien
cgccttcatctcttcaactgtcaaagggaataa

SEQ ID NO: 202978 - DNA, 33 bp, Homo sapien
cgccttcatctcttcatctgtcaaagggaataa

SEQ ID NO: 202979 - DNA, 33 bp, Homo sapien
ggcatgggctctgcaccgaggctgctccaggta

SEQ ID NO: 202980 - DNA, 33 bp, Homo sapien
ggcatgggctctgcactgaggctgctccaggta

SEQ ID NO: 202981 - DNA, 33 bp, Homo sapien
cattttgggaataaaagaatatcttcgtgctta

SEQ ID NO: 202982 - DNA, 33 bp, Homo sapien
cattttgggaataaaataatatcttcgtgctta

SEQ ID NO: 202983 - DNA, 33 bp, Homo sapien
acctcaccggaagccaatgaaggcggcatacct

SEQ ID NO: 202984 - DNA, 33 bp, Homo sapien
acctcaccggaagccagtgaaggcggcatacct

SEQ ID NO: 202985 - DNA, 33 bp, Homo sapien
atagtaaaggaacagaagtcatggatcacattc

SEQ ID NO: 202986 - DNA, 33 bp, Homo sapien
atagtaaaggaacagatgtcatggatcacattc

SEQ ID NO: 202987 - DNA, 33 bp, Homo sapien
tcagtttagtacaacacccatttattgagtatc

SEQ ID NO: 202988 - DNA, 33 bp, Homo sapien
tcagtttagtacaacagccatttattgagtatc

SEQ ID NO: 202989 - DNA, 33 bp, Homo sapien
ctgccatgaaaatggacactaccaaataaatat

SEQ ID NO: 202990 - DNA, 33 bp, Homo sapien
ctgccatgaaaatggagactaccaaataaatat

SEQ ID NO: 202991 - DNA, 33 bp, Homo sapien
agttaagcaggtacaaactaggtgatatttgaa

SEQ ID NO: 202992 - DNA, 33 bp, Homo sapien
agttaagcaggtacaagctaggtgatatttgaa

SEQ ID NO: 202993 - DNA, 33 bp, Homo sapien
atattagtgtgtcaagaatgccttttttttttt

SEQ ID NO: 202994 - DNA, 33 bp, Homo sapien
atattagtgtgtcaaggatgccttttttttttt

SEQ ID NO: 202995 - DNA, 33 bp, Homo sapien
tcctgggggtgtatgcaatgaaaaaaaaagcaa

SEQ ID NO: 202996 - DNA, 33 bp, Homo sapien
tcctgggggtgtatgcgatgaaaaaaaaagcaa

SEQ ID NO: 202997 - DNA, 33 bp, Homo sapien
ttaattccttagtctccataatctttgctacat

SEQ ID NO: 202998 - DNA, 33 bp, Homo sapien
ttaattccttagtctctataatctttgctacat

SEQ ID NO: 202999 - DNA, 33 bp, Homo sapien
ttcatgcctgaactagcaaactttgaataataa

SEQ ID NO: 203000 - DNA, 33 bp, Homo sapien
ttcatgcctgaactaggaaactttgaataataa

SEQ ID NO: 203001 - DNA, 33 bp, Homo sapien
ctacctggcacaggtaaaaatagtcttgctgtc

SEQ ID NO: 203002 - DNA, 33 bp, Homo sapien
ctacctggcacaggtagaaatagtcttgctgtc

SEQ ID NO: 203003 - DNA, 33 bp, Homo sapien
gaagcttagaaaaaaaatttgctttcattccat

SEQ ID NO: 203004 - DNA, 33 bp, Homo sapien
gaagcttagaaaaaaagtttgctttcattccat

SEQ ID NO: 203005 - DNA, 33 bp, Homo sapien
cagaagacagcatatagaactttctctttggtc

SEQ ID NO: 203006 - DNA, 33 bp, Homo sapien
cagaagacagcatatataactttctctttggtc

SEQ ID NO: 203007 - DNA, 33 bp, Homo sapien
ggcctggagtgggctccaagtaatacccagcaa

SEQ ID NO: 203008 - DNA, 33 bp, Homo sapien
ggcctggagtgggctctaagtaatacccagcaa

SEQ ID NO: 203009 - DNA, 33 bp, Homo sapien
gtacctagcatggtaactggcatatattaaggg

SEQ ID NO: 203010 - DNA, 33 bp, Homo sapien
gtacctagcatggtaattggcatatattaaggg

SEQ ID NO: 203011 - DNA, 33 bp, Homo sapien
ccactaatgactgccaatattcatgaaaaaact

SEQ ID NO: 203012 - DNA, 33 bp, Homo sapien
ccactaatgactgccattattcatgaaaaaact

SEQ ID NO: 203013 - DNA, 33 bp, Homo sapien
tcctagccctgttcaccgagagcctagaagcag

SEQ ID NO: 203014 - DNA, 33 bp, Homo sapien
tcctagccctgttcactgagagcctagaagcag

SEQ ID NO: 203015 - DNA, 33 bp, Homo sapien
gatatgacagtggagtaaaacaaagcaaacgaa

SEQ ID NO: 203016 - DNA, 33 bp, Homo sapien
gatatgacagtggagtgaaacaaagcaaacgaa

SEQ ID NO: 203017 - DNA, 33 bp, Homo sapien
gaaagagtgttagacaaggagtttaagaataca

SEQ ID NO: 203018 - DNA, 33 bp, Homo sapien
gaaagagtgttagacatggagtttaagaataca

SEQ ID NO: 203019 - DNA, 33 bp, Homo sapien
accactgtttgattcacagtgggggtcaatatg

SEQ ID NO: 203020 - DNA, 33 bp, Homo sapien
accactgtttgattcatagtgggggtcaatatg

SEQ ID NO: 203021 - DNA, 33 bp, Homo sapien
gtagctgggccattaaagaagataaaggaaaag

SEQ ID NO: 203022 - DNA, 33 bp, Homo sapien
gtagctgggccattaaggaagataaaggaaaag

SEQ ID NO: 203023 - DNA, 33 bp, Homo sapien
ctcatacagcgaggtgaactcctagctggttga

SEQ ID NO: 203024 - DNA, 33 bp, Homo sapien
ctcatacagcgaggtggactcctagctggttga

SEQ ID NO: 203025 - DNA, 33 bp, Homo sapien
gtgttgatgccgtcccaaagggaagagttccag

SEQ ID NO: 203026 - DNA, 33 bp, Homo sapien
gtgttgatgccgtcccgaagggaagagttccag

SEQ ID NO: 203027 - DNA, 33 bp, Homo sapien
ggctgcaagacatcaaatgtccagtagatggtg

SEQ ID NO: 203028 - DNA, 33 bp, Homo sapien
ggctgcaagacatcaagtgtccagtagatggtg

SEQ ID NO: 203029 - DNA, 33 bp, Homo sapien
ttttaatttaatattacaccatcagcttagaga

SEQ ID NO: 203030 - DNA, 33 bp, Homo sapien
ttttaatttaatattataccatcagcttagaga

SEQ ID NO: 203031 - DNA, 33 bp, Homo sapien
tttaaatttttcatccaccggagacactgctcc

SEQ ID NO: 203032 - DNA, 33 bp, Homo sapien
tttaaatttttcatccgccggagacactgctcc

SEQ ID NO: 203033 - DNA, 33 bp, Homo sapien
cttatgccaaaattcaaatcagtttgtgttcac

SEQ ID NO: 203034 - DNA, 33 bp, Homo sapien
cttatgccaaaattcacatcagtttgtgttcac

SEQ ID NO: 203035 - DNA, 33 bp, Homo sapien
gttactatgaggttacactactcaaatatctct

SEQ ID NO: 203036 - DNA, 33 bp, Homo sapien
gttactatgaggttaccctactcaaatatctct

SEQ ID NO: 203037 - DNA, 33 bp, Homo sapien
cctgagatttctagaacggagagatttagctaa

SEQ ID NO: 203038 - DNA, 33 bp, Homo sapien
cctgagatttctagaatggagagatttagctaa

SEQ ID NO: 203039 - DNA, 33 bp, Homo sapien
tttcatgagagaggttaaaattcatttcagtaa

SEQ ID NO: 203040 - DNA, 33 bp, Homo sapien
tttcatgagagaggttgaaattcatttcagtaa

SEQ ID NO: 203041 - DNA, 33 bp, Homo sapien
aactgagtaattatccacggaggaatcaaaatc

SEQ ID NO: 203042 - DNA, 33 bp, Homo sapien
aactgagtaattatccgcggaggaatcaaaatc

SEQ ID NO: 203043 - DNA, 33 bp, Homo sapien
ccaaaattgtaactccagatcatgccattatta

SEQ ID NO: 203044 - DNA, 33 bp, Homo sapien
ccaaaattgtaactccggatcatgccattatta

SEQ ID NO: 203045 - DNA, 33 bp, Homo sapien
gctcagtttccttccaaaatggcaaattcactt

SEQ ID NO: 203046 - DNA, 33 bp, Homo sapien
gctcagtttccttccagaatggcaaattcactt

SEQ ID NO: 203047 - DNA, 33 bp, Homo sapien
aggggatgcttagagaccatggattcgagatgt

SEQ ID NO: 203048 - DNA, 33 bp, Homo sapien
aggggatgcttagagatcatggattcgagatgt

SEQ ID NO: 203049 - DNA, 33 bp, Homo sapien
agagactggtccctgcacttgtgggactagcct

SEQ ID NO: 203050 - DNA, 33 bp, Homo sapien
agagactggtccctgcgcttgtgggactagcct

SEQ ID NO: 203051 - DNA, 33 bp, Homo sapien
acaagaatgaggattcccacctggccttagagt

SEQ ID NO: 203052 - DNA, 33 bp, Homo sapien
acaagaatgaggattctcacctggccttagagt

SEQ ID NO: 203053 - DNA, 33 bp, Homo sapien
ctttatctttgtctcccgataatgtaattgtta

SEQ ID NO: 203054 - DNA, 33 bp, Homo sapien
ctttatctttgtctcctgataatgtaattgtta

SEQ ID NO: 203055 - DNA, 33 bp, Homo sapien
cggttacatgatcacaagtctcctgttcatgcc

SEQ ID NO: 203056 - DNA, 33 bp, Homo sapien
cggttacatgatcacaggtctcctgttcatgcc

SEQ ID NO: 203057 - DNA, 33 bp, Homo sapien
tgtgacgtcactgaaaacctctgtgctctagtt

SEQ ID NO: 203058 - DNA, 33 bp, Homo sapien
tgtgacgtcactgaaagcctctgtgctctagtt

SEQ ID NO: 203059 - DNA, 33 bp, Homo sapien
ggtaagcggggctacaatcccagagtcgtggtt

SEQ ID NO: 203060 - DNA, 33 bp, Homo sapien
ggtaagcggggctacagtcccagagtcgtggtt

SEQ ID NO: 203061 - DNA, 33 bp, Homo sapien
tcaagaacttgaacaccgaccgattttgtgtcc

SEQ ID NO: 203062 - DNA, 33 bp, Homo sapien
tcaagaacttgaacactgaccgattttgtgtcc

SEQ ID NO: 203063 - DNA, 33 bp, Homo sapien
tcccaagccaggcgcaacaccaatgcagatttc

SEQ ID NO: 203064 - DNA, 33 bp, Homo sapien
tcccaagccaggcgcagcaccaatgcagatttc

SEQ ID NO: 203065 - DNA, 33 bp, Homo sapien
cagaaggtgagagagcagagaaaatatctaata

SEQ ID NO: 203066 - DNA, 33 bp, Homo sapien
cagaaggtgagagagcggagaaaatatctaata

SEQ ID NO: 203067 - DNA, 33 bp, Homo sapien
caacatctgtgtcttacctgtttctgatgattg

SEQ ID NO: 203068 - DNA, 33 bp, Homo sapien
caacatctgtgtcttatctgtttctgatgattg

SEQ ID NO: 203069 - DNA, 33 bp, Homo sapien
ggtagaagcagtgaaactgaaattaatttgcaa

SEQ ID NO: 203070 - DNA, 33 bp, Homo sapien
ggtagaagcagtgaaattgaaattaatttgcaa

SEQ ID NO: 203071 - DNA, 33 bp, Homo sapien
tggtggatagaaattacatggttcccaccccca

SEQ ID NO: 203072 - DNA, 33 bp, Homo sapien
tggtggatagaaattatatggttcccaccccca

SEQ ID NO: 203073 - DNA, 33 bp, Homo sapien
attccgtaaggaccacacagtccaaacaagagc

SEQ ID NO: 203074 - DNA, 33 bp, Homo sapien
attccgtaaggaccacgcagtccaaacaagagc

SEQ ID NO: 203075 - DNA, 33 bp, Homo sapien
actaatagaattgtaccatgtattctgaagctt

SEQ ID NO: 203076 - DNA, 33 bp, Homo sapien
actaatagaattgtactatgtattctgaagctt

SEQ ID NO: 203077 - DNA, 33 bp, Homo sapien
tatgcaagacgttcagaaaggttgaatagcaac

SEQ ID NO: 203078 - DNA, 33 bp, Homo sapien
tatgcaagacgttcaggaaggttgaatagcaac

SEQ ID NO: 203079 - DNA, 33 bp, Homo sapien
tcagcacagtataaggcagggcctcttcaacca

SEQ ID NO: 203080 - DNA, 33 bp, Homo sapien
tcagcacagtataaggtagggcctcttcaacca

SEQ ID NO: 203081 - DNA, 33 bp, Homo sapien
gaatgtggagagcatacattagctttataactt

SEQ ID NO: 203082 - DNA, 33 bp, Homo sapien
gaatgtggagagcatatattagctttataactt

SEQ ID NO: 203083 - DNA, 33 bp, Homo sapien
gaatataggtcacgtgcaaactggccaccaagt

SEQ ID NO: 203084 - DNA, 33 bp, Homo sapien
gaatataggtcacgtggaaactggccaccaagt

SEQ ID NO: 203085 - DNA, 33 bp, Homo sapien
cctcagtgattcctaaaccttttgacttcactt

SEQ ID NO: 203086 - DNA, 33 bp, Homo sapien
cctcagtgattcctaacccttttgacttcactt

SEQ ID NO: 203087 - DNA, 33 bp, Homo sapien
tcctttcccccgtttacacttcaagctggctac

SEQ ID NO: 203088 - DNA, 33 bp, Homo sapien
tcctttcccccgtttatacttcaagctggctac

SEQ ID NO: 203089 - DNA, 33 bp, Homo sapien
gtaaaaccagaaagaacggcattgagaaattag

SEQ ID NO: 203090 - DNA, 33 bp, Homo sapien
gtaaaaccagaaagaatggcattgagaaattag

SEQ ID NO: 203091 - DNA, 33 bp, Homo sapien
tttctgtcttgtctgacatggagctcaaacagg

SEQ ID NO: 203092 - DNA, 33 bp, Homo sapien
tttctgtcttgtctgatatggagctcaaacagg

SEQ ID NO: 203093 - DNA, 33 bp, Homo sapien
tattgggagaattaaacgggagagtgcacataa

SEQ ID NO: 203094 - DNA, 33 bp, Homo sapien
tattgggagaattaaatgggagagtgcacataa

SEQ ID NO: 203095 - DNA, 33 bp, Homo sapien
agctctcataaaaccccaatcacagaagattag

SEQ ID NO: 203096 - DNA, 33 bp, Homo sapien
agctctcataaaacccgaatcacagaagattag

SEQ ID NO: 203097 - DNA, 33 bp, Homo sapien
tttgcttgcaagcgaacggcttcccagggagcg

SEQ ID NO: 203098 - DNA, 33 bp, Homo sapien
tttgcttgcaagcgaatggcttcccagggagcg

SEQ ID NO: 203099 - DNA, 33 bp, Homo sapien
attaactggcagaaaagaagggtgagaataaga

SEQ ID NO: 203100 - DNA, 33 bp, Homo sapien
attaactggcagaaaataagggtgagaataaga

SEQ ID NO: 203101 - DNA, 33 bp, Homo sapien
cacacgcagtcgctcacagggggctgcttagag

SEQ ID NO: 203102 - DNA, 33 bp, Homo sapien
cacacgcagtcgctcagagggggctgcttagag

SEQ ID NO: 203103 - DNA, 33 bp, Homo sapien
tgtaagacctttgccaagtcatttccgttctcc

SEQ ID NO: 203104 - DNA, 33 bp, Homo sapien
tgtaagacctttgccacgtcatttccgttctcc

SEQ ID NO: 203105 - DNA, 33 bp, Homo sapien
ctcccacacataaatccctctctcagaacaagt

SEQ ID NO: 203106 - DNA, 33 bp, Homo sapien
ctcccacacataaatctctctctcagaacaagt

SEQ ID NO: 203107 - DNA, 33 bp, Homo sapien
gagctgctttcctcacagtcagagagtttctgc

SEQ ID NO: 203108 - DNA, 33 bp, Homo sapien
gagctgctttcctcacggtcagagagtttctgc

SEQ ID NO: 203109 - DNA, 33 bp, Homo sapien
aggagcaggagtgtaaagttaactggggacaga

SEQ ID NO: 203110 - DNA, 33 bp, Homo sapien
aggagcaggagtgtaatgttaactggggacaga

SEQ ID NO: 203111 - DNA, 33 bp, Homo sapien
attcatttactcacccaacctgccctgatgctc

SEQ ID NO: 203112 - DNA, 33 bp, Homo sapien
attcatttactcacccgacctgccctgatgctc

SEQ ID NO: 203113 - DNA, 33 bp, Homo sapien
cagaaaatgaaaatatcaagtctacaaggagcc

SEQ ID NO: 203114 - DNA, 33 bp, Homo sapien
cagaaaatgaaaatatgaagtctacaaggagcc

SEQ ID NO: 203115 - DNA, 33 bp, Homo sapien
ggttctgtgtgggacccggtcaaaatattcatt

SEQ ID NO: 203116 - DNA, 33 bp, Homo sapien
ggttctgtgtgggacctggtcaaaatattcatt

SEQ ID NO: 203117 - DNA, 33 bp, Homo sapien
tttgtcggccaaagaaaaggaagaactgtttga

SEQ ID NO: 203118 - DNA, 33 bp, Homo sapien
tttgtcggccaaagaagaggaagaactgtttga

SEQ ID NO: 203119 - DNA, 33 bp, Homo sapien
tttctttgatatttaccgaacaccctctcaagc

SEQ ID NO: 203120 - DNA, 33 bp, Homo sapien
tttctttgatatttactgaacaccctctcaagc

SEQ ID NO: 203121 - DNA, 33 bp, Homo sapien
tgatcaattactttggccatccttcactactca

SEQ ID NO: 203122 - DNA, 33 bp, Homo sapien
tgatcaattactttgggcatccttcactactca

SEQ ID NO: 203123 - DNA, 33 bp, Homo sapien
taatcaagcggcaaaaacagaagaaatcatggc

SEQ ID NO: 203124 - DNA, 33 bp, Homo sapien
taatcaagcggcaaaagcagaagaaatcatggc

SEQ ID NO: 203125 - DNA, 33 bp, Homo sapien
gacacaaccattcatcaaataagcacccgtaaa

SEQ ID NO: 203126 - DNA, 33 bp, Homo sapien
gacacaaccattcatcgaataagcacccgtaaa

SEQ ID NO: 203127 - DNA, 33 bp, Homo sapien
gagtgagttatcctggcagtgagttactatctc

SEQ ID NO: 203128 - DNA, 33 bp, Homo sapien
gagtgagttatcctgggagtgagttactatctc

SEQ ID NO: 203129 - DNA, 33 bp, Homo sapien
aatgtggtttgggttaagagtgtgagcttcagt

SEQ ID NO: 203130 - DNA, 33 bp, Homo sapien
aatgtggtttgggttatgagtgtgagcttcagt

SEQ ID NO: 203131 - DNA, 33 bp, Homo sapien
ccagtggccccatatccagccaaaattcaccac

SEQ ID NO: 203132 - DNA, 33 bp, Homo sapien
ccagtggccccatatctagccaaaattcaccac

SEQ ID NO: 203133 - DNA, 33 bp, Homo sapien
tctctggctgagtacaagttcctccctctccct

SEQ ID NO: 203134 - DNA, 33 bp, Homo sapien
tctctggctgagtacaggttcctccctctccct

SEQ ID NO: 203135 - DNA, 33 bp, Homo sapien
agatataaattgtcacactttgcaatcacagat

SEQ ID NO: 203136 - DNA, 33 bp, Homo sapien
agatataaattgtcacgctttgcaatcacagat

SEQ ID NO: 203137 - DNA, 33 bp, Homo sapien
ctggaagaggccacagcaaaagctcgcaaagtt

SEQ ID NO: 203138 - DNA, 33 bp, Homo sapien
ctggaagaggccacagtaaaagctcgcaaagtt

SEQ ID NO: 203139 - DNA, 33 bp, Homo sapien
acatgtctaatacctaacactcagaaagcatcc

SEQ ID NO: 203140 - DNA, 33 bp, Homo sapien
acatgtctaatacctagcactcagaaagcatcc

SEQ ID NO: 203141 - DNA, 33 bp, Homo sapien
aaaacagaaaaaaaacaggcattcattgctcac

SEQ ID NO: 203142 - DNA, 33 bp, Homo sapien
aaaacagaaaaaaaacgggcattcattgctcac

SEQ ID NO: 203143 - DNA, 33 bp, Homo sapien
gggagcaatgtctgaggatgtcctggagactct

SEQ ID NO: 203144 - DNA, 33 bp, Homo sapien
gggagcaatgtctgagtatgtcctggagactct

SEQ ID NO: 203145 - DNA, 33 bp, Homo sapien
aattcacacataacagaaggggtggcataaact

SEQ ID NO: 203146 - DNA, 33 bp, Homo sapien
aattcacacataacaggaggggtggcataaact

SEQ ID NO: 203147 - DNA, 33 bp, Homo sapien
ctctggaaaggctacaactagacaagctgatga

SEQ ID NO: 203148 - DNA, 33 bp, Homo sapien
ctctggaaaggctacacctagacaagctgatga

SEQ ID NO: 203149 - DNA, 33 bp, Homo sapien
aattcacatagaaaaacgagcaagtaagaattg

SEQ ID NO: 203150 - DNA, 33 bp, Homo sapien
aattcacatagaaaaatgagcaagtaagaattg

SEQ ID NO: 203151 - DNA, 33 bp, Homo sapien
gctctactctccttccaaaacagctgatttggc

SEQ ID NO: 203152 - DNA, 33 bp, Homo sapien
gctctactctccttccgaaacagctgatttggc

SEQ ID NO: 203153 - DNA, 33 bp, Homo sapien
gtacaaattttggatacatatacgtgtgcctta

SEQ ID NO: 203154 - DNA, 33 bp, Homo sapien
gtacaaattttggatagatatacgtgtgcctta

SEQ ID NO: 203155 - DNA, 33 bp, Homo sapien
gagctgctgcttttgaagtactctcatctgttt

SEQ ID NO: 203156 - DNA, 33 bp, Homo sapien
gagctgctgcttttgaggtactctcatctgttt

SEQ ID NO: 203157 - DNA, 33 bp, Homo sapien
gagatggtgaccttccaagctggccctttcgca

SEQ ID NO: 203158 - DNA, 33 bp, Homo sapien
gagatggtgaccttccgagctggccctttcgca

SEQ ID NO: 203159 - DNA, 33 bp, Homo sapien
ttcaacaaatctgtaaacttgtttggggaaaga

SEQ ID NO: 203160 - DNA, 33 bp, Homo sapien
ttcaacaaatctgtaagcttgtttggggaaaga

SEQ ID NO: 203161 - DNA, 33 bp, Homo sapien
ccttgtaataaccgcacgacctgtggcactcac

SEQ ID NO: 203162 - DNA, 33 bp, Homo sapien
ccttgtaataaccgcatgacctgtggcactcac

SEQ ID NO: 203163 - DNA, 33 bp, Homo sapien
atggacggttgtgagacgggtaagtcagaacgg

SEQ ID NO: 203164 - DNA, 33 bp, Homo sapien
atggacggttgtgagatgggtaagtcagaacgg

SEQ ID NO: 203165 - DNA, 33 bp, Homo sapien
cactgtgtggtccctcaatgcagtaagaggaaa

SEQ ID NO: 203166 - DNA, 33 bp, Homo sapien
cactgtgtggtccctcgatgcagtaagaggaaa

SEQ ID NO: 203167 - DNA, 33 bp, Homo sapien
gcctaaactagaaccgacaaagtgagggaggct

SEQ ID NO: 203168 - DNA, 33 bp, Homo sapien
gcctaaactagaaccgtcaaagtgagggaggct

SEQ ID NO: 203169 - DNA, 33 bp, Homo sapien
aaaacatgagtcaaagaaagtctcaagagtaat

SEQ ID NO: 203170 - DNA, 33 bp, Homo sapien
aaaacatgagtcaaaggaagtctcaagagtaat

SEQ ID NO: 203171 - DNA, 33 bp, Homo sapien
ttctccctagttctaacgtagcatcgtcttttc

SEQ ID NO: 203172 - DNA, 33 bp, Homo sapien
ttctccctagttctaatgtagcatcgtcttttc

SEQ ID NO: 203173 - DNA, 33 bp, Homo sapien
gcatggcactgtggataaagcatgaactggaga

SEQ ID NO: 203174 - DNA, 33 bp, Homo sapien
gcatggcactgtggatgaagcatgaactggaga

SEQ ID NO: 203175 - DNA, 33 bp, Homo sapien
aaaccagggtttttgacacagtctttggaggat

SEQ ID NO: 203176 - DNA, 33 bp, Homo sapien
aaaccagggtttttgatacagtctttggaggat

SEQ ID NO: 203177 - DNA, 33 bp, Homo sapien
ctcaacctttctgaaccgaaattgggatttatc

SEQ ID NO: 203178 - DNA, 33 bp, Homo sapien
ctcaacctttctgaactgaaattgggatttatc

SEQ ID NO: 203179 - DNA, 33 bp, Homo sapien
gtgttctgtgactgaaggcataaaccaatattt

SEQ ID NO: 203180 - DNA, 33 bp, Homo sapien
gtgttctgtgactgaatgcataaaccaatattt

SEQ ID NO: 203181 - DNA, 33 bp, Homo sapien
cttgttcaggtaatgcaaggtgctgtaacagat

SEQ ID NO: 203182 - DNA, 33 bp, Homo sapien
cttgttcaggtaatgcgaggtgctgtaacagat

SEQ ID NO: 203183 - DNA, 33 bp, Homo sapien
acaatctatacaaagcgctcagacacatgacct

SEQ ID NO: 203184 - DNA, 33 bp, Homo sapien
acaatctatacaaagctctcagacacatgacct

SEQ ID NO: 203185 - DNA, 33 bp, Homo sapien
tggcttgggaattgaactgtggatctgttaatt

SEQ ID NO: 203186 - DNA, 33 bp, Homo sapien
tggcttgggaattgaattgtggatctgttaatt

SEQ ID NO: 203187 - DNA, 33 bp, Homo sapien
ataccttttcatgataaaaacaatcaacaaact

SEQ ID NO: 203188 - DNA, 33 bp, Homo sapien
ataccttttcatgatataaacaatcaacaaact

SEQ ID NO: 203189 - DNA, 33 bp, Homo sapien
aggagggaggacaggaaacaaacatgcagtcta

SEQ ID NO: 203190 - DNA, 33 bp, Homo sapien
aggagggaggacaggacacaaacatgcagtcta

SEQ ID NO: 203191 - DNA, 33 bp, Homo sapien
gtgaatacatgggctacgagcctaaaccctgca

SEQ ID NO: 203192 - DNA, 33 bp, Homo sapien
gtgaatacatgggctatgagcctaaaccctgca

SEQ ID NO: 203193 - DNA, 33 bp, Homo sapien
cccatgtttcttgttcaaaggtcataaatcctt

SEQ ID NO: 203194 - DNA, 33 bp, Homo sapien
cccatgtttcttgttcgaaggtcataaatcctt

SEQ ID NO: 203195 - DNA, 33 bp, Homo sapien
taatgcgttagcggacaataaagaataacccta

SEQ ID NO: 203196 - DNA, 33 bp, Homo sapien
taatgcgttagcggacgataaagaataacccta

SEQ ID NO: 203197 - DNA, 33 bp, Homo sapien
tctgctctgggcagcaagaagttgggccatttg

SEQ ID NO: 203198 - DNA, 33 bp, Homo sapien
tctgctctgggcagcaggaagttgggccatttg

SEQ ID NO: 203199 - DNA, 33 bp, Homo sapien
agaggattgaagtcacaggcgaaggatgctgca

SEQ ID NO: 203200 - DNA, 33 bp, Homo sapien
agaggattgaagtcacgggcgaaggatgctgca

SEQ ID NO: 203201 - DNA, 33 bp, Homo sapien
cagggaacctagcagcacgaagcctccagttgg

SEQ ID NO: 203202 - DNA, 33 bp, Homo sapien
cagggaacctagcagctcgaagcctccagttgg

SEQ ID NO: 203203 - DNA, 33 bp, Homo sapien
gatgtttgttcctctggaattgagtgggatgat

SEQ ID NO: 203204 - DNA, 33 bp, Homo sapien
gatgtttgttcctctgtaattgagtgggatgat

SEQ ID NO: 203205 - DNA, 33 bp, Homo sapien
agagtgatgacctataacacctggtagaaacat

SEQ ID NO: 203206 - DNA, 33 bp, Homo sapien
agagtgatgacctatagcacctggtagaaacat

SEQ ID NO: 203207 - DNA, 33 bp, Homo sapien
tcatcaatggtaaatacatgacatgatatggga

SEQ ID NO: 203208 - DNA, 33 bp, Homo sapien
tcatcaatggtaaatagatgacatgatatggga

SEQ ID NO: 203209 - DNA, 33 bp, Homo sapien
ggcttctatccagagcgcataggcaaagctctc

SEQ ID NO: 203210 - DNA, 33 bp, Homo sapien
ggcttctatccagagctcataggcaaagctctc

SEQ ID NO: 203211 - DNA, 33 bp, Homo sapien
tccttgagcaggcctgcaaagtacggtcggcct

SEQ ID NO: 203212 - DNA, 33 bp, Homo sapien
tccttgagcaggcctggaaagtacggtcggcct

SEQ ID NO: 203213 - DNA, 33 bp, Homo sapien
tctgttcttctctgtaacttcactttcactcgg

SEQ ID NO: 203214 - DNA, 33 bp, Homo sapien
tctgttcttctctgtagcttcactttcactcgg

SEQ ID NO: 203215 - DNA, 33 bp, Homo sapien
ggccacgtgaggtgagcccgagtgaaagtgaag

SEQ ID NO: 203216 - DNA, 33 bp, Homo sapien
ggccacgtgaggtgagtccgagtgaaagtgaag

SEQ ID NO: 203217 - DNA, 33 bp, Homo sapien
tttctcttaataagacagagcccattctctagg

SEQ ID NO: 203218 - DNA, 33 bp, Homo sapien
tttctcttaataagacggagcccattctctagg

SEQ ID NO: 203219 - DNA, 33 bp, Homo sapien
gtggtgaaagattgtacctcattctgggtttta

SEQ ID NO: 203220 - DNA, 33 bp, Homo sapien
gtggtgaaagattgtatctcattctgggtttta

SEQ ID NO: 203221 - DNA, 33 bp, Homo sapien
gaggccctcaaggaaaactatcaatgggctcac

SEQ ID NO: 203222 - DNA, 33 bp, Homo sapien
gaggccctcaaggaaacctatcaatgggctcac

SEQ ID NO: 203223 - DNA, 33 bp, Homo sapien
ggttttggttgacagccatagacccttcatcct

SEQ ID NO: 203224 - DNA, 33 bp, Homo sapien
ggttttggttgacagctatagacccttcatcct

SEQ ID NO: 203225 - DNA, 33 bp, Homo sapien
gtaacaaacgtaggcaccaacatttactgagta

SEQ ID NO: 203226 - DNA, 33 bp, Homo sapien
gtaacaaacgtaggcatcaacatttactgagta

SEQ ID NO: 203227 - DNA, 33 bp, Homo sapien
taacacacatttacacgggcttttcttcaggtc

SEQ ID NO: 203228 - DNA, 33 bp, Homo sapien
taacacacatttacactggcttttcttcaggtc

SEQ ID NO: 203229 - DNA, 33 bp, Homo sapien
ccagagacatctgccacagtctgtgctttcctc

SEQ ID NO: 203230 - DNA, 33 bp, Homo sapien
ccagagacatctgccatagtctgtgctttcctc

SEQ ID NO: 203231 - DNA, 33 bp, Homo sapien
ctccagaagtagcccaaatgaagtgtccttcac

SEQ ID NO: 203232 - DNA, 33 bp, Homo sapien
ctccagaagtagcccagatgaagtgtccttcac

SEQ ID NO: 203233 - DNA, 33 bp, Homo sapien
accttgagaactcactaaataggcccttctgca

SEQ ID NO: 203234 - DNA, 33 bp, Homo sapien
accttgagaactcactgaataggcccttctgca

SEQ ID NO: 203235 - DNA, 33 bp, Homo sapien
gctgacactcattctacaacaccacccccagca

SEQ ID NO: 203236 - DNA, 33 bp, Homo sapien
gctgacactcattctataacaccacccccagca

SEQ ID NO: 203237 - DNA, 33 bp, Homo sapien
taggtttccacatatcaattcgagggggatgac

SEQ ID NO: 203238 - DNA, 33 bp, Homo sapien
taggtttccacatatcgattcgagggggatgac

SEQ ID NO: 203239 - DNA, 33 bp, Homo sapien
tctgttttactgctgggcatgtggtttgcataa

SEQ ID NO: 203240 - DNA, 33 bp, Homo sapien
tctgttttactgctggtcatgtggtttgcataa

SEQ ID NO: 203241 - DNA, 33 bp, Homo sapien
gtgcactctgcaccgagggatctgtcatctgat

SEQ ID NO: 203242 - DNA, 33 bp, Homo sapien
gtgcactctgcaccgatggatctgtcatctgat

SEQ ID NO: 203243 - DNA, 33 bp, Homo sapien
aataatacttaccttacggagtgactgtgagga

SEQ ID NO: 203244 - DNA, 33 bp, Homo sapien
aataatacttaccttatggagtgactgtgagga

SEQ ID NO: 203245 - DNA, 33 bp, Homo sapien
gctcccatgtgtgtaaagagaaggctgcaaggc

SEQ ID NO: 203246 - DNA, 33 bp, Homo sapien
gctcccatgtgtgtaaggagaaggctgcaaggc

SEQ ID NO: 203247 - DNA, 33 bp, Homo sapien
ggatctgcttcccaaaaacaagcaagggcattt

SEQ ID NO: 203248 - DNA, 33 bp, Homo sapien
ggatctgcttcccaaagacaagcaagggcattt

SEQ ID NO: 203249 - DNA, 33 bp, Homo sapien
gaaggtgcaagaccaacgtgaagtcagccacag

SEQ ID NO: 203250 - DNA, 33 bp, Homo sapien
gaaggtgcaagaccaaggtgaagtcagccacag

SEQ ID NO: 203251 - DNA, 33 bp, Homo sapien
gggataagcaatgtacgaatggtaagagttgag

SEQ ID NO: 203252 - DNA, 33 bp, Homo sapien
gggataagcaatgtactaatggtaagagttgag

SEQ ID NO: 203253 - DNA, 33 bp, Homo sapien
atactttcttacaccaatctaagcccactatgt

SEQ ID NO: 203254 - DNA, 33 bp, Homo sapien
atactttcttacaccagtctaagcccactatgt

SEQ ID NO: 203255 - DNA, 33 bp, Homo sapien
gccatccattttgtgcacacaccgtatatcaaa

SEQ ID NO: 203256 - DNA, 33 bp, Homo sapien
gccatccattttgtgcgcacaccgtatatcaaa

SEQ ID NO: 203257 - DNA, 33 bp, Homo sapien
actcagatatcacaaactggtggccccatgtca

SEQ ID NO: 203258 - DNA, 33 bp, Homo sapien
actcagatatcacaaattggtggccccatgtca

SEQ ID NO: 203259 - DNA, 33 bp, Homo sapien
gagtgcacttacgaaaatggtacagccagctac

SEQ ID NO: 203260 - DNA, 33 bp, Homo sapien
gagtgcacttacgaaattggtacagccagctac

SEQ ID NO: 203261 - DNA, 33 bp, Homo sapien
tgagagtgattgaaagaccatatttaggagaat

SEQ ID NO: 203262 - DNA, 33 bp, Homo sapien
tgagagtgattgaaagtccatatttaggagaat

SEQ ID NO: 203263 - DNA, 33 bp, Homo sapien
attcacctgtgaacaggaagggatggaagctgt

SEQ ID NO: 203264 - DNA, 33 bp, Homo sapien
attcacctgtgaacagtaagggatggaagctgt

SEQ ID NO: 203265 - DNA, 33 bp, Homo sapien
ggttaaatccccacaaacaacactggcgactct

SEQ ID NO: 203266 - DNA, 33 bp, Homo sapien
ggttaaatccccacaaccaacactggcgactct

SEQ ID NO: 203267 - DNA, 33 bp, Homo sapien
cacaaagttttcaagagaattgtactggtagat

SEQ ID NO: 203268 - DNA, 33 bp, Homo sapien
cacaaagttttcaagataattgtactggtagat

SEQ ID NO: 203269 - DNA, 33 bp, Homo sapien
tccctgccatgcaggcaactgaggggtgacttc

SEQ ID NO: 203270 - DNA, 33 bp, Homo sapien
tccctgccatgcaggcgactgaggggtgacttc

SEQ ID NO: 203271 - DNA, 33 bp, Homo sapien
cgtgcatatctaaaaggctcttatgtctgcatg

SEQ ID NO: 203272 - DNA, 33 bp, Homo sapien
cgtgcatatctaaaagtctcttatgtctgcatg

SEQ ID NO: 203273 - DNA, 33 bp, Homo sapien
caagtattgatttataacttggcctggaacttc

SEQ ID NO: 203274 - DNA, 33 bp, Homo sapien
caagtattgatttatatcttggcctggaacttc

SEQ ID NO: 203275 - DNA, 33 bp, Homo sapien
aaacctgcattccacaagcatgaccctagacgt

SEQ ID NO: 203276 - DNA, 33 bp, Homo sapien
aaacctgcattccacacgcatgaccctagacgt

SEQ ID NO: 203277 - DNA, 33 bp, Homo sapien
aaactcccaggatgtgaacagtaggcgggaaag

SEQ ID NO: 203278 - DNA, 33 bp, Homo sapien
aaactcccaggatgtgcacagtaggcgggaaag

SEQ ID NO: 203279 - DNA, 33 bp, Homo sapien
tcccagtggatgttgcagagctcttggtgcctt

SEQ ID NO: 203280 - DNA, 33 bp, Homo sapien
tcccagtggatgttgcggagctcttggtgcctt

SEQ ID NO: 203281 - DNA, 33 bp, Homo sapien
gtttggaccaagtttacggtggacaagggaagt

SEQ ID NO: 203282 - DNA, 33 bp, Homo sapien
gtttggaccaagtttatggtggacaagggaagt

SEQ ID NO: 203283 - DNA, 33 bp, Homo sapien
ttcctactgatttctacggacttcccttaaatc

SEQ ID NO: 203284 - DNA, 33 bp, Homo sapien
ttcctactgatttctatggacttcccttaaatc

SEQ ID NO: 203285 - DNA, 33 bp, Homo sapien
atggcccagatagcccagaaggaacctcagaga

SEQ ID NO: 203286 - DNA, 33 bp, Homo sapien
atggcccagatagcccggaaggaacctcagaga

SEQ ID NO: 203287 - DNA, 33 bp, Homo sapien
tttgtctatgcagctggcaagattacactcact

SEQ ID NO: 203288 - DNA, 33 bp, Homo sapien
tttgtctatgcagctgtcaagattacactcact

SEQ ID NO: 203289 - DNA, 33 bp, Homo sapien
catcataacctaaagaagcagtgattttcgaat

SEQ ID NO: 203290 - DNA, 33 bp, Homo sapien
catcataacctaaagatgcagtgattttcgaat

SEQ ID NO: 203291 - DNA, 33 bp, Homo sapien
ctgatgtggagccgaaccagggtttctaattat

SEQ ID NO: 203292 - DNA, 33 bp, Homo sapien
ctgatgtggagccgaagcagggtttctaattat

SEQ ID NO: 203293 - DNA, 33 bp, Homo sapien
cctatagaggaacagacagccacggcataggga

SEQ ID NO: 203294 - DNA, 33 bp, Homo sapien
cctatagaggaacagatagccacggcataggga

SEQ ID NO: 203295 - DNA, 33 bp, Homo sapien
gtgtctcaaggcaccaggagctgagtgtggacc

SEQ ID NO: 203296 - DNA, 33 bp, Homo sapien
gtgtctcaaggcaccatgagctgagtgtggacc

SEQ ID NO: 203297 - DNA, 33 bp, Homo sapien
ttcctgcagctgttacagatgagactgacggcc

SEQ ID NO: 203298 - DNA, 33 bp, Homo sapien
ttcctgcagctgttacggatgagactgacggcc

SEQ ID NO: 203299 - DNA, 33 bp, Homo sapien
cggggtgcgagcttccaaattcaggttgtgtcc

SEQ ID NO: 203300 - DNA, 33 bp, Homo sapien
cggggtgcgagcttccgaattcaggttgtgtcc

SEQ ID NO: 203301 - DNA, 33 bp, Homo sapien
cacagaactcatctcacaaagtttcagaattgc

SEQ ID NO: 203302 - DNA, 33 bp, Homo sapien
cacagaactcatctcataaagtttcagaattgc

SEQ ID NO: 203303 - DNA, 33 bp, Homo sapien
aacatgaggcacgggaagttaaatagcgtgctc

SEQ ID NO: 203304 - DNA, 33 bp, Homo sapien
aacatgaggcacgggaggttaaatagcgtgctc

SEQ ID NO: 203305 - DNA, 33 bp, Homo sapien
ctgactctgagaggaaacgttcagcagccgtgg

SEQ ID NO: 203306 - DNA, 33 bp, Homo sapien
ctgactctgagaggaaccgttcagcagccgtgg

SEQ ID NO: 203307 - DNA, 33 bp, Homo sapien
ttacagatgagagcgccgaacttaaactggatt

SEQ ID NO: 203308 - DNA, 33 bp, Homo sapien
ttacagatgagagcgctgaacttaaactggatt

SEQ ID NO: 203309 - DNA, 33 bp, Homo sapien
ctagaccttcagaggacacaaacagatgtaaaa

SEQ ID NO: 203310 - DNA, 33 bp, Homo sapien
ctagaccttcagaggatacaaacagatgtaaaa

SEQ ID NO: 203311 - DNA, 33 bp, Homo sapien
atttcacttggttcaaaccccaaccagtctctg

SEQ ID NO: 203312 - DNA, 33 bp, Homo sapien
atttcacttggttcaagccccaaccagtctctg

SEQ ID NO: 203313 - DNA, 33 bp, Homo sapien
aaaaaggaaaatggacaagtgggactattttaa

SEQ ID NO: 203314 - DNA, 33 bp, Homo sapien
aaaaaggaaaatggacgagtgggactattttaa

SEQ ID NO: 203315 - DNA, 33 bp, Homo sapien
aagagagactggttaccaggtacaaacatacag

SEQ ID NO: 203316 - DNA, 33 bp, Homo sapien
aagagagactggttactaggtacaaacatacag

SEQ ID NO: 203317 - DNA, 33 bp, Homo sapien
gtaactatagttaagcacagtgtattatatatt

SEQ ID NO: 203318 - DNA, 33 bp, Homo sapien
gtaactatagttaagcccagtgtattatatatt

SEQ ID NO: 203319 - DNA, 33 bp, Homo sapien
gtggctttgatctaaactgaatctcttgtagct

SEQ ID NO: 203320 - DNA, 33 bp, Homo sapien
gtggctttgatctaaattgaatctcttgtagct

SEQ ID NO: 203321 - DNA, 33 bp, Homo sapien
actctgcttgtcaagaagatggctctggcctcc

SEQ ID NO: 203322 - DNA, 33 bp, Homo sapien
actctgcttgtcaagaggatggctctggcctcc

SEQ ID NO: 203323 - DNA, 33 bp, Homo sapien
cactgcatcctcttcaccccagatccagttgtc

SEQ ID NO: 203324 - DNA, 33 bp, Homo sapien
cactgcatcctcttcatcccagatccagttgtc

SEQ ID NO: 203325 - DNA, 33 bp, Homo sapien
ctgccctgggagtgacaaagtgagaaccgcggc

SEQ ID NO: 203326 - DNA, 33 bp, Homo sapien
ctgccctgggagtgacgaagtgagaaccgcggc

SEQ ID NO: 203327 - DNA, 33 bp, Homo sapien
gaaagtgccagagtgaacatttttatcaaatgc

SEQ ID NO: 203328 - DNA, 33 bp, Homo sapien
gaaagtgccagagtgagcatttttatcaaatgc

SEQ ID NO: 203329 - DNA, 33 bp, Homo sapien
tccactctccttcccaagactctcagaaggact

SEQ ID NO: 203330 - DNA, 33 bp, Homo sapien
tccactctccttcccaggactctcagaaggact

SEQ ID NO: 203331 - DNA, 33 bp, Homo sapien
gaccaagcaatggaaacggtagagagaaggaaa

SEQ ID NO: 203332 - DNA, 33 bp, Homo sapien
gaccaagcaatggaaatggtagagagaaggaaa

SEQ ID NO: 203333 - DNA, 33 bp, Homo sapien
aagagacccatagagacatagtgaacaaaacaa

SEQ ID NO: 203334 - DNA, 33 bp, Homo sapien
aagagacccatagagatatagtgaacaaaacaa

SEQ ID NO: 203335 - DNA, 33 bp, Homo sapien
gtatgtaaactctctgcacttttaatatgaggc

SEQ ID NO: 203336 - DNA, 33 bp, Homo sapien
gtatgtaaactctctgtacttttaatatgaggc

SEQ ID NO: 203337 - DNA, 33 bp, Homo sapien
atcgagtaagaggacactcaccattctattggc

SEQ ID NO: 203338 - DNA, 33 bp, Homo sapien
atcgagtaagaggacattcaccattctattggc

SEQ ID NO: 203339 - DNA, 33 bp, Homo sapien
cactcactagcttgaccagcctaagttccactc

SEQ ID NO: 203340 - DNA, 33 bp, Homo sapien
cactcactagcttgactagcctaagttccactc

SEQ ID NO: 203341 - DNA, 33 bp, Homo sapien
agtcttataatttatccactagcctgtctgcct

SEQ ID NO: 203342 - DNA, 33 bp, Homo sapien
agtcttataatttatctactagcctgtctgcct

SEQ ID NO: 203343 - DNA, 33 bp, Homo sapien
ctataaacaagtacataaatgaggcagacaggc

SEQ ID NO: 203344 - DNA, 33 bp, Homo sapien
ctataaacaagtacatgaatgaggcagacaggc

SEQ ID NO: 203345 - DNA, 33 bp, Homo sapien
agttaccataagatccagaaattccactcctag

SEQ ID NO: 203346 - DNA, 33 bp, Homo sapien
agttaccataagatccggaaattccactcctag

SEQ ID NO: 203347 - DNA, 33 bp, Homo sapien
aatgggaaatggaggcaacttggtagcaatgtg

SEQ ID NO: 203348 - DNA, 33 bp, Homo sapien
aatgggaaatggaggcgacttggtagcaatgtg

SEQ ID NO: 203349 - DNA, 33 bp, Homo sapien
tgcattgggagaaaagaaagctagtgagcttag

SEQ ID NO: 203350 - DNA, 33 bp, Homo sapien
tgcattgggagaaaaggaagctagtgagcttag

SEQ ID NO: 203351 - DNA, 33 bp, Homo sapien
ggattaaatgagaaaacggatggaaaacagcag

SEQ ID NO: 203352 - DNA, 33 bp, Homo sapien
ggattaaatgagaaaatggatggaaaacagcag

SEQ ID NO: 203353 - DNA, 33 bp, Homo sapien
ccgagagcactaaaatcaactccagcagcaaag

SEQ ID NO: 203354 - DNA, 33 bp, Homo sapien
ccgagagcactaaaattaactccagcagcaaag

SEQ ID NO: 203355 - DNA, 33 bp, Homo sapien
gaggtttgtgtccctgcaacagtggaagccagg

SEQ ID NO: 203356 - DNA, 33 bp, Homo sapien
gaggtttgtgtccctggaacagtggaagccagg

SEQ ID NO: 203357 - DNA, 33 bp, Homo sapien
agagaggtgacagggaaaggtgagaatgagctc

SEQ ID NO: 203358 - DNA, 33 bp, Homo sapien
agagaggtgacagggagaggtgagaatgagctc

SEQ ID NO: 203359 - DNA, 33 bp, Homo sapien
ctttcatttcctacaaaggattagctgtcgctg

SEQ ID NO: 203360 - DNA, 33 bp, Homo sapien
ctttcatttcctacaagggattagctgtcgctg

SEQ ID NO: 203361 - DNA, 33 bp, Homo sapien
taaaagtagaaaaacacgactgtgataaacaaa

SEQ ID NO: 203362 - DNA, 33 bp, Homo sapien
taaaagtagaaaaacatgactgtgataaacaaa

SEQ ID NO: 203363 - DNA, 33 bp, Homo sapien
aaagtccagtggaacacaacagaccacaataga

SEQ ID NO: 203364 - DNA, 33 bp, Homo sapien
aaagtccagtggaacataacagaccacaataga

SEQ ID NO: 203365 - DNA, 33 bp, Homo sapien
cagaagccactttgcaccgttgctttcacccag

SEQ ID NO: 203366 - DNA, 33 bp, Homo sapien
cagaagccactttgcagcgttgctttcacccag

SEQ ID NO: 203367 - DNA, 33 bp, Homo sapien
agaagaaaacaggaaaaaaatctgtatgacctt

SEQ ID NO: 203368 - DNA, 33 bp, Homo sapien
agaagaaaacaggaaagaaatctgtatgacctt

SEQ ID NO: 203369 - DNA, 33 bp, Homo sapien
gtgtgatcttgtcataaatgcagataataaata

SEQ ID NO: 203370 - DNA, 33 bp, Homo sapien
gtgtgatcttgtcatacatgcagataataaata

SEQ ID NO: 203371 - DNA, 33 bp, Homo sapien
aaatcaaactactgaacatatgcgtaataacat

SEQ ID NO: 203372 - DNA, 33 bp, Homo sapien
aaatcaaactactgaatatatgcgtaataacat

SEQ ID NO: 203373 - DNA, 33 bp, Homo sapien
ctgagtgaaaataaaaagcctaagtaacagaga

SEQ ID NO: 203374 - DNA, 33 bp, Homo sapien
ctgagtgaaaataaaaggcctaagtaacagaga

SEQ ID NO: 203375 - DNA, 33 bp, Homo sapien
tggtttagtgtgaacagctgtgtagagaaggat

SEQ ID NO: 203376 - DNA, 33 bp, Homo sapien
tggtttagtgtgaacatctgtgtagagaaggat

SEQ ID NO: 203377 - DNA, 33 bp, Homo sapien
agaaaaacaatataggaattcaaagaaggatgt

SEQ ID NO: 203378 - DNA, 33 bp, Homo sapien
agaaaaacaatataggtattcaaagaaggatgt

SEQ ID NO: 203379 - DNA, 33 bp, Homo sapien
aaatcatgtattttaaagtaaactgtggtctgc

SEQ ID NO: 203380 - DNA, 33 bp, Homo sapien
aaatcatgtattttaatgtaaactgtggtctgc

SEQ ID NO: 203381 - DNA, 33 bp, Homo sapien
agcatctcagccatccagcactgttaggagcat

SEQ ID NO: 203382 - DNA, 33 bp, Homo sapien
agcatctcagccatccggcactgttaggagcat

SEQ ID NO: 203383 - DNA, 33 bp, Homo sapien
caggaaaaaaacagtacatagagagcacagtac

SEQ ID NO: 203384 - DNA, 33 bp, Homo sapien
caggaaaaaaacagtatatagagagcacagtac

SEQ ID NO: 203385 - DNA, 33 bp, Homo sapien
aaaaaatgttataaaacgactagtggtagttat

SEQ ID NO: 203386 - DNA, 33 bp, Homo sapien
aaaaaatgttataaaatgactagtggtagttat

SEQ ID NO: 203387 - DNA, 33 bp, Homo sapien
aggctatttattttcactctcgaagccattttc

SEQ ID NO: 203388 - DNA, 33 bp, Homo sapien
aggctatttattttcattctcgaagccattttc

SEQ ID NO: 203389 - DNA, 33 bp, Homo sapien
ggcctaaattcaaccacgtattatttcctgaaa

SEQ ID NO: 203390 - DNA, 33 bp, Homo sapien
ggcctaaattcaaccatgtattatttcctgaaa

SEQ ID NO: 203391 - DNA, 33 bp, Homo sapien
ttgccttgtgacaaacagactttgcagatatga

SEQ ID NO: 203392 - DNA, 33 bp, Homo sapien
ttgccttgtgacaaacggactttgcagatatga

SEQ ID NO: 203393 - DNA, 33 bp, Homo sapien
cctgtctcccagtgtaacggacagtcctgacct

SEQ ID NO: 203394 - DNA, 33 bp, Homo sapien
cctgtctcccagtgtagcggacagtcctgacct

SEQ ID NO: 203395 - DNA, 33 bp, Homo sapien
tcctggccaaagacaaatctgatagcttcgatg

SEQ ID NO: 203396 - DNA, 33 bp, Homo sapien
tcctggccaaagacaactctgatagcttcgatg

SEQ ID NO: 203397 - DNA, 33 bp, Homo sapien
gtggtcttttggctggaagatgcagtcatccac

SEQ ID NO: 203398 - DNA, 33 bp, Homo sapien
gtggtcttttggctgggagatgcagtcatccac

SEQ ID NO: 203399 - DNA, 33 bp, Homo sapien
gctcactcactcagtgaacaatggacacactgt

SEQ ID NO: 203400 - DNA, 33 bp, Homo sapien
gctcactcactcagtggacaatggacacactgt

SEQ ID NO: 203401 - DNA, 33 bp, Homo sapien
tcctccataaaagcaacggaaatctgaaaagaa

SEQ ID NO: 203402 - DNA, 33 bp, Homo sapien
tcctccataaaagcaatggaaatctgaaaagaa

SEQ ID NO: 203403 - DNA, 33 bp, Homo sapien
ttacctgacaactaaactgagtagaggtttcag

SEQ ID NO: 203404 - DNA, 33 bp, Homo sapien
ttacctgacaactaaattgagtagaggtttcag

SEQ ID NO: 203405 - DNA, 33 bp, Homo sapien
ttccttttagattcaacgacaaaataggttgca

SEQ ID NO: 203406 - DNA, 33 bp, Homo sapien
ttccttttagattcaatgacaaaataggttgca

SEQ ID NO: 203407 - DNA, 33 bp, Homo sapien
atcgactcataagccaacggaacagaactgacg

SEQ ID NO: 203408 - DNA, 33 bp, Homo sapien
atcgactcataagccagcggaacagaactgacg

SEQ ID NO: 203409 - DNA, 33 bp, Homo sapien
tgtaaccagagatcgcagcactgtgaattactc

SEQ ID NO: 203410 - DNA, 33 bp, Homo sapien
tgtaaccagagatcgcggcactgtgaattactc

SEQ ID NO: 203411 - DNA, 33 bp, Homo sapien
aacctattcctctgtacgtgaagaatactcgcc

SEQ ID NO: 203412 - DNA, 33 bp, Homo sapien
aacctattcctctgtaggtgaagaatactcgcc

SEQ ID NO: 203413 - DNA, 33 bp, Homo sapien
aatggctgcttggtccacggaagcctgaagcct

SEQ ID NO: 203414 - DNA, 33 bp, Homo sapien
aatggctgcttggtccgcggaagcctgaagcct

SEQ ID NO: 203415 - DNA, 33 bp, Homo sapien; identical to SEQ ID NO: 203413

SEQ ID NO: 203416 - DNA, 33 bp, Homo sapien; identical to SEQ ID NO: 203414

SEQ ID NO: 203417 - DNA, 33 bp, Homo sapien
cgccagtttgtataaacaggagagcagtagggg

SEQ ID NO: 203418 - DNA, 33 bp, Homo sapien
cgccagtttgtataaataggagagcagtagggg

SEQ ID NO: 203419 - DNA, 33 bp, Homo sapien
tgttggggctcaggatgatataggtattaacaa

SEQ ID NO: 203420 - DNA, 33 bp, Homo sapien
tgttggggctcaggattatataggtattaacaa

SEQ ID NO: 203421 - DNA, 33 bp, Homo sapien
aatagctctgattatccaggtgtaccttaaatg

SEQ ID NO: 203422 - DNA, 33 bp, Homo sapien
aatagctctgattatcgaggtgtaccttaaatg

SEQ ID NO: 203423 - DNA, 33 bp, Homo sapien
gcctgcagaccatgcaatgaaggttctggcctc

SEQ ID NO: 203424 - DNA, 33 bp, Homo sapien
gcctgcagaccatgcagtgaaggttctggcctc

SEQ ID NO: 203425 - DNA, 33 bp, Homo sapien
taaaatagttctgtaacccccaagtctcctgtg

SEQ ID NO: 203426 - DNA, 33 bp, Homo sapien
taaaatagttctgtaatccccaagtctcctgtg

SEQ ID NO: 203427 - DNA, 33 bp, Homo sapien
cacctacgctaagtcaacttgtgcaattttcca

SEQ ID NO: 203428 - DNA, 33 bp, Homo sapien
cacctacgctaagtcatcttgtgcaattttcca

SEQ ID NO: 203429 - DNA, 33 bp, Homo sapien
ctgtaggggaggtgaaaattccaacaaatggct

SEQ ID NO: 203430 - DNA, 33 bp, Homo sapien
ctgtaggggaggtgaacattccaacaaatggct

SEQ ID NO: 203431 - DNA, 33 bp, Homo sapien
actttactatagggcccggaaaactcaatacta

SEQ ID NO: 203432 - DNA, 33 bp, Homo sapien
actttactatagggcctggaaaactcaatacta

SEQ ID NO: 203433 - DNA, 33 bp, Homo sapien
aagcaccagggtaacacggtcaaatttgcattt

SEQ ID NO: 203434 - DNA, 33 bp, Homo sapien
aagcaccagggtaacatggtcaaatttgcattt

SEQ ID NO: 203435 - DNA, 33 bp, Homo sapien
cattcattctcaaaataatcacatagcctagat

SEQ ID NO: 203436 - DNA, 33 bp, Homo sapien
cattcattctcaaaatgatcacatagcctagat

SEQ ID NO: 203437 - DNA, 33 bp, Homo sapien
ggcttatggttcagccactgggttatagacact

SEQ ID NO: 203438 - DNA, 33 bp, Homo sapien
ggcttatggttcagccgctgggttatagacact

SEQ ID NO: 203439 - DNA, 33 bp, Homo sapien
cacattttactatctgaaattagctcaacattt

SEQ ID NO: 203440 - DNA, 33 bp, Homo sapien
cacattttactatctgcaattagctcaacattt

SEQ ID NO: 203441 - DNA, 33 bp, Homo sapien
ccaattagcaaaagtacgccacatccgtctgta

SEQ ID NO: 203442 - DNA, 33 bp, Homo sapien
ccaattagcaaaagtatgccacatccgtctgta

SEQ ID NO: 203443 - DNA, 33 bp, Homo sapien
atcactctgattattacaaggacagcttgaggt

SEQ ID NO: 203444 - DNA, 33 bp, Homo sapien
atcactctgattattagaaggacagcttgaggt

SEQ ID NO: 203445 - DNA, 33 bp, Homo sapien
atcagagtgataataacgacgtgcatacaaagc

SEQ ID NO: 203446 - DNA, 33 bp, Homo sapien
atcagagtgataataatgacgtgcatacaaagc

SEQ ID NO: 203447 - DNA, 33 bp, Homo sapien
acttctgcaccaggacactggagtctgccgtcc

SEQ ID NO: 203448 - DNA, 33 bp, Homo sapien
acttctgcaccaggacgctggagtctgccgtcc

SEQ ID NO: 203449 - DNA, 33 bp, Homo sapien
ggcttgtcacctgtgaagaagccttaggtgctg

SEQ ID NO: 203450 - DNA, 33 bp, Homo sapien
ggcttgtcacctgtgaggaagccttaggtgctg

SEQ ID NO: 203451 - DNA, 33 bp, Homo sapien
tgtttctctgacctgaagtttccattttgactt

SEQ ID NO: 203452 - DNA, 33 bp, Homo sapien
tgtttctctgacctgatgtttccattttgactt

SEQ ID NO: 203453 - DNA, 33 bp, Homo sapien
catcttgaagcaaaaccgccatgaagacctatg

SEQ ID NO: 203454 - DNA, 33 bp, Homo sapien
catcttgaagcaaaactgccatgaagacctatg

SEQ ID NO: 203455 - DNA, 33 bp, Homo sapien
aggtaagcagaaggacagatgtaataatactag

SEQ ID NO: 203456 - DNA, 33 bp, Homo sapien
aggtaagcagaaggacggatgtaataatactag

SEQ ID NO: 203457 - DNA, 33 bp, Homo sapien
ctcgtatagctcagagaatatcagtggatgata

SEQ ID NO: 203458 - DNA, 33 bp, Homo sapien
ctcgtatagctcagaggatatcagtggatgata

SEQ ID NO: 203459 - DNA, 33 bp, Homo sapien
tgcatattttcaaaccaatttatcaagtttcca

SEQ ID NO: 203460 - DNA, 33 bp, Homo sapien
tgcatattttcaaaccgatttatcaagtttcca

SEQ ID NO: 203461 - DNA, 33 bp, Homo sapien
atgttgtttatagcaacagtaatacccaattca

SEQ ID NO: 203462 - DNA, 33 bp, Homo sapien
atgttgtttatagcaagagtaatacccaattca

SEQ ID NO: 203463 - DNA, 33 bp, Homo sapien
ggccactagcactgataagcaatggtctcctcc

SEQ ID NO: 203464 - DNA, 33 bp, Homo sapien
ggccactagcactgatgagcaatggtctcctcc

SEQ ID NO: 203465 - DNA, 33 bp, Homo sapien
ctgtaggcaactgtaacattatggtaactattt

SEQ ID NO: 203466 - DNA, 33 bp, Homo sapien
ctgtaggcaactgtaagattatggtaactattt

SEQ ID NO: 203467 - DNA, 33 bp, Homo sapien
cgactatgagccccaccgaaacccacagaggac

SEQ ID NO: 203468 - DNA, 33 bp, Homo sapien
cgactatgagccccactgaaacccacagaggac

SEQ ID NO: 203469 - DNA, 33 bp, Homo sapien; identical to SEQ ID NO: 203467

SEQ ID NO: 203470 - DNA, 33 bp, Homo sapien; identical to SEQ ID NO: 203468

SEQ ID NO: 203471 - DNA, 33 bp, Homo sapien
agaaagataggcaatcacaggcagtggtgcccc

SEQ ID NO: 203472 - DNA, 33 bp, Homo sapien
agaaagataggcaatctcaggcagtggtgcccc

SEQ ID NO: 203473 - DNA, 33 bp, Homo sapien
tgctacttcattagcaaaaggcctctggaccca

SEQ ID NO: 203474 - DNA, 33 bp, Homo sapien
tgctacttcattagcagaaggcctctggaccca

SEQ ID NO: 203475 - DNA, 33 bp, Homo sapien
gccataatccctcttgaagcataactccactga

SEQ ID NO: 203476 - DNA, 33 bp, Homo sapien
gccataatccctcttggagcataactccactga

SEQ ID NO: 203477 - DNA, 33 bp, Homo sapien
gatgtgaaaggaagaaacaatgtaacagagaga

SEQ ID NO: 203478 - DNA, 33 bp, Homo sapien
gatgtgaaaggaagaagcaatgtaacagagaga

SEQ ID NO: 203479 - DNA, 33 bp, Homo sapien
gtagcttatgtggaagaaggatagaaggaagag

SEQ ID NO: 203480 - DNA, 33 bp, Homo sapien
gtagcttatgtggaaggaggatagaaggaagag

SEQ ID NO: 203481 - DNA, 33 bp, Homo sapien
accctggtgtatgcgacgataagtgagtgtgcc

SEQ ID NO: 203482 - DNA, 33 bp, Homo sapien
accctggtgtatgcgatgataagtgagtgtgcc

SEQ ID NO: 203483 - DNA, 33 bp, Homo sapien
cagcttccctgagacactagtggaatgcaacat

SEQ ID NO: 203484 - DNA, 33 bp, Homo sapien
cagcttccctgagacattagtggaatgcaacat

SEQ ID NO: 203485 - DNA, 33 bp, Homo sapien
ccagaaagcacaagccacgaaacaaaaaaattg

SEQ ID NO: 203486 - DNA, 33 bp, Homo sapien
ccagaaagcacaagccgcgaaacaaaaaaattg

SEQ ID NO: 203487 - DNA, 33 bp, Homo sapien
tgtggtaaaacctaaacatgaggtagtctgtgg

SEQ ID NO: 203488 - DNA, 33 bp, Homo sapien
tgtggtaaaacctaaatatgaggtagtctgtgg

SEQ ID NO: 203489 - DNA, 33 bp, Homo sapien
cagcctaggccagaacccttcttgtcttctttc

SEQ ID NO: 203490 - DNA, 33 bp, Homo sapien
cagcctaggccagaacgcttcttgtcttctttc

SEQ ID NO: 203491 - DNA, 33 bp, Homo sapien
tccatttcttgggtcacaagactcctgttttca

SEQ ID NO: 203492 - DNA, 33 bp, Homo sapien
tccatttcttgggtcataagactcctgttttca

SEQ ID NO: 203493 - DNA, 33 bp, Homo sapien
cggcatttccgtgagccattcttttgtggttcc

SEQ ID NO: 203494 - DNA, 33 bp, Homo sapien
cggcatttccgtgagctattcttttgtggttcc

SEQ ID NO: 203495 - DNA, 33 bp, Homo sapien
acccgtggtccctttgaaacctattgcttactc

SEQ ID NO: 203496 - DNA, 33 bp, Homo sapien
acccgtggtccctttggaacctattgcttactc

SEQ ID NO: 203497 - DNA, 33 bp, Homo sapien
ggagttactccttaagccctctacaccccagcc

SEQ ID NO: 203498 - DNA, 33 bp, Homo sapien
ggagttactccttaagtcctctacaccccagcc

SEQ ID NO: 203499 - DNA, 33 bp, Homo sapien
ctctaacaattcttggcacttgcctgtatttca

SEQ ID NO: 203500 - DNA, 33 bp, Homo sapien
ctctaacaattcttggtacttgcctgtatttca

SEQ ID NO: 203501 - DNA, 33 bp, Homo sapien
gggcccagtgcatcaacagtcattccatggatg

SEQ ID NO: 203502 - DNA, 33 bp, Homo sapien
gggcccagtgcatcaagagtcattccatggatg

SEQ ID NO: 203503 - DNA, 33 bp, Homo sapien
ttctgggagctagagcaatgggcttccagttcc

SEQ ID NO: 203504 - DNA, 33 bp, Homo sapien
ttctgggagctagagcgatgggcttccagttcc

SEQ ID NO: 203505 - DNA, 33 bp, Homo sapien
gatgagtaaaactgtacgctgcccggcaggccc

SEQ ID NO: 203506 - DNA, 33 bp, Homo sapien
gatgagtaaaactgtatgctgcccggcaggccc

SEQ ID NO: 203507 - DNA, 33 bp, Homo sapien
tggacatagaaaaaggcagcagcaatgaagatt

SEQ ID NO: 203508 - DNA, 33 bp, Homo sapien
tggacatagaaaaaggtagcagcaatgaagatt

SEQ ID NO: 203509 - DNA, 33 bp, Homo sapien
tgctggaaggataagaaacgggaaatgatcact

SEQ ID NO: 203510 - DNA, 33 bp, Homo sapien
tgctggaaggataagagacgggaaatgatcact

SEQ ID NO: 203511 - DNA, 33 bp, Homo sapien
tctcatgacctcactactagctgagccatagcg

SEQ ID NO: 203512 - DNA, 33 bp, Homo sapien
tctcatgacctcactattagctgagccatagcg

SEQ ID NO: 203513 - DNA, 33 bp, Homo sapien
gtccaatttatatgccaaagtgacgaagccaaa

SEQ ID NO: 203514 - DNA, 33 bp, Homo sapien
gtccaatttatatgccgaagtgacgaagccaaa

SEQ ID NO: 203515 - DNA, 33 bp, Homo sapien
tatcttaaagggccgacggatggctgtctaatg

SEQ ID NO: 203516 - DNA, 33 bp, Homo sapien
tatcttaaagggccgatggatggctgtctaatg

SEQ ID NO: 203517 - DNA, 33 bp, Homo sapien
actaataaacccgccacgcaattccaatgcatc

SEQ ID NO: 203518 - DNA, 33 bp, Homo sapien
actaataaacccgccaggcaattccaatgcatc

SEQ ID NO: 203519 - DNA, 33 bp, Homo sapien
tcatgaggacgaagaaactctcttttgaggggg

SEQ ID NO: 203520 - DNA, 33 bp, Homo sapien
tcatgaggacgaagaacctctcttttgaggggg

SEQ ID NO: 203521 - DNA, 33 bp, Homo sapien
aggattaggaaggaaagctaaaccacctattgc

SEQ ID NO: 203522 - DNA, 33 bp, Homo sapien
aggattaggaaggaaatctaaaccacctattgc

SEQ ID NO: 203523 - DNA, 33 bp, Homo sapien
ttagaccgcttccagccaggcatgaccggacct

SEQ ID NO: 203524 - DNA, 33 bp, Homo sapien
ttagaccgcttccagcgaggcatgaccggacct

SEQ ID NO: 203525 - DNA, 33 bp, Homo sapien
ctctccttcctttggccacctcctactcatctt

SEQ ID NO: 203526 - DNA, 33 bp, Homo sapien
ctctccttcctttggcgacctcctactcatctt

SEQ ID NO: 203527 - DNA, 33 bp, Homo sapien
ctttccatttgcttaactctctgaggacctccc

SEQ ID NO: 203528 - DNA, 33 bp, Homo sapien
ctttccatttgcttaattctctgaggacctccc

SEQ ID NO: 203529 - DNA, 33 bp, Homo sapien
aatagagtgtaaggacacgggctcccgaggcag

SEQ ID NO: 203530 - DNA, 33 bp, Homo sapien
aatagagtgtaaggacgcgggctcccgaggcag

SEQ ID NO: 203531 - DNA, 33 bp, Homo sapien
ggcctgacccgctaacacatgcatacacccccc

SEQ ID NO: 203532 - DNA, 33 bp, Homo sapien
ggcctgacccgctaacgcatgcatacacccccc

SEQ ID NO: 203533 - DNA, 33 bp, Homo sapien
aagtcaaatgaccacacatttatgaggcagaaa

SEQ ID NO: 203534 - DNA, 33 bp, Homo sapien
aagtcaaatgaccacatatttatgaggcagaaa

SEQ ID NO: 203535 - DNA, 33 bp, Homo sapien
agctcagtgtgagagagtacaggcagtcttgcg

SEQ ID NO: 203536 - DNA, 33 bp, Homo sapien
agctcagtgtgagagattacaggcagtcttgcg

SEQ ID NO: 203537 - DNA, 33 bp, Homo sapien
ggcaatttcaagctaccggcatgacaccaccga

SEQ ID NO: 203538 - DNA, 33 bp, Homo sapien
ggcaatttcaagctactggcatgacaccaccga

SEQ ID NO: 203539 - DNA, 33 bp, Homo sapien
acctctctgccctcacccggttattctctgcct

SEQ ID NO: 203540 - DNA, 33 bp, Homo sapien
acctctctgccctcactcggttattctctgcct

SEQ ID NO: 203541 - DNA, 33 bp, Homo sapien
actgggcaatgggcaggaccaagaaattctagt

SEQ ID NO: 203542 - DNA, 33 bp, Homo sapien
actgggcaatgggcagtaccaagaaattctagt

SEQ ID NO: 203543 - DNA, 33 bp, Homo sapien
gactcaataaagagacagagaactgaccgcctc

SEQ ID NO: 203544 - DNA, 33 bp, Homo sapien
gactcaataaagagacggagaactgaccgcctc

SEQ ID NO: 203545 - DNA, 33 bp, Homo sapien
aaacttctggaggccacagactctctaatgttg

SEQ ID NO: 203546 - DNA, 33 bp, Homo sapien
aaacttctggaggccagagactctctaatgttg

SEQ ID NO: 203547 - DNA, 33 bp, Homo sapien
tggacatgtaccctcacgtgttccgcaagaaga

SEQ ID NO: 203548 - DNA, 33 bp, Homo sapien
tggacatgtaccctcatgtgttccgcaagaaga

SEQ ID NO: 203549 - DNA, 33 bp, Homo sapien
tatggcttatccagaccggggcctgggccttga

SEQ ID NO: 203550 - DNA, 33 bp, Homo sapien
tatggcttatccagactggggcctgggccttga

SEQ ID NO: 203551 - DNA, 33 bp, Homo sapien
ttgcttccctggagccgcattcttttaggacta

SEQ ID NO: 203552 - DNA, 33 bp, Homo sapien
ttgcttccctggagcctcattcttttaggacta

SEQ ID NO: 203553 - DNA, 33 bp, Homo sapien
ggacagggctctagaacgaagctaggtctcctg

SEQ ID NO: 203554 - DNA, 33 bp, Homo sapien
ggacagggctctagaatgaagctaggtctcctg

SEQ ID NO: 203555 - DNA, 33 bp, Homo sapien
ttggtgtggcatcacaatgaaacttttcttttt

SEQ ID NO: 203556 - DNA, 33 bp, Homo sapien
ttggtgtggcatcacactgaaacttttcttttt

SEQ ID NO: 203557 - DNA, 33 bp, Homo sapien
taactgctattataaaccacagtggacccttga

SEQ ID NO: 203558 - DNA, 33 bp, Homo sapien
taactgctattataaatcacagtggacccttga

SEQ ID NO: 203559 - DNA, 33 bp, Homo sapien
accagagagaagatacacgaaacaaatgaatga

SEQ ID NO: 203560 - DNA, 33 bp, Homo sapien
accagagagaagatacgcgaaacaaatgaatga

SEQ ID NO: 203561 - DNA, 33 bp, Homo sapien
tgcattagtttcaaatgaacatggaatattcca

SEQ ID NO: 203562 - DNA, 33 bp, Homo sapien
tgcattagtttcaaattaacatggaatattcca

SEQ ID NO: 203563 - DNA, 33 bp, Homo sapien
tgaacttcaacccataccttcactgtatacaaa

SEQ ID NO: 203564 - DNA, 33 bp, Homo sapien
tgaacttcaacccatatcttcactgtatacaaa

SEQ ID NO: 203565 - DNA, 33 bp, Homo sapien
ttagaatatatgaagacacctcgataacaaagg

SEQ ID NO: 203566 - DNA, 33 bp, Homo sapien
ttagaatatatgaagatacctcgataacaaagg

SEQ ID NO: 203567 - DNA, 33 bp, Homo sapien
agttttcatgtatcagcagtttatcctttgtta

SEQ ID NO: 203568 - DNA, 33 bp, Homo sapien
agttttcatgtatcagtagtttatcctttgtta

SEQ ID NO: 203569 - DNA, 33 bp, Homo sapien
attaggtagcattccaaaattaatgagtgctat

SEQ ID NO: 203570 - DNA, 33 bp, Homo sapien
attaggtagcattccagaattaatgagtgctat

SEQ ID NO: 203571 - DNA, 33 bp, Homo sapien
cggaagcaacagggacacttttagggaggtgag

SEQ ID NO: 203572 - DNA, 33 bp, Homo sapien
cggaagcaacagggacgcttttagggaggtgag

SEQ ID NO: 203573 - DNA, 33 bp, Homo sapien
tgttgtgtctgaaaggccatgagctgtagagtc

SEQ ID NO: 203574 - DNA, 33 bp, Homo sapien
tgttgtgtctgaaaggtcatgagctgtagagtc

SEQ ID NO: 203575 - DNA, 33 bp, Homo sapien
ccacccaagtttcagaaagtcaagaaaatagca

SEQ ID NO: 203576 - DNA, 33 bp, Homo sapien
ccacccaagtttcagagagtcaagaaaatagca

SEQ ID NO: 203577 - DNA, 33 bp, Homo sapien
gagagatctacctacacgtcagactaacaggca

SEQ ID NO: 203578 - DNA, 33 bp, Homo sapien
gagagatctacctacatgtcagactaacaggca

SEQ ID NO: 203579 - DNA, 33 bp, Homo sapien
aggccttcctgagtccagctttagcctgtagca

SEQ ID NO: 203580 - DNA, 33 bp, Homo sapien
aggccttcctgagtccggctttagcctgtagca

SEQ ID NO: 203581 - DNA, 33 bp, Homo sapien
agctgtgtttgcacatcagaggttttggaatga

SEQ ID NO: 203582 - DNA, 33 bp, Homo sapien
agctgtgtttgcacattagaggttttggaatga

SEQ ID NO: 203583 - DNA, 33 bp, Homo sapien
ttcttccttggacttacctggacaattccaact

SEQ ID NO: 203584 - DNA, 33 bp, Homo sapien
ttcttccttggacttatctggacaattccaact

SEQ ID NO: 203585 - DNA, 33 bp, Homo sapien
aagggattcaaagttaaagcacataagaaaaaa

SEQ ID NO: 203586 - DNA, 33 bp, Homo sapien
aagggattcaaagttatagcacataagaaaaaa

SEQ ID NO: 203587 - DNA, 33 bp, Homo sapien
gtgactgtgacgaacacaaagtttgaggaccac

SEQ ID NO: 203588 - DNA, 33 bp, Homo sapien
gtgactgtgacgaacataaagtttgaggaccac

SEQ ID NO: 203589 - DNA, 33 bp, Homo sapien
gggcccaagtattatactacccatctccgaatg

SEQ ID NO: 203590 - DNA, 33 bp, Homo sapien
gggcccaagtattatattacccatctccgaatg

SEQ ID NO: 203591 - DNA, 33 bp, Homo sapien
gtattagtttcctatcacctcgtaattcattcc

SEQ ID NO: 203592 - DNA, 33 bp, Homo sapien
gtattagtttcctatcgcctcgtaattcattcc

SEQ ID NO: 203593 - DNA, 33 bp, Homo sapien
tgatgtctaagctttcccatcctttctgaacaa

SEQ ID NO: 203594 - DNA, 33 bp, Homo sapien
tgatgtctaagctttctcatcctttctgaacaa

SEQ ID NO: 203595 - DNA, 33 bp, Homo sapien
ctcaaatgtgcatcctcagataccaaactttaa

SEQ ID NO: 203596 - DNA, 33 bp, Homo sapien
ctcaaatgtgcatccttagataccaaactttaa

SEQ ID NO: 203597 - DNA, 33 bp, Homo sapien
cggatcagtgaaaacaacttcaaacgggaaaga

SEQ ID NO: 203598 - DNA, 33 bp, Homo sapien
cggatcagtgaaaacaccttcaaacgggaaaga

SEQ ID NO: 203599 - DNA, 33 bp, Homo sapien
atgagtcctccctgaacatcactgaacctggga

SEQ ID NO: 203600 - DNA, 33 bp, Homo sapien
atgagtcctccctgaatatcactgaacctggga

SEQ ID NO: 203601 - DNA, 33 bp, Homo sapien
cagaacagaaaattcacaaaaaggcaaaagcta

SEQ ID NO: 203602 - DNA, 33 bp, Homo sapien
cagaacagaaaattcagaaaaaggcaaaagcta

SEQ ID NO: 203603 - DNA, 33 bp, Homo sapien
ttttctgatcagcataaagttaaaccaacttac

SEQ ID NO: 203604 - DNA, 33 bp, Homo sapien
ttttctgatcagcatagagttaaaccaacttac

SEQ ID NO: 203605 - DNA, 33 bp, Homo sapien
gagtattttaagttcaacgttttatgtatgttt

SEQ ID NO: 203606 - DNA, 33 bp, Homo sapien
gagtattttaagttcaccgttttatgtatgttt

SEQ ID NO: 203607 - DNA, 33 bp, Homo sapien
cttggaaggctggctacagtggaaggatggtgc

SEQ ID NO: 203608 - DNA, 33 bp, Homo sapien
cttggaaggctggctagagtggaaggatggtgc

SEQ ID NO: 203609 - DNA, 33 bp, Homo sapien
ggatgttgtgtctacacacacgcaggacgtaga

SEQ ID NO: 203610 - DNA, 33 bp, Homo sapien
ggatgttgtgtctacatacacgcaggacgtaga

SEQ ID NO: 203611 - DNA, 33 bp, Homo sapien
aaagtgttgcccgttacgcatgagagtcaccat

SEQ ID NO: 203612 - DNA, 33 bp, Homo sapien
aaagtgttgcccgttatgcatgagagtcaccat

SEQ ID NO: 203613 - DNA, 33 bp, Homo sapien
tcacattgaaataggcactcattctgctatttc

SEQ ID NO: 203614 - DNA, 33 bp, Homo sapien
tcacattgaaataggcgctcattctgctatttc

SEQ ID NO: 203615 - DNA, 33 bp, Homo sapien
tttttagataattgtacattcgcatgcagttct

SEQ ID NO: 203616 - DNA, 33 bp, Homo sapien
tttttagataattgtagattcgcatgcagttct

SEQ ID NO: 203617 - DNA, 33 bp, Homo sapien
actgcagagtgcagacagaagagtgcctttcta

SEQ ID NO: 203618 - DNA, 33 bp, Homo sapien
actgcagagtgcagacggaagagtgcctttcta

SEQ ID NO: 203619 - DNA, 33 bp, Homo sapien
caactaatgagcaaccaagagcactgttcacac

SEQ ID NO: 203620 - DNA, 33 bp, Homo sapien
caactaatgagcaacctagagcactgttcacac

SEQ ID NO: 203621 - DNA, 33 bp, Homo sapien
accaattatttcctaccactcaggttttctttg

SEQ ID NO: 203622 - DNA, 33 bp, Homo sapien
accaattatttcctactactcaggttttctttg

SEQ ID NO: 203623 - DNA, 33 bp, Homo sapien
tttgtaaaattacgtacgaccacagatggagaa

SEQ ID NO: 203624 - DNA, 33 bp, Homo sapien
tttgtaaaattacgtaggaccacagatggagaa

SEQ ID NO: 203625 - DNA, 33 bp, Homo sapien
tactaagggcaacccaactggattttaggttga

SEQ ID NO: 203626 - DNA, 33 bp, Homo sapien
tactaagggcaacccatctggattttaggttga

SEQ ID NO: 203627 - DNA, 33 bp, Homo sapien
gaaccagctcagcgaccgtccctagtaattctc

SEQ ID NO: 203628 - DNA, 33 bp, Homo sapien
gaaccagctcagcgactgtccctagtaattctc

SEQ ID NO: 203629 - DNA, 33 bp, Homo sapien
tccaccccggggccacaactccaagcagcagag

SEQ ID NO: 203630 - DNA, 33 bp, Homo sapien
tccaccccggggccacgactccaagcagcagag

SEQ ID NO: 203631 - DNA, 33 bp, Homo sapien
ggcgcaaatccaagacagaaggatggcatgtgc

SEQ ID NO: 203632 - DNA, 33 bp, Homo sapien
ggcgcaaatccaagacggaaggatggcatgtgc

SEQ ID NO: 203633 - DNA, 33 bp, Homo sapien
tgtgcccagaattgaaggttgatttgaagatac

SEQ ID NO: 203634 - DNA, 33 bp, Homo sapien
tgtgcccagaattgaatgttgatttgaagatac

SEQ ID NO: 203635 - DNA, 33 bp, Homo sapien
tgtgtaatgggaataacggccctgacctcacag

SEQ ID NO: 203636 - DNA, 33 bp, Homo sapien
tgtgtaatgggaataatggccctgacctcacag

SEQ ID NO: 203637 - DNA, 33 bp, Homo sapien
ggaaaagatacttgtaacacacataggggtata

SEQ ID NO: 203638 - DNA, 33 bp, Homo sapien
ggaaaagatacttgtagcacacataggggtata

SEQ ID NO: 203639 - DNA, 33 bp, Homo sapien
gagatcctgtctccagaaaaaaagagagaaaag

SEQ ID NO: 203640 - DNA, 33 bp, Homo sapien
gagatcctgtctccaggaaaaaagagagaaaag

SEQ ID NO: 203641 - DNA, 33 bp, Homo sapien
ccaccctgccttgtaacagcaaagctacttgtc

SEQ ID NO: 203642 - DNA, 33 bp, Homo sapien
ccaccctgccttgtaatagcaaagctacttgtc

SEQ ID NO: 203643 - DNA, 33 bp, Homo sapien
aatattttgttattgtaaagtacttgcactacc

SEQ ID NO: 203644 - DNA, 33 bp, Homo sapien
aatattttgttattgtgaagtacttgcactacc

SEQ ID NO: 203645 - DNA, 33 bp, Homo sapien
tgaaagcaagtttcaacaggaggttcatgggag

SEQ ID NO: 203646 - DNA, 33 bp, Homo sapien
tgaaagcaagtttcaataggaggttcatgggag

SEQ ID NO: 203647 - DNA, 33 bp, Homo sapien
gttcatgggaggatcaaatctaaggttctgatg

SEQ ID NO: 203648 - DNA, 33 bp, Homo sapien
gttcatgggaggatcacatctaaggttctgatg

SEQ ID NO: 203649 - DNA, 33 bp, Homo sapien
cactctatgatttgataataaacacacacaaat

SEQ ID NO: 203650 - DNA, 33 bp, Homo sapien
cactctatgatttgatcataaacacacacaaat

SEQ ID NO: 203651 - DNA, 33 bp, Homo sapien
ctcttggtatccacgacggattgattccagaat

SEQ ID NO: 203652 - DNA, 33 bp, Homo sapien
ctcttggtatccacgagggattgattccagaat

SEQ ID NO: 203653 - DNA, 33 bp, Homo sapien
atccaagaagccaattaaaaataaatgtcagac

SEQ ID NO: 203654 - DNA, 33 bp, Homo sapien
atccaagaagccaattcaaaataaatgtcagac

SEQ ID NO: 203655 - DNA, 33 bp, Homo sapien
gtgaaccttgagaacacgtgaagtgagaaaagc

SEQ ID NO: 203656 - DNA, 33 bp, Homo sapien
gtgaaccttgagaacatgtgaagtgagaaaagc

SEQ ID NO: 203657 - DNA, 33 bp, Homo sapien
tttatcatgctagaaccgattaggcatctgctg

SEQ ID NO: 203658 - DNA, 33 bp, Homo sapien
tttatcatgctagaactgattaggcatctgctg

SEQ ID NO: 203659 - DNA, 33 bp, Homo sapien
ttgttattagattctcactgtataaatgagtta

SEQ ID NO: 203660 - DNA, 33 bp, Homo sapien
ttgttattagattctcgctgtataaatgagtta

SEQ ID NO: 203661 - DNA, 33 bp, Homo sapien
ctaagaatgtgaatcaactccgatagaaaacat

SEQ ID NO: 203662 - DNA, 33 bp, Homo sapien
ctaagaatgtgaatcagctccgatagaaaacat

SEQ ID NO: 203663 - DNA, 33 bp, Homo sapien
taaataggacggagaacgcatgtatgacagtaa

SEQ ID NO: 203664 - DNA, 33 bp, Homo sapien
taaataggacggagaaggcatgtatgacagtaa

SEQ ID NO: 203665 - DNA, 33 bp, Homo sapien
gatgcgctctggcacacatacccatgcccacat

SEQ ID NO: 203666 - DNA, 33 bp, Homo sapien
gatgcgctctggcacatatacccatgcccacat

SEQ ID NO: 203667 - DNA, 33 bp, Homo sapien
cttagccaatcatgtacgttcaccctggatcct

SEQ ID NO: 203668 - DNA, 33 bp, Homo sapien
cttagccaatcatgtatgttcaccctggatcct

SEQ ID NO: 203669 - DNA, 33 bp, Homo sapien
tttcaggagtacatcaagattgaccagcctgag

SEQ ID NO: 203670 - DNA, 33 bp, Homo sapien
tttcaggagtacatcaggattgaccagcctgag

SEQ ID NO: 203671 - DNA, 33 bp, Homo sapien
cgaggcttctcctagacggcgacctgacctcct

SEQ ID NO: 203672 - DNA, 33 bp, Homo sapien
cgaggcttctcctagatggcgacctgacctcct

SEQ ID NO: 203673 - DNA, 33 bp, Homo sapien
atctgtaaagcattagaaaagcattgccaactc

SEQ ID NO: 203674 - DNA, 33 bp, Homo sapien
atctgtaaagcattagcaaagcattgccaactc

SEQ ID NO: 203675 - DNA, 33 bp, Homo sapien
gcatccacctgcaatgaactaatctacagttca

SEQ ID NO: 203676 - DNA, 33 bp, Homo sapien
gcatccacctgcaatggactaatctacagttca

SEQ ID NO: 203677 - DNA, 33 bp, Homo sapien
cagatgacgataagcgaaagacatctgggccag

SEQ ID NO: 203678 - DNA, 33 bp, Homo sapien
cagatgacgataagcgcaagacatctgggccag

SEQ ID NO: 203679 - DNA, 33 bp, Homo sapien
cctcttctctgcttccccaacaggttctgggcc

SEQ ID NO: 203680 - DNA, 33 bp, Homo sapien
cctcttctctgcttcctcaacaggttctgggcc

SEQ ID NO: 203681 - DNA, 33 bp, Homo sapien
ttaaagctctttccaaaccagatgggaagctca

SEQ ID NO: 203682 - DNA, 33 bp, Homo sapien
ttaaagctctttccaatccagatgggaagctca

SEQ ID NO: 203683 - DNA, 33 bp, Homo sapien
tgggttgggccaagaaattcagactgggcgcca

SEQ ID NO: 203684 - DNA, 33 bp, Homo sapien
tgggttgggccaagaatttcagactgggcgcca

SEQ ID NO: 203685 - DNA, 33 bp, Homo sapien
caggacagatacctgcagagtggggagagacgg

SEQ ID NO: 203686 - DNA, 33 bp, Homo sapien
caggacagatacctgccgagtggggagagacgg

SEQ ID NO: 203687 - DNA, 33 bp, Homo sapien
aaacaaaactctgaaacgcagtagtctccagac

SEQ ID NO: 203688 - DNA, 33 bp, Homo sapien
aaacaaaactctgaaatgcagtagtctccagac

SEQ ID NO: 203689 - DNA, 33 bp, Homo sapien
aaacagagcaaagggccaggagcttggaaagga

SEQ ID NO: 203690 - DNA, 33 bp, Homo sapien
aaacagagcaaagggctaggagcttggaaagga

SEQ ID NO: 203691 - DNA, 33 bp, Homo sapien
tatgtttgatcctccaatgactggtccacagag

SEQ ID NO: 203692 - DNA, 33 bp, Homo sapien
tatgtttgatcctccagtgactggtccacagag

SEQ ID NO: 203693 - DNA, 33 bp, Homo sapien
tggcctcaaaatgaccaactgcccgggaaagcc

SEQ ID NO: 203694 - DNA, 33 bp, Homo sapien
tggcctcaaaatgaccgactgcccgggaaagcc

SEQ ID NO: 203695 - DNA, 33 bp, Homo sapien
caggcacccttcccaactgaattctgacaagag

SEQ ID NO: 203696 - DNA, 33 bp, Homo sapien
caggcacccttcccaagtgaattctgacaagag

SEQ ID NO: 203697 - DNA, 33 bp, Homo sapien
ttaatccctgctgtaacagtgttgagaagtggg

SEQ ID NO: 203698 - DNA, 33 bp, Homo sapien
ttaatccctgctgtaatagtgttgagaagtggg

SEQ ID NO: 203699 - DNA, 33 bp, Homo sapien
caagggacctctccaaagcaacagaactgggca

SEQ ID NO: 203700 - DNA, 33 bp, Homo sapien
caagggacctctccaaggcaacagaactgggca

SEQ ID NO: 203701 - DNA, 33 bp, Homo sapien
gaatcactgttgcccacgggggacgccattcac

SEQ ID NO: 203702 - DNA, 33 bp, Homo sapien
gaatcactgttgcccatgggggacgccattcac

SEQ ID NO: 203703 - DNA, 33 bp, Homo sapien
aatactcagtgttggtcaagacatggctaagca

SEQ ID NO: 203704 - DNA, 33 bp, Homo sapien
aatactcagtgttggtgaagacatggctaagca

SEQ ID NO: 203705 - DNA, 33 bp, Homo sapien
atttctatcacactaaagactttccctttcttt

SEQ ID NO: 203706 - DNA, 33 bp, Homo sapien
atttctatcacactaaggactttccctttcttt

SEQ ID NO: 203707 - DNA, 33 bp, Homo sapien
gctatttctgcccaccaaagtgctctcagcaag

SEQ ID NO: 203708 - DNA, 33 bp, Homo sapien
gctatttctgcccaccgaagtgctctcagcaag

SEQ ID NO: 203709 - DNA, 33 bp, Homo sapien
gctgattcacctactacgttggtcagagggttg

SEQ ID NO: 203710 - DNA, 33 bp, Homo sapien
gctgattcacctactaggttggtcagagggttg

SEQ ID NO: 203711 - DNA, 33 bp, Homo sapien
tgggttctcctggctgaaggatagaggccagtt

SEQ ID NO: 203712 - DNA, 33 bp, Homo sapien
tgggttctcctggctgcaggatagaggccagtt

SEQ ID NO: 203713 - DNA, 33 bp, Homo sapien
caaaaagacagaaagcacaatatcccaagaaac

SEQ ID NO: 203714 - DNA, 33 bp, Homo sapien
caaaaagacagaaagcgcaatatcccaagaaac

SEQ ID NO: 203715 - DNA, 33 bp, Homo sapien
ttccgttgactttccaatgcaagccaatttgat

SEQ ID NO: 203716 - DNA, 33 bp, Homo sapien
ttccgttgactttccagtgcaagccaatttgat

SEQ ID NO: 203717 - DNA, 33 bp, Homo sapien
cagactattacacacaagcgagaaataaacttc

SEQ ID NO: 203718 - DNA, 33 bp, Homo sapien
cagactattacacacaggcgagaaataaacttc

SEQ ID NO: 203719 - DNA, 33 bp, Homo sapien
cgtggctagtaagaacagtctcttacacgatgt

SEQ ID NO: 203720 - DNA, 33 bp, Homo sapien
cgtggctagtaagaacggtctcttacacgatgt

SEQ ID NO: 203721 - DNA, 33 bp, Homo sapien
ctgaaagatgactgtaagttattatttctataa

SEQ ID NO: 203722 - DNA, 33 bp, Homo sapien
ctgaaagatgactgtaggttattatttctataa

SEQ ID NO: 203723 - DNA, 33 bp, Homo sapien
tgaaggatcaaaagaccctaaaagcttaccttg

SEQ ID NO: 203724 - DNA, 33 bp, Homo sapien
tgaaggatcaaaagacgctaaaagcttaccttg

SEQ ID NO: 203725 - DNA, 33 bp, Homo sapien
gacacagcgttctttacattctaattctagctc

SEQ ID NO: 203726 - DNA, 33 bp, Homo sapien
gacacagcgttctttatattctaattctagctc

SEQ ID NO: 203727 - DNA, 33 bp, Homo sapien
ctcccactacctcctcactaacgcagctctttt

SEQ ID NO: 203728 - DNA, 33 bp, Homo sapien
ctcccactacctcctcgctaacgcagctctttt

SEQ ID NO: 203729 - DNA, 33 bp, Homo sapien
tacaaaaattaaaagagtacgcaggtgtggtaa

SEQ ID NO: 203730 - DNA, 33 bp, Homo sapien
tacaaaaattaaaagattacgcaggtgtggtaa

SEQ ID NO: 203731 - DNA, 33 bp, Homo sapien
gataaagtgaagcaagaaaaattctaattattg

SEQ ID NO: 203732 - DNA, 33 bp, Homo sapien
gataaagtgaagcaaggaaaattctaattattg

SEQ ID NO: 203733 - DNA, 33 bp, Homo sapien
tggcggggagagtacaatacaacccaggatcct

SEQ ID NO: 203734 - DNA, 33 bp, Homo sapien
tggcggggagagtacagtacaacccaggatcct

SEQ ID NO: 203735 - DNA, 33 bp, Homo sapien
ctttcttgctcctcaccccatattcaattaaga

SEQ ID NO: 203736 - DNA, 33 bp, Homo sapien
ctttcttgctcctcactccatattcaattaaga

SEQ ID NO: 203737 - DNA, 33 bp, Homo sapien
tcaattaagagagaaaagtgaaaaacacaaagc

SEQ ID NO: 203738 - DNA, 33 bp, Homo sapien
tcaattaagagagaaaggtgaaaaacacaaagc

SEQ ID NO: 203739 - DNA, 33 bp, Homo sapien
aattgctatttcagctcaccttccccaaaactt

SEQ ID NO: 203740 - DNA, 33 bp, Homo sapien
aattgctatttcagctgaccttccccaaaactt

SEQ ID NO: 203741 - DNA, 33 bp, Homo sapien
ccaatttgccatgcacagtgaaagggtctttca

SEQ ID NO: 203742 - DNA, 33 bp, Homo sapien
ccaatttgccatgcaccgtgaaagggtctttca

SEQ ID NO: 203743 - DNA, 33 bp, Homo sapien
attgtttttttacaaccgatgagccttacattg

SEQ ID NO: 203744 - DNA, 33 bp, Homo sapien
attgtttttttacaactgatgagccttacattg

SEQ ID NO: 203745 - DNA, 33 bp, Homo sapien
ggtcttgacctggagacacatttgcaacattga

SEQ ID NO: 203746 - DNA, 33 bp, Homo sapien
ggtcttgacctggagatacatttgcaacattga

SEQ ID NO: 203747 - DNA, 33 bp, Homo sapien
atgttcagggtttcaacgtctcagtgcagtagt

SEQ ID NO: 203748 - DNA, 33 bp, Homo sapien
atgttcagggtttcaatgtctcagtgcagtagt

SEQ ID NO: 203749 - DNA, 33 bp, Homo sapien
ctcaagtaagtggcagaaagttttttgacacct

SEQ ID NO: 203750 - DNA, 33 bp, Homo sapien
ctcaagtaagtggcaggaagttttttgacacct

SEQ ID NO: 203751 - DNA, 33 bp, Homo sapien
gaaaacacatactagggacagaagacatggact

SEQ ID NO: 203752 - DNA, 33 bp, Homo sapien
gaaaacacatactaggtacagaagacatggact

SEQ ID NO: 203753 - DNA, 33 bp, Homo sapien
aatgttttctaaagcaatgaccgtgtaccaaga

SEQ ID NO: 203754 - DNA, 33 bp, Homo sapien
aatgttttctaaagcactgaccgtgtaccaaga

SEQ ID NO: 203755 - DNA, 33 bp, Homo sapien
aacaaatgataaagacaaattggggaggaggca

SEQ ID NO: 203756 - DNA, 33 bp, Homo sapien
aacaaatgataaagacgaattggggaggaggca

SEQ ID NO: 203757 - DNA, 33 bp, Homo sapien
gaacctggtcctcgaacaaaatcttaagcagcc

SEQ ID NO: 203758 - DNA, 33 bp, Homo sapien
gaacctggtcctcgaagaaaatcttaagcagcc

SEQ ID NO: 203759 - DNA, 33 bp, Homo sapien
aatggatagaatagaacgaacccttctatgacc

SEQ ID NO: 203760 - DNA, 33 bp, Homo sapien
aatggatagaatagaatgaacccttctatgacc

SEQ ID NO: 203761 - DNA, 33 bp, Homo sapien
tagctctttgactgacaagaggaagcagaggcc

SEQ ID NO: 203762 - DNA, 33 bp, Homo sapien
tagctctttgactgacgagaggaagcagaggcc

SEQ ID NO: 203763 - DNA, 33 bp, Homo sapien
atagaaaccatttccacccacagtgataacctc

SEQ ID NO: 203764 - DNA, 33 bp, Homo sapien
atagaaaccatttccatccacagtgataacctc

SEQ ID NO: 203765 - DNA, 33 bp, Homo sapien
aagattttgtgccaacagttcttggtttctcct

SEQ ID NO: 203766 - DNA, 33 bp, Homo sapien
aagattttgtgccaacggttcttggtttctcct

SEQ ID NO: 203767 - DNA, 33 bp, Homo sapien
aggccttaattcctcaacgaaaactgcaaccat

SEQ ID NO: 203768 - DNA, 33 bp, Homo sapien
aggccttaattcctcagcgaaaactgcaaccat

SEQ ID NO: 203769 - DNA, 33 bp, Homo sapien
gcccatcacattgatacagggacttcaacttta

SEQ ID NO: 203770 - DNA, 33 bp, Homo sapien
gcccatcacattgatagagggacttcaacttta

SEQ ID NO: 203771 - DNA, 33 bp, Homo sapien
caggacaactgaggaacacattggggagggtac

SEQ ID NO: 203772 - DNA, 33 bp, Homo sapien
caggacaactgaggaagacattggggagggtac

SEQ ID NO: 203773 - DNA, 33 bp, Homo sapien
agagtgagagagattacggatgttctcctgaga

SEQ ID NO: 203774 - DNA, 33 bp, Homo sapien
agagtgagagagattatggatgttctcctgaga

SEQ ID NO: 203775 - DNA, 33 bp, Homo sapien
gcagccattaccaataactctgtccaaaacttt

SEQ ID NO: 203776 - DNA, 33 bp, Homo sapien
gcagccattaccaatatctctgtccaaaacttt

SEQ ID NO: 203777 - DNA, 33 bp, Homo sapien
ctcagtagctgtgtcacattataccagatatta

SEQ ID NO: 203778 - DNA, 33 bp, Homo sapien
ctcagtagctgtgtcatattataccagatatta

SEQ ID NO: 203779 - DNA, 33 bp, Homo sapien
accaatccaattctggacaacaaaatagtcact

SEQ ID NO: 203780 - DNA, 33 bp, Homo sapien
accaatccaattctggccaacaaaatagtcact

SEQ ID NO: 203781 - DNA, 33 bp, Homo sapien
acctggcctttaaaaaatgaaacatcatgattt

SEQ ID NO: 203782 - DNA, 33 bp, Homo sapien
acctggcctttaaaaagtgaaacatcatgattt

SEQ ID NO: 203783 - DNA, 33 bp, Homo sapien
aatttgttagcaattactaaaacgtacaatgtg

SEQ ID NO: 203784 - DNA, 33 bp, Homo sapien
aatttgttagcaattattaaaacgtacaatgtg

SEQ ID NO: 203785 - DNA, 33 bp, Homo sapien
tcttctgtgcatttcaatctcatcaaaggctct

SEQ ID NO: 203786 - DNA, 33 bp, Homo sapien
tcttctgtgcatttcagtctcatcaaaggctct

SEQ ID NO: 203787 - DNA, 33 bp, Homo sapien
gtatattaaaaggatacatttagcgaaaaagtt

SEQ ID NO: 203788 - DNA, 33 bp, Homo sapien
gtatattaaaaggatagatttagcgaaaaagtt

SEQ ID NO: 203789 - DNA, 33 bp, Homo sapien
atctgttgcatttcccaatttaccttaatccac

SEQ ID NO: 203790 - DNA, 33 bp, Homo sapien
atctgttgcatttcccgatttaccttaatccac

SEQ ID NO: 203791 - DNA, 33 bp, Homo sapien
acccaagatctggatacagcacattccaaaaga

SEQ ID NO: 203792 - DNA, 33 bp, Homo sapien
acccaagatctggatatagcacattccaaaaga

SEQ ID NO: 203793 - DNA, 33 bp, Homo sapien
agggaaataatggccaactcaattaggtaagga

SEQ ID NO: 203794 - DNA, 33 bp, Homo sapien
agggaaataatggccatctcaattaggtaagga

SEQ ID NO: 203795 - DNA, 33 bp, Homo sapien
ggcttgtgttctcaaaatggtgagaaaagggtg

SEQ ID NO: 203796 - DNA, 33 bp, Homo sapien
ggcttgtgttctcaaattggtgagaaaagggtg

SEQ ID NO: 203797 - DNA, 33 bp, Homo sapien
agtttgcattagaactaagtctcccactctaac

SEQ ID NO: 203798 - DNA, 33 bp, Homo sapien
agtttgcattagaactcagtctcccactctaac

SEQ ID NO: 203799 - DNA, 33 bp, Homo sapien
catgctcaccaaaacaaaaattcaatgaaagct

SEQ ID NO: 203800 - DNA, 33 bp, Homo sapien
catgctcaccaaaacagaaattcaatgaaagct

SEQ ID NO: 203801 - DNA, 33 bp, Homo sapien
gtcatatcaaaataaaaattgcctgatgactct

SEQ ID NO: 203802 - DNA, 33 bp, Homo sapien
gtcatatcaaaataaacattgcctgatgactct

SEQ ID NO: 203803 - DNA, 33 bp, Homo sapien
cctacctcacggcatacacaaaagttaacttaa

SEQ ID NO: 203804 - DNA, 33 bp, Homo sapien
cctacctcacggcatatacaaaagttaacttaa

SEQ ID NO: 203805 - DNA, 33 bp, Homo sapien
gcctgactggctttctcacattccttttattta

SEQ ID NO: 203806 - DNA, 33 bp, Homo sapien
gcctgactggctttctgacattccttttattta

SEQ ID NO: 203807 - DNA, 33 bp, Homo sapien
ttgaggtatgtgtaaggctattgctcatgatac

SEQ ID NO: 203808 - DNA, 33 bp, Homo sapien
ttgaggtatgtgtaagtctattgctcatgatac

SEQ ID NO: 203809 - DNA, 33 bp, Homo sapien
ttttcacagcaaggaactgtgtagcagggctga

SEQ ID NO: 203810 - DNA, 33 bp, Homo sapien
ttttcacagcaaggaattgtgtagcagggctga

SEQ ID NO: 203811 - DNA, 33 bp, Homo sapien
agtagaattctccaaaatgggtcttcggaataa

SEQ ID NO: 203812 - DNA, 33 bp, Homo sapien
agtagaattctccaaattgggtcttcggaataa

SEQ ID NO: 203813 - DNA, 33 bp, Homo sapien
agttaactttctgaacgagcaaccccagaattt

SEQ ID NO: 203814 - DNA, 33 bp, Homo sapien
agttaactttctgaactagcaaccccagaattt

SEQ ID NO: 203815 - DNA, 33 bp, Homo sapien
accagaaatcagaagaaatttttggtggatagt

SEQ ID NO: 203816 - DNA, 33 bp, Homo sapien
accagaaatcagaagagatttttggtggatagt

SEQ ID NO: 203817 - DNA, 33 bp, Homo sapien
ggtcatgtagtcattccatactggtttaagatc

SEQ ID NO: 203818 - DNA, 33 bp, Homo sapien
ggtcatgtagtcattcgatactggtttaagatc

SEQ ID NO: 203819 - DNA, 33 bp, Homo sapien
atctttggatgtagacaaacaccaatgaactga

SEQ ID NO: 203820 - DNA, 33 bp, Homo sapien
atctttggatgtagacgaacaccaatgaactga

SEQ ID NO: 203821 - DNA, 33 bp, Homo sapien
aatgtcagattaaaagaattaggtagctacctc

SEQ ID NO: 203822 - DNA, 33 bp, Homo sapien
aatgtcagattaaaaggattaggtagctacctc

SEQ ID NO: 203823 - DNA, 33 bp, Homo sapien
cacagccagtgagtcaacctcaagctccacaag

SEQ ID NO: 203824 - DNA, 33 bp, Homo sapien
cacagccagtgagtcagcctcaagctccacaag

SEQ ID NO: 203825 - DNA, 33 bp, Homo sapien
agtaccctgtctctcaaattcccatatcaactc

SEQ ID NO: 203826 - DNA, 33 bp, Homo sapien
agtaccctgtctctcagattcccatatcaactc

SEQ ID NO: 203827 - DNA, 33 bp, Homo sapien
gagaaccatttttctccgaagaagtgtcttgag

SEQ ID NO: 203828 - DNA, 33 bp, Homo sapien
gagaaccatttttctctgaagaagtgtcttgag

SEQ ID NO: 203829 - DNA, 33 bp, Homo sapien
attcaatcagcttacaatgaatactgagagaac

SEQ ID NO: 203830 - DNA, 33 bp, Homo sapien
attcaatcagcttacagtgaatactgagagaac

SEQ ID NO: 203831 - DNA, 33 bp, Homo sapien
cacttagtccagagatgatcacagtgacttctg

SEQ ID NO: 203832 - DNA, 33 bp, Homo sapien
cacttagtccagagattatcacagtgacttctg

SEQ ID NO: 203833 - DNA, 33 bp, Homo sapien
gtggatacccagattccattctgcaattccatg

SEQ ID NO: 203834 - DNA, 33 bp, Homo sapien
gtggatacccagattctattctgcaattccatg

SEQ ID NO: 203835 - DNA, 33 bp, Homo sapien
gccaatccatttctaacgcaggtaaaaataaca

SEQ ID NO: 203836 - DNA, 33 bp, Homo sapien
gccaatccatttctaatgcaggtaaaaataaca

SEQ ID NO: 203837 - DNA, 33 bp, Homo sapien
acactgaagattattccaagaggcacgttttgg

SEQ ID NO: 203838 - DNA, 33 bp, Homo sapien
acactgaagattattcgaagaggcacgttttgg

SEQ ID NO: 203839 - DNA, 33 bp, Homo sapien
gccctccagcagagccaaaatcaggcaggcata

SEQ ID NO: 203840 - DNA, 33 bp, Homo sapien
gccctccagcagagccgaaatcaggcaggcata

SEQ ID NO: 203841 - DNA, 33 bp, Homo sapien
tcttgtcgcttctacaggggagtgcttgctgtt

SEQ ID NO: 203842 - DNA, 33 bp, Homo sapien
tcttgtcgcttctacatgggagtgcttgctgtt

SEQ ID NO: 203843 - DNA, 33 bp, Homo sapien
agtaaggactacctaccgctggatgggcaggag

SEQ ID NO: 203844 - DNA, 33 bp, Homo sapien
agtaaggactacctactgctggatgggcaggag

SEQ ID NO: 203845 - DNA, 33 bp, Homo sapien
agctgagaatggaaagaattgtgttatagtgtc

SEQ ID NO: 203846 - DNA, 33 bp, Homo sapien
agctgagaatggaaagtattgtgttatagtgtc

SEQ ID NO: 203847 - DNA, 33 bp, Homo sapien
gctttgaaaagcttcaactcattgtgggaatcc

SEQ ID NO: 203848 - DNA, 33 bp, Homo sapien
gctttgaaaagcttcagctcattgtgggaatcc

SEQ ID NO: 203849 - DNA, 33 bp, Homo sapien
tctcacttcacactgacgcaaagtctgtcaaca

SEQ ID NO: 203850 - DNA, 33 bp, Homo sapien
tctcacttcacactgatgcaaagtctgtcaaca

SEQ ID NO: 203851 - DNA, 33 bp, Homo sapien
gtcttcatatatcccactccatttctggtgata

SEQ ID NO: 203852 - DNA, 33 bp, Homo sapien
gtcttcatatatcccattccatttctggtgata

SEQ ID NO: 203853 - DNA, 33 bp, Homo sapien
tattattataggatacagaaaacattgtgggga

SEQ ID NO: 203854 - DNA, 33 bp, Homo sapien
tattattataggatactgaaaacattgtgggga

SEQ ID NO: 203855 - DNA, 33 bp, Homo sapien
ttatacgttcttgttaagcattgtacttttaaa

SEQ ID NO: 203856 - DNA, 33 bp, Homo sapien
ttatacgttcttgttaggcattgtacttttaaa

SEQ ID NO: 203857 - DNA, 33 bp, Homo sapien
ttccaaatagctttcaaaaacaaagcaattatg

SEQ ID NO: 203858 - DNA, 33 bp, Homo sapien
ttccaaatagctttcagaaacaaagcaattatg

SEQ ID NO: 203859 - DNA, 33 bp, Homo sapien
acaatctgcgagtagaaatgtcagataatgcag

SEQ ID NO: 203860 - DNA, 33 bp, Homo sapien
acaatctgcgagtagacatgtcagataatgcag

SEQ ID NO: 203861 - DNA, 33 bp, Homo sapien
tcttcggtttagacaacttcgttccggcagcca

SEQ ID NO: 203862 - DNA, 33 bp, Homo sapien
tcttcggtttagacaagttcgttccggcagcca

SEQ ID NO: 203863 - DNA, 33 bp, Homo sapien
taggctcagatgtttgaatctcttctccaccaa

SEQ ID NO: 203864 - DNA, 33 bp, Homo sapien
taggctcagatgtttggatctcttctccaccaa

SEQ ID NO: 203865 - DNA, 33 bp, Homo sapien
acagtcacagacttaaaattcctgtgcagctct

SEQ ID NO: 203866 - DNA, 33 bp, Homo sapien
acagtcacagacttaagattcctgtgcagctct

SEQ ID NO: 203867 - DNA, 33 bp, Homo sapien
aactggagaacaactacgattaacaaccttgtg

SEQ ID NO: 203868 - DNA, 33 bp, Homo sapien
aactggagaacaactatgattaacaaccttgtg

SEQ ID NO: 203869 - DNA, 33 bp, Homo sapien
ctgtcttgtaattttacgagggtctatttctta

SEQ ID NO: 203870 - DNA, 33 bp, Homo sapien
ctgtcttgtaattttaggagggtctatttctta

SEQ ID NO: 203871 - DNA, 33 bp, Homo sapien
caaatgcttaggtctacgatcacaaaagctttc

SEQ ID NO: 203872 - DNA, 33 bp, Homo sapien
caaatgcttaggtctatgatcacaaaagctttc

SEQ ID NO: 203873 - DNA, 33 bp, Homo sapien
taccgtgtgcccagtcaatcaccttgtagtgtg

SEQ ID NO: 203874 - DNA, 33 bp, Homo sapien
taccgtgtgcccagtcgatcaccttgtagtgtg

SEQ ID NO: 203875 - DNA, 33 bp, Homo sapien
tatctggattttggtaccttccttaatgaaggg

SEQ ID NO: 203876 - DNA, 33 bp, Homo sapien
tatctggattttggtatcttccttaatgaaggg

SEQ ID NO: 203877 - DNA, 33 bp, Homo sapien
agagccatgagttgagcaactacctgaacccca

SEQ ID NO: 203878 - DNA, 33 bp, Homo sapien
agagccatgagttgagtaactacctgaacccca

SEQ ID NO: 203879 - DNA, 33 bp, Homo sapien
tttcttctctaacataccatactgtgaactctt

SEQ ID NO: 203880 - DNA, 33 bp, Homo sapien
tttcttctctaacatatcatactgtgaactctt

SEQ ID NO: 203881 - DNA, 33 bp, Homo sapien
ggaggtagcagaggaacattctgtagacttata

SEQ ID NO: 203882 - DNA, 33 bp, Homo sapien
ggaggtagcagaggaatattctgtagacttata

SEQ ID NO: 203883 - DNA, 33 bp, Homo sapien
aaatgataacaatgacaaatgtacaaagacttt

SEQ ID NO: 203884 - DNA, 33 bp, Homo sapien
aaatgataacaatgacgaatgtacaaagacttt

SEQ ID NO: 203885 - DNA, 33 bp, Homo sapien
tttattagcattgcttaaaaaattactctggtg

SEQ ID NO: 203886 - DNA, 33 bp, Homo sapien
tttattagcattgctttaaaaattactctggtg

SEQ ID NO: 203887 - DNA, 33 bp, Homo sapien
tctcctgagcacctccaaaaaaaagaaccactt

SEQ ID NO: 203888 - DNA, 33 bp, Homo sapien
tctcctgagcacctccgaaaaaaagaaccactt

SEQ ID NO: 203889 - DNA, 33 bp, Homo sapien
ggtggtgccatcagaaagaaaaacacttagaag

SEQ ID NO: 203890 - DNA, 33 bp, Homo sapien
ggtggtgccatcagaatgaaaaacacttagaag

SEQ ID NO: 203891 - DNA, 33 bp, Homo sapien
attaatgcttagaagaactgagagacaagaaaa

SEQ ID NO: 203892 - DNA, 33 bp, Homo sapien
attaatgcttagaagagctgagagacaagaaaa

SEQ ID NO: 203893 - DNA, 33 bp, Homo sapien
aatgggttttagcttccagagagaataagaacc

SEQ ID NO: 203894 - DNA, 33 bp, Homo sapien
aatgggttttagcttcgagagagaataagaacc

SEQ ID NO: 203895 - DNA, 33 bp, Homo sapien
agaccacgtaatcttaaatctctgcttatttgt

SEQ ID NO: 203896 - DNA, 33 bp, Homo sapien
agaccacgtaatcttagatctctgcttatttgt

SEQ ID NO: 203897 - DNA, 33 bp, Homo sapien
gatcaatgatacttcacctctgtggttctcttc

SEQ ID NO: 203898 - DNA, 33 bp, Homo sapien
gatcaatgatacttcagctctgtggttctcttc

SEQ ID NO: 203899 - DNA, 33 bp, Homo sapien
gcttgaagaatgcatgaactcggagaagggaaa

SEQ ID NO: 203900 - DNA, 33 bp, Homo sapien
gcttgaagaatgcatggactcggagaagggaaa

SEQ ID NO: 203901 - DNA, 33 bp, Homo sapien
tacacattacatcgttaaacaagaacatcctta

SEQ ID NO: 203902 - DNA, 33 bp, Homo sapien
tacacattacatcgttcaacaagaacatcctta

SEQ ID NO: 203903 - DNA, 33 bp, Homo sapien
atctctactacaaaaactattaacagtcagcca

SEQ ID NO: 203904 - DNA, 33 bp, Homo sapien
atctctactacaaaaagtattaacagtcagcca

SEQ ID NO: 203905 - DNA, 33 bp, Homo sapien
ttagtttgtaagcaagccataatactaaatata

SEQ ID NO: 203906 - DNA, 33 bp, Homo sapien
ttagtttgtaagcaagtcataatactaaatata

SEQ ID NO: 203907 - DNA, 33 bp, Homo sapien
ataacatgatcatctcaagaaattggagtattg

SEQ ID NO: 203908 - DNA, 33 bp, Homo sapien
ataacatgatcatctcgagaaattggagtattg

SEQ ID NO: 203909 - DNA, 33 bp, Homo sapien
ctacagagtccatttcaaacactgcagaatttt

SEQ ID NO: 203910 - DNA, 33 bp, Homo sapien
ctacagagtccatttcgaacactgcagaatttt

SEQ ID NO: 203911 - DNA, 33 bp, Homo sapien
ctctgtcatttatgcaacagttatcaccagaat

SEQ ID NO: 203912 - DNA, 33 bp, Homo sapien
ctctgtcatttatgcagcagttatcaccagaat

SEQ ID NO: 203913 - DNA, 33 bp, Homo sapien
atcctcgtgataagaaacgtagaaatcaacctt

SEQ ID NO: 203914 - DNA, 33 bp, Homo sapien
atcctcgtgataagaagcgtagaaatcaacctt

SEQ ID NO: 203915 - DNA, 33 bp, Homo sapien
gcaagttttattccaaaagttcaaggttggctt

SEQ ID NO: 203916 - DNA, 33 bp, Homo sapien
gcaagttttattccaagagttcaaggttggctt

SEQ ID NO: 203917 - DNA, 33 bp, Homo sapien
ctctgaaattcctaaaatcttctggaaagttca

SEQ ID NO: 203918 - DNA, 33 bp, Homo sapien
ctctgaaattcctaaactcttctggaaagttca

SEQ ID NO: 203919 - DNA, 33 bp, Homo sapien
aaatagaagttgcacactgaaattgagtgaagt

SEQ ID NO: 203920 - DNA, 33 bp, Homo sapien
aaatagaagttgcacattgaaattgagtgaagt

SEQ ID NO: 203921 - DNA, 33 bp, Homo sapien
tgaacattccataaacaacctcaacatacctaa

SEQ ID NO: 203922 - DNA, 33 bp, Homo sapien
tgaacattccataaacgacctcaacatacctaa

SEQ ID NO: 203923 - DNA, 33 bp, Homo sapien
tgacaaactgaatccacaagcacatgaaaaggc

SEQ ID NO: 203924 - DNA, 33 bp, Homo sapien
tgacaaactgaatccagaagcacatgaaaaggc

SEQ ID NO: 203925 - DNA, 33 bp, Homo sapien
taaaatgctggaagcacctaaaacggccaacac

SEQ ID NO: 203926 - DNA, 33 bp, Homo sapien
taaaatgctggaagcagctaaaacggccaacac

SEQ ID NO: 203927 - DNA, 33 bp, Homo sapien
gtcctacctgacttcacggatttatggcagttt

SEQ ID NO: 203928 - DNA, 33 bp, Homo sapien
gtcctacctgacttcatggatttatggcagttt

SEQ ID NO: 203929 - DNA, 33 bp, Homo sapien
tgaaggcttgtggtagaaggagcctggtgagct

SEQ ID NO: 203930 - DNA, 33 bp, Homo sapien
tgaaggcttgtggtaggaggagcctggtgagct

SEQ ID NO: 203931 - DNA, 33 bp, Homo sapien
tctcataaaatagccaacgttacatagaacatc

SEQ ID NO: 203932 - DNA, 33 bp, Homo sapien
tctcataaaatagccagcgttacatagaacatc

SEQ ID NO: 203933 - DNA, 33 bp, Homo sapien
ccacttcaaatttaccagaattgtaaccaagag

SEQ ID NO: 203934 - DNA, 33 bp, Homo sapien
ccacttcaaatttaccggaattgtaaccaagag

SEQ ID NO: 203935 - DNA, 33 bp, Homo sapien
ggcctcaagtctgatcacctttgtattttgcat

SEQ ID NO: 203936 - DNA, 33 bp, Homo sapien
ggcctcaagtctgatcgcctttgtattttgcat

SEQ ID NO: 203937 - DNA, 33 bp, Homo sapien
agtacacactcttggaagaattaaagaatcaaa

SEQ ID NO: 203938 - DNA, 33 bp, Homo sapien
agtacacactcttggaggaattaaagaatcaaa

SEQ ID NO: 203939 - DNA, 33 bp, Homo sapien
gaatgccagttaccataataacacgattcaatg

SEQ ID NO: 203940 - DNA, 33 bp, Homo sapien
gaatgccagttaccatgataacacgattcaatg

SEQ ID NO: 203941 - DNA, 33 bp, Homo sapien
aatagtactttgtaaaatgtgaagtgtttgata

SEQ ID NO: 203942 - DNA, 33 bp, Homo sapien
aatagtactttgtaaagtgtgaagtgtttgata

SEQ ID NO: 203943 - DNA, 33 bp, Homo sapien
tgcctgcctctgtagacaacaccatgtggcccc

SEQ ID NO: 203944 - DNA, 33 bp, Homo sapien
tgcctgcctctgtagataacaccatgtggcccc

SEQ ID NO: 203945 - DNA, 33 bp, Homo sapien
gagcatctccagccaacggctttcttgatgtat

SEQ ID NO: 203946 - DNA, 33 bp, Homo sapien
gagcatctccagccaatggctttcttgatgtat

SEQ ID NO: 203947 - DNA, 33 bp, Homo sapien
aagagacaggtttatcactaaacaggctgactt

SEQ ID NO: 203948 - DNA, 33 bp, Homo sapien
aagagacaggtttatcgctaaacaggctgactt

SEQ ID NO: 203949 - DNA, 33 bp, Homo sapien
tttccatgcaaaaaagcacccacaaatgttcac

SEQ ID NO: 203950 - DNA, 33 bp, Homo sapien
tttccatgcaaaaaagtacccacaaatgttcac

SEQ ID NO: 203951 - DNA, 33 bp, Homo sapien
ttttttttcttttgccactttcgctctttgggt

SEQ ID NO: 203952 - DNA, 33 bp, Homo sapien
ttttttttcttttgccgctttcgctctttgggt

SEQ ID NO: 203953 - DNA, 33 bp, Homo sapien
cttccctttctagtaacagcagtgctgacaata

SEQ ID NO: 203954 - DNA, 33 bp, Homo sapien
cttccctttctagtaatagcagtgctgacaata

SEQ ID NO: 203955 - DNA, 33 bp, Homo sapien
tttccaagattacacaactaacaagcggcagat

SEQ ID NO: 203956 - DNA, 33 bp, Homo sapien
tttccaagattacacagctaacaagcggcagat

SEQ ID NO: 203957 - DNA, 33 bp, Homo sapien
gaatattttcctgttacagtggatggtgacctc

SEQ ID NO: 203958 - DNA, 33 bp, Homo sapien
gaatattttcctgttagagtggatggtgacctc

SEQ ID NO: 203959 - DNA, 33 bp, Homo sapien
ccctttgaatggtccaacaaaggctatttcctg

SEQ ID NO: 203960 - DNA, 33 bp, Homo sapien
ccctttgaatggtccagcaaaggctatttcctg

SEQ ID NO: 203961 - DNA, 33 bp, Homo sapien
agcacaggtaactacacgagtcaataaagagta

SEQ ID NO: 203962 - DNA, 33 bp, Homo sapien
agcacaggtaactacatgagtcaataaagagta

SEQ ID NO: 203963 - DNA, 33 bp, Homo sapien
tctctatcttctttcacgaatacattgatttaa

SEQ ID NO: 203964 - DNA, 33 bp, Homo sapien
tctctatcttctttcatgaatacattgatttaa

SEQ ID NO: 203965 - DNA, 33 bp, Homo sapien
tctgtatcgaggcaggaattaagcacaggacta

SEQ ID NO: 203966 - DNA, 33 bp, Homo sapien
tctgtatcgaggcagggattaagcacaggacta

SEQ ID NO: 203967 - DNA, 33 bp, Homo sapien
gaccccaaattatgaacggattcaaactagaag

SEQ ID NO: 203968 - DNA, 33 bp, Homo sapien
gaccccaaattatgaatggattcaaactagaag

SEQ ID NO: 203969 - DNA, 33 bp, Homo sapien
gttcatctcataaaaaccgttttctaggagacc

SEQ ID NO: 203970 - DNA, 33 bp, Homo sapien
gttcatctcataaaaagcgttttctaggagacc

SEQ ID NO: 203971 - DNA, 33 bp, Homo sapien
cttgctgtaaagtgcaatgatgcttaatagccc

SEQ ID NO: 203972 - DNA, 33 bp, Homo sapien
cttgctgtaaagtgcagtgatgcttaatagccc

SEQ ID NO: 203973 - DNA, 33 bp, Homo sapien
gagtgtgtaattcagccatatacataggatttg

SEQ ID NO: 203974 - DNA, 33 bp, Homo sapien
gagtgtgtaattcagctatatacataggatttg

SEQ ID NO: 203975 - DNA, 33 bp, Homo sapien
catactgaatgataaacagacgataaacaattt

SEQ ID NO: 203976 - DNA, 33 bp, Homo sapien
catactgaatgataaatagacgataaacaattt

SEQ ID NO: 203977 - DNA, 33 bp, Homo sapien
gtgatgctcatggtaaagaaatgcagacgcccc

SEQ ID NO: 203978 - DNA, 33 bp, Homo sapien
gtgatgctcatggtaaggaaatgcagacgcccc

SEQ ID NO: 203979 - DNA, 33 bp, Homo sapien
tcagataaaatttgaaccatgcctaatccctgg

SEQ ID NO: 203980 - DNA, 33 bp, Homo sapien
tcagataaaatttgaatcatgcctaatccctgg

SEQ ID NO: 203981 - DNA, 33 bp, Homo sapien
cttttccagggtctaacgtatgctatgcctggg

SEQ ID NO: 203982 - DNA, 33 bp, Homo sapien
cttttccagggtctaatgtatgctatgcctggg

SEQ ID NO: 203983 - DNA, 33 bp, Homo sapien
cctcattccacaccacaccagtattgcatccat

SEQ ID NO: 203984 - DNA, 33 bp, Homo sapien
cctcattccacaccacgccagtattgcatccat

SEQ ID NO: 203985 - DNA, 33 bp, Homo sapien
accgacctctggcccaccttttgtctccacgcc

SEQ ID NO: 203986 - DNA, 33 bp, Homo sapien
accgacctctggcccatcttttgtctccacgcc

SEQ ID NO: 203987 - DNA, 33 bp, Homo sapien
gaaagaattcacgctccaaagatggttcctgct

SEQ ID NO: 203988 - DNA, 33 bp, Homo sapien
gaaagaattcacgctcgaaagatggttcctgct

SEQ ID NO: 203989 - DNA, 33 bp, Homo sapien
taagtgctctctcaccacggaggttgcctgggg

SEQ ID NO: 203990 - DNA, 33 bp, Homo sapien
taagtgctctctcaccgcggaggttgcctgggg

SEQ ID NO: 203991 - DNA, 33 bp, Homo sapien
taaatgattttaaaacagccgctaataatgaga

SEQ ID NO: 203992 - DNA, 33 bp, Homo sapien
taaatgattttaaaacggccgctaataatgaga

SEQ ID NO: 203993 - DNA, 33 bp, Homo sapien
cctgcttgaaatttggcaaagcggattcaaagc

SEQ ID NO: 203994 - DNA, 33 bp, Homo sapien
cctgcttgaaatttggtaaagcggattcaaagc

SEQ ID NO: 203995 - DNA, 33 bp, Homo sapien
gccaactctcctcataccatctgtccccaagat

SEQ ID NO: 203996 - DNA, 33 bp, Homo sapien
gccaactctcctcatatcatctgtccccaagat

SEQ ID NO: 203997 - DNA, 33 bp, Homo sapien
cagatccaagtttaaacgcttttctggaagtcc

SEQ ID NO: 203998 - DNA, 33 bp, Homo sapien
cagatccaagtttaaatgcttttctggaagtcc

SEQ ID NO: 203999 - DNA, 33 bp, Homo sapien
ggtttcaaggagcaaacgtgttctctcaatact

SEQ ID NO: 204000 - DNA, 33 bp, Homo sapien
ggtttcaaggagcaaatgtgttctctcaatact

SEQ ID NO: 204001 - DNA, 33 bp, Homo sapien
cctctgcctttcttgaccttgaagaagagcaaa

SEQ ID NO: 204002 - DNA, 33 bp, Homo sapien
cctctgcctttcttgatcttgaagaagagcaaa

SEQ ID NO: 204003 - DNA, 33 bp, Homo sapien
agtcaccctgggagacaaccgctgttccaaaat

SEQ ID NO: 204004 - DNA, 33 bp, Homo sapien
agtcaccctgggagacgaccgctgttccaaaat

SEQ ID NO: 204005 - DNA, 33 bp, Homo sapien
gactgtcaggaaaaaaacagaggcattttggaa

SEQ ID NO: 204006 - DNA, 33 bp, Homo sapien
gactgtcaggaaaaaaccagaggcattttggaa

SEQ ID NO: 204007 - DNA, 33 bp, Homo sapien
caggtcttgacttgagaagatgtggatttgaga

SEQ ID NO: 204008 - DNA, 33 bp, Homo sapien
caggtcttgacttgaggagatgtggatttgaga

SEQ ID NO: 204009 - DNA, 33 bp, Homo sapien
ccacattgcccagttacctgtcctaaaaagggc

SEQ ID NO: 204010 - DNA, 33 bp, Homo sapien
ccacattgcccagttatctgtcctaaaaagggc

SEQ ID NO: 204011 - DNA, 33 bp, Homo sapien
gaaacaaaagcttccaccacgactgtaacaggt

SEQ ID NO: 204012 - DNA, 33 bp, Homo sapien
gaaacaaaagcttccatcacgactgtaacaggt

SEQ ID NO: 204013 - DNA, 33 bp, Homo sapien
caaaacatttgattcactaatgtaaaatgtaga

SEQ ID NO: 204014 - DNA, 33 bp, Homo sapien
caaaacatttgattcagtaatgtaaaatgtaga

SEQ ID NO: 204015 - DNA, 33 bp, Homo sapien
catctttttggtgacacggcagttaaactcagc

SEQ ID NO: 204016 - DNA, 33 bp, Homo sapien
catctttttggtgacatggcagttaaactcagc

SEQ ID NO: 204017 - DNA, 33 bp, Homo sapien
ctgcaccgccctgaccccaattacagtggcctt

SEQ ID NO: 204018 - DNA, 33 bp, Homo sapien
ctgcaccgccctgacctcaattacagtggcctt

SEQ ID NO: 204019 - DNA, 33 bp, Homo sapien
attctgattggaagaacaaaaggatctagttaa

SEQ ID NO: 204020 - DNA, 33 bp, Homo sapien
attctgattggaagaagaaaaggatctagttaa

SEQ ID NO: 204021 - DNA, 33 bp, Homo sapien
ctttaaaatgagaatacgaaagccttcttcaca

SEQ ID NO: 204022 - DNA, 33 bp, Homo sapien
ctttaaaatgagaatatgaaagccttcttcaca

SEQ ID NO: 204023 - DNA, 33 bp, Homo sapien
ccaggactagggcaaacagagttcaaagagtgt

SEQ ID NO: 204024 - DNA, 33 bp, Homo sapien
ccaggactagggcaaatagagttcaaagagtgt

SEQ ID NO: 204025 - DNA, 33 bp, Homo sapien
cttgaacagaattacagtaataagggctctgat

SEQ ID NO: 204026 - DNA, 33 bp, Homo sapien
cttgaacagaattacattaataagggctctgat

SEQ ID NO: 204027 - DNA, 33 bp, Homo sapien
gtgagtagaatgtctagcattttgtctggtttt

SEQ ID NO: 204028 - DNA, 33 bp, Homo sapien
gtgagtagaatgtctatcattttgtctggtttt

SEQ ID NO: 204029 - DNA, 33 bp, Homo sapien
aaaagttggagagaacaagaagtttctggtgtt

SEQ ID NO: 204030 - DNA, 33 bp, Homo sapien
aaaagttggagagaacgagaagtttctggtgtt

SEQ ID NO: 204031 - DNA, 33 bp, Homo sapien
tttaaaaggtatattacagatccaactagattc

SEQ ID NO: 204032 - DNA, 33 bp, Homo sapien
tttaaaaggtatattagagatccaactagattc

SEQ ID NO: 204033 - DNA, 33 bp, Homo sapien
caacaatagaatggacaaaacaattaactgtga

SEQ ID NO: 204034 - DNA, 33 bp, Homo sapien
caacaatagaatggaccaaacaattaactgtga

SEQ ID NO: 204035 - DNA, 33 bp, Homo sapien
tctaggagtagaaggacattggaaaaggagact

SEQ ID NO: 204036 - DNA, 33 bp, Homo sapien
tctaggagtagaaggagattggaaaaggagact

SEQ ID NO: 204037 - DNA, 33 bp, Homo sapien
tgtttatggacctcagaacaatagacaaatacc

SEQ ID NO: 204038 - DNA, 33 bp, Homo sapien
tgtttatggacctcagcacaatagacaaatacc

SEQ ID NO: 204039 - DNA, 33 bp, Homo sapien
ctgagaaatgtacaagccacgccgcgaaccgcc

SEQ ID NO: 204040 - DNA, 33 bp, Homo sapien
ctgagaaatgtacaaggcacgccgcgaaccgcc

SEQ ID NO: 204041 - DNA, 33 bp, Homo sapien
ggacatgcgagatgccaaatgccccagacagac

SEQ ID NO: 204042 - DNA, 33 bp, Homo sapien
ggacatgcgagatgccgaatgccccagacagac

SEQ ID NO: 204043 - DNA, 33 bp, Homo sapien
accctgagttgataccaaaggaagcaagagagc

SEQ ID NO: 204044 - DNA, 33 bp, Homo sapien
accctgagttgataccgaaggaagcaagagagc

SEQ ID NO: 204045 - DNA, 33 bp, Homo sapien
tttattgaagacctaaagtaggcctgatgttgg

SEQ ID NO: 204046 - DNA, 33 bp, Homo sapien
tttattgaagacctaatgtaggcctgatgttgg

SEQ ID NO: 204047 - DNA, 33 bp, Homo sapien
gctcctcgttttactaggctcagctttcttgtg

SEQ ID NO: 204048 - DNA, 33 bp, Homo sapien
gctcctcgttttactatgctcagctttcttgtg

SEQ ID NO: 204049 - DNA, 33 bp, Homo sapien
tgccacctaggggcccagaagctgccgcccagg

SEQ ID NO: 204050 - DNA, 33 bp, Homo sapien
tgccacctaggggcccggaagctgccgcccagg

SEQ ID NO: 204051 - DNA, 33 bp, Homo sapien
ttcttagaagtttaacagtggcaccctggtgat

SEQ ID NO: 204052 - DNA, 33 bp, Homo sapien
ttcttagaagtttaacggtggcaccctggtgat

SEQ ID NO: 204053 - DNA, 33 bp, Homo sapien
agcatcttgcaaaagactaaaatcagagtccat

SEQ ID NO: 204054 - DNA, 33 bp, Homo sapien
agcatcttgcaaaagagtaaaatcagagtccat

SEQ ID NO: 204055 - DNA, 33 bp, Homo sapien
tctttgtgtattggaacgcatgagtccacactg

SEQ ID NO: 204056 - DNA, 33 bp, Homo sapien
tctttgtgtattggaatgcatgagtccacactg

SEQ ID NO: 204057 - DNA, 33 bp, Homo sapien
actggcctcaggcaaaagcttcagagaagggaa

SEQ ID NO: 204058 - DNA, 33 bp, Homo sapien
actggcctcaggcaaaggcttcagagaagggaa

SEQ ID NO: 204059 - DNA, 33 bp, Homo sapien
tacattgagcgtactaataaaaagcattcagat

SEQ ID NO: 204060 - DNA, 33 bp, Homo sapien
tacattgagcgtactactaaaaagcattcagat

SEQ ID NO: 204061 - DNA, 33 bp, Homo sapien
ttacgtagactagtgactatgtgcttgggcatt

SEQ ID NO: 204062 - DNA, 33 bp, Homo sapien
ttacgtagactagtgattatgtgcttgggcatt

SEQ ID NO: 204063 - DNA, 33 bp, Homo sapien
tagggactgcttctagaacctttggtgaatatc

SEQ ID NO: 204064 - DNA, 33 bp, Homo sapien
tagggactgcttctaggacctttggtgaatatc

SEQ ID NO: 204065 - DNA, 33 bp, Homo sapien
tgaaaaccaccaaaaaaggtgaatgactgctga

SEQ ID NO: 204066 - DNA, 33 bp, Homo sapien
tgaaaaccaccaaaaacggtgaatgactgctga

SEQ ID NO: 204067 - DNA, 33 bp, Homo sapien
ccaaatcagtgctataagaggtaatagctcaat

SEQ ID NO: 204068 - DNA, 33 bp, Homo sapien
ccaaatcagtgctataggaggtaatagctcaat

SEQ ID NO: 204069 - DNA, 33 bp, Homo sapien
attatgttatggacaacaactttagggaagaca

SEQ ID NO: 204070 - DNA, 33 bp, Homo sapien
attatgttatggacaagaactttagggaagaca

SEQ ID NO: 204071 - DNA, 33 bp, Homo sapien
ctatggtgaattacccagaagtgcaattattgg

SEQ ID NO: 204072 - DNA, 33 bp, Homo sapien
ctatggtgaattacccggaagtgcaattattgg

SEQ ID NO: 204073 - DNA, 33 bp, Homo sapien
aactgctgtttgattcaaaatgattctttgtgt

SEQ ID NO: 204074 - DNA, 33 bp, Homo sapien
aactgctgtttgattcgaaatgattctttgtgt

SEQ ID NO: 204075 - DNA, 33 bp, Homo sapien
aaataaatgcatgataacacttaaatgccaaag

SEQ ID NO: 204076 - DNA, 33 bp, Homo sapien
aaataaatgcatgatagcacttaaatgccaaag

SEQ ID NO: 204077 - DNA, 33 bp, Homo sapien
catctctgctaaaaaaatataacaattagctgg

SEQ ID NO: 204078 - DNA, 33 bp, Homo sapien
catctctgctaaaaaactataacaattagctgg

SEQ ID NO: 204079 - DNA, 33 bp, Homo sapien
acacagcccaaatcaacctatttttctccacta

SEQ ID NO: 204080 - DNA, 33 bp, Homo sapien
acacagcccaaatcaatctatttttctccacta

SEQ ID NO: 204081 - DNA, 33 bp, Homo sapien
gccaaagtgctctttcaaacagaaaaatcatgt

SEQ ID NO: 204082 - DNA, 33 bp, Homo sapien
gccaaagtgctctttcgaacagaaaaatcatgt

SEQ ID NO: 204083 - DNA, 33 bp, Homo sapien
tccagttattattttacatctgtctgttgctca

SEQ ID NO: 204084 - DNA, 33 bp, Homo sapien
tccagttattattttagatctgtctgttgctca

SEQ ID NO: 204085 - DNA, 33 bp, Homo sapien
tcaacaaaattatgacaagaaacatgacattgt

SEQ ID NO: 204086 - DNA, 33 bp, Homo sapien
tcaacaaaattatgactagaaacatgacattgt

SEQ ID NO: 204087 - DNA, 33 bp, Homo sapien
acatactgatggcttggaaagactatgctagac

SEQ ID NO: 204088 - DNA, 33 bp, Homo sapien
acatactgatggcttgtaaagactatgctagac

SEQ ID NO: 204089 - DNA, 33 bp, Homo sapien
tggtccaaagtaatagcattctaagtccactga

SEQ ID NO: 204090 - DNA, 33 bp, Homo sapien
tggtccaaagtaatagtattctaagtccactga

SEQ ID NO: 204091 - DNA, 33 bp, Homo sapien
ggtatgtgccaaaaacggtataaatgaaactat

SEQ ID NO: 204092 - DNA, 33 bp, Homo sapien
ggtatgtgccaaaaactgtataaatgaaactat

SEQ ID NO: 204093 - DNA, 33 bp, Homo sapien
atcattggccaaaatacggactttacagatact

SEQ ID NO: 204094 - DNA, 33 bp, Homo sapien
atcattggccaaaatatggactttacagatact

SEQ ID NO: 204095 - DNA, 33 bp, Homo sapien
ccattatagtctcccaatgggacatgtttgcca

SEQ ID NO: 204096 - DNA, 33 bp, Homo sapien
ccattatagtctcccagtgggacatgtttgcca

SEQ ID NO: 204097 - DNA, 33 bp, Homo sapien
cactacaaaaagtacactccacaatgagtaaga

SEQ ID NO: 204098 - DNA, 33 bp, Homo sapien
cactacaaaaagtacattccacaatgagtaaga

SEQ ID NO: 204099 - DNA, 33 bp, Homo sapien
tgatggccagcctctacatcacaggagctgccc

SEQ ID NO: 204100 - DNA, 33 bp, Homo sapien
tgatggccagcctctatatcacaggagctgccc

SEQ ID NO: 204101 - DNA, 33 bp, Homo sapien
caccaaaatagtgctcaagtcttaggttactgt

SEQ ID NO: 204102 - DNA, 33 bp, Homo sapien
caccaaaatagtgctcgagtcttaggttactgt

SEQ ID NO: 204103 - DNA, 33 bp, Homo sapien
taggtgcagccctgtcacaacaccaacagaagt

SEQ ID NO: 204104 - DNA, 33 bp, Homo sapien
taggtgcagccctgtctcaacaccaacagaagt

SEQ ID NO: 204105 - DNA, 33 bp, Homo sapien
cccacccaaacaggtacagcactttcaggcaaa

SEQ ID NO: 204106 - DNA, 33 bp, Homo sapien
cccacccaaacaggtagagcactttcaggcaaa

SEQ ID NO: 204107 - DNA, 33 bp, Homo sapien
gtgacattctgtaaccgataatgtaagtgtgtt

SEQ ID NO: 204108 - DNA, 33 bp, Homo sapien
gtgacattctgtaacctataatgtaagtgtgtt

SEQ ID NO: 204109 - DNA, 33 bp, Homo sapien
cagtttggggacatcacgtgtagccctgtcgat

SEQ ID NO: 204110 - DNA, 33 bp, Homo sapien
cagtttggggacatcatgtgtagccctgtcgat

SEQ ID NO: 204111 - DNA, 33 bp, Homo sapien
gccccctgacgacagaaagggatgccctgctct

SEQ ID NO: 204112 - DNA, 33 bp, Homo sapien
gccccctgacgacagagagggatgccctgctct

SEQ ID NO: 204113 - DNA, 33 bp, Homo sapien
gcaggcctggaacaccaccggtgccaagaaaga

SEQ ID NO: 204114 - DNA, 33 bp, Homo sapien
gcaggcctggaacaccgccggtgccaagaaaga

SEQ ID NO: 204115 - DNA, 33 bp, Homo sapien
gtgatgtccattaataaggaagtggctttggat

SEQ ID NO: 204116 - DNA, 33 bp, Homo sapien
gtgatgtccattaatatggaagtggctttggat

SEQ ID NO: 204117 - DNA, 33 bp, Homo sapien
catgctggaagaatgcccgtctgctggacaatc

SEQ ID NO: 204118 - DNA, 33 bp, Homo sapien
catgctggaagaatgctcgtctgctggacaatc

SEQ ID NO: 204119 - DNA, 33 bp, Homo sapien
ccttttccagaaacaaaacgatgtcatgttgca

SEQ ID NO: 204120 - DNA, 33 bp, Homo sapien
ccttttccagaaacaacacgatgtcatgttgca

SEQ ID NO: 204121 - DNA, 33 bp, Homo sapien
caaatggttccttcaacaggattgcctctaggt

SEQ ID NO: 204122 - DNA, 33 bp, Homo sapien
caaatggttccttcaagaggattgcctctaggt

SEQ ID NO: 204123 - DNA, 33 bp, Homo sapien
actgtcccaatctgtcaatcccgatccgtaagc

SEQ ID NO: 204124 - DNA, 33 bp, Homo sapien
actgtcccaatctgtccatcccgatccgtaagc

SEQ ID NO: 204125 - DNA, 33 bp, Homo sapien
taattactttcacaaaggtacatataaatgtac

SEQ ID NO: 204126 - DNA, 33 bp, Homo sapien
taattactttcacaaatgtacatataaatgtac

SEQ ID NO: 204127 - DNA, 33 bp, Homo sapien
tagtgctatcctaataaaaaacacctacagaat

SEQ ID NO: 204128 - DNA, 33 bp, Homo sapien
tagtgctatcctaatataaaacacctacagaat

SEQ ID NO: 204129 - DNA, 33 bp, Homo sapien
actaaacacaatagtaccaggagaagaccagca

SEQ ID NO: 204130 - DNA, 33 bp, Homo sapien
actaaacacaatagtatcaggagaagaccagca

SEQ ID NO: 204131 - DNA, 33 bp, Homo sapien
tcctttggcctaagatcaagtggaggtccccct

SEQ ID NO: 204132 - DNA, 33 bp, Homo sapien
tcctttggcctaagattaagtggaggtccccct

SEQ ID NO: 204133 - DNA, 33 bp, Homo sapien
ataaattgtgataagcaccatgaacaggatgct

SEQ ID NO: 204134 - DNA, 33 bp, Homo sapien
ataaattgtgataagcgccatgaacaggatgct

SEQ ID NO: 204135 - DNA, 33 bp, Homo sapien
gagctacagagataacccagacaaggcccttgc

SEQ ID NO: 204136 - DNA, 33 bp, Homo sapien
gagctacagagataacgcagacaaggcccttgc

SEQ ID NO: 204137 - DNA, 33 bp, Homo sapien
accccagggcctgacacagggtgcaagctcagt

SEQ ID NO: 204138 - DNA, 33 bp, Homo sapien
accccagggcctgacagagggtgcaagctcagt

SEQ ID NO: 204139 - DNA, 33 bp, Homo sapien
tcctctttggaagaaacagcaggtcatcctgtc

SEQ ID NO: 204140 - DNA, 33 bp, Homo sapien
tcctctttggaagaaagagcaggtcatcctgtc

SEQ ID NO: 204141 - DNA, 33 bp, Homo sapien
tcatctttttccctaccactgtctagaagtgga

SEQ ID NO: 204142 - DNA, 33 bp, Homo sapien
tcatctttttccctactactgtctagaagtgga

SEQ ID NO: 204143 - DNA, 33 bp, Homo sapien
ctctgttaagggtcagaagaaagcaccattcag

SEQ ID NO: 204144 - DNA, 33 bp, Homo sapien
ctctgttaagggtcaggagaaagcaccattcag

SEQ ID NO: 204145 - DNA, 33 bp, Homo sapien
gggagggagacaggtggaatgttttgagataac

SEQ ID NO: 204146 - DNA, 33 bp, Homo sapien
gggagggagacaggtgtaatgttttgagataac

SEQ ID NO: 204147 - DNA, 33 bp, Homo sapien
gttctggattctgtcaacatagattggttttgc

SEQ ID NO: 204148 - DNA, 33 bp, Homo sapien
gttctggattctgtcaccatagattggttttgc

SEQ ID NO: 204149 - DNA, 33 bp, Homo sapien
cagaaaaggccttctacagcagtggttacgaat

SEQ ID NO: 204150 - DNA, 33 bp, Homo sapien
cagaaaaggccttctagagcagtggttacgaat

SEQ ID NO: 204151 - DNA, 33 bp, Homo sapien
catgtgtaactgctccaagatctcccattcgta

SEQ ID NO: 204152 - DNA, 33 bp, Homo sapien
catgtgtaactgctccgagatctcccattcgta

SEQ ID NO: 204153 - DNA, 33 bp, Homo sapien
atgggaataagcaaaaagggccacagaaacagt

SEQ ID NO: 204154 - DNA, 33 bp, Homo sapien
atgggaataagcaaaaggggccacagaaacagt

SEQ ID NO: 204155 - DNA, 33 bp, Homo sapien
cgagccagcatctgaacagaaataactgcagac

SEQ ID NO: 204156 - DNA, 33 bp, Homo sapien
cgagccagcatctgaagagaaataactgcagac

SEQ ID NO: 204157 - DNA, 33 bp, Homo sapien
aggtatatagaccaataaaataggacaaaaatc

SEQ ID NO: 204158 - DNA, 33 bp, Homo sapien
aggtatatagaccaatgaaataggacaaaaatc

SEQ ID NO: 204159 - DNA, 33 bp, Homo sapien
gattgcttacttagtaaccggattctgtttggg

SEQ ID NO: 204160 - DNA, 33 bp, Homo sapien
gattgcttacttagtacccggattctgtttggg

SEQ ID NO: 204161 - DNA, 33 bp, Homo sapien
aaggactcgtaagaccagccaggagaacaagga

SEQ ID NO: 204162 - DNA, 33 bp, Homo sapien
aaggactcgtaagaccggccaggagaacaagga

SEQ ID NO: 204163 - DNA, 33 bp, Homo sapien
tgaaggtgggtcctgaaggctgaatgagggtga

SEQ ID NO: 204164 - DNA, 33 bp, Homo sapien
tgaaggtgggtcctgatggctgaatgagggtga

SEQ ID NO: 204165 - DNA, 33 bp, Homo sapien
gatgcattccggcacacggagcctggtttactc

SEQ ID NO: 204166 - DNA, 33 bp, Homo sapien
gatgcattccggcacatggagcctggtttactc

SEQ ID NO: 204167 - DNA, 33 bp, Homo sapien
cctggaacagagaggacatttgaggagaggcag

SEQ ID NO: 204168 - DNA, 33 bp, Homo sapien
cctggaacagagaggatatttgaggagaggcag

SEQ ID NO: 204169 - DNA, 33 bp, Homo sapien
gtgaagttgtttataacctggtaagaagaccag

SEQ ID NO: 204170 - DNA, 33 bp, Homo sapien
gtgaagttgtttataagctggtaagaagaccag

SEQ ID NO: 204171 - DNA, 33 bp, Homo sapien
taccaaacttctaacccggagctcagatctccc

SEQ ID NO: 204172 - DNA, 33 bp, Homo sapien
taccaaacttctaacctggagctcagatctccc

SEQ ID NO: 204173 - DNA, 33 bp, Homo sapien
ttccctgtccttcttcacagcatctttcttctc

SEQ ID NO: 204174 - DNA, 33 bp, Homo sapien
ttccctgtccttcttcgcagcatctttcttctc

SEQ ID NO: 204175 - DNA, 33 bp, Homo sapien
atgaatagtggcgtacaaataccacagaaggcc

SEQ ID NO: 204176 - DNA, 33 bp, Homo sapien
atgaatagtggcgtacgaataccacagaaggcc

SEQ ID NO: 204177 - DNA, 33 bp, Homo sapien
gtgctttgcccaaagtcacattttgagttacag

SEQ ID NO: 204178 - DNA, 33 bp, Homo sapien
gtgctttgcccaaagttacattttgagttacag

SEQ ID NO: 204179 - DNA, 33 bp, Homo sapien
caaggttcctacgactaacaccacagaaaatcc

SEQ ID NO: 204180 - DNA, 33 bp, Homo sapien
caaggttcctacgactgacaccacagaaaatcc

SEQ ID NO: 204181 - DNA, 33 bp, Homo sapien
cctcggacaagttaaccaagggcacggcaggaa

SEQ ID NO: 204182 - DNA, 33 bp, Homo sapien
cctcggacaagttaactaagggcacggcaggaa

SEQ ID NO: 204183 - DNA, 33 bp, Homo sapien
gtcatcttggaggtcaaatgcgtcgtttgcagc

SEQ ID NO: 204184 - DNA, 33 bp, Homo sapien
gtcatcttggaggtcacatgcgtcgtttgcagc

SEQ ID NO: 204185 - DNA, 33 bp, Homo sapien
tccaaaggccagttcacctctaagacagaggaa

SEQ ID NO: 204186 - DNA, 33 bp, Homo sapien
tccaaaggccagttcagctctaagacagaggaa

SEQ ID NO: 204187 - DNA, 33 bp, Homo sapien
taaggagtgagaatcacggtctaatcagtggtt

SEQ ID NO: 204188 - DNA, 33 bp, Homo sapien
taaggagtgagaatcatggtctaatcagtggtt

SEQ ID NO: 204189 - DNA, 33 bp, Homo sapien
ctcagtgatgctgaagaaaggtgcatggagcag

SEQ ID NO: 204190 - DNA, 33 bp, Homo sapien
ctcagtgatgctgaaggaaggtgcatggagcag

SEQ ID NO: 204191 - DNA, 33 bp, Homo sapien
cagggtcatggacaaccaggtctaaggaaaagg

SEQ ID NO: 204192 - DNA, 33 bp, Homo sapien
cagggtcatggacaactaggtctaaggaaaagg

SEQ ID NO: 204193 - DNA, 33 bp, Homo sapien
agcattttgtacaccacgagaagttccaatgtt

SEQ ID NO: 204194 - DNA, 33 bp, Homo sapien
agcattttgtacaccatgagaagttccaatgtt

SEQ ID NO: 204195 - DNA, 33 bp, Homo sapien
agctgtaagttagggacaggccactggaaaaaa

SEQ ID NO: 204196 - DNA, 33 bp, Homo sapien
agctgtaagttagggagaggccactggaaaaaa

SEQ ID NO: 204197 - DNA, 33 bp, Homo sapien
tattcatattctagtcacgtttgataatggcaa

SEQ ID NO: 204198 - DNA, 33 bp, Homo sapien
tattcatattctagtcgcgtttgataatggcaa

SEQ ID NO: 204199 - DNA, 33 bp, Homo sapien
ctcaagtcacagtagacgtataaccctttatca

SEQ ID NO: 204200 - DNA, 33 bp, Homo sapien
ctcaagtcacagtagatgtataaccctttatca

SEQ ID NO: 204201 - DNA, 33 bp, Homo sapien
tgttcagcagtatctccaaagctaaacaaaccc

SEQ ID NO: 204202 - DNA, 33 bp, Homo sapien
tgttcagcagtatctctaaagctaaacaaaccc

SEQ ID NO: 204203 - DNA, 33 bp, Homo sapien
ttttatgttgtacttacatttgctttgctcatt

SEQ ID NO: 204204 - DNA, 33 bp, Homo sapien
ttttatgttgtacttatatttgctttgctcatt

SEQ ID NO: 204205 - DNA, 33 bp, Homo sapien
gtgaacaataaagctactacagcacgcttccta

SEQ ID NO: 204206 - DNA, 33 bp, Homo sapien
gtgaacaataaagctattacagcacgcttccta

SEQ ID NO: 204207 - DNA, 33 bp, Homo sapien
acaagtggtcagaaacaatacgagagtaaaatg

SEQ ID NO: 204208 - DNA, 33 bp, Homo sapien
acaagtggtcagaaacgatacgagagtaaaatg

SEQ ID NO: 204209 - DNA, 33 bp, Homo sapien
tctctcacaacacgcaatatgattctttggaga

SEQ ID NO: 204210 - DNA, 33 bp, Homo sapien
tctctcacaacacgcattatgattctttggaga

SEQ ID NO: 204211 - DNA, 33 bp, Homo sapien
gagaaagcaagttctacgtcatcattgtgcctc

SEQ ID NO: 204212 - DNA, 33 bp, Homo sapien
gagaaagcaagttctatgtcatcattgtgcctc

SEQ ID NO: 204213 - DNA, 33 bp, Homo sapien
ctagttaatgggaaagacaatctggtgaccacc

SEQ ID NO: 204214 - DNA, 33 bp, Homo sapien
ctagttaatgggaaaggcaatctggtgaccacc

SEQ ID NO: 204215 - DNA, 33 bp, Homo sapien
tctcatcttggacttaaggttagtttagcacaa

SEQ ID NO: 204216 - DNA, 33 bp, Homo sapien
tctcatcttggacttacggttagtttagcacaa

SEQ ID NO: 204217 - DNA, 33 bp, Homo sapien
ggtatggaagaaattacgtagaatccagaccag

SEQ ID NO: 204218 - DNA, 33 bp, Homo sapien
ggtatggaagaaattatgtagaatccagaccag

SEQ ID NO: 204219 - DNA, 33 bp, Homo sapien
ctcctctgtaaggcctaaagctcaagccaacca

SEQ ID NO: 204220 - DNA, 33 bp, Homo sapien
ctcctctgtaaggcctgaagctcaagccaacca

SEQ ID NO: 204221 - DNA, 33 bp, Homo sapien
tagccaagtgtacttacagtcccaggaagcttt

SEQ ID NO: 204222 - DNA, 33 bp, Homo sapien
tagccaagtgtacttatagtcccaggaagcttt

SEQ ID NO: 204223 - DNA, 33 bp, Homo sapien
atacactgtaggccacaaacttatatgcaacaa

SEQ ID NO: 204224 - DNA, 33 bp, Homo sapien
atacactgtaggccacgaacttatatgcaacaa

SEQ ID NO: 204225 - DNA, 33 bp, Homo sapien
accttccagaagacaacgcgtgcctgtctcctc

SEQ ID NO: 204226 - DNA, 33 bp, Homo sapien
accttccagaagacaatgcgtgcctgtctcctc

SEQ ID NO: 204227 - DNA, 33 bp, Homo sapien
agtattgaattgcacacgataccaatgcagcac

SEQ ID NO: 204228 - DNA, 33 bp, Homo sapien
agtattgaattgcacaggataccaatgcagcac

SEQ ID NO: 204229 - DNA, 33 bp, Homo sapien
agaccaagtggggcccaaagatactttaactca

SEQ ID NO: 204230 - DNA, 33 bp, Homo sapien
agaccaagtggggcccgaagatactttaactca

SEQ ID NO: 204231 - DNA, 33 bp, Homo sapien
gattatccagatgaaacaccccaaaacacgtct

SEQ ID NO: 204232 - DNA, 33 bp, Homo sapien
gattatccagatgaaataccccaaaacacgtct

SEQ ID NO: 204233 - DNA, 33 bp, Homo sapien
tggattattccttcccaaatggtcactttgctt

SEQ ID NO: 204234 - DNA, 33 bp, Homo sapien
tggattattccttcccgaatggtcactttgctt

SEQ ID NO: 204235 - DNA, 33 bp, Homo sapien
tggacacaatagtggacaggtctgagccttgac

SEQ ID NO: 204236 - DNA, 33 bp, Homo sapien
tggacacaatagtggataggtctgagccttgac

SEQ ID NO: 204237 - DNA, 33 bp, Homo sapien
agaacagtagaaagagaaacccactatctctct

SEQ ID NO: 204238 - DNA, 33 bp, Homo sapien
agaacagtagaaagaggaacccactatctctct

SEQ ID NO: 204239 - DNA, 33 bp, Homo sapien
gctgtcaataacacataaaaatccatagagaca

SEQ ID NO: 204240 - DNA, 33 bp, Homo sapien
gctgtcaataacacatgaaaatccatagagaca

SEQ ID NO: 204241 - DNA, 33 bp, Homo sapien
attagagttctgtctaagaaggtgctatttgaa

SEQ ID NO: 204242 - DNA, 33 bp, Homo sapien
attagagttctgtctaggaaggtgctatttgaa

SEQ ID NO: 204243 - DNA, 33 bp, Homo sapien
cttggggatcaaggcaagagagcatttccagga

SEQ ID NO: 204244 - DNA, 33 bp, Homo sapien
cttggggatcaaggcaggagagcatttccagga

SEQ ID NO: 204245 - DNA, 33 bp, Homo sapien
ccatcttccctttcacaactccattcagcaatg

SEQ ID NO: 204246 - DNA, 33 bp, Homo sapien
ccatcttccctttcacgactccattcagcaatg

SEQ ID NO: 204247 - DNA, 33 bp, Homo sapien
tggttcgaacaaaatgccaatgtgacagataac

SEQ ID NO: 204248 - DNA, 33 bp, Homo sapien
tggttcgaacaaaatggcaatgtgacagataac

SEQ ID NO: 204249 - DNA, 33 bp, Homo sapien
tgtgtctggtcctttacgtactattggctgcat

SEQ ID NO: 204250 - DNA, 33 bp, Homo sapien
tgtgtctggtcctttatgtactattggctgcat

SEQ ID NO: 204251 - DNA, 33 bp, Homo sapien
acagggcagactgtcaatcaacaatcaatcaat

SEQ ID NO: 204252 - DNA, 33 bp, Homo sapien
acagggcagactgtcagtcaacaatcaatcaat

SEQ ID NO: 204253 - DNA, 33 bp, Homo sapien
ttgtctttggttgtcaccttacccttctgtgcc

SEQ ID NO: 204254 - DNA, 33 bp, Homo sapien
ttgtctttggttgtcatcttacccttctgtgcc

SEQ ID NO: 204255 - DNA, 33 bp, Homo sapien
taaaattttctctaaaatgtaaaatgtaagagg

SEQ ID NO: 204256 - DNA, 33 bp, Homo sapien
taaaattttctctaaagtgtaaaatgtaagagg

SEQ ID NO: 204257 - DNA, 33 bp, Homo sapien
gaacattcctaccggaagtcagggcagtatcca

SEQ ID NO: 204258 - DNA, 33 bp, Homo sapien
gaacattcctaccggaggtcagggcagtatcca

SEQ ID NO: 204259 - DNA, 33 bp, Homo sapien
agaaggatgaatactgcatgatcctatttatat

SEQ ID NO: 204260 - DNA, 33 bp, Homo sapien
agaaggatgaatactggatgatcctatttatat

SEQ ID NO: 204261 - DNA, 33 bp, Homo sapien
tatgccgttccctgtacctgggatgcctttcac

SEQ ID NO: 204262 - DNA, 33 bp, Homo sapien
tatgccgttccctgtatctgggatgcctttcac

SEQ ID NO: 204263 - DNA, 33 bp, Homo sapien
ttttcacacatgcggaggttactggggaaaatg

SEQ ID NO: 204264 - DNA, 33 bp, Homo sapien
ttttcacacatgcggatgttactggggaaaatg

SEQ ID NO: 204265 - DNA, 33 bp, Homo sapien
tggctgcaaaagcaaacgttcctaaaagcttcc

SEQ ID NO: 204266 - DNA, 33 bp, Homo sapien
tggctgcaaaagcaaatgttcctaaaagcttcc

SEQ ID NO: 204267 - DNA, 33 bp, Homo sapien
ctagaaaacaaacacactgagagacgcagatga

SEQ ID NO: 204268 - DNA, 33 bp, Homo sapien
ctagaaaacaaacacagtgagagacgcagatga

SEQ ID NO: 204269 - DNA, 33 bp, Homo sapien
gctgggaggctgggtacgtctcagagaataagc

SEQ ID NO: 204270 - DNA, 33 bp, Homo sapien
gctgggaggctgggtatgtctcagagaataagc

SEQ ID NO: 204271 - DNA, 33 bp, Homo sapien
accctgcatcctcagacggctcgtaactttggc

SEQ ID NO: 204272 - DNA, 33 bp, Homo sapien
accctgcatcctcagatggctcgtaactttggc

SEQ ID NO: 204273 - DNA, 33 bp, Homo sapien
tacctaaggagtgtcaacaatgaggaacaatgg

SEQ ID NO: 204274 - DNA, 33 bp, Homo sapien
tacctaaggagtgtcagcaatgaggaacaatgg

SEQ ID NO: 204275 - DNA, 33 bp, Homo sapien
ttccagcatttacaacccctgatgggcactcag

SEQ ID NO: 204276 - DNA, 33 bp, Homo sapien
ttccagcatttacaactcctgatgggcactcag

SEQ ID NO: 204277 - DNA, 33 bp, Homo sapien
gctttcaagaaactagaataacaggtggagagg

SEQ ID NO: 204278 - DNA, 33 bp, Homo sapien
gctttcaagaaactaggataacaggtggagagg

SEQ ID NO: 204279 - DNA, 33 bp, Homo sapien
agatgaggcacaaataagggaatgaagctaatt

SEQ ID NO: 204280 - DNA, 33 bp, Homo sapien
agatgaggcacaaatacgggaatgaagctaatt

SEQ ID NO: 204281 - DNA, 33 bp, Homo sapien
ctgtgaacttgtgtggaaagtattaaaactcgc

SEQ ID NO: 204282 - DNA, 33 bp, Homo sapien
ctgtgaacttgtgtgggaagtattaaaactcgc

SEQ ID NO: 204283 - DNA, 33 bp, Homo sapien
ataacagtaaaacgcaagagatccttaacatca

SEQ ID NO: 204284 - DNA, 33 bp, Homo sapien
ataacagtaaaacgcaggagatccttaacatca

SEQ ID NO: 204285 - DNA, 33 bp, Homo sapien
gggatacacgaggacaatgctatcacttgaccc

SEQ ID NO: 204286 - DNA, 33 bp, Homo sapien
gggatacacgaggacagtgctatcacttgaccc

SEQ ID NO: 204287 - DNA, 33 bp, Homo sapien
acggtccaaaagactcaccaccaaccatgaaag

SEQ ID NO: 204288 - DNA, 33 bp, Homo sapien
acggtccaaaagactcgccaccaaccatgaaag

SEQ ID NO: 204289 - DNA, 33 bp, Homo sapien
catgtttggggatagcagaagtgggatatataa

SEQ ID NO: 204290 - DNA, 33 bp, Homo sapien
catgtttggggatagcggaagtgggatatataa

SEQ ID NO: 204291 - DNA, 33 bp, Homo sapien
gggacatttgaactcccgctgcttggccacagc

SEQ ID NO: 204292 - DNA, 33 bp, Homo sapien
gggacatttgaactcctgctgcttggccacagc

SEQ ID NO: 204293 - DNA, 33 bp, Homo sapien
agtgacaaaagccaggaaaataggaacccgaga

SEQ ID NO: 204294 - DNA, 33 bp, Homo sapien
agtgacaaaagccagggaaataggaacccgaga

SEQ ID NO: 204295 - DNA, 33 bp, Homo sapien
gtacagtctgaatgtacgctgcctggcattaaa

SEQ ID NO: 204296 - DNA, 33 bp, Homo sapien
gtacagtctgaatgtatgctgcctggcattaaa

SEQ ID NO: 204297 - DNA, 33 bp, Homo sapien
atgccaacagcaccacaactgagggggactgta

SEQ ID NO: 204298 - DNA, 33 bp, Homo sapien
atgccaacagcaccacgactgagggggactgta

SEQ ID NO: 204299 - DNA, 33 bp, Homo sapien
gcaatacctgggtggggaattgaatgcaggtaa

SEQ ID NO: 204300 - DNA, 33 bp, Homo sapien
gcaatacctgggtgggtaattgaatgcaggtaa

SEQ ID NO: 204301 - DNA, 33 bp, Homo sapien
ctctctggtgtgaaaacatatcccaaatgcatg

SEQ ID NO: 204302 - DNA, 33 bp, Homo sapien
ctctctggtgtgaaaatatatcccaaatgcatg

SEQ ID NO: 204303 - DNA, 33 bp, Homo sapien
gcttccttctagaaaggctggcaaccaggaaag

SEQ ID NO: 204304 - DNA, 33 bp, Homo sapien
gcttccttctagaaagtctggcaaccaggaaag

SEQ ID NO: 204305 - DNA, 33 bp, Homo sapien
acacattcatgtgggaaatggtctgcaggataa

SEQ ID NO: 204306 - DNA, 33 bp, Homo sapien
acacattcatgtgggagatggtctgcaggataa

SEQ ID NO: 204307 - DNA, 33 bp, Homo sapien
aatgtgttcctgggagaatacattttggatttt

SEQ ID NO: 204308 - DNA, 33 bp, Homo sapien
aatgtgttcctgggaggatacattttggatttt

SEQ ID NO: 204309 - DNA, 33 bp, Homo sapien
atttacagcctccaaacgcaatataacatttta

SEQ ID NO: 204310 - DNA, 33 bp, Homo sapien
atttacagcctccaaatgcaatataacatttta

SEQ ID NO: 204311 - DNA, 33 bp, Homo sapien
atagaatgtgggaatcacttgtgggtgttgtgt

SEQ ID NO: 204312 - DNA, 33 bp, Homo sapien
atagaatgtgggaatctcttgtgggtgttgtgt

SEQ ID NO: 204313 - DNA, 33 bp, Homo sapien
ctctccgcttaatgtgaagaagcccgtcagctg

SEQ ID NO: 204314 - DNA, 33 bp, Homo sapien
ctctccgcttaatgtgcagaagcccgtcagctg

SEQ ID NO: 204315 - DNA, 33 bp, Homo sapien
ttcctaaaatgtaaccaaaacacttcatcatgt

SEQ ID NO: 204316 - DNA, 33 bp, Homo sapien
ttcctaaaatgtaaccgaaacacttcatcatgt

SEQ ID NO: 204317 - DNA, 33 bp, Homo sapien
ttttacaaatggtccccatcttcaaggcgtgga

SEQ ID NO: 204318 - DNA, 33 bp, Homo sapien
ttttacaaatggtccctatcttcaaggcgtgga

SEQ ID NO: 204319 - DNA, 33 bp, Homo sapien
cggcggcatccactctaacgggcactgcagtgc

SEQ ID NO: 204320 - DNA, 33 bp, Homo sapien
cggcggcatccactctgacgggcactgcagtgc

SEQ ID NO: 204321 - DNA, 33 bp, Homo sapien
ctgcaactgatctgagaacctccctgttttgta

SEQ ID NO: 204322 - DNA, 33 bp, Homo sapien
ctgcaactgatctgaggacctccctgttttgta

SEQ ID NO: 204323 - DNA, 33 bp, Homo sapien
gaaacacttgctttcacgaacactgagtgcacc

SEQ ID NO: 204324 - DNA, 33 bp, Homo sapien
gaaacacttgctttcatgaacactgagtgcacc

SEQ ID NO: 204325 - DNA, 33 bp, Homo sapien
atcatcagtgcctgtcaaagtgcctcgcatata

SEQ ID NO: 204326 - DNA, 33 bp, Homo sapien
atcatcagtgcctgtcgaagtgcctcgcatata

SEQ ID NO: 204327 - DNA, 33 bp, Homo sapien
tctccctccagttctcaagctctctgcctgttg

SEQ ID NO: 204328 - DNA, 33 bp, Homo sapien
tctccctccagttctcgagctctctgcctgttg

SEQ ID NO: 204329 - DNA, 33 bp, Homo sapien
atggcatcagcagtaaaggcagcaatatctgca

SEQ ID NO: 204330 - DNA, 33 bp, Homo sapien
atggcatcagcagtaacggcagcaatatctgca

SEQ ID NO: 204331 - DNA, 33 bp, Homo sapien
acctgggaagagactgcatcaagaatcaccagg

SEQ ID NO: 204332 - DNA, 33 bp, Homo sapien
acctgggaagagactgtatcaagaatcaccagg

SEQ ID NO: 204333 - DNA, 33 bp, Homo sapien
tccatctcagcccgaaatgttttcagagccgga

SEQ ID NO: 204334 - DNA, 33 bp, Homo sapien
tccatctcagcccgaagtgttttcagagccgga

SEQ ID NO: 204335 - DNA, 33 bp, Homo sapien
acatcacagaccccaacagaagattgctaaaat

SEQ ID NO: 204336 - DNA, 33 bp, Homo sapien
acatcacagaccccaagagaagattgctaaaat

SEQ ID NO: 204337 - DNA, 33 bp, Homo sapien
gacatcatctatgtgacaatacacagccaggcc

SEQ ID NO: 204338 - DNA, 33 bp, Homo sapien
gacatcatctatgtgagaatacacagccaggcc

SEQ ID NO: 204339 - DNA, 33 bp, Homo sapien
aaaaatggggacaatacgatttgcctcagagaa

SEQ ID NO: 204340 - DNA, 33 bp, Homo sapien
aaaaatggggacaatatgatttgcctcagagaa

SEQ ID NO: 204341 - DNA, 33 bp, Homo sapien
aaggcagctcagacaacgggaaggacagaaggg

SEQ ID NO: 204342 - DNA, 33 bp, Homo sapien
aaggcagctcagacaatgggaaggacagaaggg

SEQ ID NO: 204343 - DNA, 33 bp, Homo sapien
aaactgcctccagtctcactcatcgtgctgaga

SEQ ID NO: 204344 - DNA, 33 bp, Homo sapien
aaactgcctccagtcttactcatcgtgctgaga

SEQ ID NO: 204345 - DNA, 33 bp, Homo sapien
cacacagacggagaccaccctgccccacctact

SEQ ID NO: 204346 - DNA, 33 bp, Homo sapien
cacacagacggagaccgccctgccccacctact

SEQ ID NO: 204347 - DNA, 33 bp, Homo sapien
agcacagggggacaaacgtgtcaggatggaggt

SEQ ID NO: 204348 - DNA, 33 bp, Homo sapien
agcacagggggacaaatgtgtcaggatggaggt

SEQ ID NO: 204349 - DNA, 33 bp, Homo sapien
gtcatttgctcaaagaaccagagtttgctattt

SEQ ID NO: 204350 - DNA, 33 bp, Homo sapien
gtcatttgctcaaagagccagagtttgctattt

SEQ ID NO: 204351 - DNA, 33 bp, Homo sapien
ggaattaattaaagcaaccctgtattctctaag

SEQ ID NO: 204352 - DNA, 33 bp, Homo sapien
ggaattaattaaagcagccctgtattctctaag

SEQ ID NO: 204353 - DNA, 33 bp, Homo sapien
aacatgaacaatggaacactatacaccgatgaa

SEQ ID NO: 204354 - DNA, 33 bp, Homo sapien
aacatgaacaatggaatactatacaccgatgaa

SEQ ID NO: 204355 - DNA, 33 bp, Homo sapien
gaatgggtagaaacaccgtggcacacttgtaca

SEQ ID NO: 204356 - DNA, 33 bp, Homo sapien
gaatgggtagaaacactgtggcacacttgtaca

SEQ ID NO: 204357 - DNA, 33 bp, Homo sapien
taacaacccaataagggaggtatgattctcccc

SEQ ID NO: 204358 - DNA, 33 bp, Homo sapien
taacaacccaataaggtaggtatgattctcccc

SEQ ID NO: 204359 - DNA, 33 bp, Homo sapien
tgaaactcagtgaccacatacatgctattccac

SEQ ID NO: 204360 - DNA, 33 bp, Homo sapien
tgaaactcagtgaccatatacatgctattccac

SEQ ID NO: 204361 - DNA, 33 bp, Homo sapien
cagctgtgtaaggcaacggatggctgaggctgc

SEQ ID NO: 204362 - DNA, 33 bp, Homo sapien
cagctgtgtaaggcaatggatggctgaggctgc

SEQ ID NO: 204363 - DNA, 33 bp, Homo sapien
ctttaattttccataacgcagcaactgtaaata

SEQ ID NO: 204364 - DNA, 33 bp, Homo sapien
ctttaattttccataatgcagcaactgtaaata

SEQ ID NO: 204365 - DNA, 33 bp, Homo sapien
ccttgttttcacagagacaacgtgttttaacag

SEQ ID NO: 204366 - DNA, 33 bp, Homo sapien
ccttgttttcacagaggcaacgtgttttaacag

SEQ ID NO: 204367 - DNA, 33 bp, Homo sapien
cacaagcagttgttgacgcctaccctggttaag

SEQ ID NO: 204368 - DNA, 33 bp, Homo sapien
cacaagcagttgttgatgcctaccctggttaag

SEQ ID NO: 204369 - DNA, 33 bp, Homo sapien
gccaggcatctacagtcaaacaacaaacactta

SEQ ID NO: 204370 - DNA, 33 bp, Homo sapien
gccaggcatctacagttaaacaacaaacactta

SEQ ID NO: 204371 - DNA, 33 bp, Homo sapien
ctactgcctaaatcccagataattagagcatca

SEQ ID NO: 204372 - DNA, 33 bp, Homo sapien
ctactgcctaaatcccggataattagagcatca

SEQ ID NO: 204373 - DNA, 33 bp, Homo sapien
aattagagcatcaaaacagaggagacattaaca

SEQ ID NO: 204374 - DNA, 33 bp, Homo sapien
aattagagcatcaaaagagaggagacattaaca

SEQ ID NO: 204375 - DNA, 33 bp, Homo sapien
agtctcagatgattccaaaaaaatatatgtgtg

SEQ ID NO: 204376 - DNA, 33 bp, Homo sapien
agtctcagatgattccgaaaaaatatatgtgtg

SEQ ID NO: 204377 - DNA, 33 bp, Homo sapien
ttttggatgtaattgagattctactgcatgtac

SEQ ID NO: 204378 - DNA, 33 bp, Homo sapien
ttttggatgtaattgatattctactgcatgtac

SEQ ID NO: 204379 - DNA, 33 bp, Homo sapien
gtcactgccggagggagaactgttcagacactg

SEQ ID NO: 204380 - DNA, 33 bp, Homo sapien
gtcactgccggagggataactgttcagacactg

SEQ ID NO: 204381 - DNA, 33 bp, Homo sapien
tctcagccctttaataataatagctaacatttg

SEQ ID NO: 204382 - DNA, 33 bp, Homo sapien
tctcagccctttaatagtaatagctaacatttg

SEQ ID NO: 204383 - DNA, 33 bp, Homo sapien
ttactgattcagaagacgtttgctgctaattag

SEQ ID NO: 204384 - DNA, 33 bp, Homo sapien
ttactgattcagaagaggtttgctgctaattag

SEQ ID NO: 204385 - DNA, 33 bp, Homo sapien
accaagtgccaagctcgcaccatgtgctctaat

SEQ ID NO: 204386 - DNA, 33 bp, Homo sapien
accaagtgccaagctctcaccatgtgctctaat

SEQ ID NO: 204387 - DNA, 33 bp, Homo sapien
attccaaggcagcccaagtgaggccctgctctt

SEQ ID NO: 204388 - DNA, 33 bp, Homo sapien
attccaaggcagcccaggtgaggccctgctctt

SEQ ID NO: 204389 - DNA, 33 bp, Homo sapien
ttactttttgactgcaacaatgtttcatctcct

SEQ ID NO: 204390 - DNA, 33 bp, Homo sapien
ttactttttgactgcagcaatgtttcatctcct

SEQ ID NO: 204391 - DNA, 33 bp, Homo sapien
aaaaatgcagaggtgaaatggttcaaatcatgg

SEQ ID NO: 204392 - DNA, 33 bp, Homo sapien
aaaaatgcagaggtgagatggttcaaatcatgg

SEQ ID NO: 204393 - DNA, 33 bp, Homo sapien
agtggaaagggttataaaaaggactagcattct

SEQ ID NO: 204394 - DNA, 33 bp, Homo sapien
agtggaaagggttatacaaaggactagcattct

SEQ ID NO: 204395 - DNA, 33 bp, Homo sapien
aagaactttctatcaactagatggacatccaag

SEQ ID NO: 204396 - DNA, 33 bp, Homo sapien
aagaactttctatcaattagatggacatccaag

SEQ ID NO: 204397 - DNA, 33 bp, Homo sapien
tttcacccaaaatgcaacacaatcaccctgtcc

SEQ ID NO: 204398 - DNA, 33 bp, Homo sapien
tttcacccaaaatgcagcacaatcaccctgtcc

SEQ ID NO: 204399 - DNA, 33 bp, Homo sapien
catgccaataatggagaaaaaaaagagaactaa

SEQ ID NO: 204400 - DNA, 33 bp, Homo sapien
catgccaataatggaggaaaaaaagagaactaa

SEQ ID NO: 204401 - DNA, 33 bp, Homo sapien
cctttctgaacttcaccgaacaggtgtgatttc

SEQ ID NO: 204402 - DNA, 33 bp, Homo sapien
cctttctgaacttcactgaacaggtgtgatttc

SEQ ID NO: 204403 - DNA, 33 bp, Homo sapien
tgaaaggcactcaaatgaagggttggggaaaat

SEQ ID NO: 204404 - DNA, 33 bp, Homo sapien
tgaaaggcactcaaattaagggttggggaaaat

SEQ ID NO: 204405 - DNA, 33 bp, Homo sapien
ccagcacagccgggaaagcaaacaatgaggcag

SEQ ID NO: 204406 - DNA, 33 bp, Homo sapien
ccagcacagccgggaaggcaaacaatgaggcag

SEQ ID NO: 204407 - DNA, 33 bp, Homo sapien
gtgctcacaaacagaacgggggccgggagagga

SEQ ID NO: 204408 - DNA, 33 bp, Homo sapien
gtgctcacaaacagaatgggggccgggagagga

SEQ ID NO: 204409 - DNA, 33 bp, Homo sapien
acaatcgaaattgcaacgcgaaccatgctgaca

SEQ ID NO: 204410 - DNA, 33 bp, Homo sapien
acaatcgaaattgcaatgcgaaccatgctgaca

SEQ ID NO: 204411 - DNA, 33 bp, Homo sapien
cgtgtgttcttcagaaatcatggagaagcagaa

SEQ ID NO: 204412 - DNA, 33 bp, Homo sapien
cgtgtgttcttcagaagtcatggagaagcagaa

SEQ ID NO: 204413 - DNA, 33 bp, Homo sapien
attttgccctgggcaccctttacctcctcatta

SEQ ID NO: 204414 - DNA, 33 bp, Homo sapien
attttgccctgggcactctttacctcctcatta

SEQ ID NO: 204415 - DNA, 33 bp, Homo sapien
cttaacatgggctacaaataggtggttttcacc

SEQ ID NO: 204416 - DNA, 33 bp, Homo sapien
cttaacatgggctacagataggtggttttcacc

SEQ ID NO: 204417 - DNA, 33 bp, Homo sapien
ctagtgcttaacattacgggacagtcactgagc

SEQ ID NO: 204418 - DNA, 33 bp, Homo sapien
ctagtgcttaacattaggggacagtcactgagc

SEQ ID NO: 204419 - DNA, 33 bp, Homo sapien
acactagaaccgacaacaagatataatccttgc

SEQ ID NO: 204420 - DNA, 33 bp, Homo sapien
acactagaaccgacaataagatataatccttgc

SEQ ID NO: 204421 - DNA, 33 bp, Homo sapien
gccaagagtgtggaacaaaggcacggtgggtaa

SEQ ID NO: 204422 - DNA, 33 bp, Homo sapien
gccaagagtgtggaacgaaggcacggtgggtaa

SEQ ID NO: 204423 - DNA, 33 bp, Homo sapien
agcttttctttatgtccatctgggctttgctat

SEQ ID NO: 204424 - DNA, 33 bp, Homo sapien
agcttttctttatgtctatctgggctttgctat

SEQ ID NO: 204425 - DNA, 33 bp, Homo sapien
aggcctggaccatggactcaaaccctgctggct

SEQ ID NO: 204426 - DNA, 33 bp, Homo sapien
aggcctggaccatggattcaaaccctgctggct

SEQ ID NO: 204427 - DNA, 33 bp, Homo sapien
aagactgtggcatccagtagtgaggctagagta

SEQ ID NO: 204428 - DNA, 33 bp, Homo sapien
aagactgtggcatccattagtgaggctagagta

SEQ ID NO: 204429 - DNA, 33 bp, Homo sapien
tgcctttggttgagaaattagaaggtgctaggc

SEQ ID NO: 204430 - DNA, 33 bp, Homo sapien
tgcctttggttgagaatttagaaggtgctaggc

SEQ ID NO: 204431 - DNA, 33 bp, Homo sapien
attctttaaaactttcattaaacatggtgaatt

SEQ ID NO: 204432 - DNA, 33 bp, Homo sapien
attctttaaaactttcgttaaacatggtgaatt

SEQ ID NO: 204433 - DNA, 33 bp, Homo sapien
actccttcgaggataactcggctactccctgtg

SEQ ID NO: 204434 - DNA, 33 bp, Homo sapien
actccttcgaggataattcggctactccctgtg

SEQ ID NO: 204435 - DNA, 33 bp, Homo sapien
gaagtgtgtctgtctcacttttatcctcaccca

SEQ ID NO: 204436 - DNA, 33 bp, Homo sapien
gaagtgtgtctgtctcgcttttatcctcaccca

SEQ ID NO: 204437 - DNA, 33 bp, Homo sapien
cacggccagcaaataacggagacgggataggac

SEQ ID NO: 204438 - DNA, 33 bp, Homo sapien
cacggccagcaaataatggagacgggataggac

SEQ ID NO: 204439 - DNA, 33 bp, Homo sapien
catgcctttgccgtgaaggactggcaatctaat

SEQ ID NO: 204440 - DNA, 33 bp, Homo sapien
catgcctttgccgtgagggactggcaatctaat

SEQ ID NO: 204441 - DNA, 33 bp, Homo sapien
ctttccacatggcctcccattctttagcaggct

SEQ ID NO: 204442 - DNA, 33 bp, Homo sapien
ctttccacatggcctctcattctttagcaggct

SEQ ID NO: 204443 - DNA, 33 bp, Homo sapien
catagaaaggatgtaacgagctagagagtggga

SEQ ID NO: 204444 - DNA, 33 bp, Homo sapien
catagaaaggatgtaatgagctagagagtggga

SEQ ID NO: 204445 - DNA, 33 bp, Homo sapien
gtactttgtgacagcaaccttaagtaactaaca

SEQ ID NO: 204446 - DNA, 33 bp, Homo sapien
gtactttgtgacagcatccttaagtaactaaca

SEQ ID NO: 204447 - DNA, 33 bp, Homo sapien
ctctctgttagccgagaagagcgcagactcctt

SEQ ID NO: 204448 - DNA, 33 bp, Homo sapien
ctctctgttagccgaggagagcgcagactcctt

SEQ ID NO: 204449 - DNA, 33 bp, Homo sapien
ctggtgttttggcccacagaatatcacgaagta

SEQ ID NO: 204450 - DNA, 33 bp, Homo sapien
ctggtgttttggcccatagaatatcacgaagta

SEQ ID NO: 204451 - DNA, 33 bp, Homo sapien
attaggactgttatacaagagacccaggagagc

SEQ ID NO: 204452 - DNA, 33 bp, Homo sapien
attaggactgttataccagagacccaggagagc

SEQ ID NO: 204453 - DNA, 33 bp, Homo sapien
caaacgctggacaccaagcaaatcaaatgcccc

SEQ ID NO: 204454 - DNA, 33 bp, Homo sapien
caaacgctggacaccaggcaaatcaaatgcccc

SEQ ID NO: 204455 - DNA, 33 bp, Homo sapien
aggacagggaaaaccactaatagcctaacagca

SEQ ID NO: 204456 - DNA, 33 bp, Homo sapien
aggacagggaaaaccagtaatagcctaacagca

SEQ ID NO: 204457 - DNA, 33 bp, Homo sapien
tactgtgcacatgggaatagacacttcagtcag

SEQ ID NO: 204458 - DNA, 33 bp, Homo sapien
tactgtgcacatgggagtagacacttcagtcag

SEQ ID NO: 204459 - DNA, 33 bp, Homo sapien
agctaccgctttggaaatggtattcaaagttcc

SEQ ID NO: 204460 - DNA, 33 bp, Homo sapien
agctaccgctttggaagtggtattcaaagttcc

SEQ ID NO: 204461 - DNA, 33 bp, Homo sapien
agagtggtaatatatacgtgagaagataaattg

SEQ ID NO: 204462 - DNA, 33 bp, Homo sapien
agagtggtaatatatatgtgagaagataaattg

SEQ ID NO: 204463 - DNA, 33 bp, Homo sapien
tctcatagatgccccaagtgcctctggttcctt

SEQ ID NO: 204464 - DNA, 33 bp, Homo sapien
tctcatagatgccccacgtgcctctggttcctt

SEQ ID NO: 204465 - DNA, 33 bp, Homo sapien
agtgggattggtgagacgtaggtggatttgaga

SEQ ID NO: 204466 - DNA, 33 bp, Homo sapien
agtgggattggtgagatgtaggtggatttgaga

SEQ ID NO: 204467 - DNA, 33 bp, Homo sapien
tccagccctgctacttcaacaccctcactccag

SEQ ID NO: 204468 - DNA, 33 bp, Homo sapien
tccagccctgctactttaacaccctcactccag

SEQ ID NO: 204469 - DNA, 33 bp, Homo sapien
ggtggagagtgaactaagaagatgggaagtatg

SEQ ID NO: 204470 - DNA, 33 bp, Homo sapien
ggtggagagtgaactaggaagatgggaagtatg

SEQ ID NO: 204471 - DNA, 33 bp, Homo sapien
tggagggcctatgcccaaatgcaatgtggatgg

SEQ ID NO: 204472 - DNA, 33 bp, Homo sapien
tggagggcctatgcccgaatgcaatgtggatgg

SEQ ID NO: 204473 - DNA, 33 bp, Homo sapien
atgggcaggaagcgcactctctcactttgctga

SEQ ID NO: 204474 - DNA, 33 bp, Homo sapien
atgggcaggaagcgcattctctcactttgctga

SEQ ID NO: 204475 - DNA, 33 bp, Homo sapien
attagcccaaaggaaccggcttcttctcaaggt

SEQ ID NO: 204476 - DNA, 33 bp, Homo sapien
attagcccaaaggaactggcttcttctcaaggt

SEQ ID NO: 204477 - DNA, 33 bp, Homo sapien
ctttactgcaggaaataacgcaggaggacgtcg

SEQ ID NO: 204478 - DNA, 33 bp, Homo sapien
ctttactgcaggaaatgacgcaggaggacgtcg

SEQ ID NO: 204479 - DNA, 33 bp, Homo sapien
taaactatgaaccaggacagctttcattcagga

SEQ ID NO: 204480 - DNA, 33 bp, Homo sapien
taaactatgaaccagggcagctttcattcagga

SEQ ID NO: 204481 - DNA, 33 bp, Homo sapien
tgaggcttaggtaagacagataaattgtcccag

SEQ ID NO: 204482 - DNA, 33 bp, Homo sapien
tgaggcttaggtaagatagataaattgtcccag

SEQ ID NO: 204483 - DNA, 33 bp, Homo sapien
ctgtcttatctgcgagccatcctacagttgcgc

SEQ ID NO: 204484 - DNA, 33 bp, Homo sapien
ctgtcttatctgcgagtcatcctacagttgcgc

SEQ ID NO: 204485 - DNA, 33 bp, Homo sapien
agacaagcctggtgaaacaactgctgacaaacg

SEQ ID NO: 204486 - DNA, 33 bp, Homo sapien
agacaagcctggtgaagcaactgctgacaaacg

SEQ ID NO: 204487 - DNA, 33 bp, Homo sapien
accaagagactcatcaaattgtttatgtgatgg

SEQ ID NO: 204488 - DNA, 33 bp, Homo sapien
accaagagactcatcagattgtttatgtgatgg

SEQ ID NO: 204489 - DNA, 33 bp, Homo sapien
ttccctaatcccggagacatctgcaaggcgcct

SEQ ID NO: 204490 - DNA, 33 bp, Homo sapien
ttccctaatcccggaggcatctgcaaggcgcct

SEQ ID NO: 204491 - DNA, 33 bp, Homo sapien
atggaaattcttagatcagtcaggtcttgttta

SEQ ID NO: 204492 - DNA, 33 bp, Homo sapien
atggaaattcttagatgagtcaggtcttgttta

SEQ ID NO: 204493 - DNA, 33 bp, Homo sapien
gggggaaagtggagagcaatctttgtctttatg

SEQ ID NO: 204494 - DNA, 33 bp, Homo sapien
gggggaaagtggagagtaatctttgtctttatg

SEQ ID NO: 204495 - DNA, 33 bp, Homo sapien
gaggctggcaggagaaagcaatcatcaacaaag

SEQ ID NO: 204496 - DNA, 33 bp, Homo sapien
gaggctggcaggagaaggcaatcatcaacaaag

SEQ ID NO: 204497 - DNA, 33 bp, Homo sapien
ttggtttaaagaaatcaaatcagaatagaaaaa

SEQ ID NO: 204498 - DNA, 33 bp, Homo sapien
ttggtttaaagaaatccaatcagaatagaaaaa

SEQ ID NO: 204499 - DNA, 33 bp, Homo sapien
aataaccctgcactaaagacagttctgcaatgg

SEQ ID NO: 204500 - DNA, 33 bp, Homo sapien
aataaccctgcactaatgacagttctgcaatgg

SEQ ID NO: 204501 - DNA, 33 bp, Homo sapien
tcttcagggaacagcaaaatctcgttgcttaag

SEQ ID NO: 204502 - DNA, 33 bp, Homo sapien
tcttcagggaacagcacaatctcgttgcttaag

SEQ ID NO: 204503 - DNA, 33 bp, Homo sapien
gccagatggtcacccacgtggtatgattggaaa

SEQ ID NO: 204504 - DNA, 33 bp, Homo sapien
gccagatggtcacccatgtggtatgattggaaa

SEQ ID NO: 204505 - DNA, 33 bp, Homo sapien
tccacttgacaatacacatggccacgtgcttga

SEQ ID NO: 204506 - DNA, 33 bp, Homo sapien
tccacttgacaatacatatggccacgtgcttga

SEQ ID NO: 204507 - DNA, 33 bp, Homo sapien
tgcttgatctatccaaaggtagaaaagtcataa

SEQ ID NO: 204508 - DNA, 33 bp, Homo sapien
tgcttgatctatccaacggtagaaaagtcataa

SEQ ID NO: 204509 - DNA, 33 bp, Homo sapien
aagggactggatagcccagagaaacacatttgg

SEQ ID NO: 204510 - DNA, 33 bp, Homo sapien
aagggactggatagcctagagaaacacatttgg

SEQ ID NO: 204511 - DNA, 33 bp, Homo sapien
tttacacatatgaagcaatgataaggcagtggc

SEQ ID NO: 204512 - DNA, 33 bp, Homo sapien
tttacacatatgaagccatgataaggcagtggc

SEQ ID NO: 204513 - DNA, 33 bp, Homo sapien
ttgggatgaaaactaccaatgaggtgataggac

SEQ ID NO: 204514 - DNA, 33 bp, Homo sapien
ttgggatgaaaactactaatgaggtgataggac

SEQ ID NO: 204515 - DNA, 33 bp, Homo sapien
taattatctcatgcacaatggctttgccacctg

SEQ ID NO: 204516 - DNA, 33 bp, Homo sapien
taattatctcatgcacgatggctttgccacctg

SEQ ID NO: 204517 - DNA, 33 bp, Homo sapien
ggacagtccaagatcactcaacaaatatcaacc

SEQ ID NO: 204518 - DNA, 33 bp, Homo sapien
ggacagtccaagatcattcaacaaatatcaacc

SEQ ID NO: 204519 - DNA, 33 bp, Homo sapien
ttcccttggtaatccacgttttcacttagagga

SEQ ID NO: 204520 - DNA, 33 bp, Homo sapien
ttcccttggtaatccaggttttcacttagagga

SEQ ID NO: 204521 - DNA, 33 bp, Homo sapien
ctcagtagctagcacaacgctcacaggcctcct

SEQ ID NO: 204522 - DNA, 33 bp, Homo sapien
ctcagtagctagcacagcgctcacaggcctcct

SEQ ID NO: 204523 - DNA, 33 bp, Homo sapien
gttagtgtgaagggaacatgaatagcaggcaaa

SEQ ID NO: 204524 - DNA, 33 bp, Homo sapien
gttagtgtgaagggaatatgaatagcaggcaaa

SEQ ID NO: 204525 - DNA, 33 bp, Homo sapien
gccccactgttttcaacgagcaggaatcttgtc

SEQ ID NO: 204526 - DNA, 33 bp, Homo sapien
gccccactgttttcaatgagcaggaatcttgtc

SEQ ID NO: 204527 - DNA, 33 bp, Homo sapien
tgtagatgttgtcaaaatcttgaagatgatgcc

SEQ ID NO: 204528 - DNA, 33 bp, Homo sapien
tgtagatgttgtcaaagtcttgaagatgatgcc

SEQ ID NO: 204529 - DNA, 33 bp, Homo sapien
atgtacactgaatccaacttggaaaggacacaa

SEQ ID NO: 204530 - DNA, 33 bp, Homo sapien
atgtacactgaatccagcttggaaaggacacaa

SEQ ID NO: 204531 - DNA, 33 bp, Homo sapien
gaccacaagcaaataaaagagcatgtacccaaa

SEQ ID NO: 204532 - DNA, 33 bp, Homo sapien
gaccacaagcaaataagagagcatgtacccaaa

SEQ ID NO: 204533 - DNA, 33 bp, Homo sapien
cccaaatcagaccactaagatacttgtcaaaag

SEQ ID NO: 204534 - DNA, 33 bp, Homo sapien
cccaaatcagaccactgagatacttgtcaaaag

SEQ ID NO: 204535 - DNA, 33 bp, Homo sapien
actggaatccggcacccctgacttcactgtatt

SEQ ID NO: 204536 - DNA, 33 bp, Homo sapien
actggaatccggcacctctgacttcactgtatt

SEQ ID NO: 204537 - DNA, 33 bp, Homo sapien
tggagtgtcttttagacggaggacggaggctcc

SEQ ID NO: 204538 - DNA, 33 bp, Homo sapien
tggagtgtcttttagatggaggacggaggctcc

SEQ ID NO: 204539 - DNA, 33 bp, Homo sapien
aatgaagaaattgggaacatccatgaccatgaa

SEQ ID NO: 204540 - DNA, 33 bp, Homo sapien
aatgaagaaattgggaccatccatgaccatgaa

SEQ ID NO: 204541 - DNA, 33 bp, Homo sapien
gtgccaaaaccagcccactctgcatcgtgaagg

SEQ ID NO: 204542 - DNA, 33 bp, Homo sapien
gtgccaaaaccagcccgctctgcatcgtgaagg

SEQ ID NO: 204543 - DNA, 33 bp, Homo sapien
ccactagaaatatgaccgtatcttggattgtat

SEQ ID NO: 204544 - DNA, 33 bp, Homo sapien
ccactagaaatatgactgtatcttggattgtat

SEQ ID NO: 204545 - DNA, 33 bp, Homo sapien
taattatttaatgtagaaaattattcacacggt

SEQ ID NO: 204546 - DNA, 33 bp, Homo sapien
taattatttaatgtaggaaattattcacacggt

SEQ ID NO: 204547 - DNA, 33 bp, Homo sapien
ctaggaggggaaaccacgtgttcagagtcagct

SEQ ID NO: 204548 - DNA, 33 bp, Homo sapien
ctaggaggggaaaccaggtgttcagagtcagct

SEQ ID NO: 204549 - DNA, 33 bp, Homo sapien
aggacccgggaggtagacattttacagccagga

SEQ ID NO: 204550 - DNA, 33 bp, Homo sapien
aggacccgggaggtaggcattttacagccagga

SEQ ID NO: 204551 - DNA, 33 bp, Homo sapien
gggagaagttaagagaaagtgcacatacacaca

SEQ ID NO: 204552 - DNA, 33 bp, Homo sapien
gggagaagttaagagagagtgcacatacacaca

SEQ ID NO: 204553 - DNA, 33 bp, Homo sapien
ctctggcctttatgtgcatgagtgggaacagca

SEQ ID NO: 204554 - DNA, 33 bp, Homo sapien
ctctggcctttatgtgtatgagtgggaacagca

SEQ ID NO: 204555 - DNA, 33 bp, Homo sapien
agtgcctcctggcaacaggacttggggcggagc

SEQ ID NO: 204556 - DNA, 33 bp, Homo sapien
agtgcctcctggcaacgggacttggggcggagc

SEQ ID NO: 204557 - DNA, 33 bp, Homo sapien
cttgggaccagtatccagacatgctgatccctg

SEQ ID NO: 204558 - DNA, 33 bp, Homo sapien
cttgggaccagtatcccgacatgctgatccctg

SEQ ID NO: 204559 - DNA, 33 bp, Homo sapien
tttccaccataggcccacaggcacaacttccta

SEQ ID NO: 204560 - DNA, 33 bp, Homo sapien
tttccaccataggcccccaggcacaacttccta

SEQ ID NO: 204561 - DNA, 33 bp, Homo sapien
cgtttgtttaaccttcacctctcttagcaagta

SEQ ID NO: 204562 - DNA, 33 bp, Homo sapien
cgtttgtttaaccttcgcctctcttagcaagta

SEQ ID NO: 204563 - DNA, 33 bp, Homo sapien
ataaaatgcaacaagaaaaaagacagttaagac

SEQ ID NO: 204564 - DNA, 33 bp, Homo sapien
ataaaatgcaacaagagaaaagacagttaagac

SEQ ID NO: 204565 - DNA, 33 bp, Homo sapien
ttatcacttcaaccaacgcgaatcagagactcc

SEQ ID NO: 204566 - DNA, 33 bp, Homo sapien
ttatcacttcaaccaatgcgaatcagagactcc

SEQ ID NO: 204567 - DNA, 33 bp, Homo sapien
ttattaccagtacaggaaagcaattatttttct

SEQ ID NO: 204568 - DNA, 33 bp, Homo sapien
ttattaccagtacagggaagcaattatttttct

SEQ ID NO: 204569 - DNA, 33 bp, Homo sapien
cctcaggaagcttccaatcaatcatggtggaag

SEQ ID NO: 204570 - DNA, 33 bp, Homo sapien
cctcaggaagcttccagtcaatcatggtggaag

SEQ ID NO: 204571 - DNA, 33 bp, Homo sapien
tgttttgtgagctataacctctgacttcaagat

SEQ ID NO: 204572 - DNA, 33 bp, Homo sapien
tgttttgtgagctataccctctgacttcaagat

SEQ ID NO: 204573 - DNA, 33 bp, Homo sapien
cctgtgccacctagtcagaccgggctccctcag

SEQ ID NO: 204574 - DNA, 33 bp, Homo sapien
cctgtgccacctagtcggaccgggctccctcag

SEQ ID NO: 204575 - DNA, 33 bp, Homo sapien
tcaggagtaaaatctacgatggtcaggggccca

SEQ ID NO: 204576 - DNA, 33 bp, Homo sapien
tcaggagtaaaatctatgatggtcaggggccca

SEQ ID NO: 204577 - DNA, 33 bp, Homo sapien
tcatcactgctatggacgtggctattttggagg

SEQ ID NO: 204578 - DNA, 33 bp, Homo sapien
tcatcactgctatggatgtggctattttggagg

SEQ ID NO: 204579 - DNA, 33 bp, Homo sapien
aatgtctcccagtgacaagaataaggatgagga

SEQ ID NO: 204580 - DNA, 33 bp, Homo sapien
aatgtctcccagtgacgagaataaggatgagga

SEQ ID NO: 204581 - DNA, 33 bp, Homo sapien
tcataatgccctgccaatctctagctcaggttg

SEQ ID NO: 204582 - DNA, 33 bp, Homo sapien
tcataatgccctgccagtctctagctcaggttg

SEQ ID NO: 204583 - DNA, 33 bp, Homo sapien
ggtgtgaggctcaagcacaatgaggtctgtgaa

SEQ ID NO: 204584 - DNA, 33 bp, Homo sapien
ggtgtgaggctcaagcgcaatgaggtctgtgaa

SEQ ID NO: 204585 - DNA, 33 bp, Homo sapien
tggctccagaaagaaaagtttcattgctttgac

SEQ ID NO: 204586 - DNA, 33 bp, Homo sapien
tggctccagaaagaaacgtttcattgctttgac

SEQ ID NO: 204587 - DNA, 33 bp, Homo sapien
ccttagatcctgagaagtggagtgcatgggatg

SEQ ID NO: 204588 - DNA, 33 bp, Homo sapien
ccttagatcctgagaattggagtgcatgggatg

SEQ ID NO: 204589 - DNA, 33 bp, Homo sapien
ggatttcaggtgtggggatgggctgcagctgga

SEQ ID NO: 204590 - DNA, 33 bp, Homo sapien
ggatttcaggtgtgggtatgggctgcagctgga

SEQ ID NO: 204591 - DNA, 33 bp, Homo sapien
ccagtaatgggatgccagatagaattataattc

SEQ ID NO: 204592 - DNA, 33 bp, Homo sapien
ccagtaatgggatgccggatagaattataattc

SEQ ID NO: 204593 - DNA, 33 bp, Homo sapien
gcccaaacctcaacatcacaatatatactcatg

SEQ ID NO: 204594 - DNA, 33 bp, Homo sapien
gcccaaacctcaacatgacaatatatactcatg

SEQ ID NO: 204595 - DNA, 33 bp, Homo sapien
ggtgtatatgactacactaggggaaaatttctc

SEQ ID NO: 204596 - DNA, 33 bp, Homo sapien
ggtgtatatgactacagtaggggaaaatttctc

SEQ ID NO: 204597 - DNA, 33 bp, Homo sapien
ggaaaatttctcttcactcaggtgatctgtgaa

SEQ ID NO: 204598 - DNA, 33 bp, Homo sapien
ggaaaatttctcttcattcaggtgatctgtgaa

SEQ ID NO: 204599 - DNA, 33 bp, Homo sapien
tgcggtgaaatattgacgctgtcgagtgggatc

SEQ ID NO: 204600 - DNA, 33 bp, Homo sapien
tgcggtgaaatattgatgctgtcgagtgggatc

SEQ ID NO: 204601 - DNA, 33 bp, Homo sapien
actgtgcctttcccaccgtctttgcaacccaca

SEQ ID NO: 204602 - DNA, 33 bp, Homo sapien
actgtgcctttcccactgtctttgcaacccaca

SEQ ID NO: 204603 - DNA, 33 bp, Homo sapien
gatttaaacagtcaggacatccaaataccaact

SEQ ID NO: 204604 - DNA, 33 bp, Homo sapien
gatttaaacagtcaggtcatccaaataccaact

SEQ ID NO: 204605 - DNA, 33 bp, Homo sapien
aaataaaaggaacaaacgagagattcccataac

SEQ ID NO: 204606 - DNA, 33 bp, Homo sapien
aaataaaaggaacaaatgagagattcccataac

SEQ ID NO: 204607 - DNA, 33 bp, Homo sapien
agggtcaggtatttcaaatccttgctaacattt

SEQ ID NO: 204608 - DNA, 33 bp, Homo sapien
agggtcaggtatttcacatccttgctaacattt

SEQ ID NO: 204609 - DNA, 33 bp, Homo sapien
ggctataaccaacagacggtaagtatattttct

SEQ ID NO: 204610 - DNA, 33 bp, Homo sapien
ggctataaccaacagatggtaagtatattttct

SEQ ID NO: 204611 - DNA, 33 bp, Homo sapien
gttgcggttattttcaatcggtctgtagcgtgt

SEQ ID NO: 204612 - DNA, 33 bp, Homo sapien
gttgcggttattttcagtcggtctgtagcgtgt

SEQ ID NO: 204613 - DNA, 33 bp, Homo sapien
tgacaaaggacttgtacctggaatctaggaaga

SEQ ID NO: 204614 - DNA, 33 bp, Homo sapien
tgacaaaggacttgtatctggaatctaggaaga

SEQ ID NO: 204615 - DNA, 33 bp, Homo sapien
aaatactctgtctgtaaccctgagtgatctcaa

SEQ ID NO: 204616 - DNA, 33 bp, Homo sapien
aaatactctgtctgtacccctgagtgatctcaa

SEQ ID NO: 204617 - DNA, 33 bp, Homo sapien
tacttgtgggcccgaaaaatggcaagaagcgtg

SEQ ID NO: 204618 - DNA, 33 bp, Homo sapien
tacttgtgggcccgaataatggcaagaagcgtg

SEQ ID NO: 204619 - DNA, 33 bp, Homo sapien
tacagaggccaaaacacgagacctttccttcac

SEQ ID NO: 204620 - DNA, 33 bp, Homo sapien
tacagaggccaaaacatgagacctttccttcac

SEQ ID NO: 204621 - DNA, 33 bp, Homo sapien
taggaaggcaccctcaccaagccaattcaggct

SEQ ID NO: 204622 - DNA, 33 bp, Homo sapien
taggaaggcaccctcatcaagccaattcaggct

SEQ ID NO: 204623 - DNA, 33 bp, Homo sapien
ctggcctttgacggccaggactgtacctggtgt

SEQ ID NO: 204624 - DNA, 33 bp, Homo sapien
ctggcctttgacggccgggactgtacctggtgt

SEQ ID NO: 204625 - DNA, 33 bp, Homo sapien
ctgaccatgacttggacgaaagaaaaagaaaga

SEQ ID NO: 204626 - DNA, 33 bp, Homo sapien
ctgaccatgacttggatgaaagaaaaagaaaga

SEQ ID NO: 204627 - DNA, 33 bp, Homo sapien
cattgacgtggcccaaatcaacaccctgattcg

SEQ ID NO: 204628 - DNA, 33 bp, Homo sapien
cattgacgtggcccaattcaacaccctgattcg

SEQ ID NO: 204629 - DNA, 33 bp, Homo sapien; identical to SEQ ID NO: 204627

SEQ ID NO: 204630 - DNA, 33 bp, Homo sapien; identical to SEQ ID NO: 204628

SEQ ID NO: 204631 - DNA, 33 bp, Homo sapien
catctccaatagtaaccactcttctgacctttg

SEQ ID NO: 204632 - DNA, 33 bp, Homo sapien
catctccaatagtaacgactcttctgacctttg

SEQ ID NO: 204633 - DNA, 33 bp, Homo sapien
cacagtatagcattaaatatggtcgagtaagag

SEQ ID NO: 204634 - DNA, 33 bp, Homo sapien
cacagtatagcattaattatggtcgagtaagag

SEQ ID NO: 204635 - DNA, 33 bp, Homo sapien
cttacatcaggggatacgtcagaaagggaagtg

SEQ ID NO: 204636 - DNA, 33 bp, Homo sapien
cttacatcaggggatatgtcagaaagggaagtg

SEQ ID NO: 204637 - DNA, 33 bp, Homo sapien
gataaataaatcaaaaaaggaagtggaccaggt

SEQ ID NO: 204638 - DNA, 33 bp, Homo sapien
gataaataaatcaaaagaggaagtggaccaggt

SEQ ID NO: 204639 - DNA, 33 bp, Homo sapien
caggaggcaaaacttacagaatttgggaagtga

SEQ ID NO: 204640 - DNA, 33 bp, Homo sapien
caggaggcaaaacttatagaatttgggaagtga

SEQ ID NO: 204641 - DNA, 33 bp, Homo sapien
cagcttattttttaaactggtgatgagtgaaga

SEQ ID NO: 204642 - DNA, 33 bp, Homo sapien
cagcttattttttaaagtggtgatgagtgaaga

SEQ ID NO: 204643 - DNA, 33 bp, Homo sapien
gcagatgcattatcccaacctcagccttcacgt

SEQ ID NO: 204644 - DNA, 33 bp, Homo sapien
gcagatgcattatcccgacctcagccttcacgt

SEQ ID NO: 204645 - DNA, 33 bp, Homo sapien
atactcaaactttcctaagaaatttcaactgga

SEQ ID NO: 204646 - DNA, 33 bp, Homo sapien
atactcaaactttcctgagaaatttcaactgga

SEQ ID NO: 204647 - DNA, 33 bp, Homo sapien
ccaaaagtctgaaaaacgggcgtggttttagtg

SEQ ID NO: 204648 - DNA, 33 bp, Homo sapien
ccaaaagtctgaaaaatgggcgtggttttagtg

SEQ ID NO: 204649 - DNA, 33 bp, Homo sapien
attatgcatttcaggaaaaatttaggagcatag

SEQ ID NO: 204650 - DNA, 33 bp, Homo sapien
attatgcatttcaggacaaatttaggagcatag

SEQ ID NO: 204651 - DNA, 33 bp, Homo sapien
ctgtgtaccaattatccagctccaataactgtc

SEQ ID NO: 204652 - DNA, 33 bp, Homo sapien
ctgtgtaccaattatctagctccaataactgtc

SEQ ID NO: 204653 - DNA, 33 bp, Homo sapien
ttcattccctggcttcaattaagttagctccag

SEQ ID NO: 204654 - DNA, 33 bp, Homo sapien
ttcattccctggcttcgattaagttagctccag

SEQ ID NO: 204655 - DNA, 33 bp, Homo sapien
ttctggtgttaaataacgtacgagaagctggca

SEQ ID NO: 204656 - DNA, 33 bp, Homo sapien
ttctggtgttaaataatgtacgagaagctggca

SEQ ID NO: 204657 - DNA, 33 bp, Homo sapien
ccatgaaatgccaataagtgcttaagaaggaag

SEQ ID NO: 204658 - DNA, 33 bp, Homo sapien
ccatgaaatgccaatatgtgcttaagaaggaag

SEQ ID NO: 204659 - DNA, 33 bp, Homo sapien
ctatctgttggaagaacggacgctctctaccta

SEQ ID NO: 204660 - DNA, 33 bp, Homo sapien
ctatctgttggaagaatggacgctctctaccta

SEQ ID NO: 204661 - DNA, 33 bp, Homo sapien
ctgctgaaccagtaaacaatgccaacaagaaca

SEQ ID NO: 204662 - DNA, 33 bp, Homo sapien
ctgctgaaccagtaaagaatgccaacaagaaca

SEQ ID NO: 204663 - DNA, 33 bp, Homo sapien
ataaagaggacagttcccagtgcacgatcctgt

SEQ ID NO: 204664 - DNA, 33 bp, Homo sapien
ataaagaggacagttctcagtgcacgatcctgt

SEQ ID NO: 204665 - DNA, 33 bp, Homo sapien
gtcttcctctacccccaaccagtgatctgatct

SEQ ID NO: 204666 - DNA, 33 bp, Homo sapien
gtcttcctctaccccccaccagtgatctgatct

SEQ ID NO: 204667 - DNA, 33 bp, Homo sapien
ggggaagaatgaagacccgagcctctggactgg

SEQ ID NO: 204668 - DNA, 33 bp, Homo sapien
ggggaagaatgaagactcgagcctctggactgg

SEQ ID NO: 204669 - DNA, 33 bp, Homo sapien
gtgcagatgcttttccagaggtgcttagggcgt

SEQ ID NO: 204670 - DNA, 33 bp, Homo sapien
gtgcagatgcttttccggaggtgcttagggcgt

SEQ ID NO: 204671 - DNA, 33 bp, Homo sapien
tggtttgggctgacccccgggttctgacagggt

SEQ ID NO: 204672 - DNA, 33 bp, Homo sapien
tggtttgggctgaccctcgggttctgacagggt

SEQ ID NO: 204673 - DNA, 33 bp, Homo sapien
cgctgttctggaactaaacctgtatcatcacag

SEQ ID NO: 204674 - DNA, 33 bp, Homo sapien
cgctgttctggaactacacctgtatcatcacag

SEQ ID NO: 204675 - DNA, 33 bp, Homo sapien
tggttgggattaacaacttagatacagctagat

SEQ ID NO: 204676 - DNA, 33 bp, Homo sapien
tggttgggattaacaatttagatacagctagat

SEQ ID NO: 204677 - DNA, 33 bp, Homo sapien
ggcccagagaatcttcactgtcatattttgtca

SEQ ID NO: 204678 - DNA, 33 bp, Homo sapien
ggcccagagaatcttcgctgtcatattttgtca

SEQ ID NO: 204679 - DNA, 33 bp, Homo sapien
agagggtcaccagaaacggcttgatctttgtga

SEQ ID NO: 204680 - DNA, 33 bp, Homo sapien
agagggtcaccagaaatggcttgatctttgtga

SEQ ID NO: 204681 - DNA, 33 bp, Homo sapien
aggccttttcttcctcggagacagcccccagtc

SEQ ID NO: 204682 - DNA, 33 bp, Homo sapien
aggccttttcttcctctgagacagcccccagtc

SEQ ID NO: 204683 - DNA, 33 bp, Homo sapien
cctttaaggagtgatacggccctgaaggcactg

SEQ ID NO: 204684 - DNA, 33 bp, Homo sapien
cctttaaggagtgatatggccctgaaggcactg

SEQ ID NO: 204685 - DNA, 33 bp, Homo sapien
caccatgtgaagtctcacctctagactgatgct

SEQ ID NO: 204686 - DNA, 33 bp, Homo sapien
caccatgtgaagtctcgcctctagactgatgct

SEQ ID NO: 204687 - DNA, 33 bp, Homo sapien
gggactagatagagcacgtcgagggtcttttca

SEQ ID NO: 204688 - DNA, 33 bp, Homo sapien
gggactagatagagcatgtcgagggtcttttca

SEQ ID NO: 204689 - DNA, 33 bp, Homo sapien
gtcctgtttagcctgaggaagatgaaatggaag

SEQ ID NO: 204690 - DNA, 33 bp, Homo sapien
gtcctgtttagcctgatgaagatgaaatggaag

SEQ ID NO: 204691 - DNA, 33 bp, Homo sapien
acgtaactcttaaggcactgtcctatcctggtc

SEQ ID NO: 204692 - DNA, 33 bp, Homo sapien
acgtaactcttaaggcgctgtcctatcctggtc

SEQ ID NO: 204693 - DNA, 33 bp, Homo sapien
cccagctaatccagaaaccggcagtatttcaaa

SEQ ID NO: 204694 - DNA, 33 bp, Homo sapien
cccagctaatccagaagccggcagtatttcaaa

SEQ ID NO: 204695 - DNA, 33 bp, Homo sapien
gtgactgaggcctccaatattctcaggacacgg

SEQ ID NO: 204696 - DNA, 33 bp, Homo sapien
gtgactgaggcctccagtattctcaggacacgg

SEQ ID NO: 204697 - DNA, 33 bp, Homo sapien
tgaacgtctatataaacttcggtgtgaatatgc

SEQ ID NO: 204698 - DNA, 33 bp, Homo sapien
tgaacgtctatataaagttcggtgtgaatatgc

SEQ ID NO: 204699 - DNA, 33 bp, Homo sapien
tgagtaataggattccgccatatggcatatggt

SEQ ID NO: 204700 - DNA, 33 bp, Homo sapien
tgagtaataggattcctccatatggcatatggt

SEQ ID NO: 204701 - DNA, 33 bp, Homo sapien
aaccagggatctctacaacaaatgcatttctct

SEQ ID NO: 204702 - DNA, 33 bp, Homo sapien
aaccagggatctctacgacaaatgcatttctct

SEQ ID NO: 204703 - DNA, 33 bp, Homo sapien
gacgttgtatttgaaaacgctttgtagggggcc

SEQ ID NO: 204704 - DNA, 33 bp, Homo sapien
gacgttgtatttgaaagcgctttgtagggggcc

SEQ ID NO: 204705 - DNA, 33 bp, Homo sapien
agccagagaagagaaacccagaattctgtatat

SEQ ID NO: 204706 - DNA, 33 bp, Homo sapien
agccagagaagagaaatccagaattctgtatat

SEQ ID NO: 204707 - DNA, 33 bp, Homo sapien
aaattctgccctacagaccaaaaccacctataa

SEQ ID NO: 204708 - DNA, 33 bp, Homo sapien
aaattctgccctacaggccaaaaccacctataa

SEQ ID NO: 204709 - DNA, 33 bp, Homo sapien
catagttcctaagtcccctttcactctcgaaat

SEQ ID NO: 204710 - DNA, 33 bp, Homo sapien
catagttcctaagtcctctttcactctcgaaat

SEQ ID NO: 204711 - DNA, 33 bp, Homo sapien
taaattttaaagaaaccgtatgctgtgcttccc

SEQ ID NO: 204712 - DNA, 33 bp, Homo sapien
taaattttaaagaaactgtatgctgtgcttccc

SEQ ID NO: 204713 - DNA, 33 bp, Homo sapien
gagtgttgtgaccttaaataagatacttattct

SEQ ID NO: 204714 - DNA, 33 bp, Homo sapien
gagtgttgtgaccttagataagatacttattct

SEQ ID NO: 204715 - DNA, 33 bp, Homo sapien
cttcaatcccccttcaacttcatcctttcctca

SEQ ID NO: 204716 - DNA, 33 bp, Homo sapien
cttcaatcccccttcaccttcatcctttcctca

SEQ ID NO: 204717 - DNA, 33 bp, Homo sapien
ctcactgcctcaggcacgggcacgaagaagaga

SEQ ID NO: 204718 - DNA, 33 bp, Homo sapien
ctcactgcctcaggcatgggcacgaagaagaga

SEQ ID NO: 204719 - DNA, 33 bp, Homo sapien
caaagtgactctaagcaaagaacgaggctggat

SEQ ID NO: 204720 - DNA, 33 bp, Homo sapien
caaagtgactctaagcgaagaacgaggctggat

SEQ ID NO: 204721 - DNA, 33 bp, Homo sapien
ctagagcctgcctgcacaccagaagtgttcaat

SEQ ID NO: 204722 - DNA, 33 bp, Homo sapien
ctagagcctgcctgcataccagaagtgttcaat

SEQ ID NO: 204723 - DNA, 33 bp, Homo sapien
tatatttattgctccccgaggaagtaaggaaga

SEQ ID NO: 204724 - DNA, 33 bp, Homo sapien
tatatttattgctccctgaggaagtaaggaaga

SEQ ID NO: 204725 - DNA, 33 bp, Homo sapien
actttgttaagtgatcaatagatacttttttgg

SEQ ID NO: 204726 - DNA, 33 bp, Homo sapien
actttgttaagtgatccatagatacttttttgg

SEQ ID NO: 204727 - DNA, 33 bp, Homo sapien
accaggcagcctaagacgatagaagatggaaga

SEQ ID NO: 204728 - DNA, 33 bp, Homo sapien
accaggcagcctaagatgatagaagatggaaga

SEQ ID NO: 204729 - DNA, 33 bp, Homo sapien
gcctgccctgtcgtccacatgacaacctgggag

SEQ ID NO: 204730 - DNA, 33 bp, Homo sapien
gcctgccctgtcgtccgcatgacaacctgggag

SEQ ID NO: 204731 - DNA, 33 bp, Homo sapien
cctctttacaaaatgacgaggtttttaccccac

SEQ ID NO: 204732 - DNA, 33 bp, Homo sapien
cctctttacaaaatgatgaggtttttaccccac

SEQ ID NO: 204733 - DNA, 33 bp, Homo sapien
ggggcttggtcaacatgaactgactgactgatc

SEQ ID NO: 204734 - DNA, 33 bp, Homo sapien
ggggcttggtcaacattaactgactgactgatc

SEQ ID NO: 204735 - DNA, 33 bp, Homo sapien
gacatttaattaattcagaaaggacatactgtg

SEQ ID NO: 204736 - DNA, 33 bp, Homo sapien
gacatttaattaattcggaaaggacatactgtg

SEQ ID NO: 204737 - DNA, 33 bp, Homo sapien
gtgtaccaaagaaaacaaggtcagtgccctaaa

SEQ ID NO: 204738 - DNA, 33 bp, Homo sapien
gtgtaccaaagaaaacgaggtcagtgccctaaa

SEQ ID NO: 204739 - DNA, 33 bp, Homo sapien
tcgacagtttgtgttacagttcacgtggctctt

SEQ ID NO: 204740 - DNA, 33 bp, Homo sapien
tcgacagtttgtgttagagttcacgtggctctt

SEQ ID NO: 204741 - DNA, 33 bp, Homo sapien
agctgatccgtggccaatgccaggctttctatt

SEQ ID NO: 204742 - DNA, 33 bp, Homo sapien
agctgatccgtggccagtgccaggctttctatt

SEQ ID NO: 204743 - DNA, 33 bp, Homo sapien
acacgtgcacaccgagaagtcagggcaaaacac

SEQ ID NO: 204744 - DNA, 33 bp, Homo sapien
acacgtgcacaccgaggagtcagggcaaaacac

SEQ ID NO: 204745 - DNA, 33 bp, Homo sapien
tggtgtcaggcattgcactaagtgtcttaccat

SEQ ID NO: 204746 - DNA, 33 bp, Homo sapien
tggtgtcaggcattgcgctaagtgtcttaccat

SEQ ID NO: 204747 - DNA, 33 bp, Homo sapien
cagggaccaggtgtccagagcttcccagcagtc

SEQ ID NO: 204748 - DNA, 33 bp, Homo sapien
cagggaccaggtgtccggagcttcccagcagtc

SEQ ID NO: 204749 - DNA, 33 bp, Homo sapien
gatgaaggaagaattcaaccatttctattcttt

SEQ ID NO: 204750 - DNA, 33 bp, Homo sapien
gatgaaggaagaattcgaccatttctattcttt

SEQ ID NO: 204751 - DNA, 33 bp, Homo sapien
tattcatccagccagcagacatgtagtgaacgc

SEQ ID NO: 204752 - DNA, 33 bp, Homo sapien
tattcatccagccagcggacatgtagtgaacgc

SEQ ID NO: 204753 - DNA, 33 bp, Homo sapien
aggaagaattggagcacataacacatcagtggt

SEQ ID NO: 204754 - DNA, 33 bp, Homo sapien
aggaagaattggagcagataacacatcagtggt

SEQ ID NO: 204755 - DNA, 33 bp, Homo sapien
cacaaaatgtcaacgaaacgggtggtgtagaac

SEQ ID NO: 204756 - DNA, 33 bp, Homo sapien
cacaaaatgtcaacgagacgggtggtgtagaac

SEQ ID NO: 204757 - DNA, 33 bp, Homo sapien
gccacaaacaatgagccctctcggccgggcccc

SEQ ID NO: 204758 - DNA, 33 bp, Homo sapien
gccacaaacaatgagctctctcggccgggcccc

SEQ ID NO: 204759 - DNA, 33 bp, Homo sapien
aaatttattttagaaaagtgatgttaaggtgat

SEQ ID NO: 204760 - DNA, 33 bp, Homo sapien
aaatttattttagaaaggtgatgttaaggtgat

SEQ ID NO: 204761 - DNA, 33 bp, Homo sapien
ccccagggtgccataaagaaaggccactctgga

SEQ ID NO: 204762 - DNA, 33 bp, Homo sapien
ccccagggtgccataaggaaaggccactctgga

SEQ ID NO: 204763 - DNA, 33 bp, Homo sapien
agaacacagtcttcacgactcttatcatgagcc

SEQ ID NO: 204764 - DNA, 33 bp, Homo sapien
agaacacagtcttcactactcttatcatgagcc

SEQ ID NO: 204765 - DNA, 33 bp, Homo sapien
agtacaagtaggctccagcaaacaactgtaaca

SEQ ID NO: 204766 - DNA, 33 bp, Homo sapien
agtacaagtaggctccggcaaacaactgtaaca

SEQ ID NO: 204767 - DNA, 33 bp, Homo sapien
gtgttagagggtgtccaatacatacactgaggt

SEQ ID NO: 204768 - DNA, 33 bp, Homo sapien
gtgttagagggtgtccgatacatacactgaggt

SEQ ID NO: 204769 - DNA, 33 bp, Homo sapien
gctccttctcaacaaacggcttaagttttcacc

SEQ ID NO: 204770 - DNA, 33 bp, Homo sapien
gctccttctcaacaaatggcttaagttttcacc

SEQ ID NO: 204771 - DNA, 33 bp, Homo sapien
ggcgtctgaacctgacaagctgaaacacccagc

SEQ ID NO: 204772 - DNA, 33 bp, Homo sapien
ggcgtctgaacctgacgagctgaaacacccagc

SEQ ID NO: 204773 - DNA, 33 bp, Homo sapien
aggctcacagctgttaaaaattctgagcccaca

SEQ ID NO: 204774 - DNA, 33 bp, Homo sapien
aggctcacagctgttacaaattctgagcccaca

SEQ ID NO: 204775 - DNA, 33 bp, Homo sapien
cgcctggcacaacgccaaatttttaaaactaca

SEQ ID NO: 204776 - DNA, 33 bp, Homo sapien
cgcctggcacaacgccgaatttttaaaactaca

SEQ ID NO: 204777 - DNA, 33 bp, Homo sapien
ccaaaatctgtacacaacccatattgtcctgcc

SEQ ID NO: 204778 - DNA, 33 bp, Homo sapien
ccaaaatctgtacacatcccatattgtcctgcc

SEQ ID NO: 204779 - DNA, 33 bp, Homo sapien
tgagtgctttgagatcacagctgaggtcaggga

SEQ ID NO: 204780 - DNA, 33 bp, Homo sapien
tgagtgctttgagatcgcagctgaggtcaggga

SEQ ID NO: 204781 - DNA, 33 bp, Homo sapien
gagctctcaaaaggaccgccaggaggagacctt

SEQ ID NO: 204782 - DNA, 33 bp, Homo sapien
gagctctcaaaaggactgccaggaggagacctt

SEQ ID NO: 204783 - DNA, 33 bp, Homo sapien
gtttgatttatgccaccgcggttttgcttacaa

SEQ ID NO: 204784 - DNA, 33 bp, Homo sapien
gtttgatttatgccactgcggttttgcttacaa

SEQ ID NO: 204785 - DNA, 33 bp, Homo sapien
agggagggccagactcactgcattctgctctcc

SEQ ID NO: 204786 - DNA, 33 bp, Homo sapien
agggagggccagactcgctgcattctgctctcc

SEQ ID NO: 204787 - DNA, 33 bp, Homo sapien
gtaccaacatcaactcacgctgagactgaaagg

SEQ ID NO: 204788 - DNA, 33 bp, Homo sapien
gtaccaacatcaactcccgctgagactgaaagg

SEQ ID NO: 204789 - DNA, 33 bp, Homo sapien
atcaagttgttggaagactcacctgtcctcggc

SEQ ID NO: 204790 - DNA, 33 bp, Homo sapien
atcaagttgttggaaggctcacctgtcctcggc

SEQ ID NO: 204791 - DNA, 33 bp, Homo sapien
cctctcagtctctgccaacggcatctctccgta

SEQ ID NO: 204792 - DNA, 33 bp, Homo sapien
cctctcagtctctgccgacggcatctctccgta

SEQ ID NO: 204793 - DNA, 33 bp, Homo sapien
caggagacggaaagcaacagggcaggggatggg

SEQ ID NO: 204794 - DNA, 33 bp, Homo sapien
caggagacggaaagcatcagggcaggggatggg

SEQ ID NO: 204795 - DNA, 33 bp, Homo sapien
ttgattcttccttccccgatcttggctaaatat

SEQ ID NO: 204796 - DNA, 33 bp, Homo sapien
ttgattcttccttccctgatcttggctaaatat

SEQ ID NO: 204797 - DNA, 33 bp, Homo sapien
tagtgacgtacagggacatagctcattctgcaa

SEQ ID NO: 204798 - DNA, 33 bp, Homo sapien
tagtgacgtacagggatatagctcattctgcaa

SEQ ID NO: 204799 - DNA, 33 bp, Homo sapien
ctgatgacttacgatcaaagacaggctggtgcc

SEQ ID NO: 204800 - DNA, 33 bp, Homo sapien
ctgatgacttacgatcgaagacaggctggtgcc

SEQ ID NO: 204801 - DNA, 33 bp, Homo sapien
tgcccacctacgtgaaatgtgacctgcaaagca

SEQ ID NO: 204802 - DNA, 33 bp, Homo sapien
tgcccacctacgtgaagtgtgacctgcaaagca

SEQ ID NO: 204803 - DNA, 33 bp, Homo sapien
tctgttctgtggccaacaggtagccctggtata

SEQ ID NO: 204804 - DNA, 33 bp, Homo sapien
tctgttctgtggccaagaggtagccctggtata

SEQ ID NO: 204805 - DNA, 33 bp, Homo sapien
tattccctcattttcccatgctgtttacaaagc

SEQ ID NO: 204806 - DNA, 33 bp, Homo sapien
tattccctcattttcctatgctgtttacaaagc

SEQ ID NO: 204807 - DNA, 33 bp, Homo sapien
ctgggtaacaggaccacgtagggtttggtattc

SEQ ID NO: 204808 - DNA, 33 bp, Homo sapien
ctgggtaacaggaccatgtagggtttggtattc

SEQ ID NO: 204809 - DNA, 33 bp, Homo sapien
gggccgtgtcctggccaaagatcagtggagggc

SEQ ID NO: 204810 - DNA, 33 bp, Homo sapien
gggccgtgtcctggccgaagatcagtggagggc

SEQ ID NO: 204811 - DNA, 33 bp, Homo sapien
ggatgttgacagggaaaccacaagcacagcctg

SEQ ID NO: 204812 - DNA, 33 bp, Homo sapien
ggatgttgacagggaagccacaagcacagcctg

SEQ ID NO: 204813 - DNA, 33 bp, Homo sapien
atcccacaaggaatgacacctccaatctgttca

SEQ ID NO: 204814 - DNA, 33 bp, Homo sapien
atcccacaaggaatgatacctccaatctgttca

SEQ ID NO: 204815 - DNA, 33 bp, Homo sapien
agatcagggaacaaccgagtgactgggcaaagt

SEQ ID NO: 204816 - DNA, 33 bp, Homo sapien
agatcagggaacaacctagtgactgggcaaagt

SEQ ID NO: 204817 - DNA, 33 bp, Homo sapien
ggaggaacatgaattccaccggcttctgtggtg

SEQ ID NO: 204818 - DNA, 33 bp, Homo sapien
ggaggaacatgaattctaccggcttctgtggtg

SEQ ID NO: 204819 - DNA, 33 bp, Homo sapien
cttgtgcatggtgagacgacaaggggcaatcaa

SEQ ID NO: 204820 - DNA, 33 bp, Homo sapien
cttgtgcatggtgagaggacaaggggcaatcaa

SEQ ID NO: 204821 - DNA, 33 bp, Homo sapien
gaggcatgatctagtactaccctctccccaggt

SEQ ID NO: 204822 - DNA, 33 bp, Homo sapien
gaggcatgatctagtattaccctctccccaggt

SEQ ID NO: 204823 - DNA, 33 bp, Homo sapien
caggagagacaatgaggagcaaggcacgcagct

SEQ ID NO: 204824 - DNA, 33 bp, Homo sapien
caggagagacaatgagtagcaaggcacgcagct

SEQ ID NO: 204825 - DNA, 33 bp, Homo sapien
ttcttgtttggtgtcacagggtaattggttttt

SEQ ID NO: 204826 - DNA, 33 bp, Homo sapien
ttcttgtttggtgtcatagggtaattggttttt

SEQ ID NO: 204827 - DNA, 33 bp, Homo sapien
aagctacagagaaccaagtgactctttcatcca

SEQ ID NO: 204828 - DNA, 33 bp, Homo sapien
aagctacagagaaccaggtgactctttcatcca

SEQ ID NO: 204829 - DNA, 33 bp, Homo sapien
cctgcttgcactgaaaagcagtaggcccacttc

SEQ ID NO: 204830 - DNA, 33 bp, Homo sapien
cctgcttgcactgaaaggcagtaggcccacttc

SEQ ID NO: 204831 - DNA, 33 bp, Homo sapien
gtaggaccctgtctcacgatcttgtgtgtggta

SEQ ID NO: 204832 - DNA, 33 bp, Homo sapien
gtaggaccctgtctcatgatcttgtgtgtggta

SEQ ID NO: 204833 - DNA, 33 bp, Homo sapien
ttcctcagaatataaacgctgtacaaggtgtta

SEQ ID NO: 204834 - DNA, 33 bp, Homo sapien
ttcctcagaatataaatgctgtacaaggtgtta

SEQ ID NO: 204835 - DNA, 33 bp, Homo sapien
ggcatgttctgggcccaacaatggaagaaaaat

SEQ ID NO: 204836 - DNA, 33 bp, Homo sapien
ggcatgttctgggccctacaatggaagaaaaat

SEQ ID NO: 204837 - DNA, 33 bp, Homo sapien
aagctctgggttcgccagcgatggctgaaactt

SEQ ID NO: 204838 - DNA, 33 bp, Homo sapien
aagctctgggttcgccggcgatggctgaaactt

SEQ ID NO: 204839 - DNA, 33 bp, Homo sapien
agattggaataagctacgtgaagtgggtggcca

SEQ ID NO: 204840 - DNA, 33 bp, Homo sapien
agattggaataagctatgtgaagtgggtggcca

SEQ ID NO: 204841 - DNA, 33 bp, Homo sapien
agatggagaaaggaggcagtcatcggctggctg

SEQ ID NO: 204842 - DNA, 33 bp, Homo sapien
agatggagaaaggaggtagtcatcggctggctg

SEQ ID NO: 204843 - DNA, 33 bp, Homo sapien
tgtccagtaccttccacgtatttgttacgcact

SEQ ID NO: 204844 - DNA, 33 bp, Homo sapien
tgtccagtaccttccatgtatttgttacgcact

SEQ ID NO: 204845 - DNA, 33 bp, Homo sapien
tcagctcctttatgtccctgtcctagctatctg

SEQ ID NO: 204846 - DNA, 33 bp, Homo sapien
tcagctcctttatgtctctgtcctagctatctg

SEQ ID NO: 204847 - DNA, 33 bp, Homo sapien
cattttcagtgcagcagtccataaacgacatga

SEQ ID NO: 204848 - DNA, 33 bp, Homo sapien
cattttcagtgcagcattccataaacgacatga

SEQ ID NO: 204849 - DNA, 33 bp, Homo sapien
tattgactgaccagagacagaaagctttacaag

SEQ ID NO: 204850 - DNA, 33 bp, Homo sapien
tattgactgaccagaggcagaaagctttacaag

SEQ ID NO: 204851 - DNA, 33 bp, Homo sapien
ccctcagggcaccatccgatagcagcagcttcg

SEQ ID NO: 204852 - DNA, 33 bp, Homo sapien
ccctcagggcaccatctgatagcagcagcttcg

SEQ ID NO: 204853 - DNA, 33 bp, Homo sapien
gtactgacggcaagtaacacgttctaagtgcac

SEQ ID NO: 204854 - DNA, 33 bp, Homo sapien
gtactgacggcaagtagcacgttctaagtgcac

SEQ ID NO: 204855 - DNA, 33 bp, Homo sapien
accataggtacccccccaaatggctattacaag

SEQ ID NO: 204856 - DNA, 33 bp, Homo sapien
accataggtacccccctaaatggctattacaag

SEQ ID NO: 204857 - DNA, 33 bp, Homo sapien
caaaagttgatacctacccttcatgagactgcc

SEQ ID NO: 204858 - DNA, 33 bp, Homo sapien
caaaagttgatacctatccttcatgagactgcc

SEQ ID NO: 204859 - DNA, 33 bp, Homo sapien
gggaggggagccaggaaggaatcctcagaggtg

SEQ ID NO: 204860 - DNA, 33 bp, Homo sapien
gggaggggagccaggagggaatcctcagaggtg

SEQ ID NO: 204861 - DNA, 33 bp, Homo sapien
tggctgtcttcttacaagctttggacagagatg

SEQ ID NO: 204862 - DNA, 33 bp, Homo sapien
tggctgtcttcttacaggctttggacagagatg

SEQ ID NO: 204863 - DNA, 33 bp, Homo sapien
ccagataaaatggcaacgccaaagtggcaaagc

SEQ ID NO: 204864 - DNA, 33 bp, Homo sapien
ccagataaaatggcaatgccaaagtggcaaagc

SEQ ID NO: 204865 - DNA, 33 bp, Homo sapien
ccaacttccttttgaaatcttgaatcggctgag

SEQ ID NO: 204866 - DNA, 33 bp, Homo sapien
ccaacttccttttgaagtcttgaatcggctgag

SEQ ID NO: 204867 - DNA, 33 bp, Homo sapien
agtgctgttgggcccaaagagagaacccctttc

SEQ ID NO: 204868 - DNA, 33 bp, Homo sapien
agtgctgttgggcccagagagagaacccctttc

SEQ ID NO: 204869 - DNA, 33 bp, Homo sapien
cctcagctgagcgaccacattgcccaggatgct

SEQ ID NO: 204870 - DNA, 33 bp, Homo sapien
cctcagctgagcgaccgcattgcccaggatgct

SEQ ID NO: 204871 - DNA, 33 bp, Homo sapien
ggcttttgcctatcaaagtgcattaattaagta

SEQ ID NO: 204872 - DNA, 33 bp, Homo sapien
ggcttttgcctatcaacgtgcattaattaagta

SEQ ID NO: 204873 - DNA, 33 bp, Homo sapien
tcattttttattaatcaaaggcacatatagtgc

SEQ ID NO: 204874 - DNA, 33 bp, Homo sapien
tcattttttattaatcgaaggcacatatagtgc

SEQ ID NO: 204875 - DNA, 33 bp, Homo sapien
cttactggtctgctcacgtcctcattgcctgac

SEQ ID NO: 204876 - DNA, 33 bp, Homo sapien
cttactggtctgctcatgtcctcattgcctgac

SEQ ID NO: 204877 - DNA, 33 bp, Homo sapien
taattttaggaacttcccatttataggagagaa

SEQ ID NO: 204878 - DNA, 33 bp, Homo sapien
taattttaggaacttctcatttataggagagaa

SEQ ID NO: 204879 - DNA, 33 bp, Homo sapien
gaaaaacgtcactcacaagcagggtgagcagtg

SEQ ID NO: 204880 - DNA, 33 bp, Homo sapien
gaaaaacgtcactcacgagcagggtgagcagtg

SEQ ID NO: 204881 - DNA, 33 bp, Homo sapien
agcagaatctcatgggacataccgaggggtgga

SEQ ID NO: 204882 - DNA, 33 bp, Homo sapien
agcagaatctcatggggcataccgaggggtgga

SEQ ID NO: 204883 - DNA, 33 bp, Homo sapien
tggagctgtctctcccaactcctcagcaaacca

SEQ ID NO: 204884 - DNA, 33 bp, Homo sapien
tggagctgtctctccccactcctcagcaaacca

SEQ ID NO: 204885 - DNA, 33 bp, Homo sapien
tctggatctcaggagaaagttaggctggcaccc

SEQ ID NO: 204886 - DNA, 33 bp, Homo sapien
tctggatctcaggagagagttaggctggcaccc

SEQ ID NO: 204887 - DNA, 33 bp, Homo sapien
tcttcttgtcaatttcacctcctaagtcccttg

SEQ ID NO: 204888 - DNA, 33 bp, Homo sapien
tcttcttgtcaatttcgcctcctaagtcccttg

SEQ ID NO: 204889 - DNA, 33 bp, Homo sapien
acctggctgccttatccgagggttgatttggtg

SEQ ID NO: 204890 - DNA, 33 bp, Homo sapien
acctggctgccttatctgagggttgatttggtg

SEQ ID NO: 204891 - DNA, 33 bp, Homo sapien
gctcacaaggaaatgcacaaagatttaagtgat

SEQ ID NO: 204892 - DNA, 33 bp, Homo sapien
gctcacaaggaaatgcgcaaagatttaagtgat

SEQ ID NO: 204893 - DNA, 33 bp, Homo sapien
gcatgtgtttacttaacgagctactttcagatc

SEQ ID NO: 204894 - DNA, 33 bp, Homo sapien
gcatgtgtttacttaatgagctactttcagatc

SEQ ID NO: 204895 - DNA, 33 bp, Homo sapien
ctcttccttggcctcaaccactcgtcttcttcc

SEQ ID NO: 204896 - DNA, 33 bp, Homo sapien
ctcttccttggcctcatccactcgtcttcttcc

SEQ ID NO: 204897 - DNA, 33 bp, Homo sapien
gggagcctgcagctcaccagggttttgagtcat

SEQ ID NO: 204898 - DNA, 33 bp, Homo sapien
gggagcctgcagctcagcagggttttgagtcat

SEQ ID NO: 204899 - DNA, 33 bp, Homo sapien
cgctccatcgcctgtgaaatgctcacccctttt

SEQ ID NO: 204900 - DNA, 33 bp, Homo sapien
cgctccatcgcctgtgcaatgctcacccctttt

SEQ ID NO: 204901 - DNA, 33 bp, Homo sapien
gaccttctgcaatgctaaatgaggaggggagac

SEQ ID NO: 204902 - DNA, 33 bp, Homo sapien
gaccttctgcaatgctgaatgaggaggggagac

SEQ ID NO: 204903 - DNA, 33 bp, Homo sapien
acagcgtcattcattcccttctcttcatctcca

SEQ ID NO: 204904 - DNA, 33 bp, Homo sapien
acagcgtcattcattctcttctcttcatctcca

SEQ ID NO: 204905 - DNA, 33 bp, Homo sapien
gatcgtggactttgtaagcaaaaggggaccacc

SEQ ID NO: 204906 - DNA, 33 bp, Homo sapien
gatcgtggactttgtaggcaaaaggggaccacc

SEQ ID NO: 204907 - DNA, 33 bp, Homo sapien
gatgggctcttctctacggaaatcgtagatcca

SEQ ID NO: 204908 - DNA, 33 bp, Homo sapien
gatgggctcttctctatggaaatcgtagatcca

SEQ ID NO: 204909 - DNA, 33 bp, Homo sapien
tctgcagcatccaaccagagtcatttcccagtg

SEQ ID NO: 204910 - DNA, 33 bp, Homo sapien
tctgcagcatccaaccggagtcatttcccagtg

SEQ ID NO: 204911 - DNA, 33 bp, Homo sapien
ttcatacaagaactataagaaactacacaggtc

SEQ ID NO: 204912 - DNA, 33 bp, Homo sapien
ttcatacaagaactatgagaaactacacaggtc

SEQ ID NO: 204913 - DNA, 33 bp, Homo sapien
tccagaagacctgtccactagttacagaagcag

SEQ ID NO: 204914 - DNA, 33 bp, Homo sapien
tccagaagacctgtcctctagttacagaagcag

SEQ ID NO: 204915 - DNA, 33 bp, Homo sapien
aatcttaaataaaatccatgttccaggaaaact

SEQ ID NO: 204916 - DNA, 33 bp, Homo sapien
aatcttaaataaaatcgatgttccaggaaaact

SEQ ID NO: 204917 - DNA, 33 bp, Homo sapien
tttctgtacacaagaggctcatgatgtctctgg

SEQ ID NO: 204918 - DNA, 33 bp, Homo sapien
tttctgtacacaagagtctcatgatgtctctgg

SEQ ID NO: 204919 - DNA, 33 bp, Homo sapien
gcaccagtaatcaggacggaacagaacagaaca

SEQ ID NO: 204920 - DNA, 33 bp, Homo sapien
gcaccagtaatcaggatggaacagaacagaaca

SEQ ID NO: 204921 - DNA, 33 bp, Homo sapien
gctatggtgtttcagccactgacttcaggtagc

SEQ ID NO: 204922 - DNA, 33 bp, Homo sapien
gctatggtgtttcagctactgacttcaggtagc

SEQ ID NO: 204923 - DNA, 33 bp, Homo sapien
ccatcaggcaagcaaacggagctgatcagcatt

SEQ ID NO: 204924 - DNA, 33 bp, Homo sapien
ccatcaggcaagcaaatggagctgatcagcatt

SEQ ID NO: 204925 - DNA, 33 bp, Homo sapien
tgatgggcttaaaaggaatgaagagaaaaggtt

SEQ ID NO: 204926 - DNA, 33 bp, Homo sapien
tgatgggcttaaaaggcatgaagagaaaaggtt

SEQ ID NO: 204927 - DNA, 33 bp, Homo sapien
acgctggagattctgaaaaggaaatactctcca

SEQ ID NO: 204928 - DNA, 33 bp, Homo sapien
acgctggagattctgacaaggaaatactctcca

SEQ ID NO: 204929 - DNA, 33 bp, Homo sapien
tctgtagaatcctctcaacctgcagactactgt

SEQ ID NO: 204930 - DNA, 33 bp, Homo sapien
tctgtagaatcctctcgacctgcagactactgt

SEQ ID NO: 204931 - DNA, 33 bp, Homo sapien
catttccctttttatcaagattcaagagcagag

SEQ ID NO: 204932 - DNA, 33 bp, Homo sapien
catttccctttttatcgagattcaagagcagag

SEQ ID NO: 204933 - DNA, 33 bp, Homo sapien
caacgtgcttctgggccatacaactgccctgca

SEQ ID NO: 204934 - DNA, 33 bp, Homo sapien
caacgtgcttctgggctatacaactgccctgca

SEQ ID NO: 204935 - DNA, 33 bp, Homo sapien
tctgccttgaacgttccccagtccaggtcttca

SEQ ID NO: 204936 - DNA, 33 bp, Homo sapien
tctgccttgaacgttctccagtccaggtcttca

SEQ ID NO: 204937 - DNA, 33 bp, Homo sapien
taggcctgagaagtcaacatctttaagggcgag

SEQ ID NO: 204938 - DNA, 33 bp, Homo sapien
taggcctgagaagtcagcatctttaagggcgag

SEQ ID NO: 204939 - DNA, 33 bp, Homo sapien
tgggatcacatgaaagaagatgaaatgagggat

SEQ ID NO: 204940 - DNA, 33 bp, Homo sapien
tgggatcacatgaaaggagatgaaatgagggat

SEQ ID NO: 204941 - DNA, 33 bp, Homo sapien
ttatttccattttcgaagtgtaagaacttgaag

SEQ ID NO: 204942 - DNA, 33 bp, Homo sapien
ttatttccattttcgaggtgtaagaacttgaag

SEQ ID NO: 204943 - DNA, 33 bp, Homo sapien
tgggggcctgtggtccaagaagtaatgccacct

SEQ ID NO: 204944 - DNA, 33 bp, Homo sapien
tgggggcctgtggtccgagaagtaatgccacct

SEQ ID NO: 204945 - DNA, 33 bp, Homo sapien
tggaaaccctgcaggcaagtatgagaactgtct

SEQ ID NO: 204946 - DNA, 33 bp, Homo sapien
tggaaaccctgcaggcgagtatgagaactgtct

SEQ ID NO: 204947 - DNA, 33 bp, Homo sapien
tatctggagacaaaaacacctgcagaggaagaa

SEQ ID NO: 204948 - DNA, 33 bp, Homo sapien
tatctggagacaaaaagacctgcagaggaagaa

SEQ ID NO: 204949 - DNA, 33 bp, Homo sapien
actacaaagcaaaaccactaggaagatgagggg

SEQ ID NO: 204950 - DNA, 33 bp, Homo sapien
actacaaagcaaaaccgctaggaagatgagggg

SEQ ID NO: 204951 - DNA, 33 bp, Homo sapien
attagttcagttttcgcccacaggtacatagta

SEQ ID NO: 204952 - DNA, 33 bp, Homo sapien
attagttcagttttcgtccacaggtacatagta

SEQ ID NO: 204953 - DNA, 33 bp, Homo sapien
aacaactgggcagaaaaaaatcttaaagttgta

SEQ ID NO: 204954 - DNA, 33 bp, Homo sapien
aacaactgggcagaaacaaatcttaaagttgta

SEQ ID NO: 204955 - DNA, 33 bp, Homo sapien
gaagactgcactctcacggagcgcacgcattcc

SEQ ID NO: 204956 - DNA, 33 bp, Homo sapien
gaagactgcactctcatggagcgcacgcattcc

SEQ ID NO: 204957 - DNA, 33 bp, Homo sapien
cggcttgagcaaccaaaaggcgggagagcagtg

SEQ ID NO: 204958 - DNA, 33 bp, Homo sapien
cggcttgagcaaccaagaggcgggagagcagtg

SEQ ID NO: 204959 - DNA, 33 bp, Homo sapien
acgtctatttcttccacaggacctgcacgctgc

SEQ ID NO: 204960 - DNA, 33 bp, Homo sapien
acgtctatttcttccataggacctgcacgctgc

SEQ ID NO: 204961 - DNA, 33 bp, Homo sapien
ggtaatacatcatgacaaagtgttcatttaaca

SEQ ID NO: 204962 - DNA, 33 bp, Homo sapien
ggtaatacatcatgacgaagtgttcatttaaca

SEQ ID NO: 204963 - DNA, 33 bp, Homo sapien
ttctagattttggttacggtggtgcttacacag

SEQ ID NO: 204964 - DNA, 33 bp, Homo sapien
ttctagattttggttatggtggtgcttacacag

SEQ ID NO: 204965 - DNA, 33 bp, Homo sapien
cacacaggatttgtaaacaggaaaacaaggtta

SEQ ID NO: 204966 - DNA, 33 bp, Homo sapien
cacacaggatttgtaaccaggaaaacaaggtta

SEQ ID NO: 204967 - DNA, 33 bp, Homo sapien
cgaggaaccagcgcacaatcccaaactggggga

SEQ ID NO: 204968 - DNA, 33 bp, Homo sapien
cgaggaaccagcgcacgatcccaaactggggga

SEQ ID NO: 204969 - DNA, 33 bp, Homo sapien
gagataggccagtgcaaagctcgtaaggttatt

SEQ ID NO: 204970 - DNA, 33 bp, Homo sapien
gagataggccagtgcacagctcgtaaggttatt

SEQ ID NO: 204971 - DNA, 33 bp, Homo sapien
atcatcaaggtgcagaaccttacacctgaaatg

SEQ ID NO: 204972 - DNA, 33 bp, Homo sapien
atcatcaaggtgcagacccttacacctgaaatg

SEQ ID NO: 204973 - DNA, 33 bp, Homo sapien
ccgcagcctcttttgcaataacagacatccgtt

SEQ ID NO: 204974 - DNA, 33 bp, Homo sapien
ccgcagcctcttttgcgataacagacatccgtt

SEQ ID NO: 204975 - DNA, 33 bp, Homo sapien
ggggttcacagattgaatagaagaataaatgcc

SEQ ID NO: 204976 - DNA, 33 bp, Homo sapien
ggggttcacagattgagtagaagaataaatgcc

SEQ ID NO: 204977 - DNA, 33 bp, Homo sapien
ttaaatccacagagccacaatttgttgaactgt

SEQ ID NO: 204978 - DNA, 33 bp, Homo sapien
ttaaatccacagagcctcaatttgttgaactgt

SEQ ID NO: 204979 - DNA, 33 bp, Homo sapien
cccacacaaatacacacatccatagcagagtcc

SEQ ID NO: 204980 - DNA, 33 bp, Homo sapien
cccacacaaatacacatatccatagcagagtcc

SEQ ID NO: 204981 - DNA, 33 bp, Homo sapien
tcttcattagttttgaagaaggacctaatgact

SEQ ID NO: 204982 - DNA, 33 bp, Homo sapien
tcttcattagttttgaggaaggacctaatgact

SEQ ID NO: 204983 - DNA, 33 bp, Homo sapien
aaggaggctgcttgaaatccctttgcctgaagg

SEQ ID NO: 204984 - DNA, 33 bp, Homo sapien
aaggaggctgcttgaattccctttgcctgaagg

SEQ ID NO: 204985 - DNA, 33 bp, Homo sapien
atggttgttgggagcaagtggactttgtctgca

SEQ ID NO: 204986 - DNA, 33 bp, Homo sapien
atggttgttgggagcaggtggactttgtctgca

SEQ ID NO: 204987 - DNA, 33 bp, Homo sapien
cagtttacttccaggacgaactcggaacgtttt

SEQ ID NO: 204988 - DNA, 33 bp, Homo sapien
cagtttacttccaggatgaactcggaacgtttt

SEQ ID NO: 204989 - DNA, 33 bp, Homo sapien
ggaagccagaggccatcatggagtggagactca

SEQ ID NO: 204990 - DNA, 33 bp, Homo sapien
ggaagccagaggccatgatggagtggagactca

SEQ ID NO: 204991 - DNA, 33 bp, Homo sapien
ctgctctctagccttaagtgtcagctaatggtt

SEQ ID NO: 204992 - DNA, 33 bp, Homo sapien
ctgctctctagccttaggtgtcagctaatggtt

SEQ ID NO: 204993 - DNA, 33 bp, Homo sapien
aggcaatcctaaaacgaagcaatctattcaagc

SEQ ID NO: 204994 - DNA, 33 bp, Homo sapien
aggcaatcctaaaacgcagcaatctattcaagc

SEQ ID NO: 204995 - DNA, 33 bp, Homo sapien
cctagactgaggacccagaatgacctgagataa

SEQ ID NO: 204996 - DNA, 33 bp, Homo sapien
cctagactgaggacccggaatgacctgagataa

SEQ ID NO: 204997 - DNA, 33 bp, Homo sapien
acaggaccctggagccagaggaacatattcaaa

SEQ ID NO: 204998 - DNA, 33 bp, Homo sapien
acaggaccctggagccggaggaacatattcaaa

SEQ ID NO: 204999 - DNA, 33 bp, Homo sapien
gtcagctgaaaggctccaaacaaatgatagtta

SEQ ID NO: 205000 - DNA, 33 bp, Homo sapien
gtcagctgaaaggctctaaacaaatgatagtta

SEQ ID NO: 205001 - DNA, 33 bp, Homo sapien
cactttgtttcaaaagcaagcagcagcaactca

SEQ ID NO: 205002 - DNA, 33 bp, Homo sapien
cactttgtttcaaaagtaagcagcagcaactca

SEQ ID NO: 205003 - DNA, 33 bp, Homo sapien
gccatggaggaagtaaactcactcttctgcttt

SEQ ID NO: 205004 - DNA, 33 bp, Homo sapien
gccatggaggaagtaagctcactcttctgcttt

SEQ ID NO: 205005 - DNA, 33 bp, Homo sapien
atgaagtcagtaactaaggccctcgcgctgggc

SEQ ID NO: 205006 - DNA, 33 bp, Homo sapien
atgaagtcagtaactatggccctcgcgctgggc

SEQ ID NO: 205007 - DNA, 33 bp, Homo sapien
catctgccgctaaacaaagcgaccatttctgga

SEQ ID NO: 205008 - DNA, 33 bp, Homo sapien
catctgccgctaaacagagcgaccatttctgga

SEQ ID NO: 205009 - DNA, 33 bp, Homo sapien
cttgttcagtcccacactgagttaatggcagag

SEQ ID NO: 205010 - DNA, 33 bp, Homo sapien
cttgttcagtcccacattgagttaatggcagag

SEQ ID NO: 205011 - DNA, 33 bp, Homo sapien
ttaggataattccccacgccctagtggtcccta

SEQ ID NO: 205012 - DNA, 33 bp, Homo sapien
ttaggataattccccatgccctagtggtcccta

SEQ ID NO: 205013 - DNA, 33 bp, Homo sapien
agtcatcctgaaagcagaaaacagccgccttct

SEQ ID NO: 205014 - DNA, 33 bp, Homo sapien
agtcatcctgaaagcataaaacagccgccttct

SEQ ID NO: 205015 - DNA, 33 bp, Homo sapien
cccaggaatctagtgccatcagaacgacaagag

SEQ ID NO: 205016 - DNA, 33 bp, Homo sapien
cccaggaatctagtgctatcagaacgacaagag

SEQ ID NO: 205017 - DNA, 33 bp, Homo sapien
atatttatcatgctgcaacaaattgcttattta

SEQ ID NO: 205018 - DNA, 33 bp, Homo sapien
atatttatcatgctgctacaaattgcttattta

SEQ ID NO: 205019 - DNA, 33 bp, Homo sapien
ggtttgcaggctctgcacttcttcccatctggg

SEQ ID NO: 205020 - DNA, 33 bp, Homo sapien
ggtttgcaggctctgcgcttcttcccatctggg

SEQ ID NO: 205021 - DNA, 33 bp, Homo sapien
tccttctccgtgcaaacgccccaccttgtcctt

SEQ ID NO: 205022 - DNA, 33 bp, Homo sapien
tccttctccgtgcaaatgccccaccttgtcctt

SEQ ID NO: 205023 - DNA, 33 bp, Homo sapien
gaaccgataagatggacggagagggaggcaaaa

SEQ ID NO: 205024 - DNA, 33 bp, Homo sapien
gaaccgataagatggatggagagggaggcaaaa

SEQ ID NO: 205025 - DNA, 33 bp, Homo sapien
gtatccctagaagtcacaatcaggagtaagtgg

SEQ ID NO: 205026 - DNA, 33 bp, Homo sapien
gtatccctagaagtcagaatcaggagtaagtgg

SEQ ID NO: 205027 - DNA, 33 bp, Homo sapien
ttgtgtgtgtgtaagcagagtaaaagtagatgg

SEQ ID NO: 205028 - DNA, 33 bp, Homo sapien
ttgtgtgtgtgtaagccgagtaaaagtagatgg

SEQ ID NO: 205029 - DNA, 33 bp, Homo sapien
aaatgctttgttttaaggcctgtttaagtgact

SEQ ID NO: 205030 - DNA, 33 bp, Homo sapien
aaatgctttgttttaatgcctgtttaagtgact

SEQ ID NO: 205031 - DNA, 33 bp, Homo sapien
tatctttttcatttcacgcttgcagtcttcaag

SEQ ID NO: 205032 - DNA, 33 bp, Homo sapien
tatctttttcatttcatgcttgcagtcttcaag

SEQ ID NO: 205033 - DNA, 33 bp, Homo sapien
ttaactcaaacataacacattttgttgctcttg

SEQ ID NO: 205034 - DNA, 33 bp, Homo sapien
ttaactcaaacataacgcattttgttgctcttg

SEQ ID NO: 205035 - DNA, 33 bp, Homo sapien
gcttgtgcttgacagaacgtttccatgacctat

SEQ ID NO: 205036 - DNA, 33 bp, Homo sapien
gcttgtgcttgacagatcgtttccatgacctat

SEQ ID NO: 205037 - DNA, 33 bp, Homo sapien
gttgaagaaatggcaaagcaagtagctgggtgg

SEQ ID NO: 205038 - DNA, 33 bp, Homo sapien
gttgaagaaatggcaaggcaagtagctgggtgg

SEQ ID NO: 205039 - DNA, 33 bp, Homo sapien
taatatttctagcatacattaaatgctcattaa

SEQ ID NO: 205040 - DNA, 33 bp, Homo sapien
taatatttctagcatagattaaatgctcattaa

SEQ ID NO: 205041 - DNA, 33 bp, Homo sapien
caaagcacttgcataccgtaggagctctccagg

SEQ ID NO: 205042 - DNA, 33 bp, Homo sapien
caaagcacttgcatactgtaggagctctccagg

SEQ ID NO: 205043 - DNA, 33 bp, Homo sapien
tttttaatcaccctccaatcttactacaagggt

SEQ ID NO: 205044 - DNA, 33 bp, Homo sapien
tttttaatcaccctccgatcttactacaagggt

SEQ ID NO: 205045 - DNA, 33 bp, Homo sapien
aagtcaatgtcagatccaatttaacagggaaag

SEQ ID NO: 205046 - DNA, 33 bp, Homo sapien
aagtcaatgtcagatctaatttaacagggaaag

SEQ ID NO: 205047 - DNA, 33 bp, Homo sapien
caagctggcctcagagacaagcctggggagcgt

SEQ ID NO: 205048 - DNA, 33 bp, Homo sapien
caagctggcctcagagccaagcctggggagcgt

SEQ ID NO: 205049 - DNA, 33 bp, Homo sapien
gctctgtggttctgacacttttcacatccactc

SEQ ID NO: 205050 - DNA, 33 bp, Homo sapien
gctctgtggttctgacgcttttcacatccactc

SEQ ID NO: 205051 - DNA, 33 bp, Homo sapien
aatggctaagagaagacaggttgaatagctatg

SEQ ID NO: 205052 - DNA, 33 bp, Homo sapien
aatggctaagagaagataggttgaatagctatg

SEQ ID NO: 205053 - DNA, 33 bp, Homo sapien
acctgacgaggctcaacagagaagactaaatgt

SEQ ID NO: 205054 - DNA, 33 bp, Homo sapien
acctgacgaggctcaatagagaagactaaatgt

SEQ ID NO: 205055 - DNA, 33 bp, Homo sapien
gctctttgcaagagaagaacatggaagcaaatt

SEQ ID NO: 205056 - DNA, 33 bp, Homo sapien
gctctttgcaagagaataacatggaagcaaatt

SEQ ID NO: 205057 - DNA, 33 bp, Homo sapien
cttgtcctaagttgcacagctagtaaatggcag

SEQ ID NO: 205058 - DNA, 33 bp, Homo sapien
cttgtcctaagttgcatagctagtaaatggcag

SEQ ID NO: 205059 - DNA, 33 bp, Homo sapien
agtcatggcaacaacaacttgccccagatttct

SEQ ID NO: 205060 - DNA, 33 bp, Homo sapien
agtcatggcaacaacatcttgccccagatttct

SEQ ID NO: 205061 - DNA, 33 bp, Homo sapien
atgagggaaacattcacggctgtgagacctcag

SEQ ID NO: 205062 - DNA, 33 bp, Homo sapien
atgagggaaacattcatggctgtgagacctcag

SEQ ID NO: 205063 - DNA, 33 bp, Homo sapien
agctgaggcaccgtaacggaaggaaggggcctc

SEQ ID NO: 205064 - DNA, 33 bp, Homo sapien
agctgaggcaccgtaatggaaggaaggggcctc

SEQ ID NO: 205065 - DNA, 33 bp, Homo sapien
ccaagtcaggaagatgcaggtgaacaggtggcc

SEQ ID NO: 205066 - DNA, 33 bp, Homo sapien
ccaagtcaggaagatgtaggtgaacaggtggcc

SEQ ID NO: 205067 - DNA, 33 bp, Homo sapien
tctggctgaagaagaaatgacctggggggtgca

SEQ ID NO: 205068 - DNA, 33 bp, Homo sapien
tctggctgaagaagaagtgacctggggggtgca

SEQ ID NO: 205069 - DNA, 33 bp, Homo sapien
tagccattgccatcagcatccagggcatcaaac

SEQ ID NO: 205070 - DNA, 33 bp, Homo sapien
tagccattgccatcagtatccagggcatcaaac

SEQ ID NO: 205071 - DNA, 33 bp, Homo sapien
tctgccagaaagtgtcgagagttcggcccagtc

SEQ ID NO: 205072 - DNA, 33 bp, Homo sapien
tctgccagaaagtgtctagagttcggcccagtc

SEQ ID NO: 205073 - DNA, 33 bp, Homo sapien
aaagattctggaagtacatctgcttagcattca

SEQ ID NO: 205074 - DNA, 33 bp, Homo sapien
aaagattctggaagtatatctgcttagcattca

SEQ ID NO: 205075 - DNA, 33 bp, Homo sapien
cagaatctctgacttaccaacaatccataaacc

SEQ ID NO: 205076 - DNA, 33 bp, Homo sapien
cagaatctctgacttatcaacaatccataaacc

SEQ ID NO: 205077 - DNA, 33 bp, Homo sapien
ggtcagtgctaacaaactccctcagcatttgct

SEQ ID NO: 205078 - DNA, 33 bp, Homo sapien
ggtcagtgctaacaaattccctcagcatttgct

SEQ ID NO: 205079 - DNA, 33 bp, Homo sapien
gtggaagagggcatacagaaacctggcttctgg

SEQ ID NO: 205080 - DNA, 33 bp, Homo sapien
gtggaagagggcatacggaaacctggcttctgg

SEQ ID NO: 205081 - DNA, 33 bp, Homo sapien
tggcaaatctctgagacaaaaagctatgtctag

SEQ ID NO: 205082 - DNA, 33 bp, Homo sapien
tggcaaatctctgagataaaaagctatgtctag

SEQ ID NO: 205083 - DNA, 33 bp, Homo sapien
tgacactgaaaacaacagggaggcatgatcagg

SEQ ID NO: 205084 - DNA, 33 bp, Homo sapien
tgacactgaaaacaacggggaggcatgatcagg

SEQ ID NO: 205085 - DNA, 33 bp, Homo sapien
catgatatttacatgagattttggactttctgc

SEQ ID NO: 205086 - DNA, 33 bp, Homo sapien
catgatatttacatgatattttggactttctgc

SEQ ID NO: 205087 - DNA, 33 bp, Homo sapien
cttgaaattctttccacccaatccacagacgct

SEQ ID NO: 205088 - DNA, 33 bp, Homo sapien
cttgaaattctttccatccaatccacagacgct

SEQ ID NO: 205089 - DNA, 33 bp, Homo sapien
atcaagtggcagctgacaacataacctgacttg

SEQ ID NO: 205090 - DNA, 33 bp, Homo sapien
atcaagtggcagctgagaacataacctgacttg

SEQ ID NO: 205091 - DNA, 33 bp, Homo sapien
tgggggtctcccaaaggatcactcatcctgaga

SEQ ID NO: 205092 - DNA, 33 bp, Homo sapien
tgggggtctcccaaagtatcactcatcctgaga

SEQ ID NO: 205093 - DNA, 33 bp, Homo sapien
ttgtcactgtgaatgaactcacttagtgtggca

SEQ ID NO: 205094 - DNA, 33 bp, Homo sapien
ttgtcactgtgaatgagctcacttagtgtggca

SEQ ID NO: 205095 - DNA, 33 bp, Homo sapien
acacaatacacttgaccgggccaggtcctggga

SEQ ID NO: 205096 - DNA, 33 bp, Homo sapien
acacaatacacttgactgggccaggtcctggga

SEQ ID NO: 205097 - DNA, 33 bp, Homo sapien
agatctctagaacttacccgcttatccacattg

SEQ ID NO: 205098 - DNA, 33 bp, Homo sapien
agatctctagaacttagccgcttatccacattg

SEQ ID NO: 205099 - DNA, 33 bp, Homo sapien
gttacacctcaataaaactggaagaaaatgaag

SEQ ID NO: 205100 - DNA, 33 bp, Homo sapien
gttacacctcaataaagctggaagaaaatgaag

SEQ ID NO: 205101 - DNA, 33 bp, Homo sapien
gaaaatgaagccctgcagagatagagcaagtga

SEQ ID NO: 205102 - DNA, 33 bp, Homo sapien
gaaaatgaagccctgcggagatagagcaagtga

SEQ ID NO: 205103 - DNA, 33 bp, Homo sapien
tatagggagcccaaatcaacaagaccaacacag

SEQ ID NO: 205104 - DNA, 33 bp, Homo sapien
tatagggagcccaaattaacaagaccaacacag

SEQ ID NO: 205105 - DNA, 33 bp, Homo sapien
cctctcatcgataaaaggatgtcttctaaatag

SEQ ID NO: 205106 - DNA, 33 bp, Homo sapien
cctctcatcgataaaatgatgtcttctaaatag

SEQ ID NO: 205107 - DNA, 33 bp, Homo sapien
ttattcctcaaaaaaacgctcatataagtgaca

SEQ ID NO: 205108 - DNA, 33 bp, Homo sapien
ttattcctcaaaaaaatgctcatataagtgaca

SEQ ID NO: 205109 - DNA, 33 bp, Homo sapien
catctttccagtatcaagcctaagatattttga

SEQ ID NO: 205110 - DNA, 33 bp, Homo sapien
catctttccagtatcaggcctaagatattttga

SEQ ID NO: 205111 - DNA, 33 bp, Homo sapien
gccaaataaaaattggacagagaccctaaagaa

SEQ ID NO: 205112 - DNA, 33 bp, Homo sapien
gccaaataaaaattgggcagagaccctaaagaa

SEQ ID NO: 205113 - DNA, 33 bp, Homo sapien
tgggctctcagtgagaagtgacttgaatttaca

SEQ ID NO: 205114 - DNA, 33 bp, Homo sapien
tgggctctcagtgagaggtgacttgaatttaca

SEQ ID NO: 205115 - DNA, 33 bp, Homo sapien
agcctcaatcacctaaatgaattgtgcagttca

SEQ ID NO: 205116 - DNA, 33 bp, Homo sapien
agcctcaatcacctaactgaattgtgcagttca

SEQ ID NO: 205117 - DNA, 33 bp, Homo sapien
tctctagaatcaccacagatttgggcatgtatg

SEQ ID NO: 205118 - DNA, 33 bp, Homo sapien
tctctagaatcaccacggatttgggcatgtatg

SEQ ID NO: 205119 - DNA, 33 bp, Homo sapien
ccattacgtagtcacacatcgcaaactaaacgt

SEQ ID NO: 205120 - DNA, 33 bp, Homo sapien
ccattacgtagtcacatatcgcaaactaaacgt

SEQ ID NO: 205121 - DNA, 33 bp, Homo sapien
ctgtgtcctgagtaaaagcagaatcaagctgtg

SEQ ID NO: 205122 - DNA, 33 bp, Homo sapien
ctgtgtcctgagtaaatgcagaatcaagctgtg

SEQ ID NO: 205123 - DNA, 33 bp, Homo sapien
tgggagccaaaacacaccgacaagggggatgct

SEQ ID NO: 205124 - DNA, 33 bp, Homo sapien
tgggagccaaaacacatcgacaagggggatgct

SEQ ID NO: 205125 - DNA, 33 bp, Homo sapien
agagaacaatggagtaaatgcaatctggtaact

SEQ ID NO: 205126 - DNA, 33 bp, Homo sapien
agagaacaatggagtagatgcaatctggtaact

SEQ ID NO: 205127 - DNA, 33 bp, Homo sapien
tcaggtgaaatgaataggtacaacctcatggtt

SEQ ID NO: 205128 - DNA, 33 bp, Homo sapien
tcaggtgaaatgaatatgtacaacctcatggtt

SEQ ID NO: 205129 - DNA, 33 bp, Homo sapien
aaaaatgctgattccacgtggagcaaactgctc

SEQ ID NO: 205130 - DNA, 33 bp, Homo sapien
aaaaatgctgattccatgtggagcaaactgctc

SEQ ID NO: 205131 - DNA, 33 bp, Homo sapien
actcccacggattggccctttctgtcctcttga

SEQ ID NO: 205132 - DNA, 33 bp, Homo sapien
actcccacggattggctctttctgtcctcttga

SEQ ID NO: 205133 - DNA, 33 bp, Homo sapien
aagagtaaaagaggcacgaatgtacaagctgaa

SEQ ID NO: 205134 - DNA, 33 bp, Homo sapien
aagagtaaaagaggcatgaatgtacaagctgaa

SEQ ID NO: 205135 - DNA, 33 bp, Homo sapien
ttcaagggtatccactaaagaagccacatggtt

SEQ ID NO: 205136 - DNA, 33 bp, Homo sapien
ttcaagggtatccactgaagaagccacatggtt

SEQ ID NO: 205137 - DNA, 33 bp, Homo sapien
agacccaaccacagtaccttgaccgtgaatata

SEQ ID NO: 205138 - DNA, 33 bp, Homo sapien
agacccaaccacagtatcttgaccgtgaatata

SEQ ID NO: 205139 - DNA, 33 bp, Homo sapien
agcaatggtgtcataccagctttgctttccctg

SEQ ID NO: 205140 - DNA, 33 bp, Homo sapien
agcaatggtgtcatactagctttgctttccctg

SEQ ID NO: 205141 - DNA, 33 bp, Homo sapien
cccacctctcaattccagaccacttctcttaaa

SEQ ID NO: 205142 - DNA, 33 bp, Homo sapien
cccacctctcaattccggaccacttctcttaaa

SEQ ID NO: 205143 - DNA, 33 bp, Homo sapien
tctttcaggttctgagcacactgtggtgagtga

SEQ ID NO: 205144 - DNA, 33 bp, Homo sapien
tctttcaggttctgaggacactgtggtgagtga

SEQ ID NO: 205145 - DNA, 33 bp, Homo sapien
catggatatgacacaaaaagtacaaacccaaag

SEQ ID NO: 205146 - DNA, 33 bp, Homo sapien
catggatatgacacaacaagtacaaacccaaag

SEQ ID NO: 205147 - DNA, 33 bp, Homo sapien
aagttttgtattttcccgagtaagaaaacccac

SEQ ID NO: 205148 - DNA, 33 bp, Homo sapien
aagttttgtattttcctgagtaagaaaacccac

SEQ ID NO: 205149 - DNA, 33 bp, Homo sapien
agcttcttacgcccataaaagacaaaaccacta

SEQ ID NO: 205150 - DNA, 33 bp, Homo sapien
agcttcttacgcccatgaaagacaaaaccacta

SEQ ID NO: 205151 - DNA, 33 bp, Homo sapien
gttctcccctgcttcaacttgtacatgtgaacc

SEQ ID NO: 205152 - DNA, 33 bp, Homo sapien
gttctcccctgcttcagcttgtacatgtgaacc

SEQ ID NO: 205153 - DNA, 33 bp, Homo sapien
aattttctagcattcagaattgtctacagcatg

SEQ ID NO: 205154 - DNA, 33 bp, Homo sapien
aattttctagcattcataattgtctacagcatg

SEQ ID NO: 205155 - DNA, 33 bp, Homo sapien
ggggagaatgaatagaaataaacctagaataat

SEQ ID NO: 205156 - DNA, 33 bp, Homo sapien
ggggagaatgaatagacataaacctagaataat

SEQ ID NO: 205157 - DNA, 33 bp, Homo sapien
ataagtacttggaataacttttatatcgtgatg

SEQ ID NO: 205158 - DNA, 33 bp, Homo sapien
ataagtacttggaatagcttttatatcgtgatg

SEQ ID NO: 205159 - DNA, 33 bp, Homo sapien
cgtctggcttactgctcacacttgcttcaggga

SEQ ID NO: 205160 - DNA, 33 bp, Homo sapien
cgtctggcttactgctgacacttgcttcaggga

SEQ ID NO: 205161 - DNA, 33 bp, Homo sapien
ctgttatagcaactggacagcaatgttaagtct

SEQ ID NO: 205162 - DNA, 33 bp, Homo sapien
ctgttatagcaactgggcagcaatgttaagtct

SEQ ID NO: 205163 - DNA, 33 bp, Homo sapien
cttccaaactttactacctgatgcttcataggc

SEQ ID NO: 205164 - DNA, 33 bp, Homo sapien
cttccaaactttactatctgatgcttcataggc

SEQ ID NO: 205165 - DNA, 33 bp, Homo sapien
aagcctatgtggctgggacacagtgcaccagaa

SEQ ID NO: 205166 - DNA, 33 bp, Homo sapien
aagcctatgtggctggtacacagtgcaccagaa

SEQ ID NO: 205167 - DNA, 33 bp, Homo sapien
gttcacagcatgatcgccagaagtagattctat

SEQ ID NO: 205168 - DNA, 33 bp, Homo sapien
gttcacagcatgatcggcagaagtagattctat

SEQ ID NO: 205169 - DNA, 33 bp, Homo sapien
acctaacaacagtacaaatgctacgtaaacagt

SEQ ID NO: 205170 - DNA, 33 bp, Homo sapien
acctaacaacagtacagatgctacgtaaacagt

SEQ ID NO: 205171 - DNA, 33 bp, Homo sapien
agttccaggcaaagagccactgcagtagaaact

SEQ ID NO: 205172 - DNA, 33 bp, Homo sapien
agttccaggcaaagagtcactgcagtagaaact

SEQ ID NO: 205173 - DNA, 33 bp, Homo sapien
tcccttcaaggtctaacggcctatgttctatgt

SEQ ID NO: 205174 - DNA, 33 bp, Homo sapien
tcccttcaaggtctaatggcctatgttctatgt

SEQ ID NO: 205175 - DNA, 33 bp, Homo sapien
tagaatatctcccggccacgtctctcagtcaga

SEQ ID NO: 205176 - DNA, 33 bp, Homo sapien
tagaatatctcccggctacgtctctcagtcaga

SEQ ID NO: 205177 - DNA, 33 bp, Homo sapien
ggatgactgtcgatcacgagggagctaaggtgc

SEQ ID NO: 205178 - DNA, 33 bp, Homo sapien
ggatgactgtcgatcatgagggagctaaggtgc

SEQ ID NO: 205179 - DNA, 33 bp, Homo sapien
ctcctactctctctccaatgcacaaaccaccag

SEQ ID NO: 205180 - DNA, 33 bp, Homo sapien
ctcctactctctctccgatgcacaaaccaccag

SEQ ID NO: 205181 - DNA, 33 bp, Homo sapien
gcacacactacatgtcagacacagtttaggcaa

SEQ ID NO: 205182 - DNA, 33 bp, Homo sapien
gcacacactacatgtcggacacagtttaggcaa

SEQ ID NO: 205183 - DNA, 33 bp, Homo sapien
tcactcagcttgtcccaggatcctccattccca

SEQ ID NO: 205184 - DNA, 33 bp, Homo sapien
tcactcagcttgtcccgggatcctccattccca

SEQ ID NO: 205185 - DNA, 33 bp, Homo sapien
aggggaataataaggccgaattgagtgcaagag

SEQ ID NO: 205186 - DNA, 33 bp, Homo sapien
aggggaataataaggctgaattgagtgcaagag

SEQ ID NO: 205187 - DNA, 33 bp, Homo sapien
cttactctagcagtgaaattaatgtcattgact

SEQ ID NO: 205188 - DNA, 33 bp, Homo sapien
cttactctagcagtgagattaatgtcattgact

SEQ ID NO: 205189 - DNA, 33 bp, Homo sapien
cctagatatgagccaaggccaagtacacagacg

SEQ ID NO: 205190 - DNA, 33 bp, Homo sapien
cctagatatgagccaatgccaagtacacagacg

SEQ ID NO: 205191 - DNA, 33 bp, Homo sapien
cttctatatgctataaatcgtacttcacttcct

SEQ ID NO: 205192 - DNA, 33 bp, Homo sapien
cttctatatgctataagtcgtacttcacttcct

SEQ ID NO: 205193 - DNA, 33 bp, Homo sapien
ggcactggttcttacaaggggacatagattgct

SEQ ID NO: 205194 - DNA, 33 bp, Homo sapien
ggcactggttcttacagggggacatagattgct

SEQ ID NO: 205195 - DNA, 33 bp, Homo sapien
tcatttgtatggtttccctgttagtgagtccag

SEQ ID NO: 205196 - DNA, 33 bp, Homo sapien
tcatttgtatggtttctctgttagtgagtccag

SEQ ID NO: 205197 - DNA, 33 bp, Homo sapien
gtcacttcactaaaaaccagaaactcaaacatg

SEQ ID NO: 205198 - DNA, 33 bp, Homo sapien
gtcacttcactaaaaatcagaaactcaaacatg

SEQ ID NO: 205199 - DNA, 33 bp, Homo sapien
gtccaacaggcacacaataacacttggggtact

SEQ ID NO: 205200 - DNA, 33 bp, Homo sapien
gtccaacaggcacacagtaacacttggggtact

SEQ ID NO: 205201 - DNA, 33 bp, Homo sapien
cgtggctcgaggttaccggtactttgtgtactt

SEQ ID NO: 205202 - DNA, 33 bp, Homo sapien
cgtggctcgaggttactggtactttgtgtactt

SEQ ID NO: 205203 - DNA, 33 bp, Homo sapien
ttgggaggggcctgaccgaactgcagccaccta

SEQ ID NO: 205204 - DNA, 33 bp, Homo sapien
ttgggaggggcctgactgaactgcagccaccta

SEQ ID NO: 205205 - DNA, 33 bp, Homo sapien
agatgtgagggtaagacagaaacactgaaaggt

SEQ ID NO: 205206 - DNA, 33 bp, Homo sapien
agatgtgagggtaagatagaaacactgaaaggt

SEQ ID NO: 205207 - DNA, 33 bp, Homo sapien
gctgtaggaattcagacgtaaattagggcgctc

SEQ ID NO: 205208 - DNA, 33 bp, Homo sapien
gctgtaggaattcagatgtaaattagggcgctc

SEQ ID NO: 205209 - DNA, 33 bp, Homo sapien
ctccaggaaagctgatgagcgatctggtgaact

SEQ ID NO: 205210 - DNA, 33 bp, Homo sapien
ctccaggaaagctgattagcgatctggtgaact

SEQ ID NO: 205211 - DNA, 33 bp, Homo sapien
caaaccccttacataccggtctggaaacttgaa

SEQ ID NO: 205212 - DNA, 33 bp, Homo sapien
caaaccccttacatactggtctggaaacttgaa

SEQ ID NO: 205213 - DNA, 33 bp, Homo sapien
tctaaggatgggaagacgtagcacaacaggagg

SEQ ID NO: 205214 - DNA, 33 bp, Homo sapien
tctaaggatgggaagatgtagcacaacaggagg

SEQ ID NO: 205215 - DNA, 33 bp, Homo sapien
ccaactgattttagcccgattttcccctcatag

SEQ ID NO: 205216 - DNA, 33 bp, Homo sapien
ccaactgattttagcctgattttcccctcatag

SEQ ID NO: 205217 - DNA, 33 bp, Homo sapien
attccctgaatgctaccagtgtcaggttcttta

SEQ ID NO: 205218 - DNA, 33 bp, Homo sapien
attccctgaatgctactagtgtcaggttcttta

SEQ ID NO: 205219 - DNA, 33 bp, Homo sapien
gatatttttaaaacaaatagagagatgtgtgga

SEQ ID NO: 205220 - DNA, 33 bp, Homo sapien
gatatttttaaaacaactagagagatgtgtgga

SEQ ID NO: 205221 - DNA, 33 bp, Homo sapien
attcaagtaaggtaaacgcaaacctctgactct

SEQ ID NO: 205222 - DNA, 33 bp, Homo sapien
attcaagtaaggtaaatgcaaacctctgactct

SEQ ID NO: 205223 - DNA, 33 bp, Homo sapien
cgttattacattgcacagtctctgtttttatgt

SEQ ID NO: 205224 - DNA, 33 bp, Homo sapien
cgttattacattgcacggtctctgtttttatgt

SEQ ID NO: 205225 - DNA, 33 bp, Homo sapien
tatagcaaacttcttgaattgcgagactacttg

SEQ ID NO: 205226 - DNA, 33 bp, Homo sapien
tatagcaaacttcttggattgcgagactacttg

SEQ ID NO: 205227 - DNA, 33 bp, Homo sapien
gcaatggtgaaggctacacttttaagaaaagat

SEQ ID NO: 205228 - DNA, 33 bp, Homo sapien
gcaatggtgaaggctatacttttaagaaaagat

SEQ ID NO: 205229 - DNA, 33 bp, Homo sapien
agagattgatgtggtacatttagctgaattttg

SEQ ID NO: 205230 - DNA, 33 bp, Homo sapien
agagattgatgtggtatatttagctgaattttg

SEQ ID NO: 205231 - DNA, 33 bp, Homo sapien
ctgcagtttgtcttcacggtcagcatgccgtca

SEQ ID NO: 205232 - DNA, 33 bp, Homo sapien
ctgcagtttgtcttcatggtcagcatgccgtca

SEQ ID NO: 205233 - DNA, 33 bp, Homo sapien
acaatttctccttcacggccagtttgagataag

SEQ ID NO: 205234 - DNA, 33 bp, Homo sapien
acaatttctccttcactgccagtttgagataag

SEQ ID NO: 205235 - DNA, 33 bp, Homo sapien
ctctggtgattagctacgtgcttgaggtggcct

SEQ ID NO: 205236 - DNA, 33 bp, Homo sapien
ctctggtgattagctatgtgcttgaggtggcct

SEQ ID NO: 205237 - DNA, 33 bp, Homo sapien
aatacactaaaaatgaataattcatagtccgag

SEQ ID NO: 205238 - DNA, 33 bp, Homo sapien
aatacactaaaaatgagtaattcatagtccgag

SEQ ID NO: 205239 - DNA, 33 bp, Homo sapien
gggtcaggctggaacaaagtatacatgactttg

SEQ ID NO: 205240 - DNA, 33 bp, Homo sapien
gggtcaggctggaacacagtatacatgactttg

SEQ ID NO: 205241 - DNA, 33 bp, Homo sapien
gctcgtggtcagcagacaggctttgcttgtggt

SEQ ID NO: 205242 - DNA, 33 bp, Homo sapien
gctcgtggtcagcagataggctttgcttgtggt

SEQ ID NO: 205243 - DNA, 33 bp, Homo sapien
tctgctgaccacgagcaagaaattaactcttta

SEQ ID NO: 205244 - DNA, 33 bp, Homo sapien
tctgctgaccacgagcgagaaattaactcttta

SEQ ID NO: 205245 - DNA, 33 bp, Homo sapien
aattaacacatgatcaatagagaaaaaaacaga

SEQ ID NO: 205246 - DNA, 33 bp, Homo sapien
aattaacacatgatcagtagagaaaaaaacaga

SEQ ID NO: 205247 - DNA, 33 bp, Homo sapien
cctctgtcctcacaaacctgtgggaagcaagct

SEQ ID NO: 205248 - DNA, 33 bp, Homo sapien
cctctgtcctcacaaagctgtgggaagcaagct

SEQ ID NO: 205249 - DNA, 33 bp, Homo sapien
caagttttaactggaaagaggtacaagcatttg

SEQ ID NO: 205250 - DNA, 33 bp, Homo sapien
caagttttaactggaacgaggtacaagcatttg

SEQ ID NO: 205251 - DNA, 33 bp, Homo sapien
tattgacggcaaaaaaatagctgcgtagaagat

SEQ ID NO: 205252 - DNA, 33 bp, Homo sapien
tattgacggcaaaaaagtagctgcgtagaagat

SEQ ID NO: 205253 - DNA, 33 bp, Homo sapien
ctttgtgaggacttaaaaggacggaacaagtga

SEQ ID NO: 205254 - DNA, 33 bp, Homo sapien
ctttgtgaggacttaagaggacggaacaagtga

SEQ ID NO: 205255 - DNA, 33 bp, Homo sapien
cttgcaatgctggggggaaaacaaaaaagcagg

SEQ ID NO: 205256 - DNA, 33 bp, Homo sapien
cttgcaatgctgggggtaaaacaaaaaagcagg

SEQ ID NO: 205257 - DNA, 33 bp, Homo sapien
aaaagttacttttgccaaattctatgggtccaa

SEQ ID NO: 205258 - DNA, 33 bp, Homo sapien
aaaagttacttttgccgaattctatgggtccaa

SEQ ID NO: 205259 - DNA, 33 bp, Homo sapien
gctctttctccaaaccaattgtaagatgtcccc

SEQ ID NO: 205260 - DNA, 33 bp, Homo sapien
gctctttctccaaacccattgtaagatgtcccc

SEQ ID NO: 205261 - DNA, 33 bp, Homo sapien
cctccagatgtgctaactgaatattttccatgg

SEQ ID NO: 205262 - DNA, 33 bp, Homo sapien
cctccagatgtgctaattgaatattttccatgg

SEQ ID NO: 205263 - DNA, 33 bp, Homo sapien
gtcggccaagcccccactggagattcagaatgc

SEQ ID NO: 205264 - DNA, 33 bp, Homo sapien
gtcggccaagcccccagtggagattcagaatgc

SEQ ID NO: 205265 - DNA, 33 bp, Homo sapien
ccacacaaagcaggcacgtgaactctgctgaag

SEQ ID NO: 205266 - DNA, 33 bp, Homo sapien
ccacacaaagcaggcaggtgaactctgctgaag

SEQ ID NO: 205267 - DNA, 33 bp, Homo sapien
cgtgctcttagagagacgtccagcagatgagca

SEQ ID NO: 205268 - DNA, 33 bp, Homo sapien
cgtgctcttagagagatgtccagcagatgagca

SEQ ID NO: 205269 - DNA, 33 bp, Homo sapien
gttggtagacttggaaaaagctggagtttacaa

SEQ ID NO: 205270 - DNA, 33 bp, Homo sapien
gttggtagacttggaacaagctggagtttacaa

SEQ ID NO: 205271 - DNA, 33 bp, Homo sapien
tacttcagccccaaacaattttccacgcagcgg

SEQ ID NO: 205272 - DNA, 33 bp, Homo sapien
tacttcagccccaaacgattttccacgcagcgg

SEQ ID NO: 205273 - DNA, 33 bp, Homo sapien
ctcagaagccaaatgagaagttgaaactgtaat

SEQ ID NO: 205274 - DNA, 33 bp, Homo sapien
ctcagaagccaaatgataagttgaaactgtaat

SEQ ID NO: 205275 - DNA, 33 bp, Homo sapien
gtgcctttcaacccagacaggtaggaagttccc

SEQ ID NO: 205276 - DNA, 33 bp, Homo sapien
gtgcctttcaacccaggcaggtaggaagttccc

SEQ ID NO: 205277 - DNA, 33 bp, Homo sapien
ttcccttagctacccaatgaaaatcctcctgct

SEQ ID NO: 205278 - DNA, 33 bp, Homo sapien
ttcccttagctacccagtgaaaatcctcctgct

SEQ ID NO: 205279 - DNA, 33 bp, Homo sapien
tcctaaaggtgctaaacagttttgcatcaccca

SEQ ID NO: 205280 - DNA, 33 bp, Homo sapien
tcctaaaggtgctaaagagttttgcatcaccca

SEQ ID NO: 205281 - DNA, 33 bp, Homo sapien
tactgtttcgtactagacaacttcccaactgcc

SEQ ID NO: 205282 - DNA, 33 bp, Homo sapien
tactgtttcgtactaggcaacttcccaactgcc

SEQ ID NO: 205283 - DNA, 33 bp, Homo sapien
gtcagaaggccaagagaagaaactttggctcca

SEQ ID NO: 205284 - DNA, 33 bp, Homo sapien
gtcagaaggccaagaggagaaactttggctcca

SEQ ID NO: 205285 - DNA, 33 bp, Homo sapien
gctgtgtgaagaacaactcacattttgtttaag

SEQ ID NO: 205286 - DNA, 33 bp, Homo sapien
gctgtgtgaagaacaagtcacattttgtttaag

SEQ ID NO: 205287 - DNA, 33 bp, Homo sapien
cacagcccaaactcaccggtgttaagctccatc

SEQ ID NO: 205288 - DNA, 33 bp, Homo sapien
cacagcccaaactcacgggtgttaagctccatc

SEQ ID NO: 205289 - DNA, 33 bp, Homo sapien
acactgagcattttgaataagactggtagtttg

SEQ ID NO: 205290 - DNA, 33 bp, Homo sapien
acactgagcattttgagtaagactggtagtttg

SEQ ID NO: 205291 - DNA, 33 bp, Homo sapien
tgtcagaagatgaacaaccggttcctggaggag

SEQ ID NO: 205292 - DNA, 33 bp, Homo sapien
tgtcagaagatgaacagccggttcctggaggag

SEQ ID NO: 205293 - DNA, 33 bp, Homo sapien
ctttgcggcatcaccaatcattcgttcagtgtc

SEQ ID NO: 205294 - DNA, 33 bp, Homo sapien
ctttgcggcatcaccagtcattcgttcagtgtc

SEQ ID NO: 205295 - DNA, 33 bp, Homo sapien; identical to SEQ ID NO: 205293

SEQ ID NO: 205296 - DNA, 33 bp, Homo sapien; identical to SEQ ID NO: 205294

SEQ ID NO: 205297 - DNA, 33 bp, Homo sapien
cttttggtccttgtcacggcaaacatcaactcc

SEQ ID NO: 205298 - DNA, 33 bp, Homo sapien
cttttggtccttgtcatggcaaacatcaactcc

SEQ ID NO: 205299 - DNA, 33 bp, Homo sapien
tcattttgaatttaccagctcaggaaagaagat

SEQ ID NO: 205300 - DNA, 33 bp, Homo sapien
tcattttgaatttaccggctcaggaaagaagat

SEQ ID NO: 205301 - DNA, 33 bp, Homo sapien
ctttagaaatagaaaccgagatgctgaccaaga

SEQ ID NO: 205302 - DNA, 33 bp, Homo sapien
ctttagaaatagaaactgagatgctgaccaaga

SEQ ID NO: 205303 - DNA, 33 bp, Homo sapien
tggaaatgaaggaaagaaaactgctcttggaaa

SEQ ID NO: 205304 - DNA, 33 bp, Homo sapien
tggaaatgaaggaaaggaaactgctcttggaaa

SEQ ID NO: 205305 - DNA, 33 bp, Homo sapien
atgtcttagaggacaccgaaagcattaactgta

SEQ ID NO: 205306 - DNA, 33 bp, Homo sapien
atgtcttagaggacactgaaagcattaactgta

SEQ ID NO: 205307 - DNA, 33 bp, Homo sapien
tccagcaacattgaacaaaccaatgaaaataat

SEQ ID NO: 205308 - DNA, 33 bp, Homo sapien
tccagcaacattgaacgaaccaatgaaaataat

SEQ ID NO: 205309 - DNA, 33 bp, Homo sapien
ttctaaatgtagttcaccacttgatcattcctt

SEQ ID NO: 205310 - DNA, 33 bp, Homo sapien
ttctaaatgtagttcatcacttgatcattcctt

SEQ ID NO: 205311 - DNA, 33 bp, Homo sapien
taggcaagataggtccaacattaaagaaaaaga

SEQ ID NO: 205312 - DNA, 33 bp, Homo sapien
taggcaagataggtccgacattaaagaaaaaga

SEQ ID NO: 205313 - DNA, 33 bp, Homo sapien
atttcttgggtacaaaattcaatatacatccat

SEQ ID NO: 205314 - DNA, 33 bp, Homo sapien
atttcttgggtacaaagttcaatatacatccat

SEQ ID NO: 205315 - DNA, 33 bp, Homo sapien
agaggcggcttttggaggatgagattcttgaaa

SEQ ID NO: 205316 - DNA, 33 bp, Homo sapien
agaggcggcttttggatgatgagattcttgaaa

SEQ ID NO: 205317 - DNA, 33 bp, Homo sapien
tctctgtctcacgataccaccaagtggcactac

SEQ ID NO: 205318 - DNA, 33 bp, Homo sapien
tctctgtctcacgatatcaccaagtggcactac

SEQ ID NO: 205319 - DNA, 33 bp, Homo sapien
ccatttatacccgggacgtagtaagatgcagga

SEQ ID NO: 205320 - DNA, 33 bp, Homo sapien
ccatttatacccgggatgtagtaagatgcagga

SEQ ID NO: 205321 - DNA, 33 bp, Homo sapien
tcagtaaatatttgtacaggaaaagaggaaagg

SEQ ID NO: 205322 - DNA, 33 bp, Homo sapien
tcagtaaatatttgtataggaaaagaggaaagg

SEQ ID NO: 205323 - DNA, 33 bp, Homo sapien
attttttcctagcaagaagagctaaagtagcag

SEQ ID NO: 205324 - DNA, 33 bp, Homo sapien
attttttcctagcaaggagagctaaagtagcag

SEQ ID NO: 205325 - DNA, 33 bp, Homo sapien
tcagcaaggtcttggcactattctggggtgttc

SEQ ID NO: 205326 - DNA, 33 bp, Homo sapien
tcagcaaggtcttggcgctattctggggtgttc

SEQ ID NO: 205327 - DNA, 33 bp, Homo sapien
tttagatctctattaaaagctagagcaggaaaa

SEQ ID NO: 205328 - DNA, 33 bp, Homo sapien
tttagatctctattaagagctagagcaggaaaa

SEQ ID NO: 205329 - DNA, 33 bp, Homo sapien
acaataacacctcttacagacagcagtatacat

SEQ ID NO: 205330 - DNA, 33 bp, Homo sapien
acaataacacctcttatagacagcagtatacat

SEQ ID NO: 205331 - DNA, 33 bp, Homo sapien
gtactcagctccaaccaactgtggccatgcaag

SEQ ID NO: 205332 - DNA, 33 bp, Homo sapien
gtactcagctccaaccgactgtggccatgcaag

SEQ ID NO: 205333 - DNA, 33 bp, Homo sapien
gggttagaatggatataaaacatgaggtaggaa

SEQ ID NO: 205334 - DNA, 33 bp, Homo sapien
gggttagaatggatatgaaacatgaggtaggaa

SEQ ID NO: 205335 - DNA, 33 bp, Homo sapien
ttctatcttgttaaatcatgctaaaacacactc

SEQ ID NO: 205336 - DNA, 33 bp, Homo sapien
ttctatcttgttaaatgatgctaaaacacactc

SEQ ID NO: 205337 - DNA, 33 bp, Homo sapien
aagccaagtccttgaaatgaaagctttgggcat

SEQ ID NO: 205338 - DNA, 33 bp, Homo sapien
aagccaagtccttgaagtgaaagctttgggcat

SEQ ID NO: 205339 - DNA, 33 bp, Homo sapien
aaccaccaggaaagaacgactactggacactgg

SEQ ID NO: 205340 - DNA, 33 bp, Homo sapien
aaccaccaggaaagaatgactactggacactgg

SEQ ID NO: 205341 - DNA, 33 bp, Homo sapien
tagaattcttggttgaaaattgttgttcttcaa

SEQ ID NO: 205342 - DNA, 33 bp, Homo sapien
tagaattcttggttgagaattgttgttcttcaa

SEQ ID NO: 205343 - DNA, 33 bp, Homo sapien
agtttttaatagaccaagcatactattccattg

SEQ ID NO: 205344 - DNA, 33 bp, Homo sapien
agtttttaatagaccatgcatactattccattg

SEQ ID NO: 205345 - DNA, 33 bp, Homo sapien
tggacgaggcactaggaatcaacaatgaataag

SEQ ID NO: 205346 - DNA, 33 bp, Homo sapien
tggacgaggcactaggcatcaacaatgaataag

SEQ ID NO: 205347 - DNA, 33 bp, Homo sapien
aatttttttgtctctccctgacatttcccgtct

SEQ ID NO: 205348 - DNA, 33 bp, Homo sapien
aatttttttgtctctctctgacatttcccgtct

SEQ ID NO: 205349 - DNA, 33 bp, Homo sapien
aaatgtagagaaaaacaatccaggaaggagaag

SEQ ID NO: 205350 - DNA, 33 bp, Homo sapien
aaatgtagagaaaaacgatccaggaaggagaag

SEQ ID NO: 205351 - DNA, 33 bp, Homo sapien
agaaggaggagacgacggccttgaaggagccca

SEQ ID NO: 205352 - DNA, 33 bp, Homo sapien
agaaggaggagacgactgccttgaaggagccca

SEQ ID NO: 205353 - DNA, 33 bp, Homo sapien
gaagagtaacggatgacaatggagatgatcgtg

SEQ ID NO: 205354 - DNA, 33 bp, Homo sapien
gaagagtaacggatgataatggagatgatcgtg

SEQ ID NO: 205355 - DNA, 33 bp, Homo sapien
aagtgtcacagacaacaagatgagattaagtgt

SEQ ID NO: 205356 - DNA, 33 bp, Homo sapien
aagtgtcacagacaacgagatgagattaagtgt

SEQ ID NO: 205357 - DNA, 33 bp, Homo sapien
atatgtaacttcagaaacccggaagtggagaac

SEQ ID NO: 205358 - DNA, 33 bp, Homo sapien
atatgtaacttcagaatcccggaagtggagaac

SEQ ID NO: 205359 - DNA, 33 bp, Homo sapien
aagctctatgttaaaacagctagcaggcactgt

SEQ ID NO: 205360 - DNA, 33 bp, Homo sapien
aagctctatgttaaaagagctagcaggcactgt

SEQ ID NO: 205361 - DNA, 33 bp, Homo sapien
cgctgctccttcttctgactcaaagtcttgaga

SEQ ID NO: 205362 - DNA, 33 bp, Homo sapien
cgctgctccttcttcttactcaaagtcttgaga

SEQ ID NO: 205363 - DNA, 33 bp, Homo sapien
atgtttatgaactcaaaattgtgctgggatcaa

SEQ ID NO: 205364 - DNA, 33 bp, Homo sapien
atgtttatgaactcaagattgtgctgggatcaa

SEQ ID NO: 205365 - DNA, 33 bp, Homo sapien
cagacatccctgctggaatcagttattgacagg

SEQ ID NO: 205366 - DNA, 33 bp, Homo sapien
cagacatccctgctggtatcagttattgacagg

SEQ ID NO: 205367 - DNA, 33 bp, Homo sapien
tggtgatccttctcatcaaacacagagttcatt

SEQ ID NO: 205368 - DNA, 33 bp, Homo sapien
tggtgatccttctcatgaaacacagagttcatt

SEQ ID NO: 205369 - DNA, 33 bp, Homo sapien
ctgaggatccaggtccacatagcctggagaaaa

SEQ ID NO: 205370 - DNA, 33 bp, Homo sapien
ctgaggatccaggtccgcatagcctggagaaaa

SEQ ID NO: 205371 - DNA, 33 bp, Homo sapien
aggctattccagcccccagacattaaacttctc

SEQ ID NO: 205372 - DNA, 33 bp, Homo sapien
aggctattccagccccgagacattaaacttctc

SEQ ID NO: 205373 - DNA, 33 bp, Homo sapien
gttagagatgatgaggaatgttggaaatagata

SEQ ID NO: 205374 - DNA, 33 bp, Homo sapien
gttagagatgatgagggatgttggaaatagata

SEQ ID NO: 205375 - DNA, 33 bp, Homo sapien
atcttatctctgttaacgttgccacaagttgat

SEQ ID NO: 205376 - DNA, 33 bp, Homo sapien
atcttatctctgttaatgttgccacaagttgat

SEQ ID NO: 205377 - DNA, 33 bp, Homo sapien
tgattgatcagcaacacctattgtggatatggg

SEQ ID NO: 205378 - DNA, 33 bp, Homo sapien
tgattgatcagcaacatctattgtggatatggg

SEQ ID NO: 205379 - DNA, 33 bp, Homo sapien
gatatactgagcctcaaagaaacttacacacgt

SEQ ID NO: 205380 - DNA, 33 bp, Homo sapien
gatatactgagcctcacagaaacttacacacgt

SEQ ID NO: 205381 - DNA, 33 bp, Homo sapien
tcttgctcctcctccccgagaatatccacatca

SEQ ID NO: 205382 - DNA, 33 bp, Homo sapien
tcttgctcctcctccctgagaatatccacatca

SEQ ID NO: 205383 - DNA, 33 bp, Homo sapien
ttagcacataccttgaacagcccgggtgaggca

SEQ ID NO: 205384 - DNA, 33 bp, Homo sapien
ttagcacataccttgatcagcccgggtgaggca

SEQ ID NO: 205385 - DNA, 33 bp, Homo sapien
catgattcccaagcaagatcctcacctccttgc

SEQ ID NO: 205386 - DNA, 33 bp, Homo sapien
catgattcccaagcaatatcctcacctccttgc

SEQ ID NO: 205387 - DNA, 33 bp, Homo sapien
gtgagaacacactaaacttgtctttctatgtct

SEQ ID NO: 205388 - DNA, 33 bp, Homo sapien
gtgagaacacactaaatttgtctttctatgtct

SEQ ID NO: 205389 - DNA, 33 bp, Homo sapien
cacttctaaagtcttacatgtcacaaagctttt

SEQ ID NO: 205390 - DNA, 33 bp, Homo sapien
cacttctaaagtcttatatgtcacaaagctttt

SEQ ID NO: 205391 - DNA, 33 bp, Homo sapien
gaactttggagtcaacaagtctttggttccaat

SEQ ID NO: 205392 - DNA, 33 bp, Homo sapien
gaactttggagtcaacgagtctttggttccaat

SEQ ID NO: 205393 - DNA, 33 bp, Homo sapien
agtggctacaggatgaactgggactcaaacaca

SEQ ID NO: 205394 - DNA, 33 bp, Homo sapien
agtggctacaggatgagctgggactcaaacaca

SEQ ID NO: 205395 - DNA, 33 bp, Homo sapien
aacattacacatacaaaaagctcatcaaactct

SEQ ID NO: 205396 - DNA, 33 bp, Homo sapien
aacattacacatacaagaagctcatcaaactct

SEQ ID NO: 205397 - DNA, 33 bp, Homo sapien
aagcttattcctacaactcaaacagagccccca

SEQ ID NO: 205398 - DNA, 33 bp, Homo sapien
aagcttattcctacaattcaaacagagccccca

SEQ ID NO: 205399 - DNA, 33 bp, Homo sapien
atttgtttatattctacgggaacgagttggttg

SEQ ID NO: 205400 - DNA, 33 bp, Homo sapien
atttgtttatattctatgggaacgagttggttg

SEQ ID NO: 205401 - DNA, 33 bp, Homo sapien
agggaataggaaaaagccaagtttgtttgtagc

SEQ ID NO: 205402 - DNA, 33 bp, Homo sapien
agggaataggaaaaaggcaagtttgtttgtagc

SEQ ID NO: 205403 - DNA, 33 bp, Homo sapien
ttgctctgtgtgccaccggtaagatgaggcttg

SEQ ID NO: 205404 - DNA, 33 bp, Homo sapien
ttgctctgtgtgccacgggtaagatgaggcttg

SEQ ID NO: 205405 - DNA, 33 bp, Homo sapien
gctgggtggagttaccagggtgtgggcagatcc

SEQ ID NO: 205406 - DNA, 33 bp, Homo sapien
gctgggtggagttaccggggtgtgggcagatcc

SEQ ID NO: 205407 - DNA, 33 bp, Homo sapien
cttctcccacttccgacgtgaaaggctgccctg

SEQ ID NO: 205408 - DNA, 33 bp, Homo sapien
cttctcccacttccgatgtgaaaggctgccctg

SEQ ID NO: 205409 - DNA, 33 bp, Homo sapien
aactgtggaaagctccacctacccaatgcagcc

SEQ ID NO: 205410 - DNA, 33 bp, Homo sapien
aactgtggaaagctccgcctacccaatgcagcc

SEQ ID NO: 205411 - DNA, 33 bp, Homo sapien
aaaacgagaaagagtacgctttggaagacttgc

SEQ ID NO: 205412 - DNA, 33 bp, Homo sapien
aaaacgagaaagagtatgctttggaagacttgc

SEQ ID NO: 205413 - DNA, 33 bp, Homo sapien
ttagagcttagaagtcaaggtatataggaaaaa

SEQ ID NO: 205414 - DNA, 33 bp, Homo sapien
ttagagcttagaagtcgaggtatataggaaaaa

SEQ ID NO: 205415 - DNA, 33 bp, Homo sapien
tcagagagtagcgttcaacatcatttatacaag

SEQ ID NO: 205416 - DNA, 33 bp, Homo sapien
tcagagagtagcgttcgacatcatttatacaag

SEQ ID NO: 205417 - DNA, 33 bp, Homo sapien
acaggtattcagttggaaacaagtatatagtca

SEQ ID NO: 205418 - DNA, 33 bp, Homo sapien
acaggtattcagttgggaacaagtatatagtca

SEQ ID NO: 205419 - DNA, 33 bp, Homo sapien
agaggcagagggactaaatcggagtatctccat

SEQ ID NO: 205420 - DNA, 33 bp, Homo sapien
agaggcagagggactacatcggagtatctccat

SEQ ID NO: 205421 - DNA, 33 bp, Homo sapien
aacgttggacctaacaatctaaattgatatttt

SEQ ID NO: 205422 - DNA, 33 bp, Homo sapien
aacgttggacctaacagtctaaattgatatttt

SEQ ID NO: 205423 - DNA, 33 bp, Homo sapien
ttaggcaggttctacaccagagaggaatggcaa

SEQ ID NO: 205424 - DNA, 33 bp, Homo sapien
ttaggcaggttctacatcagagaggaatggcaa

SEQ ID NO: 205425 - DNA, 33 bp, Homo sapien
tggtaatcaaggggccaaccagatgctttctgc

SEQ ID NO: 205426 - DNA, 33 bp, Homo sapien
tggtaatcaaggggccgaccagatgctttctgc

SEQ ID NO: 205427 - DNA, 33 bp, Homo sapien
aaaagctccaagatgaagatctccaaacagcct

SEQ ID NO: 205428 - DNA, 33 bp, Homo sapien
aaaagctccaagatgaggatctccaaacagcct

SEQ ID NO: 205429 - DNA, 33 bp, Homo sapien
atgccttactactgggccatccttggtctatgt

SEQ ID NO: 205430 - DNA, 33 bp, Homo sapien
atgccttactactgggtcatccttggtctatgt

SEQ ID NO: 205431 - DNA, 33 bp, Homo sapien
ccaagacaagaaactacataactgagagagagg

SEQ ID NO: 205432 - DNA, 33 bp, Homo sapien
ccaagacaagaaactatataactgagagagagg

SEQ ID NO: 205433 - DNA, 33 bp, Homo sapien
gagcagagcatagagcacttgtattctgggcca

SEQ ID NO: 205434 - DNA, 33 bp, Homo sapien
gagcagagcatagagcgcttgtattctgggcca

SEQ ID NO: 205435 - DNA, 33 bp, Homo sapien
atctgctttgtccagcaactgagaaataataat

SEQ ID NO: 205436 - DNA, 33 bp, Homo sapien
atctgctttgtccagcgactgagaaataataat

SEQ ID NO: 205437 - DNA, 33 bp, Homo sapien
tcgcccaggtagtgaccgatcatctccggcttg

SEQ ID NO: 205438 - DNA, 33 bp, Homo sapien
tcgcccaggtagtgactgatcatctccggcttg

SEQ ID NO: 205439 - DNA, 33 bp, Homo sapien
ggcttgtagcccttaaattaaacctggcctaaa

SEQ ID NO: 205440 - DNA, 33 bp, Homo sapien
ggcttgtagcccttaatttaaacctggcctaaa

SEQ ID NO: 205441 - DNA, 33 bp, Homo sapien
ccttataagtgttctcaatctatctctctgcca

SEQ ID NO: 205442 - DNA, 33 bp, Homo sapien
ccttataagtgttctcgatctatctctctgcca

SEQ ID NO: 205443 - DNA, 33 bp, Homo sapien
taatcctgaaagaagcagatcaaaaagaacagt

SEQ ID NO: 205444 - DNA, 33 bp, Homo sapien
taatcctgaaagaagcggatcaaaaagaacagt

SEQ ID NO: 205445 - DNA, 33 bp, Homo sapien
agatgaacattgcaagcagatgaacaggtgaac

SEQ ID NO: 205446 - DNA, 33 bp, Homo sapien
agatgaacattgcaagtagatgaacaggtgaac

SEQ ID NO: 205447 - DNA, 33 bp, Homo sapien
caaaccaattgggaaagaacagcctttacaatg

SEQ ID NO: 205448 - DNA, 33 bp, Homo sapien
caaaccaattgggaaataacagcctttacaatg

SEQ ID NO: 205449 - DNA, 33 bp, Homo sapien
aacttacacgaattcaactacttgtaaatgtaa

SEQ ID NO: 205450 - DNA, 33 bp, Homo sapien
aacttacacgaattcatctacttgtaaatgtaa

SEQ ID NO: 205451 - DNA, 33 bp, Homo sapien
aagaaaaagaaaaatcactgagctactgtatcc

SEQ ID NO: 205452 - DNA, 33 bp, Homo sapien
aagaaaaagaaaaatcgctgagctactgtatcc

SEQ ID NO: 205453 - DNA, 33 bp, Homo sapien
agacagaaagagatggaatttgttaccctacat

SEQ ID NO: 205454 - DNA, 33 bp, Homo sapien
agacagaaagagatggcatttgttaccctacat

SEQ ID NO: 205455 - DNA, 33 bp, Homo sapien
cagatcatgttcactcaaagtaaagactgggca

SEQ ID NO: 205456 - DNA, 33 bp, Homo sapien
cagatcatgttcactctaagtaaagactgggca

SEQ ID NO: 205457 - DNA, 33 bp, Homo sapien
tggaaaggctgccatgacaaaaataagctggaa

SEQ ID NO: 205458 - DNA, 33 bp, Homo sapien
tggaaaggctgccatggcaaaaataagctggaa

SEQ ID NO: 205459 - DNA, 33 bp, Homo sapien
tagaagtgctatttaccgaagcctttggaaaat

SEQ ID NO: 205460 - DNA, 33 bp, Homo sapien
tagaagtgctatttactgaagcctttggaaaat

SEQ ID NO: 205461 - DNA, 33 bp, Homo sapien
aaaagaaaatttctcaaccatccatgtcacgtg

SEQ ID NO: 205462 - DNA, 33 bp, Homo sapien
aaaagaaaatttctcacccatccatgtcacgtg

SEQ ID NO: 205463 - DNA, 33 bp, Homo sapien
gtgggtctgcaaaagcactttgtcactgtggtt

SEQ ID NO: 205464 - DNA, 33 bp, Homo sapien
gtgggtctgcaaaagcgctttgtcactgtggtt

SEQ ID NO: 205465 - DNA, 33 bp, Homo sapien
gagggctgtggggtcactgacaaagatctgaat

SEQ ID NO: 205466 - DNA, 33 bp, Homo sapien
gagggctgtggggtcattgacaaagatctgaat

SEQ ID NO: 205467 - DNA, 33 bp, Homo sapien
aagcaaggagctccaaaaaccttcacacttgaa

SEQ ID NO: 205468 - DNA, 33 bp, Homo sapien
aagcaaggagctccaagaaccttcacacttgaa

SEQ ID NO: 205469 - DNA, 33 bp, Homo sapien
tctgagaccatcacacgagagcctcaagagcca

SEQ ID NO: 205470 - DNA, 33 bp, Homo sapien
tctgagaccatcacactagagcctcaagagcca

SEQ ID NO: 205471 - DNA, 33 bp, Homo sapien
caaaaatcaagaggcactgaactgtatggacac

SEQ ID NO: 205472 - DNA, 33 bp, Homo sapien
caaaaatcaagaggcattgaactgtatggacac

SEQ ID NO: 205473 - DNA, 33 bp, Homo sapien
caaaggccaccaaaataatagccggtgcacatt

SEQ ID NO: 205474 - DNA, 33 bp, Homo sapien
caaaggccaccaaaatgatagccggtgcacatt

SEQ ID NO: 205475 - DNA, 33 bp, Homo sapien
cattctttttctgaaagtcaagtttccctgggt

SEQ ID NO: 205476 - DNA, 33 bp, Homo sapien
cattctttttctgaaattcaagtttccctgggt

SEQ ID NO: 205477 - DNA, 33 bp, Homo sapien
tgctggtgcctgtgaacaacagtgaactagaga

SEQ ID NO: 205478 - DNA, 33 bp, Homo sapien
tgctggtgcctgtgaagaacagtgaactagaga

SEQ ID NO: 205479 - DNA, 33 bp, Homo sapien
tcatttgtctataggacgattggactgtagatg

SEQ ID NO: 205480 - DNA, 33 bp, Homo sapien
tcatttgtctataggatgattggactgtagatg

SEQ ID NO: 205481 - DNA, 33 bp, Homo sapien
taccgtgaaaacaataccccagggacattctgg

SEQ ID NO: 205482 - DNA, 33 bp, Homo sapien
taccgtgaaaacaatatcccagggacattctgg

SEQ ID NO: 205483 - DNA, 33 bp, Homo sapien
tatttgcaacagatgaaggattgtcttgcaggc

SEQ ID NO: 205484 - DNA, 33 bp, Homo sapien
tatttgcaacagatgagggattgtcttgcaggc

SEQ ID NO: 205485 - DNA, 33 bp, Homo sapien
acggcatgcactacaaccagtgggtctcccaca

SEQ ID NO: 205486 - DNA, 33 bp, Homo sapien
acggcatgcactacaatcagtgggtctcccaca

SEQ ID NO: 205487 - DNA, 33 bp, Homo sapien
acggccggatcagcggaacccacgaggagaacc

SEQ ID NO: 205488 - DNA, 33 bp, Homo sapien
acggccggatcagcgggacccacgaggagaacc

SEQ ID NO: 205489 - DNA, 33 bp, Homo sapien
aattaaagaggacaaaaccaaagtgagaaagac

SEQ ID NO: 205490 - DNA, 33 bp, Homo sapien
aattaaagaggacaaacccaaagtgagaaagac

SEQ ID NO: 205491 - DNA, 33 bp, Homo sapien
atttgctgttgttagagggagtcgtctatagat

SEQ ID NO: 205492 - DNA, 33 bp, Homo sapien
atttgctgttgttagatggagtcgtctatagat

SEQ ID NO: 205493 - DNA, 33 bp, Homo sapien
ctatcatcatcctgcaccacagttgtatttctg

SEQ ID NO: 205494 - DNA, 33 bp, Homo sapien
ctatcatcatcctgcatcacagttgtatttctg

SEQ ID NO: 205495 - DNA, 33 bp, Homo sapien
gatcttgaaagttatcaccacaatgaaatgata

SEQ ID NO: 205496 - DNA, 33 bp, Homo sapien
gatcttgaaagttatcgccacaatgaaatgata

SEQ ID NO: 205497 - DNA, 33 bp, Homo sapien
aaagggtggttactccagatgaacatgagggat

SEQ ID NO: 205498 - DNA, 33 bp, Homo sapien
aaagggtggttactcccgatgaacatgagggat

SEQ ID NO: 205499 - DNA, 33 bp, Homo sapien
cttcatttggtgcccaagaacctgtaatagctg

SEQ ID NO: 205500 - DNA, 33 bp, Homo sapien
cttcatttggtgcccaggaacctgtaatagctg

SEQ ID NO: 205501 - DNA, 33 bp, Homo sapien
ttactaattttggctgcagtatatttgaagact

SEQ ID NO: 205502 - DNA, 33 bp, Homo sapien
ttactaattttggctgtagtatatttgaagact

SEQ ID NO: 205503 - DNA, 33 bp, Homo sapien
acggaggatggctcacagtgaagaaaagtccag

SEQ ID NO: 205504 - DNA, 33 bp, Homo sapien
acggaggatggctcacggtgaagaaaagtccag

SEQ ID NO: 205505 - DNA, 33 bp, Homo sapien
aagggctagttttgaacacccacaaatagaata

SEQ ID NO: 205506 - DNA, 33 bp, Homo sapien
aagggctagttttgaatacccacaaatagaata

SEQ ID NO: 205507 - DNA, 33 bp, Homo sapien
cgtatcagtccataaagaccatcctcatacttt

SEQ ID NO: 205508 - DNA, 33 bp, Homo sapien
cgtatcagtccataaataccatcctcatacttt

SEQ ID NO: 205509 - DNA, 33 bp, Homo sapien
gctgaacctagaactacgatttcatctactcta

SEQ ID NO: 205510 - DNA, 33 bp, Homo sapien
gctgaacctagaactatgatttcatctactcta

SEQ ID NO: 205511 - DNA, 33 bp, Homo sapien
ctgaacaagcttgttaaacagaaatgttgccag

SEQ ID NO: 205512 - DNA, 33 bp, Homo sapien
ctgaacaagcttgttacacagaaatgttgccag

SEQ ID NO: 205513 - DNA, 33 bp, Homo sapien
ttattgcttgatagacactggaaagcagaataa

SEQ ID NO: 205514 - DNA, 33 bp, Homo sapien
ttattgcttgatagaccctggaaagcagaataa

SEQ ID NO: 205515 - DNA, 33 bp, Homo sapien
aagtaacagaaacaataaggtagagtgcatgtt

SEQ ID NO: 205516 - DNA, 33 bp, Homo sapien
aagtaacagaaacaatcaggtagagtgcatgtt

SEQ ID NO: 205517 - DNA, 33 bp, Homo sapien
tgccatcacatgaagacaggtttgaaaaaactt

SEQ ID NO: 205518 - DNA, 33 bp, Homo sapien
tgccatcacatgaagagaggtttgaaaaaactt

SEQ ID NO: 205519 - DNA, 33 bp, Homo sapien
tcatgtaacaagatacaaacgaaatataaaaag

SEQ ID NO: 205520 - DNA, 33 bp, Homo sapien
tcatgtaacaagatacgaacgaaatataaaaag

SEQ ID NO: 205521 - DNA, 33 bp, Homo sapien
gccttcctttacttcacagagatgtaggagact

SEQ ID NO: 205522 - DNA, 33 bp, Homo sapien
gccttcctttacttcatagagatgtaggagact

SEQ ID NO: 205523 - DNA, 33 bp, Homo sapien
tttctgcttagctggcaaggatcagaggactct

SEQ ID NO: 205524 - DNA, 33 bp, Homo sapien
tttctgcttagctggcgaggatcagaggactct

SEQ ID NO: 205525 - DNA, 33 bp, Homo sapien
tcctggcatagcctaacctgtgatcctggagct

SEQ ID NO: 205526 - DNA, 33 bp, Homo sapien
tcctggcatagcctaagctgtgatcctggagct

SEQ ID NO: 205527 - DNA, 33 bp, Homo sapien
atctcagacgggacaacgaacaggacgagatac

SEQ ID NO: 205528 - DNA, 33 bp, Homo sapien
atctcagacgggacaatgaacaggacgagatac

SEQ ID NO: 205529 - DNA, 33 bp, Homo sapien
cattatctggtaacgtcaagcattcacatatcc

SEQ ID NO: 205530 - DNA, 33 bp, Homo sapien
cattatctggtaacgttaagcattcacatatcc

SEQ ID NO: 205531 - DNA, 33 bp, Homo sapien
caacagtgaaccactaacaatttgtatagctgg

SEQ ID NO: 205532 - DNA, 33 bp, Homo sapien
caacagtgaaccactagcaatttgtatagctgg

SEQ ID NO: 205533 - DNA, 33 bp, Homo sapien
acactgactctttctcaaaacctcaattatttc

SEQ ID NO: 205534 - DNA, 33 bp, Homo sapien
acactgactctttctcgaaacctcaattatttc

SEQ ID NO: 205535 - DNA, 33 bp, Homo sapien
acaagaatgagcctaaccccaatctggacctaa

SEQ ID NO: 205536 - DNA, 33 bp, Homo sapien
acaagaatgagcctaatcccaatctggacctaa

SEQ ID NO: 205537 - DNA, 33 bp, Homo sapien
tgaaatgacctcttcacgcatagttcccggagt

SEQ ID NO: 205538 - DNA, 33 bp, Homo sapien
tgaaatgacctcttcatgcatagttcccggagt

SEQ ID NO: 205539 - DNA, 33 bp, Homo sapien
gttagctagcacaacactggaaccaacctaaac

SEQ ID NO: 205540 - DNA, 33 bp, Homo sapien
gttagctagcacaacattggaaccaacctaaac

SEQ ID NO: 205541 - DNA, 33 bp, Homo sapien
tctaacttgataactcccttgccaagtcacaag

SEQ ID NO: 205542 - DNA, 33 bp, Homo sapien
tctaacttgataactctcttgccaagtcacaag

SEQ ID NO: 205543 - DNA, 33 bp, Homo sapien
agctggccagcacttacaactcccattacacca

SEQ ID NO: 205544 - DNA, 33 bp, Homo sapien
agctggccagcacttagaactcccattacacca

SEQ ID NO: 205545 - DNA, 33 bp, Homo sapien
gcctgtgacacctcatgagacacactaggactt

SEQ ID NO: 205546 - DNA, 33 bp, Homo sapien
gcctgtgacacctcattagacacactaggactt

SEQ ID NO: 205547 - DNA, 33 bp, Homo sapien
aaccccaacctccatacgtgcaaaacagagcaa

SEQ ID NO: 205548 - DNA, 33 bp, Homo sapien
aaccccaacctccatatgtgcaaaacagagcaa

SEQ ID NO: 205549 - DNA, 33 bp, Homo sapien
ccaacagtgcatgctaaaatttttaatttgcta

SEQ ID NO: 205550 - DNA, 33 bp, Homo sapien
ccaacagtgcatgctacaatttttaatttgcta

SEQ ID NO: 205551 - DNA, 33 bp, Homo sapien
gaaatatccatacataagggaggggttaaatat

SEQ ID NO: 205552 - DNA, 33 bp, Homo sapien
gaaatatccatacataggggaggggttaaatat

SEQ ID NO: 205553 - DNA, 33 bp, Homo sapien
cactcctactcctaaacgcagaaaacagaaaca

SEQ ID NO: 205554 - DNA, 33 bp, Homo sapien
cactcctactcctaaatgcagaaaacagaaaca

SEQ ID NO: 205555 - DNA, 33 bp, Homo sapien
tgtttgaatctcgtaacggagattatgccagag

SEQ ID NO: 205556 - DNA, 33 bp, Homo sapien
tgtttgaatctcgtaatggagattatgccagag

SEQ ID NO: 205557 - DNA, 33 bp, Homo sapien
cagttgaactgaatcaaattttttcttgtttta

SEQ ID NO: 205558 - DNA, 33 bp, Homo sapien
cagttgaactgaatcagattttttcttgtttta

SEQ ID NO: 205559 - DNA, 33 bp, Homo sapien
actaaagcacaaaataccccataaagtagctat

SEQ ID NO: 205560 - DNA, 33 bp, Homo sapien
actaaagcacaaaatatcccataaagtagctat

SEQ ID NO: 205561 - DNA, 33 bp, Homo sapien
tatggaatgttcatttaaaatactgataccagg

SEQ ID NO: 205562 - DNA, 33 bp, Homo sapien
tatggaatgttcattttaaatactgataccagg

SEQ ID NO: 205563 - DNA, 33 bp, Homo sapien
atattgctagcgatgaaaaattattccccctaa

SEQ ID NO: 205564 - DNA, 33 bp, Homo sapien
atattgctagcgatgagaaattattccccctaa

SEQ ID NO: 205565 - DNA, 33 bp, Homo sapien
aataaggtaagtaacaaattgatctgggaagtg

SEQ ID NO: 205566 - DNA, 33 bp, Homo sapien
aataaggtaagtaacacattgatctgggaagtg

SEQ ID NO: 205567 - DNA, 33 bp, Homo sapien
gatggtttctgtataactcaatgatgccccaaa

SEQ ID NO: 205568 - DNA, 33 bp, Homo sapien
gatggtttctgtataattcaatgatgccccaaa

SEQ ID NO: 205569 - DNA, 33 bp, Homo sapien
aggagaaaaatcaaagcagaatttcttcagcct

SEQ ID NO: 205570 - DNA, 33 bp, Homo sapien
aggagaaaaatcaaagtagaatttcttcagcct

SEQ ID NO: 205571 - DNA, 33 bp, Homo sapien
ttttaagggaagcttacattgaagaaggagaaa

SEQ ID NO: 205572 - DNA, 33 bp, Homo sapien
ttttaagggaagcttatattgaagaaggagaaa

SEQ ID NO: 205573 - DNA, 33 bp, Homo sapien
taagcaaaaaggaaccagaacctgaagatttgg

SEQ ID NO: 205574 - DNA, 33 bp, Homo sapien
taagcaaaaaggaaccggaacctgaagatttgg

SEQ ID NO: 205575 - DNA, 33 bp, Homo sapien
ggtaggggcctgggagacaagattttgctgagg

SEQ ID NO: 205576 - DNA, 33 bp, Homo sapien
ggtaggggcctgggagtcaagattttgctgagg

SEQ ID NO: 205577 - DNA, 33 bp, Homo sapien
ctcctgtcaacacacaaaattgcctaatagctc

SEQ ID NO: 205578 - DNA, 33 bp, Homo sapien
ctcctgtcaacacacagaattgcctaatagctc

SEQ ID NO: 205579 - DNA, 33 bp, Homo sapien
gggatgtcagtaaaaacgctgtttgatgaggga

SEQ ID NO: 205580 - DNA, 33 bp, Homo sapien
gggatgtcagtaaaaatgctgtttgatgaggga

SEQ ID NO: 205581 - DNA, 33 bp, Homo sapien
agtccagagctctaaacggtatgtcttgtggtg

SEQ ID NO: 205582 - DNA, 33 bp, Homo sapien
agtccagagctctaaatggtatgtcttgtggtg

SEQ ID NO: 205583 - DNA, 33 bp, Homo sapien
acactgttggtcacaccatgctggatcatcatc

SEQ ID NO: 205584 - DNA, 33 bp, Homo sapien
acactgttggtcacactatgctggatcatcatc

SEQ ID NO: 205585 - DNA, 33 bp, Homo sapien
ttaaggttctagttaaacactgagaaactggcc

SEQ ID NO: 205586 - DNA, 33 bp, Homo sapien
ttaaggttctagttaaccactgagaaactggcc

SEQ ID NO: 205587 - DNA, 33 bp, Homo sapien
aaaggaatatatttagaagtagcaatgatgggc

SEQ ID NO: 205588 - DNA, 33 bp, Homo sapien
aaaggaatatatttagcagtagcaatgatgggc

SEQ ID NO: 205589 - DNA, 33 bp, Homo sapien
agctctactgtttcacagactactttgtgtcaa

SEQ ID NO: 205590 - DNA, 33 bp, Homo sapien
agctctactgtttcactgactactttgtgtcaa

SEQ ID NO: 205591 - DNA, 33 bp, Homo sapien
gctttgcataacctaacagagttcaacacatag

SEQ ID NO: 205592 - DNA, 33 bp, Homo sapien
gctttgcataacctaatagagttcaacacatag

SEQ ID NO: 205593 - DNA, 33 bp, Homo sapien
gaaggagaaagagaagccaaacaccaggaaatt

SEQ ID NO: 205594 - DNA, 33 bp, Homo sapien
gaaggagaaagagaaggcaaacaccaggaaatt

SEQ ID NO: 205595 - DNA, 33 bp, Homo sapien
ttctctccctctgttacgggcactaccaagcac

SEQ ID NO: 205596 - DNA, 33 bp, Homo sapien
ttctctccctctgttatgggcactaccaagcac

SEQ ID NO: 205597 - DNA, 33 bp, Homo sapien
acatctgaataaacgcgacggggcagtgataaa

SEQ ID NO: 205598 - DNA, 33 bp, Homo sapien
acatctgaataaacgctacggggcagtgataaa

SEQ ID NO: 205599 - DNA, 33 bp, Homo sapien
tctctctttcctagacacacccactcatttatt

SEQ ID NO: 205600 - DNA, 33 bp, Homo sapien
tctctctttcctagacgcacccactcatttatt

SEQ ID NO: 205601 - DNA, 33 bp, Homo sapien
tcctctctcaaaagacaagcatatttgtgagac

SEQ ID NO: 205602 - DNA, 33 bp, Homo sapien
tcctctctcaaaagacgagcatatttgtgagac

SEQ ID NO: 205603 - DNA, 33 bp, Homo sapien
gttgtttgaatgacagaagagaagcagttcagt

SEQ ID NO: 205604 - DNA, 33 bp, Homo sapien
gttgtttgaatgacaggagagaagcagttcagt

SEQ ID NO: 205605 - DNA, 33 bp, Homo sapien
ttacatgttttttaaaggataggtatatgaaag

SEQ ID NO: 205606 - DNA, 33 bp, Homo sapien
ttacatgttttttaaatgataggtatatgaaag

SEQ ID NO: 205607 - DNA, 33 bp, Homo sapien
gaagagtgttcaatacgcattagccattgtgat

SEQ ID NO: 205608 - DNA, 33 bp, Homo sapien
gaagagtgttcaatactcattagccattgtgat

SEQ ID NO: 205609 - DNA, 33 bp, Homo sapien
tatgttttcctggagacagactccatagctagc

SEQ ID NO: 205610 - DNA, 33 bp, Homo sapien
tatgttttcctggagagagactccatagctagc

SEQ ID NO: 205611 - DNA, 33 bp, Homo sapien
atttatccagtgggcaaccgtagaatccctggt

SEQ ID NO: 205612 - DNA, 33 bp, Homo sapien
atttatccagtgggcagccgtagaatccctggt

SEQ ID NO: 205613 - DNA, 33 bp, Homo sapien
atatcttcccaactcaacaactagcagaaaata

SEQ ID NO: 205614 - DNA, 33 bp, Homo sapien
atatcttcccaactcaccaactagcagaaaata

SEQ ID NO: 205615 - DNA, 33 bp, Homo sapien
atcaagctatctataacctgtacacttttaaaa

SEQ ID NO: 205616 - DNA, 33 bp, Homo sapien
atcaagctatctataagctgtacacttttaaaa

SEQ ID NO: 205617 - DNA, 33 bp, Homo sapien
ttatttctctaaattaccttgtctgatttaatt

SEQ ID NO: 205618 - DNA, 33 bp, Homo sapien
ttatttctctaaattatcttgtctgatttaatt

SEQ ID NO: 205619 - DNA, 33 bp, Homo sapien
gataaggtcctaaataagaatggaggaaattct

SEQ ID NO: 205620 - DNA, 33 bp, Homo sapien
gataaggtcctaaataggaatggaggaaattct

SEQ ID NO: 205621 - DNA, 33 bp, Homo sapien
gatttgtcatcgaaaaatctcaaagtactctgt

SEQ ID NO: 205622 - DNA, 33 bp, Homo sapien
gatttgtcatcgaaaactctcaaagtactctgt

SEQ ID NO: 205623 - DNA, 33 bp, Homo sapien
agtatctgtttaagtgacaccttgcttcagact

SEQ ID NO: 205624 - DNA, 33 bp, Homo sapien
agtatctgtttaagtggcaccttgcttcagact

SEQ ID NO: 205625 - DNA, 33 bp, Homo sapien
catagaaggaagaagacggtaaaagaacagagg

SEQ ID NO: 205626 - DNA, 33 bp, Homo sapien
catagaaggaagaagatggtaaaagaacagagg

SEQ ID NO: 205627 - DNA, 33 bp, Homo sapien
ctgtcctacagttcaacgtgcgacctcgacgtc

SEQ ID NO: 205628 - DNA, 33 bp, Homo sapien
ctgtcctacagttcaatgtgcgacctcgacgtc

SEQ ID NO: 205629 - DNA, 33 bp, Homo sapien
gtggtcatgtttttcaagtccctttgttctgaa

SEQ ID NO: 205630 - DNA, 33 bp, Homo sapien
gtggtcatgtttttcatgtccctttgttctgaa

SEQ ID NO: 205631 - DNA, 33 bp, Homo sapien
ctttcagacatcgtgcaatttaacaaagggttt

SEQ ID NO: 205632 - DNA, 33 bp, Homo sapien
ctttcagacatcgtgcgatttaacaaagggttt

SEQ ID NO: 205633 - DNA, 33 bp, Homo sapien
ttcttaacaaaggtcccatcccagggcaaggtg

SEQ ID NO: 205634 - DNA, 33 bp, Homo sapien
ttcttaacaaaggtcctatcccagggcaaggtg

SEQ ID NO: 205635 - DNA, 33 bp, Homo sapien
ctcttcattttctacccaaccaaactccttagc

SEQ ID NO: 205636 - DNA, 33 bp, Homo sapien
ctcttcattttctacctaaccaaactccttagc

SEQ ID NO: 205637 - DNA, 33 bp, Homo sapien
gactggacagaaggaaactgtcatagattggaa

SEQ ID NO: 205638 - DNA, 33 bp, Homo sapien
gactggacagaaggaagctgtcatagattggaa

SEQ ID NO: 205639 - DNA, 33 bp, Homo sapien
tgaagcttattggccgaaagctaaatggccgta

SEQ ID NO: 205640 - DNA, 33 bp, Homo sapien
tgaagcttattggccgcaagctaaatggccgta

SEQ ID NO: 205641 - DNA, 33 bp, Homo sapien
acttctattaaaaagcacctctgagaggaaaat

SEQ ID NO: 205642 - DNA, 33 bp, Homo sapien
acttctattaaaaagcgcctctgagaggaaaat

SEQ ID NO: 205643 - DNA, 33 bp, Homo sapien
aatgatgaacacacaccgaaaagcagcaggacc

SEQ ID NO: 205644 - DNA, 33 bp, Homo sapien
aatgatgaacacacactgaaaagcagcaggacc

SEQ ID NO: 205645 - DNA, 33 bp, Homo sapien
taagataaaaaggaaacgatgatgagttatcta

SEQ ID NO: 205646 - DNA, 33 bp, Homo sapien
taagataaaaaggaaatgatgatgagttatcta

SEQ ID NO: 205647 - DNA, 33 bp, Homo sapien
tgactttcaggaaaggcaagctctctgccaaca

SEQ ID NO: 205648 - DNA, 33 bp, Homo sapien
tgactttcaggaaaggtaagctctctgccaaca

SEQ ID NO: 205649 - DNA, 33 bp, Homo sapien
gccaacaaagctggtccccgctgtgcctcctcc

SEQ ID NO: 205650 - DNA, 33 bp, Homo sapien
gccaacaaagctggtctccgctgtgcctcctcc

SEQ ID NO: 205651 - DNA, 33 bp, Homo sapien
tgcttgtgggtgataacgagttattgtgaagga

SEQ ID NO: 205652 - DNA, 33 bp, Homo sapien
tgcttgtgggtgataaggagttattgtgaagga

SEQ ID NO: 205653 - DNA, 33 bp, Homo sapien
agtgggtacaagacaccacgtaagtttcttctt

SEQ ID NO: 205654 - DNA, 33 bp, Homo sapien
agtgggtacaagacacgacgtaagtttcttctt

SEQ ID NO: 205655 - DNA, 33 bp, Homo sapien
gaacccactggtgataaggcatgaacagcaggg

SEQ ID NO: 205656 - DNA, 33 bp, Homo sapien
gaacccactggtgatacggcatgaacagcaggg

SEQ ID NO: 205657 - DNA, 33 bp, Homo sapien
gcccgggtggctcgcccaggagaaatattttat

SEQ ID NO: 205658 - DNA, 33 bp, Homo sapien
gcccgggtggctcgcctaggagaaatattttat

SEQ ID NO: 205659 - DNA, 33 bp, Homo sapien
tcactcctgagtattccagttggagaaagaagc

SEQ ID NO: 205660 - DNA, 33 bp, Homo sapien
tcactcctgagtattctagttggagaaagaagc

SEQ ID NO: 205661 - DNA, 33 bp, Homo sapien
tgacttcttgcagcaaaggtggaagttaggaaa

SEQ ID NO: 205662 - DNA, 33 bp, Homo sapien
tgacttcttgcagcaagggtggaagttaggaaa

SEQ ID NO: 205663 - DNA, 33 bp, Homo sapien
aagtccctgtctaaaaatagctctcagcatcta

SEQ ID NO: 205664 - DNA, 33 bp, Homo sapien
aagtccctgtctaaaagtagctctcagcatcta

SEQ ID NO: 205665 - DNA, 33 bp, Homo sapien
cttggacgttgcttcacgagtccagatggtgag

SEQ ID NO: 205666 - DNA, 33 bp, Homo sapien
cttggacgttgcttcatgagtccagatggtgag

SEQ ID NO: 205667 - DNA, 33 bp, Homo sapien
tccctacgtagagttaagtagaaatgctagaaa

SEQ ID NO: 205668 - DNA, 33 bp, Homo sapien
tccctacgtagagttaggtagaaatgctagaaa

SEQ ID NO: 205669 - DNA, 33 bp, Homo sapien
taaccaaaacaggtgcagaaatttggagagctc

SEQ ID NO: 205670 - DNA, 33 bp, Homo sapien
taaccaaaacaggtgcggaaatttggagagctc

SEQ ID NO: 205671 - DNA, 33 bp, Homo sapien
gtgtgctcccgggttgaactgccgtgactgcaa

SEQ ID NO: 205672 - DNA, 33 bp, Homo sapien
gtgtgctcccgggttggactgccgtgactgcaa

SEQ ID NO: 205673 - DNA, 33 bp, Homo sapien
tacattttctttgtaacaaccagatgaagaaag

SEQ ID NO: 205674 - DNA, 33 bp, Homo sapien
tacattttctttgtaataaccagatgaagaaag

SEQ ID NO: 205675 - DNA, 33 bp, Homo sapien
taagatgtattgtttcaaggaaataaagtaaat

SEQ ID NO: 205676 - DNA, 33 bp, Homo sapien
taagatgtattgtttcgaggaaataaagtaaat

SEQ ID NO: 205677 - DNA, 33 bp, Homo sapien
gggatctctcacctatcaaaatcagacattcac

SEQ ID NO: 205678 - DNA, 33 bp, Homo sapien
gggatctctcacctatgaaaatcagacattcac

SEQ ID NO: 205679 - DNA, 33 bp, Homo sapien
attttgaaacatacgcagaagtagagatgtagc

SEQ ID NO: 205680 - DNA, 33 bp, Homo sapien
attttgaaacatacgccgaagtagagatgtagc

SEQ ID NO: 205681 - DNA, 33 bp, Homo sapien
tctctaaaaataaaaaccttagctatcatacca

SEQ ID NO: 205682 - DNA, 33 bp, Homo sapien
tctctaaaaataaaaatcttagctatcatacca

SEQ ID NO: 205683 - DNA, 33 bp, Homo sapien
tggaactgtatagacccgaactggaattacatc

SEQ ID NO: 205684 - DNA, 33 bp, Homo sapien
tggaactgtatagacctgaactggaattacatc

SEQ ID NO: 205685 - DNA, 33 bp, Homo sapien
ctaagaactagacaagacaatccaacagctgta

SEQ ID NO: 205686 - DNA, 33 bp, Homo sapien
ctaagaactagacaaggcaatccaacagctgta

SEQ ID NO: 205687 - DNA, 33 bp, Homo sapien
aaccaactataggcacaagtatgcgtttacatt

SEQ ID NO: 205688 - DNA, 33 bp, Homo sapien
aaccaactataggcacgagtatgcgtttacatt

SEQ ID NO: 205689 - DNA, 33 bp, Homo sapien
cctctagaagcctagcactttaatacggggttg

SEQ ID NO: 205690 - DNA, 33 bp, Homo sapien
cctctagaagcctagcgctttaatacggggttg

SEQ ID NO: 205691 - DNA, 33 bp, Homo sapien
gccacctaggacagtaccctaaaccattgcttt

SEQ ID NO: 205692 - DNA, 33 bp, Homo sapien
gccacctaggacagtatcctaaaccattgcttt

SEQ ID NO: 205693 - DNA, 33 bp, Homo sapien
tcatgagacaaagcaccggagaagaaggagata

SEQ ID NO: 205694 - DNA, 33 bp, Homo sapien
tcatgagacaaagcactggagaagaaggagata

SEQ ID NO: 205695 - DNA, 33 bp, Homo sapien
acccaagacaggattacgtgcgaatgctttaat

SEQ ID NO: 205696 - DNA, 33 bp, Homo sapien
acccaagacaggattatgtgcgaatgctttaat

SEQ ID NO: 205697 - DNA, 33 bp, Homo sapien
ttatgctacttagtaacctccaaccttgtgtct

SEQ ID NO: 205698 - DNA, 33 bp, Homo sapien
ttatgctacttagtaatctccaaccttgtgtct

SEQ ID NO: 205699 - DNA, 33 bp, Homo sapien
tgatttgcatttcttgaagattattctggctac

SEQ ID NO: 205700 - DNA, 33 bp, Homo sapien
tgatttgcatttcttggagattattctggctac

SEQ ID NO: 205701 - DNA, 33 bp, Homo sapien
tcgtggaaacgctgtgcatcatctggttctcct

SEQ ID NO: 205702 - DNA, 33 bp, Homo sapien
tcgtggaaacgctgtgtatcatctggttctcct

SEQ ID NO: 205703 - DNA, 33 bp, Homo sapien
cccatctttgaactggacatgaactgtgaactt

SEQ ID NO: 205704 - DNA, 33 bp, Homo sapien
cccatctttgaactggtcatgaactgtgaactt

SEQ ID NO: 205705 - DNA, 33 bp, Homo sapien
tttaagctgaaaaaacactattttatttcttga

SEQ ID NO: 205706 - DNA, 33 bp, Homo sapien
tttaagctgaaaaaacgctattttatttcttga

SEQ ID NO: 205707 - DNA, 33 bp, Homo sapien
catacatgaatcaatacagtcttttcttgaata

SEQ ID NO: 205708 - DNA, 33 bp, Homo sapien
catacatgaatcaatatagtcttttcttgaata

SEQ ID NO: 205709 - DNA, 33 bp, Homo sapien
cctgatggataaaaacaagtactcaaaacataa

SEQ ID NO: 205710 - DNA, 33 bp, Homo sapien
cctgatggataaaaacgagtactcaaaacataa

SEQ ID NO: 205711 - DNA, 33 bp, Homo sapien
ctgatgaatatattagccaaaatctttaccatt

SEQ ID NO: 205712 - DNA, 33 bp, Homo sapien
ctgatgaatatattaggcaaaatctttaccatt

SEQ ID NO: 205713 - DNA, 33 bp, Homo sapien
tattaggaggtgaaataaacaggagttggtgat

SEQ ID NO: 205714 - DNA, 33 bp, Homo sapien
tattaggaggtgaaatgaacaggagttggtgat

SEQ ID NO: 205715 - DNA, 33 bp, Homo sapien
cttttggttacatgaagaataatgctgtgagtg

SEQ ID NO: 205716 - DNA, 33 bp, Homo sapien
cttttggttacatgaataataatgctgtgagtg

SEQ ID NO: 205717 - DNA, 33 bp, Homo sapien
tgctcctttaagtccacaagtatttttaggcat

SEQ ID NO: 205718 - DNA, 33 bp, Homo sapien
tgctcctttaagtccataagtatttttaggcat

SEQ ID NO: 205719 - DNA, 33 bp, Homo sapien
gaccctggaaagaaagacacgggaaggaggaac

SEQ ID NO: 205720 - DNA, 33 bp, Homo sapien
gaccctggaaagaaagtcacgggaaggaggaac

SEQ ID NO: 205721 - DNA, 33 bp, Homo sapien
gatttaattaatcgcaagcctctcaactcttcc

SEQ ID NO: 205722 - DNA, 33 bp, Homo sapien
gatttaattaatcgcaggcctctcaactcttcc

SEQ ID NO: 205723 - DNA, 33 bp, Homo sapien
tttgaaggagtttaggaaaaattcactgcggtc

SEQ ID NO: 205724 - DNA, 33 bp, Homo sapien
tttgaaggagtttagggaaaattcactgcggtc

SEQ ID NO: 205725 - DNA, 33 bp, Homo sapien
cgtatcagggacccaaaggaataactaggacac

SEQ ID NO: 205726 - DNA, 33 bp, Homo sapien
cgtatcagggacccaacggaataactaggacac

SEQ ID NO: 205727 - DNA, 33 bp, Homo sapien
ttaaaattgtttagtaagaggactcaagggcct

SEQ ID NO: 205728 - DNA, 33 bp, Homo sapien
ttaaaattgtttagtacgaggactcaagggcct

SEQ ID NO: 205729 - DNA, 33 bp, Homo sapien
aaggaatttgagcacaaaagagaggagaagttg

SEQ ID NO: 205730 - DNA, 33 bp, Homo sapien
aaggaatttgagcacagaagagaggagaagttg

SEQ ID NO: 205731 - DNA, 33 bp, Homo sapien
ccagagcagagtagaagaatcacgaggacaagg

SEQ ID NO: 205732 - DNA, 33 bp, Homo sapien
ccagagcagagtagaataatcacgaggacaagg

SEQ ID NO: 205733 - DNA, 33 bp, Homo sapien
atgcattttccaaatgaagccctgctatgaagc

SEQ ID NO: 205734 - DNA, 33 bp, Homo sapien
atgcattttccaaatggagccctgctatgaagc

SEQ ID NO: 205735 - DNA, 33 bp, Homo sapien
ggagggtggatgtagaacattactcatcaatca

SEQ ID NO: 205736 - DNA, 33 bp, Homo sapien
ggagggtggatgtagagcattactcatcaatca

SEQ ID NO: 205737 - DNA, 33 bp, Homo sapien
catccaccctcctcggaaaccacagatcacatt

SEQ ID NO: 205738 - DNA, 33 bp, Homo sapien
catccaccctcctcgggaaccacagatcacatt

SEQ ID NO: 205739 - DNA, 33 bp, Homo sapien
ctgcctctaagaaggcagaattacggatataat

SEQ ID NO: 205740 - DNA, 33 bp, Homo sapien
ctgcctctaagaaggcggaattacggatataat

SEQ ID NO: 205741 - DNA, 33 bp, Homo sapien
ctggctgccatgtggagaaactatgttggtgag

SEQ ID NO: 205742 - DNA, 33 bp, Homo sapien
ctggctgccatgtggataaactatgttggtgag

SEQ ID NO: 205743 - DNA, 33 bp, Homo sapien
gatgctttatcacacacgttttaagaaaagtcc

SEQ ID NO: 205744 - DNA, 33 bp, Homo sapien
gatgctttatcacacatgttttaagaaaagtcc

SEQ ID NO: 205745 - DNA, 33 bp, Homo sapien
tggagacctaagctaaccgtccttttctcctcc

SEQ ID NO: 205746 - DNA, 33 bp, Homo sapien
tggagacctaagctaagcgtccttttctcctcc

SEQ ID NO: 205747 - DNA, 33 bp, Homo sapien
aagcataatccagccacgattacaataggagag

SEQ ID NO: 205748 - DNA, 33 bp, Homo sapien
aagcataatccagccatgattacaataggagag

SEQ ID NO: 205749 - DNA, 33 bp, Homo sapien
tccgaggctggagaaacggaatggaaatcattg

SEQ ID NO: 205750 - DNA, 33 bp, Homo sapien
tccgaggctggagaaatggaatggaaatcattg

SEQ ID NO: 205751 - DNA, 33 bp, Homo sapien
agtggtatcctgtatagggcagatgtgttgttt

SEQ ID NO: 205752 - DNA, 33 bp, Homo sapien
agtggtatcctgtatatggcagatgtgttgttt

SEQ ID NO: 205753 - DNA, 33 bp, Homo sapien
actgtcacaagcaaagcagaaaccatgtcaagg

SEQ ID NO: 205754 - DNA, 33 bp, Homo sapien
actgtcacaagcaaaggagaaaccatgtcaagg

SEQ ID NO: 205755 - DNA, 33 bp, Homo sapien
gtgcacatatcagaaaatgaagggggtgcatta

SEQ ID NO: 205756 - DNA, 33 bp, Homo sapien
gtgcacatatcagaaagtgaagggggtgcatta

SEQ ID NO: 205757 - DNA, 33 bp, Homo sapien
ttagccaaaacattctaaaattatgaggttaca

SEQ ID NO: 205758 - DNA, 33 bp, Homo sapien
ttagccaaaacattctgaaattatgaggttaca

SEQ ID NO: 205759 - DNA, 33 bp, Homo sapien
ttttttcctcggctccagaatggggaatgagcc

SEQ ID NO: 205760 - DNA, 33 bp, Homo sapien
ttttttcctcggctccggaatggggaatgagcc

SEQ ID NO: 205761 - DNA, 33 bp, Homo sapien
agttgtgatagtcaacaaagttctttacgtgtg

SEQ ID NO: 205762 - DNA, 33 bp, Homo sapien
agttgtgatagtcaacgaagttctttacgtgtg

SEQ ID NO: 205763 - DNA, 33 bp, Homo sapien
ttctgcaaagtgagtacgatgattacaagttaa

SEQ ID NO: 205764 - DNA, 33 bp, Homo sapien
ttctgcaaagtgagtatgatgattacaagttaa

SEQ ID NO: 205765 - DNA, 33 bp, Homo sapien
gggttaggaacatttaacttcctcattttgcgg

SEQ ID NO: 205766 - DNA, 33 bp, Homo sapien
gggttaggaacatttaccttcctcattttgcgg

SEQ ID NO: 205767 - DNA, 33 bp, Homo sapien
gcctgggtcagaacacacagagcgctgggagcc

SEQ ID NO: 205768 - DNA, 33 bp, Homo sapien
gcctgggtcagaacacgcagagcgctgggagcc

SEQ ID NO: 205769 - DNA, 33 bp, Homo sapien
ctgcagggacagccaaagaagtgaggacaactc

SEQ ID NO: 205770 - DNA, 33 bp, Homo sapien
ctgcagggacagccaaggaagtgaggacaactc

SEQ ID NO: 205771 - DNA, 33 bp, Homo sapien
gtggaggaaagagagcaaagtgaccgccagttt

SEQ ID NO: 205772 - DNA, 33 bp, Homo sapien
gtggaggaaagagagcgaagtgaccgccagttt

SEQ ID NO: 205773 - DNA, 33 bp, Homo sapien
tccagcagggtaactgaactttaacaggatggc

SEQ ID NO: 205774 - DNA, 33 bp, Homo sapien
tccagcagggtaactgcactttaacaggatggc

SEQ ID NO: 205775 - DNA, 33 bp, Homo sapien
cagtttagtaacttgaagagtgtgattaagccc

SEQ ID NO: 205776 - DNA, 33 bp, Homo sapien
cagtttagtaacttgaggagtgtgattaagccc

SEQ ID NO: 205777 - DNA, 33 bp, Homo sapien
gatcttcctctagtgcacattcctgctgctttt

SEQ ID NO: 205778 - DNA, 33 bp, Homo sapien
gatcttcctctagtgctcattcctgctgctttt

SEQ ID NO: 205779 - DNA, 33 bp, Homo sapien
ctacctttacctcctccagttcttcatatctct

SEQ ID NO: 205780 - DNA, 33 bp, Homo sapien
ctacctttacctcctctagttcttcatatctct

SEQ ID NO: 205781 - DNA, 33 bp, Homo sapien
ctctttatgagatacaagaaaagaaccaacttt

SEQ ID NO: 205782 - DNA, 33 bp, Homo sapien
ctctttatgagatacaggaaaagaaccaacttt

SEQ ID NO: 205783 - DNA, 33 bp, Homo sapien
tgatctcctagttagcccctcaggtccaggtac

SEQ ID NO: 205784 - DNA, 33 bp, Homo sapien
tgatctcctagttagctcctcaggtccaggtac

SEQ ID NO: 205785 - DNA, 33 bp, Homo sapien
tcacaggacatgagcccatcaccaacatccagt

SEQ ID NO: 205786 - DNA, 33 bp, Homo sapien
tcacaggacatgagcctatcaccaacatccagt

SEQ ID NO: 205787 - DNA, 33 bp, Homo sapien
ccatgaagacatggacaaaagaattaagcatcc

SEQ ID NO: 205788 - DNA, 33 bp, Homo sapien
ccatgaagacatggaccaaagaattaagcatcc

SEQ ID NO: 205789 - DNA, 33 bp, Homo sapien
ttccgttaacatccctaagattcttactccaag

SEQ ID NO: 205790 - DNA, 33 bp, Homo sapien
ttccgttaacatcccttagattcttactccaag

SEQ ID NO: 205791 - DNA, 33 bp, Homo sapien
aactctgaatatagcacgggcaactggaaatat

SEQ ID NO: 205792 - DNA, 33 bp, Homo sapien
aactctgaatatagcatgggcaactggaaatat

SEQ ID NO: 205793 - DNA, 33 bp, Homo sapien
aagggctagatggaaaagagagagaagagaaaa

SEQ ID NO: 205794 - DNA, 33 bp, Homo sapien
aagggctagatggaaaggagagagaagagaaaa

SEQ ID NO: 205795 - DNA, 33 bp, Homo sapien
tcagctctggaagagagatctatcttggagcac

SEQ ID NO: 205796 - DNA, 33 bp, Homo sapien
tcagctctggaagagatatctatcttggagcac

SEQ ID NO: 205797 - DNA, 33 bp, Homo sapien
aagactttcatccaccagaagggcatatcaaaa

SEQ ID NO: 205798 - DNA, 33 bp, Homo sapien
aagactttcatccaccggaagggcatatcaaaa

SEQ ID NO: 205799 - DNA, 33 bp, Homo sapien
gatagagctgtagttcaaagatagctaccactc

SEQ ID NO: 205800 - DNA, 33 bp, Homo sapien
gatagagctgtagttcgaagatagctaccactc

SEQ ID NO: 205801 - DNA, 33 bp, Homo sapien
ttagatattaaggtcaactgaaacttgatagag

SEQ ID NO: 205802 - DNA, 33 bp, Homo sapien
ttagatattaaggtcatctgaaacttgatagag

SEQ ID NO: 205803 - DNA, 33 bp, Homo sapien
gaggaaaaaaacggtacgtatgcgtattcagat

SEQ ID NO: 205804 - DNA, 33 bp, Homo sapien
gaggaaaaaaacggtatgtatgcgtattcagat

SEQ ID NO: 205805 - DNA, 33 bp, Homo sapien
cagttgtagaaaccagcaaatggtggagcagaa

SEQ ID NO: 205806 - DNA, 33 bp, Homo sapien
cagttgtagaaaccaggaaatggtggagcagaa

SEQ ID NO: 205807 - DNA, 33 bp, Homo sapien
tgcctcagatagcaagcattcttagcttagtgt

SEQ ID NO: 205808 - DNA, 33 bp, Homo sapien
tgcctcagatagcaaggattcttagcttagtgt

SEQ ID NO: 205809 - DNA, 33 bp, Homo sapien
gacacattacaaagccaccacagcaattgttga

SEQ ID NO: 205810 - DNA, 33 bp, Homo sapien
gacacattacaaagccgccacagcaattgttga

SEQ ID NO: 205811 - DNA, 33 bp, Homo sapien
tttacaaaaagtaggccatgtttattagagtca

SEQ ID NO: 205812 - DNA, 33 bp, Homo sapien
tttacaaaaagtaggctatgtttattagagtca

SEQ ID NO: 205813 - DNA, 33 bp, Homo sapien
acatttggagatttgccctcgaggaagaacaga

SEQ ID NO: 205814 - DNA, 33 bp, Homo sapien
acatttggagatttgctctcgaggaagaacaga

SEQ ID NO: 205815 - DNA, 33 bp, Homo sapien
aagatccttattttaactacatctgccaaatcc

SEQ ID NO: 205816 - DNA, 33 bp, Homo sapien
aagatccttattttaattacatctgccaaatcc

SEQ ID NO: 205817 - DNA, 33 bp, Homo sapien
tcttagcctcagcatgacagataccctaagtgg

SEQ ID NO: 205818 - DNA, 33 bp, Homo sapien
tcttagcctcagcatggcagataccctaagtgg

SEQ ID NO: 205819 - DNA, 33 bp, Homo sapien
ccagtccagatcccaaactcttatctaagagaa

SEQ ID NO: 205820 - DNA, 33 bp, Homo sapien
ccagtccagatcccaagctcttatctaagagaa

SEQ ID NO: 205821 - DNA, 33 bp, Homo sapien
ggaggcaaaaattatgccagtagtctttctgtc

SEQ ID NO: 205822 - DNA, 33 bp, Homo sapien
ggaggcaaaaattatgtcagtagtctttctgtc

SEQ ID NO: 205823 - DNA, 33 bp, Homo sapien
ttagatagtaaagaagacagctttcagttatac

SEQ ID NO: 205824 - DNA, 33 bp, Homo sapien
ttagatagtaaagaaggcagctttcagttatac

SEQ ID NO: 205825 - DNA, 33 bp, Homo sapien
aaaacatcaggacaacactttcttccataaata

SEQ ID NO: 205826 - DNA, 33 bp, Homo sapien
aaaacatcaggacaactctttcttccataaata

SEQ ID NO: 205827 - DNA, 33 bp, Homo sapien
gtccctccttccagcaactctctggtaggcatg

SEQ ID NO: 205828 - DNA, 33 bp, Homo sapien
gtccctccttccagcagctctctggtaggcatg

SEQ ID NO: 205829 - DNA, 33 bp, Homo sapien
cacaagaggttatagaaagcacaatgagaggaa

SEQ ID NO: 205830 - DNA, 33 bp, Homo sapien
cacaagaggttatagagagcacaatgagaggaa

SEQ ID NO: 205831 - DNA, 33 bp, Homo sapien
ttcctgaaagaggagaacttcagaagcagtgtg

SEQ ID NO: 205832 - DNA, 33 bp, Homo sapien
ttcctgaaagaggagaccttcagaagcagtgtg

SEQ ID NO: 205833 - DNA, 33 bp, Homo sapien
aagggtgaagaagtagaagtagaaaaacaacta

SEQ ID NO: 205834 - DNA, 33 bp, Homo sapien
aagggtgaagaagtaggagtagaaaaacaacta

SEQ ID NO: 205835 - DNA, 33 bp, Homo sapien
ctgaggttgggcaaatcaagcagtgaaagaaat

SEQ ID NO: 205836 - DNA, 33 bp, Homo sapien
ctgaggttgggcaaatgaagcagtgaaagaaat

SEQ ID NO: 205837 - DNA, 33 bp, Homo sapien
gataagtttaaaaatacggcccatgagcttata

SEQ ID NO: 205838 - DNA, 33 bp, Homo sapien
gataagtttaaaaatatggcccatgagcttata

SEQ ID NO: 205839 - DNA, 33 bp, Homo sapien
agttcacagacgaatccgaataacagccttagg

SEQ ID NO: 205840 - DNA, 33 bp, Homo sapien
agttcacagacgaatctgaataacagccttagg

SEQ ID NO: 205841 - DNA, 33 bp, Homo sapien
tgtaaaatagaggaaaggttctatgccttacac

SEQ ID NO: 205842 - DNA, 33 bp, Homo sapien
tgtaaaatagaggaaatgttctatgccttacac

SEQ ID NO: 205843 - DNA, 33 bp, Homo sapien
ttcaaggcaggaaaaacgagtctgttagagagg

SEQ ID NO: 205844 - DNA, 33 bp, Homo sapien
ttcaaggcaggaaaaatgagtctgttagagagg

SEQ ID NO: 205845 - DNA, 33 bp, Homo sapien
aacaaagcctaaacgaaagggctagattctggt

SEQ ID NO: 205846 - DNA, 33 bp, Homo sapien
aacaaagcctaaacgagagggctagattctggt

SEQ ID NO: 205847 - DNA, 33 bp, Homo sapien
ccctgtctctatacaacgttaaaaattagccaa

SEQ ID NO: 205848 - DNA, 33 bp, Homo sapien
ccctgtctctatacaatgttaaaaattagccaa

SEQ ID NO: 205849 - DNA, 33 bp, Homo sapien
tagaatgaaagtttcgcagcaacaggaagtcag

SEQ ID NO: 205850 - DNA, 33 bp, Homo sapien
tagaatgaaagtttcgtagcaacaggaagtcag

SEQ ID NO: 205851 - DNA, 33 bp, Homo sapien
agggcagctgttcttaagacgtctgagctgacc

SEQ ID NO: 205852 - DNA, 33 bp, Homo sapien
agggcagctgttcttacgacgtctgagctgacc

SEQ ID NO: 205853 - DNA, 33 bp, Homo sapien
gcagaaacctagtgtaaaagtgcagcttctgac

SEQ ID NO: 205854 - DNA, 33 bp, Homo sapien
gcagaaacctagtgtagaagtgcagcttctgac

SEQ ID NO: 205855 - DNA, 33 bp, Homo sapien
tcattcgcaaagggcaatgacctcagtaaaaag

SEQ ID NO: 205856 - DNA, 33 bp, Homo sapien
tcattcgcaaagggcagtgacctcagtaaaaag

SEQ ID NO: 205857 - DNA, 33 bp, Homo sapien
gagctccagccacacacggttgctgatctccat

SEQ ID NO: 205858 - DNA, 33 bp, Homo sapien
gagctccagccacacatggttgctgatctccat

SEQ ID NO: 205859 - DNA, 33 bp, Homo sapien
cttcccaaatacactgccaagccttgcatcctt

SEQ ID NO: 205860 - DNA, 33 bp, Homo sapien
cttcccaaatacactgtcaagccttgcatcctt

SEQ ID NO: 205861 - DNA, 33 bp, Homo sapien
tatttctagccccaccacggtcacttagagtgg

SEQ ID NO: 205862 - DNA, 33 bp, Homo sapien
tatttctagccccaccgcggtcacttagagtgg

SEQ ID NO: 205863 - DNA, 33 bp, Homo sapien
ctaccttgatcacaataaagctggagtggcact

SEQ ID NO: 205864 - DNA, 33 bp, Homo sapien
ctaccttgatcacaatcaagctggagtggcact

SEQ ID NO: 205865 - DNA, 33 bp, Homo sapien
taggaattcctatgacaatgactttctagaggt

SEQ ID NO: 205866 - DNA, 33 bp, Homo sapien
taggaattcctatgacgatgactttctagaggt

SEQ ID NO: 205867 - DNA, 33 bp, Homo sapien
ggctcacattcttccaacaaacttctccacatt

SEQ ID NO: 205868 - DNA, 33 bp, Homo sapien
ggctcacattcttccagcaaacttctccacatt

SEQ ID NO: 205869 - DNA, 33 bp, Homo sapien
tctatttagctttctccactaagggaatatttg

SEQ ID NO: 205870 - DNA, 33 bp, Homo sapien
tctatttagctttctctactaagggaatatttg

SEQ ID NO: 205871 - DNA, 33 bp, Homo sapien
cctcaggcaatgcctcacaccctgctctgtacc

SEQ ID NO: 205872 - DNA, 33 bp, Homo sapien
cctcaggcaatgcctcgcaccctgctctgtacc

SEQ ID NO: 205873 - DNA, 33 bp, Homo sapien
tattaccattactcgaagataaagctgatgtaa

SEQ ID NO: 205874 - DNA, 33 bp, Homo sapien
tattaccattactcgaggataaagctgatgtaa

SEQ ID NO: 205875 - DNA, 33 bp, Homo sapien
ggagatgctccctagcaaggcagtgccaagacc

SEQ ID NO: 205876 - DNA, 33 bp, Homo sapien
ggagatgctccctagcgaggcagtgccaagacc

SEQ ID NO: 205877 - DNA, 33 bp, Homo sapien
tttgagcaatgcagagaagtgaattttccacgt

SEQ ID NO: 205878 - DNA, 33 bp, Homo sapien
tttgagcaatgcagagcagtgaattttccacgt

SEQ ID NO: 205879 - DNA, 33 bp, Homo sapien
attccctagattagacaaaaggcttattcctct

SEQ ID NO: 205880 - DNA, 33 bp, Homo sapien
attccctagattagactaaaggcttattcctct

SEQ ID NO: 205881 - DNA, 33 bp, Homo sapien
tgagttctggcaaaaaagatatttcatcatatc

SEQ ID NO: 205882 - DNA, 33 bp, Homo sapien
tgagttctggcaaaaatgatatttcatcatatc

SEQ ID NO: 205883 - DNA, 33 bp, Homo sapien
ttgattatcaatcaaaacccactttaatacctg

SEQ ID NO: 205884 - DNA, 33 bp, Homo sapien
ttgattatcaatcaaagcccactttaatacctg

SEQ ID NO: 205885 - DNA, 33 bp, Homo sapien
ttgatgtttcagaaaacctttgccttgtgggcg

SEQ ID NO: 205886 - DNA, 33 bp, Homo sapien
ttgatgtttcagaaaatctttgccttgtgggcg

SEQ ID NO: 205887 - DNA, 33 bp, Homo sapien
acgtagatgtaatgataaatgagaaacatgaag

SEQ ID NO: 205888 - DNA, 33 bp, Homo sapien
acgtagatgtaatgatgaatgagaaacatgaag

SEQ ID NO: 205889 - DNA, 33 bp, Homo sapien
gctttacattcgttcacgctattacaagatttc

SEQ ID NO: 205890 - DNA, 33 bp, Homo sapien
gctttacattcgttcatgctattacaagatttc

SEQ ID NO: 205891 - DNA, 33 bp, Homo sapien
ttgtccctgttctctcaacttcatctattccct

SEQ ID NO: 205892 - DNA, 33 bp, Homo sapien
ttgtccctgttctctcgacttcatctattccct

SEQ ID NO: 205893 - DNA, 33 bp, Homo sapien
atggaacggagagaatcaaagctgcccatgggt

SEQ ID NO: 205894 - DNA, 33 bp, Homo sapien
atggaacggagagaatgaaagctgcccatgggt

SEQ ID NO: 205895 - DNA, 33 bp, Homo sapien
aagtgataaggtttcaacagtccttagacattt

SEQ ID NO: 205896 - DNA, 33 bp, Homo sapien
aagtgataaggtttcagcagtccttagacattt

SEQ ID NO: 205897 - DNA, 33 bp, Homo sapien
ggcataggaagcttacgctgcagcatgaggatt

SEQ ID NO: 205898 - DNA, 33 bp, Homo sapien
ggcataggaagcttactctgcagcatgaggatt

SEQ ID NO: 205899 - DNA, 33 bp, Homo sapien
caacaacctgaagaacagatctttatgaacagc

SEQ ID NO: 205900 - DNA, 33 bp, Homo sapien
caacaacctgaagaaccgatctttatgaacagc

SEQ ID NO: 205901 - DNA, 33 bp, Homo sapien
gcagggcaaaggaagcaagatcaaattataaca

SEQ ID NO: 205902 - DNA, 33 bp, Homo sapien
gcagggcaaaggaagcgagatcaaattataaca

SEQ ID NO: 205903 - DNA, 33 bp, Homo sapien
ccaactttagattagggatggctatctttccca

SEQ ID NO: 205904 - DNA, 33 bp, Homo sapien
ccaactttagattaggtatggctatctttccca

SEQ ID NO: 205905 - DNA, 33 bp, Homo sapien
ctcagaagggacaaaccgataatgttgatctct

SEQ ID NO: 205906 - DNA, 33 bp, Homo sapien
ctcagaagggacaaactgataatgttgatctct

SEQ ID NO: 205907 - DNA, 33 bp, Homo sapien
gacagatgatgatgaaaagcccttgagataacc

SEQ ID NO: 205908 - DNA, 33 bp, Homo sapien
gacagatgatgatgaatagcccttgagataacc

SEQ ID NO: 205909 - DNA, 33 bp, Homo sapien
tgtaactggatgcttgcatttctttacatattg

SEQ ID NO: 205910 - DNA, 33 bp, Homo sapien
tgtaactggatgcttgtatttctttacatattg

SEQ ID NO: 205911 - DNA, 33 bp, Homo sapien
tcggtgtcccgtgaaggctactttgtttttgat

SEQ ID NO: 205912 - DNA, 33 bp, Homo sapien
tcggtgtcccgtgaagtctactttgtttttgat

SEQ ID NO: 205913 - DNA, 33 bp, Homo sapien
tgaagcctcaaccccacgtgtagctatacttgg

SEQ ID NO: 205914 - DNA, 33 bp, Homo sapien
tgaagcctcaaccccatgtgtagctatacttgg

SEQ ID NO: 205915 - DNA, 33 bp, Homo sapien
aagattcgggactggccccacttgctaagttgg

SEQ ID NO: 205916 - DNA, 33 bp, Homo sapien
aagattcgggactggctccacttgctaagttgg

SEQ ID NO: 205917 - DNA, 33 bp, Homo sapien
gcatgttggcccagtaagaaagagagctataat

SEQ ID NO: 205918 - DNA, 33 bp, Homo sapien
gcatgttggcccagtaggaaagagagctataat

SEQ ID NO: 205919 - DNA, 33 bp, Homo sapien
ctgatggaatttaaaacgatcagactgaagaaa

SEQ ID NO: 205920 - DNA, 33 bp, Homo sapien
ctgatggaatttaaaatgatcagactgaagaaa

SEQ ID NO: 205921 - DNA, 33 bp, Homo sapien
gatgaagcttcttggccataggttctctcttgt

SEQ ID NO: 205922 - DNA, 33 bp, Homo sapien
gatgaagcttcttggctataggttctctcttgt

SEQ ID NO: 205923 - DNA, 33 bp, Homo sapien
gcactcgagaaagaaacaattgtaagatgatag

SEQ ID NO: 205924 - DNA, 33 bp, Homo sapien
gcactcgagaaagaaataattgtaagatgatag

SEQ ID NO: 205925 - DNA, 33 bp, Homo sapien
tccactgaaggcaaaagagaaggggatatcttg

SEQ ID NO: 205926 - DNA, 33 bp, Homo sapien
tccactgaaggcaaaatagaaggggatatcttg

SEQ ID NO: 205927 - DNA, 33 bp, Homo sapien
agtgctgaatcttccacagaaaacatgctgaga

SEQ ID NO: 205928 - DNA, 33 bp, Homo sapien
agtgctgaatcttccatagaaaacatgctgaga

SEQ ID NO: 205929 - DNA, 33 bp, Homo sapien
tatcatgagtacaacactagtctaatatactga

SEQ ID NO: 205930 - DNA, 33 bp, Homo sapien
tatcatgagtacaacattagtctaatatactga

SEQ ID NO: 205931 - DNA, 33 bp, Homo sapien
gtaattttgctggaaaaatcaaaacacaaagat

SEQ ID NO: 205932 - DNA, 33 bp, Homo sapien
gtaattttgctggaaagatcaaaacacaaagat

SEQ ID NO: 205933 - DNA, 33 bp, Homo sapien
ggtggaggttatattaactcaaagcaactacaa

SEQ ID NO: 205934 - DNA, 33 bp, Homo sapien
ggtggaggttatattagctcaaagcaactacaa

SEQ ID NO: 205935 - DNA, 33 bp, Homo sapien
gagcttgctagtaatcacctatggctgaactcc

SEQ ID NO: 205936 - DNA, 33 bp, Homo sapien
gagcttgctagtaatcgcctatggctgaactcc

SEQ ID NO: 205937 - DNA, 33 bp, Homo sapien
tgatgaagcgttttagaacaagtgcattcagat

SEQ ID NO: 205938 - DNA, 33 bp, Homo sapien
tgatgaagcgttttaggacaagtgcattcagat

SEQ ID NO: 205939 - DNA, 33 bp, Homo sapien
cagccaattcctgctcaatgtcttcacccacaa

SEQ ID NO: 205940 - DNA, 33 bp, Homo sapien
cagccaattcctgctctatgtcttcacccacaa

SEQ ID NO: 205941 - DNA, 33 bp, Homo sapien
tagatatacaaagcaaacatttattattaccaa

SEQ ID NO: 205942 - DNA, 33 bp, Homo sapien
tagatatacaaagcaaccatttattattaccaa

SEQ ID NO: 205943 - DNA, 33 bp, Homo sapien
ccactgaagctgtgcaaattacgtcataccttt

SEQ ID NO: 205944 - DNA, 33 bp, Homo sapien
ccactgaagctgtgcacattacgtcataccttt

SEQ ID NO: 205945 - DNA, 33 bp, Homo sapien
tgaggtcaaatgaagacgaagtgggtgaagttt

SEQ ID NO: 205946 - DNA, 33 bp, Homo sapien
tgaggtcaaatgaagatgaagtgggtgaagttt

SEQ ID NO: 205947 - DNA, 33 bp, Homo sapien
gcggactgttcctaatcatacagccagcaggag

SEQ ID NO: 205948 - DNA, 33 bp, Homo sapien
gcggactgttcctaattatacagccagcaggag

SEQ ID NO: 205949 - DNA, 33 bp, Homo sapien
ttctctcagccaggagcagagatccacagacag

SEQ ID NO: 205950 - DNA, 33 bp, Homo sapien
ttctctcagccaggagtagagatccacagacag

SEQ ID NO: 205951 - DNA, 33 bp, Homo sapien
acagcctgctcatccccagaacgaggtgccagt

SEQ ID NO: 205952 - DNA, 33 bp, Homo sapien
acagcctgctcatccctagaacgaggtgccagt

SEQ ID NO: 205953 - DNA, 33 bp, Homo sapien
gagaagtgtccagataagcaggcaaaagagtag

SEQ ID NO: 205954 - DNA, 33 bp, Homo sapien
gagaagtgtccagataggcaggcaaaagagtag

SEQ ID NO: 205955 - DNA, 33 bp, Homo sapien
ccttgatgagcaaagacaaaagttgccgcgaga

SEQ ID NO: 205956 - DNA, 33 bp, Homo sapien
ccttgatgagcaaagataaaagttgccgcgaga

SEQ ID NO: 205957 - DNA, 33 bp, Homo sapien
aatgtctggcatttagaaaagttgtacctttgc

SEQ ID NO: 205958 - DNA, 33 bp, Homo sapien
aatgtctggcatttaggaaagttgtacctttgc

SEQ ID NO: 205959 - DNA, 33 bp, Homo sapien
tttaaaatctagtttaagctaacaaagaaccac

SEQ ID NO: 205960 - DNA, 33 bp, Homo sapien
tttaaaatctagtttaggctaacaaagaaccac

SEQ ID NO: 205961 - DNA, 33 bp, Homo sapien
tatctcctcagggttcaccactacggggaaaag

SEQ ID NO: 205962 - DNA, 33 bp, Homo sapien
tatctcctcagggttcgccactacggggaaaag

SEQ ID NO: 205963 - DNA, 33 bp, Homo sapien
tctaaatgggtgccataataacggacaccagaa

SEQ ID NO: 205964 - DNA, 33 bp, Homo sapien
tctaaatgggtgccatgataacggacaccagaa

SEQ ID NO: 205965 - DNA, 33 bp, Homo sapien
gatgaaggtacacatggaatgcaagaacactaa

SEQ ID NO: 205966 - DNA, 33 bp, Homo sapien
gatgaaggtacacatgtaatgcaagaacactaa

SEQ ID NO: 205967 - DNA, 33 bp, Homo sapien
tatttggggctacatgaagacaggctcaaagct

SEQ ID NO: 205968 - DNA, 33 bp, Homo sapien
tatttggggctacatggagacaggctcaaagct

SEQ ID NO: 205969 - DNA, 33 bp, Homo sapien
caattcccaaaaaaatgagcttccaatattgat

SEQ ID NO: 205970 - DNA, 33 bp, Homo sapien
caattcccaaaaaaattagcttccaatattgat

SEQ ID NO: 205971 - DNA, 33 bp, Homo sapien
caaggaaatggtgcaacctagttgtaatgcgat

SEQ ID NO: 205972 - DNA, 33 bp, Homo sapien
caaggaaatggtgcaatctagttgtaatgcgat

SEQ ID NO: 205973 - DNA, 33 bp, Homo sapien
gagggacaatatggcccctttggctcaggacaa

SEQ ID NO: 205974 - DNA, 33 bp, Homo sapien
gagggacaatatggccgctttggctcaggacaa

SEQ ID NO: 205975 - DNA, 33 bp, Homo sapien
taccatccaacttccactagctttcccagtcca

SEQ ID NO: 205976 - DNA, 33 bp, Homo sapien
taccatccaacttccattagctttcccagtcca

SEQ ID NO: 205977 - DNA, 33 bp, Homo sapien
gtctgttgctgagaaaagtgatgtcagctctct

SEQ ID NO: 205978 - DNA, 33 bp, Homo sapien
gtctgttgctgagaaaggtgatgtcagctctct

SEQ ID NO: 205979 - DNA, 33 bp, Homo sapien
acatcatagatcactccctgacaggctgaactg

SEQ ID NO: 205980 - DNA, 33 bp, Homo sapien
acatcatagatcactcgctgacaggctgaactg

SEQ ID NO: 205981 - DNA, 33 bp, Homo sapien
aatgaaagtgaatctcaaagtgctcagaaacag

SEQ ID NO: 205982 - DNA, 33 bp, Homo sapien
aatgaaagtgaatctcgaagtgctcagaaacag

SEQ ID NO: 205983 - DNA, 33 bp, Homo sapien
ccttctcctatgaatacatttccggctcccagt

SEQ ID NO: 205984 - DNA, 33 bp, Homo sapien
ccttctcctatgaatatatttccggctcccagt

SEQ ID NO: 205985 - DNA, 33 bp, Homo sapien
agagaagacctttccagtccggagcccctggga

SEQ ID NO: 205986 - DNA, 33 bp, Homo sapien
agagaagacctttccattccggagcccctggga

SEQ ID NO: 205987 - DNA, 33 bp, Homo sapien
agcactatcgttctcacagcgggtgggtgatgg

SEQ ID NO: 205988 - DNA, 33 bp, Homo sapien
agcactatcgttctcatagcgggtgggtgatgg

SEQ ID NO: 205989 - DNA, 33 bp, Homo sapien
gtcctctggctacttacgcaggatattttgcct

SEQ ID NO: 205990 - DNA, 33 bp, Homo sapien
gtcctctggctacttatgcaggatattttgcct

SEQ ID NO: 205991 - DNA, 33 bp, Homo sapien
tgcagtggagtaactcagagtgacatggatctc

SEQ ID NO: 205992 - DNA, 33 bp, Homo sapien
tgcagtggagtaactcggagtgacatggatctc

SEQ ID NO: 205993 - DNA, 33 bp, Homo sapien
aagtttctggaaccacagtgagcaggaagttac

SEQ ID NO: 205994 - DNA, 33 bp, Homo sapien
aagtttctggaaccacggtgagcaggaagttac

SEQ ID NO: 205995 - DNA, 33 bp, Homo sapien
gccgcctgatggattccagcatctggttgcatg

SEQ ID NO: 205996 - DNA, 33 bp, Homo sapien
gccgcctgatggattctagcatctggttgcatg

SEQ ID NO: 205997 - DNA, 33 bp, Homo sapien
gatctctaactccaaaccaacaacactgccttg

SEQ ID NO: 205998 - DNA, 33 bp, Homo sapien
gatctctaactccaaagcaacaacactgccttg

SEQ ID NO: 205999 - DNA, 33 bp, Homo sapien
attgaaaagtcacacagcattataaaagttaaa

SEQ ID NO: 206000 - DNA, 33 bp, Homo sapien
attgaaaagtcacacatcattataaaagttaaa

SEQ ID NO: 206001 - DNA, 33 bp, Homo sapien
atttcataaatctcaacgaagcataatgacctg

SEQ ID NO: 206002 - DNA, 33 bp, Homo sapien
atttcataaatctcaatgaagcataatgacctg

SEQ ID NO: 206003 - DNA, 33 bp, Homo sapien
ttaagcctagatattccataatggatcttttaa

SEQ ID NO: 206004 - DNA, 33 bp, Homo sapien
ttaagcctagatattctataatggatcttttaa

SEQ ID NO: 206005 - DNA, 33 bp, Homo sapien
gagcatatggtctaggaacaggaggcacttgat

SEQ ID NO: 206006 - DNA, 33 bp, Homo sapien
gagcatatggtctaggcacaggaggcacttgat

SEQ ID NO: 206007 - DNA, 33 bp, Homo sapien
gggtttccatggctcaaatgagataatacatga

SEQ ID NO: 206008 - DNA, 33 bp, Homo sapien
gggtttccatggctcagatgagataatacatga

SEQ ID NO: 206009 - DNA, 33 bp, Homo sapien
gcaagagacagcgtaaagcctcccttttccacc

SEQ ID NO: 206010 - DNA, 33 bp, Homo sapien
gcaagagacagcgtaaggcctcccttttccacc

SEQ ID NO: 206011 - DNA, 33 bp, Homo sapien
attataggaccctataagataggacatttccga

SEQ ID NO: 206012 - DNA, 33 bp, Homo sapien
attataggaccctatatgataggacatttccga

SEQ ID NO: 206013 - DNA, 33 bp, Homo sapien
tcaataattcctcagtcaacacaaaatcacaaa

SEQ ID NO: 206014 - DNA, 33 bp, Homo sapien
tcaataattcctcagtgaacacaaaatcacaaa

SEQ ID NO: 206015 - DNA, 33 bp, Homo sapien
taggtctctggtctgcaacacaatagtcaatag

SEQ ID NO: 206016 - DNA, 33 bp, Homo sapien
taggtctctggtctgcgacacaatagtcaatag

SEQ ID NO: 206017 - DNA, 33 bp, Homo sapien
ttaggggagcagaaccagagttccagtttgcac

SEQ ID NO: 206018 - DNA, 33 bp, Homo sapien
ttaggggagcagaaccggagttccagtttgcac

SEQ ID NO: 206019 - DNA, 33 bp, Homo sapien
ctaaggccaaggagaacatgaggttctgcgggt

SEQ ID NO: 206020 - DNA, 33 bp, Homo sapien
ctaaggccaaggagaatatgaggttctgcgggt

SEQ ID NO: 206021 - DNA, 33 bp, Homo sapien
aaaggaagaaaatacggacacagagaatgcggg

SEQ ID NO: 206022 - DNA, 33 bp, Homo sapien
aaaggaagaaaatacgtacacagagaatgcggg

SEQ ID NO: 206023 - DNA, 33 bp, Homo sapien
cagtgctacgtctgtaggttatttaaaatcttc

SEQ ID NO: 206024 - DNA, 33 bp, Homo sapien
cagtgctacgtctgtatgttatttaaaatcttc

SEQ ID NO: 206025 - DNA, 33 bp, Homo sapien
cttcctagagaaagacagccatttactacaatt

SEQ ID NO: 206026 - DNA, 33 bp, Homo sapien
cttcctagagaaagacggccatttactacaatt

SEQ ID NO: 206027 - DNA, 33 bp, Homo sapien
gatctggatggatttaagagtgtttcctttatg

SEQ ID NO: 206028 - DNA, 33 bp, Homo sapien
gatctggatggatttaggagtgtttcctttatg

SEQ ID NO: 206029 - DNA, 33 bp, Homo sapien
atggtaaaggaacatacatggtcagagagaaag

SEQ ID NO: 206030 - DNA, 33 bp, Homo sapien
atggtaaaggaacatatatggtcagagagaaag

SEQ ID NO: 206031 - DNA, 33 bp, Homo sapien
ttctcactgctcttggaagatcctgaaagatta

SEQ ID NO: 206032 - DNA, 33 bp, Homo sapien
ttctcactgctcttggcagatcctgaaagatta

SEQ ID NO: 206033 - DNA, 33 bp, Homo sapien
tactaatgagaaagtacgcatctttgcaagtga

SEQ ID NO: 206034 - DNA, 33 bp, Homo sapien
tactaatgagaaagtatgcatctttgcaagtga

SEQ ID NO: 206035 - DNA, 33 bp, Homo sapien
gtatgaggcaacacccagaagtcaagagaggtt

SEQ ID NO: 206036 - DNA, 33 bp, Homo sapien
gtatgaggcaacacccggaagtcaagagaggtt

SEQ ID NO: 206037 - DNA, 33 bp, Homo sapien
taggaaactgaaggcaatcatcatgtcctttgg

SEQ ID NO: 206038 - DNA, 33 bp, Homo sapien
taggaaactgaaggcagtcatcatgtcctttgg

SEQ ID NO: 206039 - DNA, 33 bp, Homo sapien
ggagagacgtccattaccagaacacatctggtt

SEQ ID NO: 206040 - DNA, 33 bp, Homo sapien
ggagagacgtccattagcagaacacatctggtt

SEQ ID NO: 206041 - DNA, 33 bp, Homo sapien
attatatccttttgcacgttaagaagtcttaat

SEQ ID NO: 206042 - DNA, 33 bp, Homo sapien
attatatccttttgcatgttaagaagtcttaat

SEQ ID NO: 206043 - DNA, 33 bp, Homo sapien
atactaaatcttgaaaaggtaggtgcctttagt

SEQ ID NO: 206044 - DNA, 33 bp, Homo sapien
atactaaatcttgaaatggtaggtgcctttagt

SEQ ID NO: 206045 - DNA, 33 bp, Homo sapien
gctcaatcttatgtcacgtgtttaaatatgtgt

SEQ ID NO: 206046 - DNA, 33 bp, Homo sapien
gctcaatcttatgtcatgtgtttaaatatgtgt

SEQ ID NO: 206047 - DNA, 33 bp, Homo sapien
ccctctgaacgatagcacaagactgtatctttt

SEQ ID NO: 206048 - DNA, 33 bp, Homo sapien
ccctctgaacgatagcgcaagactgtatctttt

SEQ ID NO: 206049 - DNA, 33 bp, Homo sapien
atgacagaacttttcaagtaaccaatatgatca

SEQ ID NO: 206050 - DNA, 33 bp, Homo sapien
atgacagaacttttcatgtaaccaatatgatca

SEQ ID NO: 206051 - DNA, 33 bp, Homo sapien
gaatggtaaggcattcaaacaacattctctgag

SEQ ID NO: 206052 - DNA, 33 bp, Homo sapien
gaatggtaaggcattcgaacaacattctctgag

SEQ ID NO: 206053 - DNA, 33 bp, Homo sapien
tctctacatgagttggccagttctaaaaagtgt

SEQ ID NO: 206054 - DNA, 33 bp, Homo sapien
tctctacatgagttggtcagttctaaaaagtgt

SEQ ID NO: 206055 - DNA, 33 bp, Homo sapien
aaaatattcttgcccccactgagagaaccttgg

SEQ ID NO: 206056 - DNA, 33 bp, Homo sapien
aaaatattcttgcccctactgagagaaccttgg

SEQ ID NO: 206057 - DNA, 33 bp, Homo sapien
atgtgagttctgatcaagtctgtacattcctcc

SEQ ID NO: 206058 - DNA, 33 bp, Homo sapien
atgtgagttctgatcaggtctgtacattcctcc

SEQ ID NO: 206059 - DNA, 33 bp, Homo sapien
gccaaaaggaatataaagtcagattctcaggtg

SEQ ID NO: 206060 - DNA, 33 bp, Homo sapien
gccaaaaggaatataaggtcagattctcaggtg

SEQ ID NO: 206061 - DNA, 33 bp, Homo sapien
ccgtatcaacttcttaacaccttgcttccacca

SEQ ID NO: 206062 - DNA, 33 bp, Homo sapien
ccgtatcaacttcttagcaccttgcttccacca

SEQ ID NO: 206063 - DNA, 33 bp, Homo sapien
tcccacctaaaagctaatacctgctcctcccct

SEQ ID NO: 206064 - DNA, 33 bp, Homo sapien
tcccacctaaaagctactacctgctcctcccct

SEQ ID NO: 206065 - DNA, 33 bp, Homo sapien
tgaaaattagcctgctcagagaacaggtttgca

SEQ ID NO: 206066 - DNA, 33 bp, Homo sapien
tgaaaattagcctgcttagagaacaggtttgca

SEQ ID NO: 206067 - DNA, 33 bp, Homo sapien
agcaaaccagcaataaacagaacattacaaagc

SEQ ID NO: 206068 - DNA, 33 bp, Homo sapien
agcaaaccagcaataatcagaacattacaaagc

SEQ ID NO: 206069 - DNA, 33 bp, Homo sapien
gtttccaaacatacggaagaaatttttcatcaa

SEQ ID NO: 206070 - DNA, 33 bp, Homo sapien
gtttccaaacatacgggagaaatttttcatcaa

SEQ ID NO: 206071 - DNA, 33 bp, Homo sapien
aatccagaaagatgacaaggaatgggtcacagg

SEQ ID NO: 206072 - DNA, 33 bp, Homo sapien
aatccagaaagatgacgaggaatgggtcacagg

SEQ ID NO: 206073 - DNA, 33 bp, Homo sapien
tctttccagtttgagacgactcactaggctctg

SEQ ID NO: 206074 - DNA, 33 bp, Homo sapien
tctttccagtttgagaggactcactaggctctg

SEQ ID NO: 206075 - DNA, 33 bp, Homo sapien
gactctgagaagtggaaatggggacaacagtaa

SEQ ID NO: 206076 - DNA, 33 bp, Homo sapien
gactctgagaagtggagatggggacaacagtaa

SEQ ID NO: 206077 - DNA, 33 bp, Homo sapien
tgatagttcatttatgacaaaaatctcttcaac

SEQ ID NO: 206078 - DNA, 33 bp, Homo sapien
tgatagttcatttatgtcaaaaatctcttcaac

SEQ ID NO: 206079 - DNA, 33 bp, Homo sapien
gcccctattgttggacactcaaacaaggtacac

SEQ ID NO: 206080 - DNA, 33 bp, Homo sapien
gcccctattgttggacgctcaaacaaggtacac

SEQ ID NO: 206081 - DNA, 33 bp, Homo sapien
acccctttcagtttcactccaacatgcaggaga

SEQ ID NO: 206082 - DNA, 33 bp, Homo sapien
acccctttcagtttcattccaacatgcaggaga

SEQ ID NO: 206083 - DNA, 33 bp, Homo sapien
cctactttgaacagaaccccatatccctctgtg

SEQ ID NO: 206084 - DNA, 33 bp, Homo sapien
cctactttgaacagaatcccatatccctctgtg

SEQ ID NO: 206085 - DNA, 33 bp, Homo sapien
aggcacttcttttaaactgagtgatctgggaag

SEQ ID NO: 206086 - DNA, 33 bp, Homo sapien
aggcacttcttttaaattgagtgatctgggaag

SEQ ID NO: 206087 - DNA, 33 bp, Homo sapien
caacaacaactactaccgctaataataatacta

SEQ ID NO: 206088 - DNA, 33 bp, Homo sapien
caacaacaactactactgctaataataatacta

SEQ ID NO: 206089 - DNA, 33 bp, Homo sapien
gccactttggattgcacgggtttagtcagtggg

SEQ ID NO: 206090 - DNA, 33 bp, Homo sapien
gccactttggattgcatgggtttagtcagtggg

SEQ ID NO: 206091 - DNA, 33 bp, Homo sapien
catggacatagtccacaactcgaagttcttgcc

SEQ ID NO: 206092 - DNA, 33 bp, Homo sapien
catggacatagtccacgactcgaagttcttgcc

SEQ ID NO: 206093 - DNA, 33 bp, Homo sapien
agaagcaagaccaaaaattaggctcccaatttt

SEQ ID NO: 206094 - DNA, 33 bp, Homo sapien
agaagcaagaccaaaacttaggctcccaatttt

SEQ ID NO: 206095 - DNA, 33 bp, Homo sapien
cttgctcagcgattccaagatctatttaacacg

SEQ ID NO: 206096 - DNA, 33 bp, Homo sapien
cttgctcagcgattccgagatctatttaacacg

SEQ ID NO: 206097 - DNA, 33 bp, Homo sapien
atctctttgataagccacagttctcccctcctt

SEQ ID NO: 206098 - DNA, 33 bp, Homo sapien
atctctttgataagccgcagttctcccctcctt

SEQ ID NO: 206099 - DNA, 33 bp, Homo sapien
aagggtctttttacacccacaggatgaagatgg

SEQ ID NO: 206100 - DNA, 33 bp, Homo sapien
aagggtctttttacactcacaggatgaagatgg

SEQ ID NO: 206101 - DNA, 33 bp, Homo sapien
gatagaaataacattcagaagttggagatttgt

SEQ ID NO: 206102 - DNA, 33 bp, Homo sapien
gatagaaataacattcggaagttggagatttgt

SEQ ID NO: 206103 - DNA, 33 bp, Homo sapien
agtctaaaaattcagaatcaccaattcaatgat

SEQ ID NO: 206104 - DNA, 33 bp, Homo sapien
agtctaaaaattcagagtcaccaattcaatgat

SEQ ID NO: 206105 - DNA, 33 bp, Homo sapien
tgatcttgagtgaataactagaactttctgatc

SEQ ID NO: 206106 - DNA, 33 bp, Homo sapien
tgatcttgagtgaatagctagaactttctgatc

SEQ ID NO: 206107 - DNA, 33 bp, Homo sapien
atgaatctcacacaagaaaagtggcttaatgag

SEQ ID NO: 206108 - DNA, 33 bp, Homo sapien
atgaatctcacacaaggaaagtggcttaatgag

SEQ ID NO: 206109 - DNA, 33 bp, Homo sapien
tttgtgtggaagtataacatatttctgttgaga

SEQ ID NO: 206110 - DNA, 33 bp, Homo sapien
tttgtgtggaagtataccatatttctgttgaga

SEQ ID NO: 206111 - DNA, 33 bp, Homo sapien
aagggattgctgtgtcaaagataagtgtatgtt

SEQ ID NO: 206112 - DNA, 33 bp, Homo sapien
aagggattgctgtgtcgaagataagtgtatgtt

SEQ ID NO: 206113 - DNA, 33 bp, Homo sapien
atatggtacagatgaaacacatacaaaatcaat

SEQ ID NO: 206114 - DNA, 33 bp, Homo sapien
atatggtacagatgaagcacatacaaaatcaat

SEQ ID NO: 206115 - DNA, 33 bp, Homo sapien
tttctggccttctgtgaaattaattaatatttt

SEQ ID NO: 206116 - DNA, 33 bp, Homo sapien
tttctggccttctgtggaattaattaatatttt

SEQ ID NO: 206117 - DNA, 33 bp, Homo sapien
aagtatggaaatgagaaataaagcaacagaaag

SEQ ID NO: 206118 - DNA, 33 bp, Homo sapien
aagtatggaaatgagagataaagcaacagaaag

SEQ ID NO: 206119 - DNA, 33 bp, Homo sapien
acataggttatgtctgcatgaaggaaccagctg

SEQ ID NO: 206120 - DNA, 33 bp, Homo sapien
acataggttatgtctgtatgaaggaaccagctg

SEQ ID NO: 206121 - DNA, 33 bp, Homo sapien
aaacagaggtttgaaccccagctgtctgtccct

SEQ ID NO: 206122 - DNA, 33 bp, Homo sapien
aaacagaggtttgaactccagctgtctgtccct

SEQ ID NO: 206123 - DNA, 33 bp, Homo sapien
ttacccttatcttttgcaatagcaccactctgt

SEQ ID NO: 206124 - DNA, 33 bp, Homo sapien
ttacccttatcttttgtaatagcaccactctgt

SEQ ID NO: 206125 - DNA, 33 bp, Homo sapien
tctatttagaaacacgaatttacttagaagtca

SEQ ID NO: 206126 - DNA, 33 bp, Homo sapien
tctatttagaaacacggatttacttagaagtca

SEQ ID NO: 206127 - DNA, 33 bp, Homo sapien
tccaggaatggtctccacttccacatgacagtg

SEQ ID NO: 206128 - DNA, 33 bp, Homo sapien
tccaggaatggtctccgcttccacatgacagtg

SEQ ID NO: 206129 - DNA, 33 bp, Homo sapien
tgcctcttaccaaatagctactgccacatcctg

SEQ ID NO: 206130 - DNA, 33 bp, Homo sapien
tgcctcttaccaaatatctactgccacatcctg

SEQ ID NO: 206131 - DNA, 33 bp, Homo sapien
gataggaggccttagcccatattagttgaacat

SEQ ID NO: 206132 - DNA, 33 bp, Homo sapien
gataggaggccttagctcatattagttgaacat

SEQ ID NO: 206133 - DNA, 33 bp, Homo sapien
agacaggttcttagcaaattctgaagcactcac

SEQ ID NO: 206134 - DNA, 33 bp, Homo sapien
agacaggttcttagcagattctgaagcactcac

SEQ ID NO: 206135 - DNA, 33 bp, Homo sapien
accacacgcgagtctacaagacaaagtaagacc

SEQ ID NO: 206136 - DNA, 33 bp, Homo sapien
accacacgcgagtctagaagacaaagtaagacc

SEQ ID NO: 206137 - DNA, 33 bp, Homo sapien
agctcacaacacctaaaccaggcagtcatgggt

SEQ ID NO: 206138 - DNA, 33 bp, Homo sapien
agctcacaacacctaacccaggcagtcatgggt

SEQ ID NO: 206139 - DNA, 33 bp, Homo sapien
gacttccaaagaaggaataagctccgtgtggga

SEQ ID NO: 206140 - DNA, 33 bp, Homo sapien
gacttccaaagaaggagtaagctccgtgtggga

SEQ ID NO: 206141 - DNA, 33 bp, Homo sapien
gactgtaacaacgaagcctggagcttactcttt

SEQ ID NO: 206142 - DNA, 33 bp, Homo sapien
gactgtaacaacgaaggctggagcttactcttt

SEQ ID NO: 206143 - DNA, 33 bp, Homo sapien
ctccacccaaatccaaatggttagaaagtcaat

SEQ ID NO: 206144 - DNA, 33 bp, Homo sapien
ctccacccaaatccaagtggttagaaagtcaat

SEQ ID NO: 206145 - DNA, 33 bp, Homo sapien
ggcaaattggtaatccaagttctaaatcaaagt

SEQ ID NO: 206146 - DNA, 33 bp, Homo sapien
ggcaaattggtaatcccagttctaaatcaaagt

SEQ ID NO: 206147 - DNA, 33 bp, Homo sapien
gtcaggtagaattagagggtccagctgttctcc

SEQ ID NO: 206148 - DNA, 33 bp, Homo sapien
gtcaggtagaattagatggtccagctgttctcc

SEQ ID NO: 206149 - DNA, 33 bp, Homo sapien
tgcagtgtgcgcaaaaagaacatccatcatgtc

SEQ ID NO: 206150 - DNA, 33 bp, Homo sapien
tgcagtgtgcgcaaaaggaacatccatcatgtc

SEQ ID NO: 206151 - DNA, 33 bp, Homo sapien
tgtgctttgagacgaaagcagtcaccaagggag

SEQ ID NO: 206152 - DNA, 33 bp, Homo sapien
tgtgctttgagacgaacgcagtcaccaagggag

SEQ ID NO: 206153 - DNA, 33 bp, Homo sapien
ttgtaaaagggccaacaatcataaaacaattaa

SEQ ID NO: 206154 - DNA, 33 bp, Homo sapien
ttgtaaaagggccaacgatcataaaacaattaa

SEQ ID NO: 206155 - DNA, 33 bp, Homo sapien
aggggatgtgccaagaacctacattattttgtt

SEQ ID NO: 206156 - DNA, 33 bp, Homo sapien
aggggatgtgccaagagcctacattattttgtt

SEQ ID NO: 206157 - DNA, 33 bp, Homo sapien
agagacattcaagacaaatcctctgaaacataa

SEQ ID NO: 206158 - DNA, 33 bp, Homo sapien
agagacattcaagacagatcctctgaaacataa

SEQ ID NO: 206159 - DNA, 33 bp, Homo sapien
tggttgatgcacacaaaaaaggtttggccattg

SEQ ID NO: 206160 - DNA, 33 bp, Homo sapien
tggttgatgcacacaagaaaggtttggccattg

SEQ ID NO: 206161 - DNA, 33 bp, Homo sapien
ctagaccataaactcaactcgaacataagcata

SEQ ID NO: 206162 - DNA, 33 bp, Homo sapien
ctagaccataaactcagctcgaacataagcata

SEQ ID NO: 206163 - DNA, 33 bp, Homo sapien
cctcattcactttagcacacctctcgggtagtg

SEQ ID NO: 206164 - DNA, 33 bp, Homo sapien
cctcattcactttagctcacctctcgggtagtg

SEQ ID NO: 206165 - DNA, 33 bp, Homo sapien
aactcactggggttacaatggatccaaaaccaa

SEQ ID NO: 206166 - DNA, 33 bp, Homo sapien
aactcactggggttacgatggatccaaaaccaa

SEQ ID NO: 206167 - DNA, 33 bp, Homo sapien
ttctgctatttaggggaatgtctacgctctttc

SEQ ID NO: 206168 - DNA, 33 bp, Homo sapien
ttctgctatttagggggatgtctacgctctttc

SEQ ID NO: 206169 - DNA, 33 bp, Homo sapien
ctgttctctgggcttccagttcataatattcct

SEQ ID NO: 206170 - DNA, 33 bp, Homo sapien
ctgttctctgggcttcgagttcataatattcct

SEQ ID NO: 206171 - DNA, 33 bp, Homo sapien
tcaactgtaggcctgaagatagaaagaaaggcc

SEQ ID NO: 206172 - DNA, 33 bp, Homo sapien
tcaactgtaggcctgaggatagaaagaaaggcc

SEQ ID NO: 206173 - DNA, 33 bp, Homo sapien
caataaactgattacaaagccttcattcctgaa

SEQ ID NO: 206174 - DNA, 33 bp, Homo sapien
caataaactgattacacagccttcattcctgaa

SEQ ID NO: 206175 - DNA, 33 bp, Homo sapien
aatgtggtgtaacgtccaaggtctcctataaaa

SEQ ID NO: 206176 - DNA, 33 bp, Homo sapien
aatgtggtgtaacgtctaaggtctcctataaaa

SEQ ID NO: 206177 - DNA, 33 bp, Homo sapien
gagctttgcgattgtacagaaggggagtcaagt

SEQ ID NO: 206178 - DNA, 33 bp, Homo sapien
gagctttgcgattgtatagaaggggagtcaagt

SEQ ID NO: 206179 - DNA, 33 bp, Homo sapien
gtgagctagaaatttacaattatacagaattga

SEQ ID NO: 206180 - DNA, 33 bp, Homo sapien
gtgagctagaaatttagaattatacagaattga

SEQ ID NO: 206181 - DNA, 33 bp, Homo sapien
cctccctctccagaaagcccagacatagagcct

SEQ ID NO: 206182 - DNA, 33 bp, Homo sapien
cctccctctccagaaatcccagacatagagcct

SEQ ID NO: 206183 - DNA, 33 bp, Homo sapien
agcctgccgtgggggacgcaccctggcctggtt

SEQ ID NO: 206184 - DNA, 33 bp, Homo sapien
agcctgccgtgggggatgcaccctggcctggtt

SEQ ID NO: 206185 - DNA, 33 bp, Homo sapien
cctaagctggttaagacagtcttctcccagaca

SEQ ID NO: 206186 - DNA, 33 bp, Homo sapien
cctaagctggttaagagagtcttctcccagaca

SEQ ID NO: 206187 - DNA, 33 bp, Homo sapien
ttcaacaaaagttagcactgtcaaagttaacaa

SEQ ID NO: 206188 - DNA, 33 bp, Homo sapien
ttcaacaaaagttagcgctgtcaaagttaacaa

SEQ ID NO: 206189 - DNA, 33 bp, Homo sapien
gtttctctcttgggaaagtttattgtagaattt

SEQ ID NO: 206190 - DNA, 33 bp, Homo sapien
gtttctctcttgggaatgtttattgtagaattt

SEQ ID NO: 206191 - DNA, 33 bp, Homo sapien
acacaatggcccctaacatatatgcacctaata

SEQ ID NO: 206192 - DNA, 33 bp, Homo sapien
acacaatggcccctaatatatatgcacctaata

SEQ ID NO: 206193 - DNA, 33 bp, Homo sapien
tcaaagcaggttcaaaaagttttccaaaatgaa

SEQ ID NO: 206194 - DNA, 33 bp, Homo sapien
tcaaagcaggttcaaacagttttccaaaatgaa

SEQ ID NO: 206195 - DNA, 33 bp, Homo sapien
ctttagatattggaatcatcatgtgaagcctat

SEQ ID NO: 206196 - DNA, 33 bp, Homo sapien
ctttagatattggaattatcatgtgaagcctat

SEQ ID NO: 206197 - DNA, 33 bp, Homo sapien
tagctgaacaatgtcaagttcttttaggagggt

SEQ ID NO: 206198 - DNA, 33 bp, Homo sapien
tagctgaacaatgtcaggttcttttaggagggt

SEQ ID NO: 206199 - DNA, 33 bp, Homo sapien
cagccagcccatggaagaaatcagagtcaggag

SEQ ID NO: 206200 - DNA, 33 bp, Homo sapien
cagccagcccatggaataaatcagagtcaggag

SEQ ID NO: 206201 - DNA, 33 bp, Homo sapien
cagggtccccacaaacaaagctggctctgcctg

SEQ ID NO: 206202 - DNA, 33 bp, Homo sapien
cagggtccccacaaaccaagctggctctgcctg

SEQ ID NO: 206203 - DNA, 33 bp, Homo sapien
catttggccattgtcaactgaagtgatacatgc

SEQ ID NO: 206204 - DNA, 33 bp, Homo sapien
catttggccattgtcagctgaagtgatacatgc

SEQ ID NO: 206205 - DNA, 33 bp, Homo sapien
taattaataggtcaatcaattattttttttgaa

SEQ ID NO: 206206 - DNA, 33 bp, Homo sapien
taattaataggtcaatgaattattttttttgaa

SEQ ID NO: 206207 - DNA, 33 bp, Homo sapien
ctacccaaaggtggaacgagctgtttcacagcg

SEQ ID NO: 206208 - DNA, 33 bp, Homo sapien
ctacccaaaggtggaatgagctgtttcacagcg

SEQ ID NO: 206209 - DNA, 33 bp, Homo sapien
gacctctggagaacaacgcccataaggaagata

SEQ ID NO: 206210 - DNA, 33 bp, Homo sapien
gacctctggagaacaatgcccataaggaagata

SEQ ID NO: 206211 - DNA, 33 bp, Homo sapien
tctcttgaactcttacccatcagacatgtatcc

SEQ ID NO: 206212 - DNA, 33 bp, Homo sapien
tctcttgaactcttactcatcagacatgtatcc

SEQ ID NO: 206213 - DNA, 33 bp, Homo sapien
agagaaggggtggaaaggaattaagtgtagtca

SEQ ID NO: 206214 - DNA, 33 bp, Homo sapien
agagaaggggtggaaatgaattaagtgtagtca

SEQ ID NO: 206215 - DNA, 33 bp, Homo sapien
aggagtgggaggacagcacttacagcatttccc

SEQ ID NO: 206216 - DNA, 33 bp, Homo sapien
aggagtgggaggacagtacttacagcatttccc

SEQ ID NO: 206217 - DNA, 33 bp, Homo sapien
cactgatggcaacttacgttttctcaacactac

SEQ ID NO: 206218 - DNA, 33 bp, Homo sapien
cactgatggcaacttatgttttctcaacactac

SEQ ID NO: 206219 - DNA, 33 bp, Homo sapien
gtgggcgtatgtgccaagaagtggaatatttgt

SEQ ID NO: 206220 - DNA, 33 bp, Homo sapien
gtgggcgtatgtgccaggaagtggaatatttgt

SEQ ID NO: 206221 - DNA, 33 bp, Homo sapien
tataagctctaagaaaattgtttcccctccact

SEQ ID NO: 206222 - DNA, 33 bp, Homo sapien
tataagctctaagaaagttgtttcccctccact

SEQ ID NO: 206223 - DNA, 33 bp, Homo sapien
caatgctccttgcaataacaacttcctcccact

SEQ ID NO: 206224 - DNA, 33 bp, Homo sapien
caatgctccttgcaattacaacttcctcccact

SEQ ID NO: 206225 - DNA, 33 bp, Homo sapien
gtgagccgagattgcaccgttgtgctccagcct

SEQ ID NO: 206226 - DNA, 33 bp, Homo sapien
gtgagccgagattgcagcgttgtgctccagcct

SEQ ID NO: 206227 - DNA, 33 bp, Homo sapien
aagatgattagcaaaacagaatactgatcaact

SEQ ID NO: 206228 - DNA, 33 bp, Homo sapien
aagatgattagcaaaagagaatactgatcaact

SEQ ID NO: 206229 - DNA, 33 bp, Homo sapien
ccccacaactggtcagactcctgcagctgccag

SEQ ID NO: 206230 - DNA, 33 bp, Homo sapien
ccccacaactggtcagcctcctgcagctgccag

SEQ ID NO: 206231 - DNA, 33 bp, Homo sapien
gcacctggagcagctacgccacttactacctgt

SEQ ID NO: 206232 - DNA, 33 bp, Homo sapien
gcacctggagcagctatgccacttactacctgt

SEQ ID NO: 206233 - DNA, 33 bp, Homo sapien
acggaattatctcaagaatctcaattcctgact

SEQ ID NO: 206234 - DNA, 33 bp, Homo sapien
acggaattatctcaaggatctcaattcctgact

SEQ ID NO: 206235 - DNA, 33 bp, Homo sapien
tgaatgagagagacccaacttctagacctggat

SEQ ID NO: 206236 - DNA, 33 bp, Homo sapien
tgaatgagagagacccgacttctagacctggat

SEQ ID NO: 206237 - DNA, 33 bp, Homo sapien
aagctttgctgaggaaatcactttggagtcagg

SEQ ID NO: 206238 - DNA, 33 bp, Homo sapien
aagctttgctgaggaattcactttggagtcagg

SEQ ID NO: 206239 - DNA, 33 bp, Homo sapien; identical to SEQ ID NO: 206237

SEQ ID NO: 206240 - DNA, 33 bp, Homo sapien; identical to SEQ ID NO: 206238

SEQ ID NO: 206241 - DNA, 33 bp, Homo sapien
cttccagggttataggaaaaatgggactctcca

SEQ ID NO: 206242 - DNA, 33 bp, Homo sapien
cttccagggttatagggaaaatgggactctcca

SEQ ID NO: 206243 - DNA, 33 bp, Homo sapien
ggccatccagtgctgaacatagagacttacatg

SEQ ID NO: 206244 - DNA, 33 bp, Homo sapien
ggccatccagtgctgagcatagagacttacatg

SEQ ID NO: 206245 - DNA, 33 bp, Homo sapien
caatattcaacaaggacgtttcaagacaatctg

SEQ ID NO: 206246 - DNA, 33 bp, Homo sapien
caatattcaacaaggatgtttcaagacaatctg

SEQ ID NO: 206247 - DNA, 33 bp, Homo sapien
caattatctcccttacagccttcccccagcttc

SEQ ID NO: 206248 - DNA, 33 bp, Homo sapien
caattatctcccttacggccttcccccagcttc

SEQ ID NO: 206249 - DNA, 33 bp, Homo sapien
ttagagtttactgaaaagacaaacatcttggag

SEQ ID NO: 206250 - DNA, 33 bp, Homo sapien
ttagagtttactgaaaggacaaacatcttggag

SEQ ID NO: 206251 - DNA, 33 bp, Homo sapien
ctctggacaataacaacggtggccaatgttcat

SEQ ID NO: 206252 - DNA, 33 bp, Homo sapien
ctctggacaataacaatggtggccaatgttcat

SEQ ID NO: 206253 - DNA, 33 bp, Homo sapien
ctctgctacaagtgacgaggtgaagggagcagg

SEQ ID NO: 206254 - DNA, 33 bp, Homo sapien
ctctgctacaagtgactaggtgaagggagcagg

SEQ ID NO: 206255 - DNA, 33 bp, Homo sapien
gagcttaggtataagacgagcgcagtggctcat

SEQ ID NO: 206256 - DNA, 33 bp, Homo sapien
gagcttaggtataagatgagcgcagtggctcat

SEQ ID NO: 206257 - DNA, 33 bp, Homo sapien
tcccaataccaacaggagcaagaagtttattct

SEQ ID NO: 206258 - DNA, 33 bp, Homo sapien
tcccaataccaacaggggcaagaagtttattct

SEQ ID NO: 206259 - DNA, 33 bp, Homo sapien
agatcagcccttgacactagaagactctgcaga

SEQ ID NO: 206260 - DNA, 33 bp, Homo sapien
agatcagcccttgacattagaagactctgcaga

SEQ ID NO: 206261 - DNA, 33 bp, Homo sapien
tgaccaataacgaccaataaaacaagagtgacc

SEQ ID NO: 206262 - DNA, 33 bp, Homo sapien
tgaccaataacgaccagtaaaacaagagtgacc

SEQ ID NO: 206263 - DNA, 33 bp, Homo sapien
actaaataatgaaagacggtagaagaagaaaga

SEQ ID NO: 206264 - DNA, 33 bp, Homo sapien
actaaataatgaaagatggtagaagaagaaaga

SEQ ID NO: 206265 - DNA, 33 bp, Homo sapien
aggaaacaatgtggtacgtgaaaaaggtggcat

SEQ ID NO: 206266 - DNA, 33 bp, Homo sapien
aggaaacaatgtggtatgtgaaaaaggtggcat

SEQ ID NO: 206267 - DNA, 33 bp, Homo sapien
gatcttccaaagggtcacatgaactgccacctc

SEQ ID NO: 206268 - DNA, 33 bp, Homo sapien
gatcttccaaagggtcccatgaactgccacctc

SEQ ID NO: 206269 - DNA, 33 bp, Homo sapien
tggcttgtatttggaagcagcagtgaccagctt

SEQ ID NO: 206270 - DNA, 33 bp, Homo sapien
tggcttgtatttggaatcagcagtgaccagctt

SEQ ID NO: 206271 - DNA, 33 bp, Homo sapien
tgtaaggtgtcttcaaactctaacaccctatga

SEQ ID NO: 206272 - DNA, 33 bp, Homo sapien
tgtaaggtgtcttcaagctctaacaccctatga

SEQ ID NO: 206273 - DNA, 33 bp, Homo sapien
gagagctctggaattacagccagtgggtcataa

SEQ ID NO: 206274 - DNA, 33 bp, Homo sapien
gagagctctggaattatagccagtgggtcataa

SEQ ID NO: 206275 - DNA, 33 bp, Homo sapien
gcacattagaactgaactcatctgggaggcccc

SEQ ID NO: 206276 - DNA, 33 bp, Homo sapien
gcacattagaactgaagtcatctgggaggcccc

SEQ ID NO: 206277 - DNA, 33 bp, Homo sapien
gctgacagcacaaccaactgggctgcccttcat

SEQ ID NO: 206278 - DNA, 33 bp, Homo sapien
gctgacagcacaaccatctgggctgcccttcat

SEQ ID NO: 206279 - DNA, 33 bp, Homo sapien
aggggaaggatgtgacaaaattaaatttttaaa

SEQ ID NO: 206280 - DNA, 33 bp, Homo sapien
aggggaaggatgtgacgaaattaaatttttaaa

SEQ ID NO: 206281 - DNA, 33 bp, Homo sapien
atatttaatgacagacaggattctatggaagca

SEQ ID NO: 206282 - DNA, 33 bp, Homo sapien
atatttaatgacagaccggattctatggaagca

SEQ ID NO: 206283 - DNA, 33 bp, Homo sapien
aaaaagaattctgttaaaatgcaggttccaggt

SEQ ID NO: 206284 - DNA, 33 bp, Homo sapien
aaaaagaattctgttacaatgcaggttccaggt

SEQ ID NO: 206285 - DNA, 33 bp, Homo sapien
ggagggacatcgcctccgacaattcccccctta

SEQ ID NO: 206286 - DNA, 33 bp, Homo sapien
ggagggacatcgcctctgacaattcccccctta

SEQ ID NO: 206287 - DNA, 33 bp, Homo sapien
gtccatgctggtttctaacacaaggaggcagat

SEQ ID NO: 206288 - DNA, 33 bp, Homo sapien
gtccatgctggtttcttacacaaggaggcagat

SEQ ID NO: 206289 - DNA, 33 bp, Homo sapien
gtatcagaaccaataactaattgagaatctcac

SEQ ID NO: 206290 - DNA, 33 bp, Homo sapien
gtatcagaaccaataagtaattgagaatctcac

SEQ ID NO: 206291 - DNA, 33 bp, Homo sapien
aggaggagacagaaaaaagaattgaaaagggat

SEQ ID NO: 206292 - DNA, 33 bp, Homo sapien
aggaggagacagaaaagagaattgaaaagggat

SEQ ID NO: 206293 - DNA, 33 bp, Homo sapien
aactgagagtttgctaccaaccgaatctctcat

SEQ ID NO: 206294 - DNA, 33 bp, Homo sapien
aactgagagtttgctatcaaccgaatctctcat

SEQ ID NO: 206295 - DNA, 33 bp, Homo sapien
tggttttatgggagcaaggaggatagaaattag

SEQ ID NO: 206296 - DNA, 33 bp, Homo sapien
tggttttatgggagcagggaggatagaaattag

SEQ ID NO: 206297 - DNA, 33 bp, Homo sapien
gtgaggctgaaatcaaatcttgttttttcactg

SEQ ID NO: 206298 - DNA, 33 bp, Homo sapien
gtgaggctgaaatcaagtcttgttttttcactg

SEQ ID NO: 206299 - DNA, 33 bp, Homo sapien
atttacagattatgtaaacaagcaatagattca

SEQ ID NO: 206300 - DNA, 33 bp, Homo sapien
atttacagattatgtacacaagcaatagattca

SEQ ID NO: 206301 - DNA, 33 bp, Homo sapien
ccatcctgaagaaataagaacatatgaacctat

SEQ ID NO: 206302 - DNA, 33 bp, Homo sapien
ccatcctgaagaaataggaacatatgaacctat

SEQ ID NO: 206303 - DNA, 33 bp, Homo sapien
tctggaagaatatgaacgagtcttgttctaatc

SEQ ID NO: 206304 - DNA, 33 bp, Homo sapien
tctggaagaatatgaatgagtcttgttctaatc

SEQ ID NO: 206305 - DNA, 33 bp, Homo sapien
cagcccagaggattaaagagagacttcaatgac

SEQ ID NO: 206306 - DNA, 33 bp, Homo sapien
cagcccagaggattaaggagagacttcaatgac

SEQ ID NO: 206307 - DNA, 33 bp, Homo sapien
ctcatccctgtcttcacggacactttgtctgcc

SEQ ID NO: 206308 - DNA, 33 bp, Homo sapien
ctcatccctgtcttcatggacactttgtctgcc

SEQ ID NO: 206309 - DNA, 33 bp, Homo sapien
aggacagggtttctgaaggaagtcacttggggg

SEQ ID NO: 206310 - DNA, 33 bp, Homo sapien
aggacagggtttctgagggaagtcacttggggg

SEQ ID NO: 206311 - DNA, 33 bp, Homo sapien
gagatagtgaggttcaaggccagcaatctgtga

SEQ ID NO: 206312 - DNA, 33 bp, Homo sapien
gagatagtgaggttcagggccagcaatctgtga

SEQ ID NO: 206313 - DNA, 33 bp, Homo sapien
ccagcaatctgtgaaacgggaccataaagttac

SEQ ID NO: 206314 - DNA, 33 bp, Homo sapien
ccagcaatctgtgaaatgggaccataaagttac

SEQ ID NO: 206315 - DNA, 33 bp, Homo sapien
cactattttagatgtacgttgtctgcatcctgg

SEQ ID NO: 206316 - DNA, 33 bp, Homo sapien
cactattttagatgtatgttgtctgcatcctgg

SEQ ID NO: 206317 - DNA, 33 bp, Homo sapien
atgcatgtgcatacacacaaactcatgcttggt

SEQ ID NO: 206318 - DNA, 33 bp, Homo sapien
atgcatgtgcatacacgcaaactcatgcttggt

SEQ ID NO: 206319 - DNA, 33 bp, Homo sapien
tcaatgtaccagattaagaatgaccacaccagg

SEQ ID NO: 206320 - DNA, 33 bp, Homo sapien
tcaatgtaccagattaggaatgaccacaccagg

SEQ ID NO: 206321 - DNA, 33 bp, Homo sapien
aactaggagtcttcatgaggtcaatgtaccaga

SEQ ID NO: 206322 - DNA, 33 bp, Homo sapien
aactaggagtcttcattaggtcaatgtaccaga

SEQ ID NO: 206323 - DNA, 33 bp, Homo sapien
tccctgcaaagaacataataacattcctttcta

SEQ ID NO: 206324 - DNA, 33 bp, Homo sapien
tccctgcaaagaacatgataacattcctttcta

SEQ ID NO: 206325 - DNA, 33 bp, Homo sapien
ttgtcctccaaaggaactgctctacagtacaaa

SEQ ID NO: 206326 - DNA, 33 bp, Homo sapien
ttgtcctccaaaggaattgctctacagtacaaa

SEQ ID NO: 206327 - DNA, 33 bp, Homo sapien
agagcaaaagctaaacccaaagccatgctccct

SEQ ID NO: 206328 - DNA, 33 bp, Homo sapien
agagcaaaagctaaactcaaagccatgctccct

SEQ ID NO: 206329 - DNA, 33 bp, Homo sapien
ccaaagtaaaccatcacgggactggttctgaaa

SEQ ID NO: 206330 - DNA, 33 bp, Homo sapien
ccaaagtaaaccatcatgggactggttctgaaa

SEQ ID NO: 206331 - DNA, 33 bp, Homo sapien
cagtattgatttaggggatcgcatgggtcctta

SEQ ID NO: 206332 - DNA, 33 bp, Homo sapien
cagtattgatttagggtatcgcatgggtcctta

SEQ ID NO: 206333 - DNA, 33 bp, Homo sapien
ccagaagaggagtgggaaagttggtcctggaag

SEQ ID NO: 206334 - DNA, 33 bp, Homo sapien
ccagaagaggagtgggtaagttggtcctggaag

SEQ ID NO: 206335 - DNA, 33 bp, Homo sapien; identical to SEQ ID NO: 206333

SEQ ID NO: 206336 - DNA, 33 bp, Homo sapien; identical to SEQ ID NO: 206334

SEQ ID NO: 206337 - DNA, 33 bp, Homo sapien
aagtaaacggtatggccactctgttttctgaac

SEQ ID NO: 206338 - DNA, 33 bp, Homo sapien
aagtaaacggtatggcgactctgttttctgaac

SEQ ID NO: 206339 - DNA, 33 bp, Homo sapien
tgagaagaagttgtacgctgtggaggactgaca

SEQ ID NO: 206340 - DNA, 33 bp, Homo sapien
tgagaagaagttgtactctgtggaggactgaca

SEQ ID NO: 206341 - DNA, 33 bp, Homo sapien
tgtgtctggaacaaaaagaactctgacttcttg

SEQ ID NO: 206342 - DNA, 33 bp, Homo sapien
tgtgtctggaacaaaaggaactctgacttcttg

SEQ ID NO: 206343 - DNA, 33 bp, Homo sapien
catcagcatctttcttaaacccctattttctgt

SEQ ID NO: 206344 - DNA, 33 bp, Homo sapien
catcagcatctttctttaacccctattttctgt

SEQ ID NO: 206345 - DNA, 33 bp, Homo sapien
gctgtcctgaggactcacaacaccagttccatc

SEQ ID NO: 206346 - DNA, 33 bp, Homo sapien
gctgtcctgaggactcgcaacaccagttccatc

SEQ ID NO: 206347 - DNA, 33 bp, Homo sapien
ggaatttcaagaagaacggtcttgagaaaaggg

SEQ ID NO: 206348 - DNA, 33 bp, Homo sapien
ggaatttcaagaagaatggtcttgagaaaaggg

SEQ ID NO: 206349 - DNA, 33 bp, Homo sapien
tgctttattccacctaccaggacctgcaatggt

SEQ ID NO: 206350 - DNA, 33 bp, Homo sapien
tgctttattccacctatcaggacctgcaatggt

SEQ ID NO: 206351 - DNA, 33 bp, Homo sapien
ggagaaatgtatgggaaccctcacgactcctgc

SEQ ID NO: 206352 - DNA, 33 bp, Homo sapien
ggagaaatgtatgggacccctcacgactcctgc

SEQ ID NO: 206353 - DNA, 33 bp, Homo sapien
ttggaaaagtgaacctaaagggaatttgcaaat

SEQ ID NO: 206354 - DNA, 33 bp, Homo sapien
ttggaaaagtgaacctgaagggaatttgcaaat

SEQ ID NO: 206355 - DNA, 33 bp, Homo sapien
aatatttctagctcaactccttctaagtactta

SEQ ID NO: 206356 - DNA, 33 bp, Homo sapien
aatatttctagctcaattccttctaagtactta

SEQ ID NO: 206357 - DNA, 33 bp, Homo sapien
cctgcagaaccataagacacatgaatctctttt

SEQ ID NO: 206358 - DNA, 33 bp, Homo sapien
cctgcagaaccataagccacatgaatctctttt

SEQ ID NO: 206359 - DNA, 33 bp, Homo sapien
ttgcattgccatacagaaatatctgagaccggg

SEQ ID NO: 206360 - DNA, 33 bp, Homo sapien
ttgcattgccatacaggaatatctgagaccggg

SEQ ID NO: 206361 - DNA, 33 bp, Homo sapien
caaatcctatctccaaacacacgtatatcagcc

SEQ ID NO: 206362 - DNA, 33 bp, Homo sapien
caaatcctatctccaagcacacgtatatcagcc

SEQ ID NO: 206363 - DNA, 33 bp, Homo sapien
caatcatttaccaaccaggacacatttcttctt

SEQ ID NO: 206364 - DNA, 33 bp, Homo sapien
caatcatttaccaaccgggacacatttcttctt

SEQ ID NO: 206365 - DNA, 33 bp, Homo sapien
tctcctaggcagaccactataacccttttttaa

SEQ ID NO: 206366 - DNA, 33 bp, Homo sapien
tctcctaggcagaccattataacccttttttaa

SEQ ID NO: 206367 - DNA, 33 bp, Homo sapien
ccttcaaggagtttatcacctgccccctagacc

SEQ ID NO: 206368 - DNA, 33 bp, Homo sapien
ccttcaaggagtttattacctgccccctagacc

SEQ ID NO: 206369 - DNA, 33 bp, Homo sapien
tgtggaattgactttgaacaatctgtggataaa

SEQ ID NO: 206370 - DNA, 33 bp, Homo sapien
tgtggaattgactttggacaatctgtggataaa

SEQ ID NO: 206371 - DNA, 33 bp, Homo sapien
tccttactgattctccaaaccttactggaaaga

SEQ ID NO: 206372 - DNA, 33 bp, Homo sapien
tccttactgattctcccaaccttactggaaaga

SEQ ID NO: 206373 - DNA, 33 bp, Homo sapien
accccacatgatcaagacaggaagtttatggtc

SEQ ID NO: 206374 - DNA, 33 bp, Homo sapien
accccacatgatcaaggcaggaagtttatggtc

SEQ ID NO: 206375 - DNA, 33 bp, Homo sapien
caggaatttctatggacgttgggtgaactacgt

SEQ ID NO: 206376 - DNA, 33 bp, Homo sapien
caggaatttctatggatgttgggtgaactacgt

SEQ ID NO: 206377 - DNA, 33 bp, Homo sapien
aagaggagcaaagatacatttttgtgtcaagat

SEQ ID NO: 206378 - DNA, 33 bp, Homo sapien
aagaggagcaaagatatatttttgtgtcaagat

SEQ ID NO: 206379 - DNA, 33 bp, Homo sapien
aaacaaaaggaagaatcaccttggccttagggt

SEQ ID NO: 206380 - DNA, 33 bp, Homo sapien
aaacaaaaggaagaatgaccttggccttagggt

SEQ ID NO: 206381 - DNA, 33 bp, Homo sapien
ggctttcccaagacacaccatgatgcaggagag

SEQ ID NO: 206382 - DNA, 33 bp, Homo sapien
ggctttcccaagacacgccatgatgcaggagag

SEQ ID NO: 206383 - DNA, 33 bp, Homo sapien
actgcaggcggtgccactctatcctcacccatt

SEQ ID NO: 206384 - DNA, 33 bp, Homo sapien
actgcaggcggtgccattctatcctcacccatt

SEQ ID NO: 206385 - DNA, 33 bp, Homo sapien
ctccctctctgaattccgaaacttttatagctt

SEQ ID NO: 206386 - DNA, 33 bp, Homo sapien
ctccctctctgaattctgaaacttttatagctt

SEQ ID NO: 206387 - DNA, 33 bp, Homo sapien
gtagagtgcctactccgctaatgccgtagaatg

SEQ ID NO: 206388 - DNA, 33 bp, Homo sapien
gtagagtgcctactcctctaatgccgtagaatg

SEQ ID NO: 206389 - DNA, 33 bp, Homo sapien
ggaggagcaggaattacggtgggaatagatcat

SEQ ID NO: 206390 - DNA, 33 bp, Homo sapien
ggaggagcaggaattatggtgggaatagatcat

SEQ ID NO: 206391 - DNA, 33 bp, Homo sapien
ttagaaattcactccaacttactcaaataacaa

SEQ ID NO: 206392 - DNA, 33 bp, Homo sapien
ttagaaattcactccagcttactcaaataacaa

SEQ ID NO: 206393 - DNA, 33 bp, Homo sapien
tgttatggaagaggggaacttgagctgggtcag

SEQ ID NO: 206394 - DNA, 33 bp, Homo sapien
tgttatggaagagggggacttgagctgggtcag

SEQ ID NO: 206395 - DNA, 33 bp, Homo sapien
acgactcatctatccaggactcttttgcccctc

SEQ ID NO: 206396 - DNA, 33 bp, Homo sapien
acgactcatctatccatgactcttttgcccctc

SEQ ID NO: 206397 - DNA, 33 bp, Homo sapien
tgattgcctctttgtaccttctcccgttgtgct

SEQ ID NO: 206398 - DNA, 33 bp, Homo sapien
tgattgcctctttgtatcttctcccgttgtgct

SEQ ID NO: 206399 - DNA, 33 bp, Homo sapien
cacaggaggccaagctaacaaaagacaaggctt

SEQ ID NO: 206400 - DNA, 33 bp, Homo sapien
cacaggaggccaagcttacaaaagacaaggctt

SEQ ID NO: 206401 - DNA, 33 bp, Homo sapien
ccatgcaatcttttcactacacttctgtcagat

SEQ ID NO: 206402 - DNA, 33 bp, Homo sapien
ccatgcaatcttttcattacacttctgtcagat

SEQ ID NO: 206403 - DNA, 33 bp, Homo sapien
actgcatacaactgatcaaaagtatcacatgac

SEQ ID NO: 206404 - DNA, 33 bp, Homo sapien
actgcatacaactgatgaaaagtatcacatgac

SEQ ID NO: 206405 - DNA, 33 bp, Homo sapien
ccatgcatcagaagtaagtcctagaatgtgaca

SEQ ID NO: 206406 - DNA, 33 bp, Homo sapien
ccatgcatcagaagtaggtcctagaatgtgaca

SEQ ID NO: 206407 - DNA, 33 bp, Homo sapien
agaagggttctccagaagtcatttgattcaact

SEQ ID NO: 206408 - DNA, 33 bp, Homo sapien
agaagggttctccagaggtcatttgattcaact

SEQ ID NO: 206409 - DNA, 33 bp, Homo sapien
tctcatttggagaaatcagacgcattcaaataa

SEQ ID NO: 206410 - DNA, 33 bp, Homo sapien
tctcatttggagaaatgagacgcattcaaataa

SEQ ID NO: 206411 - DNA, 33 bp, Homo sapien
tttaaatatttgaaaacaacaattgtgtcaaca

SEQ ID NO: 206412 - DNA, 33 bp, Homo sapien
tttaaatatttgaaaataacaattgtgtcaaca

SEQ ID NO: 206413 - DNA, 33 bp, Homo sapien
ggaacagaagcttggcactaaaaatgaggagct

SEQ ID NO: 206414 - DNA, 33 bp, Homo sapien
ggaacagaagcttggcgctaaaaatgaggagct

SEQ ID NO: 206415 - DNA, 33 bp, Homo sapien
ctccgtcactcttccaacacagaccatatgagg

SEQ ID NO: 206416 - DNA, 33 bp, Homo sapien
ctccgtcactcttccagcacagaccatatgagg

SEQ ID NO: 206417 - DNA, 33 bp, Homo sapien
gaagctggaattcctccctctagactcgattct

SEQ ID NO: 206418 - DNA, 33 bp, Homo sapien
gaagctggaattcctctctctagactcgattct

SEQ ID NO: 206419 - DNA, 33 bp, Homo sapien
tgctttggttaagtaaagaaaacagaatgactg

SEQ ID NO: 206420 - DNA, 33 bp, Homo sapien
tgctttggttaagtaaggaaaacagaatgactg

SEQ ID NO: 206421 - DNA, 33 bp, Homo sapien
gtccagggtcagtcaaagtattttaatgtcatg

SEQ ID NO: 206422 - DNA, 33 bp, Homo sapien
gtccagggtcagtcaaggtattttaatgtcatg

SEQ ID NO: 206423 - DNA, 33 bp, Homo sapien
aatattacatcaggaacaccttctccgactact

SEQ ID NO: 206424 - DNA, 33 bp, Homo sapien
aatattacatcaggaagaccttctccgactact

SEQ ID NO: 206425 - DNA, 33 bp, Homo sapien
ttcaaaacaccttaacactcattatctcatttg

SEQ ID NO: 206426 - DNA, 33 bp, Homo sapien
ttcaaaacaccttaacgctcattatctcatttg

SEQ ID NO: 206427 - DNA, 33 bp, Homo sapien
tgaccactttctcacacagttccaaagtttatt

SEQ ID NO: 206428 - DNA, 33 bp, Homo sapien
tgaccactttctcacagagttccaaagtttatt

SEQ ID NO: 206429 - DNA, 33 bp, Homo sapien
gtatggaccgtggatgaaatgatgctcagggaa

SEQ ID NO: 206430 - DNA, 33 bp, Homo sapien
gtatggaccgtggatggaatgatgctcagggaa

SEQ ID NO: 206431 - DNA, 33 bp, Homo sapien
gagcacacgtgttgacagaaattaacacccatc

SEQ ID NO: 206432 - DNA, 33 bp, Homo sapien
gagcacacgtgttgaccgaaattaacacccatc

SEQ ID NO: 206433 - DNA, 33 bp, Homo sapien
tggctctcttgtcataacccagtctttttcttc

SEQ ID NO: 206434 - DNA, 33 bp, Homo sapien
tggctctcttgtcataccccagtctttttcttc

SEQ ID NO: 206435 - DNA, 33 bp, Homo sapien
aggctttgatcttcacaatgacacaggtagact

SEQ ID NO: 206436 - DNA, 33 bp, Homo sapien
aggctttgatcttcacgatgacacaggtagact

SEQ ID NO: 206437 - DNA, 33 bp, Homo sapien
gaagtagaataacacccagagaagcctgagtca

SEQ ID NO: 206438 - DNA, 33 bp, Homo sapien
gaagtagaataacacctagagaagcctgagtca

SEQ ID NO: 206439 - DNA, 33 bp, Homo sapien
ggaccactactctaaacggtttgatgggataag

SEQ ID NO: 206440 - DNA, 33 bp, Homo sapien
ggaccactactctaaatggtttgatgggataag

SEQ ID NO: 206441 - DNA, 33 bp, Homo sapien
tggtggggagtgcaaccatccatgtctcctaaa

SEQ ID NO: 206442 - DNA, 33 bp, Homo sapien
tggtggggagtgcaactatccatgtctcctaaa

SEQ ID NO: 206443 - DNA, 33 bp, Homo sapien
gtcctgggcatccagacagcaagtaccaaaaac

SEQ ID NO: 206444 - DNA, 33 bp, Homo sapien
gtcctgggcatccagagagcaagtaccaaaaac

SEQ ID NO: 206445 - DNA, 33 bp, Homo sapien
aggtaagccaggatgaagatgagtttttggtac

SEQ ID NO: 206446 - DNA, 33 bp, Homo sapien
aggtaagccaggatgaggatgagtttttggtac

SEQ ID NO: 206447 - DNA, 33 bp, Homo sapien
ctcatcttcctctgaactgtgttagttgtacat

SEQ ID NO: 206448 - DNA, 33 bp, Homo sapien
ctcatcttcctctgaattgtgttagttgtacat

SEQ ID NO: 206449 - DNA, 33 bp, Homo sapien
caacctaaggagatcaccactaggacagaccat

SEQ ID NO: 206450 - DNA, 33 bp, Homo sapien
caacctaaggagatcatcactaggacagaccat

SEQ ID NO: 206451 - DNA, 33 bp, Homo sapien
tgatgcggttctaagaccactattttaattact

SEQ ID NO: 206452 - DNA, 33 bp, Homo sapien
tgatgcggttctaagagcactattttaattact

SEQ ID NO: 206453 - DNA, 33 bp, Homo sapien
attttactacaatcaccactatgaatgggaata

SEQ ID NO: 206454 - DNA, 33 bp, Homo sapien
attttactacaatcactactatgaatgggaata

SEQ ID NO: 206455 - DNA, 33 bp, Homo sapien
tctgtcattgaagtatcagtgttctcagagttc

SEQ ID NO: 206456 - DNA, 33 bp, Homo sapien
tctgtcattgaagtattagtgttctcagagttc

SEQ ID NO: 206457 - DNA, 33 bp, Homo sapien
tagcctccattcaaagcacaagggcagcttcag

SEQ ID NO: 206458 - DNA, 33 bp, Homo sapien
tagcctccattcaaaggacaagggcagcttcag

SEQ ID NO: 206459 - DNA, 33 bp, Homo sapien
cgttactagctagccccgagttctttgaaatgc

SEQ ID NO: 206460 - DNA, 33 bp, Homo sapien
cgttactagctagccctgagttctttgaaatgc

SEQ ID NO: 206461 - DNA, 33 bp, Homo sapien
agtatcatgcacttcaaaatgtaagaggctaga

SEQ ID NO: 206462 - DNA, 33 bp, Homo sapien
agtatcatgcacttcagaatgtaagaggctaga

SEQ ID NO: 206463 - DNA, 33 bp, Homo sapien
taacacagggcttggcaagaaattattaggctg

SEQ ID NO: 206464 - DNA, 33 bp, Homo sapien
taacacagggcttggccagaaattattaggctg

SEQ ID NO: 206465 - DNA, 33 bp, Homo sapien
aacttgaatctcccaaactcacttcattgagtt

SEQ ID NO: 206466 - DNA, 33 bp, Homo sapien
aacttgaatctcccaagctcacttcattgagtt

SEQ ID NO: 206467 - DNA, 33 bp, Homo sapien
gccctgtgaggtgatgaactgatctgggtccca

SEQ ID NO: 206468 - DNA, 33 bp, Homo sapien
gccctgtgaggtgatggactgatctgggtccca

SEQ ID NO: 206469 - DNA, 33 bp, Homo sapien
gcttaaattagcccccaactctgacacaatgca

SEQ ID NO: 206470 - DNA, 33 bp, Homo sapien
gcttaaattagccccccactctgacacaatgca

SEQ ID NO: 206471 - DNA, 33 bp, Homo sapien
gtccatgttcatatttcaaagacaattcagcat

SEQ ID NO: 206472 - DNA, 33 bp, Homo sapien
gtccatgttcatattttaaagacaattcagcat

SEQ ID NO: 206473 - DNA, 33 bp, Homo sapien
cagttgtgtgccactgaaaaaaaggatcgagaa

SEQ ID NO: 206474 - DNA, 33 bp, Homo sapien
cagttgtgtgccactgcaaaaaaggatcgagaa

SEQ ID NO: 206475 - DNA, 33 bp, Homo sapien
ctaacactggtcagtcacaagagccatctcttt

SEQ ID NO: 206476 - DNA, 33 bp, Homo sapien
ctaacactggtcagtcgcaagagccatctcttt

SEQ ID NO: 206477 - DNA, 33 bp, Homo sapien
atggtctctccaaggtaaagatgcattctcgct

SEQ ID NO: 206478 - DNA, 33 bp, Homo sapien
atggtctctccaaggtgaagatgcattctcgct

SEQ ID NO: 206479 - DNA, 33 bp, Homo sapien
cacccacctgttgacaatctgggcatcggtgcc

SEQ ID NO: 206480 - DNA, 33 bp, Homo sapien
cacccacctgttgacagtctgggcatcggtgcc

SEQ ID NO: 206481 - DNA, 33 bp, Homo sapien
actaggcatctaccaacgggcaaaggaggaaag

SEQ ID NO: 206482 - DNA, 33 bp, Homo sapien
actaggcatctaccaatgggcaaaggaggaaag

SEQ ID NO: 206483 - DNA, 33 bp, Homo sapien
tagaactgccctactaataacaactacaacact

SEQ ID NO: 206484 - DNA, 33 bp, Homo sapien
tagaactgccctactagtaacaactacaacact

SEQ ID NO: 206485 - DNA, 33 bp, Homo sapien
cccatttgtctttttccagttgcggaatcctaa

SEQ ID NO: 206486 - DNA, 33 bp, Homo sapien
cccatttgtctttttctagttgcggaatcctaa

SEQ ID NO: 206487 - DNA, 33 bp, Homo sapien
gctcaaagtgatcagcccatagttgaacttcct

SEQ ID NO: 206488 - DNA, 33 bp, Homo sapien
gctcaaagtgatcagctcatagttgaacttcct

SEQ ID NO: 206489 - DNA, 33 bp, Homo sapien
tgcctggaaatgcttactaaatgcctggaaatt

SEQ ID NO: 206490 - DNA, 33 bp, Homo sapien
tgcctggaaatgcttattaaatgcctggaaatt

SEQ ID NO: 206491 - DNA, 33 bp, Homo sapien
caccttccatatcaaacgggaaggcaagcatct

SEQ ID NO: 206492 - DNA, 33 bp, Homo sapien
caccttccatatcaaaggggaaggcaagcatct

SEQ ID NO: 206493 - DNA, 33 bp, Homo sapien
ttctgtgtggctcttccacttctaaaacatacg

SEQ ID NO: 206494 - DNA, 33 bp, Homo sapien
ttctgtgtggctcttcgacttctaaaacatacg

SEQ ID NO: 206495 - DNA, 33 bp, Homo sapien
ataaaaagatgaataacaacaactgctggtgag

SEQ ID NO: 206496 - DNA, 33 bp, Homo sapien
ataaaaagatgaataataacaactgctggtgag

SEQ ID NO: 206497 - DNA, 33 bp, Homo sapien
attgtctctagtacacagtataatccatctgta

SEQ ID NO: 206498 - DNA, 33 bp, Homo sapien
attgtctctagtacacggtataatccatctgta

SEQ ID NO: 206499 - DNA, 33 bp, Homo sapien
ggctgagttctgagaccggttctgaggaaggaa

SEQ ID NO: 206500 - DNA, 33 bp, Homo sapien
ggctgagttctgagactggttctgaggaaggaa

SEQ ID NO: 206501 - DNA, 33 bp, Homo sapien
cccatcagagcaagtccaggggctctttgcagc

SEQ ID NO: 206502 - DNA, 33 bp, Homo sapien
cccatcagagcaagtctaggggctctttgcagc

SEQ ID NO: 206503 - DNA, 33 bp, Homo sapien
gtttgtgcctaacctgaaattttgctgttttct

SEQ ID NO: 206504 - DNA, 33 bp, Homo sapien
gtttgtgcctaacctgcaattttgctgttttct

SEQ ID NO: 206505 - DNA, 33 bp, Homo sapien
ttggagaccacctttgaaatgctgtgacgtttc

SEQ ID NO: 206506 - DNA, 33 bp, Homo sapien
ttggagaccacctttgtaatgctgtgacgtttc

SEQ ID NO: 206507 - DNA, 33 bp, Homo sapien
cagacctgcagaaataacagagggactgtggga

SEQ ID NO: 206508 - DNA, 33 bp, Homo sapien
cagacctgcagaaatagcagagggactgtggga

SEQ ID NO: 206509 - DNA, 33 bp, Homo sapien
tcagtacccaaatgcaagtagaatagcaggtga

SEQ ID NO: 206510 - DNA, 33 bp, Homo sapien
tcagtacccaaatgcaggtagaatagcaggtga

SEQ ID NO: 206511 - DNA, 33 bp, Homo sapien
cacagaagccgctctaagtgctgagaatgtggc

SEQ ID NO: 206512 - DNA, 33 bp, Homo sapien
cacagaagccgctctaggtgctgagaatgtggc

SEQ ID NO: 206513 - DNA, 33 bp, Homo sapien
attatagggtggaggaaggaataaggtagagaa

SEQ ID NO: 206514 - DNA, 33 bp, Homo sapien
attatagggtggaggatggaataaggtagagaa

SEQ ID NO: 206515 - DNA, 33 bp, Homo sapien
gtttcagaaagcaagaaagctacgaaagactca

SEQ ID NO: 206516 - DNA, 33 bp, Homo sapien
gtttcagaaagcaagacagctacgaaagactca

SEQ ID NO: 206517 - DNA, 33 bp, Homo sapien
caattctgttagaacacagtagttgcttagtaa

SEQ ID NO: 206518 - DNA, 33 bp, Homo sapien
caattctgttagaacatagtagttgcttagtaa

SEQ ID NO: 206519 - DNA, 33 bp, Homo sapien
ttagttaactcaggagacatttcttgtgagcct

SEQ ID NO: 206520 - DNA, 33 bp, Homo sapien
ttagttaactcaggaggcatttcttgtgagcct

SEQ ID NO: 206521 - DNA, 33 bp, Homo sapien
gaactgagggcaaagcaaggttcagaaagggca

SEQ ID NO: 206522 - DNA, 33 bp, Homo sapien
gaactgagggcaaagcgaggttcagaaagggca

SEQ ID NO: 206523 - DNA, 33 bp, Homo sapien
ctaacaaaggcacagaagaaggaacactcccgc

SEQ ID NO: 206524 - DNA, 33 bp, Homo sapien
ctaacaaaggcacagacgaaggaacactcccgc

SEQ ID NO: 206525 - DNA, 33 bp, Homo sapien
gaatattttgctcttccgaaattactacaatag

SEQ ID NO: 206526 - DNA, 33 bp, Homo sapien
gaatattttgctcttctgaaattactacaatag

SEQ ID NO: 206527 - DNA, 33 bp, Homo sapien
ggaaaatagcaccagaaaggagaagcaaaggat

SEQ ID NO: 206528 - DNA, 33 bp, Homo sapien
ggaaaatagcaccagagaggagaagcaaaggat

SEQ ID NO: 206529 - DNA, 33 bp, Homo sapien
tagtatcactgtcaagcatgaaggacagggcca

SEQ ID NO: 206530 - DNA, 33 bp, Homo sapien
tagtatcactgtcaaggatgaaggacagggcca

SEQ ID NO: 206531 - DNA, 33 bp, Homo sapien
gataatacatgacagacgcaggatttgaaccaa

SEQ ID NO: 206532 - DNA, 33 bp, Homo sapien
gataatacatgacagatgcaggatttgaaccaa

SEQ ID NO: 206533 - DNA, 33 bp, Homo sapien
atggcctcagaaaatcagagccctaaggaacct

SEQ ID NO: 206534 - DNA, 33 bp, Homo sapien
atggcctcagaaaatcggagccctaaggaacct

SEQ ID NO: 206535 - DNA, 33 bp, Homo sapien
taaatacagtagagaacggaacaggccctttga

SEQ ID NO: 206536 - DNA, 33 bp, Homo sapien
taaatacagtagagaatggaacaggccctttga

SEQ ID NO: 206537 - DNA, 33 bp, Homo sapien
gattcctattaaaacactattggtgaatactga

SEQ ID NO: 206538 - DNA, 33 bp, Homo sapien
gattcctattaaaacattattggtgaatactga

SEQ ID NO: 206539 - DNA, 33 bp, Homo sapien
catccctcactcatagccaagcctgagccaacc

SEQ ID NO: 206540 - DNA, 33 bp, Homo sapien
catccctcactcatagtcaagcctgagccaacc

SEQ ID NO: 206541 - DNA, 33 bp, Homo sapien
ggactgggagcaaaaaaaaatggaaaggtgctt

SEQ ID NO: 206542 - DNA, 33 bp, Homo sapien
ggactgggagcaaaaagaaatggaaaggtgctt

SEQ ID NO: 206543 - DNA, 33 bp, Homo sapien
cacctcccagctgaagaaggtctgggtgagtgg

SEQ ID NO: 206544 - DNA, 33 bp, Homo sapien
cacctcccagctgaaggaggtctgggtgagtgg

SEQ ID NO: 206545 - DNA, 33 bp, Homo sapien
accccttcagcgaggcacagtccaaaggggaca

SEQ ID NO: 206546 - DNA, 33 bp, Homo sapien
accccttcagcgaggcccagtccaaaggggaca

SEQ ID NO: 206547 - DNA, 33 bp, Homo sapien
gccctacagtgtacaacgacttccatattccca

SEQ ID NO: 206548 - DNA, 33 bp, Homo sapien
gccctacagtgtacaatgacttccatattccca

SEQ ID NO: 206549 - DNA, 33 bp, Homo sapien; identical to SEQ ID NO: 206547

SEQ ID NO: 206550 - DNA, 33 bp, Homo sapien; identical to SEQ ID NO: 206548

SEQ ID NO: 206551 - DNA, 33 bp, Homo sapien
ggtagaaggagaaatgcagctcaatggtctcaa

SEQ ID NO: 206552 - DNA, 33 bp, Homo sapien
ggtagaaggagaaatgtagctcaatggtctcaa

SEQ ID NO: 206553 - DNA, 33 bp, Homo sapien
tagagatgaagacacaaaaataagtcataatac

SEQ ID NO: 206554 - DNA, 33 bp, Homo sapien
tagagatgaagacacacaaataagtcataatac

SEQ ID NO: 206555 - DNA, 33 bp, Homo sapien
tgctatacttttacaacatacttagagccctga

SEQ ID NO: 206556 - DNA, 33 bp, Homo sapien
tgctatacttttacaatatacttagagccctga

SEQ ID NO: 206557 - DNA, 33 bp, Homo sapien; identical to SEQ ID NO: 206555

SEQ ID NO: 206558 - DNA, 33 bp, Homo sapien; identical to SEQ ID NO: 206556

SEQ ID NO: 206559 - DNA, 33 bp, Homo sapien
tctatagtaacattcccgctaggatataatctg

SEQ ID NO: 206560 - DNA, 33 bp, Homo sapien
tctatagtaacattcctgctaggatataatctg

SEQ ID NO: 206561 - DNA, 33 bp, Homo sapien
ccaattttagctttccaacctctagaaccatat

SEQ ID NO: 206562 - DNA, 33 bp, Homo sapien
ccaattttagctttccgacctctagaaccatat

SEQ ID NO: 206563 - DNA, 33 bp, Homo sapien
ctgctataacaaatcaccaaaaacttgatagct

SEQ ID NO: 206564 - DNA, 33 bp, Homo sapien
ctgctataacaaatcagcaaaaacttgatagct

SEQ ID NO: 206565 - DNA, 33 bp, Homo sapien
tgactcaatgataaggaaacaccctagaatagt

SEQ ID NO: 206566 - DNA, 33 bp, Homo sapien
tgactcaatgataaggcaacaccctagaatagt

SEQ ID NO: 206567 - DNA, 33 bp, Homo sapien
gcagcagaatgatgtaccggccagactccacca

SEQ ID NO: 206568 - DNA, 33 bp, Homo sapien
gcagcagaatgatgtatcggccagactccacca

SEQ ID NO: 206569 - DNA, 33 bp, Homo sapien
ccacagttttggatccgctgctttgactatgtg

SEQ ID NO: 206570 - DNA, 33 bp, Homo sapien
ccacagttttggatcctctgctttgactatgtg

SEQ ID NO: 206571 - DNA, 33 bp, Homo sapien
aaaatgactaaatccactgaggaatcaccaggc

SEQ ID NO: 206572 - DNA, 33 bp, Homo sapien
aaaatgactaaatccattgaggaatcaccaggc

SEQ ID NO: 206573 - DNA, 33 bp, Homo sapien
attaatatgtacttaacactctggaggtgaggg

SEQ ID NO: 206574 - DNA, 33 bp, Homo sapien
attaatatgtacttaatactctggaggtgaggg

SEQ ID NO: 206575 - DNA, 33 bp, Homo sapien
tgaaatgagcgcctaacaggatagccacagcct

SEQ ID NO: 206576 - DNA, 33 bp, Homo sapien
tgaaatgagcgcctaataggatagccacagcct

SEQ ID NO: 206577 - DNA, 33 bp, Homo sapien
ggcattttcctaacaactccctccctgactttg

SEQ ID NO: 206578 - DNA, 33 bp, Homo sapien
ggcattttcctaacaagtccctccctgactttg

SEQ ID NO: 206579 - DNA, 33 bp, Homo sapien
aaacgtgccagaactacgacctggagtgcatga

SEQ ID NO: 206580 - DNA, 33 bp, Homo sapien
aaacgtgccagaactatgacctggagtgcatga

SEQ ID NO: 206581 - DNA, 33 bp, Homo sapien
gacccatatactcaaacgcctacatggtctcac

SEQ ID NO: 206582 - DNA, 33 bp, Homo sapien
gacccatatactcaaatgcctacatggtctcac

SEQ ID NO: 206583 - DNA, 33 bp, Homo sapien
cgcaaccagaaacccaagatcatccctgccact

SEQ ID NO: 206584 - DNA, 33 bp, Homo sapien
cgcaaccagaaacccaggatcatccctgccact

SEQ ID NO: 206585 - DNA, 33 bp, Homo sapien
atttcgctgtggtaggcatgagtgtccctcctc

SEQ ID NO: 206586 - DNA, 33 bp, Homo sapien
atttcgctgtggtaggtatgagtgtccctcctc

SEQ ID NO: 206587 - DNA, 33 bp, Homo sapien
aagagacacaagccagaaggaagtgtagcaaag

SEQ ID NO: 206588 - DNA, 33 bp, Homo sapien
aagagacacaagccaggaggaagtgtagcaaag

SEQ ID NO: 206589 - DNA, 33 bp, Homo sapien
gtctgctaaactgagaagtgcattgtttctttg

SEQ ID NO: 206590 - DNA, 33 bp, Homo sapien
gtctgctaaactgagatgtgcattgtttctttg

SEQ ID NO: 206591 - DNA, 33 bp, Homo sapien
ccagaggtttatttcaaatagtgagtgtcgcta

SEQ ID NO: 206592 - DNA, 33 bp, Homo sapien
ccagaggtttatttcacatagtgagtgtcgcta

SEQ ID NO: 206593 - DNA, 33 bp, Homo sapien
agatagtccctttccacgagccccaggaatctg

SEQ ID NO: 206594 - DNA, 33 bp, Homo sapien
agatagtccctttccatgagccccaggaatctg

SEQ ID NO: 206595 - DNA, 33 bp, Homo sapien
atggtcgtttagttacagggcaaggaccagaac

SEQ ID NO: 206596 - DNA, 33 bp, Homo sapien
atggtcgtttagttaccgggcaaggaccagaac

SEQ ID NO: 206597 - DNA, 33 bp, Homo sapien
ggtatttatcagattgaaaattaaattagagac

SEQ ID NO: 206598 - DNA, 33 bp, Homo sapien
ggtatttatcagattggaaattaaattagagac

SEQ ID NO: 206599 - DNA, 33 bp, Homo sapien
tacctgtttgctgaaaagattaaggttgatgag

SEQ ID NO: 206600 - DNA, 33 bp, Homo sapien
tacctgtttgctgaaaggattaaggttgatgag

SEQ ID NO: 206601 - DNA, 33 bp, Homo sapien
ctttatttacagatcaaagaccttgccagcacc

SEQ ID NO: 206602 - DNA, 33 bp, Homo sapien
ctttatttacagatcagagaccttgccagcacc

SEQ ID NO: 206603 - DNA, 33 bp, Homo sapien
ccgcagctcctggcaccgccgacaggagttgaa

SEQ ID NO: 206604 - DNA, 33 bp, Homo sapien
ccgcagctcctggcacggccgacaggagttgaa

SEQ ID NO: 206605 - DNA, 33 bp, Homo sapien
gggaggaggagggaaaacaagcacatctcagtg

SEQ ID NO: 206606 - DNA, 33 bp, Homo sapien
gggaggaggagggaaagcaagcacatctcagtg

SEQ ID NO: 206607 - DNA, 33 bp, Homo sapien
ctatcttagagagaggaatgtcaagctctgcag

SEQ ID NO: 206608 - DNA, 33 bp, Homo sapien
ctatcttagagagaggtatgtcaagctctgcag

SEQ ID NO: 206609 - DNA, 33 bp, Homo sapien
ggattcttggacctcactaaagcacttgaaata

SEQ ID NO: 206610 - DNA, 33 bp, Homo sapien
ggattcttggacctcagtaaagcacttgaaata

SEQ ID NO: 206611 - DNA, 33 bp, Homo sapien
atgccccagtgacaccaagctcagagctggggt

SEQ ID NO: 206612 - DNA, 33 bp, Homo sapien
atgccccagtgacaccgagctcagagctggggt

SEQ ID NO: 206613 - DNA, 33 bp, Homo sapien
actgctttgtctctaacggaatgggtattttct

SEQ ID NO: 206614 - DNA, 33 bp, Homo sapien
actgctttgtctctaatggaatgggtattttct

SEQ ID NO: 206615 - DNA, 33 bp, Homo sapien
acaagataatggaggaagcgagagaatgtgaag

SEQ ID NO: 206616 - DNA, 33 bp, Homo sapien
acaagataatggaggacgcgagagaatgtgaag

SEQ ID NO: 206617 - DNA, 33 bp, Homo sapien
tccttctttcattgtacgcccgttcgaagctaa

SEQ ID NO: 206618 - DNA, 33 bp, Homo sapien
tccttctttcattgtatgcccgttcgaagctaa

SEQ ID NO: 206619 - DNA, 33 bp, Homo sapien
atggatttgagattcccatttatacttcttata

SEQ ID NO: 206620 - DNA, 33 bp, Homo sapien
atggatttgagattcctatttatacttcttata

SEQ ID NO: 206621 - DNA, 33 bp, Homo sapien
cttcaaactaagacaccgcatatagaattctcc

SEQ ID NO: 206622 - DNA, 33 bp, Homo sapien
cttcaaactaagacactgcatatagaattctcc

SEQ ID NO: 206623 - DNA, 33 bp, Homo sapien
tgtattaaggtccttgcatggctcagaaggaag

SEQ ID NO: 206624 - DNA, 33 bp, Homo sapien
tgtattaaggtccttgtatggctcagaaggaag

SEQ ID NO: 206625 - DNA, 33 bp, Homo sapien
ttgaatgtatgttttccaaacctatcgaaaaaa

SEQ ID NO: 206626 - DNA, 33 bp, Homo sapien
ttgaatgtatgttttctaaacctatcgaaaaaa

SEQ ID NO: 206627 - DNA, 33 bp, Homo sapien
aggattttgccaggtgaaaatgagggcaaaggc

SEQ ID NO: 206628 - DNA, 33 bp, Homo sapien
aggattttgccaggtggaaatgagggcaaaggc

SEQ ID NO: 206629 - DNA, 33 bp, Homo sapien
tataaaataacaaatgcaaagtatgtattatga

SEQ ID NO: 206630 - DNA, 33 bp, Homo sapien
tataaaataacaaatggaaagtatgtattatga

SEQ ID NO: 206631 - DNA, 33 bp, Homo sapien
cactaatgcttattcccctcagcttagccagct

SEQ ID NO: 206632 - DNA, 33 bp, Homo sapien
cactaatgcttattccgctcagcttagccagct

SEQ ID NO: 206633 - DNA, 33 bp, Homo sapien
gctgtcatatctccccagatttcagaggcgttc

SEQ ID NO: 206634 - DNA, 33 bp, Homo sapien
gctgtcatatctccccggatttcagaggcgttc

SEQ ID NO: 206635 - DNA, 33 bp, Homo sapien
ctcacgggacattgctcaccgcggccgactgat

SEQ ID NO: 206636 - DNA, 33 bp, Homo sapien
ctcacgggacattgcttaccgcggccgactgat

SEQ ID NO: 206637 - DNA, 33 bp, Homo sapien
attgagagaggttaacagcttttgcctcagaag

SEQ ID NO: 206638 - DNA, 33 bp, Homo sapien
attgagagaggttaacggcttttgcctcagaag

SEQ ID NO: 206639 - DNA, 33 bp, Homo sapien
ggtaatatgagttacacaactgtgatgattaca

SEQ ID NO: 206640 - DNA, 33 bp, Homo sapien
ggtaatatgagttacataactgtgatgattaca

SEQ ID NO: 206641 - DNA, 33 bp, Homo sapien
aataaatatgtgttaaacttgtgataatatgct

SEQ ID NO: 206642 - DNA, 33 bp, Homo sapien
aataaatatgtgttaagcttgtgataatatgct

SEQ ID NO: 206643 - DNA, 33 bp, Homo sapien
ggctagctcttccccaatactggttccttaatg

SEQ ID NO: 206644 - DNA, 33 bp, Homo sapien
ggctagctcttccccagtactggttccttaatg

SEQ ID NO: 206645 - DNA, 33 bp, Homo sapien
atgctcatcttgccaacattctccaagactcca

SEQ ID NO: 206646 - DNA, 33 bp, Homo sapien
atgctcatcttgccaatattctccaagactcca

SEQ ID NO: 206647 - DNA, 33 bp, Homo sapien
gactgaaaccagaagccctgaggtctgatctgt

SEQ ID NO: 206648 - DNA, 33 bp, Homo sapien
gactgaaaccagaagctctgaggtctgatctgt

SEQ ID NO: 206649 - DNA, 33 bp, Homo sapien
aagcctgtttctgcaaggctttggttgaaaaga

SEQ ID NO: 206650 - DNA, 33 bp, Homo sapien
aagcctgtttctgcaatgctttggttgaaaaga

SEQ ID NO: 206651 - DNA, 33 bp, Homo sapien
agtgggtgctcgaagacagtctaaaaaaaacag

SEQ ID NO: 206652 - DNA, 33 bp, Homo sapien
agtgggtgctcgaagagagtctaaaaaaaacag

SEQ ID NO: 206653 - DNA, 33 bp, Homo sapien
tgacaaaaacaaaaaccagggctgacaagcatc

SEQ ID NO: 206654 - DNA, 33 bp, Homo sapien
tgacaaaaacaaaaacgagggctgacaagcatc

SEQ ID NO: 206655 - DNA, 33 bp, Homo sapien
agggttaatttgcccacggaagcagtttgtgat

SEQ ID NO: 206656 - DNA, 33 bp, Homo sapien
agggttaatttgcccatggaagcagtttgtgat

SEQ ID NO: 206657 - DNA, 33 bp, Homo sapien
cacacagactcccacacaaaccaggaaacagaa

SEQ ID NO: 206658 - DNA, 33 bp, Homo sapien
cacacagactcccacagaaaccaggaaacagaa

SEQ ID NO: 206659 - DNA, 33 bp, Homo sapien
caaactcaggcccacaatgaatggtgtcctggt

SEQ ID NO: 206660 - DNA, 33 bp, Homo sapien
caaactcaggcccacagtgaatggtgtcctggt

SEQ ID NO: 206661 - DNA, 33 bp, Homo sapien
gttaagcctgtgagaccgagacctatggcagct

SEQ ID NO: 206662 - DNA, 33 bp, Homo sapien
gttaagcctgtgagacggagacctatggcagct

SEQ ID NO: 206663 - DNA, 33 bp, Homo sapien
agcgttaacctgaaaactgtaggccggtgctca

SEQ ID NO: 206664 - DNA, 33 bp, Homo sapien
agcgttaacctgaaaagtgtaggccggtgctca

SEQ ID NO: 206665 - DNA, 33 bp, Homo sapien
gtcccttgtgtacgtgaattcaagccacataac

SEQ ID NO: 206666 - DNA, 33 bp, Homo sapien
gtcccttgtgtacgtggattcaagccacataac

SEQ ID NO: 206667 - DNA, 33 bp, Homo sapien
caccttagggcaggcaactccaaacattggtaa

SEQ ID NO: 206668 - DNA, 33 bp, Homo sapien
caccttagggcaggcagctccaaacattggtaa

SEQ ID NO: 206669 - DNA, 33 bp, Homo sapien
attccatttgccacacactgtacttctttgccc

SEQ ID NO: 206670 - DNA, 33 bp, Homo sapien
attccatttgccacacgctgtacttctttgccc

SEQ ID NO: 206671 - DNA, 33 bp, Homo sapien
gagttcacgggaataactgccacaatggaattc

SEQ ID NO: 206672 - DNA, 33 bp, Homo sapien
gagttcacgggaataagtgccacaatggaattc

SEQ ID NO: 206673 - DNA, 33 bp, Homo sapien
ccaagcatgagtaacaatcattaataatcacca

SEQ ID NO: 206674 - DNA, 33 bp, Homo sapien
ccaagcatgagtaacagtcattaataatcacca

SEQ ID NO: 206675 - DNA, 33 bp, Homo sapien
tctcttgtcttttgtgaacaatagtagttgcct

SEQ ID NO: 206676 - DNA, 33 bp, Homo sapien
tctcttgtcttttgtggacaatagtagttgcct

SEQ ID NO: 206677 - DNA, 33 bp, Homo sapien
ctccagaatagtaaaaagtgaccttacaaccat

SEQ ID NO: 206678 - DNA, 33 bp, Homo sapien
ctccagaatagtaaaaggtgaccttacaaccat

SEQ ID NO: 206679 - DNA, 33 bp, Homo sapien
agcatgtctcctcacgcacctgctgttcttctc

SEQ ID NO: 206680 - DNA, 33 bp, Homo sapien
agcatgtctcctcacgtacctgctgttcttctc

SEQ ID NO: 206681 - DNA, 33 bp, Homo sapien
gtagcctctagtgaacgactttcttagggagaa

SEQ ID NO: 206682 - DNA, 33 bp, Homo sapien
gtagcctctagtgaactactttcttagggagaa

SEQ ID NO: 206683 - DNA, 33 bp, Homo sapien
cttcaccggcatcttaagaaaggcatgaagcac

SEQ ID NO: 206684 - DNA, 33 bp, Homo sapien
cttcaccggcatcttaggaaaggcatgaagcac

SEQ ID NO: 206685 - DNA, 33 bp, Homo sapien
gcagctacttaaatcccggaacacctcggggct

SEQ ID NO: 206686 - DNA, 33 bp, Homo sapien
gcagctacttaaatcctggaacacctcggggct

SEQ ID NO: 206687 - DNA, 33 bp, Homo sapien
tagaaagtgcagaaacacctgagtggtggtata

SEQ ID NO: 206688 - DNA, 33 bp, Homo sapien
tagaaagtgcagaaactcctgagtggtggtata

SEQ ID NO: 206689 - DNA, 33 bp, Homo sapien
ctgatggcatggcaccacaactccgtgccctga

SEQ ID NO: 206690 - DNA, 33 bp, Homo sapien
ctgatggcatggcaccgcaactccgtgccctga

SEQ ID NO: 206691 - DNA, 33 bp, Homo sapien
caggagagaaattcccagctatatccaaatgtt

SEQ ID NO: 206692 - DNA, 33 bp, Homo sapien
caggagagaaattcccggctatatccaaatgtt

SEQ ID NO: 206693 - DNA, 33 bp, Homo sapien
gggctccagcagtagtaaaaatatttggagatt

SEQ ID NO: 206694 - DNA, 33 bp, Homo sapien
gggctccagcagtagtgaaaatatttggagatt

SEQ ID NO: 206695 - DNA, 33 bp, Homo sapien
gcagcctgagtcacacaaaagccatttcagtct

SEQ ID NO: 206696 - DNA, 33 bp, Homo sapien
gcagcctgagtcacacgaaagccatttcagtct

SEQ ID NO: 206697 - DNA, 33 bp, Homo sapien
cttagagaattgtaaacgagtaagcaaccgaaa

SEQ ID NO: 206698 - DNA, 33 bp, Homo sapien
cttagagaattgtaaatgagtaagcaaccgaaa

SEQ ID NO: 206699 - DNA, 33 bp, Homo sapien
gtcaaaagggtgcctcagagcacagacctggac

SEQ ID NO: 206700 - DNA, 33 bp, Homo sapien
gtcaaaagggtgcctcggagcacagacctggac

SEQ ID NO: 206701 - DNA, 33 bp, Homo sapien
atgccggatggaagaaccagccctgcttcctag

SEQ ID NO: 206702 - DNA, 33 bp, Homo sapien
atgccggatggaagaatcagccctgcttcctag

SEQ ID NO: 206703 - DNA, 33 bp, Homo sapien
tctggactccccgagcactaatcttcctactcc

SEQ ID NO: 206704 - DNA, 33 bp, Homo sapien
tctggactccccgagcgctaatcttcctactcc

SEQ ID NO: 206705 - DNA, 33 bp, Homo sapien
cagacacataactgaaactgtctggatctgttt

SEQ ID NO: 206706 - DNA, 33 bp, Homo sapien
cagacacataactgaacctgtctggatctgttt

SEQ ID NO: 206707 - DNA, 33 bp, Homo sapien
cctctcatgcctggaacggactatgtggcacct

SEQ ID NO: 206708 - DNA, 33 bp, Homo sapien
cctctcatgcctggaatggactatgtggcacct

SEQ ID NO: 206709 - DNA, 33 bp, Homo sapien
actatataatccatgcccctttggcacttttac

SEQ ID NO: 206710 - DNA, 33 bp, Homo sapien
actatataatccatgctcctttggcacttttac

SEQ ID NO: 206711 - DNA, 33 bp, Homo sapien
ccgctctgtcaaagataaactaggaaagacgcc

SEQ ID NO: 206712 - DNA, 33 bp, Homo sapien
ccgctctgtcaaagatgaactaggaaagacgcc

SEQ ID NO: 206713 - DNA, 33 bp, Homo sapien
ataaaaagaagcccagaagtaggtgctgtgctt

SEQ ID NO: 206714 - DNA, 33 bp, Homo sapien
ataaaaagaagcccaggagtaggtgctgtgctt

SEQ ID NO: 206715 - DNA, 33 bp, Homo sapien
gctgctaagtgtcccacatgtcaggggaagtat

SEQ ID NO: 206716 - DNA, 33 bp, Homo sapien
gctgctaagtgtcccatatgtcaggggaagtat

SEQ ID NO: 206717 - DNA, 33 bp, Homo sapien
ctagcctcaaagccaacgttctcataggtttca

SEQ ID NO: 206718 - DNA, 33 bp, Homo sapien
ctagcctcaaagccaatgttctcataggtttca

SEQ ID NO: 206719 - DNA, 33 bp, Homo sapien
agcctcaaatctggcaaataaataaggttagcc

SEQ ID NO: 206720 - DNA, 33 bp, Homo sapien
agcctcaaatctggcatataaataaggttagcc

SEQ ID NO: 206721 - DNA, 33 bp, Homo sapien
tctgtgttcatggactaaaggtaacaatatttc

SEQ ID NO: 206722 - DNA, 33 bp, Homo sapien
tctgtgttcatggactgaaggtaacaatatttc

SEQ ID NO: 206723 - DNA, 33 bp, Homo sapien
acccaaacaagacaagaccagacatttcatttc

SEQ ID NO: 206724 - DNA, 33 bp, Homo sapien
acccaaacaagacaaggccagacatttcatttc

SEQ ID NO: 206725 - DNA, 33 bp, Homo sapien
atcctcaagcagatgaagactcagtcaagaggt

SEQ ID NO: 206726 - DNA, 33 bp, Homo sapien
atcctcaagcagatgaggactcagtcaagaggt

SEQ ID NO: 206727 - DNA, 33 bp, Homo sapien
cgtgatctgtgatttagaggattaattttgatc

SEQ ID NO: 206728 - DNA, 33 bp, Homo sapien
cgtgatctgtgatttataggattaattttgatc

SEQ ID NO: 206729 - DNA, 33 bp, Homo sapien
gaagtaataattctcacgtaggtggagagctgc

SEQ ID NO: 206730 - DNA, 33 bp, Homo sapien
gaagtaataattctcatgtaggtggagagctgc

SEQ ID NO: 206731 - DNA, 33 bp, Homo sapien
tcgtttggccatcaaaccagacctcaattgaga

SEQ ID NO: 206732 - DNA, 33 bp, Homo sapien
tcgtttggccatcaaatcagacctcaattgaga

SEQ ID NO: 206733 - DNA, 33 bp, Homo sapien
tgaccagcatagaaagactgctcagtgtgatcc

SEQ ID NO: 206734 - DNA, 33 bp, Homo sapien
tgaccagcatagaaaggctgctcagtgtgatcc

SEQ ID NO: 206735 - DNA, 33 bp, Homo sapien
cttttctttcactttcacttagagcaagatggc

SEQ ID NO: 206736 - DNA, 33 bp, Homo sapien
cttttctttcactttcgcttagagcaagatggc

SEQ ID NO: 206737 - DNA, 33 bp, Homo sapien
ttagatccatgtgtaaccttattcctcattctt

SEQ ID NO: 206738 - DNA, 33 bp, Homo sapien
ttagatccatgtgtaatcttattcctcattctt

SEQ ID NO: 206739 - DNA, 33 bp, Homo sapien
tggctctttggtcttaacctccatctggacatt

SEQ ID NO: 206740 - DNA, 33 bp, Homo sapien
tggctctttggtcttatcctccatctggacatt

SEQ ID NO: 206741 - DNA, 33 bp, Homo sapien
gttccaccgtattgatcaggcacattttagaaa

SEQ ID NO: 206742 - DNA, 33 bp, Homo sapien
gttccaccgtattgattaggcacattttagaaa

SEQ ID NO: 206743 - DNA, 33 bp, Homo sapien
ggcacttaacaatggaaagacctgaatgtctgg

SEQ ID NO: 206744 - DNA, 33 bp, Homo sapien
ggcacttaacaatggagagacctgaatgtctgg

SEQ ID NO: 206745 - DNA, 33 bp, Homo sapien
ctggcagaagaaaagacgcagtactaaagaaaa

SEQ ID NO: 206746 - DNA, 33 bp, Homo sapien
ctggcagaagaaaagatgcagtactaaagaaaa

SEQ ID NO: 206747 - DNA, 33 bp, Homo sapien
cccaagtgtgaaaaagacagccaacttgctgct

SEQ ID NO: 206748 - DNA, 33 bp, Homo sapien
cccaagtgtgaaaaagccagccaacttgctgct

SEQ ID NO: 206749 - DNA, 33 bp, Homo sapien
gatgcccccggtattcagaaggcgctgtgcatt

SEQ ID NO: 206750 - DNA, 33 bp, Homo sapien
gatgcccccggtattcggaaggcgctgtgcatt

SEQ ID NO: 206751 - DNA, 33 bp, Homo sapien
ggatgaagctgctgccaatttaaccaagtggga

SEQ ID NO: 206752 - DNA, 33 bp, Homo sapien
ggatgaagctgctgccgatttaaccaagtggga

SEQ ID NO: 206753 - DNA, 33 bp, Homo sapien
attctgttctctgtcacgatgtaatctaaaaaa

SEQ ID NO: 206754 - DNA, 33 bp, Homo sapien
attctgttctctgtcatgatgtaatctaaaaaa

SEQ ID NO: 206755 - DNA, 33 bp, Homo sapien
aatgcctattgacctactaatttcctcttccct

SEQ ID NO: 206756 - DNA, 33 bp, Homo sapien
aatgcctattgacctattaatttcctcttccct

SEQ ID NO: 206757 - DNA, 33 bp, Homo sapien
aactctgattacttcacaaagttgctctgatga

SEQ ID NO: 206758 - DNA, 33 bp, Homo sapien
aactctgattacttcataaagttgctctgatga

SEQ ID NO: 206759 - DNA, 33 bp, Homo sapien
tgtaggtgataacaaaggaattggttattatct

SEQ ID NO: 206760 - DNA, 33 bp, Homo sapien
tgtaggtgataacaaatgaattggttattatct

SEQ ID NO: 206761 - DNA, 33 bp, Homo sapien
atgcagcagctcgacaatatggtcctagcttgt

SEQ ID NO: 206762 - DNA, 33 bp, Homo sapien
atgcagcagctcgacagtatggtcctagcttgt

SEQ ID NO: 206763 - DNA, 33 bp, Homo sapien
aacaaaaagaagttgcaatctagcaaccatgaa

SEQ ID NO: 206764 - DNA, 33 bp, Homo sapien
aacaaaaagaagttgcgatctagcaaccatgaa

SEQ ID NO: 206765 - DNA, 33 bp, Homo sapien
atcataaaccttacataacaccatgggacccat

SEQ ID NO: 206766 - DNA, 33 bp, Homo sapien
atcataaaccttacatgacaccatgggacccat

SEQ ID NO: 206767 - DNA, 33 bp, Homo sapien
aaaagctatgaagatgaaaaaaacaaatcaatt

SEQ ID NO: 206768 - DNA, 33 bp, Homo sapien
aaaagctatgaagatggaaaaaacaaatcaatt

SEQ ID NO: 206769 - DNA, 33 bp, Homo sapien
caagttataggttcaccgataaatgcctctgga

SEQ ID NO: 206770 - DNA, 33 bp, Homo sapien
caagttataggttcactgataaatgcctctgga

SEQ ID NO: 206771 - DNA, 33 bp, Homo sapien
actccagtcttccaaacgctcagaccaaaaccc

SEQ ID NO: 206772 - DNA, 33 bp, Homo sapien
actccagtcttccaaatgctcagaccaaaaccc

SEQ ID NO: 206773 - DNA, 33 bp, Homo sapien
tgagactgaatgaaatcaccaaatcagtaagtg

SEQ ID NO: 206774 - DNA, 33 bp, Homo sapien
tgagactgaatgaaattaccaaatcagtaagtg

SEQ ID NO: 206775 - DNA, 33 bp, Homo sapien
aaatggaggccttccgcattttccctgagaatg

SEQ ID NO: 206776 - DNA, 33 bp, Homo sapien
aaatggaggccttccgtattttccctgagaatg

SEQ ID NO: 206777 - DNA, 33 bp, Homo sapien
tcgtgtgaacaatgacaaaactgtcagtgatca

SEQ ID NO: 206778 - DNA, 33 bp, Homo sapien
tcgtgtgaacaatgacgaaactgtcagtgatca

SEQ ID NO: 206779 - DNA, 33 bp, Homo sapien
cacgtcgcagcttgcccacaactgacaaaaaag

SEQ ID NO: 206780 - DNA, 33 bp, Homo sapien
cacgtcgcagcttgcctacaactgacaaaaaag

SEQ ID NO: 206781 - DNA, 33 bp, Homo sapien; identical to SEQ ID NO: 206779

SEQ ID NO: 206782 - DNA, 33 bp, Homo sapien; identical to SEQ ID NO: 206780

SEQ ID NO: 206783 - DNA, 33 bp, Homo sapien
gctgccttacgtaccactggatggtttcttggc

SEQ ID NO: 206784 - DNA, 33 bp, Homo sapien
gctgccttacgtaccagtggatggtttcttggc

SEQ ID NO: 206785 - DNA, 33 bp, Homo sapien
ttctgaaatcaggacacgtctcagaatcaatgg

SEQ ID NO: 206786 - DNA, 33 bp, Homo sapien
ttctgaaatcaggacaggtctcagaatcaatgg

SEQ ID NO: 206787 - DNA, 33 bp, Homo sapien
tgaaaactgcaggctcactgtgtgaacagactt

SEQ ID NO: 206788 - DNA, 33 bp, Homo sapien
tgaaaactgcaggctcgctgtgtgaacagactt

SEQ ID NO: 206789 - DNA, 33 bp, Homo sapien
tgaagaatgcgacggaaatttttttggtagaaa

SEQ ID NO: 206790 - DNA, 33 bp, Homo sapien
tgaagaatgcgacggagatttttttggtagaaa

SEQ ID NO: 206791 - DNA, 33 bp, Homo sapien
ggaattggagtagggacggaactcacaaatggc

SEQ ID NO: 206792 - DNA, 33 bp, Homo sapien
ggaattggagtagggatggaactcacaaatggc

SEQ ID NO: 206793 - DNA, 33 bp, Homo sapien
ggaaaatggctgtcaccagtaacttagacttgg

SEQ ID NO: 206794 - DNA, 33 bp, Homo sapien
ggaaaatggctgtcactagtaacttagacttgg

SEQ ID NO: 206795 - DNA, 33 bp, Homo sapien
tggtgacataaactcacctttcacacatacaca

SEQ ID NO: 206796 - DNA, 33 bp, Homo sapien
tggtgacataaactcatctttcacacatacaca

SEQ ID NO: 206797 - DNA, 33 bp, Homo sapien
tgaggatggggatcataaccagaacaggccaca

SEQ ID NO: 206798 - DNA, 33 bp, Homo sapien
tgaggatggggatcatcaccagaacaggccaca

SEQ ID NO: 206799 - DNA, 33 bp, Homo sapien
ctctgcaggaagagaacgaaaatgggaaagcct

SEQ ID NO: 206800 - DNA, 33 bp, Homo sapien
ctctgcaggaagagaaggaaaatgggaaagcct

SEQ ID NO: 206801 - DNA, 33 bp, Homo sapien
cccctggtctgaggcccaccctccagcacctct

SEQ ID NO: 206802 - DNA, 33 bp, Homo sapien
cccctggtctgaggcctaccctccagcacctct

SEQ ID NO: 206803 - DNA, 33 bp, Homo sapien
cgaagagtagaatgcccgcgtccctcactggag

SEQ ID NO: 206804 - DNA, 33 bp, Homo sapien
cgaagagtagaatgcctgcgtccctcactggag

SEQ ID NO: 206805 - DNA, 33 bp, Homo sapien
aacaacacagaaaactaagaatactatcagcct

SEQ ID NO: 206806 - DNA, 33 bp, Homo sapien
aacaacacagaaaactgagaatactatcagcct

SEQ ID NO: 206807 - DNA, 33 bp, Homo sapien
tgagaattctgggagccagtctgccatgccagg

SEQ ID NO: 206808 - DNA, 33 bp, Homo sapien
tgagaattctgggagctagtctgccatgccagg

SEQ ID NO: 206809 - DNA, 33 bp, Homo sapien
gtgactgccccgctcaagacaacaagcttacct

SEQ ID NO: 206810 - DNA, 33 bp, Homo sapien
gtgactgccccgctcaggacaacaagcttacct

SEQ ID NO: 206811 - DNA, 33 bp, Homo sapien
gttgtcagcaggattcactacttcacagatggt

SEQ ID NO: 206812 - DNA, 33 bp, Homo sapien
gttgtcagcaggattcgctacttcacagatggt

SEQ ID NO: 206813 - DNA, 33 bp, Homo sapien
cctggcaaaagacaaacacagattcaaaaagtt

SEQ ID NO: 206814 - DNA, 33 bp, Homo sapien
cctggcaaaagacaaagacagattcaaaaagtt

SEQ ID NO: 206815 - DNA, 33 bp, Homo sapien
atcagaataaaattgccgaaggttaaagacaaa

SEQ ID NO: 206816 - DNA, 33 bp, Homo sapien
atcagaataaaattgctgaaggttaaagacaaa

SEQ ID NO: 206817 - DNA, 33 bp, Homo sapien
aactttcccgagggacacagatactctacttcc

SEQ ID NO: 206818 - DNA, 33 bp, Homo sapien
aactttcccgagggacgcagatactctacttcc

SEQ ID NO: 206819 - DNA, 33 bp, Homo sapien
agagcaaacgtcttgaaaaatttgagctcctca

SEQ ID NO: 206820 - DNA, 33 bp, Homo sapien
agagcaaacgtcttgagaaatttgagctcctca

SEQ ID NO: 206821 - DNA, 33 bp, Homo sapien
agtgttcagtaaccacacgactagtggctacta

SEQ ID NO: 206822 - DNA, 33 bp, Homo sapien
agtgttcagtaaccacgcgactagtggctacta

SEQ ID NO: 206823 - DNA, 33 bp, Homo sapien
ggctagtgtagtgtccagaagggactcagatgt

SEQ ID NO: 206824 - DNA, 33 bp, Homo sapien
ggctagtgtagtgtccggaagggactcagatgt

SEQ ID NO: 206825 - DNA, 33 bp, Homo sapien
cttagtgtctagctcacaggccagagcggtgac

SEQ ID NO: 206826 - DNA, 33 bp, Homo sapien
cttagtgtctagctcagaggccagagcggtgac

SEQ ID NO: 206827 - DNA, 33 bp, Homo sapien
gggatgtgatgttgaagaagacagatatggtca

SEQ ID NO: 206828 - DNA, 33 bp, Homo sapien
gggatgtgatgttgaataagacagatatggtca

SEQ ID NO: 206829 - DNA, 33 bp, Homo sapien
gaaaagaaaagaaaacgctagttcagcttgcga

SEQ ID NO: 206830 - DNA, 33 bp, Homo sapien
gaaaagaaaagaaaactctagttcagcttgcga

SEQ ID NO: 206831 - DNA, 33 bp, Homo sapien
cctggtcagacatggcactaccactaatggaat

SEQ ID NO: 206832 - DNA, 33 bp, Homo sapien
cctggtcagacatggcgctaccactaatggaat

SEQ ID NO: 206833 - DNA, 33 bp, Homo sapien
taacttaagccaaattaaattgtatggaggagc

SEQ ID NO: 206834 - DNA, 33 bp, Homo sapien
taacttaagccaaattgaattgtatggaggagc

SEQ ID NO: 206835 - DNA, 33 bp, Homo sapien
agaaaccaaatcactacacacaaagtagaaggt

SEQ ID NO: 206836 - DNA, 33 bp, Homo sapien
agaaaccaaatcactatacacaaagtagaaggt

SEQ ID NO: 206837 - DNA, 33 bp, Homo sapien
gaccaagcttggaagacagagtaagtctggagg

SEQ ID NO: 206838 - DNA, 33 bp, Homo sapien
gaccaagcttggaagagagagtaagtctggagg

SEQ ID NO: 206839 - DNA, 33 bp, Homo sapien
atgatcggttttacaccgggtcattccattccc

SEQ ID NO: 206840 - DNA, 33 bp, Homo sapien
atgatcggttttacactgggtcattccattccc

SEQ ID NO: 206841 - DNA, 33 bp, Homo sapien
tttccagcctcggtagcagagcaagaccctatc

SEQ ID NO: 206842 - DNA, 33 bp, Homo sapien
tttccagcctcggtaggagagcaagaccctatc

SEQ ID NO: 206843 - DNA, 33 bp, Homo sapien
atcaccccaaacgcaactggttcaaaatgaaat

SEQ ID NO: 206844 - DNA, 33 bp, Homo sapien
atcaccccaaacgcaattggttcaaaatgaaat

SEQ ID NO: 206845 - DNA, 33 bp, Homo sapien
tgtgtactaatttggaaccgtatctaagaaaca

SEQ ID NO: 206846 - DNA, 33 bp, Homo sapien
tgtgtactaatttggacccgtatctaagaaaca

SEQ ID NO: 206847 - DNA, 33 bp, Homo sapien
tgttctccagtttcaaactcagcatcagcttag

SEQ ID NO: 206848 - DNA, 33 bp, Homo sapien
tgttctccagtttcaagctcagcatcagcttag

SEQ ID NO: 206849 - DNA, 33 bp, Homo sapien
ggatacagatattggaaccattttcacacccca

SEQ ID NO: 206850 - DNA, 33 bp, Homo sapien
ggatacagatattggagccattttcacacccca

SEQ ID NO: 206851 - DNA, 33 bp, Homo sapien
gccccaagctagtcccggaattaaggagtagga

SEQ ID NO: 206852 - DNA, 33 bp, Homo sapien
gccccaagctagtccctgaattaaggagtagga

SEQ ID NO: 206853 - DNA, 33 bp, Homo sapien
agcaaggagcaaaacacacagaaacccaggact

SEQ ID NO: 206854 - DNA, 33 bp, Homo sapien
agcaaggagcaaaacatacagaaacccaggact

SEQ ID NO: 206855 - DNA, 33 bp, Homo sapien
agtcacacgacagccgcagttaatgaaaggcaa

SEQ ID NO: 206856 - DNA, 33 bp, Homo sapien
agtcacacgacagccgtagttaatgaaaggcaa

SEQ ID NO: 206857 - DNA, 33 bp, Homo sapien
atagagcatttctcaccggggaggtcaactaag

SEQ ID NO: 206858 - DNA, 33 bp, Homo sapien
atagagcatttctcactggggaggtcaactaag

SEQ ID NO: 206859 - DNA, 33 bp, Homo sapien
gtaggaaagctgttgacagtcatggccgtatac

SEQ ID NO: 206860 - DNA, 33 bp, Homo sapien
gtaggaaagctgttgagagtcatggccgtatac

SEQ ID NO: 206861 - DNA, 33 bp, Homo sapien
gaaacaaaagaatccaaaagaattgatgttttc

SEQ ID NO: 206862 - DNA, 33 bp, Homo sapien
gaaacaaaagaatccagaagaattgatgttttc

SEQ ID NO: 206863 - DNA, 33 bp, Homo sapien
catggcgacacccagaagttactgcctttttcc

SEQ ID NO: 206864 - DNA, 33 bp, Homo sapien
catggcgacacccagacgttactgcctttttcc

SEQ ID NO: 206865 - DNA, 33 bp, Homo sapien
gaagtgggagttgagaatcaaaatgagatgttc

SEQ ID NO: 206866 - DNA, 33 bp, Homo sapien
gaagtgggagttgagagtcaaaatgagatgttc

SEQ ID NO: 206867 - DNA, 33 bp, Homo sapien
ctgggcacttcgcagcagattgccatcagcctt

SEQ ID NO: 206868 - DNA, 33 bp, Homo sapien
ctgggcacttcgcagccgattgccatcagcctt

SEQ ID NO: 206869 - DNA, 33 bp, Homo sapien
cagcagtaactccacaagtcaaggttcaaataa

SEQ ID NO: 206870 - DNA, 33 bp, Homo sapien
cagcagtaactccacaggtcaaggttcaaataa

SEQ ID NO: 206871 - DNA, 33 bp, Homo sapien
agtggaagacacgtggaacaagagcaaagcaca

SEQ ID NO: 206872 - DNA, 33 bp, Homo sapien
agtggaagacacgtgggacaagagcaaagcaca

SEQ ID NO: 206873 - DNA, 33 bp, Homo sapien
cagacacatcgttcccccaagtcaggccagttt

SEQ ID NO: 206874 - DNA, 33 bp, Homo sapien
cagacacatcgttccctcaagtcaggccagttt

SEQ ID NO: 206875 - DNA, 33 bp, Homo sapien
ctgaagattcaggaacaaaagtgcttaacagaa

SEQ ID NO: 206876 - DNA, 33 bp, Homo sapien
ctgaagattcaggaaccaaagtgcttaacagaa

SEQ ID NO: 206877 - DNA, 33 bp, Homo sapien
gggtttgcacatgggaaatctaaccactagagg

SEQ ID NO: 206878 - DNA, 33 bp, Homo sapien
gggtttgcacatgggagatctaaccactagagg

SEQ ID NO: 206879 - DNA, 33 bp, Homo sapien
gaggaatcattcttgacaggaggagtatcggag

SEQ ID NO: 206880 - DNA, 33 bp, Homo sapien
gaggaatcattcttgataggaggagtatcggag

SEQ ID NO: 206881 - DNA, 33 bp, Homo sapien
tcataggataaacaaacagcaaatgtacagcct

SEQ ID NO: 206882 - DNA, 33 bp, Homo sapien
tcataggataaacaaatagcaaatgtacagcct

SEQ ID NO: 206883 - DNA, 33 bp, Homo sapien
aaacagttttacaccactggatactttaggaac

SEQ ID NO: 206884 - DNA, 33 bp, Homo sapien
aaacagttttacaccattggatactttaggaac

SEQ ID NO: 206885 - DNA, 33 bp, Homo sapien
aaagaaggactatgcacgatcaaagaaaaaaat

SEQ ID NO: 206886 - DNA, 33 bp, Homo sapien
aaagaaggactatgcatgatcaaagaaaaaaat

SEQ ID NO: 206887 - DNA, 33 bp, Homo sapien
gggatttctagtagtacggttcaatatttttgg

SEQ ID NO: 206888 - DNA, 33 bp, Homo sapien
gggatttctagtagtatggttcaatatttttgg

SEQ ID NO: 206889 - DNA, 33 bp, Homo sapien
ccaactgaaatagtacacataaagttcctacag

SEQ ID NO: 206890 - DNA, 33 bp, Homo sapien
ccaactgaaatagtacccataaagttcctacag

SEQ ID NO: 206891 - DNA, 33 bp, Homo sapien
ggcttataactctcgaagtttccaatttctgct

SEQ ID NO: 206892 - DNA, 33 bp, Homo sapien
ggcttataactctcgaggtttccaatttctgct

SEQ ID NO: 206893 - DNA, 33 bp, Homo sapien
aacgataaagttatacgggaattcaaaacatga

SEQ ID NO: 206894 - DNA, 33 bp, Homo sapien
aacgataaagttatactggaattcaaaacatga

SEQ ID NO: 206895 - DNA, 33 bp, Homo sapien
actttctcatactgaccggaatttccttccaag

SEQ ID NO: 206896 - DNA, 33 bp, Homo sapien
actttctcatactgactggaatttccttccaag

SEQ ID NO: 206897 - DNA, 33 bp, Homo sapien
gatctgagacacaatccagaggttgtattgata

SEQ ID NO: 206898 - DNA, 33 bp, Homo sapien
gatctgagacacaatctagaggttgtattgata

SEQ ID NO: 206899 - DNA, 33 bp, Homo sapien
ccattttacacctgataaagctggagctcagag

SEQ ID NO: 206900 - DNA, 33 bp, Homo sapien
ccattttacacctgatgaagctggagctcagag

SEQ ID NO: 206901 - DNA, 33 bp, Homo sapien
tttccatgtagtaatacggctcctcacaagtgt

SEQ ID NO: 206902 - DNA, 33 bp, Homo sapien
tttccatgtagtaatatggctcctcacaagtgt

SEQ ID NO: 206903 - DNA, 33 bp, Homo sapien
cttacctaaacatcccactttgccgatgtcata

SEQ ID NO: 206904 - DNA, 33 bp, Homo sapien
cttacctaaacatcccgctttgccgatgtcata

SEQ ID NO: 206905 - DNA, 33 bp, Homo sapien
tgttgcacaatgccaacgcagaactgagaatcc

SEQ ID NO: 206906 - DNA, 33 bp, Homo sapien
tgttgcacaatgccaatgcagaactgagaatcc

SEQ ID NO: 206907 - DNA, 33 bp, Homo sapien
actggcttggatccgaaccgacgaatgagatct

SEQ ID NO: 206908 - DNA, 33 bp, Homo sapien
actggcttggatccgacccgacgaatgagatct

SEQ ID NO: 206909 - DNA, 33 bp, Homo sapien
caaagaaagttactcacagaagtggaaggtgat

SEQ ID NO: 206910 - DNA, 33 bp, Homo sapien
caaagaaagttactcagagaagtggaaggtgat

SEQ ID NO: 206911 - DNA, 33 bp, Homo sapien
ccactgctcttagtgcagactctggaagatgcc

SEQ ID NO: 206912 - DNA, 33 bp, Homo sapien
ccactgctcttagtgcggactctggaagatgcc

SEQ ID NO: 206913 - DNA, 33 bp, Homo sapien
ctggcctaagtttatacgcaaggacaaaaactt

SEQ ID NO: 206914 - DNA, 33 bp, Homo sapien
ctggcctaagtttatatgcaaggacaaaaactt

SEQ ID NO: 206915 - DNA, 33 bp, Homo sapien
gctagctcaaccccaacggagtgtcagccacta

SEQ ID NO: 206916 - DNA, 33 bp, Homo sapien
gctagctcaaccccaatggagtgtcagccacta

SEQ ID NO: 206917 - DNA, 33 bp, Homo sapien
gaaggaagaacctgacaagacaaacaagtggct

SEQ ID NO: 206918 - DNA, 33 bp, Homo sapien
gaaggaagaacctgacgagacaaacaagtggct

SEQ ID NO: 206919 - DNA, 33 bp, Homo sapien
ggtcacacagacaacccgatgtggaaggagaca

SEQ ID NO: 206920 - DNA, 33 bp, Homo sapien
ggtcacacagacaacctgatgtggaaggagaca

SEQ ID NO: 206921 - DNA, 33 bp, Homo sapien
ccagccgttgcaggaacatgggtcaagagtctt

SEQ ID NO: 206922 - DNA, 33 bp, Homo sapien
ccagccgttgcaggaagatgggtcaagagtctt

SEQ ID NO: 206923 - DNA, 33 bp, Homo sapien
acccagctggttctcacgcttaaccctcctcta

SEQ ID NO: 206924 - DNA, 33 bp, Homo sapien
acccagctggttctcaggcttaaccctcctcta

SEQ ID NO: 206925 - DNA, 33 bp, Homo sapien
gcagaagaacatggagaactacctgcaagccct

SEQ ID NO: 206926 - DNA, 33 bp, Homo sapien
gcagaagaacatggaggactacctgcaagccct

SEQ ID NO: 206927 - DNA, 33 bp, Homo sapien; identical to SEQ ID NO: 206925

SEQ ID NO: 206928 - DNA, 33 bp, Homo sapien; identical to SEQ ID NO: 206926

SEQ ID NO: 206929 - DNA, 33 bp, Homo sapien
gttagctctctgaagacgaattacctgagaggc

SEQ ID NO: 206930 - DNA, 33 bp, Homo sapien
gttagctctctgaagaggaattacctgagaggc

SEQ ID NO: 206931 - DNA, 33 bp, Homo sapien
aggaattaacttctcacgcatccccagactctc

SEQ ID NO: 206932 - DNA, 33 bp, Homo sapien
aggaattaacttctcaggcatccccagactctc

SEQ ID NO: 206933 - DNA, 33 bp, Homo sapien
tgctagcacctcaaccaaaagagctaatgctga

SEQ ID NO: 206934 - DNA, 33 bp, Homo sapien
tgctagcacctcaaccgaaagagctaatgctga

SEQ ID NO: 206935 - DNA, 33 bp, Homo sapien
atcattttcaagaataccattatgcaacaattc

SEQ ID NO: 206936 - DNA, 33 bp, Homo sapien
atcattttcaagaatatcattatgcaacaattc

SEQ ID NO: 206937 - DNA, 33 bp, Homo sapien
gaggctcaaaaggtcacagacttcagacatctg

SEQ ID NO: 206938 - DNA, 33 bp, Homo sapien
gaggctcaaaaggtcatagacttcagacatctg

SEQ ID NO: 206939 - DNA, 33 bp, Homo sapien
aggaaatcccatagcaataaataaggaagggag

SEQ ID NO: 206940 - DNA, 33 bp, Homo sapien
aggaaatcccatagcattaaataaggaagggag

SEQ ID NO: 206941 - DNA, 33 bp, Homo sapien
tttgcattttaaaaaacttattcagatgattct

SEQ ID NO: 206942 - DNA, 33 bp, Homo sapien
tttgcattttaaaaaagttattcagatgattct

SEQ ID NO: 206943 - DNA, 33 bp, Homo sapien
ctcccactttggagacagtaagcaagttaatac

SEQ ID NO: 206944 - DNA, 33 bp, Homo sapien
ctcccactttggagacggtaagcaagttaatac

SEQ ID NO: 206945 - DNA, 33 bp, Homo sapien
aataattgcttcttaccatcaaatatccaccat

SEQ ID NO: 206946 - DNA, 33 bp, Homo sapien
aataattgcttcttacgatcaaatatccaccat

SEQ ID NO: 206947 - DNA, 33 bp, Homo sapien
taaaccacaccatatggatgcaattagcaaaat

SEQ ID NO: 206948 - DNA, 33 bp, Homo sapien
taaaccacaccatatgtatgcaattagcaaaat

SEQ ID NO: 206949 - DNA, 33 bp, Homo sapien
cttgaaactgtctttaagcgtagaaatttagtc

SEQ ID NO: 206950 - DNA, 33 bp, Homo sapien
cttgaaactgtctttaggcgtagaaatttagtc

SEQ ID NO: 206951 - DNA, 33 bp, Homo sapien
atggagatcaaggacacggaaacacagagcgag

SEQ ID NO: 206952 - DNA, 33 bp, Homo sapien
atggagatcaaggacatggaaacacagagcgag

SEQ ID NO: 206953 - DNA, 33 bp, Homo sapien
tagttcctgatttgagaattatcttgctttatt

SEQ ID NO: 206954 - DNA, 33 bp, Homo sapien
tagttcctgatttgaggattatcttgctttatt

SEQ ID NO: 206955 - DNA, 33 bp, Homo sapien
cactggtctgtaatgacgaaatagttcctgatt

SEQ ID NO: 206956 - DNA, 33 bp, Homo sapien
cactggtctgtaatgatgaaatagttcctgatt

SEQ ID NO: 206957 - DNA, 33 bp, Homo sapien
ctaccagcctttactcaaatgtgtcttttatga

SEQ ID NO: 206958 - DNA, 33 bp, Homo sapien
ctaccagcctttactcgaatgtgtcttttatga

SEQ ID NO: 206959 - DNA, 33 bp, Homo sapien
gctggtagttcaagtgcagtgttgtggctcatg

SEQ ID NO: 206960 - DNA, 33 bp, Homo sapien
gctggtagttcaagtggagtgttgtggctcatg

SEQ ID NO: 206961 - DNA, 33 bp, Homo sapien
cttacattaattaccacggcacatttatcacaa

SEQ ID NO: 206962 - DNA, 33 bp, Homo sapien
cttacattaattaccatggcacatttatcacaa

SEQ ID NO: 206963 - DNA, 33 bp, Homo sapien
gcaggaataaatcaggaaaatggagaggaccca

SEQ ID NO: 206964 - DNA, 33 bp, Homo sapien
gcaggaataaatcaggcaaatggagaggaccca

SEQ ID NO: 206965 - DNA, 33 bp, Homo sapien
atcattgataatacaaagtagacaactgtcaca

SEQ ID NO: 206966 - DNA, 33 bp, Homo sapien
atcattgataatacaaggtagacaactgtcaca

SEQ ID NO: 206967 - DNA, 33 bp, Homo sapien
ccaccgcgcctggcagaagaccattggtttaga

SEQ ID NO: 206968 - DNA, 33 bp, Homo sapien
ccaccgcgcctggcaggagaccattggtttaga

SEQ ID NO: 206969 - DNA, 33 bp, Homo sapien
gaatagcattactttacaaggtatggccatttt

SEQ ID NO: 206970 - DNA, 33 bp, Homo sapien
gaatagcattactttagaaggtatggccatttt

SEQ ID NO: 206971 - DNA, 33 bp, Homo sapien
taccattttttcaatacaaacatcgataataag

SEQ ID NO: 206972 - DNA, 33 bp, Homo sapien
taccattttttcaatataaacatcgataataag

SEQ ID NO: 206973 - DNA, 33 bp, Homo sapien
gccctgtgaaatataacttaccataaatagcaa

SEQ ID NO: 206974 - DNA, 33 bp, Homo sapien
gccctgtgaaatataagttaccataaatagcaa

SEQ ID NO: 206975 - DNA, 33 bp, Homo sapien
tgtgcagagaattaaactgtggagatgccatat

SEQ ID NO: 206976 - DNA, 33 bp, Homo sapien
tgtgcagagaattaaattgtggagatgccatat

SEQ ID NO: 206977 - DNA, 33 bp, Homo sapien
tttatgggacagaatgaaattccaaataaaatg

SEQ ID NO: 206978 - DNA, 33 bp, Homo sapien
tttatgggacagaatggaattccaaataaaatg

SEQ ID NO: 206979 - DNA, 33 bp, Homo sapien
tggcaccattttgagaatccagctcccacaaga

SEQ ID NO: 206980 - DNA, 33 bp, Homo sapien
tggcaccattttgagagtccagctcccacaaga

SEQ ID NO: 206981 - DNA, 33 bp, Homo sapien
agcaccagtgtataccagctgggaacctgacag

SEQ ID NO: 206982 - DNA, 33 bp, Homo sapien
agcaccagtgtataccggctgggaacctgacag

SEQ ID NO: 206983 - DNA, 33 bp, Homo sapien
tcaagaaatagaatgtcacattagcaatatttt

SEQ ID NO: 206984 - DNA, 33 bp, Homo sapien
tcaagaaatagaatgttacattagcaatatttt

SEQ ID NO: 206985 - DNA, 33 bp, Homo sapien
tcctttttgaatcaacagactcatggctttaat

SEQ ID NO: 206986 - DNA, 33 bp, Homo sapien
tcctttttgaatcaacggactcatggctttaat

SEQ ID NO: 206987 - DNA, 33 bp, Homo sapien
ccttgtagatcctgtaaattagtcttttgtcgg

SEQ ID NO: 206988 - DNA, 33 bp, Homo sapien
ccttgtagatcctgtatattagtcttttgtcgg

SEQ ID NO: 206989 - DNA, 33 bp, Homo sapien
tccctcaaaaatgttccaacactcttagcatct

SEQ ID NO: 206990 - DNA, 33 bp, Homo sapien
tccctcaaaaatgttctaacactcttagcatct

SEQ ID NO: 206991 - DNA, 33 bp, Homo sapien
agaccagaggacactacaaagacaggacaacaa

SEQ ID NO: 206992 - DNA, 33 bp, Homo sapien
agaccagaggacactataaagacaggacaacaa

SEQ ID NO: 206993 - DNA, 33 bp, Homo sapien
gcccatctagcatcaaaccaatgcctatggccc

SEQ ID NO: 206994 - DNA, 33 bp, Homo sapien
gcccatctagcatcaagccaatgcctatggccc

SEQ ID NO: 206995 - DNA, 33 bp, Homo sapien
atattttggatattaacccattatcagtatgat

SEQ ID NO: 206996 - DNA, 33 bp, Homo sapien
atattttggatattaagccattatcagtatgat

SEQ ID NO: 206997 - DNA, 33 bp, Homo sapien
ataacacaaagagaaactcacttatgttaaaaa

SEQ ID NO: 206998 - DNA, 33 bp, Homo sapien
ataacacaaagagaaattcacttatgttaaaaa

SEQ ID NO: 206999 - DNA, 33 bp, Homo sapien
atacatagagttcttagaaactgtacagagcac

SEQ ID NO: 207000 - DNA, 33 bp, Homo sapien
atacatagagttcttataaactgtacagagcac

SEQ ID NO: 207001 - DNA, 33 bp, Homo sapien
ttatggtaacaagtggcaccgtgagcactgaag

SEQ ID NO: 207002 - DNA, 33 bp, Homo sapien
ttatggtaacaagtggtaccgtgagcactgaag

SEQ ID NO: 207003 - DNA, 33 bp, Homo sapien
atacgatgtagatgtacaatatgtcttatcttt

SEQ ID NO: 207004 - DNA, 33 bp, Homo sapien
atacgatgtagatgtataatatgtcttatcttt

SEQ ID NO: 207005 - DNA, 33 bp, Homo sapien
acatgaattctgcagcaaaacatagaattagta

SEQ ID NO: 207006 - DNA, 33 bp, Homo sapien
acatgaattctgcagcgaaacatagaattagta

SEQ ID NO: 207007 - DNA, 33 bp, Homo sapien
tatgggggagagaataacatagatctaaactgg

SEQ ID NO: 207008 - DNA, 33 bp, Homo sapien
tatgggggagagaataccatagatctaaactgg

SEQ ID NO: 207009 - DNA, 33 bp, Homo sapien
tgtttacattgccagacagcaggttcatgtccc

SEQ ID NO: 207010 - DNA, 33 bp, Homo sapien
tgtttacattgccagatagcaggttcatgtccc

SEQ ID NO: 207011 - DNA, 33 bp, Homo sapien
atggtgaagggactcaagttgacaaaatgtctt

SEQ ID NO: 207012 - DNA, 33 bp, Homo sapien
atggtgaagggactcaggttgacaaaatgtctt

SEQ ID NO: 207013 - DNA, 33 bp, Homo sapien; identical to SEQ ID NO: 207011

SEQ ID NO: 207014 - DNA, 33 bp, Homo sapien; identical to SEQ ID NO: 207012

SEQ ID NO: 207015 - DNA, 33 bp, Homo sapien
gacagaaaactcttcaatctaaattgcaaggca

SEQ ID NO: 207016 - DNA, 33 bp, Homo sapien
gacagaaaactcttcattctaaattgcaaggca

SEQ ID NO: 207017 - DNA, 33 bp, Homo sapien
ggtgggggcagggagagtattaggaaaaacagc

SEQ ID NO: 207018 - DNA, 33 bp, Homo sapien
ggtgggggcagggagattattaggaaaaacagc

SEQ ID NO: 207019 - DNA, 33 bp, Homo sapien
actttgaatctgataactcttctattggtgttg

SEQ ID NO: 207020 - DNA, 33 bp, Homo sapien
actttgaatctgataattcttctattggtgttg

SEQ ID NO: 207021 - DNA, 33 bp, Homo sapien
gtatccactttgccagaattaaaagcagctatc

SEQ ID NO: 207022 - DNA, 33 bp, Homo sapien
gtatccactttgccaggattaaaagcagctatc

SEQ ID NO: 207023 - DNA, 33 bp, Homo sapien
ggaaaaggatgagagactagtgagacaattata

SEQ ID NO: 207024 - DNA, 33 bp, Homo sapien
ggaaaaggatgagagattagtgagacaattata

SEQ ID NO: 207025 - DNA, 33 bp, Homo sapien
ttagaacaagcaaagacaattgacagtccagaa

SEQ ID NO: 207026 - DNA, 33 bp, Homo sapien
ttagaacaagcaaagataattgacagtccagaa

SEQ ID NO: 207027 - DNA, 33 bp, Homo sapien
ggcaagtctatggagaataaaagtaaactggag

SEQ ID NO: 207028 - DNA, 33 bp, Homo sapien
ggcaagtctatggagagtaaaagtaaactggag

SEQ ID NO: 207029 - DNA, 33 bp, Homo sapien
ccaaacttgcaactcacatctgaaattggaagg

SEQ ID NO: 207030 - DNA, 33 bp, Homo sapien
ccaaacttgcaactcatatctgaaattggaagg

SEQ ID NO: 207031 - DNA, 33 bp, Homo sapien
tatgcaatccatgtggaactgtctttatgagaa

SEQ ID NO: 207032 - DNA, 33 bp, Homo sapien
tatgcaatccatgtgggactgtctttatgagaa

SEQ ID NO: 207033 - DNA, 33 bp, Homo sapien
tggtgttttctcatcaaagatctgttcaaatta

SEQ ID NO: 207034 - DNA, 33 bp, Homo sapien
tggtgttttctcatcacagatctgttcaaatta

SEQ ID NO: 207035 - DNA, 33 bp, Homo sapien
acacagttgctgagtcggaagagggggaaagct

SEQ ID NO: 207036 - DNA, 33 bp, Homo sapien
acacagttgctgagtctgaagagggggaaagct

SEQ ID NO: 207037 - DNA, 33 bp, Homo sapien
ttagaaaccagccacaacatttgggcactccac

SEQ ID NO: 207038 - DNA, 33 bp, Homo sapien
ttagaaaccagccacagcatttgggcactccac

SEQ ID NO: 207039 - DNA, 33 bp, Homo sapien
agtttgagaacaaatcactctatgggggctttt

SEQ ID NO: 207040 - DNA, 33 bp, Homo sapien
agtttgagaacaaatctctctatgggggctttt

SEQ ID NO: 207041 - DNA, 33 bp, Homo sapien
ttcctcttcctactccccctactctctgaatgc

SEQ ID NO: 207042 - DNA, 33 bp, Homo sapien
ttcctcttcctactcctcctactctctgaatgc

SEQ ID NO: 207043 - DNA, 33 bp, Homo sapien
ccatgccaaccggtgcgctgccaacaccactgc

SEQ ID NO: 207044 - DNA, 33 bp, Homo sapien
ccatgccaaccggtgctctgccaacaccactgc

SEQ ID NO: 207045 - DNA, 33 bp, Homo sapien
atatattttatcaaccaaattcttcttcttttt

SEQ ID NO: 207046 - DNA, 33 bp, Homo sapien
atatattttatcaaccgaattcttcttcttttt

SEQ ID NO: 207047 - DNA, 33 bp, Homo sapien
tatgtataaccttgaactgtgaaggccaggatc

SEQ ID NO: 207048 - DNA, 33 bp, Homo sapien
tatgtataaccttgaagtgtgaaggccaggatc

SEQ ID NO: 207049 - DNA, 33 bp, Homo sapien
ctcttctagttttagcactggcattactacacc

SEQ ID NO: 207050 - DNA, 33 bp, Homo sapien
ctcttctagttttagcgctggcattactacacc

SEQ ID NO: 207051 - DNA, 33 bp, Homo sapien
attcctcacgaacttacaaaaaacaattctaaa

SEQ ID NO: 207052 - DNA, 33 bp, Homo sapien
attcctcacgaacttagaaaaaacaattctaaa

SEQ ID NO: 207053 - DNA, 33 bp, Homo sapien
aacctctcaattactcgaaactgtccatgataa

SEQ ID NO: 207054 - DNA, 33 bp, Homo sapien
aacctctcaattactctaaactgtccatgataa

SEQ ID NO: 207055 - DNA, 33 bp, Homo sapien
ccattcttcctagaacacttagatcaacctcag

SEQ ID NO: 207056 - DNA, 33 bp, Homo sapien
ccattcttcctagaacgcttagatcaacctcag

SEQ ID NO: 207057 - DNA, 33 bp, Homo sapien
gttaaggggtgttggacgacaattctttctggc

SEQ ID NO: 207058 - DNA, 33 bp, Homo sapien
gttaaggggtgttggatgacaattctttctggc

SEQ ID NO: 207059 - DNA, 33 bp, Homo sapien
ctttctagtggcctaaaaattatttcctaataa

SEQ ID NO: 207060 - DNA, 33 bp, Homo sapien
ctttctagtggcctaacaattatttcctaataa

SEQ ID NO: 207061 - DNA, 33 bp, Homo sapien
caccttagccctttaacatccaaatgcaggcca

SEQ ID NO: 207062 - DNA, 33 bp, Homo sapien
caccttagccctttaatatccaaatgcaggcca

SEQ ID NO: 207063 - DNA, 33 bp, Homo sapien
atggctctgatgaatgaaggaacaccagggtct

SEQ ID NO: 207064 - DNA, 33 bp, Homo sapien
atggctctgatgaatggaggaacaccagggtct

SEQ ID NO: 207065 - DNA, 33 bp, Homo sapien
ataattgttgtgataaaattagtagcacctaac

SEQ ID NO: 207066 - DNA, 33 bp, Homo sapien
ataattgttgtgataagattagtagcacctaac

SEQ ID NO: 207067 - DNA, 33 bp, Homo sapien
cacaggccagccatgactcagagtaagagggga

SEQ ID NO: 207068 - DNA, 33 bp, Homo sapien
cacaggccagccatgattcagagtaagagggga

SEQ ID NO: 207069 - DNA, 33 bp, Homo sapien
caacacagagagaacacgcctccacaaaaaaaa

SEQ ID NO: 207070 - DNA, 33 bp, Homo sapien
caacacagagagaacatgcctccacaaaaaaaa

SEQ ID NO: 207071 - DNA, 33 bp, Homo sapien
tatctttttgtagagacggaaatttccccattt

SEQ ID NO: 207072 - DNA, 33 bp, Homo sapien
tatctttttgtagagatggaaatttccccattt

SEQ ID NO: 207073 - DNA, 33 bp, Homo sapien
agagctttccaagcacagggaacaccaggtgca

SEQ ID NO: 207074 - DNA, 33 bp, Homo sapien
agagctttccaagcacggggaacaccaggtgca

SEQ ID NO: 207075 - DNA, 33 bp, Homo sapien
gtgctatttttgaacaaagaagagtcacaggct

SEQ ID NO: 207076 - DNA, 33 bp, Homo sapien
gtgctatttttgaacagagaagagtcacaggct

SEQ ID NO: 207077 - DNA, 33 bp, Homo sapien
gcatttttctaacactaactgtgcacaaattta

SEQ ID NO: 207078 - DNA, 33 bp, Homo sapien
gcatttttctaacactgactgtgcacaaattta

SEQ ID NO: 207079 - DNA, 33 bp, Homo sapien
actatagagacagaaaaagcagtatttgcctgg

SEQ ID NO: 207080 - DNA, 33 bp, Homo sapien
actatagagacagaaagagcagtatttgcctgg

SEQ ID NO: 207081 - DNA, 33 bp, Homo sapien
atgtagaccgattttacagaaaagctgaagaac

SEQ ID NO: 207082 - DNA, 33 bp, Homo sapien
atgtagaccgattttatagaaaagctgaagaac

SEQ ID NO: 207083 - DNA, 33 bp, Homo sapien
ggattctggctaaatcaacctaacagaattctt

SEQ ID NO: 207084 - DNA, 33 bp, Homo sapien
ggattctggctaaatcgacctaacagaattctt

SEQ ID NO: 207085 - DNA, 33 bp, Homo sapien
acctgtttcaacaggaaaggggtatgttctgtt

SEQ ID NO: 207086 - DNA, 33 bp, Homo sapien
acctgtttcaacaggataggggtatgttctgtt

SEQ ID NO: 207087 - DNA, 33 bp, Homo sapien
attatttgaatatgtacgtgtgaaaaaatttag

SEQ ID NO: 207088 - DNA, 33 bp, Homo sapien
attatttgaatatgtatgtgtgaaaaaatttag

SEQ ID NO: 207089 - DNA, 33 bp, Homo sapien
gttgctgtaaaactaaccaaggctctaaattct

SEQ ID NO: 207090 - DNA, 33 bp, Homo sapien
gttgctgtaaaactaatcaaggctctaaattct

SEQ ID NO: 207091 - DNA, 33 bp, Homo sapien
tcaaagtccagaattacagtggctttgcttata

SEQ ID NO: 207092 - DNA, 33 bp, Homo sapien
tcaaagtccagaattatagtggctttgcttata

SEQ ID NO: 207093 - DNA, 33 bp, Homo sapien
aaacaaggaaattaacactattatacacaggtc

SEQ ID NO: 207094 - DNA, 33 bp, Homo sapien
aaacaaggaaattaacgctattatacacaggtc

SEQ ID NO: 207095 - DNA, 33 bp, Homo sapien
tatcaacgctagtagccaatctgtttcccctct

SEQ ID NO: 207096 - DNA, 33 bp, Homo sapien
tatcaacgctagtagcgaatctgtttcccctct

SEQ ID NO: 207097 - DNA, 33 bp, Homo sapien
aggtcagaagtccaaaatgagacccagttctct

SEQ ID NO: 207098 - DNA, 33 bp, Homo sapien
aggtcagaagtccaaactgagacccagttctct

SEQ ID NO: 207099 - DNA, 33 bp, Homo sapien
ttctttgctaagtgacagcattcttcaagactc

SEQ ID NO: 207100 - DNA, 33 bp, Homo sapien
ttctttgctaagtgacggcattcttcaagactc

SEQ ID NO: 207101 - DNA, 33 bp, Homo sapien
aaacaaaacaaaactaccataggaggccaggct

SEQ ID NO: 207102 - DNA, 33 bp, Homo sapien
aaacaaaacaaaactatcataggaggccaggct

SEQ ID NO: 207103 - DNA, 33 bp, Homo sapien
ttttcatgtatttctcaatttccttgtttgtgt

SEQ ID NO: 207104 - DNA, 33 bp, Homo sapien
ttttcatgtatttctcgatttccttgtttgtgt

SEQ ID NO: 207105 - DNA, 33 bp, Homo sapien
ttgggagtttgacatacaagactggaaataaaa

SEQ ID NO: 207106 - DNA, 33 bp, Homo sapien
ttgggagtttgacatagaagactggaaataaaa

SEQ ID NO: 207107 - DNA, 33 bp, Homo sapien
ttggagtaatactatacaaagcttgccaaagtg

SEQ ID NO: 207108 - DNA, 33 bp, Homo sapien
ttggagtaatactatataaagcttgccaaagtg

SEQ ID NO: 207109 - DNA, 33 bp, Homo sapien
gcaaagccattaagtcaatgttaagctcactga

SEQ ID NO: 207110 - DNA, 33 bp, Homo sapien
gcaaagccattaagtcgatgttaagctcactga

SEQ ID NO: 207111 - DNA, 33 bp, Homo sapien
ttcagattcgagcgacaaagcctttcacattac

SEQ ID NO: 207112 - DNA, 33 bp, Homo sapien
ttcagattcgagcgaccaagcctttcacattac

SEQ ID NO: 207113 - DNA, 33 bp, Homo sapien
gccatgaggagatctgaagaaagagtgtttcag

SEQ ID NO: 207114 - DNA, 33 bp, Homo sapien
gccatgaggagatctggagaaagagtgtttcag

SEQ ID NO: 207115 - DNA, 33 bp, Homo sapien
agtgacataaagagcccgccatgaggagatctg

SEQ ID NO: 207116 - DNA, 33 bp, Homo sapien
agtgacataaagagccggccatgaggagatctg

SEQ ID NO: 207117 - DNA, 33 bp, Homo sapien
tggggatgcatgtgaaatggtattggatctcag

SEQ ID NO: 207118 - DNA, 33 bp, Homo sapien
tggggatgcatgtgaagtggtattggatctcag

SEQ ID NO: 207119 - DNA, 33 bp, Homo sapien
aaagagctcctgagtccgaaataactgttttgt

SEQ ID NO: 207120 - DNA, 33 bp, Homo sapien
aaagagctcctgagtctgaaataactgttttgt

SEQ ID NO: 207121 - DNA, 33 bp, Homo sapien
tctatactgcacttctcaaatgaggatatctca

SEQ ID NO: 207122 - DNA, 33 bp, Homo sapien
tctatactgcacttcttaaatgaggatatctca

SEQ ID NO: 207123 - DNA, 33 bp, Homo sapien
taaacatgtcaaaaggcatgcaactgaattgtt

SEQ ID NO: 207124 - DNA, 33 bp, Homo sapien
taaacatgtcaaaaggtatgcaactgaattgtt

SEQ ID NO: 207125 - DNA, 33 bp, Homo sapien
aacttcacattaaaaccacatgagataccaatt

SEQ ID NO: 207126 - DNA, 33 bp, Homo sapien
aacttcacattaaaactacatgagataccaatt

SEQ ID NO: 207127 - DNA, 33 bp, Homo sapien
cctaagctctgtcaaaaattttaaaactcactg

SEQ ID NO: 207128 - DNA, 33 bp, Homo sapien
cctaagctctgtcaaagattttaaaactcactg

SEQ ID NO: 207129 - DNA, 33 bp, Homo sapien
tcacagcaacatggagaatatcatgctaattga

SEQ ID NO: 207130 - DNA, 33 bp, Homo sapien
tcacagcaacatggaggatatcatgctaattga

SEQ ID NO: 207131 - DNA, 33 bp, Homo sapien
aatgcacatagctatcaagtgtgctttagcttg

SEQ ID NO: 207132 - DNA, 33 bp, Homo sapien
aatgcacatagctatcgagtgtgctttagcttg

SEQ ID NO: 207133 - DNA, 33 bp, Homo sapien
agttatcctgtaagagcaaggaacagagaaaat

SEQ ID NO: 207134 - DNA, 33 bp, Homo sapien
agttatcctgtaagaggaaggaacagagaaaat

SEQ ID NO: 207135 - DNA, 33 bp, Homo sapien
tagtatctaggttcccagaagcaattaacggca

SEQ ID NO: 207136 - DNA, 33 bp, Homo sapien
tagtatctaggttcccggaagcaattaacggca

SEQ ID NO: 207137 - DNA, 33 bp, Homo sapien
tgagtagattttgcgccaggtataatctcaccc

SEQ ID NO: 207138 - DNA, 33 bp, Homo sapien
tgagtagattttgcgctaggtataatctcaccc

SEQ ID NO: 207139 - DNA, 33 bp, Homo sapien
caggtccagagaggcactgaaataagactgcag

SEQ ID NO: 207140 - DNA, 33 bp, Homo sapien
caggtccagagaggcattgaaataagactgcag

SEQ ID NO: 207141 - DNA, 33 bp, Homo sapien
caggggtctgaaactacggcactgggtccaaat

SEQ ID NO: 207142 - DNA, 33 bp, Homo sapien
caggggtctgaaactatggcactgggtccaaat

SEQ ID NO: 207143 - DNA, 33 bp, Homo sapien
aacttaatgctccttacgtctatcccgttcctt

SEQ ID NO: 207144 - DNA, 33 bp, Homo sapien
aacttaatgctccttatgtctatcccgttcctt

SEQ ID NO: 207145 - DNA, 33 bp, Homo sapien
taaaaaataaacattagctaagcatggtgacgc

SEQ ID NO: 207146 - DNA, 33 bp, Homo sapien
taaaaaataaacattatctaagcatggtgacgc

SEQ ID NO: 207147 - DNA, 33 bp, Homo sapien
ttcattattgtagcacccagggctttacacaat

SEQ ID NO: 207148 - DNA, 33 bp, Homo sapien
ttcattattgtagcactcagggctttacacaat

SEQ ID NO: 207149 - DNA, 33 bp, Homo sapien
agggtgtgtcaacagacagaaagggtaaataac

SEQ ID NO: 207150 - DNA, 33 bp, Homo sapien
agggtgtgtcaacagatagaaagggtaaataac

SEQ ID NO: 207151 - DNA, 33 bp, Homo sapien
atcatgttactactgcacgtaacctaccagctc

SEQ ID NO: 207152 - DNA, 33 bp, Homo sapien
atcatgttactactgcgcgtaacctaccagctc

SEQ ID NO: 207153 - DNA, 33 bp, Homo sapien
tttaaaatccaaattcaatcatgttactactgc

SEQ ID NO: 207154 - DNA, 33 bp, Homo sapien
tttaaaatccaaattcgatcatgttactactgc

SEQ ID NO: 207155 - DNA, 33 bp, Homo sapien
ttcacttgtccccaaaactgtacaaaccataca

SEQ ID NO: 207156 - DNA, 33 bp, Homo sapien
ttcacttgtccccaaagctgtacaaaccataca

SEQ ID NO: 207157 - DNA, 33 bp, Homo sapien
ccactcaattgatttccagacctgagccagttt

SEQ ID NO: 207158 - DNA, 33 bp, Homo sapien
ccactcaattgatttctagacctgagccagttt

SEQ ID NO: 207159 - DNA, 33 bp, Homo sapien
ggtgttttacattttacatggcaaggtaaacca

SEQ ID NO: 207160 - DNA, 33 bp, Homo sapien
ggtgttttacattttatatggcaaggtaaacca

SEQ ID NO: 207161 - DNA, 33 bp, Homo sapien
caaaggagaacggtgcggaaagatcaaaagaat

SEQ ID NO: 207162 - DNA, 33 bp, Homo sapien
caaaggagaacggtgctgaaagatcaaaagaat

SEQ ID NO: 207163 - DNA, 33 bp, Homo sapien
ctgctgtgtcaggttaaactggctttgcttgta

SEQ ID NO: 207164 - DNA, 33 bp, Homo sapien
ctgctgtgtcaggttacactggctttgcttgta

SEQ ID NO: 207165 - DNA, 33 bp, Homo sapien
gagtcttaactcctaaagttggaagtaatgagc

SEQ ID NO: 207166 - DNA, 33 bp, Homo sapien
gagtcttaactcctaaggttggaagtaatgagc

SEQ ID NO: 207167 - DNA, 33 bp, Homo sapien
atgcttcccctgccaccaggagtctgagcaaat

SEQ ID NO: 207168 - DNA, 33 bp, Homo sapien
atgcttcccctgccacgaggagtctgagcaaat

SEQ ID NO: 207169 - DNA, 33 bp, Homo sapien
cagaaagaccaaaggacgtaaaggcactgtagt

SEQ ID NO: 207170 - DNA, 33 bp, Homo sapien
cagaaagaccaaaggatgtaaaggcactgtagt

SEQ ID NO: 207171 - DNA, 33 bp, Homo sapien
ccagctgaattagctaaccttgctgcaaaaatg

SEQ ID NO: 207172 - DNA, 33 bp, Homo sapien
ccagctgaattagctagccttgctgcaaaaatg

SEQ ID NO: 207173 - DNA, 33 bp, Homo sapien
tataactggattacaccgtatcaccaacaaccc

SEQ ID NO: 207174 - DNA, 33 bp, Homo sapien
tataactggattacactgtatcaccaacaaccc

SEQ ID NO: 207175 - DNA, 33 bp, Homo sapien
aggaaacggagctcataaaagagtgtaagaagc

SEQ ID NO: 207176 - DNA, 33 bp, Homo sapien
aggaaacggagctcatcaaagagtgtaagaagc

SEQ ID NO: 207177 - DNA, 33 bp, Homo sapien
taaagagacatgagaactcaatgtaacgtggtg

SEQ ID NO: 207178 - DNA, 33 bp, Homo sapien
taaagagacatgagaattcaatgtaacgtggtg

SEQ ID NO: 207179 - DNA, 33 bp, Homo sapien
gtcattatgctaagaaccagtaagttttcaaat

SEQ ID NO: 207180 - DNA, 33 bp, Homo sapien
gtcattatgctaagaagcagtaagttttcaaat

SEQ ID NO: 207181 - DNA, 33 bp, Homo sapien
tagaagaataaccacaaagtggaaatgagaact

SEQ ID NO: 207182 - DNA, 33 bp, Homo sapien
tagaagaataaccacagagtggaaatgagaact

SEQ ID NO: 207183 - DNA, 33 bp, Homo sapien
ggcatcatgattctgactcaatgtcaattctct

SEQ ID NO: 207184 - DNA, 33 bp, Homo sapien
ggcatcatgattctgattcaatgtcaattctct

SEQ ID NO: 207185 - DNA, 33 bp, Homo sapien
atgatactgttaccagcagaagagattccagtt

SEQ ID NO: 207186 - DNA, 33 bp, Homo sapien
atgatactgttaccagtagaagagattccagtt

SEQ ID NO: 207187 - DNA, 33 bp, Homo sapien
cagaatatgagaatgtcaagtaacaattcacac

SEQ ID NO: 207188 - DNA, 33 bp, Homo sapien
cagaatatgagaatgtgaagtaacaattcacac

SEQ ID NO: 207189 - DNA, 33 bp, Homo sapien
ctgtgagttaacaaacactgagttattgtggaa

SEQ ID NO: 207190 - DNA, 33 bp, Homo sapien
ctgtgagttaacaaacgctgagttattgtggaa

SEQ ID NO: 207191 - DNA, 33 bp, Homo sapien; identical to SEQ ID NO: 207189

SEQ ID NO: 207192 - DNA, 33 bp, Homo sapien; identical to SEQ ID NO: 207190

SEQ ID NO: 207193 - DNA, 33 bp, Homo sapien
aactcacagtggaaagaaaccctatgtcagcaa

SEQ ID NO: 207194 - DNA, 33 bp, Homo sapien
aactcacagtggaaagcaaccctatgtcagcaa

SEQ ID NO: 207195 - DNA, 33 bp, Homo sapien; identical to SEQ ID NO: 207193

SEQ ID NO: 207196 - DNA, 33 bp, Homo sapien; identical to SEQ ID NO: 207194

SEQ ID NO: 207197 - DNA, 33 bp, Homo sapien
ttagcagcattttatcactctgttttcttgtga

SEQ ID NO: 207198 - DNA, 33 bp, Homo sapien
ttagcagcattttatcgctctgttttcttgtga

SEQ ID NO: 207199 - DNA, 33 bp, Homo sapien; identical to SEQ ID NO: 207197

SEQ ID NO: 207200 - DNA, 33 bp, Homo sapien; identical to SEQ ID NO: 207198

SEQ ID NO: 207201 - DNA, 33 bp, Homo sapien
cgcttgctcaaaatagccactaatagctctgct

SEQ ID NO: 207202 - DNA, 33 bp, Homo sapien
cgcttgctcaaaatagtcactaatagctctgct

SEQ ID NO: 207203 - DNA, 33 bp, Homo sapien
tgtgccgaatttcaaacggaatgcttccagctc

SEQ ID NO: 207204 - DNA, 33 bp, Homo sapien
tgtgccgaatttcaaatggaatgcttccagctc

SEQ ID NO: 207205 - DNA, 33 bp, Homo sapien
gcagaggacatcataacgatttcatagtgtcta

SEQ ID NO: 207206 - DNA, 33 bp, Homo sapien
gcagaggacatcataaggatttcatagtgtcta

SEQ ID NO: 207207 - DNA, 33 bp, Homo sapien; identical to SEQ ID NO: 207205

SEQ ID NO: 207208 - DNA, 33 bp, Homo sapien; identical to SEQ ID NO: 207206

SEQ ID NO: 207209 - DNA, 33 bp, Homo sapien
aacctccatcttcagaatatctactttttcaaa

SEQ ID NO: 207210 - DNA, 33 bp, Homo sapien
aacctccatcttcagagtatctactttttcaaa

SEQ ID NO: 207211 - DNA, 33 bp, Homo sapien
aagttgcctaatgaaacggcaagagtagcgatt

SEQ ID NO: 207212 - DNA, 33 bp, Homo sapien
aagttgcctaatgaaatggcaagagtagcgatt

SEQ ID NO: 207213 - DNA, 33 bp, Homo sapien
acgaattcatctaaacaaacggtgaacaagtgc

SEQ ID NO: 207214 - DNA, 33 bp, Homo sapien
acgaattcatctaaacgaacggtgaacaagtgc

SEQ ID NO: 207215 - DNA, 33 bp, Homo sapien
tttttccatttacccaccaattcagcatgctgc

SEQ ID NO: 207216 - DNA, 33 bp, Homo sapien
tttttccatttacccagcaattcagcatgctgc

SEQ ID NO: 207217 - DNA, 33 bp, Homo sapien
gccttgtgatgattcaatatgctatgtttttcc

SEQ ID NO: 207218 - DNA, 33 bp, Homo sapien
gccttgtgatgattcagtatgctatgtttttcc

SEQ ID NO: 207219 - DNA, 33 bp, Homo sapien
atgagatatagggagacctgctttaaaacccag

SEQ ID NO: 207220 - DNA, 33 bp, Homo sapien
atgagatatagggagagctgctttaaaacccag

SEQ ID NO: 207221 - DNA, 33 bp, Homo sapien
gtaattcattcaggaaaaactctcaggagatag

SEQ ID NO: 207222 - DNA, 33 bp, Homo sapien
gtaattcattcaggaagaactctcaggagatag

SEQ ID NO: 207223 - DNA, 33 bp, Homo sapien
gcaagtcccttcccaaaaagcgcaagggacagt

SEQ ID NO: 207224 - DNA, 33 bp, Homo sapien
gcaagtcccttcccaacaagcgcaagggacagt

SEQ ID NO: 207225 - DNA, 33 bp, Homo sapien
ggaactatgttgaaaaattttaagaaaggattt

SEQ ID NO: 207226 - DNA, 33 bp, Homo sapien
ggaactatgttgaaaatttttaagaaaggattt

SEQ ID NO: 207227 - DNA, 33 bp, Homo sapien
aatatcccaaaattagacacgtgtggtggacgg

SEQ ID NO: 207228 - DNA, 33 bp, Homo sapien
aatatcccaaaattagccacgtgtggtggacgg

SEQ ID NO: 207229 - DNA, 33 bp, Homo sapien; identical to SEQ ID NO: 207227

SEQ ID NO: 207230 - DNA, 33 bp, Homo sapien; identical to SEQ ID NO: 207228

SEQ ID NO: 207231 - DNA, 33 bp, Homo sapien
tactgatttgtacacacagattttgtatcctga

SEQ ID NO: 207232 - DNA, 33 bp, Homo sapien
tactgatttgtacacatagattttgtatcctga

SEQ ID NO: 207233 - DNA, 33 bp, Homo sapien
aataagatttgaaataactccaacacaaagaaa

SEQ ID NO: 207234 - DNA, 33 bp, Homo sapien
aataagatttgaaatatctccaacacaaagaaa

SEQ ID NO: 207235 - DNA, 33 bp, Homo sapien
tccatagattaaaagagcccaagctgggcctat

SEQ ID NO: 207236 - DNA, 33 bp, Homo sapien
tccatagattaaaagatcccaagctgggcctat

SEQ ID NO: 207237 - DNA, 33 bp, Homo sapien
cctgctttgagatgcaaaagtgtttggtttttt

SEQ ID NO: 207238 - DNA, 33 bp, Homo sapien
cctgctttgagatgcagaagtgtttggtttttt

SEQ ID NO: 207239 - DNA, 33 bp, Homo sapien
atagtgcaggtaataacagctagagagagcatg

SEQ ID NO: 207240 - DNA, 33 bp, Homo sapien
atagtgcaggtaataatagctagagagagcatg

SEQ ID NO: 207241 - DNA, 33 bp, Homo sapien
agataagaacaacagaatcctagagagaggagg

SEQ ID NO: 207242 - DNA, 33 bp, Homo sapien
agataagaacaacagagtcctagagagaggagg

SEQ ID NO: 207243 - DNA, 33 bp, Homo sapien
gggttcaagatggctgaacgatatggagggtgg

SEQ ID NO: 207244 - DNA, 33 bp, Homo sapien
gggttcaagatggctgcacgatatggagggtgg

SEQ ID NO: 207245 - DNA, 33 bp, Homo sapien
ttatctgagccgatccagaaggacagtcccaat

SEQ ID NO: 207246 - DNA, 33 bp, Homo sapien
ttatctgagccgatccggaaggacagtcccaat

SEQ ID NO: 207247 - DNA, 33 bp, Homo sapien
tattacgttcaatatcgcggtaggtgtacatcc

SEQ ID NO: 207248 - DNA, 33 bp, Homo sapien
tattacgttcaatatctcggtaggtgtacatcc

SEQ ID NO: 207249 - DNA, 33 bp, Homo sapien
ctatttcatcattcgcaatagctgtaactatct

SEQ ID NO: 207250 - DNA, 33 bp, Homo sapien
ctatttcatcattcgctatagctgtaactatct

SEQ ID NO: 207251 - DNA, 33 bp, Homo sapien
tttttaaccccacgtaacgaaatcactggaaac

SEQ ID NO: 207252 - DNA, 33 bp, Homo sapien
tttttaaccccacgtatcgaaatcactggaaac

SEQ ID NO: 207253 - DNA, 33 bp, Homo sapien
tgtatttttgtaggtacgaaacaacccttctct

SEQ ID NO: 207254 - DNA, 33 bp, Homo sapien
tgtatttttgtaggtatgaaacaacccttctct

SEQ ID NO: 207255 - DNA, 33 bp, Homo sapien
gtgatgttttgagaaacgaaatcaatggaaaca

SEQ ID NO: 207256 - DNA, 33 bp, Homo sapien
gtgatgttttgagaaaggaaatcaatggaaaca

SEQ ID NO: 207257 - DNA, 33 bp, Homo sapien
cccagactattcaataaccatttttaatcacct

SEQ ID NO: 207258 - DNA, 33 bp, Homo sapien
cccagactattcaatacccatttttaatcacct

SEQ ID NO: 207259 - DNA, 33 bp, Homo sapien
gaagaatcagatcagaccctgagagataaaagg

SEQ ID NO: 207260 - DNA, 33 bp, Homo sapien
gaagaatcagatcagatcctgagagataaaagg

SEQ ID NO: 207261 - DNA, 33 bp, Homo sapien
gaaaggatgttgttaaaattggagcacttttat

SEQ ID NO: 207262 - DNA, 33 bp, Homo sapien
gaaaggatgttgttaagattggagcacttttat

SEQ ID NO: 207263 - DNA, 33 bp, Homo sapien
acattttataccactcaaagcctaatgggccac

SEQ ID NO: 207264 - DNA, 33 bp, Homo sapien
acattttataccactcgaagcctaatgggccac

SEQ ID NO: 207265 - DNA, 33 bp, Homo sapien
cagcattatctgcttacgacgatatagtgatct

SEQ ID NO: 207266 - DNA, 33 bp, Homo sapien
cagcattatctgcttatgacgatatagtgatct

SEQ ID NO: 207267 - DNA, 33 bp, Homo sapien
ctggcaacttttaaaacgtactgttgacaatgt

SEQ ID NO: 207268 - DNA, 33 bp, Homo sapien
ctggcaacttttaaaatgtactgttgacaatgt

SEQ ID NO: 207269 - DNA, 33 bp, Homo sapien
gcaataaaacagacaccgagaagtaagatgaaa

SEQ ID NO: 207270 - DNA, 33 bp, Homo sapien
gcaataaaacagacactgagaagtaagatgaaa

SEQ ID NO: 207271 - DNA, 33 bp, Homo sapien
ttctttcttgaagccaatatcgtttagtaaaaa

SEQ ID NO: 207272 - DNA, 33 bp, Homo sapien
ttctttcttgaagccagtatcgtttagtaaaaa

SEQ ID NO: 207273 - DNA, 33 bp, Homo sapien
gtgtgtgtgtagataacgtggtttttgtatggt

SEQ ID NO: 207274 - DNA, 33 bp, Homo sapien
gtgtgtgtgtagataatgtggtttttgtatggt

SEQ ID NO: 207275 - DNA, 33 bp, Homo sapien
agctatttatgacgaacgcacagccaatatatc

SEQ ID NO: 207276 - DNA, 33 bp, Homo sapien
agctatttatgacgaatgcacagccaatatatc

SEQ ID NO: 207277 - DNA, 33 bp, Homo sapien
gttttctcagttcccaaggtgccatattttgag

SEQ ID NO: 207278 - DNA, 33 bp, Homo sapien
gttttctcagttcccagggtgccatattttgag

SEQ ID NO: 207279 - DNA, 33 bp, Homo sapien
ttgctgcagaaatcataacatgacccgggtatt

SEQ ID NO: 207280 - DNA, 33 bp, Homo sapien
ttgctgcagaaatcatcacatgacccgggtatt

SEQ ID NO: 207281 - DNA, 33 bp, Homo sapien
ggattgtgccaagagacattggaccacatgtca

SEQ ID NO: 207282 - DNA, 33 bp, Homo sapien
ggattgtgccaagagatattggaccacatgtca

SEQ ID NO: 207283 - DNA, 33 bp, Homo sapien
agttaataataatacaccaatgctagttcacta

SEQ ID NO: 207284 - DNA, 33 bp, Homo sapien
agttaataataatacatcaatgctagttcacta

SEQ ID NO: 207285 - DNA, 33 bp, Homo sapien
gttctattatccctcgacaccaatatctcaaca

SEQ ID NO: 207286 - DNA, 33 bp, Homo sapien
gttctattatccctcggcaccaatatctcaaca

SEQ ID NO: 207287 - DNA, 33 bp, Homo sapien
agtttctcacttctcactattttttcacaatgt

SEQ ID NO: 207288 - DNA, 33 bp, Homo sapien
agtttctcacttctcattattttttcacaatgt

SEQ ID NO: 207289 - DNA, 33 bp, Homo sapien
tcaggctcactgatataacaaactgagcctatg

SEQ ID NO: 207290 - DNA, 33 bp, Homo sapien
tcaggctcactgatatgacaaactgagcctatg

SEQ ID NO: 207291 - DNA, 33 bp, Homo sapien
ttattctcatcgttcaaggaaacaggtgctgag

SEQ ID NO: 207292 - DNA, 33 bp, Homo sapien
ttattctcatcgttcatggaaacaggtgctgag

SEQ ID NO: 207293 - DNA, 33 bp, Homo sapien
atgtggtactgtattgaatctggcaacgctcca

SEQ ID NO: 207294 - DNA, 33 bp, Homo sapien
atgtggtactgtattgtatctggcaacgctcca

SEQ ID NO: 207295 - DNA, 33 bp, Homo sapien
ttgtttcgttttgttgaaccaaatgtctctagt

SEQ ID NO: 207296 - DNA, 33 bp, Homo sapien
ttgtttcgttttgttggaccaaatgtctctagt

SEQ ID NO: 207297 - DNA, 33 bp, Homo sapien
agcatccatcaatagaccaagaaaatggggtat

SEQ ID NO: 207298 - DNA, 33 bp, Homo sapien
agcatccatcaatagatcaagaaaatggggtat

SEQ ID NO: 207299 - DNA, 33 bp, Homo sapien
gtaccatttctgccacagtattttctctctgac

SEQ ID NO: 207300 - DNA, 33 bp, Homo sapien
gtaccatttctgccacggtattttctctctgac

SEQ ID NO: 207301 - DNA, 33 bp, Homo sapien
aagccagaaaaatgaccgagccaatctgactcc

SEQ ID NO: 207302 - DNA, 33 bp, Homo sapien
aagccagaaaaatgactgagccaatctgactcc

SEQ ID NO: 207303 - DNA, 33 bp, Homo sapien
ccctacaaaacatctgcaagcatgaaggcagaa

SEQ ID NO: 207304 - DNA, 33 bp, Homo sapien
ccctacaaaacatctgtaagcatgaaggcagaa

SEQ ID NO: 207305 - DNA, 33 bp, Homo sapien
taagctccagtaagccacctttgaacctttaag

SEQ ID NO: 207306 - DNA, 33 bp, Homo sapien
taagctccagtaagccgcctttgaacctttaag

SEQ ID NO: 207307 - DNA, 33 bp, Homo sapien
agtcattcctttttagacaagagagggatgttt

SEQ ID NO: 207308 - DNA, 33 bp, Homo sapien
agtcattcctttttagccaagagagggatgttt

SEQ ID NO: 207309 - DNA, 33 bp, Homo sapien
gggatagtagaggagacagagaaacgtaaattc

SEQ ID NO: 207310 - DNA, 33 bp, Homo sapien
gggatagtagaggagatagagaaacgtaaattc

SEQ ID NO: 207311 - DNA, 33 bp, Homo sapien
tttaaagtgctttccaataagcttcatgtacgt

SEQ ID NO: 207312 - DNA, 33 bp, Homo sapien
tttaaagtgctttccagtaagcttcatgtacgt

SEQ ID NO: 207313 - DNA, 33 bp, Homo sapien
cttgctaaaactttccaaattgtggtctcctac

SEQ ID NO: 207314 - DNA, 33 bp, Homo sapien
cttgctaaaactttcccaattgtggtctcctac

SEQ ID NO: 207315 - DNA, 33 bp, Homo sapien
ttagaagaagcaaggtaaacaaggaatattgct

SEQ ID NO: 207316 - DNA, 33 bp, Homo sapien
ttagaagaagcaaggtgaacaaggaatattgct

SEQ ID NO: 207317 - DNA, 33 bp, Homo sapien
tgaaaaggaaataaaacgtgtacagattgagaa

SEQ ID NO: 207318 - DNA, 33 bp, Homo sapien
tgaaaaggaaataaaatgtgtacagattgagaa

SEQ ID NO: 207319 - DNA, 33 bp, Homo sapien
accaatagatgctgaaagagcatgtgacaaaat

SEQ ID NO: 207320 - DNA, 33 bp, Homo sapien
accaatagatgctgaacgagcatgtgacaaaat

SEQ ID NO: 207321 - DNA, 33 bp, Homo sapien
aattatgctttttctcaaacttcaggcatgaaa

SEQ ID NO: 207322 - DNA, 33 bp, Homo sapien
aattatgctttttctcgaacttcaggcatgaaa

SEQ ID NO: 207323 - DNA, 33 bp, Homo sapien
gccaagatttgaatccaagtagcaaagtacatg

SEQ ID NO: 207324 - DNA, 33 bp, Homo sapien
gccaagatttgaatccgagtagcaaagtacatg

SEQ ID NO: 207325 - DNA, 33 bp, Homo sapien
ggtctacagaactaaaatgttgctatttacttc

SEQ ID NO: 207326 - DNA, 33 bp, Homo sapien
ggtctacagaactaaattgttgctatttacttc

SEQ ID NO: 207327 - DNA, 33 bp, Homo sapien
ctttatcagaacaagaacctcaggagttgacaa

SEQ ID NO: 207328 - DNA, 33 bp, Homo sapien
ctttatcagaacaagatcctcaggagttgacaa

SEQ ID NO: 207329 - DNA, 33 bp, Homo sapien
atgtcatgtcttcagggaactgcacattttaac

SEQ ID NO: 207330 - DNA, 33 bp, Homo sapien
atgtcatgtcttcaggtaactgcacattttaac

SEQ ID NO: 207331 - DNA, 33 bp, Homo sapien
gtgtgtggtaagacagacaaggacagttccttc

SEQ ID NO: 207332 - DNA, 33 bp, Homo sapien
gtgtgtggtaagacaggcaaggacagttccttc

SEQ ID NO: 207333 - DNA, 33 bp, Homo sapien
ctatgatcaacctggaggacaaagaccctgacc

SEQ ID NO: 207334 - DNA, 33 bp, Homo sapien
ctatgatcaacctggatgacaaagaccctgacc

SEQ ID NO: 207335 - DNA, 33 bp, Homo sapien
ttttgattagttgatggaaacaaaaagcaaaac

SEQ ID NO: 207336 - DNA, 33 bp, Homo sapien
ttttgattagttgatgtaaacaaaaagcaaaac

SEQ ID NO: 207337 - DNA, 33 bp, Homo sapien
aactcctaggatctccaagtgtgacttaatttg

SEQ ID NO: 207338 - DNA, 33 bp, Homo sapien
aactcctaggatctccgagtgtgacttaatttg

SEQ ID NO: 207339 - DNA, 33 bp, Homo sapien
cactaattttttggcacgaataaattggaaatt

SEQ ID NO: 207340 - DNA, 33 bp, Homo sapien
cactaattttttggcatgaataaattggaaatt

SEQ ID NO: 207341 - DNA, 33 bp, Homo sapien
ccttctaagattctgacaatatgtatgctaagc

SEQ ID NO: 207342 - DNA, 33 bp, Homo sapien
ccttctaagattctgataatatgtatgctaagc

SEQ ID NO: 207343 - DNA, 33 bp, Homo sapien
ttcaggctcattaataaccttgacaatacgaat

SEQ ID NO: 207344 - DNA, 33 bp, Homo sapien
ttcaggctcattaatagccttgacaatacgaat

SEQ ID NO: 207345 - DNA, 33 bp, Homo sapien
taaaagacctaaaataaccaaatctattctgaa

SEQ ID NO: 207346 - DNA, 33 bp, Homo sapien
taaaagacctaaaatagccaaatctattctgaa

SEQ ID NO: 207347 - DNA, 33 bp, Homo sapien
gggtgaatcagcaattcaagtgtgtcttttcta

SEQ ID NO: 207348 - DNA, 33 bp, Homo sapien
gggtgaatcagcaattgaagtgtgtcttttcta

SEQ ID NO: 207349 - DNA, 33 bp, Homo sapien
aaggtaaagtccaaacacaggcctggagctcag

SEQ ID NO: 207350 - DNA, 33 bp, Homo sapien
aaggtaaagtccaaacgcaggcctggagctcag

SEQ ID NO: 207351 - DNA, 33 bp, Homo sapien
ttccacaaacctgggccatataaacatcaggag

SEQ ID NO: 207352 - DNA, 33 bp, Homo sapien
ttccacaaacctgggctatataaacatcaggag

SEQ ID NO: 207353 - DNA, 33 bp, Homo sapien
ggtgctaattgtggaagtgggtctactctaaga

SEQ ID NO: 207354 - DNA, 33 bp, Homo sapien
ggtgctaattgtggaattgggtctactctaaga

SEQ ID NO: 207355 - DNA, 33 bp, Homo sapien
attttggtatgtaggacagcgacagaagggctg

SEQ ID NO: 207356 - DNA, 33 bp, Homo sapien
attttggtatgtaggagagcgacagaagggctg

SEQ ID NO: 207357 - DNA, 33 bp, Homo sapien
cttgttccggattatacactaagtcttccattt

SEQ ID NO: 207358 - DNA, 33 bp, Homo sapien
cttgttccggattatatactaagtcttccattt

SEQ ID NO: 207359 - DNA, 33 bp, Homo sapien
cctctttttgttgtccccaaacactgatttcca

SEQ ID NO: 207360 - DNA, 33 bp, Homo sapien
cctctttttgttgtcctcaaacactgatttcca

SEQ ID NO: 207361 - DNA, 33 bp, Homo sapien
tagccaacaagctcaactcaatctataaatgtg

SEQ ID NO: 207362 - DNA, 33 bp, Homo sapien
tagccaacaagctcaattcaatctataaatgtg

SEQ ID NO: 207363 - DNA, 33 bp, Homo sapien
aagtttactctattgggcactattctaggcacg

SEQ ID NO: 207364 - DNA, 33 bp, Homo sapien
aagtttactctattggtcactattctaggcacg

SEQ ID NO: 207365 - DNA, 33 bp, Homo sapien
gaggcttggagctgcaaaaagcctgtggaaaaa

SEQ ID NO: 207366 - DNA, 33 bp, Homo sapien
gaggcttggagctgcagaaagcctgtggaaaaa

SEQ ID NO: 207367 - DNA, 33 bp, Homo sapien
ggtgagtcagggtctacggtgtctcaagaattc

SEQ ID NO: 207368 - DNA, 33 bp, Homo sapien
ggtgagtcagggtctatggtgtctcaagaattc

SEQ ID NO: 207369 - DNA, 33 bp, Homo sapien
taatagatattttacacgagtgagatataacaa

SEQ ID NO: 207370 - DNA, 33 bp, Homo sapien
taatagatattttacatgagtgagatataacaa

SEQ ID NO: 207371 - DNA, 33 bp, Homo sapien
tggattctgttttgtcccattgtttacttcgcc

SEQ ID NO: 207372 - DNA, 33 bp, Homo sapien
tggattctgttttgtctcattgtttacttcgcc

SEQ ID NO: 207373 - DNA, 33 bp, Homo sapien
actagataatgtcaaacgcttttaactcttggc

SEQ ID NO: 207374 - DNA, 33 bp, Homo sapien
actagataatgtcaaatgcttttaactcttggc

SEQ ID NO: 207375 - DNA, 33 bp, Homo sapien
gggtattttgcatatggaaaggagagagaaact

SEQ ID NO: 207376 - DNA, 33 bp, Homo sapien
gggtattttgcatatgtaaaggagagagaaact

SEQ ID NO: 207377 - DNA, 33 bp, Homo sapien
agaaaagcataacaaacgtacttcatcaaagtt

SEQ ID NO: 207378 - DNA, 33 bp, Homo sapien
agaaaagcataacaaatgtacttcatcaaagtt

SEQ ID NO: 207379 - DNA, 33 bp, Homo sapien
gactcaggcactgttaaagagtttttctgagtt

SEQ ID NO: 207380 - DNA, 33 bp, Homo sapien
gactcaggcactgttacagagtttttctgagtt

SEQ ID NO: 207381 - DNA, 33 bp, Homo sapien
gattaaaatcggagaacaatttctgccaggctt

SEQ ID NO: 207382 - DNA, 33 bp, Homo sapien
gattaaaatcggagaagaatttctgccaggctt

SEQ ID NO: 207383 - DNA, 33 bp, Homo sapien
gacacatatgaaaacactgctaagaaccaagca

SEQ ID NO: 207384 - DNA, 33 bp, Homo sapien
gacacatatgaaaacattgctaagaaccaagca

SEQ ID NO: 207385 - DNA, 33 bp, Homo sapien
actacagattgatgtcaaagagtcacacgtcaa

SEQ ID NO: 207386 - DNA, 33 bp, Homo sapien
actacagattgatgtccaagagtcacacgtcaa

SEQ ID NO: 207387 - DNA, 33 bp, Homo sapien
agttggttgtatctgcagatgtggaagccagag

SEQ ID NO: 207388 - DNA, 33 bp, Homo sapien
agttggttgtatctgcggatgtggaagccagag

SEQ ID NO: 207389 - DNA, 33 bp, Homo sapien
ggacaatctggtacaacatggagaagtagagtt

SEQ ID NO: 207390 - DNA, 33 bp, Homo sapien
ggacaatctggtacaatatggagaagtagagtt

SEQ ID NO: 207391 - DNA, 33 bp, Homo sapien
cacagagttaaagatgccaacgtcttcccacaa

SEQ ID NO: 207392 - DNA, 33 bp, Homo sapien
cacagagttaaagatgtcaacgtcttcccacaa

SEQ ID NO: 207393 - DNA, 33 bp, Homo sapien
tgagctaaaagataaaactggttgagtagaaaa

SEQ ID NO: 207394 - DNA, 33 bp, Homo sapien
tgagctaaaagataaatctggttgagtagaaaa

SEQ ID NO: 207395 - DNA, 33 bp, Homo sapien
agttcactgcttggagcattagcattcacatta

SEQ ID NO: 207396 - DNA, 33 bp, Homo sapien
agttcactgcttggagtattagcattcacatta

SEQ ID NO: 207397 - DNA, 33 bp, Homo sapien
taagatgagaatcaaacactgtaaaattgctga

SEQ ID NO: 207398 - DNA, 33 bp, Homo sapien
taagatgagaatcaaatactgtaaaattgctga

SEQ ID NO: 207399 - DNA, 33 bp, Homo sapien
tccaaaaatttagtgaaaaatgcagctacatca

SEQ ID NO: 207400 - DNA, 33 bp, Homo sapien
tccaaaaatttagtgagaaatgcagctacatca

SEQ ID NO: 207401 - DNA, 33 bp, Homo sapien
ggataagaatggctgacggacggattatcttgt

SEQ ID NO: 207402 - DNA, 33 bp, Homo sapien
ggataagaatggctgatggacggattatcttgt

SEQ ID NO: 207403 - DNA, 33 bp, Homo sapien
tagtgattggagctgacggaacgagggcggagc

SEQ ID NO: 207404 - DNA, 33 bp, Homo sapien
tagtgattggagctgatggaacgagggcggagc

SEQ ID NO: 207405 - DNA, 33 bp, Homo sapien
ctgaaccacttcaaaggagtaggcagaacaact

SEQ ID NO: 207406 - DNA, 33 bp, Homo sapien
ctgaaccacttcaaagtagtaggcagaacaact

SEQ ID NO: 207407 - DNA, 33 bp, Homo sapien
attaaaggagatgacactcttggtatctttgat

SEQ ID NO: 207408 - DNA, 33 bp, Homo sapien
attaaaggagatgacattcttggtatctttgat

SEQ ID NO: 207409 - DNA, 33 bp, Homo sapien
gcaaagtatatttgaccaaaacagaattaaact

SEQ ID NO: 207410 - DNA, 33 bp, Homo sapien
gcaaagtatatttgacgaaaacagaattaaact

SEQ ID NO: 207411 - DNA, 33 bp, Homo sapien
gatagctaaattctcaacagaaacaaaaaagga

SEQ ID NO: 207412 - DNA, 33 bp, Homo sapien
gatagctaaattctcatcagaaacaaaaaagga

SEQ ID NO: 207413 - DNA, 33 bp, Homo sapien
ttcaaattgacaccacacattgttacacatttc

SEQ ID NO: 207414 - DNA, 33 bp, Homo sapien
ttcaaattgacaccacgcattgttacacatttc

SEQ ID NO: 207415 - DNA, 33 bp, Homo sapien
aagaagtcttaggtccagaaacctacaggtcca

SEQ ID NO: 207416 - DNA, 33 bp, Homo sapien
aagaagtcttaggtccggaaacctacaggtcca

SEQ ID NO: 207417 - DNA, 33 bp, Homo sapien
tttcaaaatttgcttaaatctggtctttaaatt

SEQ ID NO: 207418 - DNA, 33 bp, Homo sapien
tttcaaaatttgcttagatctggtctttaaatt

SEQ ID NO: 207419 - DNA, 33 bp, Homo sapien
catgggatttgtcataataacagagaaatcaaa

SEQ ID NO: 207420 - DNA, 33 bp, Homo sapien
catgggatttgtcatattaacagagaaatcaaa

SEQ ID NO: 207421 - DNA, 33 bp, Homo sapien
tactttccaaaaagaccgaagcagttttactgc

SEQ ID NO: 207422 - DNA, 33 bp, Homo sapien
tactttccaaaaagactgaagcagttttactgc

SEQ ID NO: 207423 - DNA, 33 bp, Homo sapien
tgactttctacgttccccaggccagtcttgaac

SEQ ID NO: 207424 - DNA, 33 bp, Homo sapien
tgactttctacgttccgcaggccagtcttgaac

SEQ ID NO: 207425 - DNA, 33 bp, Homo sapien
acactcgttgggacacacttgctgtggaaagga

SEQ ID NO: 207426 - DNA, 33 bp, Homo sapien
acactcgttgggacacccttgctgtggaaagga

SEQ ID NO: 207427 - DNA, 33 bp, Homo sapien
tgtggaatgcttaacagggacatagaagaagaa

SEQ ID NO: 207428 - DNA, 33 bp, Homo sapien
tgtggaatgcttaacatggacatagaagaagaa

SEQ ID NO: 207429 - DNA, 33 bp, Homo sapien
cctagcgtcttgtccccgagagtttgcatccga

SEQ ID NO: 207430 - DNA, 33 bp, Homo sapien
cctagcgtcttgtccctgagagtttgcatccga

SEQ ID NO: 207431 - DNA, 33 bp, Homo sapien
agcgatggggtgccggaattctgagcatttcct

SEQ ID NO: 207432 - DNA, 33 bp, Homo sapien
agcgatggggtgccgggattctgagcatttcct

SEQ ID NO: 207433 - DNA, 33 bp, Homo sapien
agcatttccttttggccctctttgactttgatt

SEQ ID NO: 207434 - DNA, 33 bp, Homo sapien
agcatttccttttggctctctttgactttgatt

SEQ ID NO: 207435 - DNA, 33 bp, Homo sapien
gaaaaaaatacagatgacagtaacttgaaatga

SEQ ID NO: 207436 - DNA, 33 bp, Homo sapien
gaaaaaaatacagatgtcagtaacttgaaatga

SEQ ID NO: 207437 - DNA, 33 bp, Homo sapien
gttaggcttgtttccaaaatggatcctattaat

SEQ ID NO: 207438 - DNA, 33 bp, Homo sapien
gttaggcttgtttccagaatggatcctattaat

SEQ ID NO: 207439 - DNA, 33 bp, Homo sapien
tcctcaaatgcacaaacaatgcaaggacacagg

SEQ ID NO: 207440 - DNA, 33 bp, Homo sapien
tcctcaaatgcacaaataatgcaaggacacagg

SEQ ID NO: 207441 - DNA, 33 bp, Homo sapien
aaattcacatttcctgaaaaaaaaggccagtag

SEQ ID NO: 207442 - DNA, 33 bp, Homo sapien
aaattcacatttcctgtaaaaaaaggccagtag

SEQ ID NO: 207443 - DNA, 33 bp, Homo sapien
ccactggcttgtttcacggataaaactctgttt

SEQ ID NO: 207444 - DNA, 33 bp, Homo sapien
ccactggcttgtttcagggataaaactctgttt

SEQ ID NO: 207445 - DNA, 33 bp, Homo sapien
ctggcttgttaagtcaaccaacatatttcctcc

SEQ ID NO: 207446 - DNA, 33 bp, Homo sapien
ctggcttgttaagtcatccaacatatttcctcc

SEQ ID NO: 207447 - DNA, 33 bp, Homo sapien
aattagctgaagtctacctcttctgggctatct

SEQ ID NO: 207448 - DNA, 33 bp, Homo sapien
aattagctgaagtctagctcttctgggctatct

SEQ ID NO: 207449 - DNA, 33 bp, Homo sapien
tgggagctggggatgaaggtagaggaagcctga

SEQ ID NO: 207450 - DNA, 33 bp, Homo sapien
tgggagctggggatgacggtagaggaagcctga

SEQ ID NO: 207451 - DNA, 33 bp, Homo sapien
gagggaggtgcttttacgccatctattaaagct

SEQ ID NO: 207452 - DNA, 33 bp, Homo sapien
gagggaggtgcttttatgccatctattaaagct

SEQ ID NO: 207453 - DNA, 33 bp, Homo sapien
tttcagaacgatagacactgagccatctaaagc

SEQ ID NO: 207454 - DNA, 33 bp, Homo sapien
tttcagaacgatagacgctgagccatctaaagc

SEQ ID NO: 207455 - DNA, 33 bp, Homo sapien
catgtgtgatctttggacaggactatacctgct

SEQ ID NO: 207456 - DNA, 33 bp, Homo sapien
catgtgtgatctttgggcaggactatacctgct

SEQ ID NO: 207457 - DNA, 33 bp, Homo sapien
gcctacagacaggacaacttcaaaaaggaaaga

SEQ ID NO: 207458 - DNA, 33 bp, Homo sapien
gcctacagacaggacaccttcaaaaaggaaaga

SEQ ID NO: 207459 - DNA, 33 bp, Homo sapien
taaatggtttctaagacgctagaaataagtgag

SEQ ID NO: 207460 - DNA, 33 bp, Homo sapien
taaatggtttctaagatgctagaaataagtgag

SEQ ID NO: 207461 - DNA, 33 bp, Homo sapien
caagtgaaggacaagacgaagatgagctttact

SEQ ID NO: 207462 - DNA, 33 bp, Homo sapien
caagtgaaggacaagatgaagatgagctttact

SEQ ID NO: 207463 - DNA, 33 bp, Homo sapien
gagtaaaagctctagacactacattctttctag

SEQ ID NO: 207464 - DNA, 33 bp, Homo sapien
gagtaaaagctctagatactacattctttctag

SEQ ID NO: 207465 - DNA, 33 bp, Homo sapien
agagcactcagcttaactaaaatcgatgtccaa

SEQ ID NO: 207466 - DNA, 33 bp, Homo sapien
agagcactcagcttaattaaaatcgatgtccaa

SEQ ID NO: 207467 - DNA, 33 bp, Homo sapien; identical to SEQ ID NO: 207465

SEQ ID NO: 207468 - DNA, 33 bp, Homo sapien; identical to SEQ ID NO: 207466

SEQ ID NO: 207469 - DNA, 33 bp, Homo sapien
aaagatgctcgttgtaagtctccatgttgctaa

SEQ ID NO: 207470 - DNA, 33 bp, Homo sapien
aaagatgctcgttgtacgtctccatgttgctaa

SEQ ID NO: 207471 - DNA, 33 bp, Homo sapien
accaatcctaaaaacacgttctctagtcttatt

SEQ ID NO: 207472 - DNA, 33 bp, Homo sapien
accaatcctaaaaacaggttctctagtcttatt

SEQ ID NO: 207473 - DNA, 33 bp, Homo sapien
aagatgacgggttggagaatgactctcgtggaa

SEQ ID NO: 207474 - DNA, 33 bp, Homo sapien
aagatgacgggttggataatgactctcgtggaa

SEQ ID NO: 207475 - DNA, 33 bp, Homo sapien
gcagatggatgtcaggaatattttggagaaaaa

SEQ ID NO: 207476 - DNA, 33 bp, Homo sapien
gcagatggatgtcagggatattttggagaaaaa

SEQ ID NO: 207477 - DNA, 33 bp, Homo sapien
tctacttacacttgaacactacccagccatttg

SEQ ID NO: 207478 - DNA, 33 bp, Homo sapien
tctacttacacttgaatactacccagccatttg

SEQ ID NO: 207479 - DNA, 33 bp, Homo sapien
aatttatgtgactaaaaggaataagacagacat

SEQ ID NO: 207480 - DNA, 33 bp, Homo sapien
aatttatgtgactaaacggaataagacagacat

SEQ ID NO: 207481 - DNA, 33 bp, Homo sapien
atctgcccaacattccagagaataatagtccca

SEQ ID NO: 207482 - DNA, 33 bp, Homo sapien
atctgcccaacattccggagaataatagtccca

SEQ ID NO: 207483 - DNA, 33 bp, Homo sapien
cagaatgcagagaccagaaataatgctgcacac

SEQ ID NO: 207484 - DNA, 33 bp, Homo sapien
cagaatgcagagaccataaataatgctgcacac

SEQ ID NO: 207485 - DNA, 33 bp, Homo sapien
aagacaccgttgtaaccattcattttggtgaga

SEQ ID NO: 207486 - DNA, 33 bp, Homo sapien
aagacaccgttgtaactattcattttggtgaga

SEQ ID NO: 207487 - DNA, 33 bp, Homo sapien
cacatggctgtagtagcagttactcaggaggct

SEQ ID NO: 207488 - DNA, 33 bp, Homo sapien
cacatggctgtagtagtagttactcaggaggct

SEQ ID NO: 207489 - DNA, 33 bp, Homo sapien
attgaatcatgaatcactgaatcattaaagctt

SEQ ID NO: 207490 - DNA, 33 bp, Homo sapien
attgaatcatgaatcattgaatcattaaagctt

SEQ ID NO: 207491 - DNA, 33 bp, Homo sapien
tagttctgctggacaacgaagaggaacaaacga

SEQ ID NO: 207492 - DNA, 33 bp, Homo sapien
tagttctgctggacaatgaagaggaacaaacga

SEQ ID NO: 207493 - DNA, 33 bp, Homo sapien
aacagcaacttacggacctcattgggtgaactt

SEQ ID NO: 207494 - DNA, 33 bp, Homo sapien
aacagcaacttacggatctcattgggtgaactt

SEQ ID NO: 207495 - DNA, 33 bp, Homo sapien
tgtcatctctacttccacagagggagcccaggg

SEQ ID NO: 207496 - DNA, 33 bp, Homo sapien
tgtcatctctacttccgcagagggagcccaggg

SEQ ID NO: 207497 - DNA, 33 bp, Homo sapien
gacaacaccaaactcactgaggtattgtgacca

SEQ ID NO: 207498 - DNA, 33 bp, Homo sapien
gacaacaccaaactcattgaggtattgtgacca

SEQ ID NO: 207499 - DNA, 33 bp, Homo sapien
gcttgttgtggaattacactatgcctgttactc

SEQ ID NO: 207500 - DNA, 33 bp, Homo sapien
gcttgttgtggaattatactatgcctgttactc

SEQ ID NO: 207501 - DNA, 33 bp, Homo sapien
aattattacagtaaccagcccttcttctactcc

SEQ ID NO: 207502 - DNA, 33 bp, Homo sapien
aattattacagtaaccggcccttcttctactcc

SEQ ID NO: 207503 - DNA, 33 bp, Homo sapien
ctctttattcatcttacagcaggattaagagat

SEQ ID NO: 207504 - DNA, 33 bp, Homo sapien
ctctttattcatcttagagcaggattaagagat

SEQ ID NO: 207505 - DNA, 33 bp, Homo sapien
agataagcaccaaaagaatggtcagaacatttg

SEQ ID NO: 207506 - DNA, 33 bp, Homo sapien
agataagcaccaaaaggatggtcagaacatttg

SEQ ID NO: 207507 - DNA, 33 bp, Homo sapien
tccttcagccttataccggtttaacattcctcc

SEQ ID NO: 207508 - DNA, 33 bp, Homo sapien
tccttcagccttatactggtttaacattcctcc

SEQ ID NO: 207509 - DNA, 33 bp, Homo sapien
tcatagcatctactaccaatacttgtaagatct

SEQ ID NO: 207510 - DNA, 33 bp, Homo sapien
tcatagcatctactactaatacttgtaagatct

SEQ ID NO: 207511 - DNA, 33 bp, Homo sapien
ttccgtgttgtctctacggatgtcaatttccac

SEQ ID NO: 207512 - DNA, 33 bp, Homo sapien
ttccgtgttgtctctatggatgtcaatttccac

SEQ ID NO: 207513 - DNA, 33 bp, Homo sapien
gcatcctgagctcgcaacctgtgtggaacccaa

SEQ ID NO: 207514 - DNA, 33 bp, Homo sapien
gcatcctgagctcgcaccctgtgtggaacccaa

SEQ ID NO: 207515 - DNA, 33 bp, Homo sapien; identical to SEQ ID NO: 207513

SEQ ID NO: 207516 - DNA, 33 bp, Homo sapien; identical to SEQ ID NO: 207514

SEQ ID NO: 207517 - DNA, 33 bp, Homo sapien
gagggctgaacaagtcactgcaaatgtttttaa

SEQ ID NO: 207518 - DNA, 33 bp, Homo sapien
gagggctgaacaagtcgctgcaaatgtttttaa

SEQ ID NO: 207519 - DNA, 33 bp, Homo sapien
gaagctgttttttgaacgtctctacacagtcca

SEQ ID NO: 207520 - DNA, 33 bp, Homo sapien
gaagctgttttttgaatgtctctacacagtcca

SEQ ID NO: 207521 - DNA, 33 bp, Homo sapien
gccagcaaatttgcatcagtataaatacaaaga

SEQ ID NO: 207522 - DNA, 33 bp, Homo sapien
gccagcaaatttgcatgagtataaatacaaaga

SEQ ID NO: 207523 - DNA, 33 bp, Homo sapien
ttgtgataatggtctgcactgaatagatgatca

SEQ ID NO: 207524 - DNA, 33 bp, Homo sapien
ttgtgataatggtctgtactgaatagatgatca

SEQ ID NO: 207525 - DNA, 33 bp, Homo sapien
aaaacgaaacgagagaacatcccaggtaaaagg

SEQ ID NO: 207526 - DNA, 33 bp, Homo sapien
aaaacgaaacgagagagcatcccaggtaaaagg

SEQ ID NO: 207527 - DNA, 33 bp, Homo sapien
atagggtaacgacgaacgtattaaaattcacac

SEQ ID NO: 207528 - DNA, 33 bp, Homo sapien
atagggtaacgacgaatgtattaaaattcacac

SEQ ID NO: 207529 - DNA, 33 bp, Homo sapien
tgtagacactttactacgaagtgcctctggcaa

SEQ ID NO: 207530 - DNA, 33 bp, Homo sapien
tgtagacactttactatgaagtgcctctggcaa

SEQ ID NO: 207531 - DNA, 33 bp, Homo sapien
gtgcacttgctttggacaattcattgagccacg

SEQ ID NO: 207532 - DNA, 33 bp, Homo sapien
gtgcacttgctttggataattcattgagccacg

SEQ ID NO: 207533 - DNA, 33 bp, Homo sapien
atatttgaaagtctcacgtgtatttctaaaggc

SEQ ID NO: 207534 - DNA, 33 bp, Homo sapien
atatttgaaagtctcatgtgtatttctaaaggc

SEQ ID NO: 207535 - DNA, 33 bp, Homo sapien
tgcatctccctgatgacggagaatgtgcagcac

SEQ ID NO: 207536 - DNA, 33 bp, Homo sapien
tgcatctccctgatgatggagaatgtgcagcac

SEQ ID NO: 207537 - DNA, 33 bp, Homo sapien
tcaggctcttgtcacaaaaatggtaaatgtttc

SEQ ID NO: 207538 - DNA, 33 bp, Homo sapien
tcaggctcttgtcacacaaatggtaaatgtttc

SEQ ID NO: 207539 - DNA, 33 bp, Homo sapien
gacaatgggggaccaacgctgcccaagtcaggg

SEQ ID NO: 207540 - DNA, 33 bp, Homo sapien
gacaatgggggaccaatgctgcccaagtcaggg

SEQ ID NO: 207541 - DNA, 33 bp, Homo sapien
gcatagagcagctgaacgctctttttgtgtgac

SEQ ID NO: 207542 - DNA, 33 bp, Homo sapien
gcatagagcagctgaaggctctttttgtgtgac

SEQ ID NO: 207543 - DNA, 33 bp, Homo sapien
ggtctttccaaacaccaaagtgaactcactgaa

SEQ ID NO: 207544 - DNA, 33 bp, Homo sapien
ggtctttccaaacaccgaagtgaactcactgaa

SEQ ID NO: 207545 - DNA, 33 bp, Homo sapien
tttgtaacaatcatcactcttgtagctatttgt

SEQ ID NO: 207546 - DNA, 33 bp, Homo sapien
tttgtaacaatcatcattcttgtagctatttgt

SEQ ID NO: 207547 - DNA, 33 bp, Homo sapien
caaagaaagggcacaacggaccacgggcaaggt

SEQ ID NO: 207548 - DNA, 33 bp, Homo sapien
caaagaaagggcacaagggaccacgggcaaggt

SEQ ID NO: 207549 - DNA, 33 bp, Homo sapien
gattcctggcataaaactcctataattcttgga

SEQ ID NO: 207550 - DNA, 33 bp, Homo sapien
gattcctggcataaaagtcctataattcttgga

SEQ ID NO: 207551 - DNA, 33 bp, Homo sapien
tctcactttgagaaatgagaaaatcattcctgt

SEQ ID NO: 207552 - DNA, 33 bp, Homo sapien
tctcactttgagaaattagaaaatcattcctgt

SEQ ID NO: 207553 - DNA, 33 bp, Homo sapien
caggaatagctgagaaatgggaaagatcaagtg

SEQ ID NO: 207554 - DNA, 33 bp, Homo sapien
caggaatagctgagaagtgggaaagatcaagtg

SEQ ID NO: 207555 - DNA, 33 bp, Homo sapien
ggttggatatcgtgcaaaaagggaccacatggc

SEQ ID NO: 207556 - DNA, 33 bp, Homo sapien
ggttggatatcgtgcataaagggaccacatggc

SEQ ID NO: 207557 - DNA, 33 bp, Homo sapien
ctagggcctttcttccacttatttcactctttc

SEQ ID NO: 207558 - DNA, 33 bp, Homo sapien
ctagggcctttcttccgcttatttcactctttc

SEQ ID NO: 207559 - DNA, 33 bp, Homo sapien
ctaccactttcggcctcaagtgacagtgttttt

SEQ ID NO: 207560 - DNA, 33 bp, Homo sapien
ctaccactttcggcctgaagtgacagtgttttt

SEQ ID NO: 207561 - DNA, 33 bp, Homo sapien
gagacacagtattataaaattgatgtgaacttc

SEQ ID NO: 207562 - DNA, 33 bp, Homo sapien
gagacacagtattatacaattgatgtgaacttc

SEQ ID NO: 207563 - DNA, 33 bp, Homo sapien
ttgcatgttcattagacggccctttacccaatg

SEQ ID NO: 207564 - DNA, 33 bp, Homo sapien
ttgcatgttcattagatggccctttacccaatg

SEQ ID NO: 207565 - DNA, 33 bp, Homo sapien
gaacacacggagacaacaaggggaataacagac

SEQ ID NO: 207566 - DNA, 33 bp, Homo sapien
gaacacacggagacaataaggggaataacagac

SEQ ID NO: 207567 - DNA, 33 bp, Homo sapien
attcctctcattcccactgatttcagaaacagt

SEQ ID NO: 207568 - DNA, 33 bp, Homo sapien
attcctctcattcccattgatttcagaaacagt

SEQ ID NO: 207569 - DNA, 33 bp, Homo sapien
tgaagtgcgtgtggaccggagagaagtgctgcc

SEQ ID NO: 207570 - DNA, 33 bp, Homo sapien
tgaagtgcgtgtggactggagagaagtgctgcc

SEQ ID NO: 207571 - DNA, 33 bp, Homo sapien
cagaccacagaccaatgaattttctgttctctt

SEQ ID NO: 207572 - DNA, 33 bp, Homo sapien
cagaccacagaccaattaattttctgttctctt

SEQ ID NO: 207573 - DNA, 33 bp, Homo sapien
acacgacaacaggtgacattgagaaggaagatc

SEQ ID NO: 207574 - DNA, 33 bp, Homo sapien
acacgacaacaggtgatattgagaaggaagatc

SEQ ID NO: 207575 - DNA, 33 bp, Homo sapien
ctcccccattctccatcagctccttttccagct

SEQ ID NO: 207576 - DNA, 33 bp, Homo sapien
ctcccccattctccattagctccttttccagct

SEQ ID NO: 207577 - DNA, 33 bp, Homo sapien
ccagcctcagtttccacgtctccccaaatgcct

SEQ ID NO: 207578 - DNA, 33 bp, Homo sapien
ccagcctcagtttccatgtctccccaaatgcct

SEQ ID NO: 207579 - DNA, 33 bp, Homo sapien
tctggccaggggactgaagaacctcacagccag

SEQ ID NO: 207580 - DNA, 33 bp, Homo sapien
tctggccaggggactggagaacctcacagccag

SEQ ID NO: 207581 - DNA, 33 bp, Homo sapien
atagagcagataagtaagttaatgtagcacaca

SEQ ID NO: 207582 - DNA, 33 bp, Homo sapien
atagagcagataagtatgttaatgtagcacaca

SEQ ID NO: 207583 - DNA, 33 bp, Homo sapien
cacacattggatgctccgactgagtggcactgc

SEQ ID NO: 207584 - DNA, 33 bp, Homo sapien
cacacattggatgctctgactgagtggcactgc

SEQ ID NO: 207585 - DNA, 33 bp, Homo sapien
caagctgttttttgaacgtctctacacagtcca

SEQ ID NO: 207586 - DNA, 33 bp, Homo sapien
caagctgttttttgaatgtctctacacagtcca

SEQ ID NO: 207587 - DNA, 33 bp, Homo sapien
catgtacaaatacaaccggaccagaagggatga

SEQ ID NO: 207588 - DNA, 33 bp, Homo sapien
catgtacaaatacaactggaccagaagggatga

SEQ ID NO: 207589 - DNA, 33 bp, Homo sapien
agggtatgggtagataagaggcaagcagttgca

SEQ ID NO: 207590 - DNA, 33 bp, Homo sapien
agggtatgggtagatacgaggcaagcagttgca

SEQ ID NO: 207591 - DNA, 33 bp, Homo sapien
tgcagattcattgaaccagatgaatgtttaagt

SEQ ID NO: 207592 - DNA, 33 bp, Homo sapien
tgcagattcattgaactagatgaatgtttaagt

SEQ ID NO: 207593 - DNA, 33 bp, Homo sapien
agtgcttctgacattaacagaaaattagaaaag

SEQ ID NO: 207594 - DNA, 33 bp, Homo sapien
agtgcttctgacattaccagaaaattagaaaag

SEQ ID NO: 207595 - DNA, 33 bp, Homo sapien
actctccattacctgaagaggaagagaaggaga

SEQ ID NO: 207596 - DNA, 33 bp, Homo sapien
actctccattacctgaggaggaagagaaggaga

SEQ ID NO: 207597 - DNA, 33 bp, Homo sapien
tgcataccttatattcaagcttctatgttggta

SEQ ID NO: 207598 - DNA, 33 bp, Homo sapien
tgcataccttatattccagcttctatgttggta

SEQ ID NO: 207599 - DNA, 33 bp, Homo sapien
aagggcaccatcaaaacaggataccacagacat

SEQ ID NO: 207600 - DNA, 33 bp, Homo sapien
aagggcaccatcaaaataggataccacagacat

SEQ ID NO: 207601 - DNA, 33 bp, Homo sapien
gcagggtcttcctgaacagttcctgaggaggaa

SEQ ID NO: 207602 - DNA, 33 bp, Homo sapien
gcagggtcttcctgaatagttcctgaggaggaa

SEQ ID NO: 207603 - DNA, 33 bp, Homo sapien; identical to SEQ ID NO: 207601

SEQ ID NO: 207604 - DNA, 33 bp, Homo sapien; identical to SEQ ID NO: 207602

SEQ ID NO: 207605 - DNA, 33 bp, Homo sapien
ttttcctccctccaaactgtacttcatccttaa

SEQ ID NO: 207606 - DNA, 33 bp, Homo sapien
ttttcctccctccaaattgtacttcatccttaa

SEQ ID NO: 207607 - DNA, 33 bp, Homo sapien
ccacatgctatcttacagaagtgatttcggatt

SEQ ID NO: 207608 - DNA, 33 bp, Homo sapien
ccacatgctatcttacggaagtgatttcggatt

SEQ ID NO: 207609 - DNA, 33 bp, Homo sapien
tcctctatttaaccaaagcagtgagaatttcta

SEQ ID NO: 207610 - DNA, 33 bp, Homo sapien
tcctctatttaaccaaggcagtgagaatttcta

SEQ ID NO: 207611 - DNA, 33 bp, Homo sapien
agaaaagaccgatgtaagatttgggcagaagaa

SEQ ID NO: 207612 - DNA, 33 bp, Homo sapien
agaaaagaccgatgtaggatttgggcagaagaa

SEQ ID NO: 207613 - DNA, 33 bp, Homo sapien
gcagtagctttcttcaataccatctcaatattt

SEQ ID NO: 207614 - DNA, 33 bp, Homo sapien
gcagtagctttcttcagtaccatctcaatattt

SEQ ID NO: 207615 - DNA, 33 bp, Homo sapien
aaagtattctctaaacaggacaggaatatgtga

SEQ ID NO: 207616 - DNA, 33 bp, Homo sapien
aaagtattctctaaacgggacaggaatatgtga

SEQ ID NO: 207617 - DNA, 33 bp, Homo sapien; identical to SEQ ID NO: 207615

SEQ ID NO: 207618 - DNA, 33 bp, Homo sapien; identical to SEQ ID NO: 207616

SEQ ID NO: 207619 - DNA, 33 bp, Homo sapien
ttttgagttaaatcgggaaggatactggagttt

SEQ ID NO: 207620 - DNA, 33 bp, Homo sapien
ttttgagttaaatcggtaaggatactggagttt

SEQ ID NO: 207621 - DNA, 33 bp, Homo sapien
aagaaagatttccagaaaaggaattaccaagac

SEQ ID NO: 207622 - DNA, 33 bp, Homo sapien
aagaaagatttccagacaaggaattaccaagac

SEQ ID NO: 207623 - DNA, 33 bp, Homo sapien
gaaggcagtacttacaatgaaagtttccatttc

SEQ ID NO: 207624 - DNA, 33 bp, Homo sapien
gaaggcagtacttacactgaaagtttccatttc

SEQ ID NO: 207625 - DNA, 33 bp, Homo sapien
aggcgccgcttgaagacagagactagcattgga

SEQ ID NO: 207626 - DNA, 33 bp, Homo sapien
aggcgccgcttgaagatagagactagcattgga

SEQ ID NO: 207627 - DNA, 33 bp, Homo sapien
gtttctctggactaccagaagtcttatccttca

SEQ ID NO: 207628 - DNA, 33 bp, Homo sapien
gtttctctggactaccggaagtcttatccttca

SEQ ID NO: 207629 - DNA, 33 bp, Homo sapien; identical to SEQ ID NO: 207627

SEQ ID NO: 207630 - DNA, 33 bp, Homo sapien; identical to SEQ ID NO: 207628

SEQ ID NO: 207631 - DNA, 33 bp, Homo sapien
agactgcagagaaaaacagagcagaatggcatg

SEQ ID NO: 207632 - DNA, 33 bp, Homo sapien
agactgcagagaaaaagagagcagaatggcatg

SEQ ID NO: 207633 - DNA, 33 bp, Homo sapien; identical to SEQ ID NO: 207631

SEQ ID NO: 207634 - DNA, 33 bp, Homo sapien; identical to SEQ ID NO: 207632

SEQ ID NO: 207635 - DNA, 33 bp, Homo sapien
tggaaaatatttcatcacaatttttagtattca

SEQ ID NO: 207636 - DNA, 33 bp, Homo sapien
tggaaaatatttcatcgcaatttttagtattca

SEQ ID NO: 207637 - DNA, 33 bp, Homo sapien
ggtattgaatcagacaaactttatcaggttcca

SEQ ID NO: 207638 - DNA, 33 bp, Homo sapien
ggtattgaatcagacagactttatcaggttcca

SEQ ID NO: 207639 - DNA, 33 bp, Homo sapien
tctagacggaacactacgcattggaccataatt

SEQ ID NO: 207640 - DNA, 33 bp, Homo sapien
tctagacggaacactatgcattggaccataatt

SEQ ID NO: 207641 - DNA, 33 bp, Homo sapien; identical to SEQ ID NO: 207639

SEQ ID NO: 207642 - DNA, 33 bp, Homo sapien; identical to SEQ ID NO: 207640

SEQ ID NO: 207643 - DNA, 33 bp, Homo sapien
atgattggattgagataaaaaactgagaatatt

SEQ ID NO: 207644 - DNA, 33 bp, Homo sapien
atgattggattgagatcaaaaactgagaatatt

SEQ ID NO: 207645 - DNA, 33 bp, Homo sapien; identical to SEQ ID NO: 207643

SEQ ID NO: 207646 - DNA, 33 bp, Homo sapien; identical to SEQ ID NO: 207644

SEQ ID NO: 207647 - DNA, 33 bp, Homo sapien
gtgattaaaagtgtcacgcacattgtatctagc

SEQ ID NO: 207648 - DNA, 33 bp, Homo sapien
gtgattaaaagtgtcatgcacattgtatctagc

SEQ ID NO: 207649 - DNA, 33 bp, Homo sapien
ttgtgatgctgttctcagactatttttctatta

SEQ ID NO: 207650 - DNA, 33 bp, Homo sapien
ttgtgatgctgttctcggactatttttctatta

SEQ ID NO: 207651 - DNA, 33 bp, Homo sapien
tcttacttttaagacactggagagaatgaaaaa

SEQ ID NO: 207652 - DNA, 33 bp, Homo sapien
tcttacttttaagacattggagagaatgaaaaa

SEQ ID NO: 207653 - DNA, 33 bp, Homo sapien
acatcccaacaacatacgcagtgagtgaaatgt

SEQ ID NO: 207654 - DNA, 33 bp, Homo sapien
acatcccaacaacatatgcagtgagtgaaatgt

SEQ ID NO: 207655 - DNA, 33 bp, Homo sapien
gggaatccatacagtgaaattgagcccagcttc

SEQ ID NO: 207656 - DNA, 33 bp, Homo sapien
gggaatccatacagtggaattgagcccagcttc

SEQ ID NO: 207657 - DNA, 33 bp, Homo sapien
aatatctcactcgtcacagagttacagcttctg

SEQ ID NO: 207658 - DNA, 33 bp, Homo sapien
aatatctcactcgtcatagagttacagcttctg

SEQ ID NO: 207659 - DNA, 33 bp, Homo sapien
tcaatgtaatctgccacagtaataatctaacaa

SEQ ID NO: 207660 - DNA, 33 bp, Homo sapien
tcaatgtaatctgccatagtaataatctaacaa

SEQ ID NO: 207661 - DNA, 33 bp, Homo sapien
acacacacacattccaaaagtagcacaagttca

SEQ ID NO: 207662 - DNA, 33 bp, Homo sapien
acacacacacattccagaagtagcacaagttca

SEQ ID NO: 207663 - DNA, 33 bp, Homo sapien
gtggaaagcagtatgacgtagctaaaaacagag

SEQ ID NO: 207664 - DNA, 33 bp, Homo sapien
gtggaaagcagtatgatgtagctaaaaacagag

SEQ ID NO: 207665 - DNA, 33 bp, Homo sapien
ggaacttagcaggtacagtaacaaccagcatag

SEQ ID NO: 207666 - DNA, 33 bp, Homo sapien
ggaacttagcaggtacggtaacaaccagcatag

SEQ ID NO: 207667 - DNA, 33 bp, Homo sapien
ggttctacacgtggtacatgaacaggtatgcat

SEQ ID NO: 207668 - DNA, 33 bp, Homo sapien
ggttctacacgtggtatatgaacaggtatgcat

SEQ ID NO: 207669 - DNA, 33 bp, Homo sapien
cctttacattattaacaccaacctttaatcttg

SEQ ID NO: 207670 - DNA, 33 bp, Homo sapien
cctttacattattaacgccaacctttaatcttg

SEQ ID NO: 207671 - DNA, 33 bp, Homo sapien
gggaagccaactgcacgctgtatctcaacacaa

SEQ ID NO: 207672 - DNA, 33 bp, Homo sapien
gggaagccaactgcactctgtatctcaacacaa

SEQ ID NO: 207673 - DNA, 33 bp, Homo sapien
ttttatttattgtgtaagaagtaagatgttctg

SEQ ID NO: 207674 - DNA, 33 bp, Homo sapien
ttttatttattgtgtaggaagtaagatgttctg

SEQ ID NO: 207675 - DNA, 33 bp, Homo sapien
aaaacaaaatgaaccaataagcctctaaggtag

SEQ ID NO: 207676 - DNA, 33 bp, Homo sapien
aaaacaaaatgaaccattaagcctctaaggtag

SEQ ID NO: 207677 - DNA, 33 bp, Homo sapien
tccacaccctcaccaaaacttgctatctcttct

SEQ ID NO: 207678 - DNA, 33 bp, Homo sapien
tccacaccctcaccaacacttgctatctcttct

SEQ ID NO: 207679 - DNA, 33 bp, Homo sapien
cagctctctctaaaacagccctgaggagataga

SEQ ID NO: 207680 - DNA, 33 bp, Homo sapien
cagctctctctaaaacggccctgaggagataga

SEQ ID NO: 207681 - DNA, 33 bp, Homo sapien
gatgcctcctacaataccacaggcgtgttttca

SEQ ID NO: 207682 - DNA, 33 bp, Homo sapien
gatgcctcctacaatatcacaggcgtgttttca

SEQ ID NO: 207683 - DNA, 33 bp, Homo sapien
attcattaaaaaataagctcctactctgcacca

SEQ ID NO: 207684 - DNA, 33 bp, Homo sapien
attcattaaaaaataatctcctactctgcacca

SEQ ID NO: 207685 - DNA, 33 bp, Homo sapien
agaaaacagagcgaaaaggcaatgtgtggaata

SEQ ID NO: 207686 - DNA, 33 bp, Homo sapien
agaaaacagagcgaaatggcaatgtgtggaata

SEQ ID NO: 207687 - DNA, 33 bp, Homo sapien
ctagcccttggtgagaacagcgaagtcttgaaa

SEQ ID NO: 207688 - DNA, 33 bp, Homo sapien
ctagcccttggtgagagcagcgaagtcttgaaa

SEQ ID NO: 207689 - DNA, 33 bp, Homo sapien
tctggttctacactaacgcaaaattgtcttaaa

SEQ ID NO: 207690 - DNA, 33 bp, Homo sapien
tctggttctacactaatgcaaaattgtcttaaa

SEQ ID NO: 207691 - DNA, 33 bp, Homo sapien
gcaccacacagttttcaaccgccagatctcacg

SEQ ID NO: 207692 - DNA, 33 bp, Homo sapien
gcaccacacagttttcgaccgccagatctcacg

SEQ ID NO: 207693 - DNA, 33 bp, Homo sapien
gtcaaatgtcaattgacgatacacgtttagatt

SEQ ID NO: 207694 - DNA, 33 bp, Homo sapien
gtcaaatgtcaattgatgatacacgtttagatt

SEQ ID NO: 207695 - DNA, 33 bp, Homo sapien
aaacgtctcagaggaacgtcaaaggtaagcctg

SEQ ID NO: 207696 - DNA, 33 bp, Homo sapien
aaacgtctcagaggaatgtcaaaggtaagcctg

SEQ ID NO: 207697 - DNA, 33 bp, Homo sapien
actagacagttctcagcaaggaatgtggcagaa

SEQ ID NO: 207698 - DNA, 33 bp, Homo sapien
actagacagttctcaggaaggaatgtggcagaa

SEQ ID NO: 207699 - DNA, 33 bp, Homo sapien
cagaacagccataggtaaagatctgattaacgt

SEQ ID NO: 207700 - DNA, 33 bp, Homo sapien
cagaacagccataggtgaagatctgattaacgt

SEQ ID NO: 207701 - DNA, 33 bp, Homo sapien
aaaacatttacgtcataaaaacatccttataaa

SEQ ID NO: 207702 - DNA, 33 bp, Homo sapien
aaaacatttacgtcatgaaaacatccttataaa

SEQ ID NO: 207703 - DNA, 33 bp, Homo sapien
tagtatcttatggatccagtttgttcccaattc

SEQ ID NO: 207704 - DNA, 33 bp, Homo sapien
tagtatcttatggatctagtttgttcccaattc

SEQ ID NO: 207705 - DNA, 33 bp, Homo sapien
cttcggaaagcctccacgctggacttagtggat

SEQ ID NO: 207706 - DNA, 33 bp, Homo sapien
cttcggaaagcctccatgctggacttagtggat

SEQ ID NO: 207707 - DNA, 33 bp, Homo sapien
agccatttacttaggaaaggcattcaggaaagt

SEQ ID NO: 207708 - DNA, 33 bp, Homo sapien
agccatttacttaggagaggcattcaggaaagt

SEQ ID NO: 207709 - DNA, 33 bp, Homo sapien
ttcctgcaagggatccaatgggcccagagcagg

SEQ ID NO: 207710 - DNA, 33 bp, Homo sapien
ttcctgcaagggatccgatgggcccagagcagg

SEQ ID NO: 207711 - DNA, 33 bp, Homo sapien
ttattactctaaccaaagtttatgtccctaatc

SEQ ID NO: 207712 - DNA, 33 bp, Homo sapien
ttattactctaaccaacgtttatgtccctaatc

SEQ ID NO: 207713 - DNA, 33 bp, Homo sapien
ctttctgacaacagatcagtctggagcagttac

SEQ ID NO: 207714 - DNA, 33 bp, Homo sapien
ctttctgacaacagattagtctggagcagttac

SEQ ID NO: 207715 - DNA, 33 bp, Homo sapien
atgtccagatgtcccaatatcacataacaatac

SEQ ID NO: 207716 - DNA, 33 bp, Homo sapien
atgtccagatgtcccactatcacataacaatac

SEQ ID NO: 207717 - DNA, 33 bp, Homo sapien
gacagttatgacctacaattataagatgtttac

SEQ ID NO: 207718 - DNA, 33 bp, Homo sapien
gacagttatgacctacgattataagatgtttac

SEQ ID NO: 207719 - DNA, 33 bp, Homo sapien
tattgcatgacgctgagcttacaataccaatga

SEQ ID NO: 207720 - DNA, 33 bp, Homo sapien
tattgcatgacgctgatcttacaataccaatga

SEQ ID NO: 207721 - DNA, 33 bp, Homo sapien
tgtacctcagtctgaacgattaggtttcccttg

SEQ ID NO: 207722 - DNA, 33 bp, Homo sapien
tgtacctcagtctgaatgattaggtttcccttg

SEQ ID NO: 207723 - DNA, 33 bp, Homo sapien
tttctggatttccaatcatgggaatttgcctct

SEQ ID NO: 207724 - DNA, 33 bp, Homo sapien
tttctggatttccaatgatgggaatttgcctct

SEQ ID NO: 207725 - DNA, 33 bp, Homo sapien
tacatttgtattctgcgctagatcctgcaaatt

SEQ ID NO: 207726 - DNA, 33 bp, Homo sapien
tacatttgtattctgctctagatcctgcaaatt

SEQ ID NO: 207727 - DNA, 33 bp, Homo sapien
tccagatcaaagcatcaacaggaagattttaga

SEQ ID NO: 207728 - DNA, 33 bp, Homo sapien
tccagatcaaagcatcgacaggaagattttaga

SEQ ID NO: 207729 - DNA, 33 bp, Homo sapien
aagattagtgtggaaaatccaagatgattagtg

SEQ ID NO: 207730 - DNA, 33 bp, Homo sapien
aagattagtgtggaaattccaagatgattagtg

SEQ ID NO: 207731 - DNA, 33 bp, Homo sapien
aaccctgataaattgaaatttccacacttatct

SEQ ID NO: 207732 - DNA, 33 bp, Homo sapien
aaccctgataaattgagatttccacacttatct

SEQ ID NO: 207733 - DNA, 33 bp, Homo sapien
gctgctatggctgctacaacaacttttcaaaaa

SEQ ID NO: 207734 - DNA, 33 bp, Homo sapien
gctgctatggctgctataacaacttttcaaaaa

SEQ ID NO: 207735 - DNA, 33 bp, Homo sapien
agatgttggaactatccgacaaacagtttaaag

SEQ ID NO: 207736 - DNA, 33 bp, Homo sapien
agatgttggaactatctgacaaacagtttaaag

SEQ ID NO: 207737 - DNA, 33 bp, Homo sapien
gaatccaggagtttataaataatgttcatgggt

SEQ ID NO: 207738 - DNA, 33 bp, Homo sapien
gaatccaggagtttatgaataatgttcatgggt

SEQ ID NO: 207739 - DNA, 33 bp, Homo sapien
gttttttgatataagacaagtctactggcaaca

SEQ ID NO: 207740 - DNA, 33 bp, Homo sapien
gttttttgatataagagaagtctactggcaaca

SEQ ID NO: 207741 - DNA, 33 bp, Homo sapien
gaggtaagcagcgaataagtaagtgaagcttca

SEQ ID NO: 207742 - DNA, 33 bp, Homo sapien
gaggtaagcagcgaatgagtaagtgaagcttca

SEQ ID NO: 207743 - DNA, 33 bp, Homo sapien
aaatcaatgtaaaagcagatgtctaaacctacc

SEQ ID NO: 207744 - DNA, 33 bp, Homo sapien
aaatcaatgtaaaagctgatgtctaaacctacc

SEQ ID NO: 207745 - DNA, 33 bp, Homo sapien
ctttttagtctaccaacctctatgacatcattc

SEQ ID NO: 207746 - DNA, 33 bp, Homo sapien
ctttttagtctaccaatctctatgacatcattc

SEQ ID NO: 207747 - DNA, 33 bp, Homo sapien
aattaaatacaaaaaaagtcagtaacagacaac

SEQ ID NO: 207748 - DNA, 33 bp, Homo sapien
aattaaatacaaaaaatgtcagtaacagacaac

SEQ ID NO: 207749 - DNA, 33 bp, Homo sapien
cgttgtttatatgatgcaccataacatgtggtt

SEQ ID NO: 207750 - DNA, 33 bp, Homo sapien
cgttgtttatatgatgtaccataacatgtggtt

SEQ ID NO: 207751 - DNA, 33 bp, Homo sapien
tgaacccaacaacttcaagattcttacacaatt

SEQ ID NO: 207752 - DNA, 33 bp, Homo sapien
tgaacccaacaacttcgagattcttacacaatt

SEQ ID NO: 207753 - DNA, 33 bp, Homo sapien
cagttttcagagttaccagaggagtagagatgt

SEQ ID NO: 207754 - DNA, 33 bp, Homo sapien
cagttttcagagttactagaggagtagagatgt

SEQ ID NO: 207755 - DNA, 33 bp, Homo sapien
aaggttccaatcaacacagaggaagagaagact

SEQ ID NO: 207756 - DNA, 33 bp, Homo sapien
aaggttccaatcaacatagaggaagagaagact

SEQ ID NO: 207757 - DNA, 33 bp, Homo sapien
acacacactcttaaaagaatttgtgctaggtta

SEQ ID NO: 207758 - DNA, 33 bp, Homo sapien
acacacactcttaaaataatttgtgctaggtta

SEQ ID NO: 207759 - DNA, 33 bp, Homo sapien
aattgacaaaaggtgactatttctcattaaaaa

SEQ ID NO: 207760 - DNA, 33 bp, Homo sapien
aattgacaaaaggtgattatttctcattaaaaa

SEQ ID NO: 207761 - DNA, 33 bp, Homo sapien
ttagaattttaattgcacaaggagaacttccaa

SEQ ID NO: 207762 - DNA, 33 bp, Homo sapien
ttagaattttaattgcgcaaggagaacttccaa

SEQ ID NO: 207763 - DNA, 33 bp, Homo sapien
atccctgaaagaccaaccatgagttctgaaatt

SEQ ID NO: 207764 - DNA, 33 bp, Homo sapien
atccctgaaagaccaatcatgagttctgaaatt

SEQ ID NO: 207765 - DNA, 33 bp, Homo sapien; identical to SEQ ID NO: 207763

SEQ ID NO: 207766 - DNA, 33 bp, Homo sapien; identical to SEQ ID NO: 207764

SEQ ID NO: 207767 - DNA, 33 bp, Homo sapien
aaggaggatattgacaagttttcagatgaccct

SEQ ID NO: 207768 - DNA, 33 bp, Homo sapien
aaggaggatattgacaggttttcagatgaccct

SEQ ID NO: 207769 - DNA, 33 bp, Homo sapien
catcccaatgatgagacggaagactggagaagc

SEQ ID NO: 207770 - DNA, 33 bp, Homo sapien
catcccaatgatgagatggaagactggagaagc

SEQ ID NO: 207771 - DNA, 33 bp, Homo sapien
agtaataaatttataccagccttccactatgca

SEQ ID NO: 207772 - DNA, 33 bp, Homo sapien
agtaataaatttatactagccttccactatgca

SEQ ID NO: 207773 - DNA, 33 bp, Homo sapien
tgagaacaggtatttcccgcccaaatgttgcat

SEQ ID NO: 207774 - DNA, 33 bp, Homo sapien
tgagaacaggtatttctcgcccaaatgttgcat

SEQ ID NO: 207775 - DNA, 33 bp, Homo sapien
ctcaggatacagaaagcccactgtccttgtgat

SEQ ID NO: 207776 - DNA, 33 bp, Homo sapien
ctcaggatacagaaagtccactgtccttgtgat

SEQ ID NO: 207777 - DNA, 33 bp, Homo sapien
aaagcttttagattaaatagccaatgcaattct

SEQ ID NO: 207778 - DNA, 33 bp, Homo sapien
aaagcttttagattaagtagccaatgcaattct

SEQ ID NO: 207779 - DNA, 33 bp, Homo sapien
tcatctatgggctgctaacaatcacatttattt

SEQ ID NO: 207780 - DNA, 33 bp, Homo sapien
tcatctatgggctgcttacaatcacatttattt

SEQ ID NO: 207781 - DNA, 33 bp, Homo sapien
ataagagtctcttgccaggcaaaaacagtcaaa

SEQ ID NO: 207782 - DNA, 33 bp, Homo sapien
ataagagtctcttgccgggcaaaaacagtcaaa

SEQ ID NO: 207783 - DNA, 33 bp, Homo sapien
actatgagccaaatcaaggatggaattaggaat

SEQ ID NO: 207784 - DNA, 33 bp, Homo sapien
actatgagccaaatcatggatggaattaggaat

SEQ ID NO: 207785 - DNA, 33 bp, Homo sapien
agtaaccaagcatgaacagtagccttgattttc

SEQ ID NO: 207786 - DNA, 33 bp, Homo sapien
agtaaccaagcatgaatagtagccttgattttc

SEQ ID NO: 207787 - DNA, 33 bp, Homo sapien
ttgttatgtacagcgcaaagacttagttaatga

SEQ ID NO: 207788 - DNA, 33 bp, Homo sapien
ttgttatgtacagcgcgaagacttagttaatga

SEQ ID NO: 207789 - DNA, 33 bp, Homo sapien
atcatacagaaccagcaataaatcaacaagata

SEQ ID NO: 207790 - DNA, 33 bp, Homo sapien
atcatacagaaccagcgataaatcaacaagata

SEQ ID NO: 207791 - DNA, 33 bp, Homo sapien
gggcagtgtttttctacctgggatggggtaatt

SEQ ID NO: 207792 - DNA, 33 bp, Homo sapien
gggcagtgtttttctatctgggatggggtaatt

SEQ ID NO: 207793 - DNA, 33 bp, Homo sapien
ctattctcagcatctccccccaaaacaaccagt

SEQ ID NO: 207794 - DNA, 33 bp, Homo sapien
ctattctcagcatctcgccccaaaacaaccagt

SEQ ID NO: 207795 - DNA, 33 bp, Homo sapien
ctggacttctgagctacagaaaccgcaagataa

SEQ ID NO: 207796 - DNA, 33 bp, Homo sapien
ctggacttctgagctatagaaaccgcaagataa

SEQ ID NO: 207797 - DNA, 33 bp, Homo sapien
cttccagaaaacaaccaggtcctcgaatttggc

SEQ ID NO: 207798 - DNA, 33 bp, Homo sapien
cttccagaaaacaaccgggtcctcgaatttggc

SEQ ID NO: 207799 - DNA, 33 bp, Homo sapien
gcttttaagcttgaaacagtttggatgtttgtc

SEQ ID NO: 207800 - DNA, 33 bp, Homo sapien
gcttttaagcttgaaatagtttggatgtttgtc

SEQ ID NO: 207801 - DNA, 33 bp, Homo sapien
tttcaagttattggtaagtatatgtaaaataag

SEQ ID NO: 207802 - DNA, 33 bp, Homo sapien
tttcaagttattggtaggtatatgtaaaataag

SEQ ID NO: 207803 - DNA, 33 bp, Homo sapien
gaggatatacataggaataggtttgttgggcca

SEQ ID NO: 207804 - DNA, 33 bp, Homo sapien
gaggatatacataggagtaggtttgttgggcca

SEQ ID NO: 207805 - DNA, 33 bp, Homo sapien
gaaacctcctccttaaaaatgccaagcatccta

SEQ ID NO: 207806 - DNA, 33 bp, Homo sapien
gaaacctcctccttaataatgccaagcatccta

SEQ ID NO: 207807 - DNA, 33 bp, Homo sapien
ctgacaatttctctgagcaggtggcagctgaag

SEQ ID NO: 207808 - DNA, 33 bp, Homo sapien
ctgacaatttctctgatcaggtggcagctgaag

SEQ ID NO: 207809 - DNA, 33 bp, Homo sapien
tcagggctaaccacaagaagtttgcttccatgt

SEQ ID NO: 207810 - DNA, 33 bp, Homo sapien
tcagggctaaccacaataagtttgcttccatgt

SEQ ID NO: 207811 - DNA, 33 bp, Homo sapien
tactaaaagaggtgacaggaggaatttggccca

SEQ ID NO: 207812 - DNA, 33 bp, Homo sapien
tactaaaagaggtgacgggaggaatttggccca

SEQ ID NO: 207813 - DNA, 33 bp, Homo sapien
gtggaaaataatcacaacttggagaaattatca

SEQ ID NO: 207814 - DNA, 33 bp, Homo sapien
gtggaaaataatcacaccttggagaaattatca

SEQ ID NO: 207815 - DNA, 33 bp, Homo sapien
tgagtgaaaagatatgcaaccagcctaaagagg

SEQ ID NO: 207816 - DNA, 33 bp, Homo sapien
tgagtgaaaagatatggaaccagcctaaagagg

SEQ ID NO: 207817 - DNA, 33 bp, Homo sapien
tctacgtacattttgtcaaagatcagttggtta

SEQ ID NO: 207818 - DNA, 33 bp, Homo sapien
tctacgtacattttgttaaagatcagttggtta

SEQ ID NO: 207819 - DNA, 33 bp, Homo sapien
gtgaagctgaggaatacggaataggaatagagc

SEQ ID NO: 207820 - DNA, 33 bp, Homo sapien
gtgaagctgaggaatatggaataggaatagagc

SEQ ID NO: 207821 - DNA, 33 bp, Homo sapien
ttttgcatttcaatcagcaaagaatgaaagtcc

SEQ ID NO: 207822 - DNA, 33 bp, Homo sapien
ttttgcatttcaatcatcaaagaatgaaagtcc

SEQ ID NO: 207823 - DNA, 33 bp, Homo sapien
agaaattgcaccttcaaattaacttgacaaggc

SEQ ID NO: 207824 - DNA, 33 bp, Homo sapien
agaaattgcaccttcagattaacttgacaaggc

SEQ ID NO: 207825 - DNA, 33 bp, Homo sapien
tagtggaaaacagtcaatcttccctgccagtgt

SEQ ID NO: 207826 - DNA, 33 bp, Homo sapien
tagtggaaaacagtcagtcttccctgccagtgt

SEQ ID NO: 207827 - DNA, 33 bp, Homo sapien
agtgccccttttccacaacagagaggtattcag

SEQ ID NO: 207828 - DNA, 33 bp, Homo sapien
agtgccccttttccacgacagagaggtattcag

SEQ ID NO: 207829 - DNA, 33 bp, Homo sapien
agagggtaattcatagactagactcaggaaagg

SEQ ID NO: 207830 - DNA, 33 bp, Homo sapien
agagggtaattcatagtctagactcaggaaagg

SEQ ID NO: 207831 - DNA, 33 bp, Homo sapien
ttgacatctcctttggccaagtaacagagcaca

SEQ ID NO: 207832 - DNA, 33 bp, Homo sapien
ttgacatctcctttggtcaagtaacagagcaca

SEQ ID NO: 207833 - DNA, 33 bp, Homo sapien
atctggatcatatctaacatcttctcaagtatt

SEQ ID NO: 207834 - DNA, 33 bp, Homo sapien
atctggatcatatctatcatcttctcaagtatt

SEQ ID NO: 207835 - DNA, 33 bp, Homo sapien
agggcattcagttgcaatacagaatttaataac

SEQ ID NO: 207836 - DNA, 33 bp, Homo sapien
agggcattcagttgcattacagaatttaataac

SEQ ID NO: 207837 - DNA, 33 bp, Homo sapien
ccttgcagaaatagataacttggatgtgagtca

SEQ ID NO: 207838 - DNA, 33 bp, Homo sapien
ccttgcagaaatagattacttggatgtgagtca

SEQ ID NO: 207839 - DNA, 33 bp, Homo sapien
ggggattgggtaagacacaatgaatctcctctc

SEQ ID NO: 207840 - DNA, 33 bp, Homo sapien
ggggattgggtaagacgcaatgaatctcctctc

SEQ ID NO: 207841 - DNA, 33 bp, Homo sapien
ctggttgcacacaatacattcattacattgatg

SEQ ID NO: 207842 - DNA, 33 bp, Homo sapien
ctggttgcacacaatagattcattacattgatg

SEQ ID NO: 207843 - DNA, 33 bp, Homo sapien
accagacatattgtccaaacttctgttcagtgg

SEQ ID NO: 207844 - DNA, 33 bp, Homo sapien
accagacatattgtccgaacttctgttcagtgg

SEQ ID NO: 207845 - DNA, 33 bp, Homo sapien
gatcatgcagaatggacgcggcgtgtgtaaata

SEQ ID NO: 207846 - DNA, 33 bp, Homo sapien
gatcatgcagaatggatgcggcgtgtgtaaata

SEQ ID NO: 207847 - DNA, 33 bp, Homo sapien
gtttgagaggtaaggaagaagctgggatgtctt

SEQ ID NO: 207848 - DNA, 33 bp, Homo sapien
gtttgagaggtaaggacgaagctgggatgtctt

SEQ ID NO: 207849 - DNA, 33 bp, Homo sapien
ctttattgaggtcaaactgatatacaaaatatt

SEQ ID NO: 207850 - DNA, 33 bp, Homo sapien
ctttattgaggtcaaattgatatacaaaatatt

SEQ ID NO: 207851 - DNA, 33 bp, Homo sapien
gccccctttttcaaagaagttgcaaggactaaa

SEQ ID NO: 207852 - DNA, 33 bp, Homo sapien
gccccctttttcaaagtagttgcaaggactaaa

SEQ ID NO: 207853 - DNA, 33 bp, Homo sapien
ggaactaatcacaccactaattcatgccagaga

SEQ ID NO: 207854 - DNA, 33 bp, Homo sapien
ggaactaatcacaccattaattcatgccagaga

SEQ ID NO: 207855 - DNA, 33 bp, Homo sapien
atcttaagtatctccaaataattgggctacaac

SEQ ID NO: 207856 - DNA, 33 bp, Homo sapien
atcttaagtatctccagataattgggctacaac

SEQ ID NO: 207857 - DNA, 33 bp, Homo sapien
tggaaccactagcttcccataatctatattaat

SEQ ID NO: 207858 - DNA, 33 bp, Homo sapien
tggaaccactagcttctcataatctatattaat

SEQ ID NO: 207859 - DNA, 33 bp, Homo sapien
ccatttcttaccctaacctcgaaacctaaatta

SEQ ID NO: 207860 - DNA, 33 bp, Homo sapien
ccatttcttaccctaatctcgaaacctaaatta

SEQ ID NO: 207861 - DNA, 33 bp, Homo sapien
gccaacagacacaggaaaaaacgctcatcatca

SEQ ID NO: 207862 - DNA, 33 bp, Homo sapien
gccaacagacacaggagaaaacgctcatcatca

SEQ ID NO: 207863 - DNA, 33 bp, Homo sapien
tgttcttaacctcataacatttccacgagtgtc

SEQ ID NO: 207864 - DNA, 33 bp, Homo sapien
tgttcttaacctcatagcatttccacgagtgtc

SEQ ID NO: 207865 - DNA, 33 bp, Homo sapien
tctcattgcataacgaaaagacaaaatatgaag

SEQ ID NO: 207866 - DNA, 33 bp, Homo sapien
tctcattgcataacgagaagacaaaatatgaag

SEQ ID NO: 207867 - DNA, 33 bp, Homo sapien
ttatcttcattttaaaactttggctatacagtc

SEQ ID NO: 207868 - DNA, 33 bp, Homo sapien
ttatcttcattttaaagctttggctatacagtc

SEQ ID NO: 207869 - DNA, 33 bp, Homo sapien
ttatattccatagcttcaaaaaactcatcatac

SEQ ID NO: 207870 - DNA, 33 bp, Homo sapien
ttatattccatagcttgaaaaaactcatcatac

SEQ ID NO: 207871 - DNA, 33 bp, Homo sapien
tggagggagtgagaataagaaaactagaagaaa

SEQ ID NO: 207872 - DNA, 33 bp, Homo sapien
tggagggagtgagaatgagaaaactagaagaaa

SEQ ID NO: 207873 - DNA, 33 bp, Homo sapien
taataatagacttaaacggcactggagggagtg

SEQ ID NO: 207874 - DNA, 33 bp, Homo sapien
taataatagacttaaagggcactggagggagtg

SEQ ID NO: 207875 - DNA, 33 bp, Homo sapien
gacttgcttattgttgcagcagttagattgtat

SEQ ID NO: 207876 - DNA, 33 bp, Homo sapien
gacttgcttattgttgtagcagttagattgtat

SEQ ID NO: 207877 - DNA, 33 bp, Homo sapien
atttcaataaatctacccttcaccattctaatc

SEQ ID NO: 207878 - DNA, 33 bp, Homo sapien
atttcaataaatctactcttcaccattctaatc

SEQ ID NO: 207879 - DNA, 33 bp, Homo sapien
aggaacacgaaagaagaaaatatgaggaaaagg

SEQ ID NO: 207880 - DNA, 33 bp, Homo sapien
aggaacacgaaagaaggaaatatgaggaaaagg

SEQ ID NO: 207881 - DNA, 33 bp, Homo sapien; identical to SEQ ID NO: 207879

SEQ ID NO: 207882 - DNA, 33 bp, Homo sapien; identical to SEQ ID NO: 207880

SEQ ID NO: 207883 - DNA, 33 bp, Homo sapien
agatgtcttccaatatcaaacataagtgataca

SEQ ID NO: 207884 - DNA, 33 bp, Homo sapien
agatgtcttccaatattaaacataagtgataca

SEQ ID NO: 207885 - DNA, 33 bp, Homo sapien
tcaactagaatgaaaactgatataggttgattt

SEQ ID NO: 207886 - DNA, 33 bp, Homo sapien
tcaactagaatgaaaattgatataggttgattt

SEQ ID NO: 207887 - DNA, 33 bp, Homo sapien
acagttcgtcatatacacttcatcttctagtgt

SEQ ID NO: 207888 - DNA, 33 bp, Homo sapien
acagttcgtcatatacgcttcatcttctagtgt

SEQ ID NO: 207889 - DNA, 33 bp, Homo sapien
acaacgttccacatgaaacagcagagcaataga

SEQ ID NO: 207890 - DNA, 33 bp, Homo sapien
acaacgttccacatgagacagcagagcaataga

SEQ ID NO: 207891 - DNA, 33 bp, Homo sapien
atattaagggatctgaggcccagaaaccacacc

SEQ ID NO: 207892 - DNA, 33 bp, Homo sapien
atattaagggatctgatgcccagaaaccacacc

SEQ ID NO: 207893 - DNA, 33 bp, Homo sapien
tcagacacagagatgtcaaaaggtgttaaataa

SEQ ID NO: 207894 - DNA, 33 bp, Homo sapien
tcagacacagagatgttaaaaggtgttaaataa

SEQ ID NO: 207895 - DNA, 33 bp, Homo sapien
gatacttcctcttgacaaaaacaggggcagtac

SEQ ID NO: 207896 - DNA, 33 bp, Homo sapien
gatacttcctcttgaccaaaacaggggcagtac

SEQ ID NO: 207897 - DNA, 33 bp, Homo sapien
ctttatcatttgcagaagtagtataaagattaa

SEQ ID NO: 207898 - DNA, 33 bp, Homo sapien
ctttatcatttgcagaggtagtataaagattaa

SEQ ID NO: 207899 - DNA, 33 bp, Homo sapien
tttaatgtggagttcacgtaactttgaagatag

SEQ ID NO: 207900 - DNA, 33 bp, Homo sapien
tttaatgtggagttcatgtaactttgaagatag

SEQ ID NO: 207901 - DNA, 33 bp, Homo sapien
gataaaattatttacacagttctccataatttg

SEQ ID NO: 207902 - DNA, 33 bp, Homo sapien
gataaaattatttacagagttctccataatttg

SEQ ID NO: 207903 - DNA, 33 bp, Homo sapien
tcactgcacttataaaaaaagaatgatatgtga

SEQ ID NO: 207904 - DNA, 33 bp, Homo sapien
tcactgcacttataaacaaagaatgatatgtga

SEQ ID NO: 207905 - DNA, 33 bp, Homo sapien
taaagctgaaggcataaaaatctgctcttttag

SEQ ID NO: 207906 - DNA, 33 bp, Homo sapien
taaagctgaaggcatataaatctgctcttttag

SEQ ID NO: 207907 - DNA, 33 bp, Homo sapien
tgtttcattcatagagcattggcaggtacattt

SEQ ID NO: 207908 - DNA, 33 bp, Homo sapien
tgtttcattcatagagtattggcaggtacattt

SEQ ID NO: 207909 - DNA, 33 bp, Homo sapien
ttgaaaaccacctggaaacaacttaccattcta

SEQ ID NO: 207910 - DNA, 33 bp, Homo sapien
ttgaaaaccacctggagacaacttaccattcta

SEQ ID NO: 207911 - DNA, 33 bp, Homo sapien
caacatcaaggcaagaagctacaccagcaaaaa

SEQ ID NO: 207912 - DNA, 33 bp, Homo sapien
caacatcaaggcaagacgctacaccagcaaaaa

SEQ ID NO: 207913 - DNA, 33 bp, Homo sapien
gtttatttatgtttacaataggagtacatcaaa

SEQ ID NO: 207914 - DNA, 33 bp, Homo sapien
gtttatttatgtttacgataggagtacatcaaa

SEQ ID NO: 207915 - DNA, 33 bp, Homo sapien
tatacagctcatcaacaatgtatttctttgtat

SEQ ID NO: 207916 - DNA, 33 bp, Homo sapien
tatacagctcatcaacgatgtatttctttgtat

SEQ ID NO: 207917 - DNA, 33 bp, Homo sapien
cttgagcttcttgacaaatatgtgagactcaaa

SEQ ID NO: 207918 - DNA, 33 bp, Homo sapien
cttgagcttcttgacagatatgtgagactcaaa

SEQ ID NO: 207919 - DNA, 33 bp, Homo sapien
tatgttaaaaagtctcagaatagctatcaccag

SEQ ID NO: 207920 - DNA, 33 bp, Homo sapien
tatgttaaaaagtctctgaatagctatcaccag

SEQ ID NO: 207921 - DNA, 33 bp, Homo sapien
gatctacaggaccacgcatctgaatggattctt

SEQ ID NO: 207922 - DNA, 33 bp, Homo sapien
gatctacaggaccacgtatctgaatggattctt

SEQ ID NO: 207923 - DNA, 33 bp, Homo sapien
gtcctgtagatcaagcactggtatggagataac

SEQ ID NO: 207924 - DNA, 33 bp, Homo sapien
gtcctgtagatcaagcgctggtatggagataac

SEQ ID NO: 207925 - DNA, 33 bp, Homo sapien
ggacaaatagttgtggaatgtattagaaaagtg

SEQ ID NO: 207926 - DNA, 33 bp, Homo sapien
ggacaaatagttgtgggatgtattagaaaagtg

SEQ ID NO: 207927 - DNA, 33 bp, Homo sapien
tctcagaggatgggcacgagttttgtcacccta

SEQ ID NO: 207928 - DNA, 33 bp, Homo sapien
tctcagaggatgggcatgagttttgtcacccta

SEQ ID NO: 207929 - DNA, 33 bp, Homo sapien
attgatgttggcttcaccaatcttgtccagccc

SEQ ID NO: 207930 - DNA, 33 bp, Homo sapien
attgatgttggcttcatcaatcttgtccagccc

SEQ ID NO: 207931 - DNA, 33 bp, Homo sapien
tactcaaaatacaactcacagatcatatgggct

SEQ ID NO: 207932 - DNA, 33 bp, Homo sapien
tactcaaaatacaacttacagatcatatgggct

SEQ ID NO: 207933 - DNA, 33 bp, Homo sapien
tcagttgtgcatttggcagacccagataaagag

SEQ ID NO: 207934 - DNA, 33 bp, Homo sapien
tcagttgtgcatttggtagacccagataaagag

SEQ ID NO: 207935 - DNA, 33 bp, Homo sapien
acttaccaggctttcacacaaatactaaatgct

SEQ ID NO: 207936 - DNA, 33 bp, Homo sapien
acttaccaggctttcatacaaatactaaatgct

SEQ ID NO: 207937 - DNA, 33 bp, Homo sapien
tgaatacaatttataaacatgattctcaagcgt

SEQ ID NO: 207938 - DNA, 33 bp, Homo sapien
tgaatacaatttataagcatgattctcaagcgt

SEQ ID NO: 207939 - DNA, 33 bp, Homo sapien
cgatggacagggcataaacatctgctttctcta

SEQ ID NO: 207940 - DNA, 33 bp, Homo sapien
cgatggacagggcatacacatctgctttctcta

SEQ ID NO: 207941 - DNA, 33 bp, Homo sapien
gctaggtcctgcatcgcaaaagaattttgtggt

SEQ ID NO: 207942 - DNA, 33 bp, Homo sapien
gctaggtcctgcatcgtaaaagaattttgtggt

SEQ ID NO: 207943 - DNA, 33 bp, Homo sapien
agctggcagctgaatgcaataacctggaataaa

SEQ ID NO: 207944 - DNA, 33 bp, Homo sapien
agctggcagctgaatgtaataacctggaataaa

SEQ ID NO: 207945 - DNA, 33 bp, Homo sapien
tctaagacataaatcaaccttgcaaatttttct

SEQ ID NO: 207946 - DNA, 33 bp, Homo sapien
tctaagacataaatcatccttgcaaatttttct

SEQ ID NO: 207947 - DNA, 33 bp, Homo sapien
ataatgggtaagatgaaggtaagaaataaaaag

SEQ ID NO: 207948 - DNA, 33 bp, Homo sapien
ataatgggtaagatgagggtaagaaataaaaag

SEQ ID NO: 207949 - DNA, 33 bp, Homo sapien
ttatctgcattttcagactagtccctgtatgtt

SEQ ID NO: 207950 - DNA, 33 bp, Homo sapien
ttatctgcattttcaggctagtccctgtatgtt

SEQ ID NO: 207951 - DNA, 33 bp, Homo sapien
gaagagtcccttgatgcatggtatcacagacac

SEQ ID NO: 207952 - DNA, 33 bp, Homo sapien
gaagagtcccttgatgtatggtatcacagacac

SEQ ID NO: 207953 - DNA, 33 bp, Homo sapien
gtcgtcctcttcgaccaagtgcacagcttcagg

SEQ ID NO: 207954 - DNA, 33 bp, Homo sapien
gtcgtcctcttcgacccagtgcacagcttcagg

SEQ ID NO: 207955 - DNA, 33 bp, Homo sapien
tagaacctccaaacaacctctcaaatactagaa

SEQ ID NO: 207956 - DNA, 33 bp, Homo sapien
tagaacctccaaacaatctctcaaatactagaa

SEQ ID NO: 207957 - DNA, 33 bp, Homo sapien
ttatgaaagactctcacgaaaatgtctgaaaca

SEQ ID NO: 207958 - DNA, 33 bp, Homo sapien
ttatgaaagactctcatgaaaatgtctgaaaca

SEQ ID NO: 207959 - DNA, 33 bp, Homo sapien
tttcatttttatcacaatgctagatgctacctg

SEQ ID NO: 207960 - DNA, 33 bp, Homo sapien
tttcatttttatcacagtgctagatgctacctg

SEQ ID NO: 207961 - DNA, 33 bp, Homo sapien
tacctagaatgtattacgtataggaccttgcta

SEQ ID NO: 207962 - DNA, 33 bp, Homo sapien
tacctagaatgtattatgtataggaccttgcta

SEQ ID NO: 207963 - DNA, 33 bp, Homo sapien
taactgtgtttgagtaagggtaggcaggcatat

SEQ ID NO: 207964 - DNA, 33 bp, Homo sapien
taactgtgtttgagtaggggtaggcaggcatat

SEQ ID NO: 207965 - DNA, 33 bp, Homo sapien
tattaattataagaggacacaggatttaaaaaa

SEQ ID NO: 207966 - DNA, 33 bp, Homo sapien
tattaattataagaggtcacaggatttaaaaaa

SEQ ID NO: 207967 - DNA, 33 bp, Homo sapien
tgcaatggaaatgataagttgaaggtatatgaa

SEQ ID NO: 207968 - DNA, 33 bp, Homo sapien
tgcaatggaaatgataggttgaaggtatatgaa

SEQ ID NO: 207969 - DNA, 33 bp, Homo sapien
tgactttcccttcatacgtctctctgtctatag

SEQ ID NO: 207970 - DNA, 33 bp, Homo sapien
tgactttcccttcatatgtctctctgtctatag

SEQ ID NO: 207971 - DNA, 33 bp, Homo sapien
gacttcagttctagtgaaaaggactcacatggt

SEQ ID NO: 207972 - DNA, 33 bp, Homo sapien
gacttcagttctagtgtaaaggactcacatggt

SEQ ID NO: 207973 - DNA, 33 bp, Homo sapien
ctgtctcctggagtccaaatagaccacagtcct

SEQ ID NO: 207974 - DNA, 33 bp, Homo sapien
ctgtctcctggagtccgaatagaccacagtcct

SEQ ID NO: 207975 - DNA, 33 bp, Homo sapien
cagttcatttgtgcctaaatctcctaaactgag

SEQ ID NO: 207976 - DNA, 33 bp, Homo sapien
cagttcatttgtgcctgaatctcctaaactgag

SEQ ID NO: 207977 - DNA, 33 bp, Homo sapien
cagcaggagagaccaaccgaccgcacacatgtt

SEQ ID NO: 207978 - DNA, 33 bp, Homo sapien
cagcaggagagaccaatcgaccgcacacatgtt

SEQ ID NO: 207979 - DNA, 33 bp, Homo sapien
taagtagaatcgcagcagaagatttcaacacaa

SEQ ID NO: 207980 - DNA, 33 bp, Homo sapien
taagtagaatcgcagcggaagatttcaacacaa

SEQ ID NO: 207981 - DNA, 33 bp, Homo sapien
tatgaaaacctctgtcaagcagctaagaacctg

SEQ ID NO: 207982 - DNA, 33 bp, Homo sapien
tatgaaaacctctgtcgagcagctaagaacctg

SEQ ID NO: 207983 - DNA, 33 bp, Homo sapien
aaagtggagtttgctaaggaaaagatactgagt

SEQ ID NO: 207984 - DNA, 33 bp, Homo sapien
aaagtggagtttgctacggaaaagatactgagt

SEQ ID NO: 207985 - DNA, 33 bp, Homo sapien
aacaacaaagaatccaaagcaatgtttaccagt

SEQ ID NO: 207986 - DNA, 33 bp, Homo sapien
aacaacaaagaatccagagcaatgtttaccagt

SEQ ID NO: 207987 - DNA, 33 bp, Homo sapien
ttttcactgggtgtagaatgctaggctgacaga

SEQ ID NO: 207988 - DNA, 33 bp, Homo sapien
ttttcactgggtgtagtatgctaggctgacaga

SEQ ID NO: 207989 - DNA, 33 bp, Homo sapien
attagttcagccactacaaaaagcagtttggag

SEQ ID NO: 207990 - DNA, 33 bp, Homo sapien
attagttcagccactataaaaagcagtttggag

SEQ ID NO: 207991 - DNA, 33 bp, Homo sapien
tttcagcgagctcgcaacaacgtcctgtggtgt

SEQ ID NO: 207992 - DNA, 33 bp, Homo sapien
tttcagcgagctcgcagcaacgtcctgtggtgt

SEQ ID NO: 207993 - DNA, 33 bp, Homo sapien
aaagaaactgaatctgcagttgaaaaccttact

SEQ ID NO: 207994 - DNA, 33 bp, Homo sapien
aaagaaactgaatctgtagttgaaaaccttact

SEQ ID NO: 207995 - DNA, 33 bp, Homo sapien
gtcctgtggggagtaacgtttctgagtttgtgg

SEQ ID NO: 207996 - DNA, 33 bp, Homo sapien
gtcctgtggggagtaatgtttctgagtttgtgg

SEQ ID NO: 207997 - DNA, 33 bp, Homo sapien
gtgaaatcaagcaggcaataacatgttaagggt

SEQ ID NO: 207998 - DNA, 33 bp, Homo sapien
gtgaaatcaagcaggcgataacatgttaagggt

SEQ ID NO: 207999 - DNA, 33 bp, Homo sapien
tgaccatgaaaataaaggggtatattgttcatc

SEQ ID NO: 208000 - DNA, 33 bp, Homo sapien
tgaccatgaaaataaatgggtatattgttcatc

SEQ ID NO: 208001 - DNA, 33 bp, Homo sapien
gagccatttggaggaccagtggtatggaatgca

SEQ ID NO: 208002 - DNA, 33 bp, Homo sapien
gagccatttggaggactagtggtatggaatgca

SEQ ID NO: 208003 - DNA, 33 bp, Homo sapien
agcctgaagtttttaacatacaccacgtgtaca

SEQ ID NO: 208004 - DNA, 33 bp, Homo sapien
agcctgaagtttttaatatacaccacgtgtaca

SEQ ID NO: 208005 - DNA, 33 bp, Homo sapien
caacagaccaaaacatcactaccccaaaagaga

SEQ ID NO: 208006 - DNA, 33 bp, Homo sapien
caacagaccaaaacatgactaccccaaaagaga

SEQ ID NO: 208007 - DNA, 33 bp, Homo sapien
aagataagttcaggaactggagaatgaggggag

SEQ ID NO: 208008 - DNA, 33 bp, Homo sapien
aagataagttcaggaattggagaatgaggggag

SEQ ID NO: 208009 - DNA, 33 bp, Homo sapien
ttgaagagtttctgtaaagctgaacaggcagtg

SEQ ID NO: 208010 - DNA, 33 bp, Homo sapien
ttgaagagtttctgtacagctgaacaggcagtg

SEQ ID NO: 208011 - DNA, 33 bp, Homo sapien
agcacaggcaaaacaaattgtgattggcatcag

SEQ ID NO: 208012 - DNA, 33 bp, Homo sapien
agcacaggcaaaacaacttgtgattggcatcag

SEQ ID NO: 208013 - DNA, 33 bp, Homo sapien
attttctttatgtttacattttattgacctcaa

SEQ ID NO: 208014 - DNA, 33 bp, Homo sapien
attttctttatgtttagattttattgacctcaa

SEQ ID NO: 208015 - DNA, 33 bp, Homo sapien
gaaaatggatgtgaaacttaaggcttgtgtata

SEQ ID NO: 208016 - DNA, 33 bp, Homo sapien
gaaaatggatgtgaaagttaaggcttgtgtata

SEQ ID NO: 208017 - DNA, 33 bp, Homo sapien
ttcaaaggatattcataaaatttggggcaagga

SEQ ID NO: 208018 - DNA, 33 bp, Homo sapien
ttcaaaggatattcattaaatttggggcaagga

SEQ ID NO: 208019 - DNA, 33 bp, Homo sapien
ttctattcagatatttaaaaggtgctagactct

SEQ ID NO: 208020 - DNA, 33 bp, Homo sapien
ttctattcagatatttgaaaggtgctagactct

SEQ ID NO: 208021 - DNA, 33 bp, Homo sapien
tacccctatatggccacgtaatttcctctctcc

SEQ ID NO: 208022 - DNA, 33 bp, Homo sapien
tacccctatatggccatgtaatttcctctctcc

SEQ ID NO: 208023 - DNA, 33 bp, Homo sapien
gaaggctaacaaatgagaaataacttacaaagt

SEQ ID NO: 208024 - DNA, 33 bp, Homo sapien
gaaggctaacaaatgataaataacttacaaagt

SEQ ID NO: 208025 - DNA, 33 bp, Homo sapien
agttttaaactctagaaagaaggctaacaaatg

SEQ ID NO: 208026 - DNA, 33 bp, Homo sapien
agttttaaactctagacagaaggctaacaaatg

SEQ ID NO: 208027 - DNA, 33 bp, Homo sapien
ataaccagaacttagccccaccaatatttcttc

SEQ ID NO: 208028 - DNA, 33 bp, Homo sapien
ataaccagaacttagctccaccaatatttcttc

SEQ ID NO: 208029 - DNA, 33 bp, Homo sapien
tactgaagctgagagacaggttacgtgacctgt

SEQ ID NO: 208030 - DNA, 33 bp, Homo sapien
tactgaagctgagagagaggttacgtgacctgt

SEQ ID NO: 208031 - DNA, 33 bp, Homo sapien
tttccatgtatcaggaaagaggtgtcttatgta

SEQ ID NO: 208032 - DNA, 33 bp, Homo sapien
tttccatgtatcaggacagaggtgtcttatgta

SEQ ID NO: 208033 - DNA, 33 bp, Homo sapien
tcacccttgaacagcaactcctgctcactaaag

SEQ ID NO: 208034 - DNA, 33 bp, Homo sapien
tcacccttgaacagcacctcctgctcactaaag

SEQ ID NO: 208035 - DNA, 33 bp, Homo sapien
cttttagtaggctcaaagttgcttcataccatt

SEQ ID NO: 208036 - DNA, 33 bp, Homo sapien
cttttagtaggctcaacgttgcttcataccatt

SEQ ID NO: 208037 - DNA, 33 bp, Homo sapien
tcactacgaagcaaaaaagacaaagaccaaggt

SEQ ID NO: 208038 - DNA, 33 bp, Homo sapien
tcactacgaagcaaaacagacaaagaccaaggt

SEQ ID NO: 208039 - DNA, 33 bp, Homo sapien
tgttattaagatgttcaaaaagctcaagaattc

SEQ ID NO: 208040 - DNA, 33 bp, Homo sapien
tgttattaagatgttcgaaaagctcaagaattc

SEQ ID NO: 208041 - DNA, 33 bp, Homo sapien
caatgaggacaagtagacagtacacagaaagac

SEQ ID NO: 208042 - DNA, 33 bp, Homo sapien
caatgaggacaagtaggcagtacacagaaagac

SEQ ID NO: 208043 - DNA, 33 bp, Homo sapien
aagatagggtaggaaacatgatttgtgacctgt

SEQ ID NO: 208044 - DNA, 33 bp, Homo sapien
aagatagggtaggaaatatgatttgtgacctgt

SEQ ID NO: 208045 - DNA, 33 bp, Homo sapien
aatgcatttcttgacccaatgacttcctttgtg

SEQ ID NO: 208046 - DNA, 33 bp, Homo sapien
aatgcatttcttgaccgaatgacttcctttgtg

SEQ ID NO: 208047 - DNA, 33 bp, Homo sapien
ccaagttttatctaggccaagcagaaaactttg

SEQ ID NO: 208048 - DNA, 33 bp, Homo sapien
ccaagttttatctaggtcaagcagaaaactttg

SEQ ID NO: 208049 - DNA, 33 bp, Homo sapien
aatgatggtaaatgaacgaaacatggcacttgc

SEQ ID NO: 208050 - DNA, 33 bp, Homo sapien
aatgatggtaaatgaatgaaacatggcacttgc

SEQ ID NO: 208051 - DNA, 33 bp, Homo sapien
gggatttctgaagttccataaactggagctaac

SEQ ID NO: 208052 - DNA, 33 bp, Homo sapien
gggatttctgaagttcgataaactggagctaac

SEQ ID NO: 208053 - DNA, 33 bp, Homo sapien
taacatatgttgcctcactagcattaactacag

SEQ ID NO: 208054 - DNA, 33 bp, Homo sapien
taacatatgttgcctcgctagcattaactacag

SEQ ID NO: 208055 - DNA, 33 bp, Homo sapien
agatctagaaagtccacgaaccccaagcaaaag

SEQ ID NO: 208056 - DNA, 33 bp, Homo sapien
agatctagaaagtccatgaaccccaagcaaaag

SEQ ID NO: 208057 - DNA, 33 bp, Homo sapien
tgtctccctacaattaaacaaatactcagaatg

SEQ ID NO: 208058 - DNA, 33 bp, Homo sapien
tgtctccctacaattatacaaatactcagaatg

SEQ ID NO: 208059 - DNA, 33 bp, Homo sapien
catccccaggtacctcagaatcacagtttccta

SEQ ID NO: 208060 - DNA, 33 bp, Homo sapien
catccccaggtacctcggaatcacagtttccta

SEQ ID NO: 208061 - DNA, 33 bp, Homo sapien
ccatcaagaccaataacgaagaattggaagtgt

SEQ ID NO: 208062 - DNA, 33 bp, Homo sapien
ccatcaagaccaataatgaagaattggaagtgt

SEQ ID NO: 208063 - DNA, 33 bp, Homo sapien
aaataaaacagatatcaaaaatttcttacacac

SEQ ID NO: 208064 - DNA, 33 bp, Homo sapien
aaataaaacagatatccaaaatttcttacacac

SEQ ID NO: 208065 - DNA, 33 bp, Homo sapien
taactatgtgagacgacggacatattaagttgc

SEQ ID NO: 208066 - DNA, 33 bp, Homo sapien
taactatgtgagacgatggacatattaagttgc

SEQ ID NO: 208067 - DNA, 33 bp, Homo sapien
atttcactaagcataacgtcttccaagttcatc

SEQ ID NO: 208068 - DNA, 33 bp, Homo sapien
atttcactaagcataatgtcttccaagttcatc

SEQ ID NO: 208069 - DNA, 33 bp, Homo sapien
tatatataatatgataaaataagttcctcaaaa

SEQ ID NO: 208070 - DNA, 33 bp, Homo sapien
tatatataatatgatacaataagttcctcaaaa

SEQ ID NO: 208071 - DNA, 33 bp, Homo sapien
gacacaaggtcgtaaacatcagatgtagcggta

SEQ ID NO: 208072 - DNA, 33 bp, Homo sapien
gacacaaggtcgtaaatatcagatgtagcggta

SEQ ID NO: 208073 - DNA, 33 bp, Homo sapien
ggagtgcagatgtggacaattacactggctcag

SEQ ID NO: 208074 - DNA, 33 bp, Homo sapien
ggagtgcagatgtggagaattacactggctcag

SEQ ID NO: 208075 - DNA, 33 bp, Homo sapien
taaatattcttggtgaaagttcttttcagtatc

SEQ ID NO: 208076 - DNA, 33 bp, Homo sapien
taaatattcttggtgacagttcttttcagtatc

SEQ ID NO: 208077 - DNA, 33 bp, Homo sapien
cactcagacctctcacagataggttgcaaaaaa

SEQ ID NO: 208078 - DNA, 33 bp, Homo sapien
cactcagacctctcacggataggttgcaaaaaa

SEQ ID NO: 208079 - DNA, 33 bp, Homo sapien
aagaaagaagtctgcactaaaaatatgttgttt

SEQ ID NO: 208080 - DNA, 33 bp, Homo sapien
aagaaagaagtctgcattaaaaatatgttgttt

SEQ ID NO: 208081 - DNA, 33 bp, Homo sapien
ggtatgcagaacctaaagaacaacctcaaacaa

SEQ ID NO: 208082 - DNA, 33 bp, Homo sapien
ggtatgcagaacctaaggaacaacctcaaacaa

SEQ ID NO: 208083 - DNA, 33 bp, Homo sapien
acaatcgcaaggcacacaacaagaaaatgagaa

SEQ ID NO: 208084 - DNA, 33 bp, Homo sapien
acaatcgcaaggcacagaacaagaaaatgagaa

SEQ ID NO: 208085 - DNA, 33 bp, Homo sapien
atctgagtataaaatgaagatgtgtcataacca

SEQ ID NO: 208086 - DNA, 33 bp, Homo sapien
atctgagtataaaatggagatgtgtcataacca

SEQ ID NO: 208087 - DNA, 33 bp, Homo sapien
ttgtgtatgcaataaaggtaggaaaggaaatgt

SEQ ID NO: 208088 - DNA, 33 bp, Homo sapien
ttgtgtatgcaataaatgtaggaaaggaaatgt

SEQ ID NO: 208089 - DNA, 33 bp, Homo sapien
gatttgctatacagtcaagcagtctcagcccta

SEQ ID NO: 208090 - DNA, 33 bp, Homo sapien
gatttgctatacagtccagcagtctcagcccta

SEQ ID NO: 208091 - DNA, 33 bp, Homo sapien
ttttttttctgagacacggtttcattcccattg

SEQ ID NO: 208092 - DNA, 33 bp, Homo sapien
ttttttttctgagacatggtttcattcccattg

SEQ ID NO: 208093 - DNA, 33 bp, Homo sapien
tgttcatggattggaagattcagcacggttaag

SEQ ID NO: 208094 - DNA, 33 bp, Homo sapien
tgttcatggattggaatattcagcacggttaag

SEQ ID NO: 208095 - DNA, 33 bp, Homo sapien
tgtcaactcatatacaaaattaagctatcctct

SEQ ID NO: 208096 - DNA, 33 bp, Homo sapien
tgtcaactcatatacagaattaagctatcctct

SEQ ID NO: 208097 - DNA, 33 bp, Homo sapien
attggtcagagggtacaaagtgttagttagaca

SEQ ID NO: 208098 - DNA, 33 bp, Homo sapien
attggtcagagggtacgaagtgttagttagaca

SEQ ID NO: 208099 - DNA, 33 bp, Homo sapien
tggcctggtgccaagaagtgttccctacagccc

SEQ ID NO: 208100 - DNA, 33 bp, Homo sapien
tggcctggtgccaagaggtgttccctacagccc

SEQ ID NO: 208101 - DNA, 33 bp, Homo sapien
cagtatcagatgggaaactgcttctacaggaaa

SEQ ID NO: 208102 - DNA, 33 bp, Homo sapien
cagtatcagatgggaacctgcttctacaggaaa

SEQ ID NO: 208103 - DNA, 33 bp, Homo sapien
aaaggtagactggtaaatgtaagagaaatataa

SEQ ID NO: 208104 - DNA, 33 bp, Homo sapien
aaaggtagactggtaactgtaagagaaatataa

SEQ ID NO: 208105 - DNA, 33 bp, Homo sapien
tccttaatcttgcaccaaattagataaaacgac

SEQ ID NO: 208106 - DNA, 33 bp, Homo sapien
tccttaatcttgcaccgaattagataaaacgac

SEQ ID NO: 208107 - DNA, 33 bp, Homo sapien
tgagctggcaagctccaatttttgcgtgacaac

SEQ ID NO: 208108 - DNA, 33 bp, Homo sapien
tgagctggcaagctccgatttttgcgtgacaac

SEQ ID NO: 208109 - DNA, 33 bp, Homo sapien
ccagaatgttttcccactggattctccactctg

SEQ ID NO: 208110 - DNA, 33 bp, Homo sapien
ccagaatgttttcccattggattctccactctg

SEQ ID NO: 208111 - DNA, 33 bp, Homo sapien
caattgagacatacatgacatcatttcttttca

SEQ ID NO: 208112 - DNA, 33 bp, Homo sapien
caattgagacatacattacatcatttcttttca

SEQ ID NO: 208113 - DNA, 33 bp, Homo sapien
tggaatataggtaggaaggatctctattccatc

SEQ ID NO: 208114 - DNA, 33 bp, Homo sapien
tggaatataggtaggagggatctctattccatc

SEQ ID NO: 208115 - DNA, 33 bp, Homo sapien
ttgccttttccttttaacatcctttagcctttg

SEQ ID NO: 208116 - DNA, 33 bp, Homo sapien
ttgccttttccttttaccatcctttagcctttg

SEQ ID NO: 208117 - DNA, 33 bp, Homo sapien
ccccggtgtcataaagaaataggacttgaacat

SEQ ID NO: 208118 - DNA, 33 bp, Homo sapien
ccccggtgtcataaaggaataggacttgaacat

SEQ ID NO: 208119 - DNA, 33 bp, Homo sapien
cggtaacactgccaaccgagactaaaggaaaca

SEQ ID NO: 208120 - DNA, 33 bp, Homo sapien
cggtaacactgccaactgagactaaaggaaaca

SEQ ID NO: 208121 - DNA, 33 bp, Homo sapien
aaacagaaagttagtacgctagttgttttgctt

SEQ ID NO: 208122 - DNA, 33 bp, Homo sapien
aaacagaaagttagtatgctagttgttttgctt

SEQ ID NO: 208123 - DNA, 33 bp, Homo sapien
gaatgaagaaattactcaacagtgtagtgacag

SEQ ID NO: 208124 - DNA, 33 bp, Homo sapien
gaatgaagaaattactgaacagtgtagtgacag

SEQ ID NO: 208125 - DNA, 33 bp, Homo sapien
ccaagctgtagttcacaggacacagaaatggag

SEQ ID NO: 208126 - DNA, 33 bp, Homo sapien
ccaagctgtagttcaccggacacagaaatggag

SEQ ID NO: 208127 - DNA, 33 bp, Homo sapien
ttccttttaacaatgaaggaatacttgtaaaaa

SEQ ID NO: 208128 - DNA, 33 bp, Homo sapien
ttccttttaacaatgagggaatacttgtaaaaa

SEQ ID NO: 208129 - DNA, 33 bp, Homo sapien
tttcattattatggtaacaatatggagtgctgt

SEQ ID NO: 208130 - DNA, 33 bp, Homo sapien
tttcattattatggtagcaatatggagtgctgt

SEQ ID NO: 208131 - DNA, 33 bp, Homo sapien
gagaaagaagcataaaaggtttgggtatctttg

SEQ ID NO: 208132 - DNA, 33 bp, Homo sapien
gagaaagaagcataaagggtttgggtatctttg

SEQ ID NO: 208133 - DNA, 33 bp, Homo sapien
agagaagcaggtgacacggatcagcttggagcc

SEQ ID NO: 208134 - DNA, 33 bp, Homo sapien
agagaagcaggtgacatggatcagcttggagcc

SEQ ID NO: 208135 - DNA, 33 bp, Homo sapien
ctatatttatgccatgcaaagtacccttagcaa

SEQ ID NO: 208136 - DNA, 33 bp, Homo sapien
ctatatttatgccatggaaagtacccttagcaa

SEQ ID NO: 208137 - DNA, 33 bp, Homo sapien
tctagatttgaagggtcaatttgcaacctctgt

SEQ ID NO: 208138 - DNA, 33 bp, Homo sapien
tctagatttgaagggttaatttgcaacctctgt

SEQ ID NO: 208139 - DNA, 33 bp, Homo sapien
taagatcaagtgtttccagttgtttattttatc

SEQ ID NO: 208140 - DNA, 33 bp, Homo sapien
taagatcaagtgtttctagttgtttattttatc

SEQ ID NO: 208141 - DNA, 33 bp, Homo sapien
tctacatcatatgcagaagaattagaaacttaa

SEQ ID NO: 208142 - DNA, 33 bp, Homo sapien
tctacatcatatgcaggagaattagaaacttaa

SEQ ID NO: 208143 - DNA, 33 bp, Homo sapien
attcagctaggtattaagtactgggctacacat

SEQ ID NO: 208144 - DNA, 33 bp, Homo sapien
attcagctaggtattatgtactgggctacacat

SEQ ID NO: 208145 - DNA, 33 bp, Homo sapien
aatctatatggtataacggaacagaaaagtgtt

SEQ ID NO: 208146 - DNA, 33 bp, Homo sapien
aatctatatggtataatggaacagaaaagtgtt

SEQ ID NO: 208147 - DNA, 33 bp, Homo sapien
tctattcagggaaaaactgttctgctccagtac

SEQ ID NO: 208148 - DNA, 33 bp, Homo sapien
tctattcagggaaaaattgttctgctccagtac

SEQ ID NO: 208149 - DNA, 33 bp, Homo sapien
cattcccttgatgatccgaagaagcattttgaa

SEQ ID NO: 208150 - DNA, 33 bp, Homo sapien
cattcccttgatgatctgaagaagcattttgaa

SEQ ID NO: 208151 - DNA, 33 bp, Homo sapien; identical to SEQ ID NO: 208149

SEQ ID NO: 208152 - DNA, 33 bp, Homo sapien; identical to SEQ ID NO: 208150

SEQ ID NO: 208153 - DNA, 33 bp, Homo sapien
gataaactgattcaaaatggccctagtgtgaaa

SEQ ID NO: 208154 - DNA, 33 bp, Homo sapien
gataaactgattcaaagtggccctagtgtgaaa

SEQ ID NO: 208155 - DNA, 33 bp, Homo sapien
cataaatgggatctaaaattctaatatgaaatc

SEQ ID NO: 208156 - DNA, 33 bp, Homo sapien
cataaatgggatctaatattctaatatgaaatc

SEQ ID NO: 208157 - DNA, 33 bp, Homo sapien; identical to SEQ ID NO: 208155

SEQ ID NO: 208158 - DNA, 33 bp, Homo sapien; identical to SEQ ID NO: 208156

SEQ ID NO: 208159 - DNA, 33 bp, Homo sapien
atattcaaaaagaagacgtaaaggaattatgtg

SEQ ID NO: 208160 - DNA, 33 bp, Homo sapien
atattcaaaaagaagatgtaaaggaattatgtg

SEQ ID NO: 208161 - DNA, 33 bp, Homo sapien
gttacaaccatcaccactactgaaatttagaaa

SEQ ID NO: 208162 - DNA, 33 bp, Homo sapien
gttacaaccatcaccattactgaaatttagaaa

SEQ ID NO: 208163 - DNA, 33 bp, Homo sapien
tcttgtattcggggaaaaattgttctgctccag

SEQ ID NO: 208164 - DNA, 33 bp, Homo sapien
tcttgtattcggggaagaattgttctgctccag

SEQ ID NO: 208165 - DNA, 33 bp, Homo sapien; identical to SEQ ID NO: 208163

SEQ ID NO: 208166 - DNA, 33 bp, Homo sapien; identical to SEQ ID NO: 208164

SEQ ID NO: 208167 - DNA, 33 bp, Homo sapien
cttttatcctgtaatgaagaaaaatccatattc

SEQ ID NO: 208168 - DNA, 33 bp, Homo sapien
cttttatcctgtaatggagaaaaatccatattc

SEQ ID NO: 208169 - DNA, 33 bp, Homo sapien
taagtataaacattgacgggttcatttatatca

SEQ ID NO: 208170 - DNA, 33 bp, Homo sapien
taagtataaacattgatgggttcatttatatca

SEQ ID NO: 208171 - DNA, 33 bp, Homo sapien
gaatagactgttaccactgaccccccagaaata

SEQ ID NO: 208172 - DNA, 33 bp, Homo sapien
gaatagactgttaccattgaccccccagaaata

SEQ ID NO: 208173 - DNA, 33 bp, Homo sapien
ccttcagttcaactccaattttggtcatttctt

SEQ ID NO: 208174 - DNA, 33 bp, Homo sapien
ccttcagttcaactccgattttggtcatttctt

SEQ ID NO: 208175 - DNA, 33 bp, Homo sapien
gagcattctgaaatcaacctgggatgatccagc

SEQ ID NO: 208176 - DNA, 33 bp, Homo sapien
gagcattctgaaatcaccctgggatgatccagc

SEQ ID NO: 208177 - DNA, 33 bp, Homo sapien
tgagggtatttaagaccgcctgacaactcttgt

SEQ ID NO: 208178 - DNA, 33 bp, Homo sapien
tgagggtatttaagactgcctgacaactcttgt

SEQ ID NO: 208179 - DNA, 33 bp, Homo sapien
accacattgacaccaaattcttgaatccaaaac

SEQ ID NO: 208180 - DNA, 33 bp, Homo sapien
accacattgacaccaagttcttgaatccaaaac

SEQ ID NO: 208181 - DNA, 33 bp, Homo sapien
aagaaagaacttgcaacgtttccaacgcaagaa

SEQ ID NO: 208182 - DNA, 33 bp, Homo sapien
aagaaagaacttgcaatgtttccaacgcaagaa

SEQ ID NO: 208183 - DNA, 33 bp, Homo sapien
aggagaataatagttaccaaagcctggaaagcg

SEQ ID NO: 208184 - DNA, 33 bp, Homo sapien
aggagaataatagttatcaaagcctggaaagcg

SEQ ID NO: 208185 - DNA, 33 bp, Homo sapien
aacacgcatgaccttacggaacagaaaaacaca

SEQ ID NO: 208186 - DNA, 33 bp, Homo sapien
aacacgcatgaccttatggaacagaaaaacaca

SEQ ID NO: 208187 - DNA, 33 bp, Homo sapien
attcaaataagcaccagcgagtaagtaaatatc

SEQ ID NO: 208188 - DNA, 33 bp, Homo sapien
attcaaataagcaccatcgagtaagtaaatatc

SEQ ID NO: 208189 - DNA, 33 bp, Homo sapien
tcagtttgaagtgctgcatcgtatttttctgtg

SEQ ID NO: 208190 - DNA, 33 bp, Homo sapien
tcagtttgaagtgctgtatcgtatttttctgtg

SEQ ID NO: 208191 - DNA, 33 bp, Homo sapien
agacaaaatgacattcaaaagacaaaacaaaag

SEQ ID NO: 208192 - DNA, 33 bp, Homo sapien
agacaaaatgacattcgaaagacaaaacaaaag

SEQ ID NO: 208193 - DNA, 33 bp, Homo sapien
actaatcattagggaaatattctaagatgctac

SEQ ID NO: 208194 - DNA, 33 bp, Homo sapien
actaatcattagggaattattctaagatgctac

SEQ ID NO: 208195 - DNA, 33 bp, Homo sapien
cattctgaagtaagcaatgaagtacgtaaagtg

SEQ ID NO: 208196 - DNA, 33 bp, Homo sapien
cattctgaagtaagcagtgaagtacgtaaagtg

SEQ ID NO: 208197 - DNA, 33 bp, Homo sapien
tttttgtgtaatcacaactatatgctcttttgt

SEQ ID NO: 208198 - DNA, 33 bp, Homo sapien
tttttgtgtaatcacagctatatgctcttttgt

SEQ ID NO: 208199 - DNA, 33 bp, Homo sapien
caaattacactaccaccaatgttgtaaaattaa

SEQ ID NO: 208200 - DNA, 33 bp, Homo sapien
caaattacactaccacgaatgttgtaaaattaa

SEQ ID NO: 208201 - DNA, 33 bp, Homo sapien
actcaacaatagaaaaaaatactcaactgcaca

SEQ ID NO: 208202 - DNA, 33 bp, Homo sapien
actcaacaatagaaaagaatactcaactgcaca

SEQ ID NO: 208203 - DNA, 33 bp, Homo sapien
attctgtcaatcactaaaacagagataaagaat

SEQ ID NO: 208204 - DNA, 33 bp, Homo sapien
attctgtcaatcactacaacagagataaagaat

SEQ ID NO: 208205 - DNA, 33 bp, Homo sapien
tgtcactcacattccacagtttactagctgaat

SEQ ID NO: 208206 - DNA, 33 bp, Homo sapien
tgtcactcacattccatagtttactagctgaat

SEQ ID NO: 208207 - DNA, 33 bp, Homo sapien
ataattccacttgataacttccattagttgtat

SEQ ID NO: 208208 - DNA, 33 bp, Homo sapien
ataattccacttgataccttccattagttgtat

SEQ ID NO: 208209 - DNA, 33 bp, Homo sapien
atcactcatgggtatacaaaatgttacagcctc

SEQ ID NO: 208210 - DNA, 33 bp, Homo sapien
atcactcatgggtatataaaatgttacagcctc

SEQ ID NO: 208211 - DNA, 33 bp, Homo sapien
gggaggtaagaccttgaagagttgattaaagtc

SEQ ID NO: 208212 - DNA, 33 bp, Homo sapien
gggaggtaagaccttggagagttgattaaagtc

SEQ ID NO: 208213 - DNA, 33 bp, Homo sapien
gacacagagacacagacgggaatgccgggtgaa

SEQ ID NO: 208214 - DNA, 33 bp, Homo sapien
gacacagagacacagaggggaatgccgggtgaa

SEQ ID NO: 208215 - DNA, 33 bp, Homo sapien
tgtgaaggcagagatacgcagggagaaattcat

SEQ ID NO: 208216 - DNA, 33 bp, Homo sapien
tgtgaaggcagagatatgcagggagaaattcat

SEQ ID NO: 208217 - DNA, 33 bp, Homo sapien
cacatgagatttatctaagaagtgcaagttttg

SEQ ID NO: 208218 - DNA, 33 bp, Homo sapien
cacatgagatttatctgagaagtgcaagttttg

SEQ ID NO: 208219 - DNA, 33 bp, Homo sapien
aggtgccagggcactgaaaattctttaaataca

SEQ ID NO: 208220 - DNA, 33 bp, Homo sapien
aggtgccagggcactggaaattctttaaataca

SEQ ID NO: 208221 - DNA, 33 bp, Homo sapien
gtattttaaatctcaaatgattccatgtacgtt

SEQ ID NO: 208222 - DNA, 33 bp, Homo sapien
gtattttaaatctcaattgattccatgtacgtt

SEQ ID NO: 208223 - DNA, 33 bp, Homo sapien
tgtccataaaagattcaattgattaatgaatgt

SEQ ID NO: 208224 - DNA, 33 bp, Homo sapien
tgtccataaaagattctattgattaatgaatgt

SEQ ID NO: 208225 - DNA, 33 bp, Homo sapien
aggctaattttactcaataatgtaggcaaagtt

SEQ ID NO: 208226 - DNA, 33 bp, Homo sapien
aggctaattttactcagtaatgtaggcaaagtt

SEQ ID NO: 208227 - DNA, 33 bp, Homo sapien
agtgcacctcatgaacaaagtggatcaagttaa

SEQ ID NO: 208228 - DNA, 33 bp, Homo sapien
agtgcacctcatgaaccaagtggatcaagttaa

SEQ ID NO: 208229 - DNA, 33 bp, Homo sapien
gctagacacgtggctacctaaatttaatcaaaa

SEQ ID NO: 208230 - DNA, 33 bp, Homo sapien
gctagacacgtggctatctaaatttaatcaaaa

SEQ ID NO: 208231 - DNA, 33 bp, Homo sapien
aaggcaaattgggccacgtttccttgagtccat

SEQ ID NO: 208232 - DNA, 33 bp, Homo sapien
aaggcaaattgggccatgtttccttgagtccat

SEQ ID NO: 208233 - DNA, 33 bp, Homo sapien
attcacagaaatttgaacactctattccgtagt

SEQ ID NO: 208234 - DNA, 33 bp, Homo sapien
attcacagaaatttgagcactctattccgtagt

SEQ ID NO: 208235 - DNA, 33 bp, Homo sapien
acacaaaattacaaagccctatggaatcccatt

SEQ ID NO: 208236 - DNA, 33 bp, Homo sapien
acacaaaattacaaagtcctatggaatcccatt

SEQ ID NO: 208237 - DNA, 33 bp, Homo sapien
aactgacttccttgacaaggcaaatgtatgggg

SEQ ID NO: 208238 - DNA, 33 bp, Homo sapien
aactgacttccttgacgaggcaaatgtatgggg

SEQ ID NO: 208239 - DNA, 33 bp, Homo sapien
tgcacaatgcttacaacgttacagcaaacaata

SEQ ID NO: 208240 - DNA, 33 bp, Homo sapien
tgcacaatgcttacaatgttacagcaaacaata

SEQ ID NO: 208241 - DNA, 33 bp, Homo sapien
ccagggagcaactgaactgtatgtagtattttt

SEQ ID NO: 208242 - DNA, 33 bp, Homo sapien
ccagggagcaactgaattgtatgtagtattttt

SEQ ID NO: 208243 - DNA, 33 bp, Homo sapien
aataaacacgcttgcacatttgcatacaggtac

SEQ ID NO: 208244 - DNA, 33 bp, Homo sapien
aataaacacgcttgcatatttgcatacaggtac

SEQ ID NO: 208245 - DNA, 33 bp, Homo sapien
ccttgcccctccttgaaaaaaacagataatgta

SEQ ID NO: 208246 - DNA, 33 bp, Homo sapien
ccttgcccctccttgagaaaaacagataatgta

SEQ ID NO: 208247 - DNA, 33 bp, Homo sapien
tttccaatggcatcaaactattcaaggcataag

SEQ ID NO: 208248 - DNA, 33 bp, Homo sapien
tttccaatggcatcaacctattcaaggcataag

SEQ ID NO: 208249 - DNA, 33 bp, Homo sapien
aaggtgataatttccaatcactgatgacaaaga

SEQ ID NO: 208250 - DNA, 33 bp, Homo sapien
aaggtgataatttccagtcactgatgacaaaga

SEQ ID NO: 208251 - DNA, 33 bp, Homo sapien
ttctgttaatgcggtaggtcacagaattgattt

SEQ ID NO: 208252 - DNA, 33 bp, Homo sapien
ttctgttaatgcggtatgtcacagaattgattt

SEQ ID NO: 208253 - DNA, 33 bp, Homo sapien
gcagggagcatagctgcaatagttgagaaatag

SEQ ID NO: 208254 - DNA, 33 bp, Homo sapien
gcagggagcatagctggaatagttgagaaatag

SEQ ID NO: 208255 - DNA, 33 bp, Homo sapien
aagagatttggctctgcagatataggattatgt

SEQ ID NO: 208256 - DNA, 33 bp, Homo sapien
aagagatttggctctgtagatataggattatgt

SEQ ID NO: 208257 - DNA, 33 bp, Homo sapien
ttactttgtagaggagaaaagtgattgcaagac

SEQ ID NO: 208258 - DNA, 33 bp, Homo sapien
ttactttgtagaggagcaaagtgattgcaagac

SEQ ID NO: 208259 - DNA, 33 bp, Homo sapien
tttggaaatattatacagatggaaccatacagc

SEQ ID NO: 208260 - DNA, 33 bp, Homo sapien
tttggaaatattatacggatggaaccatacagc

SEQ ID NO: 208261 - DNA, 33 bp, Homo sapien
atttctccctcatttgcatgtaatcttcagcaa

SEQ ID NO: 208262 - DNA, 33 bp, Homo sapien
atttctccctcatttgtatgtaatcttcagcaa

SEQ ID NO: 208263 - DNA, 33 bp, Homo sapien
gcctgaaggatttaacagatcctcaagttattc

SEQ ID NO: 208264 - DNA, 33 bp, Homo sapien
gcctgaaggatttaacggatcctcaagttattc

SEQ ID NO: 208265 - DNA, 33 bp, Homo sapien
cagagctacaggaacaccaagaagtgtagatgt

SEQ ID NO: 208266 - DNA, 33 bp, Homo sapien
cagagctacaggaacatcaagaagtgtagatgt

SEQ ID NO: 208267 - DNA, 33 bp, Homo sapien
ttaaagcaaaggtataggaatattgctagcaat

SEQ ID NO: 208268 - DNA, 33 bp, Homo sapien
ttaaagcaaaggtatatgaatattgctagcaat

SEQ ID NO: 208269 - DNA, 33 bp, Homo sapien
aatgcaacctagtagacctcaaccttgttttac

SEQ ID NO: 208270 - DNA, 33 bp, Homo sapien
aatgcaacctagtagatctcaaccttgttttac

SEQ ID NO: 208271 - DNA, 33 bp, Homo sapien
catacaacacatatgaatacacaacagacagaa

SEQ ID NO: 208272 - DNA, 33 bp, Homo sapien
catacaacacatatgactacacaacagacagaa

SEQ ID NO: 208273 - DNA, 33 bp, Homo sapien
cctttaaaggttaaacaagaatttgtgtgtgat

SEQ ID NO: 208274 - DNA, 33 bp, Homo sapien
cctttaaaggttaaaccagaatttgtgtgtgat

SEQ ID NO: 208275 - DNA, 33 bp, Homo sapien
ctaatcagatgtgggaccttccaatcatgaatc

SEQ ID NO: 208276 - DNA, 33 bp, Homo sapien
ctaatcagatgtgggatcttccaatcatgaatc

SEQ ID NO: 208277 - DNA, 33 bp, Homo sapien
ttacagaaacaaaaaacgtaagaacagcaaccc

SEQ ID NO: 208278 - DNA, 33 bp, Homo sapien
ttacagaaacaaaaaatgtaagaacagcaaccc

SEQ ID NO: 208279 - DNA, 33 bp, Homo sapien
cacatagggcattctacggcatttgtgaagcat

SEQ ID NO: 208280 - DNA, 33 bp, Homo sapien
cacatagggcattctatggcatttgtgaagcat

SEQ ID NO: 208281 - DNA, 33 bp, Homo sapien
tcacagtttcttctggaactttgggatgcacat

SEQ ID NO: 208282 - DNA, 33 bp, Homo sapien
tcacagtttcttctgggactttgggatgcacat

SEQ ID NO: 208283 - DNA, 33 bp, Homo sapien
ttgtgtcagtgaaaaaaggcttaaaatcaactt

SEQ ID NO: 208284 - DNA, 33 bp, Homo sapien
ttgtgtcagtgaaaaagggcttaaaatcaactt

SEQ ID NO: 208285 - DNA, 33 bp, Homo sapien
tgacttcatatgtggacattacatgttgatatg

SEQ ID NO: 208286 - DNA, 33 bp, Homo sapien
tgacttcatatgtggatattacatgttgatatg

SEQ ID NO: 208287 - DNA, 33 bp, Homo sapien
gtcagctgacagctaagtcttaacaattgacat

SEQ ID NO: 208288 - DNA, 33 bp, Homo sapien
gtcagctgacagctaattcttaacaattgacat

SEQ ID NO: 208289 - DNA, 33 bp, Homo sapien
accagatactgttttaagttttggagatacttc

SEQ ID NO: 208290 - DNA, 33 bp, Homo sapien
accagatactgttttaggttttggagatacttc

SEQ ID NO: 208291 - DNA, 33 bp, Homo sapien
aagtaaatttgttacaaaatatcagaaccaaat

SEQ ID NO: 208292 - DNA, 33 bp, Homo sapien
aagtaaatttgttacagaatatcagaaccaaat

SEQ ID NO: 208293 - DNA, 33 bp, Homo sapien
gggctctgggtctgtaaattggcttaagtctgg

SEQ ID NO: 208294 - DNA, 33 bp, Homo sapien
gggctctgggtctgtacattggcttaagtctgg

SEQ ID NO: 208295 - DNA, 33 bp, Homo sapien
ggcatcacctaatccaatgaagccatgaataga

SEQ ID NO: 208296 - DNA, 33 bp, Homo sapien
ggcatcacctaatccattgaagccatgaataga

SEQ ID NO: 208297 - DNA, 33 bp, Homo sapien
tgctgcttgttggggacgatggaaatgattaac

SEQ ID NO: 208298 - DNA, 33 bp, Homo sapien
tgctgcttgttggggatgatggaaatgattaac

SEQ ID NO: 208299 - DNA, 33 bp, Homo sapien
gttgtaggtacagaaacaacacaaattggatgt

SEQ ID NO: 208300 - DNA, 33 bp, Homo sapien
gttgtaggtacagaaataacacaaattggatgt

SEQ ID NO: 208301 - DNA, 33 bp, Homo sapien
cctcaccaaagcttatcaaaatgaggtcaatcc

SEQ ID NO: 208302 - DNA, 33 bp, Homo sapien
cctcaccaaagcttattaaaatgaggtcaatcc

SEQ ID NO: 208303 - DNA, 33 bp, Homo sapien
ctgttcgccgtggataccggcgtccctacaatt

SEQ ID NO: 208304 - DNA, 33 bp, Homo sapien
ctgttcgccgtggatatcggcgtccctacaatt

SEQ ID NO: 208305 - DNA, 33 bp, Homo sapien; identical to SEQ ID NO: 208303

SEQ ID NO: 208306 - DNA, 33 bp, Homo sapien; identical to SEQ ID NO: 208304

SEQ ID NO: 208307 - DNA, 33 bp, Homo sapien
gatttgctaatgagaacgtggaaattgtcttct

SEQ ID NO: 208308 - DNA, 33 bp, Homo sapien
gatttgctaatgagaatgtggaaattgtcttct

SEQ ID NO: 208309 - DNA, 33 bp, Homo sapien
aagggcatcattgggacaaatggtgaaacttga

SEQ ID NO: 208310 - DNA, 33 bp, Homo sapien
aagggcatcattgggataaatggtgaaacttga

SEQ ID NO: 208311 - DNA, 33 bp, Homo sapien
ttgatacatgttgaataactgactagatgcaaa

SEQ ID NO: 208312 - DNA, 33 bp, Homo sapien
ttgatacatgttgaatgactgactagatgcaaa

SEQ ID NO: 208313 - DNA, 33 bp, Homo sapien
attcaacatgtatcaaacaccagcagctattcg

SEQ ID NO: 208314 - DNA, 33 bp, Homo sapien
attcaacatgtatcaagcaccagcagctattcg

SEQ ID NO: 208315 - DNA, 33 bp, Homo sapien
acccaaagactgtctgcaatacaggactatttg

SEQ ID NO: 208316 - DNA, 33 bp, Homo sapien
acccaaagactgtctggaatacaggactatttg

SEQ ID NO: 208317 - DNA, 33 bp, Homo sapien
agtgtttaaagactagcagattggtacagtttt

SEQ ID NO: 208318 - DNA, 33 bp, Homo sapien
agtgtttaaagactaggagattggtacagtttt

SEQ ID NO: 208319 - DNA, 33 bp, Homo sapien
aaggaattgcagttcaaagattaactgactttc

SEQ ID NO: 208320 - DNA, 33 bp, Homo sapien
aaggaattgcagttcagagattaactgactttc

SEQ ID NO: 208321 - DNA, 33 bp, Homo sapien
tgagggtgcttcaccactcctggttgatttccc

SEQ ID NO: 208322 - DNA, 33 bp, Homo sapien
tgagggtgcttcaccattcctggttgatttccc

SEQ ID NO: 208323 - DNA, 33 bp, Homo sapien
tcattttactgatgaaaaaactgaagaaaagaa

SEQ ID NO: 208324 - DNA, 33 bp, Homo sapien
tcattttactgatgaagaaactgaagaaaagaa

SEQ ID NO: 208325 - DNA, 33 bp, Homo sapien
agtattgaaattacagccataaggcaccatgct

SEQ ID NO: 208326 - DNA, 33 bp, Homo sapien
agtattgaaattacaggcataaggcaccatgct

SEQ ID NO: 208327 - DNA, 33 bp, Homo sapien
ccatccatgtttgggaaaagaatgagagggtgg

SEQ ID NO: 208328 - DNA, 33 bp, Homo sapien
ccatccatgtttgggagaagaatgagagggtgg

SEQ ID NO: 208329 - DNA, 33 bp, Homo sapien
gtcttctgttttcctccactagattgtgttttt

SEQ ID NO: 208330 - DNA, 33 bp, Homo sapien
gtcttctgttttcctctactagattgtgttttt

SEQ ID NO: 208331 - DNA, 33 bp, Homo sapien
tccagtccgcagctcccagcatgatcgacacag

SEQ ID NO: 208332 - DNA, 33 bp, Homo sapien
tccagtccgcagctcctagcatgatcgacacag

SEQ ID NO: 208333 - DNA, 33 bp, Homo sapien
ttaatcatagtactgccctcaaaatatagtaaa

SEQ ID NO: 208334 - DNA, 33 bp, Homo sapien
ttaatcatagtactgctctcaaaatatagtaaa

SEQ ID NO: 208335 - DNA, 33 bp, Homo sapien
ttttagctcttcattacagtgtctgtctttaat

SEQ ID NO: 208336 - DNA, 33 bp, Homo sapien
ttttagctcttcattatagtgtctgtctttaat

SEQ ID NO: 208337 - DNA, 33 bp, Homo sapien
taaaatgtccataatacccagggtgatctacag

SEQ ID NO: 208338 - DNA, 33 bp, Homo sapien
taaaatgtccataatatccagggtgatctacag

SEQ ID NO: 208339 - DNA, 33 bp, Homo sapien
tataatgaacagaaaagaaatgaatataattaa

SEQ ID NO: 208340 - DNA, 33 bp, Homo sapien
tataatgaacagaaaataaatgaatataattaa

SEQ ID NO: 208341 - DNA, 33 bp, Homo sapien
gaaacgccagagaaaaattttaaagttgaaagg

SEQ ID NO: 208342 - DNA, 33 bp, Homo sapien
gaaacgccagagaaaatttttaaagttgaaagg

SEQ ID NO: 208343 - DNA, 33 bp, Homo sapien
cactacacctgccttacaagaaacgccagagaa

SEQ ID NO: 208344 - DNA, 33 bp, Homo sapien
cactacacctgccttataagaaacgccagagaa

SEQ ID NO: 208345 - DNA, 33 bp, Homo sapien
tgatgatgaactaccagagcttttgtttgggaa

SEQ ID NO: 208346 - DNA, 33 bp, Homo sapien
tgatgatgaactaccatagcttttgtttgggaa

SEQ ID NO: 208347 - DNA, 33 bp, Homo sapien
aggacactctataaaacagctgaccagtactct

SEQ ID NO: 208348 - DNA, 33 bp, Homo sapien
aggacactctataaaatagctgaccagtactct

SEQ ID NO: 208349 - DNA, 33 bp, Homo sapien
atattacaagtgcatacagttgacaaaataata

SEQ ID NO: 208350 - DNA, 33 bp, Homo sapien
atattacaagtgcatatagttgacaaaataata

SEQ ID NO: 208351 - DNA, 33 bp, Homo sapien
catgtatcatctcagtaaatatgtagcataaaa

SEQ ID NO: 208352 - DNA, 33 bp, Homo sapien
catgtatcatctcagtgaatatgtagcataaaa

SEQ ID NO: 208353 - DNA, 33 bp, Homo sapien
agtttagaatttgctgaaagaagatgtttgggc

SEQ ID NO: 208354 - DNA, 33 bp, Homo sapien
agtttagaatttgctgcaagaagatgtttgggc

SEQ ID NO: 208355 - DNA, 33 bp, Homo sapien
tttcactaggactaacaggaatagctttcttcc

SEQ ID NO: 208356 - DNA, 33 bp, Homo sapien
tttcactaggactaaccggaatagctttcttcc

SEQ ID NO: 208357 - DNA, 33 bp, Homo sapien
ctttcagaattatctgcaggccatttcaatgat

SEQ ID NO: 208358 - DNA, 33 bp, Homo sapien
ctttcagaattatctgtaggccatttcaatgat

SEQ ID NO: 208359 - DNA, 33 bp, Homo sapien
ctcagacaaccagcaacagtctctataccccag

SEQ ID NO: 208360 - DNA, 33 bp, Homo sapien
ctcagacaaccagcaatagtctctataccccag

SEQ ID NO: 208361 - DNA, 33 bp, Homo sapien
cttctctatcctgaaagacctttcttaaatcat

SEQ ID NO: 208362 - DNA, 33 bp, Homo sapien
cttctctatcctgaaatacctttcttaaatcat

SEQ ID NO: 208363 - DNA, 33 bp, Homo sapien
gaccctcactttgatacgtccaccagttctaaa

SEQ ID NO: 208364 - DNA, 33 bp, Homo sapien
gaccctcactttgatatgtccaccagttctaaa

SEQ ID NO: 208365 - DNA, 33 bp, Homo sapien
gcaatttttggaagaccagttgtacaaactatc

SEQ ID NO: 208366 - DNA, 33 bp, Homo sapien
gcaatttttggaagacgagttgtacaaactatc

SEQ ID NO: 208367 - DNA, 33 bp, Homo sapien
gaaactgaactgggaaaagtaaatattatattg

SEQ ID NO: 208368 - DNA, 33 bp, Homo sapien
gaaactgaactgggaagagtaaatattatattg

SEQ ID NO: 208369 - DNA, 33 bp, Homo sapien
aatcctaataactggagaattcatactaggaat

SEQ ID NO: 208370 - DNA, 33 bp, Homo sapien
aatcctaataactggataattcatactaggaat

SEQ ID NO: 208371 - DNA, 33 bp, Homo sapien
ggataactatatagaggcaataattcaagcata

SEQ ID NO: 208372 - DNA, 33 bp, Homo sapien
ggataactatatagagtcaataattcaagcata

SEQ ID NO: 208373 - DNA, 33 bp, Homo sapien
taaggtctggtgcgagaagaaggctgatgatat

SEQ ID NO: 208374 - DNA, 33 bp, Homo sapien
taaggtctggtgcgaggagaaggctgatgatat

SEQ ID NO: 208375 - DNA, 33 bp, Homo sapien
tggatgtgaagtaatacgtgactgtggttttgg

SEQ ID NO: 208376 - DNA, 33 bp, Homo sapien
tggatgtgaagtaatatgtgactgtggttttgg

SEQ ID NO: 208377 - DNA, 33 bp, Homo sapien
atccctgaaaggcaaaaccttaataggcaaatg

SEQ ID NO: 208378 - DNA, 33 bp, Homo sapien
atccctgaaaggcaaacccttaataggcaaatg

SEQ ID NO: 208379 - DNA, 33 bp, Homo sapien
tcgctgtaaagattataacggtgagaataagct

SEQ ID NO: 208380 - DNA, 33 bp, Homo sapien
tcgctgtaaagattatgacggtgagaataagct

SEQ ID NO: 208381 - DNA, 33 bp, Homo sapien
acaggcagatgcaatcaaatgtgacaggattga

SEQ ID NO: 208382 - DNA, 33 bp, Homo sapien
acaggcagatgcaatcgaatgtgacaggattga

SEQ ID NO: 208383 - DNA, 33 bp, Homo sapien
cttaatgattataaaacgaagaatgacacagtc

SEQ ID NO: 208384 - DNA, 33 bp, Homo sapien
cttaatgattataaaatgaagaatgacacagtc

SEQ ID NO: 208385 - DNA, 33 bp, Homo sapien
agaagtagaggacaaaacacagtacaatgtgtg

SEQ ID NO: 208386 - DNA, 33 bp, Homo sapien
agaagtagaggacaaatcacagtacaatgtgtg

SEQ ID NO: 208387 - DNA, 33 bp, Homo sapien
taattgtgctccctcaagacagagatttcagag

SEQ ID NO: 208388 - DNA, 33 bp, Homo sapien
taattgtgctccctcaggacagagatttcagag

SEQ ID NO: 208389 - DNA, 33 bp, Homo sapien
gcagaccctaggcctcaaaaggaagaggatcaa

SEQ ID NO: 208390 - DNA, 33 bp, Homo sapien
gcagaccctaggcctccaaaggaagaggatcaa

SEQ ID NO: 208391 - DNA, 33 bp, Homo sapien
agaagtatgaaagaaacatgaacattgagtccc

SEQ ID NO: 208392 - DNA, 33 bp, Homo sapien
agaagtatgaaagaaagatgaacattgagtccc

SEQ ID NO: 208393 - DNA, 33 bp, Homo sapien
tacgagacctatacaacgcctgtaatgaaaagt

SEQ ID NO: 208394 - DNA, 33 bp, Homo sapien
tacgagacctatacaatgcctgtaatgaaaagt

SEQ ID NO: 208395 - DNA, 33 bp, Homo sapien
cctatcaaagtatcaacgacattcttcacagaa

SEQ ID NO: 208396 - DNA, 33 bp, Homo sapien
cctatcaaagtatcaatgacattcttcacagaa

SEQ ID NO: 208397 - DNA, 33 bp, Homo sapien
aataaaaatatagaagaccaagacgatagtaac

SEQ ID NO: 208398 - DNA, 33 bp, Homo sapien
aataaaaatatagaaggccaagacgatagtaac

SEQ ID NO: 208399 - DNA, 33 bp, Homo sapien
gaactcactcactacactgaaaatggtaccaag

SEQ ID NO: 208400 - DNA, 33 bp, Homo sapien
gaactcactcactacattgaaaatggtaccaag

SEQ ID NO: 208401 - DNA, 33 bp, Homo sapien
tgcactcatatggtccccacaaaaaacactata

SEQ ID NO: 208402 - DNA, 33 bp, Homo sapien
tgcactcatatggtccgcacaaaaaacactata

SEQ ID NO: 208403 - DNA, 33 bp, Homo sapien
tgatttctaatgccaaatctatcacgtacggag

SEQ ID NO: 208404 - DNA, 33 bp, Homo sapien
tgatttctaatgccaagtctatcacgtacggag

SEQ ID NO: 208405 - DNA, 33 bp, Homo sapien
tagctacacagagaatcaaacaggaggattgtt

SEQ ID NO: 208406 - DNA, 33 bp, Homo sapien
tagctacacagagaatgaaacaggaggattgtt

SEQ ID NO: 208407 - DNA, 33 bp, Homo sapien
gctaaagctaagaatccatatccattagtacat

SEQ ID NO: 208408 - DNA, 33 bp, Homo sapien
gctaaagctaagaatcgatatccattagtacat

SEQ ID NO: 208409 - DNA, 33 bp, Homo sapien
atctaggattcaatgacaggtatgattccagtt

SEQ ID NO: 208410 - DNA, 33 bp, Homo sapien
atctaggattcaatgataggtatgattccagtt

SEQ ID NO: 208411 - DNA, 33 bp, Homo sapien
ttgactgggtcaagggaagaaagatctcttcgg

SEQ ID NO: 208412 - DNA, 33 bp, Homo sapien
ttgactgggtcaagggtagaaagatctcttcgg

SEQ ID NO: 208413 - DNA, 33 bp, Homo sapien
aaggccaaatccttacaaagtcttataatcatt

SEQ ID NO: 208414 - DNA, 33 bp, Homo sapien
aaggccaaatccttacgaagtcttataatcatt

SEQ ID NO: 208415 - DNA, 33 bp, Homo sapien
tgagatggtttccacactggagtttcttttcct

SEQ ID NO: 208416 - DNA, 33 bp, Homo sapien
tgagatggtttccacattggagtttcttttcct

SEQ ID NO: 208417 - DNA, 33 bp, Homo sapien
gatataggtactctgcaaaaccaagcgtgtggg

SEQ ID NO: 208418 - DNA, 33 bp, Homo sapien
gatataggtactctgctaaaccaagcgtgtggg

SEQ ID NO: 208419 - DNA, 33 bp, Homo sapien
ccagtgctgttcattgaatttccctgtaaggag

SEQ ID NO: 208420 - DNA, 33 bp, Homo sapien
ccagtgctgttcattgcatttccctgtaaggag

SEQ ID NO: 208421 - DNA, 33 bp, Homo sapien
caaactgcatcattacccaagtgagagatcaaa

SEQ ID NO: 208422 - DNA, 33 bp, Homo sapien
caaactgcatcattactcaagtgagagatcaaa

SEQ ID NO: 208423 - DNA, 33 bp, Homo sapien
acaaggagagtctttagaggtgaagagtcaact

SEQ ID NO: 208424 - DNA, 33 bp, Homo sapien
acaaggagagtctttataggtgaagagtcaact

SEQ ID NO: 208425 - DNA, 33 bp, Homo sapien
cttcctgaaagtgtaagtgaagttgacaggttc

SEQ ID NO: 208426 - DNA, 33 bp, Homo sapien
cttcctgaaagtgtaattgaagttgacaggttc

SEQ ID NO: 208427 - DNA, 33 bp, Homo sapien
tttgatgtcatctttacggaaaacattcttatt

SEQ ID NO: 208428 - DNA, 33 bp, Homo sapien
tttgatgtcatctttatggaaaacattcttatt

SEQ ID NO: 208429 - DNA, 33 bp, Homo sapien
aaacatgagtgtagaccattatttcataccata

SEQ ID NO: 208430 - DNA, 33 bp, Homo sapien
aaacatgagtgtagactattatttcataccata

SEQ ID NO: 208431 - DNA, 33 bp, Homo sapien
gagcacatctgaatggaacaaggagtggactgc

SEQ ID NO: 208432 - DNA, 33 bp, Homo sapien
gagcacatctgaatggcacaaggagtggactgc

SEQ ID NO: 208433 - DNA, 33 bp, Homo sapien
gttgtataagaatgtacgtaaatggtggatttt

SEQ ID NO: 208434 - DNA, 33 bp, Homo sapien
gttgtataagaatgtatgtaaatggtggatttt

SEQ ID NO: 208435 - DNA, 33 bp, Homo sapien
acacttatgtaaccatcatgcaggataagacat

SEQ ID NO: 208436 - DNA, 33 bp, Homo sapien
acacttatgtaaccattatgcaggataagacat

SEQ ID NO: 208437 - DNA, 33 bp, Homo sapien
tctttatactttaccaactaggttcacaaccct

SEQ ID NO: 208438 - DNA, 33 bp, Homo sapien
tctttatactttaccagctaggttcacaaccct

SEQ ID NO: 208439 - DNA, 33 bp, Homo sapien
tttccaaaatggaaaaccaatttcaggcaagtc

SEQ ID NO: 208440 - DNA, 33 bp, Homo sapien
tttccaaaatggaaaatcaatttcaggcaagtc

SEQ ID NO: 208441 - DNA, 33 bp, Homo sapien
ttcaaaagcttaagcacgagagataagtttata

SEQ ID NO: 208442 - DNA, 33 bp, Homo sapien
ttcaaaagcttaagcatgagagataagtttata

SEQ ID NO: 208443 - DNA, 33 bp, Homo sapien
ttttctgcttcatataccgacgattctgagact

SEQ ID NO: 208444 - DNA, 33 bp, Homo sapien
ttttctgcttcatatagcgacgattctgagact

SEQ ID NO: 208445 - DNA, 33 bp, Homo sapien
aagctacggaaaaatacggggttggcaggtgac

SEQ ID NO: 208446 - DNA, 33 bp, Homo sapien
aagctacggaaaaatatggggttggcaggtgac

SEQ ID NO: 208447 - DNA, 33 bp, Homo sapien
ataagaatgcatataaatagtttcttttcccct

SEQ ID NO: 208448 - DNA, 33 bp, Homo sapien
ataagaatgcatataagtagtttcttttcccct

SEQ ID NO: 208449 - DNA, 33 bp, Homo sapien
gcaaaacaatgaaggaaaatatgtctgtatttg

SEQ ID NO: 208450 - DNA, 33 bp, Homo sapien
gcaaaacaatgaaggagaatatgtctgtatttg

SEQ ID NO: 208451 - DNA, 33 bp, Homo sapien
tggaaattacaggacaataattcctcccatcca

SEQ ID NO: 208452 - DNA, 33 bp, Homo sapien
tggaaattacaggacactaattcctcccatcca

SEQ ID NO: 208453 - DNA, 33 bp, Homo sapien
acacttctctgtatgtaaattttcacttttatt

SEQ ID NO: 208454 - DNA, 33 bp, Homo sapien
acacttctctgtatgtgaattttcacttttatt

SEQ ID NO: 208455 - DNA, 33 bp, Homo sapien
gtgaagggtcaacttacatactcagtgcaatcc

SEQ ID NO: 208456 - DNA, 33 bp, Homo sapien
gtgaagggtcaacttatatactcagtgcaatcc

SEQ ID NO: 208457 - DNA, 33 bp, Homo sapien
taaataaactaagttcaatgcagctaatagagc

SEQ ID NO: 208458 - DNA, 33 bp, Homo sapien
taaataaactaagttcgatgcagctaatagagc

SEQ ID NO: 208459 - DNA, 33 bp, Homo sapien
gaattggctcagtcctgacaacaggttgaggtt

SEQ ID NO: 208460 - DNA, 33 bp, Homo sapien
gaattggctcagtccttacaacaggttgaggtt

SEQ ID NO: 208461 - DNA, 33 bp, Homo sapien
cctcttcagtggaggagtatccgctgtctgaaa

SEQ ID NO: 208462 - DNA, 33 bp, Homo sapien
cctcttcagtggaggattatccgctgtctgaaa

SEQ ID NO: 208463 - DNA, 33 bp, Homo sapien
cactcctcttcatatacattctctccttgctat

SEQ ID NO: 208464 - DNA, 33 bp, Homo sapien
cactcctcttcatatagattctctccttgctat

SEQ ID NO: 208465 - DNA, 33 bp, Homo sapien
tgctctgactcattaacgaagtttcccaggctg

SEQ ID NO: 208466 - DNA, 33 bp, Homo sapien
tgctctgactcattaatgaagtttcccaggctg

SEQ ID NO: 208467 - DNA, 33 bp, Homo sapien
ggctctacagaagatacagactctgctccaagc

SEQ ID NO: 208468 - DNA, 33 bp, Homo sapien
ggctctacagaagatatagactctgctccaagc

SEQ ID NO: 208469 - DNA, 33 bp, Homo sapien
cctataatgaccactacgtatgttctagcatct

SEQ ID NO: 208470 - DNA, 33 bp, Homo sapien
cctataatgaccactatgtatgttctagcatct

SEQ ID NO: 208471 - DNA, 33 bp, Homo sapien
aagaatgagaaactaaagacgtgagattgctgc

SEQ ID NO: 208472 - DNA, 33 bp, Homo sapien
aagaatgagaaactaatgacgtgagattgctgc

SEQ ID NO: 208473 - DNA, 33 bp, Homo sapien
aatttaatctggatcaggtggcagcaatctcac

SEQ ID NO: 208474 - DNA, 33 bp, Homo sapien
aatttaatctggatcatgtggcagcaatctcac

SEQ ID NO: 208475 - DNA, 33 bp, Homo sapien
gtaggcatctgatgtacgatctatgtattaggt

SEQ ID NO: 208476 - DNA, 33 bp, Homo sapien
gtaggcatctgatgtaggatctatgtattaggt

SEQ ID NO: 208477 - DNA, 33 bp, Homo sapien
tgattatagagctatacgtaaaaggtgagatta

SEQ ID NO: 208478 - DNA, 33 bp, Homo sapien
tgattatagagctatatgtaaaaggtgagatta

SEQ ID NO: 208479 - DNA, 33 bp, Homo sapien
tttccacttcaaaggccgacctcaggaatgagc

SEQ ID NO: 208480 - DNA, 33 bp, Homo sapien
tttccacttcaaaggctgacctcaggaatgagc

SEQ ID NO: 208481 - DNA, 33 bp, Homo sapien
ctggttccaaatcaaaaaagtccaactaaaatt

SEQ ID NO: 208482 - DNA, 33 bp, Homo sapien
ctggttccaaatcaaagaagtccaactaaaatt

SEQ ID NO: 208483 - DNA, 33 bp, Homo sapien
catatgagctgacgaaagcacgtggcaaggttg

SEQ ID NO: 208484 - DNA, 33 bp, Homo sapien
catatgagctgacgaaggcacgtggcaaggttg

SEQ ID NO: 208485 - DNA, 33 bp, Homo sapien
gaataaacagcagtaacatgtactagaaatcag

SEQ ID NO: 208486 - DNA, 33 bp, Homo sapien
gaataaacagcagtaatatgtactagaaatcag

SEQ ID NO: 208487 - DNA, 33 bp, Homo sapien
aaatatgatatagataacaatccaatcaccaaa

SEQ ID NO: 208488 - DNA, 33 bp, Homo sapien
aaatatgatatagataccaatccaatcaccaaa

SEQ ID NO: 208489 - DNA, 33 bp, Homo sapien
ttcttgctatgtcctcaaaaaaggagctgcctt

SEQ ID NO: 208490 - DNA, 33 bp, Homo sapien
ttcttgctatgtcctcgaaaaaggagctgcctt

SEQ ID NO: 208491 - DNA, 33 bp, Homo sapien
atgtaaatttttgcacaggaaattgcaatattc

SEQ ID NO: 208492 - DNA, 33 bp, Homo sapien
atgtaaatttttgcacgggaaattgcaatattc

SEQ ID NO: 208493 - DNA, 33 bp, Homo sapien; identical to SEQ ID NO: 208491

SEQ ID NO: 208494 - DNA, 33 bp, Homo sapien; identical to SEQ ID NO: 208492

SEQ ID NO: 208495 - DNA, 33 bp, Homo sapien
actgagtctttcctcaatcatttgctttctgat

SEQ ID NO: 208496 - DNA, 33 bp, Homo sapien
actgagtctttcctcagtcatttgctttctgat

SEQ ID NO: 208497 - DNA, 33 bp, Homo sapien
gctaggagaaaaacaacaaaccaatctgcctag

SEQ ID NO: 208498 - DNA, 33 bp, Homo sapien
gctaggagaaaaacaagaaaccaatctgcctag

SEQ ID NO: 208499 - DNA, 33 bp, Homo sapien
agcagatgaaaagagaactaccaacagaacctc

SEQ ID NO: 208500 - DNA, 33 bp, Homo sapien
agcagatgaaaagagagctaccaacagaacctc

SEQ ID NO: 208501 - DNA, 33 bp, Homo sapien
agtgttcccaaaagaactgtaggatcaatggtg

SEQ ID NO: 208502 - DNA, 33 bp, Homo sapien
agtgttcccaaaagaattgtaggatcaatggtg

SEQ ID NO: 208503 - DNA, 33 bp, Homo sapien
ttaaaggcttatttaactagtcatcccaacaag

SEQ ID NO: 208504 - DNA, 33 bp, Homo sapien
ttaaaggcttatttaagtagtcatcccaacaag

SEQ ID NO: 208505 - DNA, 33 bp, Homo sapien
attaaaaatcaaagaaactccatgtgttggtaa

SEQ ID NO: 208506 - DNA, 33 bp, Homo sapien
attaaaaatcaaagaacctccatgtgttggtaa

SEQ ID NO: 208507 - DNA, 33 bp, Homo sapien; identical to SEQ ID NO: 208505

SEQ ID NO: 208508 - DNA, 33 bp, Homo sapien; identical to SEQ ID NO: 208506

SEQ ID NO: 208509 - DNA, 33 bp, Homo sapien
aaaaaaacttggaatccattcatggtatttctt

SEQ ID NO: 208510 - DNA, 33 bp, Homo sapien
aaaaaaacttggaatctattcatggtatttctt

SEQ ID NO: 208511 - DNA, 33 bp, Homo sapien
atataggaaggcatccgaacacaagaaggtcta

SEQ ID NO: 208512 - DNA, 33 bp, Homo sapien
atataggaaggcatcctaacacaagaaggtcta

SEQ ID NO: 208513 - DNA, 33 bp, Homo sapien
gcatgggtatacaaaaatccatagccaacctct

SEQ ID NO: 208514 - DNA, 33 bp, Homo sapien
gcatgggtatacaaaagtccatagccaacctct

SEQ ID NO: 208515 - DNA, 33 bp, Homo sapien; identical to SEQ ID NO: 208513

SEQ ID NO: 208516 - DNA, 33 bp, Homo sapien; identical to SEQ ID NO: 208514

SEQ ID NO: 208517 - DNA, 33 bp, Homo sapien
actcaacctgttaacaacttcctcatggactgt

SEQ ID NO: 208518 - DNA, 33 bp, Homo sapien
actcaacctgttaacaccttcctcatggactgt

SEQ ID NO: 208519 - DNA, 33 bp, Homo sapien
tactccttcctgatacactaatctctttcactc

SEQ ID NO: 208520 - DNA, 33 bp, Homo sapien
tactccttcctgatacgctaatctctttcactc

SEQ ID NO: 208521 - DNA, 33 bp, Homo sapien
tgtcccccataaagcacataaagtcaaactgca

SEQ ID NO: 208522 - DNA, 33 bp, Homo sapien
tgtcccccataaagcatataaagtcaaactgca

SEQ ID NO: 208523 - DNA, 33 bp, Homo sapien
aggtgacagaagagccaaaagagactctatcag

SEQ ID NO: 208524 - DNA, 33 bp, Homo sapien
aggtgacagaagagccgaaagagactctatcag

SEQ ID NO: 208525 - DNA, 33 bp, Homo sapien
aagatttcctaatacaataaagttcgctataga

SEQ ID NO: 208526 - DNA, 33 bp, Homo sapien
aagatttcctaatacagtaaagttcgctataga

SEQ ID NO: 208527 - DNA, 33 bp, Homo sapien
ctgatcatgtacaaagacagtaagctgatagga

SEQ ID NO: 208528 - DNA, 33 bp, Homo sapien
ctgatcatgtacaaagtcagtaagctgatagga

SEQ ID NO: 208529 - DNA, 33 bp, Homo sapien
taaaaatcaaagaacacccatgagttggtaatt

SEQ ID NO: 208530 - DNA, 33 bp, Homo sapien
taaaaatcaaagaacatccatgagttggtaatt

SEQ ID NO: 208531 - DNA, 33 bp, Homo sapien
tggggaggttaaaacaaagttggccatgaaacc

SEQ ID NO: 208532 - DNA, 33 bp, Homo sapien
tggggaggttaaaacagagttggccatgaaacc

SEQ ID NO: 208533 - DNA, 33 bp, Homo sapien; identical to SEQ ID NO: 208531

SEQ ID NO: 208534 - DNA, 33 bp, Homo sapien; identical to SEQ ID NO: 208532

SEQ ID NO: 208535 - DNA, 33 bp, Homo sapien
aaatacctaggatcaaatagcaagaaatgcaca

SEQ ID NO: 208536 - DNA, 33 bp, Homo sapien
aaatacctaggatcaagtagcaagaaatgcaca

SEQ ID NO: 208537 - DNA, 33 bp, Homo sapien
ctgtaacaatcactgcaaaagtctgtggcctca

SEQ ID NO: 208538 - DNA, 33 bp, Homo sapien
ctgtaacaatcactgcgaaagtctgtggcctca

SEQ ID NO: 208539 - DNA, 33 bp, Homo sapien; identical to SEQ ID NO: 208537

SEQ ID NO: 208540 - DNA, 33 bp, Homo sapien; identical to SEQ ID NO: 208538

SEQ ID NO: 208541 - DNA, 33 bp, Homo sapien
agttgattggcaaatgaaattcctcttcccata

SEQ ID NO: 208542 - DNA, 33 bp, Homo sapien
agttgattggcaaatgtaattcctcttcccata

SEQ ID NO: 208543 - DNA, 33 bp, Homo sapien
tgcccttgttccttggacattctcattgtgtga

SEQ ID NO: 208544 - DNA, 33 bp, Homo sapien
tgcccttgttccttgggcattctcattgtgtga

SEQ ID NO: 208545 - DNA, 33 bp, Homo sapien
acactctaatgcaaaccatatcctaaccctggg

SEQ ID NO: 208546 - DNA, 33 bp, Homo sapien
acactctaatgcaaactatatcctaaccctggg

SEQ ID NO: 208547 - DNA, 33 bp, Homo sapien
acttgattctcaccacaatcccatgcagtaggc

SEQ ID NO: 208548 - DNA, 33 bp, Homo sapien
acttgattctcaccacgatcccatgcagtaggc

SEQ ID NO: 208549 - DNA, 33 bp, Homo sapien
tggggtgtcattaacactaagtgctttctggct

SEQ ID NO: 208550 - DNA, 33 bp, Homo sapien
tggggtgtcattaacattaagtgctttctggct

SEQ ID NO: 208551 - DNA, 33 bp, Homo sapien
caattaagtctttaacaaatgtgcatgaatccc

SEQ ID NO: 208552 - DNA, 33 bp, Homo sapien
caattaagtctttaacgaatgtgcatgaatccc

SEQ ID NO: 208553 - DNA, 33 bp, Homo sapien
atgtcccagagagagaaggtcgttaatttatga

SEQ ID NO: 208554 - DNA, 33 bp, Homo sapien
atgtcccagagagagagggtcgttaatttatga

SEQ ID NO: 208555 - DNA, 33 bp, Homo sapien
gaggaaacttcagagaaaaagaaaggagcaaac

SEQ ID NO: 208556 - DNA, 33 bp, Homo sapien
gaggaaacttcagagagaaagaaaggagcaaac

SEQ ID NO: 208557 - DNA, 33 bp, Homo sapien
caaggaagaaaacacactgtggtacaccatgaa

SEQ ID NO: 208558 - DNA, 33 bp, Homo sapien
caaggaagaaaacacattgtggtacaccatgaa

SEQ ID NO: 208559 - DNA, 33 bp, Homo sapien
agaataagtgttctaacaagccaagcagaggag

SEQ ID NO: 208560 - DNA, 33 bp, Homo sapien
agaataagtgttctaataagccaagcagaggag

SEQ ID NO: 208561 - DNA, 33 bp, Homo sapien
gattaaaacagagaacactttattaccctgcca

SEQ ID NO: 208562 - DNA, 33 bp, Homo sapien
gattaaaacagagaacgctttattaccctgcca

SEQ ID NO: 208563 - DNA, 33 bp, Homo sapien
ttctcaggtcagaaagcaactcagtttccattt

SEQ ID NO: 208564 - DNA, 33 bp, Homo sapien
ttctcaggtcagaaaggaactcagtttccattt

SEQ ID NO: 208565 - DNA, 33 bp, Homo sapien
ggaactcccatgattaagcatttggtggattct

SEQ ID NO: 208566 - DNA, 33 bp, Homo sapien
ggaactcccatgattaggcatttggtggattct

SEQ ID NO: 208567 - DNA, 33 bp, Homo sapien
tgttacacaagcccaaagatgcaagaaaccaga

SEQ ID NO: 208568 - DNA, 33 bp, Homo sapien
tgttacacaagcccaacgatgcaagaaaccaga

SEQ ID NO: 208569 - DNA, 33 bp, Homo sapien
ggtgggactagttttcccatttgatttctatgc

SEQ ID NO: 208570 - DNA, 33 bp, Homo sapien
ggtgggactagttttcgcatttgatttctatgc

SEQ ID NO: 208571 - DNA, 33 bp, Homo sapien
tttataacctctatgagcctggagttttacaga

SEQ ID NO: 208572 - DNA, 33 bp, Homo sapien
tttataacctctatgatcctggagttttacaga

SEQ ID NO: 208573 - DNA, 33 bp, Homo sapien
atgctatgcagtcattaaaaagagcaagatcat

SEQ ID NO: 208574 - DNA, 33 bp, Homo sapien
atgctatgcagtcattgaaaagagcaagatcat

SEQ ID NO: 208575 - DNA, 33 bp, Homo sapien
agatgtttgggactgtaaagaatagtaagtaat

SEQ ID NO: 208576 - DNA, 33 bp, Homo sapien
agatgtttgggactgtgaagaatagtaagtaat

SEQ ID NO: 208577 - DNA, 33 bp, Homo sapien
gtaagagaggctgtgaagatttgtttgccttcc

SEQ ID NO: 208578 - DNA, 33 bp, Homo sapien
gtaagagaggctgtgaggatttgtttgccttcc

SEQ ID NO: 208579 - DNA, 33 bp, Homo sapien
ctcttactgtgattccactgcaaaggtgagaca

SEQ ID NO: 208580 - DNA, 33 bp, Homo sapien
ctcttactgtgattccgctgcaaaggtgagaca

SEQ ID NO: 208581 - DNA, 33 bp, Homo sapien
gttagatgggactcataaagacttccttgacag

SEQ ID NO: 208582 - DNA, 33 bp, Homo sapien
gttagatgggactcatgaagacttccttgacag

SEQ ID NO: 208583 - DNA, 33 bp, Homo sapien
catcttggaaattccaaataagcattactgaga

SEQ ID NO: 208584 - DNA, 33 bp, Homo sapien
catcttggaaattccagataagcattactgaga

SEQ ID NO: 208585 - DNA, 33 bp, Homo sapien
tatatgaagttgagcagtagccaatattaaact

SEQ ID NO: 208586 - DNA, 33 bp, Homo sapien
tatatgaagttgagcattagccaatattaaact

SEQ ID NO: 208587 - DNA, 33 bp, Homo sapien
gagacatcaatcaatacgcggaagatttacatg

SEQ ID NO: 208588 - DNA, 33 bp, Homo sapien
gagacatcaatcaatatgcggaagatttacatg

SEQ ID NO: 208589 - DNA, 33 bp, Homo sapien
ggtagcagagtaaggaataatgagctgctatga

SEQ ID NO: 208590 - DNA, 33 bp, Homo sapien
ggtagcagagtaaggactaatgagctgctatga

SEQ ID NO: 208591 - DNA, 33 bp, Homo sapien
tgattgtatgctcacaaattaatttaatcctcc

SEQ ID NO: 208592 - DNA, 33 bp, Homo sapien
tgattgtatgctcacagattaatttaatcctcc

SEQ ID NO: 208593 - DNA, 33 bp, Homo sapien
tgggaatgagcctccaatgaaagatgcttaaca

SEQ ID NO: 208594 - DNA, 33 bp, Homo sapien
tgggaatgagcctccagtgaaagatgcttaaca

SEQ ID NO: 208595 - DNA, 33 bp, Homo sapien
cacaatctcaaatcccaaaaggtcaaattccta

SEQ ID NO: 208596 - DNA, 33 bp, Homo sapien
cacaatctcaaatcccgaaaggtcaaattccta

SEQ ID NO: 208597 - DNA, 33 bp, Homo sapien
cagagtgcagttctcaacctgaagaatgggaaa

SEQ ID NO: 208598 - DNA, 33 bp, Homo sapien
cagagtgcagttctcagcctgaagaatgggaaa

SEQ ID NO: 208599 - DNA, 33 bp, Homo sapien; identical to SEQ ID NO: 208597

SEQ ID NO: 208600 - DNA, 33 bp, Homo sapien; identical to SEQ ID NO: 208598

SEQ ID NO: 208601 - DNA, 33 bp, Homo sapien
tgccaggcctgatgaacgtctttctggccatgt

SEQ ID NO: 208602 - DNA, 33 bp, Homo sapien
tgccaggcctgatgaatgtctttctggccatgt

SEQ ID NO: 208603 - DNA, 33 bp, Homo sapien
gggcctggtctcttaacattctgcgtggcatgt

SEQ ID NO: 208604 - DNA, 33 bp, Homo sapien
gggcctggtctcttaatattctgcgtggcatgt

SEQ ID NO: 208605 - DNA, 33 bp, Homo sapien; identical to SEQ ID NO: 208603

SEQ ID NO: 208606 - DNA, 33 bp, Homo sapien; identical to SEQ ID NO: 208604

SEQ ID NO: 208607 - DNA, 33 bp, Homo sapien
tacattaggttgattcacatgaaattgctgata

SEQ ID NO: 208608 - DNA, 33 bp, Homo sapien
tacattaggttgattcgcatgaaattgctgata

SEQ ID NO: 208609 - DNA, 33 bp, Homo sapien
atgcttgcctcaaatcccatgtccagaagtctg

SEQ ID NO: 208610 - DNA, 33 bp, Homo sapien
atgcttgcctcaaatcgcatgtccagaagtctg

SEQ ID NO: 208611 - DNA, 33 bp, Homo sapien
tagctaatgattcctacagctgactgcaaaaat

SEQ ID NO: 208612 - DNA, 33 bp, Homo sapien
tagctaatgattcctatagctgactgcaaaaat

SEQ ID NO: 208613 - DNA, 33 bp, Homo sapien
agcctttaagaagacaaaaaacatactacccat

SEQ ID NO: 208614 - DNA, 33 bp, Homo sapien
agcctttaagaagacacaaaacatactacccat

SEQ ID NO: 208615 - DNA, 33 bp, Homo sapien
atttgaaatgctaacacactatagtacttttta

SEQ ID NO: 208616 - DNA, 33 bp, Homo sapien
atttgaaatgctaacagactatagtacttttta

SEQ ID NO: 208617 - DNA, 33 bp, Homo sapien
tttcaaatgttggtaaccttttatttaggactt

SEQ ID NO: 208618 - DNA, 33 bp, Homo sapien
tttcaaatgttggtaagcttttatttaggactt

SEQ ID NO: 208619 - DNA, 33 bp, Homo sapien
acacccattgcactcacatcatctggttatgtg

SEQ ID NO: 208620 - DNA, 33 bp, Homo sapien
acacccattgcactcatatcatctggttatgtg

SEQ ID NO: 208621 - DNA, 33 bp, Homo sapien
agcaggatcatgtaaaatctaacttggggcagg

SEQ ID NO: 208622 - DNA, 33 bp, Homo sapien
agcaggatcatgtaaagtctaacttggggcagg

SEQ ID NO: 208623 - DNA, 33 bp, Homo sapien
gagcagggtctgatacagaggagcaagcctgga

SEQ ID NO: 208624 - DNA, 33 bp, Homo sapien
gagcagggtctgatacggaggagcaagcctgga

SEQ ID NO: 208625 - DNA, 33 bp, Homo sapien
cagtatgaacacaataaatgtatgatgaaatga

SEQ ID NO: 208626 - DNA, 33 bp, Homo sapien
cagtatgaacacaatagatgtatgatgaaatga

SEQ ID NO: 208627 - DNA, 33 bp, Homo sapien
tatttggttaaaaatacgtggaactctaataag

SEQ ID NO: 208628 - DNA, 33 bp, Homo sapien
tatttggttaaaaatatgtggaactctaataag

SEQ ID NO: 208629 - DNA, 33 bp, Homo sapien
aaagatacagaaaattcaataatgatagtcaga

SEQ ID NO: 208630 - DNA, 33 bp, Homo sapien
aaagatacagaaaattgaataatgatagtcaga

SEQ ID NO: 208631 - DNA, 33 bp, Homo sapien
gtgtaacttggtcctgaattagagatttctctc

SEQ ID NO: 208632 - DNA, 33 bp, Homo sapien
gtgtaacttggtcctgcattagagatttctctc

SEQ ID NO: 208633 - DNA, 33 bp, Homo sapien
tttaaatgtgttaatactatagagttgcagaaa

SEQ ID NO: 208634 - DNA, 33 bp, Homo sapien
tttaaatgtgttaatattatagagttgcagaaa

SEQ ID NO: 208635 - DNA, 33 bp, Homo sapien
gaagcttgcaggtacaggatgtttgccacagtt

SEQ ID NO: 208636 - DNA, 33 bp, Homo sapien
gaagcttgcaggtacatgatgtttgccacagtt

SEQ ID NO: 208637 - DNA, 33 bp, Homo sapien
aactgttccagccataaagatgaaatcctcttc

SEQ ID NO: 208638 - DNA, 33 bp, Homo sapien
aactgttccagccatagagatgaaatcctcttc

SEQ ID NO: 208639 - DNA, 33 bp, Homo sapien
gaaatttccaggttaacgggcattagttgagaa

SEQ ID NO: 208640 - DNA, 33 bp, Homo sapien
gaaatttccaggttaatgggcattagttgagaa

SEQ ID NO: 208641 - DNA, 33 bp, Homo sapien
tgagaaggaaaataccaagcattgcaccaaagt

SEQ ID NO: 208642 - DNA, 33 bp, Homo sapien
tgagaaggaaaatacccagcattgcaccaaagt

SEQ ID NO: 208643 - DNA, 33 bp, Homo sapien
agatagaaggaagctcaagaaattatctgtata

SEQ ID NO: 208644 - DNA, 33 bp, Homo sapien
agatagaaggaagctcgagaaattatctgtata

SEQ ID NO: 208645 - DNA, 33 bp, Homo sapien
agagtttgcactttacactatagaggctgagaa

SEQ ID NO: 208646 - DNA, 33 bp, Homo sapien
agagtttgcactttaccctatagaggctgagaa

SEQ ID NO: 208647 - DNA, 33 bp, Homo sapien
tgagaagatttctgaacgttgggctcaacgcat

SEQ ID NO: 208648 - DNA, 33 bp, Homo sapien
tgagaagatttctgaatgttgggctcaacgcat

SEQ ID NO: 208649 - DNA, 33 bp, Homo sapien
aaatccaatttacccaaaagttctcagaaaaca

SEQ ID NO: 208650 - DNA, 33 bp, Homo sapien
aaatccaatttacccataagttctcagaaaaca

SEQ ID NO: 208651 - DNA, 33 bp, Homo sapien
agaaaaactggggggcacttagaagcctgctaa

SEQ ID NO: 208652 - DNA, 33 bp, Homo sapien
agaaaaactggggggcgcttagaagcctgctaa

SEQ ID NO: 208653 - DNA, 33 bp, Homo sapien
aaaaatgagaaaaaacaggcaagaattcagaaa

SEQ ID NO: 208654 - DNA, 33 bp, Homo sapien
aaaaatgagaaaaaacgggcaagaattcagaaa

SEQ ID NO: 208655 - DNA, 33 bp, Homo sapien
cacagcatggcagtgaagtaaagcccttttctg

SEQ ID NO: 208656 - DNA, 33 bp, Homo sapien
cacagcatggcagtgaggtaaagcccttttctg

SEQ ID NO: 208657 - DNA, 33 bp, Homo sapien
actctaaagcatttcccggaaaaaatgagctac

SEQ ID NO: 208658 - DNA, 33 bp, Homo sapien
actctaaagcatttcctggaaaaaatgagctac

SEQ ID NO: 208659 - DNA, 33 bp, Homo sapien
ctttctaggtgttggaatatgcagaaatcgttc

SEQ ID NO: 208660 - DNA, 33 bp, Homo sapien
ctttctaggtgttggagtatgcagaaatcgttc

SEQ ID NO: 208661 - DNA, 33 bp, Homo sapien
aaggctggattttgtgaaatcttttcctctata

SEQ ID NO: 208662 - DNA, 33 bp, Homo sapien
aaggctggattttgtgtaatcttttcctctata

SEQ ID NO: 208663 - DNA, 33 bp, Homo sapien
gaattacaagtgcctcgcagtcagaactgattg

SEQ ID NO: 208664 - DNA, 33 bp, Homo sapien
gaattacaagtgcctctcagtcagaactgattg

SEQ ID NO: 208665 - DNA, 33 bp, Homo sapien
gatctactgaacatcaaatctcatttctttcta

SEQ ID NO: 208666 - DNA, 33 bp, Homo sapien
gatctactgaacatcacatctcatttctttcta

SEQ ID NO: 208667 - DNA, 33 bp, Homo sapien
gaagccctgattgtgcaaccctgggtgagccag

SEQ ID NO: 208668 - DNA, 33 bp, Homo sapien
gaagccctgattgtgcgaccctgggtgagccag

SEQ ID NO: 208669 - DNA, 33 bp, Homo sapien
gctttcctggaaaacaccggaagcagctggctc

SEQ ID NO: 208670 - DNA, 33 bp, Homo sapien
gctttcctggaaaacagcggaagcagctggctc

SEQ ID NO: 208671 - DNA, 33 bp, Homo sapien
ctgagagtaatagaaacttgtcagggcaaggaa

SEQ ID NO: 208672 - DNA, 33 bp, Homo sapien
ctgagagtaatagaaatttgtcagggcaaggaa

SEQ ID NO: 208673 - DNA, 33 bp, Homo sapien
ggagcatcacagagaaataaatgcccttaaatg

SEQ ID NO: 208674 - DNA, 33 bp, Homo sapien
ggagcatcacagagaagtaaatgcccttaaatg

SEQ ID NO: 208675 - DNA, 33 bp, Homo sapien
attcctccatccatatgagaaagaaattaggtc

SEQ ID NO: 208676 - DNA, 33 bp, Homo sapien
attcctccatccatattagaaagaaattaggtc

SEQ ID NO: 208677 - DNA, 33 bp, Homo sapien
gagaggatgacactaaatagcacagacccagat

SEQ ID NO: 208678 - DNA, 33 bp, Homo sapien
gagaggatgacactaagtagcacagacccagat

SEQ ID NO: 208679 - DNA, 33 bp, Homo sapien
cacatgcttgcgaagacaggatggagttgtacc

SEQ ID NO: 208680 - DNA, 33 bp, Homo sapien
cacatgcttgcgaagataggatggagttgtacc

SEQ ID NO: 208681 - DNA, 33 bp, Homo sapien
tggcccatttttcaaccgaggacactgagcctc

SEQ ID NO: 208682 - DNA, 33 bp, Homo sapien
tggcccatttttcaactgaggacactgagcctc

SEQ ID NO: 208683 - DNA, 33 bp, Homo sapien
agtcacattaaagaaactagtccttctccctcc

SEQ ID NO: 208684 - DNA, 33 bp, Homo sapien
agtcacattaaagaaattagtccttctccctcc

SEQ ID NO: 208685 - DNA, 33 bp, Homo sapien
tggctttttccatatcaccagtgacatctttct

SEQ ID NO: 208686 - DNA, 33 bp, Homo sapien
tggctttttccatatcgccagtgacatctttct

SEQ ID NO: 208687 - DNA, 33 bp, Homo sapien
ctggcttatgtgcttacagaggcagacaagccc

SEQ ID NO: 208688 - DNA, 33 bp, Homo sapien
ctggcttatgtgcttatagaggcagacaagccc

SEQ ID NO: 208689 - DNA, 33 bp, Homo sapien
gagacttaagatgaaacgacagttctaacagag

SEQ ID NO: 208690 - DNA, 33 bp, Homo sapien
gagacttaagatgaaatgacagttctaacagag

SEQ ID NO: 208691 - DNA, 33 bp, Homo sapien
atggaactgagcagacactgctgtatttggagt

SEQ ID NO: 208692 - DNA, 33 bp, Homo sapien
atggaactgagcagacgctgctgtatttggagt

SEQ ID NO: 208693 - DNA, 33 bp, Homo sapien
actaagagctgaacacagagttgcctttgcctc

SEQ ID NO: 208694 - DNA, 33 bp, Homo sapien
actaagagctgaacacggagttgcctttgcctc

SEQ ID NO: 208695 - DNA, 33 bp, Homo sapien
gggctgttcaattaagcagtttgtttattaggg

SEQ ID NO: 208696 - DNA, 33 bp, Homo sapien
gggctgttcaattaagtagtttgtttattaggg

SEQ ID NO: 208697 - DNA, 33 bp, Homo sapien
ccaggagatagaagacaagtagttattttcctc

SEQ ID NO: 208698 - DNA, 33 bp, Homo sapien
ccaggagatagaagactagtagttattttcctc

SEQ ID NO: 208699 - DNA, 33 bp, Homo sapien
tagaagctgaaaaacaagttggttcaggacgcc

SEQ ID NO: 208700 - DNA, 33 bp, Homo sapien
tagaagctgaaaaacacgttggttcaggacgcc

SEQ ID NO: 208701 - DNA, 33 bp, Homo sapien
aaggaaatgaaatctaaactgacgattacggag

SEQ ID NO: 208702 - DNA, 33 bp, Homo sapien
aaggaaatgaaatctacactgacgattacggag

SEQ ID NO: 208703 - DNA, 33 bp, Homo sapien
cagcatcaagtcttaccaggggcttcaacaacg

SEQ ID NO: 208704 - DNA, 33 bp, Homo sapien
cagcatcaagtcttactaggggcttcaacaacg

SEQ ID NO: 208705 - DNA, 33 bp, Homo sapien
cccagcgagctgcaacccagacctccttcaaaa

SEQ ID NO: 208706 - DNA, 33 bp, Homo sapien
cccagcgagctgcaactcagacctccttcaaaa

SEQ ID NO: 208707 - DNA, 33 bp, Homo sapien
tacagtgtgggtagaacagctccaaataaaaca

SEQ ID NO: 208708 - DNA, 33 bp, Homo sapien
tacagtgtgggtagaagagctccaaataaaaca

SEQ ID NO: 208709 - DNA, 33 bp, Homo sapien
gactggttggcattataaagcagttcagagaag

SEQ ID NO: 208710 - DNA, 33 bp, Homo sapien
gactggttggcattatgaagcagttcagagaag

SEQ ID NO: 208711 - DNA, 33 bp, Homo sapien
caaggagcccgcttcaccagtcttaaggagtgc

SEQ ID NO: 208712 - DNA, 33 bp, Homo sapien
caaggagcccgcttcatcagtcttaaggagtgc

SEQ ID NO: 208713 - DNA, 33 bp, Homo sapien
ttacttccctgcccaaatgaagcagaaatgtct

SEQ ID NO: 208714 - DNA, 33 bp, Homo sapien
ttacttccctgcccaagtgaagcagaaatgtct

SEQ ID NO: 208715 - DNA, 33 bp, Homo sapien
acgttttattcctatagattgcaacatccccca

SEQ ID NO: 208716 - DNA, 33 bp, Homo sapien
acgttttattcctatatattgcaacatccccca

SEQ ID NO: 208717 - DNA, 33 bp, Homo sapien
ccttaactatcttccacgagatgttatcctgac

SEQ ID NO: 208718 - DNA, 33 bp, Homo sapien
ccttaactatcttccatgagatgttatcctgac

SEQ ID NO: 208719 - DNA, 33 bp, Homo sapien
taaacattttcttgtcaacacacagtattgtat

SEQ ID NO: 208720 - DNA, 33 bp, Homo sapien
taaacattttcttgtccacacacagtattgtat

SEQ ID NO: 208721 - DNA, 33 bp, Homo sapien
gcccttatgtgtgacacggagatagaaagaaga

SEQ ID NO: 208722 - DNA, 33 bp, Homo sapien
gcccttatgtgtgacatggagatagaaagaaga

SEQ ID NO: 208723 - DNA, 33 bp, Homo sapien
gcaagccattcaacaacagatagaacagacaga

SEQ ID NO: 208724 - DNA, 33 bp, Homo sapien
gcaagccattcaacaagagatagaacagacaga

SEQ ID NO: 208725 - DNA, 33 bp, Homo sapien
tggctatttattaacccgcaacatcataaaccc

SEQ ID NO: 208726 - DNA, 33 bp, Homo sapien
tggctatttattaacctgcaacatcataaaccc

SEQ ID NO: 208727 - DNA, 33 bp, Homo sapien
ctgatgaagttgtcaaagtcatcctgccagaaa

SEQ ID NO: 208728 - DNA, 33 bp, Homo sapien
ctgatgaagttgtcaaggtcatcctgccagaaa

SEQ ID NO: 208729 - DNA, 33 bp, Homo sapien
tggggagaacttaggaatcatatactcaggcca

SEQ ID NO: 208730 - DNA, 33 bp, Homo sapien
tggggagaacttaggattcatatactcaggcca

SEQ ID NO: 208731 - DNA, 33 bp, Homo sapien
taattttattctcccaacaagcctggcaggtag

SEQ ID NO: 208732 - DNA, 33 bp, Homo sapien
taattttattctcccagcaagcctggcaggtag

SEQ ID NO: 208733 - DNA, 33 bp, Homo sapien
cacagacactaaggtacagctcatgcttgttat

SEQ ID NO: 208734 - DNA, 33 bp, Homo sapien
cacagacactaaggtatagctcatgcttgttat

SEQ ID NO: 208735 - DNA, 33 bp, Homo sapien
acagggcccttcataagcagtaactcttgtaac

SEQ ID NO: 208736 - DNA, 33 bp, Homo sapien
acagggcccttcataatcagtaactcttgtaac

SEQ ID NO: 208737 - DNA, 33 bp, Homo sapien
tgtagcttcttgaacactgtcaaactgtcagac

SEQ ID NO: 208738 - DNA, 33 bp, Homo sapien
tgtagcttcttgaacattgtcaaactgtcagac

SEQ ID NO: 208739 - DNA, 33 bp, Homo sapien
caaagagagaagtcaacaggctcaacttgtatg

SEQ ID NO: 208740 - DNA, 33 bp, Homo sapien
caaagagagaagtcaataggctcaacttgtatg

SEQ ID NO: 208741 - DNA, 33 bp, Homo sapien
actctcctctagacataaactgagggttctcaa

SEQ ID NO: 208742 - DNA, 33 bp, Homo sapien
actctcctctagacatgaactgagggttctcaa

SEQ ID NO: 208743 - DNA, 33 bp, Homo sapien
cttacaacttaaatcccgcacattaaaaataaa

SEQ ID NO: 208744 - DNA, 33 bp, Homo sapien
cttacaacttaaatcctgcacattaaaaataaa

SEQ ID NO: 208745 - DNA, 33 bp, Homo sapien
ttaagttgtaagtgaaaaggactgcgtcaagag

SEQ ID NO: 208746 - DNA, 33 bp, Homo sapien
ttaagttgtaagtgaagaggactgcgtcaagag

SEQ ID NO: 208747 - DNA, 33 bp, Homo sapien
agggatgttgtccaaaatacgtgttcatgtgta

SEQ ID NO: 208748 - DNA, 33 bp, Homo sapien
agggatgttgtccaaagtacgtgttcatgtgta

SEQ ID NO: 208749 - DNA, 33 bp, Homo sapien
atgccattagtaagaggcacaaatactgtgata

SEQ ID NO: 208750 - DNA, 33 bp, Homo sapien
atgccattagtaagagtcacaaatactgtgata

SEQ ID NO: 208751 - DNA, 33 bp, Homo sapien
acagatccagcttacactgaatgaaacaactaa

SEQ ID NO: 208752 - DNA, 33 bp, Homo sapien
acagatccagcttacattgaatgaaacaactaa

SEQ ID NO: 208753 - DNA, 33 bp, Homo sapien
aaccaacaaattagaacgtagggtgattggagt

SEQ ID NO: 208754 - DNA, 33 bp, Homo sapien
aaccaacaaattagaatgtagggtgattggagt

SEQ ID NO: 208755 - DNA, 33 bp, Homo sapien
tcataaacccttaacactggagagtaatataac

SEQ ID NO: 208756 - DNA, 33 bp, Homo sapien
tcataaacccttaacattggagagtaatataac

SEQ ID NO: 208757 - DNA, 33 bp, Homo sapien
aggaagaaatttgtccactgagaagtctccctt

SEQ ID NO: 208758 - DNA, 33 bp, Homo sapien
aggaagaaatttgtccgctgagaagtctccctt

SEQ ID NO: 208759 - DNA, 33 bp, Homo sapien
caggaagtaaactacgaataaaaagctggtttt

SEQ ID NO: 208760 - DNA, 33 bp, Homo sapien
caggaagtaaactacggataaaaagctggtttt

SEQ ID NO: 208761 - DNA, 33 bp, Homo sapien
agaggagagaccttaacgtatacagagactaag

SEQ ID NO: 208762 - DNA, 33 bp, Homo sapien
agaggagagaccttaatgtatacagagactaag

SEQ ID NO: 208763 - DNA, 33 bp, Homo sapien
tttctccagctaagccaaaggatggtgggggca

SEQ ID NO: 208764 - DNA, 33 bp, Homo sapien
tttctccagctaagccgaaggatggtgggggca

SEQ ID NO: 208765 - DNA, 33 bp, Homo sapien
atctcttttgcttctacgagaataagtattgaa

SEQ ID NO: 208766 - DNA, 33 bp, Homo sapien
atctcttttgcttctatgagaataagtattgaa

SEQ ID NO: 208767 - DNA, 33 bp, Homo sapien
ctgtgctttccaaggacagtagaaatgctagtg

SEQ ID NO: 208768 - DNA, 33 bp, Homo sapien
ctgtgctttccaaggagagtagaaatgctagtg

SEQ ID NO: 208769 - DNA, 33 bp, Homo sapien
gggcctccgggtctgtcaaaatgatcaggcctc

SEQ ID NO: 208770 - DNA, 33 bp, Homo sapien
gggcctccgggtctgttaaaatgatcaggcctc

SEQ ID NO: 208771 - DNA, 33 bp, Homo sapien
agttttgctgtcaacacgttttctgctaaaaac

SEQ ID NO: 208772 - DNA, 33 bp, Homo sapien
agttttgctgtcaacaggttttctgctaaaaac

SEQ ID NO: 208773 - DNA, 33 bp, Homo sapien
caggagcccttaattacacaagctttctgagtc

SEQ ID NO: 208774 - DNA, 33 bp, Homo sapien
caggagcccttaattagacaagctttctgagtc

SEQ ID NO: 208775 - DNA, 33 bp, Homo sapien
atatagagagcatagaaagctacattgtttgct

SEQ ID NO: 208776 - DNA, 33 bp, Homo sapien
atatagagagcatagatagctacattgtttgct

SEQ ID NO: 208777 - DNA, 33 bp, Homo sapien
tagccatgaaatgtgggagttgtagcaggcatg

SEQ ID NO: 208778 - DNA, 33 bp, Homo sapien
tagccatgaaatgtggtagttgtagcaggcatg

SEQ ID NO: 208779 - DNA, 33 bp, Homo sapien
gcatacagctgacaaacagaggaacaagattca

SEQ ID NO: 208780 - DNA, 33 bp, Homo sapien
gcatacagctgacaaagagaggaacaagattca

SEQ ID NO: 208781 - DNA, 33 bp, Homo sapien
aaatatgcctttttaaccaatctcaatcctaga

SEQ ID NO: 208782 - DNA, 33 bp, Homo sapien
aaatatgcctttttaagcaatctcaatcctaga

SEQ ID NO: 208783 - DNA, 33 bp, Homo sapien
gtcatcaagggcaccacatagctgaaaggcagg

SEQ ID NO: 208784 - DNA, 33 bp, Homo sapien
gtcatcaagggcaccatatagctgaaaggcagg

SEQ ID NO: 208785 - DNA, 33 bp, Homo sapien
ttttttcagaaccagacctttctgtatgttaac

SEQ ID NO: 208786 - DNA, 33 bp, Homo sapien
ttttttcagaaccagatctttctgtatgttaac

SEQ ID NO: 208787 - DNA, 33 bp, Homo sapien
ataaatatttgtagtgcaggcgccctgaaaata

SEQ ID NO: 208788 - DNA, 33 bp, Homo sapien
ataaatatttgtagtgtaggcgccctgaaaata

SEQ ID NO: 208789 - DNA, 33 bp, Homo sapien
acaaatttggcagtaacgtaagcaggacctgcc

SEQ ID NO: 208790 - DNA, 33 bp, Homo sapien
acaaatttggcagtaatgtaagcaggacctgcc

SEQ ID NO: 208791 - DNA, 33 bp, Homo sapien
agccagagagcatgccagcacgtatatgcgtgc

SEQ ID NO: 208792 - DNA, 33 bp, Homo sapien
agccagagagcatgccggcacgtatatgcgtgc

SEQ ID NO: 208793 - DNA, 33 bp, Homo sapien
aatgaataacatttaccgaatgcttggctattc

SEQ ID NO: 208794 - DNA, 33 bp, Homo sapien
aatgaataacatttactgaatgcttggctattc

SEQ ID NO: 208795 - DNA, 33 bp, Homo sapien
aacttatcggtcaaaactttcactaaaggcagt

SEQ ID NO: 208796 - DNA, 33 bp, Homo sapien
aacttatcggtcaaaattttcactaaaggcagt

SEQ ID NO: 208797 - DNA, 33 bp, Homo sapien
aattgtgactggatgccgagcacattgagacac

SEQ ID NO: 208798 - DNA, 33 bp, Homo sapien
aattgtgactggatgctgagcacattgagacac

SEQ ID NO: 208799 - DNA, 33 bp, Homo sapien
aattcttgtctgattaacgaatagcccaagtgc

SEQ ID NO: 208800 - DNA, 33 bp, Homo sapien
aattcttgtctgattaccgaatagcccaagtgc

SEQ ID NO: 208801 - DNA, 33 bp, Homo sapien
gtttctttcatttctacccgtaagaaggttagt

SEQ ID NO: 208802 - DNA, 33 bp, Homo sapien
gtttctttcatttctatccgtaagaaggttagt

SEQ ID NO: 208803 - DNA, 33 bp, Homo sapien
aatattgttcacaatagtaaaagatcatctcct

SEQ ID NO: 208804 - DNA, 33 bp, Homo sapien
aatattgttcacaatattaaaagatcatctcct

SEQ ID NO: 208805 - DNA, 33 bp, Homo sapien
acttcagaggcttcccgaattgaatctttgtat

SEQ ID NO: 208806 - DNA, 33 bp, Homo sapien
acttcagaggcttccctaattgaatctttgtat

SEQ ID NO: 208807 - DNA, 33 bp, Homo sapien
taaaagacctcgtaaaagagaagtgtgaaggga

SEQ ID NO: 208808 - DNA, 33 bp, Homo sapien
taaaagacctcgtaaaggagaagtgtgaaggga

SEQ ID NO: 208809 - DNA, 33 bp, Homo sapien
tactgtagagcaaaaacaaagcggacagttctc

SEQ ID NO: 208810 - DNA, 33 bp, Homo sapien
tactgtagagcaaaaagaaagcggacagttctc

SEQ ID NO: 208811 - DNA, 33 bp, Homo sapien
aatctagctcgttttaaaggcatttgaaggagg

SEQ ID NO: 208812 - DNA, 33 bp, Homo sapien
aatctagctcgttttacaggcatttgaaggagg

SEQ ID NO: 208813 - DNA, 33 bp, Homo sapien
ggtggaatttctaatccgagacaagtgtctgtt

SEQ ID NO: 208814 - DNA, 33 bp, Homo sapien
ggtggaatttctaatctgagacaagtgtctgtt

SEQ ID NO: 208815 - DNA, 33 bp, Homo sapien
aaaaagttttccctacagtagcaataggctaaa

SEQ ID NO: 208816 - DNA, 33 bp, Homo sapien
aaaaagttttccctacggtagcaataggctaaa

SEQ ID NO: 208817 - DNA, 33 bp, Homo sapien
gtgatatttatttgtgccaatggactcaaccca

SEQ ID NO: 208818 - DNA, 33 bp, Homo sapien
gtgatatttatttgtggcaatggactcaaccca

SEQ ID NO: 208819 - DNA, 33 bp, Homo sapien
cgtttgcatcggcttggagctggttagtcaaat

SEQ ID NO: 208820 - DNA, 33 bp, Homo sapien
cgtttgcatcggcttgtagctggttagtcaaat

SEQ ID NO: 208821 - DNA, 33 bp, Homo sapien
tgtaagtactgtgcaaggataaaggattttgag

SEQ ID NO: 208822 - DNA, 33 bp, Homo sapien
tgtaagtactgtgcaatgataaaggattttgag

SEQ ID NO: 208823 - DNA, 33 bp, Homo sapien
gtttgggtttcactaaagctacagaagtccact

SEQ ID NO: 208824 - DNA, 33 bp, Homo sapien
gtttgggtttcactaaggctacagaagtccact

SEQ ID NO: 208825 - DNA, 33 bp, Homo sapien
gatttggctctcagcgaaaatgtttttagtgta

SEQ ID NO: 208826 - DNA, 33 bp, Homo sapien
gatttggctctcagcgtaaatgtttttagtgta

SEQ ID NO: 208827 - DNA, 33 bp, Homo sapien
gtaaagttaccacagacagcagcttagttagca

SEQ ID NO: 208828 - DNA, 33 bp, Homo sapien
gtaaagttaccacagatagcagcttagttagca

SEQ ID NO: 208829 - DNA, 33 bp, Homo sapien
gtccaccttccagatcactcacaaatgcctaat

SEQ ID NO: 208830 - DNA, 33 bp, Homo sapien
gtccaccttccagatcgctcacaaatgcctaat

SEQ ID NO: 208831 - DNA, 33 bp, Homo sapien
tttttgaccaagcacacaaggcctttaagtaat

SEQ ID NO: 208832 - DNA, 33 bp, Homo sapien
tttttgaccaagcacataaggcctttaagtaat

SEQ ID NO: 208833 - DNA, 33 bp, Homo sapien
tttttatcaggactcaactcctgtgatgactaa

SEQ ID NO: 208834 - DNA, 33 bp, Homo sapien
tttttatcaggactcagctcctgtgatgactaa

SEQ ID NO: 208835 - DNA, 33 bp, Homo sapien
ttttatctcagttcttcaaacaaccagatcaga

SEQ ID NO: 208836 - DNA, 33 bp, Homo sapien
ttttatctcagttcttgaaacaaccagatcaga

SEQ ID NO: 208837 - DNA, 33 bp, Homo sapien
atcctctcgcaggtgaggagctctgagaaccac

SEQ ID NO: 208838 - DNA, 33 bp, Homo sapien
atcctctcgcaggtgatgagctctgagaaccac

SEQ ID NO: 208839 - DNA, 33 bp, Homo sapien
gagacttcaggatctgcaaaaaactgtaattca

SEQ ID NO: 208840 - DNA, 33 bp, Homo sapien
gagacttcaggatctggaaaaaactgtaattca

SEQ ID NO: 208841 - DNA, 33 bp, Homo sapien
gataacatgtctcaaacggcctagcagaggacc

SEQ ID NO: 208842 - DNA, 33 bp, Homo sapien
gataacatgtctcaaagggcctagcagaggacc

SEQ ID NO: 208843 - DNA, 33 bp, Homo sapien
cctctcacttggcttacagtgaggggaagtgtc

SEQ ID NO: 208844 - DNA, 33 bp, Homo sapien
cctctcacttggcttagagtgaggggaagtgtc

SEQ ID NO: 208845 - DNA, 33 bp, Homo sapien
gttcaaatggccttaacattttctcagagcctt

SEQ ID NO: 208846 - DNA, 33 bp, Homo sapien
gttcaaatggccttaatattttctcagagcctt

SEQ ID NO: 208847 - DNA, 33 bp, Homo sapien
agtaataatttcaacaactgctgtatcctgtgt

SEQ ID NO: 208848 - DNA, 33 bp, Homo sapien
agtaataatttcaacagctgctgtatcctgtgt

SEQ ID NO: 208849 - DNA, 33 bp, Homo sapien
ccaactctaccatacagataaccttctatccat

SEQ ID NO: 208850 - DNA, 33 bp, Homo sapien
ccaactctaccatacatataaccttctatccat

SEQ ID NO: 208851 - DNA, 33 bp, Homo sapien
acatacagcaaggactaaagaaccatacagcta

SEQ ID NO: 208852 - DNA, 33 bp, Homo sapien
acatacagcaaggactgaagaaccatacagcta

SEQ ID NO: 208853 - DNA, 33 bp, Homo sapien
ttgataagtagaggacactggttgaacacatta

SEQ ID NO: 208854 - DNA, 33 bp, Homo sapien
ttgataagtagaggacgctggttgaacacatta

SEQ ID NO: 208855 - DNA, 33 bp, Homo sapien
tatagggaaagtaatacaagttcaatacacaga

SEQ ID NO: 208856 - DNA, 33 bp, Homo sapien
tatagggaaagtaatataagttcaatacacaga

SEQ ID NO: 208857 - DNA, 33 bp, Homo sapien
gacagcccttcaaatacatgaaacatgtcatcc

SEQ ID NO: 208858 - DNA, 33 bp, Homo sapien
gacagcccttcaaatatatgaaacatgtcatcc

SEQ ID NO: 208859 - DNA, 33 bp, Homo sapien
catctattttcagaacaagaaatcctgatggga

SEQ ID NO: 208860 - DNA, 33 bp, Homo sapien
catctattttcagaacgagaaatcctgatggga

SEQ ID NO: 208861 - DNA, 33 bp, Homo sapien
atttcatctcgctttggataaattctataacct

SEQ ID NO: 208862 - DNA, 33 bp, Homo sapien
atttcatctcgctttgtataaattctataacct

SEQ ID NO: 208863 - DNA, 33 bp, Homo sapien
gatttttatccactacgcaatgggagccatcaa

SEQ ID NO: 208864 - DNA, 33 bp, Homo sapien
gatttttatccactactcaatgggagccatcaa

SEQ ID NO: 208865 - DNA, 33 bp, Homo sapien
cttgtctaccagctgcaaaccccagtgtcttat

SEQ ID NO: 208866 - DNA, 33 bp, Homo sapien
cttgtctaccagctgcgaaccccagtgtcttat

SEQ ID NO: 208867 - DNA, 33 bp, Homo sapien
ctaggagtttttcacccgaactgctgctgaacc

SEQ ID NO: 208868 - DNA, 33 bp, Homo sapien
ctaggagtttttcacctgaactgctgctgaacc

SEQ ID NO: 208869 - DNA, 33 bp, Homo sapien
ttcaacagaggcccggaaaaggccacacctgtg

SEQ ID NO: 208870 - DNA, 33 bp, Homo sapien
ttcaacagaggcccgggaaaggccacacctgtg

SEQ ID NO: 208871 - DNA, 33 bp, Homo sapien
aaaaaactagtttggactatttccacataatga

SEQ ID NO: 208872 - DNA, 33 bp, Homo sapien
aaaaaactagtttggattatttccacataatga

SEQ ID NO: 208873 - DNA, 33 bp, Homo sapien
gcaacttttaggttcacagagaacaggccaaaa

SEQ ID NO: 208874 - DNA, 33 bp, Homo sapien
gcaacttttaggttcagagagaacaggccaaaa

SEQ ID NO: 208875 - DNA, 33 bp, Homo sapien
acagttagagaatgagccatttttcacaaaata

SEQ ID NO: 208876 - DNA, 33 bp, Homo sapien
acagttagagaatgaggcatttttcacaaaata

SEQ ID NO: 208877 - DNA, 33 bp, Homo sapien
aaatgactgagaagtgaaagcgttctgcctatg

SEQ ID NO: 208878 - DNA, 33 bp, Homo sapien
aaatgactgagaagtggaagcgttctgcctatg

SEQ ID NO: 208879 - DNA, 33 bp, Homo sapien
tttcaggcctatcacaccctttcatatttgtgt

SEQ ID NO: 208880 - DNA, 33 bp, Homo sapien
tttcaggcctatcacatcctttcatatttgtgt

SEQ ID NO: 208881 - DNA, 33 bp, Homo sapien
cgtaaaacagggtcataataaggattgccataa

SEQ ID NO: 208882 - DNA, 33 bp, Homo sapien
cgtaaaacagggtcatgataaggattgccataa

SEQ ID NO: 208883 - DNA, 33 bp, Homo sapien
aacttcaaatgtgaccaaatgtgtcctgtattc

SEQ ID NO: 208884 - DNA, 33 bp, Homo sapien
aacttcaaatgtgaccgaatgtgtcctgtattc

SEQ ID NO: 208885 - DNA, 33 bp, Homo sapien
ttctgaatgtgtctggcagtcctataatcattc

SEQ ID NO: 208886 - DNA, 33 bp, Homo sapien
ttctgaatgtgtctggtagtcctataatcattc

SEQ ID NO: 208887 - DNA, 33 bp, Homo sapien
gatatttcagctcctacacctccttccaatagc

SEQ ID NO: 208888 - DNA, 33 bp, Homo sapien
gatatttcagctcctagacctccttccaatagc

SEQ ID NO: 208889 - DNA, 33 bp, Homo sapien
gaggtggtacagacaaattggcctgggtgtctg

SEQ ID NO: 208890 - DNA, 33 bp, Homo sapien
gaggtggtacagacaagttggcctgggtgtctg

SEQ ID NO: 208891 - DNA, 33 bp, Homo sapien
tgggacccttcatggaccttcttaatgtgcaag

SEQ ID NO: 208892 - DNA, 33 bp, Homo sapien
tgggacccttcatggagcttcttaatgtgcaag

SEQ ID NO: 208893 - DNA, 33 bp, Homo sapien
agaaccgcatgctgatcaccctagatgagctgc

SEQ ID NO: 208894 - DNA, 33 bp, Homo sapien
agaaccgcatgctgattaccctagatgagctgc

SEQ ID NO: 208895 - DNA, 33 bp, Homo sapien
cctgggccaatttgcaccaggtacagttggagc

SEQ ID NO: 208896 - DNA, 33 bp, Homo sapien
cctgggccaatttgcatcaggtacagttggagc

SEQ ID NO: 208897 - DNA, 33 bp, Homo sapien
ggagcagaactgagaaatagtgacaaggctggg

SEQ ID NO: 208898 - DNA, 33 bp, Homo sapien
ggagcagaactgagaagtagtgacaaggctggg

SEQ ID NO: 208899 - DNA, 33 bp, Homo sapien
tgtgccagcaactttccctaagagagtgttaac

SEQ ID NO: 208900 - DNA, 33 bp, Homo sapien
tgtgccagcaactttctctaagagagtgttaac

SEQ ID NO: 208901 - DNA, 33 bp, Homo sapien
tatgcaatcttggggaaattaacctctcagatt

SEQ ID NO: 208902 - DNA, 33 bp, Homo sapien
tatgcaatcttggggagattaacctctcagatt

SEQ ID NO: 208903 - DNA, 33 bp, Homo sapien
atttgttaaatgtcaaatgaactgactgttcca

SEQ ID NO: 208904 - DNA, 33 bp, Homo sapien
atttgttaaatgtcaagtgaactgactgttcca

SEQ ID NO: 208905 - DNA, 33 bp, Homo sapien
gcttattcttttgtacacagctgaagaaagata

SEQ ID NO: 208906 - DNA, 33 bp, Homo sapien
gcttattcttttgtacgcagctgaagaaagata

SEQ ID NO: 208907 - DNA, 33 bp, Homo sapien
tggaagtggcccatcaaagccttatctttcttc

SEQ ID NO: 208908 - DNA, 33 bp, Homo sapien
tggaagtggcccatcagagccttatctttcttc

SEQ ID NO: 208909 - DNA, 33 bp, Homo sapien
ggtatgtgtggatggaaagggactggtcagatg

SEQ ID NO: 208910 - DNA, 33 bp, Homo sapien
ggtatgtgtggatggagagggactggtcagatg

SEQ ID NO: 208911 - DNA, 33 bp, Homo sapien
gactaagcctcatgcaaagactcagggttcatg

SEQ ID NO: 208912 - DNA, 33 bp, Homo sapien
gactaagcctcatgcagagactcagggttcatg

SEQ ID NO: 208913 - DNA, 33 bp, Homo sapien
tggcaccaagtgtctcaatggctctctctgctg

SEQ ID NO: 208914 - DNA, 33 bp, Homo sapien
tggcaccaagtgtctcgatggctctctctgctg

SEQ ID NO: 208915 - DNA, 33 bp, Homo sapien
gtatgcctgcaaggaaaacatcagctaaggtct

SEQ ID NO: 208916 - DNA, 33 bp, Homo sapien
gtatgcctgcaaggaagacatcagctaaggtct

SEQ ID NO: 208917 - DNA, 33 bp, Homo sapien
ggtcacgcctgggatacagcagagttagcagcc

SEQ ID NO: 208918 - DNA, 33 bp, Homo sapien
ggtcacgcctgggatagagcagagttagcagcc

SEQ ID NO: 208919 - DNA, 33 bp, Homo sapien
gaggatactgttatgaaggctcagaggtgccag

SEQ ID NO: 208920 - DNA, 33 bp, Homo sapien
gaggatactgttatgacggctcagaggtgccag

SEQ ID NO: 208921 - DNA, 33 bp, Homo sapien
aattagccctagactaagcactctctggttctg

SEQ ID NO: 208922 - DNA, 33 bp, Homo sapien
aattagccctagactacgcactctctggttctg

SEQ ID NO: 208923 - DNA, 33 bp, Homo sapien
gtgttctagaacaaacacaaggatatctataga

SEQ ID NO: 208924 - DNA, 33 bp, Homo sapien
gtgttctagaacaaacgcaaggatatctataga

SEQ ID NO: 208925 - DNA, 33 bp, Homo sapien
gggcagaggccttttaagtttcctgggagtcac

SEQ ID NO: 208926 - DNA, 33 bp, Homo sapien
gggcagaggccttttacgtttcctgggagtcac

SEQ ID NO: 208927 - DNA, 33 bp, Homo sapien
ttaaattagcttataaaatgcacattgctttcc

SEQ ID NO: 208928 - DNA, 33 bp, Homo sapien
ttaaattagcttataagatgcacattgctttcc

SEQ ID NO: 208929 - DNA, 33 bp, Homo sapien
tcatatccatactctaaatcaactatggatgcc

SEQ ID NO: 208930 - DNA, 33 bp, Homo sapien
tcatatccatactctagatcaactatggatgcc

SEQ ID NO: 208931 - DNA, 33 bp, Homo sapien
aaatcttatgcatatgaagtgaattaaaacaat

SEQ ID NO: 208932 - DNA, 33 bp, Homo sapien
aaatcttatgcatatggagtgaattaaaacaat

SEQ ID NO: 208933 - DNA, 33 bp, Homo sapien
tggaaagtgtgtctggaatacacagctattact

SEQ ID NO: 208934 - DNA, 33 bp, Homo sapien
tggaaagtgtgtctgggatacacagctattact

SEQ ID NO: 208935 - DNA, 33 bp, Homo sapien
gtttaactgaagctgaagttaccagatcttttc

SEQ ID NO: 208936 - DNA, 33 bp, Homo sapien
gtttaactgaagctgatgttaccagatcttttc

SEQ ID NO: 208937 - DNA, 33 bp, Homo sapien
aatctagtataactggaaaggagtgcaagcaac

SEQ ID NO: 208938 - DNA, 33 bp, Homo sapien
aatctagtataactgggaaggagtgcaagcaac

SEQ ID NO: 208939 - DNA, 33 bp, Homo sapien
cacaattgtttaatagaagagttgcataatcta

SEQ ID NO: 208940 - DNA, 33 bp, Homo sapien
cacaattgtttaataggagagttgcataatcta

SEQ ID NO: 208941 - DNA, 33 bp, Homo sapien
ataaaggaagttatcacaggaaaatgtagccct

SEQ ID NO: 208942 - DNA, 33 bp, Homo sapien
ataaaggaagttatcataggaaaatgtagccct

SEQ ID NO: 208943 - DNA, 33 bp, Homo sapien
taaaagtaaccaacatcaaagataactgcaaat

SEQ ID NO: 208944 - DNA, 33 bp, Homo sapien
taaaagtaaccaacatgaaagataactgcaaat

SEQ ID NO: 208945 - DNA, 33 bp, Homo sapien
ctaactgttatgagaacgtagagaaagaaaact

SEQ ID NO: 208946 - DNA, 33 bp, Homo sapien
ctaactgttatgagaatgtagagaaagaaaact

SEQ ID NO: 208947 - DNA, 33 bp, Homo sapien
tatcttaagtgacataagaccaggaacagaaaa

SEQ ID NO: 208948 - DNA, 33 bp, Homo sapien
tatcttaagtgacataggaccaggaacagaaaa

SEQ ID NO: 208949 - DNA, 33 bp, Homo sapien
actggcacattgcacgcattcttttttaaataa

SEQ ID NO: 208950 - DNA, 33 bp, Homo sapien
actggcacattgcacgtattcttttttaaataa

SEQ ID NO: 208951 - DNA, 33 bp, Homo sapien
aactttctttttccttgaactatcagagcctat

SEQ ID NO: 208952 - DNA, 33 bp, Homo sapien
aactttctttttcctttaactatcagagcctat

SEQ ID NO: 208953 - DNA, 33 bp, Homo sapien
atttatactcaggaaaatgttcttcttccccat

SEQ ID NO: 208954 - DNA, 33 bp, Homo sapien
atttatactcaggaaagtgttcttcttccccat

SEQ ID NO: 208955 - DNA, 33 bp, Homo sapien
ggtgtggactatgtaacgtgttttctggtttta

SEQ ID NO: 208956 - DNA, 33 bp, Homo sapien
ggtgtggactatgtaatgtgttttctggtttta

SEQ ID NO: 208957 - DNA, 33 bp, Homo sapien
agagcaaaagataacaactgtggcaaaaaaaat

SEQ ID NO: 208958 - DNA, 33 bp, Homo sapien
agagcaaaagataacagctgtggcaaaaaaaat

SEQ ID NO: 208959 - DNA, 33 bp, Homo sapien
gcctaaaaatcaaccaaaggtgaagcctatggt

SEQ ID NO: 208960 - DNA, 33 bp, Homo sapien
gcctaaaaatcaaccagaggtgaagcctatggt

SEQ ID NO: 208961 - DNA, 33 bp, Homo sapien
atggtgtggctgagcactgaagtattggcacca

SEQ ID NO: 208962 - DNA, 33 bp, Homo sapien
atggtgtggctgagcattgaagtattggcacca

SEQ ID NO: 208963 - DNA, 33 bp, Homo sapien
tctgtccaccatgaacaacgtaaatatcccatt

SEQ ID NO: 208964 - DNA, 33 bp, Homo sapien
tctgtccaccatgaaccacgtaaatatcccatt

SEQ ID NO: 208965 - DNA, 33 bp, Homo sapien
aaagaatatgcatgctaaaacacattgttacta

SEQ ID NO: 208966 - DNA, 33 bp, Homo sapien
aaagaatatgcatgctgaaacacattgttacta

SEQ ID NO: 208967 - DNA, 33 bp, Homo sapien
cagtgaatttcacaccaatttataaagatacag

SEQ ID NO: 208968 - DNA, 33 bp, Homo sapien
cagtgaatttcacaccgatttataaagatacag

SEQ ID NO: 208969 - DNA, 33 bp, Homo sapien
cctttcaggatattgcgaagaggactttaaggt

SEQ ID NO: 208970 - DNA, 33 bp, Homo sapien
cctttcaggatattgctaagaggactttaaggt

SEQ ID NO: 208971 - DNA, 33 bp, Homo sapien
ctgtgttcattctttccacttacccaaacaagc

SEQ ID NO: 208972 - DNA, 33 bp, Homo sapien
ctgtgttcattctttctacttacccaaacaagc

SEQ ID NO: 208973 - DNA, 33 bp, Homo sapien
gctgtcccactcatacaggaaaattaaaacata

SEQ ID NO: 208974 - DNA, 33 bp, Homo sapien
gctgtcccactcatacgggaaaattaaaacata

SEQ ID NO: 208975 - DNA, 33 bp, Homo sapien
gtacactaaagtttgacaataaatgtgccaggg

SEQ ID NO: 208976 - DNA, 33 bp, Homo sapien
gtacactaaagtttgagaataaatgtgccaggg

SEQ ID NO: 208977 - DNA, 33 bp, Homo sapien
cacaaatattgtcttgcagcatcgtttttagta

SEQ ID NO: 208978 - DNA, 33 bp, Homo sapien
cacaaatattgtcttgtagcatcgtttttagta

SEQ ID NO: 208979 - DNA, 33 bp, Homo sapien
agcatttgaattggtaaactcagaaaagtactt

SEQ ID NO: 208980 - DNA, 33 bp, Homo sapien
agcatttgaattggtagactcagaaaagtactt

SEQ ID NO: 208981 - DNA, 33 bp, Homo sapien
gtctcttgcttccatcccttttccattcttgga

SEQ ID NO: 208982 - DNA, 33 bp, Homo sapien
gtctcttgcttccatctcttttccattcttgga

SEQ ID NO: 208983 - DNA, 33 bp, Homo sapien
cctcagatcatccacaagttctgacacctgaga

SEQ ID NO: 208984 - DNA, 33 bp, Homo sapien
cctcagatcatccacaggttctgacacctgaga

SEQ ID NO: 208985 - DNA, 33 bp, Homo sapien
tcgtgttggtaaaatacggagagaggatgtttg

SEQ ID NO: 208986 - DNA, 33 bp, Homo sapien
tcgtgttggtaaaatatggagagaggatgtttg

SEQ ID NO: 208987 - DNA, 33 bp, Homo sapien
tggcaccaaccccggacatagtatgcaaaggac

SEQ ID NO: 208988 - DNA, 33 bp, Homo sapien
tggcaccaaccccggatatagtatgcaaaggac

SEQ ID NO: 208989 - DNA, 33 bp, Homo sapien
atttcttgacgcagacaatgtaatataaaatga

SEQ ID NO: 208990 - DNA, 33 bp, Homo sapien
atttcttgacgcagaccatgtaatataaaatga

SEQ ID NO: 208991 - DNA, 33 bp, Homo sapien
aaggagagggtgatagacgggggaatgattggt

SEQ ID NO: 208992 - DNA, 33 bp, Homo sapien
aaggagagggtgatagccgggggaatgattggt

SEQ ID NO: 208993 - DNA, 33 bp, Homo sapien
ggagatggtctaagacaaacttgccttctagtg

SEQ ID NO: 208994 - DNA, 33 bp, Homo sapien
ggagatggtctaagacgaacttgccttctagtg

SEQ ID NO: 208995 - DNA, 33 bp, Homo sapien
gttgtaattatagaaaattgctcaggtgacttc

SEQ ID NO: 208996 - DNA, 33 bp, Homo sapien
gttgtaattatagaaacttgctcaggtgacttc

SEQ ID NO: 208997 - DNA, 33 bp, Homo sapien
agactatgtcaggtaccgatcttctctcatcaa

SEQ ID NO: 208998 - DNA, 33 bp, Homo sapien
agactatgtcaggtactgatcttctctcatcaa

SEQ ID NO: 208999 - DNA, 33 bp, Homo sapien
ctcaattcaaatatgacagaagctgaattcacg

SEQ ID NO: 209000 - DNA, 33 bp, Homo sapien
ctcaattcaaatatgatagaagctgaattcacg

SEQ ID NO: 209001 - DNA, 33 bp, Homo sapien
cccgagtattatcaaccaacatgttccataaag

SEQ ID NO: 209002 - DNA, 33 bp, Homo sapien
cccgagtattatcaactaacatgttccataaag

SEQ ID NO: 209003 - DNA, 33 bp, Homo sapien
ttctatggtaaatgccaaaagtgaaccttcaac

SEQ ID NO: 209004 - DNA, 33 bp, Homo sapien
ttctatggtaaatgccgaaagtgaaccttcaac

SEQ ID NO: 209005 - DNA, 33 bp, Homo sapien
ctaacttttccacacacgaagtctactaataag

SEQ ID NO: 209006 - DNA, 33 bp, Homo sapien
ctaacttttccacacatgaagtctactaataag

SEQ ID NO: 209007 - DNA, 33 bp, Homo sapien
atccgttaaacagcaacttcctatcctctcttc

SEQ ID NO: 209008 - DNA, 33 bp, Homo sapien
atccgttaaacagcaatttcctatcctctcttc

SEQ ID NO: 209009 - DNA, 33 bp, Homo sapien
ttactcactattggtgaagacgtaacatggtat

SEQ ID NO: 209010 - DNA, 33 bp, Homo sapien
ttactcactattggtggagacgtaacatggtat

SEQ ID NO: 209011 - DNA, 33 bp, Homo sapien
tggagtcaggtagacccggaattggaatccaag

SEQ ID NO: 209012 - DNA, 33 bp, Homo sapien
tggagtcaggtagacctggaattggaatccaag

SEQ ID NO: 209013 - DNA, 33 bp, Homo sapien
aacaatttccaggttcacaggcttgctctctgt

SEQ ID NO: 209014 - DNA, 33 bp, Homo sapien
aacaatttccaggttcgcaggcttgctctctgt

SEQ ID NO: 209015 - DNA, 33 bp, Homo sapien
gacagaatggtggctaaagcaaattagtatggc

SEQ ID NO: 209016 - DNA, 33 bp, Homo sapien
gacagaatggtggctagagcaaattagtatggc

SEQ ID NO: 209017 - DNA, 33 bp, Homo sapien
atgttggaggtgttggcaaatttaaatctgtca

SEQ ID NO: 209018 - DNA, 33 bp, Homo sapien
atgttggaggtgttggtaaatttaaatctgtca

SEQ ID NO: 209019 - DNA, 33 bp, Homo sapien
tcgtttgacctctttacatgggactagttttgt

SEQ ID NO: 209020 - DNA, 33 bp, Homo sapien
tcgtttgacctctttatatgggactagttttgt

SEQ ID NO: 209021 - DNA, 33 bp, Homo sapien
tagtaaagtgtggtacagagagattaactgact

SEQ ID NO: 209022 - DNA, 33 bp, Homo sapien
tagtaaagtgtggtacggagagattaactgact

SEQ ID NO: 209023 - DNA, 33 bp, Homo sapien
aaccaggcttttaaccaaaggagctcaaagtga

SEQ ID NO: 209024 - DNA, 33 bp, Homo sapien
aaccaggcttttaaccgaaggagctcaaagtga

SEQ ID NO: 209025 - DNA, 33 bp, Homo sapien
gttgccacttcaagaacgtaaatgtggggtctt

SEQ ID NO: 209026 - DNA, 33 bp, Homo sapien
gttgccacttcaagaatgtaaatgtggggtctt

SEQ ID NO: 209027 - DNA, 33 bp, Homo sapien
aatttccttgaaccttcaagcctgcttattttt

SEQ ID NO: 209028 - DNA, 33 bp, Homo sapien
aatttccttgaacctttaagcctgcttattttt

SEQ ID NO: 209029 - DNA, 33 bp, Homo sapien
atcactggacattagaaaagtgcaatcaaaagc

SEQ ID NO: 209030 - DNA, 33 bp, Homo sapien
atcactggacattagagaagtgcaatcaaaagc

SEQ ID NO: 209031 - DNA, 33 bp, Homo sapien
ccaggcctgagagagacgaataaactttcattt

SEQ ID NO: 209032 - DNA, 33 bp, Homo sapien
ccaggcctgagagagatgaataaactttcattt

SEQ ID NO: 209033 - DNA, 33 bp, Homo sapien
tgatacagggtcttgcccaggaaatatgtgtaa

SEQ ID NO: 209034 - DNA, 33 bp, Homo sapien
tgatacagggtcttgctcaggaaatatgtgtaa

SEQ ID NO: 209035 - DNA, 33 bp, Homo sapien
tttggagacattaaacacgggccccagctggat

SEQ ID NO: 209036 - DNA, 33 bp, Homo sapien
tttggagacattaaacgcgggccccagctggat

SEQ ID NO: 209037 - DNA, 33 bp, Homo sapien
tggcttgagtccagaaagtcgaagctgcagtga

SEQ ID NO: 209038 - DNA, 33 bp, Homo sapien
tggcttgagtccagaaggtcgaagctgcagtga

SEQ ID NO: 209039 - DNA, 33 bp, Homo sapien
cttcagcatgaagcccaaccgcgagctcaggct

SEQ ID NO: 209040 - DNA, 33 bp, Homo sapien
cttcagcatgaagcccgaccgcgagctcaggct

SEQ ID NO: 209041 - DNA, 33 bp, Homo sapien
gaaagtctgaggcaatcatagaaacatcagccc

SEQ ID NO: 209042 - DNA, 33 bp, Homo sapien
gaaagtctgaggcaattatagaaacatcagccc

SEQ ID NO: 209043 - DNA, 33 bp, Homo sapien
ataatgccataagacaataactcctggtatcaa

SEQ ID NO: 209044 - DNA, 33 bp, Homo sapien
ataatgccataagacagtaactcctggtatcaa

SEQ ID NO: 209045 - DNA, 33 bp, Homo sapien
atcatgttgtggggaactgagataatgccataa

SEQ ID NO: 209046 - DNA, 33 bp, Homo sapien
atcatgttgtggggaattgagataatgccataa

SEQ ID NO: 209047 - DNA, 33 bp, Homo sapien
acgtcaccttgaccaccagatgagtaagctgca

SEQ ID NO: 209048 - DNA, 33 bp, Homo sapien
acgtcaccttgaccactagatgagtaagctgca

SEQ ID NO: 209049 - DNA, 33 bp, Homo sapien
tgagtaagatcttggaccgcgtcttgtttttgc

SEQ ID NO: 209050 - DNA, 33 bp, Homo sapien
tgagtaagatcttggatcgcgtcttgtttttgc

SEQ ID NO: 209051 - DNA, 33 bp, Homo sapien
tgaatcagtttctgcaccctgttgttgatcaga

SEQ ID NO: 209052 - DNA, 33 bp, Homo sapien
tgaatcagtttctgcagcctgttgttgatcaga

SEQ ID NO: 209053 - DNA, 33 bp, Homo sapien
ggtgtgatttgcttacaaactccagtcagctaa

SEQ ID NO: 209054 - DNA, 33 bp, Homo sapien
ggtgtgatttgcttacgaactccagtcagctaa

SEQ ID NO: 209055 - DNA, 33 bp, Homo sapien
ttctgcataggacttggaaagacgggagctttt

SEQ ID NO: 209056 - DNA, 33 bp, Homo sapien
ttctgcataggacttgtaaagacgggagctttt

SEQ ID NO: 209057 - DNA, 33 bp, Homo sapien
gtcgtcagagaggtaacaggagcagatccagac

SEQ ID NO: 209058 - DNA, 33 bp, Homo sapien
gtcgtcagagaggtaataggagcagatccagac

SEQ ID NO: 209059 - DNA, 33 bp, Homo sapien
ccttaaacattaagtaaacacaccttctgttaa

SEQ ID NO: 209060 - DNA, 33 bp, Homo sapien
ccttaaacattaagtagacacaccttctgttaa

SEQ ID NO: 209061 - DNA, 33 bp, Homo sapien
ttggacggtactggtacagatgatgttgcagaa

SEQ ID NO: 209062 - DNA, 33 bp, Homo sapien
ttggacggtactggtatagatgatgttgcagaa

SEQ ID NO: 209063 - DNA, 33 bp, Homo sapien
tgactaaatgatctctcaaatctccttcaacgc

SEQ ID NO: 209064 - DNA, 33 bp, Homo sapien
tgactaaatgatctctgaaatctccttcaacgc

SEQ ID NO: 209065 - DNA, 33 bp, Homo sapien
acagggcataatgaaaaatgattccctctcaac

SEQ ID NO: 209066 - DNA, 33 bp, Homo sapien
acagggcataatgaaagatgattccctctcaac

SEQ ID NO: 209067 - DNA, 33 bp, Homo sapien
gaaatgtgaaataacaatgagttttatgtggct

SEQ ID NO: 209068 - DNA, 33 bp, Homo sapien
gaaatgtgaaataacagtgagttttatgtggct

SEQ ID NO: 209069 - DNA, 33 bp, Homo sapien
acattcagtatctagcaccatctgtggggcctt

SEQ ID NO: 209070 - DNA, 33 bp, Homo sapien
acattcagtatctagcgccatctgtggggcctt

SEQ ID NO: 209071 - DNA, 33 bp, Homo sapien
tagaattcacacttacaaaatgctacgctaggg

SEQ ID NO: 209072 - DNA, 33 bp, Homo sapien
tagaattcacacttacgaaatgctacgctaggg

SEQ ID NO: 209073 - DNA, 33 bp, Homo sapien
gagaaggaagaagatccgacaagaacagagaaa

SEQ ID NO: 209074 - DNA, 33 bp, Homo sapien
gagaaggaagaagatctgacaagaacagagaaa

SEQ ID NO: 209075 - DNA, 33 bp, Homo sapien
aacggagacaaagaatcaagcgtcctcttatct

SEQ ID NO: 209076 - DNA, 33 bp, Homo sapien
aacggagacaaagaatgaagcgtcctcttatct

SEQ ID NO: 209077 - DNA, 33 bp, Homo sapien
tgatcttaagggaagacgttttcatggctgaat

SEQ ID NO: 209078 - DNA, 33 bp, Homo sapien
tgatcttaagggaagatgttttcatggctgaat

SEQ ID NO: 209079 - DNA, 33 bp, Homo sapien
gaaaaccagacagacccaagaggttggaagaaa

SEQ ID NO: 209080 - DNA, 33 bp, Homo sapien
gaaaaccagacagaccgaagaggttggaagaaa

SEQ ID NO: 209081 - DNA, 33 bp, Homo sapien
aactcaaacaagaacacggtgggataaccactc

SEQ ID NO: 209082 - DNA, 33 bp, Homo sapien
aactcaaacaagaacatggtgggataaccactc

SEQ ID NO: 209083 - DNA, 33 bp, Homo sapien
ttaaaattgccctcacagaggagagaagatgca

SEQ ID NO: 209084 - DNA, 33 bp, Homo sapien
ttaaaattgccctcacggaggagagaagatgca

SEQ ID NO: 209085 - DNA, 33 bp, Homo sapien
gagtatgttatgtccaaagtactgtagaagtaa

SEQ ID NO: 209086 - DNA, 33 bp, Homo sapien
gagtatgttatgtccacagtactgtagaagtaa

SEQ ID NO: 209087 - DNA, 33 bp, Homo sapien
aattttttccctccaacaaaactgaagaaacag

SEQ ID NO: 209088 - DNA, 33 bp, Homo sapien
aattttttccctccaataaaactgaagaaacag

SEQ ID NO: 209089 - DNA, 33 bp, Homo sapien
ggcaacaagatataccaaaatgcctttcaatag

SEQ ID NO: 209090 - DNA, 33 bp, Homo sapien
ggcaacaagatataccgaaatgcctttcaatag

SEQ ID NO: 209091 - DNA, 33 bp, Homo sapien
cagtctagaatggtaactataaaacctgagagc

SEQ ID NO: 209092 - DNA, 33 bp, Homo sapien
cagtctagaatggtaagtataaaacctgagagc

SEQ ID NO: 209093 - DNA, 33 bp, Homo sapien
tcatggtgacccaggaagttgacaagcatttgc

SEQ ID NO: 209094 - DNA, 33 bp, Homo sapien
tcatggtgacccaggaggttgacaagcatttgc

SEQ ID NO: 209095 - DNA, 33 bp, Homo sapien
tctcatggaattgtccacaagctgaaggtagac

SEQ ID NO: 209096 - DNA, 33 bp, Homo sapien
tctcatggaattgtccgcaagctgaaggtagac

SEQ ID NO: 209097 - DNA, 33 bp, Homo sapien
aaataaactatcatcacgtcaaatcaaatacac

SEQ ID NO: 209098 - DNA, 33 bp, Homo sapien
aaataaactatcatcatgtcaaatcaaatacac

SEQ ID NO: 209099 - DNA, 33 bp, Homo sapien
gccatgggaagtttcacgcaaagccagtttctc

SEQ ID NO: 209100 - DNA, 33 bp, Homo sapien
gccatgggaagtttcatgcaaagccagtttctc

SEQ ID NO: 209101 - DNA, 33 bp, Homo sapien
cctttaactagtttctcaaacttcttgtacttt

SEQ ID NO: 209102 - DNA, 33 bp, Homo sapien
cctttaactagtttctgaaacttcttgtacttt

SEQ ID NO: 209103 - DNA, 33 bp, Homo sapien
cagagaaccaaaatgcactataatgaaagagat

SEQ ID NO: 209104 - DNA, 33 bp, Homo sapien
cagagaaccaaaatgctctataatgaaagagat

SEQ ID NO: 209105 - DNA, 33 bp, Homo sapien
ggcaagccacaggtcaagataagtggttaggga

SEQ ID NO: 209106 - DNA, 33 bp, Homo sapien
ggcaagccacaggtcaggataagtggttaggga

SEQ ID NO: 209107 - DNA, 33 bp, Homo sapien
aatgtgtcatgttctcaaagttctgaaaaaagg

SEQ ID NO: 209108 - DNA, 33 bp, Homo sapien
aatgtgtcatgttctcgaagttctgaaaaaagg

SEQ ID NO: 209109 - DNA, 33 bp, Homo sapien
caattaagaaaatgagacatagagcaactcagc

SEQ ID NO: 209110 - DNA, 33 bp, Homo sapien
caattaagaaaatgagccatagagcaactcagc

SEQ ID NO: 209111 - DNA, 33 bp, Homo sapien
gactgtaagggcatacacacagggcagtgagca

SEQ ID NO: 209112 - DNA, 33 bp, Homo sapien
gactgtaagggcatacgcacagggcagtgagca

SEQ ID NO: 209113 - DNA, 33 bp, Homo sapien
gcacagtccaaagatacagctagttgccttgtg

SEQ ID NO: 209114 - DNA, 33 bp, Homo sapien
gcacagtccaaagatatagctagttgccttgtg

SEQ ID NO: 209115 - DNA, 33 bp, Homo sapien
aaggttcaaagcaggaaatcacctctataggat

SEQ ID NO: 209116 - DNA, 33 bp, Homo sapien
aaggttcaaagcaggagatcacctctataggat

SEQ ID NO: 209117 - DNA, 33 bp, Homo sapien
gcaagcatcattttcccaattttgagtaggtac

SEQ ID NO: 209118 - DNA, 33 bp, Homo sapien
gcaagcatcattttcctaattttgagtaggtac

SEQ ID NO: 209119 - DNA, 33 bp, Homo sapien
gcaacaagtgacaaagaaacccttgggatgtcc

SEQ ID NO: 209120 - DNA, 33 bp, Homo sapien
gcaacaagtgacaaaggaacccttgggatgtcc

SEQ ID NO: 209121 - DNA, 33 bp, Homo sapien
cccttaccgctgggcacaggtgtctaaacagag

SEQ ID NO: 209122 - DNA, 33 bp, Homo sapien
cccttaccgctgggcagaggtgtctaaacagag

SEQ ID NO: 209123 - DNA, 33 bp, Homo sapien
ctccttggtttctgaactatctgtagaggtact

SEQ ID NO: 209124 - DNA, 33 bp, Homo sapien
ctccttggtttctgaattatctgtagaggtact

SEQ ID NO: 209125 - DNA, 33 bp, Homo sapien
gtagatgtttaatgatcacttgttaaagagaga

SEQ ID NO: 209126 - DNA, 33 bp, Homo sapien
gtagatgtttaatgattacttgttaaagagaga

SEQ ID NO: 209127 - DNA, 33 bp, Homo sapien
acttgtcagagttcagaaaccactggtagaaat

SEQ ID NO: 209128 - DNA, 33 bp, Homo sapien
acttgtcagagttcaggaaccactggtagaaat

SEQ ID NO: 209129 - DNA, 33 bp, Homo sapien
gaccaagagatgtgaacttagggctaacctgca

SEQ ID NO: 209130 - DNA, 33 bp, Homo sapien
gaccaagagatgtgaagttagggctaacctgca

SEQ ID NO: 209131 - DNA, 33 bp, Homo sapien
gcatgtcctctatgaaatgttaccgaagcaatg

SEQ ID NO: 209132 - DNA, 33 bp, Homo sapien
gcatgtcctctatgaagtgttaccgaagcaatg

SEQ ID NO: 209133 - DNA, 33 bp, Homo sapien
cacctctttcctgttcaacctatctcttcccag

SEQ ID NO: 209134 - DNA, 33 bp, Homo sapien
cacctctttcctgttcgacctatctcttcccag

SEQ ID NO: 209135 - DNA, 33 bp, Homo sapien
cttcattttacagaagaaaactggagctcaaga

SEQ ID NO: 209136 - DNA, 33 bp, Homo sapien
cttcattttacagaaggaaactggagctcaaga

SEQ ID NO: 209137 - DNA, 33 bp, Homo sapien
atatctagtgggaattgaacttgtgtatagtag

SEQ ID NO: 209138 - DNA, 33 bp, Homo sapien
atatctagtgggaatttaacttgtgtatagtag

SEQ ID NO: 209139 - DNA, 33 bp, Homo sapien
cctaccctcatgaagacctagtataattagttg

SEQ ID NO: 209140 - DNA, 33 bp, Homo sapien
cctaccctcatgaagatctagtataattagttg

SEQ ID NO: 209141 - DNA, 33 bp, Homo sapien
tccaggtccttaacaacgttctaggctccttga

SEQ ID NO: 209142 - DNA, 33 bp, Homo sapien
tccaggtccttaacaatgttctaggctccttga

SEQ ID NO: 209143 - DNA, 33 bp, Homo sapien
tatttcctttaaataacggcaaggctctatcct

SEQ ID NO: 209144 - DNA, 33 bp, Homo sapien
tatttcctttaaataatggcaaggctctatcct

SEQ ID NO: 209145 - DNA, 33 bp, Homo sapien
tcaaagcaaagaacaacgaagtagttgagattt

SEQ ID NO: 209146 - DNA, 33 bp, Homo sapien
tcaaagcaaagaacaatgaagtagttgagattt

SEQ ID NO: 209147 - DNA, 33 bp, Homo sapien
gttgatgtgaataagaggtgagacagaaggtga

SEQ ID NO: 209148 - DNA, 33 bp, Homo sapien
gttgatgtgaataagatgtgagacagaaggtga

SEQ ID NO: 209149 - DNA, 33 bp, Homo sapien
gcctggggttcaagtcacttataatctgtgtag

SEQ ID NO: 209150 - DNA, 33 bp, Homo sapien
gcctggggttcaagtcgcttataatctgtgtag

SEQ ID NO: 209151 - DNA, 33 bp, Homo sapien
ggggtgaaagcagaaacaagaagagggacaatg

SEQ ID NO: 209152 - DNA, 33 bp, Homo sapien
ggggtgaaagcagaaataagaagagggacaatg

SEQ ID NO: 209153 - DNA, 33 bp, Homo sapien
cattctggaaagttaacggaattttagaaacag

SEQ ID NO: 209154 - DNA, 33 bp, Homo sapien
cattctggaaagttaatggaattttagaaacag

SEQ ID NO: 209155 - DNA, 33 bp, Homo sapien
tggccggctagtatgaaggttttccgtggcgtt

SEQ ID NO: 209156 - DNA, 33 bp, Homo sapien
tggccggctagtatgagggttttccgtggcgtt

SEQ ID NO: 209157 - DNA, 33 bp, Homo sapien
ctggctctacaaaatacgaaaactttagctggg

SEQ ID NO: 209158 - DNA, 33 bp, Homo sapien
ctggctctacaaaatatgaaaactttagctggg

SEQ ID NO: 209159 - DNA, 33 bp, Homo sapien
tagggaccagcagaatcactatgtgctagagcg

SEQ ID NO: 209160 - DNA, 33 bp, Homo sapien
tagggaccagcagaatgactatgtgctagagcg

SEQ ID NO: 209161 - DNA, 33 bp, Homo sapien
catcttgatttctaaaagttgtagtaccctaag

SEQ ID NO: 209162 - DNA, 33 bp, Homo sapien
catcttgatttctaaacgttgtagtaccctaag

SEQ ID NO: 209163 - DNA, 33 bp, Homo sapien
tgatatttgagtagaaccctgaatggaatgaga

SEQ ID NO: 209164 - DNA, 33 bp, Homo sapien
tgatatttgagtagaatcctgaatggaatgaga

SEQ ID NO: 209165 - DNA, 33 bp, Homo sapien
ttcccattcccttaccaaagttgatcagacaag

SEQ ID NO: 209166 - DNA, 33 bp, Homo sapien
ttcccattcccttaccgaagttgatcagacaag

SEQ ID NO: 209167 - DNA, 33 bp, Homo sapien
aagagggcaaaagagacaatactggagacaagc

SEQ ID NO: 209168 - DNA, 33 bp, Homo sapien
aagagggcaaaagagataatactggagacaagc

SEQ ID NO: 209169 - DNA, 33 bp, Homo sapien
ctcagcaatgtgggaaatgaagaaatatttgtc

SEQ ID NO: 209170 - DNA, 33 bp, Homo sapien
ctcagcaatgtgggaagtgaagaaatatttgtc

SEQ ID NO: 209171 - DNA, 33 bp, Homo sapien
taccacaggctcaagacagctgcatttaaatat

SEQ ID NO: 209172 - DNA, 33 bp, Homo sapien
taccacaggctcaagatagctgcatttaaatat

SEQ ID NO: 209173 - DNA, 33 bp, Homo sapien
tcttaaaatcctggccgcaagagctcctcccag

SEQ ID NO: 209174 - DNA, 33 bp, Homo sapien
tcttaaaatcctggcctcaagagctcctcccag

SEQ ID NO: 209175 - DNA, 33 bp, Homo sapien
tcaggactctagcttcactgaaaaataacctga

SEQ ID NO: 209176 - DNA, 33 bp, Homo sapien
tcaggactctagcttccctgaaaaataacctga

SEQ ID NO: 209177 - DNA, 33 bp, Homo sapien
aagagctttgaaagaaagtgcttgtggctgggg

SEQ ID NO: 209178 - DNA, 33 bp, Homo sapien
aagagctttgaaagaatgtgcttgtggctgggg

SEQ ID NO: 209179 - DNA, 33 bp, Homo sapien
gtgtggctatttcatccgagtctggaagtgagg

SEQ ID NO: 209180 - DNA, 33 bp, Homo sapien
gtgtggctatttcatcggagtctggaagtgagg

SEQ ID NO: 209181 - DNA, 33 bp, Homo sapien
gagcagagttaggaaaaggcagagaaaagccag

SEQ ID NO: 209182 - DNA, 33 bp, Homo sapien
gagcagagttaggaaagggcagagaaaagccag

SEQ ID NO: 209183 - DNA, 33 bp, Homo sapien
cagcttggtattgggaagctcttctgactctca

SEQ ID NO: 209184 - DNA, 33 bp, Homo sapien
cagcttggtattgggaggctcttctgactctca

SEQ ID NO: 209185 - DNA, 33 bp, Homo sapien
aaaagccactgtggcacaggaaaaaaatgttta

SEQ ID NO: 209186 - DNA, 33 bp, Homo sapien
aaaagccactgtggcataggaaaaaaatgttta

SEQ ID NO: 209187 - DNA, 33 bp, Homo sapien
gccatggggtctgtacgcttggcattgatcaag

SEQ ID NO: 209188 - DNA, 33 bp, Homo sapien
gccatggggtctgtactcttggcattgatcaag

SEQ ID NO: 209189 - DNA, 33 bp, Homo sapien
gacaaaagtatactacactccaataatatgcgc

SEQ ID NO: 209190 - DNA, 33 bp, Homo sapien
gacaaaagtatactactctccaataatatgcgc

SEQ ID NO: 209191 - DNA, 33 bp, Homo sapien
ttttaaattttcagaaaagacaaggcattgcta

SEQ ID NO: 209192 - DNA, 33 bp, Homo sapien
ttttaaattttcagaagagacaaggcattgcta

SEQ ID NO: 209193 - DNA, 33 bp, Homo sapien
tacaaatattgaacaagtgaaaaggtcacagat

SEQ ID NO: 209194 - DNA, 33 bp, Homo sapien
tacaaatattgaacaattgaaaaggtcacagat

SEQ ID NO: 209195 - DNA, 33 bp, Homo sapien
atttctgctccagtaagtaagttgtgattatct

SEQ ID NO: 209196 - DNA, 33 bp, Homo sapien
atttctgctccagtaattaagttgtgattatct

SEQ ID NO: 209197 - DNA, 33 bp, Homo sapien
gtggggtcaggctgcacgaggagctaattgtac

SEQ ID NO: 209198 - DNA, 33 bp, Homo sapien
gtggggtcaggctgcatgaggagctaattgtac

SEQ ID NO: 209199 - DNA, 33 bp, Homo sapien
gaatagcttcaatctgaatcttggtgggttttg

SEQ ID NO: 209200 - DNA, 33 bp, Homo sapien
gaatagcttcaatctggatcttggtgggttttg

SEQ ID NO: 209201 - DNA, 33 bp, Homo sapien
aataaggatatggtcactaaaggtacaaagttt

SEQ ID NO: 209202 - DNA, 33 bp, Homo sapien
aataaggatatggtcagtaaaggtacaaagttt

SEQ ID NO: 209203 - DNA, 33 bp, Homo sapien
cctaagtgtgcgcccactgatgcataaagtcta

SEQ ID NO: 209204 - DNA, 33 bp, Homo sapien
cctaagtgtgcgcccattgatgcataaagtcta

SEQ ID NO: 209205 - DNA, 33 bp, Homo sapien
tggcagatgggaaggaccagagctgtaatccag

SEQ ID NO: 209206 - DNA, 33 bp, Homo sapien
tggcagatgggaaggatcagagctgtaatccag

SEQ ID NO: 209207 - DNA, 33 bp, Homo sapien
aaaaagtaagttatgcactgtatttcaattcat

SEQ ID NO: 209208 - DNA, 33 bp, Homo sapien
aaaaagtaagttatgcgctgtatttcaattcat

SEQ ID NO: 209209 - DNA, 33 bp, Homo sapien
ggctgaatagtatcccacgaaaagtcatgtcta

SEQ ID NO: 209210 - DNA, 33 bp, Homo sapien
ggctgaatagtatccctcgaaaagtcatgtcta

SEQ ID NO: 209211 - DNA, 33 bp, Homo sapien
cgaggaaactgcagataagaaaagcttgtttgt

SEQ ID NO: 209212 - DNA, 33 bp, Homo sapien
cgaggaaactgcagatcagaaaagcttgtttgt

SEQ ID NO: 209213 - DNA, 33 bp, Homo sapien
cgggcatccagggacaacatattacaaggcggt

SEQ ID NO: 209214 - DNA, 33 bp, Homo sapien
cgggcatccagggacatcatattacaaggcggt

SEQ ID NO: 209215 - DNA, 33 bp, Homo sapien
tgtaagaaagccctcaaacaaaggaggtaagaa

SEQ ID NO: 209216 - DNA, 33 bp, Homo sapien
tgtaagaaagccctcagacaaaggaggtaagaa

SEQ ID NO: 209217 - DNA, 33 bp, Homo sapien; identical to SEQ ID NO: 209215

SEQ ID NO: 209218 - DNA, 33 bp, Homo sapien; identical to SEQ ID NO: 209216

SEQ ID NO: 209219 - DNA, 33 bp, Homo sapien
acagcctggcacaagacgttggagtctaagcag

SEQ ID NO: 209220 - DNA, 33 bp, Homo sapien
acagcctggcacaagatgttggagtctaagcag

SEQ ID NO: 209221 - DNA, 33 bp, Homo sapien
attattttgtgaataaatgctctcaacccatct

SEQ ID NO: 209222 - DNA, 33 bp, Homo sapien
attattttgtgaataactgctctcaacccatct

SEQ ID NO: 209223 - DNA, 33 bp, Homo sapien
ttatctggtgaataaccgccaattctcacaatc

SEQ ID NO: 209224 - DNA, 33 bp, Homo sapien
ttatctggtgaataactgccaattctcacaatc

SEQ ID NO: 209225 - DNA, 33 bp, Homo sapien
taaaaaggttagaagcactatgaacctgtatcc

SEQ ID NO: 209226 - DNA, 33 bp, Homo sapien
taaaaaggttagaagcgctatgaacctgtatcc

SEQ ID NO: 209227 - DNA, 33 bp, Homo sapien
agaagaggtcacgtgaacacaccaaaaagatgg

SEQ ID NO: 209228 - DNA, 33 bp, Homo sapien
agaagaggtcacgtgagcacaccaaaaagatgg

SEQ ID NO: 209229 - DNA, 33 bp, Homo sapien
ccccacggctgggttacagaatcccattaagta

SEQ ID NO: 209230 - DNA, 33 bp, Homo sapien
ccccacggctgggttagagaatcccattaagta

SEQ ID NO: 209231 - DNA, 33 bp, Homo sapien
gaaggaagcaagaaaacagacggctctgccagt

SEQ ID NO: 209232 - DNA, 33 bp, Homo sapien
gaaggaagcaagaaaagagacggctctgccagt

SEQ ID NO: 209233 - DNA, 33 bp, Homo sapien
acccatcactttcaaccgggtgacactctaagg

SEQ ID NO: 209234 - DNA, 33 bp, Homo sapien
acccatcactttcaactgggtgacactctaagg

SEQ ID NO: 209235 - DNA, 33 bp, Homo sapien
gactaattggagaaaggccttgaagctcaaact

SEQ ID NO: 209236 - DNA, 33 bp, Homo sapien
gactaattggagaaagtccttgaagctcaaact

SEQ ID NO: 209237 - DNA, 33 bp, Homo sapien
cgaattgctacattcaatcagtagtaataacag

SEQ ID NO: 209238 - DNA, 33 bp, Homo sapien
cgaattgctacattcagtcagtagtaataacag

SEQ ID NO: 209239 - DNA, 33 bp, Homo sapien
cctatcttagtggccgaaggtggctcccaggaa

SEQ ID NO: 209240 - DNA, 33 bp, Homo sapien
cctatcttagtggccgcaggtggctcccaggaa

SEQ ID NO: 209241 - DNA, 33 bp, Homo sapien
ataaattgggaaatcgaaaaagagaaaggagtg

SEQ ID NO: 209242 - DNA, 33 bp, Homo sapien
ataaattgggaaatcggaaaagagaaaggagtg

SEQ ID NO: 209243 - DNA, 33 bp, Homo sapien
ctctcccagtctacaccaattgtacaaagtact

SEQ ID NO: 209244 - DNA, 33 bp, Homo sapien
ctctcccagtctacacgaattgtacaaagtact

SEQ ID NO: 209245 - DNA, 33 bp, Homo sapien
tttgtgtgtttttcaacaagtgattcaaattgc

SEQ ID NO: 209246 - DNA, 33 bp, Homo sapien
tttgtgtgtttttcaagaagtgattcaaattgc

SEQ ID NO: 209247 - DNA, 33 bp, Homo sapien
gtgcaacccccttccacgtgatgatctgtcaat

SEQ ID NO: 209248 - DNA, 33 bp, Homo sapien
gtgcaacccccttccatgtgatgatctgtcaat

SEQ ID NO: 209249 - DNA, 33 bp, Homo sapien
ggaatgaagatcccaaaacaagaatttacttta

SEQ ID NO: 209250 - DNA, 33 bp, Homo sapien
ggaatgaagatcccaagacaagaatttacttta

SEQ ID NO: 209251 - DNA, 33 bp, Homo sapien
acttggacttcacaaacgtgtcagtgctgccta

SEQ ID NO: 209252 - DNA, 33 bp, Homo sapien
acttggacttcacaaatgtgtcagtgctgccta

SEQ ID NO: 209253 - DNA, 33 bp, Homo sapien
tgctacccaagtacaacgcacaagcctttttga

SEQ ID NO: 209254 - DNA, 33 bp, Homo sapien
tgctacccaagtacaatgcacaagcctttttga

SEQ ID NO: 209255 - DNA, 33 bp, Homo sapien
gatggggagtgagagccgataagtaggaggaag

SEQ ID NO: 209256 - DNA, 33 bp, Homo sapien
gatggggagtgagagctgataagtaggaggaag

SEQ ID NO: 209257 - DNA, 33 bp, Homo sapien
cgttgtcacattagaaagcccttaatttcttca

SEQ ID NO: 209258 - DNA, 33 bp, Homo sapien
cgttgtcacattagaatgcccttaatttcttca

SEQ ID NO: 209259 - DNA, 33 bp, Homo sapien
actatagctagagctgaaagaattaggcttttc

SEQ ID NO: 209260 - DNA, 33 bp, Homo sapien
actatagctagagctggaagaattaggcttttc

SEQ ID NO: 209261 - DNA, 33 bp, Homo sapien
ttctcagctgtaaacccgggtcactccagccat

SEQ ID NO: 209262 - DNA, 33 bp, Homo sapien
ttctcagctgtaaacctgggtcactccagccat

SEQ ID NO: 209263 - DNA, 33 bp, Homo sapien
tggagatgtgaaggaaatacaggtgggtaagaa

SEQ ID NO: 209264 - DNA, 33 bp, Homo sapien
tggagatgtgaaggaagtacaggtgggtaagaa

SEQ ID NO: 209265 - DNA, 33 bp, Homo sapien
cttgagtcttgattcacaccccaccctgccttc

SEQ ID NO: 209266 - DNA, 33 bp, Homo sapien
cttgagtcttgattcataccccaccctgccttc

SEQ ID NO: 209267 - DNA, 33 bp, Homo sapien
gtatcgttagtgttcactcatctgcttgttctt

SEQ ID NO: 209268 - DNA, 33 bp, Homo sapien
gtatcgttagtgttcattcatctgcttgttctt

SEQ ID NO: 209269 - DNA, 33 bp, Homo sapien
aaaggtttgaagaggagcagagcattgctccaa

SEQ ID NO: 209270 - DNA, 33 bp, Homo sapien
aaaggtttgaagaggatcagagcattgctccaa

SEQ ID NO: 209271 - DNA, 33 bp, Homo sapien
gtcatcatctttcctgaagtcctttcagcagtc

SEQ ID NO: 209272 - DNA, 33 bp, Homo sapien
gtcatcatctttcctggagtcctttcagcagtc

SEQ ID NO: 209273 - DNA, 33 bp, Homo sapien
aagtctcttttctcacagtaggaaataatacag

SEQ ID NO: 209274 - DNA, 33 bp, Homo sapien
aagtctcttttctcacggtaggaaataatacag

SEQ ID NO: 209275 - DNA, 33 bp, Homo sapien
ggaagacatttgaggaccactcctttggagctt

SEQ ID NO: 209276 - DNA, 33 bp, Homo sapien
ggaagacatttgaggagcactcctttggagctt

SEQ ID NO: 209277 - DNA, 33 bp, Homo sapien
aggtggaaggtacatccagaatgttctgggggt

SEQ ID NO: 209278 - DNA, 33 bp, Homo sapien
aggtggaaggtacatctagaatgttctgggggt

SEQ ID NO: 209279 - DNA, 33 bp, Homo sapien
tgtcagttatcccgtaagtcttttataaactcc

SEQ ID NO: 209280 - DNA, 33 bp, Homo sapien
tgtcagttatcccgtacgtcttttataaactcc

SEQ ID NO: 209281 - DNA, 33 bp, Homo sapien
aacaagtgatccctgcactagaactggtttaat

SEQ ID NO: 209282 - DNA, 33 bp, Homo sapien
aacaagtgatccctgcgctagaactggtttaat

SEQ ID NO: 209283 - DNA, 33 bp, Homo sapien
ggggattaggatgccaatgcggtggagtaaatc

SEQ ID NO: 209284 - DNA, 33 bp, Homo sapien
ggggattaggatgccactgcggtggagtaaatc

SEQ ID NO: 209285 - DNA, 33 bp, Homo sapien
tggaagagtgtgcaaaactttcgagactcctca

SEQ ID NO: 209286 - DNA, 33 bp, Homo sapien
tggaagagtgtgcaaacctttcgagactcctca

SEQ ID NO: 209287 - DNA, 33 bp, Homo sapien
tcaccctggcttttccaacctgtatctacatct

SEQ ID NO: 209288 - DNA, 33 bp, Homo sapien
tcaccctggcttttccgacctgtatctacatct

SEQ ID NO: 209289 - DNA, 33 bp, Homo sapien
tttccaaatactttctaaatgtccagcttcccc

SEQ ID NO: 209290 - DNA, 33 bp, Homo sapien
tttccaaatactttctgaatgtccagcttcccc

SEQ ID NO: 209291 - DNA, 33 bp, Homo sapien
atatcaactgtttgcaactattttctatttatt

SEQ ID NO: 209292 - DNA, 33 bp, Homo sapien
atatcaactgtttgcagctattttctatttatt

SEQ ID NO: 209293 - DNA, 33 bp, Homo sapien
aattgataaactaagaaagcagataaaataaaa

SEQ ID NO: 209294 - DNA, 33 bp, Homo sapien
aattgataaactaagagagcagataaaataaaa

SEQ ID NO: 209295 - DNA, 33 bp, Homo sapien
tttcttaaaatttccacagcttgaaacacattc

SEQ ID NO: 209296 - DNA, 33 bp, Homo sapien
tttcttaaaatttccatagcttgaaacacattc

SEQ ID NO: 209297 - DNA, 33 bp, Homo sapien
aatggaaagaacatcaaagaacttgaggtcatc

SEQ ID NO: 209298 - DNA, 33 bp, Homo sapien
aatggaaagaacatcagagaacttgaggtcatc

SEQ ID NO: 209299 - DNA, 33 bp, Homo sapien
tgattgtggaacatgagtatggttataacaaca

SEQ ID NO: 209300 - DNA, 33 bp, Homo sapien
tgattgtggaacatgattatggttataacaaca

SEQ ID NO: 209301 - DNA, 33 bp, Homo sapien
agggttgactgtagcccagaagagaatactggc

SEQ ID NO: 209302 - DNA, 33 bp, Homo sapien
agggttgactgtagcctagaagagaatactggc

SEQ ID NO: 209303 - DNA, 33 bp, Homo sapien
ctacttgccaggaaacaaaaagtattccatgtg

SEQ ID NO: 209304 - DNA, 33 bp, Homo sapien
ctacttgccaggaaacgaaaagtattccatgtg

SEQ ID NO: 209305 - DNA, 33 bp, Homo sapien
taccaaatttactatcaaatctaccaaatgact

SEQ ID NO: 209306 - DNA, 33 bp, Homo sapien
taccaaatttactatcgaatctaccaaatgact

SEQ ID NO: 209307 - DNA, 33 bp, Homo sapien
aggctgaagaacaggacgtgtaaaggtcgagtc

SEQ ID NO: 209308 - DNA, 33 bp, Homo sapien
aggctgaagaacaggatgtgtaaaggtcgagtc

SEQ ID NO: 209309 - DNA, 33 bp, Homo sapien
tcataaagcctgtaggacagcttatctcctaag

SEQ ID NO: 209310 - DNA, 33 bp, Homo sapien
tcataaagcctgtagggcagcttatctcctaag

SEQ ID NO: 209311 - DNA, 33 bp, Homo sapien
agtttaagtaattagccgatgtggtttggctct

SEQ ID NO: 209312 - DNA, 33 bp, Homo sapien
agtttaagtaattagcggatgtggtttggctct

SEQ ID NO: 209313 - DNA, 33 bp, Homo sapien
ccatgtttagtactcactccacaagataccaca

SEQ ID NO: 209314 - DNA, 33 bp, Homo sapien
ccatgtttagtactcattccacaagataccaca

SEQ ID NO: 209315 - DNA, 33 bp, Homo sapien
tggcaaaacaaagtcaatgaaggaaatgccaaa

SEQ ID NO: 209316 - DNA, 33 bp, Homo sapien
tggcaaaacaaagtcagtgaaggaaatgccaaa

SEQ ID NO: 209317 - DNA, 33 bp, Homo sapien
aatgatttcactttgacaaaggtgctgttttta

SEQ ID NO: 209318 - DNA, 33 bp, Homo sapien
aatgatttcactttgagaaaggtgctgttttta

SEQ ID NO: 209319 - DNA, 33 bp, Homo sapien
gactgaaagggcattcaaatcacaggatggttc

SEQ ID NO: 209320 - DNA, 33 bp, Homo sapien
gactgaaagggcattcgaatcacaggatggttc

SEQ ID NO: 209321 - DNA, 33 bp, Homo sapien
gcactgtcagctaggaaaaaacatcagagctgt

SEQ ID NO: 209322 - DNA, 33 bp, Homo sapien
gcactgtcagctaggagaaaacatcagagctgt

SEQ ID NO: 209323 - DNA, 33 bp, Homo sapien
atcacagtttcttcaccggcctggtcaccacta

SEQ ID NO: 209324 - DNA, 33 bp, Homo sapien
atcacagtttcttcactggcctggtcaccacta

SEQ ID NO: 209325 - DNA, 33 bp, Homo sapien
gaaaatgggttcataacggtcaagtattcactt

SEQ ID NO: 209326 - DNA, 33 bp, Homo sapien
gaaaatgggttcataatggtcaagtattcactt

SEQ ID NO: 209327 - DNA, 33 bp, Homo sapien
gcaaactgggtgttccaagagcacgaataatgg

SEQ ID NO: 209328 - DNA, 33 bp, Homo sapien
gcaaactgggtgttccgagagcacgaataatgg

SEQ ID NO: 209329 - DNA, 33 bp, Homo sapien
attcaagaggtatcccaaccctagcaggaaaag

SEQ ID NO: 209330 - DNA, 33 bp, Homo sapien
attcaagaggtatcccgaccctagcaggaaaag

SEQ ID NO: 209331 - DNA, 33 bp, Homo sapien
gtgcacctgcctcatcgatctgttgtccttcct

SEQ ID NO: 209332 - DNA, 33 bp, Homo sapien
gtgcacctgcctcatctatctgttgtccttcct

SEQ ID NO: 209333 - DNA, 33 bp, Homo sapien
gaaagtggtataagcaaagctggataaagagtt

SEQ ID NO: 209334 - DNA, 33 bp, Homo sapien
gaaagtggtataagcatagctggataaagagtt

SEQ ID NO: 209335 - DNA, 33 bp, Homo sapien
agtcacacaaaggcaaagatgctaatttcagga

SEQ ID NO: 209336 - DNA, 33 bp, Homo sapien
agtcacacaaaggcaacgatgctaatttcagga

SEQ ID NO: 209337 - DNA, 33 bp, Homo sapien
aagaatgtggagctaaagaaactctcattcatg

SEQ ID NO: 209338 - DNA, 33 bp, Homo sapien
aagaatgtggagctaacgaaactctcattcatg

SEQ ID NO: 209339 - DNA, 33 bp, Homo sapien
tctgtgatactggaacggtctctttctgtctcc

SEQ ID NO: 209340 - DNA, 33 bp, Homo sapien
tctgtgatactggaactgtctctttctgtctcc

SEQ ID NO: 209341 - DNA, 33 bp, Homo sapien
gaagaggaatctggggaagacttagtcaaatgt

SEQ ID NO: 209342 - DNA, 33 bp, Homo sapien
gaagaggaatctgggggagacttagtcaaatgt

SEQ ID NO: 209343 - DNA, 33 bp, Homo sapien
tggcttcctgacccacagacggaggtggctacc

SEQ ID NO: 209344 - DNA, 33 bp, Homo sapien
tggcttcctgacccacggacggaggtggctacc

SEQ ID NO: 209345 - DNA, 33 bp, Homo sapien
cactccaaatcctaccacattttgccataagga

SEQ ID NO: 209346 - DNA, 33 bp, Homo sapien
cactccaaatcctaccgcattttgccataagga

SEQ ID NO: 209347 - DNA, 33 bp, Homo sapien
taggtataaacctgacacaatcagggaaatact

SEQ ID NO: 209348 - DNA, 33 bp, Homo sapien
taggtataaacctgacgcaatcagggaaatact

SEQ ID NO: 209349 - DNA, 33 bp, Homo sapien
ggccaattcatctccacctttaccctcttctgc

SEQ ID NO: 209350 - DNA, 33 bp, Homo sapien
ggccaattcatctccatctttaccctcttctgc

SEQ ID NO: 209351 - DNA, 33 bp, Homo sapien
cttggtttgtcacatccctgaaaatctgagcca

SEQ ID NO: 209352 - DNA, 33 bp, Homo sapien
cttggtttgtcacatctctgaaaatctgagcca

SEQ ID NO: 209353 - DNA, 33 bp, Homo sapien
aggaacacagcaaagacatccatggtcactgtt

SEQ ID NO: 209354 - DNA, 33 bp, Homo sapien
aggaacacagcaaagatatccatggtcactgtt

SEQ ID NO: 209355 - DNA, 33 bp, Homo sapien
gatcaaaacctctcgccccttaggttgtatgta

SEQ ID NO: 209356 - DNA, 33 bp, Homo sapien
gatcaaaacctctcgctccttaggttgtatgta

SEQ ID NO: 209357 - DNA, 33 bp, Homo sapien
catagggcagaggaaccattagccagggctcag

SEQ ID NO: 209358 - DNA, 33 bp, Homo sapien
catagggcagaggaactattagccagggctcag

SEQ ID NO: 209359 - DNA, 33 bp, Homo sapien
catttgctccgaaacactcggctctctgcagcc

SEQ ID NO: 209360 - DNA, 33 bp, Homo sapien
catttgctccgaaacattcggctctctgcagcc

SEQ ID NO: 209361 - DNA, 33 bp, Homo sapien
ctttcatctgagaacaagaagccaaaggaggct

SEQ ID NO: 209362 - DNA, 33 bp, Homo sapien
ctttcatctgagaacatgaagccaaaggaggct

SEQ ID NO: 209363 - DNA, 33 bp, Homo sapien
gccagacctgccttaggagacttcttgtatcag

SEQ ID NO: 209364 - DNA, 33 bp, Homo sapien
gccagacctgccttagtagacttcttgtatcag

SEQ ID NO: 209365 - DNA, 33 bp, Homo sapien
taaaacaacaataacaatggccagagaggctca

SEQ ID NO: 209366 - DNA, 33 bp, Homo sapien
taaaacaacaataacagtggccagagaggctca

SEQ ID NO: 209367 - DNA, 33 bp, Homo sapien
aggatgccagactgacaaattcaaattttgagc

SEQ ID NO: 209368 - DNA, 33 bp, Homo sapien
aggatgccagactgacgaattcaaattttgagc

SEQ ID NO: 209369 - DNA, 33 bp, Homo sapien
ggtaattcacagatacacagcgctttggcgctc

SEQ ID NO: 209370 - DNA, 33 bp, Homo sapien
ggtaattcacagatacgcagcgctttggcgctc

SEQ ID NO: 209371 - DNA, 33 bp, Homo sapien
tgaattaaagtggttaagtaaatactcttaggt

SEQ ID NO: 209372 - DNA, 33 bp, Homo sapien
tgaattaaagtggttacgtaaatactcttaggt

SEQ ID NO: 209373 - DNA, 33 bp, Homo sapien
atttccccagcatgtaagtgcagcacccagccc

SEQ ID NO: 209374 - DNA, 33 bp, Homo sapien
atttccccagcatgtaggtgcagcacccagccc

SEQ ID NO: 209375 - DNA, 33 bp, Homo sapien
gtgatagctctgctgaagatcaagattcacttt

SEQ ID NO: 209376 - DNA, 33 bp, Homo sapien
gtgatagctctgctgaggatcaagattcacttt

SEQ ID NO: 209377 - DNA, 33 bp, Homo sapien
taaagccctctctgtaaaagtgtacacatatat

SEQ ID NO: 209378 - DNA, 33 bp, Homo sapien
taaagccctctctgtagaagtgtacacatatat

SEQ ID NO: 209379 - DNA, 33 bp, Homo sapien
tggaagccaggctctaagatcacccacacggat

SEQ ID NO: 209380 - DNA, 33 bp, Homo sapien
tggaagccaggctctacgatcacccacacggat

SEQ ID NO: 209381 - DNA, 33 bp, Homo sapien
tcttggcctcctcgtacgctcaaccaatcttca

SEQ ID NO: 209382 - DNA, 33 bp, Homo sapien
tcttggcctcctcgtatgctcaaccaatcttca

SEQ ID NO: 209383 - DNA, 33 bp, Homo sapien
tggaatagtgggcacacaggatgaagaaccttt

SEQ ID NO: 209384 - DNA, 33 bp, Homo sapien
tggaatagtgggcacagaggatgaagaaccttt

SEQ ID NO: 209385 - DNA, 33 bp, Homo sapien
gaattgtaaacaaggactaggcataatctcatc

SEQ ID NO: 209386 - DNA, 33 bp, Homo sapien
gaattgtaaacaaggagtaggcataatctcatc

SEQ ID NO: 209387 - DNA, 33 bp, Homo sapien
ggccagagacgatggaaaattgcattaatgttg

SEQ ID NO: 209388 - DNA, 33 bp, Homo sapien
ggccagagacgatggataattgcattaatgttg

SEQ ID NO: 209389 - DNA, 33 bp, Homo sapien
acaaatatgcaacttcaaatttaacttcttctg

SEQ ID NO: 209390 - DNA, 33 bp, Homo sapien
acaaatatgcaacttcgaatttaacttcttctg

SEQ ID NO: 209391 - DNA, 33 bp, Homo sapien
tcccaatcccaccagactctaattactctagaa

SEQ ID NO: 209392 - DNA, 33 bp, Homo sapien
tcccaatcccaccagattctaattactctagaa

SEQ ID NO: 209393 - DNA, 33 bp, Homo sapien
gattgggacaggtttccacattccctagggttt

SEQ ID NO: 209394 - DNA, 33 bp, Homo sapien
gattgggacaggtttcgacattccctagggttt

SEQ ID NO: 209395 - DNA, 33 bp, Homo sapien
agcagtatatagttaacacgttcctggcaaata

SEQ ID NO: 209396 - DNA, 33 bp, Homo sapien
agcagtatatagttaatacgttcctggcaaata

SEQ ID NO: 209397 - DNA, 33 bp, Homo sapien
atggtattaatccctccccctagattggacact

SEQ ID NO: 209398 - DNA, 33 bp, Homo sapien
atggtattaatccctctccctagattggacact

SEQ ID NO: 209399 - DNA, 33 bp, Homo sapien
attggtaagtcatttgcatgtcagagggtgaaa

SEQ ID NO: 209400 - DNA, 33 bp, Homo sapien
attggtaagtcatttgtatgtcagagggtgaaa

SEQ ID NO: 209401 - DNA, 33 bp, Homo sapien
tgtctgaggctgtgaccggactccccttccgtc

SEQ ID NO: 209402 - DNA, 33 bp, Homo sapien
tgtctgaggctgtgactggactccccttccgtc

SEQ ID NO: 209403 - DNA, 33 bp, Homo sapien
agatagcctgttatgacacttctaggcttccat

SEQ ID NO: 209404 - DNA, 33 bp, Homo sapien
agatagcctgttatgagacttctaggcttccat

SEQ ID NO: 209405 - DNA, 33 bp, Homo sapien
cacaccaaatgggaacaggcatgatgcagaaca

SEQ ID NO: 209406 - DNA, 33 bp, Homo sapien
cacaccaaatgggaacgggcatgatgcagaaca

SEQ ID NO: 209407 - DNA, 33 bp, Homo sapien
aaccctgactaatacacagtgaaagtaggactc

SEQ ID NO: 209408 - DNA, 33 bp, Homo sapien
aaccctgactaatacatagtgaaagtaggactc

SEQ ID NO: 209409 - DNA, 33 bp, Homo sapien
tgctgggaatttctccccattctttaaggttca

SEQ ID NO: 209410 - DNA, 33 bp, Homo sapien
tgctgggaatttctcctcattctttaaggttca

SEQ ID NO: 209411 - DNA, 33 bp, Homo sapien
agaacacatgtacacacatacccatattcatta

SEQ ID NO: 209412 - DNA, 33 bp, Homo sapien
agaacacatgtacacagatacccatattcatta

SEQ ID NO: 209413 - DNA, 33 bp, Homo sapien
ttatgacagaccatgaaatgatttgccaagtca

SEQ ID NO: 209414 - DNA, 33 bp, Homo sapien
ttatgacagaccatgagatgatttgccaagtca

SEQ ID NO: 209415 - DNA, 33 bp, Homo sapien
gcaagtgagcccacgacggaagaactcaaaggc

SEQ ID NO: 209416 - DNA, 33 bp, Homo sapien
gcaagtgagcccacgatggaagaactcaaaggc

SEQ ID NO: 209417 - DNA, 33 bp, Homo sapien
agaaaatctctgcaaacgccaaataactacaag

SEQ ID NO: 209418 - DNA, 33 bp, Homo sapien
agaaaatctctgcaaaggccaaataactacaag

SEQ ID NO: 209419 - DNA, 33 bp, Homo sapien
tccaacccagaaaagcacaccatgagttctctg

SEQ ID NO: 209420 - DNA, 33 bp, Homo sapien
tccaacccagaaaagcgcaccatgagttctctg

SEQ ID NO: 209421 - DNA, 33 bp, Homo sapien
atgcatgaataaaagcacatttcatttagctga

SEQ ID NO: 209422 - DNA, 33 bp, Homo sapien
atgcatgaataaaagcgcatttcatttagctga

SEQ ID NO: 209423 - DNA, 33 bp, Homo sapien
cgccattcacatctcaagtcgaattgtaatccc

SEQ ID NO: 209424 - DNA, 33 bp, Homo sapien
cgccattcacatctcatgtcgaattgtaatccc

SEQ ID NO: 209425 - DNA, 33 bp, Homo sapien
gatgtgaatggcgacaaaaactcaaaccaaatc

SEQ ID NO: 209426 - DNA, 33 bp, Homo sapien
gatgtgaatggcgacacaaactcaaaccaaatc

SEQ ID NO: 209427 - DNA, 33 bp, Homo sapien
gggcttgagtgctccgaaaccctttgggttccg

SEQ ID NO: 209428 - DNA, 33 bp, Homo sapien
gggcttgagtgctccgcaaccctttgggttccg

SEQ ID NO: 209429 - DNA, 33 bp, Homo sapien
gtcacagttactcccaatcctgtctcattttgc

SEQ ID NO: 209430 - DNA, 33 bp, Homo sapien
gtcacagttactcccagtcctgtctcattttgc

SEQ ID NO: 209431 - DNA, 33 bp, Homo sapien
gcctcttgtctgctcacctctagagtggtggag

SEQ ID NO: 209432 - DNA, 33 bp, Homo sapien
gcctcttgtctgctcatctctagagtggtggag

SEQ ID NO: 209433 - DNA, 33 bp, Homo sapien
cagtttctctaggatgcaaaggaggtgataagt

SEQ ID NO: 209434 - DNA, 33 bp, Homo sapien
cagtttctctaggatggaaaggaggtgataagt

SEQ ID NO: 209435 - DNA, 33 bp, Homo sapien
agcccagaaacaaatccaaacatatacagtcaa

SEQ ID NO: 209436 - DNA, 33 bp, Homo sapien
agcccagaaacaaatcgaaacatatacagtcaa

SEQ ID NO: 209437 - DNA, 33 bp, Homo sapien
tggctttacttgctgacgtccagttccaatccc

SEQ ID NO: 209438 - DNA, 33 bp, Homo sapien
tggctttacttgctgatgtccagttccaatccc

SEQ ID NO: 209439 - DNA, 33 bp, Homo sapien
catggccccctatgcaggaagtgtctcttaaga

SEQ ID NO: 209440 - DNA, 33 bp, Homo sapien
catggccccctatgcatgaagtgtctcttaaga

SEQ ID NO: 209441 - DNA, 33 bp, Homo sapien
gcttggcacatggagacaactgagtgtgactgg

SEQ ID NO: 209442 - DNA, 33 bp, Homo sapien
gcttggcacatggagagaactgagtgtgactgg

SEQ ID NO: 209443 - DNA, 33 bp, Homo sapien
ttgcctttccccctcacagtctgtctttccacc

SEQ ID NO: 209444 - DNA, 33 bp, Homo sapien
ttgcctttccccctcatagtctgtctttccacc

SEQ ID NO: 209445 - DNA, 33 bp, Homo sapien
gcacttggttggcataacagggtattttcctaa

SEQ ID NO: 209446 - DNA, 33 bp, Homo sapien
gcacttggttggcatagcagggtattttcctaa

SEQ ID NO: 209447 - DNA, 33 bp, Homo sapien
tcctgtacccatgaaactcttgcttaattactg

SEQ ID NO: 209448 - DNA, 33 bp, Homo sapien
tcctgtacccatgaaattcttgcttaattactg

SEQ ID NO: 209449 - DNA, 33 bp, Homo sapien
agatgaggaacaactcaagccaacttttaagta

SEQ ID NO: 209450 - DNA, 33 bp, Homo sapien
agatgaggaacaactcgagccaacttttaagta

SEQ ID NO: 209451 - DNA, 33 bp, Homo sapien
aagcacaacatagcaggacccgtccaatggaga

SEQ ID NO: 209452 - DNA, 33 bp, Homo sapien
aagcacaacatagcagtacccgtccaatggaga

SEQ ID NO: 209453 - DNA, 33 bp, Homo sapien
taagaagcaatgctcacgccttttacagggggt

SEQ ID NO: 209454 - DNA, 33 bp, Homo sapien
taagaagcaatgctcatgccttttacagggggt

SEQ ID NO: 209455 - DNA, 33 bp, Homo sapien
caatatctcttatctacgaaaagcagattatat

SEQ ID NO: 209456 - DNA, 33 bp, Homo sapien
caatatctcttatctatgaaaagcagattatat

SEQ ID NO: 209457 - DNA, 33 bp, Homo sapien
tcaagactgcagatccaccaccttccttctttt

SEQ ID NO: 209458 - DNA, 33 bp, Homo sapien
tcaagactgcagatccgccaccttccttctttt

SEQ ID NO: 209459 - DNA, 33 bp, Homo sapien
tgtcaccaatctatagccaagaaacttcagcct

SEQ ID NO: 209460 - DNA, 33 bp, Homo sapien
tgtcaccaatctataggcaagaaacttcagcct

SEQ ID NO: 209461 - DNA, 33 bp, Homo sapien
catgctatcattactacagaaggctgaagatgt

SEQ ID NO: 209462 - DNA, 33 bp, Homo sapien
catgctatcattactagagaaggctgaagatgt

SEQ ID NO: 209463 - DNA, 33 bp, Homo sapien
ttaccactgcctaactcactttacacgtgacct

SEQ ID NO: 209464 - DNA, 33 bp, Homo sapien
ttaccactgcctaactgactttacacgtgacct

SEQ ID NO: 209465 - DNA, 33 bp, Homo sapien
gtctcataattcataccgaggtgtaaacagcca

SEQ ID NO: 209466 - DNA, 33 bp, Homo sapien
gtctcataattcatacggaggtgtaaacagcca

SEQ ID NO: 209467 - DNA, 33 bp, Homo sapien
tgaccgtgtgctgacactggcataccatctaca

SEQ ID NO: 209468 - DNA, 33 bp, Homo sapien
tgaccgtgtgctgacattggcataccatctaca

SEQ ID NO: 209469 - DNA, 33 bp, Homo sapien
aacctttatagcacaactctactccagcctggg

SEQ ID NO: 209470 - DNA, 33 bp, Homo sapien
aacctttatagcacaattctactccagcctggg

SEQ ID NO: 209471 - DNA, 33 bp, Homo sapien
aagaaaaagggaagtacggggctatgaagggat

SEQ ID NO: 209472 - DNA, 33 bp, Homo sapien
aagaaaaagggaagtagggggctatgaagggat

SEQ ID NO: 209473 - DNA, 33 bp, Homo sapien
ctcctatgtttttctgacacctaattctccttg

SEQ ID NO: 209474 - DNA, 33 bp, Homo sapien
ctcctatgtttttctggcacctaattctccttg

SEQ ID NO: 209475 - DNA, 33 bp, Homo sapien
atacttgatttcttcacagtcccaatacttcct

SEQ ID NO: 209476 - DNA, 33 bp, Homo sapien
atacttgatttcttcatagtcccaatacttcct

SEQ ID NO: 209477 - DNA, 33 bp, Homo sapien
tctccatatcatttccaagctgccttaaagaat

SEQ ID NO: 209478 - DNA, 33 bp, Homo sapien
tctccatatcatttcccagctgccttaaagaat

SEQ ID NO: 209479 - DNA, 33 bp, Homo sapien
gtctagtcacacagagccagggtcctgtattca

SEQ ID NO: 209480 - DNA, 33 bp, Homo sapien
gtctagtcacacagagtcagggtcctgtattca

SEQ ID NO: 209481 - DNA, 33 bp, Homo sapien
tggccacaaaagtcacaagaacaagatgggtaa

SEQ ID NO: 209482 - DNA, 33 bp, Homo sapien
tggccacaaaagtcaccagaacaagatgggtaa

SEQ ID NO: 209483 - DNA, 33 bp, Homo sapien
tggtagcagcaaaagaagaccataaattgcccg

SEQ ID NO: 209484 - DNA, 33 bp, Homo sapien
tggtagcagcaaaagatgaccataaattgcccg

SEQ ID NO: 209485 - DNA, 33 bp, Homo sapien
ttaagtttgtggctctcaacacatttatatagg

SEQ ID NO: 209486 - DNA, 33 bp, Homo sapien
ttaagtttgtggctcttaacacatttatatagg

SEQ ID NO: 209487 - DNA, 33 bp, Homo sapien
caggttgaggcttacacatccaggggttcctag

SEQ ID NO: 209488 - DNA, 33 bp, Homo sapien
caggttgaggcttacatatccaggggttcctag

SEQ ID NO: 209489 - DNA, 33 bp, Homo sapien
tttgtgtgtgacatgcacgggacttgatagttc

SEQ ID NO: 209490 - DNA, 33 bp, Homo sapien
tttgtgtgtgacatgcccgggacttgatagttc

SEQ ID NO: 209491 - DNA, 33 bp, Homo sapien
gtacaagagtcaagcacacccttttgctgtcat

SEQ ID NO: 209492 - DNA, 33 bp, Homo sapien
gtacaagagtcaagcatacccttttgctgtcat

SEQ ID NO: 209493 - DNA, 33 bp, Homo sapien
gtgcagagagggaagaactataagcaaatggga

SEQ ID NO: 209494 - DNA, 33 bp, Homo sapien
gtgcagagagggaagagctataagcaaatggga

SEQ ID NO: 209495 - DNA, 33 bp, Homo sapien
ttggacctgaaacaaactccaatgattggccct

SEQ ID NO: 209496 - DNA, 33 bp, Homo sapien
ttggacctgaaacaaattccaatgattggccct

SEQ ID NO: 209497 - DNA, 33 bp, Homo sapien
agatggttagagcaatcaatgagcacacatttt

SEQ ID NO: 209498 - DNA, 33 bp, Homo sapien
agatggttagagcaatgaatgagcacacatttt

SEQ ID NO: 209499 - DNA, 33 bp, Homo sapien
tcacttttcacttagaagaacagagcttttgga

SEQ ID NO: 209500 - DNA, 33 bp, Homo sapien
tcacttttcacttagaggaacagagcttttgga

SEQ ID NO: 209501 - DNA, 33 bp, Homo sapien
gttcatgactcacgagccactagcaactgcagg

SEQ ID NO: 209502 - DNA, 33 bp, Homo sapien
gttcatgactcacgaggcactagcaactgcagg

SEQ ID NO: 209503 - DNA, 33 bp, Homo sapien
caaaggcccaccaaccagattagactgtccatt

SEQ ID NO: 209504 - DNA, 33 bp, Homo sapien
caaaggcccaccaaccggattagactgtccatt

SEQ ID NO: 209505 - DNA, 33 bp, Homo sapien
ctgctgaggctcattaccctgatttcaagtttc

SEQ ID NO: 209506 - DNA, 33 bp, Homo sapien
ctgctgaggctcattatcctgatttcaagtttc

SEQ ID NO: 209507 - DNA, 33 bp, Homo sapien
tcctgaggcacccttagagacagatgatcactt

SEQ ID NO: 209508 - DNA, 33 bp, Homo sapien
tcctgaggcacccttatagacagatgatcactt

SEQ ID NO: 209509 - DNA, 33 bp, Homo sapien
cactctagcctggtacaaacacctgagaaaggc

SEQ ID NO: 209510 - DNA, 33 bp, Homo sapien
cactctagcctggtaccaacacctgagaaaggc

SEQ ID NO: 209511 - DNA, 33 bp, Homo sapien
agccctgtgagacactaagcaaagaacccagca

SEQ ID NO: 209512 - DNA, 33 bp, Homo sapien
agccctgtgagacactgagcaaagaacccagca

SEQ ID NO: 209513 - DNA, 33 bp, Homo sapien
gagcctccagactataacctagctcagccaaca

SEQ ID NO: 209514 - DNA, 33 bp, Homo sapien
gagcctccagactatagcctagctcagccaaca

SEQ ID NO: 209515 - DNA, 33 bp, Homo sapien
gggcaggacctgaaaaagcaggtagataagaga

SEQ ID NO: 209516 - DNA, 33 bp, Homo sapien
gggcaggacctgaaaaggcaggtagataagaga

SEQ ID NO: 209517 - DNA, 33 bp, Homo sapien
ggcaacaccctcaccccactaaataactctgca

SEQ ID NO: 209518 - DNA, 33 bp, Homo sapien
ggcaacaccctcacccgactaaataactctgca

SEQ ID NO: 209519 - DNA, 33 bp, Homo sapien
ttccccctctctgtcacgctttctaaagactct

SEQ ID NO: 209520 - DNA, 33 bp, Homo sapien
ttccccctctctgtcatgctttctaaagactct

SEQ ID NO: 209521 - DNA, 33 bp, Homo sapien
catggattatagaaggcagtggagcagagaagg

SEQ ID NO: 209522 - DNA, 33 bp, Homo sapien
catggattatagaaggtagtggagcagagaagg

SEQ ID NO: 209523 - DNA, 33 bp, Homo sapien
tatcttttaaacctcacgtatgaagtcttccta

SEQ ID NO: 209524 - DNA, 33 bp, Homo sapien
tatcttttaaacctcatgtatgaagtcttccta

SEQ ID NO: 209525 - DNA, 33 bp, Homo sapien
attctttatgtgccagaaatttgctagatgtgg

SEQ ID NO: 209526 - DNA, 33 bp, Homo sapien
attctttatgtgccaggaatttgctagatgtgg

SEQ ID NO: 209527 - DNA, 33 bp, Homo sapien
cgtgggaaaagggtgcacttatttcaataacac

SEQ ID NO: 209528 - DNA, 33 bp, Homo sapien
cgtgggaaaagggtgcgcttatttcaataacac

SEQ ID NO: 209529 - DNA, 33 bp, Homo sapien
acctttcttctcatcaagtaagaagaggctact

SEQ ID NO: 209530 - DNA, 33 bp, Homo sapien
acctttcttctcatcatgtaagaagaggctact

SEQ ID NO: 209531 - DNA, 33 bp, Homo sapien
ccattgagaggacacaaccctgaaagaggtcag

SEQ ID NO: 209532 - DNA, 33 bp, Homo sapien
ccattgagaggacacacccctgaaagaggtcag

SEQ ID NO: 209533 - DNA, 33 bp, Homo sapien
gcacactccagtagcacggtctaccattgagag

SEQ ID NO: 209534 - DNA, 33 bp, Homo sapien
gcacactccagtagcatggtctaccattgagag

SEQ ID NO: 209535 - DNA, 33 bp, Homo sapien
agggtcaggaaatacaccagttggtcccacaaa

SEQ ID NO: 209536 - DNA, 33 bp, Homo sapien
agggtcaggaaatacagcagttggtcccacaaa

SEQ ID NO: 209537 - DNA, 33 bp, Homo sapien
ggtgaacatttgggcgccagaggtattgcttaa

SEQ ID NO: 209538 - DNA, 33 bp, Homo sapien
ggtgaacatttgggcgtcagaggtattgcttaa

SEQ ID NO: 209539 - DNA, 33 bp, Homo sapien
agattctaagccagacaactacagatcattttt

SEQ ID NO: 209540 - DNA, 33 bp, Homo sapien
agattctaagccagaccactacagatcattttt

SEQ ID NO: 209541 - DNA, 33 bp, Homo sapien
tatctgtgtgtgtatacagaaagacagttttac

SEQ ID NO: 209542 - DNA, 33 bp, Homo sapien
tatctgtgtgtgtatagagaaagacagttttac

SEQ ID NO: 209543 - DNA, 33 bp, Homo sapien
gtccaattggacttcaaatgtacagaatgtaga

SEQ ID NO: 209544 - DNA, 33 bp, Homo sapien
gtccaattggacttcagatgtacagaatgtaga

SEQ ID NO: 209545 - DNA, 33 bp, Homo sapien
gaccaaacttcccttcaattgaaccacctgcct

SEQ ID NO: 209546 - DNA, 33 bp, Homo sapien
gaccaaacttcccttccattgaaccacctgcct

SEQ ID NO: 209547 - DNA, 33 bp, Homo sapien
cccttacctgatataaccaattgaagagtgaga

SEQ ID NO: 209548 - DNA, 33 bp, Homo sapien
cccttacctgatataagcaattgaagagtgaga

SEQ ID NO: 209549 - DNA, 33 bp, Homo sapien
gcattgggcactaaccactagcccttgcctcat

SEQ ID NO: 209550 - DNA, 33 bp, Homo sapien
gcattgggcactaaccgctagcccttgcctcat

SEQ ID NO: 209551 - DNA, 33 bp, Homo sapien
gctagagtgttgtcacaagaatgtctgtcttgc

SEQ ID NO: 209552 - DNA, 33 bp, Homo sapien
gctagagtgttgtcaccagaatgtctgtcttgc

SEQ ID NO: 209553 - DNA, 33 bp, Homo sapien
aaaaattaatgtcagactatgtgtttgtgattt

SEQ ID NO: 209554 - DNA, 33 bp, Homo sapien
aaaaattaatgtcagattatgtgtttgtgattt

SEQ ID NO: 209555 - DNA, 33 bp, Homo sapien
gctataatggaagaagactgggtaatggagagt

SEQ ID NO: 209556 - DNA, 33 bp, Homo sapien
gctataatggaagaagcctgggtaatggagagt

SEQ ID NO: 209557 - DNA, 33 bp, Homo sapien
tgagccgaagctcgagaataggagcacaccaaa

SEQ ID NO: 209558 - DNA, 33 bp, Homo sapien
tgagccgaagctcgaggataggagcacaccaaa

SEQ ID NO: 209559 - DNA, 33 bp, Homo sapien
tattcatgggagctcaccaggttttactgtgga

SEQ ID NO: 209560 - DNA, 33 bp, Homo sapien
tattcatgggagctcagcaggttttactgtgga

SEQ ID NO: 209561 - DNA, 33 bp, Homo sapien
gacttgggagaggggacctattcatgggagctc

SEQ ID NO: 209562 - DNA, 33 bp, Homo sapien
gacttgggagaggggatctattcatgggagctc

SEQ ID NO: 209563 - DNA, 33 bp, Homo sapien
tagtgcagtaaagttacgatggagcaggaaaac

SEQ ID NO: 209564 - DNA, 33 bp, Homo sapien
tagtgcagtaaagttatgatggagcaggaaaac

SEQ ID NO: 209565 - DNA, 33 bp, Homo sapien
gattcacctccagctcaaccttttccacccgtc

SEQ ID NO: 209566 - DNA, 33 bp, Homo sapien
gattcacctccagctcgaccttttccacccgtc

SEQ ID NO: 209567 - DNA, 33 bp, Homo sapien
gagtcagatcaaagtcccggatttcagcttgtt

SEQ ID NO: 209568 - DNA, 33 bp, Homo sapien
gagtcagatcaaagtctcggatttcagcttgtt

SEQ ID NO: 209569 - DNA, 33 bp, Homo sapien
gcacagctttgagctacgtattcgtcttctcag

SEQ ID NO: 209570 - DNA, 33 bp, Homo sapien
gcacagctttgagctatgtattcgtcttctcag

SEQ ID NO: 209571 - DNA, 33 bp, Homo sapien
gagatgaaagccatgacggaaaaaaatacaatt

SEQ ID NO: 209572 - DNA, 33 bp, Homo sapien
gagatgaaagccatgatggaaaaaaatacaatt

SEQ ID NO: 209573 - DNA, 33 bp, Homo sapien
tgtttctgcttggcaacacatccggaatataca

SEQ ID NO: 209574 - DNA, 33 bp, Homo sapien
tgtttctgcttggcaagacatccggaatataca

SEQ ID NO: 209575 - DNA, 33 bp, Homo sapien
acctgtagttcttcagaatatactaggatgttt

SEQ ID NO: 209576 - DNA, 33 bp, Homo sapien
acctgtagttcttcagcatatactaggatgttt

SEQ ID NO: 209577 - DNA, 33 bp, Homo sapien
ataaatggctgtaacaacaccagtatcactttt

SEQ ID NO: 209578 - DNA, 33 bp, Homo sapien
ataaatggctgtaacagcaccagtatcactttt

SEQ ID NO: 209579 - DNA, 33 bp, Homo sapien
actaaagcattccatgaattaagaagctagtcc

SEQ ID NO: 209580 - DNA, 33 bp, Homo sapien
actaaagcattccatgcattaagaagctagtcc

SEQ ID NO: 209581 - DNA, 33 bp, Homo sapien
gtgctgtgctcacagacaggtgtaagctgctgt

SEQ ID NO: 209582 - DNA, 33 bp, Homo sapien
gtgctgtgctcacagataggtgtaagctgctgt

SEQ ID NO: 209583 - DNA, 33 bp, Homo sapien
ctagagctttatctggaaggtagatgtaatctt

SEQ ID NO: 209584 - DNA, 33 bp, Homo sapien
ctagagctttatctggcaggtagatgtaatctt

SEQ ID NO: 209585 - DNA, 33 bp, Homo sapien
aagatatgtgttattcaaagatagaaatagact

SEQ ID NO: 209586 - DNA, 33 bp, Homo sapien
aagatatgtgttattccaagatagaaatagact

SEQ ID NO: 209587 - DNA, 33 bp, Homo sapien
gtgcagggtttcagaacaggccgagcagtggtt

SEQ ID NO: 209588 - DNA, 33 bp, Homo sapien
gtgcagggtttcagaagaggccgagcagtggtt

SEQ ID NO: 209589 - DNA, 33 bp, Homo sapien
caacttcttgtgattacaaatgatgccgataca

SEQ ID NO: 209590 - DNA, 33 bp, Homo sapien
caacttcttgtgattagaaatgatgccgataca

SEQ ID NO: 209591 - DNA, 33 bp, Homo sapien
caattctgtgcgtcagaagttcaggcccagtgt

SEQ ID NO: 209592 - DNA, 33 bp, Homo sapien
caattctgtgcgtcaggagttcaggcccagtgt

SEQ ID NO: 209593 - DNA, 33 bp, Homo sapien
gctgcatagctcaacccgaatgctctgctagca

SEQ ID NO: 209594 - DNA, 33 bp, Homo sapien
gctgcatagctcaacctgaatgctctgctagca

SEQ ID NO: 209595 - DNA, 33 bp, Homo sapien
tcatgtgttctagaggacacacttttttctccc

SEQ ID NO: 209596 - DNA, 33 bp, Homo sapien
tcatgtgttctagagggcacacttttttctccc

SEQ ID NO: 209597 - DNA, 33 bp, Homo sapien
gctccggatgactgaacccacaagcctctagga

SEQ ID NO: 209598 - DNA, 33 bp, Homo sapien
gctccggatgactgaatccacaagcctctagga

SEQ ID NO: 209599 - DNA, 33 bp, Homo sapien
caaccatcccttttgacgcgcacatttttcaaa

SEQ ID NO: 209600 - DNA, 33 bp, Homo sapien
caaccatcccttttgaggcgcacatttttcaaa

SEQ ID NO: 209601 - DNA, 33 bp, Homo sapien
cttacagcattaataccaggttcatttattcat

SEQ ID NO: 209602 - DNA, 33 bp, Homo sapien
cttacagcattaatactaggttcatttattcat

SEQ ID NO: 209603 - DNA, 33 bp, Homo sapien
gaagtggacaaaaacactgaaaggctggattct

SEQ ID NO: 209604 - DNA, 33 bp, Homo sapien
gaagtggacaaaaacattgaaaggctggattct

SEQ ID NO: 209605 - DNA, 33 bp, Homo sapien
gtattgacttagcatccactgtaggaaaagcct

SEQ ID NO: 209606 - DNA, 33 bp, Homo sapien
gtattgacttagcatcgactgtaggaaaagcct

SEQ ID NO: 209607 - DNA, 33 bp, Homo sapien
ttggtatgtttagcaccctttctagtttcacat

SEQ ID NO: 209608 - DNA, 33 bp, Homo sapien
ttggtatgtttagcactctttctagtttcacat

SEQ ID NO: 209609 - DNA, 33 bp, Homo sapien
aaatttgtttgcatataaagttcccagtataga

SEQ ID NO: 209610 - DNA, 33 bp, Homo sapien
aaatttgtttgcatatgaagttcccagtataga

SEQ ID NO: 209611 - DNA, 33 bp, Homo sapien
agtgacaagaaaagaactatcacagggagggct

SEQ ID NO: 209612 - DNA, 33 bp, Homo sapien
agtgacaagaaaagaattatcacagggagggct

SEQ ID NO: 209613 - DNA, 33 bp, Homo sapien
gtaatcagttaatgggaccaagtacagtggctc

SEQ ID NO: 209614 - DNA, 33 bp, Homo sapien
gtaatcagttaatggggccaagtacagtggctc

SEQ ID NO: 209615 - DNA, 33 bp, Homo sapien
cacttaacacacatcaactgagcaccattagtg

SEQ ID NO: 209616 - DNA, 33 bp, Homo sapien
cacttaacacacatcagctgagcaccattagtg

SEQ ID NO: 209617 - DNA, 33 bp, Homo sapien
gaagatcctataaaagaactgagttagaacaat

SEQ ID NO: 209618 - DNA, 33 bp, Homo sapien
gaagatcctataaaaggactgagttagaacaat

SEQ ID NO: 209619 - DNA, 33 bp, Homo sapien
aatcagctatgaaaaaaccagatgagtaaatag

SEQ ID NO: 209620 - DNA, 33 bp, Homo sapien
aatcagctatgaaaaacccagatgagtaaatag

SEQ ID NO: 209621 - DNA, 33 bp, Homo sapien
aagtcaagatccagaaatcaaaatcagtgagaa

SEQ ID NO: 209622 - DNA, 33 bp, Homo sapien
aagtcaagatccagaattcaaaatcagtgagaa

SEQ ID NO: 209623 - DNA, 33 bp, Homo sapien
tcttggtttcatatataagtaagaggactgaag

SEQ ID NO: 209624 - DNA, 33 bp, Homo sapien
tcttggtttcatatatgagtaagaggactgaag

SEQ ID NO: 209625 - DNA, 33 bp, Homo sapien
catatgtgagaatgaaagacaggttaaaattat

SEQ ID NO: 209626 - DNA, 33 bp, Homo sapien
catatgtgagaatgaatgacaggttaaaattat

SEQ ID NO: 209627 - DNA, 33 bp, Homo sapien
cttttaaaaatcaccaaagcattagtattgaga

SEQ ID NO: 209628 - DNA, 33 bp, Homo sapien
cttttaaaaatcaccagagcattagtattgaga

SEQ ID NO: 209629 - DNA, 33 bp, Homo sapien
gagccacacaaaaccacgcagaattagggaata

SEQ ID NO: 209630 - DNA, 33 bp, Homo sapien
gagccacacaaaaccatgcagaattagggaata

SEQ ID NO: 209631 - DNA, 33 bp, Homo sapien
agcctgatccttctgaataagtcactgaagtga

SEQ ID NO: 209632 - DNA, 33 bp, Homo sapien
agcctgatccttctgagtaagtcactgaagtga

SEQ ID NO: 209633 - DNA, 33 bp, Homo sapien
ggtaagagaagagaaacaaggcacaaaacagag

SEQ ID NO: 209634 - DNA, 33 bp, Homo sapien
ggtaagagaagagaaataaggcacaaaacagag

SEQ ID NO: 209635 - DNA, 33 bp, Homo sapien
ccaagtgatgtttcaaattattgtatctgatca

SEQ ID NO: 209636 - DNA, 33 bp, Homo sapien
ccaagtgatgtttcaagttattgtatctgatca

SEQ ID NO: 209637 - DNA, 33 bp, Homo sapien
gcattgaagcactgggaactgatagaactttta

SEQ ID NO: 209638 - DNA, 33 bp, Homo sapien
gcattgaagcactgggcactgatagaactttta

SEQ ID NO: 209639 - DNA, 33 bp, Homo sapien
gtaatggatcccagaacttaacttgcttaatgt

SEQ ID NO: 209640 - DNA, 33 bp, Homo sapien
gtaatggatcccagaagttaacttgcttaatgt

SEQ ID NO: 209641 - DNA, 33 bp, Homo sapien
acctggtttttctaacgcaaaatgtttgtggat

SEQ ID NO: 209642 - DNA, 33 bp, Homo sapien
acctggtttttctaactcaaaatgtttgtggat

SEQ ID NO: 209643 - DNA, 33 bp, Homo sapien
ttgtactcttatcacacctattttgtctcactt

SEQ ID NO: 209644 - DNA, 33 bp, Homo sapien
ttgtactcttatcacatctattttgtctcactt

SEQ ID NO: 209645 - DNA, 33 bp, Homo sapien
caaaagaaaagtgttcaagaaattctgcatccc

SEQ ID NO: 209646 - DNA, 33 bp, Homo sapien
caaaagaaaagtgttcgagaaattctgcatccc

SEQ ID NO: 209647 - DNA, 33 bp, Homo sapien
ctaaatgctctttaaaatatcttcacaaagagt

SEQ ID NO: 209648 - DNA, 33 bp, Homo sapien
ctaaatgctctttaaactatcttcacaaagagt

SEQ ID NO: 209649 - DNA, 33 bp, Homo sapien
ttcctatgttaaaccacatagataagcttgatc

SEQ ID NO: 209650 - DNA, 33 bp, Homo sapien
ttcctatgttaaaccatatagataagcttgatc

SEQ ID NO: 209651 - DNA, 33 bp, Homo sapien
cgacataatatggaccaaaaaacttgcccttgt

SEQ ID NO: 209652 - DNA, 33 bp, Homo sapien
cgacataatatggaccgaaaaacttgcccttgt

SEQ ID NO: 209653 - DNA, 33 bp, Homo sapien
attgatttatgtctccaacttagtctatcttct

SEQ ID NO: 209654 - DNA, 33 bp, Homo sapien
attgatttatgtctccgacttagtctatcttct

SEQ ID NO: 209655 - DNA, 33 bp, Homo sapien
ttcatttcactcttaacaaagtcctgcagggtg

SEQ ID NO: 209656 - DNA, 33 bp, Homo sapien
ttcatttcactcttaagaaagtcctgcagggtg

SEQ ID NO: 209657 - DNA, 33 bp, Homo sapien
actccagcatgggtaactaaatgagactctgtc

SEQ ID NO: 209658 - DNA, 33 bp, Homo sapien
actccagcatgggtaattaaatgagactctgtc

SEQ ID NO: 209659 - DNA, 33 bp, Homo sapien
cagaataaaatcaaacaggaagtaccaaagtat

SEQ ID NO: 209660 - DNA, 33 bp, Homo sapien
cagaataaaatcaaacgggaagtaccaaagtat

SEQ ID NO: 209661 - DNA, 33 bp, Homo sapien
tctacaatttgatctccccactctgcttgcact

SEQ ID NO: 209662 - DNA, 33 bp, Homo sapien
tctacaatttgatctctccactctgcttgcact

SEQ ID NO: 209663 - DNA, 33 bp, Homo sapien
gctgacatcttattgcaccgacatgcctgagga

SEQ ID NO: 209664 - DNA, 33 bp, Homo sapien
gctgacatcttattgcgccgacatgcctgagga

SEQ ID NO: 209665 - DNA, 33 bp, Homo sapien
tggtgagactcaaaaaaaccaatgtatagaagc

SEQ ID NO: 209666 - DNA, 33 bp, Homo sapien
tggtgagactcaaaaagaccaatgtatagaagc

SEQ ID NO: 209667 - DNA, 33 bp, Homo sapien
aagctacacagacaaaataatgaagatatcctt

SEQ ID NO: 209668 - DNA, 33 bp, Homo sapien
aagctacacagacaaagtaatgaagatatcctt

SEQ ID NO: 209669 - DNA, 33 bp, Homo sapien
ggggttgcgttgcaaaatcacagctgcacccct

SEQ ID NO: 209670 - DNA, 33 bp, Homo sapien
ggggttgcgttgcaaattcacagctgcacccct

SEQ ID NO: 209671 - DNA, 33 bp, Homo sapien
cacctcctaatttctacgttattgcttctgact

SEQ ID NO: 209672 - DNA, 33 bp, Homo sapien
cacctcctaatttctaggttattgcttctgact

SEQ ID NO: 209673 - DNA, 33 bp, Homo sapien
tagtgaaatacacagacgctgaatatttgggag

SEQ ID NO: 209674 - DNA, 33 bp, Homo sapien
tagtgaaatacacagatgctgaatatttgggag

SEQ ID NO: 209675 - DNA, 33 bp, Homo sapien
gtcggggaggggagccaaaaacatgaaggggaa

SEQ ID NO: 209676 - DNA, 33 bp, Homo sapien
gtcggggaggggagccgaaaacatgaaggggaa

SEQ ID NO: 209677 - DNA, 33 bp, Homo sapien
agtaaagacactgtaaatctcaaaaatactcca

SEQ ID NO: 209678 - DNA, 33 bp, Homo sapien
agtaaagacactgtaagtctcaaaaatactcca

SEQ ID NO: 209679 - DNA, 33 bp, Homo sapien
ttcggaaagtagggaaacttgaaagagcaagga

SEQ ID NO: 209680 - DNA, 33 bp, Homo sapien
ttcggaaagtagggaaccttgaaagagcaagga

SEQ ID NO: 209681 - DNA, 33 bp, Homo sapien
gttagttcaagatttacagatagaataaccaga

SEQ ID NO: 209682 - DNA, 33 bp, Homo sapien
gttagttcaagatttagagatagaataaccaga

SEQ ID NO: 209683 - DNA, 33 bp, Homo sapien
acacccaatccatccaaaactgtgagattccgc

SEQ ID NO: 209684 - DNA, 33 bp, Homo sapien
acacccaatccatccagaactgtgagattccgc

SEQ ID NO: 209685 - DNA, 33 bp, Homo sapien
agagccgctattggcaccattgctcacataccc

SEQ ID NO: 209686 - DNA, 33 bp, Homo sapien
agagccgctattggcagcattgctcacataccc

SEQ ID NO: 209687 - DNA, 33 bp, Homo sapien
atgatgggatccactaaaaactcagtggtgaga

SEQ ID NO: 209688 - DNA, 33 bp, Homo sapien
atgatgggatccactagaaactcagtggtgaga

SEQ ID NO: 209689 - DNA, 33 bp, Homo sapien
atctccaccctcagaaatcagcctggcaaacac

SEQ ID NO: 209690 - DNA, 33 bp, Homo sapien
atctccaccctcagaagtcagcctggcaaacac

SEQ ID NO: 209691 - DNA, 33 bp, Homo sapien
gctcatttctcttaaaggtcaagctcatttctc

SEQ ID NO: 209692 - DNA, 33 bp, Homo sapien
gctcatttctcttaaatgtcaagctcatttctc

SEQ ID NO: 209693 - DNA, 33 bp, Homo sapien
gagcaatcctgcaagaacaaggtacataaacaa

SEQ ID NO: 209694 - DNA, 33 bp, Homo sapien
gagcaatcctgcaagagcaaggtacataaacaa

SEQ ID NO: 209695 - DNA, 33 bp, Homo sapien
gtagcttttcccaaacggatcttttcatttagg

SEQ ID NO: 209696 - DNA, 33 bp, Homo sapien
gtagcttttcccaaactgatcttttcatttagg

SEQ ID NO: 209697 - DNA, 33 bp, Homo sapien
gtaccaacaggtctcacatcaagcacgggacgg

SEQ ID NO: 209698 - DNA, 33 bp, Homo sapien
gtaccaacaggtctcatatcaagcacgggacgg

SEQ ID NO: 209699 - DNA, 33 bp, Homo sapien
ctttcttgctcaatacccctctttctccctttt

SEQ ID NO: 209700 - DNA, 33 bp, Homo sapien
ctttcttgctcaatactcctctttctccctttt

SEQ ID NO: 209701 - DNA, 33 bp, Homo sapien
tcgcctgcggtactcacgtgaaatttttattga

SEQ ID NO: 209702 - DNA, 33 bp, Homo sapien
tcgcctgcggtactcatgtgaaatttttattga

SEQ ID NO: 209703 - DNA, 33 bp, Homo sapien
gaaatatcaataaccacgttggtagaaaaatga

SEQ ID NO: 209704 - DNA, 33 bp, Homo sapien
gaaatatcaataaccatgttggtagaaaaatga

SEQ ID NO: 209705 - DNA, 33 bp, Homo sapien
ttcataggaaaatatcacttctgtaacaaaaag

SEQ ID NO: 209706 - DNA, 33 bp, Homo sapien
ttcataggaaaatatcgcttctgtaacaaaaag

SEQ ID NO: 209707 - DNA, 33 bp, Homo sapien
gagaacatgagatgcacatttcagaccatgaaa

SEQ ID NO: 209708 - DNA, 33 bp, Homo sapien
gagaacatgagatgcatatttcagaccatgaaa

SEQ ID NO: 209709 - DNA, 33 bp, Homo sapien
gctctcaggaagaacactggaccaacctcagtg

SEQ ID NO: 209710 - DNA, 33 bp, Homo sapien
gctctcaggaagaacattggaccaacctcagtg

SEQ ID NO: 209711 - DNA, 33 bp, Homo sapien
gctgtgtccttgagccagattaatgttagtttc

SEQ ID NO: 209712 - DNA, 33 bp, Homo sapien
gctgtgtccttgagccggattaatgttagtttc

SEQ ID NO: 209713 - DNA, 33 bp, Homo sapien
acaatcaggatggccacgtaacacctaaatgaa

SEQ ID NO: 209714 - DNA, 33 bp, Homo sapien
acaatcaggatggccatgtaacacctaaatgaa

SEQ ID NO: 209715 - DNA, 33 bp, Homo sapien
atgaaagatgttgatgaaggaacaataagagag

SEQ ID NO: 209716 - DNA, 33 bp, Homo sapien
atgaaagatgttgatggaggaacaataagagag

SEQ ID NO: 209717 - DNA, 33 bp, Homo sapien
tagctatgagtgagaactggtctttcccattca

SEQ ID NO: 209718 - DNA, 33 bp, Homo sapien
tagctatgagtgagaattggtctttcccattca

SEQ ID NO: 209719 - DNA, 33 bp, Homo sapien
aaggcctataaaaaggaacaatcactattctgt

SEQ ID NO: 209720 - DNA, 33 bp, Homo sapien
aaggcctataaaaagggacaatcactattctgt

SEQ ID NO: 209721 - DNA, 33 bp, Homo sapien
ctgtcccagtattgtccgaacaatcccaggaag

SEQ ID NO: 209722 - DNA, 33 bp, Homo sapien
ctgtcccagtattgtctgaacaatcccaggaag

SEQ ID NO: 209723 - DNA, 33 bp, Homo sapien
cattgtacatactagacataggaatacttttta

SEQ ID NO: 209724 - DNA, 33 bp, Homo sapien
cattgtacatactagagataggaatacttttta

SEQ ID NO: 209725 - DNA, 33 bp, Homo sapien
acaaatatcttgcagcactgtgtagtaagtgag

SEQ ID NO: 209726 - DNA, 33 bp, Homo sapien
acaaatatcttgcagcgctgtgtagtaagtgag

SEQ ID NO: 209727 - DNA, 33 bp, Homo sapien
gatataaataaagtaccccggcattcagagtag

SEQ ID NO: 209728 - DNA, 33 bp, Homo sapien
gatataaataaagtactccggcattcagagtag

SEQ ID NO: 209729 - DNA, 33 bp, Homo sapien
atttgtaggatgtagaaagcccctgtcctaaag

SEQ ID NO: 209730 - DNA, 33 bp, Homo sapien
atttgtaggatgtagagagcccctgtcctaaag

SEQ ID NO: 209731 - DNA, 33 bp, Homo sapien
tcctacaaattaaagcacgatgaagaggtgctt

SEQ ID NO: 209732 - DNA, 33 bp, Homo sapien
tcctacaaattaaagcccgatgaagaggtgctt

SEQ ID NO: 209733 - DNA, 33 bp, Homo sapien
aatgtttttaccctcacattttacagttagaga

SEQ ID NO: 209734 - DNA, 33 bp, Homo sapien
aatgtttttaccctcatattttacagttagaga

SEQ ID NO: 209735 - DNA, 33 bp, Homo sapien
ttagccacaagctggcaaccccatttaatggta

SEQ ID NO: 209736 - DNA, 33 bp, Homo sapien
ttagccacaagctggcgaccccatttaatggta

SEQ ID NO: 209737 - DNA, 33 bp, Homo sapien
cacagactatttgttacggcagttagcctacca

SEQ ID NO: 209738 - DNA, 33 bp, Homo sapien
cacagactatttgttatggcagttagcctacca

SEQ ID NO: 209739 - DNA, 33 bp, Homo sapien
cagcaggtattatttcacaacaatcaggagtca

SEQ ID NO: 209740 - DNA, 33 bp, Homo sapien
cagcaggtattatttcgcaacaatcaggagtca

SEQ ID NO: 209741 - DNA, 33 bp, Homo sapien
tttccatctggtactcaaaacacaagaaaggat

SEQ ID NO: 209742 - DNA, 33 bp, Homo sapien
tttccatctggtactcgaaacacaagaaaggat

SEQ ID NO: 209743 - DNA, 33 bp, Homo sapien
agttctctgggtaacacgacttcttggaagctt

SEQ ID NO: 209744 - DNA, 33 bp, Homo sapien
agttctctgggtaacaggacttcttggaagctt

SEQ ID NO: 209745 - DNA, 33 bp, Homo sapien
ttgcccttcctaatgccatttgtgatttcttat

SEQ ID NO: 209746 - DNA, 33 bp, Homo sapien
ttgcccttcctaatgctatttgtgatttcttat

SEQ ID NO: 209747 - DNA, 33 bp, Homo sapien
cacagacagaaaatacgggaagcataggtacag

SEQ ID NO: 209748 - DNA, 33 bp, Homo sapien
cacagacagaaaatactggaagcataggtacag

SEQ ID NO: 209749 - DNA, 33 bp, Homo sapien
ttgcttagagaaggagcagagttcatgttagcg

SEQ ID NO: 209750 - DNA, 33 bp, Homo sapien
ttgcttagagaaggagtagagttcatgttagcg

SEQ ID NO: 209751 - DNA, 33 bp, Homo sapien
aaagagaaatgaaaacaaaacaggattcctcag

SEQ ID NO: 209752 - DNA, 33 bp, Homo sapien
aaagagaaatgaaaacgaaacaggattcctcag

SEQ ID NO: 209753 - DNA, 33 bp, Homo sapien
gtttatatcgattctgcaacaatcaggggacac

SEQ ID NO: 209754 - DNA, 33 bp, Homo sapien
gtttatatcgattctggaacaatcaggggacac

SEQ ID NO: 209755 - DNA, 33 bp, Homo sapien
ctcactttaaaaagcaatcttatggcatcacag

SEQ ID NO: 209756 - DNA, 33 bp, Homo sapien
ctcactttaaaaagcagtcttatggcatcacag

SEQ ID NO: 209757 - DNA, 33 bp, Homo sapien
tacagaataatacaacagaattggcatcttaat

SEQ ID NO: 209758 - DNA, 33 bp, Homo sapien
tacagaataatacaacggaattggcatcttaat

SEQ ID NO: 209759 - DNA, 33 bp, Homo sapien
attgtgccctatctgacaagagaaaatgcatga

SEQ ID NO: 209760 - DNA, 33 bp, Homo sapien
attgtgccctatctgataagagaaaatgcatga

SEQ ID NO: 209761 - DNA, 33 bp, Homo sapien
tcaatcacaataagtccaaacctttcttctcat

SEQ ID NO: 209762 - DNA, 33 bp, Homo sapien
tcaatcacaataagtctaaacctttcttctcat

SEQ ID NO: 209763 - DNA, 33 bp, Homo sapien
atctccaccacttccaacctttaatccaccttt

SEQ ID NO: 209764 - DNA, 33 bp, Homo sapien
atctccaccacttccagcctttaatccaccttt

SEQ ID NO: 209765 - DNA, 33 bp, Homo sapien
gtcatatgaacacagaactaatcattattgatt

SEQ ID NO: 209766 - DNA, 33 bp, Homo sapien
gtcatatgaacacagagctaatcattattgatt

SEQ ID NO: 209767 - DNA, 33 bp, Homo sapien
aggcctaagaagagacccagagataatgaatga

SEQ ID NO: 209768 - DNA, 33 bp, Homo sapien
aggcctaagaagagactcagagataatgaatga

SEQ ID NO: 209769 - DNA, 33 bp, Homo sapien
caattagctgtgtaacggtcatactggaccctt

SEQ ID NO: 209770 - DNA, 33 bp, Homo sapien
caattagctgtgtaactgtcatactggaccctt

SEQ ID NO: 209771 - DNA, 33 bp, Homo sapien
tttcttgcctttagacactcaaattatgctaat

SEQ ID NO: 209772 - DNA, 33 bp, Homo sapien
tttcttgcctttagactctcaaattatgctaat

SEQ ID NO: 209773 - DNA, 33 bp, Homo sapien
taaaatgaaggttctccatggataatttctaag

SEQ ID NO: 209774 - DNA, 33 bp, Homo sapien
taaaatgaaggttctctatggataatttctaag

SEQ ID NO: 209775 - DNA, 33 bp, Homo sapien
ttgtgctcatgctcacaactcttagtcacctct

SEQ ID NO: 209776 - DNA, 33 bp, Homo sapien
ttgtgctcatgctcacgactcttagtcacctct

SEQ ID NO: 209777 - DNA, 33 bp, Homo sapien
gatttctacctttctaacattgtctaataagtc

SEQ ID NO: 209778 - DNA, 33 bp, Homo sapien
gatttctacctttctagcattgtctaataagtc

SEQ ID NO: 209779 - DNA, 33 bp, Homo sapien
gcttcttgagtacatacgctcagtaggccttga

SEQ ID NO: 209780 - DNA, 33 bp, Homo sapien
gcttcttgagtacatatgctcagtaggccttga

SEQ ID NO: 209781 - DNA, 33 bp, Homo sapien
ataaggagtttgttaacgtggttcctgtagcac

SEQ ID NO: 209782 - DNA, 33 bp, Homo sapien
ataaggagtttgttaatgtggttcctgtagcac

SEQ ID NO: 209783 - DNA, 33 bp, Homo sapien
tccaatattctaaaataagattgacccttgagt

SEQ ID NO: 209784 - DNA, 33 bp, Homo sapien
tccaatattctaaaatgagattgacccttgagt

SEQ ID NO: 209785 - DNA, 33 bp, Homo sapien
gccatcaccataaagaggcctacaggaaagtca

SEQ ID NO: 209786 - DNA, 33 bp, Homo sapien
gccatcaccataaagatgcctacaggaaagtca

SEQ ID NO: 209787 - DNA, 33 bp, Homo sapien
tatagtcaactctcaaatgccctcaataggaca

SEQ ID NO: 209788 - DNA, 33 bp, Homo sapien
tatagtcaactctcaattgccctcaataggaca

SEQ ID NO: 209789 - DNA, 33 bp, Homo sapien
cagcctggctccctaacgtatgaacttggtacc

SEQ ID NO: 209790 - DNA, 33 bp, Homo sapien
cagcctggctccctaatgtatgaacttggtacc

SEQ ID NO: 209791 - DNA, 33 bp, Homo sapien
tggggcaactttttcaaatgatatgcactgaca

SEQ ID NO: 209792 - DNA, 33 bp, Homo sapien
tggggcaactttttcagatgatatgcactgaca

SEQ ID NO: 209793 - DNA, 33 bp, Homo sapien
agttgccccaggaataaaaaagttgctagaatc

SEQ ID NO: 209794 - DNA, 33 bp, Homo sapien
agttgccccaggaatacaaaagttgctagaatc

SEQ ID NO: 209795 - DNA, 33 bp, Homo sapien
taagaaatgctacccaatggagaagagcaggtg

SEQ ID NO: 209796 - DNA, 33 bp, Homo sapien
taagaaatgctacccagtggagaagagcaggtg

SEQ ID NO: 209797 - DNA, 33 bp, Homo sapien
aaatggaagtacagtaagcaagcttggaacttt

SEQ ID NO: 209798 - DNA, 33 bp, Homo sapien
aaatggaagtacagtacgcaagcttggaacttt

SEQ ID NO: 209799 - DNA, 33 bp, Homo sapien
cctagtctactgaagtcaagagcataataaggc

SEQ ID NO: 209800 - DNA, 33 bp, Homo sapien
cctagtctactgaagtgaagagcataataaggc

SEQ ID NO: 209801 - DNA, 33 bp, Homo sapien
tctctgtatcagtgataaatgaaaagatctagg

SEQ ID NO: 209802 - DNA, 33 bp, Homo sapien
tctctgtatcagtgatgaatgaaaagatctagg

SEQ ID NO: 209803 - DNA, 33 bp, Homo sapien
aataccccataaagaccgaccccacaagagtta

SEQ ID NO: 209804 - DNA, 33 bp, Homo sapien
aataccccataaagacggaccccacaagagtta

SEQ ID NO: 209805 - DNA, 33 bp, Homo sapien
tccctatcttcttgcagccatagccttatccta

SEQ ID NO: 209806 - DNA, 33 bp, Homo sapien
tccctatcttcttgcatccatagccttatccta

SEQ ID NO: 209807 - DNA, 33 bp, Homo sapien
aatatgctgaaataacacccacagcattacagt

SEQ ID NO: 209808 - DNA, 33 bp, Homo sapien
aatatgctgaaataacgcccacagcattacagt

SEQ ID NO: 209809 - DNA, 33 bp, Homo sapien
aaggagttcacttggaaatggtgccaataggat

SEQ ID NO: 209810 - DNA, 33 bp, Homo sapien
aaggagttcacttggagatggtgccaataggat

SEQ ID NO: 209811 - DNA, 33 bp, Homo sapien
tcagtggaatatcttcacaaccaatacatcctt

SEQ ID NO: 209812 - DNA, 33 bp, Homo sapien
tcagtggaatatcttcgcaaccaatacatcctt

SEQ ID NO: 209813 - DNA, 33 bp, Homo sapien
aataacaacccttcatgaatgtgaagccaaact

SEQ ID NO: 209814 - DNA, 33 bp, Homo sapien
aataacaacccttcattaatgtgaagccaaact

SEQ ID NO: 209815 - DNA, 33 bp, Homo sapien
ctttcaaggtggttaacgctttgatggtcagac

SEQ ID NO: 209816 - DNA, 33 bp, Homo sapien
ctttcaaggtggttaatgctttgatggtcagac

SEQ ID NO: 209817 - DNA, 33 bp, Homo sapien
tgagttccatccagcaagtattttttatattaa

SEQ ID NO: 209818 - DNA, 33 bp, Homo sapien
tgagttccatccagcaggtattttttatattaa

SEQ ID NO: 209819 - DNA, 33 bp, Homo sapien
tttaaggagagattcagagctgtgaaagtccac

SEQ ID NO: 209820 - DNA, 33 bp, Homo sapien
tttaaggagagattcatagctgtgaaagtccac

SEQ ID NO: 209821 - DNA, 33 bp, Homo sapien
gtcttgccccttaaaacaggtttctgcctcaca

SEQ ID NO: 209822 - DNA, 33 bp, Homo sapien
gtcttgccccttaaaagaggtttctgcctcaca

SEQ ID NO: 209823 - DNA, 33 bp, Homo sapien
aatagtggcaatgctaccaaagagactaaatgc

SEQ ID NO: 209824 - DNA, 33 bp, Homo sapien
aatagtggcaatgctatcaaagagactaaatgc

SEQ ID NO: 209825 - DNA, 33 bp, Homo sapien
agaaagactactatagacactttgaagtcttca

SEQ ID NO: 209826 - DNA, 33 bp, Homo sapien
agaaagactactataggcactttgaagtcttca

SEQ ID NO: 209827 - DNA, 33 bp, Homo sapien
gattgcaaatatcttacgtaggcagctaaatcc

SEQ ID NO: 209828 - DNA, 33 bp, Homo sapien
gattgcaaatatcttatgtaggcagctaaatcc

SEQ ID NO: 209829 - DNA, 33 bp, Homo sapien
gggattactttattcaacattactgcctctacc

SEQ ID NO: 209830 - DNA, 33 bp, Homo sapien
gggattactttattcatcattactgcctctacc

SEQ ID NO: 209831 - DNA, 33 bp, Homo sapien
atacctgggctgttccacacacttctgagcact

SEQ ID NO: 209832 - DNA, 33 bp, Homo sapien
atacctgggctgttccgcacacttctgagcact

SEQ ID NO: 209833 - DNA, 33 bp, Homo sapien
gacacacatggtaaagacttcccacactgaacc

SEQ ID NO: 209834 - DNA, 33 bp, Homo sapien
gacacacatggtaaaggcttcccacactgaacc

SEQ ID NO: 209835 - DNA, 33 bp, Homo sapien
caagaaatagcagagaatccaagaaagtaaact

SEQ ID NO: 209836 - DNA, 33 bp, Homo sapien
caagaaatagcagagattccaagaaagtaaact

SEQ ID NO: 209837 - DNA, 33 bp, Homo sapien
acctggggcaaagtacacctggaattcataaaa

SEQ ID NO: 209838 - DNA, 33 bp, Homo sapien
acctggggcaaagtacgcctggaattcataaaa

SEQ ID NO: 209839 - DNA, 33 bp, Homo sapien
tgaataccatattgtcacagggtggtttccatg

SEQ ID NO: 209840 - DNA, 33 bp, Homo sapien
tgaataccatattgtcgcagggtggtttccatg

SEQ ID NO: 209841 - DNA, 33 bp, Homo sapien
aattagtgattaaggaaagaatactgtaggggg

SEQ ID NO: 209842 - DNA, 33 bp, Homo sapien
aattagtgattaaggagagaatactgtaggggg

SEQ ID NO: 209843 - DNA, 33 bp, Homo sapien
cttatctgactaaaaacgtttctcaagaggata

SEQ ID NO: 209844 - DNA, 33 bp, Homo sapien
cttatctgactaaaaatgtttctcaagaggata

SEQ ID NO: 209845 - DNA, 33 bp, Homo sapien
gggccaatatgggatcaaaatcaagggtgctgg

SEQ ID NO: 209846 - DNA, 33 bp, Homo sapien
gggccaatatgggatccaaatcaagggtgctgg

SEQ ID NO: 209847 - DNA, 33 bp, Homo sapien
actgcctaaaagtgccaatctgctcatctttta

SEQ ID NO: 209848 - DNA, 33 bp, Homo sapien
actgcctaaaagtgccgatctgctcatctttta

SEQ ID NO: 209849 - DNA, 33 bp, Homo sapien
caccaagtctggccagcaggtagattgtagagt

SEQ ID NO: 209850 - DNA, 33 bp, Homo sapien
caccaagtctggccaggaggtagattgtagagt

SEQ ID NO: 209851 - DNA, 33 bp, Homo sapien
ttgagctattgtgcccacataacaaatacttat

SEQ ID NO: 209852 - DNA, 33 bp, Homo sapien
ttgagctattgtgcccgcataacaaatacttat

SEQ ID NO: 209853 - DNA, 33 bp, Homo sapien
tgcagagtctcaaaccaggaggactaggcactc

SEQ ID NO: 209854 - DNA, 33 bp, Homo sapien
tgcagagtctcaaaccgggaggactaggcactc

SEQ ID NO: 209855 - DNA, 33 bp, Homo sapien
aaagtgaaaaagctaacagaggtgtttattcat

SEQ ID NO: 209856 - DNA, 33 bp, Homo sapien
aaagtgaaaaagctaatagaggtgtttattcat

SEQ ID NO: 209857 - DNA, 33 bp, Homo sapien
taaaggaaaggaaggaatcaaacaagctcaatc

SEQ ID NO: 209858 - DNA, 33 bp, Homo sapien
taaaggaaaggaaggactcaaacaagctcaatc

SEQ ID NO: 209859 - DNA, 33 bp, Homo sapien
attaaaacatggctgaaatcttttctagagaag

SEQ ID NO: 209860 - DNA, 33 bp, Homo sapien
attaaaacatggctgagatcttttctagagaag

SEQ ID NO: 209861 - DNA, 33 bp, Homo sapien
catgtcctcatgacgagctctgttctgaagggt

SEQ ID NO: 209862 - DNA, 33 bp, Homo sapien
catgtcctcatgacgatctctgttctgaagggt

SEQ ID NO: 209863 - DNA, 33 bp, Homo sapien
ttagtgtcagttacatcagtggccatgattctt

SEQ ID NO: 209864 - DNA, 33 bp, Homo sapien
ttagtgtcagttacattagtggccatgattctt

SEQ ID NO: 209865 - DNA, 33 bp, Homo sapien
catcctttgccactctcagaggcagaatgtgtt

SEQ ID NO: 209866 - DNA, 33 bp, Homo sapien
catcctttgccactctgagaggcagaatgtgtt

SEQ ID NO: 209867 - DNA, 33 bp, Homo sapien
gcctcttcttcactgacagtgtttgttaaactt

SEQ ID NO: 209868 - DNA, 33 bp, Homo sapien
gcctcttcttcactgagagtgtttgttaaactt

SEQ ID NO: 209869 - DNA, 33 bp, Homo sapien
aggaggtacaacaccacaggcccagaacagaga

SEQ ID NO: 209870 - DNA, 33 bp, Homo sapien
aggaggtacaacaccagaggcccagaacagaga

SEQ ID NO: 209871 - DNA, 33 bp, Homo sapien
ttttaattagtgtgaccagagaaagcacactgg

SEQ ID NO: 209872 - DNA, 33 bp, Homo sapien
ttttaattagtgtgacgagagaaagcacactgg

SEQ ID NO: 209873 - DNA, 33 bp, Homo sapien
gagtgtcttgtagcaacaatgccttgcccataa

SEQ ID NO: 209874 - DNA, 33 bp, Homo sapien
gagtgtcttgtagcaataatgccttgcccataa

SEQ ID NO: 209875 - DNA, 33 bp, Homo sapien
ctcaccgtatttcctaccagaaaccagagttca

SEQ ID NO: 209876 - DNA, 33 bp, Homo sapien
ctcaccgtatttcctagcagaaaccagagttca

SEQ ID NO: 209877 - DNA, 33 bp, Homo sapien
tttaaataaataaatacggtcactattgccaca

SEQ ID NO: 209878 - DNA, 33 bp, Homo sapien
tttaaataaataaatatggtcactattgccaca

SEQ ID NO: 209879 - DNA, 33 bp, Homo sapien
gtttggaattaggcacagagatcttcttttaac

SEQ ID NO: 209880 - DNA, 33 bp, Homo sapien
gtttggaattaggcacggagatcttcttttaac

SEQ ID NO: 209881 - DNA, 33 bp, Homo sapien
ctctttatgggagcgaaccaggcatctgtattt

SEQ ID NO: 209882 - DNA, 33 bp, Homo sapien
ctctttatgggagcgacccaggcatctgtattt

SEQ ID NO: 209883 - DNA, 33 bp, Homo sapien
caaagagctatctacaatctatggagcagaaat

SEQ ID NO: 209884 - DNA, 33 bp, Homo sapien
caaagagctatctacagtctatggagcagaaat

SEQ ID NO: 209885 - DNA, 33 bp, Homo sapien
cacagaaagggctctcagaaggccacggaaatg

SEQ ID NO: 209886 - DNA, 33 bp, Homo sapien
cacagaaagggctctcggaaggccacggaaatg

SEQ ID NO: 209887 - DNA, 33 bp, Homo sapien
tgaggacaagggcaaactgaaattaggactagg

SEQ ID NO: 209888 - DNA, 33 bp, Homo sapien
tgaggacaagggcaaattgaaattaggactagg

SEQ ID NO: 209889 - DNA, 33 bp, Homo sapien
gcctttgggcaacaccaacactgactggtaaag

SEQ ID NO: 209890 - DNA, 33 bp, Homo sapien
gcctttgggcaacaccgacactgactggtaaag

SEQ ID NO: 209891 - DNA, 33 bp, Homo sapien
ctggaaaccatgatgacaaatctcaccaaatag

SEQ ID NO: 209892 - DNA, 33 bp, Homo sapien
ctggaaaccatgatgagaaatctcaccaaatag

SEQ ID NO: 209893 - DNA, 33 bp, Homo sapien
accaaatagagcctgacctgtcacagactttat

SEQ ID NO: 209894 - DNA, 33 bp, Homo sapien
accaaatagagcctgatctgtcacagactttat

SEQ ID NO: 209895 - DNA, 33 bp, Homo sapien
caccaaatctgtgacaaatctaattactcttgt

SEQ ID NO: 209896 - DNA, 33 bp, Homo sapien
caccaaatctgtgacagatctaattactcttgt

SEQ ID NO: 209897 - DNA, 33 bp, Homo sapien
atcttcaactcgtcgactccctgcaaacacaaa

SEQ ID NO: 209898 - DNA, 33 bp, Homo sapien
atcttcaactcgtcgattccctgcaaacacaaa

SEQ ID NO: 209899 - DNA, 33 bp, Homo sapien
tatgtccttagtttgaagcatagaataagattt

SEQ ID NO: 209900 - DNA, 33 bp, Homo sapien
tatgtccttagtttgatgcatagaataagattt

SEQ ID NO: 209901 - DNA, 33 bp, Homo sapien
acaggtctggttgaacgaagaatgagaaggctc

SEQ ID NO: 209902 - DNA, 33 bp, Homo sapien
acaggtctggttgaactaagaatgagaaggctc

SEQ ID NO: 209903 - DNA, 33 bp, Homo sapien
tattgattccaaatctgacgtgtgactattctg

SEQ ID NO: 209904 - DNA, 33 bp, Homo sapien
tattgattccaaatcttacgtgtgactattctg

SEQ ID NO: 209905 - DNA, 33 bp, Homo sapien
ctgaaaacttgacttacgacttcacacaccagc

SEQ ID NO: 209906 - DNA, 33 bp, Homo sapien
ctgaaaacttgacttaggacttcacacaccagc

SEQ ID NO: 209907 - DNA, 33 bp, Homo sapien
tacagaaattgcctccaaagaagcatcctatac

SEQ ID NO: 209908 - DNA, 33 bp, Homo sapien
tacagaaattgcctccgaagaagcatcctatac

SEQ ID NO: 209909 - DNA, 33 bp, Homo sapien
caaagagaaacagaaacggcaccatctgagaag

SEQ ID NO: 209910 - DNA, 33 bp, Homo sapien
caaagagaaacagaaatggcaccatctgagaag

SEQ ID NO: 209911 - DNA, 33 bp, Homo sapien
tgagatccacaaaccaccagtcttcattactca

SEQ ID NO: 209912 - DNA, 33 bp, Homo sapien
tgagatccacaaaccatcagtcttcattactca

SEQ ID NO: 209913 - DNA, 33 bp, Homo sapien
aaagtcctcaagggaacgatgtgatttatgtgg

SEQ ID NO: 209914 - DNA, 33 bp, Homo sapien
aaagtcctcaagggaatgatgtgatttatgtgg

SEQ ID NO: 209915 - DNA, 33 bp, Homo sapien
aatgtcatttattgagaatttaagtatgtgcca

SEQ ID NO: 209916 - DNA, 33 bp, Homo sapien
aatgtcatttattgagtatttaagtatgtgcca

SEQ ID NO: 209917 - DNA, 33 bp, Homo sapien
atgtctcctcaaagataaggtgcaaggtagagg

SEQ ID NO: 209918 - DNA, 33 bp, Homo sapien
atgtctcctcaaagatcaggtgcaaggtagagg

SEQ ID NO: 209919 - DNA, 33 bp, Homo sapien
tttctagattccatgaaagtggctcttcccttc

SEQ ID NO: 209920 - DNA, 33 bp, Homo sapien
tttctagattccatgatagtggctcttcccttc

SEQ ID NO: 209921 - DNA, 33 bp, Homo sapien
ttgccaaagtccatctaaagccactcttccaga

SEQ ID NO: 209922 - DNA, 33 bp, Homo sapien
ttgccaaagtccatctgaagccactcttccaga

SEQ ID NO: 209923 - DNA, 33 bp, Homo sapien
actgtgaaaaaagcccgggacttggcatcagac

SEQ ID NO: 209924 - DNA, 33 bp, Homo sapien
actgtgaaaaaagccctggacttggcatcagac

SEQ ID NO: 209925 - DNA, 33 bp, Homo sapien
agactgatacagcagcacatgaaatttcaaatg

SEQ ID NO: 209926 - DNA, 33 bp, Homo sapien
agactgatacagcagcgcatgaaatttcaaatg

SEQ ID NO: 209927 - DNA, 33 bp, Homo sapien
acgttttagcaactgacaatcagaggaggcaat

SEQ ID NO: 209928 - DNA, 33 bp, Homo sapien
acgttttagcaactgataatcagaggaggcaat

SEQ ID NO: 209929 - DNA, 33 bp, Homo sapien
tatagaggtggtttgaacagaaaaaatatttaa

SEQ ID NO: 209930 - DNA, 33 bp, Homo sapien
tatagaggtggtttgaccagaaaaaatatttaa

SEQ ID NO: 209931 - DNA, 33 bp, Homo sapien
ccacagcaagtagctccacaccctaccatctat

SEQ ID NO: 209932 - DNA, 33 bp, Homo sapien
ccacagcaagtagctctacaccctaccatctat

SEQ ID NO: 209933 - DNA, 33 bp, Homo sapien
catgggttgtcaaggactattaggatttgagtc

SEQ ID NO: 209934 - DNA, 33 bp, Homo sapien
catgggttgtcaaggagtattaggatttgagtc

SEQ ID NO: 209935 - DNA, 33 bp, Homo sapien
gcctgtgcattaggtacggcatcaaggcaggag

SEQ ID NO: 209936 - DNA, 33 bp, Homo sapien
gcctgtgcattaggtatggcatcaaggcaggag

SEQ ID NO: 209937 - DNA, 33 bp, Homo sapien
acgcacacacacgtacacatgcaaacagataag

SEQ ID NO: 209938 - DNA, 33 bp, Homo sapien
acgcacacacacgtacgcatgcaaacagataag

SEQ ID NO: 209939 - DNA, 33 bp, Homo sapien
aacaagttgtgactcaaacatttgtaccgactt

SEQ ID NO: 209940 - DNA, 33 bp, Homo sapien
aacaagttgtgactcacacatttgtaccgactt

SEQ ID NO: 209941 - DNA, 33 bp, Homo sapien
ctgagatgcctttgagaaaaatggtaacagcag

SEQ ID NO: 209942 - DNA, 33 bp, Homo sapien
ctgagatgcctttgaggaaaatggtaacagcag

SEQ ID NO: 209943 - DNA, 33 bp, Homo sapien
gtgttgcagaacttctcaaacactttagacctg

SEQ ID NO: 209944 - DNA, 33 bp, Homo sapien
gtgttgcagaacttctgaaacactttagacctg

SEQ ID NO: 209945 - DNA, 33 bp, Homo sapien
ctggggggactaaagacgctgagatgtgttcct

SEQ ID NO: 209946 - DNA, 33 bp, Homo sapien
ctggggggactaaagatgctgagatgtgttcct

SEQ ID NO: 209947 - DNA, 33 bp, Homo sapien
gaacctctgggaacaccctcttaagactgcttt

SEQ ID NO: 209948 - DNA, 33 bp, Homo sapien
gaacctctgggaacactctcttaagactgcttt

SEQ ID NO: 209949 - DNA, 33 bp, Homo sapien
tctactactttccctgcatcacaagtcctcagc

SEQ ID NO: 209950 - DNA, 33 bp, Homo sapien
tctactactttccctgtatcacaagtcctcagc

SEQ ID NO: 209951 - DNA, 33 bp, Homo sapien
ctgcctgaagaacccacagttcctggacagaaa

SEQ ID NO: 209952 - DNA, 33 bp, Homo sapien
ctgcctgaagaacccatagttcctggacagaaa

SEQ ID NO: 209953 - DNA, 33 bp, Homo sapien
gtggcttctgtaagggaattcacaggaagaagg

SEQ ID NO: 209954 - DNA, 33 bp, Homo sapien
gtggcttctgtaagggtattcacaggaagaagg

SEQ ID NO: 209955 - DNA, 33 bp, Homo sapien
gccatgtaagttgagaagtttcagatgattcta

SEQ ID NO: 209956 - DNA, 33 bp, Homo sapien
gccatgtaagttgagacgtttcagatgattcta

SEQ ID NO: 209957 - DNA, 33 bp, Homo sapien
aatgctgggaatcagggacaaagggataagaag

SEQ ID NO: 209958 - DNA, 33 bp, Homo sapien
aatgctgggaatcaggtacaaagggataagaag

SEQ ID NO: 209959 - DNA, 33 bp, Homo sapien
gtgagccaacgtgaccacccagggataggggat

SEQ ID NO: 209960 - DNA, 33 bp, Homo sapien
gtgagccaacgtgaccgcccagggataggggat

SEQ ID NO: 209961 - DNA, 33 bp, Homo sapien
ttctgccaccttaaagacaccatcaattctgcc

SEQ ID NO: 209962 - DNA, 33 bp, Homo sapien
ttctgccaccttaaagtcaccatcaattctgcc

SEQ ID NO: 209963 - DNA, 33 bp, Homo sapien
atatttaaaatccacaaataactctgcatttca

SEQ ID NO: 209964 - DNA, 33 bp, Homo sapien
atatttaaaatccacagataactctgcatttca

SEQ ID NO: 209965 - DNA, 33 bp, Homo sapien
aaggggacaaggtagacgtgcatgaggtccctt

SEQ ID NO: 209966 - DNA, 33 bp, Homo sapien
aaggggacaaggtagatgtgcatgaggtccctt

SEQ ID NO: 209967 - DNA, 33 bp, Homo sapien
aagtgcttttctttaaggctgattgagaagagc

SEQ ID NO: 209968 - DNA, 33 bp, Homo sapien
aagtgcttttctttaatgctgattgagaagagc

SEQ ID NO: 209969 - DNA, 33 bp, Homo sapien
tacatcccagcattataaaaagtctcaacccat

SEQ ID NO: 209970 - DNA, 33 bp, Homo sapien
tacatcccagcattatcaaaagtctcaacccat

SEQ ID NO: 209971 - DNA, 33 bp, Homo sapien
ctctgtgtctgtttccacttctcttctcttaca

SEQ ID NO: 209972 - DNA, 33 bp, Homo sapien
ctctgtgtctgtttccgcttctcttctcttaca

SEQ ID NO: 209973 - DNA, 33 bp, Homo sapien
gcaaagtacttgaacacatccttttttacgact

SEQ ID NO: 209974 - DNA, 33 bp, Homo sapien
gcaaagtacttgaacagatccttttttacgact

SEQ ID NO: 209975 - DNA, 33 bp, Homo sapien
gagatggtccactacacagcagatttttataat

SEQ ID NO: 209976 - DNA, 33 bp, Homo sapien
gagatggtccactacagagcagatttttataat

SEQ ID NO: 209977 - DNA, 33 bp, Homo sapien
agtccttgaactgagaagttatcgtgtactccc

SEQ ID NO: 209978 - DNA, 33 bp, Homo sapien
agtccttgaactgagaggttatcgtgtactccc

SEQ ID NO: 209979 - DNA, 33 bp, Homo sapien
ggctgaatttagcacacaggctgaagttggcca

SEQ ID NO: 209980 - DNA, 33 bp, Homo sapien
ggctgaatttagcacagaggctgaagttggcca

SEQ ID NO: 209981 - DNA, 33 bp, Homo sapien
tattgacacagagaaactaatggaaatgagtaa

SEQ ID NO: 209982 - DNA, 33 bp, Homo sapien
tattgacacagagaaagtaatggaaatgagtaa

SEQ ID NO: 209983 - DNA, 33 bp, Homo sapien
aaaataatgaggtaaacttcttgttctcgggaa

SEQ ID NO: 209984 - DNA, 33 bp, Homo sapien
aaaataatgaggtaaagttcttgttctcgggaa

SEQ ID NO: 209985 - DNA, 33 bp, Homo sapien
aactcaggaagtttaccgctagattgttcataa

SEQ ID NO: 209986 - DNA, 33 bp, Homo sapien
aactcaggaagtttactgctagattgttcataa

SEQ ID NO: 209987 - DNA, 33 bp, Homo sapien
acaaaagatcacaaccaattgcaataacttctg

SEQ ID NO: 209988 - DNA, 33 bp, Homo sapien
acaaaagatcacaaccgattgcaataacttctg

SEQ ID NO: 209989 - DNA, 33 bp, Homo sapien
aattggctcacataaccataaaggctgacaagt

SEQ ID NO: 209990 - DNA, 33 bp, Homo sapien
aattggctcacataactataaaggctgacaagt

SEQ ID NO: 209991 - DNA, 33 bp, Homo sapien
gcctgtgacatttgagaacctgactggggggaa

SEQ ID NO: 209992 - DNA, 33 bp, Homo sapien
gcctgtgacatttgagcacctgactggggggaa

SEQ ID NO: 209993 - DNA, 33 bp, Homo sapien
tggagaatctaagtcactgaaaataaaccaaat

SEQ ID NO: 209994 - DNA, 33 bp, Homo sapien
tggagaatctaagtcattgaaaataaaccaaat

SEQ ID NO: 209995 - DNA, 33 bp, Homo sapien
agtgtcttcaacttcaactgatatctgattgca

SEQ ID NO: 209996 - DNA, 33 bp, Homo sapien
agtgtcttcaacttcagctgatatctgattgca

SEQ ID NO: 209997 - DNA, 33 bp, Homo sapien
catataggcatatatacaaaactgcagtggaaa

SEQ ID NO: 209998 - DNA, 33 bp, Homo sapien
catataggcatatatataaaactgcagtggaaa

SEQ ID NO: 209999 - DNA, 33 bp, Homo sapien
agcatttgacattattaaacagctaaatgaaag

SEQ ID NO: 210000 - DNA, 33 bp, Homo sapien
agcatttgacattatttaacagctaaatgaaag

SEQ ID NO: 210001 - DNA, 33 bp, Homo sapien
agactcagctagaagaataaggggcagcaaaca

SEQ ID NO: 210002 - DNA, 33 bp, Homo sapien
agactcagctagaagactaaggggcagcaaaca

SEQ ID NO: 210003 - DNA, 33 bp, Homo sapien
ataatttatttattcaaatgtcttcaagtgtca

SEQ ID NO: 210004 - DNA, 33 bp, Homo sapien
ataatttatttattcagatgtcttcaagtgtca

SEQ ID NO: 210005 - DNA, 33 bp, Homo sapien
caggtgtgctttaacagctaacagatcctcctc

SEQ ID NO: 210006 - DNA, 33 bp, Homo sapien
caggtgtgctttaacatctaacagatcctcctc

SEQ ID NO: 210007 - DNA, 33 bp, Homo sapien
aataacatattctcacaggatgatttagggagg

SEQ ID NO: 210008 - DNA, 33 bp, Homo sapien
aataacatattctcacgggatgatttagggagg

SEQ ID NO: 210009 - DNA, 33 bp, Homo sapien
ggttccagaattgtccacttcttcacaggtacc

SEQ ID NO: 210010 - DNA, 33 bp, Homo sapien
ggttccagaattgtccgcttcttcacaggtacc

SEQ ID NO: 210011 - DNA, 33 bp, Homo sapien
ctaactaagcctgaaagctactgagagagatag

SEQ ID NO: 210012 - DNA, 33 bp, Homo sapien
ctaactaagcctgaaatctactgagagagatag

SEQ ID NO: 210013 - DNA, 33 bp, Homo sapien
atcttcgtggagtttacgtcctgatacatagat

SEQ ID NO: 210014 - DNA, 33 bp, Homo sapien
atcttcgtggagtttatgtcctgatacatagat

SEQ ID NO: 210015 - DNA, 33 bp, Homo sapien
gtaagagagaattcagacattttaggactgtgt

SEQ ID NO: 210016 - DNA, 33 bp, Homo sapien
gtaagagagaattcaggcattttaggactgtgt

SEQ ID NO: 210017 - DNA, 33 bp, Homo sapien
ctacttgcaagcagcactaaaaagtaagagaga

SEQ ID NO: 210018 - DNA, 33 bp, Homo sapien
ctacttgcaagcagcagtaaaaagtaagagaga

SEQ ID NO: 210019 - DNA, 33 bp, Homo sapien
aaagagagatgatcttcaaacataatgagttta

SEQ ID NO: 210020 - DNA, 33 bp, Homo sapien
aaagagagatgatcttgaaacataatgagttta

SEQ ID NO: 210021 - DNA, 33 bp, Homo sapien
aaactactgagaaaaacgagcacagaaatataa

SEQ ID NO: 210022 - DNA, 33 bp, Homo sapien
aaactactgagaaaaatgagcacagaaatataa

SEQ ID NO: 210023 - DNA, 33 bp, Homo sapien
ccagcagaaggggtaaaaaaggcttcagtcctg

SEQ ID NO: 210024 - DNA, 33 bp, Homo sapien
ccagcagaaggggtaacaaaggcttcagtcctg

SEQ ID NO: 210025 - DNA, 33 bp, Homo sapien
atatttacaaattcacacctgcggtagagctct

SEQ ID NO: 210026 - DNA, 33 bp, Homo sapien
atatttacaaattcactcctgcggtagagctct

SEQ ID NO: 210027 - DNA, 33 bp, Homo sapien
actaaagctcatttaaagccaaagtcatttagc

SEQ ID NO: 210028 - DNA, 33 bp, Homo sapien
actaaagctcatttaaggccaaagtcatttagc

SEQ ID NO: 210029 - DNA, 33 bp, Homo sapien
aatgatgtcaaccacaatgaagggaaaggaaga

SEQ ID NO: 210030 - DNA, 33 bp, Homo sapien
aatgatgtcaaccacagtgaagggaaaggaaga

SEQ ID NO: 210031 - DNA, 33 bp, Homo sapien
acccagactactgagcccctagagatgtcactg

SEQ ID NO: 210032 - DNA, 33 bp, Homo sapien
acccagactactgagcgcctagagatgtcactg

SEQ ID NO: 210033 - DNA, 33 bp, Homo sapien
atttgtagaggaaggaacttgattcaatggtat

SEQ ID NO: 210034 - DNA, 33 bp, Homo sapien
atttgtagaggaaggaccttgattcaatggtat

SEQ ID NO: 210035 - DNA, 33 bp, Homo sapien
agtatagtgtataaggccaaataatgaaaaact

SEQ ID NO: 210036 - DNA, 33 bp, Homo sapien
agtatagtgtataaggtcaaataatgaaaaact

SEQ ID NO: 210037 - DNA, 33 bp, Homo sapien
agtctgctttccagaacaatgtctctaaccagg

SEQ ID NO: 210038 - DNA, 33 bp, Homo sapien
agtctgctttccagaataatgtctctaaccagg

SEQ ID NO: 210039 - DNA, 33 bp, Homo sapien
aggccctgcctttgccgactttgtgataaacct

SEQ ID NO: 210040 - DNA, 33 bp, Homo sapien
aggccctgcctttgcctactttgtgataaacct

SEQ ID NO: 210041 - DNA, 33 bp, Homo sapien
gccttaatttaatatccatagttcatccaatta

SEQ ID NO: 210042 - DNA, 33 bp, Homo sapien
gccttaatttaatatcgatagttcatccaatta

SEQ ID NO: 210043 - DNA, 33 bp, Homo sapien
tcattttcatttacacaccaatattaagctctg

SEQ ID NO: 210044 - DNA, 33 bp, Homo sapien
tcattttcatttacaccccaatattaagctctg

SEQ ID NO: 210045 - DNA, 33 bp, Homo sapien
aaataaacaaacagacggtcagtaacactgacg

SEQ ID NO: 210046 - DNA, 33 bp, Homo sapien
aaataaacaaacagactgtcagtaacactgacg

SEQ ID NO: 210047 - DNA, 33 bp, Homo sapien
aacaatccagcataccccaaataatattggctt

SEQ ID NO: 210048 - DNA, 33 bp, Homo sapien
aacaatccagcataccgcaaataatattggctt

SEQ ID NO: 210049 - DNA, 33 bp, Homo sapien
gtggcaaggactgctacgtctcccttgataggt

SEQ ID NO: 210050 - DNA, 33 bp, Homo sapien
gtggcaaggactgctatgtctcccttgataggt

SEQ ID NO: 210051 - DNA, 33 bp, Homo sapien
ttgggaatgaggcttacgggagaaaaaaaatga

SEQ ID NO: 210052 - DNA, 33 bp, Homo sapien
ttgggaatgaggcttaggggagaaaaaaaatga

SEQ ID NO: 210053 - DNA, 33 bp, Homo sapien
gtccctctttaggaaaccagactatgtcacccc

SEQ ID NO: 210054 - DNA, 33 bp, Homo sapien
gtccctctttaggaaagcagactatgtcacccc

SEQ ID NO: 210055 - DNA, 33 bp, Homo sapien
tatgtgcttcttaaaacagtgttgaaataatta

SEQ ID NO: 210056 - DNA, 33 bp, Homo sapien
tatgtgcttcttaaaatagtgttgaaataatta

SEQ ID NO: 210057 - DNA, 33 bp, Homo sapien
ttatataatatcacacactgggagaaataaaat

SEQ ID NO: 210058 - DNA, 33 bp, Homo sapien
ttatataatatcacacgctgggagaaataaaat

SEQ ID NO: 210059 - DNA, 33 bp, Homo sapien
ttgctcaaagtagcaacctggtagtgaaggagg

SEQ ID NO: 210060 - DNA, 33 bp, Homo sapien
ttgctcaaagtagcaagctggtagtgaaggagg

SEQ ID NO: 210061 - DNA, 33 bp, Homo sapien
gccttagtgaagtgaagactgggtgataaactc

SEQ ID NO: 210062 - DNA, 33 bp, Homo sapien
gccttagtgaagtgaatactgggtgataaactc

SEQ ID NO: 210063 - DNA, 33 bp, Homo sapien
tgatctaatcagtgacaccgtaatgcatttcag

SEQ ID NO: 210064 - DNA, 33 bp, Homo sapien
tgatctaatcagtgacgccgtaatgcatttcag

SEQ ID NO: 210065 - DNA, 33 bp, Homo sapien
tctgggacacgaaaagaacagagttggaagatt

SEQ ID NO: 210066 - DNA, 33 bp, Homo sapien
tctgggacacgaaaaggacagagttggaagatt

SEQ ID NO: 210067 - DNA, 33 bp, Homo sapien
ataaaaaagaatgagaccatttccttcacaggg

SEQ ID NO: 210068 - DNA, 33 bp, Homo sapien
ataaaaaagaatgagatcatttccttcacaggg

SEQ ID NO: 210069 - DNA, 33 bp, Homo sapien
gccactttaaataaaaggagcgaagagaggaac

SEQ ID NO: 210070 - DNA, 33 bp, Homo sapien
gccactttaaataaaatgagcgaagagaggaac

SEQ ID NO: 210071 - DNA, 33 bp, Homo sapien
ttatattgtctcctaactcatccctactaaaat

SEQ ID NO: 210072 - DNA, 33 bp, Homo sapien
ttatattgtctcctaattcatccctactaaaat

SEQ ID NO: 210073 - DNA, 33 bp, Homo sapien
ctttttcttttttagggacagttcatatgactg

SEQ ID NO: 210074 - DNA, 33 bp, Homo sapien
ctttttcttttttaggtacagttcatatgactg

SEQ ID NO: 210075 - DNA, 33 bp, Homo sapien
accttgcaaggaagacagacacaaagcatagta

SEQ ID NO: 210076 - DNA, 33 bp, Homo sapien
accttgcaaggaagacggacacaaagcatagta

SEQ ID NO: 210077 - DNA, 33 bp, Homo sapien
cataaccctgtaaagaaatcctgtaccctttag

SEQ ID NO: 210078 - DNA, 33 bp, Homo sapien
cataaccctgtaaagagatcctgtaccctttag

SEQ ID NO: 210079 - DNA, 33 bp, Homo sapien
ctcctgaaactcatccaaatagtaggttaacaa

SEQ ID NO: 210080 - DNA, 33 bp, Homo sapien
ctcctgaaactcatcccaatagtaggttaacaa

SEQ ID NO: 210081 - DNA, 33 bp, Homo sapien
caatggatgaacgtataagcaaaatgtggcata

SEQ ID NO: 210082 - DNA, 33 bp, Homo sapien
caatggatgaacgtatgagcaaaatgtggcata

SEQ ID NO: 210083 - DNA, 33 bp, Homo sapien
catcatattagcaccaccaattcaacaaataag

SEQ ID NO: 210084 - DNA, 33 bp, Homo sapien
catcatattagcaccagcaattcaacaaataag

SEQ ID NO: 210085 - DNA, 33 bp, Homo sapien
tttgctccattggtgcaaatgtctgcttattta

SEQ ID NO: 210086 - DNA, 33 bp, Homo sapien
tttgctccattggtgctaatgtctgcttattta

SEQ ID NO: 210087 - DNA, 33 bp, Homo sapien
cactaccaccaggaatcatatgcttgctacctt

SEQ ID NO: 210088 - DNA, 33 bp, Homo sapien
cactaccaccaggaattatatgcttgctacctt

SEQ ID NO: 210089 - DNA, 33 bp, Homo sapien
gaaagtgtcactaaaaatcattattatagatac

SEQ ID NO: 210090 - DNA, 33 bp, Homo sapien
gaaagtgtcactaaaagtcattattatagatac

SEQ ID NO: 210091 - DNA, 33 bp, Homo sapien
cagacagatcatcatcaactctttttagtctta

SEQ ID NO: 210092 - DNA, 33 bp, Homo sapien
cagacagatcatcatccactctttttagtctta

SEQ ID NO: 210093 - DNA, 33 bp, Homo sapien
gctcacttggtagcaaaaaaatgacctgatctg

SEQ ID NO: 210094 - DNA, 33 bp, Homo sapien
gctcacttggtagcaagaaaatgacctgatctg

SEQ ID NO: 210095 - DNA, 33 bp, Homo sapien
acacatttcagagacactatggtgtgctatttt

SEQ ID NO: 210096 - DNA, 33 bp, Homo sapien
acacatttcagagacattatggtgtgctatttt

SEQ ID NO: 210097 - DNA, 33 bp, Homo sapien
tctgtcaagatggtacgagtaacagattcaaag

SEQ ID NO: 210098 - DNA, 33 bp, Homo sapien
tctgtcaagatggtactagtaacagattcaaag

SEQ ID NO: 210099 - DNA, 33 bp, Homo sapien
ctgtgagggccaactacaggaatctgcttacca

SEQ ID NO: 210100 - DNA, 33 bp, Homo sapien
ctgtgagggccaactagaggaatctgcttacca

SEQ ID NO: 210101 - DNA, 33 bp, Homo sapien
acttctacaactaaaactaaggtgaatcaacct

SEQ ID NO: 210102 - DNA, 33 bp, Homo sapien
acttctacaactaaaagtaaggtgaatcaacct

SEQ ID NO: 210103 - DNA, 33 bp, Homo sapien
gactttaagcatttcacgaagaggttgcttaga

SEQ ID NO: 210104 - DNA, 33 bp, Homo sapien
gactttaagcatttcatgaagaggttgcttaga

SEQ ID NO: 210105 - DNA, 33 bp, Homo sapien
ggaacatcaccagtgtaaagtaccagtgttaag

SEQ ID NO: 210106 - DNA, 33 bp, Homo sapien
ggaacatcaccagtgtgaagtaccagtgttaag

SEQ ID NO: 210107 - DNA, 33 bp, Homo sapien
aaatgattttaaagacagcaaagtcatttcatc

SEQ ID NO: 210108 - DNA, 33 bp, Homo sapien
aaatgattttaaagacggcaaagtcatttcatc

SEQ ID NO: 210109 - DNA, 33 bp, Homo sapien
agaaatgagaaagagaacaagcaaaagatgttg

SEQ ID NO: 210110 - DNA, 33 bp, Homo sapien
agaaatgagaaagagatcaagcaaaagatgttg

SEQ ID NO: 210111 - DNA, 33 bp, Homo sapien
ttgcttagatctggaacgatccctttccttcat

SEQ ID NO: 210112 - DNA, 33 bp, Homo sapien
ttgcttagatctggaatgatccctttccttcat

SEQ ID NO: 210113 - DNA, 33 bp, Homo sapien
agcaaaaaggataaaaaatctgagctacagcgc

SEQ ID NO: 210114 - DNA, 33 bp, Homo sapien
agcaaaaaggataaaacatctgagctacagcgc

SEQ ID NO: 210115 - DNA, 33 bp, Homo sapien
aactcaacatcctaacggtctaatattttcttt

SEQ ID NO: 210116 - DNA, 33 bp, Homo sapien
aactcaacatcctaactgtctaatattttcttt

SEQ ID NO: 210117 - DNA, 33 bp, Homo sapien
ctgtgtctggtcttcaatccaggtcattagaaa

SEQ ID NO: 210118 - DNA, 33 bp, Homo sapien
ctgtgtctggtcttcagtccaggtcattagaaa

SEQ ID NO: 210119 - DNA, 33 bp, Homo sapien
ttaaacaacctttgaactctagcactctcctaa

SEQ ID NO: 210120 - DNA, 33 bp, Homo sapien
ttaaacaacctttgaattctagcactctcctaa

SEQ ID NO: 210121 - DNA, 33 bp, Homo sapien
taagacaaaagagttacgtaccacggagtccaa

SEQ ID NO: 210122 - DNA, 33 bp, Homo sapien
taagacaaaagagttatgtaccacggagtccaa

SEQ ID NO: 210123 - DNA, 33 bp, Homo sapien
tgggaaccatatgtaccgctgtgcaccaactaa

SEQ ID NO: 210124 - DNA, 33 bp, Homo sapien
tgggaaccatatgtactgctgtgcaccaactaa

SEQ ID NO: 210125 - DNA, 33 bp, Homo sapien
tgctcatactgtgttcccaaatcactttttgtg

SEQ ID NO: 210126 - DNA, 33 bp, Homo sapien
tgctcatactgtgttcgcaaatcactttttgtg

SEQ ID NO: 210127 - DNA, 33 bp, Homo sapien
tgtgaaactagagcggacaagagtagtaacaga

SEQ ID NO: 210128 - DNA, 33 bp, Homo sapien
tgtgaaactagagcggtcaagagtagtaacaga

SEQ ID NO: 210129 - DNA, 33 bp, Homo sapien
gaattcttggtagacaatcactactacctgaaa

SEQ ID NO: 210130 - DNA, 33 bp, Homo sapien
gaattcttggtagacagtcactactacctgaaa

SEQ ID NO: 210131 - DNA, 33 bp, Homo sapien
atttaatttatttacaagattgattctgcttta

SEQ ID NO: 210132 - DNA, 33 bp, Homo sapien
atttaatttatttacatgattgattctgcttta

SEQ ID NO: 210133 - DNA, 33 bp, Homo sapien
ggcttggattcctagggacacgactggagtggt

SEQ ID NO: 210134 - DNA, 33 bp, Homo sapien
ggcttggattcctaggtacacgactggagtggt

SEQ ID NO: 210135 - DNA, 33 bp, Homo sapien
tttagttttatcttgcacataaaatttttacat

SEQ ID NO: 210136 - DNA, 33 bp, Homo sapien
tttagttttatcttgcgcataaaatttttacat

SEQ ID NO: 210137 - DNA, 33 bp, Homo sapien
acattcagtggcacctaagaatgagaatgtcta

SEQ ID NO: 210138 - DNA, 33 bp, Homo sapien
acattcagtggcaccttagaatgagaatgtcta

SEQ ID NO: 210139 - DNA, 33 bp, Homo sapien
tcaggcaataagatgaccagggccaggtttttc

SEQ ID NO: 210140 - DNA, 33 bp, Homo sapien
tcaggcaataagatgatcagggccaggtttttc

SEQ ID NO: 210141 - DNA, 33 bp, Homo sapien
cccaaaaagctgcaaacaaagatggatacctct

SEQ ID NO: 210142 - DNA, 33 bp, Homo sapien
cccaaaaagctgcaaagaaagatggatacctct

SEQ ID NO: 210143 - DNA, 33 bp, Homo sapien
cattcttgtaaacatacgaagtgctccaggaat

SEQ ID NO: 210144 - DNA, 33 bp, Homo sapien
cattcttgtaaacatatgaagtgctccaggaat

SEQ ID NO: 210145 - DNA, 33 bp, Homo sapien
gatcaggatttcaaggccaacctgggcaacatg

SEQ ID NO: 210146 - DNA, 33 bp, Homo sapien
gatcaggatttcaaggtcaacctgggcaacatg

SEQ ID NO: 210147 - DNA, 33 bp, Homo sapien
gtgttaactagtactacaactcttccctggaag

SEQ ID NO: 210148 - DNA, 33 bp, Homo sapien
gtgttaactagtactataactcttccctggaag

SEQ ID NO: 210149 - DNA, 33 bp, Homo sapien
gtaatgaatatgtacacattaaaagaataagaa

SEQ ID NO: 210150 - DNA, 33 bp, Homo sapien
gtaatgaatatgtacagattaaaagaataagaa

SEQ ID NO: 210151 - DNA, 33 bp, Homo sapien
catttgaggacacataaaaaaggcagctgtctc

SEQ ID NO: 210152 - DNA, 33 bp, Homo sapien
catttgaggacacatacaaaaggcagctgtctc

SEQ ID NO: 210153 - DNA, 33 bp, Homo sapien
cagttacctcaccaaacgaaagatacaaactgt

SEQ ID NO: 210154 - DNA, 33 bp, Homo sapien
cagttacctcaccaaatgaaagatacaaactgt

SEQ ID NO: 210155 - DNA, 33 bp, Homo sapien
caacaaaatggcaagacgtgaagagctacaaag

SEQ ID NO: 210156 - DNA, 33 bp, Homo sapien
caacaaaatggcaagaggtgaagagctacaaag

SEQ ID NO: 210157 - DNA, 33 bp, Homo sapien
attgttacacttgtcaaggatagatgaaaaatc

SEQ ID NO: 210158 - DNA, 33 bp, Homo sapien
attgttacacttgtcagggatagatgaaaaatc

SEQ ID NO: 210159 - DNA, 33 bp, Homo sapien
gacagaagagccaatccaagaggcagaagaaaa

SEQ ID NO: 210160 - DNA, 33 bp, Homo sapien
gacagaagagccaatctaagaggcagaagaaaa

SEQ ID NO: 210161 - DNA, 33 bp, Homo sapien
tcctaaccaattttccagcttaggcctaagctg

SEQ ID NO: 210162 - DNA, 33 bp, Homo sapien
tcctaaccaattttccggcttaggcctaagctg

SEQ ID NO: 210163 - DNA, 33 bp, Homo sapien
actgaatattaagacagagatatcattgcttag

SEQ ID NO: 210164 - DNA, 33 bp, Homo sapien
actgaatattaagacatagatatcattgcttag

SEQ ID NO: 210165 - DNA, 33 bp, Homo sapien
aatattggccagggacccaagtctggaagcctg

SEQ ID NO: 210166 - DNA, 33 bp, Homo sapien
aatattggccagggactcaagtctggaagcctg

SEQ ID NO: 210167 - DNA, 33 bp, Homo sapien
agcagttctcaggagacgctgaagttgagacta

SEQ ID NO: 210168 - DNA, 33 bp, Homo sapien
agcagttctcaggagatgctgaagttgagacta

SEQ ID NO: 210169 - DNA, 33 bp, Homo sapien
aataaacagttaaagaacagagattgcaagagc

SEQ ID NO: 210170 - DNA, 33 bp, Homo sapien
aataaacagttaaagaccagagattgcaagagc

SEQ ID NO: 210171 - DNA, 33 bp, Homo sapien
ctcctttcctccatcccctcaaaactggagaag

SEQ ID NO: 210172 - DNA, 33 bp, Homo sapien
ctcctttcctccatcctctcaaaactggagaag

SEQ ID NO: 210173 - DNA, 33 bp, Homo sapien
cctcatatccatagatcagctttgcacttagcc

SEQ ID NO: 210174 - DNA, 33 bp, Homo sapien
cctcatatccatagatgagctttgcacttagcc

SEQ ID NO: 210175 - DNA, 33 bp, Homo sapien
caaagtgaattttgtaataatagtgtgacaact

SEQ ID NO: 210176 - DNA, 33 bp, Homo sapien
caaagtgaattttgtactaatagtgtgacaact

SEQ ID NO: 210177 - DNA, 33 bp, Homo sapien
gtagatgcatacataggaagaaagaagtttata

SEQ ID NO: 210178 - DNA, 33 bp, Homo sapien
gtagatgcatacatagtaagaaagaagtttata

SEQ ID NO: 210179 - DNA, 33 bp, Homo sapien
aattttgctaacaacacagatgcttaggctcac

SEQ ID NO: 210180 - DNA, 33 bp, Homo sapien
aattttgctaacaacatagatgcttaggctcac

SEQ ID NO: 210181 - DNA, 33 bp, Homo sapien
ttagtgaatttacttaacctggatggaactagt

SEQ ID NO: 210182 - DNA, 33 bp, Homo sapien
ttagtgaatttacttaccctggatggaactagt

SEQ ID NO: 210183 - DNA, 33 bp, Homo sapien
atgtgaaacattttcaactgtaaactttatgaa

SEQ ID NO: 210184 - DNA, 33 bp, Homo sapien
atgtgaaacattttcagctgtaaactttatgaa

SEQ ID NO: 210185 - DNA, 33 bp, Homo sapien
aagaaagctgatttcaaactgaggctcctttat

SEQ ID NO: 210186 - DNA, 33 bp, Homo sapien
aagaaagctgatttcagactgaggctcctttat

SEQ ID NO: 210187 - DNA, 33 bp, Homo sapien
acttcaaagatttaggaagattagcacttcaat

SEQ ID NO: 210188 - DNA, 33 bp, Homo sapien
acttcaaagatttagggagattagcacttcaat

SEQ ID NO: 210189 - DNA, 33 bp, Homo sapien
gtcttttcactaatcacaaataaagcacgaaga

SEQ ID NO: 210190 - DNA, 33 bp, Homo sapien
gtcttttcactaatcataaataaagcacgaaga

SEQ ID NO: 210191 - DNA, 33 bp, Homo sapien
gtgcaatggggaataagggtgttggattatttt

SEQ ID NO: 210192 - DNA, 33 bp, Homo sapien
gtgcaatggggaataatggtgttggattatttt

SEQ ID NO: 210193 - DNA, 33 bp, Homo sapien
tggctcctgcagccaaatacactgatgatttaa

SEQ ID NO: 210194 - DNA, 33 bp, Homo sapien
tggctcctgcagccaagtacactgatgatttaa

SEQ ID NO: 210195 - DNA, 33 bp, Homo sapien
ctaaatattaagcaagcagtagaagcaaggaat

SEQ ID NO: 210196 - DNA, 33 bp, Homo sapien
ctaaatattaagcaagtagtagaagcaaggaat

SEQ ID NO: 210197 - DNA, 33 bp, Homo sapien
acacaacagaaattcaacataggcaagctaatg

SEQ ID NO: 210198 - DNA, 33 bp, Homo sapien
acacaacagaaattcagcataggcaagctaatg

SEQ ID NO: 210199 - DNA, 33 bp, Homo sapien
atccaagccattatgaaaatccaaaaggaattg

SEQ ID NO: 210200 - DNA, 33 bp, Homo sapien
atccaagccattatgagaatccaaaaggaattg

SEQ ID NO: 210201 - DNA, 33 bp, Homo sapien
accatttttgtttcaacgtatgtatagctttcc

SEQ ID NO: 210202 - DNA, 33 bp, Homo sapien
accatttttgtttcaatgtatgtatagctttcc

SEQ ID NO: 210203 - DNA, 33 bp, Homo sapien
ggtttggctagagtaaatgaaaggatggaggtg

SEQ ID NO: 210204 - DNA, 33 bp, Homo sapien
ggtttggctagagtaactgaaaggatggaggtg

SEQ ID NO: 210205 - DNA, 33 bp, Homo sapien
gccagaaagatttgggcatatgttagtagctag

SEQ ID NO: 210206 - DNA, 33 bp, Homo sapien
gccagaaagatttgggtatatgttagtagctag

SEQ ID NO: 210207 - DNA, 33 bp, Homo sapien
cattgtgatgccacaaatagggtaaactaattt

SEQ ID NO: 210208 - DNA, 33 bp, Homo sapien
cattgtgatgccacaagtagggtaaactaattt

SEQ ID NO: 210209 - DNA, 33 bp, Homo sapien
aaattattatgtaaaaaattgcagacagacaga

SEQ ID NO: 210210 - DNA, 33 bp, Homo sapien
aaattattatgtaaaatattgcagacagacaga

SEQ ID NO: 210211 - DNA, 33 bp, Homo sapien
taaggataaagttcaacgatttaatttggtttt

SEQ ID NO: 210212 - DNA, 33 bp, Homo sapien
taaggataaagttcaaggatttaatttggtttt

SEQ ID NO: 210213 - DNA, 33 bp, Homo sapien
gaaactgatgtagtaactgttatttgatatgtt

SEQ ID NO: 210214 - DNA, 33 bp, Homo sapien
gaaactgatgtagtaagtgttatttgatatgtt

SEQ ID NO: 210215 - DNA, 33 bp, Homo sapien
attaagatattagcagaattatgtgttcaaacc

SEQ ID NO: 210216 - DNA, 33 bp, Homo sapien
attaagatattagcaggattatgtgttcaaacc

SEQ ID NO: 210217 - DNA, 33 bp, Homo sapien
caggtacaaagccttcactgttctgtctctgct

SEQ ID NO: 210218 - DNA, 33 bp, Homo sapien
caggtacaaagccttcgctgttctgtctctgct

SEQ ID NO: 210219 - DNA, 33 bp, Homo sapien
atgggagttgagtcaagctagtcagtagttgag

SEQ ID NO: 210220 - DNA, 33 bp, Homo sapien
atgggagttgagtcaatctagtcagtagttgag

SEQ ID NO: 210221 - DNA, 33 bp, Homo sapien
ctctctagtgtctttaagcccagtttctttctt

SEQ ID NO: 210222 - DNA, 33 bp, Homo sapien
ctctctagtgtctttaggcccagtttctttctt

SEQ ID NO: 210223 - DNA, 33 bp, Homo sapien
gctacctgacttcaaactataccgcaaggctac

SEQ ID NO: 210224 - DNA, 33 bp, Homo sapien
gctacctgacttcaaattataccgcaaggctac

SEQ ID NO: 210225 - DNA, 33 bp, Homo sapien
tcctttagttcagcgaagtttgtttgcttgttt

SEQ ID NO: 210226 - DNA, 33 bp, Homo sapien
tcctttagttcagcgatgtttgtttgcttgttt

SEQ ID NO: 210227 - DNA, 33 bp, Homo sapien
cggaggacagaggcagaccaccatctctgctgt

SEQ ID NO: 210228 - DNA, 33 bp, Homo sapien
cggaggacagaggcaggccaccatctctgctgt

SEQ ID NO: 210229 - DNA, 33 bp, Homo sapien
tagataggtgagtagtcacataaaaaactttaa

SEQ ID NO: 210230 - DNA, 33 bp, Homo sapien
tagataggtgagtagttacataaaaaactttaa

SEQ ID NO: 210231 - DNA, 33 bp, Homo sapien
ttctagtggttaggcccagtgtgcttctccttc

SEQ ID NO: 210232 - DNA, 33 bp, Homo sapien
ttctagtggttaggcctagtgtgcttctccttc

SEQ ID NO: 210233 - DNA, 33 bp, Homo sapien
caacctaggctaccaaatcgtaaagacgttctt

SEQ ID NO: 210234 - DNA, 33 bp, Homo sapien
caacctaggctaccaactcgtaaagacgttctt

SEQ ID NO: 210235 - DNA, 33 bp, Homo sapien
tgcagggatataaacacctagccctcttcccct

SEQ ID NO: 210236 - DNA, 33 bp, Homo sapien
tgcagggatataaacagctagccctcttcccct

SEQ ID NO: 210237 - DNA, 33 bp, Homo sapien
gtcctgaaggatctggacaatgcaccacatcat

SEQ ID NO: 210238 - DNA, 33 bp, Homo sapien
gtcctgaaggatctgggcaatgcaccacatcat

SEQ ID NO: 210239 - DNA, 33 bp, Homo sapien
tctaggaataatcagacgggtagcaatgtctgg

SEQ ID NO: 210240 - DNA, 33 bp, Homo sapien
tctaggaataatcagatgggtagcaatgtctgg

SEQ ID NO: 210241 - DNA, 33 bp, Homo sapien
gtattgtattatactactactatggtctggata

SEQ ID NO: 210242 - DNA, 33 bp, Homo sapien
gtattgtattatactattactatggtctggata

SEQ ID NO: 210243 - DNA, 33 bp, Homo sapien
agtcgctgtgtttttccagaactctcaactcca

SEQ ID NO: 210244 - DNA, 33 bp, Homo sapien
agtcgctgtgtttttctagaactctcaactcca

SEQ ID NO: 210245 - DNA, 33 bp, Homo sapien
taagtccttctactaacagccagcattgacttg

SEQ ID NO: 210246 - DNA, 33 bp, Homo sapien
taagtccttctactaagagccagcattgacttg

SEQ ID NO: 210247 - DNA, 33 bp, Homo sapien
ccatataaacaaactcaatctcaaatgtggttg

SEQ ID NO: 210248 - DNA, 33 bp, Homo sapien
ccatataaacaaactcgatctcaaatgtggttg

SEQ ID NO: 210249 - DNA, 33 bp, Homo sapien
ggttgaaccaatgtaccaaaggtcagcagaagg

SEQ ID NO: 210250 - DNA, 33 bp, Homo sapien
ggttgaaccaatgtactaaaggtcagcagaagg

SEQ ID NO: 210251 - DNA, 33 bp, Homo sapien
atcacactgctagtaagaaagagaaccagaatg

SEQ ID NO: 210252 - DNA, 33 bp, Homo sapien
atcacactgctagtaataaagagaaccagaatg

SEQ ID NO: 210253 - DNA, 33 bp, Homo sapien
gaggaaggagctttaaatagagaacagcatatg

SEQ ID NO: 210254 - DNA, 33 bp, Homo sapien
gaggaaggagctttaagtagagaacagcatatg

SEQ ID NO: 210255 - DNA, 33 bp, Homo sapien
tagagaacagcatatgaaaatactgtgagatgt

SEQ ID NO: 210256 - DNA, 33 bp, Homo sapien
tagagaacagcatatgcaaatactgtgagatgt

SEQ ID NO: 210257 - DNA, 33 bp, Homo sapien
gtagggtcacagtgaactaacagcagcttccag

SEQ ID NO: 210258 - DNA, 33 bp, Homo sapien
gtagggtcacagtgaagtaacagcagcttccag

SEQ ID NO: 210259 - DNA, 33 bp, Homo sapien
gcaacagtggaatgcaaaatacaaagcattata

SEQ ID NO: 210260 - DNA, 33 bp, Homo sapien
gcaacagtggaatgcagaatacaaagcattata

SEQ ID NO: 210261 - DNA, 33 bp, Homo sapien
gttagttaaggtaggaaggaattcaggcaaagg

SEQ ID NO: 210262 - DNA, 33 bp, Homo sapien
gttagttaaggtaggagggaattcaggcaaagg

SEQ ID NO: 210263 - DNA, 33 bp, Homo sapien
ctaaatgcttcctgacaatttttctaggaattc

SEQ ID NO: 210264 - DNA, 33 bp, Homo sapien
ctaaatgcttcctgactatttttctaggaattc

SEQ ID NO: 210265 - DNA, 33 bp, Homo sapien
acccctattcaagcaactagaggccagaaaatg

SEQ ID NO: 210266 - DNA, 33 bp, Homo sapien
acccctattcaagcaattagaggccagaaaatg

SEQ ID NO: 210267 - DNA, 33 bp, Homo sapien
ttgtgtcacttaggagaaatgaaggctttaacc

SEQ ID NO: 210268 - DNA, 33 bp, Homo sapien
ttgtgtcacttaggagcaatgaaggctttaacc

SEQ ID NO: 210269 - DNA, 33 bp, Homo sapien
ttcttcctcttgccaacaatagtgacattgaaa

SEQ ID NO: 210270 - DNA, 33 bp, Homo sapien
ttcttcctcttgccaataatagtgacattgaaa

SEQ ID NO: 210271 - DNA, 33 bp, Homo sapien
tgttgtaggttgtgggaaatttaatgacattca

SEQ ID NO: 210272 - DNA, 33 bp, Homo sapien
tgttgtaggttgtgggtaatttaatgacattca

SEQ ID NO: 210273 - DNA, 33 bp, Homo sapien
caagattcacgatgccggctagggactggacct

SEQ ID NO: 210274 - DNA, 33 bp, Homo sapien
caagattcacgatgcctgctagggactggacct

SEQ ID NO: 210275 - DNA, 33 bp, Homo sapien
taatagattttattcacatcaaatccaaccaca

SEQ ID NO: 210276 - DNA, 33 bp, Homo sapien
taatagattttattcagatcaaatccaaccaca

SEQ ID NO: 210277 - DNA, 33 bp, Homo sapien
ggaacctgtttctcatgaaaagattagcaagag

SEQ ID NO: 210278 - DNA, 33 bp, Homo sapien
ggaacctgtttctcattaaaagattagcaagag

SEQ ID NO: 210279 - DNA, 33 bp, Homo sapien
caccttcttgatgttacacaattacgtcctgca

SEQ ID NO: 210280 - DNA, 33 bp, Homo sapien
caccttcttgatgttatacaattacgtcctgca

SEQ ID NO: 210281 - DNA, 33 bp, Homo sapien
gacaggctttagatgcaaggaacaatatggcag

SEQ ID NO: 210282 - DNA, 33 bp, Homo sapien
gacaggctttagatgcgaggaacaatatggcag

SEQ ID NO: 210283 - DNA, 33 bp, Homo sapien
gagaggtgacatatagaagataagtggtaaacc

SEQ ID NO: 210284 - DNA, 33 bp, Homo sapien
gagaggtgacatatagcagataagtggtaaacc

SEQ ID NO: 210285 - DNA, 33 bp, Homo sapien
agctgggcagctgatacgaacaacattcagctc

SEQ ID NO: 210286 - DNA, 33 bp, Homo sapien
agctgggcagctgataggaacaacattcagctc

SEQ ID NO: 210287 - DNA, 33 bp, Homo sapien
tctagtctcagctctacaactatgtggtttttg

SEQ ID NO: 210288 - DNA, 33 bp, Homo sapien
tctagtctcagctctataactatgtggtttttg

SEQ ID NO: 210289 - DNA, 33 bp, Homo sapien
ttttatgtgcttttaacaagagactctcaatgt

SEQ ID NO: 210290 - DNA, 33 bp, Homo sapien
ttttatgtgcttttaagaagagactctcaatgt

SEQ ID NO: 210291 - DNA, 33 bp, Homo sapien
ttttcagaggcgaatgcagcaatatccttcaaa

SEQ ID NO: 210292 - DNA, 33 bp, Homo sapien
ttttcagaggcgaatgtagcaatatccttcaaa

SEQ ID NO: 210293 - DNA, 33 bp, Homo sapien
caagagcagacaattcactgacaagaacataac

SEQ ID NO: 210294 - DNA, 33 bp, Homo sapien
caagagcagacaattcgctgacaagaacataac

SEQ ID NO: 210295 - DNA, 33 bp, Homo sapien
tacaaggctacaatgacgaaacagtatggtatt

SEQ ID NO: 210296 - DNA, 33 bp, Homo sapien
tacaaggctacaatgatgaaacagtatggtatt

SEQ ID NO: 210297 - DNA, 33 bp, Homo sapien
tgcggctagaagcaaacagaggaggtgaaggtg

SEQ ID NO: 210298 - DNA, 33 bp, Homo sapien
tgcggctagaagcaaagagaggaggtgaaggtg

SEQ ID NO: 210299 - DNA, 33 bp, Homo sapien
aagtgaagaaagaagggatggtgccttcagata

SEQ ID NO: 210300 - DNA, 33 bp, Homo sapien
aagtgaagaaagaaggtatggtgccttcagata

SEQ ID NO: 210301 - DNA, 33 bp, Homo sapien
tctggaggctgggtaaactgactttttcacaaa

SEQ ID NO: 210302 - DNA, 33 bp, Homo sapien
tctggaggctgggtaacctgactttttcacaaa

SEQ ID NO: 210303 - DNA, 33 bp, Homo sapien
agctaaaggcaataaagctacagcaataaagaa

SEQ ID NO: 210304 - DNA, 33 bp, Homo sapien
agctaaaggcaataaatctacagcaataaagaa

SEQ ID NO: 210305 - DNA, 33 bp, Homo sapien
acatttatatcagctccagtcagaaaattattt

SEQ ID NO: 210306 - DNA, 33 bp, Homo sapien
acatttatatcagctctagtcagaaaattattt

SEQ ID NO: 210307 - DNA, 33 bp, Homo sapien
gaattagaaggtccacaactccaattgaactag

SEQ ID NO: 210308 - DNA, 33 bp, Homo sapien
gaattagaaggtccacgactccaattgaactag

SEQ ID NO: 210309 - DNA, 33 bp, Homo sapien
tactgcttgagttctacggtggaaaggagaata

SEQ ID NO: 210310 - DNA, 33 bp, Homo sapien
tactgcttgagttctatggtggaaaggagaata

SEQ ID NO: 210311 - DNA, 33 bp, Homo sapien
agatattaccattgggaaaatttgattaaagtg

SEQ ID NO: 210312 - DNA, 33 bp, Homo sapien
agatattaccattggggaaatttgattaaagtg

SEQ ID NO: 210313 - DNA, 33 bp, Homo sapien
cattttatcttcagagacaagacaatttatttc

SEQ ID NO: 210314 - DNA, 33 bp, Homo sapien
cattttatcttcagagtcaagacaatttatttc

SEQ ID NO: 210315 - DNA, 33 bp, Homo sapien
atatccaaaagtcaacaaaacagtttgacctta

SEQ ID NO: 210316 - DNA, 33 bp, Homo sapien
atatccaaaagtcaacgaaacagtttgacctta

SEQ ID NO: 210317 - DNA, 33 bp, Homo sapien
ggggatgtctccccaccattatttctccattgc

SEQ ID NO: 210318 - DNA, 33 bp, Homo sapien
ggggatgtctccccacgattatttctccattgc

SEQ ID NO: 210319 - DNA, 33 bp, Homo sapien
aaaatatagctgctgtcaagaggattaacacca

SEQ ID NO: 210320 - DNA, 33 bp, Homo sapien
aaaatatagctgctgtgaagaggattaacacca

SEQ ID NO: 210321 - DNA, 33 bp, Homo sapien
caatgaagacgccaaccaaggtatcaaatattt

SEQ ID NO: 210322 - DNA, 33 bp, Homo sapien
caatgaagacgccaacgaaggtatcaaatattt

SEQ ID NO: 210323 - DNA, 33 bp, Homo sapien
atgtcttgatgaatagaaagctaccttgataag

SEQ ID NO: 210324 - DNA, 33 bp, Homo sapien
atgtcttgatgaataggaagctaccttgataag

SEQ ID NO: 210325 - DNA, 33 bp, Homo sapien
aatttattctacgatacgtgtggtccatattgg

SEQ ID NO: 210326 - DNA, 33 bp, Homo sapien
aatttattctacgatatgtgtggtccatattgg

SEQ ID NO: 210327 - DNA, 33 bp, Homo sapien
cattgttaacatagtcaccttgttctgctatag

SEQ ID NO: 210328 - DNA, 33 bp, Homo sapien
cattgttaacatagtcgccttgttctgctatag

SEQ ID NO: 210329 - DNA, 33 bp, Homo sapien
ttggtagcagtaatggaccaattgtacctgaag

SEQ ID NO: 210330 - DNA, 33 bp, Homo sapien
ttggtagcagtaatgggccaattgtacctgaag

SEQ ID NO: 210331 - DNA, 33 bp, Homo sapien
ataggctacacagaaacggcaccagacttccta

SEQ ID NO: 210332 - DNA, 33 bp, Homo sapien
ataggctacacagaaatggcaccagacttccta

SEQ ID NO: 210333 - DNA, 33 bp, Homo sapien
ctgtgagatcaatggcggcattagagtttcata

SEQ ID NO: 210334 - DNA, 33 bp, Homo sapien
ctgtgagatcaatggctgcattagagtttcata

SEQ ID NO: 210335 - DNA, 33 bp, Homo sapien
ggttattgccagctgaccttattgaattcattt

SEQ ID NO: 210336 - DNA, 33 bp, Homo sapien
ggttattgccagctgatcttattgaattcattt

SEQ ID NO: 210337 - DNA, 33 bp, Homo sapien
aggacactagtctaaaacaatggattccataaa

SEQ ID NO: 210338 - DNA, 33 bp, Homo sapien
aggacactagtctaaagcaatggattccataaa

SEQ ID NO: 210339 - DNA, 33 bp, Homo sapien
aaaggggattctaaaaattattgctgtggactg

SEQ ID NO: 210340 - DNA, 33 bp, Homo sapien
aaaggggattctaaaagttattgctgtggactg

SEQ ID NO: 210341 - DNA, 33 bp, Homo sapien
ccaaaatgtcgtgtagcaccaatgacagaaact

SEQ ID NO: 210342 - DNA, 33 bp, Homo sapien
ccaaaatgtcgtgtagtaccaatgacagaaact

SEQ ID NO: 210343 - DNA, 33 bp, Homo sapien
taaacctatctatgaaccctttttaatctcaga

SEQ ID NO: 210344 - DNA, 33 bp, Homo sapien
taaacctatctatgaatcctttttaatctcaga

SEQ ID NO: 210345 - DNA, 33 bp, Homo sapien
gctggactttttgagacgctcaagaaacttatt

SEQ ID NO: 210346 - DNA, 33 bp, Homo sapien
gctggactttttgagatgctcaagaaacttatt

SEQ ID NO: 210347 - DNA, 33 bp, Homo sapien
agaacatcatttgatacatgtttttgctaattg

SEQ ID NO: 210348 - DNA, 33 bp, Homo sapien
agaacatcatttgatatatgtttttgctaattg

SEQ ID NO: 210349 - DNA, 33 bp, Homo sapien
cataagattggcaaaaattataaagttataaag

SEQ ID NO: 210350 - DNA, 33 bp, Homo sapien
cataagattggcaaaatttataaagttataaag

SEQ ID NO: 210351 - DNA, 33 bp, Homo sapien
ttaactaatctccccaatgataaacacctaagt

SEQ ID NO: 210352 - DNA, 33 bp, Homo sapien
ttaactaatctccccagtgataaacacctaagt

SEQ ID NO: 210353 - DNA, 33 bp, Homo sapien
cttctagtcttctacacggtattctttactatg

SEQ ID NO: 210354 - DNA, 33 bp, Homo sapien
cttctagtcttctacatggtattctttactatg

SEQ ID NO: 210355 - DNA, 33 bp, Homo sapien
atgttgatttatgccacaatggaaattgtactg

SEQ ID NO: 210356 - DNA, 33 bp, Homo sapien
atgttgatttatgccagaatggaaattgtactg

SEQ ID NO: 210357 - DNA, 33 bp, Homo sapien
gtggcatgatattccactcataagtaagagcta

SEQ ID NO: 210358 - DNA, 33 bp, Homo sapien
gtggcatgatattccattcataagtaagagcta

SEQ ID NO: 210359 - DNA, 33 bp, Homo sapien
agttttatcacttaaccgctttgtaaattagac

SEQ ID NO: 210360 - DNA, 33 bp, Homo sapien
agttttatcacttaactgctttgtaaattagac

SEQ ID NO: 210361 - DNA, 33 bp, Homo sapien
tcacatctccttctgaagcacaatgacccatat

SEQ ID NO: 210362 - DNA, 33 bp, Homo sapien
tcacatctccttctgaggcacaatgacccatat

SEQ ID NO: 210363 - DNA, 33 bp, Homo sapien
aaaaagtcaattttccagacttgagatgcactg

SEQ ID NO: 210364 - DNA, 33 bp, Homo sapien
aaaaagtcaattttccggacttgagatgcactg

SEQ ID NO: 210365 - DNA, 33 bp, Homo sapien
aactgtttaaagtgccccagagttcagggtact

SEQ ID NO: 210366 - DNA, 33 bp, Homo sapien
aactgtttaaagtgcctcagagttcagggtact

SEQ ID NO: 210367 - DNA, 33 bp, Homo sapien
catctccttcaaaaacaccttctctttgacatt

SEQ ID NO: 210368 - DNA, 33 bp, Homo sapien
catctccttcaaaaacgccttctctttgacatt

SEQ ID NO: 210369 - DNA, 33 bp, Homo sapien
aacacttgtttcaaaacgtgacaacttgtttag

SEQ ID NO: 210370 - DNA, 33 bp, Homo sapien
aacacttgtttcaaaatgtgacaacttgtttag

SEQ ID NO: 210371 - DNA, 33 bp, Homo sapien
aatttgttttgttttgaatccacctacatacag

SEQ ID NO: 210372 - DNA, 33 bp, Homo sapien
aatttgttttgttttggatccacctacatacag

SEQ ID NO: 210373 - DNA, 33 bp, Homo sapien
ttgtactttataaatacagaaaacagcttgtgg

SEQ ID NO: 210374 - DNA, 33 bp, Homo sapien
ttgtactttataaatagagaaaacagcttgtgg

SEQ ID NO: 210375 - DNA, 33 bp, Homo sapien
tatctaaggtgaattccagcaaagtgaatatca

SEQ ID NO: 210376 - DNA, 33 bp, Homo sapien
tatctaaggtgaattctagcaaagtgaatatca

SEQ ID NO: 210377 - DNA, 33 bp, Homo sapien
aggaactataaattgcaaaaggtaaatgctgtt

SEQ ID NO: 210378 - DNA, 33 bp, Homo sapien
aggaactataaattgccaaaggtaaatgctgtt

SEQ ID NO: 210379 - DNA, 33 bp, Homo sapien
ttaatctctctgctaaatgtaaatatgtgactc

SEQ ID NO: 210380 - DNA, 33 bp, Homo sapien
ttaatctctctgctaagtgtaaatatgtgactc

SEQ ID NO: 210381 - DNA, 33 bp, Homo sapien
agaaagtgacacataaaaggacaacttaaggtt

SEQ ID NO: 210382 - DNA, 33 bp, Homo sapien
agaaagtgacacataagaggacaacttaaggtt

SEQ ID NO: 210383 - DNA, 33 bp, Homo sapien
ctagcttattattcctcagactggagaggacct

SEQ ID NO: 210384 - DNA, 33 bp, Homo sapien
ctagcttattattcctgagactggagaggacct

SEQ ID NO: 210385 - DNA, 33 bp, Homo sapien
atgttctagttctaaaaaatcttgcaagcccat

SEQ ID NO: 210386 - DNA, 33 bp, Homo sapien
atgttctagttctaaagaatcttgcaagcccat

SEQ ID NO: 210387 - DNA, 33 bp, Homo sapien
cacatcagcatatatgaaatgactttatggtaa

SEQ ID NO: 210388 - DNA, 33 bp, Homo sapien
cacatcagcatatatgcaatgactttatggtaa

SEQ ID NO: 210389 - DNA, 33 bp, Homo sapien
caggtcttattaagccaacaatgcataggcaag

SEQ ID NO: 210390 - DNA, 33 bp, Homo sapien
caggtcttattaagccgacaatgcataggcaag

SEQ ID NO: 210391 - DNA, 33 bp, Homo sapien
tgataaacacaataaacgcaccaattaaattct

SEQ ID NO: 210392 - DNA, 33 bp, Homo sapien
tgataaacacaataaatgcaccaattaaattct

SEQ ID NO: 210393 - DNA, 33 bp, Homo sapien
cttatgtgtagttctccgacttttttgaaataa

SEQ ID NO: 210394 - DNA, 33 bp, Homo sapien
cttatgtgtagttctctgacttttttgaaataa

SEQ ID NO: 210395 - DNA, 33 bp, Homo sapien
taaagatacttcaaacactctcagactcaattc

SEQ ID NO: 210396 - DNA, 33 bp, Homo sapien
taaagatacttcaaacgctctcagactcaattc

SEQ ID NO: 210397 - DNA, 33 bp, Homo sapien
tttagtgagaagagacaaagtgagtaaaaaaat

SEQ ID NO: 210398 - DNA, 33 bp, Homo sapien
tttagtgagaagagactaagtgagtaaaaaaat

SEQ ID NO: 210399 - DNA, 33 bp, Homo sapien
ctgttggtttcaggataagagacaacataatgt

SEQ ID NO: 210400 - DNA, 33 bp, Homo sapien
ctgttggtttcaggatgagagacaacataatgt

SEQ ID NO: 210401 - DNA, 33 bp, Homo sapien
atgccacttagtctgaagaaggggaaaaattgg

SEQ ID NO: 210402 - DNA, 33 bp, Homo sapien
atgccacttagtctgaggaaggggaaaaattgg

SEQ ID NO: 210403 - DNA, 33 bp, Homo sapien
gcgaggatcatttgaaataaggaatagaaaaca

SEQ ID NO: 210404 - DNA, 33 bp, Homo sapien
gcgaggatcatttgaagtaaggaatagaaaaca

SEQ ID NO: 210405 - DNA, 33 bp, Homo sapien
ctcagcactttgaagacgccttttcattgtcct

SEQ ID NO: 210406 - DNA, 33 bp, Homo sapien
ctcagcactttgaagatgccttttcattgtcct

SEQ ID NO: 210407 - DNA, 33 bp, Homo sapien
agttaggcctattcaaactcctgtatggtttaa

SEQ ID NO: 210408 - DNA, 33 bp, Homo sapien
agttaggcctattcaatctcctgtatggtttaa

SEQ ID NO: 210409 - DNA, 33 bp, Homo sapien
ccaggcatcctgaacaccaaaggattatgagga

SEQ ID NO: 210410 - DNA, 33 bp, Homo sapien
ccaggcatcctgaacatcaaaggattatgagga

SEQ ID NO: 210411 - DNA, 33 bp, Homo sapien
accttatttcagttgacgcttgtaatgtagaat

SEQ ID NO: 210412 - DNA, 33 bp, Homo sapien
accttatttcagttgatgcttgtaatgtagaat

SEQ ID NO: 210413 - DNA, 33 bp, Homo sapien
ttccctaaggtcactaactatgccaattgattc

SEQ ID NO: 210414 - DNA, 33 bp, Homo sapien
ttccctaaggtcactagctatgccaattgattc

SEQ ID NO: 210415 - DNA, 33 bp, Homo sapien
catgtatgtgaggaaactacccagttccaggga

SEQ ID NO: 210416 - DNA, 33 bp, Homo sapien
catgtatgtgaggaaattacccagttccaggga

SEQ ID NO: 210417 - DNA, 33 bp, Homo sapien
ttttgagtcctctaacaaatgcactggtattta

SEQ ID NO: 210418 - DNA, 33 bp, Homo sapien
ttttgagtcctctaaccaatgcactggtattta

SEQ ID NO: 210419 - DNA, 33 bp, Homo sapien
ctggattttatagtaactctgctttgaggtttt

SEQ ID NO: 210420 - DNA, 33 bp, Homo sapien
ctggattttatagtaattctgctttgaggtttt

SEQ ID NO: 210421 - DNA, 33 bp, Homo sapien
tagcattaggggaaaacagttggtgataatgat

SEQ ID NO: 210422 - DNA, 33 bp, Homo sapien
tagcattaggggaaaatagttggtgataatgat

SEQ ID NO: 210423 - DNA, 33 bp, Homo sapien
attctcttttgataccaaagtgtgtcgggtcac

SEQ ID NO: 210424 - DNA, 33 bp, Homo sapien
attctcttttgatacccaagtgtgtcgggtcac

SEQ ID NO: 210425 - DNA, 33 bp, Homo sapien
tggtgtattcagctggaatcacttaattcctct

SEQ ID NO: 210426 - DNA, 33 bp, Homo sapien
tggtgtattcagctgggatcacttaattcctct

SEQ ID NO: 210427 - DNA, 33 bp, Homo sapien
aaagagattgtagaaagataggatgataggagc

SEQ ID NO: 210428 - DNA, 33 bp, Homo sapien
aaagagattgtagaaatataggatgataggagc

SEQ ID NO: 210429 - DNA, 33 bp, Homo sapien
tcagccttgatacacacgaattggaagaatagc

SEQ ID NO: 210430 - DNA, 33 bp, Homo sapien
tcagccttgatacacatgaattggaagaatagc

SEQ ID NO: 210431 - DNA, 33 bp, Homo sapien
agcaagtttgatataaatgacattcaagatcac

SEQ ID NO: 210432 - DNA, 33 bp, Homo sapien
agcaagtttgatataagtgacattcaagatcac

SEQ ID NO: 210433 - DNA, 33 bp, Homo sapien
tgtttacatcctcccaaagttccttgttgaact

SEQ ID NO: 210434 - DNA, 33 bp, Homo sapien
tgtttacatcctcccacagttccttgttgaact

SEQ ID NO: 210435 - DNA, 33 bp, Homo sapien
ggggtcactgctaataccattattgtcctaggg

SEQ ID NO: 210436 - DNA, 33 bp, Homo sapien
ggggtcactgctaatatcattattgtcctaggg

SEQ ID NO: 210437 - DNA, 33 bp, Homo sapien
ttgacaccttctcatacggatttgccttttctt

SEQ ID NO: 210438 - DNA, 33 bp, Homo sapien
ttgacaccttctcatatggatttgccttttctt

SEQ ID NO: 210439 - DNA, 33 bp, Homo sapien
agatagcttaggatgaagaaaccacagtgtcct

SEQ ID NO: 210440 - DNA, 33 bp, Homo sapien
agatagcttaggatgaggaaaccacagtgtcct

SEQ ID NO: 210441 - DNA, 33 bp, Homo sapien
taaattgggcgacagaaatacaacctacttaga

SEQ ID NO: 210442 - DNA, 33 bp, Homo sapien
taaattgggcgacagatatacaacctacttaga

SEQ ID NO: 210443 - DNA, 33 bp, Homo sapien
tcaacaggtaacaatcacaaggataaaccttgt

SEQ ID NO: 210444 - DNA, 33 bp, Homo sapien
tcaacaggtaacaatcgcaaggataaaccttgt

SEQ ID NO: 210445 - DNA, 33 bp, Homo sapien
attttcagcaagtatgcagagtgtttaaggact

SEQ ID NO: 210446 - DNA, 33 bp, Homo sapien
attttcagcaagtatgtagagtgtttaaggact

SEQ ID NO: 210447 - DNA, 33 bp, Homo sapien
aaatttgtgttttcccaatggtcagagactaca

SEQ ID NO: 210448 - DNA, 33 bp, Homo sapien
aaatttgtgttttcccgatggtcagagactaca

SEQ ID NO: 210449 - DNA, 33 bp, Homo sapien
aaaaatgacaaaggatcactactcatgtttgta

SEQ ID NO: 210450 - DNA, 33 bp, Homo sapien
aaaaatgacaaaggatgactactcatgtttgta

SEQ ID NO: 210451 - DNA, 33 bp, Homo sapien
aggatgaggtaaaattaaaagacaacagcatca

SEQ ID NO: 210452 - DNA, 33 bp, Homo sapien
aggatgaggtaaaattcaaagacaacagcatca

SEQ ID NO: 210453 - DNA, 33 bp, Homo sapien
agcaggaaggagaagacgattgccaaaaaagtg

SEQ ID NO: 210454 - DNA, 33 bp, Homo sapien
agcaggaaggagaagatgattgccaaaaaagtg

SEQ ID NO: 210455 - DNA, 33 bp, Homo sapien
gaatggatgagcttcaagagattctacaaacac

SEQ ID NO: 210456 - DNA, 33 bp, Homo sapien
gaatggatgagcttcacgagattctacaaacac

SEQ ID NO: 210457 - DNA, 33 bp, Homo sapien
tctgacgttcaagtagacatttcagataggaag

SEQ ID NO: 210458 - DNA, 33 bp, Homo sapien
tctgacgttcaagtaggcatttcagataggaag

SEQ ID NO: 210459 - DNA, 33 bp, Homo sapien
ctgctcagaagaaaccacaactgtagcagctct

SEQ ID NO: 210460 - DNA, 33 bp, Homo sapien
ctgctcagaagaaaccgcaactgtagcagctct

SEQ ID NO: 210461 - DNA, 33 bp, Homo sapien
ttttttaaacagtgaaccactcattactctaat

SEQ ID NO: 210462 - DNA, 33 bp, Homo sapien
ttttttaaacagtgaatcactcattactctaat

SEQ ID NO: 210463 - DNA, 33 bp, Homo sapien
ggagccataagacatgaacatagatgtataaca

SEQ ID NO: 210464 - DNA, 33 bp, Homo sapien
ggagccataagacatggacatagatgtataaca

SEQ ID NO: 210465 - DNA, 33 bp, Homo sapien
caagttgggaatagaaagaaactaactcaatat

SEQ ID NO: 210466 - DNA, 33 bp, Homo sapien
caagttgggaatagaaggaaactaactcaatat

SEQ ID NO: 210467 - DNA, 33 bp, Homo sapien
attctctcttttttccacagttatactattggg

SEQ ID NO: 210468 - DNA, 33 bp, Homo sapien
attctctcttttttccgcagttatactattggg

SEQ ID NO: 210469 - DNA, 33 bp, Homo sapien
aagctgaggaaattcaccactaccggaactgct

SEQ ID NO: 210470 - DNA, 33 bp, Homo sapien
aagctgaggaaattcatcactaccggaactgct

SEQ ID NO: 210471 - DNA, 33 bp, Homo sapien
acacaacattagaaataattcagttagaggaac

SEQ ID NO: 210472 - DNA, 33 bp, Homo sapien
acacaacattagaaattattcagttagaggaac

SEQ ID NO: 210473 - DNA, 33 bp, Homo sapien
gtatatctggatgttaaacaaaacagctacctc

SEQ ID NO: 210474 - DNA, 33 bp, Homo sapien
gtatatctggatgttatacaaaacagctacctc

SEQ ID NO: 210475 - DNA, 33 bp, Homo sapien
atcaggagactagttaaaatgctgtagcaggcc

SEQ ID NO: 210476 - DNA, 33 bp, Homo sapien
atcaggagactagttacaatgctgtagcaggcc

SEQ ID NO: 210477 - DNA, 33 bp, Homo sapien
tcagtcttattctatcaccattatatcattcaa

SEQ ID NO: 210478 - DNA, 33 bp, Homo sapien
tcagtcttattctatcgccattatatcattcaa

SEQ ID NO: 210479 - DNA, 33 bp, Homo sapien
gcattctaagtatccaataaatagccagctctg

SEQ ID NO: 210480 - DNA, 33 bp, Homo sapien
gcattctaagtatccagtaaatagccagctctg

SEQ ID NO: 210481 - DNA, 33 bp, Homo sapien
ctattttaatagcgcaagaagtaatcattctga

SEQ ID NO: 210482 - DNA, 33 bp, Homo sapien
ctattttaatagcgcaggaagtaatcattctga

SEQ ID NO: 210483 - DNA, 33 bp, Homo sapien
tagggctgaatatgaacgttggttgcatcgtat

SEQ ID NO: 210484 - DNA, 33 bp, Homo sapien
tagggctgaatatgaatgttggttgcatcgtat

SEQ ID NO: 210485 - DNA, 33 bp, Homo sapien
ttaagatggtggatataagcgttaatctcacat

SEQ ID NO: 210486 - DNA, 33 bp, Homo sapien
ttaagatggtggatatgagcgttaatctcacat

SEQ ID NO: 210487 - DNA, 33 bp, Homo sapien
tcaccctgagtcccaacgttcacaaatgctttg

SEQ ID NO: 210488 - DNA, 33 bp, Homo sapien
tcaccctgagtcccaatgttcacaaatgctttg

SEQ ID NO: 210489 - DNA, 33 bp, Homo sapien
aatgtgaactccccaaaggtgcattagatattt

SEQ ID NO: 210490 - DNA, 33 bp, Homo sapien
aatgtgaactccccaatggtgcattagatattt

SEQ ID NO: 210491 - DNA, 33 bp, Homo sapien
cagcactctattctgagcatcctccgttgatct

SEQ ID NO: 210492 - DNA, 33 bp, Homo sapien
cagcactctattctgatcatcctccgttgatct

SEQ ID NO: 210493 - DNA, 33 bp, Homo sapien
tgtgccaggtgaggaaaatttgttgatgagtgt

SEQ ID NO: 210494 - DNA, 33 bp, Homo sapien
tgtgccaggtgaggaacatttgttgatgagtgt

SEQ ID NO: 210495 - DNA, 33 bp, Homo sapien
aaaaatgaattgagaaagtagggaacaattttc

SEQ ID NO: 210496 - DNA, 33 bp, Homo sapien
aaaaatgaattgagaatgtagggaacaattttc

SEQ ID NO: 210497 - DNA, 33 bp, Homo sapien
gccaaaggcttgttaaaggatgcaaaagtatac

SEQ ID NO: 210498 - DNA, 33 bp, Homo sapien
gccaaaggcttgttaagggatgcaaaagtatac

SEQ ID NO: 210499 - DNA, 33 bp, Homo sapien
tgtgttatgtgttatacgacagactcagtgtta

SEQ ID NO: 210500 - DNA, 33 bp, Homo sapien
tgtgttatgtgttatatgacagactcagtgtta

SEQ ID NO: 210501 - DNA, 33 bp, Homo sapien
tgaacatgtggaacaacaatgagactgattttt

SEQ ID NO: 210502 - DNA, 33 bp, Homo sapien
tgaacatgtggaacaataatgagactgattttt

SEQ ID NO: 210503 - DNA, 33 bp, Homo sapien
tctcagcacgtaaaagaatgcctggaatcagtt

SEQ ID NO: 210504 - DNA, 33 bp, Homo sapien
tctcagcacgtaaaaggatgcctggaatcagtt

SEQ ID NO: 210505 - DNA, 33 bp, Homo sapien
tcctccccagtagagccacttgctccttttcct

SEQ ID NO: 210506 - DNA, 33 bp, Homo sapien
tcctccccagtagagcgacttgctccttttcct

SEQ ID NO: 210507 - DNA, 33 bp, Homo sapien
tgttcctcaaattatcacccaggttttagccag

SEQ ID NO: 210508 - DNA, 33 bp, Homo sapien
tgttcctcaaattatcgcccaggttttagccag

SEQ ID NO: 210509 - DNA, 33 bp, Homo sapien
tggtaaattcttcaccagagaaaacttacttct

SEQ ID NO: 210510 - DNA, 33 bp, Homo sapien
tggtaaattcttcacctgagaaaacttacttct

SEQ ID NO: 210511 - DNA, 33 bp, Homo sapien
caaagcagcaccttaaccttttagttgaattat

SEQ ID NO: 210512 - DNA, 33 bp, Homo sapien
caaagcagcaccttaagcttttagttgaattat

SEQ ID NO: 210513 - DNA, 33 bp, Homo sapien
aagtaacctctcacaactcagtgttttttcagt

SEQ ID NO: 210514 - DNA, 33 bp, Homo sapien
aagtaacctctcacaattcagtgttttttcagt

SEQ ID NO: 210515 - DNA, 33 bp, Homo sapien
aagcaaggagacaaaaaactgtgggagaaagta

SEQ ID NO: 210516 - DNA, 33 bp, Homo sapien
aagcaaggagacaaaagactgtgggagaaagta

SEQ ID NO: 210517 - DNA, 33 bp, Homo sapien
tatttagaaaagttaaagtgctcaaggttatat

SEQ ID NO: 210518 - DNA, 33 bp, Homo sapien
tatttagaaaagttaacgtgctcaaggttatat

SEQ ID NO: 210519 - DNA, 33 bp, Homo sapien
tattatagataaattgaactgcaggttagccca

SEQ ID NO: 210520 - DNA, 33 bp, Homo sapien
tattatagataaattggactgcaggttagccca

SEQ ID NO: 210521 - DNA, 33 bp, Homo sapien
catctcctctgctccaatcaaggacatcacacc

SEQ ID NO: 210522 - DNA, 33 bp, Homo sapien
catctcctctgctccagtcaaggacatcacacc

SEQ ID NO: 210523 - DNA, 33 bp, Homo sapien
ggacaattcacattccaattcttacattttaaa

SEQ ID NO: 210524 - DNA, 33 bp, Homo sapien
ggacaattcacattccgattcttacattttaaa

SEQ ID NO: 210525 - DNA, 33 bp, Homo sapien
aattgtggaagctgacgaactgacagaacttta

SEQ ID NO: 210526 - DNA, 33 bp, Homo sapien
aattgtggaagctgactaactgacagaacttta

SEQ ID NO: 210527 - DNA, 33 bp, Homo sapien
cctagaacgtggtcaaatggctccaattctctt

SEQ ID NO: 210528 - DNA, 33 bp, Homo sapien
cctagaacgtggtcaagtggctccaattctctt

SEQ ID NO: 210529 - DNA, 33 bp, Homo sapien
gagaggctgagaagacacagtaaaaagtctgca

SEQ ID NO: 210530 - DNA, 33 bp, Homo sapien
gagaggctgagaagacgcagtaaaaagtctgca

SEQ ID NO: 210531 - DNA, 33 bp, Homo sapien
aatggcatgacttcaactgatgttaacacctaa

SEQ ID NO: 210532 - DNA, 33 bp, Homo sapien
aatggcatgacttcaattgatgttaacacctaa

SEQ ID NO: 210533 - DNA, 33 bp, Homo sapien
agagtactcctttgacactaatgattttcaaga

SEQ ID NO: 210534 - DNA, 33 bp, Homo sapien
agagtactcctttgacgctaatgattttcaaga

SEQ ID NO: 210535 - DNA, 33 bp, Homo sapien
tgagaatggtgcgacacattattaaaatgtcca

SEQ ID NO: 210536 - DNA, 33 bp, Homo sapien
tgagaatggtgcgacatattattaaaatgtcca

SEQ ID NO: 210537 - DNA, 33 bp, Homo sapien
cctattgtaacttagacggaacattgttgtaaa

SEQ ID NO: 210538 - DNA, 33 bp, Homo sapien
cctattgtaacttagatggaacattgttgtaaa

SEQ ID NO: 210539 - DNA, 33 bp, Homo sapien
gcaccaggacacgcacaaaatgtaaaggattgg

SEQ ID NO: 210540 - DNA, 33 bp, Homo sapien
gcaccaggacacgcacgaaatgtaaaggattgg

SEQ ID NO: 210541 - DNA, 33 bp, Homo sapien
atttccaattctttacgagcaaatgtattacca

SEQ ID NO: 210542 - DNA, 33 bp, Homo sapien
atttccaattctttactagcaaatgtattacca

SEQ ID NO: 210543 - DNA, 33 bp, Homo sapien
ttacattccatgaagacgtctgcagctgtacag

SEQ ID NO: 210544 - DNA, 33 bp, Homo sapien
ttacattccatgaagatgtctgcagctgtacag

SEQ ID NO: 210545 - DNA, 33 bp, Homo sapien
ttacaaagtggacaaccgaatttggactcaatt

SEQ ID NO: 210546 - DNA, 33 bp, Homo sapien
ttacaaagtggacaactgaatttggactcaatt

SEQ ID NO: 210547 - DNA, 33 bp, Homo sapien
agacactgtaattttacgctgtgacacttagtt

SEQ ID NO: 210548 - DNA, 33 bp, Homo sapien
agacactgtaattttatgctgtgacacttagtt

SEQ ID NO: 210549 - DNA, 33 bp, Homo sapien
ttgaccatacaggcaaaggtttatttctggact

SEQ ID NO: 210550 - DNA, 33 bp, Homo sapien
ttgaccatacaggcaacggtttatttctggact

SEQ ID NO: 210551 - DNA, 33 bp, Homo sapien
atacataggtacattacgttcgttgtttgtttt

SEQ ID NO: 210552 - DNA, 33 bp, Homo sapien
atacataggtacattatgttcgttgtttgtttt

SEQ ID NO: 210553 - DNA, 33 bp, Homo sapien
gaactagcgtgctttacagcagaagaatgaagt

SEQ ID NO: 210554 - DNA, 33 bp, Homo sapien
gaactagcgtgctttatagcagaagaatgaagt

SEQ ID NO: 210555 - DNA, 33 bp, Homo sapien
cacatatttgtataataagcatatgacctttgg

SEQ ID NO: 210556 - DNA, 33 bp, Homo sapien
cacatatttgtataatgagcatatgacctttgg

SEQ ID NO: 210557 - DNA, 33 bp, Homo sapien
agggcacagtgagggggagatatggtatttctt

SEQ ID NO: 210558 - DNA, 33 bp, Homo sapien
agggcacagtgaggggtagatatggtatttctt

SEQ ID NO: 210559 - DNA, 33 bp, Homo sapien
ctatttctataacataacaattaactcaacttg

SEQ ID NO: 210560 - DNA, 33 bp, Homo sapien
ctatttctataacatatcaattaactcaacttg

SEQ ID NO: 210561 - DNA, 33 bp, Homo sapien
cagaaagcctttgacacgatatttgtaatgtct

SEQ ID NO: 210562 - DNA, 33 bp, Homo sapien
cagaaagcctttgacatgatatttgtaatgtct

SEQ ID NO: 210563 - DNA, 33 bp, Homo sapien
aaaccacttgtaggcaaaaagactgcaaggtaa

SEQ ID NO: 210564 - DNA, 33 bp, Homo sapien
aaaccacttgtaggcagaaagactgcaaggtaa

SEQ ID NO: 210565 - DNA, 33 bp, Homo sapien
gggattcaaaaggcaaagcgggaagcactgcag

SEQ ID NO: 210566 - DNA, 33 bp, Homo sapien
gggattcaaaaggcaaggcgggaagcactgcag

SEQ ID NO: 210567 - DNA, 33 bp, Homo sapien
taaataaatgatcaaaaagactacatgataacc

SEQ ID NO: 210568 - DNA, 33 bp, Homo sapien
taaataaatgatcaaagagactacatgataacc

SEQ ID NO: 210569 - DNA, 33 bp, Homo sapien
gtggactcaaagccaagaacaacctaagaagtc

SEQ ID NO: 210570 - DNA, 33 bp, Homo sapien
gtggactcaaagccaataacaacctaagaagtc

SEQ ID NO: 210571 - DNA, 33 bp, Homo sapien
tctcccagaaccaacactggcaacacatgagat

SEQ ID NO: 210572 - DNA, 33 bp, Homo sapien
tctcccagaaccaacattggcaacacatgagat

SEQ ID NO: 210573 - DNA, 33 bp, Homo sapien
agctggtcgaacatcaatatcaagtgttaagag

SEQ ID NO: 210574 - DNA, 33 bp, Homo sapien
agctggtcgaacatcagtatcaagtgttaagag

SEQ ID NO: 210575 - DNA, 33 bp, Homo sapien
acatgctttacctttcaatcatttgtgaacatg

SEQ ID NO: 210576 - DNA, 33 bp, Homo sapien
acatgctttacctttcgatcatttgtgaacatg

SEQ ID NO: 210577 - DNA, 33 bp, Homo sapien
tttactaggtaactaaatcctatcaattccttc

SEQ ID NO: 210578 - DNA, 33 bp, Homo sapien
tttactaggtaactaagtcctatcaattccttc

SEQ ID NO: 210579 - DNA, 33 bp, Homo sapien
tgtaagtgcaataataaaagtcatgtttgattt

SEQ ID NO: 210580 - DNA, 33 bp, Homo sapien
tgtaagtgcaataatagaagtcatgtttgattt

SEQ ID NO: 210581 - DNA, 33 bp, Homo sapien
tctcattcatatacacagccatgcatataaatt

SEQ ID NO: 210582 - DNA, 33 bp, Homo sapien
tctcattcatatacacggccatgcatataaatt

SEQ ID NO: 210583 - DNA, 33 bp, Homo sapien
tgacataggaaatagaggtacattttaggaaga

SEQ ID NO: 210584 - DNA, 33 bp, Homo sapien
tgacataggaaatagatgtacattttaggaaga

SEQ ID NO: 210585 - DNA, 33 bp, Homo sapien
agtttccagatgagtacccaccagatgaaagct

SEQ ID NO: 210586 - DNA, 33 bp, Homo sapien
agtttccagatgagtatccaccagatgaaagct

SEQ ID NO: 210587 - DNA, 33 bp, Homo sapien
gtatctaggttaactgccaagtgagagtcaaat

SEQ ID NO: 210588 - DNA, 33 bp, Homo sapien
gtatctaggttaactgtcaagtgagagtcaaat

SEQ ID NO: 210589 - DNA, 33 bp, Homo sapien
agagggatgataagtacgataagagtaaataat

SEQ ID NO: 210590 - DNA, 33 bp, Homo sapien
agagggatgataagtatgataagagtaaataat

SEQ ID NO: 210591 - DNA, 33 bp, Homo sapien
gcaaaaagcatttgacaaaactcaaaacacttt

SEQ ID NO: 210592 - DNA, 33 bp, Homo sapien
gcaaaaagcatttgaccaaactcaaaacacttt

SEQ ID NO: 210593 - DNA, 33 bp, Homo sapien
tctttgcttcttccgacggctagctctgttact

SEQ ID NO: 210594 - DNA, 33 bp, Homo sapien
tctttgcttcttccgatggctagctctgttact

SEQ ID NO: 210595 - DNA, 33 bp, Homo sapien
tattcaagtaataaaaactgaaccataagcaat

SEQ ID NO: 210596 - DNA, 33 bp, Homo sapien
tattcaagtaataaaagctgaaccataagcaat

SEQ ID NO: 210597 - DNA, 33 bp, Homo sapien
agttttcttctccataataacataaacagctac

SEQ ID NO: 210598 - DNA, 33 bp, Homo sapien
agttttcttctccatattaacataaacagctac

SEQ ID NO: 210599 - DNA, 33 bp, Homo sapien
tattttgtagacgttaaaaagaatgtgttgaac

SEQ ID NO: 210600 - DNA, 33 bp, Homo sapien
tattttgtagacgttataaagaatgtgttgaac

SEQ ID NO: 210601 - DNA, 33 bp, Homo sapien
gccatgaccatgagcaacaagtaacaagtgcca

SEQ ID NO: 210602 - DNA, 33 bp, Homo sapien
gccatgaccatgagcagcaagtaacaagtgcca

SEQ ID NO: 210603 - DNA, 33 bp, Homo sapien
atacaaacttaatccacaatctcaaggaaacat

SEQ ID NO: 210604 - DNA, 33 bp, Homo sapien
atacaaacttaatccataatctcaaggaaacat

SEQ ID NO: 210605 - DNA, 33 bp, Homo sapien
ccccaccagagtggtacaaaccttacaactgat

SEQ ID NO: 210606 - DNA, 33 bp, Homo sapien
ccccaccagagtggtataaaccttacaactgat

SEQ ID NO: 210607 - DNA, 33 bp, Homo sapien
attttaaatttcttgcccattattccacttaca

SEQ ID NO: 210608 - DNA, 33 bp, Homo sapien
attttaaatttcttgctcattattccacttaca

SEQ ID NO: 210609 - DNA, 33 bp, Homo sapien
acactttagtgagagccgaattttctattcttc

SEQ ID NO: 210610 - DNA, 33 bp, Homo sapien
acactttagtgagagctgaattttctattcttc

SEQ ID NO: 210611 - DNA, 33 bp, Homo sapien
tttgtcagtggcaaccagcatttttaaaaaaga

SEQ ID NO: 210612 - DNA, 33 bp, Homo sapien
tttgtcagtggcaaccggcatttttaaaaaaga

SEQ ID NO: 210613 - DNA, 33 bp, Homo sapien
tgaaaaagaaaaacaacggcagatgccacagaa

SEQ ID NO: 210614 - DNA, 33 bp, Homo sapien
tgaaaaagaaaaacaatggcagatgccacagaa

SEQ ID NO: 210615 - DNA, 33 bp, Homo sapien
gaagaggccatctttagatctcaactctttttt

SEQ ID NO: 210616 - DNA, 33 bp, Homo sapien
gaagaggccatctttatatctcaactctttttt

SEQ ID NO: 210617 - DNA, 33 bp, Homo sapien
aggaaccattgctaaaatgaacaaggccagcag

SEQ ID NO: 210618 - DNA, 33 bp, Homo sapien
aggaaccattgctaaagtgaacaaggccagcag

SEQ ID NO: 210619 - DNA, 33 bp, Homo sapien
actatctgaacaagaactgggataccaggctac

SEQ ID NO: 210620 - DNA, 33 bp, Homo sapien
actatctgaacaagaattgggataccaggctac

SEQ ID NO: 210621 - DNA, 33 bp, Homo sapien
cgttctgagttttgacaaatctgttgctcgaag

SEQ ID NO: 210622 - DNA, 33 bp, Homo sapien
cgttctgagttttgacgaatctgttgctcgaag

SEQ ID NO: 210623 - DNA, 33 bp, Homo sapien
cacataaatcagtgaacaagccttgagagttct

SEQ ID NO: 210624 - DNA, 33 bp, Homo sapien
cacataaatcagtgaagaagccttgagagttct

SEQ ID NO: 210625 - DNA, 33 bp, Homo sapien
tactactttgagttaacagagaaaaatcttcct

SEQ ID NO: 210626 - DNA, 33 bp, Homo sapien
tactactttgagttaagagagaaaaatcttcct

SEQ ID NO: 210627 - DNA, 33 bp, Homo sapien
aaggctgtttgtagaacgttagctgctatcaca

SEQ ID NO: 210628 - DNA, 33 bp, Homo sapien
aaggctgtttgtagaatgttagctgctatcaca

SEQ ID NO: 210629 - DNA, 33 bp, Homo sapien
aaaactaaagcagttaaatgacacttcaggctc

SEQ ID NO: 210630 - DNA, 33 bp, Homo sapien
aaaactaaagcagttacatgacacttcaggctc

SEQ ID NO: 210631 - DNA, 33 bp, Homo sapien
gtatttgaaaactgaaagcaaagccagttccag

SEQ ID NO: 210632 - DNA, 33 bp, Homo sapien
gtatttgaaaactgaaggcaaagccagttccag

SEQ ID NO: 210633 - DNA, 33 bp, Homo sapien
ggcttacaacttgtaccctccacagcagcagcc

SEQ ID NO: 210634 - DNA, 33 bp, Homo sapien
ggcttacaacttgtactctccacagcagcagcc

SEQ ID NO: 210635 - DNA, 33 bp, Homo sapien
agcagtagcagtgcacagattccaaccatatct

SEQ ID NO: 210636 - DNA, 33 bp, Homo sapien
agcagtagcagtgcacggattccaaccatatct

SEQ ID NO: 210637 - DNA, 33 bp, Homo sapien
tacccctcaacttcaacataccgtgcctctgat

SEQ ID NO: 210638 - DNA, 33 bp, Homo sapien
tacccctcaacttcaagataccgtgcctctgat

SEQ ID NO: 210639 - DNA, 33 bp, Homo sapien
ggccacattgttactgaatcaggaatctgtccc

SEQ ID NO: 210640 - DNA, 33 bp, Homo sapien
ggccacattgttactgtatcaggaatctgtccc

SEQ ID NO: 210641 - DNA, 33 bp, Homo sapien
tgcgtttctctgctgactaatgacgttgaacgt

SEQ ID NO: 210642 - DNA, 33 bp, Homo sapien
tgcgtttctctgctgagtaatgacgttgaacgt

SEQ ID NO: 210643 - DNA, 33 bp, Homo sapien
taattttcctctatcaagagatgagtcccatcc

SEQ ID NO: 210644 - DNA, 33 bp, Homo sapien
taattttcctctatcaggagatgagtcccatcc

SEQ ID NO: 210645 - DNA, 33 bp, Homo sapien
ctgctttccgcgtttccccttctatataagtgt

SEQ ID NO: 210646 - DNA, 33 bp, Homo sapien
ctgctttccgcgtttctccttctatataagtgt

SEQ ID NO: 210647 - DNA, 33 bp, Homo sapien
gttattttatgaactacgttggaactaaatgta

SEQ ID NO: 210648 - DNA, 33 bp, Homo sapien
gttattttatgaactatgttggaactaaatgta

SEQ ID NO: 210649 - DNA, 33 bp, Homo sapien
caagaatgcggaccacaaacacatttacactgt

SEQ ID NO: 210650 - DNA, 33 bp, Homo sapien
caagaatgcggaccaccaacacatttacactgt

SEQ ID NO: 210651 - DNA, 33 bp, Homo sapien
cagttggttgtacatacgaggctttatttctgg

SEQ ID NO: 210652 - DNA, 33 bp, Homo sapien
cagttggttgtacatatgaggctttatttctgg

SEQ ID NO: 210653 - DNA, 33 bp, Homo sapien
gggaaagaaatgatacaagtcttatgaatgcac

SEQ ID NO: 210654 - DNA, 33 bp, Homo sapien
gggaaagaaatgatacgagtcttatgaatgcac

SEQ ID NO: 210655 - DNA, 33 bp, Homo sapien
tgtaatgtcaagcctgaagaaatagatggcttt

SEQ ID NO: 210656 - DNA, 33 bp, Homo sapien
tgtaatgtcaagcctgcagaaatagatggcttt

SEQ ID NO: 210657 - DNA, 33 bp, Homo sapien
tttttaaccaatttatcagagatcaataagtgc

SEQ ID NO: 210658 - DNA, 33 bp, Homo sapien
tttttaaccaatttatgagagatcaataagtgc

SEQ ID NO: 210659 - DNA, 33 bp, Homo sapien
ggggaaacgagagttaaagtaagtagccttaga

SEQ ID NO: 210660 - DNA, 33 bp, Homo sapien
ggggaaacgagagttacagtaagtagccttaga

SEQ ID NO: 210661 - DNA, 33 bp, Homo sapien
gaaggccatttgtaaccctgataattgtaaaca

SEQ ID NO: 210662 - DNA, 33 bp, Homo sapien
gaaggccatttgtaacgctgataattgtaaaca

SEQ ID NO: 210663 - DNA, 33 bp, Homo sapien
caagttaccacttcagaacaatttgtttacaat

SEQ ID NO: 210664 - DNA, 33 bp, Homo sapien
caagttaccacttcagtacaatttgtttacaat

SEQ ID NO: 210665 - DNA, 33 bp, Homo sapien
cactttccaagaagaaacacattcttataacca

SEQ ID NO: 210666 - DNA, 33 bp, Homo sapien
cactttccaagaagaaccacattcttataacca

SEQ ID NO: 210667 - DNA, 33 bp, Homo sapien
cccacattgtggacacagaaaatggtctctata

SEQ ID NO: 210668 - DNA, 33 bp, Homo sapien
cccacattgtggacacggaaaatggtctctata

SEQ ID NO: 210669 - DNA, 33 bp, Homo sapien
aaactgaccttatacaccagggcaataaacctt

SEQ ID NO: 210670 - DNA, 33 bp, Homo sapien
aaactgaccttatacatcagggcaataaacctt

SEQ ID NO: 210671 - DNA, 33 bp, Homo sapien
tcagaaagctatactaagagagtgaaggagggc

SEQ ID NO: 210672 - DNA, 33 bp, Homo sapien
tcagaaagctatactaggagagtgaaggagggc

SEQ ID NO: 210673 - DNA, 33 bp, Homo sapien
cacaattctgcaggctaactgaagagattgtaa

SEQ ID NO: 210674 - DNA, 33 bp, Homo sapien
cacaattctgcaggcttactgaagagattgtaa

SEQ ID NO: 210675 - DNA, 33 bp, Homo sapien
acaaatgaacaaacaacagtcaatggtttatgt

SEQ ID NO: 210676 - DNA, 33 bp, Homo sapien
acaaatgaacaaacaatagtcaatggtttatgt

SEQ ID NO: 210677 - DNA, 33 bp, Homo sapien
agcctggtctgcaaaacacctgtgactgaggtt

SEQ ID NO: 210678 - DNA, 33 bp, Homo sapien
agcctggtctgcaaaatacctgtgactgaggtt

SEQ ID NO: 210679 - DNA, 33 bp, Homo sapien
agatccagtcagaaaacagaaaccataccacca

SEQ ID NO: 210680 - DNA, 33 bp, Homo sapien
agatccagtcagaaaatagaaaccataccacca

SEQ ID NO: 210681 - DNA, 33 bp, Homo sapien
actaattcgtgctcagacactttcatttactgt

SEQ ID NO: 210682 - DNA, 33 bp, Homo sapien
actaattcgtgctcaggcactttcatttactgt

SEQ ID NO: 210683 - DNA, 33 bp, Homo sapien
cacagtggagaaatcaagagtgctattcctggc

SEQ ID NO: 210684 - DNA, 33 bp, Homo sapien
cacagtggagaaatcaggagtgctattcctggc

SEQ ID NO: 210685 - DNA, 33 bp, Homo sapien
attaatggtcccgacaatcaccactcaggcatc

SEQ ID NO: 210686 - DNA, 33 bp, Homo sapien
attaatggtcccgacagtcaccactcaggcatc

SEQ ID NO: 210687 - DNA, 33 bp, Homo sapien
tcatgctcccttctaaacactgactgccaggct

SEQ ID NO: 210688 - DNA, 33 bp, Homo sapien
tcatgctcccttctaagcactgactgccaggct

SEQ ID NO: 210689 - DNA, 33 bp, Homo sapien
ctctgttaagtccaaactagcaaaataagtggt

SEQ ID NO: 210690 - DNA, 33 bp, Homo sapien
ctctgttaagtccaaagtagcaaaataagtggt

SEQ ID NO: 210691 - DNA, 33 bp, Homo sapien
gtgtctctaagcagcaaaactaagatcaatagg

SEQ ID NO: 210692 - DNA, 33 bp, Homo sapien
gtgtctctaagcagcagaactaagatcaatagg

SEQ ID NO: 210693 - DNA, 33 bp, Homo sapien
tcattcccatcttgcaactttatgccttcctat

SEQ ID NO: 210694 - DNA, 33 bp, Homo sapien
tcattcccatcttgcagctttatgccttcctat

SEQ ID NO: 210695 - DNA, 33 bp, Homo sapien
gactgaggatttcacaatgaacttttgtgcatg

SEQ ID NO: 210696 - DNA, 33 bp, Homo sapien
gactgaggatttcacagtgaacttttgtgcatg

SEQ ID NO: 210697 - DNA, 33 bp, Homo sapien
taacagctgtactgaaagacagttatgtagaga

SEQ ID NO: 210698 - DNA, 33 bp, Homo sapien
taacagctgtactgaatgacagttatgtagaga

SEQ ID NO: 210699 - DNA, 33 bp, Homo sapien
ttgtgagggttactggaacattatctcaaatcc

SEQ ID NO: 210700 - DNA, 33 bp, Homo sapien
ttgtgagggttactgggacattatctcaaatcc

SEQ ID NO: 210701 - DNA, 33 bp, Homo sapien
caactgcacttactccccaccaccttcttggca

SEQ ID NO: 210702 - DNA, 33 bp, Homo sapien
caactgcacttactcctcaccaccttcttggca

SEQ ID NO: 210703 - DNA, 33 bp, Homo sapien
atctttggttcctccaatctctggtgtgttgta

SEQ ID NO: 210704 - DNA, 33 bp, Homo sapien
atctttggttcctccagtctctggtgtgttgta

SEQ ID NO: 210705 - DNA, 33 bp, Homo sapien
gatgtcaaagtcagtacgtcaataaaggtttat

SEQ ID NO: 210706 - DNA, 33 bp, Homo sapien
gatgtcaaagtcagtatgtcaataaaggtttat

SEQ ID NO: 210707 - DNA, 33 bp, Homo sapien
cctcttgtgggttttacggggacgaatattgat

SEQ ID NO: 210708 - DNA, 33 bp, Homo sapien
cctcttgtgggttttagggggacgaatattgat

SEQ ID NO: 210709 - DNA, 33 bp, Homo sapien
attttagtctgacacaatctcatttgtctattt

SEQ ID NO: 210710 - DNA, 33 bp, Homo sapien
attttagtctgacacattctcatttgtctattt

SEQ ID NO: 210711 - DNA, 33 bp, Homo sapien
acctggaattgaacaggacaactgaactctgca

SEQ ID NO: 210712 - DNA, 33 bp, Homo sapien
acctggaattgaacagtacaactgaactctgca

SEQ ID NO: 210713 - DNA, 33 bp, Homo sapien
agcttgaaaggtaagtcactagtgaagactaga

SEQ ID NO: 210714 - DNA, 33 bp, Homo sapien
agcttgaaaggtaagttactagtgaagactaga

SEQ ID NO: 210715 - DNA, 33 bp, Homo sapien
aggaactcattgagaactgagttgaattgaatt

SEQ ID NO: 210716 - DNA, 33 bp, Homo sapien
aggaactcattgagaagtgagttgaattgaatt

SEQ ID NO: 210717 - DNA, 33 bp, Homo sapien
tatcacagtcttccagcctccaagctgcattag

SEQ ID NO: 210718 - DNA, 33 bp, Homo sapien
tatcacagtcttccagtctccaagctgcattag

SEQ ID NO: 210719 - DNA, 33 bp, Homo sapien
agcactgccctttgtactaaataatgtgctgtt

SEQ ID NO: 210720 - DNA, 33 bp, Homo sapien
agcactgccctttgtattaaataatgtgctgtt

SEQ ID NO: 210721 - DNA, 33 bp, Homo sapien
gctaaaaatgtgcctccaggtagtagctggtta

SEQ ID NO: 210722 - DNA, 33 bp, Homo sapien
gctaaaaatgtgcctcgaggtagtagctggtta

SEQ ID NO: 210723 - DNA, 33 bp, Homo sapien
agctggttagtgcttgcaaagatgccacatcac

SEQ ID NO: 210724 - DNA, 33 bp, Homo sapien
agctggttagtgcttgtaaagatgccacatcac

SEQ ID NO: 210725 - DNA, 33 bp, Homo sapien
acagttattgatccaacacatggttttgcaggc

SEQ ID NO: 210726 - DNA, 33 bp, Homo sapien
acagttattgatccaagacatggttttgcaggc

SEQ ID NO: 210727 - DNA, 33 bp, Homo sapien
gcctaatactgctctcaaagttttagacacatc

SEQ ID NO: 210728 - DNA, 33 bp, Homo sapien
gcctaatactgctctcgaagttttagacacatc

SEQ ID NO: 210729 - DNA, 33 bp, Homo sapien
aaagattgtaacacaacgataagcatcagaaaa

SEQ ID NO: 210730 - DNA, 33 bp, Homo sapien
aaagattgtaacacaaggataagcatcagaaaa

SEQ ID NO: 210731 - DNA, 33 bp, Homo sapien
aaagacgcatatcatcacacttttatattccca

SEQ ID NO: 210732 - DNA, 33 bp, Homo sapien
aaagacgcatatcatcgcacttttatattccca

SEQ ID NO: 210733 - DNA, 33 bp, Homo sapien
cattctgctaagatccaaactagctatatgctc

SEQ ID NO: 210734 - DNA, 33 bp, Homo sapien
cattctgctaagatccgaactagctatatgctc

SEQ ID NO: 210735 - DNA, 33 bp, Homo sapien
gagcgctttccatatacgtcggcaggcagttat

SEQ ID NO: 210736 - DNA, 33 bp, Homo sapien
gagcgctttccatatatgtcggcaggcagttat

SEQ ID NO: 210737 - DNA, 33 bp, Homo sapien
tagacagattattgtacagttccttttcttgga

SEQ ID NO: 210738 - DNA, 33 bp, Homo sapien
tagacagattattgtatagttccttttcttgga

SEQ ID NO: 210739 - DNA, 33 bp, Homo sapien
ctttaaaaaagtccataatcattacagttctca

SEQ ID NO: 210740 - DNA, 33 bp, Homo sapien
ctttaaaaaagtccattatcattacagttctca

SEQ ID NO: 210741 - DNA, 33 bp, Homo sapien
tcattcaaggtgggcaatattaaaagatcagaa

SEQ ID NO: 210742 - DNA, 33 bp, Homo sapien
tcattcaaggtgggcagtattaaaagatcagaa

SEQ ID NO: 210743 - DNA, 33 bp, Homo sapien
ggtctttgtccttttaagactactcacttagcc

SEQ ID NO: 210744 - DNA, 33 bp, Homo sapien
ggtctttgtccttttatgactactcacttagcc

SEQ ID NO: 210745 - DNA, 33 bp, Homo sapien
aaagtataggaaaacacaaatactcagaaatat

SEQ ID NO: 210746 - DNA, 33 bp, Homo sapien
aaagtataggaaaacagaaatactcagaaatat

SEQ ID NO: 210747 - DNA, 33 bp, Homo sapien
gggctctgatcaactcaagtcaactgatgagaa

SEQ ID NO: 210748 - DNA, 33 bp, Homo sapien
gggctctgatcaactccagtcaactgatgagaa

SEQ ID NO: 210749 - DNA, 33 bp, Homo sapien
attatagtactgaataggtatgtctaggaagag

SEQ ID NO: 210750 - DNA, 33 bp, Homo sapien
attatagtactgaatatgtatgtctaggaagag

SEQ ID NO: 210751 - DNA, 33 bp, Homo sapien
tatatataacctctgaaatttagtgacagttgg

SEQ ID NO: 210752 - DNA, 33 bp, Homo sapien
tatatataacctctgatatttagtgacagttgg

SEQ ID NO: 210753 - DNA, 33 bp, Homo sapien
caagtataaaatagcccagcacatgttagggac

SEQ ID NO: 210754 - DNA, 33 bp, Homo sapien
caagtataaaatagcctagcacatgttagggac

SEQ ID NO: 210755 - DNA, 33 bp, Homo sapien
cagtgcaaaggagaccactaaaggactcaaact

SEQ ID NO: 210756 - DNA, 33 bp, Homo sapien
cagtgcaaaggagaccgctaaaggactcaaact

SEQ ID NO: 210757 - DNA, 33 bp, Homo sapien
attttcatcagtttgccctagctgcctacctct

SEQ ID NO: 210758 - DNA, 33 bp, Homo sapien
attttcatcagtttgctctagctgcctacctct

SEQ ID NO: 210759 - DNA, 33 bp, Homo sapien
tttgattaggcatacactctattggtccaagtc

SEQ ID NO: 210760 - DNA, 33 bp, Homo sapien
tttgattaggcatacattctattggtccaagtc

SEQ ID NO: 210761 - DNA, 33 bp, Homo sapien
tcagagtgcactgaagcatcaagggaacagcca

SEQ ID NO: 210762 - DNA, 33 bp, Homo sapien
tcagagtgcactgaaggatcaagggaacagcca

SEQ ID NO: 210763 - DNA, 33 bp, Homo sapien
gatactacctgatgaaagcaagggccatatctt

SEQ ID NO: 210764 - DNA, 33 bp, Homo sapien
gatactacctgatgaaggcaagggccatatctt

SEQ ID NO: 210765 - DNA, 33 bp, Homo sapien
aggtgtggccttgggaaaacttaagagacaaag

SEQ ID NO: 210766 - DNA, 33 bp, Homo sapien
aggtgtggccttgggagaacttaagagacaaag

SEQ ID NO: 210767 - DNA, 33 bp, Homo sapien
catacaaagtggacaactggcagagatcaaaga

SEQ ID NO: 210768 - DNA, 33 bp, Homo sapien
catacaaagtggacaagtggcagagatcaaaga

SEQ ID NO: 210769 - DNA, 33 bp, Homo sapien
tagtagatgtcaagaaaccagatgtagggatgg

SEQ ID NO: 210770 - DNA, 33 bp, Homo sapien
tagtagatgtcaagaacccagatgtagggatgg

SEQ ID NO: 210771 - DNA, 33 bp, Homo sapien
aaaggaaagatcaacactggtgaaaataaacaa

SEQ ID NO: 210772 - DNA, 33 bp, Homo sapien
aaaggaaagatcaacattggtgaaaataaacaa

SEQ ID NO: 210773 - DNA, 33 bp, Homo sapien
gagactctgttccaggaaaacagttccccagct

SEQ ID NO: 210774 - DNA, 33 bp, Homo sapien
gagactctgttccaggcaaacagttccccagct

SEQ ID NO: 210775 - DNA, 33 bp, Homo sapien
acattttgagggctgacgaaagagaaagagaac

SEQ ID NO: 210776 - DNA, 33 bp, Homo sapien
acattttgagggctgatgaaagagaaagagaac

SEQ ID NO: 210777 - DNA, 33 bp, Homo sapien
ctatagaagagagtaacgtaaagcagaaatagt

SEQ ID NO: 210778 - DNA, 33 bp, Homo sapien
ctatagaagagagtaatgtaaagcagaaatagt

SEQ ID NO: 210779 - DNA, 33 bp, Homo sapien
gaaagtattcattataaattggaagtacagaat

SEQ ID NO: 210780 - DNA, 33 bp, Homo sapien
gaaagtattcattatacattggaagtacagaat

SEQ ID NO: 210781 - DNA, 33 bp, Homo sapien
acgtttttcctatgaacaagacattctccaaat

SEQ ID NO: 210782 - DNA, 33 bp, Homo sapien
acgtttttcctatgaataagacattctccaaat

SEQ ID NO: 210783 - DNA, 33 bp, Homo sapien
ggacacaccaccaaaaatgtttaatctgaatct

SEQ ID NO: 210784 - DNA, 33 bp, Homo sapien
ggacacaccaccaaaactgtttaatctgaatct

SEQ ID NO: 210785 - DNA, 33 bp, Homo sapien
ttcacactataaaacaccaacaggcatatgata

SEQ ID NO: 210786 - DNA, 33 bp, Homo sapien
ttcacactataaaacatcaacaggcatatgata

SEQ ID NO: 210787 - DNA, 33 bp, Homo sapien
atcaccaataacagggcaaactgatatcatatg

SEQ ID NO: 210788 - DNA, 33 bp, Homo sapien
atcaccaataacaggggaaactgatatcatatg

SEQ ID NO: 210789 - DNA, 33 bp, Homo sapien
cactgctaaagatcccagagtcactccatgtcc

SEQ ID NO: 210790 - DNA, 33 bp, Homo sapien
cactgctaaagatcccggagtcactccatgtcc

SEQ ID NO: 210791 - DNA, 33 bp, Homo sapien
tggcttaagactaagacaatctgacacatccat

SEQ ID NO: 210792 - DNA, 33 bp, Homo sapien
tggcttaagactaagataatctgacacatccat

SEQ ID NO: 210793 - DNA, 33 bp, Homo sapien
ggcataatctctttctgaaaccatacaggtttt

SEQ ID NO: 210794 - DNA, 33 bp, Homo sapien
ggcataatctctttcttaaaccatacaggtttt

SEQ ID NO: 210795 - DNA, 33 bp, Homo sapien
tatgcttttgggcatcccctattgcacttaggt

SEQ ID NO: 210796 - DNA, 33 bp, Homo sapien
tatgcttttgggcatctcctattgcacttaggt

SEQ ID NO: 210797 - DNA, 33 bp, Homo sapien
acttaccattgcactacaatttgtctacagtat

SEQ ID NO: 210798 - DNA, 33 bp, Homo sapien
acttaccattgcactataatttgtctacagtat

SEQ ID NO: 210799 - DNA, 33 bp, Homo sapien
aataaacagggaatacagtagacaccagttatc

SEQ ID NO: 210800 - DNA, 33 bp, Homo sapien
aataaacagggaatacggtagacaccagttatc

SEQ ID NO: 210801 - DNA, 33 bp, Homo sapien
cttagtggaacccttcaagcgacactggcctag

SEQ ID NO: 210802 - DNA, 33 bp, Homo sapien
cttagtggaacccttcgagcgacactggcctag

SEQ ID NO: 210803 - DNA, 33 bp, Homo sapien
tttttatatactgaaaactagcccctatcaatt

SEQ ID NO: 210804 - DNA, 33 bp, Homo sapien
tttttatatactgaaatctagcccctatcaatt

SEQ ID NO: 210805 - DNA, 33 bp, Homo sapien
gtcttctaaggcagcagatatacctcagaatct

SEQ ID NO: 210806 - DNA, 33 bp, Homo sapien
gtcttctaaggcagcatatatacctcagaatct

SEQ ID NO: 210807 - DNA, 33 bp, Homo sapien
aattatatggtcagataagatgtcttatactac

SEQ ID NO: 210808 - DNA, 33 bp, Homo sapien
aattatatggtcagattagatgtcttatactac

SEQ ID NO: 210809 - DNA, 33 bp, Homo sapien
cgcccatgtttttcaaagatctactgtatacct

SEQ ID NO: 210810 - DNA, 33 bp, Homo sapien
cgcccatgtttttcaacgatctactgtatacct

SEQ ID NO: 210811 - DNA, 33 bp, Homo sapien
tgatgtttgaagataaataagcaagccattcct

SEQ ID NO: 210812 - DNA, 33 bp, Homo sapien
tgatgtttgaagataagtaagcaagccattcct

SEQ ID NO: 210813 - DNA, 33 bp, Homo sapien
aaattcacgtttcaacaagcggtgtcaggaacc

SEQ ID NO: 210814 - DNA, 33 bp, Homo sapien
aaattcacgtttcaacgagcggtgtcaggaacc

SEQ ID NO: 210815 - DNA, 33 bp, Homo sapien
atttgtctacatatataaagttggtggcaaagg

SEQ ID NO: 210816 - DNA, 33 bp, Homo sapien
atttgtctacatatatcaagttggtggcaaagg

SEQ ID NO: 210817 - DNA, 33 bp, Homo sapien
tagactgtgctttagacctagttgttgtcatca

SEQ ID NO: 210818 - DNA, 33 bp, Homo sapien
tagactgtgctttagatctagttgttgtcatca

SEQ ID NO: 210819 - DNA, 33 bp, Homo sapien
taatgcagaaattgtgaaacactatgcaaatga

SEQ ID NO: 210820 - DNA, 33 bp, Homo sapien
taatgcagaaattgtggaacactatgcaaatga

SEQ ID NO: 210821 - DNA, 33 bp, Homo sapien
gaattacttggaactacaatgagacataataag

SEQ ID NO: 210822 - DNA, 33 bp, Homo sapien
gaattacttggaactataatgagacataataag

SEQ ID NO: 210823 - DNA, 33 bp, Homo sapien
ttgtaattcttccttacaaaatctgtgacattc

SEQ ID NO: 210824 - DNA, 33 bp, Homo sapien
ttgtaattcttccttataaaatctgtgacattc

SEQ ID NO: 210825 - DNA, 33 bp, Homo sapien
gcctctcctgttgctaacgatcattgacttttt

SEQ ID NO: 210826 - DNA, 33 bp, Homo sapien
gcctctcctgttgctagcgatcattgacttttt

SEQ ID NO: 210827 - DNA, 33 bp, Homo sapien
ccattttgcatctccgccagcaatgctccacat

SEQ ID NO: 210828 - DNA, 33 bp, Homo sapien
ccattttgcatctccgtcagcaatgctccacat

SEQ ID NO: 210829 - DNA, 33 bp, Homo sapien
tccagaactttgtgtcaaaaagactttattttc

SEQ ID NO: 210830 - DNA, 33 bp, Homo sapien
tccagaactttgtgtcgaaaagactttattttc

SEQ ID NO: 210831 - DNA, 33 bp, Homo sapien
caattgtacacctttcactaactatgaaacata

SEQ ID NO: 210832 - DNA, 33 bp, Homo sapien
caattgtacacctttcgctaactatgaaacata

SEQ ID NO: 210833 - DNA, 33 bp, Homo sapien
atatttccaaataagaacaccttctgacatgag

SEQ ID NO: 210834 - DNA, 33 bp, Homo sapien
atatttccaaataagaccaccttctgacatgag

SEQ ID NO: 210835 - DNA, 33 bp, Homo sapien
tactataaagcaagaaactttctgggtatctct

SEQ ID NO: 210836 - DNA, 33 bp, Homo sapien
tactataaagcaagaagctttctgggtatctct

SEQ ID NO: 210837 - DNA, 33 bp, Homo sapien
agaacattcgctgtgaagtagtatatgctctgg

SEQ ID NO: 210838 - DNA, 33 bp, Homo sapien
agaacattcgctgtgaggtagtatatgctctgg

SEQ ID NO: 210839 - DNA, 33 bp, Homo sapien
ctgttttgttgtctaaatacagctcatctttgc

SEQ ID NO: 210840 - DNA, 33 bp, Homo sapien
ctgttttgttgtctaagtacagctcatctttgc

SEQ ID NO: 210841 - DNA, 33 bp, Homo sapien
gttcgtcagaattaaacgtagacagaaacagct

SEQ ID NO: 210842 - DNA, 33 bp, Homo sapien
gttcgtcagaattaaatgtagacagaaacagct

SEQ ID NO: 210843 - DNA, 33 bp, Homo sapien
aggaggataatttggggatgattcaaatgcatt

SEQ ID NO: 210844 - DNA, 33 bp, Homo sapien
aggaggataatttgggtatgattcaaatgcatt

SEQ ID NO: 210845 - DNA, 33 bp, Homo sapien
agatattagtgcataaagtatgatagttttgtt

SEQ ID NO: 210846 - DNA, 33 bp, Homo sapien
agatattagtgcataaggtatgatagttttgtt

SEQ ID NO: 210847 - DNA, 33 bp, Homo sapien
atgtggttttgctaaaatagaaagattagtttg

SEQ ID NO: 210848 - DNA, 33 bp, Homo sapien
atgtggttttgctaaactagaaagattagtttg

SEQ ID NO: 210849 - DNA, 33 bp, Homo sapien
cctccatagtctgccacgtttctttttcatata

SEQ ID NO: 210850 - DNA, 33 bp, Homo sapien
cctccatagtctgccaggtttctttttcatata

SEQ ID NO: 210851 - DNA, 33 bp, Homo sapien
ataaaaccaaacaaaacgtaagatccattggtt

SEQ ID NO: 210852 - DNA, 33 bp, Homo sapien
ataaaaccaaacaaaatgtaagatccattggtt

SEQ ID NO: 210853 - DNA, 33 bp, Homo sapien
aattttatgcatttacacacgtagttaaacatg

SEQ ID NO: 210854 - DNA, 33 bp, Homo sapien
aattttatgcatttacccacgtagttaaacatg

SEQ ID NO: 210855 - DNA, 33 bp, Homo sapien
taatagcagccgtttaagagtaggtttctaaag

SEQ ID NO: 210856 - DNA, 33 bp, Homo sapien
taatagcagccgtttaggagtaggtttctaaag

SEQ ID NO: 210857 - DNA, 33 bp, Homo sapien
gtgcggttttatgtaacgagaatctgttcagat

SEQ ID NO: 210858 - DNA, 33 bp, Homo sapien
gtgcggttttatgtaatgagaatctgttcagat

SEQ ID NO: 210859 - DNA, 33 bp, Homo sapien
ggctaaaacttcatcaaaaaaaatctttgaggt

SEQ ID NO: 210860 - DNA, 33 bp, Homo sapien
ggctaaaacttcatcagaaaaaatctttgaggt

SEQ ID NO: 210861 - DNA, 33 bp, Homo sapien
tctaacagatcatccaaactaaaaacccctacg

SEQ ID NO: 210862 - DNA, 33 bp, Homo sapien
tctaacagatcatccagactaaaaacccctacg

SEQ ID NO: 210863 - DNA, 33 bp, Homo sapien
gtccacccagtttacacatctatctcaaacaat

SEQ ID NO: 210864 - DNA, 33 bp, Homo sapien
gtccacccagtttacatatctatctcaaacaat

SEQ ID NO: 210865 - DNA, 33 bp, Homo sapien
attacacatctgtttacaggagcatgtagtctt

SEQ ID NO: 210866 - DNA, 33 bp, Homo sapien
attacacatctgtttataggagcatgtagtctt

SEQ ID NO: 210867 - DNA, 33 bp, Homo sapien
agaacatggtcttacaaagtgagggtgtggcag

SEQ ID NO: 210868 - DNA, 33 bp, Homo sapien
agaacatggtcttacacagtgagggtgtggcag

SEQ ID NO: 210869 - DNA, 33 bp, Homo sapien
ctgattgagttttctacatgtttcagatagtct

SEQ ID NO: 210870 - DNA, 33 bp, Homo sapien
ctgattgagttttctatatgtttcagatagtct

SEQ ID NO: 210871 - DNA, 33 bp, Homo sapien
ggcagtggatccaagagagcagtgggaactgta

SEQ ID NO: 210872 - DNA, 33 bp, Homo sapien
ggcagtggatccaagatagcagtgggaactgta

SEQ ID NO: 210873 - DNA, 33 bp, Homo sapien
gttattcctgctatcacgaaaagagccctggac

SEQ ID NO: 210874 - DNA, 33 bp, Homo sapien
gttattcctgctatcatgaaaagagccctggac

SEQ ID NO: 210875 - DNA, 33 bp, Homo sapien
aaatttgggggacctactaagaattataaagag

SEQ ID NO: 210876 - DNA, 33 bp, Homo sapien
aaatttgggggacctattaagaattataaagag

SEQ ID NO: 210877 - DNA, 33 bp, Homo sapien
caaaatgtgcaatgaacgtttatgctcatattt

SEQ ID NO: 210878 - DNA, 33 bp, Homo sapien
caaaatgtgcaatgaatgtttatgctcatattt

SEQ ID NO: 210879 - DNA, 33 bp, Homo sapien
gtagtgcagatgaaagcctccgtataaattagg

SEQ ID NO: 210880 - DNA, 33 bp, Homo sapien
gtagtgcagatgaaaggctccgtataaattagg

SEQ ID NO: 210881 - DNA, 33 bp, Homo sapien
tagctcttcttgaagcaaaactaacattagtga

SEQ ID NO: 210882 - DNA, 33 bp, Homo sapien
tagctcttcttgaagcgaaactaacattagtga

SEQ ID NO: 210883 - DNA, 33 bp, Homo sapien
tttatgcttatatttcccaccactaacctaacc

SEQ ID NO: 210884 - DNA, 33 bp, Homo sapien
tttatgcttatatttctcaccactaacctaacc

SEQ ID NO: 210885 - DNA, 33 bp, Homo sapien
ttgatgcaaacacaataaaaattaagtacttag

SEQ ID NO: 210886 - DNA, 33 bp, Homo sapien
ttgatgcaaacacaatgaaaattaagtacttag

SEQ ID NO: 210887 - DNA, 33 bp, Homo sapien
agactaggtatggaaaaagactaattcactggc

SEQ ID NO: 210888 - DNA, 33 bp, Homo sapien
agactaggtatggaaagagactaattcactggc

SEQ ID NO: 210889 - DNA, 33 bp, Homo sapien
tcccactgtacatttcacttccaactgccctag

SEQ ID NO: 210890 - DNA, 33 bp, Homo sapien
tcccactgtacatttcgcttccaactgccctag

SEQ ID NO: 210891 - DNA, 33 bp, Homo sapien
tctaaacagctttattaaacattgattgacatt

SEQ ID NO: 210892 - DNA, 33 bp, Homo sapien
tctaaacagctttattcaacattgattgacatt

SEQ ID NO: 210893 - DNA, 33 bp, Homo sapien
ttctgagattcatagacgttgtagtatgtatca

SEQ ID NO: 210894 - DNA, 33 bp, Homo sapien
ttctgagattcatagatgttgtagtatgtatca

SEQ ID NO: 210895 - DNA, 33 bp, Homo sapien
agggttgctattcaaagaatgttgatatgcatg

SEQ ID NO: 210896 - DNA, 33 bp, Homo sapien
agggttgctattcaaataatgttgatatgcatg

SEQ ID NO: 210897 - DNA, 33 bp, Homo sapien
tattgatctatactctaaaaccattgtactaaa

SEQ ID NO: 210898 - DNA, 33 bp, Homo sapien
tattgatctatactctgaaaccattgtactaaa

SEQ ID NO: 210899 - DNA, 33 bp, Homo sapien
gttacagccctaatcaagtctgcaaatcatgcc

SEQ ID NO: 210900 - DNA, 33 bp, Homo sapien
gttacagccctaatcatgtctgcaaatcatgcc

SEQ ID NO: 210901 - DNA, 33 bp, Homo sapien
catgtgaatattaggaagacatgaacattcaga

SEQ ID NO: 210902 - DNA, 33 bp, Homo sapien
catgtgaatattaggaggacatgaacattcaga

SEQ ID NO: 210903 - DNA, 33 bp, Homo sapien
attaagaatgagaagccgaatcttgtctaaaac

SEQ ID NO: 210904 - DNA, 33 bp, Homo sapien
attaagaatgagaagctgaatcttgtctaaaac

SEQ ID NO: 210905 - DNA, 33 bp, Homo sapien
tgccttagccagagacactgatgaaatattttc

SEQ ID NO: 210906 - DNA, 33 bp, Homo sapien
tgccttagccagagacgctgatgaaatattttc

SEQ ID NO: 210907 - DNA, 33 bp, Homo sapien
ttgcagcgttatacacaatagccaatatatgga

SEQ ID NO: 210908 - DNA, 33 bp, Homo sapien
ttgcagcgttatacaccatagccaatatatgga

SEQ ID NO: 210909 - DNA, 33 bp, Homo sapien
taggtttaatgtataaatgtaacaatgcagtat

SEQ ID NO: 210910 - DNA, 33 bp, Homo sapien
taggtttaatgtataagtgtaacaatgcagtat

SEQ ID NO: 210911 - DNA, 33 bp, Homo sapien
gttttcattactgcttaaaattatttctgttgt

SEQ ID NO: 210912 - DNA, 33 bp, Homo sapien
gttttcattactgcttgaaattatttctgttgt

SEQ ID NO: 210913 - DNA, 33 bp, Homo sapien
tacaagtaacaactcaatctagtacctagtaat

SEQ ID NO: 210914 - DNA, 33 bp, Homo sapien
tacaagtaacaactcagtctagtacctagtaat

SEQ ID NO: 210915 - DNA, 33 bp, Homo sapien
ttatcagggccataaacacaaggtcaccaatga

SEQ ID NO: 210916 - DNA, 33 bp, Homo sapien
ttatcagggccataaagacaaggtcaccaatga

SEQ ID NO: 210917 - DNA, 33 bp, Homo sapien
ctaaatctgattcttacgataacttttcactgg

SEQ ID NO: 210918 - DNA, 33 bp, Homo sapien
ctaaatctgattcttaggataacttttcactgg

SEQ ID NO: 210919 - DNA, 33 bp, Homo sapien
tgggaaatatgtaataaaaaggttgttgtaggc

SEQ ID NO: 210920 - DNA, 33 bp, Homo sapien
tgggaaatatgtaatagaaaggttgttgtaggc

SEQ ID NO: 210921 - DNA, 33 bp, Homo sapien
atcaccattattatcaacatcatcattctcttc

SEQ ID NO: 210922 - DNA, 33 bp, Homo sapien
atcaccattattatcaccatcatcattctcttc

SEQ ID NO: 210923 - DNA, 33 bp, Homo sapien
gcttgatgtaagaggaccattttataattagcg

SEQ ID NO: 210924 - DNA, 33 bp, Homo sapien
gcttgatgtaagaggagcattttataattagcg

SEQ ID NO: 210925 - DNA, 33 bp, Homo sapien
accttgttaatatgtaccaattggacagaccca

SEQ ID NO: 210926 - DNA, 33 bp, Homo sapien
accttgttaatatgtatcaattggacagaccca

SEQ ID NO: 210927 - DNA, 33 bp, Homo sapien
tttccctgtatgagaacgtacatatgtgtgtac

SEQ ID NO: 210928 - DNA, 33 bp, Homo sapien
tttccctgtatgagaatgtacatatgtgtgtac

SEQ ID NO: 210929 - DNA, 33 bp, Homo sapien
ttattagtatgtaataagagaaagcaggaatga

SEQ ID NO: 210930 - DNA, 33 bp, Homo sapien
ttattagtatgtaataggagaaagcaggaatga

SEQ ID NO: 210931 - DNA, 33 bp, Homo sapien
tcttatagattctgcacattggaccattgtcaa

SEQ ID NO: 210932 - DNA, 33 bp, Homo sapien
tcttatagattctgcatattggaccattgtcaa

SEQ ID NO: 210933 - DNA, 33 bp, Homo sapien
agatattcattgtgacaaatatgatacaaaatc

SEQ ID NO: 210934 - DNA, 33 bp, Homo sapien
agatattcattgtgacgaatatgatacaaaatc

SEQ ID NO: 210935 - DNA, 33 bp, Homo sapien
acatacagaaagaaaaaagttcattgtggcctt

SEQ ID NO: 210936 - DNA, 33 bp, Homo sapien
acatacagaaagaaaagagttcattgtggcctt

SEQ ID NO: 210937 - DNA, 33 bp, Homo sapien
gttattcctgaagtccgaagttagctttttaaa

SEQ ID NO: 210938 - DNA, 33 bp, Homo sapien
gttattcctgaagtcctaagttagctttttaaa

SEQ ID NO: 210939 - DNA, 33 bp, Homo sapien
tttggtaagcaactccaaattttccagacataa

SEQ ID NO: 210940 - DNA, 33 bp, Homo sapien
tttggtaagcaactcccaattttccagacataa

SEQ ID NO: 210941 - DNA, 33 bp, Homo sapien
atatgcaaagtaatgacgattatgttaaaccaa

SEQ ID NO: 210942 - DNA, 33 bp, Homo sapien
atatgcaaagtaatgatgattatgttaaaccaa

SEQ ID NO: 210943 - DNA, 33 bp, Homo sapien
taaccaagagtttttcaccatttcataaaatca

SEQ ID NO: 210944 - DNA, 33 bp, Homo sapien
taaccaagagtttttcgccatttcataaaatca

SEQ ID NO: 210945 - DNA, 33 bp, Homo sapien
cagggccaagagaaaaagtagtcagagtgaggg

SEQ ID NO: 210946 - DNA, 33 bp, Homo sapien
cagggccaagagaaaaggtagtcagagtgaggg

SEQ ID NO: 210947 - DNA, 33 bp, Homo sapien
ttatgcgtttgtgtaccatactttgcttagttc

SEQ ID NO: 210948 - DNA, 33 bp, Homo sapien
ttatgcgtttgtgtactatactttgcttagttc

SEQ ID NO: 210949 - DNA, 33 bp, Homo sapien
ttgaatttgaaggactaaagaaatgatgcagct

SEQ ID NO: 210950 - DNA, 33 bp, Homo sapien
ttgaatttgaaggacttaagaaatgatgcagct

SEQ ID NO: 210951 - DNA, 33 bp, Homo sapien
tatctcatatgtacccaaaacgaatatgtattc

SEQ ID NO: 210952 - DNA, 33 bp, Homo sapien
tatctcatatgtacccgaaacgaatatgtattc

SEQ ID NO: 210953 - DNA, 33 bp, Homo sapien
tggctatcataacaacagtgaaacagaaaatgt

SEQ ID NO: 210954 - DNA, 33 bp, Homo sapien
tggctatcataacaaccgtgaaacagaaaatgt

SEQ ID NO: 210955 - DNA, 33 bp, Homo sapien
gattgtattaaaagcaaggttatctgacataat

SEQ ID NO: 210956 - DNA, 33 bp, Homo sapien
gattgtattaaaagcacggttatctgacataat

SEQ ID NO: 210957 - DNA, 33 bp, Homo sapien
agatgtgaggttatgcaagagtaatgccagtgc

SEQ ID NO: 210958 - DNA, 33 bp, Homo sapien
agatgtgaggttatgcgagagtaatgccagtgc

SEQ ID NO: 210959 - DNA, 33 bp, Homo sapien
ccagctagtgtaagagcctcctatgattcttag

SEQ ID NO: 210960 - DNA, 33 bp, Homo sapien
ccagctagtgtaagaggctcctatgattcttag

SEQ ID NO: 210961 - DNA, 33 bp, Homo sapien
tttcacttgcactaacaaagacaagtgaagaca

SEQ ID NO: 210962 - DNA, 33 bp, Homo sapien
tttcacttgcactaacgaagacaagtgaagaca

SEQ ID NO: 210963 - DNA, 33 bp, Homo sapien
tatttgtgggcttgaactggtcagtaagcattc

SEQ ID NO: 210964 - DNA, 33 bp, Homo sapien
tatttgtgggcttgaattggtcagtaagcattc

SEQ ID NO: 210965 - DNA, 33 bp, Homo sapien
cagtcaggtaattacacaaactagcaatccagg

SEQ ID NO: 210966 - DNA, 33 bp, Homo sapien
cagtcaggtaattacagaaactagcaatccagg

SEQ ID NO: 210967 - DNA, 33 bp, Homo sapien
ttgcaacacagagctggaaaggataagaaatac

SEQ ID NO: 210968 - DNA, 33 bp, Homo sapien
ttgcaacacagagctgtaaaggataagaaatac

SEQ ID NO: 210969 - DNA, 33 bp, Homo sapien
acttattgatggtatacgctgaagcacaaaagt

SEQ ID NO: 210970 - DNA, 33 bp, Homo sapien
acttattgatggtatatgctgaagcacaaaagt

SEQ ID NO: 210971 - DNA, 33 bp, Homo sapien
gcaatgaatgacaacaagaatggattgtaaaac

SEQ ID NO: 210972 - DNA, 33 bp, Homo sapien
gcaatgaatgacaacacgaatggattgtaaaac

SEQ ID NO: 210973 - DNA, 33 bp, Homo sapien
atataagaaatttggaaaacacctgtaagatac

SEQ ID NO: 210974 - DNA, 33 bp, Homo sapien
atataagaaatttggagaacacctgtaagatac

SEQ ID NO: 210975 - DNA, 33 bp, Homo sapien
acctaaatggtgaccacgaagtgtgataagctc

SEQ ID NO: 210976 - DNA, 33 bp, Homo sapien
acctaaatggtgaccatgaagtgtgataagctc

SEQ ID NO: 210977 - DNA, 33 bp, Homo sapien
tggggccagaggcttggagagagacccctgggt

SEQ ID NO: 210978 - DNA, 33 bp, Homo sapien
tggggccagaggcttgtagagagacccctgggt

SEQ ID NO: 210979 - DNA, 33 bp, Homo sapien
ggggagtgggggcaccaaattcccttcattgtc

SEQ ID NO: 210980 - DNA, 33 bp, Homo sapien
ggggagtgggggcaccgaattcccttcattgtc

SEQ ID NO: 210981 - DNA, 33 bp, Homo sapien
gtgataggcctccaagaagcacagcaaacaaac

SEQ ID NO: 210982 - DNA, 33 bp, Homo sapien
gtgataggcctccaagcagcacagcaaacaaac

SEQ ID NO: 210983 - DNA, 33 bp, Homo sapien
tgtttaaacttacagagaaaatgatcagtgcaa

SEQ ID NO: 210984 - DNA, 33 bp, Homo sapien
tgtttaaacttacagataaaatgatcagtgcaa

SEQ ID NO: 210985 - DNA, 33 bp, Homo sapien
actattacaaccttggccaaaaatgcttaaaaa

SEQ ID NO: 210986 - DNA, 33 bp, Homo sapien
actattacaaccttggtcaaaaatgcttaaaaa

SEQ ID NO: 210987 - DNA, 33 bp, Homo sapien
ccagtacaagggcataaccagcacttatttggc

SEQ ID NO: 210988 - DNA, 33 bp, Homo sapien
ccagtacaagggcatagccagcacttatttggc

SEQ ID NO: 210989 - DNA, 33 bp, Homo sapien
atggcctgtttttacacagaaaggtggaggaaa

SEQ ID NO: 210990 - DNA, 33 bp, Homo sapien
atggcctgtttttacatagaaaggtggaggaaa

SEQ ID NO: 210991 - DNA, 33 bp, Homo sapien
aacaacactataactcacctgaccaaagcttac

SEQ ID NO: 210992 - DNA, 33 bp, Homo sapien
aacaacactataactcgcctgaccaaagcttac

SEQ ID NO: 210993 - DNA, 33 bp, Homo sapien
acatagccatgcttgacagcaaaaatgaatata

SEQ ID NO: 210994 - DNA, 33 bp, Homo sapien
acatagccatgcttgagagcaaaaatgaatata

SEQ ID NO: 210995 - DNA, 33 bp, Homo sapien
gaatgaacacaaaggaacaatcactgaagtgtg

SEQ ID NO: 210996 - DNA, 33 bp, Homo sapien
gaatgaacacaaaggagcaatcactgaagtgtg

SEQ ID NO: 210997 - DNA, 33 bp, Homo sapien
tattgccattagttggaaaaatgatgtttaaat

SEQ ID NO: 210998 - DNA, 33 bp, Homo sapien
tattgccattagttgggaaaatgatgtttaaat

SEQ ID NO: 210999 - DNA, 33 bp, Homo sapien
ttcaaattcagtggaaatgaaataaaaagcgta

SEQ ID NO: 211000 - DNA, 33 bp, Homo sapien
ttcaaattcagtggaagtgaaataaaaagcgta

SEQ ID NO: 211001 - DNA, 33 bp, Homo sapien
tgccaccagattccctcactcttcagcttgcag

SEQ ID NO: 211002 - DNA, 33 bp, Homo sapien
tgccaccagattcccttactcttcagcttgcag

SEQ ID NO: 211003 - DNA, 33 bp, Homo sapien
ctacatacaagcataactccagtctccagaggt

SEQ ID NO: 211004 - DNA, 33 bp, Homo sapien
ctacatacaagcataagtccagtctccagaggt

SEQ ID NO: 211005 - DNA, 33 bp, Homo sapien
gattaaaatgaactcaaagaaaacatttcactc

SEQ ID NO: 211006 - DNA, 33 bp, Homo sapien
gattaaaatgaactcagagaaaacatttcactc

SEQ ID NO: 211007 - DNA, 33 bp, Homo sapien
ctttgtcatatcatcaacgcaacctttgttaag

SEQ ID NO: 211008 - DNA, 33 bp, Homo sapien
ctttgtcatatcatcagcgcaacctttgttaag

SEQ ID NO: 211009 - DNA, 33 bp, Homo sapien
tcacaattaacacttgaaaaaagctataaatta

SEQ ID NO: 211010 - DNA, 33 bp, Homo sapien
tcacaattaacacttgcaaaaagctataaatta

SEQ ID NO: 211011 - DNA, 33 bp, Homo sapien
catctacttgttagaacttcagatcctagtcct

SEQ ID NO: 211012 - DNA, 33 bp, Homo sapien
catctacttgttagaatttcagatcctagtcct

SEQ ID NO: 211013 - DNA, 33 bp, Homo sapien
tttatgcagcactttacatttggaaagaggtca

SEQ ID NO: 211014 - DNA, 33 bp, Homo sapien
tttatgcagcactttatatttggaaagaggtca

SEQ ID NO: 211015 - DNA, 33 bp, Homo sapien
ttggccttgaggttgaagttaaagctgggcctg

SEQ ID NO: 211016 - DNA, 33 bp, Homo sapien
ttggccttgaggttgatgttaaagctgggcctg

SEQ ID NO: 211017 - DNA, 33 bp, Homo sapien
agattcacctgacatacaactactcacataaac

SEQ ID NO: 211018 - DNA, 33 bp, Homo sapien
agattcacctgacatataactactcacataaac

SEQ ID NO: 211019 - DNA, 33 bp, Homo sapien
gccatggaaatgtaagaaaacaaagtacaatgt

SEQ ID NO: 211020 - DNA, 33 bp, Homo sapien
gccatggaaatgtaaggaaacaaagtacaatgt

SEQ ID NO: 211021 - DNA, 33 bp, Homo sapien
tattcttccacacagaatcaatttaaggagtta

SEQ ID NO: 211022 - DNA, 33 bp, Homo sapien
tattcttccacacagactcaatttaaggagtta

SEQ ID NO: 211023 - DNA, 33 bp, Homo sapien
tagtgaccagatcacaaggtatttactgatgct

SEQ ID NO: 211024 - DNA, 33 bp, Homo sapien
tagtgaccagatcacagggtatttactgatgct

SEQ ID NO: 211025 - DNA, 33 bp, Homo sapien
aggattggtaagctggaaggttgtgaatggggc

SEQ ID NO: 211026 - DNA, 33 bp, Homo sapien
aggattggtaagctggcaggttgtgaatggggc

SEQ ID NO: 211027 - DNA, 33 bp, Homo sapien
aaagaaaagcataggcaatatctggaagcactg

SEQ ID NO: 211028 - DNA, 33 bp, Homo sapien
aaagaaaagcataggcgatatctggaagcactg

SEQ ID NO: 211029 - DNA, 33 bp, Homo sapien
tctcaccactttgaaccctgctctaaataagtt

SEQ ID NO: 211030 - DNA, 33 bp, Homo sapien
tctcaccactttgaactctgctctaaataagtt

SEQ ID NO: 211031 - DNA, 33 bp, Homo sapien
gtgagtagttgtatatcagaacatggtgcttgc

SEQ ID NO: 211032 - DNA, 33 bp, Homo sapien
gtgagtagttgtatattagaacatggtgcttgc

SEQ ID NO: 211033 - DNA, 33 bp, Homo sapien
agacctgttttcaggcccttgagttgacctaac

SEQ ID NO: 211034 - DNA, 33 bp, Homo sapien
agacctgttttcaggctcttgagttgacctaac

SEQ ID NO: 211035 - DNA, 33 bp, Homo sapien
gcaataggtccattatcacctcctgcttaaaac

SEQ ID NO: 211036 - DNA, 33 bp, Homo sapien
gcaataggtccattattacctcctgcttaaaac

SEQ ID NO: 211037 - DNA, 33 bp, Homo sapien
aagtataagaaattcacgttaaccttagtggag

SEQ ID NO: 211038 - DNA, 33 bp, Homo sapien
aagtataagaaattcatgttaaccttagtggag

SEQ ID NO: 211039 - DNA, 33 bp, Homo sapien
aagttcacgaatataaactacagcaacttacaa

SEQ ID NO: 211040 - DNA, 33 bp, Homo sapien
aagttcacgaatataagctacagcaacttacaa

SEQ ID NO: 211041 - DNA, 33 bp, Homo sapien
atgacacttctctcctcaaagctgtgcgatgtc

SEQ ID NO: 211042 - DNA, 33 bp, Homo sapien
atgacacttctctcctgaaagctgtgcgatgtc

SEQ ID NO: 211043 - DNA, 33 bp, Homo sapien
gtttcctctaaaggacaaatttttgggtgaatt

SEQ ID NO: 211044 - DNA, 33 bp, Homo sapien
gtttcctctaaaggacgaatttttgggtgaatt

SEQ ID NO: 211045 - DNA, 33 bp, Homo sapien
ttacacgatatgattacctacctattgctgccc

SEQ ID NO: 211046 - DNA, 33 bp, Homo sapien
ttacacgatatgattatctacctattgctgccc

SEQ ID NO: 211047 - DNA, 33 bp, Homo sapien
tccctctaactgtgaaatctggttcaggtgttt

SEQ ID NO: 211048 - DNA, 33 bp, Homo sapien
tccctctaactgtgaattctggttcaggtgttt

SEQ ID NO: 211049 - DNA, 33 bp, Homo sapien
cggcctgctctccaaaagattttatgtgtgcat

SEQ ID NO: 211050 - DNA, 33 bp, Homo sapien
cggcctgctctccaaatgattttatgtgtgcat

SEQ ID NO: 211051 - DNA, 33 bp, Homo sapien
cacacatataatggaacctgtacctaatactta

SEQ ID NO: 211052 - DNA, 33 bp, Homo sapien
cacacatataatggaatctgtacctaatactta

SEQ ID NO: 211053 - DNA, 33 bp, Homo sapien
cattgaatgaggctagcatctaataccacttta

SEQ ID NO: 211054 - DNA, 33 bp, Homo sapien
cattgaatgaggctaggatctaataccacttta

SEQ ID NO: 211055 - DNA, 33 bp, Homo sapien
tgacagacaggggtgacattaagatccaggttt

SEQ ID NO: 211056 - DNA, 33 bp, Homo sapien
tgacagacaggggtgatattaagatccaggttt

SEQ ID NO: 211057 - DNA, 33 bp, Homo sapien
ccaagaagtcctagaaacatatgacaagacgga

SEQ ID NO: 211058 - DNA, 33 bp, Homo sapien
ccaagaagtcctagaagcatatgacaagacgga

SEQ ID NO: 211059 - DNA, 33 bp, Homo sapien
gtgtgcacattccgtacctcagttctatcattt

SEQ ID NO: 211060 - DNA, 33 bp, Homo sapien
gtgtgcacattccgtatctcagttctatcattt

SEQ ID NO: 211061 - DNA, 33 bp, Homo sapien
cgcactaagacttaacaacagctacaatgtccg

SEQ ID NO: 211062 - DNA, 33 bp, Homo sapien
cgcactaagacttaacgacagctacaatgtccg

SEQ ID NO: 211063 - DNA, 33 bp, Homo sapien
cttgaggaagcccttcccattgcacagagtcct

SEQ ID NO: 211064 - DNA, 33 bp, Homo sapien
cttgaggaagcccttctcattgcacagagtcct

SEQ ID NO: 211065 - DNA, 33 bp, Homo sapien
tcttttccaactttcaaaattttcctgtgtttc

SEQ ID NO: 211066 - DNA, 33 bp, Homo sapien
tcttttccaactttcagaattttcctgtgtttc

SEQ ID NO: 211067 - DNA, 33 bp, Homo sapien
acaaaagcatgacaccaaagaatgtatttatta

SEQ ID NO: 211068 - DNA, 33 bp, Homo sapien
acaaaagcatgacaccgaagaatgtatttatta

SEQ ID NO: 211069 - DNA, 33 bp, Homo sapien
tatgtgttgagtgatacagttccaagcaaagtg

SEQ ID NO: 211070 - DNA, 33 bp, Homo sapien
tatgtgttgagtgatatagttccaagcaaagtg

SEQ ID NO: 211071 - DNA, 33 bp, Homo sapien
ctgtcccttaggataaaaaaacatagagctcca

SEQ ID NO: 211072 - DNA, 33 bp, Homo sapien
ctgtcccttaggataagaaaacatagagctcca

SEQ ID NO: 211073 - DNA, 33 bp, Homo sapien
gcaagtaacaaaactacggattcaaaaagtgtt

SEQ ID NO: 211074 - DNA, 33 bp, Homo sapien
gcaagtaacaaaactatggattcaaaaagtgtt

SEQ ID NO: 211075 - DNA, 33 bp, Homo sapien
ggagaactttgagaaccatctgatatccctact

SEQ ID NO: 211076 - DNA, 33 bp, Homo sapien
ggagaactttgagaactatctgatatccctact

SEQ ID NO: 211077 - DNA, 33 bp, Homo sapien
aaggagacaaatgtgaaagagaagtacagtcag

SEQ ID NO: 211078 - DNA, 33 bp, Homo sapien
aaggagacaaatgtgagagagaagtacagtcag

SEQ ID NO: 211079 - DNA, 33 bp, Homo sapien
gtttggttgaccaagcacaaatcctgtaccgga

SEQ ID NO: 211080 - DNA, 33 bp, Homo sapien
gtttggttgaccaagcgcaaatcctgtaccgga

SEQ ID NO: 211081 - DNA, 33 bp, Homo sapien
aagttatactaagaaaacccatctaactgtgga

SEQ ID NO: 211082 - DNA, 33 bp, Homo sapien
aagttatactaagaaagcccatctaactgtgga

SEQ ID NO: 211083 - DNA, 33 bp, Homo sapien
caaaaaaagttggaggaaaatgcagggtgttac

SEQ ID NO: 211084 - DNA, 33 bp, Homo sapien
caaaaaaagttggagggaaatgcagggtgttac

SEQ ID NO: 211085 - DNA, 33 bp, Homo sapien
aatgtcaatcaatgaaagaatacaaaaatgtga

SEQ ID NO: 211086 - DNA, 33 bp, Homo sapien
aatgtcaatcaatgaatgaatacaaaaatgtga

SEQ ID NO: 211087 - DNA, 33 bp, Homo sapien
tgcttccttcactaccaacaagttttatgagaa

SEQ ID NO: 211088 - DNA, 33 bp, Homo sapien
tgcttccttcactaccgacaagttttatgagaa

SEQ ID NO: 211089 - DNA, 33 bp, Homo sapien
gatatgtacaaagtgacaataggtaaggttaca

SEQ ID NO: 211090 - DNA, 33 bp, Homo sapien
gatatgtacaaagtgagaataggtaaggttaca

SEQ ID NO: 211091 - DNA, 33 bp, Homo sapien
caacataattcaattacacaaacatttatgaat

SEQ ID NO: 211092 - DNA, 33 bp, Homo sapien
caacataattcaattagacaaacatttatgaat

SEQ ID NO: 211093 - DNA, 33 bp, Homo sapien
tcccatattttgatgacaatgaacatataactg

SEQ ID NO: 211094 - DNA, 33 bp, Homo sapien
tcccatattttgatgagaatgaacatataactg

SEQ ID NO: 211095 - DNA, 33 bp, Homo sapien
ttggaaatatgggaaaaggtggtataatgaagc

SEQ ID NO: 211096 - DNA, 33 bp, Homo sapien
ttggaaatatgggaaagggtggtataatgaagc

SEQ ID NO: 211097 - DNA, 33 bp, Homo sapien
gccgggtggctaaaaacgaggaataagccgaga

SEQ ID NO: 211098 - DNA, 33 bp, Homo sapien
gccgggtggctaaaaatgaggaataagccgaga

SEQ ID NO: 211099 - DNA, 33 bp, Homo sapien
ggtagaatagcaagaagtgggtctttttctctt

SEQ ID NO: 211100 - DNA, 33 bp, Homo sapien
ggtagaatagcaagaattgggtctttttctctt

SEQ ID NO: 211101 - DNA, 33 bp, Homo sapien
taaacaatgtattcacagaatgtaaaggtcaac

SEQ ID NO: 211102 - DNA, 33 bp, Homo sapien
taaacaatgtattcacggaatgtaaaggtcaac

SEQ ID NO: 211103 - DNA, 33 bp, Homo sapien
gactttctagaatattcaaggtagaggtctcca

SEQ ID NO: 211104 - DNA, 33 bp, Homo sapien
gactttctagaatattgaaggtagaggtctcca

SEQ ID NO: 211105 - DNA, 33 bp, Homo sapien
aaacaggagctcagagaagtgttatcttagcag

SEQ ID NO: 211106 - DNA, 33 bp, Homo sapien
aaacaggagctcagaggagtgttatcttagcag

SEQ ID NO: 211107 - DNA, 33 bp, Homo sapien
tacctctcttctgaaactgaaatacagccactt

SEQ ID NO: 211108 - DNA, 33 bp, Homo sapien
tacctctcttctgaaagtgaaatacagccactt

SEQ ID NO: 211109 - DNA, 33 bp, Homo sapien
gtgtgatttgtcctcacagcagacagctgaaga

SEQ ID NO: 211110 - DNA, 33 bp, Homo sapien
gtgtgatttgtcctcatagcagacagctgaaga

SEQ ID NO: 211111 - DNA, 33 bp, Homo sapien
cccagtacttgacaaaaagtaggcattcagtaa

SEQ ID NO: 211112 - DNA, 33 bp, Homo sapien
cccagtacttgacaaagagtaggcattcagtaa

SEQ ID NO: 211113 - DNA, 33 bp, Homo sapien
gattatccagtattaaagggcaaaataccatat

SEQ ID NO: 211114 - DNA, 33 bp, Homo sapien
gattatccagtattaaggggcaaaataccatat

SEQ ID NO: 211115 - DNA, 33 bp, Homo sapien
ctttcagtaattaatgaatcaggcagaaaaaga

SEQ ID NO: 211116 - DNA, 33 bp, Homo sapien
ctttcagtaattaatggatcaggcagaaaaaga

SEQ ID NO: 211117 - DNA, 33 bp, Homo sapien
ccacattagataccatcatatagccactaatga

SEQ ID NO: 211118 - DNA, 33 bp, Homo sapien
ccacattagataccattatatagccactaatga

SEQ ID NO: 211119 - DNA, 33 bp, Homo sapien
ttgtgtatttttggcaaccttgtgaagtggtat

SEQ ID NO: 211120 - DNA, 33 bp, Homo sapien
ttgtgtatttttggcacccttgtgaagtggtat

SEQ ID NO: 211121 - DNA, 33 bp, Homo sapien
tgagattgaatggatacatatttttgttgttgt

SEQ ID NO: 211122 - DNA, 33 bp, Homo sapien
tgagattgaatggatatatatttttgttgttgt

SEQ ID NO: 211123 - DNA, 33 bp, Homo sapien
gattaaaattagaaatcagtgatagaaagacaa

SEQ ID NO: 211124 - DNA, 33 bp, Homo sapien
gattaaaattagaaatgagtgatagaaagacaa

SEQ ID NO: 211125 - DNA, 33 bp, Homo sapien
aatttcaggtgcattaagttaagtgaataaaac

SEQ ID NO: 211126 - DNA, 33 bp, Homo sapien
aatttcaggtgcattatgttaagtgaataaaac

SEQ ID NO: 211127 - DNA, 33 bp, Homo sapien
tgaggtgtaatctaaccagtagacaaatggcat

SEQ ID NO: 211128 - DNA, 33 bp, Homo sapien
tgaggtgtaatctaactagtagacaaatggcat

SEQ ID NO: 211129 - DNA, 33 bp, Homo sapien
tgaactcccagaaaaccgcaggatccctacaga

SEQ ID NO: 211130 - DNA, 33 bp, Homo sapien
tgaactcccagaaaactgcaggatccctacaga

SEQ ID NO: 211131 - DNA, 33 bp, Homo sapien
aattcaaactttaagcagaggactaacatgata

SEQ ID NO: 211132 - DNA, 33 bp, Homo sapien
aattcaaactttaagcggaggactaacatgata

SEQ ID NO: 211133 - DNA, 33 bp, Homo sapien
tatgagtgggaagaatgaacaacaaacgtatta

SEQ ID NO: 211134 - DNA, 33 bp, Homo sapien
tatgagtgggaagaattaacaacaaacgtatta

SEQ ID NO: 211135 - DNA, 33 bp, Homo sapien
ctgaggggtcttgagacgaatgattatcctggg

SEQ ID NO: 211136 - DNA, 33 bp, Homo sapien
ctgaggggtcttgagatgaatgattatcctggg

SEQ ID NO: 211137 - DNA, 33 bp, Homo sapien
ccagatattttcaacccatggttcattgaatcc

SEQ ID NO: 211138 - DNA, 33 bp, Homo sapien
ccagatattttcaaccgatggttcattgaatcc

SEQ ID NO: 211139 - DNA, 33 bp, Homo sapien
tgaacggccttgatcaactcagctttctgtgcc

SEQ ID NO: 211140 - DNA, 33 bp, Homo sapien
tgaacggccttgatcagctcagctttctgtgcc

SEQ ID NO: 211141 - DNA, 33 bp, Homo sapien
tttgactcatgctacaatggtccccgttaagga

SEQ ID NO: 211142 - DNA, 33 bp, Homo sapien
tttgactcatgctacagtggtccccgttaagga

SEQ ID NO: 211143 - DNA, 33 bp, Homo sapien
tagaaaatcattttgcacatcaatacaaaatgg

SEQ ID NO: 211144 - DNA, 33 bp, Homo sapien
tagaaaatcattttgcgcatcaatacaaaatgg

SEQ ID NO: 211145 - DNA, 33 bp, Homo sapien
tttaatgcaatttagaatatgtcacactcctgc

SEQ ID NO: 211146 - DNA, 33 bp, Homo sapien
tttaatgcaatttagattatgtcacactcctgc

SEQ ID NO: 211147 - DNA, 33 bp, Homo sapien
agtccactgtgtcaaagaaaatctctgatttct

SEQ ID NO: 211148 - DNA, 33 bp, Homo sapien
agtccactgtgtcaaataaaatctctgatttct

SEQ ID NO: 211149 - DNA, 33 bp, Homo sapien
aaaatagaaacaatagacaatgagaactacttg

SEQ ID NO: 211150 - DNA, 33 bp, Homo sapien
aaaatagaaacaataggcaatgagaactacttg

SEQ ID NO: 211151 - DNA, 33 bp, Homo sapien
atgagaactacttgaggctagagagaaggatgg

SEQ ID NO: 211152 - DNA, 33 bp, Homo sapien
atgagaactacttgagtctagagagaaggatgg

SEQ ID NO: 211153 - DNA, 33 bp, Homo sapien
ataattctaatctcaccctcctactcccacaag

SEQ ID NO: 211154 - DNA, 33 bp, Homo sapien
ataattctaatctcactctcctactcccacaag

SEQ ID NO: 211155 - DNA, 33 bp, Homo sapien
taaatatattgcaaaaaaggacacctatttata

SEQ ID NO: 211156 - DNA, 33 bp, Homo sapien
taaatatattgcaaaacaggacacctatttata

SEQ ID NO: 211157 - DNA, 33 bp, Homo sapien
tgagatctaacaagacaacactttgcttcttgt

SEQ ID NO: 211158 - DNA, 33 bp, Homo sapien
tgagatctaacaagacgacactttgcttcttgt

SEQ ID NO: 211159 - DNA, 33 bp, Homo sapien
attggttccaagacaccgcctacctacatcaca

SEQ ID NO: 211160 - DNA, 33 bp, Homo sapien
attggttccaagacactgcctacctacatcaca

SEQ ID NO: 211161 - DNA, 33 bp, Homo sapien
gatggtattaagtgaactagcgtttaaattaca

SEQ ID NO: 211162 - DNA, 33 bp, Homo sapien
gatggtattaagtgaattagcgtttaaattaca

SEQ ID NO: 211163 - DNA, 33 bp, Homo sapien
ctgtaaagctgtcagaaggtattgttaaatatc

SEQ ID NO: 211164 - DNA, 33 bp, Homo sapien
ctgtaaagctgtcagatggtattgttaaatatc

SEQ ID NO: 211165 - DNA, 33 bp, Homo sapien
aagacctagcctaccactggacttactacctga

SEQ ID NO: 211166 - DNA, 33 bp, Homo sapien
aagacctagcctaccattggacttactacctga

SEQ ID NO: 211167 - DNA, 33 bp, Homo sapien
gtttacaaagatgttaagtaagattctggagag

SEQ ID NO: 211168 - DNA, 33 bp, Homo sapien
gtttacaaagatgttaggtaagattctggagag

SEQ ID NO: 211169 - DNA, 33 bp, Homo sapien
tgttaaaatgtctctactacccaagtaatctaa

SEQ ID NO: 211170 - DNA, 33 bp, Homo sapien
tgttaaaatgtctctattacccaagtaatctaa

SEQ ID NO: 211171 - DNA, 33 bp, Homo sapien
tcttaaaggcttactgaattttgttagaacaaa

SEQ ID NO: 211172 - DNA, 33 bp, Homo sapien
tcttaaaggcttactgcattttgttagaacaaa

SEQ ID NO: 211173 - DNA, 33 bp, Homo sapien
ctaacagcacctgttcacattttctaagggcct

SEQ ID NO: 211174 - DNA, 33 bp, Homo sapien
ctaacagcacctgttcgcattttctaagggcct

SEQ ID NO: 211175 - DNA, 33 bp, Homo sapien
aacaactcagatgggaagaaggctcttaatact

SEQ ID NO: 211176 - DNA, 33 bp, Homo sapien
aacaactcagatgggaggaaggctcttaatact

SEQ ID NO: 211177 - DNA, 33 bp, Homo sapien
atctgcttgaaaaccacacccacagagtcttat

SEQ ID NO: 211178 - DNA, 33 bp, Homo sapien
atctgcttgaaaaccatacccacagagtcttat

SEQ ID NO: 211179 - DNA, 33 bp, Homo sapien
ttgcctagaatgtctcacaattattccagctaa

SEQ ID NO: 211180 - DNA, 33 bp, Homo sapien
ttgcctagaatgtctctcaattattccagctaa

SEQ ID NO: 211181 - DNA, 33 bp, Homo sapien
tcacaaaacataagaactctaactagacacaca

SEQ ID NO: 211182 - DNA, 33 bp, Homo sapien
tcacaaaacataagaattctaactagacacaca

SEQ ID NO: 211183 - DNA, 33 bp, Homo sapien
cgacctatccttggaaataccatggagtcactt

SEQ ID NO: 211184 - DNA, 33 bp, Homo sapien
cgacctatccttggaagtaccatggagtcactt

SEQ ID NO: 211185 - DNA, 33 bp, Homo sapien
tagaactttcacaaaccaagtccagtcaccatg

SEQ ID NO: 211186 - DNA, 33 bp, Homo sapien
tagaactttcacaaactaagtccagtcaccatg

SEQ ID NO: 211187 - DNA, 33 bp, Homo sapien
aatctatggttgacacagtcctaaatcttacta

SEQ ID NO: 211188 - DNA, 33 bp, Homo sapien
aatctatggttgacacggtcctaaatcttacta

SEQ ID NO: 211189 - DNA, 33 bp, Homo sapien
aaaaaaaacagtgagaaaacagtggtaggtgtg

SEQ ID NO: 211190 - DNA, 33 bp, Homo sapien
aaaaaaaacagtgagagaacagtggtaggtgtg

SEQ ID NO: 211191 - DNA, 33 bp, Homo sapien
tagcaatgagaaaaagcacattagcttaagcag

SEQ ID NO: 211192 - DNA, 33 bp, Homo sapien
tagcaatgagaaaaagtacattagcttaagcag

SEQ ID NO: 211193 - DNA, 33 bp, Homo sapien
caagtaatgctaagcaacacatcctcccttcag

SEQ ID NO: 211194 - DNA, 33 bp, Homo sapien
caagtaatgctaagcagcacatcctcccttcag

SEQ ID NO: 211195 - DNA, 33 bp, Homo sapien
tgttagttatgcaaacaaaacaccatttcatga

SEQ ID NO: 211196 - DNA, 33 bp, Homo sapien
tgttagttatgcaaacgaaacaccatttcatga

SEQ ID NO: 211197 - DNA, 33 bp, Homo sapien
ttctcacatgtttagaagagttgaaggcaagca

SEQ ID NO: 211198 - DNA, 33 bp, Homo sapien
ttctcacatgtttagacgagttgaaggcaagca

SEQ ID NO: 211199 - DNA, 33 bp, Homo sapien
ataattctggttgccacgatgaaatgaatcaga

SEQ ID NO: 211200 - DNA, 33 bp, Homo sapien
ataattctggttgccatgatgaaatgaatcaga

SEQ ID NO: 211201 - DNA, 33 bp, Homo sapien
ttgggagggaagagcaatataacctggtaaaaa

SEQ ID NO: 211202 - DNA, 33 bp, Homo sapien
ttgggagggaagagcagtataacctggtaaaaa

SEQ ID NO: 211203 - DNA, 33 bp, Homo sapien
cagtagactaacactcaaaagaaaaagaagcag

SEQ ID NO: 211204 - DNA, 33 bp, Homo sapien
cagtagactaacactcgaaagaaaaagaagcag

SEQ ID NO: 211205 - DNA, 33 bp, Homo sapien
ttcacccattgctataacccaatatccacacct

SEQ ID NO: 211206 - DNA, 33 bp, Homo sapien
ttcacccattgctatatcccaatatccacacct

SEQ ID NO: 211207 - DNA, 33 bp, Homo sapien
gctttaggcctgaaaaactgtaacaaggattgc

SEQ ID NO: 211208 - DNA, 33 bp, Homo sapien
gctttaggcctgaaaacctgtaacaaggattgc

SEQ ID NO: 211209 - DNA, 33 bp, Homo sapien
agtcattgggtattaacagtgtgatttggttta

SEQ ID NO: 211210 - DNA, 33 bp, Homo sapien
agtcattgggtattaatagtgtgatttggttta

SEQ ID NO: 211211 - DNA, 33 bp, Homo sapien
ttaatttggggtataacctacatagccatgact

SEQ ID NO: 211212 - DNA, 33 bp, Homo sapien
ttaatttggggtataatctacatagccatgact

SEQ ID NO: 211213 - DNA, 33 bp, Homo sapien
agagatgagaaaatagacaataatgaacaaatt

SEQ ID NO: 211214 - DNA, 33 bp, Homo sapien
agagatgagaaaatagtcaataatgaacaaatt

SEQ ID NO: 211215 - DNA, 33 bp, Homo sapien
taaaagcagactaaaaaaaagatatttatgtgc

SEQ ID NO: 211216 - DNA, 33 bp, Homo sapien
taaaagcagactaaaagaaagatatttatgtgc

SEQ ID NO: 211217 - DNA, 33 bp, Homo sapien
tttatcttactgtaaaccacaaagtagtttttt

SEQ ID NO: 211218 - DNA, 33 bp, Homo sapien
tttatcttactgtaaagcacaaagtagtttttt

SEQ ID NO: 211219 - DNA, 33 bp, Homo sapien
tttatcagagtagccaatgatttcctaattacc

SEQ ID NO: 211220 - DNA, 33 bp, Homo sapien
tttatcagagtagccagtgatttcctaattacc

SEQ ID NO: 211221 - DNA, 33 bp, Homo sapien
ttgaacacctccattgaattgaagacccctatg

SEQ ID NO: 211222 - DNA, 33 bp, Homo sapien
ttgaacacctccattgcattgaagacccctatg

SEQ ID NO: 211223 - DNA, 33 bp, Homo sapien
atcttaacttattctacgaacagcatttgaact

SEQ ID NO: 211224 - DNA, 33 bp, Homo sapien
atcttaacttattctatgaacagcatttgaact

SEQ ID NO: 211225 - DNA, 33 bp, Homo sapien
atcagtgactttgatgcaagtagcttcaataaa

SEQ ID NO: 211226 - DNA, 33 bp, Homo sapien
atcagtgactttgatgtaagtagcttcaataaa

SEQ ID NO: 211227 - DNA, 33 bp, Homo sapien
ttattgaagcaattaacagtccatattattagc

SEQ ID NO: 211228 - DNA, 33 bp, Homo sapien
ttattgaagcaattaagagtccatattattagc

SEQ ID NO: 211229 - DNA, 33 bp, Homo sapien
ggcttgtcccctgagccctgtctcatattccat

SEQ ID NO: 211230 - DNA, 33 bp, Homo sapien
ggcttgtcccctgagcgctgtctcatattccat

SEQ ID NO: 211231 - DNA, 33 bp, Homo sapien
gaagtcggcaaacaagaagctatttgaaagcta

SEQ ID NO: 211232 - DNA, 33 bp, Homo sapien
gaagtcggcaaacaaggagctatttgaaagcta

SEQ ID NO: 211233 - DNA, 33 bp, Homo sapien
attctgtcttccatcaacatttcctctttgtgt

SEQ ID NO: 211234 - DNA, 33 bp, Homo sapien
attctgtcttccatcagcatttcctctttgtgt

SEQ ID NO: 211235 - DNA, 33 bp, Homo sapien
caaggcccatggttacgactgcctggctaccac

SEQ ID NO: 211236 - DNA, 33 bp, Homo sapien
caaggcccatggttactactgcctggctaccac

SEQ ID NO: 211237 - DNA, 33 bp, Homo sapien
aggatacaaaatcaatgattagtagcatttctg

SEQ ID NO: 211238 - DNA, 33 bp, Homo sapien
aggatacaaaatcaattattagtagcatttctg

SEQ ID NO: 211239 - DNA, 33 bp, Homo sapien
tttgctaggacttccaactttactcttaaataa

SEQ ID NO: 211240 - DNA, 33 bp, Homo sapien
tttgctaggacttccacctttactcttaaataa

SEQ ID NO: 211241 - DNA, 33 bp, Homo sapien
catagaaaattggaaaccttgtacattggcaat

SEQ ID NO: 211242 - DNA, 33 bp, Homo sapien
catagaaaattggaaatcttgtacattggcaat

SEQ ID NO: 211243 - DNA, 33 bp, Homo sapien
tcactgttgttggaaactttcatctaatggcaa

SEQ ID NO: 211244 - DNA, 33 bp, Homo sapien
tcactgttgttggaaattttcatctaatggcaa

SEQ ID NO: 211245 - DNA, 33 bp, Homo sapien
tgagatgaaatctcaactgctcactagtgcaca

SEQ ID NO: 211246 - DNA, 33 bp, Homo sapien
tgagatgaaatctcaagtgctcactagtgcaca

SEQ ID NO: 211247 - DNA, 33 bp, Homo sapien
tagaagtatcattttcccttacagttcaaattg

SEQ ID NO: 211248 - DNA, 33 bp, Homo sapien
tagaagtatcattttctcttacagttcaaattg

SEQ ID NO: 211249 - DNA, 33 bp, Homo sapien
ggaaaataacattgaaaacagactcttgcagga

SEQ ID NO: 211250 - DNA, 33 bp, Homo sapien
ggaaaataacattgaatacagactcttgcagga

SEQ ID NO: 211251 - DNA, 33 bp, Homo sapien
actgagacatggaaaacattgatggttcattaa

SEQ ID NO: 211252 - DNA, 33 bp, Homo sapien
actgagacatggaaaatattgatggttcattaa

SEQ ID NO: 211253 - DNA, 33 bp, Homo sapien
gctgatcattactacccagaccatgttcatgaa

SEQ ID NO: 211254 - DNA, 33 bp, Homo sapien
gctgatcattactacctagaccatgttcatgaa

SEQ ID NO: 211255 - DNA, 33 bp, Homo sapien
ctttcatggacctaaactctgacttgtattcct

SEQ ID NO: 211256 - DNA, 33 bp, Homo sapien
ctttcatggacctaaattctgacttgtattcct

SEQ ID NO: 211257 - DNA, 33 bp, Homo sapien
cagtgtaaaactagaaaagaatactatgattac

SEQ ID NO: 211258 - DNA, 33 bp, Homo sapien
cagtgtaaaactagaagagaatactatgattac

SEQ ID NO: 211259 - DNA, 33 bp, Homo sapien
ctaagttgaagagttaaggaatagtttacggaa

SEQ ID NO: 211260 - DNA, 33 bp, Homo sapien
ctaagttgaagagttacggaatagtttacggaa

SEQ ID NO: 211261 - DNA, 33 bp, Homo sapien
atgtgtgaattaaaagaaaagatacaagcattt

SEQ ID NO: 211262 - DNA, 33 bp, Homo sapien
atgtgtgaattaaaaggaaagatacaagcattt

SEQ ID NO: 211263 - DNA, 33 bp, Homo sapien
atagcagaaaggtttcaaaaatttcctcatttc

SEQ ID NO: 211264 - DNA, 33 bp, Homo sapien
atagcagaaaggtttcgaaaatttcctcatttc

SEQ ID NO: 211265 - DNA, 33 bp, Homo sapien
ctcatttgatgtccagcactttgcccgttgttc

SEQ ID NO: 211266 - DNA, 33 bp, Homo sapien
ctcatttgatgtccagtactttgcccgttgttc

SEQ ID NO: 211267 - DNA, 33 bp, Homo sapien
caatctcatggactctaaaatatctcattaagg

SEQ ID NO: 211268 - DNA, 33 bp, Homo sapien
caatctcatggactctcaaatatctcattaagg

SEQ ID NO: 211269 - DNA, 33 bp, Homo sapien
ctacctcttctagtgcaaaaaagtgggaaaaca

SEQ ID NO: 211270 - DNA, 33 bp, Homo sapien
ctacctcttctagtgcgaaaaagtgggaaaaca

SEQ ID NO: 211271 - DNA, 33 bp, Homo sapien
ggagaagccaagaaatcaaagtatggacagggg

SEQ ID NO: 211272 - DNA, 33 bp, Homo sapien
ggagaagccaagaaatgaaagtatggacagggg

SEQ ID NO: 211273 - DNA, 33 bp, Homo sapien
cttaattgggctgaaaaaaatacagggctggaa

SEQ ID NO: 211274 - DNA, 33 bp, Homo sapien
cttaattgggctgaaacaaatacagggctggaa

SEQ ID NO: 211275 - DNA, 33 bp, Homo sapien
ccgatacttgccaaggaagtcttttccctcaag

SEQ ID NO: 211276 - DNA, 33 bp, Homo sapien
ccgatacttgccaaggcagtcttttccctcaag

SEQ ID NO: 211277 - DNA, 33 bp, Homo sapien
tcttccaagagaaacaataattgagcaagtatc

SEQ ID NO: 211278 - DNA, 33 bp, Homo sapien
tcttccaagagaaacagtaattgagcaagtatc

SEQ ID NO: 211279 - DNA, 33 bp, Homo sapien
ctcatcaaaaaactgggaactcaacataagcta

SEQ ID NO: 211280 - DNA, 33 bp, Homo sapien
ctcatcaaaaaactggtaactcaacataagcta

SEQ ID NO: 211281 - DNA, 33 bp, Homo sapien
tggttatatacaagagaatggaagagttgagtg

SEQ ID NO: 211282 - DNA, 33 bp, Homo sapien
tggttatatacaagagtatggaagagttgagtg

SEQ ID NO: 211283 - DNA, 33 bp, Homo sapien
tgaaaatcttcccaatgagaggcaagagaaaga

SEQ ID NO: 211284 - DNA, 33 bp, Homo sapien
tgaaaatcttcccaattagaggcaagagaaaga

SEQ ID NO: 211285 - DNA, 33 bp, Homo sapien
agtaatttgctgcctacaaacgaagtacttaaa

SEQ ID NO: 211286 - DNA, 33 bp, Homo sapien
agtaatttgctgcctagaaacgaagtacttaaa

SEQ ID NO: 211287 - DNA, 33 bp, Homo sapien
aactgggttttagcaacgcggtagataaaatga

SEQ ID NO: 211288 - DNA, 33 bp, Homo sapien
aactgggttttagcaatgcggtagataaaatga

SEQ ID NO: 211289 - DNA, 33 bp, Homo sapien
agtggtaagaatcacacaaattgatgtttgaat

SEQ ID NO: 211290 - DNA, 33 bp, Homo sapien
agtggtaagaatcacataaattgatgtttgaat

SEQ ID NO: 211291 - DNA, 33 bp, Homo sapien
actgatttcagatttacgcctttcagaactgtg

SEQ ID NO: 211292 - DNA, 33 bp, Homo sapien
actgatttcagatttatgcctttcagaactgtg

SEQ ID NO: 211293 - DNA, 33 bp, Homo sapien
gcagttgtgggtcttaggtccaccactaggata

SEQ ID NO: 211294 - DNA, 33 bp, Homo sapien
gcagttgtgggtcttatgtccaccactaggata

SEQ ID NO: 211295 - DNA, 33 bp, Homo sapien
atgggacaatccaataaagacagaatgacttgc

SEQ ID NO: 211296 - DNA, 33 bp, Homo sapien
atgggacaatccaatagagacagaatgacttgc

SEQ ID NO: 211297 - DNA, 33 bp, Homo sapien
ggagaaaagaaagaaagagtgctactaaagttc

SEQ ID NO: 211298 - DNA, 33 bp, Homo sapien
ggagaaaagaaagaaatagtgctactaaagttc

SEQ ID NO: 211299 - DNA, 33 bp, Homo sapien
tccagcctagggaagaacgcaagaatgtctcaa

SEQ ID NO: 211300 - DNA, 33 bp, Homo sapien
tccagcctagggaagagcgcaagaatgtctcaa

SEQ ID NO: 211301 - DNA, 33 bp, Homo sapien
aaagaatgtatgaaaaagtgattggagaagatg

SEQ ID NO: 211302 - DNA, 33 bp, Homo sapien
aaagaatgtatgaaaacgtgattggagaagatg

SEQ ID NO: 211303 - DNA, 33 bp, Homo sapien
cccattagaatatcagcagaaaccttgtaggcc

SEQ ID NO: 211304 - DNA, 33 bp, Homo sapien
cccattagaatatcagtagaaaccttgtaggcc

SEQ ID NO: 211305 - DNA, 33 bp, Homo sapien
attaagtttagcactaccaaaatatataaaagt

SEQ ID NO: 211306 - DNA, 33 bp, Homo sapien
attaagtttagcactatcaaaatatataaaagt

SEQ ID NO: 211307 - DNA, 33 bp, Homo sapien
aaaatcgatcacaaaagtagaagtaaaacacta

SEQ ID NO: 211308 - DNA, 33 bp, Homo sapien
aaaatcgatcacaaaattagaagtaaaacacta

SEQ ID NO: 211309 - DNA, 33 bp, Homo sapien
acacatccaagaactacggagttatgtaaaaag

SEQ ID NO: 211310 - DNA, 33 bp, Homo sapien
acacatccaagaactatggagttatgtaaaaag

SEQ ID NO: 211311 - DNA, 33 bp, Homo sapien
tttaatgctgtagatcgctctaggtactatgtt

SEQ ID NO: 211312 - DNA, 33 bp, Homo sapien
tttaatgctgtagatctctctaggtactatgtt

SEQ ID NO: 211313 - DNA, 33 bp, Homo sapien
gctcggcggagtaacccggatcttaattgccaa

SEQ ID NO: 211314 - DNA, 33 bp, Homo sapien
gctcggcggagtaacctggatcttaattgccaa

SEQ ID NO: 211315 - DNA, 33 bp, Homo sapien
acgcgttgcataccagaagttggcatttgaatg

SEQ ID NO: 211316 - DNA, 33 bp, Homo sapien
acgcgttgcataccagcagttggcatttgaatg

SEQ ID NO: 211317 - DNA, 33 bp, Homo sapien
ctttcataaaaccgtaagagctaagttatggga

SEQ ID NO: 211318 - DNA, 33 bp, Homo sapien
ctttcataaaaccgtacgagctaagttatggga

SEQ ID NO: 211319 - DNA, 33 bp, Homo sapien
ataacacaaacattggaaattgctgctaagaaa

SEQ ID NO: 211320 - DNA, 33 bp, Homo sapien
ataacacaaacattggtaattgctgctaagaaa

SEQ ID NO: 211321 - DNA, 33 bp, Homo sapien
aaaagtgtacctagtacggttttgatggataga

SEQ ID NO: 211322 - DNA, 33 bp, Homo sapien
aaaagtgtacctagtatggttttgatggataga

SEQ ID NO: 211323 - DNA, 33 bp, Homo sapien
ttttacttgcaatccaacccaaaaggtcaaaag

SEQ ID NO: 211324 - DNA, 33 bp, Homo sapien
ttttacttgcaatccatcccaaaaggtcaaaag

SEQ ID NO: 211325 - DNA, 33 bp, Homo sapien
atactctcatcatcaactcttttgtcagggtgt

SEQ ID NO: 211326 - DNA, 33 bp, Homo sapien
atactctcatcatcaagtcttttgtcagggtgt

SEQ ID NO: 211327 - DNA, 33 bp, Homo sapien
tgtattctttagctccagaatttctgattggtt

SEQ ID NO: 211328 - DNA, 33 bp, Homo sapien
tgtattctttagctcccgaatttctgattggtt

SEQ ID NO: 211329 - DNA, 33 bp, Homo sapien
atacattctttgttgaaatgtagattagtagaa

SEQ ID NO: 211330 - DNA, 33 bp, Homo sapien
atacattctttgttgagatgtagattagtagaa

SEQ ID NO: 211331 - DNA, 33 bp, Homo sapien
tttttagttttttgagaatcttctacagagttt

SEQ ID NO: 211332 - DNA, 33 bp, Homo sapien
tttttagttttttgaggatcttctacagagttt

SEQ ID NO: 211333 - DNA, 33 bp, Homo sapien
caaagtccacagtttacaatcagttcattcttg

SEQ ID NO: 211334 - DNA, 33 bp, Homo sapien
caaagtccacagtttataatcagttcattcttg

SEQ ID NO: 211335 - DNA, 33 bp, Homo sapien
ctagtatatttgagcactgaaattatttcctgg

SEQ ID NO: 211336 - DNA, 33 bp, Homo sapien
ctagtatatttgagcattgaaattatttcctgg

SEQ ID NO: 211337 - DNA, 33 bp, Homo sapien
gaccacacagaaaatacacactttgataaatat

SEQ ID NO: 211338 - DNA, 33 bp, Homo sapien
gaccacacagaaaatagacactttgataaatat

SEQ ID NO: 211339 - DNA, 33 bp, Homo sapien
taaccaaaatgatcaaactgattctatgtacat

SEQ ID NO: 211340 - DNA, 33 bp, Homo sapien
taaccaaaatgatcaatctgattctatgtacat

SEQ ID NO: 211341 - DNA, 33 bp, Homo sapien
acattcagctttttccaacacatgggaatatgc

SEQ ID NO: 211342 - DNA, 33 bp, Homo sapien
acattcagctttttccgacacatgggaatatgc

SEQ ID NO: 211343 - DNA, 33 bp, Homo sapien
catttgagtagaccaactattaagcaatttttc

SEQ ID NO: 211344 - DNA, 33 bp, Homo sapien
catttgagtagaccaattattaagcaatttttc

SEQ ID NO: 211345 - DNA, 33 bp, Homo sapien
gagataggtgactgccacagaactctacccaaa

SEQ ID NO: 211346 - DNA, 33 bp, Homo sapien
gagataggtgactgccgcagaactctacccaaa

SEQ ID NO: 211347 - DNA, 33 bp, Homo sapien
ccactctaacactctccattaaagatcttcatc

SEQ ID NO: 211348 - DNA, 33 bp, Homo sapien
ccactctaacactctctattaaagatcttcatc

SEQ ID NO: 211349 - DNA, 33 bp, Homo sapien
ctctcaatctgtaaaaagactaggaaagcaaaa

SEQ ID NO: 211350 - DNA, 33 bp, Homo sapien
ctctcaatctgtaaaacgactaggaaagcaaaa

SEQ ID NO: 211351 - DNA, 33 bp, Homo sapien
aggtgggatagtgatgcagaaatttcctgttat

SEQ ID NO: 211352 - DNA, 33 bp, Homo sapien
aggtgggatagtgatgtagaaatttcctgttat

SEQ ID NO: 211353 - DNA, 33 bp, Homo sapien
cctataaaaatgaaaactcctaatgaaagataa

SEQ ID NO: 211354 - DNA, 33 bp, Homo sapien
cctataaaaatgaaaagtcctaatgaaagataa

SEQ ID NO: 211355 - DNA, 33 bp, Homo sapien
ctttctcttttatctcccaatttagatatgtag

SEQ ID NO: 211356 - DNA, 33 bp, Homo sapien
ctttctcttttatctctcaatttagatatgtag

SEQ ID NO: 211357 - DNA, 33 bp, Homo sapien
ggacatgagaaaagaacgcctgtatattgataa

SEQ ID NO: 211358 - DNA, 33 bp, Homo sapien
ggacatgagaaaagaatgcctgtatattgataa

SEQ ID NO: 211359 - DNA, 33 bp, Homo sapien
attccaaaagaggctccaacaagaaagcagcct

SEQ ID NO: 211360 - DNA, 33 bp, Homo sapien
attccaaaagaggctctaacaagaaagcagcct

SEQ ID NO: 211361 - DNA, 33 bp, Homo sapien
attgcttatttcaacaatgtcctaacagttcaa

SEQ ID NO: 211362 - DNA, 33 bp, Homo sapien
attgcttatttcaacagtgtcctaacagttcaa

SEQ ID NO: 211363 - DNA, 33 bp, Homo sapien
agcattgggatgttgggaccttaagaggtgatt

SEQ ID NO: 211364 - DNA, 33 bp, Homo sapien
agcattgggatgttggtaccttaagaggtgatt

SEQ ID NO: 211365 - DNA, 33 bp, Homo sapien
catgaggtgctccagacagtgagacaaccatat

SEQ ID NO: 211366 - DNA, 33 bp, Homo sapien
catgaggtgctccagagagtgagacaaccatat

SEQ ID NO: 211367 - DNA, 33 bp, Homo sapien
agtatagctcagttaaactcctttgattacaaa

SEQ ID NO: 211368 - DNA, 33 bp, Homo sapien
agtatagctcagttaagctcctttgattacaaa

SEQ ID NO: 211369 - DNA, 33 bp, Homo sapien
ataattttgaaagagaaaaatgaggatatccta

SEQ ID NO: 211370 - DNA, 33 bp, Homo sapien
ataattttgaaagagacaaatgaggatatccta

SEQ ID NO: 211371 - DNA, 33 bp, Homo sapien
attctagtggcacaaacagagatgagtggtctt

SEQ ID NO: 211372 - DNA, 33 bp, Homo sapien
attctagtggcacaaagagagatgagtggtctt

SEQ ID NO: 211373 - DNA, 33 bp, Homo sapien
ttactattttacttgacctctttagcattatta

SEQ ID NO: 211374 - DNA, 33 bp, Homo sapien
ttactattttacttgatctctttagcattatta

SEQ ID NO: 211375 - DNA, 33 bp, Homo sapien
ttttattggcaaaagcagacaagagaaggaaaa

SEQ ID NO: 211376 - DNA, 33 bp, Homo sapien
ttttattggcaaaagcggacaagagaaggaaaa

SEQ ID NO: 211377 - DNA, 33 bp, Homo sapien
gtaacttaatttattgaaaaagatcctgatgta

SEQ ID NO: 211378 - DNA, 33 bp, Homo sapien
gtaacttaatttattggaaaagatcctgatgta

SEQ ID NO: 211379 - DNA, 33 bp, Homo sapien
cacagatcaaaacttcactgcaaacatgaaaac

SEQ ID NO: 211380 - DNA, 33 bp, Homo sapien
cacagatcaaaacttcgctgcaaacatgaaaac

SEQ ID NO: 211381 - DNA, 33 bp, Homo sapien
tcagggaaagctattcaaaagcaggccaagtca

SEQ ID NO: 211382 - DNA, 33 bp, Homo sapien
tcagggaaagctattcgaaagcaggccaagtca

SEQ ID NO: 211383 - DNA, 33 bp, Homo sapien
taattttggttattgaacactttggcctctgat

SEQ ID NO: 211384 - DNA, 33 bp, Homo sapien
taattttggttattgaccactttggcctctgat

SEQ ID NO: 211385 - DNA, 33 bp, Homo sapien
agccatactttaaccagtcacagacagccaact

SEQ ID NO: 211386 - DNA, 33 bp, Homo sapien
agccatactttaaccattcacagacagccaact

SEQ ID NO: 211387 - DNA, 33 bp, Homo sapien
gagttgaagagttaagcccctactcaccatcat

SEQ ID NO: 211388 - DNA, 33 bp, Homo sapien
gagttgaagagttaagtccctactcaccatcat

SEQ ID NO: 211389 - DNA, 33 bp, Homo sapien
agtctagggtgagaaaccagttagtgatcatgc

SEQ ID NO: 211390 - DNA, 33 bp, Homo sapien
agtctagggtgagaaagcagttagtgatcatgc

SEQ ID NO: 211391 - DNA, 33 bp, Homo sapien
aataatgttagacttaagccacaagtcttggtc

SEQ ID NO: 211392 - DNA, 33 bp, Homo sapien
aataatgttagacttaggccacaagtcttggtc

SEQ ID NO: 211393 - DNA, 33 bp, Homo sapien
acttccttcactgatacgccttttcaattgtct

SEQ ID NO: 211394 - DNA, 33 bp, Homo sapien
acttccttcactgatatgccttttcaattgtct

SEQ ID NO: 211395 - DNA, 33 bp, Homo sapien
tcccctttcataaaaaacaatattcctgccata

SEQ ID NO: 211396 - DNA, 33 bp, Homo sapien
tcccctttcataaaaaccaatattcctgccata

SEQ ID NO: 211397 - DNA, 33 bp, Homo sapien
tgctaaggatagtcaccctagtctgctatcaaa

SEQ ID NO: 211398 - DNA, 33 bp, Homo sapien
tgctaaggatagtcactctagtctgctatcaaa

SEQ ID NO: 211399 - DNA, 33 bp, Homo sapien
ttcctcttagacatcaataatgaacactggcat

SEQ ID NO: 211400 - DNA, 33 bp, Homo sapien
ttcctcttagacatcagtaatgaacactggcat

SEQ ID NO: 211401 - DNA, 33 bp, Homo sapien
acctctagcccgagtacgtattgtcacagaact

SEQ ID NO: 211402 - DNA, 33 bp, Homo sapien
acctctagcccgagtatgtattgtcacagaact

SEQ ID NO: 211403 - DNA, 33 bp, Homo sapien
ttctttccctctcgtgcactggcaaggaagatc

SEQ ID NO: 211404 - DNA, 33 bp, Homo sapien
ttctttccctctcgtgtactggcaaggaagatc

SEQ ID NO: 211405 - DNA, 33 bp, Homo sapien
ttaagatgaattaatgaaggcttctggaatttt

SEQ ID NO: 211406 - DNA, 33 bp, Homo sapien
ttaagatgaattaatggaggcttctggaatttt

SEQ ID NO: 211407 - DNA, 33 bp, Homo sapien
actatgaacagcttccactagagtgtcacaaaa

SEQ ID NO: 211408 - DNA, 33 bp, Homo sapien
actatgaacagcttcccctagagtgtcacaaaa

SEQ ID NO: 211409 - DNA, 33 bp, Homo sapien
attaaagcttctcaaactgtcatgaccccggaa

SEQ ID NO: 211410 - DNA, 33 bp, Homo sapien
attaaagcttctcaaagtgtcatgaccccggaa

SEQ ID NO: 211411 - DNA, 33 bp, Homo sapien
tattctagaagctacaatatttcttagtttata

SEQ ID NO: 211412 - DNA, 33 bp, Homo sapien
tattctagaagctacagtatttcttagtttata

SEQ ID NO: 211413 - DNA, 33 bp, Homo sapien
tgaaatgggttagaagcctgtctgaaaaaattt

SEQ ID NO: 211414 - DNA, 33 bp, Homo sapien
tgaaatgggttagaaggctgtctgaaaaaattt

SEQ ID NO: 211415 - DNA, 33 bp, Homo sapien
gattcccagccccacgcatatgtttgggtgcta

SEQ ID NO: 211416 - DNA, 33 bp, Homo sapien
gattcccagccccacggatatgtttgggtgcta

SEQ ID NO: 211417 - DNA, 33 bp, Homo sapien
atctataaattacagaaaaacaatgagtgaata

SEQ ID NO: 211418 - DNA, 33 bp, Homo sapien
atctataaattacagagaaacaatgagtgaata

SEQ ID NO: 211419 - DNA, 33 bp, Homo sapien
tggataaaataaagaaagtcagtttaagtaagc

SEQ ID NO: 211420 - DNA, 33 bp, Homo sapien
tggataaaataaagaaggtcagtttaagtaagc

SEQ ID NO: 211421 - DNA, 33 bp, Homo sapien
gaagaaaaactatgcccactgatcagaaacact

SEQ ID NO: 211422 - DNA, 33 bp, Homo sapien
gaagaaaaactatgcctactgatcagaaacact

SEQ ID NO: 211423 - DNA, 33 bp, Homo sapien
aactcaatgtaagtcaatattgtgatgtggcta

SEQ ID NO: 211424 - DNA, 33 bp, Homo sapien
aactcaatgtaagtcattattgtgatgtggcta

SEQ ID NO: 211425 - DNA, 33 bp, Homo sapien
aatgaacgacaattacacatggaatatcatcag

SEQ ID NO: 211426 - DNA, 33 bp, Homo sapien
aatgaacgacaattacgcatggaatatcatcag

SEQ ID NO: 211427 - DNA, 33 bp, Homo sapien
ttcaataaccacatcaatatcaccttagaagtg

SEQ ID NO: 211428 - DNA, 33 bp, Homo sapien
ttcaataaccacatcagtatcaccttagaagtg

SEQ ID NO: 211429 - DNA, 33 bp, Homo sapien
agcgcctctgccttcaacattatgttttgctca

SEQ ID NO: 211430 - DNA, 33 bp, Homo sapien
agcgcctctgccttcagcattatgttttgctca

SEQ ID NO: 211431 - DNA, 33 bp, Homo sapien
caagtattggttgataagtagtttgttgtcaat

SEQ ID NO: 211432 - DNA, 33 bp, Homo sapien
caagtattggttgatacgtagtttgttgtcaat

SEQ ID NO: 211433 - DNA, 33 bp, Homo sapien
cctccactcttctcacaccaagcaaagttaagt

SEQ ID NO: 211434 - DNA, 33 bp, Homo sapien
cctccactcttctcacgccaagcaaagttaagt

SEQ ID NO: 211435 - DNA, 33 bp, Homo sapien
gtgttcaccagaaaaactgtctacattctagat

SEQ ID NO: 211436 - DNA, 33 bp, Homo sapien
gtgttcaccagaaaaattgtctacattctagat

SEQ ID NO: 211437 - DNA, 33 bp, Homo sapien
tccagcagtagcacgtaaatgatagagtgccat

SEQ ID NO: 211438 - DNA, 33 bp, Homo sapien
tccagcagtagcacgtgaatgatagagtgccat

SEQ ID NO: 211439 - DNA, 33 bp, Homo sapien
tatacattagcctttgaattttatggtttataa

SEQ ID NO: 211440 - DNA, 33 bp, Homo sapien
tatacattagcctttggattttatggtttataa

SEQ ID NO: 211441 - DNA, 33 bp, Homo sapien
tctaattaggccaatccatgtagtgatttctta

SEQ ID NO: 211442 - DNA, 33 bp, Homo sapien
tctaattaggccaatcgatgtagtgatttctta

SEQ ID NO: 211443 - DNA, 33 bp, Homo sapien
cggaacctagttgtgacatagaagtgttagcct

SEQ ID NO: 211444 - DNA, 33 bp, Homo sapien
cggaacctagttgtgatatagaagtgttagcct

SEQ ID NO: 211445 - DNA, 33 bp, Homo sapien
taaggattagctaacagactgtggattaaagta

SEQ ID NO: 211446 - DNA, 33 bp, Homo sapien
taaggattagctaacatactgtggattaaagta

SEQ ID NO: 211447 - DNA, 33 bp, Homo sapien
aaatttttatctacaactggtttccctcttggt

SEQ ID NO: 211448 - DNA, 33 bp, Homo sapien
aaatttttatctacaattggtttccctcttggt

SEQ ID NO: 211449 - DNA, 33 bp, Homo sapien
caggtattggggagaacgatgatgaaatcagac

SEQ ID NO: 211450 - DNA, 33 bp, Homo sapien
caggtattggggagaatgatgatgaaatcagac

SEQ ID NO: 211451 - DNA, 33 bp, Homo sapien
atggaaaggagcagtaacatttgggtgttgtca

SEQ ID NO: 211452 - DNA, 33 bp, Homo sapien
atggaaaggagcagtagcatttgggtgttgtca

SEQ ID NO: 211453 - DNA, 33 bp, Homo sapien
tacaaaggagaaaacacggagctgggaacaata

SEQ ID NO: 211454 - DNA, 33 bp, Homo sapien
tacaaaggagaaaacatggagctgggaacaata

SEQ ID NO: 211455 - DNA, 33 bp, Homo sapien
tctgtaaaccttaaaacagagtggccagctatt

SEQ ID NO: 211456 - DNA, 33 bp, Homo sapien
tctgtaaaccttaaaagagagtggccagctatt

SEQ ID NO: 211457 - DNA, 33 bp, Homo sapien
atatctgccaggcaaacccaagtatagatgagg

SEQ ID NO: 211458 - DNA, 33 bp, Homo sapien
atatctgccaggcaaatccaagtatagatgagg

SEQ ID NO: 211459 - DNA, 33 bp, Homo sapien
tgagtaggctttatataagaaaatgagaaaaat

SEQ ID NO: 211460 - DNA, 33 bp, Homo sapien
tgagtaggctttatattagaaaatgagaaaaat

SEQ ID NO: 211461 - DNA, 33 bp, Homo sapien
taattattgataggataaatgaaaatgaagttg

SEQ ID NO: 211462 - DNA, 33 bp, Homo sapien
taattattgataggatgaatgaaaatgaagttg

SEQ ID NO: 211463 - DNA, 33 bp, Homo sapien
gagctgtatccttaaaattatcagccttttatt

SEQ ID NO: 211464 - DNA, 33 bp, Homo sapien
gagctgtatccttaaagttatcagccttttatt

SEQ ID NO: 211465 - DNA, 33 bp, Homo sapien
accctaacctctcaagcataaacctcagatcac

SEQ ID NO: 211466 - DNA, 33 bp, Homo sapien
accctaacctctcaaggataaacctcagatcac

SEQ ID NO: 211467 - DNA, 33 bp, Homo sapien
tttgtattaggtatgaagtttgggtcgtttata

SEQ ID NO: 211468 - DNA, 33 bp, Homo sapien
tttgtattaggtatgaggtttgggtcgtttata

SEQ ID NO: 211469 - DNA, 33 bp, Homo sapien
gctaacctgtcttcaccgaattacttttacaac

SEQ ID NO: 211470 - DNA, 33 bp, Homo sapien
gctaacctgtcttcactgaattacttttacaac

SEQ ID NO: 211471 - DNA, 33 bp, Homo sapien
agatcaccactgaactaaagatatgtagagttt

SEQ ID NO: 211472 - DNA, 33 bp, Homo sapien
agatcaccactgaactgaagatatgtagagttt

SEQ ID NO: 211473 - DNA, 33 bp, Homo sapien
aggcttttattttcggcaactcagccggcaata

SEQ ID NO: 211474 - DNA, 33 bp, Homo sapien
aggcttttattttcgggaactcagccggcaata

SEQ ID NO: 211475 - DNA, 33 bp, Homo sapien
gaagacacattcccgaaagccactagaatctag

SEQ ID NO: 211476 - DNA, 33 bp, Homo sapien
gaagacacattcccgatagccactagaatctag

SEQ ID NO: 211477 - DNA, 33 bp, Homo sapien
tctgcccacacaatgacacatctcgaacacagg

SEQ ID NO: 211478 - DNA, 33 bp, Homo sapien
tctgcccacacaatgatacatctcgaacacagg

SEQ ID NO: 211479 - DNA, 33 bp, Homo sapien
atccctctacttcatgcaacacactgagatctg

SEQ ID NO: 211480 - DNA, 33 bp, Homo sapien
atccctctacttcatggaacacactgagatctg

SEQ ID NO: 211481 - DNA, 33 bp, Homo sapien
tctagtgagctagcaaagcgagttaaacagaca

SEQ ID NO: 211482 - DNA, 33 bp, Homo sapien
tctagtgagctagcaatgcgagttaaacagaca

SEQ ID NO: 211483 - DNA, 33 bp, Homo sapien
ttactcattggtagtacattttctgaaataata

SEQ ID NO: 211484 - DNA, 33 bp, Homo sapien
ttactcattggtagtagattttctgaaataata

SEQ ID NO: 211485 - DNA, 33 bp, Homo sapien
agcattagcaggattacgctttggattatcctt

SEQ ID NO: 211486 - DNA, 33 bp, Homo sapien
agcattagcaggattatgctttggattatcctt

SEQ ID NO: 211487 - DNA, 33 bp, Homo sapien
ccctatgacttctaaaattactgagagaagccc

SEQ ID NO: 211488 - DNA, 33 bp, Homo sapien
ccctatgacttctaaatttactgagagaagccc

SEQ ID NO: 211489 - DNA, 33 bp, Homo sapien
atccagatctttcttaaacaactacctcctggt

SEQ ID NO: 211490 - DNA, 33 bp, Homo sapien
atccagatctttcttatacaactacctcctggt

SEQ ID NO: 211491 - DNA, 33 bp, Homo sapien
gagcacaagaaagagacggagaagcaaaatggc

SEQ ID NO: 211492 - DNA, 33 bp, Homo sapien
gagcacaagaaagagatggagaagcaaaatggc

SEQ ID NO: 211493 - DNA, 33 bp, Homo sapien
ccatttctaatattaacgcgactagtcaataag

SEQ ID NO: 211494 - DNA, 33 bp, Homo sapien
ccatttctaatattaatgcgactagtcaataag

SEQ ID NO: 211495 - DNA, 33 bp, Homo sapien
ttgcagaggtagtaaaatagtgaaatctgagtt

SEQ ID NO: 211496 - DNA, 33 bp, Homo sapien
ttgcagaggtagtaaactagtgaaatctgagtt

SEQ ID NO: 211497 - DNA, 33 bp, Homo sapien
tcactgatttctaaagaccacacttttaatctc

SEQ ID NO: 211498 - DNA, 33 bp, Homo sapien
tcactgatttctaaaggccacacttttaatctc

SEQ ID NO: 211499 - DNA, 33 bp, Homo sapien
ttccttgagcctagacaaaatgggttctccacg

SEQ ID NO: 211500 - DNA, 33 bp, Homo sapien
ttccttgagcctagaccaaatgggttctccacg

SEQ ID NO: 211501 - DNA, 33 bp, Homo sapien
tttagtggggcagtcacgagaattttggtgcat

SEQ ID NO: 211502 - DNA, 33 bp, Homo sapien
tttagtggggcagtcatgagaattttggtgcat

SEQ ID NO: 211503 - DNA, 33 bp, Homo sapien
agatgaggttaagaggccaagaagtgaagattg

SEQ ID NO: 211504 - DNA, 33 bp, Homo sapien
agatgaggttaagaggtcaagaagtgaagattg

SEQ ID NO: 211505 - DNA, 33 bp, Homo sapien
gcaaatggttcatggaccactttgaaaaaataa

SEQ ID NO: 211506 - DNA, 33 bp, Homo sapien
gcaaatggttcatggatcactttgaaaaaataa

SEQ ID NO: 211507 - DNA, 33 bp, Homo sapien
ctggcaagaacaggtacagcctagaggtacata

SEQ ID NO: 211508 - DNA, 33 bp, Homo sapien
ctggcaagaacaggtatagcctagaggtacata

SEQ ID NO: 211509 - DNA, 33 bp, Homo sapien
acataaaaaacataaaatggtgtgtgaggagaa

SEQ ID NO: 211510 - DNA, 33 bp, Homo sapien
acataaaaaacataaagtggtgtgtgaggagaa

SEQ ID NO: 211511 - DNA, 33 bp, Homo sapien
ataaatactgtgaaaacggatttgcgttccttg

SEQ ID NO: 211512 - DNA, 33 bp, Homo sapien
ataaatactgtgaaaatggatttgcgttccttg

SEQ ID NO: 211513 - DNA, 33 bp, Homo sapien
aagtggtgtttcttctcactggaataaatactg

SEQ ID NO: 211514 - DNA, 33 bp, Homo sapien
aagtggtgtttcttcttactggaataaatactg

SEQ ID NO: 211515 - DNA, 33 bp, Homo sapien
acttaccaagtaaataagttcaatcaaagggca

SEQ ID NO: 211516 - DNA, 33 bp, Homo sapien
acttaccaagtaaataggttcaatcaaagggca

SEQ ID NO: 211517 - DNA, 33 bp, Homo sapien
aatcttgaatactctcaatgcaatgggcttctt

SEQ ID NO: 211518 - DNA, 33 bp, Homo sapien
aatcttgaatactctcgatgcaatgggcttctt

SEQ ID NO: 211519 - DNA, 33 bp, Homo sapien
tactcagtttgacacactctattttattttcct

SEQ ID NO: 211520 - DNA, 33 bp, Homo sapien
tactcagtttgacacattctattttattttcct

SEQ ID NO: 211521 - DNA, 33 bp, Homo sapien
ggggccaaagtaacttgaacaccacatctctct

SEQ ID NO: 211522 - DNA, 33 bp, Homo sapien
ggggccaaagtaactttaacaccacatctctct

SEQ ID NO: 211523 - DNA, 33 bp, Homo sapien
cctcagcactggtagagatttgagttcgttaaa

SEQ ID NO: 211524 - DNA, 33 bp, Homo sapien
cctcagcactggtagatatttgagttcgttaaa

SEQ ID NO: 211525 - DNA, 33 bp, Homo sapien
aacattttgaatattacagtgtggcaactctag

SEQ ID NO: 211526 - DNA, 33 bp, Homo sapien
aacattttgaatattatagtgtggcaactctag

SEQ ID NO: 211527 - DNA, 33 bp, Homo sapien
ctttggtctgcagctacacattttgttttctac

SEQ ID NO: 211528 - DNA, 33 bp, Homo sapien
ctttggtctgcagctatacattttgttttctac

SEQ ID NO: 211529 - DNA, 33 bp, Homo sapien
aaaaatgttgtgcatccgaaaacactatcaaca

SEQ ID NO: 211530 - DNA, 33 bp, Homo sapien
aaaaatgttgtgcatctgaaaacactatcaaca

SEQ ID NO: 211531 - DNA, 33 bp, Homo sapien
gaatctctcctcttaaaaaggcagagcaatgtg

SEQ ID NO: 211532 - DNA, 33 bp, Homo sapien
gaatctctcctcttaagaaggcagagcaatgtg

SEQ ID NO: 211533 - DNA, 33 bp, Homo sapien
ctctctgtctcataggaactagcaggtagtgaa

SEQ ID NO: 211534 - DNA, 33 bp, Homo sapien
ctctctgtctcatagggactagcaggtagtgaa

SEQ ID NO: 211535 - DNA, 33 bp, Homo sapien
tagatgtgcaagaaaaaatcgtgaataagagat

SEQ ID NO: 211536 - DNA, 33 bp, Homo sapien
tagatgtgcaagaaaagatcgtgaataagagat

SEQ ID NO: 211537 - DNA, 33 bp, Homo sapien
ttcatatgctgaaatcaaatcctcaaagtaatg

SEQ ID NO: 211538 - DNA, 33 bp, Homo sapien
ttcatatgctgaaatcgaatcctcaaagtaatg

SEQ ID NO: 211539 - DNA, 33 bp, Homo sapien
aaattcagacttttaaatagggctataacttta

SEQ ID NO: 211540 - DNA, 33 bp, Homo sapien
aaattcagacttttaagtagggctataacttta

SEQ ID NO: 211541 - DNA, 33 bp, Homo sapien
tttttccatgactttcactctagaagccacact

SEQ ID NO: 211542 - DNA, 33 bp, Homo sapien
tttttccatgactttcgctctagaagccacact

SEQ ID NO: 211543 - DNA, 33 bp, Homo sapien
aaaatcatgtccaattaaagacttgagcattgt

SEQ ID NO: 211544 - DNA, 33 bp, Homo sapien
aaaatcatgtccaattgaagacttgagcattgt

SEQ ID NO: 211545 - DNA, 33 bp, Homo sapien
atacacaatggttataactgtcacaaaattaac

SEQ ID NO: 211546 - DNA, 33 bp, Homo sapien
atacacaatggttatatctgtcacaaaattaac

SEQ ID NO: 211547 - DNA, 33 bp, Homo sapien
gaggcagcagctgagacgacaagtagttgaatt

SEQ ID NO: 211548 - DNA, 33 bp, Homo sapien
gaggcagcagctgagatgacaagtagttgaatt

SEQ ID NO: 211549 - DNA, 33 bp, Homo sapien
cttttaactgcttccacgtatctctcaagtgtt

SEQ ID NO: 211550 - DNA, 33 bp, Homo sapien
cttttaactgcttccatgtatctctcaagtgtt

SEQ ID NO: 211551 - DNA, 33 bp, Homo sapien
ttgggattacaggtacaaatcactgcacacagc

SEQ ID NO: 211552 - DNA, 33 bp, Homo sapien
ttgggattacaggtacgaatcactgcacacagc

SEQ ID NO: 211553 - DNA, 33 bp, Homo sapien
catccaaagagttgaacaggagctccagttgat

SEQ ID NO: 211554 - DNA, 33 bp, Homo sapien
catccaaagagttgaataggagctccagttgat

SEQ ID NO: 211555 - DNA, 33 bp, Homo sapien
tctgcatttaaaaatacgtttatgctcttctcc

SEQ ID NO: 211556 - DNA, 33 bp, Homo sapien
tctgcatttaaaaatatgtttatgctcttctcc

SEQ ID NO: 211557 - DNA, 33 bp, Homo sapien
ctgatgtcttattacaagccaagtggacataga

SEQ ID NO: 211558 - DNA, 33 bp, Homo sapien
ctgatgtcttattacatgccaagtggacataga

SEQ ID NO: 211559 - DNA, 33 bp, Homo sapien
atctacaatttcttagaaaatcaaggtaactgt

SEQ ID NO: 211560 - DNA, 33 bp, Homo sapien
atctacaatttcttagtaaatcaaggtaactgt

SEQ ID NO: 211561 - DNA, 33 bp, Homo sapien
aggagaaatgagatcacgtgaacaaattgaagg

SEQ ID NO: 211562 - DNA, 33 bp, Homo sapien
aggagaaatgagatcatgtgaacaaattgaagg

SEQ ID NO: 211563 - DNA, 33 bp, Homo sapien
aagagggaggctctaaccctactcagcgcatta

SEQ ID NO: 211564 - DNA, 33 bp, Homo sapien
aagagggaggctctaatcctactcagcgcatta

SEQ ID NO: 211565 - DNA, 33 bp, Homo sapien
ataatgggttgtaagacaagatttgtaagcctc

SEQ ID NO: 211566 - DNA, 33 bp, Homo sapien
ataatgggttgtaagataagatttgtaagcctc

SEQ ID NO: 211567 - DNA, 33 bp, Homo sapien
ccttctcacgatttgccgacaagaaaattcctt

SEQ ID NO: 211568 - DNA, 33 bp, Homo sapien
ccttctcacgatttgctgacaagaaaattcctt

SEQ ID NO: 211569 - DNA, 33 bp, Homo sapien
aattgaccattgactaagattttttaattttaa

SEQ ID NO: 211570 - DNA, 33 bp, Homo sapien
aattgaccattgactatgattttttaattttaa

SEQ ID NO: 211571 - DNA, 33 bp, Homo sapien
cattagggggtgattacgtgaattaccaaggac

SEQ ID NO: 211572 - DNA, 33 bp, Homo sapien
cattagggggtgattatgtgaattaccaaggac

SEQ ID NO: 211573 - DNA, 33 bp, Homo sapien
gtgtgcatacagagaaatatgattattagggac

SEQ ID NO: 211574 - DNA, 33 bp, Homo sapien
gtgtgcatacagagaagtatgattattagggac

SEQ ID NO: 211575 - DNA, 33 bp, Homo sapien
aaaataataatgcttacatgataccaacaatag

SEQ ID NO: 211576 - DNA, 33 bp, Homo sapien
aaaataataatgcttatatgataccaacaatag

SEQ ID NO: 211577 - DNA, 33 bp, Homo sapien
gaaggcaaagcccacaaagagtgacattatttc

SEQ ID NO: 211578 - DNA, 33 bp, Homo sapien
gaaggcaaagcccacagagagtgacattatttc

SEQ ID NO: 211579 - DNA, 33 bp, Homo sapien
gcattttccagcctatgacattctgcctttgaa

SEQ ID NO: 211580 - DNA, 33 bp, Homo sapien
gcattttccagcctattacattctgcctttgaa

SEQ ID NO: 211581 - DNA, 33 bp, Homo sapien
acacactgtgcattcaataagcacccattgatt

SEQ ID NO: 211582 - DNA, 33 bp, Homo sapien
acacactgtgcattcagtaagcacccattgatt

SEQ ID NO: 211583 - DNA, 33 bp, Homo sapien
atcacatttgaagacacagcttgaagcaggaat

SEQ ID NO: 211584 - DNA, 33 bp, Homo sapien
atcacatttgaagacatagcttgaagcaggaat

SEQ ID NO: 211585 - DNA, 33 bp, Homo sapien
gtgaaagaagagtccccagccccagaaaagttg

SEQ ID NO: 211586 - DNA, 33 bp, Homo sapien
gtgaaagaagagtccctagccccagaaaagttg

SEQ ID NO: 211587 - DNA, 33 bp, Homo sapien
ttccactaagtgaaaggagcttcgtacaaaagt

SEQ ID NO: 211588 - DNA, 33 bp, Homo sapien
ttccactaagtgaaagtagcttcgtacaaaagt

SEQ ID NO: 211589 - DNA, 33 bp, Homo sapien
tcctaaacctttagccgctggcaactgccaatc

SEQ ID NO: 211590 - DNA, 33 bp, Homo sapien
tcctaaacctttagcctctggcaactgccaatc

SEQ ID NO: 211591 - DNA, 33 bp, Homo sapien
ttatatcttcttcttaacacttttcttgctttg

SEQ ID NO: 211592 - DNA, 33 bp, Homo sapien
ttatatcttcttcttaccacttttcttgctttg

SEQ ID NO: 211593 - DNA, 33 bp, Homo sapien
agtgtctccaactcgcaccaggtgaacaatgtt

SEQ ID NO: 211594 - DNA, 33 bp, Homo sapien
agtgtctccaactcgcgccaggtgaacaatgtt

SEQ ID NO: 211595 - DNA, 33 bp, Homo sapien
ttatgagacactcttactaccatactcaaaata

SEQ ID NO: 211596 - DNA, 33 bp, Homo sapien
ttatgagacactcttagtaccatactcaaaata

SEQ ID NO: 211597 - DNA, 33 bp, Homo sapien
gctcaatcttctaaaccgctgtttgtcctacat

SEQ ID NO: 211598 - DNA, 33 bp, Homo sapien
gctcaatcttctaaactgctgtttgtcctacat

SEQ ID NO: 211599 - DNA, 33 bp, Homo sapien
ttttaaccggttcttgcaggccatattgatttg

SEQ ID NO: 211600 - DNA, 33 bp, Homo sapien
ttttaaccggttcttgtaggccatattgatttg

SEQ ID NO: 211601 - DNA, 33 bp, Homo sapien
cccttgtgccacaatacatctgggtactggtag

SEQ ID NO: 211602 - DNA, 33 bp, Homo sapien
cccttgtgccacaatagatctgggtactggtag

SEQ ID NO: 211603 - DNA, 33 bp, Homo sapien
caacctgtactgctaccccttcttaatctgaca

SEQ ID NO: 211604 - DNA, 33 bp, Homo sapien
caacctgtactgctactccttcttaatctgaca

SEQ ID NO: 211605 - DNA, 33 bp, Homo sapien
ctgcactcaatttctacgaattttgaactaaaa

SEQ ID NO: 211606 - DNA, 33 bp, Homo sapien
ctgcactcaatttctatgaattttgaactaaaa

SEQ ID NO: 211607 - DNA, 33 bp, Homo sapien
caagaattttaggacacgaagagatcatctaaa

SEQ ID NO: 211608 - DNA, 33 bp, Homo sapien
caagaattttaggacatgaagagatcatctaaa

SEQ ID NO: 211609 - DNA, 33 bp, Homo sapien
gggtgctgtgattctagacagtgagagaagaaa

SEQ ID NO: 211610 - DNA, 33 bp, Homo sapien
gggtgctgtgattctatacagtgagagaagaaa

SEQ ID NO: 211611 - DNA, 33 bp, Homo sapien
aaagattacatttctaagtgttttgaagttgtg

SEQ ID NO: 211612 - DNA, 33 bp, Homo sapien
aaagattacatttctatgtgttttgaagttgtg

SEQ ID NO: 211613 - DNA, 33 bp, Homo sapien
atttgcagactataagaaaactacaggcagagg

SEQ ID NO: 211614 - DNA, 33 bp, Homo sapien
atttgcagactataagcaaactacaggcagagg

SEQ ID NO: 211615 - DNA, 33 bp, Homo sapien
agtaaattgtattacaaaatttcattgtcaggg

SEQ ID NO: 211616 - DNA, 33 bp, Homo sapien
agtaaattgtattacagaatttcattgtcaggg

SEQ ID NO: 211617 - DNA, 33 bp, Homo sapien
ttggttttagacttccaatcaacatcacttgat

SEQ ID NO: 211618 - DNA, 33 bp, Homo sapien
ttggttttagacttcccatcaacatcacttgat

SEQ ID NO: 211619 - DNA, 33 bp, Homo sapien
aataaagatgaattaacacaaatggagactcca

SEQ ID NO: 211620 - DNA, 33 bp, Homo sapien
aataaagatgaattaagacaaatggagactcca

SEQ ID NO: 211621 - DNA, 33 bp, Homo sapien
gtactcaatcgtcaaaaaggagtcctcctttag

SEQ ID NO: 211622 - DNA, 33 bp, Homo sapien
gtactcaatcgtcaaacaggagtcctcctttag

SEQ ID NO: 211623 - DNA, 33 bp, Homo sapien
atgtagtaaatatccaggaaaccactacctagg

SEQ ID NO: 211624 - DNA, 33 bp, Homo sapien
atgtagtaaatatccatgaaaccactacctagg

SEQ ID NO: 211625 - DNA, 33 bp, Homo sapien
ttcagtaaaatactgaacaggatccaactggat

SEQ ID NO: 211626 - DNA, 33 bp, Homo sapien
ttcagtaaaatactgaccaggatccaactggat

SEQ ID NO: 211627 - DNA, 33 bp, Homo sapien
tgttagcattcctttcgaagtccaaacaaaata

SEQ ID NO: 211628 - DNA, 33 bp, Homo sapien
tgttagcattcctttctaagtccaaacaaaata

SEQ ID NO: 211629 - DNA, 33 bp, Homo sapien
cctgttctcgtaacctcaaaacctatccataaa

SEQ ID NO: 211630 - DNA, 33 bp, Homo sapien
cctgttctcgtaacctgaaaacctatccataaa

SEQ ID NO: 211631 - DNA, 33 bp, Homo sapien
cgtggtaggactcggacatcatgcgagattgta

SEQ ID NO: 211632 - DNA, 33 bp, Homo sapien
cgtggtaggactcggagatcatgcgagattgta

SEQ ID NO: 211633 - DNA, 33 bp, Homo sapien
ccaagttgcatcattacccctctcctttctcct

SEQ ID NO: 211634 - DNA, 33 bp, Homo sapien
ccaagttgcatcattatccctctcctttctcct

SEQ ID NO: 211635 - DNA, 33 bp, Homo sapien
taacccattggcaaaactgataagaataataag

SEQ ID NO: 211636 - DNA, 33 bp, Homo sapien
taacccattggcaaaattgataagaataataag

SEQ ID NO: 211637 - DNA, 33 bp, Homo sapien
agttggctcaatctcaatatgccctttttctta

SEQ ID NO: 211638 - DNA, 33 bp, Homo sapien
agttggctcaatctcagtatgccctttttctta

SEQ ID NO: 211639 - DNA, 33 bp, Homo sapien
aagcttatggctaacccactctgtggaactata

SEQ ID NO: 211640 - DNA, 33 bp, Homo sapien
aagcttatggctaacctactctgtggaactata

SEQ ID NO: 211641 - DNA, 33 bp, Homo sapien
tggtcacagggaccaaaaggaccagagagggaa

SEQ ID NO: 211642 - DNA, 33 bp, Homo sapien
tggtcacagggaccaagaggaccagagagggaa

SEQ ID NO: 211643 - DNA, 33 bp, Homo sapien
ggaaaggaataatgacacgtatgaagagtagca

SEQ ID NO: 211644 - DNA, 33 bp, Homo sapien
ggaaaggaataatgacgcgtatgaagagtagca

SEQ ID NO: 211645 - DNA, 33 bp, Homo sapien
ccagaatctcaactgccgaaaatctcaaaggtg

SEQ ID NO: 211646 - DNA, 33 bp, Homo sapien
ccagaatctcaactgctgaaaatctcaaaggtg

SEQ ID NO: 211647 - DNA, 33 bp, Homo sapien
gaaggcgaagaactcacgtcagacagtttcagt

SEQ ID NO: 211648 - DNA, 33 bp, Homo sapien
gaaggcgaagaactcatgtcagacagtttcagt

SEQ ID NO: 211649 - DNA, 33 bp, Homo sapien
ctatgattgagaacacaagagtaaggagagcct

SEQ ID NO: 211650 - DNA, 33 bp, Homo sapien
ctatgattgagaacaccagagtaaggagagcct

SEQ ID NO: 211651 - DNA, 33 bp, Homo sapien
aagaatccgcttattacctattttctgcacata

SEQ ID NO: 211652 - DNA, 33 bp, Homo sapien
aagaatccgcttattagctattttctgcacata

SEQ ID NO: 211653 - DNA, 33 bp, Homo sapien
tgactcaatgattggaaacaggttcatttaagg

SEQ ID NO: 211654 - DNA, 33 bp, Homo sapien
tgactcaatgattggacacaggttcatttaagg

SEQ ID NO: 211655 - DNA, 33 bp, Homo sapien
aagcctctggctcttacaatttctcaaactaaa

SEQ ID NO: 211656 - DNA, 33 bp, Homo sapien
aagcctctggctcttataatttctcaaactaaa

SEQ ID NO: 211657 - DNA, 33 bp, Homo sapien
tctagccatatttttaaaaccaatactgagagt

SEQ ID NO: 211658 - DNA, 33 bp, Homo sapien
tctagccatatttttagaaccaatactgagagt

SEQ ID NO: 211659 - DNA, 33 bp, Homo sapien
ttcgtgatgcaaggaacaaagtcaaaaaaatca

SEQ ID NO: 211660 - DNA, 33 bp, Homo sapien
ttcgtgatgcaaggaagaaagtcaaaaaaatca

SEQ ID NO: 211661 - DNA, 33 bp, Homo sapien
catggcattttatacccgctgcttttataatgt

SEQ ID NO: 211662 - DNA, 33 bp, Homo sapien
catggcattttatacctgctgcttttataatgt

SEQ ID NO: 211663 - DNA, 33 bp, Homo sapien
attcacagtcccagaaaagagagaactgattgg

SEQ ID NO: 211664 - DNA, 33 bp, Homo sapien
attcacagtcccagaagagagagaactgattgg

SEQ ID NO: 211665 - DNA, 33 bp, Homo sapien
atgtggagaaatagacaacacaatttgtaatga

SEQ ID NO: 211666 - DNA, 33 bp, Homo sapien
atgtggagaaatagactacacaatttgtaatga

SEQ ID NO: 211667 - DNA, 33 bp, Homo sapien
attaaaaatcagaaaaatgttgctaatgctata

SEQ ID NO: 211668 - DNA, 33 bp, Homo sapien
attaaaaatcagaaaattgttgctaatgctata

SEQ ID NO: 211669 - DNA, 33 bp, Homo sapien
aatataaatgctttcacggctggtttcttttgc

SEQ ID NO: 211670 - DNA, 33 bp, Homo sapien
aatataaatgctttcatggctggtttcttttgc

SEQ ID NO: 211671 - DNA, 33 bp, Homo sapien
ctcaatttgtctggaaatgtgacagtatcacaa

SEQ ID NO: 211672 - DNA, 33 bp, Homo sapien
ctcaatttgtctggaagtgtgacagtatcacaa

SEQ ID NO: 211673 - DNA, 33 bp, Homo sapien
tactgccaaatggtacgcaaaagcagacccttc

SEQ ID NO: 211674 - DNA, 33 bp, Homo sapien
tactgccaaatggtactcaaaagcagacccttc

SEQ ID NO: 211675 - DNA, 33 bp, Homo sapien
atttaaatttttgaatgatcggacaccacacaa

SEQ ID NO: 211676 - DNA, 33 bp, Homo sapien
atttaaatttttgaattatcggacaccacacaa

SEQ ID NO: 211677 - DNA, 33 bp, Homo sapien
gggttaatgtccttacaagaagaataagagaaa

SEQ ID NO: 211678 - DNA, 33 bp, Homo sapien
gggttaatgtccttacgagaagaataagagaaa

SEQ ID NO: 211679 - DNA, 33 bp, Homo sapien
caattcataacatacacggacaagacgggacaa

SEQ ID NO: 211680 - DNA, 33 bp, Homo sapien
caattcataacatacatggacaagacgggacaa

SEQ ID NO: 211681 - DNA, 33 bp, Homo sapien
ttaaaatcagtttgcaaatactactaatgtagg

SEQ ID NO: 211682 - DNA, 33 bp, Homo sapien
ttaaaatcagtttgcagatactactaatgtagg

SEQ ID NO: 211683 - DNA, 33 bp, Homo sapien
tcatctgtttaacagaacttcttcatatctgct

SEQ ID NO: 211684 - DNA, 33 bp, Homo sapien
tcatctgtttaacagaccttcttcatatctgct

SEQ ID NO: 211685 - DNA, 33 bp, Homo sapien
taaaccacctttacacgagtttgctacttaaac

SEQ ID NO: 211686 - DNA, 33 bp, Homo sapien
taaaccacctttacactagtttgctacttaaac

SEQ ID NO: 211687 - DNA, 33 bp, Homo sapien
cttatgcccctggagactatttgactacttaca

SEQ ID NO: 211688 - DNA, 33 bp, Homo sapien
cttatgcccctggagattatttgactacttaca

SEQ ID NO: 211689 - DNA, 33 bp, Homo sapien
cagccagagcatccaaagaagactcaagggctc

SEQ ID NO: 211690 - DNA, 33 bp, Homo sapien
cagccagagcatccaaggaagactcaagggctc

SEQ ID NO: 211691 - DNA, 33 bp, Homo sapien
ctatataatatgcgtagggtgctagacctgaca

SEQ ID NO: 211692 - DNA, 33 bp, Homo sapien
ctatataatatgcgtatggtgctagacctgaca

SEQ ID NO: 211693 - DNA, 33 bp, Homo sapien
cttcttctcttctacacactccatggttccagc

SEQ ID NO: 211694 - DNA, 33 bp, Homo sapien
cttcttctcttctacatactccatggttccagc

SEQ ID NO: 211695 - DNA, 33 bp, Homo sapien
aagtcttaggcctggccgagatatgcagtaaaa

SEQ ID NO: 211696 - DNA, 33 bp, Homo sapien
aagtcttaggcctggctgagatatgcagtaaaa

SEQ ID NO: 211697 - DNA, 33 bp, Homo sapien
tagtgctatcttcaagaaaagttgaacaatgat

SEQ ID NO: 211698 - DNA, 33 bp, Homo sapien
tagtgctatcttcaaggaaagttgaacaatgat

SEQ ID NO: 211699 - DNA, 33 bp, Homo sapien
agttagcatcatataaacaataggtaataagta

SEQ ID NO: 211700 - DNA, 33 bp, Homo sapien
agttagcatcatataagcaataggtaataagta

SEQ ID NO: 211701 - DNA, 33 bp, Homo sapien
tttaggccgttcataagattctttacataatga

SEQ ID NO: 211702 - DNA, 33 bp, Homo sapien
tttaggccgttcataatattctttacataatga

SEQ ID NO: 211703 - DNA, 33 bp, Homo sapien
agtcccatgttttaaaatatagtttggaactga

SEQ ID NO: 211704 - DNA, 33 bp, Homo sapien
agtcccatgttttaaagtatagtttggaactga

SEQ ID NO: 211705 - DNA, 33 bp, Homo sapien
tcatcccaaacagaaactttacccatcaaacaa

SEQ ID NO: 211706 - DNA, 33 bp, Homo sapien
tcatcccaaacagaaagtttacccatcaaacaa

SEQ ID NO: 211707 - DNA, 33 bp, Homo sapien
cccaacttcaaacatgaatcagtgtaaaatctt

SEQ ID NO: 211708 - DNA, 33 bp, Homo sapien
cccaacttcaaacatgcatcagtgtaaaatctt

SEQ ID NO: 211709 - DNA, 33 bp, Homo sapien
aaggcttaaagtaatacggataacacgatacct

SEQ ID NO: 211710 - DNA, 33 bp, Homo sapien
aaggcttaaagtaatatggataacacgatacct

SEQ ID NO: 211711 - DNA, 33 bp, Homo sapien
taagtgttttgagtcacgagaggattttaagca

SEQ ID NO: 211712 - DNA, 33 bp, Homo sapien
taagtgttttgagtcatgagaggattttaagca

SEQ ID NO: 211713 - DNA, 33 bp, Homo sapien
tgaaaaactatagccaacaacacgaatcacttt

SEQ ID NO: 211714 - DNA, 33 bp, Homo sapien
tgaaaaactatagccaccaacacgaatcacttt

SEQ ID NO: 211715 - DNA, 33 bp, Homo sapien
aggtggttattgatcaaattgtatgtaaaggag

SEQ ID NO: 211716 - DNA, 33 bp, Homo sapien
aggtggttattgatcagattgtatgtaaaggag

SEQ ID NO: 211717 - DNA, 33 bp, Homo sapien
ataatatgcaacttcaaccactttagcgaaagt

SEQ ID NO: 211718 - DNA, 33 bp, Homo sapien
ataatatgcaacttcatccactttagcgaaagt

SEQ ID NO: 211719 - DNA, 33 bp, Homo sapien
aaataataaaagtgtacgtttagtgtatatgct

SEQ ID NO: 211720 - DNA, 33 bp, Homo sapien
aaataataaaagtgtatgtttagtgtatatgct

SEQ ID NO: 211721 - DNA, 33 bp, Homo sapien
aaataggatttgacacagtattatcaatagcaa

SEQ ID NO: 211722 - DNA, 33 bp, Homo sapien
aaataggatttgacacggtattatcaatagcaa

SEQ ID NO: 211723 - DNA, 33 bp, Homo sapien
gcacttatcactggttaaaattcttattcactt

SEQ ID NO: 211724 - DNA, 33 bp, Homo sapien
gcacttatcactggttcaaattcttattcactt

SEQ ID NO: 211725 - DNA, 33 bp, Homo sapien
tccagtgaaagacagacgagcaggagagttagg

SEQ ID NO: 211726 - DNA, 33 bp, Homo sapien
tccagtgaaagacagatgagcaggagagttagg

SEQ ID NO: 211727 - DNA, 33 bp, Homo sapien
tggagcagtgtgaaaagttggttttttacttta

SEQ ID NO: 211728 - DNA, 33 bp, Homo sapien
tggagcagtgtgaaaatttggttttttacttta

SEQ ID NO: 211729 - DNA, 33 bp, Homo sapien
ccaataaatatttatcaatgtgcaaaacagctt

SEQ ID NO: 211730 - DNA, 33 bp, Homo sapien
ccaataaatatttatcgatgtgcaaaacagctt

SEQ ID NO: 211731 - DNA, 33 bp, Homo sapien
tatcaagaatgagggcaagttaaaagaagcctt

SEQ ID NO: 211732 - DNA, 33 bp, Homo sapien
tatcaagaatgagggcgagttaaaagaagcctt

SEQ ID NO: 211733 - DNA, 33 bp, Homo sapien
gaaatttctggctaaaagaatcatcttcagttc

SEQ ID NO: 211734 - DNA, 33 bp, Homo sapien
gaaatttctggctaaatgaatcatcttcagttc

SEQ ID NO: 211735 - DNA, 33 bp, Homo sapien
aaaatcacaaaataccaacttgctaaacataga

SEQ ID NO: 211736 - DNA, 33 bp, Homo sapien
aaaatcacaaaataccgacttgctaaacataga

SEQ ID NO: 211737 - DNA, 33 bp, Homo sapien
agatggtacaagtgtaaaattgactgttagtac

SEQ ID NO: 211738 - DNA, 33 bp, Homo sapien
agatggtacaagtgtagaattgactgttagtac

SEQ ID NO: 211739 - DNA, 33 bp, Homo sapien
ggccgagttggacagaaagcttgaacccaggag

SEQ ID NO: 211740 - DNA, 33 bp, Homo sapien
ggccgagttggacagagagcttgaacccaggag

SEQ ID NO: 211741 - DNA, 33 bp, Homo sapien
gatcgtcttgataccaacccagtgttccttaca

SEQ ID NO: 211742 - DNA, 33 bp, Homo sapien
gatcgtcttgataccagcccagtgttccttaca

SEQ ID NO: 211743 - DNA, 33 bp, Homo sapien
gagggagaaaggtaccaaattgctcttatataa

SEQ ID NO: 211744 - DNA, 33 bp, Homo sapien
gagggagaaaggtacccaattgctcttatataa

SEQ ID NO: 211745 - DNA, 33 bp, Homo sapien
ctactaggatcttgtgcagaatttcccaactga

SEQ ID NO: 211746 - DNA, 33 bp, Homo sapien
ctactaggatcttgtgtagaatttcccaactga

SEQ ID NO: 211747 - DNA, 33 bp, Homo sapien
ccatcatcaaaaaccactgaattatatgtaatt

SEQ ID NO: 211748 - DNA, 33 bp, Homo sapien
ccatcatcaaaaaccattgaattatatgtaatt

SEQ ID NO: 211749 - DNA, 33 bp, Homo sapien
ctggcagtttggttcacgaggtttatggaaaga

SEQ ID NO: 211750 - DNA, 33 bp, Homo sapien
ctggcagtttggttcatgaggtttatggaaaga

SEQ ID NO: 211751 - DNA, 33 bp, Homo sapien
gtggggaaagaatggaagataaaggttgaaatc

SEQ ID NO: 211752 - DNA, 33 bp, Homo sapien
gtggggaaagaatggaggataaaggttgaaatc

SEQ ID NO: 211753 - DNA, 33 bp, Homo sapien
atggattcttacactgcattgttatggagaaaa

SEQ ID NO: 211754 - DNA, 33 bp, Homo sapien
atggattcttacactgtattgttatggagaaaa

SEQ ID NO: 211755 - DNA, 33 bp, Homo sapien
gtcaaggtacttaagcaattcccttcttagaat

SEQ ID NO: 211756 - DNA, 33 bp, Homo sapien
gtcaaggtacttaagcgattcccttcttagaat

SEQ ID NO: 211757 - DNA, 33 bp, Homo sapien
tttgctttttcctttcaattttaacacatagag

SEQ ID NO: 211758 - DNA, 33 bp, Homo sapien
tttgctttttcctttcgattttaacacatagag

SEQ ID NO: 211759 - DNA, 33 bp, Homo sapien
catcaactcaccaggagagtgagcactaagaac

SEQ ID NO: 211760 - DNA, 33 bp, Homo sapien
catcaactcaccaggatagtgagcactaagaac

SEQ ID NO: 211761 - DNA, 33 bp, Homo sapien
ttgttgctggtgggtacgctacagagtcccagg

SEQ ID NO: 211762 - DNA, 33 bp, Homo sapien
ttgttgctggtgggtatgctacagagtcccagg

SEQ ID NO: 211763 - DNA, 33 bp, Homo sapien
atacctttgtaaataaacactcctgaatttatc

SEQ ID NO: 211764 - DNA, 33 bp, Homo sapien
atacctttgtaaataaccactcctgaatttatc

SEQ ID NO: 211765 - DNA, 33 bp, Homo sapien
atttatttttggcaagaaatcacgtctttgttt

SEQ ID NO: 211766 - DNA, 33 bp, Homo sapien
atttatttttggcaagcaatcacgtctttgttt

SEQ ID NO: 211767 - DNA, 33 bp, Homo sapien
agttataattaggcaacgacccataaatgtgca

SEQ ID NO: 211768 - DNA, 33 bp, Homo sapien
agttataattaggcaatgacccataaatgtgca

SEQ ID NO: 211769 - DNA, 33 bp, Homo sapien
agcaggatagtggacacggaacgtaaattggat

SEQ ID NO: 211770 - DNA, 33 bp, Homo sapien
agcaggatagtggacatggaacgtaaattggat

SEQ ID NO: 211771 - DNA, 33 bp, Homo sapien
agttagtcttagcccaaattattccaaatgtat

SEQ ID NO: 211772 - DNA, 33 bp, Homo sapien
agttagtcttagcccagattattccaaatgtat

SEQ ID NO: 211773 - DNA, 33 bp, Homo sapien
aagtaagccatgaaaccaagaaaggtcactctc

SEQ ID NO: 211774 - DNA, 33 bp, Homo sapien
aagtaagccatgaaacgaagaaaggtcactctc

SEQ ID NO: 211775 - DNA, 33 bp, Homo sapien
caaaaaaaataaagcacctgtcacataacatgg

SEQ ID NO: 211776 - DNA, 33 bp, Homo sapien
caaaaaaaataaagcatctgtcacataacatgg

SEQ ID NO: 211777 - DNA, 33 bp, Homo sapien
tagggaattacacagaaagaaagtgaagagaat

SEQ ID NO: 211778 - DNA, 33 bp, Homo sapien
tagggaattacacagacagaaagtgaagagaat

SEQ ID NO: 211779 - DNA, 33 bp, Homo sapien
aatatgtctaacaaggaaccagcctgttcaacg

SEQ ID NO: 211780 - DNA, 33 bp, Homo sapien
aatatgtctaacaagggaccagcctgttcaacg

SEQ ID NO: 211781 - DNA, 33 bp, Homo sapien
aagccgcaaagtggaacagatcccgtgaagaac

SEQ ID NO: 211782 - DNA, 33 bp, Homo sapien
aagccgcaaagtggaagagatcccgtgaagaac

SEQ ID NO: 211783 - DNA, 33 bp, Homo sapien
gtggttgaagactcccaagctgagtgttccaag

SEQ ID NO: 211784 - DNA, 33 bp, Homo sapien
gtggttgaagactcccgagctgagtgttccaag

SEQ ID NO: 211785 - DNA, 33 bp, Homo sapien
caacacttaaattaagaaaattggctacaaccc

SEQ ID NO: 211786 - DNA, 33 bp, Homo sapien
caacacttaaattaaggaaattggctacaaccc

SEQ ID NO: 211787 - DNA, 33 bp, Homo sapien
tagtgttttggacttaacacgtgtgctcagagt

SEQ ID NO: 211788 - DNA, 33 bp, Homo sapien
tagtgttttggacttaccacgtgtgctcagagt

SEQ ID NO: 211789 - DNA, 33 bp, Homo sapien
taatgtctagtaacacaattaaggcaacacctt

SEQ ID NO: 211790 - DNA, 33 bp, Homo sapien
taatgtctagtaacacgattaaggcaacacctt

SEQ ID NO: 211791 - DNA, 33 bp, Homo sapien
gcttcccaacatcaggaaaagaagggtctacca

SEQ ID NO: 211792 - DNA, 33 bp, Homo sapien
gcttcccaacatcaggtaaagaagggtctacca

SEQ ID NO: 211793 - DNA, 33 bp, Homo sapien
tttctatttgaagtacaggagaaatgttgctgt

SEQ ID NO: 211794 - DNA, 33 bp, Homo sapien
tttctatttgaagtacgggagaaatgttgctgt

SEQ ID NO: 211795 - DNA, 33 bp, Homo sapien
gacataacaaaaaaataaatctacagaccaata

SEQ ID NO: 211796 - DNA, 33 bp, Homo sapien
gacataacaaaaaaattaatctacagaccaata

SEQ ID NO: 211797 - DNA, 33 bp, Homo sapien
gattatctagaagttaaatattaatgcaattgg

SEQ ID NO: 211798 - DNA, 33 bp, Homo sapien
gattatctagaagttacatattaatgcaattgg

SEQ ID NO: 211799 - DNA, 33 bp, Homo sapien
taattagaaatcacacacttataccgcagttaa

SEQ ID NO: 211800 - DNA, 33 bp, Homo sapien
taattagaaatcacacgcttataccgcagttaa

SEQ ID NO: 211801 - DNA, 33 bp, Homo sapien
gttgtcaacagagaagaagaaaagtaccaaatt

SEQ ID NO: 211802 - DNA, 33 bp, Homo sapien
gttgtcaacagagaaggagaaaagtaccaaatt

SEQ ID NO: 211803 - DNA, 33 bp, Homo sapien
catatataattgggaaataagtaaggacatgtc

SEQ ID NO: 211804 - DNA, 33 bp, Homo sapien
catatataattgggaagtaagtaaggacatgtc

SEQ ID NO: 211805 - DNA, 33 bp, Homo sapien
cagtgatccttttaagacatagttcagatcata

SEQ ID NO: 211806 - DNA, 33 bp, Homo sapien
cagtgatccttttaaggcatagttcagatcata

SEQ ID NO: 211807 - DNA, 33 bp, Homo sapien
aaggctaaacaaattcccctagcccactgtcca

SEQ ID NO: 211808 - DNA, 33 bp, Homo sapien
aaggctaaacaaattctcctagcccactgtcca

SEQ ID NO: 211809 - DNA, 33 bp, Homo sapien
ttggttagaatgtgtaggacactgattaatata

SEQ ID NO: 211810 - DNA, 33 bp, Homo sapien
ttggttagaatgtgtatgacactgattaatata

SEQ ID NO: 211811 - DNA, 33 bp, Homo sapien
ggcaagaccaccggcaacgcattccctcaaatt

SEQ ID NO: 211812 - DNA, 33 bp, Homo sapien
ggcaagaccaccggcagcgcattccctcaaatt

SEQ ID NO: 211813 - DNA, 33 bp, Homo sapien
aaagactttacaagaaagagctttggtggagaa

SEQ ID NO: 211814 - DNA, 33 bp, Homo sapien
aaagactttacaagaatgagctttggtggagaa

SEQ ID NO: 211815 - DNA, 33 bp, Homo sapien
gccttcactggagttacagtctagctaggaaga

SEQ ID NO: 211816 - DNA, 33 bp, Homo sapien
gccttcactggagttatagtctagctaggaaga

SEQ ID NO: 211817 - DNA, 33 bp, Homo sapien
ctcataacattataaagtaacatctgatcatgc

SEQ ID NO: 211818 - DNA, 33 bp, Homo sapien
ctcataacattataaattaacatctgatcatgc

SEQ ID NO: 211819 - DNA, 33 bp, Homo sapien
tgtttgtgttgtctggcactcagttggcataaa

SEQ ID NO: 211820 - DNA, 33 bp, Homo sapien
tgtttgtgttgtctggtactcagttggcataaa

SEQ ID NO: 211821 - DNA, 33 bp, Homo sapien
tgtgatttgattcttaactcattgcatgtggaa

SEQ ID NO: 211822 - DNA, 33 bp, Homo sapien
tgtgatttgattcttagctcattgcatgtggaa

SEQ ID NO: 211823 - DNA, 33 bp, Homo sapien
cagttctccttagggaccctcaattgcctgtga

SEQ ID NO: 211824 - DNA, 33 bp, Homo sapien
cagttctccttagggatcctcaattgcctgtga

SEQ ID NO: 211825 - DNA, 33 bp, Homo sapien
tgtggcagcaaaactccaatcactgcctttata

SEQ ID NO: 211826 - DNA, 33 bp, Homo sapien
tgtggcagcaaaactctaatcactgcctttata

SEQ ID NO: 211827 - DNA, 33 bp, Homo sapien
gtggtacccagaacaaccacgtaaaagaaagaa

SEQ ID NO: 211828 - DNA, 33 bp, Homo sapien
gtggtacccagaacaatcacgtaaaagaaagaa

SEQ ID NO: 211829 - DNA, 33 bp, Homo sapien
gaaaactgctcactacacggggaaaaacaaatc

SEQ ID NO: 211830 - DNA, 33 bp, Homo sapien
gaaaactgctcactacgcggggaaaaacaaatc

SEQ ID NO: 211831 - DNA, 33 bp, Homo sapien
attttctcatagaaacaatcattagcttcccag

SEQ ID NO: 211832 - DNA, 33 bp, Homo sapien
attttctcatagaaacgatcattagcttcccag

SEQ ID NO: 211833 - DNA, 33 bp, Homo sapien
gggcctaaggcaatcaaaagtatccatagaaga

SEQ ID NO: 211834 - DNA, 33 bp, Homo sapien
gggcctaaggcaatcacaagtatccatagaaga

SEQ ID NO: 211835 - DNA, 33 bp, Homo sapien
tacaacctggtcataaacacccctcagtggcct

SEQ ID NO: 211836 - DNA, 33 bp, Homo sapien
tacaacctggtcataaccacccctcagtggcct

SEQ ID NO: 211837 - DNA, 33 bp, Homo sapien
acaaatcagttttccaacattgcactgtacccc

SEQ ID NO: 211838 - DNA, 33 bp, Homo sapien
acaaatcagttttccagcattgcactgtacccc

SEQ ID NO: 211839 - DNA, 33 bp, Homo sapien
taaaagtgctttgcaaactcataaagcaccatt

SEQ ID NO: 211840 - DNA, 33 bp, Homo sapien
taaaagtgctttgcaagctcataaagcaccatt

SEQ ID NO: 211841 - DNA, 33 bp, Homo sapien
ggatcagccaggagaactacttgagtgacactg

SEQ ID NO: 211842 - DNA, 33 bp, Homo sapien
ggatcagccaggagaagtacttgagtgacactg

SEQ ID NO: 211843 - DNA, 33 bp, Homo sapien
gagagaaatgagacggaaggaaggtaatggagc

SEQ ID NO: 211844 - DNA, 33 bp, Homo sapien
gagagaaatgagacgggaggaaggtaatggagc

SEQ ID NO: 211845 - DNA, 33 bp, Homo sapien
tcataaagtctaaaaagctactagatctcaaag

SEQ ID NO: 211846 - DNA, 33 bp, Homo sapien
tcataaagtctaaaaatctactagatctcaaag

SEQ ID NO: 211847 - DNA, 33 bp, Homo sapien
agtaaggattttaacaaactcaatacaaatccc

SEQ ID NO: 211848 - DNA, 33 bp, Homo sapien
agtaaggattttaacagactcaatacaaatccc

SEQ ID NO: 211849 - DNA, 33 bp, Homo sapien
aaaattatataaacaacaagtgtggcgcaggtc

SEQ ID NO: 211850 - DNA, 33 bp, Homo sapien
aaaattatataaacaataagtgtggcgcaggtc

SEQ ID NO: 211851 - DNA, 33 bp, Homo sapien
ctgtttccaaacatgaaggaagtttgggaacag

SEQ ID NO: 211852 - DNA, 33 bp, Homo sapien
ctgtttccaaacatgagggaagtttgggaacag

SEQ ID NO: 211853 - DNA, 33 bp, Homo sapien
caggtttgttacatggacaacaatgtgtgtgat

SEQ ID NO: 211854 - DNA, 33 bp, Homo sapien
caggtttgttacatgggcaacaatgtgtgtgat

SEQ ID NO: 211855 - DNA, 33 bp, Homo sapien
ttcactaactgagtaacgggatcgatagaagcc

SEQ ID NO: 211856 - DNA, 33 bp, Homo sapien
ttcactaactgagtaatgggatcgatagaagcc

SEQ ID NO: 211857 - DNA, 33 bp, Homo sapien
acaatctcagcctgttaaaattgcctgagtttt

SEQ ID NO: 211858 - DNA, 33 bp, Homo sapien
acaatctcagcctgttgaaattgcctgagtttt

SEQ ID NO: 211859 - DNA, 33 bp, Homo sapien
agcatttcaatagggaagaagtgatcaattttg

SEQ ID NO: 211860 - DNA, 33 bp, Homo sapien
agcatttcaatagggaggaagtgatcaattttg

SEQ ID NO: 211861 - DNA, 33 bp, Homo sapien
catacacaggacttccaagttttctccagttct

SEQ ID NO: 211862 - DNA, 33 bp, Homo sapien
catacacaggacttccgagttttctccagttct

SEQ ID NO: 211863 - DNA, 33 bp, Homo sapien
ctataattttttgtgacgataaggttactagtg

SEQ ID NO: 211864 - DNA, 33 bp, Homo sapien
ctataattttttgtgatgataaggttactagtg

SEQ ID NO: 211865 - DNA, 33 bp, Homo sapien
aaagttaccctgtttcactctcaaatatcctag

SEQ ID NO: 211866 - DNA, 33 bp, Homo sapien
aaagttaccctgtttcgctctcaaatatcctag

SEQ ID NO: 211867 - DNA, 33 bp, Homo sapien
ggctaaagtctgattacacctccatttgttata

SEQ ID NO: 211868 - DNA, 33 bp, Homo sapien
ggctaaagtctgattatacctccatttgttata

SEQ ID NO: 211869 - DNA, 33 bp, Homo sapien
catcactctgacctcactcttccactttaaagg

SEQ ID NO: 211870 - DNA, 33 bp, Homo sapien
catcactctgacctcattcttccactttaaagg

SEQ ID NO: 211871 - DNA, 33 bp, Homo sapien
ataataccagcatccacagtcaattgtgttcca

SEQ ID NO: 211872 - DNA, 33 bp, Homo sapien
ataataccagcatccagagtcaattgtgttcca

SEQ ID NO: 211873 - DNA, 33 bp, Homo sapien
tacaggcaaatgagagactattactcaccacaa

SEQ ID NO: 211874 - DNA, 33 bp, Homo sapien
tacaggcaaatgagaggctattactcaccacaa

SEQ ID NO: 211875 - DNA, 33 bp, Homo sapien
agaagtgcgttaaaacaagcacaccgtgaaggg

SEQ ID NO: 211876 - DNA, 33 bp, Homo sapien
agaagtgcgttaaaacgagcacaccgtgaaggg

SEQ ID NO: 211877 - DNA, 33 bp, Homo sapien
ctctattgacaatttacgactagggcaggtact

SEQ ID NO: 211878 - DNA, 33 bp, Homo sapien
ctctattgacaatttatgactagggcaggtact

SEQ ID NO: 211879 - DNA, 33 bp, Homo sapien
ctttctttctccacgacgtgctatttgaagaga

SEQ ID NO: 211880 - DNA, 33 bp, Homo sapien
ctttctttctccacgatgtgctatttgaagaga

SEQ ID NO: 211881 - DNA, 33 bp, Homo sapien
gaactctgtggcaaaagttaagtcagtgtgtca

SEQ ID NO: 211882 - DNA, 33 bp, Homo sapien
gaactctgtggcaaaatttaagtcagtgtgtca

SEQ ID NO: 211883 - DNA, 33 bp, Homo sapien
tcaggagaaacttaaacaaggcaatagctcttc

SEQ ID NO: 211884 - DNA, 33 bp, Homo sapien
tcaggagaaacttaaataaggcaatagctcttc

SEQ ID NO: 211885 - DNA, 33 bp, Homo sapien
aaccattcctttgcaacgaataaagacactaat

SEQ ID NO: 211886 - DNA, 33 bp, Homo sapien
aaccattcctttgcaatgaataaagacactaat

SEQ ID NO: 211887 - DNA, 33 bp, Homo sapien
aggctaatatcaagagcaggtatatgaatcaca

SEQ ID NO: 211888 - DNA, 33 bp, Homo sapien
aggctaatatcaagagtaggtatatgaatcaca

SEQ ID NO: 211889 - DNA, 33 bp, Homo sapien
tttccagaattgaagacatgatgcctggaagga

SEQ ID NO: 211890 - DNA, 33 bp, Homo sapien
tttccagaattgaagagatgatgcctggaagga

SEQ ID NO: 211891 - DNA, 33 bp, Homo sapien
gaaggcattccaaggactaaccataaacagctt

SEQ ID NO: 211892 - DNA, 33 bp, Homo sapien
gaaggcattccaaggagtaaccataaacagctt

SEQ ID NO: 211893 - DNA, 33 bp, Homo sapien
aaaccggctcaatgcactcaaattaatgtcgtg

SEQ ID NO: 211894 - DNA, 33 bp, Homo sapien
aaaccggctcaatgcattcaaattaatgtcgtg

SEQ ID NO: 211895 - DNA, 33 bp, Homo sapien
catcatttctatcctgaagaagcctgacactga

SEQ ID NO: 211896 - DNA, 33 bp, Homo sapien
catcatttctatcctgtagaagcctgacactga

SEQ ID NO: 211897 - DNA, 33 bp, Homo sapien
tcatttctgtttcatacaagagagtatctaaaa

SEQ ID NO: 211898 - DNA, 33 bp, Homo sapien
tcatttctgtttcatataagagagtatctaaaa

SEQ ID NO: 211899 - DNA, 33 bp, Homo sapien
agcagtctagaaaaaaacctgcattctgataag

SEQ ID NO: 211900 - DNA, 33 bp, Homo sapien
agcagtctagaaaaaagcctgcattctgataag

SEQ ID NO: 211901 - DNA, 33 bp, Homo sapien
taatctctttggcaaaggtagctggactatacc

SEQ ID NO: 211902 - DNA, 33 bp, Homo sapien
taatctctttggcaaatgtagctggactatacc

SEQ ID NO: 211903 - DNA, 33 bp, Homo sapien
tctcccactgtcttaaaaaatagcacctggctc

SEQ ID NO: 211904 - DNA, 33 bp, Homo sapien
tctcccactgtcttaagaaatagcacctggctc

SEQ ID NO: 211905 - DNA, 33 bp, Homo sapien
caggatacaatggtgaaacaggcatagagtaaa

SEQ ID NO: 211906 - DNA, 33 bp, Homo sapien
caggatacaatggtgagacaggcatagagtaaa

SEQ ID NO: 211907 - DNA, 33 bp, Homo sapien
agtgagacttgagcagacatcatcatgtgatgc

SEQ ID NO: 211908 - DNA, 33 bp, Homo sapien
agtgagacttgagcaggcatcatcatgtgatgc

SEQ ID NO: 211909 - DNA, 33 bp, Homo sapien
agagagtccctactaacgagaaagccctcacca

SEQ ID NO: 211910 - DNA, 33 bp, Homo sapien
agagagtccctactaatgagaaagccctcacca

SEQ ID NO: 211911 - DNA, 33 bp, Homo sapien
ggggccctcgcttaccaacagttcctctccatg

SEQ ID NO: 211912 - DNA, 33 bp, Homo sapien
ggggccctcgcttaccgacagttcctctccatg

SEQ ID NO: 211913 - DNA, 33 bp, Homo sapien
tcccaagtagctataaatcttttaaacaaacaa

SEQ ID NO: 211914 - DNA, 33 bp, Homo sapien
tcccaagtagctataagtcttttaaacaaacaa

SEQ ID NO: 211915 - DNA, 33 bp, Homo sapien
aaaaaacatcacagaactagtctagcctcagaa

SEQ ID NO: 211916 - DNA, 33 bp, Homo sapien
aaaaaacatcacagaagtagtctagcctcagaa

SEQ ID NO: 211917 - DNA, 33 bp, Homo sapien
ttgattcaactacaccaaaccactgacaattct

SEQ ID NO: 211918 - DNA, 33 bp, Homo sapien
ttgattcaactacaccgaaccactgacaattct

SEQ ID NO: 211919 - DNA, 33 bp, Homo sapien
tcaggttaaacagaaaattaatgtcaggttaaa

SEQ ID NO: 211920 - DNA, 33 bp, Homo sapien
tcaggttaaacagaaagttaatgtcaggttaaa

SEQ ID NO: 211921 - DNA, 33 bp, Homo sapien
gaaaagagactatatcccgaaggaactgtggaa

SEQ ID NO: 211922 - DNA, 33 bp, Homo sapien
gaaaagagactatatctcgaaggaactgtggaa

SEQ ID NO: 211923 - DNA, 33 bp, Homo sapien
atgagcatctaagatacagaattggagtcatca

SEQ ID NO: 211924 - DNA, 33 bp, Homo sapien
atgagcatctaagatatagaattggagtcatca

SEQ ID NO: 211925 - DNA, 33 bp, Homo sapien
aaatctgctatgtcaaagtcaagaccatgaatg

SEQ ID NO: 211926 - DNA, 33 bp, Homo sapien
aaatctgctatgtcaaggtcaagaccatgaatg

SEQ ID NO: 211927 - DNA, 33 bp, Homo sapien
tgagttatttcagagaagtagttttcaagttct

SEQ ID NO: 211928 - DNA, 33 bp, Homo sapien
tgagttatttcagagaggtagttttcaagttct

SEQ ID NO: 211929 - DNA, 33 bp, Homo sapien
caatgagatactgtcacataccagtgagaatgg

SEQ ID NO: 211930 - DNA, 33 bp, Homo sapien
caatgagatactgtcatataccagtgagaatgg

SEQ ID NO: 211931 - DNA, 33 bp, Homo sapien
tacaacattgtgcctaaaattaacaatattgtt

SEQ ID NO: 211932 - DNA, 33 bp, Homo sapien
tacaacattgtgcctataattaacaatattgtt

SEQ ID NO: 211933 - DNA, 33 bp, Homo sapien
accaagcttgccagtacgttctccaggacttgt

SEQ ID NO: 211934 - DNA, 33 bp, Homo sapien
accaagcttgccagtatgttctccaggacttgt

SEQ ID NO: 211935 - DNA, 33 bp, Homo sapien
gaggaggatgaagggaatcatgaagaagagaaa

SEQ ID NO: 211936 - DNA, 33 bp, Homo sapien
gaggaggatgaagggagtcatgaagaagagaaa

SEQ ID NO: 211937 - DNA, 33 bp, Homo sapien
aagaagagaaagaagagattttatttgcggtag

SEQ ID NO: 211938 - DNA, 33 bp, Homo sapien
aagaagagaaagaagatattttatttgcggtag

SEQ ID NO: 211939 - DNA, 33 bp, Homo sapien
caaatggtcaaatggaagtattttatgataaac

SEQ ID NO: 211940 - DNA, 33 bp, Homo sapien
caaatggtcaaatggatgtattttatgataaac

SEQ ID NO: 211941 - DNA, 33 bp, Homo sapien
tgaaaagttaaacaccacaggtactaggccaag

SEQ ID NO: 211942 - DNA, 33 bp, Homo sapien
tgaaaagttaaacaccgcaggtactaggccaag

SEQ ID NO: 211943 - DNA, 33 bp, Homo sapien
aataattcattgataaataacagtggctgtttt

SEQ ID NO: 211944 - DNA, 33 bp, Homo sapien
aataattcattgataagtaacagtggctgtttt

SEQ ID NO: 211945 - DNA, 33 bp, Homo sapien
ctgtagatgtccagataagaaggaaagttagca

SEQ ID NO: 211946 - DNA, 33 bp, Homo sapien
ctgtagatgtccagatgagaaggaaagttagca

SEQ ID NO: 211947 - DNA, 33 bp, Homo sapien
gttctcaaacatctcaaaaaccatcagctctgt

SEQ ID NO: 211948 - DNA, 33 bp, Homo sapien
gttctcaaacatctcacaaaccatcagctctgt

SEQ ID NO: 211949 - DNA, 33 bp, Homo sapien
agtgaataagtccgataacatctgatggtttta

SEQ ID NO: 211950 - DNA, 33 bp, Homo sapien
agtgaataagtccgatgacatctgatggtttta

SEQ ID NO: 211951 - DNA, 33 bp, Homo sapien
atcttggggttagatacggaaaggctttcaaaa

SEQ ID NO: 211952 - DNA, 33 bp, Homo sapien
atcttggggttagatagggaaaggctttcaaaa

SEQ ID NO: 211953 - DNA, 33 bp, Homo sapien
ggagtggagtcccataacatcattaattccaca

SEQ ID NO: 211954 - DNA, 33 bp, Homo sapien
ggagtggagtcccatagcatcattaattccaca

SEQ ID NO: 211955 - DNA, 33 bp, Homo sapien
cttagattgaaaaagacgctattgctttaatag

SEQ ID NO: 211956 - DNA, 33 bp, Homo sapien
cttagattgaaaaagaggctattgctttaatag

SEQ ID NO: 211957 - DNA, 33 bp, Homo sapien
gctagatatttttctaagcattccccttcttcc

SEQ ID NO: 211958 - DNA, 33 bp, Homo sapien
gctagatatttttctatgcattccccttcttcc

SEQ ID NO: 211959 - DNA, 33 bp, Homo sapien
ggcaaactgctaagagaactaggaactactcat

SEQ ID NO: 211960 - DNA, 33 bp, Homo sapien
ggcaaactgctaagagcactaggaactactcat

SEQ ID NO: 211961 - DNA, 33 bp, Homo sapien
cctgatgtaacataaaacacagaacagacattc

SEQ ID NO: 211962 - DNA, 33 bp, Homo sapien
cctgatgtaacataaatcacagaacagacattc

SEQ ID NO: 211963 - DNA, 33 bp, Homo sapien
tgagatcactgtaatacatggcaatagatgggt

SEQ ID NO: 211964 - DNA, 33 bp, Homo sapien
tgagatcactgtaatatatggcaatagatgggt

SEQ ID NO: 211965 - DNA, 33 bp, Homo sapien
gatttattatagggtcaatgcctaaaagatgcc

SEQ ID NO: 211966 - DNA, 33 bp, Homo sapien
gatttattatagggtcgatgcctaaaagatgcc

SEQ ID NO: 211967 - DNA, 33 bp, Homo sapien
aatggaaggcaagggagctttggccacttgact

SEQ ID NO: 211968 - DNA, 33 bp, Homo sapien
aatggaaggcaagggatctttggccacttgact

SEQ ID NO: 211969 - DNA, 33 bp, Homo sapien
cttttggaggcatttcccttttaccattcaccg

SEQ ID NO: 211970 - DNA, 33 bp, Homo sapien
cttttggaggcatttctcttttaccattcaccg

SEQ ID NO: 211971 - DNA, 33 bp, Homo sapien
ggtctgaagccaaaaacggttcctcttctcctg

SEQ ID NO: 211972 - DNA, 33 bp, Homo sapien
ggtctgaagccaaaaatggttcctcttctcctg

SEQ ID NO: 211973 - DNA, 33 bp, Homo sapien
ccaagtttcgctgttacaccaccatgtggagaa

SEQ ID NO: 211974 - DNA, 33 bp, Homo sapien
ccaagtttcgctgttataccaccatgtggagaa

SEQ ID NO: 211975 - DNA, 33 bp, Homo sapien
taattttaaaattccaacatcacttttgtttaa

SEQ ID NO: 211976 - DNA, 33 bp, Homo sapien
taattttaaaattccagcatcacttttgtttaa

SEQ ID NO: 211977 - DNA, 33 bp, Homo sapien
gttttccatacttgacaaagattgaccatgtca

SEQ ID NO: 211978 - DNA, 33 bp, Homo sapien
gttttccatacttgacgaagattgaccatgtca

SEQ ID NO: 211979 - DNA, 33 bp, Homo sapien
ttttattgttattccaatccaacattatgactc

SEQ ID NO: 211980 - DNA, 33 bp, Homo sapien
ttttattgttattccagtccaacattatgactc

SEQ ID NO: 211981 - DNA, 33 bp, Homo sapien
taaaatgcaagtaagaacattaataacaataga

SEQ ID NO: 211982 - DNA, 33 bp, Homo sapien
taaaatgcaagtaagagcattaataacaataga

SEQ ID NO: 211983 - DNA, 33 bp, Homo sapien
tgaaattctgtcctcacctcggtctattgttat

SEQ ID NO: 211984 - DNA, 33 bp, Homo sapien
tgaaattctgtcctcagctcggtctattgttat

SEQ ID NO: 211985 - DNA, 33 bp, Homo sapien
gcactgtatcatatcaaaaaaagcaggatccat

SEQ ID NO: 211986 - DNA, 33 bp, Homo sapien
gcactgtatcatatcagaaaaagcaggatccat

SEQ ID NO: 211987 - DNA, 33 bp, Homo sapien
ggatgttttccccattaaatacgttgaaatagg

SEQ ID NO: 211988 - DNA, 33 bp, Homo sapien
ggatgttttccccatttaatacgttgaaatagg

SEQ ID NO: 211989 - DNA, 33 bp, Homo sapien
gtccatcccatagccaatgactgcctctcattc

SEQ ID NO: 211990 - DNA, 33 bp, Homo sapien
gtccatcccatagccagtgactgcctctcattc

SEQ ID NO: 211991 - DNA, 33 bp, Homo sapien
ccttatttctgaactcgctcatgttggtggtta

SEQ ID NO: 211992 - DNA, 33 bp, Homo sapien
ccttatttctgaactctctcatgttggtggtta

SEQ ID NO: 211993 - DNA, 33 bp, Homo sapien
ctggaagacgcaaaaactgtggccagcctctcc

SEQ ID NO: 211994 - DNA, 33 bp, Homo sapien
ctggaagacgcaaaaattgtggccagcctctcc

SEQ ID NO: 211995 - DNA, 33 bp, Homo sapien
tttgcaagccgtgacacattgagggcctatttt

SEQ ID NO: 211996 - DNA, 33 bp, Homo sapien
tttgcaagccgtgacagattgagggcctatttt

SEQ ID NO: 211997 - DNA, 33 bp, Homo sapien
tatggtgtattatttaagtaagcctaggcaaat

SEQ ID NO: 211998 - DNA, 33 bp, Homo sapien
tatggtgtattatttatgtaagcctaggcaaat

SEQ ID NO: 211999 - DNA, 33 bp, Homo sapien
tagagctgctaagtcacagagtatctccctatt

SEQ ID NO: 212000 - DNA, 33 bp, Homo sapien
tagagctgctaagtcatagagtatctccctatt

SEQ ID NO: 212001 - DNA, 33 bp, Homo sapien
aaacttgactgcagtacagtttgaattacaaag

SEQ ID NO: 212002 - DNA, 33 bp, Homo sapien
aaacttgactgcagtagagtttgaattacaaag

SEQ ID NO: 212003 - DNA, 33 bp, Homo sapien
gatgacccaggtgataaagaataaaggtaaatg

SEQ ID NO: 212004 - DNA, 33 bp, Homo sapien
gatgacccaggtgatatagaataaaggtaaatg

SEQ ID NO: 212005 - DNA, 33 bp, Homo sapien
aggtttaaattcgaaactgtcaatggacaaata

SEQ ID NO: 212006 - DNA, 33 bp, Homo sapien
aggtttaaattcgaaagtgtcaatggacaaata

SEQ ID NO: 212007 - DNA, 33 bp, Homo sapien
aaactagggaaagaaactgtgactcacatcaca

SEQ ID NO: 212008 - DNA, 33 bp, Homo sapien
aaactagggaaagaaattgtgactcacatcaca

SEQ ID NO: 212009 - DNA, 33 bp, Homo sapien
atggacaaaatgcctccataactttgggcagag

SEQ ID NO: 212010 - DNA, 33 bp, Homo sapien
atggacaaaatgcctctataactttgggcagag

SEQ ID NO: 212011 - DNA, 33 bp, Homo sapien
tgggtaacaggtctaacaatggagctgggactc

SEQ ID NO: 212012 - DNA, 33 bp, Homo sapien
tgggtaacaggtctaagaatggagctgggactc

SEQ ID NO: 212013 - DNA, 33 bp, Homo sapien
cttccttttgactacactggttcacattctcgt

SEQ ID NO: 212014 - DNA, 33 bp, Homo sapien
cttccttttgactacagtggttcacattctcgt

SEQ ID NO: 212015 - DNA, 33 bp, Homo sapien
tcatagtaaaaaagtaacttgtttctctctctc

SEQ ID NO: 212016 - DNA, 33 bp, Homo sapien
tcatagtaaaaaagtagcttgtttctctctctc

SEQ ID NO: 212017 - DNA, 33 bp, Homo sapien
tactattaccctgcctaaagtcttctcaagcct

SEQ ID NO: 212018 - DNA, 33 bp, Homo sapien
tactattaccctgcctgaagtcttctcaagcct

SEQ ID NO: 212019 - DNA, 33 bp, Homo sapien
tattccctgaattaccagaatgtgcatactgtg

SEQ ID NO: 212020 - DNA, 33 bp, Homo sapien
tattccctgaattaccggaatgtgcatactgtg

SEQ ID NO: 212021 - DNA, 33 bp, Homo sapien
tgcctacagtgtcttgcatgccaccaatacaaa

SEQ ID NO: 212022 - DNA, 33 bp, Homo sapien
tgcctacagtgtcttggatgccaccaatacaaa

SEQ ID NO: 212023 - DNA, 33 bp, Homo sapien
tgtcctaaggtgcacacggagtctgaaacctag

SEQ ID NO: 212024 - DNA, 33 bp, Homo sapien
tgtcctaaggtgcacatggagtctgaaacctag

SEQ ID NO: 212025 - DNA, 33 bp, Homo sapien
attttttggctttaaaatgtcaacatggaaatt

SEQ ID NO: 212026 - DNA, 33 bp, Homo sapien
attttttggctttaaactgtcaacatggaaatt

SEQ ID NO: 212027 - DNA, 33 bp, Homo sapien
tgttttgtttctagaaatgtgattagactggag

SEQ ID NO: 212028 - DNA, 33 bp, Homo sapien
tgttttgtttctagaagtgtgattagactggag

SEQ ID NO: 212029 - DNA, 33 bp, Homo sapien
caaagatttaccgaacacttactatatgtcaac

SEQ ID NO: 212030 - DNA, 33 bp, Homo sapien
caaagatttaccgaacccttactatatgtcaac

SEQ ID NO: 212031 - DNA, 33 bp, Homo sapien
cgggccacatatcgtcatggcagaacatagatt

SEQ ID NO: 212032 - DNA, 33 bp, Homo sapien
cgggccacatatcgtcgtggcagaacatagatt

SEQ ID NO: 212033 - DNA, 33 bp, Homo sapien
aatcaatgatcctagcctaatgtgctatttttt

SEQ ID NO: 212034 - DNA, 33 bp, Homo sapien
aatcaatgatcctagcttaatgtgctatttttt

SEQ ID NO: 212035 - DNA, 33 bp, Homo sapien
ctttctctgtcaataaaatactgtctaattctg

SEQ ID NO: 212036 - DNA, 33 bp, Homo sapien
ctttctctgtcaataagatactgtctaattctg

SEQ ID NO: 212037 - DNA, 33 bp, Homo sapien
gcagttaggtccatcaaattctgaggttaggat

SEQ ID NO: 212038 - DNA, 33 bp, Homo sapien
gcagttaggtccatcagattctgaggttaggat

SEQ ID NO: 212039 - DNA, 33 bp, Homo sapien
aaatagtttgagcaaacgaatagagttggataa

SEQ ID NO: 212040 - DNA, 33 bp, Homo sapien
aaatagtttgagcaaatgaatagagttggataa

SEQ ID NO: 212041 - DNA, 33 bp, Homo sapien
tgtctctataagccgacgagtctgttctctttc

SEQ ID NO: 212042 - DNA, 33 bp, Homo sapien
tgtctctataagccgatgagtctgttctctttc

SEQ ID NO: 212043 - DNA, 33 bp, Homo sapien
gacacaactctacacaaaatgccattgaaagga

SEQ ID NO: 212044 - DNA, 33 bp, Homo sapien
gacacaactctacacacaatgccattgaaagga

SEQ ID NO: 212045 - DNA, 33 bp, Homo sapien
agcaggccattattccaccctgaatagctttta

SEQ ID NO: 212046 - DNA, 33 bp, Homo sapien
agcaggccattattcccccctgaatagctttta

SEQ ID NO: 212047 - DNA, 33 bp, Homo sapien
aaattaatttgttcatgagagagtttcaagcaa

SEQ ID NO: 212048 - DNA, 33 bp, Homo sapien
aaattaatttgttcattagagagtttcaagcaa

SEQ ID NO: 212049 - DNA, 33 bp, Homo sapien
acttgagcccgggatacgaagattgcaggacac

SEQ ID NO: 212050 - DNA, 33 bp, Homo sapien
acttgagcccgggatatgaagattgcaggacac

SEQ ID NO: 212051 - DNA, 33 bp, Homo sapien
tctgttacttctaaaccgcatattactaactgc

SEQ ID NO: 212052 - DNA, 33 bp, Homo sapien
tctgttacttctaaactgcatattactaactgc

SEQ ID NO: 212053 - DNA, 33 bp, Homo sapien
ttggtattgcagagtaaattgaagccagtataa

SEQ ID NO: 212054 - DNA, 33 bp, Homo sapien
ttggtattgcagagtacattgaagccagtataa

SEQ ID NO: 212055 - DNA, 33 bp, Homo sapien
ccagtgtttcatagtggaaaatctgtgcattca

SEQ ID NO: 212056 - DNA, 33 bp, Homo sapien
ccagtgtttcatagtgtaaaatctgtgcattca

SEQ ID NO: 212057 - DNA, 33 bp, Homo sapien
cctcattttctacataagagatcactgtgcctt

SEQ ID NO: 212058 - DNA, 33 bp, Homo sapien
cctcattttctacatatgagatcactgtgcctt

SEQ ID NO: 212059 - DNA, 33 bp, Homo sapien
agaaggatttttgtggcatcagaacttttggag

SEQ ID NO: 212060 - DNA, 33 bp, Homo sapien
agaaggatttttgtggtatcagaacttttggag

SEQ ID NO: 212061 - DNA, 33 bp, Homo sapien
ggaagataagatggtgaaagttattcataatgt

SEQ ID NO: 212062 - DNA, 33 bp, Homo sapien
ggaagataagatggtgcaagttattcataatgt

SEQ ID NO: 212063 - DNA, 33 bp, Homo sapien
aggcttattttttcccacaaattctactgtttt

SEQ ID NO: 212064 - DNA, 33 bp, Homo sapien
aggcttattttttcccgcaaattctactgtttt

SEQ ID NO: 212065 - DNA, 33 bp, Homo sapien
tccagttgatgcaaaagagtgtcctgagtgctt

SEQ ID NO: 212066 - DNA, 33 bp, Homo sapien
tccagttgatgcaaaatagtgtcctgagtgctt

SEQ ID NO: 212067 - DNA, 33 bp, Homo sapien
aggaaaagattgtctaactcttgtcatgcttta

SEQ ID NO: 212068 - DNA, 33 bp, Homo sapien
aggaaaagattgtctacctcttgtcatgcttta

SEQ ID NO: 212069 - DNA, 33 bp, Homo sapien
ggaattttccacaagacagttaattccctgact

SEQ ID NO: 212070 - DNA, 33 bp, Homo sapien
ggaattttccacaagagagttaattccctgact

SEQ ID NO: 212071 - DNA, 33 bp, Homo sapien
actggatttacagaaaagagaacagtatgcagt

SEQ ID NO: 212072 - DNA, 33 bp, Homo sapien
actggatttacagaaatgagaacagtatgcagt

SEQ ID NO: 212073 - DNA, 33 bp, Homo sapien
cagtatgcagttgaaaataagcttattattaaa

SEQ ID NO: 212074 - DNA, 33 bp, Homo sapien
cagtatgcagttgaaagtaagcttattattaaa

SEQ ID NO: 212075 - DNA, 33 bp, Homo sapien
aacataggccaattccaaatcttgggggagatg

SEQ ID NO: 212076 - DNA, 33 bp, Homo sapien
aacataggccaattccgaatcttgggggagatg

SEQ ID NO: 212077 - DNA, 33 bp, Homo sapien
accctgtctttgtcaaaattctttcattattaa

SEQ ID NO: 212078 - DNA, 33 bp, Homo sapien
accctgtctttgtcaagattctttcattattaa

SEQ ID NO: 212079 - DNA, 33 bp, Homo sapien
gtttctactaagcgaaaaaaaccagataagaga

SEQ ID NO: 212080 - DNA, 33 bp, Homo sapien
gtttctactaagcgaagaaaaccagataagaga

SEQ ID NO: 212081 - DNA, 33 bp, Homo sapien
acaatcaatctcttgaacttattcctcctgtac

SEQ ID NO: 212082 - DNA, 33 bp, Homo sapien
acaatcaatctcttgagcttattcctcctgtac

SEQ ID NO: 212083 - DNA, 33 bp, Homo sapien
gtgtggaactttagcacgaataactccatttag

SEQ ID NO: 212084 - DNA, 33 bp, Homo sapien
gtgtggaactttagcatgaataactccatttag

SEQ ID NO: 212085 - DNA, 33 bp, Homo sapien
aacagcaagaaactaaataaccgaatagaaaaa

SEQ ID NO: 212086 - DNA, 33 bp, Homo sapien
aacagcaagaaactaagtaaccgaatagaaaaa

SEQ ID NO: 212087 - DNA, 33 bp, Homo sapien
aaaaagaacaattggaatacctgacagacaaat

SEQ ID NO: 212088 - DNA, 33 bp, Homo sapien
aaaaagaacaattggagtacctgacagacaaat

SEQ ID NO: 212089 - DNA, 33 bp, Homo sapien
acaaagaaggaagttcccaggaccttgatggaa

SEQ ID NO: 212090 - DNA, 33 bp, Homo sapien
acaaagaaggaagttctcaggaccttgatggaa

SEQ ID NO: 212091 - DNA, 33 bp, Homo sapien
tatgtatgtgttaatacgcactaccacattaat

SEQ ID NO: 212092 - DNA, 33 bp, Homo sapien
tatgtatgtgttaatatgcactaccacattaat

SEQ ID NO: 212093 - DNA, 33 bp, Homo sapien
cagtgaatgagggagagaggttcctgatgtgaa

SEQ ID NO: 212094 - DNA, 33 bp, Homo sapien
cagtgaatgagggagataggttcctgatgtgaa

SEQ ID NO: 212095 - DNA, 33 bp, Homo sapien
cagaaggtgtctgtgaactgtgatcatattgat

SEQ ID NO: 212096 - DNA, 33 bp, Homo sapien
cagaaggtgtctgtgacctgtgatcatattgat

SEQ ID NO: 212097 - DNA, 33 bp, Homo sapien
gagtattacacattaaagtacaacaagctgtta

SEQ ID NO: 212098 - DNA, 33 bp, Homo sapien
gagtattacacattaaggtacaacaagctgtta

SEQ ID NO: 212099 - DNA, 33 bp, Homo sapien
ttggctacagggtagacgataggtagagagggt

SEQ ID NO: 212100 - DNA, 33 bp, Homo sapien
ttggctacagggtagaggataggtagagagggt

SEQ ID NO: 212101 - DNA, 33 bp, Homo sapien
tgggtaaaatatctccaaaaaacattgtttgag

SEQ ID NO: 212102 - DNA, 33 bp, Homo sapien
tgggtaaaatatctccgaaaaacattgtttgag

SEQ ID NO: 212103 - DNA, 33 bp, Homo sapien
tttcaaagaccaggtaagaaaaatgtgacatta

SEQ ID NO: 212104 - DNA, 33 bp, Homo sapien
tttcaaagaccaggtaggaaaaatgtgacatta

SEQ ID NO: 212105 - DNA, 33 bp, Homo sapien
aagataggcccagcacaatggaattaaaaaact

SEQ ID NO: 212106 - DNA, 33 bp, Homo sapien
aagataggcccagcacgatggaattaaaaaact

SEQ ID NO: 212107 - DNA, 33 bp, Homo sapien
aaagcaggtaatgtcacaaaggatttgccattt

SEQ ID NO: 212108 - DNA, 33 bp, Homo sapien
aaagcaggtaatgtcataaaggatttgccattt

SEQ ID NO: 212109 - DNA, 33 bp, Homo sapien
cagttaacttaagtcaccttcagaatgttcttg

SEQ ID NO: 212110 - DNA, 33 bp, Homo sapien
cagttaacttaagtcagcttcagaatgttcttg

SEQ ID NO: 212111 - DNA, 33 bp, Homo sapien
ttgggctggggtatgaccaagtatttgtgcgta

SEQ ID NO: 212112 - DNA, 33 bp, Homo sapien
ttgggctggggtatgagcaagtatttgtgcgta

SEQ ID NO: 212113 - DNA, 33 bp, Homo sapien
ccttatattccacgctcaacatgggaaaggaga

SEQ ID NO: 212114 - DNA, 33 bp, Homo sapien
ccttatattccacgcttaacatgggaaaggaga

SEQ ID NO: 212115 - DNA, 33 bp, Homo sapien
ttgtattcttgaaaaacgtaaacagagcagttg

SEQ ID NO: 212116 - DNA, 33 bp, Homo sapien
ttgtattcttgaaaaatgtaaacagagcagttg

SEQ ID NO: 212117 - DNA, 33 bp, Homo sapien
ggagatgttgatcaaaagatacataattacagt

SEQ ID NO: 212118 - DNA, 33 bp, Homo sapien
ggagatgttgatcaaaggatacataattacagt

SEQ ID NO: 212119 - DNA, 33 bp, Homo sapien
tattaaggacacttaacatccatagtgttgcaa

SEQ ID NO: 212120 - DNA, 33 bp, Homo sapien
tattaaggacacttaatatccatagtgttgcaa

SEQ ID NO: 212121 - DNA, 33 bp, Homo sapien
acattttctttaggtcaccatttattgatggac

SEQ ID NO: 212122 - DNA, 33 bp, Homo sapien
acattttctttaggtctccatttattgatggac

SEQ ID NO: 212123 - DNA, 33 bp, Homo sapien
tccttttttaatatccagcatctgacttattag

SEQ ID NO: 212124 - DNA, 33 bp, Homo sapien
tccttttttaatatccggcatctgacttattag

SEQ ID NO: 212125 - DNA, 33 bp, Homo sapien
gtgaatcattcaaggaatatggaatctgtgtag

SEQ ID NO: 212126 - DNA, 33 bp, Homo sapien
gtgaatcattcaaggagtatggaatctgtgtag

SEQ ID NO: 212127 - DNA, 33 bp, Homo sapien
tgcacaaaagccaaaactttggactcctttgat

SEQ ID NO: 212128 - DNA, 33 bp, Homo sapien
tgcacaaaagccaaaagtttggactcctttgat

SEQ ID NO: 212129 - DNA, 33 bp, Homo sapien
tatagtatatatgtgacaacttgaaaaacactt

SEQ ID NO: 212130 - DNA, 33 bp, Homo sapien
tatagtatatatgtgagaacttgaaaaacactt

SEQ ID NO: 212131 - DNA, 33 bp, Homo sapien
gctttctcgtttacgaacacactgatatttcct

SEQ ID NO: 212132 - DNA, 33 bp, Homo sapien
gctttctcgtttacgaccacactgatatttcct

SEQ ID NO: 212133 - DNA, 33 bp, Homo sapien
caggcaatatgcagcaatccaccaagaagggag

SEQ ID NO: 212134 - DNA, 33 bp, Homo sapien
caggcaatatgcagcagtccaccaagaagggag

SEQ ID NO: 212135 - DNA, 33 bp, Homo sapien
cagtgggcacgggagaacattgagcagaacata

SEQ ID NO: 212136 - DNA, 33 bp, Homo sapien
cagtgggcacgggagaccattgagcagaacata

SEQ ID NO: 212137 - DNA, 33 bp, Homo sapien
ttttcaatttttggaaaagatgggtatcgcata

SEQ ID NO: 212138 - DNA, 33 bp, Homo sapien
ttttcaatttttggaagagatgggtatcgcata

SEQ ID NO: 212139 - DNA, 33 bp, Homo sapien
aaaaaaaaaggcatagacattttgcaaagcatt

SEQ ID NO: 212140 - DNA, 33 bp, Homo sapien
aaaaaaaaaggcataggcattttgcaaagcatt

SEQ ID NO: 212141 - DNA, 33 bp, Homo sapien
agtagaagtctttagccagaataattaagggaa

SEQ ID NO: 212142 - DNA, 33 bp, Homo sapien
agtagaagtctttagcgagaataattaagggaa

SEQ ID NO: 212143 - DNA, 33 bp, Homo sapien
atgacttttcttttggaatatatgctggcatca

SEQ ID NO: 212144 - DNA, 33 bp, Homo sapien
atgacttttcttttgggatatatgctggcatca

SEQ ID NO: 212145 - DNA, 33 bp, Homo sapien
ttaaatgttctagataaaaagctggtcgctcat

SEQ ID NO: 212146 - DNA, 33 bp, Homo sapien
ttaaatgttctagatacaaagctggtcgctcat

SEQ ID NO: 212147 - DNA, 33 bp, Homo sapien
tggacaaatctgcacaatgatagtttatctgca

SEQ ID NO: 212148 - DNA, 33 bp, Homo sapien
tggacaaatctgcacagtgatagtttatctgca

SEQ ID NO: 212149 - DNA, 33 bp, Homo sapien
ataaacatacataaaaatctttccaattttcca

SEQ ID NO: 212150 - DNA, 33 bp, Homo sapien
ataaacatacataaaagtctttccaattttcca

SEQ ID NO: 212151 - DNA, 33 bp, Homo sapien
tcttgtgactaaaaccaatgaatactaatctaa

SEQ ID NO: 212152 - DNA, 33 bp, Homo sapien
tcttgtgactaaaaccgatgaatactaatctaa

SEQ ID NO: 212153 - DNA, 33 bp, Homo sapien
agacatagcaactatcaagaatcatatactaaa

SEQ ID NO: 212154 - DNA, 33 bp, Homo sapien
agacatagcaactatcgagaatcatatactaaa

SEQ ID NO: 212155 - DNA, 33 bp, Homo sapien
tagggacatgggcataataatgtcacataaaag

SEQ ID NO: 212156 - DNA, 33 bp, Homo sapien
tagggacatgggcatagtaatgtcacataaaag

SEQ ID NO: 212157 - DNA, 33 bp, Homo sapien
aaaagcaaaataatccaccagtctcttaattta

SEQ ID NO: 212158 - DNA, 33 bp, Homo sapien
aaaagcaaaataatccgccagtctcttaattta

SEQ ID NO: 212159 - DNA, 33 bp, Homo sapien
agtcacttcttgtgagcagaaactgtgcaatca

SEQ ID NO: 212160 - DNA, 33 bp, Homo sapien
agtcacttcttgtgagtagaaactgtgcaatca

SEQ ID NO: 212161 - DNA, 33 bp, Homo sapien
tagaacaatggaaaaaagttagagttttcttgt

SEQ ID NO: 212162 - DNA, 33 bp, Homo sapien
tagaacaatggaaaaatgttagagttttcttgt

SEQ ID NO: 212163 - DNA, 33 bp, Homo sapien
aaaatttatttatgaaagcaacttcaattgcta

SEQ ID NO: 212164 - DNA, 33 bp, Homo sapien
aaaatttatttatgaatgcaacttcaattgcta

SEQ ID NO: 212165 - DNA, 33 bp, Homo sapien
tgggtttcgttgatgacgttggttgaattctac

SEQ ID NO: 212166 - DNA, 33 bp, Homo sapien
tgggtttcgttgatgatgttggttgaattctac

SEQ ID NO: 212167 - DNA, 33 bp, Homo sapien
aaacctcgaactttcacgtcctgtttgcccttg

SEQ ID NO: 212168 - DNA, 33 bp, Homo sapien
aaacctcgaactttcatgtcctgtttgcccttg

SEQ ID NO: 212169 - DNA, 33 bp, Homo sapien
tcatgcttgttttcagaaaatgtctatgcacat

SEQ ID NO: 212170 - DNA, 33 bp, Homo sapien
tcatgcttgttttcaggaaatgtctatgcacat

SEQ ID NO: 212171 - DNA, 33 bp, Homo sapien
agaatctcataacagacgtttacaaagtgagca

SEQ ID NO: 212172 - DNA, 33 bp, Homo sapien
agaatctcataacagatgtttacaaagtgagca

SEQ ID NO: 212173 - DNA, 33 bp, Homo sapien
ttaacaagcttagaaacctcctaagtgcagggc

SEQ ID NO: 212174 - DNA, 33 bp, Homo sapien
ttaacaagcttagaaatctcctaagtgcagggc

SEQ ID NO: 212175 - DNA, 33 bp, Homo sapien
gcatagcaatattatcacctatccttccaattc

SEQ ID NO: 212176 - DNA, 33 bp, Homo sapien
gcatagcaatattatcgcctatccttccaattc

SEQ ID NO: 212177 - DNA, 33 bp, Homo sapien
aaatgctctcaggcaactaaacggcagttgtaa

SEQ ID NO: 212178 - DNA, 33 bp, Homo sapien
aaatgctctcaggcaattaaacggcagttgtaa

SEQ ID NO: 212179 - DNA, 33 bp, Homo sapien
tgttatgagatgggaacgatacacagcctctcc

SEQ ID NO: 212180 - DNA, 33 bp, Homo sapien
tgttatgagatgggaaggatacacagcctctcc

SEQ ID NO: 212181 - DNA, 33 bp, Homo sapien
ggtttgaaatatgagtcacgttctgctgacacc

SEQ ID NO: 212182 - DNA, 33 bp, Homo sapien
ggtttgaaatatgagttacgttctgctgacacc

SEQ ID NO: 212183 - DNA, 33 bp, Homo sapien
attctgtgatttatgaatagggaccagagagcc

SEQ ID NO: 212184 - DNA, 33 bp, Homo sapien
attctgtgatttatgagtagggaccagagagcc

SEQ ID NO: 212185 - DNA, 33 bp, Homo sapien
agagtgggacatgtaccaggtattaattaaatg

SEQ ID NO: 212186 - DNA, 33 bp, Homo sapien
agagtgggacatgtactaggtattaattaaatg

SEQ ID NO: 212187 - DNA, 33 bp, Homo sapien
ccaaggactggatcaaacgtggagagcagagca

SEQ ID NO: 212188 - DNA, 33 bp, Homo sapien
ccaaggactggatcaagcgtggagagcagagca

SEQ ID NO: 212189 - DNA, 33 bp, Homo sapien
aaacttgttctcttcaataagtcagaatgcctt

SEQ ID NO: 212190 - DNA, 33 bp, Homo sapien
aaacttgttctcttcagtaagtcagaatgcctt

SEQ ID NO: 212191 - DNA, 33 bp, Homo sapien
atgttcttagtgtttacaggttggaagaaaata

SEQ ID NO: 212192 - DNA, 33 bp, Homo sapien
atgttcttagtgtttataggttggaagaaaata

SEQ ID NO: 212193 - DNA, 33 bp, Homo sapien
tctacagtagacagtgaaaaagctaaaagcttt

SEQ ID NO: 212194 - DNA, 33 bp, Homo sapien
tctacagtagacagtgcaaaagctaaaagcttt

SEQ ID NO: 212195 - DNA, 33 bp, Homo sapien
gggaacgagttgatgaccttaaaaaggggaatg

SEQ ID NO: 212196 - DNA, 33 bp, Homo sapien
gggaacgagttgatgatcttaaaaaggggaatg

SEQ ID NO: 212197 - DNA, 33 bp, Homo sapien
ttaaaatacagtattaagtagactcatcttaat

SEQ ID NO: 212198 - DNA, 33 bp, Homo sapien
ttaaaatacagtattaggtagactcatcttaat

SEQ ID NO: 212199 - DNA, 33 bp, Homo sapien
tatctttgagaggataggttgggttgataattc

SEQ ID NO: 212200 - DNA, 33 bp, Homo sapien
tatctttgagaggatatgttgggttgataattc

SEQ ID NO: 212201 - DNA, 33 bp, Homo sapien
tcctctctctaaaaaaataggaagatatcagtt

SEQ ID NO: 212202 - DNA, 33 bp, Homo sapien
tcctctctctaaaaaattaggaagatatcagtt

SEQ ID NO: 212203 - DNA, 33 bp, Homo sapien
ggaaaagatggaagaagatgtgagtaaatacag

SEQ ID NO: 212204 - DNA, 33 bp, Homo sapien
ggaaaagatggaagaatatgtgagtaaatacag

SEQ ID NO: 212205 - DNA, 33 bp, Homo sapien
tgtttacaaattaggaaattaatggcaactatc

SEQ ID NO: 212206 - DNA, 33 bp, Homo sapien
tgtttacaaattaggagattaatggcaactatc

SEQ ID NO: 212207 - DNA, 33 bp, Homo sapien
agacctaaaatcataaaaattctagaagacaac

SEQ ID NO: 212208 - DNA, 33 bp, Homo sapien
agacctaaaatcataagaattctagaagacaac

SEQ ID NO: 212209 - DNA, 33 bp, Homo sapien
aaacttcctgccagcaaaaagatccattgctta

SEQ ID NO: 212210 - DNA, 33 bp, Homo sapien
aaacttcctgccagcagaaagatccattgctta

SEQ ID NO: 212211 - DNA, 33 bp, Homo sapien
ctgttacctatgctgggagacttaaggacaggt

SEQ ID NO: 212212 - DNA, 33 bp, Homo sapien
ctgttacctatgctggtagacttaaggacaggt

SEQ ID NO: 212213 - DNA, 33 bp, Homo sapien
aaccctgtggaggtcaaccaaatagttcaggca

SEQ ID NO: 212214 - DNA, 33 bp, Homo sapien
aaccctgtggaggtcagccaaatagttcaggca

SEQ ID NO: 212215 - DNA, 33 bp, Homo sapien
aaatttagaaaatcaaatcgaatctgtattagc

SEQ ID NO: 212216 - DNA, 33 bp, Homo sapien
aaatttagaaaatcaagtcgaatctgtattagc

SEQ ID NO: 212217 - DNA, 33 bp, Homo sapien
tcctattgactaggtccgtgttaagtgtattct

SEQ ID NO: 212218 - DNA, 33 bp, Homo sapien
tcctattgactaggtctgtgttaagtgtattct

SEQ ID NO: 212219 - DNA, 33 bp, Homo sapien
cttgtagtgtatgatacaatggtcattaagtaa

SEQ ID NO: 212220 - DNA, 33 bp, Homo sapien
cttgtagtgtatgatataatggtcattaagtaa

SEQ ID NO: 212221 - DNA, 33 bp, Homo sapien
gtccttgggttattcactccagtgactgtatac

SEQ ID NO: 212222 - DNA, 33 bp, Homo sapien
gtccttgggttattcattccagtgactgtatac

SEQ ID NO: 212223 - DNA, 33 bp, Homo sapien
tgacttattttttgaccgactttttgagtctaa

SEQ ID NO: 212224 - DNA, 33 bp, Homo sapien
tgacttattttttgactgactttttgagtctaa

SEQ ID NO: 212225 - DNA, 33 bp, Homo sapien
ttataaactactgataagcaatcattctcttac

SEQ ID NO: 212226 - DNA, 33 bp, Homo sapien
ttataaactactgataggcaatcattctcttac

SEQ ID NO: 212227 - DNA, 33 bp, Homo sapien
atgatgtaactgaaagactgggtttaatttatt

SEQ ID NO: 212228 - DNA, 33 bp, Homo sapien
atgatgtaactgaaaggctgggtttaatttatt

SEQ ID NO: 212229 - DNA, 33 bp, Homo sapien
gtaaagtttggagttacacaacactttggtaac

SEQ ID NO: 212230 - DNA, 33 bp, Homo sapien
gtaaagtttggagttatacaacactttggtaac

SEQ ID NO: 212231 - DNA, 33 bp, Homo sapien
ctataaacattaatctaactatggaaatctttg

SEQ ID NO: 212232 - DNA, 33 bp, Homo sapien
ctataaacattaatcttactatggaaatctttg

SEQ ID NO: 212233 - DNA, 33 bp, Homo sapien
tacagagattactgtacagattgttagaaatgc

SEQ ID NO: 212234 - DNA, 33 bp, Homo sapien
tacagagattactgtagagattgttagaaatgc

SEQ ID NO: 212235 - DNA, 33 bp, Homo sapien
gatagctagaaaccaagaattaatcagaaagtt

SEQ ID NO: 212236 - DNA, 33 bp, Homo sapien
gatagctagaaaccaataattaatcagaaagtt

SEQ ID NO: 212237 - DNA, 33 bp, Homo sapien
ctagtttaatcattcaaggaattttcaggctat

SEQ ID NO: 212238 - DNA, 33 bp, Homo sapien
ctagtttaatcattcagggaattttcaggctat

SEQ ID NO: 212239 - DNA, 33 bp, Homo sapien
aatgccaattaatttacctatcaaatgctgttt

SEQ ID NO: 212240 - DNA, 33 bp, Homo sapien
aatgccaattaatttatctatcaaatgctgttt

SEQ ID NO: 212241 - DNA, 33 bp, Homo sapien
aaaccacaacctctgcagcaacatagatggaac

SEQ ID NO: 212242 - DNA, 33 bp, Homo sapien
aaaccacaacctctgcggcaacatagatggaac

SEQ ID NO: 212243 - DNA, 33 bp, Homo sapien
tcacaacatacctgatcagaaaccattgtgtga

SEQ ID NO: 212244 - DNA, 33 bp, Homo sapien
tcacaacatacctgatgagaaaccattgtgtga

SEQ ID NO: 212245 - DNA, 33 bp, Homo sapien
tggaatgattattataccaccttttgcattcta

SEQ ID NO: 212246 - DNA, 33 bp, Homo sapien
tggaatgattattatagcaccttttgcattcta

SEQ ID NO: 212247 - DNA, 33 bp, Homo sapien
gagctctttgagggtacgtattttttccaatta

SEQ ID NO: 212248 - DNA, 33 bp, Homo sapien
gagctctttgagggtaggtattttttccaatta

SEQ ID NO: 212249 - DNA, 33 bp, Homo sapien
atggaagtgtgcaaggacatggcccttccaaag

SEQ ID NO: 212250 - DNA, 33 bp, Homo sapien
atggaagtgtgcaaggtcatggcccttccaaag

SEQ ID NO: 212251 - DNA, 33 bp, Homo sapien
ctgtattggattgcagaataggtagcagttagt

SEQ ID NO: 212252 - DNA, 33 bp, Homo sapien
ctgtattggattgcaggataggtagcagttagt

SEQ ID NO: 212253 - DNA, 33 bp, Homo sapien
gtacatagtaggcgtagatatttatggcgtaca

SEQ ID NO: 212254 - DNA, 33 bp, Homo sapien
gtacatagtaggcgtatatatttatggcgtaca

SEQ ID NO: 212255 - DNA, 33 bp, Homo sapien
gtccacttaagagttaaacaagatcgtactgtg

SEQ ID NO: 212256 - DNA, 33 bp, Homo sapien
gtccacttaagagttagacaagatcgtactgtg

SEQ ID NO: 212257 - DNA, 33 bp, Homo sapien
gaatgtactataaagaatcaaagagatggaaaa

SEQ ID NO: 212258 - DNA, 33 bp, Homo sapien
gaatgtactataaagagtcaaagagatggaaaa

SEQ ID NO: 212259 - DNA, 33 bp, Homo sapien
cagcttccttttgaaactaatgatctcaggtaa

SEQ ID NO: 212260 - DNA, 33 bp, Homo sapien
cagcttccttttgaaagtaatgatctcaggtaa

SEQ ID NO: 212261 - DNA, 33 bp, Homo sapien
tgaagccctgagaacactggccgacaacacaaa

SEQ ID NO: 212262 - DNA, 33 bp, Homo sapien
tgaagccctgagaacattggccgacaacacaaa

SEQ ID NO: 212263 - DNA, 33 bp, Homo sapien
aaaactgttgaattataaatgagatgctgagta

SEQ ID NO: 212264 - DNA, 33 bp, Homo sapien
aaaactgttgaattatgaatgagatgctgagta

SEQ ID NO: 212265 - DNA, 33 bp, Homo sapien
gataagacgtggcttgcagtcaattctctagga

SEQ ID NO: 212266 - DNA, 33 bp, Homo sapien
gataagacgtggcttgtagtcaattctctagga

SEQ ID NO: 212267 - DNA, 33 bp, Homo sapien
aattttaaattaggcaatctgaagtggaaggtt

SEQ ID NO: 212268 - DNA, 33 bp, Homo sapien
aattttaaattaggcattctgaagtggaaggtt

SEQ ID NO: 212269 - DNA, 33 bp, Homo sapien
cagcccagacttcacactaacttttcaagtcct

SEQ ID NO: 212270 - DNA, 33 bp, Homo sapien
cagcccagacttcacattaacttttcaagtcct

SEQ ID NO: 212271 - DNA, 33 bp, Homo sapien
accttttcctttcaacaagcagaatccagattt

SEQ ID NO: 212272 - DNA, 33 bp, Homo sapien
accttttcctttcaactagcagaatccagattt

SEQ ID NO: 212273 - DNA, 33 bp, Homo sapien
cttttgcacccaagcactagaactaagtgggat

SEQ ID NO: 212274 - DNA, 33 bp, Homo sapien
cttttgcacccaagcagtagaactaagtgggat

SEQ ID NO: 212275 - DNA, 33 bp, Homo sapien
aatcgactaaaagtaaaacaagataaacaaagg

SEQ ID NO: 212276 - DNA, 33 bp, Homo sapien
aatcgactaaaagtaagacaagataaacaaagg

SEQ ID NO: 212277 - DNA, 33 bp, Homo sapien
atgaagaaatgccttaacaatctgcagattatg

SEQ ID NO: 212278 - DNA, 33 bp, Homo sapien
atgaagaaatgccttaccaatctgcagattatg

SEQ ID NO: 212279 - DNA, 33 bp, Homo sapien
tttgaaattgcaaaccagagtgaactcagaaaa

SEQ ID NO: 212280 - DNA, 33 bp, Homo sapien
tttgaaattgcaaaccggagtgaactcagaaaa

SEQ ID NO: 212281 - DNA, 33 bp, Homo sapien
aacagatgtgtgttacaatgacatttcattctt

SEQ ID NO: 212282 - DNA, 33 bp, Homo sapien
aacagatgtgtgttacgatgacatttcattctt

SEQ ID NO: 212283 - DNA, 33 bp, Homo sapien
aaggagtttgtaaaagccttgtcatatatggtt

SEQ ID NO: 212284 - DNA, 33 bp, Homo sapien
aaggagtttgtaaaaggcttgtcatatatggtt

SEQ ID NO: 212285 - DNA, 33 bp, Homo sapien
atgaggaaatggaaacacatagaaattgaatat

SEQ ID NO: 212286 - DNA, 33 bp, Homo sapien
atgaggaaatggaaactcatagaaattgaatat

SEQ ID NO: 212287 - DNA, 33 bp, Homo sapien
actttgatcctgaagacgtcgttttggtagatc

SEQ ID NO: 212288 - DNA, 33 bp, Homo sapien
actttgatcctgaagatgtcgttttggtagatc

SEQ ID NO: 212289 - DNA, 33 bp, Homo sapien
catttattaagcagccactatgtgccaggaata

SEQ ID NO: 212290 - DNA, 33 bp, Homo sapien
catttattaagcagccgctatgtgccaggaata

SEQ ID NO: 212291 - DNA, 33 bp, Homo sapien
aagtactccaaatttaagcatacttcacacgtg

SEQ ID NO: 212292 - DNA, 33 bp, Homo sapien
aagtactccaaatttaggcatacttcacacgtg

SEQ ID NO: 212293 - DNA, 33 bp, Homo sapien
atccctgtacttgatacatcattagttagcaga

SEQ ID NO: 212294 - DNA, 33 bp, Homo sapien
atccctgtacttgatagatcattagttagcaga

SEQ ID NO: 212295 - DNA, 33 bp, Homo sapien
taaaacactgggaccacgtaggaattctatcta

SEQ ID NO: 212296 - DNA, 33 bp, Homo sapien
taaaacactgggaccatgtaggaattctatcta

SEQ ID NO: 212297 - DNA, 33 bp, Homo sapien
cctctctggaccaggaagggaacatacatttgc

SEQ ID NO: 212298 - DNA, 33 bp, Homo sapien
cctctctggaccaggatgggaacatacatttgc

SEQ ID NO: 212299 - DNA, 33 bp, Homo sapien
cactgaatacacataaacaacagagagcaatgt

SEQ ID NO: 212300 - DNA, 33 bp, Homo sapien
cactgaatacacataatcaacagagagcaatgt

SEQ ID NO: 212301 - DNA, 33 bp, Homo sapien
agaaagttcaattttcacttaaaggagccagag

SEQ ID NO: 212302 - DNA, 33 bp, Homo sapien
agaaagttcaattttcgcttaaaggagccagag

SEQ ID NO: 212303 - DNA, 33 bp, Homo sapien
taagagaaaacaatccaagttttgctaacacat

SEQ ID NO: 212304 - DNA, 33 bp, Homo sapien
taagagaaaacaatccgagttttgctaacacat

SEQ ID NO: 212305 - DNA, 33 bp, Homo sapien
acttgaagtattttagacaggactagggaacaa

SEQ ID NO: 212306 - DNA, 33 bp, Homo sapien
acttgaagtattttaggcaggactagggaacaa

SEQ ID NO: 212307 - DNA, 33 bp, Homo sapien
ggatttaattgatcacagatggggcctctcaat

SEQ ID NO: 212308 - DNA, 33 bp, Homo sapien
ggatttaattgatcacggatggggcctctcaat

SEQ ID NO: 212309 - DNA, 33 bp, Homo sapien
tttttgtaatccctcccagctactgtgttggca

SEQ ID NO: 212310 - DNA, 33 bp, Homo sapien
tttttgtaatccctcctagctactgtgttggca

SEQ ID NO: 212311 - DNA, 33 bp, Homo sapien
gatgccaactatcagaccgtagagattttccac

SEQ ID NO: 212312 - DNA, 33 bp, Homo sapien
gatgccaactatcagatcgtagagattttccac

SEQ ID NO: 212313 - DNA, 33 bp, Homo sapien
aaatttttattcaccaacatggtaaatctttta

SEQ ID NO: 212314 - DNA, 33 bp, Homo sapien
aaatttttattcaccatcatggtaaatctttta

SEQ ID NO: 212315 - DNA, 33 bp, Homo sapien
gagttactaggaaacaaagtgccttgctagcaa

SEQ ID NO: 212316 - DNA, 33 bp, Homo sapien
gagttactaggaaacacagtgccttgctagcaa

SEQ ID NO: 212317 - DNA, 33 bp, Homo sapien
gactgtattctgtaacccttttctgtatctcag

SEQ ID NO: 212318 - DNA, 33 bp, Homo sapien
gactgtattctgtaactcttttctgtatctcag

SEQ ID NO: 212319 - DNA, 33 bp, Homo sapien
gatgttgagttagagcaatgatcctgattttct

SEQ ID NO: 212320 - DNA, 33 bp, Homo sapien
gatgttgagttagagcgatgatcctgattttct

SEQ ID NO: 212321 - DNA, 33 bp, Homo sapien
ctgttgatggtctcacgattctttccatagttc

SEQ ID NO: 212322 - DNA, 33 bp, Homo sapien
ctgttgatggtctcactattctttccatagttc

SEQ ID NO: 212323 - DNA, 33 bp, Homo sapien
tcataatagaagtcacaagattcttatccattc

SEQ ID NO: 212324 - DNA, 33 bp, Homo sapien
tcataatagaagtcaccagattcttatccattc

SEQ ID NO: 212325 - DNA, 33 bp, Homo sapien
tggaggtatcactatccaataaggtcagagact

SEQ ID NO: 212326 - DNA, 33 bp, Homo sapien
tggaggtatcactatctaataaggtcagagact

SEQ ID NO: 212327 - DNA, 33 bp, Homo sapien
cgcaacacttagatagaactttctgtactgatg

SEQ ID NO: 212328 - DNA, 33 bp, Homo sapien
cgcaacacttagataggactttctgtactgatg

SEQ ID NO: 212329 - DNA, 33 bp, Homo sapien
ttcagcaaaagacaaaattccaaacattttccc

SEQ ID NO: 212330 - DNA, 33 bp, Homo sapien
ttcagcaaaagacaaatttccaaacattttccc

SEQ ID NO: 212331 - DNA, 33 bp, Homo sapien
aactcaacaatatttaggagttcttgcatttgg

SEQ ID NO: 212332 - DNA, 33 bp, Homo sapien
aactcaacaatatttatgagttcttgcatttgg

SEQ ID NO: 212333 - DNA, 33 bp, Homo sapien
ttcttcatcagacggaaagattttatttgccat

SEQ ID NO: 212334 - DNA, 33 bp, Homo sapien
ttcttcatcagacggagagattttatttgccat

SEQ ID NO: 212335 - DNA, 33 bp, Homo sapien
agatgatataatgccaataaatccataaattaa

SEQ ID NO: 212336 - DNA, 33 bp, Homo sapien
agatgatataatgccagtaaatccataaattaa

SEQ ID NO: 212337 - DNA, 33 bp, Homo sapien
tagtgaccggaattaaatagagttattcacaca

SEQ ID NO: 212338 - DNA, 33 bp, Homo sapien
tagtgaccggaattaagtagagttattcacaca

SEQ ID NO: 212339 - DNA, 33 bp, Homo sapien
ttccaagaatattaaaatgttaggatgtttaca

SEQ ID NO: 212340 - DNA, 33 bp, Homo sapien
ttccaagaatattaaagtgttaggatgtttaca

SEQ ID NO: 212341 - DNA, 33 bp, Homo sapien
taatagaatttgtcaacaagaaataacatctac

SEQ ID NO: 212342 - DNA, 33 bp, Homo sapien
taatagaatttgtcaagaagaaataacatctac

SEQ ID NO: 212343 - DNA, 33 bp, Homo sapien
atttaatgtcttccaacgtattgtatccacaga

SEQ ID NO: 212344 - DNA, 33 bp, Homo sapien
atttaatgtcttccaatgtattgtatccacaga

SEQ ID NO: 212345 - DNA, 33 bp, Homo sapien
ctgaaatccagtttaaagctattcttatcaaaa

SEQ ID NO: 212346 - DNA, 33 bp, Homo sapien
ctgaaatccagtttaacgctattcttatcaaaa

SEQ ID NO: 212347 - DNA, 33 bp, Homo sapien
tttatatgctgcgtaacagagcacttggaaaac

SEQ ID NO: 212348 - DNA, 33 bp, Homo sapien
tttatatgctgcgtaatagagcacttggaaaac

SEQ ID NO: 212349 - DNA, 33 bp, Homo sapien
tcatatggtttgccccagaaggaaaaacttgtg

SEQ ID NO: 212350 - DNA, 33 bp, Homo sapien
tcatatggtttgccccggaaggaaaaacttgtg

SEQ ID NO: 212351 - DNA, 33 bp, Homo sapien
aaatgttcccctttgacaatctctattgccttc

SEQ ID NO: 212352 - DNA, 33 bp, Homo sapien
aaatgttcccctttgataatctctattgccttc

SEQ ID NO: 212353 - DNA, 33 bp, Homo sapien
acactgaggtagcaagacacattgcaataaatt

SEQ ID NO: 212354 - DNA, 33 bp, Homo sapien
acactgaggtagcaagccacattgcaataaatt

SEQ ID NO: 212355 - DNA, 33 bp, Homo sapien
aaatcaactcaaaatacgtaaagactgaaatgt

SEQ ID NO: 212356 - DNA, 33 bp, Homo sapien
aaatcaactcaaaataggtaaagactgaaatgt

SEQ ID NO: 212357 - DNA, 33 bp, Homo sapien
tcttctataagtttcacggtttcaggtgttaca

SEQ ID NO: 212358 - DNA, 33 bp, Homo sapien
tcttctataagtttcatggtttcaggtgttaca

SEQ ID NO: 212359 - DNA, 33 bp, Homo sapien
cgctagataatgttaacctgtctcactatagta

SEQ ID NO: 212360 - DNA, 33 bp, Homo sapien
cgctagataatgttaatctgtctcactatagta

SEQ ID NO: 212361 - DNA, 33 bp, Homo sapien
gtcataacacacagaaccacaacccacttttat

SEQ ID NO: 212362 - DNA, 33 bp, Homo sapien
gtcataacacacagaatcacaacccacttttat

SEQ ID NO: 212363 - DNA, 33 bp, Homo sapien
tatgcattcattttggccagagagtcttttatt

SEQ ID NO: 212364 - DNA, 33 bp, Homo sapien
tatgcattcattttggtcagagagtcttttatt

SEQ ID NO: 212365 - DNA, 33 bp, Homo sapien
aaatacttacaatagaaataaggaatagcatac

SEQ ID NO: 212366 - DNA, 33 bp, Homo sapien
aaatacttacaatagacataaggaatagcatac

SEQ ID NO: 212367 - DNA, 33 bp, Homo sapien
ccttgtaattgggtacagagattctggcaggct

SEQ ID NO: 212368 - DNA, 33 bp, Homo sapien
ccttgtaattgggtacggagattctggcaggct

SEQ ID NO: 212369 - DNA, 33 bp, Homo sapien
aatcatgctatgaaggcaagaacaatttgcagg

SEQ ID NO: 212370 - DNA, 33 bp, Homo sapien
aatcatgctatgaagggaagaacaatttgcagg

SEQ ID NO: 212371 - DNA, 33 bp, Homo sapien
tcctacatacctaaaaccactttagcacccctt

SEQ ID NO: 212372 - DNA, 33 bp, Homo sapien
tcctacatacctaaaatcactttagcacccctt

SEQ ID NO: 212373 - DNA, 33 bp, Homo sapien
acagcagagatagtaaagaccatcaaacttgtg

SEQ ID NO: 212374 - DNA, 33 bp, Homo sapien
acagcagagatagtaaggaccatcaaacttgtg

SEQ ID NO: 212375 - DNA, 33 bp, Homo sapien
ttctctttttctatgacacactaacagctgtgt

SEQ ID NO: 212376 - DNA, 33 bp, Homo sapien
ttctctttttctatgatacactaacagctgtgt

SEQ ID NO: 212377 - DNA, 33 bp, Homo sapien
ctgtattttggtcccacattcttcagaaaatct

SEQ ID NO: 212378 - DNA, 33 bp, Homo sapien
ctgtattttggtcccatattcttcagaaaatct

SEQ ID NO: 212379 - DNA, 33 bp, Homo sapien
cttagtacttcattagaaacctcttagttcact

SEQ ID NO: 212380 - DNA, 33 bp, Homo sapien
cttagtacttcattaggaacctcttagttcact

SEQ ID NO: 212381 - DNA, 33 bp, Homo sapien
attgtagctccaataactctcatgtgttgtgga

SEQ ID NO: 212382 - DNA, 33 bp, Homo sapien
attgtagctccaataattctcatgtgttgtgga

SEQ ID NO: 212383 - DNA, 33 bp, Homo sapien
ctatttatgaatcacccgatatgtaccaaaatg

SEQ ID NO: 212384 - DNA, 33 bp, Homo sapien
ctatttatgaatcacctgatatgtaccaaaatg

SEQ ID NO: 212385 - DNA, 33 bp, Homo sapien
gaagatttaaaaaatgaactgacaatatcagca

SEQ ID NO: 212386 - DNA, 33 bp, Homo sapien
gaagatttaaaaaatggactgacaatatcagca

SEQ ID NO: 212387 - DNA, 33 bp, Homo sapien
aactgatgtatttgcccgagataaagaaatata

SEQ ID NO: 212388 - DNA, 33 bp, Homo sapien
aactgatgtatttgcctgagataaagaaatata

SEQ ID NO: 212389 - DNA, 33 bp, Homo sapien
tacaattattcttaccaatgctcaaactttcct

SEQ ID NO: 212390 - DNA, 33 bp, Homo sapien
tacaattattcttaccgatgctcaaactttcct

SEQ ID NO: 212391 - DNA, 33 bp, Homo sapien
agtcagatagaatccacgtgagtgcaaaggagt

SEQ ID NO: 212392 - DNA, 33 bp, Homo sapien
agtcagatagaatccatgtgagtgcaaaggagt

SEQ ID NO: 212393 - DNA, 33 bp, Homo sapien
tttcctacacaagcaacgtcccagaagaaaagc

SEQ ID NO: 212394 - DNA, 33 bp, Homo sapien
tttcctacacaagcaatgtcccagaagaaaagc

SEQ ID NO: 212395 - DNA, 33 bp, Homo sapien
tattctaccataacacactgtgagaatgaaata

SEQ ID NO: 212396 - DNA, 33 bp, Homo sapien
tattctaccataacactctgtgagaatgaaata

SEQ ID NO: 212397 - DNA, 33 bp, Homo sapien
ttcttcttccatgcgtgacaccaactttaatta

SEQ ID NO: 212398 - DNA, 33 bp, Homo sapien
ttcttcttccatgcgttacaccaactttaatta

SEQ ID NO: 212399 - DNA, 33 bp, Homo sapien
tggtcatgtatttgtaagttctggtttctcttc

SEQ ID NO: 212400 - DNA, 33 bp, Homo sapien
tggtcatgtatttgtaggttctggtttctcttc

SEQ ID NO: 212401 - DNA, 33 bp, Homo sapien
taatgatcttcctgcaataaaatatgagataga

SEQ ID NO: 212402 - DNA, 33 bp, Homo sapien
taatgatcttcctgcagtaaaatatgagataga

SEQ ID NO: 212403 - DNA, 33 bp, Homo sapien
cagtatcaaggaataaaatctttaacctgatga

SEQ ID NO: 212404 - DNA, 33 bp, Homo sapien
cagtatcaaggaataagatctttaacctgatga

SEQ ID NO: 212405 - DNA, 33 bp, Homo sapien
gttatttaggacccaacttaattaatgttaata

SEQ ID NO: 212406 - DNA, 33 bp, Homo sapien
gttatttaggacccaagttaattaatgttaata

SEQ ID NO: 212407 - DNA, 33 bp, Homo sapien
tttgacatacagttaacagaagaaaggcaggat

SEQ ID NO: 212408 - DNA, 33 bp, Homo sapien
tttgacatacagttaatagaagaaaggcaggat

SEQ ID NO: 212409 - DNA, 33 bp, Homo sapien
cataggatatgccacagtctggatttaattctt

SEQ ID NO: 212410 - DNA, 33 bp, Homo sapien
cataggatatgccacattctggatttaattctt

SEQ ID NO: 212411 - DNA, 33 bp, Homo sapien
acacttggagtccaccacaagtccatacagctt

SEQ ID NO: 212412 - DNA, 33 bp, Homo sapien
acacttggagtccaccgcaagtccatacagctt

SEQ ID NO: 212413 - DNA, 33 bp, Homo sapien
gtttatcaaaatgaaccgaaggaaaacgttcaa

SEQ ID NO: 212414 - DNA, 33 bp, Homo sapien
gtttatcaaaatgaactgaaggaaaacgttcaa

SEQ ID NO: 212415 - DNA, 33 bp, Homo sapien
atatttaatctgtcccggaatcatactgagtct

SEQ ID NO: 212416 - DNA, 33 bp, Homo sapien
atatttaatctgtccctgaatcatactgagtct

SEQ ID NO: 212417 - DNA, 33 bp, Homo sapien
tataataatggtcagaaataggcatattaatga

SEQ ID NO: 212418 - DNA, 33 bp, Homo sapien
tataataatggtcagatataggcatattaatga

SEQ ID NO: 212419 - DNA, 33 bp, Homo sapien
tgcattactcacattcaaaaaccacacaggagc

SEQ ID NO: 212420 - DNA, 33 bp, Homo sapien
tgcattactcacattcgaaaaccacacaggagc

SEQ ID NO: 212421 - DNA, 33 bp, Homo sapien
gtggagaattaagaaacagtgagtacagctgaa

SEQ ID NO: 212422 - DNA, 33 bp, Homo sapien
gtggagaattaagaaagagtgagtacagctgaa

SEQ ID NO: 212423 - DNA, 33 bp, Homo sapien
cttcatgttaaactcaaatgaaaaaacatacaa

SEQ ID NO: 212424 - DNA, 33 bp, Homo sapien
cttcatgttaaactcacatgaaaaaacatacaa

SEQ ID NO: 212425 - DNA, 33 bp, Homo sapien
gtaaccagataacctcaaagggaaggacccagt

SEQ ID NO: 212426 - DNA, 33 bp, Homo sapien
gtaaccagataacctcgaagggaaggacccagt

SEQ ID NO: 212427 - DNA, 33 bp, Homo sapien
aggcagtgcagctcataacaataaaagtgattc

SEQ ID NO: 212428 - DNA, 33 bp, Homo sapien
aggcagtgcagctcatcacaataaaagtgattc

SEQ ID NO: 212429 - DNA, 33 bp, Homo sapien
caaaaaggccatgtaacaactcagggagaaggt

SEQ ID NO: 212430 - DNA, 33 bp, Homo sapien
caaaaaggccatgtaagaactcagggagaaggt

SEQ ID NO: 212431 - DNA, 33 bp, Homo sapien
atggctgttaataggcactgagtttgttttagg

SEQ ID NO: 212432 - DNA, 33 bp, Homo sapien
atggctgttaataggcgctgagtttgttttagg

SEQ ID NO: 212433 - DNA, 33 bp, Homo sapien
gaggtgacgagataaacctaaagttcaggagta

SEQ ID NO: 212434 - DNA, 33 bp, Homo sapien
gaggtgacgagataaatctaaagttcaggagta

SEQ ID NO: 212435 - DNA, 33 bp, Homo sapien
aggacagttgttgatacagttgcagcaatatgt

SEQ ID NO: 212436 - DNA, 33 bp, Homo sapien
aggacagttgttgatatagttgcagcaatatgt

SEQ ID NO: 212437 - DNA, 33 bp, Homo sapien
ataatatgttcagagcaaaatatattaaacgct

SEQ ID NO: 212438 - DNA, 33 bp, Homo sapien
ataatatgttcagagcgaaatatattaaacgct

SEQ ID NO: 212439 - DNA, 33 bp, Homo sapien
ctgtgtggctttggtcacaatattttaatcaac

SEQ ID NO: 212440 - DNA, 33 bp, Homo sapien
ctgtgtggctttggtcgcaatattttaatcaac

SEQ ID NO: 212441 - DNA, 33 bp, Homo sapien
gagccacggtgcacaacctccaatttcttatga

SEQ ID NO: 212442 - DNA, 33 bp, Homo sapien
gagccacggtgcacaagctccaatttcttatga

SEQ ID NO: 212443 - DNA, 33 bp, Homo sapien
agtgatctaatcgtacagagaaattaaggccag

SEQ ID NO: 212444 - DNA, 33 bp, Homo sapien
agtgatctaatcgtacggagaaattaaggccag

SEQ ID NO: 212445 - DNA, 33 bp, Homo sapien
ttatttgattattttccctcagttttttgtatt

SEQ ID NO: 212446 - DNA, 33 bp, Homo sapien
ttatttgattattttctctcagttttttgtatt

SEQ ID NO: 212447 - DNA, 33 bp, Homo sapien
tatcttagagatctaaaatccagaaatcagaaa

SEQ ID NO: 212448 - DNA, 33 bp, Homo sapien
tatcttagagatctaacatccagaaatcagaaa

SEQ ID NO: 212449 - DNA, 33 bp, Homo sapien
agtggaattttaagtacaagtttaggactgata

SEQ ID NO: 212450 - DNA, 33 bp, Homo sapien
agtggaattttaagtagaagtttaggactgata

SEQ ID NO: 212451 - DNA, 33 bp, Homo sapien
cgatacctactttttgaaacctgttgagttctc

SEQ ID NO: 212452 - DNA, 33 bp, Homo sapien
cgatacctactttttgcaacctgttgagttctc

SEQ ID NO: 212453 - DNA, 33 bp, Homo sapien
atgcaggtgtagtcaactctaagcttctactgg

SEQ ID NO: 212454 - DNA, 33 bp, Homo sapien
atgcaggtgtagtcaagtctaagcttctactgg

SEQ ID NO: 212455 - DNA, 33 bp, Homo sapien
ttagaacaaggtaccaggatagtgtcttttaag

SEQ ID NO: 212456 - DNA, 33 bp, Homo sapien
ttagaacaaggtaccatgatagtgtcttttaag

SEQ ID NO: 212457 - DNA, 33 bp, Homo sapien
tatttttcaagagttacaagtaggaaataaatc

SEQ ID NO: 212458 - DNA, 33 bp, Homo sapien
tatttttcaagagttagaagtaggaaataaatc

SEQ ID NO: 212459 - DNA, 33 bp, Homo sapien
cataaatgagtaaagaatatcaagggcaggaaa

SEQ ID NO: 212460 - DNA, 33 bp, Homo sapien
cataaatgagtaaagagtatcaagggcaggaaa

SEQ ID NO: 212461 - DNA, 33 bp, Homo sapien
ctctccccatacacaccaaaactcatgtgctcc

SEQ ID NO: 212462 - DNA, 33 bp, Homo sapien
ctctccccatacacactaaaactcatgtgctcc

SEQ ID NO: 212463 - DNA, 33 bp, Homo sapien
agaggtaacaggcacaacagaggaattaacaga

SEQ ID NO: 212464 - DNA, 33 bp, Homo sapien
agaggtaacaggcacatcagaggaattaacaga

SEQ ID NO: 212465 - DNA, 33 bp, Homo sapien
atctcttcacattgaacaggtagaggaggagga

SEQ ID NO: 212466 - DNA, 33 bp, Homo sapien
atctcttcacattgaataggtagaggaggagga

SEQ ID NO: 212467 - DNA, 33 bp, Homo sapien
aagatagatgtttggacgaccatgaaaatttga

SEQ ID NO: 212468 - DNA, 33 bp, Homo sapien
aagatagatgtttggatgaccatgaaaatttga

SEQ ID NO: 212469 - DNA, 33 bp, Homo sapien
tgagccagtatgtggacatttatcacagatcct

SEQ ID NO: 212470 - DNA, 33 bp, Homo sapien
tgagccagtatgtggatatttatcacagatcct

SEQ ID NO: 212471 - DNA, 33 bp, Homo sapien
tgtctcgaagtactgacaggacccagcatatgc

SEQ ID NO: 212472 - DNA, 33 bp, Homo sapien
tgtctcgaagtactgagaggacccagcatatgc

SEQ ID NO: 212473 - DNA, 33 bp, Homo sapien
aaatgataccagccatcatactattctctggta

SEQ ID NO: 212474 - DNA, 33 bp, Homo sapien
aaatgataccagccatgatactattctctggta

SEQ ID NO: 212475 - DNA, 33 bp, Homo sapien
tcttaatatcatccaccaggttctcaaaaaata

SEQ ID NO: 212476 - DNA, 33 bp, Homo sapien
tcttaatatcatccactaggttctcaaaaaata

SEQ ID NO: 212477 - DNA, 33 bp, Homo sapien
gtgaaaagcaacatcaataattaagatatttgg

SEQ ID NO: 212478 - DNA, 33 bp, Homo sapien
gtgaaaagcaacatcagtaattaagatatttgg

SEQ ID NO: 212479 - DNA, 33 bp, Homo sapien
tttttaagggtagtgacgtgaatagtaaagcga

SEQ ID NO: 212480 - DNA, 33 bp, Homo sapien
tttttaagggtagtgatgtgaatagtaaagcga

SEQ ID NO: 212481 - DNA, 33 bp, Homo sapien
ttaaggcttacctgagaagatcactctgactgt

SEQ ID NO: 212482 - DNA, 33 bp, Homo sapien
ttaaggcttacctgaggagatcactctgactgt

SEQ ID NO: 212483 - DNA, 33 bp, Homo sapien
agaaattttgcttttccacttcctccaaactac

SEQ ID NO: 212484 - DNA, 33 bp, Homo sapien
agaaattttgcttttctacttcctccaaactac

SEQ ID NO: 212485 - DNA, 33 bp, Homo sapien
taggatgtagtttctacctgtacccagtcccta

SEQ ID NO: 212486 - DNA, 33 bp, Homo sapien
taggatgtagtttctatctgtacccagtcccta

SEQ ID NO: 212487 - DNA, 33 bp, Homo sapien
tgctgtcatttactccacttactgtaagcatac

SEQ ID NO: 212488 - DNA, 33 bp, Homo sapien
tgctgtcatttactccgcttactgtaagcatac

SEQ ID NO: 212489 - DNA, 33 bp, Homo sapien
gagagtgtgagtgacgaagtgcaggaccatgtg

SEQ ID NO: 212490 - DNA, 33 bp, Homo sapien
gagagtgtgagtgacgtagtgcaggaccatgtg

SEQ ID NO: 212491 - DNA, 33 bp, Homo sapien
tccaaaagccaggctacaagttaaagccttaga

SEQ ID NO: 212492 - DNA, 33 bp, Homo sapien
tccaaaagccaggctagaagttaaagccttaga

SEQ ID NO: 212493 - DNA, 33 bp, Homo sapien
aggaatcctagcatcacgtggaatgttttaaag

SEQ ID NO: 212494 - DNA, 33 bp, Homo sapien
aggaatcctagcatcatgtggaatgttttaaag

SEQ ID NO: 212495 - DNA, 33 bp, Homo sapien
tcatctgcaaaaatggacaaattgactttctcc

SEQ ID NO: 212496 - DNA, 33 bp, Homo sapien
tcatctgcaaaaatgggcaaattgactttctcc

SEQ ID NO: 212497 - DNA, 33 bp, Homo sapien
tcatgtcctttcctcacatttcacttgggttgt

SEQ ID NO: 212498 - DNA, 33 bp, Homo sapien
tcatgtcctttcctcatatttcacttgggttgt

SEQ ID NO: 212499 - DNA, 33 bp, Homo sapien
acaaatattcttgataaaagctaggaagtagtc

SEQ ID NO: 212500 - DNA, 33 bp, Homo sapien
acaaatattcttgatacaagctaggaagtagtc

SEQ ID NO: 212501 - DNA, 33 bp, Homo sapien
acgtggtaacaacaacaacctccatttggacat

SEQ ID NO: 212502 - DNA, 33 bp, Homo sapien
acgtggtaacaacaaccacctccatttggacat

SEQ ID NO: 212503 - DNA, 33 bp, Homo sapien
gatctcacagaaatacaaactaccatgagagaa

SEQ ID NO: 212504 - DNA, 33 bp, Homo sapien
gatctcacagaaatacgaactaccatgagagaa

SEQ ID NO: 212505 - DNA, 33 bp, Homo sapien
aacctatatttaagaacagtcctcagagttcta

SEQ ID NO: 212506 - DNA, 33 bp, Homo sapien
aacctatatttaagaatagtcctcagagttcta

SEQ ID NO: 212507 - DNA, 33 bp, Homo sapien
tgcagaactggaaaccagaagtcccaacatatt

SEQ ID NO: 212508 - DNA, 33 bp, Homo sapien
tgcagaactggaaaccggaagtcccaacatatt

SEQ ID NO: 212509 - DNA, 33 bp, Homo sapien
caaaaaaacttgtatcccagaagctattgaaat

SEQ ID NO: 212510 - DNA, 33 bp, Homo sapien
caaaaaaacttgtatctcagaagctattgaaat

SEQ ID NO: 212511 - DNA, 33 bp, Homo sapien
gtacactagttggtgaccaagtgcactgaaacc

SEQ ID NO: 212512 - DNA, 33 bp, Homo sapien
gtacactagttggtgagcaagtgcactgaaacc

SEQ ID NO: 212513 - DNA, 33 bp, Homo sapien
attcctgcagtagtaacgttgtatttcattggg

SEQ ID NO: 212514 - DNA, 33 bp, Homo sapien
attcctgcagtagtaatgttgtatttcattggg

SEQ ID NO: 212515 - DNA, 33 bp, Homo sapien
tgtacttaatgtttagcaccacttgtaagtgag

SEQ ID NO: 212516 - DNA, 33 bp, Homo sapien
tgtacttaatgtttaggaccacttgtaagtgag

SEQ ID NO: 212517 - DNA, 33 bp, Homo sapien
gacagtctgtttaataaatggtgctgagaaaac

SEQ ID NO: 212518 - DNA, 33 bp, Homo sapien
gacagtctgtttaatacatggtgctgagaaaac

SEQ ID NO: 212519 - DNA, 33 bp, Homo sapien
tggtgaaatcgtaaaaactgaagtagtgcaacc

SEQ ID NO: 212520 - DNA, 33 bp, Homo sapien
tggtgaaatcgtaaaacctgaagtagtgcaacc

SEQ ID NO: 212521 - DNA, 33 bp, Homo sapien
gaacaatccactctcagaagtgaatacacaagg

SEQ ID NO: 212522 - DNA, 33 bp, Homo sapien
gaacaatccactctcataagtgaatacacaagg

SEQ ID NO: 212523 - DNA, 33 bp, Homo sapien
ctagatttcacaatggaagtattagagacaaaa

SEQ ID NO: 212524 - DNA, 33 bp, Homo sapien
ctagatttcacaatggcagtattagagacaaaa

SEQ ID NO: 212525 - DNA, 33 bp, Homo sapien
ttaggatccaaggcaactgaaaattaaaagttc

SEQ ID NO: 212526 - DNA, 33 bp, Homo sapien
ttaggatccaaggcaattgaaaattaaaagttc

SEQ ID NO: 212527 - DNA, 33 bp, Homo sapien
tataatcttactcttcaccaataataaaccaca

SEQ ID NO: 212528 - DNA, 33 bp, Homo sapien
tataatcttactcttcgccaataataaaccaca

SEQ ID NO: 212529 - DNA, 33 bp, Homo sapien
cacccaactctttgtacagcaacagtgaccttt

SEQ ID NO: 212530 - DNA, 33 bp, Homo sapien
cacccaactctttgtatagcaacagtgaccttt

SEQ ID NO: 212531 - DNA, 33 bp, Homo sapien
aataagacttaaagccagatccaggtatataac

SEQ ID NO: 212532 - DNA, 33 bp, Homo sapien
aataagacttaaagccggatccaggtatataac

SEQ ID NO: 212533 - DNA, 33 bp, Homo sapien
caaatagaagccaaaaagagatatcacctcatc

SEQ ID NO: 212534 - DNA, 33 bp, Homo sapien
caaatagaagccaaaatgagatatcacctcatc

SEQ ID NO: 212535 - DNA, 33 bp, Homo sapien
gtattcatgattgttaaatgcttttattaatcc

SEQ ID NO: 212536 - DNA, 33 bp, Homo sapien
gtattcatgattgttatatgcttttattaatcc

SEQ ID NO: 212537 - DNA, 33 bp, Homo sapien
gcagttgaaagacataaatttgatggagtggat

SEQ ID NO: 212538 - DNA, 33 bp, Homo sapien
gcagttgaaagacatacatttgatggagtggat

SEQ ID NO: 212539 - DNA, 33 bp, Homo sapien
ctttgctgttgttccaagttccatcattagaaa

SEQ ID NO: 212540 - DNA, 33 bp, Homo sapien
ctttgctgttgttccaggttccatcattagaaa

SEQ ID NO: 212541 - DNA, 33 bp, Homo sapien
catcattagaaatttacgcctctgaattaagac

SEQ ID NO: 212542 - DNA, 33 bp, Homo sapien
catcattagaaatttatgcctctgaattaagac

SEQ ID NO: 212543 - DNA, 33 bp, Homo sapien
ccacctgcctcccatacgcacaccaacatgcct

SEQ ID NO: 212544 - DNA, 33 bp, Homo sapien
ccacctgcctcccatatgcacaccaacatgcct

SEQ ID NO: 212545 - DNA, 33 bp, Homo sapien
gtgtattctgcagccacagtatgaaatcttctg

SEQ ID NO: 212546 - DNA, 33 bp, Homo sapien
gtgtattctgcagccatagtatgaaatcttctg

SEQ ID NO: 212547 - DNA, 33 bp, Homo sapien
aaaaaaatgaggcccaatgatttgttgcctgta

SEQ ID NO: 212548 - DNA, 33 bp, Homo sapien
aaaaaaatgaggcccagtgatttgttgcctgta

SEQ ID NO: 212549 - DNA, 33 bp, Homo sapien
ccaccagaaaaatcaactcattaaaaggaggac

SEQ ID NO: 212550 - DNA, 33 bp, Homo sapien
ccaccagaaaaatcaattcattaaaaggaggac

SEQ ID NO: 212551 - DNA, 33 bp, Homo sapien
taaacatgttcaccaacggtatttctgaggtat

SEQ ID NO: 212552 - DNA, 33 bp, Homo sapien
taaacatgttcaccaatggtatttctgaggtat

SEQ ID NO: 212553 - DNA, 33 bp, Homo sapien
aatatctcacattgaaagccactgggatagagg

SEQ ID NO: 212554 - DNA, 33 bp, Homo sapien
aatatctcacattgaaggccactgggatagagg

SEQ ID NO: 212555 - DNA, 33 bp, Homo sapien
gatgccagagctttgagcattggtgggtataga

SEQ ID NO: 212556 - DNA, 33 bp, Homo sapien
gatgccagagctttgatcattggtgggtataga

SEQ ID NO: 212557 - DNA, 33 bp, Homo sapien
tactcttgtttttccacgatcccacaaaatgag

SEQ ID NO: 212558 - DNA, 33 bp, Homo sapien
tactcttgtttttccatgatcccacaaaatgag

SEQ ID NO: 212559 - DNA, 33 bp, Homo sapien
tatttaacaggcataagctttggtctcctgagc

SEQ ID NO: 212560 - DNA, 33 bp, Homo sapien
tatttaacaggcataatctttggtctcctgagc

SEQ ID NO: 212561 - DNA, 33 bp, Homo sapien
taacagattttttcctaaccataattctatcaa

SEQ ID NO: 212562 - DNA, 33 bp, Homo sapien
taacagattttttccttaccataattctatcaa

SEQ ID NO: 212563 - DNA, 33 bp, Homo sapien
ctccttgtatttctacgggcttttacttcagat

SEQ ID NO: 212564 - DNA, 33 bp, Homo sapien
ctccttgtatttctactggcttttacttcagat

SEQ ID NO: 212565 - DNA, 33 bp, Homo sapien
tattttaatacaggtcgcatttgaattagataa

SEQ ID NO: 212566 - DNA, 33 bp, Homo sapien
tattttaatacaggtctcatttgaattagataa

SEQ ID NO: 212567 - DNA, 33 bp, Homo sapien
gagaatacaaagagaacttagctgtttgcagcc

SEQ ID NO: 212568 - DNA, 33 bp, Homo sapien
gagaatacaaagagaagttagctgtttgcagcc

SEQ ID NO: 212569 - DNA, 33 bp, Homo sapien
gagaccagaagacattaaaatgatatatccaat

SEQ ID NO: 212570 - DNA, 33 bp, Homo sapien
gagaccagaagacattgaaatgatatatccaat

SEQ ID NO: 212571 - DNA, 33 bp, Homo sapien
ccttttaacaagtatacagtgacatagcttatt

SEQ ID NO: 212572 - DNA, 33 bp, Homo sapien
ccttttaacaagtatatagtgacatagcttatt

SEQ ID NO: 212573 - DNA, 33 bp, Homo sapien
cagcattattaacaacagccaagatgtagaagc

SEQ ID NO: 212574 - DNA, 33 bp, Homo sapien
cagcattattaacaacggccaagatgtagaagc

SEQ ID NO: 212575 - DNA, 33 bp, Homo sapien
aatagaatcaccatacaagccattaattattct

SEQ ID NO: 212576 - DNA, 33 bp, Homo sapien
aatagaatcaccatacgagccattaattattct

SEQ ID NO: 212577 - DNA, 33 bp, Homo sapien
tctttttcatgaaagccgaaccattttatattt

SEQ ID NO: 212578 - DNA, 33 bp, Homo sapien
tctttttcatgaaagctgaaccattttatattt

SEQ ID NO: 212579 - DNA, 33 bp, Homo sapien
cagaaaattcaacatcaaccttatccacttgtt

SEQ ID NO: 212580 - DNA, 33 bp, Homo sapien
cagaaaattcaacatcgaccttatccacttgtt

SEQ ID NO: 212581 - DNA, 33 bp, Homo sapien
aatgtccttctttagcaaaatcatcaatgtaag

SEQ ID NO: 212582 - DNA, 33 bp, Homo sapien
aatgtccttctttagcgaaatcatcaatgtaag

SEQ ID NO: 212583 - DNA, 33 bp, Homo sapien
catgttcaattttagaaatatgccttagagtag

SEQ ID NO: 212584 - DNA, 33 bp, Homo sapien
catgttcaattttagacatatgccttagagtag

SEQ ID NO: 212585 - DNA, 33 bp, Homo sapien
agttcacaaccaaaagaattctcctattctaac

SEQ ID NO: 212586 - DNA, 33 bp, Homo sapien
agttcacaaccaaaaggattctcctattctaac

SEQ ID NO: 212587 - DNA, 33 bp, Homo sapien
atcgcgctagataggacgtgagaaaaagttttt

SEQ ID NO: 212588 - DNA, 33 bp, Homo sapien
atcgcgctagataggatgtgagaaaaagttttt

SEQ ID NO: 212589 - DNA, 33 bp, Homo sapien
ataacattgacttgataacaaactacctagaaa

SEQ ID NO: 212590 - DNA, 33 bp, Homo sapien
ataacattgacttgattacaaactacctagaaa

SEQ ID NO: 212591 - DNA, 33 bp, Homo sapien
ggcagaagggcctacaatacagatgtgtcccag

SEQ ID NO: 212592 - DNA, 33 bp, Homo sapien
ggcagaagggcctacagtacagatgtgtcccag

SEQ ID NO: 212593 - DNA, 33 bp, Homo sapien
aaaagagttatgtccccgagtaacagcttatct

SEQ ID NO: 212594 - DNA, 33 bp, Homo sapien
aaaagagttatgtccctgagtaacagcttatct

SEQ ID NO: 212595 - DNA, 33 bp, Homo sapien
ttaaattgagctgtgaaccagtaaatggtgctt

SEQ ID NO: 212596 - DNA, 33 bp, Homo sapien
ttaaattgagctgtgatccagtaaatggtgctt

SEQ ID NO: 212597 - DNA, 33 bp, Homo sapien
ctaaagtttaagggaacctcacgttgaatctat

SEQ ID NO: 212598 - DNA, 33 bp, Homo sapien
ctaaagtttaagggaagctcacgttgaatctat

SEQ ID NO: 212599 - DNA, 33 bp, Homo sapien
tgtacaaggtccaaaaacgtgtgtaaggaggag

SEQ ID NO: 212600 - DNA, 33 bp, Homo sapien
tgtacaaggtccaaaagcgtgtgtaaggaggag

SEQ ID NO: 212601 - DNA, 33 bp, Homo sapien
gtagtaatgtcattgacaccttttacctactcg

SEQ ID NO: 212602 - DNA, 33 bp, Homo sapien
gtagtaatgtcattgataccttttacctactcg

SEQ ID NO: 212603 - DNA, 33 bp, Homo sapien
tatctctgatttttgacaagttggttattatcc

SEQ ID NO: 212604 - DNA, 33 bp, Homo sapien
tatctctgatttttgataagttggttattatcc

SEQ ID NO: 212605 - DNA, 33 bp, Homo sapien
aacatcagcaaaaaaaacatccaatgctggcaa

SEQ ID NO: 212606 - DNA, 33 bp, Homo sapien
aacatcagcaaaaaaaccatccaatgctggcaa

SEQ ID NO: 212607 - DNA, 33 bp, Homo sapien
aaaccacataaaaagcaaactctaatctaaaat

SEQ ID NO: 212608 - DNA, 33 bp, Homo sapien
aaaccacataaaaagcgaactctaatctaaaat

SEQ ID NO: 212609 - DNA, 33 bp, Homo sapien
gaaaagaccagagataccaagtttacactttat

SEQ ID NO: 212610 - DNA, 33 bp, Homo sapien
gaaaagaccagagatatcaagtttacactttat

SEQ ID NO: 212611 - DNA, 33 bp, Homo sapien
taaaacaaggagaagagacttacctatattcac

SEQ ID NO: 212612 - DNA, 33 bp, Homo sapien
taaaacaaggagaagatacttacctatattcac

SEQ ID NO: 212613 - DNA, 33 bp, Homo sapien
atttcattgaccagtcaaattggtctgactaac

SEQ ID NO: 212614 - DNA, 33 bp, Homo sapien
atttcattgaccagtctaattggtctgactaac

SEQ ID NO: 212615 - DNA, 33 bp, Homo sapien
gattgtgcataagaaaatcaagacagagaacat

SEQ ID NO: 212616 - DNA, 33 bp, Homo sapien
gattgtgcataagaaagtcaagacagagaacat

SEQ ID NO: 212617 - DNA, 33 bp, Homo sapien
ataactcatttacttgaattaatctgtgtgtcc

SEQ ID NO: 212618 - DNA, 33 bp, Homo sapien
ataactcatttacttgcattaatctgtgtgtcc

SEQ ID NO: 212619 - DNA, 33 bp, Homo sapien
gacatccctgtcctaacagatgagtttcagtag

SEQ ID NO: 212620 - DNA, 33 bp, Homo sapien
gacatccctgtcctaatagatgagtttcagtag

SEQ ID NO: 212621 - DNA, 33 bp, Homo sapien
gtagaatcattggctacggggaaattgaacgcg

SEQ ID NO: 212622 - DNA, 33 bp, Homo sapien
gtagaatcattggctatggggaaattgaacgcg

SEQ ID NO: 212623 - DNA, 33 bp, Homo sapien
atcaaagaaggaatagacataagaacacaatga

SEQ ID NO: 212624 - DNA, 33 bp, Homo sapien
atcaaagaaggaatagtcataagaacacaatga

SEQ ID NO: 212625 - DNA, 33 bp, Homo sapien
ctactgcaatttccacaaacatgaatccagaat

SEQ ID NO: 212626 - DNA, 33 bp, Homo sapien
ctactgcaatttccacgaacatgaatccagaat

SEQ ID NO: 212627 - DNA, 33 bp, Homo sapien
ggaagagtcaattgccacaggaaacttcatcac

SEQ ID NO: 212628 - DNA, 33 bp, Homo sapien
ggaagagtcaattgccgcaggaaacttcatcac

SEQ ID NO: 212629 - DNA, 33 bp, Homo sapien
taagtatatttgctaccgaaataatgtctttgt

SEQ ID NO: 212630 - DNA, 33 bp, Homo sapien
taagtatatttgctactgaaataatgtctttgt

SEQ ID NO: 212631 - DNA, 33 bp, Homo sapien
agttaaaagcatggataagcatgaacttcctaa

SEQ ID NO: 212632 - DNA, 33 bp, Homo sapien
agttaaaagcatggatgagcatgaacttcctaa

SEQ ID NO: 212633 - DNA, 33 bp, Homo sapien
agatgatactgaaatacagatgaggctttgttt

SEQ ID NO: 212634 - DNA, 33 bp, Homo sapien
agatgatactgaaatatagatgaggctttgttt

SEQ ID NO: 212635 - DNA, 33 bp, Homo sapien
gagtcttgagaatgaagtatatattgaccaggt

SEQ ID NO: 212636 - DNA, 33 bp, Homo sapien
gagtcttgagaatgaattatatattgaccaggt

SEQ ID NO: 212637 - DNA, 33 bp, Homo sapien
aaataaaaatttggtaaacattgctgttgcctc

SEQ ID NO: 212638 - DNA, 33 bp, Homo sapien
aaataaaaatttggtagacattgctgttgcctc

SEQ ID NO: 212639 - DNA, 33 bp, Homo sapien
actgggagcacttcccaatgacaaatactagac

SEQ ID NO: 212640 - DNA, 33 bp, Homo sapien
actgggagcacttcccgatgacaaatactagac

SEQ ID NO: 212641 - DNA, 33 bp, Homo sapien; identical to SEQ ID NO: 212639

SEQ ID NO: 212642 - DNA, 33 bp, Homo sapien; identical to SEQ ID NO: 212640

SEQ ID NO: 212643 - DNA, 33 bp, Homo sapien
cttatgcatttagagaactaactcctcgggagc

SEQ ID NO: 212644 - DNA, 33 bp, Homo sapien
cttatgcatttagagagctaactcctcgggagc

SEQ ID NO: 212645 - DNA, 33 bp, Homo sapien
gagatgaggaataggcacaaagagtttaaacag

SEQ ID NO: 212646 - DNA, 33 bp, Homo sapien
gagatgaggaataggctcaaagagtttaaacag

SEQ ID NO: 212647 - DNA, 33 bp, Homo sapien
tgaatggatactatcccgaccttgaactacatg

SEQ ID NO: 212648 - DNA, 33 bp, Homo sapien
tgaatggatactatcctgaccttgaactacatg

SEQ ID NO: 212649 - DNA, 33 bp, Homo sapien
atttctactttgggaccagtaaataaaatgatg

SEQ ID NO: 212650 - DNA, 33 bp, Homo sapien
atttctactttgggacgagtaaataaaatgatg

SEQ ID NO: 212651 - DNA, 33 bp, Homo sapien
catgctcatcgattaaacctcatcccatgcctc

SEQ ID NO: 212652 - DNA, 33 bp, Homo sapien
catgctcatcgattaatcctcatcccatgcctc

SEQ ID NO: 212653 - DNA, 33 bp, Homo sapien
catacgctcatacttacgctgacatgacctgtg

SEQ ID NO: 212654 - DNA, 33 bp, Homo sapien
catacgctcatacttatgctgacatgacctgtg

SEQ ID NO: 212655 - DNA, 33 bp, Homo sapien
ctctctccttaatccaccataccagaaacctat

SEQ ID NO: 212656 - DNA, 33 bp, Homo sapien
ctctctccttaatccatcataccagaaacctat

SEQ ID NO: 212657 - DNA, 33 bp, Homo sapien
caacaagatactgtaaacctattcctagaactg

SEQ ID NO: 212658 - DNA, 33 bp, Homo sapien
caacaagatactgtaatcctattcctagaactg

SEQ ID NO: 212659 - DNA, 33 bp, Homo sapien
gggacgtggactttggaaatatcagtttattca

SEQ ID NO: 212660 - DNA, 33 bp, Homo sapien
gggacgtggactttgggaatatcagtttattca

SEQ ID NO: 212661 - DNA, 33 bp, Homo sapien
acgtgcagtgtttcgacagaagattttccttat

SEQ ID NO: 212662 - DNA, 33 bp, Homo sapien
acgtgcagtgtttcgatagaagattttccttat

SEQ ID NO: 212663 - DNA, 33 bp, Homo sapien
ccatatattcacactgaagatgaaaagggcact

SEQ ID NO: 212664 - DNA, 33 bp, Homo sapien
ccatatattcacactggagatgaaaagggcact

SEQ ID NO: 212665 - DNA, 33 bp, Homo sapien
gttatgaccacaaaaaatgtactagttactgta

SEQ ID NO: 212666 - DNA, 33 bp, Homo sapien
gttatgaccacaaaaagtgtactagttactgta

SEQ ID NO: 212667 - DNA, 33 bp, Homo sapien
attgcatattgcagtacacaatgtttctggcat

SEQ ID NO: 212668 - DNA, 33 bp, Homo sapien
attgcatattgcagtagacaatgtttctggcat

SEQ ID NO: 212669 - DNA, 33 bp, Homo sapien
atttagggactaaccacgatttagatatacatg

SEQ ID NO: 212670 - DNA, 33 bp, Homo sapien
atttagggactaaccatgatttagatatacatg

SEQ ID NO: 212671 - DNA, 33 bp, Homo sapien
ctgtatttgtgactaaaggttgtgggggagcat

SEQ ID NO: 212672 - DNA, 33 bp, Homo sapien
ctgtatttgtgactaagggttgtgggggagcat

SEQ ID NO: 212673 - DNA, 33 bp, Homo sapien
aatgataagcggaagactagtgatggactcaag

SEQ ID NO: 212674 - DNA, 33 bp, Homo sapien
aatgataagcggaagattagtgatggactcaag

SEQ ID NO: 212675 - DNA, 33 bp, Homo sapien
tgatacaatttaataactaatcatgataaacat

SEQ ID NO: 212676 - DNA, 33 bp, Homo sapien
tgatacaatttaataagtaatcatgataaacat

SEQ ID NO: 212677 - DNA, 33 bp, Homo sapien
atggtacaaggaaatcaaactgtcgtcaaggtt

SEQ ID NO: 212678 - DNA, 33 bp, Homo sapien
atggtacaaggaaatcgaactgtcgtcaaggtt

SEQ ID NO: 212679 - DNA, 33 bp, Homo sapien
taggttcagaagaagacgtggcaagtcatgtgg

SEQ ID NO: 212680 - DNA, 33 bp, Homo sapien
taggttcagaagaagatgtggcaagtcatgtgg

SEQ ID NO: 212681 - DNA, 33 bp, Homo sapien
gactcacagcctgctgaaagagacaatattaca

SEQ ID NO: 212682 - DNA, 33 bp, Homo sapien
gactcacagcctgctggaagagacaatattaca

SEQ ID NO: 212683 - DNA, 33 bp, Homo sapien
aggtgcctgtggagtaggtagggagtgaattag

SEQ ID NO: 212684 - DNA, 33 bp, Homo sapien
aggtgcctgtggagtatgtagggagtgaattag

SEQ ID NO: 212685 - DNA, 33 bp, Homo sapien
aaagatgattagttacaatgtatttgtggcaga

SEQ ID NO: 212686 - DNA, 33 bp, Homo sapien
aaagatgattagttaccatgtatttgtggcaga

SEQ ID NO: 212687 - DNA, 33 bp, Homo sapien
gcacatgtctgcaatccaggcactggctcagct

SEQ ID NO: 212688 - DNA, 33 bp, Homo sapien
gcacatgtctgcaatctaggcactggctcagct

SEQ ID NO: 212689 - DNA, 33 bp, Homo sapien
tggggcctgcaaccaagcctcactgcacatgtc

SEQ ID NO: 212690 - DNA, 33 bp, Homo sapien
tggggcctgcaaccaatcctcactgcacatgtc

SEQ ID NO: 212691 - DNA, 33 bp, Homo sapien
ggagttgtgtgccagaaaactgcagacacaaca

SEQ ID NO: 212692 - DNA, 33 bp, Homo sapien
ggagttgtgtgccagagaactgcagacacaaca

SEQ ID NO: 212693 - DNA, 33 bp, Homo sapien
aggtgactgattaaatcactggctgctagtgat

SEQ ID NO: 212694 - DNA, 33 bp, Homo sapien
aggtgactgattaaattactggctgctagtgat

SEQ ID NO: 212695 - DNA, 33 bp, Homo sapien
atgaagaaatacataaagcaaagcatataagaa

SEQ ID NO: 212696 - DNA, 33 bp, Homo sapien
atgaagaaatacataaggcaaagcatataagaa

SEQ ID NO: 212697 - DNA, 33 bp, Homo sapien
ttatcaaggatgtcacaaagaaacagatgaaga

SEQ ID NO: 212698 - DNA, 33 bp, Homo sapien
ttatcaaggatgtcacgaagaaacagatgaaga

SEQ ID NO: 212699 - DNA, 33 bp, Homo sapien
aaacagactttatttgcaaatggaaccatcacc

SEQ ID NO: 212700 - DNA, 33 bp, Homo sapien
aaacagactttatttgtaaatggaaccatcacc

SEQ ID NO: 212701 - DNA, 33 bp, Homo sapien
tcatcccagcaaagaagcagtttgttaactcct

SEQ ID NO: 212702 - DNA, 33 bp, Homo sapien
tcatcccagcaaagaatcagtttgttaactcct

SEQ ID NO: 212703 - DNA, 33 bp, Homo sapien
gattgagaatggattacgccaaaattaataagg

SEQ ID NO: 212704 - DNA, 33 bp, Homo sapien
gattgagaatggattatgccaaaattaataagg

SEQ ID NO: 212705 - DNA, 33 bp, Homo sapien
ctatagacaaactgctaagagagacacttgcca

SEQ ID NO: 212706 - DNA, 33 bp, Homo sapien
ctatagacaaactgctcagagagacacttgcca

SEQ ID NO: 212707 - DNA, 33 bp, Homo sapien
taaattttgtgagggcaatgaaattttactctt

SEQ ID NO: 212708 - DNA, 33 bp, Homo sapien
taaattttgtgagggcgatgaaattttactctt

SEQ ID NO: 212709 - DNA, 33 bp, Homo sapien
gggtatggtaagagagacaatgctgcttttaaa

SEQ ID NO: 212710 - DNA, 33 bp, Homo sapien
gggtatggtaagagaggcaatgctgcttttaaa

SEQ ID NO: 212711 - DNA, 33 bp, Homo sapien
gtgtccttgagtttcacgtaaccaaacaccttt

SEQ ID NO: 212712 - DNA, 33 bp, Homo sapien
gtgtccttgagtttcatgtaaccaaacaccttt

SEQ ID NO: 212713 - DNA, 33 bp, Homo sapien
gttggggtgtttcgaccgcaaattcttctacca

SEQ ID NO: 212714 - DNA, 33 bp, Homo sapien
gttggggtgtttcgactgcaaattcttctacca

SEQ ID NO: 212715 - DNA, 33 bp, Homo sapien
ctagtccccaagcaagccatgctctttgctgtc

SEQ ID NO: 212716 - DNA, 33 bp, Homo sapien
ctagtccccaagcaagtcatgctctttgctgtc

SEQ ID NO: 212717 - DNA, 33 bp, Homo sapien
accccacacacacctacgattaaggggtaacta

SEQ ID NO: 212718 - DNA, 33 bp, Homo sapien
accccacacacacctatgattaaggggtaacta

SEQ ID NO: 212719 - DNA, 33 bp, Homo sapien
gagtatctgctaagaactcaaagttatttcaaa

SEQ ID NO: 212720 - DNA, 33 bp, Homo sapien
gagtatctgctaagaattcaaagttatttcaaa

SEQ ID NO: 212721 - DNA, 33 bp, Homo sapien
gaaattgagtgaatgacaattttgtaatttagg

SEQ ID NO: 212722 - DNA, 33 bp, Homo sapien
gaaattgagtgaatgataattttgtaatttagg

SEQ ID NO: 212723 - DNA, 33 bp, Homo sapien
acactgcaatgccactaaagaaaccagatgaaa

SEQ ID NO: 212724 - DNA, 33 bp, Homo sapien
acactgcaatgccacttaagaaaccagatgaaa

SEQ ID NO: 212725 - DNA, 33 bp, Homo sapien
gcaaattcactttcaactaaagcagtccagttt

SEQ ID NO: 212726 - DNA, 33 bp, Homo sapien
gcaaattcactttcaattaaagcagtccagttt

SEQ ID NO: 212727 - DNA, 33 bp, Homo sapien
tcagaaccatttcaagcattaaggcagagaaag

SEQ ID NO: 212728 - DNA, 33 bp, Homo sapien
tcagaaccatttcaagtattaaggcagagaaag

SEQ ID NO: 212729 - DNA, 33 bp, Homo sapien
ctatatccttgtatgcactcagaggaggaaaag

SEQ ID NO: 212730 - DNA, 33 bp, Homo sapien
ctatatccttgtatgcgctcagaggaggaaaag

SEQ ID NO: 212731 - DNA, 33 bp, Homo sapien
aagggagtttgtggaagagtccatagtgaatga

SEQ ID NO: 212732 - DNA, 33 bp, Homo sapien
aagggagtttgtggaatagtccatagtgaatga

SEQ ID NO: 212733 - DNA, 33 bp, Homo sapien
agcagatccataagtaagagataagttaaactt

SEQ ID NO: 212734 - DNA, 33 bp, Homo sapien
agcagatccataagtaggagataagttaaactt

SEQ ID NO: 212735 - DNA, 33 bp, Homo sapien
ttgagtttgagttacacgtgagatatagaactt

SEQ ID NO: 212736 - DNA, 33 bp, Homo sapien
ttgagtttgagttacatgtgagatatagaactt

SEQ ID NO: 212737 - DNA, 33 bp, Homo sapien
gagttcggtttctgatgaattgagtttgagtta

SEQ ID NO: 212738 - DNA, 33 bp, Homo sapien
gagttcggtttctgattaattgagtttgagtta

SEQ ID NO: 212739 - DNA, 33 bp, Homo sapien
gaacacacagctggtaagtcgaagcagaatcca

SEQ ID NO: 212740 - DNA, 33 bp, Homo sapien
gaacacacagctggtaggtcgaagcagaatcca

SEQ ID NO: 212741 - DNA, 33 bp, Homo sapien
aagagagggaccactccgagcatatgacggaaa

SEQ ID NO: 212742 - DNA, 33 bp, Homo sapien
aagagagggaccactctgagcatatgacggaaa

SEQ ID NO: 212743 - DNA, 33 bp, Homo sapien
cttctccataattgggacactacaaatatacaa

SEQ ID NO: 212744 - DNA, 33 bp, Homo sapien
cttctccataattgggccactacaaatatacaa

SEQ ID NO: 212745 - DNA, 33 bp, Homo sapien
tgtaagggcaaacaaaataagttgtctctttgt

SEQ ID NO: 212746 - DNA, 33 bp, Homo sapien
tgtaagggcaaacaaactaagttgtctctttgt

SEQ ID NO: 212747 - DNA, 33 bp, Homo sapien
gacaattaaaaggcaaatgtagaaactagggaa

SEQ ID NO: 212748 - DNA, 33 bp, Homo sapien
gacaattaaaaggcaagtgtagaaactagggaa

SEQ ID NO: 212749 - DNA, 33 bp, Homo sapien
gcttttaaatggattgaatttgagacaccttgt

SEQ ID NO: 212750 - DNA, 33 bp, Homo sapien
gcttttaaatggattgcatttgagacaccttgt

SEQ ID NO: 212751 - DNA, 33 bp, Homo sapien
agctttgggactccgactagcttccttgttcct

SEQ ID NO: 212752 - DNA, 33 bp, Homo sapien
agctttgggactccgattagcttccttgttcct

SEQ ID NO: 212753 - DNA, 33 bp, Homo sapien
aaccagaggtagagaaaggtgtgtacgttatgg

SEQ ID NO: 212754 - DNA, 33 bp, Homo sapien
aaccagaggtagagaagggtgtgtacgttatgg

SEQ ID NO: 212755 - DNA, 33 bp, Homo sapien
tgatggttgctgggcacacccttgtagcagtga

SEQ ID NO: 212756 - DNA, 33 bp, Homo sapien
tgatggttgctgggcatacccttgtagcagtga

SEQ ID NO: 212757 - DNA, 33 bp, Homo sapien
tttgtgaactgacagacatttcatggagacaat

SEQ ID NO: 212758 - DNA, 33 bp, Homo sapien
tttgtgaactgacagatatttcatggagacaat

SEQ ID NO: 212759 - DNA, 33 bp, Homo sapien
ttatgatgataacgtacgtgtgtagggcttgac

SEQ ID NO: 212760 - DNA, 33 bp, Homo sapien
ttatgatgataacgtatgtgtgtagggcttgac

SEQ ID NO: 212761 - DNA, 33 bp, Homo sapien
atttatcgttcaagtacatgccctcaattagat

SEQ ID NO: 212762 - DNA, 33 bp, Homo sapien
atttatcgttcaagtatatgccctcaattagat

SEQ ID NO: 212763 - DNA, 33 bp, Homo sapien
gatcacagttaatcaacgataaggccagcactc

SEQ ID NO: 212764 - DNA, 33 bp, Homo sapien
gatcacagttaatcaatgataaggccagcactc

SEQ ID NO: 212765 - DNA, 33 bp, Homo sapien
tccaaaggtctccaagaaacatataacttaggt

SEQ ID NO: 212766 - DNA, 33 bp, Homo sapien
tccaaaggtctccaaggaacatataacttaggt

SEQ ID NO: 212767 - DNA, 33 bp, Homo sapien
gaaacagatatgaaggaaaaagctatttaaagc

SEQ ID NO: 212768 - DNA, 33 bp, Homo sapien
gaaacagatatgaagggaaaagctatttaaagc

SEQ ID NO: 212769 - DNA, 33 bp, Homo sapien
tgatagttgtcaaacacgatctactaattccat

SEQ ID NO: 212770 - DNA, 33 bp, Homo sapien
tgatagttgtcaaacatgatctactaattccat

SEQ ID NO: 212771 - DNA, 33 bp, Homo sapien
aagattattctgtgaccgccaattctaagattg

SEQ ID NO: 212772 - DNA, 33 bp, Homo sapien
aagattattctgtgactgccaattctaagattg

SEQ ID NO: 212773 - DNA, 33 bp, Homo sapien
aattcatagccaaaaacatactttcgggtcatc

SEQ ID NO: 212774 - DNA, 33 bp, Homo sapien
aattcatagccaaaaatatactttcgggtcatc

SEQ ID NO: 212775 - DNA, 33 bp, Homo sapien
tccttccttttcagccaaatatgcacttctcag

SEQ ID NO: 212776 - DNA, 33 bp, Homo sapien
tccttccttttcagccgaatatgcacttctcag

SEQ ID NO: 212777 - DNA, 33 bp, Homo sapien
ggtaggtacaacgacaaattgcaaagtagtttt

SEQ ID NO: 212778 - DNA, 33 bp, Homo sapien
ggtaggtacaacgacacattgcaaagtagtttt

SEQ ID NO: 212779 - DNA, 33 bp, Homo sapien
agttgactgaagcaaacataaacactcaaacca

SEQ ID NO: 212780 - DNA, 33 bp, Homo sapien
agttgactgaagcaaagataaacactcaaacca

SEQ ID NO: 212781 - DNA, 33 bp, Homo sapien
aggtgaagggaaatgcaagcaaaagagtttaag

SEQ ID NO: 212782 - DNA, 33 bp, Homo sapien
aggtgaagggaaatgcgagcaaaagagtttaag

SEQ ID NO: 212783 - DNA, 33 bp, Homo sapien
taacttctgggggcaaagtacaccatctatgag

SEQ ID NO: 212784 - DNA, 33 bp, Homo sapien
taacttctgggggcaaggtacaccatctatgag

SEQ ID NO: 212785 - DNA, 33 bp, Homo sapien
ttcttaattggtaaaagcatctttcaacaagtc

SEQ ID NO: 212786 - DNA, 33 bp, Homo sapien
ttcttaattggtaaaatcatctttcaacaagtc

SEQ ID NO: 212787 - DNA, 33 bp, Homo sapien
tgtctcattactgctgaacttaatcccctggtt

SEQ ID NO: 212788 - DNA, 33 bp, Homo sapien
tgtctcattactgctggacttaatcccctggtt

SEQ ID NO: 212789 - DNA, 33 bp, Homo sapien
aaaagaggccctgcagcaaagaactggcgcatg

SEQ ID NO: 212790 - DNA, 33 bp, Homo sapien
aaaagaggccctgcaggaaagaactggcgcatg

SEQ ID NO: 212791 - DNA, 33 bp, Homo sapien
atacatgggaactcaccaaacagttttggcaac

SEQ ID NO: 212792 - DNA, 33 bp, Homo sapien
atacatgggaactcacgaaacagttttggcaac

SEQ ID NO: 212793 - DNA, 33 bp, Homo sapien
aagaatatttcatagaccactttacataataaa

SEQ ID NO: 212794 - DNA, 33 bp, Homo sapien
aagaatatttcatagatcactttacataataaa

SEQ ID NO: 212795 - DNA, 33 bp, Homo sapien
ctgaagatacagagataacagatgagcctctag

SEQ ID NO: 212796 - DNA, 33 bp, Homo sapien
ctgaagatacagagatgacagatgagcctctag

SEQ ID NO: 212797 - DNA, 33 bp, Homo sapien
tcttaaagccataaggaaaatcacagagatctt

SEQ ID NO: 212798 - DNA, 33 bp, Homo sapien
tcttaaagccataaggcaaatcacagagatctt

SEQ ID NO: 212799 - DNA, 33 bp, Homo sapien
agggatgataagaaaaatatttagctaggtaca

SEQ ID NO: 212800 - DNA, 33 bp, Homo sapien
agggatgataagaaaagtatttagctaggtaca

SEQ ID NO: 212801 - DNA, 33 bp, Homo sapien
tgggtttcaacaattcactttcaaagcactaac

SEQ ID NO: 212802 - DNA, 33 bp, Homo sapien
tgggtttcaacaattccctttcaaagcactaac

SEQ ID NO: 212803 - DNA, 33 bp, Homo sapien
attcctcactttgacactcactaatctcccttc

SEQ ID NO: 212804 - DNA, 33 bp, Homo sapien
attcctcactttgacattcactaatctcccttc

SEQ ID NO: 212805 - DNA, 33 bp, Homo sapien
aacccaacagcaactacggaggtggatatcaga

SEQ ID NO: 212806 - DNA, 33 bp, Homo sapien
aacccaacagcaactatggaggtggatatcaga

SEQ ID NO: 212807 - DNA, 33 bp, Homo sapien
ggagagaaagagaaaacgaggagggttcaaaga

SEQ ID NO: 212808 - DNA, 33 bp, Homo sapien
ggagagaaagagaaaatgaggagggttcaaaga

SEQ ID NO: 212809 - DNA, 33 bp, Homo sapien
aattcacgttatagctcacttacagtagtccac

SEQ ID NO: 212810 - DNA, 33 bp, Homo sapien
aattcacgttatagctgacttacagtagtccac

SEQ ID NO: 212811 - DNA, 33 bp, Homo sapien
tttgctttccacttcaatatccagaaaactctc

SEQ ID NO: 212812 - DNA, 33 bp, Homo sapien
tttgctttccacttcagtatccagaaaactctc

SEQ ID NO: 212813 - DNA, 33 bp, Homo sapien
acaaaatagatcaacaaaaaagatcaacaaaaa

SEQ ID NO: 212814 - DNA, 33 bp, Homo sapien
acaaaatagatcaacataaaagatcaacaaaaa

SEQ ID NO: 212815 - DNA, 33 bp, Homo sapien
gaaaggaacagatggacggaaaaagacacattc

SEQ ID NO: 212816 - DNA, 33 bp, Homo sapien
gaaaggaacagatggatggaaaaagacacattc

SEQ ID NO: 212817 - DNA, 33 bp, Homo sapien
aaacagtctgtccaaagtaggagggctggaagc

SEQ ID NO: 212818 - DNA, 33 bp, Homo sapien
aaacagtctgtccaaattaggagggctggaagc

SEQ ID NO: 212819 - DNA, 33 bp, Homo sapien
agccaggaagaaagtccattaagttgtatttag

SEQ ID NO: 212820 - DNA, 33 bp, Homo sapien
agccaggaagaaagtcgattaagttgtatttag

SEQ ID NO: 212821 - DNA, 33 bp, Homo sapien
ggacaaaagaagatgacgtaaacttaaggattg

SEQ ID NO: 212822 - DNA, 33 bp, Homo sapien
ggacaaaagaagatgatgtaaacttaaggattg

SEQ ID NO: 212823 - DNA, 33 bp, Homo sapien
tgattctaaacgtaccagggataactccaaatg

SEQ ID NO: 212824 - DNA, 33 bp, Homo sapien
tgattctaaacgtaccggggataactccaaatg

SEQ ID NO: 212825 - DNA, 33 bp, Homo sapien
tttcacttgtctatcaaagtttttcctcttttg

SEQ ID NO: 212826 - DNA, 33 bp, Homo sapien
tttcacttgtctatcagagtttttcctcttttg

SEQ ID NO: 212827 - DNA, 33 bp, Homo sapien
tctgtgaacagcagtaataacaataataatagt

SEQ ID NO: 212828 - DNA, 33 bp, Homo sapien
tctgtgaacagcagtagtaacaataataatagt

SEQ ID NO: 212829 - DNA, 33 bp, Homo sapien
aaattgaagaacaacaatggacagatatcaaca

SEQ ID NO: 212830 - DNA, 33 bp, Homo sapien
aaattgaagaacaacagtggacagatatcaaca

SEQ ID NO: 212831 - DNA, 33 bp, Homo sapien
cctagtgatgtacactaagcttgcctccatctt

SEQ ID NO: 212832 - DNA, 33 bp, Homo sapien
cctagtgatgtacactgagcttgcctccatctt

SEQ ID NO: 212833 - DNA, 33 bp, Homo sapien
gcctggggagagtccaaatagccaagtttgaaa

SEQ ID NO: 212834 - DNA, 33 bp, Homo sapien
gcctggggagagtccagatagccaagtttgaaa

SEQ ID NO: 212835 - DNA, 33 bp, Homo sapien
gtgaaagtgtcccaaaatgtgcctttaaattgt

SEQ ID NO: 212836 - DNA, 33 bp, Homo sapien
gtgaaagtgtcccaaattgtgcctttaaattgt

SEQ ID NO: 212837 - DNA, 33 bp, Homo sapien
tcctgtcacagaattcactttcttgaggcagga

SEQ ID NO: 212838 - DNA, 33 bp, Homo sapien
tcctgtcacagaattcgctttcttgaggcagga

SEQ ID NO: 212839 - DNA, 33 bp, Homo sapien
aaatcaatgattctgaaattaagtaaagttggt

SEQ ID NO: 212840 - DNA, 33 bp, Homo sapien
aaatcaatgattctgacattaagtaaagttggt

SEQ ID NO: 212841 - DNA, 33 bp, Homo sapien
tatagatacaaatcacgaatctttccagtatag

SEQ ID NO: 212842 - DNA, 33 bp, Homo sapien
tatagatacaaatcactaatctttccagtatag

SEQ ID NO: 212843 - DNA, 33 bp, Homo sapien
acattctctcttcttaacaccccactttgaaac

SEQ ID NO: 212844 - DNA, 33 bp, Homo sapien
acattctctcttcttagcaccccactttgaaac

SEQ ID NO: 212845 - DNA, 33 bp, Homo sapien
taaaatggtggtaagacggtgaaatggagattt

SEQ ID NO: 212846 - DNA, 33 bp, Homo sapien
taaaatggtggtaagatggtgaaatggagattt

SEQ ID NO: 212847 - DNA, 33 bp, Homo sapien
gttttgtgaaagtagacaagaacacttcatcat

SEQ ID NO: 212848 - DNA, 33 bp, Homo sapien
gttttgtgaaagtagataagaacacttcatcat

SEQ ID NO: 212849 - DNA, 33 bp, Homo sapien
atatgttaggtttctaagactgaatgtacgcat

SEQ ID NO: 212850 - DNA, 33 bp, Homo sapien
atatgttaggtttctaggactgaatgtacgcat

SEQ ID NO: 212851 - DNA, 33 bp, Homo sapien
ttcttcttgtaagtatcagtgatagagctgact

SEQ ID NO: 212852 - DNA, 33 bp, Homo sapien
ttcttcttgtaagtatgagtgatagagctgact

SEQ ID NO: 212853 - DNA, 33 bp, Homo sapien
atagtttttactaagagtcagtgtttcatgata

SEQ ID NO: 212854 - DNA, 33 bp, Homo sapien
atagtttttactaagattcagtgtttcatgata

SEQ ID NO: 212855 - DNA, 33 bp, Homo sapien
atatgacatttgtgaaataatctccagtgatag

SEQ ID NO: 212856 - DNA, 33 bp, Homo sapien
atatgacatttgtgaactaatctccagtgatag

SEQ ID NO: 212857 - DNA, 33 bp, Homo sapien
gccaatgttaacctcaactgatgaagccatgtg

SEQ ID NO: 212858 - DNA, 33 bp, Homo sapien
gccaatgttaacctcagctgatgaagccatgtg

SEQ ID NO: 212859 - DNA, 33 bp, Homo sapien
ctgaacctgatagagacaaatagaaagagaata

SEQ ID NO: 212860 - DNA, 33 bp, Homo sapien
ctgaacctgatagagataaatagaaagagaata

SEQ ID NO: 212861 - DNA, 33 bp, Homo sapien
cggcccaccatcctgcaaggaagagttctttaa

SEQ ID NO: 212862 - DNA, 33 bp, Homo sapien
cggcccaccatcctgccaggaagagttctttaa

SEQ ID NO: 212863 - DNA, 33 bp, Homo sapien
aaaagttgatatcctcaagaaagataaacagga

SEQ ID NO: 212864 - DNA, 33 bp, Homo sapien
aaaagttgatatcctccagaaagataaacagga

SEQ ID NO: 212865 - DNA, 33 bp, Homo sapien
ggacctagccaacatacactggcagaagctggg

SEQ ID NO: 212866 - DNA, 33 bp, Homo sapien
ggacctagccaacatatactggcagaagctggg

SEQ ID NO: 212867 - DNA, 33 bp, Homo sapien
cattacctctttaagcgcatctcttactgctct

SEQ ID NO: 212868 - DNA, 33 bp, Homo sapien
cattacctctttaagctcatctcttactgctct

SEQ ID NO: 212869 - DNA, 33 bp, Homo sapien
atgtaatttctctgaactcgatgtaatttgttt

SEQ ID NO: 212870 - DNA, 33 bp, Homo sapien
atgtaatttctctgaagtcgatgtaatttgttt

SEQ ID NO: 212871 - DNA, 33 bp, Homo sapien
aatacacgtcaccaaaattcccatgttaaataa

SEQ ID NO: 212872 - DNA, 33 bp, Homo sapien
aatacacgtcaccaaatttcccatgttaaataa

SEQ ID NO: 212873 - DNA, 33 bp, Homo sapien
cccttgggcaagatagaagatgagatttcagga

SEQ ID NO: 212874 - DNA, 33 bp, Homo sapien
cccttgggcaagatagtagatgagatttcagga

SEQ ID NO: 212875 - DNA, 33 bp, Homo sapien
cagcttgaatgatttactaaagttgaatttgat

SEQ ID NO: 212876 - DNA, 33 bp, Homo sapien
cagcttgaatgatttagtaaagttgaatttgat

SEQ ID NO: 212877 - DNA, 33 bp, Homo sapien
aatacaaaaattaaccaagtatgatggcaagtg

SEQ ID NO: 212878 - DNA, 33 bp, Homo sapien
aatacaaaaattaaccgagtatgatggcaagtg

SEQ ID NO: 212879 - DNA, 33 bp, Homo sapien
cttatctgtgtctgcacgaagcaccttcttcca

SEQ ID NO: 212880 - DNA, 33 bp, Homo sapien
cttatctgtgtctgcatgaagcaccttcttcca

SEQ ID NO: 212881 - DNA, 33 bp, Homo sapien
gattaaagagaaagaactctggaggcatcattt

SEQ ID NO: 212882 - DNA, 33 bp, Homo sapien
gattaaagagaaagaattctggaggcatcattt

SEQ ID NO: 212883 - DNA, 33 bp, Homo sapien
gaaaaatggcatactacgaaatgcgagctgaac

SEQ ID NO: 212884 - DNA, 33 bp, Homo sapien
gaaaaatggcatactatgaaatgcgagctgaac

SEQ ID NO: 212885 - DNA, 33 bp, Homo sapien
ttataacatggtttaccggatattttaagccaa

SEQ ID NO: 212886 - DNA, 33 bp, Homo sapien
ttataacatggtttactggatattttaagccaa

SEQ ID NO: 212887 - DNA, 33 bp, Homo sapien
gagccttaaatgctcacgttaatcataaatatg

SEQ ID NO: 212888 - DNA, 33 bp, Homo sapien
gagccttaaatgctcatgttaatcataaatatg

SEQ ID NO: 212889 - DNA, 33 bp, Homo sapien
ctgtgattctcatgtgcagccggagttgactac

SEQ ID NO: 212890 - DNA, 33 bp, Homo sapien
ctgtgattctcatgtggagccggagttgactac

SEQ ID NO: 212891 - DNA, 33 bp, Homo sapien
tatggctgaacttgacggctccttgacagatcc

SEQ ID NO: 212892 - DNA, 33 bp, Homo sapien
tatggctgaacttgactgctccttgacagatcc

SEQ ID NO: 212893 - DNA, 33 bp, Homo sapien
gtagagccaacacttacgaatgaggccaagagt

SEQ ID NO: 212894 - DNA, 33 bp, Homo sapien
gtagagccaacacttatgaatgaggccaagagt

SEQ ID NO: 212895 - DNA, 33 bp, Homo sapien
aatctcagggaggatactactccattaggtaca

SEQ ID NO: 212896 - DNA, 33 bp, Homo sapien
aatctcagggaggatattactccattaggtaca

SEQ ID NO: 212897 - DNA, 33 bp, Homo sapien
cacattggatttcctaggtcaccttaaggtctt

SEQ ID NO: 212898 - DNA, 33 bp, Homo sapien
cacattggatttcctatgtcaccttaaggtctt

SEQ ID NO: 212899 - DNA, 33 bp, Homo sapien
ttttggttattattgcaaagctatttttacatg

SEQ ID NO: 212900 - DNA, 33 bp, Homo sapien
ttttggttattattgcgaagctatttttacatg

SEQ ID NO: 212901 - DNA, 33 bp, Homo sapien
gtttggtggaacagtccgaacacttacaacact

SEQ ID NO: 212902 - DNA, 33 bp, Homo sapien
gtttggtggaacagtctgaacacttacaacact

SEQ ID NO: 212903 - DNA, 33 bp, Homo sapien
atattattcacctgaaatcttacttcatttgac

SEQ ID NO: 212904 - DNA, 33 bp, Homo sapien
atattattcacctgaactcttacttcatttgac

SEQ ID NO: 212905 - DNA, 33 bp, Homo sapien
acttgcagtattttcacgttgatataaaactac

SEQ ID NO: 212906 - DNA, 33 bp, Homo sapien
acttgcagtattttcatgttgatataaaactac

SEQ ID NO: 212907 - DNA, 33 bp, Homo sapien
gatataaacatgacacagaaagagagttatgta

SEQ ID NO: 212908 - DNA, 33 bp, Homo sapien
gatataaacatgacaccgaaagagagttatgta

SEQ ID NO: 212909 - DNA, 33 bp, Homo sapien
caagttgactttggcagaaatgtagtttatact

SEQ ID NO: 212910 - DNA, 33 bp, Homo sapien
caagttgactttggcataaatgtagtttatact

SEQ ID NO: 212911 - DNA, 33 bp, Homo sapien
gatgcttggtctgttacgcagcttgaaaggcag

SEQ ID NO: 212912 - DNA, 33 bp, Homo sapien
gatgcttggtctgttatgcagcttgaaaggcag

SEQ ID NO: 212913 - DNA, 33 bp, Homo sapien
acaaacaaaatcaagaaacaatggctatcttca

SEQ ID NO: 212914 - DNA, 33 bp, Homo sapien
acaaacaaaatcaagatacaatggctatcttca

SEQ ID NO: 212915 - DNA, 33 bp, Homo sapien
ggaccaagagaacctacctaagggaagatgcag

SEQ ID NO: 212916 - DNA, 33 bp, Homo sapien
ggaccaagagaacctatctaagggaagatgcag

SEQ ID NO: 212917 - DNA, 33 bp, Homo sapien
caggagacttaagcagaaacttcaaggcttctt

SEQ ID NO: 212918 - DNA, 33 bp, Homo sapien
caggagacttaagcaggaacttcaaggcttctt

SEQ ID NO: 212919 - DNA, 33 bp, Homo sapien
gtgtagttcactggggccatcatgggaaactag

SEQ ID NO: 212920 - DNA, 33 bp, Homo sapien
gtgtagttcactggggtcatcatgggaaactag

SEQ ID NO: 212921 - DNA, 33 bp, Homo sapien
agctagcaaaatcttcccaaagtaagaaattgg

SEQ ID NO: 212922 - DNA, 33 bp, Homo sapien
agctagcaaaatcttctcaaagtaagaaattgg

SEQ ID NO: 212923 - DNA, 33 bp, Homo sapien
ttttccatccagcaacaaataataacttcctta

SEQ ID NO: 212924 - DNA, 33 bp, Homo sapien
ttttccatccagcaactaataataacttcctta

SEQ ID NO: 212925 - DNA, 33 bp, Homo sapien
ctttacaagagtgttacagatgatccaaaatgg

SEQ ID NO: 212926 - DNA, 33 bp, Homo sapien
ctttacaagagtgttatagatgatccaaaatgg

SEQ ID NO: 212927 - DNA, 33 bp, Homo sapien
aaataagcacgacctcactcgcattcaagttat

SEQ ID NO: 212928 - DNA, 33 bp, Homo sapien
aaataagcacgacctcgctcgcattcaagttat

SEQ ID NO: 212929 - DNA, 33 bp, Homo sapien
tttaggtcttggctcaaatgaaagctcctcata

SEQ ID NO: 212930 - DNA, 33 bp, Homo sapien
tttaggtcttggctcagatgaaagctcctcata

SEQ ID NO: 212931 - DNA, 33 bp, Homo sapien
gcccaccatttaagtgcgataatttgtcagtgt

SEQ ID NO: 212932 - DNA, 33 bp, Homo sapien
gcccaccatttaagtgtgataatttgtcagtgt

SEQ ID NO: 212933 - DNA, 33 bp, Homo sapien
tgaggatcctgggaggaaaaaattagctctgaa

SEQ ID NO: 212934 - DNA, 33 bp, Homo sapien
tgaggatcctgggagggaaaaattagctctgaa

SEQ ID NO: 212935 - DNA, 33 bp, Homo sapien
gatcaacttcaccacactggagacagcataagg

SEQ ID NO: 212936 - DNA, 33 bp, Homo sapien
gatcaacttcaccacattggagacagcataagg

SEQ ID NO: 212937 - DNA, 33 bp, Homo sapien
atcttgaaaatgttccgaccttttgaattcata

SEQ ID NO: 212938 - DNA, 33 bp, Homo sapien
atcttgaaaatgttcctaccttttgaattcata

SEQ ID NO: 212939 - DNA, 33 bp, Homo sapien
gcaataagttactaaacagcacagtggtgaggc

SEQ ID NO: 212940 - DNA, 33 bp, Homo sapien
gcaataagttactaaatagcacagtggtgaggc

SEQ ID NO: 212941 - DNA, 33 bp, Homo sapien
gctgcgatgccaaccaaaaacccctccacagta

SEQ ID NO: 212942 - DNA, 33 bp, Homo sapien
gctgcgatgccaaccataaacccctccacagta

SEQ ID NO: 212943 - DNA, 33 bp, Homo sapien
gaatatttggaggaagcatggcacataaaagaa

SEQ ID NO: 212944 - DNA, 33 bp, Homo sapien
gaatatttggaggaaggatggcacataaaagaa

SEQ ID NO: 212945 - DNA, 33 bp, Homo sapien
tttcacagatgttaaaatattaaaaactgtgca

SEQ ID NO: 212946 - DNA, 33 bp, Homo sapien
tttcacagatgttaaagtattaaaaactgtgca

SEQ ID NO: 212947 - DNA, 33 bp, Homo sapien
taattgtgccaacagcaataatgcaaactttga

SEQ ID NO: 212948 - DNA, 33 bp, Homo sapien
taattgtgccaacagcgataatgcaaactttga

SEQ ID NO: 212949 - DNA, 33 bp, Homo sapien
agcccccaactctccaacaatactcctcacatg

SEQ ID NO: 212950 - DNA, 33 bp, Homo sapien
agcccccaactctccagcaatactcctcacatg

SEQ ID NO: 212951 - DNA, 33 bp, Homo sapien
ctaaatgatccacagacgagctttttagattat

SEQ ID NO: 212952 - DNA, 33 bp, Homo sapien
ctaaatgatccacagatgagctttttagattat

SEQ ID NO: 212953 - DNA, 33 bp, Homo sapien
tgtgaggtgttttacaaacaattaagcaaactt

SEQ ID NO: 212954 - DNA, 33 bp, Homo sapien
tgtgaggtgttttacatacaattaagcaaactt

SEQ ID NO: 212955 - DNA, 33 bp, Homo sapien
ttgttttccttggaaacggatggagacttactc

SEQ ID NO: 212956 - DNA, 33 bp, Homo sapien
ttgttttccttggaaagggatggagacttactc

SEQ ID NO: 212957 - DNA, 33 bp, Homo sapien
tcttgacttggaatcacagcatggaaccagtgt

SEQ ID NO: 212958 - DNA, 33 bp, Homo sapien
tcttgacttggaatcatagcatggaaccagtgt

SEQ ID NO: 212959 - DNA, 33 bp, Homo sapien
tttccttaaagtgtcacattttgcggaattgag

SEQ ID NO: 212960 - DNA, 33 bp, Homo sapien
tttccttaaagtgtcatattttgcggaattgag

SEQ ID NO: 212961 - DNA, 33 bp, Homo sapien
ccacaggaagagatcaagccttaaggggtttat

SEQ ID NO: 212962 - DNA, 33 bp, Homo sapien
ccacaggaagagatcaggccttaaggggtttat

SEQ ID NO: 212963 - DNA, 33 bp, Homo sapien
aaaacattacacaacccagcaacaacaaaaaaa

SEQ ID NO: 212964 - DNA, 33 bp, Homo sapien
aaaacattacacaacctagcaacaacaaaaaaa

SEQ ID NO: 212965 - DNA, 33 bp, Homo sapien
cgtttagctgctttgaatattaggacatctcct

SEQ ID NO: 212966 - DNA, 33 bp, Homo sapien
cgtttagctgctttgagtattaggacatctcct

SEQ ID NO: 212967 - DNA, 33 bp, Homo sapien
acaggggctgagagcaacccccaaacacgcaag

SEQ ID NO: 212968 - DNA, 33 bp, Homo sapien
acaggggctgagagcaccccccaaacacgcaag

SEQ ID NO: 212969 - DNA, 33 bp, Homo sapien
tcagaagaatagctgacgggaactttaagatgt

SEQ ID NO: 212970 - DNA, 33 bp, Homo sapien
tcagaagaatagctgatgggaactttaagatgt

SEQ ID NO: 212971 - DNA, 33 bp, Homo sapien
cccactttctaaggctcaaaaattctctttctg

SEQ ID NO: 212972 - DNA, 33 bp, Homo sapien
cccactttctaaggcttaaaaattctctttctg

SEQ ID NO: 212973 - DNA, 33 bp, Homo sapien
tgttccttaatggaaactggatgacagtcagtt

SEQ ID NO: 212974 - DNA, 33 bp, Homo sapien
tgttccttaatggaaagtggatgacagtcagtt

SEQ ID NO: 212975 - DNA, 33 bp, Homo sapien
attaatcaaacataaaagtcttatcagtttcat

SEQ ID NO: 212976 - DNA, 33 bp, Homo sapien
attaatcaaacataaaggtcttatcagtttcat

SEQ ID NO: 212977 - DNA, 33 bp, Homo sapien
ttgattctaccagtaactgagctttgtgtttcc

SEQ ID NO: 212978 - DNA, 33 bp, Homo sapien
ttgattctaccagtaattgagctttgtgtttcc

SEQ ID NO: 212979 - DNA, 33 bp, Homo sapien
agataataatactagaaagctgttcgagatttc

SEQ ID NO: 212980 - DNA, 33 bp, Homo sapien
agataataatactagacagctgttcgagatttc

SEQ ID NO: 212981 - DNA, 33 bp, Homo sapien
tcctcaagttcaaggactatttgtagagtaaat

SEQ ID NO: 212982 - DNA, 33 bp, Homo sapien
tcctcaagttcaaggagtatttgtagagtaaat

SEQ ID NO: 212983 - DNA, 33 bp, Homo sapien
gtttctcacctgtatcacttctttctttctgaa

SEQ ID NO: 212984 - DNA, 33 bp, Homo sapien
gtttctcacctgtatcgcttctttctttctgaa

SEQ ID NO: 212985 - DNA, 33 bp, Homo sapien
ctaagccaatgtaaaaacaaagcaataattaac

SEQ ID NO: 212986 - DNA, 33 bp, Homo sapien
ctaagccaatgtaaaagcaaagcaataattaac

SEQ ID NO: 212987 - DNA, 33 bp, Homo sapien
gtttgggtatgatatagatttggaaatgacaca

SEQ ID NO: 212988 - DNA, 33 bp, Homo sapien
gtttgggtatgatatatatttggaaatgacaca

SEQ ID NO: 212989 - DNA, 33 bp, Homo sapien
agaataaagcattggtaaatgtctcccagctga

SEQ ID NO: 212990 - DNA, 33 bp, Homo sapien
agaataaagcattggtgaatgtctcccagctga

SEQ ID NO: 212991 - DNA, 33 bp, Homo sapien
catctaaagatctaaagatggctttaggtaaga

SEQ ID NO: 212992 - DNA, 33 bp, Homo sapien
catctaaagatctaaatatggctttaggtaaga

SEQ ID NO: 212993 - DNA, 33 bp, Homo sapien
tcaatgctttatcattcaatctccatcagtaat

SEQ ID NO: 212994 - DNA, 33 bp, Homo sapien
tcaatgctttatcatttaatctccatcagtaat

SEQ ID NO: 212995 - DNA, 33 bp, Homo sapien
ggtatcatttttcttaagctgggaaaatgtctt

SEQ ID NO: 212996 - DNA, 33 bp, Homo sapien
ggtatcatttttcttacgctgggaaaatgtctt

SEQ ID NO: 212997 - DNA, 33 bp, Homo sapien
ttttagttgttttgcacccttaccagcatctgg

SEQ ID NO: 212998 - DNA, 33 bp, Homo sapien
ttttagttgttttgcatccttaccagcatctgg

SEQ ID NO: 212999 - DNA, 33 bp, Homo sapien
tgagaaactgtcaaacggttgtcttaagtaact

SEQ ID NO: 213000 - DNA, 33 bp, Homo sapien
tgagaaactgtcaaactgttgtcttaagtaact

SEQ ID NO: 213001 - DNA, 33 bp, Homo sapien
cattattcaaggtctccagtgagtctgctaatt

SEQ ID NO: 213002 - DNA, 33 bp, Homo sapien
cattattcaaggtctctagtgagtctgctaatt

SEQ ID NO: 213003 - DNA, 33 bp, Homo sapien
ttatgccacgttctttaaaaatgttacctcatt

SEQ ID NO: 213004 - DNA, 33 bp, Homo sapien
ttatgccacgttctttgaaaatgttacctcatt

SEQ ID NO: 213005 - DNA, 33 bp, Homo sapien
gagtgggagaggcagaagcaggcttgaatgagt

SEQ ID NO: 213006 - DNA, 33 bp, Homo sapien
gagtgggagaggcagacgcaggcttgaatgagt

SEQ ID NO: 213007 - DNA, 33 bp, Homo sapien
tgacaaatctccaaaccgcttttcatagtggct

SEQ ID NO: 213008 - DNA, 33 bp, Homo sapien
tgacaaatctccaaactgcttttcatagtggct

SEQ ID NO: 213009 - DNA, 33 bp, Homo sapien
atatgctgcactggcacattaactattttgaat

SEQ ID NO: 213010 - DNA, 33 bp, Homo sapien
atatgctgcactggcatattaactattttgaat

SEQ ID NO: 213011 - DNA, 33 bp, Homo sapien
taatacaccaagatcaactgaggcaatatgtaa

SEQ ID NO: 213012 - DNA, 33 bp, Homo sapien
taatacaccaagatcagctgaggcaatatgtaa

SEQ ID NO: 213013 - DNA, 33 bp, Homo sapien
taaataatagtgcacaagaaaatcatactatat

SEQ ID NO: 213014 - DNA, 33 bp, Homo sapien
taaataatagtgcacaggaaaatcatactatat

SEQ ID NO: 213015 - DNA, 33 bp, Homo sapien
ggaataacagcctgcaaactgtctttaatatca

SEQ ID NO: 213016 - DNA, 33 bp, Homo sapien
ggaataacagcctgcacactgtctttaatatca

SEQ ID NO: 213017 - DNA, 33 bp, Homo sapien
aggatctatgagagacacacaggcctaaccaag

SEQ ID NO: 213018 - DNA, 33 bp, Homo sapien
aggatctatgagagacgcacaggcctaaccaag

SEQ ID NO: 213019 - DNA, 33 bp, Homo sapien
cagttgaagaatttcaagtgtccattttttttt

SEQ ID NO: 213020 - DNA, 33 bp, Homo sapien
cagttgaagaatttcaggtgtccattttttttt

SEQ ID NO: 213021 - DNA, 33 bp, Homo sapien
agtttcaattcagtcaagtttttattcagtgga

SEQ ID NO: 213022 - DNA, 33 bp, Homo sapien
agtttcaattcagtcacgtttttattcagtgga

SEQ ID NO: 213023 - DNA, 33 bp, Homo sapien
ttttttttctgcaaaaggtttaccatctccttt

SEQ ID NO: 213024 - DNA, 33 bp, Homo sapien
ttttttttctgcaaaatgtttaccatctccttt

SEQ ID NO: 213025 - DNA, 33 bp, Homo sapien
agcataaatcattacagagagcttggtagggag

SEQ ID NO: 213026 - DNA, 33 bp, Homo sapien
agcataaatcattacatagagcttggtagggag

SEQ ID NO: 213027 - DNA, 33 bp, Homo sapien
aacaaaagcagataacacagatgtggagttatt

SEQ ID NO: 213028 - DNA, 33 bp, Homo sapien
aacaaaagcagataacccagatgtggagttatt

SEQ ID NO: 213029 - DNA, 33 bp, Homo sapien
gctggctggtggaatacgacctaaggcttgcaa

SEQ ID NO: 213030 - DNA, 33 bp, Homo sapien
gctggctggtggaatatgacctaaggcttgcaa

SEQ ID NO: 213031 - DNA, 33 bp, Homo sapien
aatgaacagtattgtacggttataaagcggcta

SEQ ID NO: 213032 - DNA, 33 bp, Homo sapien
aatgaacagtattgtatggttataaagcggcta

SEQ ID NO: 213033 - DNA, 33 bp, Homo sapien
ctttttattttttccaactgaaggtctgtgttt

SEQ ID NO: 213034 - DNA, 33 bp, Homo sapien
ctttttattttttccatctgaaggtctgtgttt

SEQ ID NO: 213035 - DNA, 33 bp, Homo sapien
catctggcccaaataacaatttttgactgttga

SEQ ID NO: 213036 - DNA, 33 bp, Homo sapien
catctggcccaaataataatttttgactgttga

SEQ ID NO: 213037 - DNA, 33 bp, Homo sapien
caatggggagatactgaaggtgagccaggtgac

SEQ ID NO: 213038 - DNA, 33 bp, Homo sapien
caatggggagatactgtaggtgagccaggtgac

SEQ ID NO: 213039 - DNA, 33 bp, Homo sapien
cagcagctgatgccaaaaactggtctacacaca

SEQ ID NO: 213040 - DNA, 33 bp, Homo sapien
cagcagctgatgccaacaactggtctacacaca

SEQ ID NO: 213041 - DNA, 33 bp, Homo sapien
ctttgatatttgttgaggcttgctttataatga

SEQ ID NO: 213042 - DNA, 33 bp, Homo sapien
ctttgatatttgttgatgcttgctttataatga

SEQ ID NO: 213043 - DNA, 33 bp, Homo sapien
gtttctgtactgaacacgtgcagatattttttc

SEQ ID NO: 213044 - DNA, 33 bp, Homo sapien
gtttctgtactgaacatgtgcagatattttttc

SEQ ID NO: 213045 - DNA, 33 bp, Homo sapien
ctagtgatgatttaaaatatatggcagaatata

SEQ ID NO: 213046 - DNA, 33 bp, Homo sapien
ctagtgatgatttaaagtatatggcagaatata

SEQ ID NO: 213047 - DNA, 33 bp, Homo sapien
aatctaatcaaggttccagatcttcctcttttt

SEQ ID NO: 213048 - DNA, 33 bp, Homo sapien
aatctaatcaaggttctagatcttcctcttttt

SEQ ID NO: 213049 - DNA, 33 bp, Homo sapien
ttgcatcacatcagaaagtataacatgtcaggt

SEQ ID NO: 213050 - DNA, 33 bp, Homo sapien
ttgcatcacatcagaaggtataacatgtcaggt

SEQ ID NO: 213051 - DNA, 33 bp, Homo sapien
ggagagattccctgtacgtgtacattccctgta

SEQ ID NO: 213052 - DNA, 33 bp, Homo sapien
ggagagattccctgtatgtgtacattccctgta

SEQ ID NO: 213053 - DNA, 33 bp, Homo sapien
agaccaaaatggttgcaaactgctggtctaacc

SEQ ID NO: 213054 - DNA, 33 bp, Homo sapien
agaccaaaatggttgcgaactgctggtctaacc

SEQ ID NO: 213055 - DNA, 33 bp, Homo sapien
tctaaagcgctcatcaacatttactgatcaatc

SEQ ID NO: 213056 - DNA, 33 bp, Homo sapien
tctaaagcgctcatcagcatttactgatcaatc

SEQ ID NO: 213057 - DNA, 33 bp, Homo sapien
ttctctgaagccttgagggtttgaaacatttgg

SEQ ID NO: 213058 - DNA, 33 bp, Homo sapien
ttctctgaagccttgatggtttgaaacatttgg

SEQ ID NO: 213059 - DNA, 33 bp, Homo sapien
atagcattaacacttaaggcagcaattttgaaa

SEQ ID NO: 213060 - DNA, 33 bp, Homo sapien
atagcattaacacttatggcagcaattttgaaa

SEQ ID NO: 213061 - DNA, 33 bp, Homo sapien
tagcatataaatgccacgttgagtcttttgaga

SEQ ID NO: 213062 - DNA, 33 bp, Homo sapien
tagcatataaatgccatgttgagtcttttgaga

SEQ ID NO: 213063 - DNA, 33 bp, Homo sapien
tgcaggataaaagaggaaagggaccctagtgcc

SEQ ID NO: 213064 - DNA, 33 bp, Homo sapien
tgcaggataaaagagggaagggaccctagtgcc

SEQ ID NO: 213065 - DNA, 33 bp, Homo sapien
gaattcatgaaggagactacagagttataggac

SEQ ID NO: 213066 - DNA, 33 bp, Homo sapien
gaattcatgaaggagattacagagttataggac

SEQ ID NO: 213067 - DNA, 33 bp, Homo sapien
tccttaaaactaatgcaatggggtaatgcatac

SEQ ID NO: 213068 - DNA, 33 bp, Homo sapien
tccttaaaactaatgctatggggtaatgcatac

SEQ ID NO: 213069 - DNA, 33 bp, Homo sapien
cctacagaatgaaatccaaatgacagcatctgc

SEQ ID NO: 213070 - DNA, 33 bp, Homo sapien
cctacagaatgaaatcgaaatgacagcatctgc

SEQ ID NO: 213071 - DNA, 33 bp, Homo sapien
aataaacgcaccacgtgaagtgcttaaagccac

SEQ ID NO: 213072 - DNA, 33 bp, Homo sapien
aataaacgcaccacgttaagtgcttaaagccac

SEQ ID NO: 213073 - DNA, 33 bp, Homo sapien
acaaactttagtgtcacatctatcatttacgag

SEQ ID NO: 213074 - DNA, 33 bp, Homo sapien
acaaactttagtgtcagatctatcatttacgag

SEQ ID NO: 213075 - DNA, 33 bp, Homo sapien
atatttttcctgacataagttgtgttactttat

SEQ ID NO: 213076 - DNA, 33 bp, Homo sapien
atatttttcctgacatgagttgtgttactttat

SEQ ID NO: 213077 - DNA, 33 bp, Homo sapien
tgttatgcagaattaaaccagtaagatcatttt

SEQ ID NO: 213078 - DNA, 33 bp, Homo sapien
tgttatgcagaattaagccagtaagatcatttt

SEQ ID NO: 213079 - DNA, 33 bp, Homo sapien
ctaggggtgacaaacacctgaaaatgatcttac

SEQ ID NO: 213080 - DNA, 33 bp, Homo sapien
ctaggggtgacaaacatctgaaaatgatcttac

SEQ ID NO: 213081 - DNA, 33 bp, Homo sapien
gtacagttgcacaatacgatttatttaagtatt

SEQ ID NO: 213082 - DNA, 33 bp, Homo sapien
gtacagttgcacaatatgatttatttaagtatt

SEQ ID NO: 213083 - DNA, 33 bp, Homo sapien
cagattatcaatgcaacttataacaacaattca

SEQ ID NO: 213084 - DNA, 33 bp, Homo sapien
cagattatcaatgcaatttataacaacaattca

SEQ ID NO: 213085 - DNA, 33 bp, Homo sapien
gaaaagctgaggtcaactagcaaacaattgaaa

SEQ ID NO: 213086 - DNA, 33 bp, Homo sapien
gaaaagctgaggtcaattagcaaacaattgaaa

SEQ ID NO: 213087 - DNA, 33 bp, Homo sapien
cccacatgaatgaggccgaaattcccgaattgc

SEQ ID NO: 213088 - DNA, 33 bp, Homo sapien
cccacatgaatgaggctgaaattcccgaattgc

SEQ ID NO: 213089 - DNA, 33 bp, Homo sapien
ggcagcattaaaccacaaatccagagttgtagc

SEQ ID NO: 213090 - DNA, 33 bp, Homo sapien
ggcagcattaaaccactaatccagagttgtagc

SEQ ID NO: 213091 - DNA, 33 bp, Homo sapien
acattccagagagtgaaactcagcaaaactttt

SEQ ID NO: 213092 - DNA, 33 bp, Homo sapien
acattccagagagtgagactcagcaaaactttt

SEQ ID NO: 213093 - DNA, 33 bp, Homo sapien
tttttgttcttaaaaaccttcgagcccttcatt

SEQ ID NO: 213094 - DNA, 33 bp, Homo sapien
tttttgttcttaaaaatcttcgagcccttcatt

SEQ ID NO: 213095 - DNA, 33 bp, Homo sapien
tgagttactcttagaaatcttcttcaaataaaa

SEQ ID NO: 213096 - DNA, 33 bp, Homo sapien
tgagttactcttagaactcttcttcaaataaaa

SEQ ID NO: 213097 - DNA, 33 bp, Homo sapien
gcagacacggaagagtaaataaacaacccatgt

SEQ ID NO: 213098 - DNA, 33 bp, Homo sapien
gcagacacggaagagtcaataaacaacccatgt

SEQ ID NO: 213099 - DNA, 33 bp, Homo sapien
cactggttgaatgttacgttgtgcagaaaactg

SEQ ID NO: 213100 - DNA, 33 bp, Homo sapien
cactggttgaatgttatgttgtgcagaaaactg

SEQ ID NO: 213101 - DNA, 33 bp, Homo sapien
gatgctataaaatcgcaagggtctttagccagg

SEQ ID NO: 213102 - DNA, 33 bp, Homo sapien
gatgctataaaatcgccagggtctttagccagg

SEQ ID NO: 213103 - DNA, 33 bp, Homo sapien
gtgggaaggggtagacaagaggaattaccaagg

SEQ ID NO: 213104 - DNA, 33 bp, Homo sapien
gtgggaaggggtagacgagaggaattaccaagg

SEQ ID NO: 213105 - DNA, 33 bp, Homo sapien
ggcagattaagaaaaacacttgaagaatgaaca

SEQ ID NO: 213106 - DNA, 33 bp, Homo sapien
ggcagattaagaaaaagacttgaagaatgaaca

SEQ ID NO: 213107 - DNA, 33 bp, Homo sapien
attcttatatccccaacttgcagcacttgtagt

SEQ ID NO: 213108 - DNA, 33 bp, Homo sapien
attcttatatccccaatttgcagcacttgtagt

SEQ ID NO: 213109 - DNA, 33 bp, Homo sapien
aacagaaattagtcaacgtgaagcagtaagaga

SEQ ID NO: 213110 - DNA, 33 bp, Homo sapien
aacagaaattagtcaatgtgaagcagtaagaga

SEQ ID NO: 213111 - DNA, 33 bp, Homo sapien
atctttttgagaccacaccatggatatacttgc

SEQ ID NO: 213112 - DNA, 33 bp, Homo sapien
atctttttgagaccacgccatggatatacttgc

SEQ ID NO: 213113 - DNA, 33 bp, Homo sapien
ttagaaggtaattaccacaaaaactctgtatta

SEQ ID NO: 213114 - DNA, 33 bp, Homo sapien
ttagaaggtaattaccgcaaaaactctgtatta

SEQ ID NO: 213115 - DNA, 33 bp, Homo sapien
gtatctgttccaatcaactaataggaaggtgct

SEQ ID NO: 213116 - DNA, 33 bp, Homo sapien
gtatctgttccaatcagctaataggaaggtgct

SEQ ID NO: 213117 - DNA, 33 bp, Homo sapien
agagattaagggtaaacgctggtataagaccaa

SEQ ID NO: 213118 - DNA, 33 bp, Homo sapien
agagattaagggtaaatgctggtataagaccaa

SEQ ID NO: 213119 - DNA, 33 bp, Homo sapien
ctagacaaggagacatcatcattggtcttatac

SEQ ID NO: 213120 - DNA, 33 bp, Homo sapien
ctagacaaggagacattatcattggtcttatac

SEQ ID NO: 213121 - DNA, 33 bp, Homo sapien
gttttctgtatccaaacctgttatcatctgctg

SEQ ID NO: 213122 - DNA, 33 bp, Homo sapien
gttttctgtatccaaatctgttatcatctgctg

SEQ ID NO: 213123 - DNA, 33 bp, Homo sapien
tcaaccaaaatcataccggtagcataaagcaca

SEQ ID NO: 213124 - DNA, 33 bp, Homo sapien
tcaaccaaaatcatactggtagcataaagcaca

SEQ ID NO: 213125 - DNA, 33 bp, Homo sapien
atcccagagtattcccaatgctgtcagagacac

SEQ ID NO: 213126 - DNA, 33 bp, Homo sapien
atcccagagtattccccatgctgtcagagacac

SEQ ID NO: 213127 - DNA, 33 bp, Homo sapien
ctaactgggtaaaatacagctggaacaattctc

SEQ ID NO: 213128 - DNA, 33 bp, Homo sapien
ctaactgggtaaaatatagctggaacaattctc

SEQ ID NO: 213129 - DNA, 33 bp, Homo sapien
gagaaggtcatgagccaagaaatgtgggcagcc

SEQ ID NO: 213130 - DNA, 33 bp, Homo sapien
gagaaggtcatgagccgagaaatgtgggcagcc

SEQ ID NO: 213131 - DNA, 33 bp, Homo sapien
ctctattctaagctagcctactctgaactgtca

SEQ ID NO: 213132 - DNA, 33 bp, Homo sapien
ctctattctaagctagtctactctgaactgtca

SEQ ID NO: 213133 - DNA, 33 bp, Homo sapien
aaaggaggattagatactacgatgcaggaacaa

SEQ ID NO: 213134 - DNA, 33 bp, Homo sapien
aaaggaggattagatattacgatgcaggaacaa

SEQ ID NO: 213135 - DNA, 33 bp, Homo sapien
tggaagaagagtgtaactgatgttgggaagtca

SEQ ID NO: 213136 - DNA, 33 bp, Homo sapien
tggaagaagagtgtaattgatgttgggaagtca

SEQ ID NO: 213137 - DNA, 33 bp, Homo sapien
tatgagtagcactacaatgaacgtattagtgca

SEQ ID NO: 213138 - DNA, 33 bp, Homo sapien
tatgagtagcactacagtgaacgtattagtgca

SEQ ID NO: 213139 - DNA, 33 bp, Homo sapien
ggttttttctgtagaccgatttactttcctttg

SEQ ID NO: 213140 - DNA, 33 bp, Homo sapien
ggttttttctgtagactgatttactttcctttg

SEQ ID NO: 213141 - DNA, 33 bp, Homo sapien
aaataccatgaagtccaatgattaataaaccag

SEQ ID NO: 213142 - DNA, 33 bp, Homo sapien
aaataccatgaagtccgatgattaataaaccag

SEQ ID NO: 213143 - DNA, 33 bp, Homo sapien
gtcttacattgattgaaagatctgttatacata

SEQ ID NO: 213144 - DNA, 33 bp, Homo sapien
gtcttacattgattgacagatctgttatacata

SEQ ID NO: 213145 - DNA, 33 bp, Homo sapien
ctgcaaagattgctacaatttactcataaagtc

SEQ ID NO: 213146 - DNA, 33 bp, Homo sapien
ctgcaaagattgctaccatttactcataaagtc

SEQ ID NO: 213147 - DNA, 33 bp, Homo sapien
aacttatggtctcacaaaaaatctgatcaaggt

SEQ ID NO: 213148 - DNA, 33 bp, Homo sapien
aacttatggtctcacacaaaatctgatcaaggt

SEQ ID NO: 213149 - DNA, 33 bp, Homo sapien
ctcttcctgtgtcttcacctatttctgttaggg

SEQ ID NO: 213150 - DNA, 33 bp, Homo sapien
ctcttcctgtgtcttctcctatttctgttaggg

SEQ ID NO: 213151 - DNA, 33 bp, Homo sapien
gctaaagactgacatactaattcttctattccc

SEQ ID NO: 213152 - DNA, 33 bp, Homo sapien
gctaaagactgacatattaattcttctattccc

SEQ ID NO: 213153 - DNA, 33 bp, Homo sapien
gaaaggctactacaataatctaggcaagaaatt

SEQ ID NO: 213154 - DNA, 33 bp, Homo sapien
gaaaggctactacaatcatctaggcaagaaatt

SEQ ID NO: 213155 - DNA, 33 bp, Homo sapien
gaatgcagaacaatcacaattttaaacagacaa

SEQ ID NO: 213156 - DNA, 33 bp, Homo sapien
gaatgcagaacaatcataattttaaacagacaa

SEQ ID NO: 213157 - DNA, 33 bp, Homo sapien
tccaacagaagaaacaacagaactgcttaaggc

SEQ ID NO: 213158 - DNA, 33 bp, Homo sapien
tccaacagaagaaacagcagaactgcttaaggc

SEQ ID NO: 213159 - DNA, 33 bp, Homo sapien
agcagccagagttacaacaaagatcttaactgt

SEQ ID NO: 213160 - DNA, 33 bp, Homo sapien
agcagccagagttacagcaaagatcttaactgt

SEQ ID NO: 213161 - DNA, 33 bp, Homo sapien
gattttccacacatacaatgaccttttcaattt

SEQ ID NO: 213162 - DNA, 33 bp, Homo sapien
gattttccacacatactatgaccttttcaattt

SEQ ID NO: 213163 - DNA, 33 bp, Homo sapien
gtctgaaaatacagacacaaaaacaaatcagta

SEQ ID NO: 213164 - DNA, 33 bp, Homo sapien
gtctgaaaatacagacgcaaaaacaaatcagta

SEQ ID NO: 213165 - DNA, 33 bp, Homo sapien
cctgctacctgaaaagcacttcagaaaacaaag

SEQ ID NO: 213166 - DNA, 33 bp, Homo sapien
cctgctacctgaaaaggacttcagaaaacaaag

SEQ ID NO: 213167 - DNA, 33 bp, Homo sapien
tgtgatatcactaaaccgataaaacctgatttt

SEQ ID NO: 213168 - DNA, 33 bp, Homo sapien
tgtgatatcactaaactgataaaacctgatttt

SEQ ID NO: 213169 - DNA, 33 bp, Homo sapien
cgaacgcagcatctaacgggttaatgaggctgg

SEQ ID NO: 213170 - DNA, 33 bp, Homo sapien
cgaacgcagcatctaatgggttaatgaggctgg

SEQ ID NO: 213171 - DNA, 33 bp, Homo sapien
attgctgtataacaaacgatcccacactttagc

SEQ ID NO: 213172 - DNA, 33 bp, Homo sapien
attgctgtataacaaatgatcccacactttagc

SEQ ID NO: 213173 - DNA, 33 bp, Homo sapien
agagttttaaaaatccgagtgaaatctttgagt

SEQ ID NO: 213174 - DNA, 33 bp, Homo sapien
agagttttaaaaatcctagtgaaatctttgagt

SEQ ID NO: 213175 - DNA, 33 bp, Homo sapien
gttgctagtgaaagtaagctaaatttataagta

SEQ ID NO: 213176 - DNA, 33 bp, Homo sapien
gttgctagtgaaagtaggctaaatttataagta

SEQ ID NO: 213177 - DNA, 33 bp, Homo sapien
aagtaggtaaatagaacgtgcagtcctaactta

SEQ ID NO: 213178 - DNA, 33 bp, Homo sapien
aagtaggtaaatagaatgtgcagtcctaactta

SEQ ID NO: 213179 - DNA, 33 bp, Homo sapien
gaatgaggtagctgaaccatgctctgtttttct

SEQ ID NO: 213180 - DNA, 33 bp, Homo sapien
gaatgaggtagctgaatcatgctctgtttttct

SEQ ID NO: 213181 - DNA, 33 bp, Homo sapien
ggggtgagaaaaataccgcatcaccactaacat

SEQ ID NO: 213182 - DNA, 33 bp, Homo sapien
ggggtgagaaaaatactgcatcaccactaacat

SEQ ID NO: 213183 - DNA, 33 bp, Homo sapien
ccataagaagtcaaagccagttatcattaccct

SEQ ID NO: 213184 - DNA, 33 bp, Homo sapien
ccataagaagtcaaagtcagttatcattaccct

SEQ ID NO: 213185 - DNA, 33 bp, Homo sapien
gggccctgcctcataacaccatcaaactgaaga

SEQ ID NO: 213186 - DNA, 33 bp, Homo sapien
gggccctgcctcataataccatcaaactgaaga

SEQ ID NO: 213187 - DNA, 33 bp, Homo sapien
ctggtcacacaggaataagtcctaaccagcact

SEQ ID NO: 213188 - DNA, 33 bp, Homo sapien
ctggtcacacaggaatgagtcctaaccagcact

SEQ ID NO: 213189 - DNA, 33 bp, Homo sapien
tctgccatgttataaggcagtaagaaggccctc

SEQ ID NO: 213190 - DNA, 33 bp, Homo sapien
tctgccatgttataagtcagtaagaaggccctc

SEQ ID NO: 213191 - DNA, 33 bp, Homo sapien
aaacaggtctctagtcactcaaaaagaaaaggt

SEQ ID NO: 213192 - DNA, 33 bp, Homo sapien
aaacaggtctctagtcgctcaaaaagaaaaggt

SEQ ID NO: 213193 - DNA, 33 bp, Homo sapien
tctcaaagcgtcatatcaatggaagaggtggcc

SEQ ID NO: 213194 - DNA, 33 bp, Homo sapien
tctcaaagcgtcatattaatggaagaggtggcc

SEQ ID NO: 213195 - DNA, 33 bp, Homo sapien
tctttccatgtacaccaaacaaaagcaagtacc

SEQ ID NO: 213196 - DNA, 33 bp, Homo sapien
tctttccatgtacaccgaacaaaagcaagtacc

SEQ ID NO: 213197 - DNA, 33 bp, Homo sapien
agaacaatagaatagaacctagagtcagttgcc

SEQ ID NO: 213198 - DNA, 33 bp, Homo sapien
agaacaatagaatagatcctagagtcagttgcc

SEQ ID NO: 213199 - DNA, 33 bp, Homo sapien
aatgtggtggtgctgactaagtagaagggtatc

SEQ ID NO: 213200 - DNA, 33 bp, Homo sapien
aatgtggtggtgctgattaagtagaagggtatc

SEQ ID NO: 213201 - DNA, 33 bp, Homo sapien
aaacagttgatttttacgagacttatagcctat

SEQ ID NO: 213202 - DNA, 33 bp, Homo sapien
aaacagttgatttttatgagacttatagcctat

SEQ ID NO: 213203 - DNA, 33 bp, Homo sapien
gtgacatgaaaggacaaatcagcaaagatcatt

SEQ ID NO: 213204 - DNA, 33 bp, Homo sapien
gtgacatgaaaggacagatcagcaaagatcatt

SEQ ID NO: 213205 - DNA, 33 bp, Homo sapien
gggcccttttgtatccccatttgtagctcccga

SEQ ID NO: 213206 - DNA, 33 bp, Homo sapien
gggcccttttgtatccgcatttgtagctcccga

SEQ ID NO: 213207 - DNA, 33 bp, Homo sapien
acatcttccccaaaaaatagttttcagtggtga

SEQ ID NO: 213208 - DNA, 33 bp, Homo sapien
acatcttccccaaaaattagttttcagtggtga

SEQ ID NO: 213209 - DNA, 33 bp, Homo sapien
atttgtttggcaggagaacatcttcaaataaat

SEQ ID NO: 213210 - DNA, 33 bp, Homo sapien
atttgtttggcaggaggacatcttcaaataaat

SEQ ID NO: 213211 - DNA, 33 bp, Homo sapien
tgacaactctattttccaggaacttgcttttca

SEQ ID NO: 213212 - DNA, 33 bp, Homo sapien
tgacaactctattttctaggaacttgcttttca

SEQ ID NO: 213213 - DNA, 33 bp, Homo sapien
aagccagtgaagctggaaattatggtgtgcatt

SEQ ID NO: 213214 - DNA, 33 bp, Homo sapien
aagccagtgaagctgggaattatggtgtgcatt

SEQ ID NO: 213215 - DNA, 33 bp, Homo sapien
taagtagcagctgcaacagaagtaataattgat

SEQ ID NO: 213216 - DNA, 33 bp, Homo sapien
taagtagcagctgcaatagaagtaataattgat

SEQ ID NO: 213217 - DNA, 33 bp, Homo sapien
agctatgtaaccctataaatcttcccatttctc

SEQ ID NO: 213218 - DNA, 33 bp, Homo sapien
agctatgtaaccctatcaatcttcccatttctc

SEQ ID NO: 213219 - DNA, 33 bp, Homo sapien
gaaatataaaaggctcagagaaatgggaagatt

SEQ ID NO: 213220 - DNA, 33 bp, Homo sapien
gaaatataaaaggctccgagaaatgggaagatt

SEQ ID NO: 213221 - DNA, 33 bp, Homo sapien
aatgaagttcatctacacagtagaaaattattt

SEQ ID NO: 213222 - DNA, 33 bp, Homo sapien
aatgaagttcatctacccagtagaaaattattt

SEQ ID NO: 213223 - DNA, 33 bp, Homo sapien
gacaatgctatggcacccacttttattttcaag

SEQ ID NO: 213224 - DNA, 33 bp, Homo sapien
gacaatgctatggcactcacttttattttcaag

SEQ ID NO: 213225 - DNA, 33 bp, Homo sapien
atatctcaaatttgaaatcatctctgaacatgg

SEQ ID NO: 213226 - DNA, 33 bp, Homo sapien
atatctcaaatttgaagtcatctctgaacatgg

SEQ ID NO: 213227 - DNA, 33 bp, Homo sapien
tttaggaaaactggtaataatatatgacagatg

SEQ ID NO: 213228 - DNA, 33 bp, Homo sapien
tttaggaaaactggtagtaatatatgacagatg

SEQ ID NO: 213229 - DNA, 33 bp, Homo sapien
ttgcaagctctttgaaaactgtcatggacaaat

SEQ ID NO: 213230 - DNA, 33 bp, Homo sapien
ttgcaagctctttgaacactgtcatggacaaat

SEQ ID NO: 213231 - DNA, 33 bp, Homo sapien
tagttcaatttaacaaaaaccacttactctgtg

SEQ ID NO: 213232 - DNA, 33 bp, Homo sapien
tagttcaatttaacaacaaccacttactctgtg

SEQ ID NO: 213233 - DNA, 33 bp, Homo sapien
ttctaatatttttcagactcctaacaggattaa

SEQ ID NO: 213234 - DNA, 33 bp, Homo sapien
ttctaatatttttcaggctcctaacaggattaa

SEQ ID NO: 213235 - DNA, 33 bp, Homo sapien
tacagtaaaatcttacacccttcacagttcttg

SEQ ID NO: 213236 - DNA, 33 bp, Homo sapien
tacagtaaaatcttacgcccttcacagttcttg

SEQ ID NO: 213237 - DNA, 33 bp, Homo sapien
tgtgtaaggtgacagaaaaggatctagtttcat

SEQ ID NO: 213238 - DNA, 33 bp, Homo sapien
tgtgtaaggtgacagataaggatctagtttcat

SEQ ID NO: 213239 - DNA, 33 bp, Homo sapien
tttaagttcaggtcagaaaatgaagaatttact

SEQ ID NO: 213240 - DNA, 33 bp, Homo sapien
tttaagttcaggtcagcaaatgaagaatttact

SEQ ID NO: 213241 - DNA, 33 bp, Homo sapien
aaaagcataatatgagaagacaataccgtgcca

SEQ ID NO: 213242 - DNA, 33 bp, Homo sapien
aaaagcataatatgaggagacaataccgtgcca

SEQ ID NO: 213243 - DNA, 33 bp, Homo sapien
aaggccaacatcaatcactcataaagcaactta

SEQ ID NO: 213244 - DNA, 33 bp, Homo sapien
aaggccaacatcaatcgctcataaagcaactta

SEQ ID NO: 213245 - DNA, 33 bp, Homo sapien
aacaaaattcacattaataaccataacctgtca

SEQ ID NO: 213246 - DNA, 33 bp, Homo sapien
aacaaaattcacattactaaccataacctgtca

SEQ ID NO: 213247 - DNA, 33 bp, Homo sapien
gtatctttaaagctggaataagcctgtgatgag

SEQ ID NO: 213248 - DNA, 33 bp, Homo sapien
gtatctttaaagctgggataagcctgtgatgag

SEQ ID NO: 213249 - DNA, 33 bp, Homo sapien
tgctgctgaaaggaatcaataaaaatggcagcc

SEQ ID NO: 213250 - DNA, 33 bp, Homo sapien
tgctgctgaaaggaattaataaaaatggcagcc

SEQ ID NO: 213251 - DNA, 33 bp, Homo sapien
cattgtgtgtttaaacgagagattcattgagtg

SEQ ID NO: 213252 - DNA, 33 bp, Homo sapien
cattgtgtgtttaaactagagattcattgagtg

SEQ ID NO: 213253 - DNA, 33 bp, Homo sapien
ttgtctgtaagaagagcaaaggagaaactaaag

SEQ ID NO: 213254 - DNA, 33 bp, Homo sapien
ttgtctgtaagaagaggaaaggagaaactaaag

SEQ ID NO: 213255 - DNA, 33 bp, Homo sapien
tttatttgttggctccaatatggcagctggcct

SEQ ID NO: 213256 - DNA, 33 bp, Homo sapien
tttatttgttggctccgatatggcagctggcct

SEQ ID NO: 213257 - DNA, 33 bp, Homo sapien
cttcgatggtaacattaaagaaggaaatgtgga

SEQ ID NO: 213258 - DNA, 33 bp, Homo sapien
cttcgatggtaacattcaagaaggaaatgtgga

SEQ ID NO: 213259 - DNA, 33 bp, Homo sapien
tgataatctaagtatacgttagaggcccaaatg

SEQ ID NO: 213260 - DNA, 33 bp, Homo sapien
tgataatctaagtatatgttagaggcccaaatg

SEQ ID NO: 213261 - DNA, 33 bp, Homo sapien
aaagattccacatataagtaaaatcatacagtt

SEQ ID NO: 213262 - DNA, 33 bp, Homo sapien
aaagattccacatatacgtaaaatcatacagtt

SEQ ID NO: 213263 - DNA, 33 bp, Homo sapien
ctcttagcaaaaatcacaaatacaataaaattt

SEQ ID NO: 213264 - DNA, 33 bp, Homo sapien
ctcttagcaaaaatcagaaatacaataaaattt

SEQ ID NO: 213265 - DNA, 33 bp, Homo sapien
ttcctaatagcgtgtcaaactatgtgaagcatg

SEQ ID NO: 213266 - DNA, 33 bp, Homo sapien
ttcctaatagcgtgtccaactatgtgaagcatg

SEQ ID NO: 213267 - DNA, 33 bp, Homo sapien
gccagatcttgaagaaagttatatatacggcag

SEQ ID NO: 213268 - DNA, 33 bp, Homo sapien
gccagatcttgaagaaggttatatatacggcag

SEQ ID NO: 213269 - DNA, 33 bp, Homo sapien
atggcttacaagtcaccatatgatctgcccctt

SEQ ID NO: 213270 - DNA, 33 bp, Homo sapien
atggcttacaagtcactatatgatctgcccctt

SEQ ID NO: 213271 - DNA, 33 bp, Homo sapien
attaagtgtaaaaagccaatagggtatgtgctt

SEQ ID NO: 213272 - DNA, 33 bp, Homo sapien
attaagtgtaaaaagctaatagggtatgtgctt

SEQ ID NO: 213273 - DNA, 33 bp, Homo sapien
agacccccttgatgaacgaattactgtctcatt

SEQ ID NO: 213274 - DNA, 33 bp, Homo sapien
agacccccttgatgaatgaattactgtctcatt

SEQ ID NO: 213275 - DNA, 33 bp, Homo sapien
gaacctacactctcaaataatctgtactaggca

SEQ ID NO: 213276 - DNA, 33 bp, Homo sapien
gaacctacactctcaagtaatctgtactaggca

SEQ ID NO: 213277 - DNA, 33 bp, Homo sapien
tctgtactaggcattgcaacaggatagggtccc

SEQ ID NO: 213278 - DNA, 33 bp, Homo sapien
tctgtactaggcattgtaacaggatagggtccc

SEQ ID NO: 213279 - DNA, 33 bp, Homo sapien
gcagccctggaatgaaagtatctgtctctgatc

SEQ ID NO: 213280 - DNA, 33 bp, Homo sapien
gcagccctggaatgaaggtatctgtctctgatc

SEQ ID NO: 213281 - DNA, 33 bp, Homo sapien
tctttgagatatttcaaatgtaaaccagataac

SEQ ID NO: 213282 - DNA, 33 bp, Homo sapien
tctttgagatatttcagatgtaaaccagataac

SEQ ID NO: 213283 - DNA, 33 bp, Homo sapien
ccttttctgcttcaacaacagacaggtggatat

SEQ ID NO: 213284 - DNA, 33 bp, Homo sapien
ccttttctgcttcaacgacagacaggtggatat

SEQ ID NO: 213285 - DNA, 33 bp, Homo sapien
agtgaaacccggaggagggtcatcactctacca

SEQ ID NO: 213286 - DNA, 33 bp, Homo sapien
agtgaaacccggaggatggtcatcactctacca

SEQ ID NO: 213287 - DNA, 33 bp, Homo sapien
atgtgggccacagagacagaggtcacttaagag

SEQ ID NO: 213288 - DNA, 33 bp, Homo sapien
atgtgggccacagagagagaggtcacttaagag

SEQ ID NO: 213289 - DNA, 33 bp, Homo sapien
cagactgtgctgtcttcaaagagactcatccta

SEQ ID NO: 213290 - DNA, 33 bp, Homo sapien
cagactgtgctgtcttgaaagagactcatccta

SEQ ID NO: 213291 - DNA, 33 bp, Homo sapien
atattcaccaggcaagaaattttattatctgaa

SEQ ID NO: 213292 - DNA, 33 bp, Homo sapien
atattcaccaggcaagcaattttattatctgaa

SEQ ID NO: 213293 - DNA, 33 bp, Homo sapien
accttatttggataaccacttccagctgattgt

SEQ ID NO: 213294 - DNA, 33 bp, Homo sapien
accttatttggataactacttccagctgattgt

SEQ ID NO: 213295 - DNA, 33 bp, Homo sapien
cgatgcttatccaaaacagtacgcctgccttca

SEQ ID NO: 213296 - DNA, 33 bp, Homo sapien
cgatgcttatccaaaatagtacgcctgccttca

SEQ ID NO: 213297 - DNA, 33 bp, Homo sapien
atagcttcaaatcaccaactgttgcagattatc

SEQ ID NO: 213298 - DNA, 33 bp, Homo sapien
atagcttcaaatcaccgactgttgcagattatc

SEQ ID NO: 213299 - DNA, 33 bp, Homo sapien
agggcttgcatagaacaaagaggttaagaaagt

SEQ ID NO: 213300 - DNA, 33 bp, Homo sapien
agggcttgcatagaactaagaggttaagaaagt

SEQ ID NO: 213301 - DNA, 33 bp, Homo sapien
tccacagagggaaagaggcattcaaagttagag

SEQ ID NO: 213302 - DNA, 33 bp, Homo sapien
tccacagagggaaagatgcattcaaagttagag

SEQ ID NO: 213303 - DNA, 33 bp, Homo sapien
agtcaccaagaatgatcagccaggagccaacac

SEQ ID NO: 213304 - DNA, 33 bp, Homo sapien
agtcaccaagaatgatgagccaggagccaacac

SEQ ID NO: 213305 - DNA, 33 bp, Homo sapien
gtgaaatcattgttgaatacactgtcaattgtg

SEQ ID NO: 213306 - DNA, 33 bp, Homo sapien
gtgaaatcattgttgagtacactgtcaattgtg

SEQ ID NO: 213307 - DNA, 33 bp, Homo sapien
ggtggtcataaatcataaagaataatgtagctt

SEQ ID NO: 213308 - DNA, 33 bp, Homo sapien
ggtggtcataaatcatgaagaataatgtagctt

SEQ ID NO: 213309 - DNA, 33 bp, Homo sapien
tcactcctgggaaaaacgtgtgtatttatgcat

SEQ ID NO: 213310 - DNA, 33 bp, Homo sapien
tcactcctgggaaaaatgtgtgtatttatgcat

SEQ ID NO: 213311 - DNA, 33 bp, Homo sapien
tctggattcatagacaatcatttgtttagatga

SEQ ID NO: 213312 - DNA, 33 bp, Homo sapien
tctggattcatagacagtcatttgtttagatga

SEQ ID NO: 213313 - DNA, 33 bp, Homo sapien
ttcagttgattattgccacataataacacacca

SEQ ID NO: 213314 - DNA, 33 bp, Homo sapien
ttcagttgattattgctacataataacacacca

SEQ ID NO: 213315 - DNA, 33 bp, Homo sapien
aggctgggaatgaaaacggcagctaaggagtgg

SEQ ID NO: 213316 - DNA, 33 bp, Homo sapien
aggctgggaatgaaaatggcagctaaggagtgg

SEQ ID NO: 213317 - DNA, 33 bp, Homo sapien
ctggagaaattgcccacgtgttagatttgcatg

SEQ ID NO: 213318 - DNA, 33 bp, Homo sapien
ctggagaaattgcccatgtgttagatttgcatg

SEQ ID NO: 213319 - DNA, 33 bp, Homo sapien
aagagacagtaaggccacttgtttagttgaagt

SEQ ID NO: 213320 - DNA, 33 bp, Homo sapien
aagagacagtaaggccgcttgtttagttgaagt

SEQ ID NO: 213321 - DNA, 33 bp, Homo sapien
tattctgtcaggataccgtaagctccataaaga

SEQ ID NO: 213322 - DNA, 33 bp, Homo sapien
tattctgtcaggatactgtaagctccataaaga

SEQ ID NO: 213323 - DNA, 33 bp, Homo sapien
cgttcccgctaagtaaccttctgggtctctgag

SEQ ID NO: 213324 - DNA, 33 bp, Homo sapien
cgttcccgctaagtaatcttctgggtctctgag

SEQ ID NO: 213325 - DNA, 33 bp, Homo sapien
tctcctcctacttcccccatcctcggttttgga

SEQ ID NO: 213326 - DNA, 33 bp, Homo sapien
tctcctcctacttccctcatcctcggttttgga

SEQ ID NO: 213327 - DNA, 33 bp, Homo sapien
gaagtggaaaatacaactgtcaatgtcatgttt

SEQ ID NO: 213328 - DNA, 33 bp, Homo sapien
gaagtggaaaatacaattgtcaatgtcatgttt

SEQ ID NO: 213329 - DNA, 33 bp, Homo sapien
tcacttcaaatgtgaccaatagcaatcgaagta

SEQ ID NO: 213330 - DNA, 33 bp, Homo sapien
tcacttcaaatgtgactaatagcaatcgaagta

SEQ ID NO: 213331 - DNA, 33 bp, Homo sapien
ggtttcttttccatgaaaccaaaatccaagtaa

SEQ ID NO: 213332 - DNA, 33 bp, Homo sapien
ggtttcttttccatgagaccaaaatccaagtaa

SEQ ID NO: 213333 - DNA, 33 bp, Homo sapien
agagtgacctgaaaccaccaatcacacaccact

SEQ ID NO: 213334 - DNA, 33 bp, Homo sapien
agagtgacctgaaaccgccaatcacacaccact

SEQ ID NO: 213335 - DNA, 33 bp, Homo sapien
tcagttttgagacccaaataagtacaagaaata

SEQ ID NO: 213336 - DNA, 33 bp, Homo sapien
tcagttttgagacccagataagtacaagaaata

SEQ ID NO: 213337 - DNA, 33 bp, Homo sapien
actattctttagatacgggactttctttacttg

SEQ ID NO: 213338 - DNA, 33 bp, Homo sapien
actattctttagatactggactttctttacttg

SEQ ID NO: 213339 - DNA, 33 bp, Homo sapien
tgaagaaattaaggaaaactctggatttgggtt

SEQ ID NO: 213340 - DNA, 33 bp, Homo sapien
tgaagaaattaaggaagactctggatttgggtt

SEQ ID NO: 213341 - DNA, 33 bp, Homo sapien
tggaggctacaattcaagatgatatttgggtgg

SEQ ID NO: 213342 - DNA, 33 bp, Homo sapien
tggaggctacaattcaggatgatatttgggtgg

SEQ ID NO: 213343 - DNA, 33 bp, Homo sapien
agcaaaaatgcgctataaaatgggtccgcaacc

SEQ ID NO: 213344 - DNA, 33 bp, Homo sapien
agcaaaaatgcgctatcaaatgggtccgcaacc

SEQ ID NO: 213345 - DNA, 33 bp, Homo sapien
atatttgaaattgaagacctaaaaatccagaat

SEQ ID NO: 213346 - DNA, 33 bp, Homo sapien
atatttgaaattgaaggcctaaaaatccagaat

SEQ ID NO: 213347 - DNA, 33 bp, Homo sapien
tctttattttcattgcccagagatgaataacaa

SEQ ID NO: 213348 - DNA, 33 bp, Homo sapien
tctttattttcattgctcagagatgaataacaa

SEQ ID NO: 213349 - DNA, 33 bp, Homo sapien
gctctgcagcaacgcaatgcctctgttttttgt

SEQ ID NO: 213350 - DNA, 33 bp, Homo sapien
gctctgcagcaacgcagtgcctctgttttttgt

SEQ ID NO: 213351 - DNA, 33 bp, Homo sapien
accagatagggcttcaaaacaaggttcctcact

SEQ ID NO: 213352 - DNA, 33 bp, Homo sapien
accagatagggcttcagaacaaggttcctcact

SEQ ID NO: 213353 - DNA, 33 bp, Homo sapien
aaattctatagctcaacgtgagttttgatgccc

SEQ ID NO: 213354 - DNA, 33 bp, Homo sapien
aaattctatagctcaatgtgagttttgatgccc

SEQ ID NO: 213355 - DNA, 33 bp, Homo sapien
agtctatgatccccacaactggtgcactctcct

SEQ ID NO: 213356 - DNA, 33 bp, Homo sapien
agtctatgatccccaccactggtgcactctcct

SEQ ID NO: 213357 - DNA, 33 bp, Homo sapien
ttatcttgtctttgcaacaatatttcaagcttc

SEQ ID NO: 213358 - DNA, 33 bp, Homo sapien
ttatcttgtctttgcagcaatatttcaagcttc

SEQ ID NO: 213359 - DNA, 33 bp, Homo sapien
tcagagaagaaagcacaatgtcagaaactcacg

SEQ ID NO: 213360 - DNA, 33 bp, Homo sapien
tcagagaagaaagcacgatgtcagaaactcacg

SEQ ID NO: 213361 - DNA, 33 bp, Homo sapien
gcattagctcaattcaactctcatccagtatct

SEQ ID NO: 213362 - DNA, 33 bp, Homo sapien
gcattagctcaattcatctctcatccagtatct

SEQ ID NO: 213363 - DNA, 33 bp, Homo sapien
agcagtatgagtggaacgcttttgattctacag

SEQ ID NO: 213364 - DNA, 33 bp, Homo sapien
agcagtatgagtggaatgcttttgattctacag

SEQ ID NO: 213365 - DNA, 33 bp, Homo sapien
atctgattcaacaaaacgatttggagaaacggt

SEQ ID NO: 213366 - DNA, 33 bp, Homo sapien
atctgattcaacaaaatgatttggagaaacggt

SEQ ID NO: 213367 - DNA, 33 bp, Homo sapien
tgtgattagggcaagacagtaaagggattattc

SEQ ID NO: 213368 - DNA, 33 bp, Homo sapien
tgtgattagggcaagatagtaaagggattattc

SEQ ID NO: 213369 - DNA, 33 bp, Homo sapien
agaaaaaggcaaacaacgttttgttatgattat

SEQ ID NO: 213370 - DNA, 33 bp, Homo sapien
agaaaaaggcaaacaaggttttgttatgattat

SEQ ID NO: 213371 - DNA, 33 bp, Homo sapien
atgataataatttttaactcatagtgttgttgt

SEQ ID NO: 213372 - DNA, 33 bp, Homo sapien
atgataataatttttacctcatagtgttgttgt

SEQ ID NO: 213373 - DNA, 33 bp, Homo sapien
gtatcagggaagaatcagaactaaaaataacta

SEQ ID NO: 213374 - DNA, 33 bp, Homo sapien
gtatcagggaagaatcggaactaaaaataacta

SEQ ID NO: 213375 - DNA, 33 bp, Homo sapien
acttgagcacctggataagcaacctgattcatc

SEQ ID NO: 213376 - DNA, 33 bp, Homo sapien
acttgagcacctggatcagcaacctgattcatc

SEQ ID NO: 213377 - DNA, 33 bp, Homo sapien
tgctttctaaaaagacggcaattcctcatgtgt

SEQ ID NO: 213378 - DNA, 33 bp, Homo sapien
tgctttctaaaaagactgcaattcctcatgtgt

SEQ ID NO: 213379 - DNA, 33 bp, Homo sapien
ggaggtggaatcaggacagctgcgctagaatgt

SEQ ID NO: 213380 - DNA, 33 bp, Homo sapien
ggaggtggaatcaggagagctgcgctagaatgt

SEQ ID NO: 213381 - DNA, 33 bp, Homo sapien
taatcaaatataataacgaaggattggcactgg

SEQ ID NO: 213382 - DNA, 33 bp, Homo sapien
taatcaaatataataatgaaggattggcactgg

SEQ ID NO: 213383 - DNA, 33 bp, Homo sapien
gagtgaaggaggttgcactttcttttctgctga

SEQ ID NO: 213384 - DNA, 33 bp, Homo sapien
gagtgaaggaggttgcgctttcttttctgctga

SEQ ID NO: 213385 - DNA, 33 bp, Homo sapien
gcttaagcgttgttagaactgttaatgttttac

SEQ ID NO: 213386 - DNA, 33 bp, Homo sapien
gcttaagcgttgttagtactgttaatgttttac

SEQ ID NO: 213387 - DNA, 33 bp, Homo sapien
aagactgacaaacataccctgagtcatatgtac

SEQ ID NO: 213388 - DNA, 33 bp, Homo sapien
aagactgacaaacatagcctgagtcatatgtac

SEQ ID NO: 213389 - DNA, 33 bp, Homo sapien
ctttatcataaatggaagtcacccattctttca

SEQ ID NO: 213390 - DNA, 33 bp, Homo sapien
ctttatcataaatggaggtcacccattctttca

SEQ ID NO: 213391 - DNA, 33 bp, Homo sapien
tagaaatatgtcaaaaacgggtcagagacaagt

SEQ ID NO: 213392 - DNA, 33 bp, Homo sapien
tagaaatatgtcaaaagcgggtcagagacaagt

SEQ ID NO: 213393 - DNA, 33 bp, Homo sapien
tcactgaaagacaaaacgaatgatggagcaaag

SEQ ID NO: 213394 - DNA, 33 bp, Homo sapien
tcactgaaagacaaaatgaatgatggagcaaag

SEQ ID NO: 213395 - DNA, 33 bp, Homo sapien
gaattctctcaaaaacccaaaataaagttgttc

SEQ ID NO: 213396 - DNA, 33 bp, Homo sapien
gaattctctcaaaaactcaaaataaagttgttc

SEQ ID NO: 213397 - DNA, 33 bp, Homo sapien
ttcctttggcagtaccaccctcaactttgttac

SEQ ID NO: 213398 - DNA, 33 bp, Homo sapien
ttcctttggcagtaccgccctcaactttgttac

SEQ ID NO: 213399 - DNA, 33 bp, Homo sapien
ttttccctctttgctacgctattaaaaatcaga

SEQ ID NO: 213400 - DNA, 33 bp, Homo sapien
ttttccctctttgctatgctattaaaaatcaga

SEQ ID NO: 213401 - DNA, 33 bp, Homo sapien
taaacatccacagtgacaagaaattaaattgat

SEQ ID NO: 213402 - DNA, 33 bp, Homo sapien
taaacatccacagtgagaagaaattaaattgat

SEQ ID NO: 213403 - DNA, 33 bp, Homo sapien
gcatgcagtaactcacacctataaaactagcac

SEQ ID NO: 213404 - DNA, 33 bp, Homo sapien
gcatgcagtaactcacgcctataaaactagcac

SEQ ID NO: 213405 - DNA, 33 bp, Homo sapien
ttttgagatgaggactgacttactatggtgtcc

SEQ ID NO: 213406 - DNA, 33 bp, Homo sapien
ttttgagatgaggacttacttactatggtgtcc

SEQ ID NO: 213407 - DNA, 33 bp, Homo sapien
ttcacacacaaaacaaatcgagtcagattctac

SEQ ID NO: 213408 - DNA, 33 bp, Homo sapien
ttcacacacaaaacaagtcgagtcagattctac

SEQ ID NO: 213409 - DNA, 33 bp, Homo sapien
aggtattgtattaaaccagaaaatatgagctct

SEQ ID NO: 213410 - DNA, 33 bp, Homo sapien
aggtattgtattaaacgagaaaatatgagctct

SEQ ID NO: 213411 - DNA, 33 bp, Homo sapien
tatacttgcaaagcagcccttgtggttggatca

SEQ ID NO: 213412 - DNA, 33 bp, Homo sapien
tatacttgcaaagcaggccttgtggttggatca

SEQ ID NO: 213413 - DNA, 33 bp, Homo sapien
acctgttccatgcctcaatactgctgacagtcc

SEQ ID NO: 213414 - DNA, 33 bp, Homo sapien
acctgttccatgcctccatactgctgacagtcc

SEQ ID NO: 213415 - DNA, 33 bp, Homo sapien
agcacagataaagttcaacaaagagaggagagt

SEQ ID NO: 213416 - DNA, 33 bp, Homo sapien
agcacagataaagttctacaaagagaggagagt

SEQ ID NO: 213417 - DNA, 33 bp, Homo sapien
aagtcagctataataaacgctgttgcagagcac

SEQ ID NO: 213418 - DNA, 33 bp, Homo sapien
aagtcagctataataagcgctgttgcagagcac

SEQ ID NO: 213419 - DNA, 33 bp, Homo sapien
ctcaaacagaacgaaactgaacaaacttcacat

SEQ ID NO: 213420 - DNA, 33 bp, Homo sapien
ctcaaacagaacgaaattgaacaaacttcacat

SEQ ID NO: 213421 - DNA, 33 bp, Homo sapien
tatagtgaggggggaacggcggtattgatgaag

SEQ ID NO: 213422 - DNA, 33 bp, Homo sapien
tatagtgaggggggaatggcggtattgatgaag

SEQ ID NO: 213423 - DNA, 33 bp, Homo sapien
tgtgctgccttgaatggaggtgaatactaagag

SEQ ID NO: 213424 - DNA, 33 bp, Homo sapien
tgtgctgccttgaatgtaggtgaatactaagag

SEQ ID NO: 213425 - DNA, 33 bp, Homo sapien
aaagacaaactgttctcaaaggagtttaaaaac

SEQ ID NO: 213426 - DNA, 33 bp, Homo sapien
aaagacaaactgttctgaaaggagtttaaaaac

SEQ ID NO: 213427 - DNA, 33 bp, Homo sapien
ttctcaacatattaaacatgcttagcttgatga

SEQ ID NO: 213428 - DNA, 33 bp, Homo sapien
ttctcaacatattaaagatgcttagcttgatga

SEQ ID NO: 213429 - DNA, 33 bp, Homo sapien
caataatcaagaatacagatcaattttatctgg

SEQ ID NO: 213430 - DNA, 33 bp, Homo sapien
caataatcaagaatacggatcaattttatctgg

SEQ ID NO: 213431 - DNA, 33 bp, Homo sapien
tactaatcaagtcatacaatttctggtctttgt

SEQ ID NO: 213432 - DNA, 33 bp, Homo sapien
tactaatcaagtcatataatttctggtctttgt

SEQ ID NO: 213433 - DNA, 33 bp, Homo sapien
acagtcacttacccagaagccagcagcatatga

SEQ ID NO: 213434 - DNA, 33 bp, Homo sapien
acagtcacttacccaggagccagcagcatatga

SEQ ID NO: 213435 - DNA, 33 bp, Homo sapien
tggttaatgaaagtcgccaatgttcagagtcct

SEQ ID NO: 213436 - DNA, 33 bp, Homo sapien
tggttaatgaaagtcgtcaatgttcagagtcct

SEQ ID NO: 213437 - DNA, 33 bp, Homo sapien
taaatctctcagattacgtgtatgtgaagttgc

SEQ ID NO: 213438 - DNA, 33 bp, Homo sapien
taaatctctcagattatgtgtatgtgaagttgc

SEQ ID NO: 213439 - DNA, 33 bp, Homo sapien
tttcaattatgctccactgacataacagctgtt

SEQ ID NO: 213440 - DNA, 33 bp, Homo sapien
tttcaattatgctccattgacataacagctgtt

SEQ ID NO: 213441 - DNA, 33 bp, Homo sapien
tttaacagtaaaacccaaactatagccagatgt

SEQ ID NO: 213442 - DNA, 33 bp, Homo sapien
tttaacagtaaaacccgaactatagccagatgt

SEQ ID NO: 213443 - DNA, 33 bp, Homo sapien
ttgttctgcatccccaatactatcgctttttat

SEQ ID NO: 213444 - DNA, 33 bp, Homo sapien
ttgttctgcatccccagtactatcgctttttat

SEQ ID NO: 213445 - DNA, 33 bp, Homo sapien
gatggtaaaccattgacgctacagactttacca

SEQ ID NO: 213446 - DNA, 33 bp, Homo sapien
gatggtaaaccattgatgctacagactttacca

SEQ ID NO: 213447 - DNA, 33 bp, Homo sapien
tacttaaaacatacacaaacagattaaacaaaa

SEQ ID NO: 213448 - DNA, 33 bp, Homo sapien
tacttaaaacatacacgaacagattaaacaaaa

SEQ ID NO: 213449 - DNA, 33 bp, Homo sapien
acatatgtagaaaaatgataccatgctcgtatg

SEQ ID NO: 213450 - DNA, 33 bp, Homo sapien
acatatgtagaaaaattataccatgctcgtatg

SEQ ID NO: 213451 - DNA, 33 bp, Homo sapien
ttcccttaagattgaaacctggattagttctcc

SEQ ID NO: 213452 - DNA, 33 bp, Homo sapien
ttcccttaagattgaagcctggattagttctcc

SEQ ID NO: 213453 - DNA, 33 bp, Homo sapien
tagttttgtctaaacacgacttatatgtactgt

SEQ ID NO: 213454 - DNA, 33 bp, Homo sapien
tagttttgtctaaacatgacttatatgtactgt

SEQ ID NO: 213455 - DNA, 33 bp, Homo sapien
tgtctctaccttgttaccattttttcaagccaa

SEQ ID NO: 213456 - DNA, 33 bp, Homo sapien
tgtctctaccttgttatcattttttcaagccaa

SEQ ID NO: 213457 - DNA, 33 bp, Homo sapien
actgtcatctatttgcaccattcctcaattaac

SEQ ID NO: 213458 - DNA, 33 bp, Homo sapien
actgtcatctatttgcgccattcctcaattaac

SEQ ID NO: 213459 - DNA, 33 bp, Homo sapien
ctcttgttccctgttacattttcagcccctaaa

SEQ ID NO: 213460 - DNA, 33 bp, Homo sapien
ctcttgttccctgttatattttcagcccctaaa

SEQ ID NO: 213461 - DNA, 33 bp, Homo sapien
tatagtcagctcataaaacccttcatatttttt

SEQ ID NO: 213462 - DNA, 33 bp, Homo sapien
tatagtcagctcataatacccttcatatttttt

SEQ ID NO: 213463 - DNA, 33 bp, Homo sapien
aaagctcattgcacagaatacatagtagtgatg

SEQ ID NO: 213464 - DNA, 33 bp, Homo sapien
aaagctcattgcacaggatacatagtagtgatg

SEQ ID NO: 213465 - DNA, 33 bp, Homo sapien
tcaatacagctcccccaattcaactatattagg

SEQ ID NO: 213466 - DNA, 33 bp, Homo sapien
tcaatacagctcccccgattcaactatattagg

SEQ ID NO: 213467 - DNA, 33 bp, Homo sapien
aatattgaagttaacaaaggaagttagaaaaga

SEQ ID NO: 213468 - DNA, 33 bp, Homo sapien
aatattgaagttaacataggaagttagaaaaga

SEQ ID NO: 213469 - DNA, 33 bp, Homo sapien
cccaagtaattgctacaaattgggcctcaattt

SEQ ID NO: 213470 - DNA, 33 bp, Homo sapien
cccaagtaattgctacgaattgggcctcaattt

SEQ ID NO: 213471 - DNA, 33 bp, Homo sapien
tagggttgtatcttcaagaagagtattgcttca

SEQ ID NO: 213472 - DNA, 33 bp, Homo sapien
tagggttgtatcttcaggaagagtattgcttca

SEQ ID NO: 213473 - DNA, 33 bp, Homo sapien
gccctaaatcaaagaggagtttccttataagag

SEQ ID NO: 213474 - DNA, 33 bp, Homo sapien
gccctaaatcaaagagtagtttccttataagag

SEQ ID NO: 213475 - DNA, 33 bp, Homo sapien
ttaaagatcatttttacagtgagttagtatctc

SEQ ID NO: 213476 - DNA, 33 bp, Homo sapien
ttaaagatcatttttagagtgagttagtatctc

SEQ ID NO: 213477 - DNA, 33 bp, Homo sapien
aaatggatgcctcagaacacctgaataataaga

SEQ ID NO: 213478 - DNA, 33 bp, Homo sapien
aaatggatgcctcagagcacctgaataataaga

SEQ ID NO: 213479 - DNA, 33 bp, Homo sapien
cttcctgtgaaacagtcaatcaggtcaagatga

SEQ ID NO: 213480 - DNA, 33 bp, Homo sapien
cttcctgtgaaacagtgaatcaggtcaagatga

SEQ ID NO: 213481 - DNA, 33 bp, Homo sapien
ctgacactatgctaagactctttatccatgatt

SEQ ID NO: 213482 - DNA, 33 bp, Homo sapien
ctgacactatgctaaggctctttatccatgatt

SEQ ID NO: 213483 - DNA, 33 bp, Homo sapien
taatactttcccaagacctctgacattctcctt

SEQ ID NO: 213484 - DNA, 33 bp, Homo sapien
taatactttcccaagatctctgacattctcctt

SEQ ID NO: 213485 - DNA, 33 bp, Homo sapien
ccaagtgcttagagagaacttaataagtggtct

SEQ ID NO: 213486 - DNA, 33 bp, Homo sapien
ccaagtgcttagagaggacttaataagtggtct

SEQ ID NO: 213487 - DNA, 33 bp, Homo sapien
cgtgcaagtgttttcccaatgacagaagcaatt

SEQ ID NO: 213488 - DNA, 33 bp, Homo sapien
cgtgcaagtgttttccgaatgacagaagcaatt

SEQ ID NO: 213489 - DNA, 33 bp, Homo sapien
tggatcgtaggaaaaacgattcttactaactcc

SEQ ID NO: 213490 - DNA, 33 bp, Homo sapien
tggatcgtaggaaaaatgattcttactaactcc

SEQ ID NO: 213491 - DNA, 33 bp, Homo sapien
aacttgtttattgccaaattcccagacacttgt

SEQ ID NO: 213492 - DNA, 33 bp, Homo sapien
aacttgtttattgccagattcccagacacttgt

SEQ ID NO: 213493 - DNA, 33 bp, Homo sapien
ttctctgcctgccaaaattaaaagaaatcagct

SEQ ID NO: 213494 - DNA, 33 bp, Homo sapien
ttctctgcctgccaaagttaaaagaaatcagct

SEQ ID NO: 213495 - DNA, 33 bp, Homo sapien
tcagatattgttttcccgaactatgcaagtgtg

SEQ ID NO: 213496 - DNA, 33 bp, Homo sapien
tcagatattgttttcctgaactatgcaagtgtg

SEQ ID NO: 213497 - DNA, 33 bp, Homo sapien
tagtcattcatgattcacatatattttatcaag

SEQ ID NO: 213498 - DNA, 33 bp, Homo sapien
tagtcattcatgattcgcatatattttatcaag

SEQ ID NO: 213499 - DNA, 33 bp, Homo sapien
ttcaaaattgggacataaatgatacaacgttta

SEQ ID NO: 213500 - DNA, 33 bp, Homo sapien
ttcaaaattgggacatgaatgatacaacgttta

SEQ ID NO: 213501 - DNA, 33 bp, Homo sapien
gtatggcccactgttacctcaaaatcactatat

SEQ ID NO: 213502 - DNA, 33 bp, Homo sapien
gtatggcccactgttatctcaaaatcactatat

SEQ ID NO: 213503 - DNA, 33 bp, Homo sapien
atccagatataatgaaatacaaatttggtgtgt

SEQ ID NO: 213504 - DNA, 33 bp, Homo sapien
atccagatataatgaactacaaatttggtgtgt

SEQ ID NO: 213505 - DNA, 33 bp, Homo sapien
acacattaacataataccaacgtagagctcatt

SEQ ID NO: 213506 - DNA, 33 bp, Homo sapien
acacattaacataatatcaacgtagagctcatt

SEQ ID NO: 213507 - DNA, 33 bp, Homo sapien
gatataggttaatagacggatcctttaaaatac

SEQ ID NO: 213508 - DNA, 33 bp, Homo sapien
gatataggttaatagatggatcctttaaaatac

SEQ ID NO: 213509 - DNA, 33 bp, Homo sapien
aaggagcacaatctggcattcaaagattatcaa

SEQ ID NO: 213510 - DNA, 33 bp, Homo sapien
aaggagcacaatctggtattcaaagattatcaa

SEQ ID NO: 213511 - DNA, 33 bp, Homo sapien
tatatgtgtattacaacgctctttatcatgatt

SEQ ID NO: 213512 - DNA, 33 bp, Homo sapien
tatatgtgtattacaatgctctttatcatgatt

SEQ ID NO: 213513 - DNA, 33 bp, Homo sapien
cactcttcatcaaataaattaacttgcctagtg

SEQ ID NO: 213514 - DNA, 33 bp, Homo sapien
cactcttcatcaaatacattaacttgcctagtg

SEQ ID NO: 213515 - DNA, 33 bp, Homo sapien
ttctttgggcatttgacaattccaagatttttc

SEQ ID NO: 213516 - DNA, 33 bp, Homo sapien
ttctttgggcatttgagaattccaagatttttc

SEQ ID NO: 213517 - DNA, 33 bp, Homo sapien
agaaatcttgacctataaggctgaaatgttgaa

SEQ ID NO: 213518 - DNA, 33 bp, Homo sapien
agaaatcttgacctatgaggctgaaatgttgaa

SEQ ID NO: 213519 - DNA, 33 bp, Homo sapien
aataagggctttagaaacagacaagtcggaatg

SEQ ID NO: 213520 - DNA, 33 bp, Homo sapien
aataagggctttagaatcagacaagtcggaatg

SEQ ID NO: 213521 - DNA, 33 bp, Homo sapien
tgcttggcataaaataaggactcattcaattcg

SEQ ID NO: 213522 - DNA, 33 bp, Homo sapien
tgcttggcataaaatagggactcattcaattcg

SEQ ID NO: 213523 - DNA, 33 bp, Homo sapien
ctattcaggctttataatactgcatcctctata

SEQ ID NO: 213524 - DNA, 33 bp, Homo sapien
ctattcaggctttatagtactgcatcctctata

SEQ ID NO: 213525 - DNA, 33 bp, Homo sapien
catccacacacagttccctgaaaacatttttaa

SEQ ID NO: 213526 - DNA, 33 bp, Homo sapien
catccacacacagttctctgaaaacatttttaa

SEQ ID NO: 213527 - DNA, 33 bp, Homo sapien
ccaagaatctgttaaacgatgaatgaaaaaaca

SEQ ID NO: 213528 - DNA, 33 bp, Homo sapien
ccaagaatctgttaaatgatgaatgaaaaaaca

SEQ ID NO: 213529 - DNA, 33 bp, Homo sapien
ggcccaggatgcttcacagccagttgtaagaac

SEQ ID NO: 213530 - DNA, 33 bp, Homo sapien
ggcccaggatgcttcagagccagttgtaagaac

SEQ ID NO: 213531 - DNA, 33 bp, Homo sapien
taggttatatgagttacattctaagactgatgg

SEQ ID NO: 213532 - DNA, 33 bp, Homo sapien
taggttatatgagttatattctaagactgatgg

SEQ ID NO: 213533 - DNA, 33 bp, Homo sapien
tctgaagtgcattacagacagaaactatctttt

SEQ ID NO: 213534 - DNA, 33 bp, Homo sapien
tctgaagtgcattacatacagaaactatctttt

SEQ ID NO: 213535 - DNA, 33 bp, Homo sapien
taaaattatgggaagccagatttacaaaggcct

SEQ ID NO: 213536 - DNA, 33 bp, Homo sapien
taaaattatgggaagctagatttacaaaggcct

SEQ ID NO: 213537 - DNA, 33 bp, Homo sapien
gttgagataatatgaaagttgagtgttcagggt

SEQ ID NO: 213538 - DNA, 33 bp, Homo sapien
gttgagataatatgaaggttgagtgttcagggt

SEQ ID NO: 213539 - DNA, 33 bp, Homo sapien
tcattaggttgctgaacaattgatagtggagag

SEQ ID NO: 213540 - DNA, 33 bp, Homo sapien
tcattaggttgctgaagaattgatagtggagag

SEQ ID NO: 213541 - DNA, 33 bp, Homo sapien
tcatacatgagagacaaataataagacctgttc

SEQ ID NO: 213542 - DNA, 33 bp, Homo sapien
tcatacatgagagacatataataagacctgttc

SEQ ID NO: 213543 - DNA, 33 bp, Homo sapien
taaaaccttctgcaataaaaattaacttattta

SEQ ID NO: 213544 - DNA, 33 bp, Homo sapien
taaaaccttctgcaatgaaaattaacttattta

SEQ ID NO: 213545 - DNA, 33 bp, Homo sapien
atgactcacagatgtacattggttggaagtttc

SEQ ID NO: 213546 - DNA, 33 bp, Homo sapien
atgactcacagatgtatattggttggaagtttc

SEQ ID NO: 213547 - DNA, 33 bp, Homo sapien
atgatcttcaaccataaaagtttctgtgctgtc

SEQ ID NO: 213548 - DNA, 33 bp, Homo sapien
atgatcttcaaccatagaagtttctgtgctgtc

SEQ ID NO: 213549 - DNA, 33 bp, Homo sapien
gctgtccattgcttaacgcaggttatttcatta

SEQ ID NO: 213550 - DNA, 33 bp, Homo sapien
gctgtccattgcttaatgcaggttatttcatta

SEQ ID NO: 213551 - DNA, 33 bp, Homo sapien
tgtttatgatgacagtcactgaacaaaatttcc

SEQ ID NO: 213552 - DNA, 33 bp, Homo sapien
tgtttatgatgacagttactgaacaaaatttcc

SEQ ID NO: 213553 - DNA, 33 bp, Homo sapien
gcctaaccaggccagccaacaaaagcctattta

SEQ ID NO: 213554 - DNA, 33 bp, Homo sapien
gcctaaccaggccagcgaacaaaagcctattta

SEQ ID NO: 213555 - DNA, 33 bp, Homo sapien
ccagactggtgtccaactcctgagctcaggtga

SEQ ID NO: 213556 - DNA, 33 bp, Homo sapien
ccagactggtgtccaattcctgagctcaggtga

SEQ ID NO: 213557 - DNA, 33 bp, Homo sapien
tctcctaattgtttcacgccaagaaagaaccat

SEQ ID NO: 213558 - DNA, 33 bp, Homo sapien
tctcctaattgtttcatgccaagaaagaaccat

SEQ ID NO: 213559 - DNA, 33 bp, Homo sapien
ggcattgcctctactcaaccactctatagtgga

SEQ ID NO: 213560 - DNA, 33 bp, Homo sapien
ggcattgcctctactcgaccactctatagtgga

SEQ ID NO: 213561 - DNA, 33 bp, Homo sapien
tttctataaaggtgtagcatgagagggaaatct

SEQ ID NO: 213562 - DNA, 33 bp, Homo sapien
tttctataaaggtgtatcatgagagggaaatct

SEQ ID NO: 213563 - DNA, 33 bp, Homo sapien
ctgttgtactgatgaaaggctactaaacttaaa

SEQ ID NO: 213564 - DNA, 33 bp, Homo sapien
ctgttgtactgatgaagggctactaaacttaaa

SEQ ID NO: 213565 - DNA, 33 bp, Homo sapien
aatcctgctgaaaagaagtactcaaaaatactt

SEQ ID NO: 213566 - DNA, 33 bp, Homo sapien
aatcctgctgaaaagaggtactcaaaaatactt

SEQ ID NO: 213567 - DNA, 33 bp, Homo sapien
gtacaatttgataatacagcaatgctgggttct

SEQ ID NO: 213568 - DNA, 33 bp, Homo sapien
gtacaatttgataatatagcaatgctgggttct

SEQ ID NO: 213569 - DNA, 33 bp, Homo sapien
gctaaaccaaaggaacacaatcataatccaggg

SEQ ID NO: 213570 - DNA, 33 bp, Homo sapien
gctaaaccaaaggaacccaatcataatccaggg

SEQ ID NO: 213571 - DNA, 33 bp, Homo sapien
aaattgcttgtaatacagcagggctacttacat

SEQ ID NO: 213572 - DNA, 33 bp, Homo sapien
aaattgcttgtaataccgcagggctacttacat

SEQ ID NO: 213573 - DNA, 33 bp, Homo sapien
tgagcccattgtgactaaaattttccttatata

SEQ ID NO: 213574 - DNA, 33 bp, Homo sapien
tgagcccattgtgacttaaattttccttatata

SEQ ID NO: 213575 - DNA, 33 bp, Homo sapien
aatatggactaaaataccttctcccttgcagtt

SEQ ID NO: 213576 - DNA, 33 bp, Homo sapien
aatatggactaaaatatcttctcccttgcagtt

SEQ ID NO: 213577 - DNA, 33 bp, Homo sapien
ttcgatggcagtgcacaattccctcagtggctt

SEQ ID NO: 213578 - DNA, 33 bp, Homo sapien
ttcgatggcagtgcacgattccctcagtggctt

SEQ ID NO: 213579 - DNA, 33 bp, Homo sapien
tttcttaaatgcttcaatactactgtggcctca

SEQ ID NO: 213580 - DNA, 33 bp, Homo sapien
tttcttaaatgcttcattactactgtggcctca

SEQ ID NO: 213581 - DNA, 33 bp, Homo sapien
tgaaaggttattcagacgaccacttgaataaac

SEQ ID NO: 213582 - DNA, 33 bp, Homo sapien
tgaaaggttattcagatgaccacttgaataaac

SEQ ID NO: 213583 - DNA, 33 bp, Homo sapien
catcttttgaaaatgcaaaaccagtcacaacag

SEQ ID NO: 213584 - DNA, 33 bp, Homo sapien
catcttttgaaaatgcgaaaccagtcacaacag

SEQ ID NO: 213585 - DNA, 33 bp, Homo sapien
gtaaaagctaaccaatcataacaaccacagttt

SEQ ID NO: 213586 - DNA, 33 bp, Homo sapien
gtaaaagctaaccaatgataacaaccacagttt

SEQ ID NO: 213587 - DNA, 33 bp, Homo sapien
caggagttcatgtgcccactgtgtgtatataga

SEQ ID NO: 213588 - DNA, 33 bp, Homo sapien
caggagttcatgtgcctactgtgtgtatataga

SEQ ID NO: 213589 - DNA, 33 bp, Homo sapien
ataataagaaaaaagcaacctgcccatatggtg

SEQ ID NO: 213590 - DNA, 33 bp, Homo sapien
ataataagaaaaaagccacctgcccatatggtg

SEQ ID NO: 213591 - DNA, 33 bp, Homo sapien
ttccacatccctgccactgacagagcttcctgg

SEQ ID NO: 213592 - DNA, 33 bp, Homo sapien
ttccacatccctgccagtgacagagcttcctgg

SEQ ID NO: 213593 - DNA, 33 bp, Homo sapien
gatgagttagatgcaaagggctgttcttcaatt

SEQ ID NO: 213594 - DNA, 33 bp, Homo sapien
gatgagttagatgcaacgggctgttcttcaatt

SEQ ID NO: 213595 - DNA, 33 bp, Homo sapien
ttgatttatatgtatacgcaaaatgtatttatc

SEQ ID NO: 213596 - DNA, 33 bp, Homo sapien
ttgatttatatgtatatgcaaaatgtatttatc

SEQ ID NO: 213597 - DNA, 33 bp, Homo sapien
taggttcagttcgatacggaatatgcattgtag

SEQ ID NO: 213598 - DNA, 33 bp, Homo sapien
taggttcagttcgatatggaatatgcattgtag

SEQ ID NO: 213599 - DNA, 33 bp, Homo sapien
agaggagaaccatgcaactccctggccatagaa

SEQ ID NO: 213600 - DNA, 33 bp, Homo sapien
agaggagaaccatgcagctccctggccatagaa

SEQ ID NO: 213601 - DNA, 33 bp, Homo sapien
aatacagacaacaaaaccaaaaacagccagagt

SEQ ID NO: 213602 - DNA, 33 bp, Homo sapien
aatacagacaacaaaatcaaaaacagccagagt

SEQ ID NO: 213603 - DNA, 33 bp, Homo sapien
gctttgaccttgggcaaactgtgagcacaaagt

SEQ ID NO: 213604 - DNA, 33 bp, Homo sapien
gctttgaccttgggcagactgtgagcacaaagt

SEQ ID NO: 213605 - DNA, 33 bp, Homo sapien
tagtgtttctaggaaaaataaggagtgactgtt

SEQ ID NO: 213606 - DNA, 33 bp, Homo sapien
tagtgtttctaggaaatataaggagtgactgtt

SEQ ID NO: 213607 - DNA, 33 bp, Homo sapien
actaattttctccaccaaaactataatgttctt

SEQ ID NO: 213608 - DNA, 33 bp, Homo sapien
actaattttctccacccaaactataatgttctt

SEQ ID NO: 213609 - DNA, 33 bp, Homo sapien
agtctgtgttctttaaggtcttgttttcaaata

SEQ ID NO: 213610 - DNA, 33 bp, Homo sapien
agtctgtgttctttaatgtcttgttttcaaata

SEQ ID NO: 213611 - DNA, 33 bp, Homo sapien
taaatctagaataaaacagaagtcaccagttac

SEQ ID NO: 213612 - DNA, 33 bp, Homo sapien
taaatctagaataaaagagaagtcaccagttac

SEQ ID NO: 213613 - DNA, 33 bp, Homo sapien
tgtaataataagctacaggtcaacagtctatag

SEQ ID NO: 213614 - DNA, 33 bp, Homo sapien
tgtaataataagctaccggtcaacagtctatag

SEQ ID NO: 213615 - DNA, 33 bp, Homo sapien
tgttgttcctggttcacagggggaaaacacgat

SEQ ID NO: 213616 - DNA, 33 bp, Homo sapien
tgttgttcctggttcatagggggaaaacacgat

SEQ ID NO: 213617 - DNA, 33 bp, Homo sapien
catctattgtgtgccaaaaactatacacagcag

SEQ ID NO: 213618 - DNA, 33 bp, Homo sapien
catctattgtgtgccagaaactatacacagcag

SEQ ID NO: 213619 - DNA, 33 bp, Homo sapien
taagagtgcagtacaaacgcataggtgcaattc

SEQ ID NO: 213620 - DNA, 33 bp, Homo sapien
taagagtgcagtacaagcgcataggtgcaattc

SEQ ID NO: 213621 - DNA, 33 bp, Homo sapien
tggagagcatcaagtaaagaacaggtagatgga

SEQ ID NO: 213622 - DNA, 33 bp, Homo sapien
tggagagcatcaagtagagaacaggtagatgga

SEQ ID NO: 213623 - DNA, 33 bp, Homo sapien
ctcataatgtaaaccccacaattgcattcccta

SEQ ID NO: 213624 - DNA, 33 bp, Homo sapien
ctcataatgtaaacccgacaattgcattcccta

SEQ ID NO: 213625 - DNA, 33 bp, Homo sapien
aaaactgtagggtgcaacctatatacaaattag

SEQ ID NO: 213626 - DNA, 33 bp, Homo sapien
aaaactgtagggtgcatcctatatacaaattag

SEQ ID NO: 213627 - DNA, 33 bp, Homo sapien
tcttcctgggaatacccatttgctgctaaacca

SEQ ID NO: 213628 - DNA, 33 bp, Homo sapien
tcttcctgggaatacctatttgctgctaaacca

SEQ ID NO: 213629 - DNA, 33 bp, Homo sapien
gcctaaattatgacagcatccaatcacaagtta

SEQ ID NO: 213630 - DNA, 33 bp, Homo sapien
gcctaaattatgacagtatccaatcacaagtta

SEQ ID NO: 213631 - DNA, 33 bp, Homo sapien
actccatcttgccccaatagtttgtgctttacg

SEQ ID NO: 213632 - DNA, 33 bp, Homo sapien
actccatcttgccccagtagtttgtgctttacg

SEQ ID NO: 213633 - DNA, 33 bp, Homo sapien
gtatttagcaggataccggtcagcacgtgtgca

SEQ ID NO: 213634 - DNA, 33 bp, Homo sapien
gtatttagcaggatactggtcagcacgtgtgca

SEQ ID NO: 213635 - DNA, 33 bp, Homo sapien
gttattagaaagatcactccattggcagtgatc

SEQ ID NO: 213636 - DNA, 33 bp, Homo sapien
gttattagaaagatcattccattggcagtgatc

SEQ ID NO: 213637 - DNA, 33 bp, Homo sapien
tgtctagaattttttgcattaagctactcttct

SEQ ID NO: 213638 - DNA, 33 bp, Homo sapien
tgtctagaattttttgtattaagctactcttct

SEQ ID NO: 213639 - DNA, 33 bp, Homo sapien
aaaaaccgtggcttacaattccatcagggcaga

SEQ ID NO: 213640 - DNA, 33 bp, Homo sapien
aaaaaccgtggcttacgattccatcagggcaga

SEQ ID NO: 213641 - DNA, 33 bp, Homo sapien
tcattctctgagaccacaagtagaggattattt

SEQ ID NO: 213642 - DNA, 33 bp, Homo sapien
tcattctctgagaccataagtagaggattattt

SEQ ID NO: 213643 - DNA, 33 bp, Homo sapien
actggctgttatgagacagaagtaaaataccca

SEQ ID NO: 213644 - DNA, 33 bp, Homo sapien
actggctgttatgagatagaagtaaaataccca

SEQ ID NO: 213645 - DNA, 33 bp, Homo sapien
aggtcgccattatctacagcacctcttctttct

SEQ ID NO: 213646 - DNA, 33 bp, Homo sapien
aggtcgccattatctatagcacctcttctttct

SEQ ID NO: 213647 - DNA, 33 bp, Homo sapien
ttagactcttataggacggttgaggggatgtat

SEQ ID NO: 213648 - DNA, 33 bp, Homo sapien
ttagactcttataggatggttgaggggatgtat

SEQ ID NO: 213649 - DNA, 33 bp, Homo sapien
tttgctggttcctcaacgttctcactgccatct

SEQ ID NO: 213650 - DNA, 33 bp, Homo sapien
tttgctggttcctcaatgttctcactgccatct

SEQ ID NO: 213651 - DNA, 33 bp, Homo sapien
ttgcactgactaatgcagaaatgtcaccggcca

SEQ ID NO: 213652 - DNA, 33 bp, Homo sapien
ttgcactgactaatgcggaaatgtcaccggcca

SEQ ID NO: 213653 - DNA, 33 bp, Homo sapien
attaggtctcaaaatacgacaagctcaacttaa

SEQ ID NO: 213654 - DNA, 33 bp, Homo sapien
attaggtctcaaaatatgacaagctcaacttaa

SEQ ID NO: 213655 - DNA, 33 bp, Homo sapien
ggaaaatgaggttttgaaagataattccaatag

SEQ ID NO: 213656 - DNA, 33 bp, Homo sapien
ggaaaatgaggttttggaagataattccaatag

SEQ ID NO: 213657 - DNA, 33 bp, Homo sapien
cttcctatgtagtagccgaaagtctgaagaaaa

SEQ ID NO: 213658 - DNA, 33 bp, Homo sapien
cttcctatgtagtagctgaaagtctgaagaaaa

SEQ ID NO: 213659 - DNA, 33 bp, Homo sapien
aaaagctgaaagaggcaagtagatttgtcaaga

SEQ ID NO: 213660 - DNA, 33 bp, Homo sapien
aaaagctgaaagaggccagtagatttgtcaaga

SEQ ID NO: 213661 - DNA, 33 bp, Homo sapien
tcttgcactttgttgtaaataaactaattatat

SEQ ID NO: 213662 - DNA, 33 bp, Homo sapien
tcttgcactttgttgtgaataaactaattatat

SEQ ID NO: 213663 - DNA, 33 bp, Homo sapien
ttagatatcttggcaaaggaaaaatgtatgtaa

SEQ ID NO: 213664 - DNA, 33 bp, Homo sapien
ttagatatcttggcaagggaaaaatgtatgtaa

SEQ ID NO: 213665 - DNA, 33 bp, Homo sapien
tttatagccataaccaagttaaacatttttctc

SEQ ID NO: 213666 - DNA, 33 bp, Homo sapien
tttatagccataaccaggttaaacatttttctc

SEQ ID NO: 213667 - DNA, 33 bp, Homo sapien
attttaatacctttcaagcaagaaattagtttc

SEQ ID NO: 213668 - DNA, 33 bp, Homo sapien
attttaatacctttcaggcaagaaattagtttc

SEQ ID NO: 213669 - DNA, 33 bp, Homo sapien
aggtaaccactgatcacgttaggaagatttaaa

SEQ ID NO: 213670 - DNA, 33 bp, Homo sapien
aggtaaccactgatcatgttaggaagatttaaa

SEQ ID NO: 213671 - DNA, 33 bp, Homo sapien
tattcaaggtgtagccaatcgcccgtggatgtt

SEQ ID NO: 213672 - DNA, 33 bp, Homo sapien
tattcaaggtgtagccgatcgcccgtggatgtt

SEQ ID NO: 213673 - DNA, 33 bp, Homo sapien
gcaaaggatcactccactgaatttgtattactt

SEQ ID NO: 213674 - DNA, 33 bp, Homo sapien
gcaaaggatcactccattgaatttgtattactt

SEQ ID NO: 213675 - DNA, 33 bp, Homo sapien
ttatatcgttggctacagagacttcaaatttgg

SEQ ID NO: 213676 - DNA, 33 bp, Homo sapien
ttatatcgttggctacggagacttcaaatttgg

SEQ ID NO: 213677 - DNA, 33 bp, Homo sapien
tctgaaattgaccatcagaaatttgagtaggtg

SEQ ID NO: 213678 - DNA, 33 bp, Homo sapien
tctgaaattgaccatcggaaatttgagtaggtg

SEQ ID NO: 213679 - DNA, 33 bp, Homo sapien
caaaacaatgcgagaacaatgtcaggcacaaga

SEQ ID NO: 213680 - DNA, 33 bp, Homo sapien
caaaacaatgcgagaataatgtcaggcacaaga

SEQ ID NO: 213681 - DNA, 33 bp, Homo sapien
aagatgggatcacaaactgtttttctgttctcc

SEQ ID NO: 213682 - DNA, 33 bp, Homo sapien
aagatgggatcacaaagtgtttttctgttctcc

SEQ ID NO: 213683 - DNA, 33 bp, Homo sapien
agaacctactctttaacacaaaatcagtataaa

SEQ ID NO: 213684 - DNA, 33 bp, Homo sapien
agaacctactctttaatacaaaatcagtataaa

SEQ ID NO: 213685 - DNA, 33 bp, Homo sapien
aaagtagagtttgtctaaaatttctaagtactc

SEQ ID NO: 213686 - DNA, 33 bp, Homo sapien
aaagtagagtttgtctgaaatttctaagtactc

SEQ ID NO: 213687 - DNA, 33 bp, Homo sapien
gaacatatccacctgaacttcggggactagaat

SEQ ID NO: 213688 - DNA, 33 bp, Homo sapien
gaacatatccacctgaccttcggggactagaat

SEQ ID NO: 213689 - DNA, 33 bp, Homo sapien
agttttaaaaaagtcacagcatcagatagagaa

SEQ ID NO: 213690 - DNA, 33 bp, Homo sapien
agttttaaaaaagtcatagcatcagatagagaa

SEQ ID NO: 213691 - DNA, 33 bp, Homo sapien
ccaccactccttcaaccgtgccttctgtcatgg

SEQ ID NO: 213692 - DNA, 33 bp, Homo sapien
ccaccactccttcaactgtgccttctgtcatgg

SEQ ID NO: 213693 - DNA, 33 bp, Homo sapien
tatatttttgtggaataaacctaacattgtatg

SEQ ID NO: 213694 - DNA, 33 bp, Homo sapien
tatatttttgtggaatcaacctaacattgtatg

SEQ ID NO: 213695 - DNA, 33 bp, Homo sapien
aagtgcagattcaaaacgctaaacagaattctg

SEQ ID NO: 213696 - DNA, 33 bp, Homo sapien
aagtgcagattcaaaatgctaaacagaattctg

SEQ ID NO: 213697 - DNA, 33 bp, Homo sapien
agcaaatgtgaataccgccatgcaaatgcccac

SEQ ID NO: 213698 - DNA, 33 bp, Homo sapien
agcaaatgtgaatacctccatgcaaatgcccac

SEQ ID NO: 213699 - DNA, 33 bp, Homo sapien
aagtttgtggtttttacattcgcgataagaaat

SEQ ID NO: 213700 - DNA, 33 bp, Homo sapien
aagtttgtggtttttatattcgcgataagaaat

SEQ ID NO: 213701 - DNA, 33 bp, Homo sapien
atccgatattctaaaaccaagacagttttccat

SEQ ID NO: 213702 - DNA, 33 bp, Homo sapien
atccgatattctaaaatcaagacagttttccat

SEQ ID NO: 213703 - DNA, 33 bp, Homo sapien
cttagagagattcagggatttagtcaaaatgtc

SEQ ID NO: 213704 - DNA, 33 bp, Homo sapien
cttagagagattcaggtatttagtcaaaatgtc

SEQ ID NO: 213705 - DNA, 33 bp, Homo sapien
ataaattggggttcatcagtaaggaagtgagtg

SEQ ID NO: 213706 - DNA, 33 bp, Homo sapien
ataaattggggttcatgagtaaggaagtgagtg

SEQ ID NO: 213707 - DNA, 33 bp, Homo sapien
gcaaactatcgcaagaactgttatcatttaaaa

SEQ ID NO: 213708 - DNA, 33 bp, Homo sapien
gcaaactatcgcaagagctgttatcatttaaaa

SEQ ID NO: 213709 - DNA, 33 bp, Homo sapien
tccttacaatgccctacgcggcctaaataatct

SEQ ID NO: 213710 - DNA, 33 bp, Homo sapien
tccttacaatgccctatgcggcctaaataatct

SEQ ID NO: 213711 - DNA, 33 bp, Homo sapien
catgtattaatttgaaactttgaagaagagatg

SEQ ID NO: 213712 - DNA, 33 bp, Homo sapien
catgtattaatttgaacctttgaagaagagatg

SEQ ID NO: 213713 - DNA, 33 bp, Homo sapien
tctcactgaaggctcaatattaccaatcctaat

SEQ ID NO: 213714 - DNA, 33 bp, Homo sapien
tctcactgaaggctcagtattaccaatcctaat

SEQ ID NO: 213715 - DNA, 33 bp, Homo sapien
cattgatcatctaatccaattccttcagtgact

SEQ ID NO: 213716 - DNA, 33 bp, Homo sapien
cattgatcatctaatctaattccttcagtgact

SEQ ID NO: 213717 - DNA, 33 bp, Homo sapien
tctttgcaaatgctcagcttaaggagaaatatt

SEQ ID NO: 213718 - DNA, 33 bp, Homo sapien
tctttgcaaatgctcatcttaaggagaaatatt

SEQ ID NO: 213719 - DNA, 33 bp, Homo sapien
ctgaggtttggttagaagatccgagttctagtt

SEQ ID NO: 213720 - DNA, 33 bp, Homo sapien
ctgaggtttggttagaggatccgagttctagtt

SEQ ID NO: 213721 - DNA, 33 bp, Homo sapien
ctctcttctacagaacccttcgatggctcccag

SEQ ID NO: 213722 - DNA, 33 bp, Homo sapien
ctctcttctacagaactcttcgatggctcccag

SEQ ID NO: 213723 - DNA, 33 bp, Homo sapien
cccttcaggaaccagacagtcatttccccagct

SEQ ID NO: 213724 - DNA, 33 bp, Homo sapien
cccttcaggaaccagatagtcatttccccagct

SEQ ID NO: 213725 - DNA, 33 bp, Homo sapien
aaaaaaaatcaagtaaaatacaaatggtgcctt

SEQ ID NO: 213726 - DNA, 33 bp, Homo sapien
aaaaaaaatcaagtaagatacaaatggtgcctt

SEQ ID NO: 213727 - DNA, 33 bp, Homo sapien
agcagcaatgagagcactccatggaaaggataa

SEQ ID NO: 213728 - DNA, 33 bp, Homo sapien
agcagcaatgagagcagtccatggaaaggataa

SEQ ID NO: 213729 - DNA, 33 bp, Homo sapien
atgcacaggcctctcaatctcagcgcacctcag

SEQ ID NO: 213730 - DNA, 33 bp, Homo sapien
atgcacaggcctctcagtctcagcgcacctcag

SEQ ID NO: 213731 - DNA, 33 bp, Homo sapien
agtggcagagaaaaaacgctgatcatgacaccc

SEQ ID NO: 213732 - DNA, 33 bp, Homo sapien
agtggcagagaaaaaaggctgatcatgacaccc

SEQ ID NO: 213733 - DNA, 33 bp, Homo sapien
ttcaagccaaagcaaacgtagtcactgcattat

SEQ ID NO: 213734 - DNA, 33 bp, Homo sapien
ttcaagccaaagcaaatgtagtcactgcattat

SEQ ID NO: 213735 - DNA, 33 bp, Homo sapien
gttgaaaactatatcacattatcccatgaaaga

SEQ ID NO: 213736 - DNA, 33 bp, Homo sapien
gttgaaaactatatcatattatcccatgaaaga

SEQ ID NO: 213737 - DNA, 33 bp, Homo sapien
attcagatctcttcccaaaagtatggctaaggg

SEQ ID NO: 213738 - DNA, 33 bp, Homo sapien
attcagatctcttcccgaaagtatggctaaggg

SEQ ID NO: 213739 - DNA, 33 bp, Homo sapien
cactagaatctccccacagtctagcctgtctgg

SEQ ID NO: 213740 - DNA, 33 bp, Homo sapien
cactagaatctccccatagtctagcctgtctgg

SEQ ID NO: 213741 - DNA, 33 bp, Homo sapien
aggagtcgacaccaggaaactaatattaacctg

SEQ ID NO: 213742 - DNA, 33 bp, Homo sapien
aggagtcgacaccaggtaactaatattaacctg

SEQ ID NO: 213743 - DNA, 33 bp, Homo sapien
gtttattcattcatgacgaacagtgctaaattc

SEQ ID NO: 213744 - DNA, 33 bp, Homo sapien
gtttattcattcatgaggaacagtgctaaattc

SEQ ID NO: 213745 - DNA, 33 bp, Homo sapien
tgtgatttttctggcaacaatccattctttctt

SEQ ID NO: 213746 - DNA, 33 bp, Homo sapien
tgtgatttttctggcagcaatccattctttctt

SEQ ID NO: 213747 - DNA, 33 bp, Homo sapien
tccaggcacagatctaacttctgaattaaaata

SEQ ID NO: 213748 - DNA, 33 bp, Homo sapien
tccaggcacagatctagcttctgaattaaaata

SEQ ID NO: 213749 - DNA, 33 bp, Homo sapien
ttccaaatggaatccaatcagcactgtaccatt

SEQ ID NO: 213750 - DNA, 33 bp, Homo sapien
ttccaaatggaatccattcagcactgtaccatt

SEQ ID NO: 213751 - DNA, 33 bp, Homo sapien
catagcatcattctgaaaattaagccaggtaac

SEQ ID NO: 213752 - DNA, 33 bp, Homo sapien
catagcatcattctgagaattaagccaggtaac

SEQ ID NO: 213753 - DNA, 33 bp, Homo sapien
attgaaagtttgctaactgaaagaaacattcta

SEQ ID NO: 213754 - DNA, 33 bp, Homo sapien
attgaaagtttgctaattgaaagaaacattcta

SEQ ID NO: 213755 - DNA, 33 bp, Homo sapien
ccacaggttcccttccacaacacttagggatta

SEQ ID NO: 213756 - DNA, 33 bp, Homo sapien
ccacaggttcccttccgcaacacttagggatta

SEQ ID NO: 213757 - DNA, 33 bp, Homo sapien; identical to SEQ ID NO: 213755

SEQ ID NO: 213758 - DNA, 33 bp, Homo sapien; identical to SEQ ID NO: 213756

SEQ ID NO: 213759 - DNA, 33 bp, Homo sapien
ataaatcaatatgtccaaggtatacctgcattc

SEQ ID NO: 213760 - DNA, 33 bp, Homo sapien
ataaatcaatatgtcccaggtatacctgcattc

SEQ ID NO: 213761 - DNA, 33 bp, Homo sapien
aagtatgaaatttcaaagtaaatgaccaggtca

SEQ ID NO: 213762 - DNA, 33 bp, Homo sapien
aagtatgaaatttcaatgtaaatgaccaggtca

SEQ ID NO: 213763 - DNA, 33 bp, Homo sapien
aagaaattgagaactacggatggctctaaaagt

SEQ ID NO: 213764 - DNA, 33 bp, Homo sapien
aagaaattgagaactatggatggctctaaaagt

SEQ ID NO: 213765 - DNA, 33 bp, Homo sapien
ttttctcacttgaacgaatgttatattaagctg

SEQ ID NO: 213766 - DNA, 33 bp, Homo sapien
ttttctcacttgaacggatgttatattaagctg

SEQ ID NO: 213767 - DNA, 33 bp, Homo sapien
tgagacctaaatttcacccgaagcaagggaata

SEQ ID NO: 213768 - DNA, 33 bp, Homo sapien
tgagacctaaatttcatccgaagcaagggaata

SEQ ID NO: 213769 - DNA, 33 bp, Homo sapien
tcagaaacagattggacgctttaaaaaattcca

SEQ ID NO: 213770 - DNA, 33 bp, Homo sapien
tcagaaacagattggatgctttaaaaaattcca

SEQ ID NO: 213771 - DNA, 33 bp, Homo sapien
ctttaaccagacagaactaccgcattcttagac

SEQ ID NO: 213772 - DNA, 33 bp, Homo sapien
ctttaaccagacagaagtaccgcattcttagac

SEQ ID NO: 213773 - DNA, 33 bp, Homo sapien
gaattaatgctaaccagaataattgtctactca

SEQ ID NO: 213774 - DNA, 33 bp, Homo sapien
gaattaatgctaaccataataattgtctactca

SEQ ID NO: 213775 - DNA, 33 bp, Homo sapien
aattaggaattgcagaaataaggagctgaaacc

SEQ ID NO: 213776 - DNA, 33 bp, Homo sapien
aattaggaattgcagagataaggagctgaaacc

SEQ ID NO: 213777 - DNA, 33 bp, Homo sapien
gtgttttgtgttcatgaaagaaaaaaacacaca

SEQ ID NO: 213778 - DNA, 33 bp, Homo sapien
gtgttttgtgttcatggaagaaaaaaacacaca

SEQ ID NO: 213779 - DNA, 33 bp, Homo sapien
tgacatttataaagtcccaagtctcaattgatt

SEQ ID NO: 213780 - DNA, 33 bp, Homo sapien
tgacatttataaagtctcaagtctcaattgatt

SEQ ID NO: 213781 - DNA, 33 bp, Homo sapien
tggggcccttatctccacgttccatgcagctct

SEQ ID NO: 213782 - DNA, 33 bp, Homo sapien
tggggcccttatctcctcgttccatgcagctct

SEQ ID NO: 213783 - DNA, 33 bp, Homo sapien
agtggcacaaccaaaactcaaatccaggtcttt

SEQ ID NO: 213784 - DNA, 33 bp, Homo sapien
agtggcacaaccaaaattcaaatccaggtcttt

SEQ ID NO: 213785 - DNA, 33 bp, Homo sapien
gattaaagatgaactaagtttgtcttgatttgg

SEQ ID NO: 213786 - DNA, 33 bp, Homo sapien
gattaaagatgaactatgtttgtcttgatttgg

SEQ ID NO: 213787 - DNA, 33 bp, Homo sapien
gacaactctgcgtcaaacaaatatattgacaca

SEQ ID NO: 213788 - DNA, 33 bp, Homo sapien
gacaactctgcgtcaagcaaatatattgacaca

SEQ ID NO: 213789 - DNA, 33 bp, Homo sapien
tgcaacacagtaagccaaatataacatgggata

SEQ ID NO: 213790 - DNA, 33 bp, Homo sapien
tgcaacacagtaagccgaatataacatgggata

SEQ ID NO: 213791 - DNA, 33 bp, Homo sapien
ctgttaggtcagtttccatgtagattatgtcct

SEQ ID NO: 213792 - DNA, 33 bp, Homo sapien
ctgttaggtcagtttctatgtagattatgtcct

SEQ ID NO: 213793 - DNA, 33 bp, Homo sapien
gcaggatgggcagataaagaggttgaattgaga

SEQ ID NO: 213794 - DNA, 33 bp, Homo sapien
gcaggatgggcagatagagaggttgaattgaga

SEQ ID NO: 213795 - DNA, 33 bp, Homo sapien
atggaatttcagaaacaaggtaagaggtcattg

SEQ ID NO: 213796 - DNA, 33 bp, Homo sapien
atggaatttcagaaaccaggtaagaggtcattg

SEQ ID NO: 213797 - DNA, 33 bp, Homo sapien
ttggcttctgcgtcccactgatatacctccatt

SEQ ID NO: 213798 - DNA, 33 bp, Homo sapien
ttggcttctgcgtcccgctgatatacctccatt

SEQ ID NO: 213799 - DNA, 33 bp, Homo sapien
ggcatttccatcttaacgtgtccaaaacaaacc

SEQ ID NO: 213800 - DNA, 33 bp, Homo sapien
ggcatttccatcttaatgtgtccaaaacaaacc

SEQ ID NO: 213801 - DNA, 33 bp, Homo sapien
taataaaacaagagaacgaatgaagaaacaaag

SEQ ID NO: 213802 - DNA, 33 bp, Homo sapien
taataaaacaagagaatgaatgaagaaacaaag

SEQ ID NO: 213803 - DNA, 33 bp, Homo sapien
tccagcatcacaatcccacttaagcaagcaact

SEQ ID NO: 213804 - DNA, 33 bp, Homo sapien
tccagcatcacaatcctacttaagcaagcaact

SEQ ID NO: 213805 - DNA, 33 bp, Homo sapien
aaagcagcagtggtaacagctcctttgtggtag

SEQ ID NO: 213806 - DNA, 33 bp, Homo sapien
aaagcagcagtggtaatagctcctttgtggtag

SEQ ID NO: 213807 - DNA, 33 bp, Homo sapien
caacgctgtaggcaaaagacactggagtaactg

SEQ ID NO: 213808 - DNA, 33 bp, Homo sapien
caacgctgtaggcaaaggacactggagtaactg

SEQ ID NO: 213809 - DNA, 33 bp, Homo sapien
ttattatgctctgagcactgttctatatacttt

SEQ ID NO: 213810 - DNA, 33 bp, Homo sapien
ttattatgctctgagctctgttctatatacttt

SEQ ID NO: 213811 - DNA, 33 bp, Homo sapien
atcagctgtgacgttaaagtctcataggaacct

SEQ ID NO: 213812 - DNA, 33 bp, Homo sapien
atcagctgtgacgttagagtctcataggaacct

SEQ ID NO: 213813 - DNA, 33 bp, Homo sapien
ttctcactgggattgacagcccaatggagcaaa

SEQ ID NO: 213814 - DNA, 33 bp, Homo sapien
ttctcactgggattgatagcccaatggagcaaa

SEQ ID NO: 213815 - DNA, 33 bp, Homo sapien
agagtgatgtgaaaaggcgtgagcaacactctg

SEQ ID NO: 213816 - DNA, 33 bp, Homo sapien
agagtgatgtgaaaagtcgtgagcaacactctg

SEQ ID NO: 213817 - DNA, 33 bp, Homo sapien
gctgagaaattgagaacggtatggcatcctaaa

SEQ ID NO: 213818 - DNA, 33 bp, Homo sapien
gctgagaaattgagaatggtatggcatcctaaa

SEQ ID NO: 213819 - DNA, 33 bp, Homo sapien
aacatgaagctctggaacacacttttgtaacat

SEQ ID NO: 213820 - DNA, 33 bp, Homo sapien
aacatgaagctctggagcacacttttgtaacat

SEQ ID NO: 213821 - DNA, 33 bp, Homo sapien
gtaactacaatgctaaacctatgttggcagatt

SEQ ID NO: 213822 - DNA, 33 bp, Homo sapien
gtaactacaatgctaatcctatgttggcagatt

SEQ ID NO: 213823 - DNA, 33 bp, Homo sapien
tttttgcacccacttcaaatactactgaattag

SEQ ID NO: 213824 - DNA, 33 bp, Homo sapien
tttttgcacccacttcgaatactactgaattag

SEQ ID NO: 213825 - DNA, 33 bp, Homo sapien
taagatcagagtgagaaatattcagctagtata

SEQ ID NO: 213826 - DNA, 33 bp, Homo sapien
taagatcagagtgagagatattcagctagtata

SEQ ID NO: 213827 - DNA, 33 bp, Homo sapien
tttctcaggacaataaaatttgtgcctacagcc

SEQ ID NO: 213828 - DNA, 33 bp, Homo sapien
tttctcaggacaataagatttgtgcctacagcc

SEQ ID NO: 213829 - DNA, 33 bp, Homo sapien
tctgtaacatagctgaaaaagcttaatgatctg

SEQ ID NO: 213830 - DNA, 33 bp, Homo sapien
tctgtaacatagctgagaaagcttaatgatctg

SEQ ID NO: 213831 - DNA, 33 bp, Homo sapien
gcagatagtttgggagccatctgaaaatctctg

SEQ ID NO: 213832 - DNA, 33 bp, Homo sapien
gcagatagtttgggagtcatctgaaaatctctg

SEQ ID NO: 213833 - DNA, 33 bp, Homo sapien
cggagaacaaatagacaaggtccctatcctcat

SEQ ID NO: 213834 - DNA, 33 bp, Homo sapien
cggagaacaaatagacgaggtccctatcctcat

SEQ ID NO: 213835 - DNA, 33 bp, Homo sapien
ttcagcctactctttcaccccttctctagccat

SEQ ID NO: 213836 - DNA, 33 bp, Homo sapien
ttcagcctactctttctccccttctctagccat

SEQ ID NO: 213837 - DNA, 33 bp, Homo sapien
ccagtcacacttgttaaaaatgcagggttacag

SEQ ID NO: 213838 - DNA, 33 bp, Homo sapien
ccagtcacacttgttacaaatgcagggttacag

SEQ ID NO: 213839 - DNA, 33 bp, Homo sapien
ctgtgattcatccaaaacgttatttagagatct

SEQ ID NO: 213840 - DNA, 33 bp, Homo sapien
ctgtgattcatccaaagcgttatttagagatct

SEQ ID NO: 213841 - DNA, 33 bp, Homo sapien
tatttggtctcttgtaacacctaaatttccctc

SEQ ID NO: 213842 - DNA, 33 bp, Homo sapien
tatttggtctcttgtatcacctaaatttccctc

SEQ ID NO: 213843 - DNA, 33 bp, Homo sapien
acatatcagcttgtaacaggagggtaagatcaa

SEQ ID NO: 213844 - DNA, 33 bp, Homo sapien
acatatcagcttgtaataggagggtaagatcaa

SEQ ID NO: 213845 - DNA, 33 bp, Homo sapien
atgacattagtcaccactaaggaaggtcttttc

SEQ ID NO: 213846 - DNA, 33 bp, Homo sapien
atgacattagtcaccattaaggaaggtcttttc

SEQ ID NO: 213847 - DNA, 33 bp, Homo sapien
aatatttgctcctttacatgaacatataattta

SEQ ID NO: 213848 - DNA, 33 bp, Homo sapien
aatatttgctcctttagatgaacatataattta

SEQ ID NO: 213849 - DNA, 33 bp, Homo sapien
aggtaacattactactcacgagaaataaacatt

SEQ ID NO: 213850 - DNA, 33 bp, Homo sapien
aggtaacattactactgacgagaaataaacatt

SEQ ID NO: 213851 - DNA, 33 bp, Homo sapien
ggaaacattgagaaaccagactacatttgaaag

SEQ ID NO: 213852 - DNA, 33 bp, Homo sapien
ggaaacattgagaaactagactacatttgaaag

SEQ ID NO: 213853 - DNA, 33 bp, Homo sapien
aaacatgggctagaataaaagtctttaaaacac

SEQ ID NO: 213854 - DNA, 33 bp, Homo sapien
aaacatgggctagaatgaaagtctttaaaacac

SEQ ID NO: 213855 - DNA, 33 bp, Homo sapien
ttgtattaagatgtaagaatggtacttgaaatt

SEQ ID NO: 213856 - DNA, 33 bp, Homo sapien
ttgtattaagatgtaataatggtacttgaaatt

SEQ ID NO: 213857 - DNA, 33 bp, Homo sapien
cagccatgcacgtgaaaataaagagggatacca

SEQ ID NO: 213858 - DNA, 33 bp, Homo sapien
cagccatgcacgtgaagataaagagggatacca

SEQ ID NO: 213859 - DNA, 33 bp, Homo sapien
ctagaagatttagtataaggaacaaacagacaa

SEQ ID NO: 213860 - DNA, 33 bp, Homo sapien
ctagaagatttagtatcaggaacaaacagacaa

SEQ ID NO: 213861 - DNA, 33 bp, Homo sapien
aaactcatcattttaaccaaggatatgagtaat

SEQ ID NO: 213862 - DNA, 33 bp, Homo sapien
aaactcatcattttaatcaaggatatgagtaat

SEQ ID NO: 213863 - DNA, 33 bp, Homo sapien
acagttatttctccacacttaatctctctatcc

SEQ ID NO: 213864 - DNA, 33 bp, Homo sapien
acagttatttctccacgcttaatctctctatcc

SEQ ID NO: 213865 - DNA, 33 bp, Homo sapien
gcctggaatgatagtaactttattgctgatttg

SEQ ID NO: 213866 - DNA, 33 bp, Homo sapien
gcctggaatgatagtagctttattgctgatttg

SEQ ID NO: 213867 - DNA, 33 bp, Homo sapien
tagaacttgaagggaaacatggaactaatgatt

SEQ ID NO: 213868 - DNA, 33 bp, Homo sapien
tagaacttgaagggaaccatggaactaatgatt

SEQ ID NO: 213869 - DNA, 33 bp, Homo sapien
gacacagaaattaacaacatttttcctgcctga

SEQ ID NO: 213870 - DNA, 33 bp, Homo sapien
gacacagaaattaacagcatttttcctgcctga

SEQ ID NO: 213871 - DNA, 33 bp, Homo sapien
tctaagaatttgtggaaatcaaaagaggatttg

SEQ ID NO: 213872 - DNA, 33 bp, Homo sapien
tctaagaatttgtggacatcaaaagaggatttg

SEQ ID NO: 213873 - DNA, 33 bp, Homo sapien
gataaatacgctatccactctgtttccaatctg

SEQ ID NO: 213874 - DNA, 33 bp, Homo sapien
gataaatacgctatcccctctgtttccaatctg

SEQ ID NO: 213875 - DNA, 33 bp, Homo sapien
ttttacaaggtactaaatatgccaggcactgtc

SEQ ID NO: 213876 - DNA, 33 bp, Homo sapien
ttttacaaggtactaagtatgccaggcactgtc

SEQ ID NO: 213877 - DNA, 33 bp, Homo sapien
gggtcctttcctttacagcaacagtttccctct

SEQ ID NO: 213878 - DNA, 33 bp, Homo sapien
gggtcctttcctttacggcaacagtttccctct

SEQ ID NO: 213879 - DNA, 33 bp, Homo sapien
atattttattaatgaccagccagacaccatagc

SEQ ID NO: 213880 - DNA, 33 bp, Homo sapien
atattttattaatgactagccagacaccatagc

SEQ ID NO: 213881 - DNA, 33 bp, Homo sapien
ctacagagaaggtgaccgaaaggaggagaagaa

SEQ ID NO: 213882 - DNA, 33 bp, Homo sapien
ctacagagaaggtgactgaaaggaggagaagaa

SEQ ID NO: 213883 - DNA, 33 bp, Homo sapien
gacaggcagagtactgcaaaggagttaagccaa

SEQ ID NO: 213884 - DNA, 33 bp, Homo sapien
gacaggcagagtactggaaaggagttaagccaa

SEQ ID NO: 213885 - DNA, 33 bp, Homo sapien
tcagccaagttaactacctgccaaagcaaagca

SEQ ID NO: 213886 - DNA, 33 bp, Homo sapien
tcagccaagttaactatctgccaaagcaaagca

SEQ ID NO: 213887 - DNA, 33 bp, Homo sapien
catctgggcatgaaagaaggatgcaatttggaa

SEQ ID NO: 213888 - DNA, 33 bp, Homo sapien
catctgggcatgaaaggaggatgcaatttggaa

SEQ ID NO: 213889 - DNA, 33 bp, Homo sapien
gggagctgttttccaacaaccaaatgtgactct

SEQ ID NO: 213890 - DNA, 33 bp, Homo sapien
gggagctgttttccaagaaccaaatgtgactct

SEQ ID NO: 213891 - DNA, 33 bp, Homo sapien
gaatggatttgttatacggcttctgatttgggg

SEQ ID NO: 213892 - DNA, 33 bp, Homo sapien
gaatggatttgttatatggcttctgatttgggg

SEQ ID NO: 213893 - DNA, 33 bp, Homo sapien
gaaatttactgctcaaatgttacccatttcttg

SEQ ID NO: 213894 - DNA, 33 bp, Homo sapien
gaaatttactgctcaagtgttacccatttcttg

SEQ ID NO: 213895 - DNA, 33 bp, Homo sapien
cacctacaatctctacacttctcaccagatggt

SEQ ID NO: 213896 - DNA, 33 bp, Homo sapien
cacctacaatctctacgcttctcaccagatggt

SEQ ID NO: 213897 - DNA, 33 bp, Homo sapien
gatgtgttcttagctacggtctcttcacctcac

SEQ ID NO: 213898 - DNA, 33 bp, Homo sapien
gatgtgttcttagctatggtctcttcacctcac

SEQ ID NO: 213899 - DNA, 33 bp, Homo sapien
tataagtaagtaacaaagcaagatgttcttcag

SEQ ID NO: 213900 - DNA, 33 bp, Homo sapien
tataagtaagtaacaaggcaagatgttcttcag

SEQ ID NO: 213901 - DNA, 33 bp, Homo sapien
catcaagcacagcacaatgattcactaaggata

SEQ ID NO: 213902 - DNA, 33 bp, Homo sapien
catcaagcacagcacagtgattcactaaggata

SEQ ID NO: 213903 - DNA, 33 bp, Homo sapien
actatctgtgctgcaccgggtataaccacagag

SEQ ID NO: 213904 - DNA, 33 bp, Homo sapien
actatctgtgctgcactgggtataaccacagag

SEQ ID NO: 213905 - DNA, 33 bp, Homo sapien
tcagagcaaactgaccaatttcttctttgggtt

SEQ ID NO: 213906 - DNA, 33 bp, Homo sapien
tcagagcaaactgaccgatttcttctttgggtt

SEQ ID NO: 213907 - DNA, 33 bp, Homo sapien
cataaggtcttcatcaccaaatcctggttctta

SEQ ID NO: 213908 - DNA, 33 bp, Homo sapien
cataaggtcttcatcatcaaatcctggttctta

SEQ ID NO: 213909 - DNA, 33 bp, Homo sapien
gactgtgatcttttcactacacagttttccttt

SEQ ID NO: 213910 - DNA, 33 bp, Homo sapien
gactgtgatcttttcattacacagttttccttt

SEQ ID NO: 213911 - DNA, 33 bp, Homo sapien
gagaagtttatacagcactgagtgtgaaaaata

SEQ ID NO: 213912 - DNA, 33 bp, Homo sapien
gagaagtttatacagctctgagtgtgaaaaata

SEQ ID NO: 213913 - DNA, 33 bp, Homo sapien
tttttttttttttgacaagatgtgactccattg

SEQ ID NO: 213914 - DNA, 33 bp, Homo sapien
tttttttttttttgacgagatgtgactccattg

SEQ ID NO: 213915 - DNA, 33 bp, Homo sapien
aaagcacacttaagccaaaagctctggtttgtt

SEQ ID NO: 213916 - DNA, 33 bp, Homo sapien
aaagcacacttaagccgaaagctctggtttgtt

SEQ ID NO: 213917 - DNA, 33 bp, Homo sapien
gtttctatatctgttacgatagtcataaatgtt

SEQ ID NO: 213918 - DNA, 33 bp, Homo sapien
gtttctatatctgttaggatagtcataaatgtt

SEQ ID NO: 213919 - DNA, 33 bp, Homo sapien
tctaaatgactttcagaccacttctcaccataa

SEQ ID NO: 213920 - DNA, 33 bp, Homo sapien
tctaaatgactttcaggccacttctcaccataa

SEQ ID NO: 213921 - DNA, 33 bp, Homo sapien
gcctttgagttggtgcaaagggtgactagggtg

SEQ ID NO: 213922 - DNA, 33 bp, Homo sapien
gcctttgagttggtgcgaagggtgactagggtg

SEQ ID NO: 213923 - DNA, 33 bp, Homo sapien
gcaagaagataaagagaaaggagatagctggat

SEQ ID NO: 213924 - DNA, 33 bp, Homo sapien
gcaagaagataaagaggaaggagatagctggat

SEQ ID NO: 213925 - DNA, 33 bp, Homo sapien
cctaacataagaagtgcatcctttctatcaagc

SEQ ID NO: 213926 - DNA, 33 bp, Homo sapien
cctaacataagaagtggatcctttctatcaagc

SEQ ID NO: 213927 - DNA, 33 bp, Homo sapien
gcttttgagattacaaataaatgttagcaagta

SEQ ID NO: 213928 - DNA, 33 bp, Homo sapien
gcttttgagattacaagtaaatgttagcaagta

SEQ ID NO: 213929 - DNA, 33 bp, Homo sapien
taaattttataaagtcgctgtaaactctgaaat

SEQ ID NO: 213930 - DNA, 33 bp, Homo sapien
taaattttataaagtctctgtaaactctgaaat

SEQ ID NO: 213931 - DNA, 33 bp, Homo sapien
gataactggaaataccaacaatatggagaattg

SEQ ID NO: 213932 - DNA, 33 bp, Homo sapien
gataactggaaataccgacaatatggagaattg

SEQ ID NO: 213933 - DNA, 33 bp, Homo sapien
gagtctgaggggtcagaatatgtgggcttcaca

SEQ ID NO: 213934 - DNA, 33 bp, Homo sapien
gagtctgaggggtcaggatatgtgggcttcaca

SEQ ID NO: 213935 - DNA, 33 bp, Homo sapien
cattccagcaaagggggcacaggataaaagcca

SEQ ID NO: 213936 - DNA, 33 bp, Homo sapien
cattccagcaaaggggtcacaggataaaagcca

SEQ ID NO: 213937 - DNA, 33 bp, Homo sapien
cgtagaataaatgctacggcggaaacaggtaca

SEQ ID NO: 213938 - DNA, 33 bp, Homo sapien
cgtagaataaatgctatggcggaaacaggtaca

SEQ ID NO: 213939 - DNA, 33 bp, Homo sapien
tgatagataattttgaggctaagtcctcatctc

SEQ ID NO: 213940 - DNA, 33 bp, Homo sapien
tgatagataattttgatgctaagtcctcatctc

SEQ ID NO: 213941 - DNA, 33 bp, Homo sapien
tacaactctttgaagccgagatagagcagttct

SEQ ID NO: 213942 - DNA, 33 bp, Homo sapien
tacaactctttgaagctgagatagagcagttct

SEQ ID NO: 213943 - DNA, 33 bp, Homo sapien
ctagaagtgacgctcaataacccaaagcaggcc

SEQ ID NO: 213944 - DNA, 33 bp, Homo sapien
ctagaagtgacgctcagtaacccaaagcaggcc

SEQ ID NO: 213945 - DNA, 33 bp, Homo sapien
caaagggtaccattaccaaagccaatgaaaaag

SEQ ID NO: 213946 - DNA, 33 bp, Homo sapien
caaagggtaccattactaaagccaatgaaaaag

SEQ ID NO: 213947 - DNA, 33 bp, Homo sapien
ttgcagttgagcaccagcaatcaaatgcttcca

SEQ ID NO: 213948 - DNA, 33 bp, Homo sapien
ttgcagttgagcaccatcaatcaaatgcttcca

SEQ ID NO: 213949 - DNA, 33 bp, Homo sapien
atagaatttgtctcccactgttatcagcaggtt

SEQ ID NO: 213950 - DNA, 33 bp, Homo sapien
atagaatttgtctcccgctgttatcagcaggtt

SEQ ID NO: 213951 - DNA, 33 bp, Homo sapien
accaagcagtctttaactcttcaatactaagaa

SEQ ID NO: 213952 - DNA, 33 bp, Homo sapien
accaagcagtctttaattcttcaatactaagaa

SEQ ID NO: 213953 - DNA, 33 bp, Homo sapien
ccataattgagcaagaggtcatggttatgtttc

SEQ ID NO: 213954 - DNA, 33 bp, Homo sapien
ccataattgagcaagatgtcatggttatgtttc

SEQ ID NO: 213955 - DNA, 33 bp, Homo sapien
agaaccaaactggtgaagagctgctgtggataa

SEQ ID NO: 213956 - DNA, 33 bp, Homo sapien
agaaccaaactggtgaggagctgctgtggataa

SEQ ID NO: 213957 - DNA, 33 bp, Homo sapien
ggtaatgtctatatgccattgatttcttaaaac

SEQ ID NO: 213958 - DNA, 33 bp, Homo sapien
ggtaatgtctatatgctattgatttcttaaaac

SEQ ID NO: 213959 - DNA, 33 bp, Homo sapien
aggtaccaagtaagccagcagaagagttaaggg

SEQ ID NO: 213960 - DNA, 33 bp, Homo sapien
aggtaccaagtaagccggcagaagagttaaggg

SEQ ID NO: 213961 - DNA, 33 bp, Homo sapien
aatgaagtgtcaagacaaaggcaaaacctgagc

SEQ ID NO: 213962 - DNA, 33 bp, Homo sapien
aatgaagtgtcaagacgaaggcaaaacctgagc

SEQ ID NO: 213963 - DNA, 33 bp, Homo sapien
tcaaaaaagctgacaaactcggtctgaaatgta

SEQ ID NO: 213964 - DNA, 33 bp, Homo sapien
tcaaaaaagctgacaagctcggtctgaaatgta

SEQ ID NO: 213965 - DNA, 33 bp, Homo sapien
cggtctgaaatgtagaaactgaaaaaagtgaaa

SEQ ID NO: 213966 - DNA, 33 bp, Homo sapien
cggtctgaaatgtagacactgaaaaaagtgaaa

SEQ ID NO: 213967 - DNA, 33 bp, Homo sapien
tgttcagcaagaaggaagttatgaggactgagg

SEQ ID NO: 213968 - DNA, 33 bp, Homo sapien
tgttcagcaagaaggacgttatgaggactgagg

SEQ ID NO: 213969 - DNA, 33 bp, Homo sapien
ttccttagataaaccacaaaggatacaatttta

SEQ ID NO: 213970 - DNA, 33 bp, Homo sapien
ttccttagataaaccagaaaggatacaatttta

SEQ ID NO: 213971 - DNA, 33 bp, Homo sapien
aaacactttctgtggacaaagataggctgcagg

SEQ ID NO: 213972 - DNA, 33 bp, Homo sapien
aaacactttctgtggataaagataggctgcagg

SEQ ID NO: 213973 - DNA, 33 bp, Homo sapien
attaggactagaagagacatttcgtgtgaaaat

SEQ ID NO: 213974 - DNA, 33 bp, Homo sapien
attaggactagaagagccatttcgtgtgaaaat

SEQ ID NO: 213975 - DNA, 33 bp, Homo sapien
ggtgtggattatgcaaaaaacttacagtcattt

SEQ ID NO: 213976 - DNA, 33 bp, Homo sapien
ggtgtggattatgcaagaaacttacagtcattt

SEQ ID NO: 213977 - DNA, 33 bp, Homo sapien
gctaaaatgccaatgaactgttattaatggtga

SEQ ID NO: 213978 - DNA, 33 bp, Homo sapien
gctaaaatgccaatgatctgttattaatggtga

SEQ ID NO: 213979 - DNA, 33 bp, Homo sapien
acactggaggtataaaaagagtgaacgattcaa

SEQ ID NO: 213980 - DNA, 33 bp, Homo sapien
acactggaggtataaagagagtgaacgattcaa

SEQ ID NO: 213981 - DNA, 33 bp, Homo sapien
aacatgtggacttaggcatctgggttctctatt

SEQ ID NO: 213982 - DNA, 33 bp, Homo sapien
aacatgtggacttaggtatctgggttctctatt

SEQ ID NO: 213983 - DNA, 33 bp, Homo sapien
aattatggtacatcaacataatggaattcaatt

SEQ ID NO: 213984 - DNA, 33 bp, Homo sapien
aattatggtacatcaatataatggaattcaatt

SEQ ID NO: 213985 - DNA, 33 bp, Homo sapien
aacaaaattatgtacaatatgatcccattttgt

SEQ ID NO: 213986 - DNA, 33 bp, Homo sapien
aacaaaattatgtacactatgatcccattttgt

SEQ ID NO: 213987 - DNA, 33 bp, Homo sapien
aaaagtacttccaaaccactggattaggaatgg

SEQ ID NO: 213988 - DNA, 33 bp, Homo sapien
aaaagtacttccaaactactggattaggaatgg

SEQ ID NO: 213989 - DNA, 33 bp, Homo sapien
cgacaaaacttttgcaacttgggtctgggtcca

SEQ ID NO: 213990 - DNA, 33 bp, Homo sapien
cgacaaaacttttgcatcttgggtctgggtcca

SEQ ID NO: 213991 - DNA, 33 bp, Homo sapien
ggatggaagcacatcaagtatgaaccagacaaa

SEQ ID NO: 213992 - DNA, 33 bp, Homo sapien
ggatggaagcacatcaggtatgaaccagacaaa

SEQ ID NO: 213993 - DNA, 33 bp, Homo sapien
atactatggtgattgccattggagcacgatgag

SEQ ID NO: 213994 - DNA, 33 bp, Homo sapien
atactatggtgattgcgattggagcacgatgag

SEQ ID NO: 213995 - DNA, 33 bp, Homo sapien
acagctcttgcatttccactatttggtatatgt

SEQ ID NO: 213996 - DNA, 33 bp, Homo sapien
acagctcttgcatttctactatttggtatatgt

SEQ ID NO: 213997 - DNA, 33 bp, Homo sapien
tctccaagtcttccaaagaacaataaagtctag

SEQ ID NO: 213998 - DNA, 33 bp, Homo sapien
tctccaagtcttccaatgaacaataaagtctag

SEQ ID NO: 213999 - DNA, 33 bp, Homo sapien
agattaagtgagataacagaaagtgcctaggat

SEQ ID NO: 214000 - DNA, 33 bp, Homo sapien
agattaagtgagataatagaaagtgcctaggat

SEQ ID NO: 214001 - DNA, 33 bp, Homo sapien
aaattaaaaatggcaaaagggaaggtggtaacc

SEQ ID NO: 214002 - DNA, 33 bp, Homo sapien
aaattaaaaatggcaagagggaaggtggtaacc

SEQ ID NO: 214003 - DNA, 33 bp, Homo sapien
gtgtttgttctttaacagagactgaagattaaa

SEQ ID NO: 214004 - DNA, 33 bp, Homo sapien
gtgtttgttctttaacggagactgaagattaaa

SEQ ID NO: 214005 - DNA, 33 bp, Homo sapien
caaatgaagctttaagacgctttatcctttact

SEQ ID NO: 214006 - DNA, 33 bp, Homo sapien
caaatgaagctttaaggcgctttatcctttact

SEQ ID NO: 214007 - DNA, 33 bp, Homo sapien
gcataatacacacacccgcttttcttcccagct

SEQ ID NO: 214008 - DNA, 33 bp, Homo sapien
gcataatacacacacctgcttttcttcccagct

SEQ ID NO: 214009 - DNA, 33 bp, Homo sapien
atgttctcattatttacgtggcttttgctttat

SEQ ID NO: 214010 - DNA, 33 bp, Homo sapien
atgttctcattatttatgtggcttttgctttat

SEQ ID NO: 214011 - DNA, 33 bp, Homo sapien
acatggatatgttgcacagaaggacaagacact

SEQ ID NO: 214012 - DNA, 33 bp, Homo sapien
acatggatatgttgcatagaaggacaagacact

SEQ ID NO: 214013 - DNA, 33 bp, Homo sapien
caccctgtgacccagcacttcaactcctaggta

SEQ ID NO: 214014 - DNA, 33 bp, Homo sapien
caccctgtgacccagctcttcaactcctaggta

SEQ ID NO: 214015 - DNA, 33 bp, Homo sapien
ccaaaatgtccatctgcagtaaaagagaatacc

SEQ ID NO: 214016 - DNA, 33 bp, Homo sapien
ccaaaatgtccatctgtagtaaaagagaatacc

SEQ ID NO: 214017 - DNA, 33 bp, Homo sapien
taggactatgaaaaagaacacattaaatgtata

SEQ ID NO: 214018 - DNA, 33 bp, Homo sapien
taggactatgaaaaaggacacattaaatgtata

SEQ ID NO: 214019 - DNA, 33 bp, Homo sapien
ctctgcattcaacaaactctccagagatttcat

SEQ ID NO: 214020 - DNA, 33 bp, Homo sapien
ctctgcattcaacaaagtctccagagatttcat

SEQ ID NO: 214021 - DNA, 33 bp, Homo sapien
accagggaatagagaccggacacaagtgatcaa

SEQ ID NO: 214022 - DNA, 33 bp, Homo sapien
accagggaatagagactggacacaagtgatcaa

SEQ ID NO: 214023 - DNA, 33 bp, Homo sapien
cattgtcttcatagtacaattgcaagctcaact

SEQ ID NO: 214024 - DNA, 33 bp, Homo sapien
cattgtcttcatagtataattgcaagctcaact

SEQ ID NO: 214025 - DNA, 33 bp, Homo sapien
gaataagagagtgtgaaatagagcgcttttgct

SEQ ID NO: 214026 - DNA, 33 bp, Homo sapien
gaataagagagtgtgagatagagcgcttttgct

SEQ ID NO: 214027 - DNA, 33 bp, Homo sapien
aagtaccccaaaataaagagtcagtttgcacct

SEQ ID NO: 214028 - DNA, 33 bp, Homo sapien
aagtaccccaaaataaggagtcagtttgcacct

SEQ ID NO: 214029 - DNA, 33 bp, Homo sapien
tgtactaatttacaccactaccctcagtataca

SEQ ID NO: 214030 - DNA, 33 bp, Homo sapien
tgtactaatttacaccgctaccctcagtataca

SEQ ID NO: 214031 - DNA, 33 bp, Homo sapien
tggaagccctgcactccatcccccgatacctca

SEQ ID NO: 214032 - DNA, 33 bp, Homo sapien
tggaagccctgcactctatcccccgatacctca

SEQ ID NO: 214033 - DNA, 33 bp, Homo sapien
tccctccagcaccatacgagttaggaagcctgt

SEQ ID NO: 214034 - DNA, 33 bp, Homo sapien
tccctccagcaccatatgagttaggaagcctgt

SEQ ID NO: 214035 - DNA, 33 bp, Homo sapien
ttggcaaaaccaatcaaagtagcattccaactc

SEQ ID NO: 214036 - DNA, 33 bp, Homo sapien
ttggcaaaaccaatcagagtagcattccaactc

SEQ ID NO: 214037 - DNA, 33 bp, Homo sapien
atggagcaaatgagaccgaatttgagcccagga

SEQ ID NO: 214038 - DNA, 33 bp, Homo sapien
atggagcaaatgagactgaatttgagcccagga

SEQ ID NO: 214039 - DNA, 33 bp, Homo sapien
tggtcataaaaatgtgcagttagcattaaaatc

SEQ ID NO: 214040 - DNA, 33 bp, Homo sapien
tggtcataaaaatgtggagttagcattaaaatc

SEQ ID NO: 214041 - DNA, 33 bp, Homo sapien
atattttggggtggcaaagtcacgtaggatgtg

SEQ ID NO: 214042 - DNA, 33 bp, Homo sapien
atattttggggtggcagagtcacgtaggatgtg

SEQ ID NO: 214043 - DNA, 33 bp, Homo sapien
tatggagagccacgtagaaatatgattggacaa

SEQ ID NO: 214044 - DNA, 33 bp, Homo sapien
tatggagagccacgtataaatatgattggacaa

SEQ ID NO: 214045 - DNA, 33 bp, Homo sapien
aatgaatagtttccaaattctgaagaattcagg

SEQ ID NO: 214046 - DNA, 33 bp, Homo sapien
aatgaatagtttccaatttctgaagaattcagg

SEQ ID NO: 214047 - DNA, 33 bp, Homo sapien
catgtgtttccacttacggaatcaaggaactca

SEQ ID NO: 214048 - DNA, 33 bp, Homo sapien
catgtgtttccacttatggaatcaaggaactca

SEQ ID NO: 214049 - DNA, 33 bp, Homo sapien
tttgtaaaagatgctaaaattagaagattcatt

SEQ ID NO: 214050 - DNA, 33 bp, Homo sapien
tttgtaaaagatgctagaattagaagattcatt

SEQ ID NO: 214051 - DNA, 33 bp, Homo sapien
tttatagtaaaatgccagagaaaaagggataaa

SEQ ID NO: 214052 - DNA, 33 bp, Homo sapien
tttatagtaaaatgcccgagaaaaagggataaa

SEQ ID NO: 214053 - DNA, 33 bp, Homo sapien
tgcaaccaatattaccacactacactttatctt

SEQ ID NO: 214054 - DNA, 33 bp, Homo sapien
tgcaaccaatattaccgcactacactttatctt

SEQ ID NO: 214055 - DNA, 33 bp, Homo sapien
taagaacattgatcaaaaggagggaaggtgcca

SEQ ID NO: 214056 - DNA, 33 bp, Homo sapien
taagaacattgatcaagaggagggaaggtgcca

SEQ ID NO: 214057 - DNA, 33 bp, Homo sapien
aaaattcatacaaaaaaatgctacataggaata

SEQ ID NO: 214058 - DNA, 33 bp, Homo sapien
aaaattcatacaaaaagatgctacataggaata

SEQ ID NO: 214059 - DNA, 33 bp, Homo sapien
ttcttctaccatggcaggaaccttgcaccattg

SEQ ID NO: 214060 - DNA, 33 bp, Homo sapien
ttcttctaccatggcatgaaccttgcaccattg

SEQ ID NO: 214061 - DNA, 33 bp, Homo sapien
gttaaaagacagctgcaaagtctacatggggaa

SEQ ID NO: 214062 - DNA, 33 bp, Homo sapien
gttaaaagacagctgcgaagtctacatggggaa

SEQ ID NO: 214063 - DNA, 33 bp, Homo sapien
gtatcagtttcaactacgcttataatttgtgct

SEQ ID NO: 214064 - DNA, 33 bp, Homo sapien
gtatcagtttcaactatgcttataatttgtgct

SEQ ID NO: 214065 - DNA, 33 bp, Homo sapien
cctcctgtgcataggaaaaactgagagaagccc

SEQ ID NO: 214066 - DNA, 33 bp, Homo sapien
cctcctgtgcataggagaaactgagagaagccc

SEQ ID NO: 214067 - DNA, 33 bp, Homo sapien
tcctttccaaacttcacaagcaggggagggagc

SEQ ID NO: 214068 - DNA, 33 bp, Homo sapien
tcctttccaaacttcagaagcaggggagggagc

SEQ ID NO: 214069 - DNA, 33 bp, Homo sapien
gagacagcatttctaacatttctaatagacact

SEQ ID NO: 214070 - DNA, 33 bp, Homo sapien
gagacagcatttctaagatttctaatagacact

SEQ ID NO: 214071 - DNA, 33 bp, Homo sapien
gtagtgcccaatcctacggtagctgagctggta

SEQ ID NO: 214072 - DNA, 33 bp, Homo sapien
gtagtgcccaatcctatggtagctgagctggta

SEQ ID NO: 214073 - DNA, 33 bp, Homo sapien
atcaagactctgcctaacctattgtagtgccca

SEQ ID NO: 214074 - DNA, 33 bp, Homo sapien
atcaagactctgcctatcctattgtagtgccca

SEQ ID NO: 214075 - DNA, 33 bp, Homo sapien
aagggcccagtcctagaagaattcaacacctgc

SEQ ID NO: 214076 - DNA, 33 bp, Homo sapien
aagggcccagtcctagcagaattcaacacctgc

SEQ ID NO: 214077 - DNA, 33 bp, Homo sapien
agtttttgtgtattgtcaactcaaagtgtctga

SEQ ID NO: 214078 - DNA, 33 bp, Homo sapien
agtttttgtgtattgtgaactcaaagtgtctga

SEQ ID NO: 214079 - DNA, 33 bp, Homo sapien
aacataagaattacagaagattctcagtgtaaa

SEQ ID NO: 214080 - DNA, 33 bp, Homo sapien
aacataagaattacagcagattctcagtgtaaa

SEQ ID NO: 214081 - DNA, 33 bp, Homo sapien
aagcattttggcacaacagcaaagctggtaagt

SEQ ID NO: 214082 - DNA, 33 bp, Homo sapien
aagcattttggcacaagagcaaagctggtaagt

SEQ ID NO: 214083 - DNA, 33 bp, Homo sapien
tctgggttctgaacacaactgataattaattcc

SEQ ID NO: 214084 - DNA, 33 bp, Homo sapien
tctgggttctgaacacgactgataattaattcc

SEQ ID NO: 214085 - DNA, 33 bp, Homo sapien
aaattctgtgctatcaatactggtaacatggac

SEQ ID NO: 214086 - DNA, 33 bp, Homo sapien
aaattctgtgctatcagtactggtaacatggac

SEQ ID NO: 214087 - DNA, 33 bp, Homo sapien
ccgctcttgccccttcacatcattatataggca

SEQ ID NO: 214088 - DNA, 33 bp, Homo sapien
ccgctcttgccccttcgcatcattatataggca

SEQ ID NO: 214089 - DNA, 33 bp, Homo sapien
tctcaaattttactcacatctgatttagatgaa

SEQ ID NO: 214090 - DNA, 33 bp, Homo sapien
tctcaaattttactcatatctgatttagatgaa

SEQ ID NO: 214091 - DNA, 33 bp, Homo sapien
ttttataccattgctaggactttaggtaaattg

SEQ ID NO: 214092 - DNA, 33 bp, Homo sapien
ttttataccattgctatgactttaggtaaattg

SEQ ID NO: 214093 - DNA, 33 bp, Homo sapien
aaaggctagattgccacgaataaaacactaagg

SEQ ID NO: 214094 - DNA, 33 bp, Homo sapien
aaaggctagattgccatgaataaaacactaagg

SEQ ID NO: 214095 - DNA, 33 bp, Homo sapien
atgaataaattgaagaaagtctgaagagagtta

SEQ ID NO: 214096 - DNA, 33 bp, Homo sapien
atgaataaattgaagagagtctgaagagagtta

SEQ ID NO: 214097 - DNA, 33 bp, Homo sapien
atgtcctataaccctaagatcctgtataatttt

SEQ ID NO: 214098 - DNA, 33 bp, Homo sapien
atgtcctataaccctatgatcctgtataatttt

SEQ ID NO: 214099 - DNA, 33 bp, Homo sapien
ggattgggagtttgaaagatctatggcttccat

SEQ ID NO: 214100 - DNA, 33 bp, Homo sapien
ggattgggagtttgaatgatctatggcttccat

SEQ ID NO: 214101 - DNA, 33 bp, Homo sapien
aaaggctttctgaagacactgcatttgcacatt

SEQ ID NO: 214102 - DNA, 33 bp, Homo sapien
aaaggctttctgaagagactgcatttgcacatt

SEQ ID NO: 214103 - DNA, 33 bp, Homo sapien
acctgcagtatatccccaacaggaatctccatc

SEQ ID NO: 214104 - DNA, 33 bp, Homo sapien
acctgcagtatatcccgaacaggaatctccatc

SEQ ID NO: 214105 - DNA, 33 bp, Homo sapien
cttcccagttctcagacggttcttggagcactg

SEQ ID NO: 214106 - DNA, 33 bp, Homo sapien
cttcccagttctcagatggttcttggagcactg

SEQ ID NO: 214107 - DNA, 33 bp, Homo sapien
tgctttttctaatatacagcagaacatgggtgg

SEQ ID NO: 214108 - DNA, 33 bp, Homo sapien
tgctttttctaatatagagcagaacatgggtgg

SEQ ID NO: 214109 - DNA, 33 bp, Homo sapien
cagtctcactttgtaggcatttgtaactgacct

SEQ ID NO: 214110 - DNA, 33 bp, Homo sapien
cagtctcactttgtagtcatttgtaactgacct

SEQ ID NO: 214111 - DNA, 33 bp, Homo sapien
ggtagaagtgcagtagcagtaatgacagaagag

SEQ ID NO: 214112 - DNA, 33 bp, Homo sapien
ggtagaagtgcagtagtagtaatgacagaagag

SEQ ID NO: 214113 - DNA, 33 bp, Homo sapien
gtcattttcctcagtacctcttcaaaatatttc

SEQ ID NO: 214114 - DNA, 33 bp, Homo sapien
gtcattttcctcagtatctcttcaaaatatttc

SEQ ID NO: 214115 - DNA, 33 bp, Homo sapien
acttggacagtcctacaaaatgtttaaacagat

SEQ ID NO: 214116 - DNA, 33 bp, Homo sapien
acttggacagtcctaccaaatgtttaaacagat

SEQ ID NO: 214117 - DNA, 33 bp, Homo sapien
agcaggcttgaagcaaagaagagccaacatttc

SEQ ID NO: 214118 - DNA, 33 bp, Homo sapien
agcaggcttgaagcaaggaagagccaacatttc

SEQ ID NO: 214119 - DNA, 33 bp, Homo sapien
agtggccaaaataatcaatttcctgagacaaac

SEQ ID NO: 214120 - DNA, 33 bp, Homo sapien
agtggccaaaataatcgatttcctgagacaaac

SEQ ID NO: 214121 - DNA, 33 bp, Homo sapien
ctagccaaaattctgaagacagtggccttgagc

SEQ ID NO: 214122 - DNA, 33 bp, Homo sapien
ctagccaaaattctgaggacagtggccttgagc

SEQ ID NO: 214123 - DNA, 33 bp, Homo sapien
ctccccactaatcacaagaaatgaatgacagca

SEQ ID NO: 214124 - DNA, 33 bp, Homo sapien
ctccccactaatcacaggaaatgaatgacagca

SEQ ID NO: 214125 - DNA, 33 bp, Homo sapien
tcatactgtattgtcagtatgattgtctgttta

SEQ ID NO: 214126 - DNA, 33 bp, Homo sapien
tcatactgtattgtcattatgattgtctgttta

SEQ ID NO: 214127 - DNA, 33 bp, Homo sapien
ctatgccagtgtttaacgattctgacatacctc

SEQ ID NO: 214128 - DNA, 33 bp, Homo sapien
ctatgccagtgtttaatgattctgacatacctc

SEQ ID NO: 214129 - DNA, 33 bp, Homo sapien
aaggtggtcggatcaacggattgcgggttccag

SEQ ID NO: 214130 - DNA, 33 bp, Homo sapien
aaggtggtcggatcaatggattgcgggttccag

SEQ ID NO: 214131 - DNA, 33 bp, Homo sapien
ccctccattaccttaactgcaagcatcccaccg

SEQ ID NO: 214132 - DNA, 33 bp, Homo sapien
ccctccattaccttaagtgcaagcatcccaccg

SEQ ID NO: 214133 - DNA, 33 bp, Homo sapien
aacacagcctcagtcaataatcttccacagtcc

SEQ ID NO: 214134 - DNA, 33 bp, Homo sapien
aacacagcctcagtcagtaatcttccacagtcc

SEQ ID NO: 214135 - DNA, 33 bp, Homo sapien
agtagccactactatcacaatatcattacatag

SEQ ID NO: 214136 - DNA, 33 bp, Homo sapien
agtagccactactatcgcaatatcattacatag

SEQ ID NO: 214137 - DNA, 33 bp, Homo sapien
gagcaggagtgcagaacggtgagaagaccagag

SEQ ID NO: 214138 - DNA, 33 bp, Homo sapien
gagcaggagtgcagaatggtgagaagaccagag

SEQ ID NO: 214139 - DNA, 33 bp, Homo sapien
taggagaatttcacaaaactattgagaaccaaa

SEQ ID NO: 214140 - DNA, 33 bp, Homo sapien
taggagaatttcacaagactattgagaaccaaa

SEQ ID NO: 214141 - DNA, 33 bp, Homo sapien
tgtaatcaacttgtcacctctggacgccatgat

SEQ ID NO: 214142 - DNA, 33 bp, Homo sapien
tgtaatcaacttgtcatctctggacgccatgat

SEQ ID NO: 214143 - DNA, 33 bp, Homo sapien
atactggatgccaaaactgtatgtcaatgagta

SEQ ID NO: 214144 - DNA, 33 bp, Homo sapien
atactggatgccaaaattgtatgtcaatgagta

SEQ ID NO: 214145 - DNA, 33 bp, Homo sapien
taggaattcaacaatagcatggaagagaagcta

SEQ ID NO: 214146 - DNA, 33 bp, Homo sapien
taggaattcaacaatatcatggaagagaagcta

SEQ ID NO: 214147 - DNA, 33 bp, Homo sapien
tagctatgaataagtaaatagctgggtgccccg

SEQ ID NO: 214148 - DNA, 33 bp, Homo sapien
tagctatgaataagtagatagctgggtgccccg

SEQ ID NO: 214149 - DNA, 33 bp, Homo sapien
taatccagctcttccaccctttcatccctggaa

SEQ ID NO: 214150 - DNA, 33 bp, Homo sapien
taatccagctcttccatcctttcatccctggaa

SEQ ID NO: 214151 - DNA, 33 bp, Homo sapien
tcatttcattgcttcaaaaacttttaatggctt

SEQ ID NO: 214152 - DNA, 33 bp, Homo sapien
tcatttcattgcttcataaacttttaatggctt

SEQ ID NO: 214153 - DNA, 33 bp, Homo sapien
aaattagcttcaaaaccttacatgaattgaaca

SEQ ID NO: 214154 - DNA, 33 bp, Homo sapien
aaattagcttcaaaactttacatgaattgaaca

SEQ ID NO: 214155 - DNA, 33 bp, Homo sapien
tttgatgtaaacaaagcctttgaggaaagaggt

SEQ ID NO: 214156 - DNA, 33 bp, Homo sapien
tttgatgtaaacaaaggctttgaggaaagaggt

SEQ ID NO: 214157 - DNA, 33 bp, Homo sapien
aagcagcagagtttaacagaaaaaacatagggt

SEQ ID NO: 214158 - DNA, 33 bp, Homo sapien
aagcagcagagtttaatagaaaaaacatagggt

SEQ ID NO: 214159 - DNA, 33 bp, Homo sapien
tcatggctactcttaggacactgaatttagaca

SEQ ID NO: 214160 - DNA, 33 bp, Homo sapien
tcatggctactcttagtacactgaatttagaca

SEQ ID NO: 214161 - DNA, 33 bp, Homo sapien
aaaagaaaaaaaagaaataggtgctaacagaca

SEQ ID NO: 214162 - DNA, 33 bp, Homo sapien
aaaagaaaaaaaagaagtaggtgctaacagaca

SEQ ID NO: 214163 - DNA, 33 bp, Homo sapien
ggtcttaaagaaggaaatgagcttagttttttt

SEQ ID NO: 214164 - DNA, 33 bp, Homo sapien
ggtcttaaagaaggaagtgagcttagttttttt

SEQ ID NO: 214165 - DNA, 33 bp, Homo sapien
ggtattcacctctggaactcactggaaatgttg

SEQ ID NO: 214166 - DNA, 33 bp, Homo sapien
ggtattcacctctggagctcactggaaatgttg

SEQ ID NO: 214167 - DNA, 33 bp, Homo sapien
gttcttcaggcctcaccgactagtggcttccat

SEQ ID NO: 214168 - DNA, 33 bp, Homo sapien
gttcttcaggcctcactgactagtggcttccat

SEQ ID NO: 214169 - DNA, 33 bp, Homo sapien
caagaagttggtttcacgactcatgtctctgca

SEQ ID NO: 214170 - DNA, 33 bp, Homo sapien
caagaagttggtttcaggactcatgtctctgca

SEQ ID NO: 214171 - DNA, 33 bp, Homo sapien
gtcctatgacaacaaaattgattcttccttcta

SEQ ID NO: 214172 - DNA, 33 bp, Homo sapien
gtcctatgacaacaaagttgattcttccttcta

SEQ ID NO: 214173 - DNA, 33 bp, Homo sapien
agcagcatgaaggccaaagtatatcttgaaaca

SEQ ID NO: 214174 - DNA, 33 bp, Homo sapien
agcagcatgaaggccagagtatatcttgaaaca

SEQ ID NO: 214175 - DNA, 33 bp, Homo sapien
catataccaaatattaagtgtcttgtctctctt

SEQ ID NO: 214176 - DNA, 33 bp, Homo sapien
catataccaaatattacgtgtcttgtctctctt

SEQ ID NO: 214177 - DNA, 33 bp, Homo sapien
gaacatttaaacagacactgagtcaagtcagaa

SEQ ID NO: 214178 - DNA, 33 bp, Homo sapien
gaacatttaaacagacgctgagtcaagtcagaa

SEQ ID NO: 214179 - DNA, 33 bp, Homo sapien
ggttgttgggagaattaaatgagatgatatatt

SEQ ID NO: 214180 - DNA, 33 bp, Homo sapien
ggttgttgggagaatttaatgagatgatatatt

SEQ ID NO: 214181 - DNA, 33 bp, Homo sapien
tgtgcctctttgtctacatgataggtaacaaat

SEQ ID NO: 214182 - DNA, 33 bp, Homo sapien
tgtgcctctttgtctatatgataggtaacaaat

SEQ ID NO: 214183 - DNA, 33 bp, Homo sapien
tatttacaaaaagttacattccctacagcactt

SEQ ID NO: 214184 - DNA, 33 bp, Homo sapien
tatttacaaaaagttagattccctacagcactt

SEQ ID NO: 214185 - DNA, 33 bp, Homo sapien
aagaaacagagacccacgcaagctaactcaagt

SEQ ID NO: 214186 - DNA, 33 bp, Homo sapien
aagaaacagagacccatgcaagctaactcaagt

SEQ ID NO: 214187 - DNA, 33 bp, Homo sapien
catattcataaactcacctgtgcggtttttgaa

SEQ ID NO: 214188 - DNA, 33 bp, Homo sapien
catattcataaactcatctgtgcggtttttgaa

SEQ ID NO: 214189 - DNA, 33 bp, Homo sapien
tgcattgttgtaattcacatcatgtttgcatct

SEQ ID NO: 214190 - DNA, 33 bp, Homo sapien
tgcattgttgtaattcgcatcatgtttgcatct

SEQ ID NO: 214191 - DNA, 33 bp, Homo sapien
ggcttaggagaggacacgaagtaggaaaatgac

SEQ ID NO: 214192 - DNA, 33 bp, Homo sapien
ggcttaggagaggacaggaagtaggaaaatgac

SEQ ID NO: 214193 - DNA, 33 bp, Homo sapien
ttctcactttgtctaacgttaaccgatttcaca

SEQ ID NO: 214194 - DNA, 33 bp, Homo sapien
ttctcactttgtctaaggttaaccgatttcaca

SEQ ID NO: 214195 - DNA, 33 bp, Homo sapien
gatgttcaagatgataaattttatgttacatat

SEQ ID NO: 214196 - DNA, 33 bp, Homo sapien
gatgttcaagatgatacattttatgttacatat

SEQ ID NO: 214197 - DNA, 33 bp, Homo sapien
gaaaagggaaattaacaggtacagagtttcaag

SEQ ID NO: 214198 - DNA, 33 bp, Homo sapien
gaaaagggaaattaacgggtacagagtttcaag

SEQ ID NO: 214199 - DNA, 33 bp, Homo sapien
ttctttttaaggctcaataaaattctcttgtag

SEQ ID NO: 214200 - DNA, 33 bp, Homo sapien
ttctttttaaggctcagtaaaattctcttgtag

SEQ ID NO: 214201 - DNA, 33 bp, Homo sapien
caaatgcccatcgatgaatgaatagataagcaa

SEQ ID NO: 214202 - DNA, 33 bp, Homo sapien
caaatgcccatcgatgtatgaatagataagcaa

SEQ ID NO: 214203 - DNA, 33 bp, Homo sapien
gataaactcaaacctaacattcaaaactgactg

SEQ ID NO: 214204 - DNA, 33 bp, Homo sapien
gataaactcaaacctaccattcaaaactgactg

SEQ ID NO: 214205 - DNA, 33 bp, Homo sapien
ttggctggattaacaacaaaaaatttctgccag

SEQ ID NO: 214206 - DNA, 33 bp, Homo sapien
ttggctggattaacaataaaaaatttctgccag

SEQ ID NO: 214207 - DNA, 33 bp, Homo sapien
tagaaaaagtgcctaaacttacttggtctcagt

SEQ ID NO: 214208 - DNA, 33 bp, Homo sapien
tagaaaaagtgcctaaccttacttggtctcagt

SEQ ID NO: 214209 - DNA, 33 bp, Homo sapien
aatattctgaaagcatcagcagaacactacatt

SEQ ID NO: 214210 - DNA, 33 bp, Homo sapien
aatattctgaaagcatgagcagaacactacatt

SEQ ID NO: 214211 - DNA, 33 bp, Homo sapien
ttcaaactgtcacttcacgcaagactttaaaac

SEQ ID NO: 214212 - DNA, 33 bp, Homo sapien
ttcaaactgtcacttcgcgcaagactttaaaac

SEQ ID NO: 214213 - DNA, 33 bp, Homo sapien
atgcttctttccccataacttctaggaatctat

SEQ ID NO: 214214 - DNA, 33 bp, Homo sapien
atgcttctttccccatgacttctaggaatctat

SEQ ID NO: 214215 - DNA, 33 bp, Homo sapien
aggccttcagtaggaacctaatgtgaagaaatt

SEQ ID NO: 214216 - DNA, 33 bp, Homo sapien
aggccttcagtaggaatctaatgtgaagaaatt

SEQ ID NO: 214217 - DNA, 33 bp, Homo sapien
cctgatcttgtctacactggacttctagcactt

SEQ ID NO: 214218 - DNA, 33 bp, Homo sapien
cctgatcttgtctacagtggacttctagcactt

SEQ ID NO: 214219 - DNA, 33 bp, Homo sapien
atctctaaagatgtcaaattttcagagaagagt

SEQ ID NO: 214220 - DNA, 33 bp, Homo sapien
atctctaaagatgtcagattttcagagaagagt

SEQ ID NO: 214221 - DNA, 33 bp, Homo sapien
gagaaaaagggcttagcatggagcactgagtaa

SEQ ID NO: 214222 - DNA, 33 bp, Homo sapien
gagaaaaagggcttaggatggagcactgagtaa

SEQ ID NO: 214223 - DNA, 33 bp, Homo sapien
tgaatagctctgtactcactacccaggtttaag

SEQ ID NO: 214224 - DNA, 33 bp, Homo sapien
tgaatagctctgtactgactacccaggtttaag

SEQ ID NO: 214225 - DNA, 33 bp, Homo sapien
taaaaaactcaaacaacgaggttcagagaactt

SEQ ID NO: 214226 - DNA, 33 bp, Homo sapien
taaaaaactcaaacaatgaggttcagagaactt

SEQ ID NO: 214227 - DNA, 33 bp, Homo sapien
aattatccaactctccagattcctactgaagtg

SEQ ID NO: 214228 - DNA, 33 bp, Homo sapien
aattatccaactctccggattcctactgaagtg

SEQ ID NO: 214229 - DNA, 33 bp, Homo sapien
atccagaaagtaagaaagtcttgaagccatggc

SEQ ID NO: 214230 - DNA, 33 bp, Homo sapien
atccagaaagtaagaaggtcttgaagccatggc

SEQ ID NO: 214231 - DNA, 33 bp, Homo sapien
cagaaatggcagtcccaaaaatcttaagcctca

SEQ ID NO: 214232 - DNA, 33 bp, Homo sapien
cagaaatggcagtcccgaaaatcttaagcctca

SEQ ID NO: 214233 - DNA, 33 bp, Homo sapien
tcagtttgaagacttcgaacctacactgctgtg

SEQ ID NO: 214234 - DNA, 33 bp, Homo sapien
tcagtttgaagacttctaacctacactgctgtg

SEQ ID NO: 214235 - DNA, 33 bp, Homo sapien
tgctgtgatggattcccaaagggtacccctact

SEQ ID NO: 214236 - DNA, 33 bp, Homo sapien
tgctgtgatggattcctaaagggtacccctact

SEQ ID NO: 214237 - DNA, 33 bp, Homo sapien
ggcctctgcggtttaagccagcagggggatggg

SEQ ID NO: 214238 - DNA, 33 bp, Homo sapien
ggcctctgcggtttaatccagcagggggatggg

SEQ ID NO: 214239 - DNA, 33 bp, Homo sapien
ttcctaagagcgccctaaacaagaattgaaaat

SEQ ID NO: 214240 - DNA, 33 bp, Homo sapien
ttcctaagagcgccctcaacaagaattgaaaat

SEQ ID NO: 214241 - DNA, 33 bp, Homo sapien
cattagcctggaactgaaactggttaagtccta

SEQ ID NO: 214242 - DNA, 33 bp, Homo sapien
cattagcctggaactggaactggttaagtccta

SEQ ID NO: 214243 - DNA, 33 bp, Homo sapien
gtaaaagcaaacagacaagcaactacttcaaaa

SEQ ID NO: 214244 - DNA, 33 bp, Homo sapien
gtaaaagcaaacagacgagcaactacttcaaaa

SEQ ID NO: 214245 - DNA, 33 bp, Homo sapien
acgcctttacataataaccacagcaccttttag

SEQ ID NO: 214246 - DNA, 33 bp, Homo sapien
acgcctttacataatatccacagcaccttttag

SEQ ID NO: 214247 - DNA, 33 bp, Homo sapien
aattctgcattgagaaactgaatagctgtcata

SEQ ID NO: 214248 - DNA, 33 bp, Homo sapien
aattctgcattgagaacctgaatagctgtcata

SEQ ID NO: 214249 - DNA, 33 bp, Homo sapien; identical to SEQ ID NO: 214247

SEQ ID NO: 214250 - DNA, 33 bp, Homo sapien; identical to SEQ ID NO: 214248

SEQ ID NO: 214251 - DNA, 33 bp, Homo sapien
agtttgtcatccctgacgaatgtaaagttacac

SEQ ID NO: 214252 - DNA, 33 bp, Homo sapien
agtttgtcatccctgatgaatgtaaagttacac

SEQ ID NO: 214253 - DNA, 33 bp, Homo sapien; identical to SEQ ID NO: 214251

SEQ ID NO: 214254 - DNA, 33 bp, Homo sapien; identical to SEQ ID NO: 214252

SEQ ID NO: 214255 - DNA, 33 bp, Homo sapien
aaaagatgagcaaagacggtaaaaagaagaaaa

SEQ ID NO: 214256 - DNA, 33 bp, Homo sapien
aaaagatgagcaaagatggtaaaaagaagaaaa

SEQ ID NO: 214257 - DNA, 33 bp, Homo sapien; identical to SEQ ID NO: 214255

SEQ ID NO: 214258 - DNA, 33 bp, Homo sapien; identical to SEQ ID NO: 214256

SEQ ID NO: 214259 - DNA, 33 bp, Homo sapien
gcaagagactatactacatatcccaggtgtata

SEQ ID NO: 214260 - DNA, 33 bp, Homo sapien
gcaagagactatactatatatcccaggtgtata

SEQ ID NO: 214261 - DNA, 33 bp, Homo sapien
aaaatgcattaaatgaataacagaatttctgtt

SEQ ID NO: 214262 - DNA, 33 bp, Homo sapien
aaaatgcattaaatgagtaacagaatttctgtt

SEQ ID NO: 214263 - DNA, 33 bp, Homo sapien
ttaagtaaatgtcaaccgaatgctcaaatctct

SEQ ID NO: 214264 - DNA, 33 bp, Homo sapien
ttaagtaaatgtcaactgaatgctcaaatctct

SEQ ID NO: 214265 - DNA, 33 bp, Homo sapien
actggttatgaaaacccatctgattttaaaaca

SEQ ID NO: 214266 - DNA, 33 bp, Homo sapien
actggttatgaaaacctatctgattttaaaaca

SEQ ID NO: 214267 - DNA, 33 bp, Homo sapien
actaactcacaataaaatattaaatgaaggaaa

SEQ ID NO: 214268 - DNA, 33 bp, Homo sapien
actaactcacaataaactattaaatgaaggaaa

SEQ ID NO: 214269 - DNA, 33 bp, Homo sapien
aaatctgcctttgcacactgttacattgaaagt

SEQ ID NO: 214270 - DNA, 33 bp, Homo sapien
aaatctgcctttgcactctgttacattgaaagt

SEQ ID NO: 214271 - DNA, 33 bp, Homo sapien
cttataattttaagtagccagcatttagtaaag

SEQ ID NO: 214272 - DNA, 33 bp, Homo sapien
cttataattttaagtatccagcatttagtaaag

SEQ ID NO: 214273 - DNA, 33 bp, Homo sapien
taacctgttcaagtcacatggcatttgcccaca

SEQ ID NO: 214274 - DNA, 33 bp, Homo sapien
taacctgttcaagtcagatggcatttgcccaca

SEQ ID NO: 214275 - DNA, 33 bp, Homo sapien
tatgttacttagataacactgcaagatccataa

SEQ ID NO: 214276 - DNA, 33 bp, Homo sapien
tatgttacttagataatactgcaagatccataa

SEQ ID NO: 214277 - DNA, 33 bp, Homo sapien
aaggagtggactggacccgaatccaacaatttt

SEQ ID NO: 214278 - DNA, 33 bp, Homo sapien
aaggagtggactggactcgaatccaacaatttt

SEQ ID NO: 214279 - DNA, 33 bp, Homo sapien
aatatggttgctaacaatagtttactttgagac

SEQ ID NO: 214280 - DNA, 33 bp, Homo sapien
aatatggttgctaacagtagtttactttgagac

SEQ ID NO: 214281 - DNA, 33 bp, Homo sapien
aatcttctcgggtcagaaggcttgtgatatttt

SEQ ID NO: 214282 - DNA, 33 bp, Homo sapien
aatcttctcgggtcaggaggcttgtgatatttt

SEQ ID NO: 214283 - DNA, 33 bp, Homo sapien
agatatgataagcgctaaataaaagaataacac

SEQ ID NO: 214284 - DNA, 33 bp, Homo sapien
agatatgataagcgctgaataaaagaataacac

SEQ ID NO: 214285 - DNA, 33 bp, Homo sapien
agatgtatttaactgcaaggatatctacaagtc

SEQ ID NO: 214286 - DNA, 33 bp, Homo sapien
agatgtatttaactgcgaggatatctacaagtc

SEQ ID NO: 214287 - DNA, 33 bp, Homo sapien
acatgtgtatggaaaaagtttagaaggctattt

SEQ ID NO: 214288 - DNA, 33 bp, Homo sapien
acatgtgtatggaaaaggtttagaaggctattt

SEQ ID NO: 214289 - DNA, 33 bp, Homo sapien
ttctgcctaataagtacgtcagtcatttaaaag

SEQ ID NO: 214290 - DNA, 33 bp, Homo sapien
ttctgcctaataagtatgtcagtcatttaaaag

SEQ ID NO: 214291 - DNA, 33 bp, Homo sapien
attaacaggactagaactgcgctatagtcacta

SEQ ID NO: 214292 - DNA, 33 bp, Homo sapien
attaacaggactagaattgcgctatagtcacta

SEQ ID NO: 214293 - DNA, 33 bp, Homo sapien
cctttccatgtgggtcacttcatgagattacct

SEQ ID NO: 214294 - DNA, 33 bp, Homo sapien
cctttccatgtgggtctcttcatgagattacct

SEQ ID NO: 214295 - DNA, 33 bp, Homo sapien
tatagcctggctatcaaaaagacaatgtattag

SEQ ID NO: 214296 - DNA, 33 bp, Homo sapien
tatagcctggctatcagaaagacaatgtattag

SEQ ID NO: 214297 - DNA, 33 bp, Homo sapien
atgataacagtacctacctcataggatttcaga

SEQ ID NO: 214298 - DNA, 33 bp, Homo sapien
atgataacagtacctagctcataggatttcaga

SEQ ID NO: 214299 - DNA, 33 bp, Homo sapien
tccagccactgaacaccacctgagattccccac

SEQ ID NO: 214300 - DNA, 33 bp, Homo sapien
tccagccactgaacacgacctgagattccccac

SEQ ID NO: 214301 - DNA, 33 bp, Homo sapien
ccagatgaaggttaataagggtatgactgaaga

SEQ ID NO: 214302 - DNA, 33 bp, Homo sapien
ccagatgaaggttaatgagggtatgactgaaga

SEQ ID NO: 214303 - DNA, 33 bp, Homo sapien
ttttgtagacaaaataaaacgtgtatcctgtaa

SEQ ID NO: 214304 - DNA, 33 bp, Homo sapien
ttttgtagacaaaatacaacgtgtatcctgtaa

SEQ ID NO: 214305 - DNA, 33 bp, Homo sapien
aatgaattagtggaggaagaatgaattagaagc

SEQ ID NO: 214306 - DNA, 33 bp, Homo sapien
aatgaattagtggagggagaatgaattagaagc

SEQ ID NO: 214307 - DNA, 33 bp, Homo sapien
gggaacaagagtttctcaatgttcaatggatgc

SEQ ID NO: 214308 - DNA, 33 bp, Homo sapien
gggaacaagagtttctgaatgttcaatggatgc

SEQ ID NO: 214309 - DNA, 33 bp, Homo sapien
ataagacactcactaaaggaaatctcagaagac

SEQ ID NO: 214310 - DNA, 33 bp, Homo sapien
ataagacactcactaagggaaatctcagaagac

SEQ ID NO: 214311 - DNA, 33 bp, Homo sapien
gaacaaagtaggcataagagtctaatttcctat

SEQ ID NO: 214312 - DNA, 33 bp, Homo sapien
gaacaaagtaggcatacgagtctaatttcctat

SEQ ID NO: 214313 - DNA, 33 bp, Homo sapien
actcttactagctgtacggttttaaaggaatgt

SEQ ID NO: 214314 - DNA, 33 bp, Homo sapien
actcttactagctgtatggttttaaaggaatgt

SEQ ID NO: 214315 - DNA, 33 bp, Homo sapien
cttcttgtccatttataacctgaacactttttt

SEQ ID NO: 214316 - DNA, 33 bp, Homo sapien
cttcttgtccatttattacctgaacactttttt

SEQ ID NO: 214317 - DNA, 33 bp, Homo sapien
ccaacactgacctactaagaaaataagaaataa

SEQ ID NO: 214318 - DNA, 33 bp, Homo sapien
ccaacactgacctactgagaaaataagaaataa

SEQ ID NO: 214319 - DNA, 33 bp, Homo sapien
gtagcattagttcataaagacatagagggaata

SEQ ID NO: 214320 - DNA, 33 bp, Homo sapien
gtagcattagttcatatagacatagagggaata

SEQ ID NO: 214321 - DNA, 33 bp, Homo sapien
taccaaaagaggatacaattgtcacaaaacaat

SEQ ID NO: 214322 - DNA, 33 bp, Homo sapien
taccaaaagaggatacgattgtcacaaaacaat

SEQ ID NO: 214323 - DNA, 33 bp, Homo sapien
acaaagcgcacaagtgaatttttactcaaagta

SEQ ID NO: 214324 - DNA, 33 bp, Homo sapien
acaaagcgcacaagtgcatttttactcaaagta

SEQ ID NO: 214325 - DNA, 33 bp, Homo sapien
aaagcatatgatagccaaagaaaaactaaaaag

SEQ ID NO: 214326 - DNA, 33 bp, Homo sapien
aaagcatatgatagccgaagaaaaactaaaaag

SEQ ID NO: 214327 - DNA, 33 bp, Homo sapien
attttgcttccaggagccattgaatataaatac

SEQ ID NO: 214328 - DNA, 33 bp, Homo sapien
attttgcttccaggagtcattgaatataaatac

SEQ ID NO: 214329 - DNA, 33 bp, Homo sapien
gaaacttaagagaaaaataaccaccgtgaaatg

SEQ ID NO: 214330 - DNA, 33 bp, Homo sapien
gaaacttaagagaaaattaaccaccgtgaaatg

SEQ ID NO: 214331 - DNA, 33 bp, Homo sapien
ttaggggcaaaatttgcagaaggatactctttt

SEQ ID NO: 214332 - DNA, 33 bp, Homo sapien
ttaggggcaaaatttggagaaggatactctttt

SEQ ID NO: 214333 - DNA, 33 bp, Homo sapien
tagactatcaatttaccataacgatttgtgggg

SEQ ID NO: 214334 - DNA, 33 bp, Homo sapien
tagactatcaatttactataacgatttgtgggg

SEQ ID NO: 214335 - DNA, 33 bp, Homo sapien
ttacattcttggtcacagtaattgggggcagaa

SEQ ID NO: 214336 - DNA, 33 bp, Homo sapien
ttacattcttggtcacggtaattgggggcagaa

SEQ ID NO: 214337 - DNA, 33 bp, Homo sapien
ctcttccactgggaataagaagggccaccagca

SEQ ID NO: 214338 - DNA, 33 bp, Homo sapien
ctcttccactgggaatgagaagggccaccagca

SEQ ID NO: 214339 - DNA, 33 bp, Homo sapien
ttaaaatagcagactcaataggaaaaaggaacc

SEQ ID NO: 214340 - DNA, 33 bp, Homo sapien
ttaaaatagcagactcgataggaaaaaggaacc

SEQ ID NO: 214341 - DNA, 33 bp, Homo sapien
agtatactgtgccatcaagcaaaaattgtctgc

SEQ ID NO: 214342 - DNA, 33 bp, Homo sapien
agtatactgtgccatcgagcaaaaattgtctgc

SEQ ID NO: 214343 - DNA, 33 bp, Homo sapien
tctggataggtgttcaatattttgacaataaaa

SEQ ID NO: 214344 - DNA, 33 bp, Homo sapien
tctggataggtgttcagtattttgacaataaaa

SEQ ID NO: 214345 - DNA, 33 bp, Homo sapien
ttctttttttaatagcacttctacttggaattc

SEQ ID NO: 214346 - DNA, 33 bp, Homo sapien
ttctttttttaatagcgcttctacttggaattc

SEQ ID NO: 214347 - DNA, 33 bp, Homo sapien
atgctaaagctcagagaaacaacagcaggattt

SEQ ID NO: 214348 - DNA, 33 bp, Homo sapien
atgctaaagctcagaggaacaacagcaggattt

SEQ ID NO: 214349 - DNA, 33 bp, Homo sapien
tactaaggttaccttccaatgaccctgaatgta

SEQ ID NO: 214350 - DNA, 33 bp, Homo sapien
tactaaggttaccttctaatgaccctgaatgta

SEQ ID NO: 214351 - DNA, 33 bp, Homo sapien
caactgaaagtggaagcctcaaattcagagact

SEQ ID NO: 214352 - DNA, 33 bp, Homo sapien
caactgaaagtggaaggctcaaattcagagact

SEQ ID NO: 214353 - DNA, 33 bp, Homo sapien
ttccagaactctgagaccatacatttctgtggc

SEQ ID NO: 214354 - DNA, 33 bp, Homo sapien
ttccagaactctgagatcatacatttctgtggc

SEQ ID NO: 214355 - DNA, 33 bp, Homo sapien
tccaaagttcaatcaaacccttactaaatcagt

SEQ ID NO: 214356 - DNA, 33 bp, Homo sapien
tccaaagttcaatcaagcccttactaaatcagt

SEQ ID NO: 214357 - DNA, 33 bp, Homo sapien
tagacatttggaaatacgggaccatcaaggtga

SEQ ID NO: 214358 - DNA, 33 bp, Homo sapien
tagacatttggaaatatgggaccatcaaggtga

SEQ ID NO: 214359 - DNA, 33 bp, Homo sapien
gagtgaagaggaatgacagtaatggtgtcaaaa

SEQ ID NO: 214360 - DNA, 33 bp, Homo sapien
gagtgaagaggaatgagagtaatggtgtcaaaa

SEQ ID NO: 214361 - DNA, 33 bp, Homo sapien
catatggaaatgcaaacgactctgattaaccta

SEQ ID NO: 214362 - DNA, 33 bp, Homo sapien
catatggaaatgcaaaggactctgattaaccta

SEQ ID NO: 214363 - DNA, 33 bp, Homo sapien
tgtctgcatttacttacgtcttcttcaatgtct

SEQ ID NO: 214364 - DNA, 33 bp, Homo sapien
tgtctgcatttacttaggtcttcttcaatgtct

SEQ ID NO: 214365 - DNA, 33 bp, Homo sapien
tttgctgtctctttaaactaggagaacaacatg

SEQ ID NO: 214366 - DNA, 33 bp, Homo sapien
tttgctgtctctttaagctaggagaacaacatg

SEQ ID NO: 214367 - DNA, 33 bp, Homo sapien
cctgtgaccctgggaacgacagatcaaatcaca

SEQ ID NO: 214368 - DNA, 33 bp, Homo sapien
cctgtgaccctgggaatgacagatcaaatcaca

SEQ ID NO: 214369 - DNA, 33 bp, Homo sapien
acaatccacagtttcacgcacacactgagaatc

SEQ ID NO: 214370 - DNA, 33 bp, Homo sapien
acaatccacagtttcatgcacacactgagaatc

SEQ ID NO: 214371 - DNA, 33 bp, Homo sapien
tgctgaggttgttaagacctatggttagaatga

SEQ ID NO: 214372 - DNA, 33 bp, Homo sapien
tgctgaggttgttaagtcctatggttagaatga

SEQ ID NO: 214373 - DNA, 33 bp, Homo sapien
ctgggtactcttcctgcatcttgctgatgagga

SEQ ID NO: 214374 - DNA, 33 bp, Homo sapien
ctgggtactcttcctgtatcttgctgatgagga

SEQ ID NO: 214375 - DNA, 33 bp, Homo sapien
gggtttccagatggctcactctttggatcgggg

SEQ ID NO: 214376 - DNA, 33 bp, Homo sapien
gggtttccagatggcttactctttggatcgggg

SEQ ID NO: 214377 - DNA, 33 bp, Homo sapien
ttggatgataagattacaggtggttgttaattt

SEQ ID NO: 214378 - DNA, 33 bp, Homo sapien
ttggatgataagattataggtggttgttaattt

SEQ ID NO: 214379 - DNA, 33 bp, Homo sapien
gtacagcgctcactcaacgatagtgttcacatg

SEQ ID NO: 214380 - DNA, 33 bp, Homo sapien
gtacagcgctcactcagcgatagtgttcacatg

SEQ ID NO: 214381 - DNA, 33 bp, Homo sapien
cgggcacatttcttacacgttcgctgagaagcc

SEQ ID NO: 214382 - DNA, 33 bp, Homo sapien
cgggcacatttcttacccgttcgctgagaagcc

SEQ ID NO: 214383 - DNA, 33 bp, Homo sapien
ttaatttgcacaggaacagtttccatctctgga

SEQ ID NO: 214384 - DNA, 33 bp, Homo sapien
ttaatttgcacaggaatagtttccatctctgga

SEQ ID NO: 214385 - DNA, 33 bp, Homo sapien
tatatacgatacttcaataaaatgcataataaa

SEQ ID NO: 214386 - DNA, 33 bp, Homo sapien
tatatacgatacttcagtaaaatgcataataaa

SEQ ID NO: 214387 - DNA, 33 bp, Homo sapien
gtagaaaataagccaaaggatttggaagaacat

SEQ ID NO: 214388 - DNA, 33 bp, Homo sapien
gtagaaaataagccaagggatttggaagaacat

SEQ ID NO: 214389 - DNA, 33 bp, Homo sapien
ttctcacttgcagaaacgtaagtataggttttt

SEQ ID NO: 214390 - DNA, 33 bp, Homo sapien
ttctcacttgcagaaatgtaagtataggttttt

SEQ ID NO: 214391 - DNA, 33 bp, Homo sapien
ctcttctatcatgaaaagggcagcgatttgtct

SEQ ID NO: 214392 - DNA, 33 bp, Homo sapien
ctcttctatcatgaaacgggcagcgatttgtct

SEQ ID NO: 214393 - DNA, 33 bp, Homo sapien; identical to SEQ ID NO: 214391

SEQ ID NO: 214394 - DNA, 33 bp, Homo sapien; identical to SEQ ID NO: 214392

SEQ ID NO: 214395 - DNA, 33 bp, Homo sapien
tgctggaaaataaaccgagaaggatgataagga

SEQ ID NO: 214396 - DNA, 33 bp, Homo sapien
tgctggaaaataaacctagaaggatgataagga

SEQ ID NO: 214397 - DNA, 33 bp, Homo sapien
ataaaagtgaaatcaacaattgactgaggcaaa

SEQ ID NO: 214398 - DNA, 33 bp, Homo sapien
ataaaagtgaaatcaataattgactgaggcaaa

SEQ ID NO: 214399 - DNA, 33 bp, Homo sapien
tgatggagcaacgtaacgtgcctgtatggggag

SEQ ID NO: 214400 - DNA, 33 bp, Homo sapien
tgatggagcaacgtaatgtgcctgtatggggag

SEQ ID NO: 214401 - DNA, 33 bp, Homo sapien
cacagaaggcaacacaaggatagaccatgggga

SEQ ID NO: 214402 - DNA, 33 bp, Homo sapien
cacagaaggcaacacagggatagaccatgggga

SEQ ID NO: 214403 - DNA, 33 bp, Homo sapien
tgttcaagatcccacaatgactcttactttccc

SEQ ID NO: 214404 - DNA, 33 bp, Homo sapien
tgttcaagatcccacagtgactcttactttccc

SEQ ID NO: 214405 - DNA, 33 bp, Homo sapien
gattgatattggcttaacactgaatttttaggg

SEQ ID NO: 214406 - DNA, 33 bp, Homo sapien
gattgatattggcttatcactgaatttttaggg

SEQ ID NO: 214407 - DNA, 33 bp, Homo sapien
gagatgagtccagaaaagtagattgtgagcttt

SEQ ID NO: 214408 - DNA, 33 bp, Homo sapien
gagatgagtccagaaaggtagattgtgagcttt

SEQ ID NO: 214409 - DNA, 33 bp, Homo sapien
gtattattcttacacagtattttcatgcttagt

SEQ ID NO: 214410 - DNA, 33 bp, Homo sapien
gtattattcttacacattattttcatgcttagt

SEQ ID NO: 214411 - DNA, 33 bp, Homo sapien
taaccatgaacaaaacagaacagtctacacgat

SEQ ID NO: 214412 - DNA, 33 bp, Homo sapien
taaccatgaacaaaacggaacagtctacacgat

SEQ ID NO: 214413 - DNA, 33 bp, Homo sapien
caggaaatgacaaaggaacaaaaatattttaat

SEQ ID NO: 214414 - DNA, 33 bp, Homo sapien
caggaaatgacaaagggacaaaaatattttaat

SEQ ID NO: 214415 - DNA, 33 bp, Homo sapien
ctaaaatttgccaaaaaagtctcacctttcagc

SEQ ID NO: 214416 - DNA, 33 bp, Homo sapien
ctaaaatttgccaaaagagtctcacctttcagc

SEQ ID NO: 214417 - DNA, 33 bp, Homo sapien
ttaatcagttgttgcacagaaatgtaattagtg

SEQ ID NO: 214418 - DNA, 33 bp, Homo sapien
ttaatcagttgttgcatagaaatgtaattagtg

SEQ ID NO: 214419 - DNA, 33 bp, Homo sapien
gacaaagacaatcttaaaggttaattagcagag

SEQ ID NO: 214420 - DNA, 33 bp, Homo sapien
gacaaagacaatcttacaggttaattagcagag

SEQ ID NO: 214421 - DNA, 33 bp, Homo sapien
taattttggtaaataacctcttcagactgcagt

SEQ ID NO: 214422 - DNA, 33 bp, Homo sapien
taattttggtaaataatctcttcagactgcagt

SEQ ID NO: 214423 - DNA, 33 bp, Homo sapien
ttacaatctttcataactaaaggacaatttaaa

SEQ ID NO: 214424 - DNA, 33 bp, Homo sapien
ttacaatctttcataattaaaggacaatttaaa

SEQ ID NO: 214425 - DNA, 33 bp, Homo sapien
aaaatgtgttcagcataagttggaaatacagtg

SEQ ID NO: 214426 - DNA, 33 bp, Homo sapien
aaaatgtgttcagcatgagttggaaatacagtg

SEQ ID NO: 214427 - DNA, 33 bp, Homo sapien
ggatattgctggtgtactaaacaggctttctcc

SEQ ID NO: 214428 - DNA, 33 bp, Homo sapien
ggatattgctggtgtattaaacaggctttctcc

SEQ ID NO: 214429 - DNA, 33 bp, Homo sapien
gccatttcacttttcaggggcactgttattaga

SEQ ID NO: 214430 - DNA, 33 bp, Homo sapien
gccatttcacttttcatgggcactgttattaga

SEQ ID NO: 214431 - DNA, 33 bp, Homo sapien
aagggagggaagagagcctattgagaggcaaga

SEQ ID NO: 214432 - DNA, 33 bp, Homo sapien
aagggagggaagagagtctattgagaggcaaga

SEQ ID NO: 214433 - DNA, 33 bp, Homo sapien
gggcagtgtggctagaacagagtgcatgaagaa

SEQ ID NO: 214434 - DNA, 33 bp, Homo sapien
gggcagtgtggctagagcagagtgcatgaagaa

SEQ ID NO: 214435 - DNA, 33 bp, Homo sapien
attagttcctgacttacagtggatagatatgtg

SEQ ID NO: 214436 - DNA, 33 bp, Homo sapien
attagttcctgacttatagtggatagatatgtg

SEQ ID NO: 214437 - DNA, 33 bp, Homo sapien
cctctgtcttcttggcactctgtcaattctctt

SEQ ID NO: 214438 - DNA, 33 bp, Homo sapien
cctctgtcttcttggccctctgtcaattctctt

SEQ ID NO: 214439 - DNA, 33 bp, Homo sapien
aatacatcatatattaagctgttcttgcattgc

SEQ ID NO: 214440 - DNA, 33 bp, Homo sapien
aatacatcatatattaggctgttcttgcattgc

SEQ ID NO: 214441 - DNA, 33 bp, Homo sapien
aagcagatacagcaaacatgaactaattggctg

SEQ ID NO: 214442 - DNA, 33 bp, Homo sapien
aagcagatacagcaaagatgaactaattggctg

SEQ ID NO: 214443 - DNA, 33 bp, Homo sapien
gtgtttgttcctagtgcatcaataattagacga

SEQ ID NO: 214444 - DNA, 33 bp, Homo sapien
gtgtttgttcctagtggatcaataattagacga

SEQ ID NO: 214445 - DNA, 33 bp, Homo sapien
aaaatctctgattatacgtgtctcctaagctct

SEQ ID NO: 214446 - DNA, 33 bp, Homo sapien
aaaatctctgattatatgtgtctcctaagctct

SEQ ID NO: 214447 - DNA, 33 bp, Homo sapien
acagaatcaggatgctaaacagatctgcctaaa

SEQ ID NO: 214448 - DNA, 33 bp, Homo sapien
acagaatcaggatgctgaacagatctgcctaaa

SEQ ID NO: 214449 - DNA, 33 bp, Homo sapien
tgcctccattgaaaataaatccagatgttttaa

SEQ ID NO: 214450 - DNA, 33 bp, Homo sapien
tgcctccattgaaaatgaatccagatgttttaa

SEQ ID NO: 214451 - DNA, 33 bp, Homo sapien
tttgctgaccaaaaacgaaaggtatgtgtagga

SEQ ID NO: 214452 - DNA, 33 bp, Homo sapien
tttgctgaccaaaaactaaaggtatgtgtagga

SEQ ID NO: 214453 - DNA, 33 bp, Homo sapien
tgatagggttgattcacaaatatgactctttta

SEQ ID NO: 214454 - DNA, 33 bp, Homo sapien
tgatagggttgattcataaatatgactctttta

SEQ ID NO: 214455 - DNA, 33 bp, Homo sapien
gcaactgatgaggccacaagagaactagaaaaa

SEQ ID NO: 214456 - DNA, 33 bp, Homo sapien
gcaactgatgaggccagaagagaactagaaaaa

SEQ ID NO: 214457 - DNA, 33 bp, Homo sapien
ttggacttccagtttccagaagtatgagaaaat

SEQ ID NO: 214458 - DNA, 33 bp, Homo sapien
ttggacttccagtttctagaagtatgagaaaat

SEQ ID NO: 214459 - DNA, 33 bp, Homo sapien
caagcttcttgctcaccagatgagagatgggga

SEQ ID NO: 214460 - DNA, 33 bp, Homo sapien
caagcttcttgctcacgagatgagagatgggga

SEQ ID NO: 214461 - DNA, 33 bp, Homo sapien
accacagagagacaaacaggaagttacaaaagc

SEQ ID NO: 214462 - DNA, 33 bp, Homo sapien
accacagagagacaaataggaagttacaaaagc

SEQ ID NO: 214463 - DNA, 33 bp, Homo sapien
ttagtattcaaattgacgttaaattcttttacc

SEQ ID NO: 214464 - DNA, 33 bp, Homo sapien
ttagtattcaaattgatgttaaattcttttacc

SEQ ID NO: 214465 - DNA, 33 bp, Homo sapien
gtttcctattttgcggcaaatcgtttcacattg

SEQ ID NO: 214466 - DNA, 33 bp, Homo sapien
gtttcctattttgcggtaaatcgtttcacattg

SEQ ID NO: 214467 - DNA, 33 bp, Homo sapien
cagaagtagttaactcacagaatcataaatctt

SEQ ID NO: 214468 - DNA, 33 bp, Homo sapien
cagaagtagttaactcccagaatcataaatctt

SEQ ID NO: 214469 - DNA, 33 bp, Homo sapien
tgtatttgcctttagaaggaggataacagtaac

SEQ ID NO: 214470 - DNA, 33 bp, Homo sapien
tgtatttgcctttagagggaggataacagtaac

SEQ ID NO: 214471 - DNA, 33 bp, Homo sapien
tattactcaagagggaccatttttaccatctgg

SEQ ID NO: 214472 - DNA, 33 bp, Homo sapien
tattactcaagagggatcatttttaccatctgg

SEQ ID NO: 214473 - DNA, 33 bp, Homo sapien
ataaagaacagaacgagctctgaaagccaggaa

SEQ ID NO: 214474 - DNA, 33 bp, Homo sapien
ataaagaacagaacgatctctgaaagccaggaa

SEQ ID NO: 214475 - DNA, 33 bp, Homo sapien
ccactttgaaaggttacgttgctcatacattat

SEQ ID NO: 214476 - DNA, 33 bp, Homo sapien
ccactttgaaaggttaggttgctcatacattat

SEQ ID NO: 214477 - DNA, 33 bp, Homo sapien
ggtaaaatgggccacagaacattagatctgagc

SEQ ID NO: 214478 - DNA, 33 bp, Homo sapien
ggtaaaatgggccacataacattagatctgagc

SEQ ID NO: 214479 - DNA, 33 bp, Homo sapien
atgtatgtaaagtaaccgtaaatagcaggttct

SEQ ID NO: 214480 - DNA, 33 bp, Homo sapien
atgtatgtaaagtaactgtaaatagcaggttct

SEQ ID NO: 214481 - DNA, 33 bp, Homo sapien
gacttcaatcctatcaacagaattattagatac

SEQ ID NO: 214482 - DNA, 33 bp, Homo sapien
gacttcaatcctatcatcagaattattagatac

SEQ ID NO: 214483 - DNA, 33 bp, Homo sapien
gaaccattttggtcaactagagacagattaccc

SEQ ID NO: 214484 - DNA, 33 bp, Homo sapien
gaaccattttggtcaattagagacagattaccc

SEQ ID NO: 214485 - DNA, 33 bp, Homo sapien
acctcttattccattcaccattatatttccagt

SEQ ID NO: 214486 - DNA, 33 bp, Homo sapien
acctcttattccattcgccattatatttccagt

SEQ ID NO: 214487 - DNA, 33 bp, Homo sapien
cccgagcaggccaatacaatcacatctcagctc

SEQ ID NO: 214488 - DNA, 33 bp, Homo sapien
cccgagcaggccaatataatcacatctcagctc

SEQ ID NO: 214489 - DNA, 33 bp, Homo sapien
ttggtgatcaacctgcactgttttacttaaccc

SEQ ID NO: 214490 - DNA, 33 bp, Homo sapien
ttggtgatcaacctgcgctgttttacttaaccc

SEQ ID NO: 214491 - DNA, 33 bp, Homo sapien
ccacccaatgtggcaacttctgtgttcttccca

SEQ ID NO: 214492 - DNA, 33 bp, Homo sapien
ccacccaatgtggcaatttctgtgttcttccca

SEQ ID NO: 214493 - DNA, 33 bp, Homo sapien
gtattctgctaaggagcctacaagacagaggcc

SEQ ID NO: 214494 - DNA, 33 bp, Homo sapien
gtattctgctaaggagtctacaagacagaggcc

SEQ ID NO: 214495 - DNA, 33 bp, Homo sapien
gtaagaaactgcattaaaatattccaaaggcat

SEQ ID NO: 214496 - DNA, 33 bp, Homo sapien
gtaagaaactgcattagaatattccaaaggcat

SEQ ID NO: 214497 - DNA, 33 bp, Homo sapien
ttcccaaccttggagaacttacagacatggatt

SEQ ID NO: 214498 - DNA, 33 bp, Homo sapien
ttcccaaccttggagagcttacagacatggatt

SEQ ID NO: 214499 - DNA, 33 bp, Homo sapien
tcacttttgaattttaaccgaatccactgtgac

SEQ ID NO: 214500 - DNA, 33 bp, Homo sapien
tcacttttgaattttagccgaatccactgtgac

SEQ ID NO: 214501 - DNA, 33 bp, Homo sapien
aaaacttctttggtcccctcacctaaatgtgaa

SEQ ID NO: 214502 - DNA, 33 bp, Homo sapien
aaaacttctttggtcctctcacctaaatgtgaa

SEQ ID NO: 214503 - DNA, 33 bp, Homo sapien
cttatgaggacagaggaacttctgaggatagct

SEQ ID NO: 214504 - DNA, 33 bp, Homo sapien
cttatgaggacagagggacttctgaggatagct

SEQ ID NO: 214505 - DNA, 33 bp, Homo sapien
cagtcactagctgaagcaaagcaatgtagctcc

SEQ ID NO: 214506 - DNA, 33 bp, Homo sapien
cagtcactagctgaaggaaagcaatgtagctcc

SEQ ID NO: 214507 - DNA, 33 bp, Homo sapien
tctgcatttcaattcaaggccaaggtcccttct

SEQ ID NO: 214508 - DNA, 33 bp, Homo sapien
tctgcatttcaattcagggccaaggtcccttct

SEQ ID NO: 214509 - DNA, 33 bp, Homo sapien
ctgccagtcatcatcccgcctacaagactggct

SEQ ID NO: 214510 - DNA, 33 bp, Homo sapien
ctgccagtcatcatcctgcctacaagactggct

SEQ ID NO: 214511 - DNA, 33 bp, Homo sapien
cttggctctacaattgaatgatcttgggtaact

SEQ ID NO: 214512 - DNA, 33 bp, Homo sapien
cttggctctacaattgtatgatcttgggtaact

SEQ ID NO: 214513 - DNA, 33 bp, Homo sapien
tttatatgcatttatcacaatactatttctgca

SEQ ID NO: 214514 - DNA, 33 bp, Homo sapien
tttatatgcatttatcgcaatactatttctgca

SEQ ID NO: 214515 - DNA, 33 bp, Homo sapien
catatatacagttaccaaatgcttctttggagt

SEQ ID NO: 214516 - DNA, 33 bp, Homo sapien
catatatacagttaccgaatgcttctttggagt

SEQ ID NO: 214517 - DNA, 33 bp, Homo sapien
gaagcaaaaagataaaccaagagtgaagatggg

SEQ ID NO: 214518 - DNA, 33 bp, Homo sapien
gaagcaaaaagataaatcaagagtgaagatggg

SEQ ID NO: 214519 - DNA, 33 bp, Homo sapien
atatacttgccaataacagcaatgaagaaggac

SEQ ID NO: 214520 - DNA, 33 bp, Homo sapien
atatacttgccaataatagcaatgaagaaggac

SEQ ID NO: 214521 - DNA, 33 bp, Homo sapien
tcattcctttcatggaaccatcaacctctctgt

SEQ ID NO: 214522 - DNA, 33 bp, Homo sapien
tcattcctttcatggacccatcaacctctctgt

SEQ ID NO: 214523 - DNA, 33 bp, Homo sapien
tacctgaccagtccaaaacctattgctggaagg

SEQ ID NO: 214524 - DNA, 33 bp, Homo sapien
tacctgaccagtccaacacctattgctggaagg

SEQ ID NO: 214525 - DNA, 33 bp, Homo sapien
tatcaggtgtgggcacagaaaattaagctgtct

SEQ ID NO: 214526 - DNA, 33 bp, Homo sapien
tatcaggtgtgggcacggaaaattaagctgtct

SEQ ID NO: 214527 - DNA, 33 bp, Homo sapien
aatgggcatacaacatcatgacttaatatacgt

SEQ ID NO: 214528 - DNA, 33 bp, Homo sapien
aatgggcatacaacatgatgacttaatatacgt

SEQ ID NO: 214529 - DNA, 33 bp, Homo sapien
gatcgcaatgtatctcaacctgaccaataaata

SEQ ID NO: 214530 - DNA, 33 bp, Homo sapien
gatcgcaatgtatctcgacctgaccaataaata

SEQ ID NO: 214531 - DNA, 33 bp, Homo sapien
tcttttccctaccttcaagccttcaaattatgt

SEQ ID NO: 214532 - DNA, 33 bp, Homo sapien
tcttttccctaccttcgagccttcaaattatgt

SEQ ID NO: 214533 - DNA, 33 bp, Homo sapien
tgtttttgtcccataacgtgagaagagtagaag

SEQ ID NO: 214534 - DNA, 33 bp, Homo sapien
tgtttttgtcccataatgtgagaagagtagaag

SEQ ID NO: 214535 - DNA, 33 bp, Homo sapien
tcacagaaacatgacaactcaaattttcagtgg

SEQ ID NO: 214536 - DNA, 33 bp, Homo sapien
tcacagaaacatgacagctcaaattttcagtgg

SEQ ID NO: 214537 - DNA, 33 bp, Homo sapien
actgttcttcggtggcaagaattgacttcagga

SEQ ID NO: 214538 - DNA, 33 bp, Homo sapien
actgttcttcggtggcgagaattgacttcagga

SEQ ID NO: 214539 - DNA, 33 bp, Homo sapien
attgtatcgaccctagcattgccaaacaaaaga

SEQ ID NO: 214540 - DNA, 33 bp, Homo sapien
attgtatcgaccctagtattgccaaacaaaaga

SEQ ID NO: 214541 - DNA, 33 bp, Homo sapien
attaattcactgttaaagctactgctctattca

SEQ ID NO: 214542 - DNA, 33 bp, Homo sapien
attaattcactgttaacgctactgctctattca

SEQ ID NO: 214543 - DNA, 33 bp, Homo sapien
ccattatgttttagcaagatacaatttcttaaa

SEQ ID NO: 214544 - DNA, 33 bp, Homo sapien
ccattatgttttagcatgatacaatttcttaaa

SEQ ID NO: 214545 - DNA, 33 bp, Homo sapien
tatctctgaagaagtacatccctggcactaact

SEQ ID NO: 214546 - DNA, 33 bp, Homo sapien
tatctctgaagaagtagatccctggcactaact

SEQ ID NO: 214547 - DNA, 33 bp, Homo sapien
ctggaattccatttaacgctctttctgtgaatt

SEQ ID NO: 214548 - DNA, 33 bp, Homo sapien
ctggaattccatttaatgctctttctgtgaatt

SEQ ID NO: 214549 - DNA, 33 bp, Homo sapien
ggtgtggcttcaggtaagttgtctgttgaaagc

SEQ ID NO: 214550 - DNA, 33 bp, Homo sapien
ggtgtggcttcaggtaggttgtctgttgaaagc

SEQ ID NO: 214551 - DNA, 33 bp, Homo sapien
cttgctacacctcccaaataaatttcttgtact

SEQ ID NO: 214552 - DNA, 33 bp, Homo sapien
cttgctacacctcccagataaatttcttgtact

SEQ ID NO: 214553 - DNA, 33 bp, Homo sapien
tgaagagtaacaaaagacttagaaaatgattcc

SEQ ID NO: 214554 - DNA, 33 bp, Homo sapien
tgaagagtaacaaaagccttagaaaatgattcc

SEQ ID NO: 214555 - DNA, 33 bp, Homo sapien
ataaaagtaaacttcaaaatgtgtctctctttt

SEQ ID NO: 214556 - DNA, 33 bp, Homo sapien
ataaaagtaaacttcataatgtgtctctctttt

SEQ ID NO: 214557 - DNA, 33 bp, Homo sapien
tttaatattctggttacggaaggagactgaaga

SEQ ID NO: 214558 - DNA, 33 bp, Homo sapien
tttaatattctggttatggaaggagactgaaga

SEQ ID NO: 214559 - DNA, 33 bp, Homo sapien
ggtcaagattttaacacactgcacaaagcagca

SEQ ID NO: 214560 - DNA, 33 bp, Homo sapien
ggtcaagattttaacatactgcacaaagcagca

SEQ ID NO: 214561 - DNA, 33 bp, Homo sapien
gccctatgtgttccgaagtgctattatccctgt

SEQ ID NO: 214562 - DNA, 33 bp, Homo sapien
gccctatgtgttccgaggtgctattatccctgt

SEQ ID NO: 214563 - DNA, 33 bp, Homo sapien
ttcaggttttgttggaggcagacatctagcctg

SEQ ID NO: 214564 - DNA, 33 bp, Homo sapien
ttcaggttttgttggatgcagacatctagcctg

SEQ ID NO: 214565 - DNA, 33 bp, Homo sapien
ataacaaattgcttagcccaaatattttcattc

SEQ ID NO: 214566 - DNA, 33 bp, Homo sapien
ataacaaattgcttagtccaaatattttcattc

SEQ ID NO: 214567 - DNA, 33 bp, Homo sapien
aaaaccttttagggaaaacagactgtgccaaat

SEQ ID NO: 214568 - DNA, 33 bp, Homo sapien
aaaaccttttagggaagacagactgtgccaaat

SEQ ID NO: 214569 - DNA, 33 bp, Homo sapien
tgacagcccccaggataacagattttggagaag

SEQ ID NO: 214570 - DNA, 33 bp, Homo sapien
tgacagcccccaggatgacagattttggagaag

SEQ ID NO: 214571 - DNA, 33 bp, Homo sapien
ctccaattgttgttacggaagtcctagagagaa

SEQ ID NO: 214572 - DNA, 33 bp, Homo sapien
ctccaattgttgttactgaagtcctagagagaa

SEQ ID NO: 214573 - DNA, 33 bp, Homo sapien
aatgtcattttcagaaagacatttgattgatta

SEQ ID NO: 214574 - DNA, 33 bp, Homo sapien
aatgtcattttcagaaggacatttgattgatta

SEQ ID NO: 214575 - DNA, 33 bp, Homo sapien
ggagtgactcagccaaattatggatcacatgca

SEQ ID NO: 214576 - DNA, 33 bp, Homo sapien
ggagtgactcagccaagttatggatcacatgca

SEQ ID NO: 214577 - DNA, 33 bp, Homo sapien
tagtgtgaagttgagacggactggtctgtaacc

SEQ ID NO: 214578 - DNA, 33 bp, Homo sapien
tagtgtgaagttgagatggactggtctgtaacc

SEQ ID NO: 214579 - DNA, 33 bp, Homo sapien
tttccctgttgtcctaataactgatacctgttt

SEQ ID NO: 214580 - DNA, 33 bp, Homo sapien
tttccctgttgtcctagtaactgatacctgttt

SEQ ID NO: 214581 - DNA, 33 bp, Homo sapien
cgtattttagtattcaatctattcatgcagcta

SEQ ID NO: 214582 - DNA, 33 bp, Homo sapien
cgtattttagtattcagtctattcatgcagcta

SEQ ID NO: 214583 - DNA, 33 bp, Homo sapien
aattatggctgtgaacaagtgtactaaatttgt

SEQ ID NO: 214584 - DNA, 33 bp, Homo sapien
aattatggctgtgaacgagtgtactaaatttgt

SEQ ID NO: 214585 - DNA, 33 bp, Homo sapien
gccatgtgccattttcactctacacttctgaag

SEQ ID NO: 214586 - DNA, 33 bp, Homo sapien
gccatgtgccattttcgctctacacttctgaag

SEQ ID NO: 214587 - DNA, 33 bp, Homo sapien
tttgttactgtatggcaatcctggctatcattt

SEQ ID NO: 214588 - DNA, 33 bp, Homo sapien
tttgttactgtatggctatcctggctatcattt

SEQ ID NO: 214589 - DNA, 33 bp, Homo sapien
gggaaaccacagcacactgaggaagttgtacgt

SEQ ID NO: 214590 - DNA, 33 bp, Homo sapien
gggaaaccacagcacattgaggaagttgtacgt

SEQ ID NO: 214591 - DNA, 33 bp, Homo sapien
tattttcaggtttatccaattattcatagtgcc

SEQ ID NO: 214592 - DNA, 33 bp, Homo sapien
tattttcaggtttatcgaattattcatagtgcc

SEQ ID NO: 214593 - DNA, 33 bp, Homo sapien
taattttcttgtaataacttggctgagttttgg

SEQ ID NO: 214594 - DNA, 33 bp, Homo sapien
taattttcttgtaatatcttggctgagttttgg

SEQ ID NO: 214595 - DNA, 33 bp, Homo sapien
tttatcaaaagtattaacatataaggccagagg

SEQ ID NO: 214596 - DNA, 33 bp, Homo sapien
tttatcaaaagtattagcatataaggccagagg

SEQ ID NO: 214597 - DNA, 33 bp, Homo sapien
ataagaaatccagcaacgtcttcggtgagcaag

SEQ ID NO: 214598 - DNA, 33 bp, Homo sapien
ataagaaatccagcaatgtcttcggtgagcaag

SEQ ID NO: 214599 - DNA, 33 bp, Homo sapien
tgtcaattggttgaaacgcttcttatcagtaga

SEQ ID NO: 214600 - DNA, 33 bp, Homo sapien
tgtcaattggttgaaatgcttcttatcagtaga

SEQ ID NO: 214601 - DNA, 33 bp, Homo sapien
tgaggtgctgggggcaccaacgtgaagcagcta

SEQ ID NO: 214602 - DNA, 33 bp, Homo sapien
tgaggtgctgggggcatcaacgtgaagcagcta

SEQ ID NO: 214603 - DNA, 33 bp, Homo sapien
ttttggatttctaatggagcttgaagtaaaggt

SEQ ID NO: 214604 - DNA, 33 bp, Homo sapien
ttttggatttctaatgtagcttgaagtaaaggt

SEQ ID NO: 214605 - DNA, 33 bp, Homo sapien
tgaagaatttattagcccctttctagcattgct

SEQ ID NO: 214606 - DNA, 33 bp, Homo sapien
tgaagaatttattagctcctttctagcattgct

SEQ ID NO: 214607 - DNA, 33 bp, Homo sapien
aagtgctttcaccccacgtcatgtattatcatg

SEQ ID NO: 214608 - DNA, 33 bp, Homo sapien
aagtgctttcaccccatgtcatgtattatcatg

SEQ ID NO: 214609 - DNA, 33 bp, Homo sapien
gtgaagggaataagaaattcagccctagtctgg

SEQ ID NO: 214610 - DNA, 33 bp, Homo sapien
gtgaagggaataagaacttcagccctagtctgg

SEQ ID NO: 214611 - DNA, 33 bp, Homo sapien
tggctaagagaacttccccacgtcacacacctt

SEQ ID NO: 214612 - DNA, 33 bp, Homo sapien
tggctaagagaacttctccacgtcacacacctt

SEQ ID NO: 214613 - DNA, 33 bp, Homo sapien
aatgcaaagcttaaaacatgacaatggctttac

SEQ ID NO: 214614 - DNA, 33 bp, Homo sapien
aatgcaaagcttaaaatatgacaatggctttac

SEQ ID NO: 214615 - DNA, 33 bp, Homo sapien
atgtttgtcaaaagaagtccatcggccactttc

SEQ ID NO: 214616 - DNA, 33 bp, Homo sapien
atgtttgtcaaaagaattccatcggccactttc

SEQ ID NO: 214617 - DNA, 33 bp, Homo sapien
acttttgggatgtgaccgaaatgtaaagttttg

SEQ ID NO: 214618 - DNA, 33 bp, Homo sapien
acttttgggatgtgactgaaatgtaaagttttg

SEQ ID NO: 214619 - DNA, 33 bp, Homo sapien
tgcttttgctaggccaataaacactctcagtac

SEQ ID NO: 214620 - DNA, 33 bp, Homo sapien
tgcttttgctaggccagtaaacactctcagtac

SEQ ID NO: 214621 - DNA, 33 bp, Homo sapien
aagggacaaagactgacatatgcgtgatctctt

SEQ ID NO: 214622 - DNA, 33 bp, Homo sapien
aagggacaaagactgatatatgcgtgatctctt

SEQ ID NO: 214623 - DNA, 33 bp, Homo sapien
cagcaaagctcaccaacggatgctggtttttct

SEQ ID NO: 214624 - DNA, 33 bp, Homo sapien
cagcaaagctcaccaatggatgctggtttttct

SEQ ID NO: 214625 - DNA, 33 bp, Homo sapien
tcctgtttgggctttacagtctgggctcgtgat

SEQ ID NO: 214626 - DNA, 33 bp, Homo sapien
tcctgtttgggctttatagtctgggctcgtgat

SEQ ID NO: 214627 - DNA, 33 bp, Homo sapien
ttataagaacaatacgaccccacctgggaatgt

SEQ ID NO: 214628 - DNA, 33 bp, Homo sapien
ttataagaacaatacgcccccacctgggaatgt

SEQ ID NO: 214629 - DNA, 33 bp, Homo sapien
aaatctggtctatctaactttctttcaacctaa

SEQ ID NO: 214630 - DNA, 33 bp, Homo sapien
aaatctggtctatctagctttctttcaacctaa

SEQ ID NO: 214631 - DNA, 33 bp, Homo sapien
agatccgcttccaataaaagacaatgaaatagt

SEQ ID NO: 214632 - DNA, 33 bp, Homo sapien
agatccgcttccaatagaagacaatgaaatagt

SEQ ID NO: 214633 - DNA, 33 bp, Homo sapien
gaacccaggactgctaaggaagacattagggaa

SEQ ID NO: 214634 - DNA, 33 bp, Homo sapien
gaacccaggactgctagggaagacattagggaa

SEQ ID NO: 214635 - DNA, 33 bp, Homo sapien
ctgacgtaagtcaccacgtatagaagcctacaa

SEQ ID NO: 214636 - DNA, 33 bp, Homo sapien
ctgacgtaagtcaccatgtatagaagcctacaa

SEQ ID NO: 214637 - DNA, 33 bp, Homo sapien
aagagatgcaagtggaggtagagatcaaatcat

SEQ ID NO: 214638 - DNA, 33 bp, Homo sapien
aagagatgcaagtggatgtagagatcaaatcat

SEQ ID NO: 214639 - DNA, 33 bp, Homo sapien
gccaggcttatctctccacctcaaatgatccgc

SEQ ID NO: 214640 - DNA, 33 bp, Homo sapien
gccaggcttatctctcgacctcaaatgatccgc

SEQ ID NO: 214641 - DNA, 33 bp, Homo sapien
caaaaattagcaacaaatctaatgttcatcaat

SEQ ID NO: 214642 - DNA, 33 bp, Homo sapien
caaaaattagcaacaattctaatgttcatcaat

SEQ ID NO: 214643 - DNA, 33 bp, Homo sapien
agctacttgggaactacgactgtactactgtac

SEQ ID NO: 214644 - DNA, 33 bp, Homo sapien
agctacttgggaactatgactgtactactgtac

SEQ ID NO: 214645 - DNA, 33 bp, Homo sapien
cggttgggtttttaccacagtagccagctccgg

SEQ ID NO: 214646 - DNA, 33 bp, Homo sapien
cggttgggtttttaccgcagtagccagctccgg

SEQ ID NO: 214647 - DNA, 33 bp, Homo sapien
gccactggcacatttcaaggaacaagtcttcac

SEQ ID NO: 214648 - DNA, 33 bp, Homo sapien
gccactggcacatttcgaggaacaagtcttcac

SEQ ID NO: 214649 - DNA, 33 bp, Homo sapien
caagcccttatctacacgatttccatctcagct

SEQ ID NO: 214650 - DNA, 33 bp, Homo sapien
caagcccttatctacatgatttccatctcagct

SEQ ID NO: 214651 - DNA, 33 bp, Homo sapien
aagggcagctccaccactattggttttaactaa

SEQ ID NO: 214652 - DNA, 33 bp, Homo sapien
aagggcagctccaccattattggttttaactaa

SEQ ID NO: 214653 - DNA, 33 bp, Homo sapien
tgcctaaattttcgtaactaccactctgaattt

SEQ ID NO: 214654 - DNA, 33 bp, Homo sapien
tgcctaaattttcgtacctaccactctgaattt

SEQ ID NO: 214655 - DNA, 33 bp, Homo sapien
agttatgcaagtgcagaaataaggaaacaacat

SEQ ID NO: 214656 - DNA, 33 bp, Homo sapien
agttatgcaagtgcaggaataaggaaacaacat

SEQ ID NO: 214657 - DNA, 33 bp, Homo sapien
ttaattccatactaagacaggaaatgataaggt

SEQ ID NO: 214658 - DNA, 33 bp, Homo sapien
ttaattccatactaaggcaggaaatgataaggt

SEQ ID NO: 214659 - DNA, 33 bp, Homo sapien
agggttgttgtgagaagtcgatgaacagtacca

SEQ ID NO: 214660 - DNA, 33 bp, Homo sapien
agggttgttgtgagaattcgatgaacagtacca

SEQ ID NO: 214661 - DNA, 33 bp, Homo sapien
aaccttattttatggacgaagaagataacaatt

SEQ ID NO: 214662 - DNA, 33 bp, Homo sapien
aaccttattttatggatgaagaagataacaatt

SEQ ID NO: 214663 - DNA, 33 bp, Homo sapien
cagttgtttctataaaaggtcatttgattggcc

SEQ ID NO: 214664 - DNA, 33 bp, Homo sapien
cagttgtttctataaatggtcatttgattggcc

SEQ ID NO: 214665 - DNA, 33 bp, Homo sapien
gtgcagcttaagtacacagtgtttacaaagttt

SEQ ID NO: 214666 - DNA, 33 bp, Homo sapien
gtgcagcttaagtacagagtgtttacaaagttt

SEQ ID NO: 214667 - DNA, 33 bp, Homo sapien
aaggcagactattatgcagccaataaaagagtt

SEQ ID NO: 214668 - DNA, 33 bp, Homo sapien
aaggcagactattatggagccaataaaagagtt

SEQ ID NO: 214669 - DNA, 33 bp, Homo sapien
tattctatagtttgatcagtagaagtgttaaca

SEQ ID NO: 214670 - DNA, 33 bp, Homo sapien
tattctatagtttgattagtagaagtgttaaca

SEQ ID NO: 214671 - DNA, 33 bp, Homo sapien
gactgtcccacataacaacttccaaatgaccca

SEQ ID NO: 214672 - DNA, 33 bp, Homo sapien
gactgtcccacataacgacttccaaatgaccca

SEQ ID NO: 214673 - DNA, 33 bp, Homo sapien
tgcagatctaaaagcagtctcctgaggccatct

SEQ ID NO: 214674 - DNA, 33 bp, Homo sapien
tgcagatctaaaagcattctcctgaggccatct

SEQ ID NO: 214675 - DNA, 33 bp, Homo sapien
tgttgttcttgttgtaacccatgccactctcag

SEQ ID NO: 214676 - DNA, 33 bp, Homo sapien
tgttgttcttgttgtaccccatgccactctcag

SEQ ID NO: 214677 - DNA, 33 bp, Homo sapien
ttaattataattcatccacattattcccaaatc

SEQ ID NO: 214678 - DNA, 33 bp, Homo sapien
ttaattataattcatctacattattcccaaatc

SEQ ID NO: 214679 - DNA, 33 bp, Homo sapien
ttatcacacatcatcacatcttttgatacctaa

SEQ ID NO: 214680 - DNA, 33 bp, Homo sapien
ttatcacacatcatcatatcttttgatacctaa

SEQ ID NO: 214681 - DNA, 33 bp, Homo sapien
agagacctttaattcaccatagcaccttataca

SEQ ID NO: 214682 - DNA, 33 bp, Homo sapien
agagacctttaattcatcatagcaccttataca

SEQ ID NO: 214683 - DNA, 33 bp, Homo sapien
atattttgtacaaggcactaggatagattaaag

SEQ ID NO: 214684 - DNA, 33 bp, Homo sapien
atattttgtacaaggcgctaggatagattaaag

SEQ ID NO: 214685 - DNA, 33 bp, Homo sapien
agtataattgcaaaacagatggctttttatgtt

SEQ ID NO: 214686 - DNA, 33 bp, Homo sapien
agtataattgcaaaaccgatggctttttatgtt

SEQ ID NO: 214687 - DNA, 33 bp, Homo sapien
acaatatgggaccttacaatttgaccttcctgg

SEQ ID NO: 214688 - DNA, 33 bp, Homo sapien
acaatatgggaccttataatttgaccttcctgg

SEQ ID NO: 214689 - DNA, 33 bp, Homo sapien
ccagtgggctgccagccatgaaaggcgagacat

SEQ ID NO: 214690 - DNA, 33 bp, Homo sapien
ccagtgggctgccagctatgaaaggcgagacat

SEQ ID NO: 214691 - DNA, 33 bp, Homo sapien
tgaaaatagtgcaaagaaatgaatggagagcaa

SEQ ID NO: 214692 - DNA, 33 bp, Homo sapien
tgaaaatagtgcaaaggaatgaatggagagcaa

SEQ ID NO: 214693 - DNA, 33 bp, Homo sapien
agcagggttaatcaacagtgcataaaacagcat

SEQ ID NO: 214694 - DNA, 33 bp, Homo sapien
agcagggttaatcaacggtgcataaaacagcat

SEQ ID NO: 214695 - DNA, 33 bp, Homo sapien
gaaacctcataatgaaaacaataactgaactat

SEQ ID NO: 214696 - DNA, 33 bp, Homo sapien
gaaacctcataatgaagacaataactgaactat

SEQ ID NO: 214697 - DNA, 33 bp, Homo sapien
ctctaccaaatgctaaagtgccttggcaacagt

SEQ ID NO: 214698 - DNA, 33 bp, Homo sapien
ctctaccaaatgctaaggtgccttggcaacagt

SEQ ID NO: 214699 - DNA, 33 bp, Homo sapien
aatcaatcaaattgaagtagcaaagagctagaa

SEQ ID NO: 214700 - DNA, 33 bp, Homo sapien
aatcaatcaaattgaattagcaaagagctagaa

SEQ ID NO: 214701 - DNA, 33 bp, Homo sapien
agcttatggcattacaatcatattcttctgaaa

SEQ ID NO: 214702 - DNA, 33 bp, Homo sapien
agcttatggcattacattcatattcttctgaaa

SEQ ID NO: 214703 - DNA, 33 bp, Homo sapien
gttatttgcaaagtaacataatggcaagatcaa

SEQ ID NO: 214704 - DNA, 33 bp, Homo sapien
gttatttgcaaagtaatataatggcaagatcaa

SEQ ID NO: 214705 - DNA, 33 bp, Homo sapien
ttatagattttgtgacagtaatgatttacatat

SEQ ID NO: 214706 - DNA, 33 bp, Homo sapien
ttatagattttgtgactgtaatgatttacatat

SEQ ID NO: 214707 - DNA, 33 bp, Homo sapien
cattaggagatacttaccccaacccagtgtgtt

SEQ ID NO: 214708 - DNA, 33 bp, Homo sapien
cattaggagatacttatcccaacccagtgtgtt

SEQ ID NO: 214709 - DNA, 33 bp, Homo sapien
gactttatcctgacagccacaagcaaattttaa

SEQ ID NO: 214710 - DNA, 33 bp, Homo sapien
gactttatcctgacaggcacaagcaaattttaa

SEQ ID NO: 214711 - DNA, 33 bp, Homo sapien
gcaaattttaagcgtgaaaattaaatgattagc

SEQ ID NO: 214712 - DNA, 33 bp, Homo sapien
gcaaattttaagcgtggaaattaaatgattagc

SEQ ID NO: 214713 - DNA, 33 bp, Homo sapien
ttcatttcctggctcaaagaaggtgcccaataa

SEQ ID NO: 214714 - DNA, 33 bp, Homo sapien
ttcatttcctggctcagagaaggtgcccaataa

SEQ ID NO: 214715 - DNA, 33 bp, Homo sapien
ggaggggctcaccagacaagccactgtgacagt

SEQ ID NO: 214716 - DNA, 33 bp, Homo sapien
ggaggggctcaccagagaagccactgtgacagt

SEQ ID NO: 214717 - DNA, 33 bp, Homo sapien
tgtatcaaaaggcctgaatgtccaagcagaagt

SEQ ID NO: 214718 - DNA, 33 bp, Homo sapien
tgtatcaaaaggcctggatgtccaagcagaagt

SEQ ID NO: 214719 - DNA, 33 bp, Homo sapien
ttattagggagtcaagcatctcggctcttctta

SEQ ID NO: 214720 - DNA, 33 bp, Homo sapien
ttattagggagtcaagtatctcggctcttctta

SEQ ID NO: 214721 - DNA, 33 bp, Homo sapien
gaatgtgaatgccaaactacggaagcaacctaa

SEQ ID NO: 214722 - DNA, 33 bp, Homo sapien
gaatgtgaatgccaaagtacggaagcaacctaa

SEQ ID NO: 214723 - DNA, 33 bp, Homo sapien
aagaggatgattttaacgagagtagcatctctg

SEQ ID NO: 214724 - DNA, 33 bp, Homo sapien
aagaggatgattttaatgagagtagcatctctg

SEQ ID NO: 214725 - DNA, 33 bp, Homo sapien
tctctgggtttcaaaccaatgactcttgggcca

SEQ ID NO: 214726 - DNA, 33 bp, Homo sapien
tctctgggtttcaaactaatgactcttgggcca

SEQ ID NO: 214727 - DNA, 33 bp, Homo sapien
ctctgccttctgtaataagaattgctttggagg

SEQ ID NO: 214728 - DNA, 33 bp, Homo sapien
ctctgccttctgtaatgagaattgctttggagg

SEQ ID NO: 214729 - DNA, 33 bp, Homo sapien
ctccaaatttagcccacgcacagagtcagggga

SEQ ID NO: 214730 - DNA, 33 bp, Homo sapien
ctccaaatttagcccatgcacagagtcagggga

SEQ ID NO: 214731 - DNA, 33 bp, Homo sapien
gattggagagagaggaaaagcattcttaggttg

SEQ ID NO: 214732 - DNA, 33 bp, Homo sapien
gattggagagagaggagaagcattcttaggttg

SEQ ID NO: 214733 - DNA, 33 bp, Homo sapien
gactagggagtcacgaaatttcctgctgcgaag

SEQ ID NO: 214734 - DNA, 33 bp, Homo sapien
gactagggagtcacgatatttcctgctgcgaag

SEQ ID NO: 214735 - DNA, 33 bp, Homo sapien
ccatcttcctcatctcccaacaactcctctaaa

SEQ ID NO: 214736 - DNA, 33 bp, Homo sapien
ccatcttcctcatctctcaacaactcctctaaa

SEQ ID NO: 214737 - DNA, 33 bp, Homo sapien
gatgaaaggttgtaggacagtaacagtgaaaat

SEQ ID NO: 214738 - DNA, 33 bp, Homo sapien
gatgaaaggttgtagggcagtaacagtgaaaat

SEQ ID NO: 214739 - DNA, 33 bp, Homo sapien
ccagtaatcaggtaggcattttgaacagttaga

SEQ ID NO: 214740 - DNA, 33 bp, Homo sapien
ccagtaatcaggtaggtattttgaacagttaga

SEQ ID NO: 214741 - DNA, 33 bp, Homo sapien
gagtaaaagacccagaagagagtttggtgccta

SEQ ID NO: 214742 - DNA, 33 bp, Homo sapien
gagtaaaagacccagaggagagtttggtgccta

SEQ ID NO: 214743 - DNA, 33 bp, Homo sapien
atagatagtgcttaataagatccaagtagggtt

SEQ ID NO: 214744 - DNA, 33 bp, Homo sapien
atagatagtgcttaatgagatccaagtagggtt

SEQ ID NO: 214745 - DNA, 33 bp, Homo sapien
acttcctcattcaataatatggactaggtacct

SEQ ID NO: 214746 - DNA, 33 bp, Homo sapien
acttcctcattcaatattatggactaggtacct

SEQ ID NO: 214747 - DNA, 33 bp, Homo sapien
ggccagtccatttggtcaactcctcatttattc

SEQ ID NO: 214748 - DNA, 33 bp, Homo sapien
ggccagtccatttggttaactcctcatttattc

SEQ ID NO: 214749 - DNA, 33 bp, Homo sapien
tgagctggatgaactacaaaaagaaaaatgttt

SEQ ID NO: 214750 - DNA, 33 bp, Homo sapien
tgagctggatgaactataaaaagaaaaatgttt

SEQ ID NO: 214751 - DNA, 33 bp, Homo sapien
agtccattcaggtctacaccttccctctttcaa

SEQ ID NO: 214752 - DNA, 33 bp, Homo sapien
agtccattcaggtctataccttccctctttcaa

SEQ ID NO: 214753 - DNA, 33 bp, Homo sapien
ttttaaacaagcttgcaccatgattcatatgca

SEQ ID NO: 214754 - DNA, 33 bp, Homo sapien
ttttaaacaagcttgcgccatgattcatatgca

SEQ ID NO: 214755 - DNA, 33 bp, Homo sapien
tgtcattatctttacaaacgtgggttcagtaaa

SEQ ID NO: 214756 - DNA, 33 bp, Homo sapien
tgtcattatctttacagacgtgggttcagtaaa

SEQ ID NO: 214757 - DNA, 33 bp, Homo sapien
tctaaaaatgctcatcaagaaacagagaaatga

SEQ ID NO: 214758 - DNA, 33 bp, Homo sapien
tctaaaaatgctcatcgagaaacagagaaatga

SEQ ID NO: 214759 - DNA, 33 bp, Homo sapien
atgagcagtcatgatacacgtgagagatataga

SEQ ID NO: 214760 - DNA, 33 bp, Homo sapien
atgagcagtcatgatatacgtgagagatataga

SEQ ID NO: 214761 - DNA, 33 bp, Homo sapien
ctctgaagccagaccacgttgttcagacttggc

SEQ ID NO: 214762 - DNA, 33 bp, Homo sapien
ctctgaagccagaccatgttgttcagacttggc

SEQ ID NO: 214763 - DNA, 33 bp, Homo sapien
atgtcccatgagcaacaatttttacatctcagt

SEQ ID NO: 214764 - DNA, 33 bp, Homo sapien
atgtcccatgagcaaccatttttacatctcagt

SEQ ID NO: 214765 - DNA, 33 bp, Homo sapien
gttgaggaagattgcaaatgattgacaggcatg

SEQ ID NO: 214766 - DNA, 33 bp, Homo sapien
gttgaggaagattgcacatgattgacaggcatg

SEQ ID NO: 214767 - DNA, 33 bp, Homo sapien
ttttttggcccctgagaagacagcagacctcaa

SEQ ID NO: 214768 - DNA, 33 bp, Homo sapien
ttttttggcccctgaggagacagcagacctcaa

SEQ ID NO: 214769 - DNA, 33 bp, Homo sapien
ggtatgttaatagatacgtataggcaccagttt

SEQ ID NO: 214770 - DNA, 33 bp, Homo sapien
ggtatgttaatagatatgtataggcaccagttt

SEQ ID NO: 214771 - DNA, 33 bp, Homo sapien
ctgacacacacttagaagctcaatccatacttg

SEQ ID NO: 214772 - DNA, 33 bp, Homo sapien
ctgacacacacttagaggctcaatccatacttg

SEQ ID NO: 214773 - DNA, 33 bp, Homo sapien
ggtttaccaacgtttaagagatcagcaaaggaa

SEQ ID NO: 214774 - DNA, 33 bp, Homo sapien
ggtttaccaacgtttaggagatcagcaaaggaa

SEQ ID NO: 214775 - DNA, 33 bp, Homo sapien
agccctgtggataggcaatctggaaaggaaaca

SEQ ID NO: 214776 - DNA, 33 bp, Homo sapien
agccctgtggataggccatctggaaaggaaaca

SEQ ID NO: 214777 - DNA, 33 bp, Homo sapien
agcaggagaggagaaaacctgtacttggagttg

SEQ ID NO: 214778 - DNA, 33 bp, Homo sapien
agcaggagaggagaaagcctgtacttggagttg

SEQ ID NO: 214779 - DNA, 33 bp, Homo sapien
aaaaacaactgagtagaatgccacttaaaagcg

SEQ ID NO: 214780 - DNA, 33 bp, Homo sapien
aaaaacaactgagtaggatgccacttaaaagcg

SEQ ID NO: 214781 - DNA, 33 bp, Homo sapien
tctcataatctttccacgaacaagtagtttgag

SEQ ID NO: 214782 - DNA, 33 bp, Homo sapien
tctcataatctttccatgaacaagtagtttgag

SEQ ID NO: 214783 - DNA, 33 bp, Homo sapien
gcccttaatgcacaccaaagccctttaagaggc

SEQ ID NO: 214784 - DNA, 33 bp, Homo sapien
gcccttaatgcacaccgaagccctttaagaggc

SEQ ID NO: 214785 - DNA, 33 bp, Homo sapien
tcaccctatgtgcattaaaaaattcctagttgg

SEQ ID NO: 214786 - DNA, 33 bp, Homo sapien
tcaccctatgtgcatttaaaaattcctagttgg

SEQ ID NO: 214787 - DNA, 33 bp, Homo sapien
ttcactgtgaacaaaaccgtagctagcaacaac

SEQ ID NO: 214788 - DNA, 33 bp, Homo sapien
ttcactgtgaacaaaatcgtagctagcaacaac

SEQ ID NO: 214789 - DNA, 33 bp, Homo sapien
gtgctctgagttttaacgctggtccactaatgt

SEQ ID NO: 214790 - DNA, 33 bp, Homo sapien
gtgctctgagttttaatgctggtccactaatgt

SEQ ID NO: 214791 - DNA, 33 bp, Homo sapien
ttgctatgaaagcaaaatatcatcctagagatg

SEQ ID NO: 214792 - DNA, 33 bp, Homo sapien
ttgctatgaaagcaaagtatcatcctagagatg

SEQ ID NO: 214793 - DNA, 33 bp, Homo sapien
acgtgccaggaagacacggcattctggcttccc

SEQ ID NO: 214794 - DNA, 33 bp, Homo sapien
acgtgccaggaagacatggcattctggcttccc

SEQ ID NO: 214795 - DNA, 33 bp, Homo sapien
ggaagccttttatatcacccaactcaatgtaat

SEQ ID NO: 214796 - DNA, 33 bp, Homo sapien
ggaagccttttatatcgcccaactcaatgtaat

SEQ ID NO: 214797 - DNA, 33 bp, Homo sapien
tagcacctggcatatcaaaagaacttagtaaat

SEQ ID NO: 214798 - DNA, 33 bp, Homo sapien
tagcacctggcatatcgaaagaacttagtaaat

SEQ ID NO: 214799 - DNA, 33 bp, Homo sapien
taattcttcatccaaacgaatgtttccactgtg

SEQ ID NO: 214800 - DNA, 33 bp, Homo sapien
taattcttcatccaaatgaatgtttccactgtg

SEQ ID NO: 214801 - DNA, 33 bp, Homo sapien
atgtcctctgaaatcacgggaggaaaaatccct

SEQ ID NO: 214802 - DNA, 33 bp, Homo sapien
atgtcctctgaaatcatgggaggaaaaatccct

SEQ ID NO: 214803 - DNA, 33 bp, Homo sapien
tcctggtctacaccccaccttaaacagtgaaag

SEQ ID NO: 214804 - DNA, 33 bp, Homo sapien
tcctggtctacaccccgccttaaacagtgaaag

SEQ ID NO: 214805 - DNA, 33 bp, Homo sapien
aagaaatgtgcctccaactgaaacaagtcacat

SEQ ID NO: 214806 - DNA, 33 bp, Homo sapien
aagaaatgtgcctccacctgaaacaagtcacat

SEQ ID NO: 214807 - DNA, 33 bp, Homo sapien
agccagaatgagaaaccctttctactctcagca

SEQ ID NO: 214808 - DNA, 33 bp, Homo sapien
agccagaatgagaaacgctttctactctcagca

SEQ ID NO: 214809 - DNA, 33 bp, Homo sapien
agcaattctctaattcactgcagataccaactg

SEQ ID NO: 214810 - DNA, 33 bp, Homo sapien
agcaattctctaattctctgcagataccaactg

SEQ ID NO: 214811 - DNA, 33 bp, Homo sapien
attgaaacagctgtataagcaaaggatgcagtt

SEQ ID NO: 214812 - DNA, 33 bp, Homo sapien
attgaaacagctgtatcagcaaaggatgcagtt

SEQ ID NO: 214813 - DNA, 33 bp, Homo sapien
attataatttagaaagccatgaatgtacgccac

SEQ ID NO: 214814 - DNA, 33 bp, Homo sapien
attataatttagaaagtcatgaatgtacgccac

SEQ ID NO: 214815 - DNA, 33 bp, Homo sapien
aggatattaagggaaacgaattttgtgttctgg

SEQ ID NO: 214816 - DNA, 33 bp, Homo sapien
aggatattaagggaaatgaattttgtgttctgg

SEQ ID NO: 214817 - DNA, 33 bp, Homo sapien
gaggcttcaaaagaaaccaactctgccagcacc

SEQ ID NO: 214818 - DNA, 33 bp, Homo sapien
gaggcttcaaaagaaatcaactctgccagcacc

SEQ ID NO: 214819 - DNA, 33 bp, Homo sapien
tccttataaagagagaagataccatagaaggaa

SEQ ID NO: 214820 - DNA, 33 bp, Homo sapien
tccttataaagagagaggataccatagaaggaa

SEQ ID NO: 214821 - DNA, 33 bp, Homo sapien
ggctgggaaccatagcaacacaccacatttaaa

SEQ ID NO: 214822 - DNA, 33 bp, Homo sapien
ggctgggaaccatagcgacacaccacatttaaa

SEQ ID NO: 214823 - DNA, 33 bp, Homo sapien
ttcttctgggcaccctcaaggcattataaccac

SEQ ID NO: 214824 - DNA, 33 bp, Homo sapien
ttcttctgggcaccctgaaggcattataaccac

SEQ ID NO: 214825 - DNA, 33 bp, Homo sapien
actcctaccccttgcacgtcgctacagtgcaca

SEQ ID NO: 214826 - DNA, 33 bp, Homo sapien
actcctaccccttgcatgtcgctacagtgcaca

SEQ ID NO: 214827 - DNA, 33 bp, Homo sapien
ttgttgtctaaattaacgtagagcaaggtttta

SEQ ID NO: 214828 - DNA, 33 bp, Homo sapien
ttgttgtctaaattaatgtagagcaaggtttta

SEQ ID NO: 214829 - DNA, 33 bp, Homo sapien
tctggtttgaagtctaagttgaaattcccactg

SEQ ID NO: 214830 - DNA, 33 bp, Homo sapien
tctggtttgaagtctatgttgaaattcccactg

SEQ ID NO: 214831 - DNA, 33 bp, Homo sapien
aatgttatagagcgcacatctgagagagctgac

SEQ ID NO: 214832 - DNA, 33 bp, Homo sapien
aatgttatagagcgcatatctgagagagctgac

SEQ ID NO: 214833 - DNA, 33 bp, Homo sapien
ctcgccagctacttcacgtggaaaaggaagtgg

SEQ ID NO: 214834 - DNA, 33 bp, Homo sapien
ctcgccagctacttcatgtggaaaaggaagtgg

SEQ ID NO: 214835 - DNA, 33 bp, Homo sapien
aaagattgaaagattgaacaatgaaatctgaga

SEQ ID NO: 214836 - DNA, 33 bp, Homo sapien
aaagattgaaagattggacaatgaaatctgaga

SEQ ID NO: 214837 - DNA, 33 bp, Homo sapien
agaaggagtgggaagcaaaatgggaccgtgaag

SEQ ID NO: 214838 - DNA, 33 bp, Homo sapien
agaaggagtgggaagcgaaatgggaccgtgaag

SEQ ID NO: 214839 - DNA, 33 bp, Homo sapien
tatcataaaaacataacatgggttctgtcagtc

SEQ ID NO: 214840 - DNA, 33 bp, Homo sapien
tatcataaaaacataatatgggttctgtcagtc

SEQ ID NO: 214841 - DNA, 33 bp, Homo sapien
ttcaactctcatgatgcaaataagcatcctttt

SEQ ID NO: 214842 - DNA, 33 bp, Homo sapien
ttcaactctcatgatgtaaataagcatcctttt

SEQ ID NO: 214843 - DNA, 33 bp, Homo sapien
ttaggagtgtagaaaaataataggagagttcca

SEQ ID NO: 214844 - DNA, 33 bp, Homo sapien
ttaggagtgtagaaaagtaataggagagttcca

SEQ ID NO: 214845 - DNA, 33 bp, Homo sapien
gaagcacatgggaaataaaactcattcttcagg

SEQ ID NO: 214846 - DNA, 33 bp, Homo sapien
gaagcacatgggaaatcaaactcattcttcagg

SEQ ID NO: 214847 - DNA, 33 bp, Homo sapien
gatttctgagaaaataactcagcttttcccaac

SEQ ID NO: 214848 - DNA, 33 bp, Homo sapien
gatttctgagaaaatagctcagcttttcccaac

SEQ ID NO: 214849 - DNA, 33 bp, Homo sapien
gaaccttattcatcccacatctctatttgtctt

SEQ ID NO: 214850 - DNA, 33 bp, Homo sapien
gaaccttattcatcccgcatctctatttgtctt

SEQ ID NO: 214851 - DNA, 33 bp, Homo sapien
aaagacctctccggaaagctaatgcttctgtgt

SEQ ID NO: 214852 - DNA, 33 bp, Homo sapien
aaagacctctccggaaggctaatgcttctgtgt

SEQ ID NO: 214853 - DNA, 33 bp, Homo sapien
ctgtaagggcttttcaaaatgtagcaagataaa

SEQ ID NO: 214854 - DNA, 33 bp, Homo sapien
ctgtaagggcttttcacaatgtagcaagataaa

SEQ ID NO: 214855 - DNA, 33 bp, Homo sapien
tacatgaaaatgcttaaaagtgataggaattat

SEQ ID NO: 214856 - DNA, 33 bp, Homo sapien
tacatgaaaatgcttagaagtgataggaattat

SEQ ID NO: 214857 - DNA, 33 bp, Homo sapien
atcatttctcttttcaactctcacttttaatct

SEQ ID NO: 214858 - DNA, 33 bp, Homo sapien
atcatttctcttttcagctctcacttttaatct

SEQ ID NO: 214859 - DNA, 33 bp, Homo sapien
cctagaaggtagagaccgtagtgagctatgatc

SEQ ID NO: 214860 - DNA, 33 bp, Homo sapien
cctagaaggtagagactgtagtgagctatgatc

SEQ ID NO: 214861 - DNA, 33 bp, Homo sapien
tggatcttccttgtgaactgttagattcctgta

SEQ ID NO: 214862 - DNA, 33 bp, Homo sapien
tggatcttccttgtgagctgttagattcctgta

SEQ ID NO: 214863 - DNA, 33 bp, Homo sapien
tgcccagcattctcccagatccctattgctgtt

SEQ ID NO: 214864 - DNA, 33 bp, Homo sapien
tgcccagcattctcccggatccctattgctgtt

SEQ ID NO: 214865 - DNA, 33 bp, Homo sapien
agtgtcactggatgcacaggtggaaagagatgt

SEQ ID NO: 214866 - DNA, 33 bp, Homo sapien
agtgtcactggatgcagaggtggaaagagatgt

SEQ ID NO: 214867 - DNA, 33 bp, Homo sapien
ataattatgtagagacaaggacattaggtgaaa

SEQ ID NO: 214868 - DNA, 33 bp, Homo sapien
ataattatgtagagacgaggacattaggtgaaa

SEQ ID NO: 214869 - DNA, 33 bp, Homo sapien
ttccaagtagcagtccagatacacaaatgggtc

SEQ ID NO: 214870 - DNA, 33 bp, Homo sapien
ttccaagtagcagtccggatacacaaatgggtc

SEQ ID NO: 214871 - DNA, 33 bp, Homo sapien
tgcaggttgaactaggacaggtgacacactgcc

SEQ ID NO: 214872 - DNA, 33 bp, Homo sapien
tgcaggttgaactagggcaggtgacacactgcc

SEQ ID NO: 214873 - DNA, 33 bp, Homo sapien
tataatcagggaataacgataatgaacatgaat

SEQ ID NO: 214874 - DNA, 33 bp, Homo sapien
tataatcagggaataatgataatgaacatgaat

SEQ ID NO: 214875 - DNA, 33 bp, Homo sapien
atatctgttggcagtacgtctttgttttctaaa

SEQ ID NO: 214876 - DNA, 33 bp, Homo sapien
atatctgttggcagtatgtctttgttttctaaa

SEQ ID NO: 214877 - DNA, 33 bp, Homo sapien
acatgtctggacttaaaatgtgggaagtgaggg

SEQ ID NO: 214878 - DNA, 33 bp, Homo sapien
acatgtctggacttaacatgtgggaagtgaggg

SEQ ID NO: 214879 - DNA, 33 bp, Homo sapien
gtggtatctccctgaacgctcaaatttactttt

SEQ ID NO: 214880 - DNA, 33 bp, Homo sapien
gtggtatctccctgaatgctcaaatttactttt

SEQ ID NO: 214881 - DNA, 33 bp, Homo sapien
tgtgaaaagccaaagaaaattctgaccgagaag

SEQ ID NO: 214882 - DNA, 33 bp, Homo sapien
tgtgaaaagccaaagagaattctgaccgagaag

SEQ ID NO: 214883 - DNA, 33 bp, Homo sapien
acaggatgagcaaaggcaaacaggcacaaaagc

SEQ ID NO: 214884 - DNA, 33 bp, Homo sapien
acaggatgagcaaaggtaaacaggcacaaaagc

SEQ ID NO: 214885 - DNA, 33 bp, Homo sapien
taaagcctaacaccacaggaatcacactgatta

SEQ ID NO: 214886 - DNA, 33 bp, Homo sapien
taaagcctaacaccaccggaatcacactgatta

SEQ ID NO: 214887 - DNA, 33 bp, Homo sapien
gtgataatgttttgaaacttaaaaagcactacc

SEQ ID NO: 214888 - DNA, 33 bp, Homo sapien
gtgataatgttttgaagcttaaaaagcactacc

SEQ ID NO: 214889 - DNA, 33 bp, Homo sapien
cagcattgcttacaaactggcacgtaaacataa

SEQ ID NO: 214890 - DNA, 33 bp, Homo sapien
cagcattgcttacaaattggcacgtaaacataa

SEQ ID NO: 214891 - DNA, 33 bp, Homo sapien
caaatatttgagcacaagaaactcctagtagtc

SEQ ID NO: 214892 - DNA, 33 bp, Homo sapien
caaatatttgagcacacgaaactcctagtagtc

SEQ ID NO: 214893 - DNA, 33 bp, Homo sapien
aatgtagacagaatgacggaaataaatgtcacc

SEQ ID NO: 214894 - DNA, 33 bp, Homo sapien
aatgtagacagaatgatggaaataaatgtcacc

SEQ ID NO: 214895 - DNA, 33 bp, Homo sapien
ggtcaaacaggctgaacgactgtatgctagggc

SEQ ID NO: 214896 - DNA, 33 bp, Homo sapien
ggtcaaacaggctgaatgactgtatgctagggc

SEQ ID NO: 214897 - DNA, 33 bp, Homo sapien
ttaatctgttgcacacggcatagctaggaatgc

SEQ ID NO: 214898 - DNA, 33 bp, Homo sapien
ttaatctgttgcacactgcatagctaggaatgc

SEQ ID NO: 214899 - DNA, 33 bp, Homo sapien
agaactataaccagataacccagacataacctt

SEQ ID NO: 214900 - DNA, 33 bp, Homo sapien
agaactataaccagatgacccagacataacctt

SEQ ID NO: 214901 - DNA, 33 bp, Homo sapien
atctccatcattcctgaattaggagtcctcatt

SEQ ID NO: 214902 - DNA, 33 bp, Homo sapien
atctccatcattcctggattaggagtcctcatt

SEQ ID NO: 214903 - DNA, 33 bp, Homo sapien
gccatcttcgatatcacctctcacttttgccat

SEQ ID NO: 214904 - DNA, 33 bp, Homo sapien
gccatcttcgatatcatctctcacttttgccat

SEQ ID NO: 214905 - DNA, 33 bp, Homo sapien
gtgaagggaaggtattaaaaaacatgggaagga

SEQ ID NO: 214906 - DNA, 33 bp, Homo sapien
gtgaagggaaggtattgaaaaacatgggaagga

SEQ ID NO: 214907 - DNA, 33 bp, Homo sapien
gagatcagaagagaccagggaatagcaaataga

SEQ ID NO: 214908 - DNA, 33 bp, Homo sapien
gagatcagaagagaccggggaatagcaaataga

SEQ ID NO: 214909 - DNA, 33 bp, Homo sapien
ataggactttataccaactactaatgtagagct

SEQ ID NO: 214910 - DNA, 33 bp, Homo sapien
ataggactttataccacctactaatgtagagct

SEQ ID NO: 214911 - DNA, 33 bp, Homo sapien
ttgattagtgacccagaaaaccaattctgaaat

SEQ ID NO: 214912 - DNA, 33 bp, Homo sapien
ttgattagtgacccaggaaaccaattctgaaat

SEQ ID NO: 214913 - DNA, 33 bp, Homo sapien
tttcttctttcaagcaacctactttctagttgg

SEQ ID NO: 214914 - DNA, 33 bp, Homo sapien
tttcttctttcaagcatcctactttctagttgg

SEQ ID NO: 214915 - DNA, 33 bp, Homo sapien
aagaacagggaaatacaggcacaatcagacaga

SEQ ID NO: 214916 - DNA, 33 bp, Homo sapien
aagaacagggaaatacgggcacaatcagacaga

SEQ ID NO: 214917 - DNA, 33 bp, Homo sapien
aataactggtcttcccaaatactgatgccagaa

SEQ ID NO: 214918 - DNA, 33 bp, Homo sapien
aataactggtcttcccgaatactgatgccagaa

SEQ ID NO: 214919 - DNA, 33 bp, Homo sapien
ggtgaggaagcaagaaaagaaactaattctaca

SEQ ID NO: 214920 - DNA, 33 bp, Homo sapien
ggtgaggaagcaagaagagaaactaattctaca

SEQ ID NO: 214921 - DNA, 33 bp, Homo sapien
ccagagactctgagaagatctggagtagggcct

SEQ ID NO: 214922 - DNA, 33 bp, Homo sapien
ccagagactctgagaatatctggagtagggcct

SEQ ID NO: 214923 - DNA, 33 bp, Homo sapien
ttcagtggattcaggacaggaatgaatcaagta

SEQ ID NO: 214924 - DNA, 33 bp, Homo sapien
ttcagtggattcaggataggaatgaatcaagta

SEQ ID NO: 214925 - DNA, 33 bp, Homo sapien
agtcaggcttcggaaaaggaaatagttaccctt

SEQ ID NO: 214926 - DNA, 33 bp, Homo sapien
agtcaggcttcggaaagggaaatagttaccctt

SEQ ID NO: 214927 - DNA, 33 bp, Homo sapien
gagccagtgaagcagaacgaaagatcaggagat

SEQ ID NO: 214928 - DNA, 33 bp, Homo sapien
gagccagtgaagcagagcgaaagatcaggagat

SEQ ID NO: 214929 - DNA, 33 bp, Homo sapien
gcaacctttagattggccaaagaggcagtgact

SEQ ID NO: 214930 - DNA, 33 bp, Homo sapien
gcaacctttagattggtcaaagaggcagtgact

SEQ ID NO: 214931 - DNA, 33 bp, Homo sapien
caagaagctcacaatgaagtgtatataaaagga

SEQ ID NO: 214932 - DNA, 33 bp, Homo sapien
caagaagctcacaatgtagtgtatataaaagga

SEQ ID NO: 214933 - DNA, 33 bp, Homo sapien
catactctagtagagactccacagagatcatta

SEQ ID NO: 214934 - DNA, 33 bp, Homo sapien
catactctagtagagattccacagagatcatta

SEQ ID NO: 214935 - DNA, 33 bp, Homo sapien
tggataaaactactgaagtcataaggcccaaat

SEQ ID NO: 214936 - DNA, 33 bp, Homo sapien
tggataaaactactgatgtcataaggcccaaat

SEQ ID NO: 214937 - DNA, 33 bp, Homo sapien
accattcattcacagaaccattcacttctgcac

SEQ ID NO: 214938 - DNA, 33 bp, Homo sapien
accattcattcacagatccattcacttctgcac

SEQ ID NO: 214939 - DNA, 33 bp, Homo sapien
ccaagattggtccagacacaaggggtacaaaga

SEQ ID NO: 214940 - DNA, 33 bp, Homo sapien
ccaagattggtccagatacaaggggtacaaaga

SEQ ID NO: 214941 - DNA, 33 bp, Homo sapien
tgagaaataacacaacacatttgaggaatggca

SEQ ID NO: 214942 - DNA, 33 bp, Homo sapien
tgagaaataacacaacgcatttgaggaatggca

SEQ ID NO: 214943 - DNA, 33 bp, Homo sapien
gtgttactgctttgaaatgttgatgaaaattta

SEQ ID NO: 214944 - DNA, 33 bp, Homo sapien
gtgttactgctttgaagtgttgatgaaaattta

SEQ ID NO: 214945 - DNA, 33 bp, Homo sapien
acttattatggtcttacgaatgttattttggaa

SEQ ID NO: 214946 - DNA, 33 bp, Homo sapien
acttattatggtcttatgaatgttattttggaa

SEQ ID NO: 214947 - DNA, 33 bp, Homo sapien
taaagcaagagcaaaagatgtttttgactgagg

SEQ ID NO: 214948 - DNA, 33 bp, Homo sapien
taaagcaagagcaaaatatgtttttgactgagg

SEQ ID NO: 214949 - DNA, 33 bp, Homo sapien
cttgtgggcctccagacctttaccctaaaacaa

SEQ ID NO: 214950 - DNA, 33 bp, Homo sapien
cttgtgggcctccagatctttaccctaaaacaa

SEQ ID NO: 214951 - DNA, 33 bp, Homo sapien
atgtaaatcgtgtatcaagtgaaaggctgatca

SEQ ID NO: 214952 - DNA, 33 bp, Homo sapien
atgtaaatcgtgtatcgagtgaaaggctgatca

SEQ ID NO: 214953 - DNA, 33 bp, Homo sapien
atctcctgaagtgaagaagcccaccaagaaaca

SEQ ID NO: 214954 - DNA, 33 bp, Homo sapien
atctcctgaagtgaaggagcccaccaagaaaca

SEQ ID NO: 214955 - DNA, 33 bp, Homo sapien
gcctccaggtcttaaactgatgctagctggagt

SEQ ID NO: 214956 - DNA, 33 bp, Homo sapien
gcctccaggtcttaaattgatgctagctggagt

SEQ ID NO: 214957 - DNA, 33 bp, Homo sapien
acacataataaatcagaatttccttgaaatatg

SEQ ID NO: 214958 - DNA, 33 bp, Homo sapien
acacataataaatcaggatttccttgaaatatg

SEQ ID NO: 214959 - DNA, 33 bp, Homo sapien
gtaaatgtaggaagaaaaccattgttctctggc

SEQ ID NO: 214960 - DNA, 33 bp, Homo sapien
gtaaatgtaggaagaagaccattgttctctggc

SEQ ID NO: 214961 - DNA, 33 bp, Homo sapien
acttatacagtcatggaatacagaaaacaaatg

SEQ ID NO: 214962 - DNA, 33 bp, Homo sapien
acttatacagtcatgggatacagaaaacaaatg

SEQ ID NO: 214963 - DNA, 33 bp, Homo sapien
gaaaggcttgacacccaccttgtgatcacggtc

SEQ ID NO: 214964 - DNA, 33 bp, Homo sapien
gaaaggcttgacaccctccttgtgatcacggtc

SEQ ID NO: 214965 - DNA, 33 bp, Homo sapien
acttatcaattgttccagcaagtggtgattact

SEQ ID NO: 214966 - DNA, 33 bp, Homo sapien
acttatcaattgttccggcaagtggtgattact

SEQ ID NO: 214967 - DNA, 33 bp, Homo sapien
agattgcaaaaatccaatcaagcctcaatgcca

SEQ ID NO: 214968 - DNA, 33 bp, Homo sapien
agattgcaaaaatccagtcaagcctcaatgcca

SEQ ID NO: 214969 - DNA, 33 bp, Homo sapien
gttgggtgaggacgtacgaagcaacagagaaga

SEQ ID NO: 214970 - DNA, 33 bp, Homo sapien
gttgggtgaggacgtatgaagcaacagagaaga

SEQ ID NO: 214971 - DNA, 33 bp, Homo sapien
ttgtatatttttctacagctggccataaattag

SEQ ID NO: 214972 - DNA, 33 bp, Homo sapien
ttgtatatttttctacggctggccataaattag

SEQ ID NO: 214973 - DNA, 33 bp, Homo sapien
cttcaaataaacgaatcaactgaggaacagcaa

SEQ ID NO: 214974 - DNA, 33 bp, Homo sapien
cttcaaataaacgaattaactgaggaacagcaa

SEQ ID NO: 214975 - DNA, 33 bp, Homo sapien
gataaagatgtttataccttacattccagttag

SEQ ID NO: 214976 - DNA, 33 bp, Homo sapien
gataaagatgtttatagcttacattccagttag

SEQ ID NO: 214977 - DNA, 33 bp, Homo sapien
tgggaagagcaagtaaaatgttgtctctgccat

SEQ ID NO: 214978 - DNA, 33 bp, Homo sapien
tgggaagagcaagtaagatgttgtctctgccat

SEQ ID NO: 214979 - DNA, 33 bp, Homo sapien
ataatctcagtgacttcaacatccatcatatag

SEQ ID NO: 214980 - DNA, 33 bp, Homo sapien
ataatctcagtgactttaacatccatcatatag

SEQ ID NO: 214981 - DNA, 33 bp, Homo sapien
acctaactctctgtcacgtcagtatcccatcag

SEQ ID NO: 214982 - DNA, 33 bp, Homo sapien
acctaactctctgtcatgtcagtatcccatcag

SEQ ID NO: 214983 - DNA, 33 bp, Homo sapien
atacaaagctactagcactcaggaatgttggaa

SEQ ID NO: 214984 - DNA, 33 bp, Homo sapien
atacaaagctactagcgctcaggaatgttggaa

SEQ ID NO: 214985 - DNA, 33 bp, Homo sapien
aatttagttggagaaaggagcttattatcataa

SEQ ID NO: 214986 - DNA, 33 bp, Homo sapien
aatttagttggagaaatgagcttattatcataa

SEQ ID NO: 214987 - DNA, 33 bp, Homo sapien
aatattttgtatctgccgacctcctttacaatc

SEQ ID NO: 214988 - DNA, 33 bp, Homo sapien
aatattttgtatctgctgacctcctttacaatc

SEQ ID NO: 214989 - DNA, 33 bp, Homo sapien
gctttagacaagtttacgaaggaggtcaagttt

SEQ ID NO: 214990 - DNA, 33 bp, Homo sapien
gctttagacaagtttaggaaggaggtcaagttt

SEQ ID NO: 214991 - DNA, 33 bp, Homo sapien
tacatcactggcctaagctacaaaaccctgaat

SEQ ID NO: 214992 - DNA, 33 bp, Homo sapien
tacatcactggcctaatctacaaaaccctgaat

SEQ ID NO: 214993 - DNA, 33 bp, Homo sapien
ggttctctagatgataagaagcagttacaataa

SEQ ID NO: 214994 - DNA, 33 bp, Homo sapien
ggttctctagatgataggaagcagttacaataa

SEQ ID NO: 214995 - DNA, 33 bp, Homo sapien
gtctttctatgtggcccacgctaacctcaaact

SEQ ID NO: 214996 - DNA, 33 bp, Homo sapien
gtctttctatgtggcctacgctaacctcaaact

SEQ ID NO: 214997 - DNA, 33 bp, Homo sapien
atggagaaataggggaaagtcaagtgaaaggtg

SEQ ID NO: 214998 - DNA, 33 bp, Homo sapien
atggagaaataggggacagtcaagtgaaaggtg

SEQ ID NO: 214999 - DNA, 33 bp, Homo sapien; identical to SEQ ID NO: 214997

SEQ ID NO: 215000 - DNA, 33 bp, Homo sapien; identical to SEQ ID NO: 214998

SEQ ID NO: 215001 - DNA, 33 bp, Homo sapien
atgcccatcttttgtccatgccaaggtgaccaa

SEQ ID NO: 215002 - DNA, 33 bp, Homo sapien
atgcccatcttttgtctatgccaaggtgaccaa

SEQ ID NO: 215003 - DNA, 33 bp, Homo sapien
ggcatttttttttctacgtgaaccaatcatgat

SEQ ID NO: 215004 - DNA, 33 bp, Homo sapien
ggcatttttttttctatgtgaaccaatcatgat

SEQ ID NO: 215005 - DNA, 33 bp, Homo sapien
actgtgtttctttttacgctttggagatgagaa

SEQ ID NO: 215006 - DNA, 33 bp, Homo sapien
actgtgtttctttttatgctttggagatgagaa

SEQ ID NO: 215007 - DNA, 33 bp, Homo sapien
ttttttcccaactcgactattggctttttgagg

SEQ ID NO: 215008 - DNA, 33 bp, Homo sapien
ttttttcccaactcgattattggctttttgagg

SEQ ID NO: 215009 - DNA, 33 bp, Homo sapien
cttctaagttcccacaagaagcaataaggatgc

SEQ ID NO: 215010 - DNA, 33 bp, Homo sapien
cttctaagttcccacaggaagcaataaggatgc

SEQ ID NO: 215011 - DNA, 33 bp, Homo sapien
ataatacggcatgatcaaaacacaatattgact

SEQ ID NO: 215012 - DNA, 33 bp, Homo sapien
ataatacggcatgatcgaaacacaatattgact

SEQ ID NO: 215013 - DNA, 33 bp, Homo sapien
gtctatgccagcattcgataagtttgtgttggg

SEQ ID NO: 215014 - DNA, 33 bp, Homo sapien
gtctatgccagcattctataagtttgtgttggg

SEQ ID NO: 215015 - DNA, 33 bp, Homo sapien
acacattcatcctaacaacagtgagatatgaaa

SEQ ID NO: 215016 - DNA, 33 bp, Homo sapien
acacattcatcctaacgacagtgagatatgaaa

SEQ ID NO: 215017 - DNA, 33 bp, Homo sapien
tctctttaatatgacccgaaaaataacttccag

SEQ ID NO: 215018 - DNA, 33 bp, Homo sapien
tctctttaatatgacctgaaaaataacttccag

SEQ ID NO: 215019 - DNA, 33 bp, Homo sapien
agaaagttcagcacaacgtagtacatatctacg

SEQ ID NO: 215020 - DNA, 33 bp, Homo sapien
agaaagttcagcacaatgtagtacatatctacg

SEQ ID NO: 215021 - DNA, 33 bp, Homo sapien
gctgggaagtgctaagcccagaaatcgagtttt

SEQ ID NO: 215022 - DNA, 33 bp, Homo sapien
gctgggaagtgctaagtccagaaatcgagtttt

SEQ ID NO: 215023 - DNA, 33 bp, Homo sapien
ctttgcctaatacttacgatttgctctcagtga

SEQ ID NO: 215024 - DNA, 33 bp, Homo sapien
ctttgcctaatacttatgatttgctctcagtga

SEQ ID NO: 215025 - DNA, 33 bp, Homo sapien
tcagacgcaggagagcagaagaggaggcatatc

SEQ ID NO: 215026 - DNA, 33 bp, Homo sapien
tcagacgcaggagagcggaagaggaggcatatc

SEQ ID NO: 215027 - DNA, 33 bp, Homo sapien
attggcacaagtgataaaatttgaaaatggatt

SEQ ID NO: 215028 - DNA, 33 bp, Homo sapien
attggcacaagtgatacaatttgaaaatggatt

SEQ ID NO: 215029 - DNA, 33 bp, Homo sapien
aactgtagacatttgacgtggagttcatctgat

SEQ ID NO: 215030 - DNA, 33 bp, Homo sapien
aactgtagacatttgatgtggagttcatctgat

SEQ ID NO: 215031 - DNA, 33 bp, Homo sapien
ctgattggtactatgacgtttaaagatttcctt

SEQ ID NO: 215032 - DNA, 33 bp, Homo sapien
ctgattggtactatgatgtttaaagatttcctt

SEQ ID NO: 215033 - DNA, 33 bp, Homo sapien
aggctctaggtcaccacatattcataatccact

SEQ ID NO: 215034 - DNA, 33 bp, Homo sapien
aggctctaggtcaccatatattcataatccact

SEQ ID NO: 215035 - DNA, 33 bp, Homo sapien
tatgtattgcccaacacaaaatatttcatttca

SEQ ID NO: 215036 - DNA, 33 bp, Homo sapien
tatgtattgcccaacataaaatatttcatttca

SEQ ID NO: 215037 - DNA, 33 bp, Homo sapien
aagccacgcctagatcactactccacagaaact

SEQ ID NO: 215038 - DNA, 33 bp, Homo sapien
aagccacgcctagatcgctactccacagaaact

SEQ ID NO: 215039 - DNA, 33 bp, Homo sapien
ctaactgacaggattcactgacatagttacgtg

SEQ ID NO: 215040 - DNA, 33 bp, Homo sapien
ctaactgacaggattcgctgacatagttacgtg

SEQ ID NO: 215041 - DNA, 33 bp, Homo sapien
attttcatacaacagaatacagttttgcgatga

SEQ ID NO: 215042 - DNA, 33 bp, Homo sapien
attttcatacaacagagtacagttttgcgatga

SEQ ID NO: 215043 - DNA, 33 bp, Homo sapien
tgagggcagagaactacaccctgcagatttttt

SEQ ID NO: 215044 - DNA, 33 bp, Homo sapien
tgagggcagagaactataccctgcagatttttt

SEQ ID NO: 215045 - DNA, 33 bp, Homo sapien
cataaggtaaaaagcactagggccaagaaaaga

SEQ ID NO: 215046 - DNA, 33 bp, Homo sapien
cataaggtaaaaagcattagggccaagaaaaga

SEQ ID NO: 215047 - DNA, 33 bp, Homo sapien
ataagcctttattcaaacatggttcaatatgac

SEQ ID NO: 215048 - DNA, 33 bp, Homo sapien
ataagcctttattcaagcatggttcaatatgac

SEQ ID NO: 215049 - DNA, 33 bp, Homo sapien
acagggagacattaccaaggagtgtagggtagg

SEQ ID NO: 215050 - DNA, 33 bp, Homo sapien
acagggagacattaccgaggagtgtagggtagg

SEQ ID NO: 215051 - DNA, 33 bp, Homo sapien
aatctaagtgccaggtaaatacttgttatactg

SEQ ID NO: 215052 - DNA, 33 bp, Homo sapien
aatctaagtgccaggttaatacttgttatactg

SEQ ID NO: 215053 - DNA, 33 bp, Homo sapien
ttgcatctgtgtattcaaacatccacagatcaa

SEQ ID NO: 215054 - DNA, 33 bp, Homo sapien
ttgcatctgtgtattcgaacatccacagatcaa

SEQ ID NO: 215055 - DNA, 33 bp, Homo sapien
ggaattaatgtacctaagtcaaacacaaaataa

SEQ ID NO: 215056 - DNA, 33 bp, Homo sapien
ggaattaatgtacctacgtcaaacacaaaataa

SEQ ID NO: 215057 - DNA, 33 bp, Homo sapien
cccctgcttaggattacccgtccctgactggct

SEQ ID NO: 215058 - DNA, 33 bp, Homo sapien
cccctgcttaggattatccgtccctgactggct

SEQ ID NO: 215059 - DNA, 33 bp, Homo sapien
atttattgattttgtacggcaatggcatatcca

SEQ ID NO: 215060 - DNA, 33 bp, Homo sapien
atttattgattttgtatggcaatggcatatcca

SEQ ID NO: 215061 - DNA, 33 bp, Homo sapien
atattacacagtacaactctggagtggtcttct

SEQ ID NO: 215062 - DNA, 33 bp, Homo sapien
atattacacagtacaattctggagtggtcttct

SEQ ID NO: 215063 - DNA, 33 bp, Homo sapien
ttagtgaggatccaagacttcaatatatacacg

SEQ ID NO: 215064 - DNA, 33 bp, Homo sapien
ttagtgaggatccaaggcttcaatatatacacg

SEQ ID NO: 215065 - DNA, 33 bp, Homo sapien
aaaggcattagcaagtcaagtatgttaacacac

SEQ ID NO: 215066 - DNA, 33 bp, Homo sapien
aaaggcattagcaagtgaagtatgttaacacac

SEQ ID NO: 215067 - DNA, 33 bp, Homo sapien
ttccaatcatgttgaacgtaatttccctcttcc

SEQ ID NO: 215068 - DNA, 33 bp, Homo sapien
ttccaatcatgttgaatgtaatttccctcttcc

SEQ ID NO: 215069 - DNA, 33 bp, Homo sapien
gggcacacactttttccaaaacgcaaagtctac

SEQ ID NO: 215070 - DNA, 33 bp, Homo sapien
gggcacacactttttctaaaacgcaaagtctac

SEQ ID NO: 215071 - DNA, 33 bp, Homo sapien
gactgtgtttaacatacggagcttagcttttca

SEQ ID NO: 215072 - DNA, 33 bp, Homo sapien
gactgtgtttaacatatggagcttagcttttca

SEQ ID NO: 215073 - DNA, 33 bp, Homo sapien
agtttccaaatacttgaatgaatatgacgtgaa

SEQ ID NO: 215074 - DNA, 33 bp, Homo sapien
agtttccaaatacttggatgaatatgacgtgaa

SEQ ID NO: 215075 - DNA, 33 bp, Homo sapien
gaggggtaagtgaaaacagccaaatgaacaagc

SEQ ID NO: 215076 - DNA, 33 bp, Homo sapien
gaggggtaagtgaaaatagccaaatgaacaagc

SEQ ID NO: 215077 - DNA, 33 bp, Homo sapien
cagaaactgactttagaactctatttagggcta

SEQ ID NO: 215078 - DNA, 33 bp, Homo sapien
cagaaactgactttaggactctatttagggcta

SEQ ID NO: 215079 - DNA, 33 bp, Homo sapien
agctagaaccttcccaatgataaaatggaaagt

SEQ ID NO: 215080 - DNA, 33 bp, Homo sapien
agctagaaccttcccagtgataaaatggaaagt

SEQ ID NO: 215081 - DNA, 33 bp, Homo sapien
atccaaaagaaggtcaagggttacctggaagtg

SEQ ID NO: 215082 - DNA, 33 bp, Homo sapien
atccaaaagaaggtcaggggttacctggaagtg

SEQ ID NO: 215083 - DNA, 33 bp, Homo sapien
gcagcactgattcaataactctgggtaagtggt

SEQ ID NO: 215084 - DNA, 33 bp, Homo sapien
gcagcactgattcaatgactctgggtaagtggt

SEQ ID NO: 215085 - DNA, 33 bp, Homo sapien
cctggcctctctaagtaactcgccttccccacc

SEQ ID NO: 215086 - DNA, 33 bp, Homo sapien
cctggcctctctaagtgactcgccttccccacc

SEQ ID NO: 215087 - DNA, 33 bp, Homo sapien
gatgtttatatatgaaagagctttgattaattg

SEQ ID NO: 215088 - DNA, 33 bp, Homo sapien
gatgtttatatatgaaggagctttgattaattg

SEQ ID NO: 215089 - DNA, 33 bp, Homo sapien
tgtgtgttaatgttcactcatttccccatttag

SEQ ID NO: 215090 - DNA, 33 bp, Homo sapien
tgtgtgttaatgttcattcatttccccatttag

SEQ ID NO: 215091 - DNA, 33 bp, Homo sapien
catagaacgaggtatacggatggcagaagaatt

SEQ ID NO: 215092 - DNA, 33 bp, Homo sapien
catagaacgaggtatatggatggcagaagaatt

SEQ ID NO: 215093 - DNA, 33 bp, Homo sapien
tgtgaagggtgaaaagcctttgtctagatttag

SEQ ID NO: 215094 - DNA, 33 bp, Homo sapien
tgtgaagggtgaaaagtctttgtctagatttag

SEQ ID NO: 215095 - DNA, 33 bp, Homo sapien
acttatagtgcccagaagttatataaaaagaca

SEQ ID NO: 215096 - DNA, 33 bp, Homo sapien
acttatagtgcccagacgttatataaaaagaca

SEQ ID NO: 215097 - DNA, 33 bp, Homo sapien
aattataaaacagagaatcatggcccttcaatc

SEQ ID NO: 215098 - DNA, 33 bp, Homo sapien
aattataaaacagagattcatggcccttcaatc

SEQ ID NO: 215099 - DNA, 33 bp, Homo sapien
taacatctctacaaccaaatctttttacagacc

SEQ ID NO: 215100 - DNA, 33 bp, Homo sapien
taacatctctacaaccgaatctttttacagacc

SEQ ID NO: 215101 - DNA, 33 bp, Homo sapien
agttttaaacagctccacagtgttccatgtcat

SEQ ID NO: 215102 - DNA, 33 bp, Homo sapien
agttttaaacagctccgcagtgttccatgtcat

SEQ ID NO: 215103 - DNA, 33 bp, Homo sapien
gagtaagtccttacccaaaaataatgaagcaac

SEQ ID NO: 215104 - DNA, 33 bp, Homo sapien
gagtaagtccttacccgaaaataatgaagcaac

SEQ ID NO: 215105 - DNA, 33 bp, Homo sapien
gaaaagtctgatggctgaaaagagctacatctg

SEQ ID NO: 215106 - DNA, 33 bp, Homo sapien
gaaaagtctgatggcttaaaagagctacatctg

SEQ ID NO: 215107 - DNA, 33 bp, Homo sapien
gggtactctataccaaatgggagactcgtgtat

SEQ ID NO: 215108 - DNA, 33 bp, Homo sapien
gggtactctataccaagtgggagactcgtgtat

SEQ ID NO: 215109 - DNA, 33 bp, Homo sapien
tcattaccttatggcaaaaattcccagcaacta

SEQ ID NO: 215110 - DNA, 33 bp, Homo sapien
tcattaccttatggcagaaattcccagcaacta

SEQ ID NO: 215111 - DNA, 33 bp, Homo sapien
cgccgcgtacttgagaaaagaagaggaaaaaga

SEQ ID NO: 215112 - DNA, 33 bp, Homo sapien
cgccgcgtacttgagacaagaagaggaaaaaga

SEQ ID NO: 215113 - DNA, 33 bp, Homo sapien
tggagattgatagaaacattgatggaatgaggg

SEQ ID NO: 215114 - DNA, 33 bp, Homo sapien
tggagattgatagaaagattgatggaatgaggg

SEQ ID NO: 215115 - DNA, 33 bp, Homo sapien
taggccaaaaatgaacaactctgctaattcacc

SEQ ID NO: 215116 - DNA, 33 bp, Homo sapien
taggccaaaaatgaacgactctgctaattcacc

SEQ ID NO: 215117 - DNA, 33 bp, Homo sapien
ttacaatctctgcttaacaaactggagcaggct

SEQ ID NO: 215118 - DNA, 33 bp, Homo sapien
ttacaatctctgcttatcaaactggagcaggct

SEQ ID NO: 215119 - DNA, 33 bp, Homo sapien
gcctactgagacaaaaaagcaaatgaacaactc

SEQ ID NO: 215120 - DNA, 33 bp, Homo sapien
gcctactgagacaaaatagcaaatgaacaactc

SEQ ID NO: 215121 - DNA, 33 bp, Homo sapien
tggaacaaagacgaaaacttttgatatgtgcta

SEQ ID NO: 215122 - DNA, 33 bp, Homo sapien
tggaacaaagacgaaaccttttgatatgtgcta

SEQ ID NO: 215123 - DNA, 33 bp, Homo sapien
agatacatacttttccactttcatccttctttt

SEQ ID NO: 215124 - DNA, 33 bp, Homo sapien
agatacatacttttccgctttcatccttctttt

SEQ ID NO: 215125 - DNA, 33 bp, Homo sapien
gtgttgttcgggaatacatacagcaaacataaa

SEQ ID NO: 215126 - DNA, 33 bp, Homo sapien
gtgttgttcgggaatatatacagcaaacataaa

SEQ ID NO: 215127 - DNA, 33 bp, Homo sapien
ccaattttgacaataaataacacaaacccattt

SEQ ID NO: 215128 - DNA, 33 bp, Homo sapien
ccaattttgacaataagtaacacaaacccattt

SEQ ID NO: 215129 - DNA, 33 bp, Homo sapien
aagcaacttgattgcacattactgcctttcctt

SEQ ID NO: 215130 - DNA, 33 bp, Homo sapien
aagcaacttgattgcatattactgcctttcctt

SEQ ID NO: 215131 - DNA, 33 bp, Homo sapien
taactaaagcctagaacgatttcaggagctgcc

SEQ ID NO: 215132 - DNA, 33 bp, Homo sapien
taactaaagcctagaatgatttcaggagctgcc

SEQ ID NO: 215133 - DNA, 33 bp, Homo sapien
tgtctatcttgtgccaataccgtactatcttgg

SEQ ID NO: 215134 - DNA, 33 bp, Homo sapien
tgtctatcttgtgccagtaccgtactatcttgg

SEQ ID NO: 215135 - DNA, 33 bp, Homo sapien
aaatcatttaaaagcacagtagttttctgtcat

SEQ ID NO: 215136 - DNA, 33 bp, Homo sapien
aaatcatttaaaagcatagtagttttctgtcat

SEQ ID NO: 215137 - DNA, 33 bp, Homo sapien
aggaacctggagaagaagagcaaaataaaccta

SEQ ID NO: 215138 - DNA, 33 bp, Homo sapien
aggaacctggagaagaggagcaaaataaaccta

SEQ ID NO: 215139 - DNA, 33 bp, Homo sapien
aagataaaaactgacacaatcagaatggctact

SEQ ID NO: 215140 - DNA, 33 bp, Homo sapien
aagataaaaactgacataatcagaatggctact

SEQ ID NO: 215141 - DNA, 33 bp, Homo sapien
acaggataaagagcaacaaatacgatttaggaa

SEQ ID NO: 215142 - DNA, 33 bp, Homo sapien
acaggataaagagcaataaatacgatttaggaa

SEQ ID NO: 215143 - DNA, 33 bp, Homo sapien
tttaaatcttcttcccacagctttcttcactgt

SEQ ID NO: 215144 - DNA, 33 bp, Homo sapien
tttaaatcttcttcccgcagctttcttcactgt

SEQ ID NO: 215145 - DNA, 33 bp, Homo sapien
cagcaagaaggtactccaaaaggctaatctgtg

SEQ ID NO: 215146 - DNA, 33 bp, Homo sapien
cagcaagaaggtactctaaaaggctaatctgtg

SEQ ID NO: 215147 - DNA, 33 bp, Homo sapien
tattgttcaaagtaacaggaatgataaaaattg

SEQ ID NO: 215148 - DNA, 33 bp, Homo sapien
tattgttcaaagtaacgggaatgataaaaattg

SEQ ID NO: 215149 - DNA, 33 bp, Homo sapien
cttacccagggactaccatgtaatcattacact

SEQ ID NO: 215150 - DNA, 33 bp, Homo sapien
cttacccagggactacgatgtaatcattacact

SEQ ID NO: 215151 - DNA, 33 bp, Homo sapien
tagtcttagaaaaaaaaagtcttcagagagaca

SEQ ID NO: 215152 - DNA, 33 bp, Homo sapien
tagtcttagaaaaaaacagtcttcagagagaca

SEQ ID NO: 215153 - DNA, 33 bp, Homo sapien
aaaaatagccatttcacgaggctgtcaactcta

SEQ ID NO: 215154 - DNA, 33 bp, Homo sapien
aaaaatagccatttcatgaggctgtcaactcta

SEQ ID NO: 215155 - DNA, 33 bp, Homo sapien
acagaacctttaaaagccctggaagagactgaa

SEQ ID NO: 215156 - DNA, 33 bp, Homo sapien
acagaacctttaaaagtcctggaagagactgaa

SEQ ID NO: 215157 - DNA, 33 bp, Homo sapien
ggaagtctctttctcaacgtaatgcttatgatg

SEQ ID NO: 215158 - DNA, 33 bp, Homo sapien
ggaagtctctttctcagcgtaatgcttatgatg

SEQ ID NO: 215159 - DNA, 33 bp, Homo sapien
gtgggaaagcagagaaagaattgtgcctatgac

SEQ ID NO: 215160 - DNA, 33 bp, Homo sapien
gtgggaaagcagagaaggaattgtgcctatgac

SEQ ID NO: 215161 - DNA, 33 bp, Homo sapien
tatgtgccaggctaaaagttaggtgctaggtac

SEQ ID NO: 215162 - DNA, 33 bp, Homo sapien
tatgtgccaggctaaatgttaggtgctaggtac

SEQ ID NO: 215163 - DNA, 33 bp, Homo sapien
tgctggagccagattacagtaaatcttgaaaac

SEQ ID NO: 215164 - DNA, 33 bp, Homo sapien
tgctggagccagattatagtaaatcttgaaaac

SEQ ID NO: 215165 - DNA, 33 bp, Homo sapien
caagaggcaaaacttgaaagtggggagcggact

SEQ ID NO: 215166 - DNA, 33 bp, Homo sapien
caagaggcaaaacttggaagtggggagcggact

SEQ ID NO: 215167 - DNA, 33 bp, Homo sapien
tttacacaaaatatgggaggagttagggaagtg

SEQ ID NO: 215168 - DNA, 33 bp, Homo sapien
tttacacaaaatatggtaggagttagggaagtg

SEQ ID NO: 215169 - DNA, 33 bp, Homo sapien
tcttagtgggccatcacgtacagctacttttac

SEQ ID NO: 215170 - DNA, 33 bp, Homo sapien
tcttagtgggccatcatgtacagctacttttac

SEQ ID NO: 215171 - DNA, 33 bp, Homo sapien
tcacaaggcagcataccggttgctcctggagca

SEQ ID NO: 215172 - DNA, 33 bp, Homo sapien
tcacaaggcagcatactggttgctcctggagca

SEQ ID NO: 215173 - DNA, 33 bp, Homo sapien
catgatgaaaccaagaccatttatatattgtcc

SEQ ID NO: 215174 - DNA, 33 bp, Homo sapien
catgatgaaaccaagatcatttatatattgtcc

SEQ ID NO: 215175 - DNA, 33 bp, Homo sapien
aacagcctgacacttacaatgctaataatttct

SEQ ID NO: 215176 - DNA, 33 bp, Homo sapien
aacagcctgacacttataatgctaataatttct

SEQ ID NO: 215177 - DNA, 33 bp, Homo sapien
taagttgctggttgcaatatggtactaacttga

SEQ ID NO: 215178 - DNA, 33 bp, Homo sapien
taagttgctggttgcagtatggtactaacttga

SEQ ID NO: 215179 - DNA, 33 bp, Homo sapien
aaaacaatgaaaaaccaaatcctaacacagtgt

SEQ ID NO: 215180 - DNA, 33 bp, Homo sapien
aaaacaatgaaaaaccgaatcctaacacagtgt

SEQ ID NO: 215181 - DNA, 33 bp, Homo sapien
ccacagtaggacaaatgatgagaagtggagatg

SEQ ID NO: 215182 - DNA, 33 bp, Homo sapien
ccacagtaggacaaattatgagaagtggagatg

SEQ ID NO: 215183 - DNA, 33 bp, Homo sapien
ttagcagcacttcttccacgtgggcagccacca

SEQ ID NO: 215184 - DNA, 33 bp, Homo sapien
ttagcagcacttcttctacgtgggcagccacca

SEQ ID NO: 215185 - DNA, 33 bp, Homo sapien
actgttggttaccatgacaacagaaagaaccaa

SEQ ID NO: 215186 - DNA, 33 bp, Homo sapien
actgttggttaccatggcaacagaaagaaccaa

SEQ ID NO: 215187 - DNA, 33 bp, Homo sapien
aaagatcttaagaaaactgatgaatccaatagg

SEQ ID NO: 215188 - DNA, 33 bp, Homo sapien
aaagatcttaagaaaattgatgaatccaatagg

SEQ ID NO: 215189 - DNA, 33 bp, Homo sapien
gaaaatacacaactcgaagactgtcataaaatt

SEQ ID NO: 215190 - DNA, 33 bp, Homo sapien
gaaaatacacaactcggagactgtcataaaatt

SEQ ID NO: 215191 - DNA, 33 bp, Homo sapien
agccactgctcttcacggagataatcctagatg

SEQ ID NO: 215192 - DNA, 33 bp, Homo sapien
agccactgctcttcactgagataatcctagatg

SEQ ID NO: 215193 - DNA, 33 bp, Homo sapien
ctccagagagtgtccactagagtttgaaattac

SEQ ID NO: 215194 - DNA, 33 bp, Homo sapien
ctccagagagtgtccattagagtttgaaattac

SEQ ID NO: 215195 - DNA, 33 bp, Homo sapien
attctgttcctactgaaagatatggcaatcacc

SEQ ID NO: 215196 - DNA, 33 bp, Homo sapien
attctgttcctactgagagatatggcaatcacc

SEQ ID NO: 215197 - DNA, 33 bp, Homo sapien
cttgaagcaccttttagactatcttccttttct

SEQ ID NO: 215198 - DNA, 33 bp, Homo sapien
cttgaagcaccttttatactatcttccttttct

SEQ ID NO: 215199 - DNA, 33 bp, Homo sapien
gccaaagaccaaaaccccttcataaactgcagt

SEQ ID NO: 215200 - DNA, 33 bp, Homo sapien
gccaaagaccaaaacctcttcataaactgcagt

SEQ ID NO: 215201 - DNA, 33 bp, Homo sapien
taccaatcagaaattcactgaatctacctatga

SEQ ID NO: 215202 - DNA, 33 bp, Homo sapien
taccaatcagaaattcgctgaatctacctatga

SEQ ID NO: 215203 - DNA, 33 bp, Homo sapien
aacaattatcaacttacggctaatcttgtttta

SEQ ID NO: 215204 - DNA, 33 bp, Homo sapien
aacaattatcaacttatggctaatcttgtttta

SEQ ID NO: 215205 - DNA, 33 bp, Homo sapien
cacttagaaaattacaactttgccatccaagcc

SEQ ID NO: 215206 - DNA, 33 bp, Homo sapien
cacttagaaaattacagctttgccatccaagcc

SEQ ID NO: 215207 - DNA, 33 bp, Homo sapien
aatgacaatatgtcacaaatcaaggatcatgaa

SEQ ID NO: 215208 - DNA, 33 bp, Homo sapien
aatgacaatatgtcacgaatcaaggatcatgaa

SEQ ID NO: 215209 - DNA, 33 bp, Homo sapien
agtctgataggtataacagttatcgagttcttc

SEQ ID NO: 215210 - DNA, 33 bp, Homo sapien
agtctgataggtataatagttatcgagttcttc

SEQ ID NO: 215211 - DNA, 33 bp, Homo sapien
tggagtgtggttattaaatgtgtgtcctacttc

SEQ ID NO: 215212 - DNA, 33 bp, Homo sapien
tggagtgtggttattacatgtgtgtcctacttc

SEQ ID NO: 215213 - DNA, 33 bp, Homo sapien
acatactgagtgcctacagtgtttcctacacat

SEQ ID NO: 215214 - DNA, 33 bp, Homo sapien
acatactgagtgcctatagtgtttcctacacat

SEQ ID NO: 215215 - DNA, 33 bp, Homo sapien
ctgcgtcctgtgaaagacagaatcacaacattt

SEQ ID NO: 215216 - DNA, 33 bp, Homo sapien
ctgcgtcctgtgaaaggcagaatcacaacattt

SEQ ID NO: 215217 - DNA, 33 bp, Homo sapien
taaactcccatggaaaatattcacagacacaga

SEQ ID NO: 215218 - DNA, 33 bp, Homo sapien
taaactcccatggaaagtattcacagacacaga

SEQ ID NO: 215219 - DNA, 33 bp, Homo sapien
gaaggataacatgagaccaagaaaaagtcccta

SEQ ID NO: 215220 - DNA, 33 bp, Homo sapien
gaaggataacatgagagcaagaaaaagtcccta

SEQ ID NO: 215221 - DNA, 33 bp, Homo sapien; identical to SEQ ID NO: 215219

SEQ ID NO: 215222 - DNA, 33 bp, Homo sapien; identical to SEQ ID NO: 215220

SEQ ID NO: 215223 - DNA, 33 bp, Homo sapien
atggaaacactaaagaacacagtttaagacaag

SEQ ID NO: 215224 - DNA, 33 bp, Homo sapien
atggaaacactaaagagcacagtttaagacaag

SEQ ID NO: 215225 - DNA, 33 bp, Homo sapien
aatgatatattgtagacaaatgaaaatcacaag

SEQ ID NO: 215226 - DNA, 33 bp, Homo sapien
aatgatatattgtagataaatgaaaatcacaag

SEQ ID NO: 215227 - DNA, 33 bp, Homo sapien
taaaacactctttgtacgcagcaaggaaagaat

SEQ ID NO: 215228 - DNA, 33 bp, Homo sapien
taaaacactctttgtatgcagcaaggaaagaat

SEQ ID NO: 215229 - DNA, 33 bp, Homo sapien
gaaatgcagcatctcaaatagttcagcagggaa

SEQ ID NO: 215230 - DNA, 33 bp, Homo sapien
gaaatgcagcatctcagatagttcagcagggaa

SEQ ID NO: 215231 - DNA, 33 bp, Homo sapien
cagccatcagatccaacttctgagtttctaagg

SEQ ID NO: 215232 - DNA, 33 bp, Homo sapien
cagccatcagatccaagttctgagtttctaagg

SEQ ID NO: 215233 - DNA, 33 bp, Homo sapien
tactcatttgaaatgacgtgtaaagagttgcag

SEQ ID NO: 215234 - DNA, 33 bp, Homo sapien
tactcatttgaaatgatgtgtaaagagttgcag

SEQ ID NO: 215235 - DNA, 33 bp, Homo sapien
tttttctatgactagcgaacagaggagaggaac

SEQ ID NO: 215236 - DNA, 33 bp, Homo sapien
tttttctatgactagctaacagaggagaggaac

SEQ ID NO: 215237 - DNA, 33 bp, Homo sapien
cagccccacaagtgtagattcataaatgctggt

SEQ ID NO: 215238 - DNA, 33 bp, Homo sapien
cagccccacaagtgtatattcataaatgctggt

SEQ ID NO: 215239 - DNA, 33 bp, Homo sapien
aattattgtatttacacagacatttcttttgta

SEQ ID NO: 215240 - DNA, 33 bp, Homo sapien
aattattgtatttacagagacatttcttttgta

SEQ ID NO: 215241 - DNA, 33 bp, Homo sapien
tcatatgtcaatattcccttcttcaatttttga

SEQ ID NO: 215242 - DNA, 33 bp, Homo sapien
tcatatgtcaatattctcttcttcaatttttga

SEQ ID NO: 215243 - DNA, 33 bp, Homo sapien
gtggttaagttggcgaccttgaaatggggagat

SEQ ID NO: 215244 - DNA, 33 bp, Homo sapien
gtggttaagttggcgatcttgaaatggggagat

SEQ ID NO: 215245 - DNA, 33 bp, Homo sapien
aggcgtttccttaccaacctatgtacaaaaagc

SEQ ID NO: 215246 - DNA, 33 bp, Homo sapien
aggcgtttccttaccaccctatgtacaaaaagc

SEQ ID NO: 215247 - DNA, 33 bp, Homo sapien
tatactccattcatgacacatgatacaaatgca

SEQ ID NO: 215248 - DNA, 33 bp, Homo sapien
tatactccattcatgagacatgatacaaatgca

SEQ ID NO: 215249 - DNA, 33 bp, Homo sapien
caacacagaaatatctaaccactgtgcaaagga

SEQ ID NO: 215250 - DNA, 33 bp, Homo sapien
caacacagaaatatctcaccactgtgcaaagga

SEQ ID NO: 215251 - DNA, 33 bp, Homo sapien
tcctgttagtttaaaaatacacatatacacaca

SEQ ID NO: 215252 - DNA, 33 bp, Homo sapien
tcctgttagtttaaaattacacatatacacaca

SEQ ID NO: 215253 - DNA, 33 bp, Homo sapien
cgcctctgtagccaaaactaataaacaatggaa

SEQ ID NO: 215254 - DNA, 33 bp, Homo sapien
cgcctctgtagccaaagctaataaacaatggaa

SEQ ID NO: 215255 - DNA, 33 bp, Homo sapien
agtttctggcttgtaaatcaaataattgccctt

SEQ ID NO: 215256 - DNA, 33 bp, Homo sapien
agtttctggcttgtaagtcaaataattgccctt

SEQ ID NO: 215257 - DNA, 33 bp, Homo sapien
caggtcctctaatccacgcccccattcatctta

SEQ ID NO: 215258 - DNA, 33 bp, Homo sapien
caggtcctctaatccatgcccccattcatctta

SEQ ID NO: 215259 - DNA, 33 bp, Homo sapien
tattcaatgatgtcaactgttatccttcctcat

SEQ ID NO: 215260 - DNA, 33 bp, Homo sapien
tattcaatgatgtcaattgttatccttcctcat

SEQ ID NO: 215261 - DNA, 33 bp, Homo sapien
tgagtacaattgaaaacttctgtgtggcaaaaa

SEQ ID NO: 215262 - DNA, 33 bp, Homo sapien
tgagtacaattgaaaagttctgtgtggcaaaaa

SEQ ID NO: 215263 - DNA, 33 bp, Homo sapien
agatatcgatgaatggccacttaataaatgtca

SEQ ID NO: 215264 - DNA, 33 bp, Homo sapien
agatatcgatgaatggtcacttaataaatgtca

SEQ ID NO: 215265 - DNA, 33 bp, Homo sapien
ggacgggattatagacagaggaaggagactggc

SEQ ID NO: 215266 - DNA, 33 bp, Homo sapien
ggacgggattatagactgaggaaggagactggc

SEQ ID NO: 215267 - DNA, 33 bp, Homo sapien
cgatgttgacaacaagaaagcctaaatctgcat

SEQ ID NO: 215268 - DNA, 33 bp, Homo sapien
cgatgttgacaacaagcaagcctaaatctgcat

SEQ ID NO: 215269 - DNA, 33 bp, Homo sapien
gagacctcaccaaagaacatacagagatgacaa

SEQ ID NO: 215270 - DNA, 33 bp, Homo sapien
gagacctcaccaaagaccatacagagatgacaa

SEQ ID NO: 215271 - DNA, 33 bp, Homo sapien
aataattcaaccaaaagtatcaacacagcacca

SEQ ID NO: 215272 - DNA, 33 bp, Homo sapien
aataattcaaccaaaattatcaacacagcacca

SEQ ID NO: 215273 - DNA, 33 bp, Homo sapien
agaaatgaaaggcaacagtgaacagtgtttgct

SEQ ID NO: 215274 - DNA, 33 bp, Homo sapien
agaaatgaaaggcaacggtgaacagtgtttgct

SEQ ID NO: 215275 - DNA, 33 bp, Homo sapien
gtactgtaaatgtccacctgattttatttatga

SEQ ID NO: 215276 - DNA, 33 bp, Homo sapien
gtactgtaaatgtccatctgattttatttatga

SEQ ID NO: 215277 - DNA, 33 bp, Homo sapien
gctcaattcatatttcacttcatataggaagct

SEQ ID NO: 215278 - DNA, 33 bp, Homo sapien
gctcaattcatatttcgcttcatataggaagct

SEQ ID NO: 215279 - DNA, 33 bp, Homo sapien
accaaatagagaacaacgccatgcactgggaaa

SEQ ID NO: 215280 - DNA, 33 bp, Homo sapien
accaaatagagaacaatgccatgcactgggaaa

SEQ ID NO: 215281 - DNA, 33 bp, Homo sapien
cacattcacatccagaatatttcttttcctatt

SEQ ID NO: 215282 - DNA, 33 bp, Homo sapien
cacattcacatccagagtatttcttttcctatt

SEQ ID NO: 215283 - DNA, 33 bp, Homo sapien
aatggaagaagagatacaaaaagttcagatatt

SEQ ID NO: 215284 - DNA, 33 bp, Homo sapien
aatggaagaagagatagaaaaagttcagatatt

SEQ ID NO: 215285 - DNA, 33 bp, Homo sapien
accacttcatactctaacaaaaacctaaaaggc

SEQ ID NO: 215286 - DNA, 33 bp, Homo sapien
accacttcatactctagcaaaaacctaaaaggc

SEQ ID NO: 215287 - DNA, 33 bp, Homo sapien
aaggtctgggttatgacacagaacatatgcaac

SEQ ID NO: 215288 - DNA, 33 bp, Homo sapien
aaggtctgggttatgatacagaacatatgcaac

SEQ ID NO: 215289 - DNA, 33 bp, Homo sapien
aaaaaagggtacttacaattgaaagttggccgg

SEQ ID NO: 215290 - DNA, 33 bp, Homo sapien
aaaaaagggtacttacgattgaaagttggccgg

SEQ ID NO: 215291 - DNA, 33 bp, Homo sapien
gaccccaccaaccacaatgaaaatgtattttcc

SEQ ID NO: 215292 - DNA, 33 bp, Homo sapien
gaccccaccaaccacagtgaaaatgtattttcc

SEQ ID NO: 215293 - DNA, 33 bp, Homo sapien
tatgtggtaggtaatacgcttaatactttatat

SEQ ID NO: 215294 - DNA, 33 bp, Homo sapien
tatgtggtaggtaatatgcttaatactttatat

SEQ ID NO: 215295 - DNA, 33 bp, Homo sapien
atgttttgaggaaacaatattgctgttgttttg

SEQ ID NO: 215296 - DNA, 33 bp, Homo sapien
atgttttgaggaaacagtattgctgttgttttg

SEQ ID NO: 215297 - DNA, 33 bp, Homo sapien
tgggaaagctttgtaaatagtggtggcatttaa

SEQ ID NO: 215298 - DNA, 33 bp, Homo sapien
tgggaaagctttgtaattagtggtggcatttaa

SEQ ID NO: 215299 - DNA, 33 bp, Homo sapien
acttttaatggttttaaggcagagaccatgtga

SEQ ID NO: 215300 - DNA, 33 bp, Homo sapien
acttttaatggttttacggcagagaccatgtga

SEQ ID NO: 215301 - DNA, 33 bp, Homo sapien
ttgactttattagcaacgtgattgtaaattgat

SEQ ID NO: 215302 - DNA, 33 bp, Homo sapien
ttgactttattagcaatgtgattgtaaattgat

SEQ ID NO: 215303 - DNA, 33 bp, Homo sapien
ttgatgactcattttacgctaacatccactttc

SEQ ID NO: 215304 - DNA, 33 bp, Homo sapien
ttgatgactcattttaggctaacatccactttc

SEQ ID NO: 215305 - DNA, 33 bp, Homo sapien
atatcctgcagtcctaagaaagcagtgaaggct

SEQ ID NO: 215306 - DNA, 33 bp, Homo sapien
atatcctgcagtcctacgaaagcagtgaaggct

SEQ ID NO: 215307 - DNA, 33 bp, Homo sapien
ggctttgaactgtaacacctctaatcaattcag

SEQ ID NO: 215308 - DNA, 33 bp, Homo sapien
ggctttgaactgtaacgcctctaatcaattcag

SEQ ID NO: 215309 - DNA, 33 bp, Homo sapien
atggcacagtcatggacaataagatgtgagggt

SEQ ID NO: 215310 - DNA, 33 bp, Homo sapien
atggcacagtcatggataataagatgtgagggt

SEQ ID NO: 215311 - DNA, 33 bp, Homo sapien
attctgactggtatgaagtggtaatctgattgt

SEQ ID NO: 215312 - DNA, 33 bp, Homo sapien
attctgactggtatgaggtggtaatctgattgt

SEQ ID NO: 215313 - DNA, 33 bp, Homo sapien
ttcttcttttgtatcactcaggcctagaacaag

SEQ ID NO: 215314 - DNA, 33 bp, Homo sapien
ttcttcttttgtatcagtcaggcctagaacaag

SEQ ID NO: 215315 - DNA, 33 bp, Homo sapien
acagagcaggttgtcaataaaggcaggctgaac

SEQ ID NO: 215316 - DNA, 33 bp, Homo sapien
acagagcaggttgtcagtaaaggcaggctgaac

SEQ ID NO: 215317 - DNA, 33 bp, Homo sapien
ccttgaggaaaaagaaactccacctgtgaacag

SEQ ID NO: 215318 - DNA, 33 bp, Homo sapien
ccttgaggaaaaagaagctccacctgtgaacag

SEQ ID NO: 215319 - DNA, 33 bp, Homo sapien
caattgaggaaatctacaaacatattgtacctg

SEQ ID NO: 215320 - DNA, 33 bp, Homo sapien
caattgaggaaatctataaacatattgtacctg

SEQ ID NO: 215321 - DNA, 33 bp, Homo sapien
agaatgaatttcaatgacactgcagaatgcagc

SEQ ID NO: 215322 - DNA, 33 bp, Homo sapien
agaatgaatttcaatgccactgcagaatgcagc

SEQ ID NO: 215323 - DNA, 33 bp, Homo sapien
actgtgtgaacttcataaaatatccactggtca

SEQ ID NO: 215324 - DNA, 33 bp, Homo sapien
actgtgtgaacttcatcaaatatccactggtca

SEQ ID NO: 215325 - DNA, 33 bp, Homo sapien
ggagatctctcttccacagtacaggacaagggt

SEQ ID NO: 215326 - DNA, 33 bp, Homo sapien
ggagatctctcttccatagtacaggacaagggt

SEQ ID NO: 215327 - DNA, 33 bp, Homo sapien
ttattgccattgaaaacatagattgttactcgc

SEQ ID NO: 215328 - DNA, 33 bp, Homo sapien
ttattgccattgaaaagatagattgttactcgc

SEQ ID NO: 215329 - DNA, 33 bp, Homo sapien
atcttcacaggtataacagatctcacaataaag

SEQ ID NO: 215330 - DNA, 33 bp, Homo sapien
atcttcacaggtataatagatctcacaataaag

SEQ ID NO: 215331 - DNA, 33 bp, Homo sapien
aatataagaaacatgcaaagtactgacagtatg

SEQ ID NO: 215332 - DNA, 33 bp, Homo sapien
aatataagaaacatgcgaagtactgacagtatg

SEQ ID NO: 215333 - DNA, 33 bp, Homo sapien
tttctgtagttcttgagagagaaatagatgtga

SEQ ID NO: 215334 - DNA, 33 bp, Homo sapien
tttctgtagttcttgatagagaaatagatgtga

SEQ ID NO: 215335 - DNA, 33 bp, Homo sapien
cctcccctctcactcgaaccactgctgtaacat

SEQ ID NO: 215336 - DNA, 33 bp, Homo sapien
cctcccctctcactcgtaccactgctgtaacat

SEQ ID NO: 215337 - DNA, 33 bp, Homo sapien
tgactgatgtgggaagaaaggcagagagaacag

SEQ ID NO: 215338 - DNA, 33 bp, Homo sapien
tgactgatgtgggaaggaaggcagagagaacag

SEQ ID NO: 215339 - DNA, 33 bp, Homo sapien
gcctactttgacagtcactgctttagactcttt

SEQ ID NO: 215340 - DNA, 33 bp, Homo sapien
gcctactttgacagtcgctgctttagactcttt

SEQ ID NO: 215341 - DNA, 33 bp, Homo sapien
catttggtagcagtcacccatccttcatcagcc

SEQ ID NO: 215342 - DNA, 33 bp, Homo sapien
catttggtagcagtcatccatccttcatcagcc

SEQ ID NO: 215343 - DNA, 33 bp, Homo sapien
aaaggccagaggatcacacagttttaatggttt

SEQ ID NO: 215344 - DNA, 33 bp, Homo sapien
aaaggccagaggatcatacagttttaatggttt

SEQ ID NO: 215345 - DNA, 33 bp, Homo sapien
gagctaaacattgacaactgggtactattaaat

SEQ ID NO: 215346 - DNA, 33 bp, Homo sapien
gagctaaacattgacagctgggtactattaaat

SEQ ID NO: 215347 - DNA, 33 bp, Homo sapien
aagagagggtaagagcaagaaagcaagatgtgg

SEQ ID NO: 215348 - DNA, 33 bp, Homo sapien
aagagagggtaagagcgagaaagcaagatgtgg

SEQ ID NO: 215349 - DNA, 33 bp, Homo sapien
gtataagaacaatatacgcttggaacttctgag

SEQ ID NO: 215350 - DNA, 33 bp, Homo sapien
gtataagaacaatatatgcttggaacttctgag

SEQ ID NO: 215351 - DNA, 33 bp, Homo sapien
tgacctggaaagaacccactgcttattttgcct

SEQ ID NO: 215352 - DNA, 33 bp, Homo sapien
tgacctggaaagaacctactgcttattttgcct

SEQ ID NO: 215353 - DNA, 33 bp, Homo sapien
ttgaggctcacatactcaaagtgcctttgcaaa

SEQ ID NO: 215354 - DNA, 33 bp, Homo sapien
ttgaggctcacatactgaaagtgcctttgcaaa

SEQ ID NO: 215355 - DNA, 33 bp, Homo sapien
gaaaaataaagagctgatttctgaaacataacc

SEQ ID NO: 215356 - DNA, 33 bp, Homo sapien
gaaaaataaagagctgctttctgaaacataacc

SEQ ID NO: 215357 - DNA, 33 bp, Homo sapien
aataagaagcctcaacaagtctagataaaatgg

SEQ ID NO: 215358 - DNA, 33 bp, Homo sapien
aataagaagcctcaaccagtctagataaaatgg

SEQ ID NO: 215359 - DNA, 33 bp, Homo sapien
catctaatgagctgtcaaacaatgaccctcctt

SEQ ID NO: 215360 - DNA, 33 bp, Homo sapien
catctaatgagctgtcgaacaatgaccctcctt

SEQ ID NO: 215361 - DNA, 33 bp, Homo sapien
tctcttcacccacttcgatcttttccattccta

SEQ ID NO: 215362 - DNA, 33 bp, Homo sapien
tctcttcacccacttctatcttttccattccta

SEQ ID NO: 215363 - DNA, 33 bp, Homo sapien
cccaaatggactaagacagtaggaatggaaaag

SEQ ID NO: 215364 - DNA, 33 bp, Homo sapien
cccaaatggactaagatagtaggaatggaaaag

SEQ ID NO: 215365 - DNA, 33 bp, Homo sapien
atcaataacaagagcaaccttggaaaacataca

SEQ ID NO: 215366 - DNA, 33 bp, Homo sapien
atcaataacaagagcagccttggaaaacataca

SEQ ID NO: 215367 - DNA, 33 bp, Homo sapien
tgataccaacaccagacaagaaaataccacaaa

SEQ ID NO: 215368 - DNA, 33 bp, Homo sapien
tgataccaacaccagagaagaaaataccacaaa

SEQ ID NO: 215369 - DNA, 33 bp, Homo sapien
aagtgtatgttggctcaaaaagttgaggactaa

SEQ ID NO: 215370 - DNA, 33 bp, Homo sapien
aagtgtatgttggctccaaaagttgaggactaa

SEQ ID NO: 215371 - DNA, 33 bp, Homo sapien
cttccgtgatcacaaaaaaaacataatgctagc

SEQ ID NO: 215372 - DNA, 33 bp, Homo sapien
cttccgtgatcacaaagaaaacataatgctagc

SEQ ID NO: 215373 - DNA, 33 bp, Homo sapien
tagagattcggacccacgtagccaggcattaaa

SEQ ID NO: 215374 - DNA, 33 bp, Homo sapien
tagagattcggacccatgtagccaggcattaaa

SEQ ID NO: 215375 - DNA, 33 bp, Homo sapien
caagactctgtttcaacgagaacaaaaagatac

SEQ ID NO: 215376 - DNA, 33 bp, Homo sapien
caagactctgtttcaatgagaacaaaaagatac

SEQ ID NO: 215377 - DNA, 33 bp, Homo sapien
ggatagcaacttgaaacgctcagtgagacccca

SEQ ID NO: 215378 - DNA, 33 bp, Homo sapien
ggatagcaacttgaaatgctcagtgagacccca

SEQ ID NO: 215379 - DNA, 33 bp, Homo sapien
atctgtagattggcccccagtttttaagcaggt

SEQ ID NO: 215380 - DNA, 33 bp, Homo sapien
atctgtagattggccctcagtttttaagcaggt

SEQ ID NO: 215381 - DNA, 33 bp, Homo sapien
gatatgatggatgctcaactccagaattttacc

SEQ ID NO: 215382 - DNA, 33 bp, Homo sapien
gatatgatggatgctcgactccagaattttacc

SEQ ID NO: 215383 - DNA, 33 bp, Homo sapien
ggggctgttattcttaccacatataatgctaca

SEQ ID NO: 215384 - DNA, 33 bp, Homo sapien
ggggctgttattcttatcacatataatgctaca

SEQ ID NO: 215385 - DNA, 33 bp, Homo sapien
ttcacagtatcagaaccactcatcacccaaccc

SEQ ID NO: 215386 - DNA, 33 bp, Homo sapien
ttcacagtatcagaacgactcatcacccaaccc

SEQ ID NO: 215387 - DNA, 33 bp, Homo sapien
actgaaggtttcaggcaacgtgtgggctcaagt

SEQ ID NO: 215388 - DNA, 33 bp, Homo sapien
actgaaggtttcaggcgacgtgtgggctcaagt

SEQ ID NO: 215389 - DNA, 33 bp, Homo sapien
atgcttttctagaacaaggcaaagaatacagaa

SEQ ID NO: 215390 - DNA, 33 bp, Homo sapien
atgcttttctagaacatggcaaagaatacagaa

SEQ ID NO: 215391 - DNA, 33 bp, Homo sapien
gataaagccaatgtgacaaatgtgaaagatttt

SEQ ID NO: 215392 - DNA, 33 bp, Homo sapien
gataaagccaatgtgagaaatgtgaaagatttt

SEQ ID NO: 215393 - DNA, 33 bp, Homo sapien
ttcagaaagcgtctctaaaaataaaactttctc

SEQ ID NO: 215394 - DNA, 33 bp, Homo sapien
ttcagaaagcgtctctcaaaataaaactttctc

SEQ ID NO: 215395 - DNA, 33 bp, Homo sapien
agaatcagtgtccacacggagagctcttttcag

SEQ ID NO: 215396 - DNA, 33 bp, Homo sapien
agaatcagtgtccacatggagagctcttttcag

SEQ ID NO: 215397 - DNA, 33 bp, Homo sapien
accaccacatcttgtactaaccttttgttctgc

SEQ ID NO: 215398 - DNA, 33 bp, Homo sapien
accaccacatcttgtagtaaccttttgttctgc

SEQ ID NO: 215399 - DNA, 33 bp, Homo sapien
actgcagagatgtagacgcttgagggtcctcat

SEQ ID NO: 215400 - DNA, 33 bp, Homo sapien
actgcagagatgtagatgcttgagggtcctcat

SEQ ID NO: 215401 - DNA, 33 bp, Homo sapien
tacaatagggaaaagagccacaagggcttaaca

SEQ ID NO: 215402 - DNA, 33 bp, Homo sapien
tacaatagggaaaagatccacaagggcttaaca

SEQ ID NO: 215403 - DNA, 33 bp, Homo sapien
taagaaactttgggctcaagatgataaagtctt

SEQ ID NO: 215404 - DNA, 33 bp, Homo sapien
taagaaactttgggcttaagatgataaagtctt

SEQ ID NO: 215405 - DNA, 33 bp, Homo sapien
cctcaggcccacagaaagcaagtgttggtaccc

SEQ ID NO: 215406 - DNA, 33 bp, Homo sapien
cctcaggcccacagaaggcaagtgttggtaccc

SEQ ID NO: 215407 - DNA, 33 bp, Homo sapien
cttatttcccatagtacgcgtatattcaaagca

SEQ ID NO: 215408 - DNA, 33 bp, Homo sapien
cttatttcccatagtatgcgtatattcaaagca

SEQ ID NO: 215409 - DNA, 33 bp, Homo sapien
gaggatgtggagaaacgcgatcattcataaatt

SEQ ID NO: 215410 - DNA, 33 bp, Homo sapien
gaggatgtggagaaactcgatcattcataaatt

SEQ ID NO: 215411 - DNA, 33 bp, Homo sapien
tgcaaacagaccaagacactaaggcctgcagat

SEQ ID NO: 215412 - DNA, 33 bp, Homo sapien
tgcaaacagaccaagatactaaggcctgcagat

SEQ ID NO: 215413 - DNA, 33 bp, Homo sapien
tgtaaggtagcactacagtagaaaactaaatga

SEQ ID NO: 215414 - DNA, 33 bp, Homo sapien
tgtaaggtagcactacggtagaaaactaaatga

SEQ ID NO: 215415 - DNA, 33 bp, Homo sapien
tctgaggaaatagatacggaagagatggaggcc

SEQ ID NO: 215416 - DNA, 33 bp, Homo sapien
tctgaggaaatagatatggaagagatggaggcc

SEQ ID NO: 215417 - DNA, 33 bp, Homo sapien
gtttgagcattatgagcatcttgtatacgtcaa

SEQ ID NO: 215418 - DNA, 33 bp, Homo sapien
gtttgagcattatgagtatcttgtatacgtcaa

SEQ ID NO: 215419 - DNA, 33 bp, Homo sapien
gatgaatgatgtaaagcaatttgatgatagatg

SEQ ID NO: 215420 - DNA, 33 bp, Homo sapien
gatgaatgatgtaaaggaatttgatgatagatg

SEQ ID NO: 215421 - DNA, 33 bp, Homo sapien
gttctagtgaaaccacacaaaaagtaagcagct

SEQ ID NO: 215422 - DNA, 33 bp, Homo sapien
gttctagtgaaaccacgcaaaaagtaagcagct

SEQ ID NO: 215423 - DNA, 33 bp, Homo sapien
taggccaacagtgatccatctctatggtaagac

SEQ ID NO: 215424 - DNA, 33 bp, Homo sapien
taggccaacagtgatctatctctatggtaagac

SEQ ID NO: 215425 - DNA, 33 bp, Homo sapien
tgagccaagatttgaaagtactgtgggagtaag

SEQ ID NO: 215426 - DNA, 33 bp, Homo sapien
tgagccaagatttgaaggtactgtgggagtaag

SEQ ID NO: 215427 - DNA, 33 bp, Homo sapien
ccacttcatccccaaactgaatcttctcttcaa

SEQ ID NO: 215428 - DNA, 33 bp, Homo sapien
ccacttcatccccaaattgaatcttctcttcaa

SEQ ID NO: 215429 - DNA, 33 bp, Homo sapien
acttttaatgccttacgacttgaaagcgcttaa

SEQ ID NO: 215430 - DNA, 33 bp, Homo sapien
acttttaatgccttactacttgaaagcgcttaa

SEQ ID NO: 215431 - DNA, 33 bp, Homo sapien
ttggggatggtgtaacaaaagagtcagcttgtt

SEQ ID NO: 215432 - DNA, 33 bp, Homo sapien
ttggggatggtgtaactaaagagtcagcttgtt

SEQ ID NO: 215433 - DNA, 33 bp, Homo sapien
aaatttctccaaatcacctagaacttggattga

SEQ ID NO: 215434 - DNA, 33 bp, Homo sapien
aaatttctccaaatcagctagaacttggattga

SEQ ID NO: 215435 - DNA, 33 bp, Homo sapien
gtgtatttcacttatgaatcctctatcatagtt

SEQ ID NO: 215436 - DNA, 33 bp, Homo sapien
gtgtatttcacttatgtatcctctatcatagtt

SEQ ID NO: 215437 - DNA, 33 bp, Homo sapien
tgtgatattttagtcagagtcgaggataatgat

SEQ ID NO: 215438 - DNA, 33 bp, Homo sapien
tgtgatattttagtcatagtcgaggataatgat

SEQ ID NO: 215439 - DNA, 33 bp, Homo sapien
caagtcaagagctgcaaaagaaatggtgcacat

SEQ ID NO: 215440 - DNA, 33 bp, Homo sapien
caagtcaagagctgcagaagaaatggtgcacat

SEQ ID NO: 215441 - DNA, 33 bp, Homo sapien
taaaactggcaacttcgagacattagctcacaa

SEQ ID NO: 215442 - DNA, 33 bp, Homo sapien
taaaactggcaacttctagacattagctcacaa

SEQ ID NO: 215443 - DNA, 33 bp, Homo sapien
aaagacagaataacagaaaaaagtctgtgtgta

SEQ ID NO: 215444 - DNA, 33 bp, Homo sapien
aaagacagaataacagtaaaaagtctgtgtgta

SEQ ID NO: 215445 - DNA, 33 bp, Homo sapien
agaggagtgctcggagaactacagaaacgaaag

SEQ ID NO: 215446 - DNA, 33 bp, Homo sapien
agaggagtgctcggaggactacagaaacgaaag

SEQ ID NO: 215447 - DNA, 33 bp, Homo sapien
ttatttgctgttcctacgcagtgactgtatttt

SEQ ID NO: 215448 - DNA, 33 bp, Homo sapien
ttatttgctgttcctaggcagtgactgtatttt

SEQ ID NO: 215449 - DNA, 33 bp, Homo sapien
ccttcctaagcacataactaatgactcctcctt

SEQ ID NO: 215450 - DNA, 33 bp, Homo sapien
ccttcctaagcacatagctaatgactcctcctt

SEQ ID NO: 215451 - DNA, 33 bp, Homo sapien
atactgagtttataaacagtgaaggggtctacg

SEQ ID NO: 215452 - DNA, 33 bp, Homo sapien
atactgagtttataaatagtgaaggggtctacg

SEQ ID NO: 215453 - DNA, 33 bp, Homo sapien
taatcattcctttatcaaatatgcagttctgtt

SEQ ID NO: 215454 - DNA, 33 bp, Homo sapien
taatcattcctttatcgaatatgcagttctgtt

SEQ ID NO: 215455 - DNA, 33 bp, Homo sapien
agggaaattgactacagtgacttttattttggc

SEQ ID NO: 215456 - DNA, 33 bp, Homo sapien
agggaaattgactacattgacttttattttggc

SEQ ID NO: 215457 - DNA, 33 bp, Homo sapien
aggtgactgtcagcacactccttacctctctcg

SEQ ID NO: 215458 - DNA, 33 bp, Homo sapien
aggtgactgtcagcacgctccttacctctctcg

SEQ ID NO: 215459 - DNA, 33 bp, Homo sapien
tagatatttggtaggaaaaggagaaagcactaa

SEQ ID NO: 215460 - DNA, 33 bp, Homo sapien
tagatatttggtaggagaaggagaaagcactaa

SEQ ID NO: 215461 - DNA, 33 bp, Homo sapien; identical to SEQ ID NO: 215459

SEQ ID NO: 215462 - DNA, 33 bp, Homo sapien; identical to SEQ ID NO: 215460

SEQ ID NO: 215463 - DNA, 33 bp, Homo sapien
ataccactttcacatacgttgttgaatcattaa

SEQ ID NO: 215464 - DNA, 33 bp, Homo sapien
ataccactttcacatatgttgttgaatcattaa

SEQ ID NO: 215465 - DNA, 33 bp, Homo sapien
cttgcaacccccacatgagtaccttcacactca

SEQ ID NO: 215466 - DNA, 33 bp, Homo sapien
cttgcaacccccacattagtaccttcacactca

SEQ ID NO: 215467 - DNA, 33 bp, Homo sapien
ggccaattcacatgtgccaactgtataatagaa

SEQ ID NO: 215468 - DNA, 33 bp, Homo sapien
ggccaattcacatgtgtcaactgtataatagaa

SEQ ID NO: 215469 - DNA, 33 bp, Homo sapien
cccaattattgtggccagaaactttcccagtcc

SEQ ID NO: 215470 - DNA, 33 bp, Homo sapien
cccaattattgtggccggaaactttcccagtcc

SEQ ID NO: 215471 - DNA, 33 bp, Homo sapien
ctttctacttctctgactacagacttatagtac

SEQ ID NO: 215472 - DNA, 33 bp, Homo sapien
ctttctacttctctgagtacagacttatagtac

SEQ ID NO: 215473 - DNA, 33 bp, Homo sapien
aatgtacactaactacaggtaaaagtgaagtgc

SEQ ID NO: 215474 - DNA, 33 bp, Homo sapien
aatgtacactaactacgggtaaaagtgaagtgc

SEQ ID NO: 215475 - DNA, 33 bp, Homo sapien
ctgctgctagttgctgacacacaattcctctat

SEQ ID NO: 215476 - DNA, 33 bp, Homo sapien
ctgctgctagttgctggcacacaattcctctat

SEQ ID NO: 215477 - DNA, 33 bp, Homo sapien
ggacaagtgctccagagatctcaatcctgtcag

SEQ ID NO: 215478 - DNA, 33 bp, Homo sapien
ggacaagtgctccagatatctcaatcctgtcag

SEQ ID NO: 215479 - DNA, 33 bp, Homo sapien
aggcctgggttgaaccacagaatcttacgacca

SEQ ID NO: 215480 - DNA, 33 bp, Homo sapien
aggcctgggttgaaccgcagaatcttacgacca

SEQ ID NO: 215481 - DNA, 33 bp, Homo sapien
aggcttctaaatggagccaacctgtggataaac

SEQ ID NO: 215482 - DNA, 33 bp, Homo sapien
aggcttctaaatggaggcaacctgtggataaac

SEQ ID NO: 215483 - DNA, 33 bp, Homo sapien
catatatattgtggaaaggtcatagcaagctaa

SEQ ID NO: 215484 - DNA, 33 bp, Homo sapien
catatatattgtggaatggtcatagcaagctaa

SEQ ID NO: 215485 - DNA, 33 bp, Homo sapien
aatccagtgggggagacagtcagataatcacat

SEQ ID NO: 215486 - DNA, 33 bp, Homo sapien
aatccagtgggggagatagtcagataatcacat

SEQ ID NO: 215487 - DNA, 33 bp, Homo sapien
taagttggctatctgaaaaacacttcttgattt

SEQ ID NO: 215488 - DNA, 33 bp, Homo sapien
taagttggctatctgagaaacacttcttgattt

SEQ ID NO: 215489 - DNA, 33 bp, Homo sapien
cgaatcaaattcattgcactattttggaatgac

SEQ ID NO: 215490 - DNA, 33 bp, Homo sapien
cgaatcaaattcattgtactattttggaatgac

SEQ ID NO: 215491 - DNA, 33 bp, Homo sapien
cattctttgcttacccagaaatctgctagttat

SEQ ID NO: 215492 - DNA, 33 bp, Homo sapien
cattctttgcttacccggaaatctgctagttat

SEQ ID NO: 215493 - DNA, 33 bp, Homo sapien
aacttttaactgtccaagatttcagggagccct

SEQ ID NO: 215494 - DNA, 33 bp, Homo sapien
aacttttaactgtccaggatttcagggagccct

SEQ ID NO: 215495 - DNA, 33 bp, Homo sapien; identical to SEQ ID NO: 215493

SEQ ID NO: 215496 - DNA, 33 bp, Homo sapien; identical to SEQ ID NO: 215494

SEQ ID NO: 215497 - DNA, 33 bp, Homo sapien
gggaatgcctttgaaacagatgaattaataata

SEQ ID NO: 215498 - DNA, 33 bp, Homo sapien
gggaatgcctttgaaagagatgaattaataata

SEQ ID NO: 215499 - DNA, 33 bp, Homo sapien
tacattcaagtctacaagttatattcaccagga

SEQ ID NO: 215500 - DNA, 33 bp, Homo sapien
tacattcaagtctacacgttatattcaccagga

SEQ ID NO: 215501 - DNA, 33 bp, Homo sapien
ataatagcatttgaaaagctcattaaatagaac

SEQ ID NO: 215502 - DNA, 33 bp, Homo sapien
ataatagcatttgaaaggctcattaaatagaac

SEQ ID NO: 215503 - DNA, 33 bp, Homo sapien
tgggaactcatccaagaagttgataccggaact

SEQ ID NO: 215504 - DNA, 33 bp, Homo sapien
tgggaactcatccaaggagttgataccggaact

SEQ ID NO: 215505 - DNA, 33 bp, Homo sapien
ctgcatcctgtgaaagacagaatcacaacattt

SEQ ID NO: 215506 - DNA, 33 bp, Homo sapien
ctgcatcctgtgaaaggcagaatcacaacattt

SEQ ID NO: 215507 - DNA, 33 bp, Homo sapien
tattttcattttttagacctatgccttttgctt

SEQ ID NO: 215508 - DNA, 33 bp, Homo sapien
tattttcattttttagccctatgccttttgctt

SEQ ID NO: 215509 - DNA, 33 bp, Homo sapien
gcctcctagttacgaactggaccatggatattt

SEQ ID NO: 215510 - DNA, 33 bp, Homo sapien
gcctcctagttacgaattggaccatggatattt

SEQ ID NO: 215511 - DNA, 33 bp, Homo sapien
caataaatgcagtttccagtatcaattcttgga

SEQ ID NO: 215512 - DNA, 33 bp, Homo sapien
caataaatgcagtttctagtatcaattcttgga

SEQ ID NO: 215513 - DNA, 33 bp, Homo sapien
atacaatttggagaaaattcgtgtagattagga

SEQ ID NO: 215514 - DNA, 33 bp, Homo sapien
atacaatttggagaaagttcgtgtagattagga

SEQ ID NO: 215515 - DNA, 33 bp, Homo sapien
aaaaaaaaatctgagaagtaccaagaagacagt

SEQ ID NO: 215516 - DNA, 33 bp, Homo sapien
aaaaaaaaatctgagaggtaccaagaagacagt

SEQ ID NO: 215517 - DNA, 33 bp, Homo sapien
atgagatgttaaccaaatgttggggctaaattg

SEQ ID NO: 215518 - DNA, 33 bp, Homo sapien
atgagatgttaaccaagtgttggggctaaattg

SEQ ID NO: 215519 - DNA, 33 bp, Homo sapien
gaaaccttgaatttaaacaccactgatctgaat

SEQ ID NO: 215520 - DNA, 33 bp, Homo sapien
gaaaccttgaatttaagcaccactgatctgaat

SEQ ID NO: 215521 - DNA, 33 bp, Homo sapien
gtatttttggtgaatggaaaggctgatggaaat

SEQ ID NO: 215522 - DNA, 33 bp, Homo sapien
gtatttttggtgaatgtaaaggctgatggaaat

SEQ ID NO: 215523 - DNA, 33 bp, Homo sapien
gggtcttagcttgtaaaccttaggcagtgacat

SEQ ID NO: 215524 - DNA, 33 bp, Homo sapien
gggtcttagcttgtaagccttaggcagtgacat

SEQ ID NO: 215525 - DNA, 33 bp, Homo sapien
aacaattaggcaactgcactctgccagaaagtg

SEQ ID NO: 215526 - DNA, 33 bp, Homo sapien
aacaattaggcaactgtactctgccagaaagtg

SEQ ID NO: 215527 - DNA, 33 bp, Homo sapien
tttcatggggaccttccaaaagaattgtttata

SEQ ID NO: 215528 - DNA, 33 bp, Homo sapien
tttcatggggaccttctaaaagaattgtttata

SEQ ID NO: 215529 - DNA, 33 bp, Homo sapien
aaggtctggcataatcaattttataaatatctg

SEQ ID NO: 215530 - DNA, 33 bp, Homo sapien
aaggtctggcataatcgattttataaatatctg

SEQ ID NO: 215531 - DNA, 33 bp, Homo sapien
attttaaagcaaaaaacgtctgatggaaaaaac

SEQ ID NO: 215532 - DNA, 33 bp, Homo sapien
attttaaagcaaaaaatgtctgatggaaaaaac

SEQ ID NO: 215533 - DNA, 33 bp, Homo sapien
ttggctcacctgaagaccatgttttcctgatag

SEQ ID NO: 215534 - DNA, 33 bp, Homo sapien
ttggctcacctgaagatcatgttttcctgatag

SEQ ID NO: 215535 - DNA, 33 bp, Homo sapien
gtagtttgtctctaagaaaatagaatgttttgc

SEQ ID NO: 215536 - DNA, 33 bp, Homo sapien
gtagtttgtctctaagcaaatagaatgttttgc

SEQ ID NO: 215537 - DNA, 33 bp, Homo sapien
aatttcttagtcttgacgaatgtaatcatgatt

SEQ ID NO: 215538 - DNA, 33 bp, Homo sapien
aatttcttagtcttgatgaatgtaatcatgatt

SEQ ID NO: 215539 - DNA, 33 bp, Homo sapien
aaatattggtaaatatcacaggctttggagcca

SEQ ID NO: 215540 - DNA, 33 bp, Homo sapien
aaatattggtaaatatgacaggctttggagcca

SEQ ID NO: 215541 - DNA, 33 bp, Homo sapien
ccctgcctcactacgacgcttggttccagacag

SEQ ID NO: 215542 - DNA, 33 bp, Homo sapien
ccctgcctcactacgatgcttggttccagacag

SEQ ID NO: 215543 - DNA, 33 bp, Homo sapien
tggtccatgggcttcacactgtttttggcttga

SEQ ID NO: 215544 - DNA, 33 bp, Homo sapien
tggtccatgggcttcagactgtttttggcttga

SEQ ID NO: 215545 - DNA, 33 bp, Homo sapien
tgtgcctggaattagactaaaactgatcacttc

SEQ ID NO: 215546 - DNA, 33 bp, Homo sapien
tgtgcctggaattagattaaaactgatcacttc

SEQ ID NO: 215547 - DNA, 33 bp, Homo sapien
atcacttgagcccggacggaagagactgcagtg

SEQ ID NO: 215548 - DNA, 33 bp, Homo sapien
atcacttgagcccggatggaagagactgcagtg

SEQ ID NO: 215549 - DNA, 33 bp, Homo sapien
ttttagaaacatgataataattgataatgaaaa

SEQ ID NO: 215550 - DNA, 33 bp, Homo sapien
ttttagaaacatgatagtaattgataatgaaaa

SEQ ID NO: 215551 - DNA, 33 bp, Homo sapien
gaagggatagggaagacaggttttataatggca

SEQ ID NO: 215552 - DNA, 33 bp, Homo sapien
gaagggatagggaagagaggttttataatggca

SEQ ID NO: 215553 - DNA, 33 bp, Homo sapien
tcaattacagtgcatacaatttgttttaaaata

SEQ ID NO: 215554 - DNA, 33 bp, Homo sapien
tcaattacagtgcatagaatttgttttaaaata

SEQ ID NO: 215555 - DNA, 33 bp, Homo sapien
gaaattccttccaccacatccaaatgtgtcctg

SEQ ID NO: 215556 - DNA, 33 bp, Homo sapien
gaaattccttccaccatatccaaatgtgtcctg

SEQ ID NO: 215557 - DNA, 33 bp, Homo sapien
tttttttctaaaatctaaattgaatggcacaaa

SEQ ID NO: 215558 - DNA, 33 bp, Homo sapien
tttttttctaaaatctgaattgaatggcacaaa

SEQ ID NO: 215559 - DNA, 33 bp, Homo sapien
tttattattatcttcacggactatttcacagcc

SEQ ID NO: 215560 - DNA, 33 bp, Homo sapien
tttattattatcttcatggactatttcacagcc

SEQ ID NO: 215561 - DNA, 33 bp, Homo sapien
aaaacaaactcatacacagagaagtacgggagg

SEQ ID NO: 215562 - DNA, 33 bp, Homo sapien
aaaacaaactcatacagagagaagtacgggagg

SEQ ID NO: 215563 - DNA, 33 bp, Homo sapien
ggttgtttaccacttaccagcccaccactgggt

SEQ ID NO: 215564 - DNA, 33 bp, Homo sapien
ggttgtttaccacttatcagcccaccactgggt

SEQ ID NO: 215565 - DNA, 33 bp, Homo sapien
ccttcttgccatctggaatgtgtcatttaatgg

SEQ ID NO: 215566 - DNA, 33 bp, Homo sapien
ccttcttgccatctgggatgtgtcatttaatgg

SEQ ID NO: 215567 - DNA, 33 bp, Homo sapien
attggtgtagtcgggaacctgacaataactaaa

SEQ ID NO: 215568 - DNA, 33 bp, Homo sapien
attggtgtagtcgggatcctgacaataactaaa

SEQ ID NO: 215569 - DNA, 33 bp, Homo sapien
tcactcaggatgtttacctcagcctatccttga

SEQ ID NO: 215570 - DNA, 33 bp, Homo sapien
tcactcaggatgtttatctcagcctatccttga

SEQ ID NO: 215571 - DNA, 33 bp, Homo sapien
taatcttccctcttaacgctgcctgtcattcct

SEQ ID NO: 215572 - DNA, 33 bp, Homo sapien
taatcttccctcttaatgctgcctgtcattcct

SEQ ID NO: 215573 - DNA, 33 bp, Homo sapien
agtgtcccagtttgaaggatagtttatgtagtc

SEQ ID NO: 215574 - DNA, 33 bp, Homo sapien
agtgtcccagtttgaatgatagtttatgtagtc

SEQ ID NO: 215575 - DNA, 33 bp, Homo sapien
gattataacactcctcacatagcctcatctata

SEQ ID NO: 215576 - DNA, 33 bp, Homo sapien
gattataacactcctcgcatagcctcatctata

SEQ ID NO: 215577 - DNA, 33 bp, Homo sapien
ccggcacaggtcctgaagtatagtcaatgctaa

SEQ ID NO: 215578 - DNA, 33 bp, Homo sapien
ccggcacaggtcctgaggtatagtcaatgctaa

SEQ ID NO: 215579 - DNA, 33 bp, Homo sapien
aggccaccttcctgtcactttgatttcttcact

SEQ ID NO: 215580 - DNA, 33 bp, Homo sapien
aggccaccttcctgtcgctttgatttcttcact

SEQ ID NO: 215581 - DNA, 33 bp, Homo sapien
ttaaaaaatgaaactgaatagaaagatcatagg

SEQ ID NO: 215582 - DNA, 33 bp, Homo sapien
ttaaaaaatgaaactggatagaaagatcatagg

SEQ ID NO: 215583 - DNA, 33 bp, Homo sapien
caatctatgtcataaaagccgatcacctccaaa

SEQ ID NO: 215584 - DNA, 33 bp, Homo sapien
caatctatgtcataaacgccgatcacctccaaa

SEQ ID NO: 215585 - DNA, 33 bp, Homo sapien
gatggcctcttttaggcaattctttaaacataa

SEQ ID NO: 215586 - DNA, 33 bp, Homo sapien
gatggcctcttttaggtaattctttaaacataa

SEQ ID NO: 215587 - DNA, 33 bp, Homo sapien
gaaaaactcatccaacaattcatatagcatctc

SEQ ID NO: 215588 - DNA, 33 bp, Homo sapien
gaaaaactcatccaacgattcatatagcatctc

SEQ ID NO: 215589 - DNA, 33 bp, Homo sapien
tagctgaatctgtcttgaacacttgagtaaagt

SEQ ID NO: 215590 - DNA, 33 bp, Homo sapien
tagctgaatctgtctttaacacttgagtaaagt

SEQ ID NO: 215591 - DNA, 33 bp, Homo sapien
tctagtacaaagattaaaatcaaaacagtcaaa

SEQ ID NO: 215592 - DNA, 33 bp, Homo sapien
tctagtacaaagattagaatcaaaacagtcaaa

SEQ ID NO: 215593 - DNA, 33 bp, Homo sapien
gcactagcgtcttaacgcacggaatgttgtagt

SEQ ID NO: 215594 - DNA, 33 bp, Homo sapien
gcactagcgtcttaactcacggaatgttgtagt

SEQ ID NO: 215595 - DNA, 33 bp, Homo sapien
tcaaaaacctctaacccacaagctttggaggag

SEQ ID NO: 215596 - DNA, 33 bp, Homo sapien
tcaaaaacctctaacctacaagctttggaggag

SEQ ID NO: 215597 - DNA, 33 bp, Homo sapien
catctttgaccccctaagagttcatctccttcc

SEQ ID NO: 215598 - DNA, 33 bp, Homo sapien
catctttgaccccctatgagttcatctccttcc

SEQ ID NO: 215599 - DNA, 33 bp, Homo sapien
cagatccctctctttccccaggctaatggcctt

SEQ ID NO: 215600 - DNA, 33 bp, Homo sapien
cagatccctctctttctccaggctaatggcctt

SEQ ID NO: 215601 - DNA, 33 bp, Homo sapien
aactagcaaacacaaactgtcttcacaatcaga

SEQ ID NO: 215602 - DNA, 33 bp, Homo sapien
aactagcaaacacaaattgtcttcacaatcaga

SEQ ID NO: 215603 - DNA, 33 bp, Homo sapien
tgcccccacctgtgccaaaagttgccaagtaag

SEQ ID NO: 215604 - DNA, 33 bp, Homo sapien
tgcccccacctgtgccgaaagttgccaagtaag

SEQ ID NO: 215605 - DNA, 33 bp, Homo sapien
tggtagctgacaacagaaatcactctaactaag

SEQ ID NO: 215606 - DNA, 33 bp, Homo sapien
tggtagctgacaacaggaatcactctaactaag

SEQ ID NO: 215607 - DNA, 33 bp, Homo sapien
ggatatcaaatgtagccgagtaagagatgtaaa

SEQ ID NO: 215608 - DNA, 33 bp, Homo sapien
ggatatcaaatgtagctgagtaagagatgtaaa

SEQ ID NO: 215609 - DNA, 33 bp, Homo sapien
agcaagataatctaagcaaacaagagttacatc

SEQ ID NO: 215610 - DNA, 33 bp, Homo sapien
agcaagataatctaaggaaacaagagttacatc

SEQ ID NO: 215611 - DNA, 33 bp, Homo sapien
ggggagatacaccaaacatagaatgagaaaaca

SEQ ID NO: 215612 - DNA, 33 bp, Homo sapien
ggggagatacaccaaatatagaatgagaaaaca

SEQ ID NO: 215613 - DNA, 33 bp, Homo sapien
agctcattccttttcacgttttccttcataggc

SEQ ID NO: 215614 - DNA, 33 bp, Homo sapien
agctcattccttttcatgttttccttcataggc

SEQ ID NO: 215615 - DNA, 33 bp, Homo sapien
aaatagtccttaggctcaaaagtggtatatgtt

SEQ ID NO: 215616 - DNA, 33 bp, Homo sapien
aaatagtccttaggcttaaaagtggtatatgtt

SEQ ID NO: 215617 - DNA, 33 bp, Homo sapien
tcaattgtaaagactacgtagcaaaatttttga

SEQ ID NO: 215618 - DNA, 33 bp, Homo sapien
tcaattgtaaagactatgtagcaaaatttttga

SEQ ID NO: 215619 - DNA, 33 bp, Homo sapien
gtacataagaaatgctcactcttaggcaatatt

SEQ ID NO: 215620 - DNA, 33 bp, Homo sapien
gtacataagaaatgctgactcttaggcaatatt

SEQ ID NO: 215621 - DNA, 33 bp, Homo sapien
tagatgccctgaaaaaaatcttattcgttagaa

SEQ ID NO: 215622 - DNA, 33 bp, Homo sapien
tagatgccctgaaaaacatcttattcgttagaa

SEQ ID NO: 215623 - DNA, 33 bp, Homo sapien
gttacttccctagtgagcttgtgaccttttaaa

SEQ ID NO: 215624 - DNA, 33 bp, Homo sapien
gttacttccctagtgatcttgtgaccttttaaa

SEQ ID NO: 215625 - DNA, 33 bp, Homo sapien
ttggaatccggtggcaccttaaaggacggaatt

SEQ ID NO: 215626 - DNA, 33 bp, Homo sapien
ttggaatccggtggcatcttaaaggacggaatt

SEQ ID NO: 215627 - DNA, 33 bp, Homo sapien
caaagggcttcaccacccctagagaagaaactg

SEQ ID NO: 215628 - DNA, 33 bp, Homo sapien
caaagggcttcaccactcctagagaagaaactg

SEQ ID NO: 215629 - DNA, 33 bp, Homo sapien
atcaagaagaaacacccgaattgcaacctgttg

SEQ ID NO: 215630 - DNA, 33 bp, Homo sapien
atcaagaagaaacacctgaattgcaacctgttg

SEQ ID NO: 215631 - DNA, 33 bp, Homo sapien
tcctgatttcagctgaacatagtgtctcacgcc

SEQ ID NO: 215632 - DNA, 33 bp, Homo sapien
tcctgatttcagctgagcatagtgtctcacgcc

SEQ ID NO: 215633 - DNA, 33 bp, Homo sapien
gctcacctaccatgaaagctccacctgtccttt

SEQ ID NO: 215634 - DNA, 33 bp, Homo sapien
gctcacctaccatgaaggctccacctgtccttt

SEQ ID NO: 215635 - DNA, 33 bp, Homo sapien
tatttttttcttcaccaagagaattttcccgaa

SEQ ID NO: 215636 - DNA, 33 bp, Homo sapien
tatttttttcttcacctagagaattttcccgaa

SEQ ID NO: 215637 - DNA, 33 bp, Homo sapien
catatattaaatcaaaagaagaggccatttgac

SEQ ID NO: 215638 - DNA, 33 bp, Homo sapien
catatattaaatcaaaggaagaggccatttgac

SEQ ID NO: 215639 - DNA, 33 bp, Homo sapien
ctattttgaaccatcagagaacaaagaaaataa

SEQ ID NO: 215640 - DNA, 33 bp, Homo sapien
ctattttgaaccatcatagaacaaagaaaataa

SEQ ID NO: 215641 - DNA, 33 bp, Homo sapien
gcccaagactcctagaagaccaaagccactcat

SEQ ID NO: 215642 - DNA, 33 bp, Homo sapien
gcccaagactcctagatgaccaaagccactcat

SEQ ID NO: 215643 - DNA, 33 bp, Homo sapien
aggtggatgttttggcaacaagaaagagaaact

SEQ ID NO: 215644 - DNA, 33 bp, Homo sapien
aggtggatgttttggccacaagaaagagaaact

SEQ ID NO: 215645 - DNA, 33 bp, Homo sapien
gcttagtcacaccacaaaattgcaaaagttctt

SEQ ID NO: 215646 - DNA, 33 bp, Homo sapien
gcttagtcacaccacataattgcaaaagttctt

SEQ ID NO: 215647 - DNA, 33 bp, Homo sapien
tcctatatgatttaagcctggttttatttagat

SEQ ID NO: 215648 - DNA, 33 bp, Homo sapien
tcctatatgatttaaggctggttttatttagat

SEQ ID NO: 215649 - DNA, 33 bp, Homo sapien
agtatattaacttgcactctttgtcccatacaa

SEQ ID NO: 215650 - DNA, 33 bp, Homo sapien
agtatattaacttgcagtctttgtcccatacaa

SEQ ID NO: 215651 - DNA, 33 bp, Homo sapien
cctaactggaaagaaacttgacaagcactttat

SEQ ID NO: 215652 - DNA, 33 bp, Homo sapien
cctaactggaaagaaatttgacaagcactttat

SEQ ID NO: 215653 - DNA, 33 bp, Homo sapien
ctgcagcttgttgagacagatgaaaccacacac

SEQ ID NO: 215654 - DNA, 33 bp, Homo sapien
ctgcagcttgttgagatagatgaaaccacacac

SEQ ID NO: 215655 - DNA, 33 bp, Homo sapien
caaagcctaacttacacgatctggaaatttaaa

SEQ ID NO: 215656 - DNA, 33 bp, Homo sapien
caaagcctaacttacatgatctggaaatttaaa

SEQ ID NO: 215657 - DNA, 33 bp, Homo sapien
gagctgtcacttccgacattagagggcaaaaaa

SEQ ID NO: 215658 - DNA, 33 bp, Homo sapien
gagctgtcacttccgagattagagggcaaaaaa

SEQ ID NO: 215659 - DNA, 33 bp, Homo sapien
ccagatactatgtcaaacattgaaaatataaaa

SEQ ID NO: 215660 - DNA, 33 bp, Homo sapien
ccagatactatgtcaagcattgaaaatataaaa

SEQ ID NO: 215661 - DNA, 33 bp, Homo sapien
ctggttattcctcctgaattctctgtccacata

SEQ ID NO: 215662 - DNA, 33 bp, Homo sapien
ctggttattcctcctggattctctgtccacata

SEQ ID NO: 215663 - DNA, 33 bp, Homo sapien
ccccacagccttagggaaatggcaaggactctg

SEQ ID NO: 215664 - DNA, 33 bp, Homo sapien
ccccacagccttaggggaatggcaaggactctg

SEQ ID NO: 215665 - DNA, 33 bp, Homo sapien
ctctttatgaaatctacactcagtgcctatgtt

SEQ ID NO: 215666 - DNA, 33 bp, Homo sapien
ctctttatgaaatctatactcagtgcctatgtt

SEQ ID NO: 215667 - DNA, 33 bp, Homo sapien
taaatctggttttcccacaggcgttaggattaa

SEQ ID NO: 215668 - DNA, 33 bp, Homo sapien
taaatctggttttcccgcaggcgttaggattaa

SEQ ID NO: 215669 - DNA, 33 bp, Homo sapien
attattattttacgaaacttattcattatgcat

SEQ ID NO: 215670 - DNA, 33 bp, Homo sapien
attattattttacgaagcttattcattatgcat

SEQ ID NO: 215671 - DNA, 33 bp, Homo sapien
aactgggtttcagaaaatgcaaaagtagtgacg

SEQ ID NO: 215672 - DNA, 33 bp, Homo sapien
aactgggtttcagaaagtgcaaaagtagtgacg

SEQ ID NO: 215673 - DNA, 33 bp, Homo sapien
ttctagtccttgcaaactctctgccccttttta

SEQ ID NO: 215674 - DNA, 33 bp, Homo sapien
ttctagtccttgcaaattctctgccccttttta

SEQ ID NO: 215675 - DNA, 33 bp, Homo sapien
taaagactgtgaagcaacctgaaaaaatgtgca

SEQ ID NO: 215676 - DNA, 33 bp, Homo sapien
taaagactgtgaagcagcctgaaaaaatgtgca

SEQ ID NO: 215677 - DNA, 33 bp, Homo sapien
cctgaaaaaatgtgcaagacatagaaaaagggg

SEQ ID NO: 215678 - DNA, 33 bp, Homo sapien
cctgaaaaaatgtgcatgacatagaaaaagggg

SEQ ID NO: 215679 - DNA, 33 bp, Homo sapien
ttatgctgggattttacatatatgatcaagtgt

SEQ ID NO: 215680 - DNA, 33 bp, Homo sapien
ttatgctgggattttatatatatgatcaagtgt

SEQ ID NO: 215681 - DNA, 33 bp, Homo sapien
tatggtagatccacaaaaggatgttaacaaagt

SEQ ID NO: 215682 - DNA, 33 bp, Homo sapien
tatggtagatccacaataggatgttaacaaagt

SEQ ID NO: 215683 - DNA, 33 bp, Homo sapien
tgctctgtactttgggccatttagttattttag

SEQ ID NO: 215684 - DNA, 33 bp, Homo sapien
tgctctgtactttgggtcatttagttattttag

SEQ ID NO: 215685 - DNA, 33 bp, Homo sapien
tttcaatttgcaaatgaagttctcaattttaat

SEQ ID NO: 215686 - DNA, 33 bp, Homo sapien
tttcaatttgcaaatgcagttctcaattttaat

SEQ ID NO: 215687 - DNA, 33 bp, Homo sapien
ctgtattctcaccttccctgggcttatccatat

SEQ ID NO: 215688 - DNA, 33 bp, Homo sapien
ctgtattctcaccttctctgggcttatccatat

SEQ ID NO: 215689 - DNA, 33 bp, Homo sapien
agtccagaatcacatacagcattacttgccatg

SEQ ID NO: 215690 - DNA, 33 bp, Homo sapien
agtccagaatcacatatagcattacttgccatg

SEQ ID NO: 215691 - DNA, 33 bp, Homo sapien
atttgatttattctgcaacaacttcttactaga

SEQ ID NO: 215692 - DNA, 33 bp, Homo sapien
atttgatttattctgcgacaacttcttactaga

SEQ ID NO: 215693 - DNA, 33 bp, Homo sapien
tggatttgaaaatgcacggtagctgcctaatca

SEQ ID NO: 215694 - DNA, 33 bp, Homo sapien
tggatttgaaaatgcatggtagctgcctaatca

SEQ ID NO: 215695 - DNA, 33 bp, Homo sapien
ctcaaccacagctgaacgtgacccctctgctct

SEQ ID NO: 215696 - DNA, 33 bp, Homo sapien
ctcaaccacagctgaatgtgacccctctgctct

SEQ ID NO: 215697 - DNA, 33 bp, Homo sapien
gcaggaacaagctccaagtttccctctttttat

SEQ ID NO: 215698 - DNA, 33 bp, Homo sapien
gcaggaacaagctccaggtttccctctttttat

SEQ ID NO: 215699 - DNA, 33 bp, Homo sapien
aagactggaggtgaagaaggattggaaaacaag

SEQ ID NO: 215700 - DNA, 33 bp, Homo sapien
aagactggaggtgaagcaggattggaaaacaag

SEQ ID NO: 215701 - DNA, 33 bp, Homo sapien
agacattaccatatgccgaacctatcattactg

SEQ ID NO: 215702 - DNA, 33 bp, Homo sapien
agacattaccatatgctgaacctatcattactg

SEQ ID NO: 215703 - DNA, 33 bp, Homo sapien
tggctaagtaagggtcacaggaaaggcaagaaa

SEQ ID NO: 215704 - DNA, 33 bp, Homo sapien
tggctaagtaagggtcgcaggaaaggcaagaaa

SEQ ID NO: 215705 - DNA, 33 bp, Homo sapien
agtagcttgaccaaaccaacagtaaagctttag

SEQ ID NO: 215706 - DNA, 33 bp, Homo sapien
agtagcttgaccaaacgaacagtaaagctttag

SEQ ID NO: 215707 - DNA, 33 bp, Homo sapien
aacaaagaatgtgaagaatagagattgaaagac

SEQ ID NO: 215708 - DNA, 33 bp, Homo sapien
aacaaagaatgtgaaggatagagattgaaagac

SEQ ID NO: 215709 - DNA, 33 bp, Homo sapien
cataaatcgacatcagcaagaagcagtgtgtga

SEQ ID NO: 215710 - DNA, 33 bp, Homo sapien
cataaatcgacatcaggaagaagcagtgtgtga

SEQ ID NO: 215711 - DNA, 33 bp, Homo sapien
taagagagatttgggacgccatgagtaattcag

SEQ ID NO: 215712 - DNA, 33 bp, Homo sapien
taagagagatttgggatgccatgagtaattcag

SEQ ID NO: 215713 - DNA, 33 bp, Homo sapien
gaatatacgctaatataactgaccaataatttt

SEQ ID NO: 215714 - DNA, 33 bp, Homo sapien
gaatatacgctaatatcactgaccaataatttt

SEQ ID NO: 215715 - DNA, 33 bp, Homo sapien
gttttatcttaccaaaatccacgaggtgggtgc

SEQ ID NO: 215716 - DNA, 33 bp, Homo sapien
gttttatcttaccaaattccacgaggtgggtgc

SEQ ID NO: 215717 - DNA, 33 bp, Homo sapien
agtacaaaataattagaagctatgaatatctgg

SEQ ID NO: 215718 - DNA, 33 bp, Homo sapien
agtacaaaataattagcagctatgaatatctgg

SEQ ID NO: 215719 - DNA, 33 bp, Homo sapien
cgagacttgtctcatacggctaatgcacagaca

SEQ ID NO: 215720 - DNA, 33 bp, Homo sapien
cgagacttgtctcatatggctaatgcacagaca

SEQ ID NO: 215721 - DNA, 33 bp, Homo sapien
cctcacagagtttgaaagaagtaagtttcatta

SEQ ID NO: 215722 - DNA, 33 bp, Homo sapien
cctcacagagtttgaaggaagtaagtttcatta

SEQ ID NO: 215723 - DNA, 33 bp, Homo sapien
caaacaccttcataatgaaagaaatggttactt

SEQ ID NO: 215724 - DNA, 33 bp, Homo sapien
caaacaccttcataattaaagaaatggttactt

SEQ ID NO: 215725 - DNA, 33 bp, Homo sapien
gtgatgttttttcttacgggtgttctaagtcac

SEQ ID NO: 215726 - DNA, 33 bp, Homo sapien
gtgatgttttttcttatgggtgttctaagtcac

SEQ ID NO: 215727 - DNA, 33 bp, Homo sapien
tggttatatgcccactaagatagatggttaata

SEQ ID NO: 215728 - DNA, 33 bp, Homo sapien
tggttatatgcccactgagatagatggttaata

SEQ ID NO: 215729 - DNA, 33 bp, Homo sapien
ggtccatccccaggagacctaaacacgtcaatg

SEQ ID NO: 215730 - DNA, 33 bp, Homo sapien
ggtccatccccaggaggcctaaacacgtcaatg

SEQ ID NO: 215731 - DNA, 33 bp, Homo sapien
atgggaactcttatacactgttggcagaaatgt

SEQ ID NO: 215732 - DNA, 33 bp, Homo sapien
atgggaactcttatacgctgttggcagaaatgt

SEQ ID NO: 215733 - DNA, 33 bp, Homo sapien
acctcagcaatgcacactatagtcttgtaacaa

SEQ ID NO: 215734 - DNA, 33 bp, Homo sapien
acctcagcaatgcacattatagtcttgtaacaa

SEQ ID NO: 215735 - DNA, 33 bp, Homo sapien
ttgaggatactcctaacattaaatagtcacagg

SEQ ID NO: 215736 - DNA, 33 bp, Homo sapien
ttgaggatactcctaagattaaatagtcacagg

SEQ ID NO: 215737 - DNA, 33 bp, Homo sapien
tactgtgctctgctagaaagtggtgaagagatt

SEQ ID NO: 215738 - DNA, 33 bp, Homo sapien
tactgtgctctgctaggaagtggtgaagagatt

SEQ ID NO: 215739 - DNA, 33 bp, Homo sapien
cttttcacagggcaaccctccaaagaccacgct

SEQ ID NO: 215740 - DNA, 33 bp, Homo sapien
cttttcacagggcaacgctccaaagaccacgct

SEQ ID NO: 215741 - DNA, 33 bp, Homo sapien
tgtataaattcctaacgatactgcagacacctc

SEQ ID NO: 215742 - DNA, 33 bp, Homo sapien
tgtataaattcctaactatactgcagacacctc

SEQ ID NO: 215743 - DNA, 33 bp, Homo sapien
atggtgcagacatagaacattattagccattat

SEQ ID NO: 215744 - DNA, 33 bp, Homo sapien
atggtgcagacatagagcattattagccattat

SEQ ID NO: 215745 - DNA, 33 bp, Homo sapien
atgcattgaaaatgacaaatgaaatccctttat

SEQ ID NO: 215746 - DNA, 33 bp, Homo sapien
atgcattgaaaatgacgaatgaaatccctttat

SEQ ID NO: 215747 - DNA, 33 bp, Homo sapien
ccaagagagaacttaccgcaatccccagccact

SEQ ID NO: 215748 - DNA, 33 bp, Homo sapien
ccaagagagaacttactgcaatccccagccact

SEQ ID NO: 215749 - DNA, 33 bp, Homo sapien
ttgacgaacaggaaaactggcttttacttattc

SEQ ID NO: 215750 - DNA, 33 bp, Homo sapien
ttgacgaacaggaaaattggcttttacttattc

SEQ ID NO: 215751 - DNA, 33 bp, Homo sapien
catattgatgggatgtaacacacaggtaaataa

SEQ ID NO: 215752 - DNA, 33 bp, Homo sapien
catattgatgggatgttacacacaggtaaataa

SEQ ID NO: 215753 - DNA, 33 bp, Homo sapien
accaggagtcagtagagagtacacaaattctac

SEQ ID NO: 215754 - DNA, 33 bp, Homo sapien
accaggagtcagtagatagtacacaaattctac

SEQ ID NO: 215755 - DNA, 33 bp, Homo sapien
gccctcttttctgtggaatccgtaagtaatata

SEQ ID NO: 215756 - DNA, 33 bp, Homo sapien
gccctcttttctgtgggatccgtaagtaatata

SEQ ID NO: 215757 - DNA, 33 bp, Homo sapien
agagtgatatgaacatcaagaattaaccaagtc

SEQ ID NO: 215758 - DNA, 33 bp, Homo sapien
agagtgatatgaacattaagaattaaccaagtc

SEQ ID NO: 215759 - DNA, 33 bp, Homo sapien
aatctataagtacttccacagaaaggtctccaa

SEQ ID NO: 215760 - DNA, 33 bp, Homo sapien
aatctataagtacttctacagaaaggtctccaa

SEQ ID NO: 215761 - DNA, 33 bp, Homo sapien
gacaaaagtacggatacaagcaagataaacatg

SEQ ID NO: 215762 - DNA, 33 bp, Homo sapien
gacaaaagtacggatataagcaagataaacatg

SEQ ID NO: 215763 - DNA, 33 bp, Homo sapien
atgggaagttaggcatcacaggatatttgacaa

SEQ ID NO: 215764 - DNA, 33 bp, Homo sapien
atgggaagttaggcattacaggatatttgacaa

SEQ ID NO: 215765 - DNA, 33 bp, Homo sapien
gatggaaaaactgaaccctcaaagatgtatgtc

SEQ ID NO: 215766 - DNA, 33 bp, Homo sapien
gatggaaaaactgaactctcaaagatgtatgtc

SEQ ID NO: 215767 - DNA, 33 bp, Homo sapien
cactattaatagtaaacgcagtgagacaacaat

SEQ ID NO: 215768 - DNA, 33 bp, Homo sapien
cactattaatagtaaatgcagtgagacaacaat

SEQ ID NO: 215769 - DNA, 33 bp, Homo sapien
atggtatggtgacatacaaactgaacagtatgc

SEQ ID NO: 215770 - DNA, 33 bp, Homo sapien
atggtatggtgacatataaactgaacagtatgc

SEQ ID NO: 215771 - DNA, 33 bp, Homo sapien
tgaagacaaaccatcaatagtcccaaaacgtgt

SEQ ID NO: 215772 - DNA, 33 bp, Homo sapien
tgaagacaaaccatcagtagtcccaaaacgtgt

SEQ ID NO: 215773 - DNA, 33 bp, Homo sapien
taggaattcagctaggcagatcttgtaggcgtt

SEQ ID NO: 215774 - DNA, 33 bp, Homo sapien
taggaattcagctaggtagatcttgtaggcgtt

SEQ ID NO: 215775 - DNA, 33 bp, Homo sapien
tatatttgagtagagactattagcaagtacagg

SEQ ID NO: 215776 - DNA, 33 bp, Homo sapien
tatatttgagtagagagtattagcaagtacagg

SEQ ID NO: 215777 - DNA, 33 bp, Homo sapien
tgccatatgctgaagaatatcagtcactaatag

SEQ ID NO: 215778 - DNA, 33 bp, Homo sapien
tgccatatgctgaagagtatcagtcactaatag

SEQ ID NO: 215779 - DNA, 33 bp, Homo sapien
acagaattaaaagcgacgtaaacaattcaacaa

SEQ ID NO: 215780 - DNA, 33 bp, Homo sapien
acagaattaaaagcgatgtaaacaattcaacaa

SEQ ID NO: 215781 - DNA, 33 bp, Homo sapien
tgtgcagttcaccataaggttttgcatggctat

SEQ ID NO: 215782 - DNA, 33 bp, Homo sapien
tgtgcagttcaccatagggttttgcatggctat

SEQ ID NO: 215783 - DNA, 33 bp, Homo sapien
aaataagaatctatacaaagacaaccaactaat

SEQ ID NO: 215784 - DNA, 33 bp, Homo sapien
aaataagaatctatacgaagacaaccaactaat

SEQ ID NO: 215785 - DNA, 33 bp, Homo sapien
aatttggcatatgaggcacattaggttagtttt

SEQ ID NO: 215786 - DNA, 33 bp, Homo sapien
aatttggcatatgaggtacattaggttagtttt

SEQ ID NO: 215787 - DNA, 33 bp, Homo sapien
attcctttgactatcacctaatggaccagtcac

SEQ ID NO: 215788 - DNA, 33 bp, Homo sapien
attcctttgactatcagctaatggaccagtcac

SEQ ID NO: 215789 - DNA, 33 bp, Homo sapien
aattccaaagataaaaaaccttaagatgtgtag

SEQ ID NO: 215790 - DNA, 33 bp, Homo sapien
aattccaaagataaaagaccttaagatgtgtag

SEQ ID NO: 215791 - DNA, 33 bp, Homo sapien
aactgagtaaaatgaactaaagcagactatgga

SEQ ID NO: 215792 - DNA, 33 bp, Homo sapien
aactgagtaaaatgaagtaaagcagactatgga

SEQ ID NO: 215793 - DNA, 33 bp, Homo sapien
tttcttttatattccaacaaaattttctgaaac

SEQ ID NO: 215794 - DNA, 33 bp, Homo sapien
tttcttttatattccaccaaaattttctgaaac

SEQ ID NO: 215795 - DNA, 33 bp, Homo sapien
gagattatatttgttacacgttttgcttcctgc

SEQ ID NO: 215796 - DNA, 33 bp, Homo sapien
gagattatatttgttatacgttttgcttcctgc

SEQ ID NO: 215797 - DNA, 33 bp, Homo sapien
agcaacagactaggaacgctgtcaaaaaaaact

SEQ ID NO: 215798 - DNA, 33 bp, Homo sapien
agcaacagactaggaatgctgtcaaaaaaaact

SEQ ID NO: 215799 - DNA, 33 bp, Homo sapien
caagagtagtttcaacagagtggtggaagaaca

SEQ ID NO: 215800 - DNA, 33 bp, Homo sapien
caagagtagtttcaacggagtggtggaagaaca

SEQ ID NO: 215801 - DNA, 33 bp, Homo sapien
taatgataccatccaaaaagtgaaaaggaagac

SEQ ID NO: 215802 - DNA, 33 bp, Homo sapien
taatgataccatccaagaagtgaaaaggaagac

SEQ ID NO: 215803 - DNA, 33 bp, Homo sapien
tccttcaattgctaaagggataaaatataacac

SEQ ID NO: 215804 - DNA, 33 bp, Homo sapien
tccttcaattgctaaatggataaaatataacac

SEQ ID NO: 215805 - DNA, 33 bp, Homo sapien
catcctcactttaaaaatatatgttcacattac

SEQ ID NO: 215806 - DNA, 33 bp, Homo sapien
catcctcactttaaaagtatatgttcacattac

SEQ ID NO: 215807 - DNA, 33 bp, Homo sapien
tttaatcgcatcccaaaaaaactctctgatgct

SEQ ID NO: 215808 - DNA, 33 bp, Homo sapien
tttaatcgcatcccaagaaaactctctgatgct

SEQ ID NO: 215809 - DNA, 33 bp, Homo sapien
tttggaaatcatacaacaatgtgctaagaatta

SEQ ID NO: 215810 - DNA, 33 bp, Homo sapien
tttggaaatcatacaagaatgtgctaagaatta

SEQ ID NO: 215811 - DNA, 33 bp, Homo sapien
attttagatcagaaacaaaagaccgtttttgaa

SEQ ID NO: 215812 - DNA, 33 bp, Homo sapien
attttagatcagaaacgaaagaccgtttttgaa

SEQ ID NO: 215813 - DNA, 33 bp, Homo sapien
gaagcgagtaacctgggcagtttctagaaaggt

SEQ ID NO: 215814 - DNA, 33 bp, Homo sapien
gaagcgagtaacctggtcagtttctagaaaggt

SEQ ID NO: 215815 - DNA, 33 bp, Homo sapien
gtgatcaggaggcaaacttcttcagttcttagc

SEQ ID NO: 215816 - DNA, 33 bp, Homo sapien
gtgatcaggaggcaaatttcttcagttcttagc

SEQ ID NO: 215817 - DNA, 33 bp, Homo sapien
attaatcccatttagacatctgaaagtgggcct

SEQ ID NO: 215818 - DNA, 33 bp, Homo sapien
attaatcccatttagagatctgaaagtgggcct

SEQ ID NO: 215819 - DNA, 33 bp, Homo sapien
taagatgaattgggtgaaaggttgaagaatgtg

SEQ ID NO: 215820 - DNA, 33 bp, Homo sapien
taagatgaattgggtggaaggttgaagaatgtg

SEQ ID NO: 215821 - DNA, 33 bp, Homo sapien
cagaatcttcagtaccactaaattgctaataag

SEQ ID NO: 215822 - DNA, 33 bp, Homo sapien
cagaatcttcagtaccgctaaattgctaataag

SEQ ID NO: 215823 - DNA, 33 bp, Homo sapien
gtaattttcacatctaacatagtgccatgcata

SEQ ID NO: 215824 - DNA, 33 bp, Homo sapien
gtaattttcacatctagcatagtgccatgcata

SEQ ID NO: 215825 - DNA, 33 bp, Homo sapien
gaactaccagcttgtcaatatttgtttatgtta

SEQ ID NO: 215826 - DNA, 33 bp, Homo sapien
gaactaccagcttgtcgatatttgtttatgtta

SEQ ID NO: 215827 - DNA, 33 bp, Homo sapien
gcaaatactatgcaaaaaccattgtggaacaga

SEQ ID NO: 215828 - DNA, 33 bp, Homo sapien
gcaaatactatgcaaacaccattgtggaacaga

SEQ ID NO: 215829 - DNA, 33 bp, Homo sapien
taagatattctatgagcacatttgaggagtact

SEQ ID NO: 215830 - DNA, 33 bp, Homo sapien
taagatattctatgagtacatttgaggagtact

SEQ ID NO: 215831 - DNA, 33 bp, Homo sapien
aacctggtgactggaaataggatatgaaaccaa

SEQ ID NO: 215832 - DNA, 33 bp, Homo sapien
aacctggtgactggaagtaggatatgaaaccaa

SEQ ID NO: 215833 - DNA, 33 bp, Homo sapien
aggaataatttatacacgagcagtttttaagga

SEQ ID NO: 215834 - DNA, 33 bp, Homo sapien
aggaataatttatacatgagcagtttttaagga

SEQ ID NO: 215835 - DNA, 33 bp, Homo sapien
aaatgggctataaccaaaaaaacatgaagagtt

SEQ ID NO: 215836 - DNA, 33 bp, Homo sapien
aaatgggctataaccagaaaaacatgaagagtt

SEQ ID NO: 215837 - DNA, 33 bp, Homo sapien
cagatgtttaatgaaacgttgcttaatgaagga

SEQ ID NO: 215838 - DNA, 33 bp, Homo sapien
cagatgtttaatgaaatgttgcttaatgaagga

SEQ ID NO: 215839 - DNA, 33 bp, Homo sapien
ttggcagaattattcaccaaggaccagaaaatc

SEQ ID NO: 215840 - DNA, 33 bp, Homo sapien
ttggcagaattattcagcaaggaccagaaaatc

SEQ ID NO: 215841 - DNA, 33 bp, Homo sapien
tgtaaagcaaaacccaaagtgattattcatttc

SEQ ID NO: 215842 - DNA, 33 bp, Homo sapien
tgtaaagcaaaacccagagtgattattcatttc

SEQ ID NO: 215843 - DNA, 33 bp, Homo sapien
atgaattctgcatttacacaacttttattccca

SEQ ID NO: 215844 - DNA, 33 bp, Homo sapien
atgaattctgcatttatacaacttttattccca

SEQ ID NO: 215845 - DNA, 33 bp, Homo sapien
ataatgtggctgctaaactctaaaccacacttt

SEQ ID NO: 215846 - DNA, 33 bp, Homo sapien
ataatgtggctgctaacctctaaaccacacttt

SEQ ID NO: 215847 - DNA, 33 bp, Homo sapien
caaagatgaatttagaaaaatggcaagggtagg

SEQ ID NO: 215848 - DNA, 33 bp, Homo sapien
caaagatgaatttagacaaatggcaagggtagg

SEQ ID NO: 215849 - DNA, 33 bp, Homo sapien
ccatgttttgtacactcagatccacttcctcta

SEQ ID NO: 215850 - DNA, 33 bp, Homo sapien
ccatgttttgtacactgagatccacttcctcta

SEQ ID NO: 215851 - DNA, 33 bp, Homo sapien
gtcatagccataatacagcacccagggccttat

SEQ ID NO: 215852 - DNA, 33 bp, Homo sapien
gtcatagccataatacggcacccagggccttat

SEQ ID NO: 215853 - DNA, 33 bp, Homo sapien
aagcattccccctccaagagtcagtacctctaa

SEQ ID NO: 215854 - DNA, 33 bp, Homo sapien
aagcattccccctccaggagtcagtacctctaa

SEQ ID NO: 215855 - DNA, 33 bp, Homo sapien
aatatgtgcttctcacccttgcaaactctgggc

SEQ ID NO: 215856 - DNA, 33 bp, Homo sapien
aatatgtgcttctcactcttgcaaactctgggc

SEQ ID NO: 215857 - DNA, 33 bp, Homo sapien
acgtgaaatagaaatgccataactgctatggca

SEQ ID NO: 215858 - DNA, 33 bp, Homo sapien
acgtgaaatagaaatgtcataactgctatggca

SEQ ID NO: 215859 - DNA, 33 bp, Homo sapien
gtgtgatagccagctaagtactattcgaatgaa

SEQ ID NO: 215860 - DNA, 33 bp, Homo sapien
gtgtgatagccagctaggtactattcgaatgaa

SEQ ID NO: 215861 - DNA, 33 bp, Homo sapien
cattgactctttcaagcaagacatatttactaa

SEQ ID NO: 215862 - DNA, 33 bp, Homo sapien
cattgactctttcaagtaagacatatttactaa

SEQ ID NO: 215863 - DNA, 33 bp, Homo sapien
gttgcttgttaaaacacgaagcaattactgaat

SEQ ID NO: 215864 - DNA, 33 bp, Homo sapien
gttgcttgttaaaacatgaagcaattactgaat

SEQ ID NO: 215865 - DNA, 33 bp, Homo sapien
tggagatacatatgagaaacaagttattttcca

SEQ ID NO: 215866 - DNA, 33 bp, Homo sapien
tggagatacatatgaggaacaagttattttcca

SEQ ID NO: 215867 - DNA, 33 bp, Homo sapien
aatctgtggtcaaatgcagactattatcatata

SEQ ID NO: 215868 - DNA, 33 bp, Homo sapien
aatctgtggtcaaatgtagactattatcatata

SEQ ID NO: 215869 - DNA, 33 bp, Homo sapien
taccagattttattctaaactttgttctcacct

SEQ ID NO: 215870 - DNA, 33 bp, Homo sapien
taccagattttattctgaactttgttctcacct

SEQ ID NO: 215871 - DNA, 33 bp, Homo sapien
ttacaggcatgataccacaccaggcccgtttcc

SEQ ID NO: 215872 - DNA, 33 bp, Homo sapien
ttacaggcatgataccgcaccaggcccgtttcc

SEQ ID NO: 215873 - DNA, 33 bp, Homo sapien
gtgccttaactttgaacgtcagaaaatttaggc

SEQ ID NO: 215874 - DNA, 33 bp, Homo sapien
gtgccttaactttgaatgtcagaaaatttaggc

SEQ ID NO: 215875 - DNA, 33 bp, Homo sapien
cagcagatcacaggtaagtttaccttcaacaga

SEQ ID NO: 215876 - DNA, 33 bp, Homo sapien
cagcagatcacaggtatgtttaccttcaacaga

SEQ ID NO: 215877 - DNA, 33 bp, Homo sapien
tgatgatatgattaaacactgtgaagaaaggtt

SEQ ID NO: 215878 - DNA, 33 bp, Homo sapien
tgatgatatgattaaagactgtgaagaaaggtt

SEQ ID NO: 215879 - DNA, 33 bp, Homo sapien
atctgtcttataactacaaaagataaagcaaac

SEQ ID NO: 215880 - DNA, 33 bp, Homo sapien
atctgtcttataactagaaaagataaagcaaac

SEQ ID NO: 215881 - DNA, 33 bp, Homo sapien
atctttggaacaacaacatttaggtgggtctct

SEQ ID NO: 215882 - DNA, 33 bp, Homo sapien
atctttggaacaacaagatttaggtgggtctct

SEQ ID NO: 215883 - DNA, 33 bp, Homo sapien
acacagatatcgagtgaacaaactaccatccca

SEQ ID NO: 215884 - DNA, 33 bp, Homo sapien
acacagatatcgagtggacaaactaccatccca

SEQ ID NO: 215885 - DNA, 33 bp, Homo sapien
atcctcagatgggctgaaaactagttggaaggc

SEQ ID NO: 215886 - DNA, 33 bp, Homo sapien
atcctcagatgggctggaaactagttggaaggc

SEQ ID NO: 215887 - DNA, 33 bp, Homo sapien
atggaggatcactgaaataggctctactgaata

SEQ ID NO: 215888 - DNA, 33 bp, Homo sapien
atggaggatcactgaagtaggctctactgaata

SEQ ID NO: 215889 - DNA, 33 bp, Homo sapien
tataaacaaacatagacactaaccatcagccaa

SEQ ID NO: 215890 - DNA, 33 bp, Homo sapien
tataaacaaacatagatactaaccatcagccaa

SEQ ID NO: 215891 - DNA, 33 bp, Homo sapien
tttataaaacctatgcaaatgtaatgaaatggc

SEQ ID NO: 215892 - DNA, 33 bp, Homo sapien
tttataaaacctatgccaatgtaatgaaatggc

SEQ ID NO: 215893 - DNA, 33 bp, Homo sapien
ctcacaaggttataaacatgtagctgactattc

SEQ ID NO: 215894 - DNA, 33 bp, Homo sapien
ctcacaaggttataaagatgtagctgactattc

SEQ ID NO: 215895 - DNA, 33 bp, Homo sapien
ccctgggcacctttagaagcctgaactggaact

SEQ ID NO: 215896 - DNA, 33 bp, Homo sapien
ccctgggcacctttaggagcctgaactggaact

SEQ ID NO: 215897 - DNA, 33 bp, Homo sapien; identical to SEQ ID NO: 215895

SEQ ID NO: 215898 - DNA, 33 bp, Homo sapien; identical to SEQ ID NO: 215896

SEQ ID NO: 215899 - DNA, 33 bp, Homo sapien
aactccaatcacaaaggaaccccaatcactaat

SEQ ID NO: 215900 - DNA, 33 bp, Homo sapien
aactccaatcacaaagtaaccccaatcactaat

SEQ ID NO: 215901 - DNA, 33 bp, Homo sapien
ggattagaagccattaaattctctgaataacag

SEQ ID NO: 215902 - DNA, 33 bp, Homo sapien
ggattagaagccattacattctctgaataacag

SEQ ID NO: 215903 - DNA, 33 bp, Homo sapien
aatggcttctaatccaagattacacagatggta

SEQ ID NO: 215904 - DNA, 33 bp, Homo sapien
aatggcttctaatccaggattacacagatggta

SEQ ID NO: 215905 - DNA, 33 bp, Homo sapien
aatccatgctttcagcaaaattacattaattac

SEQ ID NO: 215906 - DNA, 33 bp, Homo sapien
aatccatgctttcagcgaaattacattaattac

SEQ ID NO: 215907 - DNA, 33 bp, Homo sapien
gagtgacattaggagaaaaagtgacttgcttgt

SEQ ID NO: 215908 - DNA, 33 bp, Homo sapien
gagtgacattaggagataaagtgacttgcttgt

SEQ ID NO: 215909 - DNA, 33 bp, Homo sapien
aacagccaacaattacccttaaacttccctgtg

SEQ ID NO: 215910 - DNA, 33 bp, Homo sapien
aacagccaacaattactcttaaacttccctgtg

SEQ ID NO: 215911 - DNA, 33 bp, Homo sapien
gagaggctcctggtgagggggtggctgaaagac

SEQ ID NO: 215912 - DNA, 33 bp, Homo sapien
gagaggctcctggtgatggggtggctgaaagac

SEQ ID NO: 215913 - DNA, 33 bp, Homo sapien
cctgtctcaaacacaaagctatgtgatgtgtgg

SEQ ID NO: 215914 - DNA, 33 bp, Homo sapien
cctgtctcaaacacaaggctatgtgatgtgtgg

SEQ ID NO: 215915 - DNA, 33 bp, Homo sapien
ccctttcaggattcaaatgaaattgttttgcat

SEQ ID NO: 215916 - DNA, 33 bp, Homo sapien
ccctttcaggattcaactgaaattgttttgcat

SEQ ID NO: 215917 - DNA, 33 bp, Homo sapien
tgaaagggcaagctgaacttagctgatgtgtgg

SEQ ID NO: 215918 - DNA, 33 bp, Homo sapien
tgaaagggcaagctgaccttagctgatgtgtgg

SEQ ID NO: 215919 - DNA, 33 bp, Homo sapien
tctgagttttgtcaaaagtgcattcccaaatgc

SEQ ID NO: 215920 - DNA, 33 bp, Homo sapien
tctgagttttgtcaaacgtgcattcccaaatgc

SEQ ID NO: 215921 - DNA, 33 bp, Homo sapien
gaaacaaacaaaagtaaagcaagaaagattgag

SEQ ID NO: 215922 - DNA, 33 bp, Homo sapien
gaaacaaacaaaagtagagcaagaaagattgag

SEQ ID NO: 215923 - DNA, 33 bp, Homo sapien
ttgtgacacctgaaaacaagtgccaggggattt

SEQ ID NO: 215924 - DNA, 33 bp, Homo sapien
ttgtgacacctgaaaagaagtgccaggggattt

SEQ ID NO: 215925 - DNA, 33 bp, Homo sapien
agtcaaattgagcacaaaggaaggcacgcatct

SEQ ID NO: 215926 - DNA, 33 bp, Homo sapien
agtcaaattgagcacagaggaaggcacgcatct

SEQ ID NO: 215927 - DNA, 33 bp, Homo sapien
gaggctatggaaactcaaatctttttggtcatc

SEQ ID NO: 215928 - DNA, 33 bp, Homo sapien
gaggctatggaaactccaatctttttggtcatc

SEQ ID NO: 215929 - DNA, 33 bp, Homo sapien
gcattcttgtggctacaggattttatcttagca

SEQ ID NO: 215930 - DNA, 33 bp, Homo sapien
gcattcttgtggctacgggattttatcttagca

SEQ ID NO: 215931 - DNA, 33 bp, Homo sapien
acatgaaatcagggaactgctttttctggagac

SEQ ID NO: 215932 - DNA, 33 bp, Homo sapien
acatgaaatcagggaattgctttttctggagac

SEQ ID NO: 215933 - DNA, 33 bp, Homo sapien
aatgctaaacatcagcactggaaagaacagtta

SEQ ID NO: 215934 - DNA, 33 bp, Homo sapien
aatgctaaacatcagcgctggaaagaacagtta

SEQ ID NO: 215935 - DNA, 33 bp, Homo sapien
caagattccaggcagaaagcatcaaacgcagct

SEQ ID NO: 215936 - DNA, 33 bp, Homo sapien
caagattccaggcagagagcatcaaacgcagct

SEQ ID NO: 215937 - DNA, 33 bp, Homo sapien
tttcagtttgttaaagcactggactttctatca

SEQ ID NO: 215938 - DNA, 33 bp, Homo sapien
tttcagtttgttaaaggactggactttctatca

SEQ ID NO: 215939 - DNA, 33 bp, Homo sapien
ctcttctgggtacgggaacgttgtatggttcag

SEQ ID NO: 215940 - DNA, 33 bp, Homo sapien
ctcttctgggtacggggacgttgtatggttcag

SEQ ID NO: 215941 - DNA, 33 bp, Homo sapien
ttgttttcttttcatactaagccttagaaatgt

SEQ ID NO: 215942 - DNA, 33 bp, Homo sapien
ttgttttcttttcatagtaagccttagaaatgt

SEQ ID NO: 215943 - DNA, 33 bp, Homo sapien
tgattctttcctcagggagaagtcatggaccaa

SEQ ID NO: 215944 - DNA, 33 bp, Homo sapien
tgattctttcctcaggtagaagtcatggaccaa

SEQ ID NO: 215945 - DNA, 33 bp, Homo sapien
taggaacaatggattaggtttcattctgattct

SEQ ID NO: 215946 - DNA, 33 bp, Homo sapien
taggaacaatggattatgtttcattctgattct

SEQ ID NO: 215947 - DNA, 33 bp, Homo sapien
tatttcattatttgctcaaaattatgccttttt

SEQ ID NO: 215948 - DNA, 33 bp, Homo sapien
tatttcattatttgctgaaaattatgccttttt

SEQ ID NO: 215949 - DNA, 33 bp, Homo sapien
caagttactgcctttcgcctctatgtctactga

SEQ ID NO: 215950 - DNA, 33 bp, Homo sapien
caagttactgcctttctcctctatgtctactga

SEQ ID NO: 215951 - DNA, 33 bp, Homo sapien
ttcaaaataaattacaacacaaagcaagctata

SEQ ID NO: 215952 - DNA, 33 bp, Homo sapien
ttcaaaataaattacagcacaaagcaagctata

SEQ ID NO: 215953 - DNA, 33 bp, Homo sapien
ccatatcatttgtttacgtaactgatcaaaggc

SEQ ID NO: 215954 - DNA, 33 bp, Homo sapien
ccatatcatttgtttatgtaactgatcaaaggc

SEQ ID NO: 215955 - DNA, 33 bp, Homo sapien
tgtgcattatttcatccacacagggtaactgac

SEQ ID NO: 215956 - DNA, 33 bp, Homo sapien
tgtgcattatttcatctacacagggtaactgac

SEQ ID NO: 215957 - DNA, 33 bp, Homo sapien
attatataatgctcaagaggtcaattcagtgaa

SEQ ID NO: 215958 - DNA, 33 bp, Homo sapien
attatataatgctcaataggtcaattcagtgaa

SEQ ID NO: 215959 - DNA, 33 bp, Homo sapien
gtagattgattatgtcccggattaggtgctgaa

SEQ ID NO: 215960 - DNA, 33 bp, Homo sapien
gtagattgattatgtctcggattaggtgctgaa

SEQ ID NO: 215961 - DNA, 33 bp, Homo sapien
gatgattgaggaaaagaacctaatattacaatt

SEQ ID NO: 215962 - DNA, 33 bp, Homo sapien
gatgattgaggaaaagtacctaatattacaatt

SEQ ID NO: 215963 - DNA, 33 bp, Homo sapien
ccaaggtagtgggaacactttctttagcttggc

SEQ ID NO: 215964 - DNA, 33 bp, Homo sapien
ccaaggtagtgggaacgctttctttagcttggc

SEQ ID NO: 215965 - DNA, 33 bp, Homo sapien
cggcattgcttattgacgatggcagggaaagtt

SEQ ID NO: 215966 - DNA, 33 bp, Homo sapien
cggcattgcttattgatgatggcagggaaagtt

SEQ ID NO: 215967 - DNA, 33 bp, Homo sapien
ttctcactatgtcaagaccattctatttcttta

SEQ ID NO: 215968 - DNA, 33 bp, Homo sapien
ttctcactatgtcaagtccattctatttcttta

SEQ ID NO: 215969 - DNA, 33 bp, Homo sapien
tttcttgataaccatacgtaatgtactaggtaa

SEQ ID NO: 215970 - DNA, 33 bp, Homo sapien
tttcttgataaccatatgtaatgtactaggtaa

SEQ ID NO: 215971 - DNA, 33 bp, Homo sapien
atgctctgaaatctccacttatctcttaacttt

SEQ ID NO: 215972 - DNA, 33 bp, Homo sapien
atgctctgaaatctccgcttatctcttaacttt

SEQ ID NO: 215973 - DNA, 33 bp, Homo sapien
ttttatgcattttgaccatcttttacactactt

SEQ ID NO: 215974 - DNA, 33 bp, Homo sapien
ttttatgcattttgactatcttttacactactt

SEQ ID NO: 215975 - DNA, 33 bp, Homo sapien
attaaatactctgaccgatattatgcagcagag

SEQ ID NO: 215976 - DNA, 33 bp, Homo sapien
attaaatactctgacctatattatgcagcagag

SEQ ID NO: 215977 - DNA, 33 bp, Homo sapien
gccaacattcctcagaagaccacttggaaaatc

SEQ ID NO: 215978 - DNA, 33 bp, Homo sapien
gccaacattcctcagaggaccacttggaaaatc

SEQ ID NO: 215979 - DNA, 33 bp, Homo sapien
agggcttagaggtaaactcagtcttctatactc

SEQ ID NO: 215980 - DNA, 33 bp, Homo sapien
agggcttagaggtaaattcagtcttctatactc

SEQ ID NO: 215981 - DNA, 33 bp, Homo sapien
acagtcctcaaatttccacagttgaaaacatca

SEQ ID NO: 215982 - DNA, 33 bp, Homo sapien
acagtcctcaaatttctacagttgaaaacatca

SEQ ID NO: 215983 - DNA, 33 bp, Homo sapien
tcacttagatacaccacgcagcaatttcagttc

SEQ ID NO: 215984 - DNA, 33 bp, Homo sapien
tcacttagatacaccatgcagcaatttcagttc

SEQ ID NO: 215985 - DNA, 33 bp, Homo sapien
caaacacagaagaagaacaatagcgaagcacca

SEQ ID NO: 215986 - DNA, 33 bp, Homo sapien
caaacacagaagaagagcaatagcgaagcacca

SEQ ID NO: 215987 - DNA, 33 bp, Homo sapien
caagttccatgagttacgccagattgtgtcaat

SEQ ID NO: 215988 - DNA, 33 bp, Homo sapien
caagttccatgagttatgccagattgtgtcaat

SEQ ID NO: 215989 - DNA, 33 bp, Homo sapien
tgcctggtgttaggaaatgtaatcatgatcaat

SEQ ID NO: 215990 - DNA, 33 bp, Homo sapien
tgcctggtgttaggaattgtaatcatgatcaat

SEQ ID NO: 215991 - DNA, 33 bp, Homo sapien
gtatttctctttgatgaaccattctctctacag

SEQ ID NO: 215992 - DNA, 33 bp, Homo sapien
gtatttctctttgatggaccattctctctacag

SEQ ID NO: 215993 - DNA, 33 bp, Homo sapien
aataatcaatcctagcaaggaagacacgtcaaa

SEQ ID NO: 215994 - DNA, 33 bp, Homo sapien
aataatcaatcctagcgaggaagacacgtcaaa

SEQ ID NO: 215995 - DNA, 33 bp, Homo sapien
ttcagggagttattcacgactttcccaggtgaa

SEQ ID NO: 215996 - DNA, 33 bp, Homo sapien
ttcagggagttattcatgactttcccaggtgaa

SEQ ID NO: 215997 - DNA, 33 bp, Homo sapien
cagcaagagcaaaaaacactcatcacagaatgg

SEQ ID NO: 215998 - DNA, 33 bp, Homo sapien
cagcaagagcaaaaaagactcatcacagaatgg

SEQ ID NO: 215999 - DNA, 33 bp, Homo sapien
acatgacctctattaaagcccaaagctcaaaac

SEQ ID NO: 216000 - DNA, 33 bp, Homo sapien
acatgacctctattaaggcccaaagctcaaaac

SEQ ID NO: 216001 - DNA, 33 bp, Homo sapien
cctgccaacacttgacaacaatatccgtgctgg

SEQ ID NO: 216002 - DNA, 33 bp, Homo sapien
cctgccaacacttgacgacaatatccgtgctgg

SEQ ID NO: 216003 - DNA, 33 bp, Homo sapien
acatttttggttacaacggctgggtaccttcac

SEQ ID NO: 216004 - DNA, 33 bp, Homo sapien
acatttttggttacaatggctgggtaccttcac

SEQ ID NO: 216005 - DNA, 33 bp, Homo sapien
taatatatatcttgtcaattcccagatggtttg

SEQ ID NO: 216006 - DNA, 33 bp, Homo sapien
taatatatatcttgtccattcccagatggtttg

SEQ ID NO: 216007 - DNA, 33 bp, Homo sapien
cagcttcactcataatcaccagaacttaaaagc

SEQ ID NO: 216008 - DNA, 33 bp, Homo sapien
cagcttcactcataatgaccagaacttaaaagc

SEQ ID NO: 216009 - DNA, 33 bp, Homo sapien
agaatcagctgcttccagaggacaaacagttac

SEQ ID NO: 216010 - DNA, 33 bp, Homo sapien
agaatcagctgcttcccgaggacaaacagttac

SEQ ID NO: 216011 - DNA, 33 bp, Homo sapien
gggtagttctgagacaacagggattagcctcta

SEQ ID NO: 216012 - DNA, 33 bp, Homo sapien
gggtagttctgagacagcagggattagcctcta

SEQ ID NO: 216013 - DNA, 33 bp, Homo sapien
tttttctttgagtggcataggaattatgatatt

SEQ ID NO: 216014 - DNA, 33 bp, Homo sapien
tttttctttgagtggcgtaggaattatgatatt

SEQ ID NO: 216015 - DNA, 33 bp, Homo sapien
tctagaagttaaaaacaaattagcgatctttac

SEQ ID NO: 216016 - DNA, 33 bp, Homo sapien
tctagaagttaaaaaccaattagcgatctttac

SEQ ID NO: 216017 - DNA, 33 bp, Homo sapien
gaatcaaattataaacaaagcacagaaaatgat

SEQ ID NO: 216018 - DNA, 33 bp, Homo sapien
gaatcaaattataaaccaagcacagaaaatgat

SEQ ID NO: 216019 - DNA, 33 bp, Homo sapien
tctggggtcccaactgcacaagcagaagacagc

SEQ ID NO: 216020 - DNA, 33 bp, Homo sapien
tctggggtcccaactggacaagcagaagacagc

SEQ ID NO: 216021 - DNA, 33 bp, Homo sapien
gccagctttaatggcacacgctgtgttatgtcc

SEQ ID NO: 216022 - DNA, 33 bp, Homo sapien
gccagctttaatggcagacgctgtgttatgtcc

SEQ ID NO: 216023 - DNA, 33 bp, Homo sapien
tgcacagagacagagaacttttataaaatatca

SEQ ID NO: 216024 - DNA, 33 bp, Homo sapien
tgcacagagacagagagcttttataaaatatca

SEQ ID NO: 216025 - DNA, 33 bp, Homo sapien
agctctcttaaaggcaaggatattcatatttgt

SEQ ID NO: 216026 - DNA, 33 bp, Homo sapien
agctctcttaaaggcagggatattcatatttgt

SEQ ID NO: 216027 - DNA, 33 bp, Homo sapien
gctccttccagatgccactaggtagtacagtct

SEQ ID NO: 216028 - DNA, 33 bp, Homo sapien
gctccttccagatgccgctaggtagtacagtct

SEQ ID NO: 216029 - DNA, 33 bp, Homo sapien
attttgccatgataaagatttcaattcagaaga

SEQ ID NO: 216030 - DNA, 33 bp, Homo sapien
attttgccatgataaatatttcaattcagaaga

SEQ ID NO: 216031 - DNA, 33 bp, Homo sapien
agaagcaaaaattgacagaactgaaaagggaaa

SEQ ID NO: 216032 - DNA, 33 bp, Homo sapien
agaagcaaaaattgacggaactgaaaagggaaa

SEQ ID NO: 216033 - DNA, 33 bp, Homo sapien
gtttgttcaatcttagcagttgctgtcctttgg

SEQ ID NO: 216034 - DNA, 33 bp, Homo sapien
gtttgttcaatcttagtagttgctgtcctttgg

SEQ ID NO: 216035 - DNA, 33 bp, Homo sapien
tagtttagctattgtgaaaagtaattagggatt

SEQ ID NO: 216036 - DNA, 33 bp, Homo sapien
tagtttagctattgtggaaagtaattagggatt

SEQ ID NO: 216037 - DNA, 33 bp, Homo sapien
tgctgtgattaacatacacatacaggtctcttt

SEQ ID NO: 216038 - DNA, 33 bp, Homo sapien
tgctgtgattaacatatacatacaggtctcttt

SEQ ID NO: 216039 - DNA, 33 bp, Homo sapien
ggcttttctttgtgggaagttcttttgatcact

SEQ ID NO: 216040 - DNA, 33 bp, Homo sapien
ggcttttctttgtgggtagttcttttgatcact

SEQ ID NO: 216041 - DNA, 33 bp, Homo sapien
atgtctatataaaatgaatgaagttgtagaaaa

SEQ ID NO: 216042 - DNA, 33 bp, Homo sapien
atgtctatataaaatggatgaagttgtagaaaa

SEQ ID NO: 216043 - DNA, 33 bp, Homo sapien
aaatgaacagaaatagaagaaccaggcagaaag

SEQ ID NO: 216044 - DNA, 33 bp, Homo sapien
aaatgaacagaaataggagaaccaggcagaaag

SEQ ID NO: 216045 - DNA, 33 bp, Homo sapien
cctaggtgcttagatcaatggtcatactattca

SEQ ID NO: 216046 - DNA, 33 bp, Homo sapien
cctaggtgcttagatcgatggtcatactattca

SEQ ID NO: 216047 - DNA, 33 bp, Homo sapien
gattattatagccatcaatgtgaatacggtgaa

SEQ ID NO: 216048 - DNA, 33 bp, Homo sapien
gattattatagccatccatgtgaatacggtgaa

SEQ ID NO: 216049 - DNA, 33 bp, Homo sapien
acctttgtgatttggagtataaagtttggataa

SEQ ID NO: 216050 - DNA, 33 bp, Homo sapien
acctttgtgatttggattataaagtttggataa

SEQ ID NO: 216051 - DNA, 33 bp, Homo sapien
cagtgccttggcatcacagctgaggttaaaaca

SEQ ID NO: 216052 - DNA, 33 bp, Homo sapien
cagtgccttggcatcatagctgaggttaaaaca

SEQ ID NO: 216053 - DNA, 33 bp, Homo sapien
tgccttgaagaaccagcaaattattgagaatgt

SEQ ID NO: 216054 - DNA, 33 bp, Homo sapien
tgccttgaagaaccagtaaattattgagaatgt

SEQ ID NO: 216055 - DNA, 33 bp, Homo sapien
tcttgttgaatttatcaaatgtgcataatatct

SEQ ID NO: 216056 - DNA, 33 bp, Homo sapien
tcttgttgaatttatcgaatgtgcataatatct

SEQ ID NO: 216057 - DNA, 33 bp, Homo sapien
acaatcagctgtcatacagtagatgtctcaaaa

SEQ ID NO: 216058 - DNA, 33 bp, Homo sapien
acaatcagctgtcatatagtagatgtctcaaaa

SEQ ID NO: 216059 - DNA, 33 bp, Homo sapien
gctatcagacacaataacagtttaggtgtatct

SEQ ID NO: 216060 - DNA, 33 bp, Homo sapien
gctatcagacacaatatcagtttaggtgtatct

SEQ ID NO: 216061 - DNA, 33 bp, Homo sapien
tgcggtggaccttatacaaattctccccaagat

SEQ ID NO: 216062 - DNA, 33 bp, Homo sapien
tgcggtggaccttatataaattctccccaagat

SEQ ID NO: 216063 - DNA, 33 bp, Homo sapien
tgcttgtgaatccatacagcccaggacaatttt

SEQ ID NO: 216064 - DNA, 33 bp, Homo sapien
tgcttgtgaatccatagagcccaggacaatttt

SEQ ID NO: 216065 - DNA, 33 bp, Homo sapien
ctcagtgcaaggatgcaaggcctatctatcata

SEQ ID NO: 216066 - DNA, 33 bp, Homo sapien
ctcagtgcaaggatgcgaggcctatctatcata

SEQ ID NO: 216067 - DNA, 33 bp, Homo sapien
tcaaagtagttaaacaatgtcacttgacctgag

SEQ ID NO: 216068 - DNA, 33 bp, Homo sapien
tcaaagtagttaaacagtgtcacttgacctgag

SEQ ID NO: 216069 - DNA, 33 bp, Homo sapien
agccttcaccctcagacgcaacgtgaatgtttt

SEQ ID NO: 216070 - DNA, 33 bp, Homo sapien
agccttcaccctcagatgcaacgtgaatgtttt

SEQ ID NO: 216071 - DNA, 33 bp, Homo sapien
ctcaagtcaaaattcaaaagtctctaggtttat

SEQ ID NO: 216072 - DNA, 33 bp, Homo sapien
ctcaagtcaaaattcagaagtctctaggtttat

SEQ ID NO: 216073 - DNA, 33 bp, Homo sapien
cacactactactcattaaaaggtaaacaaccaa

SEQ ID NO: 216074 - DNA, 33 bp, Homo sapien
cacactactactcattgaaaggtaaacaaccaa

SEQ ID NO: 216075 - DNA, 33 bp, Homo sapien
ccctttgaaattcacaaagaaagagcttgtctt

SEQ ID NO: 216076 - DNA, 33 bp, Homo sapien
ccctttgaaattcacagagaaagagcttgtctt

SEQ ID NO: 216077 - DNA, 33 bp, Homo sapien
attattgccccagacccggcctggaatgaatac

SEQ ID NO: 216078 - DNA, 33 bp, Homo sapien
attattgccccagacctggcctggaatgaatac

SEQ ID NO: 216079 - DNA, 33 bp, Homo sapien
tgtgtattcttctccacacttggtacaaaattg

SEQ ID NO: 216080 - DNA, 33 bp, Homo sapien
tgtgtattcttctccagacttggtacaaaattg

SEQ ID NO: 216081 - DNA, 33 bp, Homo sapien
agtgatgattattttacgtttttgggcccagag

SEQ ID NO: 216082 - DNA, 33 bp, Homo sapien
agtgatgattattttatgtttttgggcccagag

SEQ ID NO: 216083 - DNA, 33 bp, Homo sapien
tataaactctttaagcaatcctgatatgatttc

SEQ ID NO: 216084 - DNA, 33 bp, Homo sapien
tataaactctttaagcgatcctgatatgatttc

SEQ ID NO: 216085 - DNA, 33 bp, Homo sapien
ctcaccattactttaccgcacccaagttgcttt

SEQ ID NO: 216086 - DNA, 33 bp, Homo sapien
ctcaccattactttactgcacccaagttgcttt

SEQ ID NO: 216087 - DNA, 33 bp, Homo sapien
cttctacaggggtcccaaagacatttcctgtat

SEQ ID NO: 216088 - DNA, 33 bp, Homo sapien
cttctacaggggtcccgaagacatttcctgtat

SEQ ID NO: 216089 - DNA, 33 bp, Homo sapien
taggtttcagttcccgaaagattatagcagtgt

SEQ ID NO: 216090 - DNA, 33 bp, Homo sapien
taggtttcagttcccggaagattatagcagtgt

SEQ ID NO: 216091 - DNA, 33 bp, Homo sapien
gtcatttgcatgattacagaaagaaaaagtcac

SEQ ID NO: 216092 - DNA, 33 bp, Homo sapien
gtcatttgcatgattagagaaagaaaaagtcac

SEQ ID NO: 216093 - DNA, 33 bp, Homo sapien
actccttctttctgaacaagtgtgtgtcctatg

SEQ ID NO: 216094 - DNA, 33 bp, Homo sapien
actccttctttctgaataagtgtgtgtcctatg

SEQ ID NO: 216095 - DNA, 33 bp, Homo sapien
aaatggactagcatgcagagaaagtttgtctgc

SEQ ID NO: 216096 - DNA, 33 bp, Homo sapien
aaatggactagcatgcggagaaagtttgtctgc

SEQ ID NO: 216097 - DNA, 33 bp, Homo sapien
agactcatttcttgaccaaacctattctttgtc

SEQ ID NO: 216098 - DNA, 33 bp, Homo sapien
agactcatttcttgactaaacctattctttgtc

SEQ ID NO: 216099 - DNA, 33 bp, Homo sapien
aggcaggggttgccaactctcaattcttaactt

SEQ ID NO: 216100 - DNA, 33 bp, Homo sapien
aggcaggggttgccaagtctcaattcttaactt

SEQ ID NO: 216101 - DNA, 33 bp, Homo sapien
gagtgtttcaaccataacctagattaagtagaa

SEQ ID NO: 216102 - DNA, 33 bp, Homo sapien
gagtgtttcaaccatagcctagattaagtagaa

SEQ ID NO: 216103 - DNA, 33 bp, Homo sapien
cattgcctatgctggaagagtcaaactgctccc

SEQ ID NO: 216104 - DNA, 33 bp, Homo sapien
cattgcctatgctggaggagtcaaactgctccc

SEQ ID NO: 216105 - DNA, 33 bp, Homo sapien
ctcatggctcacaacacgagaaacagcccagtg

SEQ ID NO: 216106 - DNA, 33 bp, Homo sapien
ctcatggctcacaacatgagaaacagcccagtg

SEQ ID NO: 216107 - DNA, 33 bp, Homo sapien
ttcgagactaacctggccaataaggtgaaactc

SEQ ID NO: 216108 - DNA, 33 bp, Homo sapien
ttcgagactaacctggtcaataaggtgaaactc

SEQ ID NO: 216109 - DNA, 33 bp, Homo sapien
tcttaggtaagagtaaaaaggctatagtcattc

SEQ ID NO: 216110 - DNA, 33 bp, Homo sapien
tcttaggtaagagtaagaaggctatagtcattc

SEQ ID NO: 216111 - DNA, 33 bp, Homo sapien
gctctcactgaggagcccttccgttaataaaaa

SEQ ID NO: 216112 - DNA, 33 bp, Homo sapien
gctctcactgaggagctcttccgttaataaaaa

SEQ ID NO: 216113 - DNA, 33 bp, Homo sapien
tgggatagggcccagacagttgtaatttttaaa

SEQ ID NO: 216114 - DNA, 33 bp, Homo sapien
tgggatagggcccagagagttgtaatttttaaa

SEQ ID NO: 216115 - DNA, 33 bp, Homo sapien
agcttgaaataatgccactaggatcatttaagc

SEQ ID NO: 216116 - DNA, 33 bp, Homo sapien
agcttgaaataatgccgctaggatcatttaagc

SEQ ID NO: 216117 - DNA, 33 bp, Homo sapien
tttaagttacagtgccaatctccatgatagtga

SEQ ID NO: 216118 - DNA, 33 bp, Homo sapien
tttaagttacagtgccgatctccatgatagtga

SEQ ID NO: 216119 - DNA, 33 bp, Homo sapien
acttattcaactgatacgcgttagtcaggccga

SEQ ID NO: 216120 - DNA, 33 bp, Homo sapien
acttattcaactgatatgcgttagtcaggccga

SEQ ID NO: 216121 - DNA, 33 bp, Homo sapien
gtttatctaaaataaaacacaccgcattgaatg

SEQ ID NO: 216122 - DNA, 33 bp, Homo sapien
gtttatctaaaataaatcacaccgcattgaatg

SEQ ID NO: 216123 - DNA, 33 bp, Homo sapien
ttattttagataaacaaacttgcctataaacat

SEQ ID NO: 216124 - DNA, 33 bp, Homo sapien
ttattttagataaacagacttgcctataaacat

SEQ ID NO: 216125 - DNA, 33 bp, Homo sapien
ttgagaaatgagaacccctactgagccacataa

SEQ ID NO: 216126 - DNA, 33 bp, Homo sapien
ttgagaaatgagaacctctactgagccacataa

SEQ ID NO: 216127 - DNA, 33 bp, Homo sapien
actctttttttccaaaatctcacaacctctgac

SEQ ID NO: 216128 - DNA, 33 bp, Homo sapien
actctttttttccaaagtctcacaacctctgac

SEQ ID NO: 216129 - DNA, 33 bp, Homo sapien
tgaaatgttggagggaatcacgtagaggataca

SEQ ID NO: 216130 - DNA, 33 bp, Homo sapien
tgaaatgttggagggagtcacgtagaggataca

SEQ ID NO: 216131 - DNA, 33 bp, Homo sapien
ttctgtttttccaaagaaaggttttctgctaaa

SEQ ID NO: 216132 - DNA, 33 bp, Homo sapien
ttctgtttttccaaaggaaggttttctgctaaa

SEQ ID NO: 216133 - DNA, 33 bp, Homo sapien
ggaatatttacccaacaccaacatctgccaaga

SEQ ID NO: 216134 - DNA, 33 bp, Homo sapien
ggaatatttacccaactccaacatctgccaaga

SEQ ID NO: 216135 - DNA, 33 bp, Homo sapien
gtggtagaatgcatgactaccagatatactgag

SEQ ID NO: 216136 - DNA, 33 bp, Homo sapien
gtggtagaatgcatgattaccagatatactgag

SEQ ID NO: 216137 - DNA, 33 bp, Homo sapien
taaaaggatggtttgaaggcctgtagtttcttg

SEQ ID NO: 216138 - DNA, 33 bp, Homo sapien
taaaaggatggtttgagggcctgtagtttcttg

SEQ ID NO: 216139 - DNA, 33 bp, Homo sapien
aggaaaaaagttgtccagcatgtgcaatatttc

SEQ ID NO: 216140 - DNA, 33 bp, Homo sapien
aggaaaaaagttgtcctgcatgtgcaatatttc

SEQ ID NO: 216141 - DNA, 33 bp, Homo sapien
tgttgctaatggagacaggagcataaccgactc

SEQ ID NO: 216142 - DNA, 33 bp, Homo sapien
tgttgctaatggagacgggagcataaccgactc

SEQ ID NO: 216143 - DNA, 33 bp, Homo sapien
ccaagacccagtaacacaagatgaaaatcctgc

SEQ ID NO: 216144 - DNA, 33 bp, Homo sapien
ccaagacccagtaacataagatgaaaatcctgc

SEQ ID NO: 216145 - DNA, 33 bp, Homo sapien
ctttgagtcaaaaaacagtggttcaaatcttgc

SEQ ID NO: 216146 - DNA, 33 bp, Homo sapien
ctttgagtcaaaaaactgtggttcaaatcttgc

SEQ ID NO: 216147 - DNA, 33 bp, Homo sapien
tctttaagacacattcacaaataaaaaagataa

SEQ ID NO: 216148 - DNA, 33 bp, Homo sapien
tctttaagacacattcgcaaataaaaaagataa

SEQ ID NO: 216149 - DNA, 33 bp, Homo sapien
ttgaggtcaatgaactcaatacccagagggaga

SEQ ID NO: 216150 - DNA, 33 bp, Homo sapien
ttgaggtcaatgaacttaatacccagagggaga

SEQ ID NO: 216151 - DNA, 33 bp, Homo sapien
tgctcttagtagcccacgttccatcaagggaaa

SEQ ID NO: 216152 - DNA, 33 bp, Homo sapien
tgctcttagtagcccatgttccatcaagggaaa

SEQ ID NO: 216153 - DNA, 33 bp, Homo sapien
tctctctaatcatgaaaactactagtcttaaaa

SEQ ID NO: 216154 - DNA, 33 bp, Homo sapien
tctctctaatcatgaacactactagtcttaaaa

SEQ ID NO: 216155 - DNA, 33 bp, Homo sapien
ttgcatgtgcagtgtcaatacaatgcctgttac

SEQ ID NO: 216156 - DNA, 33 bp, Homo sapien
ttgcatgtgcagtgtcgatacaatgcctgttac

SEQ ID NO: 216157 - DNA, 33 bp, Homo sapien
agctccagatccctcaagggtttgtatttttaa

SEQ ID NO: 216158 - DNA, 33 bp, Homo sapien
agctccagatccctcatgggtttgtatttttaa

SEQ ID NO: 216159 - DNA, 33 bp, Homo sapien
gcactacttccatgaaagcactggtgattagca

SEQ ID NO: 216160 - DNA, 33 bp, Homo sapien
gcactacttccatgaaggcactggtgattagca

SEQ ID NO: 216161 - DNA, 33 bp, Homo sapien
tctcattgctattaagccatgcctctggttgaa

SEQ ID NO: 216162 - DNA, 33 bp, Homo sapien
tctcattgctattaagtcatgcctctggttgaa

SEQ ID NO: 216163 - DNA, 33 bp, Homo sapien
aaagaattgggtactccatcttgaaatttgaaa

SEQ ID NO: 216164 - DNA, 33 bp, Homo sapien
aaagaattgggtactctatcttgaaatttgaaa

SEQ ID NO: 216165 - DNA, 33 bp, Homo sapien
cacttctttgaattcactaactgatgtctactt

SEQ ID NO: 216166 - DNA, 33 bp, Homo sapien
cacttctttgaattcattaactgatgtctactt

SEQ ID NO: 216167 - DNA, 33 bp, Homo sapien
tgacccattttggacaacaagacaattgagctt

SEQ ID NO: 216168 - DNA, 33 bp, Homo sapien
tgacccattttggacagcaagacaattgagctt

SEQ ID NO: 216169 - DNA, 33 bp, Homo sapien
acatctgacaacatccacatgagtgaccctcag

SEQ ID NO: 216170 - DNA, 33 bp, Homo sapien
acatctgacaacatccgcatgagtgaccctcag

SEQ ID NO: 216171 - DNA, 33 bp, Homo sapien
aacccgcaattagttcacaccaacctaatactc

SEQ ID NO: 216172 - DNA, 33 bp, Homo sapien
aacccgcaattagttcgcaccaacctaatactc

SEQ ID NO: 216173 - DNA, 33 bp, Homo sapien
tgaaagacagctaagacaaaagatttcatcaac

SEQ ID NO: 216174 - DNA, 33 bp, Homo sapien
tgaaagacagctaagataaaagatttcatcaac

SEQ ID NO: 216175 - DNA, 33 bp, Homo sapien
tctggaaaaggcaaaacaatggaaggagtaaaa

SEQ ID NO: 216176 - DNA, 33 bp, Homo sapien
tctggaaaaggcaaaagaatggaaggagtaaaa

SEQ ID NO: 216177 - DNA, 33 bp, Homo sapien
gaggactaaaatcaatcatgcagagtctcagaa

SEQ ID NO: 216178 - DNA, 33 bp, Homo sapien
gaggactaaaatcaattatgcagagtctcagaa

SEQ ID NO: 216179 - DNA, 33 bp, Homo sapien
agaagagaggaacccactaattgacatcatgga

SEQ ID NO: 216180 - DNA, 33 bp, Homo sapien
agaagagaggaacccattaattgacatcatgga

SEQ ID NO: 216181 - DNA, 33 bp, Homo sapien
gtttccattaattatcagagctgcaaaatggta

SEQ ID NO: 216182 - DNA, 33 bp, Homo sapien
gtttccattaattatcggagctgcaaaatggta

SEQ ID NO: 216183 - DNA, 33 bp, Homo sapien
aggctaagaaatgttacaaaggaagtgtcatga

SEQ ID NO: 216184 - DNA, 33 bp, Homo sapien
aggctaagaaatgttataaaggaagtgtcatga

SEQ ID NO: 216185 - DNA, 33 bp, Homo sapien
tggcttagagatgatcacattcactcagtagag

SEQ ID NO: 216186 - DNA, 33 bp, Homo sapien
tggcttagagatgatcgcattcactcagtagag

SEQ ID NO: 216187 - DNA, 33 bp, Homo sapien
taaactatatgaacaacgtccctattctaatag

SEQ ID NO: 216188 - DNA, 33 bp, Homo sapien
taaactatatgaacaaggtccctattctaatag

SEQ ID NO: 216189 - DNA, 33 bp, Homo sapien
ggatcatgaaaccacacggtgtgggcatggaat

SEQ ID NO: 216190 - DNA, 33 bp, Homo sapien
ggatcatgaaaccacatggtgtgggcatggaat

SEQ ID NO: 216191 - DNA, 33 bp, Homo sapien
gtgtcccaggttcttgaattttgtatttacagc

SEQ ID NO: 216192 - DNA, 33 bp, Homo sapien
gtgtcccaggttcttgcattttgtatttacagc

SEQ ID NO: 216193 - DNA, 33 bp, Homo sapien
ggctatatccgcaacaagtagaatagatgggtc

SEQ ID NO: 216194 - DNA, 33 bp, Homo sapien
ggctatatccgcaacaggtagaatagatgggtc

SEQ ID NO: 216195 - DNA, 33 bp, Homo sapien
tatcatgctgatagacaagtttttctataagct

SEQ ID NO: 216196 - DNA, 33 bp, Homo sapien
tatcatgctgatagacgagtttttctataagct

SEQ ID NO: 216197 - DNA, 33 bp, Homo sapien
tttattgtacaaataccgcttcctcagccaatg

SEQ ID NO: 216198 - DNA, 33 bp, Homo sapien
tttattgtacaaatactgcttcctcagccaatg

SEQ ID NO: 216199 - DNA, 33 bp, Homo sapien
ggctgagattaacccacgctgtacactaagagt

SEQ ID NO: 216200 - DNA, 33 bp, Homo sapien
ggctgagattaacccatgctgtacactaagagt

SEQ ID NO: 216201 - DNA, 33 bp, Homo sapien
agtgatcattcttgtgaacaatctctttccact

SEQ ID NO: 216202 - DNA, 33 bp, Homo sapien
agtgatcattcttgtggacaatctctttccact

SEQ ID NO: 216203 - DNA, 33 bp, Homo sapien
ttcttccatagaagccagagtgcctacactttt

SEQ ID NO: 216204 - DNA, 33 bp, Homo sapien
ttcttccatagaagccggagtgcctacactttt

SEQ ID NO: 216205 - DNA, 33 bp, Homo sapien
tactgtgccatatgatcaggaaggcatttccaa

SEQ ID NO: 216206 - DNA, 33 bp, Homo sapien
tactgtgccatatgatgaggaaggcatttccaa

SEQ ID NO: 216207 - DNA, 33 bp, Homo sapien
ctgtttctatctgttcaatgtgggtattttctc

SEQ ID NO: 216208 - DNA, 33 bp, Homo sapien
ctgtttctatctgttcgatgtgggtattttctc

SEQ ID NO: 216209 - DNA, 33 bp, Homo sapien
ccatatataacccaacaatctgactgctaagag

SEQ ID NO: 216210 - DNA, 33 bp, Homo sapien
ccatatataacccaacgatctgactgctaagag

SEQ ID NO: 216211 - DNA, 33 bp, Homo sapien
tttcagttctggtcaaaccttatgatttttaca

SEQ ID NO: 216212 - DNA, 33 bp, Homo sapien
tttcagttctggtcaatccttatgatttttaca

SEQ ID NO: 216213 - DNA, 33 bp, Homo sapien
tttttctttccacacaacttgttcccttcctgg

SEQ ID NO: 216214 - DNA, 33 bp, Homo sapien
tttttctttccacacagcttgttcccttcctgg

SEQ ID NO: 216215 - DNA, 33 bp, Homo sapien
gaggattcacgaatggcccagtgttgtttgctc

SEQ ID NO: 216216 - DNA, 33 bp, Homo sapien
gaggattcacgaatggtccagtgttgtttgctc

SEQ ID NO: 216217 - DNA, 33 bp, Homo sapien
attactgtttagaggaagtattaattcgacctc

SEQ ID NO: 216218 - DNA, 33 bp, Homo sapien
attactgtttagaggaggtattaattcgacctc

SEQ ID NO: 216219 - DNA, 33 bp, Homo sapien
atcctacctcttttccacacagctccaccctta

SEQ ID NO: 216220 - DNA, 33 bp, Homo sapien
atcctacctcttttccgcacagctccaccctta

SEQ ID NO: 216221 - DNA, 33 bp, Homo sapien
aatgttgaatggatgacggaagaaaaaaatatg

SEQ ID NO: 216222 - DNA, 33 bp, Homo sapien
aatgttgaatggatgatggaagaaaaaaatatg

SEQ ID NO: 216223 - DNA, 33 bp, Homo sapien
ttacatctaagaacttaaactgaaactgagacc

SEQ ID NO: 216224 - DNA, 33 bp, Homo sapien
ttacatctaagaactttaactgaaactgagacc

SEQ ID NO: 216225 - DNA, 33 bp, Homo sapien
aaaatgcagtagaaagacaaatcatgctgtgag

SEQ ID NO: 216226 - DNA, 33 bp, Homo sapien
aaaatgcagtagaaagtcaaatcatgctgtgag

SEQ ID NO: 216227 - DNA, 33 bp, Homo sapien
tttgcctgcatggaaaatgaagtgaattgaagc

SEQ ID NO: 216228 - DNA, 33 bp, Homo sapien
tttgcctgcatggaaagtgaagtgaattgaagc

SEQ ID NO: 216229 - DNA, 33 bp, Homo sapien
gtgtacgtgcccacaaatagcctgggcccctac

SEQ ID NO: 216230 - DNA, 33 bp, Homo sapien
gtgtacgtgcccacaagtagcctgggcccctac

SEQ ID NO: 216231 - DNA, 33 bp, Homo sapien
gggacaccatgaagagacctaatatttccatta

SEQ ID NO: 216232 - DNA, 33 bp, Homo sapien
gggacaccatgaagaggcctaatatttccatta

SEQ ID NO: 216233 - DNA, 33 bp, Homo sapien
atctttgtgttgaatccatttgaaatctttgag

SEQ ID NO: 216234 - DNA, 33 bp, Homo sapien
atctttgtgttgaatcgatttgaaatctttgag

SEQ ID NO: 216235 - DNA, 33 bp, Homo sapien
atcacatagttctcacaccacagttttcagctc

SEQ ID NO: 216236 - DNA, 33 bp, Homo sapien
atcacatagttctcacgccacagttttcagctc

SEQ ID NO: 216237 - DNA, 33 bp, Homo sapien; identical to SEQ ID NO: 216235

SEQ ID NO: 216238 - DNA, 33 bp, Homo sapien; identical to SEQ ID NO: 216236

SEQ ID NO: 216239 - DNA, 33 bp, Homo sapien
gagaaccatccaaaggcagggctaataactcga

SEQ ID NO: 216240 - DNA, 33 bp, Homo sapien
gagaaccatccaaaggtagggctaataactcga

SEQ ID NO: 216241 - DNA, 33 bp, Homo sapien
atctcagccatcctcaagatctgaagtctgaag

SEQ ID NO: 216242 - DNA, 33 bp, Homo sapien
atctcagccatcctcacgatctgaagtctgaag

SEQ ID NO: 216243 - DNA, 33 bp, Homo sapien
ctcttttgcttatacactagatctttggcatga

SEQ ID NO: 216244 - DNA, 33 bp, Homo sapien
ctcttttgcttatacattagatctttggcatga

SEQ ID NO: 216245 - DNA, 33 bp, Homo sapien
acagccagaacctgtacgcactactaggggact

SEQ ID NO: 216246 - DNA, 33 bp, Homo sapien
acagccagaacctgtatgcactactaggggact

SEQ ID NO: 216247 - DNA, 33 bp, Homo sapien
ggcttttgataatgccactgttctgatacaatc

SEQ ID NO: 216248 - DNA, 33 bp, Homo sapien
ggcttttgataatgcctctgttctgatacaatc

SEQ ID NO: 216249 - DNA, 33 bp, Homo sapien
tctgttactagttgtccggagcttcctaggttc

SEQ ID NO: 216250 - DNA, 33 bp, Homo sapien
tctgttactagttgtctggagcttcctaggttc

SEQ ID NO: 216251 - DNA, 33 bp, Homo sapien
aatgtatgaagggaagactgtagaaaattgtgt

SEQ ID NO: 216252 - DNA, 33 bp, Homo sapien
aatgtatgaagggaagcctgtagaaaattgtgt

SEQ ID NO: 216253 - DNA, 33 bp, Homo sapien
gtagatatcttgaaaagcacgtgttgatgggaa

SEQ ID NO: 216254 - DNA, 33 bp, Homo sapien
gtagatatcttgaaaatcacgtgttgatgggaa

SEQ ID NO: 216255 - DNA, 33 bp, Homo sapien
accctttctccttaacacctattttcaaattcc

SEQ ID NO: 216256 - DNA, 33 bp, Homo sapien
accctttctccttaacgcctattttcaaattcc

SEQ ID NO: 216257 - DNA, 33 bp, Homo sapien
aaacacaatacaactacatctgaatgacgtgaa

SEQ ID NO: 216258 - DNA, 33 bp, Homo sapien
aaacacaatacaactatatctgaatgacgtgaa

SEQ ID NO: 216259 - DNA, 33 bp, Homo sapien
ttcacaaaatggccaacgaaaaataattttcct

SEQ ID NO: 216260 - DNA, 33 bp, Homo sapien
ttcacaaaatggccaatgaaaaataattttcct

SEQ ID NO: 216261 - DNA, 33 bp, Homo sapien
tttgggggatgcatccaaggaaagcgtcctgtg

SEQ ID NO: 216262 - DNA, 33 bp, Homo sapien
tttgggggatgcatccgaggaaagcgtcctgtg

SEQ ID NO: 216263 - DNA, 33 bp, Homo sapien
cctgggatacctggagaaagagtaaacaaagac

SEQ ID NO: 216264 - DNA, 33 bp, Homo sapien
cctgggatacctggaggaagagtaaacaaagac

SEQ ID NO: 216265 - DNA, 33 bp, Homo sapien
ttattctcttcttgggaattaattgcacttatt

SEQ ID NO: 216266 - DNA, 33 bp, Homo sapien
ttattctcttcttgggtattaattgcacttatt

SEQ ID NO: 216267 - DNA, 33 bp, Homo sapien
gcataagaggaaaggcacttagagatagccctt

SEQ ID NO: 216268 - DNA, 33 bp, Homo sapien
gcataagaggaaaggcccttagagatagccctt

SEQ ID NO: 216269 - DNA, 33 bp, Homo sapien
gccagcattcagcataacacgctttgggaaatg

SEQ ID NO: 216270 - DNA, 33 bp, Homo sapien
gccagcattcagcatatcacgctttgggaaatg

SEQ ID NO: 216271 - DNA, 33 bp, Homo sapien
tagtgtctggcaattacagtaaggctttttttt

SEQ ID NO: 216272 - DNA, 33 bp, Homo sapien
tagtgtctggcaattatagtaaggctttttttt

SEQ ID NO: 216273 - DNA, 33 bp, Homo sapien
caagatgtccaaaagccataggggatacatatt

SEQ ID NO: 216274 - DNA, 33 bp, Homo sapien
caagatgtccaaaagctataggggatacatatt

SEQ ID NO: 216275 - DNA, 33 bp, Homo sapien
ttagataaatatatgacggtaaattgcagcttt

SEQ ID NO: 216276 - DNA, 33 bp, Homo sapien
ttagataaatatatgatggtaaattgcagcttt

SEQ ID NO: 216277 - DNA, 33 bp, Homo sapien
ttcaagcgggataaaccaactgtgcaggaaaga

SEQ ID NO: 216278 - DNA, 33 bp, Homo sapien
ttcaagcgggataaactaactgtgcaggaaaga

SEQ ID NO: 216279 - DNA, 33 bp, Homo sapien
ctgcccggctgcccaaccatctgggaagtgtgg

SEQ ID NO: 216280 - DNA, 33 bp, Homo sapien
ctgcccggctgcccaatcatctgggaagtgtgg

SEQ ID NO: 216281 - DNA, 33 bp, Homo sapien
agattagttttcctgacgttcacccgtagaatt

SEQ ID NO: 216282 - DNA, 33 bp, Homo sapien
agattagttttcctgatgttcacccgtagaatt

SEQ ID NO: 216283 - DNA, 33 bp, Homo sapien
actcacttcacagagaagatgcaagacagtaga

SEQ ID NO: 216284 - DNA, 33 bp, Homo sapien
actcacttcacagagaggatgcaagacagtaga

SEQ ID NO: 216285 - DNA, 33 bp, Homo sapien
ttataccgggtgaacaacaagaatgattttgta

SEQ ID NO: 216286 - DNA, 33 bp, Homo sapien
ttataccgggtgaacaccaagaatgattttgta

SEQ ID NO: 216287 - DNA, 33 bp, Homo sapien
tgatgttcacatatgacacgagatttttccatg

SEQ ID NO: 216288 - DNA, 33 bp, Homo sapien
tgatgttcacatatgatacgagatttttccatg

SEQ ID NO: 216289 - DNA, 33 bp, Homo sapien
tggcatcacagtgcacacatttccttcagacct

SEQ ID NO: 216290 - DNA, 33 bp, Homo sapien
tggcatcacagtgcacgcatttccttcagacct

SEQ ID NO: 216291 - DNA, 33 bp, Homo sapien
taacatggaattgaagaaaagtatggtgacccc

SEQ ID NO: 216292 - DNA, 33 bp, Homo sapien
taacatggaattgaagcaaagtatggtgacccc

SEQ ID NO: 216293 - DNA, 33 bp, Homo sapien
aaaaaatactcacatcactacttatcagagaaa

SEQ ID NO: 216294 - DNA, 33 bp, Homo sapien
aaaaaatactcacatctctacttatcagagaaa

SEQ ID NO: 216295 - DNA, 33 bp, Homo sapien
ggcagtagatgtctataagaattgtgtttaaaa

SEQ ID NO: 216296 - DNA, 33 bp, Homo sapien
ggcagtagatgtctatgagaattgtgtttaaaa

SEQ ID NO: 216297 - DNA, 33 bp, Homo sapien
tgaaatcaggctggtaacattttccttgtccaa

SEQ ID NO: 216298 - DNA, 33 bp, Homo sapien
tgaaatcaggctggtagcattttccttgtccaa

SEQ ID NO: 216299 - DNA, 33 bp, Homo sapien
tcactgtaatacacaacaggaagtaaagttctt

SEQ ID NO: 216300 - DNA, 33 bp, Homo sapien
tcactgtaatacacaataggaagtaaagttctt

SEQ ID NO: 216301 - DNA, 33 bp, Homo sapien
aacacatcaagaacaccggaaattatcagacat

SEQ ID NO: 216302 - DNA, 33 bp, Homo sapien
aacacatcaagaacactggaaattatcagacat

SEQ ID NO: 216303 - DNA, 33 bp, Homo sapien
atttgtatcaggtaaactctggcgtcacctttg

SEQ ID NO: 216304 - DNA, 33 bp, Homo sapien
atttgtatcaggtaaattctggcgtcacctttg

SEQ ID NO: 216305 - DNA, 33 bp, Homo sapien
tgtgccaggttaaatacatgccagcatctggaa

SEQ ID NO: 216306 - DNA, 33 bp, Homo sapien
tgtgccaggttaaatatatgccagcatctggaa

SEQ ID NO: 216307 - DNA, 33 bp, Homo sapien
gtttgtggaatgaaggccctgttccagttcgcc

SEQ ID NO: 216308 - DNA, 33 bp, Homo sapien
gtttgtggaatgaaggtcctgttccagttcgcc

SEQ ID NO: 216309 - DNA, 33 bp, Homo sapien
ttacataatgctctaaaaaattcgcatattttt

SEQ ID NO: 216310 - DNA, 33 bp, Homo sapien
ttacataatgctctaagaaattcgcatattttt

SEQ ID NO: 216311 - DNA, 33 bp, Homo sapien
ggagtgaggactgtgaaaagatgaccagggcag

SEQ ID NO: 216312 - DNA, 33 bp, Homo sapien
ggagtgaggactgtgagaagatgaccagggcag

SEQ ID NO: 216313 - DNA, 33 bp, Homo sapien
gtgtttagcagtgggaaagatgttcatagaaaa

SEQ ID NO: 216314 - DNA, 33 bp, Homo sapien
gtgtttagcagtgggacagatgttcatagaaaa

SEQ ID NO: 216315 - DNA, 33 bp, Homo sapien
aagataacatgcagtgaaaagttcttgcatggc

SEQ ID NO: 216316 - DNA, 33 bp, Homo sapien
aagataacatgcagtggaaagttcttgcatggc

SEQ ID NO: 216317 - DNA, 33 bp, Homo sapien
tattggaaaagcaatacggtagtgaccagcagc

SEQ ID NO: 216318 - DNA, 33 bp, Homo sapien
tattggaaaagcaatatggtagtgaccagcagc

SEQ ID NO: 216319 - DNA, 33 bp, Homo sapien
gcttctaacaacaataaagcaaagctgatggac

SEQ ID NO: 216320 - DNA, 33 bp, Homo sapien
gcttctaacaacaatacagcaaagctgatggac

SEQ ID NO: 216321 - DNA, 33 bp, Homo sapien
actcaattttcaaagacgaggtgggcatgttac

SEQ ID NO: 216322 - DNA, 33 bp, Homo sapien
actcaattttcaaagaggaggtgggcatgttac

SEQ ID NO: 216323 - DNA, 33 bp, Homo sapien
ctggagagccttgcacaatccgtgatggtggta

SEQ ID NO: 216324 - DNA, 33 bp, Homo sapien
ctggagagccttgcacgatccgtgatggtggta

SEQ ID NO: 216325 - DNA, 33 bp, Homo sapien
ttttgttcccattacccactcccttcaacacta

SEQ ID NO: 216326 - DNA, 33 bp, Homo sapien
ttttgttcccattacctactcccttcaacacta

SEQ ID NO: 216327 - DNA, 33 bp, Homo sapien
atttaacactcaataaatcataacagccaagta

SEQ ID NO: 216328 - DNA, 33 bp, Homo sapien
atttaacactcaataagtcataacagccaagta

SEQ ID NO: 216329 - DNA, 33 bp, Homo sapien
atcacacacgctttcccataaggcataccttac

SEQ ID NO: 216330 - DNA, 33 bp, Homo sapien
atcacacacgctttcctataaggcataccttac

SEQ ID NO: 216331 - DNA, 33 bp, Homo sapien
gcttgcaacagaatacaattttgttacaaacca

SEQ ID NO: 216332 - DNA, 33 bp, Homo sapien
gcttgcaacagaatacgattttgttacaaacca

SEQ ID NO: 216333 - DNA, 33 bp, Homo sapien
ggtgagaccttcctacaggggttgtcagacact

SEQ ID NO: 216334 - DNA, 33 bp, Homo sapien
ggtgagaccttcctaccggggttgtcagacact

SEQ ID NO: 216335 - DNA, 33 bp, Homo sapien
tctaagcaatatttcacagacatggctttttct

SEQ ID NO: 216336 - DNA, 33 bp, Homo sapien
tctaagcaatatttcatagacatggctttttct

SEQ ID NO: 216337 - DNA, 33 bp, Homo sapien
aaagctgattggttcagaattacatgagcatat

SEQ ID NO: 216338 - DNA, 33 bp, Homo sapien
aaagctgattggttcataattacatgagcatat

SEQ ID NO: 216339 - DNA, 33 bp, Homo sapien
acctgcttaattatacacaaaaactggttttag

SEQ ID NO: 216340 - DNA, 33 bp, Homo sapien
acctgcttaattatactcaaaaactggttttag

SEQ ID NO: 216341 - DNA, 33 bp, Homo sapien
agtattattttgtgaccgtaaaaatgagcattc

SEQ ID NO: 216342 - DNA, 33 bp, Homo sapien
agtattattttgtgactgtaaaaatgagcattc

SEQ ID NO: 216343 - DNA, 33 bp, Homo sapien
aattattgccattttcacaagtacaattggaac

SEQ ID NO: 216344 - DNA, 33 bp, Homo sapien
aattattgccattttcgcaagtacaattggaac

SEQ ID NO: 216345 - DNA, 33 bp, Homo sapien
gatcactgatgttatacagatgcaagaattagg

SEQ ID NO: 216346 - DNA, 33 bp, Homo sapien
gatcactgatgttatatagatgcaagaattagg

SEQ ID NO: 216347 - DNA, 33 bp, Homo sapien
ttagaaggtaaattctaaagttcttggcttgct

SEQ ID NO: 216348 - DNA, 33 bp, Homo sapien
ttagaaggtaaattctgaagttcttggcttgct

SEQ ID NO: 216349 - DNA, 33 bp, Homo sapien
tccctaatttctcttagacctctctccacttga

SEQ ID NO: 216350 - DNA, 33 bp, Homo sapien
tccctaatttctcttatacctctctccacttga

SEQ ID NO: 216351 - DNA, 33 bp, Homo sapien
gaggttccagataaaaagcgatggctaaatgct

SEQ ID NO: 216352 - DNA, 33 bp, Homo sapien
gaggttccagataaaaggcgatggctaaatgct

SEQ ID NO: 216353 - DNA, 33 bp, Homo sapien
cacgtttaatacgcaaaggcataaaatagaatg

SEQ ID NO: 216354 - DNA, 33 bp, Homo sapien
cacgtttaatacgcaagggcataaaatagaatg

SEQ ID NO: 216355 - DNA, 33 bp, Homo sapien
tctgtccacttatcaaaagtttaggaactactc

SEQ ID NO: 216356 - DNA, 33 bp, Homo sapien
tctgtccacttatcaagagtttaggaactactc

SEQ ID NO: 216357 - DNA, 33 bp, Homo sapien
acttggtaagtacaaacgttatacacagtggga

SEQ ID NO: 216358 - DNA, 33 bp, Homo sapien
acttggtaagtacaaatgttatacacagtggga

SEQ ID NO: 216359 - DNA, 33 bp, Homo sapien
aacttttgttattgccactctgactctactttc

SEQ ID NO: 216360 - DNA, 33 bp, Homo sapien
aacttttgttattgccgctctgactctactttc

SEQ ID NO: 216361 - DNA, 33 bp, Homo sapien
cctgaagttaggatggaataaactgataagact

SEQ ID NO: 216362 - DNA, 33 bp, Homo sapien
cctgaagttaggatggcataaactgataagact

SEQ ID NO: 216363 - DNA, 33 bp, Homo sapien
ttccctttgcttacgaagtgcttagggaatgaa

SEQ ID NO: 216364 - DNA, 33 bp, Homo sapien
ttccctttgcttacgacgtgcttagggaatgaa

SEQ ID NO: 216365 - DNA, 33 bp, Homo sapien
ccaaaagtccttttcacaagacagcttttctac

SEQ ID NO: 216366 - DNA, 33 bp, Homo sapien
ccaaaagtccttttcagaagacagcttttctac

SEQ ID NO: 216367 - DNA, 33 bp, Homo sapien
gatggtagaaagtgtaactgctaatgttaacaa

SEQ ID NO: 216368 - DNA, 33 bp, Homo sapien
gatggtagaaagtgtacctgctaatgttaacaa

SEQ ID NO: 216369 - DNA, 33 bp, Homo sapien
agtctgccagcattaaatcatacactttttgtc

SEQ ID NO: 216370 - DNA, 33 bp, Homo sapien
agtctgccagcattaagtcatacactttttgtc

SEQ ID NO: 216371 - DNA, 33 bp, Homo sapien
catttttctctctgacactgtaatgatgttgtt

SEQ ID NO: 216372 - DNA, 33 bp, Homo sapien
catttttctctctgacgctgtaatgatgttgtt

SEQ ID NO: 216373 - DNA, 33 bp, Homo sapien
aagaatccatacaaaacagtttttggagtttct

SEQ ID NO: 216374 - DNA, 33 bp, Homo sapien
aagaatccatacaaaatagtttttggagtttct

SEQ ID NO: 216375 - DNA, 33 bp, Homo sapien
ctttttatcttcactacggttctaggatgagag

SEQ ID NO: 216376 - DNA, 33 bp, Homo sapien
ctttttatcttcactatggttctaggatgagag

SEQ ID NO: 216377 - DNA, 33 bp, Homo sapien
agttacaaatatccaacagactagagtaaatca

SEQ ID NO: 216378 - DNA, 33 bp, Homo sapien
agttacaaatatccaatagactagagtaaatca

SEQ ID NO: 216379 - DNA, 33 bp, Homo sapien
atcagccaatttctaacgatgtgaggcattttt

SEQ ID NO: 216380 - DNA, 33 bp, Homo sapien
atcagccaatttctaatgatgtgaggcattttt

SEQ ID NO: 216381 - DNA, 33 bp, Homo sapien
tgtttggattctaacactggaggaggtggtaca

SEQ ID NO: 216382 - DNA, 33 bp, Homo sapien
tgtttggattctaacattggaggaggtggtaca

SEQ ID NO: 216383 - DNA, 33 bp, Homo sapien
agttgatgcaatactcaattacaaaatgtttca

SEQ ID NO: 216384 - DNA, 33 bp, Homo sapien
agttgatgcaatactcgattacaaaatgtttca

SEQ ID NO: 216385 - DNA, 33 bp, Homo sapien
ggctgattagctctggacaatttattatctctg

SEQ ID NO: 216386 - DNA, 33 bp, Homo sapien
ggctgattagctctggccaatttattatctctg

SEQ ID NO: 216387 - DNA, 33 bp, Homo sapien
tttttgtaaagagaggacactggcaggagaata

SEQ ID NO: 216388 - DNA, 33 bp, Homo sapien
tttttgtaaagagaggccactggcaggagaata

SEQ ID NO: 216389 - DNA, 33 bp, Homo sapien
aaatgttagtgtatcaaatatttctgcataaga

SEQ ID NO: 216390 - DNA, 33 bp, Homo sapien
aaatgttagtgtatcatatatttctgcataaga

SEQ ID NO: 216391 - DNA, 33 bp, Homo sapien
aatgacagtagatgaaaaacaggattatgattt

SEQ ID NO: 216392 - DNA, 33 bp, Homo sapien
aatgacagtagatgaagaacaggattatgattt

SEQ ID NO: 216393 - DNA, 33 bp, Homo sapien
cgttctgaggaaaagacgtttatgaagaagagg

SEQ ID NO: 216394 - DNA, 33 bp, Homo sapien
cgttctgaggaaaagaggtttatgaagaagagg

SEQ ID NO: 216395 - DNA, 33 bp, Homo sapien
gctggagatcttgatacgagaaattaatggata

SEQ ID NO: 216396 - DNA, 33 bp, Homo sapien
gctggagatcttgatatgagaaattaatggata

SEQ ID NO: 216397 - DNA, 33 bp, Homo sapien
caggagtgtgctcatacgctggtgtaacaaaaa

SEQ ID NO: 216398 - DNA, 33 bp, Homo sapien
caggagtgtgctcatatgctggtgtaacaaaaa

SEQ ID NO: 216399 - DNA, 33 bp, Homo sapien
aaacatgagttcatacaatattttcaatgctaa

SEQ ID NO: 216400 - DNA, 33 bp, Homo sapien
aaacatgagttcatacgatattttcaatgctaa

SEQ ID NO: 216401 - DNA, 33 bp, Homo sapien
actgtggagttatagcaaatgtaagataagggc

SEQ ID NO: 216402 - DNA, 33 bp, Homo sapien
actgtggagttatagccaatgtaagataagggc

SEQ ID NO: 216403 - DNA, 33 bp, Homo sapien
aatgaagaaacaagatcaaacagatagtaataa

SEQ ID NO: 216404 - DNA, 33 bp, Homo sapien
aatgaagaaacaagattaaacagatagtaataa

SEQ ID NO: 216405 - DNA, 33 bp, Homo sapien
gaacagggatattaacagatatacaagaaatca

SEQ ID NO: 216406 - DNA, 33 bp, Homo sapien
gaacagggatattaacggatatacaagaaatca

SEQ ID NO: 216407 - DNA, 33 bp, Homo sapien
aacccacaaaaacatccagctgagggacagata

SEQ ID NO: 216408 - DNA, 33 bp, Homo sapien
aacccacaaaaacatctagctgagggacagata

SEQ ID NO: 216409 - DNA, 33 bp, Homo sapien
agtaaattgttaggtcacgattaaaagtatatt

SEQ ID NO: 216410 - DNA, 33 bp, Homo sapien
agtaaattgttaggtcgcgattaaaagtatatt

SEQ ID NO: 216411 - DNA, 33 bp, Homo sapien
ttgtatcccagtaacacaaggtgtcattggttc

SEQ ID NO: 216412 - DNA, 33 bp, Homo sapien
ttgtatcccagtaacataaggtgtcattggttc

SEQ ID NO: 216413 - DNA, 33 bp, Homo sapien
tatatatcatagcaggaactggacgttttttga

SEQ ID NO: 216414 - DNA, 33 bp, Homo sapien
tatatatcatagcaggtactggacgttttttga

SEQ ID NO: 216415 - DNA, 33 bp, Homo sapien
gagctaactaggaaatcataagggagacagaga

SEQ ID NO: 216416 - DNA, 33 bp, Homo sapien
gagctaactaggaaattataagggagacagaga

SEQ ID NO: 216417 - DNA, 33 bp, Homo sapien
tgtataaagatgctaaagtacaatttgagaagc

SEQ ID NO: 216418 - DNA, 33 bp, Homo sapien
tgtataaagatgctaacgtacaatttgagaagc

SEQ ID NO: 216419 - DNA, 33 bp, Homo sapien
cagctaggctggtttacacttttgtacctggca

SEQ ID NO: 216420 - DNA, 33 bp, Homo sapien
cagctaggctggtttatacttttgtacctggca

SEQ ID NO: 216421 - DNA, 33 bp, Homo sapien
ttgtttagagcagccacaattgtacaattgcct

SEQ ID NO: 216422 - DNA, 33 bp, Homo sapien
ttgtttagagcagccataattgtacaattgcct

SEQ ID NO: 216423 - DNA, 33 bp, Homo sapien
ttttctcaataggttacagaccgaacaaaatta

SEQ ID NO: 216424 - DNA, 33 bp, Homo sapien
ttttctcaataggttatagaccgaacaaaatta

SEQ ID NO: 216425 - DNA, 33 bp, Homo sapien
agagttagaatattaaaaatgcagtggaggaaa

SEQ ID NO: 216426 - DNA, 33 bp, Homo sapien
agagttagaatattaacaatgcagtggaggaaa

SEQ ID NO: 216427 - DNA, 33 bp, Homo sapien
cttccggagtagtataggtcattcctcagtatc

SEQ ID NO: 216428 - DNA, 33 bp, Homo sapien
cttccggagtagtatatgtcattcctcagtatc

SEQ ID NO: 216429 - DNA, 33 bp, Homo sapien
ctctaaaatgcaaaaaatttcaaaaaggcagtc

SEQ ID NO: 216430 - DNA, 33 bp, Homo sapien
ctctaaaatgcaaaaactttcaaaaaggcagtc

SEQ ID NO: 216431 - DNA, 33 bp, Homo sapien
cagtaggtactaaccaagaagtacttgagagat

SEQ ID NO: 216432 - DNA, 33 bp, Homo sapien
cagtaggtactaaccatgaagtacttgagagat

SEQ ID NO: 216433 - DNA, 33 bp, Homo sapien
ttatgattattcttgaagtttttgatgcaaaag

SEQ ID NO: 216434 - DNA, 33 bp, Homo sapien
ttatgattattcttgacgtttttgatgcaaaag

SEQ ID NO: 216435 - DNA, 33 bp, Homo sapien
actgcaacctcaatgcaagatttgacaggtact

SEQ ID NO: 216436 - DNA, 33 bp, Homo sapien
actgcaacctcaatgctagatttgacaggtact

SEQ ID NO: 216437 - DNA, 33 bp, Homo sapien
ctgatcattggttcaaatgttcagccaggccaa

SEQ ID NO: 216438 - DNA, 33 bp, Homo sapien
ctgatcattggttcaactgttcagccaggccaa

SEQ ID NO: 216439 - DNA, 33 bp, Homo sapien
tttccttagatgtgcaataaatcaaatttgtta

SEQ ID NO: 216440 - DNA, 33 bp, Homo sapien
tttccttagatgtgcagtaaatcaaatttgtta

SEQ ID NO: 216441 - DNA, 33 bp, Homo sapien
ccaccatttttgcatcacccgttttcgtatgga

SEQ ID NO: 216442 - DNA, 33 bp, Homo sapien
ccaccatttttgcatcccccgttttcgtatgga

SEQ ID NO: 216443 - DNA, 33 bp, Homo sapien
aatctggcattcttccccaccaaggaaatacaa

SEQ ID NO: 216444 - DNA, 33 bp, Homo sapien
aatctggcattcttccgcaccaaggaaatacaa

SEQ ID NO: 216445 - DNA, 33 bp, Homo sapien
agattctgctaccataaaattaccagattatct

SEQ ID NO: 216446 - DNA, 33 bp, Homo sapien
agattctgctaccatagaattaccagattatct

SEQ ID NO: 216447 - DNA, 33 bp, Homo sapien
ctctttaaatgtccacaaaatgagtgaatcaat

SEQ ID NO: 216448 - DNA, 33 bp, Homo sapien
ctctttaaatgtccacgaaatgagtgaatcaat

SEQ ID NO: 216449 - DNA, 33 bp, Homo sapien
cttcccgttgtcggcacgtaataaaaggagaag

SEQ ID NO: 216450 - DNA, 33 bp, Homo sapien
cttcccgttgtcggcatgtaataaaaggagaag

SEQ ID NO: 216451 - DNA, 33 bp, Homo sapien
ctgggctctctcctcacgtgattctcagtctgt

SEQ ID NO: 216452 - DNA, 33 bp, Homo sapien
ctgggctctctcctcatgtgattctcagtctgt

SEQ ID NO: 216453 - DNA, 33 bp, Homo sapien
acgtactggttatataaaatcctgtaaatgtct

SEQ ID NO: 216454 - DNA, 33 bp, Homo sapien
acgtactggttatatagaatcctgtaaatgtct

SEQ ID NO: 216455 - DNA, 33 bp, Homo sapien
tcctccttaagagcccaaataacgtactggtta

SEQ ID NO: 216456 - DNA, 33 bp, Homo sapien
tcctccttaagagccccaataacgtactggtta

SEQ ID NO: 216457 - DNA, 33 bp, Homo sapien
gtttttccaggagagacgatgctttactgggag

SEQ ID NO: 216458 - DNA, 33 bp, Homo sapien
gtttttccaggagagatgatgctttactgggag

SEQ ID NO: 216459 - DNA, 33 bp, Homo sapien
cagaagaaataaggcaaaccctaaggcacagct

SEQ ID NO: 216460 - DNA, 33 bp, Homo sapien
cagaagaaataaggcagaccctaaggcacagct

SEQ ID NO: 216461 - DNA, 33 bp, Homo sapien
ttcttgtgtaaatgtaacaatgacactatcaaa

SEQ ID NO: 216462 - DNA, 33 bp, Homo sapien
ttcttgtgtaaatgtagcaatgacactatcaaa

SEQ ID NO: 216463 - DNA, 33 bp, Homo sapien
agtgaaaccgtttcagaaaattcaaccaaatgt

SEQ ID NO: 216464 - DNA, 33 bp, Homo sapien
agtgaaaccgtttcaggaaattcaaccaaatgt

SEQ ID NO: 216465 - DNA, 33 bp, Homo sapien
ggacatttcaaatacacgttcatgaaactgagt

SEQ ID NO: 216466 - DNA, 33 bp, Homo sapien
ggacatttcaaatacaggttcatgaaactgagt

SEQ ID NO: 216467 - DNA, 33 bp, Homo sapien
gaagatgagagaaagagaatagtcagaatttca

SEQ ID NO: 216468 - DNA, 33 bp, Homo sapien
gaagatgagagaaagataatagtcagaatttca

SEQ ID NO: 216469 - DNA, 33 bp, Homo sapien
ttcctcttaccattatgaaacaatgccctgatc

SEQ ID NO: 216470 - DNA, 33 bp, Homo sapien
ttcctcttaccattattaaacaatgccctgatc

SEQ ID NO: 216471 - DNA, 33 bp, Homo sapien
ttattaacagggtttcacgttcggccatgtaat

SEQ ID NO: 216472 - DNA, 33 bp, Homo sapien
ttattaacagggtttcgcgttcggccatgtaat

SEQ ID NO: 216473 - DNA, 33 bp, Homo sapien
tttccttctgttcctaagcagttagctacagat

SEQ ID NO: 216474 - DNA, 33 bp, Homo sapien
tttccttctgttcctaggcagttagctacagat

SEQ ID NO: 216475 - DNA, 33 bp, Homo sapien
taccaaatgtttaataaaagcagagattgtaga

SEQ ID NO: 216476 - DNA, 33 bp, Homo sapien
taccaaatgtttaatagaagcagagattgtaga

SEQ ID NO: 216477 - DNA, 33 bp, Homo sapien
ttctgtttaataacacacatttagacatagatg

SEQ ID NO: 216478 - DNA, 33 bp, Homo sapien
ttctgtttaataacacccatttagacatagatg

SEQ ID NO: 216479 - DNA, 33 bp, Homo sapien
tagaagttcaatcatgcaagcaaatctcacctt

SEQ ID NO: 216480 - DNA, 33 bp, Homo sapien
tagaagttcaatcatggaagcaaatctcacctt

SEQ ID NO: 216481 - DNA, 33 bp, Homo sapien
gttttcaaacagcctaactgccatggcttaaaa

SEQ ID NO: 216482 - DNA, 33 bp, Homo sapien
gttttcaaacagcctacctgccatggcttaaaa

SEQ ID NO: 216483 - DNA, 33 bp, Homo sapien
agttagacaccattacacattgcagactattcc

SEQ ID NO: 216484 - DNA, 33 bp, Homo sapien
agttagacaccattacgcattgcagactattcc

SEQ ID NO: 216485 - DNA, 33 bp, Homo sapien
gtgtcctggttgatgacgaaataggaagcaaga

SEQ ID NO: 216486 - DNA, 33 bp, Homo sapien
gtgtcctggttgatgatgaaataggaagcaaga

SEQ ID NO: 216487 - DNA, 33 bp, Homo sapien
aagttcctctggcttacaaggatgaatggtcca

SEQ ID NO: 216488 - DNA, 33 bp, Homo sapien
aagttcctctggcttataaggatgaatggtcca

SEQ ID NO: 216489 - DNA, 33 bp, Homo sapien
aagtcttggaatgaaaccaacccaaagctaaag

SEQ ID NO: 216490 - DNA, 33 bp, Homo sapien
aagtcttggaatgaaatcaacccaaagctaaag

SEQ ID NO: 216491 - DNA, 33 bp, Homo sapien
atacgcacattaaatcacttagcaagaatcttg

SEQ ID NO: 216492 - DNA, 33 bp, Homo sapien
atacgcacattaaatcgcttagcaagaatcttg

SEQ ID NO: 216493 - DNA, 33 bp, Homo sapien
tgatgccaataccctcaattaatgttcaactgt

SEQ ID NO: 216494 - DNA, 33 bp, Homo sapien
tgatgccaataccctcgattaatgttcaactgt

SEQ ID NO: 216495 - DNA, 33 bp, Homo sapien
tcttcttcagttcatacagttctacaatgaagg

SEQ ID NO: 216496 - DNA, 33 bp, Homo sapien
tcttcttcagttcatagagttctacaatgaagg

SEQ ID NO: 216497 - DNA, 33 bp, Homo sapien
ctctatctacttgaacaagaacctcttatttgt

SEQ ID NO: 216498 - DNA, 33 bp, Homo sapien
ctctatctacttgaacgagaacctcttatttgt

SEQ ID NO: 216499 - DNA, 33 bp, Homo sapien
cagcaaaaaggcattgaattggccatcaggaga

SEQ ID NO: 216500 - DNA, 33 bp, Homo sapien
cagcaaaaaggcattgtattggccatcaggaga

SEQ ID NO: 216501 - DNA, 33 bp, Homo sapien
ggatggatggaaataacggaaaacacagcaaat

SEQ ID NO: 216502 - DNA, 33 bp, Homo sapien
ggatggatggaaataatggaaaacacagcaaat

SEQ ID NO: 216503 - DNA, 33 bp, Homo sapien
aaaaagtcaaactattcaaacagcaatattcaa

SEQ ID NO: 216504 - DNA, 33 bp, Homo sapien
aaaaagtcaaactattgaaacagcaatattcaa

SEQ ID NO: 216505 - DNA, 33 bp, Homo sapien
ctctgaagcaactctaataacaacgacaataaa

SEQ ID NO: 216506 - DNA, 33 bp, Homo sapien
ctctgaagcaactctagtaacaacgacaataaa

SEQ ID NO: 216507 - DNA, 33 bp, Homo sapien
gttttcttgaaggtggaactgaaaatcctaatg

SEQ ID NO: 216508 - DNA, 33 bp, Homo sapien
gttttcttgaaggtgggactgaaaatcctaatg

SEQ ID NO: 216509 - DNA, 33 bp, Homo sapien
cagatttgcagcatgaataaccctttatctgca

SEQ ID NO: 216510 - DNA, 33 bp, Homo sapien
cagatttgcagcatgagtaaccctttatctgca

SEQ ID NO: 216511 - DNA, 33 bp, Homo sapien
ggaaataactgcaggaagtgcttattagtgagt

SEQ ID NO: 216512 - DNA, 33 bp, Homo sapien
ggaaataactgcaggatgtgcttattagtgagt

SEQ ID NO: 216513 - DNA, 33 bp, Homo sapien
acagaaatgagcaaataatacagatcaaatctt

SEQ ID NO: 216514 - DNA, 33 bp, Homo sapien
acagaaatgagcaaatgatacagatcaaatctt

SEQ ID NO: 216515 - DNA, 33 bp, Homo sapien
tccatattctgattccaatcatactacataact

SEQ ID NO: 216516 - DNA, 33 bp, Homo sapien
tccatattctgattccgatcatactacataact

SEQ ID NO: 216517 - DNA, 33 bp, Homo sapien
ctgtgctcataaaaagcctcaatgccataaaga

SEQ ID NO: 216518 - DNA, 33 bp, Homo sapien
ctgtgctcataaaaagtctcaatgccataaaga

SEQ ID NO: 216519 - DNA, 33 bp, Homo sapien
tagctaattagtacacaaggacattctttttga

SEQ ID NO: 216520 - DNA, 33 bp, Homo sapien
tagctaattagtacacgaggacattctttttga

SEQ ID NO: 216521 - DNA, 33 bp, Homo sapien
ggtaccctgggtttcacgtgctgatttgtgatg

SEQ ID NO: 216522 - DNA, 33 bp, Homo sapien
ggtaccctgggtttcaggtgctgatttgtgatg

SEQ ID NO: 216523 - DNA, 33 bp, Homo sapien
attaacgtgtcacatcagatacttaagttttat

SEQ ID NO: 216524 - DNA, 33 bp, Homo sapien
attaacgtgtcacatcggatacttaagttttat

SEQ ID NO: 216525 - DNA, 33 bp, Homo sapien
tataacctcacctatcaaaaagtcaaaattctg

SEQ ID NO: 216526 - DNA, 33 bp, Homo sapien
tataacctcacctatccaaaagtcaaaattctg

SEQ ID NO: 216527 - DNA, 33 bp, Homo sapien
actaccatgttggttcgcatgaagtccctaagt

SEQ ID NO: 216528 - DNA, 33 bp, Homo sapien
actaccatgttggttctcatgaagtccctaagt

SEQ ID NO: 216529 - DNA, 33 bp, Homo sapien
tagaatagttcctgggccataataaatacaatg

SEQ ID NO: 216530 - DNA, 33 bp, Homo sapien
tagaatagttcctgggtcataataaatacaatg

SEQ ID NO: 216531 - DNA, 33 bp, Homo sapien
agactgcctgctggaaagagaagaattccggct

SEQ ID NO: 216532 - DNA, 33 bp, Homo sapien
agactgcctgctggaaggagaagaattccggct

SEQ ID NO: 216533 - DNA, 33 bp, Homo sapien
agcagaaagggtaggaagaaatatgaattcctc

SEQ ID NO: 216534 - DNA, 33 bp, Homo sapien
agcagaaagggtaggatgaaatatgaattcctc

SEQ ID NO: 216535 - DNA, 33 bp, Homo sapien
atgagtggatgataagaaagtgttggaaattaa

SEQ ID NO: 216536 - DNA, 33 bp, Homo sapien
atgagtggatgataaggaagtgttggaaattaa

SEQ ID NO: 216537 - DNA, 33 bp, Homo sapien
tgcttccagggaggaacatatgacagggactca

SEQ ID NO: 216538 - DNA, 33 bp, Homo sapien
tgcttccagggaggaatatatgacagggactca

SEQ ID NO: 216539 - DNA, 33 bp, Homo sapien
cacaggctgtaaagccaaagtgtatacaggtca

SEQ ID NO: 216540 - DNA, 33 bp, Homo sapien
cacaggctgtaaagccgaagtgtatacaggtca

SEQ ID NO: 216541 - DNA, 33 bp, Homo sapien
gtatttggggcaaaagcctagatatctaaaaac

SEQ ID NO: 216542 - DNA, 33 bp, Homo sapien
gtatttggggcaaaaggctagatatctaaaaac

SEQ ID NO: 216543 - DNA, 33 bp, Homo sapien
aaggtgatgaagagcacggagtaaataaagaag

SEQ ID NO: 216544 - DNA, 33 bp, Homo sapien
aaggtgatgaagagcatggagtaaataaagaag

SEQ ID NO: 216545 - DNA, 33 bp, Homo sapien
tgacttcatggggtgacaggttcctggagtacc

SEQ ID NO: 216546 - DNA, 33 bp, Homo sapien
tgacttcatggggtgataggttcctggagtacc

SEQ ID NO: 216547 - DNA, 33 bp, Homo sapien
aggcagcagatctaaactagggcccagagatcg

SEQ ID NO: 216548 - DNA, 33 bp, Homo sapien
aggcagcagatctaaattagggcccagagatcg

SEQ ID NO: 216549 - DNA, 33 bp, Homo sapien
tcattcattagaacaaatcagagaaatcgagta

SEQ ID NO: 216550 - DNA, 33 bp, Homo sapien
tcattcattagaacaactcagagaaatcgagta

SEQ ID NO: 216551 - DNA, 33 bp, Homo sapien
caaaggaagaaacctacgggacaaggtccagga

SEQ ID NO: 216552 - DNA, 33 bp, Homo sapien
caaaggaagaaacctatgggacaaggtccagga

SEQ ID NO: 216553 - DNA, 33 bp, Homo sapien
atgaaaggactttaaaatcctgattctttctct

SEQ ID NO: 216554 - DNA, 33 bp, Homo sapien
atgaaaggactttaaactcctgattctttctct

SEQ ID NO: 216555 - DNA, 33 bp, Homo sapien
agaagcatcacacttacataggctatttaacca

SEQ ID NO: 216556 - DNA, 33 bp, Homo sapien
agaagcatcacacttatataggctatttaacca

SEQ ID NO: 216557 - DNA, 33 bp, Homo sapien
ctattcgctatgaaccaagcattggcctagata

SEQ ID NO: 216558 - DNA, 33 bp, Homo sapien
ctattcgctatgaaccgagcattggcctagata

SEQ ID NO: 216559 - DNA, 33 bp, Homo sapien
tctctgtggcatctgcacggtaataaaatttaa

SEQ ID NO: 216560 - DNA, 33 bp, Homo sapien
tctctgtggcatctgcgcggtaataaaatttaa

SEQ ID NO: 216561 - DNA, 33 bp, Homo sapien
aagtctcctgtgtcacaaaaaacttatactaaa

SEQ ID NO: 216562 - DNA, 33 bp, Homo sapien
aagtctcctgtgtcacgaaaaacttatactaaa

SEQ ID NO: 216563 - DNA, 33 bp, Homo sapien
aactcttagttcatacccatttttatcctatca

SEQ ID NO: 216564 - DNA, 33 bp, Homo sapien
aactcttagttcatactcatttttatcctatca

SEQ ID NO: 216565 - DNA, 33 bp, Homo sapien
aatcatagctcacagcagcatcaaactcctggg

SEQ ID NO: 216566 - DNA, 33 bp, Homo sapien
aatcatagctcacagcggcatcaaactcctggg

SEQ ID NO: 216567 - DNA, 33 bp, Homo sapien
gtgtttcatttaacgacaaggagttgaaattga

SEQ ID NO: 216568 - DNA, 33 bp, Homo sapien
gtgtttcatttaacgataaggagttgaaattga

SEQ ID NO: 216569 - DNA, 33 bp, Homo sapien
gtgaggctcactggaaatcaagttctgactact

SEQ ID NO: 216570 - DNA, 33 bp, Homo sapien
gtgaggctcactggaactcaagttctgactact

SEQ ID NO: 216571 - DNA, 33 bp, Homo sapien
tgctgtgtcctccctccctcaagcacacagact

SEQ ID NO: 216572 - DNA, 33 bp, Homo sapien
tgctgtgtcctccctctctcaagcacacagact

SEQ ID NO: 216573 - DNA, 33 bp, Homo sapien
caaagacataacactcaaagacaaactagctat

SEQ ID NO: 216574 - DNA, 33 bp, Homo sapien
caaagacataacactcgaagacaaactagctat

SEQ ID NO: 216575 - DNA, 33 bp, Homo sapien
caggtgagattcaaagcattcaagaaggactcc

SEQ ID NO: 216576 - DNA, 33 bp, Homo sapien
caggtgagattcaaagtattcaagaaggactcc

SEQ ID NO: 216577 - DNA, 33 bp, Homo sapien
tgttgctagctcttcactcatggccttacatca

SEQ ID NO: 216578 - DNA, 33 bp, Homo sapien
tgttgctagctcttcattcatggccttacatca

SEQ ID NO: 216579 - DNA, 33 bp, Homo sapien
acaggcaagttacctacccagctatgcctctgt

SEQ ID NO: 216580 - DNA, 33 bp, Homo sapien
acaggcaagttacctatccagctatgcctctgt

SEQ ID NO: 216581 - DNA, 33 bp, Homo sapien
gtaggagcttgagaaacgtttgagtcaattaat

SEQ ID NO: 216582 - DNA, 33 bp, Homo sapien
gtaggagcttgagaaatgtttgagtcaattaat

SEQ ID NO: 216583 - DNA, 33 bp, Homo sapien
aggttgaccatccaaacgactgcttctagagtt

SEQ ID NO: 216584 - DNA, 33 bp, Homo sapien
aggttgaccatccaaatgactgcttctagagtt

SEQ ID NO: 216585 - DNA, 33 bp, Homo sapien
aatcagtccagttaagacattcaacgagacacc

SEQ ID NO: 216586 - DNA, 33 bp, Homo sapien
aatcagtccagttaaggcattcaacgagacacc

SEQ ID NO: 216587 - DNA, 33 bp, Homo sapien
ttcactaccactttcccaataaagttcctctcc

SEQ ID NO: 216588 - DNA, 33 bp, Homo sapien
ttcactaccactttcctaataaagttcctctcc

SEQ ID NO: 216589 - DNA, 33 bp, Homo sapien
gttagaactttatcaggatccgacttacatttt

SEQ ID NO: 216590 - DNA, 33 bp, Homo sapien
gttagaactttatcagtatccgacttacatttt

SEQ ID NO: 216591 - DNA, 33 bp, Homo sapien
ctgctgttctattatccaggagcatctgactcc

SEQ ID NO: 216592 - DNA, 33 bp, Homo sapien
ctgctgttctattatctaggagcatctgactcc

SEQ ID NO: 216593 - DNA, 33 bp, Homo sapien
ttttccccatcaatcaagtccagatgcttccct

SEQ ID NO: 216594 - DNA, 33 bp, Homo sapien
ttttccccatcaatcaggtccagatgcttccct

SEQ ID NO: 216595 - DNA, 33 bp, Homo sapien
agctatagtattacaactctatatatgctataa

SEQ ID NO: 216596 - DNA, 33 bp, Homo sapien
agctatagtattacaattctatatatgctataa

SEQ ID NO: 216597 - DNA, 33 bp, Homo sapien
tctaaaacatgagatcaaagcaaaacaaaaaaa

SEQ ID NO: 216598 - DNA, 33 bp, Homo sapien
tctaaaacatgagatcgaagcaaaacaaaaaaa

SEQ ID NO: 216599 - DNA, 33 bp, Homo sapien
cacctcctactacttcactccttgctgtttttc

SEQ ID NO: 216600 - DNA, 33 bp, Homo sapien
cacctcctactacttcgctccttgctgtttttc

SEQ ID NO: 216601 - DNA, 33 bp, Homo sapien
ctcaaggattctgttacagcagtaccaaatgga

SEQ ID NO: 216602 - DNA, 33 bp, Homo sapien
ctcaaggattctgttatagcagtaccaaatgga

SEQ ID NO: 216603 - DNA, 33 bp, Homo sapien
gacaataggcgaataaactgaaagctggagatc

SEQ ID NO: 216604 - DNA, 33 bp, Homo sapien
gacaataggcgaataacctgaaagctggagatc

SEQ ID NO: 216605 - DNA, 33 bp, Homo sapien
cacctaggttttgagcaaagggtcagaagagag

SEQ ID NO: 216606 - DNA, 33 bp, Homo sapien
cacctaggttttgagcgaagggtcagaagagag

SEQ ID NO: 216607 - DNA, 33 bp, Homo sapien
ccctcatgattattgacgttgaactccttttca

SEQ ID NO: 216608 - DNA, 33 bp, Homo sapien
ccctcatgattattgatgttgaactccttttca

SEQ ID NO: 216609 - DNA, 33 bp, Homo sapien
tgtggagaaaagagacactattgacaggaatct

SEQ ID NO: 216610 - DNA, 33 bp, Homo sapien
tgtggagaaaagagacgctattgacaggaatct

SEQ ID NO: 216611 - DNA, 33 bp, Homo sapien
ctagctatctagcaaacggcagtaacccaaata

SEQ ID NO: 216612 - DNA, 33 bp, Homo sapien
ctagctatctagcaaatggcagtaacccaaata

SEQ ID NO: 216613 - DNA, 33 bp, Homo sapien
attcaatcagctcatagctagtaaatggttcta

SEQ ID NO: 216614 - DNA, 33 bp, Homo sapien
attcaatcagctcatatctagtaaatggttcta

SEQ ID NO: 216615 - DNA, 33 bp, Homo sapien
ttcattcttaacaaacactttcttctcccagca

SEQ ID NO: 216616 - DNA, 33 bp, Homo sapien
ttcattcttaacaaactctttcttctcccagca

SEQ ID NO: 216617 - DNA, 33 bp, Homo sapien
tcccttctttgcaggaggaaattctgtagagag

SEQ ID NO: 216618 - DNA, 33 bp, Homo sapien
tcccttctttgcaggatgaaattctgtagagag

SEQ ID NO: 216619 - DNA, 33 bp, Homo sapien
ctattagaaaaacataagtataagtcttcatga

SEQ ID NO: 216620 - DNA, 33 bp, Homo sapien
ctattagaaaaacataggtataagtcttcatga

SEQ ID NO: 216621 - DNA, 33 bp, Homo sapien
caaacatacactgaaaacatgatgctaagtgat

SEQ ID NO: 216622 - DNA, 33 bp, Homo sapien
caaacatacactgaaaccatgatgctaagtgat

SEQ ID NO: 216623 - DNA, 33 bp, Homo sapien
atctgccctcatagctcaatgacgggttaaatg

SEQ ID NO: 216624 - DNA, 33 bp, Homo sapien
atctgccctcatagctgaatgacgggttaaatg

SEQ ID NO: 216625 - DNA, 33 bp, Homo sapien
agttttcaatcaccaaatattatcctacatgag

SEQ ID NO: 216626 - DNA, 33 bp, Homo sapien
agttttcaatcaccaattattatcctacatgag

SEQ ID NO: 216627 - DNA, 33 bp, Homo sapien
caaaaattgagtcacacggaagaatctgaataa

SEQ ID NO: 216628 - DNA, 33 bp, Homo sapien
caaaaattgagtcacatggaagaatctgaataa

SEQ ID NO: 216629 - DNA, 33 bp, Homo sapien
caactgacaccacaacaagtagagacgagctgc

SEQ ID NO: 216630 - DNA, 33 bp, Homo sapien
caactgacaccacaacgagtagagacgagctgc

SEQ ID NO: 216631 - DNA, 33 bp, Homo sapien
ctttctgctttgacaacatcatttttgtgtgga

SEQ ID NO: 216632 - DNA, 33 bp, Homo sapien
ctttctgctttgacaatatcatttttgtgtgga

SEQ ID NO: 216633 - DNA, 33 bp, Homo sapien
attctacccaacttgaactatagattttaatgc

SEQ ID NO: 216634 - DNA, 33 bp, Homo sapien
attctacccaacttgatctatagattttaatgc

SEQ ID NO: 216635 - DNA, 33 bp, Homo sapien
catagttagttgttgacgtacttctcctttaat

SEQ ID NO: 216636 - DNA, 33 bp, Homo sapien
catagttagttgttgatgtacttctcctttaat

SEQ ID NO: 216637 - DNA, 33 bp, Homo sapien
cctgtcctcatgtaaactctttgagggtagaaa

SEQ ID NO: 216638 - DNA, 33 bp, Homo sapien
cctgtcctcatgtaaattctttgagggtagaaa

SEQ ID NO: 216639 - DNA, 33 bp, Homo sapien
acaagaagacaagactaaaaatgacatcaggcc

SEQ ID NO: 216640 - DNA, 33 bp, Homo sapien
acaagaagacaagactgaaaatgacatcaggcc

SEQ ID NO: 216641 - DNA, 33 bp, Homo sapien
ggtgcagacagagaaacttctaacctcctattt

SEQ ID NO: 216642 - DNA, 33 bp, Homo sapien
ggtgcagacagagaaagttctaacctcctattt

SEQ ID NO: 216643 - DNA, 33 bp, Homo sapien
acctgagggaatgaggccattagagtctttgag

SEQ ID NO: 216644 - DNA, 33 bp, Homo sapien
acctgagggaatgaggtcattagagtctttgag

SEQ ID NO: 216645 - DNA, 33 bp, Homo sapien
gatctttcaatgtcaacttcaatccagacctcg

SEQ ID NO: 216646 - DNA, 33 bp, Homo sapien
gatctttcaatgtcaagttcaatccagacctcg

SEQ ID NO: 216647 - DNA, 33 bp, Homo sapien
ttgttttgatacatcacctttggctgtgcatca

SEQ ID NO: 216648 - DNA, 33 bp, Homo sapien
ttgttttgatacatcatctttggctgtgcatca

SEQ ID NO: 216649 - DNA, 33 bp, Homo sapien
atgtgggcagaagagacaaagtaagggtcttgc

SEQ ID NO: 216650 - DNA, 33 bp, Homo sapien
atgtgggcagaagagagaaagtaagggtcttgc

SEQ ID NO: 216651 - DNA, 33 bp, Homo sapien
cttaaatattttaaaaacaacttggctaattgg

SEQ ID NO: 216652 - DNA, 33 bp, Homo sapien
cttaaatattttaaaaccaacttggctaattgg

SEQ ID NO: 216653 - DNA, 33 bp, Homo sapien
tgttccttatccttgaatatgcagacatatctc

SEQ ID NO: 216654 - DNA, 33 bp, Homo sapien
tgttccttatccttgagtatgcagacatatctc

SEQ ID NO: 216655 - DNA, 33 bp, Homo sapien
tatcctatttgatggcccaatctcatgttactg

SEQ ID NO: 216656 - DNA, 33 bp, Homo sapien
tatcctatttgatggctcaatctcatgttactg

SEQ ID NO: 216657 - DNA, 33 bp, Homo sapien
aatgctataacctagcaagatgcaactatacta

SEQ ID NO: 216658 - DNA, 33 bp, Homo sapien
aatgctataacctagcgagatgcaactatacta

SEQ ID NO: 216659 - DNA, 33 bp, Homo sapien
atatttgttcagtgagcaaataaatggatgcac

SEQ ID NO: 216660 - DNA, 33 bp, Homo sapien
atatttgttcagtgagtaaataaatggatgcac

SEQ ID NO: 216661 - DNA, 33 bp, Homo sapien
ctttggacctcatgtacgctataggcttccctg

SEQ ID NO: 216662 - DNA, 33 bp, Homo sapien
ctttggacctcatgtatgctataggcttccctg

SEQ ID NO: 216663 - DNA, 33 bp, Homo sapien
tgcatattcctgctttcaaaaacaacaacacaa

SEQ ID NO: 216664 - DNA, 33 bp, Homo sapien
tgcatattcctgctttgaaaaacaacaacacaa

SEQ ID NO: 216665 - DNA, 33 bp, Homo sapien
caatagcaaataaatgccaggttctattctagg

SEQ ID NO: 216666 - DNA, 33 bp, Homo sapien
caatagcaaataaatggcaggttctattctagg

SEQ ID NO: 216667 - DNA, 33 bp, Homo sapien
ttttgcagtgaggtacagatataaatacaaagg

SEQ ID NO: 216668 - DNA, 33 bp, Homo sapien
ttttgcagtgaggtacggatataaatacaaagg

SEQ ID NO: 216669 - DNA, 33 bp, Homo sapien
caaagctatagctaacaatttgtgctagttatg

SEQ ID NO: 216670 - DNA, 33 bp, Homo sapien
caaagctatagctaacgatttgtgctagttatg

SEQ ID NO: 216671 - DNA, 33 bp, Homo sapien
ctcaaggaacaagctacgtcttactatagacga

SEQ ID NO: 216672 - DNA, 33 bp, Homo sapien
ctcaaggaacaagctatgtcttactatagacga

SEQ ID NO: 216673 - DNA, 33 bp, Homo sapien
gcaaatatattgttcccgaaaacttcattagtt

SEQ ID NO: 216674 - DNA, 33 bp, Homo sapien
gcaaatatattgttcctgaaaacttcattagtt

SEQ ID NO: 216675 - DNA, 33 bp, Homo sapien
gttaggcttagtagacacaaaattaaaataaaa

SEQ ID NO: 216676 - DNA, 33 bp, Homo sapien
gttaggcttagtagacgcaaaattaaaataaaa

SEQ ID NO: 216677 - DNA, 33 bp, Homo sapien
catgtttagctgtatacgattttctaatgttta

SEQ ID NO: 216678 - DNA, 33 bp, Homo sapien
catgtttagctgtatatgattttctaatgttta

SEQ ID NO: 216679 - DNA, 33 bp, Homo sapien
tctccctcacgttccaatatcaaattccttgta

SEQ ID NO: 216680 - DNA, 33 bp, Homo sapien
tctccctcacgttccagtatcaaattccttgta

SEQ ID NO: 216681 - DNA, 33 bp, Homo sapien
ggaggatttggacataactgacttgggagatta

SEQ ID NO: 216682 - DNA, 33 bp, Homo sapien
ggaggatttggacatatctgacttgggagatta

SEQ ID NO: 216683 - DNA, 33 bp, Homo sapien
agggtcactgtgaagaatatgcatagaggatta

SEQ ID NO: 216684 - DNA, 33 bp, Homo sapien
agggtcactgtgaagattatgcatagaggatta

SEQ ID NO: 216685 - DNA, 33 bp, Homo sapien
ttttcttatctctaagactatggtcccttctaa

SEQ ID NO: 216686 - DNA, 33 bp, Homo sapien
ttttcttatctctaaggctatggtcccttctaa

SEQ ID NO: 216687 - DNA, 33 bp, Homo sapien
actttcgacactttgacattaaatgactgtatg

SEQ ID NO: 216688 - DNA, 33 bp, Homo sapien
actttcgacactttgatattaaatgactgtatg

SEQ ID NO: 216689 - DNA, 33 bp, Homo sapien
agtgcagtgcttttctcaatacaccataccatt

SEQ ID NO: 216690 - DNA, 33 bp, Homo sapien
agtgcagtgcttttcttaatacaccataccatt

SEQ ID NO: 216691 - DNA, 33 bp, Homo sapien
tattaaaaaacagcaaactcacgcatctttgat

SEQ ID NO: 216692 - DNA, 33 bp, Homo sapien
tattaaaaaacagcaacctcacgcatctttgat

SEQ ID NO: 216693 - DNA, 33 bp, Homo sapien
gctgaagctaacgcataagggatgatgaagaat

SEQ ID NO: 216694 - DNA, 33 bp, Homo sapien
gctgaagctaacgcatgagggatgatgaagaat

SEQ ID NO: 216695 - DNA, 33 bp, Homo sapien
gaagagcttaggcagacagattacatgatcaaa

SEQ ID NO: 216696 - DNA, 33 bp, Homo sapien
gaagagcttaggcagagagattacatgatcaaa

SEQ ID NO: 216697 - DNA, 33 bp, Homo sapien
tgctgtataaatattacgtgctgctaatgttct

SEQ ID NO: 216698 - DNA, 33 bp, Homo sapien
tgctgtataaatattatgtgctgctaatgttct

SEQ ID NO: 216699 - DNA, 33 bp, Homo sapien
aggatagcagaatatcactgctcaatttggtaa

SEQ ID NO: 216700 - DNA, 33 bp, Homo sapien
aggatagcagaatatcgctgctcaatttggtaa

SEQ ID NO: 216701 - DNA, 33 bp, Homo sapien
tcattgctctgaagataacgaacaatccagatg

SEQ ID NO: 216702 - DNA, 33 bp, Homo sapien
tcattgctctgaagatgacgaacaatccagatg

SEQ ID NO: 216703 - DNA, 33 bp, Homo sapien
catgaaagaaatgcacaaagccaatatttaaat

SEQ ID NO: 216704 - DNA, 33 bp, Homo sapien
catgaaagaaatgcacgaagccaatatttaaat

SEQ ID NO: 216705 - DNA, 33 bp, Homo sapien
ccaatcatttaaaggcacccaaagtagccatta

SEQ ID NO: 216706 - DNA, 33 bp, Homo sapien
ccaatcatttaaaggcgcccaaagtagccatta

SEQ ID NO: 216707 - DNA, 33 bp, Homo sapien
attctcctatgagttcccctctttcctcctgct

SEQ ID NO: 216708 - DNA, 33 bp, Homo sapien
attctcctatgagttctcctctttcctcctgct

SEQ ID NO: 216709 - DNA, 33 bp, Homo sapien
attttggtttaatatgaatcctgagagcccagc

SEQ ID NO: 216710 - DNA, 33 bp, Homo sapien
attttggtttaatatggatcctgagagcccagc

SEQ ID NO: 216711 - DNA, 33 bp, Homo sapien
aacaaatttcacagtagagtatgtaacagctgc

SEQ ID NO: 216712 - DNA, 33 bp, Homo sapien
aacaaatttcacagtatagtatgtaacagctgc

SEQ ID NO: 216713 - DNA, 33 bp, Homo sapien
taatatttgctcatgtaaaattcttcctttcac

SEQ ID NO: 216714 - DNA, 33 bp, Homo sapien
taatatttgctcatgtgaaattcttcctttcac

SEQ ID NO: 216715 - DNA, 33 bp, Homo sapien
ctcatgagactcaagacggcccaaggtgtaact

SEQ ID NO: 216716 - DNA, 33 bp, Homo sapien
ctcatgagactcaagatggcccaaggtgtaact

SEQ ID NO: 216717 - DNA, 33 bp, Homo sapien
agacacaaactagctcactttattcagaagaaa

SEQ ID NO: 216718 - DNA, 33 bp, Homo sapien
agacacaaactagctccctttattcagaagaaa

SEQ ID NO: 216719 - DNA, 33 bp, Homo sapien
ctatccaaatacctcaacatcatgtgaaaatat

SEQ ID NO: 216720 - DNA, 33 bp, Homo sapien
ctatccaaatacctcaccatcatgtgaaaatat

SEQ ID NO: 216721 - DNA, 33 bp, Homo sapien
ctcttagcaaattaaccgtgtcatacttgttca

SEQ ID NO: 216722 - DNA, 33 bp, Homo sapien
ctcttagcaaattaactgtgtcatacttgttca

SEQ ID NO: 216723 - DNA, 33 bp, Homo sapien
cacgtgactgagaaacaaaatgatgctgatgcc

SEQ ID NO: 216724 - DNA, 33 bp, Homo sapien
cacgtgactgagaaaccaaatgatgctgatgcc

SEQ ID NO: 216725 - DNA, 33 bp, Homo sapien
ggggccctcttttccaccaggcatttgaatcag

SEQ ID NO: 216726 - DNA, 33 bp, Homo sapien
ggggccctcttttccatcaggcatttgaatcag

SEQ ID NO: 216727 - DNA, 33 bp, Homo sapien
tttttacataaattagaagatggaaatgaaata

SEQ ID NO: 216728 - DNA, 33 bp, Homo sapien
tttttacataaattagcagatggaaatgaaata

SEQ ID NO: 216729 - DNA, 33 bp, Homo sapien
gctgtttccttccaaccctgagatctctcagca

SEQ ID NO: 216730 - DNA, 33 bp, Homo sapien
gctgtttccttccaactctgagatctctcagca

SEQ ID NO: 216731 - DNA, 33 bp, Homo sapien
tagttcgcaatggttgcagctatctaagtccat

SEQ ID NO: 216732 - DNA, 33 bp, Homo sapien
tagttcgcaatggttggagctatctaagtccat

SEQ ID NO: 216733 - DNA, 33 bp, Homo sapien
ctaggtctagaatgtacacccgtgaaatcagag

SEQ ID NO: 216734 - DNA, 33 bp, Homo sapien
ctaggtctagaatgtatacccgtgaaatcagag

SEQ ID NO: 216735 - DNA, 33 bp, Homo sapien
agcagccaaagtgagaaaaatcatctataccat

SEQ ID NO: 216736 - DNA, 33 bp, Homo sapien
agcagccaaagtgagagaaatcatctataccat

SEQ ID NO: 216737 - DNA, 33 bp, Homo sapien
tgagggaaatgtaagacgttctgatatccttgg

SEQ ID NO: 216738 - DNA, 33 bp, Homo sapien
tgagggaaatgtaagatgttctgatatccttgg

SEQ ID NO: 216739 - DNA, 33 bp, Homo sapien
ccatcctatatttgcacctcattctctctcctc

SEQ ID NO: 216740 - DNA, 33 bp, Homo sapien
ccatcctatatttgcatctcattctctctcctc

SEQ ID NO: 216741 - DNA, 33 bp, Homo sapien
tagactcccactgatacgttatttttttgcgaa

SEQ ID NO: 216742 - DNA, 33 bp, Homo sapien
tagactcccactgatatgttatttttttgcgaa

SEQ ID NO: 216743 - DNA, 33 bp, Homo sapien
ttccactttccatccacgcaacgactgtgcaaa

SEQ ID NO: 216744 - DNA, 33 bp, Homo sapien
ttccactttccatccatgcaacgactgtgcaaa

SEQ ID NO: 216745 - DNA, 33 bp, Homo sapien
tagataaaattgacaaaaaaaaacaggcaatgg

SEQ ID NO: 216746 - DNA, 33 bp, Homo sapien
tagataaaattgacaataaaaaacaggcaatgg

SEQ ID NO: 216747 - DNA, 33 bp, Homo sapien
caaatataatatcagtcaatggtcaaagaatgt

SEQ ID NO: 216748 - DNA, 33 bp, Homo sapien
caaatataatatcagttaatggtcaaagaatgt

SEQ ID NO: 216749 - DNA, 33 bp, Homo sapien
aaaaatcatgtattccaccaggtagagtggctc

SEQ ID NO: 216750 - DNA, 33 bp, Homo sapien
aaaaatcatgtattccgccaggtagagtggctc

SEQ ID NO: 216751 - DNA, 33 bp, Homo sapien
aataatcaggttataccgacatccaaagagtga

SEQ ID NO: 216752 - DNA, 33 bp, Homo sapien
aataatcaggttatactgacatccaaagagtga

SEQ ID NO: 216753 - DNA, 33 bp, Homo sapien
tccagtatttcttcaaagcaacacaaagcagac

SEQ ID NO: 216754 - DNA, 33 bp, Homo sapien
tccagtatttcttcaaggcaacacaaagcagac

SEQ ID NO: 216755 - DNA, 33 bp, Homo sapien
tgggttttctttagacagcacgtaattgggtct

SEQ ID NO: 216756 - DNA, 33 bp, Homo sapien
tgggttttctttagacggcacgtaattgggtct

SEQ ID NO: 216757 - DNA, 33 bp, Homo sapien
taacttggtatgaagactaggtgtaatcaaggc

SEQ ID NO: 216758 - DNA, 33 bp, Homo sapien
taacttggtatgaagattaggtgtaatcaaggc

SEQ ID NO: 216759 - DNA, 33 bp, Homo sapien
ttgtatctcataccagccaattgttagaaacac

SEQ ID NO: 216760 - DNA, 33 bp, Homo sapien
ttgtatctcataccagtcaattgttagaaacac

SEQ ID NO: 216761 - DNA, 33 bp, Homo sapien
tagccactctttgtcccatatatctcggacact

SEQ ID NO: 216762 - DNA, 33 bp, Homo sapien
tagccactctttgtcctatatatctcggacact

SEQ ID NO: 216763 - DNA, 33 bp, Homo sapien
tactgattaaaagttacgcgtgaagccaaagag

SEQ ID NO: 216764 - DNA, 33 bp, Homo sapien
tactgattaaaagttatgcgtgaagccaaagag

SEQ ID NO: 216765 - DNA, 33 bp, Homo sapien
aggcaagaagagtcaccattctagcagaagaaa

SEQ ID NO: 216766 - DNA, 33 bp, Homo sapien
aggcaagaagagtcacgattctagcagaagaaa

SEQ ID NO: 216767 - DNA, 33 bp, Homo sapien
atgctgcattccttacagcaggttacattgggc

SEQ ID NO: 216768 - DNA, 33 bp, Homo sapien
atgctgcattccttacggcaggttacattgggc

SEQ ID NO: 216769 - DNA, 33 bp, Homo sapien
gatagaatctaggttgaagacttagaaaaggag

SEQ ID NO: 216770 - DNA, 33 bp, Homo sapien
gatagaatctaggttggagacttagaaaaggag

SEQ ID NO: 216771 - DNA, 33 bp, Homo sapien
acatctccctggcaccaaaaatccccaaaacat

SEQ ID NO: 216772 - DNA, 33 bp, Homo sapien
acatctccctggcacccaaaatccccaaaacat

SEQ ID NO: 216773 - DNA, 33 bp, Homo sapien
acttggtgaatgatcaaaggaaggtcatagagc

SEQ ID NO: 216774 - DNA, 33 bp, Homo sapien
acttggtgaatgatcagaggaaggtcatagagc

SEQ ID NO: 216775 - DNA, 33 bp, Homo sapien
agaaccatttgtgggacggtaattaggtgatgc

SEQ ID NO: 216776 - DNA, 33 bp, Homo sapien
agaaccatttgtgggatggtaattaggtgatgc

SEQ ID NO: 216777 - DNA, 33 bp, Homo sapien
aaattctaaagagcaactggaagtcttcctctc

SEQ ID NO: 216778 - DNA, 33 bp, Homo sapien
aaattctaaagagcaagtggaagtcttcctctc

SEQ ID NO: 216779 - DNA, 33 bp, Homo sapien
tagaatttaagggcatgaacaatccagcagaaa

SEQ ID NO: 216780 - DNA, 33 bp, Homo sapien
tagaatttaagggcattaacaatccagcagaaa

SEQ ID NO: 216781 - DNA, 33 bp, Homo sapien
gatcccaacctgaaaaagttggtgctaggagtg

SEQ ID NO: 216782 - DNA, 33 bp, Homo sapien
gatcccaacctgaaaacgttggtgctaggagtg

SEQ ID NO: 216783 - DNA, 33 bp, Homo sapien
agaatatgctgtctccacaaatagtagaggcct

SEQ ID NO: 216784 - DNA, 33 bp, Homo sapien
agaatatgctgtctccgcaaatagtagaggcct

SEQ ID NO: 216785 - DNA, 33 bp, Homo sapien
gagatatagcaccttacaggagtctctggagga

SEQ ID NO: 216786 - DNA, 33 bp, Homo sapien
gagatatagcaccttataggagtctctggagga

SEQ ID NO: 216787 - DNA, 33 bp, Homo sapien
tgtgctttctgtcccacaaatcctgggctttgc

SEQ ID NO: 216788 - DNA, 33 bp, Homo sapien
tgtgctttctgtcccataaatcctgggctttgc

SEQ ID NO: 216789 - DNA, 33 bp, Homo sapien
tagacacagagtacataatacgttattccattt

SEQ ID NO: 216790 - DNA, 33 bp, Homo sapien
tagacacagagtacatgatacgttattccattt

SEQ ID NO: 216791 - DNA, 33 bp, Homo sapien
tagttttgtctcatctaaaattcatacaaatgg

SEQ ID NO: 216792 - DNA, 33 bp, Homo sapien
tagttttgtctcatctcaaattcatacaaatgg

SEQ ID NO: 216793 - DNA, 33 bp, Homo sapien
cggatggcaaagctaaagaagctcactgtaaca

SEQ ID NO: 216794 - DNA, 33 bp, Homo sapien
cggatggcaaagctaaggaagctcactgtaaca

SEQ ID NO: 216795 - DNA, 33 bp, Homo sapien
gcattggtgaaaactcagaactgtacatttaaa

SEQ ID NO: 216796 - DNA, 33 bp, Homo sapien
gcattggtgaaaactcggaactgtacatttaaa

SEQ ID NO: 216797 - DNA, 33 bp, Homo sapien
atacaaggttttttagaagcatagaggtagtac

SEQ ID NO: 216798 - DNA, 33 bp, Homo sapien
atacaaggttttttaggagcatagaggtagtac

SEQ ID NO: 216799 - DNA, 33 bp, Homo sapien
ctatttagactgaaaagcaccatctgaaactca

SEQ ID NO: 216800 - DNA, 33 bp, Homo sapien
ctatttagactgaaaatcaccatctgaaactca

SEQ ID NO: 216801 - DNA, 33 bp, Homo sapien
accttgaagaagcacacattcaggttgccccat

SEQ ID NO: 216802 - DNA, 33 bp, Homo sapien
accttgaagaagcacagattcaggttgccccat

SEQ ID NO: 216803 - DNA, 33 bp, Homo sapien
cccatagttctctttagggcacagagtctaccc

SEQ ID NO: 216804 - DNA, 33 bp, Homo sapien
cccatagttctctttatggcacagagtctaccc

SEQ ID NO: 216805 - DNA, 33 bp, Homo sapien
ctgagagggaaaaaaccagtggagcagatggag

SEQ ID NO: 216806 - DNA, 33 bp, Homo sapien
ctgagagggaaaaaacgagtggagcagatggag

SEQ ID NO: 216807 - DNA, 33 bp, Homo sapien
ttaattaagggtgacactaaatgaaatctcagc

SEQ ID NO: 216808 - DNA, 33 bp, Homo sapien
ttaattaagggtgacattaaatgaaatctcagc

SEQ ID NO: 216809 - DNA, 33 bp, Homo sapien
ttccattactttgacacgatcaggcattccccg

SEQ ID NO: 216810 - DNA, 33 bp, Homo sapien
ttccattactttgacatgatcaggcattccccg

SEQ ID NO: 216811 - DNA, 33 bp, Homo sapien
ctgctgtcagtaggcacacaattccattacttt

SEQ ID NO: 216812 - DNA, 33 bp, Homo sapien
ctgctgtcagtaggcatacaattccattacttt

SEQ ID NO: 216813 - DNA, 33 bp, Homo sapien
aggtggcagtgggtaacgtgtgcaccaagaaaa

SEQ ID NO: 216814 - DNA, 33 bp, Homo sapien
aggtggcagtgggtaatgtgtgcaccaagaaaa

SEQ ID NO: 216815 - DNA, 33 bp, Homo sapien
ccagagaccagagggcagactgtgcgataatac

SEQ ID NO: 216816 - DNA, 33 bp, Homo sapien
ccagagaccagagggcggactgtgcgataatac

SEQ ID NO: 216817 - DNA, 33 bp, Homo sapien
gctagagaagtgtaacaggcaaatgaaacattg

SEQ ID NO: 216818 - DNA, 33 bp, Homo sapien
gctagagaagtgtaacgggcaaatgaaacattg

SEQ ID NO: 216819 - DNA, 33 bp, Homo sapien
cctctcttgccataatcacagctctcaaatgct

SEQ ID NO: 216820 - DNA, 33 bp, Homo sapien
cctctcttgccataattacagctctcaaatgct

SEQ ID NO: 216821 - DNA, 33 bp, Homo sapien
acacagagggccttaaatcgttcattcacctct

SEQ ID NO: 216822 - DNA, 33 bp, Homo sapien
acacagagggccttaagtcgttcattcacctct

SEQ ID NO: 216823 - DNA, 33 bp, Homo sapien
aggccacaggtcaataccggttcgtggcctgtt

SEQ ID NO: 216824 - DNA, 33 bp, Homo sapien
aggccacaggtcaatatcggttcgtggcctgtt

SEQ ID NO: 216825 - DNA, 33 bp, Homo sapien
gtgcatcatgaaaagaagactgcaaagcctgga

SEQ ID NO: 216826 - DNA, 33 bp, Homo sapien
gtgcatcatgaaaagaggactgcaaagcctgga

SEQ ID NO: 216827 - DNA, 33 bp, Homo sapien
cccagtagagtctaaaagccatagcaatgtgaa

SEQ ID NO: 216828 - DNA, 33 bp, Homo sapien
cccagtagagtctaaatgccatagcaatgtgaa

SEQ ID NO: 216829 - DNA, 33 bp, Homo sapien
tctactgtgaactctaaagaactctgacaatag

SEQ ID NO: 216830 - DNA, 33 bp, Homo sapien
tctactgtgaactctatagaactctgacaatag

SEQ ID NO: 216831 - DNA, 33 bp, Homo sapien
tcattctttctacaaacattcacgtgcatattt

SEQ ID NO: 216832 - DNA, 33 bp, Homo sapien
tcattctttctacaaatattcacgtgcatattt

SEQ ID NO: 216833 - DNA, 33 bp, Homo sapien
aaggaaattaatgcaacctctgtgaaaaaagag

SEQ ID NO: 216834 - DNA, 33 bp, Homo sapien
aaggaaattaatgcaagctctgtgaaaaaagag

SEQ ID NO: 216835 - DNA, 33 bp, Homo sapien
cttgtctgggtctacagatgttggtaaaagctg

SEQ ID NO: 216836 - DNA, 33 bp, Homo sapien
cttgtctgggtctacatatgttggtaaaagctg

SEQ ID NO: 216837 - DNA, 33 bp, Homo sapien
ttgagcttgggtcaaactgatggtgaactcctt

SEQ ID NO: 216838 - DNA, 33 bp, Homo sapien
ttgagcttgggtcaaattgatggtgaactcctt

SEQ ID NO: 216839 - DNA, 33 bp, Homo sapien
caccataagttaggaggcacgtgcaaagaggat

SEQ ID NO: 216840 - DNA, 33 bp, Homo sapien
caccataagttaggagtcacgtgcaaagaggat

SEQ ID NO: 216841 - DNA, 33 bp, Homo sapien
agagataggacccctcaagatcattatccctcc

SEQ ID NO: 216842 - DNA, 33 bp, Homo sapien
agagataggacccctcgagatcattatccctcc

SEQ ID NO: 216843 - DNA, 33 bp, Homo sapien
gtggatccacattttaaaagttgggaagaagat

SEQ ID NO: 216844 - DNA, 33 bp, Homo sapien
gtggatccacattttacaagttgggaagaagat

SEQ ID NO: 216845 - DNA, 33 bp, Homo sapien
ttatttcagcctggtaccaatgcccccataaaa

SEQ ID NO: 216846 - DNA, 33 bp, Homo sapien
ttatttcagcctggtatcaatgcccccataaaa

SEQ ID NO: 216847 - DNA, 33 bp, Homo sapien
ttttgggttagatgaggaagagtatataacatg

SEQ ID NO: 216848 - DNA, 33 bp, Homo sapien
ttttgggttagatgagtaagagtatataacatg

SEQ ID NO: 216849 - DNA, 33 bp, Homo sapien
gggacaaaacgctgatcaagcgctagaaaacag

SEQ ID NO: 216850 - DNA, 33 bp, Homo sapien
gggacaaaacgctgattaagcgctagaaaacag

SEQ ID NO: 216851 - DNA, 33 bp, Homo sapien
tttgcagaagatcatgcagttgcaggtagggga

SEQ ID NO: 216852 - DNA, 33 bp, Homo sapien
tttgcagaagatcatgtagttgcaggtagggga

SEQ ID NO: 216853 - DNA, 33 bp, Homo sapien
catagtaaagcattcaatactaactattatgaa

SEQ ID NO: 216854 - DNA, 33 bp, Homo sapien
catagtaaagcattcagtactaactattatgaa

SEQ ID NO: 216855 - DNA, 33 bp, Homo sapien
aataacataaacaagaaaaggcaagactacacc

SEQ ID NO: 216856 - DNA, 33 bp, Homo sapien
aataacataaacaagagaaggcaagactacacc

SEQ ID NO: 216857 - DNA, 33 bp, Homo sapien
tctaccttaacatcagaaattatagtgatgttc

SEQ ID NO: 216858 - DNA, 33 bp, Homo sapien
tctaccttaacatcagcaattatagtgatgttc

SEQ ID NO: 216859 - DNA, 33 bp, Homo sapien
taaggaatggaagcaactattatatcaacgaca

SEQ ID NO: 216860 - DNA, 33 bp, Homo sapien
taaggaatggaagcaattattatatcaacgaca

SEQ ID NO: 216861 - DNA, 33 bp, Homo sapien
ctttatgataaatgccaaagccaggtagcataa

SEQ ID NO: 216862 - DNA, 33 bp, Homo sapien
ctttatgataaatgccgaagccaggtagcataa

SEQ ID NO: 216863 - DNA, 33 bp, Homo sapien
aaaatatatctttgcaaatttgtgtcaggcaaa

SEQ ID NO: 216864 - DNA, 33 bp, Homo sapien
aaaatatatctttgcagatttgtgtcaggcaaa

SEQ ID NO: 216865 - DNA, 33 bp, Homo sapien
tatctttttactcttccacgtgacttctgtatt

SEQ ID NO: 216866 - DNA, 33 bp, Homo sapien
tatctttttactcttctacgtgacttctgtatt

SEQ ID NO: 216867 - DNA, 33 bp, Homo sapien
tgttagactgttaggccattatctgaccccttt

SEQ ID NO: 216868 - DNA, 33 bp, Homo sapien
tgttagactgttaggctattatctgaccccttt

SEQ ID NO: 216869 - DNA, 33 bp, Homo sapien
tcaaggacatgtaaaaactactctttcatttat

SEQ ID NO: 216870 - DNA, 33 bp, Homo sapien
tcaaggacatgtaaaatctactctttcatttat

SEQ ID NO: 216871 - DNA, 33 bp, Homo sapien
catgtgtatcataacaaatattacccgataagt

SEQ ID NO: 216872 - DNA, 33 bp, Homo sapien
catgtgtatcataacatatattacccgataagt

SEQ ID NO: 216873 - DNA, 33 bp, Homo sapien
gctagctataaggtgtcaagagaactctaaaga

SEQ ID NO: 216874 - DNA, 33 bp, Homo sapien
gctagctataaggtgttaagagaactctaaaga

SEQ ID NO: 216875 - DNA, 33 bp, Homo sapien
tgatgcttctcaacttgaagtgtgctcttcatc

SEQ ID NO: 216876 - DNA, 33 bp, Homo sapien
tgatgcttctcaactttaagtgtgctcttcatc

SEQ ID NO: 216877 - DNA, 33 bp, Homo sapien
aatcccttcaatgtaacgttctcgcaactctac

SEQ ID NO: 216878 - DNA, 33 bp, Homo sapien
aatcccttcaatgtaatgttctcgcaactctac

SEQ ID NO: 216879 - DNA, 33 bp, Homo sapien
gcacacatttgaaacaccaggaatgcaagcccc

SEQ ID NO: 216880 - DNA, 33 bp, Homo sapien
gcacacatttgaaacatcaggaatgcaagcccc

SEQ ID NO: 216881 - DNA, 33 bp, Homo sapien
ctgagggtgcatttaaaccagccttagccagat

SEQ ID NO: 216882 - DNA, 33 bp, Homo sapien
ctgagggtgcatttaagccagccttagccagat

SEQ ID NO: 216883 - DNA, 33 bp, Homo sapien
cccaggtagtatactgcaggctttgcataagac

SEQ ID NO: 216884 - DNA, 33 bp, Homo sapien
cccaggtagtatactgtaggctttgcataagac

SEQ ID NO: 216885 - DNA, 33 bp, Homo sapien
agctctaggtggctcaatacaaagagagagaga

SEQ ID NO: 216886 - DNA, 33 bp, Homo sapien
agctctaggtggctcagtacaaagagagagaga

SEQ ID NO: 216887 - DNA, 33 bp, Homo sapien
aaggccacacctctagaagtctgcaagaagcac

SEQ ID NO: 216888 - DNA, 33 bp, Homo sapien
aaggccacacctctaggagtctgcaagaagcac

SEQ ID NO: 216889 - DNA, 33 bp, Homo sapien
atatctgatgaataatcatgcaaaaatcttcaa

SEQ ID NO: 216890 - DNA, 33 bp, Homo sapien
atatctgatgaataatgatgcaaaaatcttcaa

SEQ ID NO: 216891 - DNA, 33 bp, Homo sapien
gaagctgtcttcaccaataaggccgaagcataa

SEQ ID NO: 216892 - DNA, 33 bp, Homo sapien
gaagctgtcttcaccagtaaggccgaagcataa

SEQ ID NO: 216893 - DNA, 33 bp, Homo sapien
cacctccacctgaactaacaatgtctgctctat

SEQ ID NO: 216894 - DNA, 33 bp, Homo sapien
cacctccacctgaactcacaatgtctgctctat

SEQ ID NO: 216895 - DNA, 33 bp, Homo sapien
aaaagatgacaaagagaaaaacagttcagtgtt

SEQ ID NO: 216896 - DNA, 33 bp, Homo sapien
aaaagatgacaaagaggaaaacagttcagtgtt

SEQ ID NO: 216897 - DNA, 33 bp, Homo sapien
ttcacataagtccagaaatgttctccctagatg

SEQ ID NO: 216898 - DNA, 33 bp, Homo sapien
ttcacataagtccagagatgttctccctagatg

SEQ ID NO: 216899 - DNA, 33 bp, Homo sapien
cttactattcaaattcaaaaccttattcctttc

SEQ ID NO: 216900 - DNA, 33 bp, Homo sapien
cttactattcaaattccaaaccttattcctttc

SEQ ID NO: 216901 - DNA, 33 bp, Homo sapien
tcagggtgagatttgactaaggacacaaacaat

SEQ ID NO: 216902 - DNA, 33 bp, Homo sapien
tcagggtgagatttgattaaggacacaaacaat

SEQ ID NO: 216903 - DNA, 33 bp, Homo sapien
cagccttttatgttccacttcctcttgaatgct

SEQ ID NO: 216904 - DNA, 33 bp, Homo sapien
cagccttttatgttcctcttcctcttgaatgct

SEQ ID NO: 216905 - DNA, 33 bp, Homo sapien
tcttgctatgcaagaaggaaggccttgtttgga

SEQ ID NO: 216906 - DNA, 33 bp, Homo sapien
tcttgctatgcaagaatgaaggccttgtttgga

SEQ ID NO: 216907 - DNA, 33 bp, Homo sapien
gtatgccctgaggatccacccacccactggaag

SEQ ID NO: 216908 - DNA, 33 bp, Homo sapien
gtatgccctgaggatctacccacccactggaag

SEQ ID NO: 216909 - DNA, 33 bp, Homo sapien
acaatacataaatggaacatggctgtattctaa

SEQ ID NO: 216910 - DNA, 33 bp, Homo sapien
acaatacataaatggagcatggctgtattctaa

SEQ ID NO: 216911 - DNA, 33 bp, Homo sapien
gagtagttgcaaaagaatatatggtctgcaaaa

SEQ ID NO: 216912 - DNA, 33 bp, Homo sapien
gagtagttgcaaaagagtatatggtctgcaaaa

SEQ ID NO: 216913 - DNA, 33 bp, Homo sapien
gcagctttcttggaaacagttcaggcccagtct

SEQ ID NO: 216914 - DNA, 33 bp, Homo sapien
gcagctttcttggaaatagttcaggcccagtct

SEQ ID NO: 216915 - DNA, 33 bp, Homo sapien
aagctggatctccaaaaactcaattccatctca

SEQ ID NO: 216916 - DNA, 33 bp, Homo sapien
aagctggatctccaaagactcaattccatctca

SEQ ID NO: 216917 - DNA, 33 bp, Homo sapien
cattgatatacctcaaaaacataatgcttcttg

SEQ ID NO: 216918 - DNA, 33 bp, Homo sapien
cattgatatacctcaagaacataatgcttcttg

SEQ ID NO: 216919 - DNA, 33 bp, Homo sapien
gctgatgggccctgacagggtggagtttcctct

SEQ ID NO: 216920 - DNA, 33 bp, Homo sapien
gctgatgggccctgacggggtggagtttcctct

SEQ ID NO: 216921 - DNA, 33 bp, Homo sapien
ttttataagcgattaacacccaaattcaccatg

SEQ ID NO: 216922 - DNA, 33 bp, Homo sapien
ttttataagcgattaatacccaaattcaccatg

SEQ ID NO: 216923 - DNA, 33 bp, Homo sapien
tccttgctgtgttctaccatcttctggggagca

SEQ ID NO: 216924 - DNA, 33 bp, Homo sapien
tccttgctgtgttctatcatcttctggggagca

SEQ ID NO: 216925 - DNA, 33 bp, Homo sapien
cttctactgacccacaaaatggtttttatccat

SEQ ID NO: 216926 - DNA, 33 bp, Homo sapien
cttctactgacccacacaatggtttttatccat

SEQ ID NO: 216927 - DNA, 33 bp, Homo sapien
ctggacaatgtagcaactaactgtctctacaaa

SEQ ID NO: 216928 - DNA, 33 bp, Homo sapien
ctggacaatgtagcaagtaactgtctctacaaa

SEQ ID NO: 216929 - DNA, 33 bp, Homo sapien
tgatcacaagaccttaaaaactatgtgagaaaa

SEQ ID NO: 216930 - DNA, 33 bp, Homo sapien
tgatcacaagaccttacaaactatgtgagaaaa

SEQ ID NO: 216931 - DNA, 33 bp, Homo sapien
gaaagaagaatcaaagaaacacaatcagaaatg

SEQ ID NO: 216932 - DNA, 33 bp, Homo sapien
gaaagaagaatcaaaggaacacaatcagaaatg

SEQ ID NO: 216933 - DNA, 33 bp, Homo sapien
ggtagctgcagcattcactcaaacaagatggtg

SEQ ID NO: 216934 - DNA, 33 bp, Homo sapien
ggtagctgcagcattcgctcaaacaagatggtg

SEQ ID NO: 216935 - DNA, 33 bp, Homo sapien
aggcctatcattgatacgttagtgtgagcaaca

SEQ ID NO: 216936 - DNA, 33 bp, Homo sapien
aggcctatcattgatatgttagtgtgagcaaca

SEQ ID NO: 216937 - DNA, 33 bp, Homo sapien
actttactaagattgaagggtagtaagccactc

SEQ ID NO: 216938 - DNA, 33 bp, Homo sapien
actttactaagattgacgggtagtaagccactc

SEQ ID NO: 216939 - DNA, 33 bp, Homo sapien
tatgatgtccttacaaacaggggaagaggcacc

SEQ ID NO: 216940 - DNA, 33 bp, Homo sapien
tatgatgtccttacaagcaggggaagaggcacc

SEQ ID NO: 216941 - DNA, 33 bp, Homo sapien
gcttgatttgcagcaaaatataaccaaaaccat

SEQ ID NO: 216942 - DNA, 33 bp, Homo sapien
gcttgatttgcagcaatatataaccaaaaccat

SEQ ID NO: 216943 - DNA, 33 bp, Homo sapien
tctggagcggactgaaagaaaagatagattggg

SEQ ID NO: 216944 - DNA, 33 bp, Homo sapien
tctggagcggactgaaggaaaagatagattggg

SEQ ID NO: 216945 - DNA, 33 bp, Homo sapien
ggatgagtcccaatggaaagaggatggtgtggc

SEQ ID NO: 216946 - DNA, 33 bp, Homo sapien
ggatgagtcccaatgggaagaggatggtgtggc

SEQ ID NO: 216947 - DNA, 33 bp, Homo sapien
tgtaatttggtcatcaccagaagactgtgacat

SEQ ID NO: 216948 - DNA, 33 bp, Homo sapien
tgtaatttggtcatcatcagaagactgtgacat

SEQ ID NO: 216949 - DNA, 33 bp, Homo sapien
agctctttcacacagactatgtaatttggtcat

SEQ ID NO: 216950 - DNA, 33 bp, Homo sapien
agctctttcacacagattatgtaatttggtcat

SEQ ID NO: 216951 - DNA, 33 bp, Homo sapien
aggaatacaaacatcacaatgcgagggagaaaa

SEQ ID NO: 216952 - DNA, 33 bp, Homo sapien
aggaatacaaacatcataatgcgagggagaaaa

SEQ ID NO: 216953 - DNA, 33 bp, Homo sapien
gctttgtcttccatatcaactgtgagatgatat

SEQ ID NO: 216954 - DNA, 33 bp, Homo sapien
gctttgtcttccatatgaactgtgagatgatat

SEQ ID NO: 216955 - DNA, 33 bp, Homo sapien
tagcccaactgccttaagaataaagaactagag

SEQ ID NO: 216956 - DNA, 33 bp, Homo sapien
tagcccaactgccttaggaataaagaactagag

SEQ ID NO: 216957 - DNA, 33 bp, Homo sapien
tctatcaagatactaaacgagaaggaacatcac

SEQ ID NO: 216958 - DNA, 33 bp, Homo sapien
tctatcaagatactaagcgagaaggaacatcac

SEQ ID NO: 216959 - DNA, 33 bp, Homo sapien
agatgtttttcagttacctagatcaggagtaag

SEQ ID NO: 216960 - DNA, 33 bp, Homo sapien
agatgtttttcagttatctagatcaggagtaag

SEQ ID NO: 216961 - DNA, 33 bp, Homo sapien
atgaatagctacaaaagtgtcattcacttggct

SEQ ID NO: 216962 - DNA, 33 bp, Homo sapien
atgaatagctacaaaattgtcattcacttggct

SEQ ID NO: 216963 - DNA, 33 bp, Homo sapien
ataaactctgtttcaccgaagataggaaaaaag

SEQ ID NO: 216964 - DNA, 33 bp, Homo sapien
ataaactctgtttcactgaagataggaaaaaag

SEQ ID NO: 216965 - DNA, 33 bp, Homo sapien
atcaacctggatctcaaatgtgcttggcataat

SEQ ID NO: 216966 - DNA, 33 bp, Homo sapien
atcaacctggatctcagatgtgcttggcataat

SEQ ID NO: 216967 - DNA, 33 bp, Homo sapien
ctaaatcacagcatatgactagttgcttcctta

SEQ ID NO: 216968 - DNA, 33 bp, Homo sapien
ctaaatcacagcatattactagttgcttcctta

SEQ ID NO: 216969 - DNA, 33 bp, Homo sapien
tctaacattgctataacaaaacgaggaggactg

SEQ ID NO: 216970 - DNA, 33 bp, Homo sapien
tctaacattgctataataaaacgaggaggactg

SEQ ID NO: 216971 - DNA, 33 bp, Homo sapien
taggggggtattgttaagttcagaatgtgtgag

SEQ ID NO: 216972 - DNA, 33 bp, Homo sapien
taggggggtattgttacgttcagaatgtgtgag

SEQ ID NO: 216973 - DNA, 33 bp, Homo sapien
cactactgaagcaaaaccttcctaagtactttg

SEQ ID NO: 216974 - DNA, 33 bp, Homo sapien
cactactgaagcaaaatcttcctaagtactttg

SEQ ID NO: 216975 - DNA, 33 bp, Homo sapien
gtgcctaaacatcataagagtaagacctgaaaa

SEQ ID NO: 216976 - DNA, 33 bp, Homo sapien
gtgcctaaacatcataggagtaagacctgaaaa

SEQ ID NO: 216977 - DNA, 33 bp, Homo sapien
gctttgttccatgcaactgagttacttgaaaca

SEQ ID NO: 216978 - DNA, 33 bp, Homo sapien
gctttgttccatgcaattgagttacttgaaaca

SEQ ID NO: 216979 - DNA, 33 bp, Homo sapien
gaagggaataattaacacaattctaaacacaga

SEQ ID NO: 216980 - DNA, 33 bp, Homo sapien
gaagggaataattaacgcaattctaaacacaga

SEQ ID NO: 216981 - DNA, 33 bp, Homo sapien
agcgacatataagatcccattttgaaacaccta

SEQ ID NO: 216982 - DNA, 33 bp, Homo sapien
agcgacatataagatctcattttgaaacaccta

SEQ ID NO: 216983 - DNA, 33 bp, Homo sapien
tctggtaaaattgccccatttttgccctaatct

SEQ ID NO: 216984 - DNA, 33 bp, Homo sapien
tctggtaaaattgcccgatttttgccctaatct

SEQ ID NO: 216985 - DNA, 33 bp, Homo sapien
tcagattgtgtttttacatcaagaccctattaa

SEQ ID NO: 216986 - DNA, 33 bp, Homo sapien
tcagattgtgtttttatatcaagaccctattaa

SEQ ID NO: 216987 - DNA, 33 bp, Homo sapien
acttaattttggaatacgccggctttcgacaaa

SEQ ID NO: 216988 - DNA, 33 bp, Homo sapien
acttaattttggaatatgccggctttcgacaaa

SEQ ID NO: 216989 - DNA, 33 bp, Homo sapien
ctccaagaaatagcacaagagggtgatgatggc

SEQ ID NO: 216990 - DNA, 33 bp, Homo sapien
ctccaagaaatagcacgagagggtgatgatggc

SEQ ID NO: 216991 - DNA, 33 bp, Homo sapien
gccatctgcaatggagcatggtgaataccagca

SEQ ID NO: 216992 - DNA, 33 bp, Homo sapien
gccatctgcaatggagtatggtgaataccagca

SEQ ID NO: 216993 - DNA, 33 bp, Homo sapien
gaagccatggacagtgccaactttcccagcaat

SEQ ID NO: 216994 - DNA, 33 bp, Homo sapien
gaagccatggacagtggcaactttcccagcaat

SEQ ID NO: 216995 - DNA, 33 bp, Homo sapien
gtctatgatatgagcccgaataaaaactctgga

SEQ ID NO: 216996 - DNA, 33 bp, Homo sapien
gtctatgatatgagcctgaataaaaactctgga

SEQ ID NO: 216997 - DNA, 33 bp, Homo sapien
tgattacaattcctgaactttttgattccccaa

SEQ ID NO: 216998 - DNA, 33 bp, Homo sapien
tgattacaattcctgatctttttgattccccaa

SEQ ID NO: 216999 - DNA, 33 bp, Homo sapien
ggtagagtaacatctacaccacatctactttct

SEQ ID NO: 217000 - DNA, 33 bp, Homo sapien
ggtagagtaacatctataccacatctactttct

SEQ ID NO: 217001 - DNA, 33 bp, Homo sapien
gaacagacaagctaacagcaacctacattctat

SEQ ID NO: 217002 - DNA, 33 bp, Homo sapien
gaacagacaagctaacggcaacctacattctat

SEQ ID NO: 217003 - DNA, 33 bp, Homo sapien
caattcagtccatgtacctgttaaaaacagctt

SEQ ID NO: 217004 - DNA, 33 bp, Homo sapien
caattcagtccatgtatctgttaaaaacagctt

SEQ ID NO: 217005 - DNA, 33 bp, Homo sapien
atgtaattcttcaaaactgaaatgtcaacttcc

SEQ ID NO: 217006 - DNA, 33 bp, Homo sapien
atgtaattcttcaaaattgaaatgtcaacttcc

SEQ ID NO: 217007 - DNA, 33 bp, Homo sapien
atcactgataattagcagatttattttccaatt

SEQ ID NO: 217008 - DNA, 33 bp, Homo sapien
atcactgataattagctgatttattttccaatt

SEQ ID NO: 217009 - DNA, 33 bp, Homo sapien
tcaacaaggaaagtgccgagatagaaggccaga

SEQ ID NO: 217010 - DNA, 33 bp, Homo sapien
tcaacaaggaaagtgctgagatagaaggccaga

SEQ ID NO: 217011 - DNA, 33 bp, Homo sapien
attccaaaagaaagacagaatgggaggtgttag

SEQ ID NO: 217012 - DNA, 33 bp, Homo sapien
attccaaaagaaagacggaatgggaggtgttag

SEQ ID NO: 217013 - DNA, 33 bp, Homo sapien
tccctcaggcataatgcaatgatgtggctaggt

SEQ ID NO: 217014 - DNA, 33 bp, Homo sapien
tccctcaggcataatggaatgatgtggctaggt

SEQ ID NO: 217015 - DNA, 33 bp, Homo sapien
tgttgtgatgcttaaacgcgataattaaagcag

SEQ ID NO: 217016 - DNA, 33 bp, Homo sapien
tgttgtgatgcttaaatgcgataattaaagcag

SEQ ID NO: 217017 - DNA, 33 bp, Homo sapien
aagctgaggtctagaaaggttaagtaacttgcc

SEQ ID NO: 217018 - DNA, 33 bp, Homo sapien
aagctgaggtctagaagggttaagtaacttgcc

SEQ ID NO: 217019 - DNA, 33 bp, Homo sapien
attatggcttttaagtcaaccaaagatattttc

SEQ ID NO: 217020 - DNA, 33 bp, Homo sapien
attatggcttttaagttaaccaaagatattttc

SEQ ID NO: 217021 - DNA, 33 bp, Homo sapien
tgtgttttctaggaagccatttactcattataa

SEQ ID NO: 217022 - DNA, 33 bp, Homo sapien
tgtgttttctaggaaggcatttactcattataa

SEQ ID NO: 217023 - DNA, 33 bp, Homo sapien
cacttaagtagagtaaaagattagcaggtcttc

SEQ ID NO: 217024 - DNA, 33 bp, Homo sapien
cacttaagtagagtaagagattagcaggtcttc

SEQ ID NO: 217025 - DNA, 33 bp, Homo sapien
taagaagcagtttgcacgagggaactgacattg

SEQ ID NO: 217026 - DNA, 33 bp, Homo sapien
taagaagcagtttgcatgagggaactgacattg

SEQ ID NO: 217027 - DNA, 33 bp, Homo sapien
acataaggtaaaaaaaggtcaatcttgaagtca

SEQ ID NO: 217028 - DNA, 33 bp, Homo sapien
acataaggtaaaaaaatgtcaatcttgaagtca

SEQ ID NO: 217029 - DNA, 33 bp, Homo sapien
ttcaattcttagtaaaagctccattgtagtcag

SEQ ID NO: 217030 - DNA, 33 bp, Homo sapien
ttcaattcttagtaaaggctccattgtagtcag

SEQ ID NO: 217031 - DNA, 33 bp, Homo sapien
cattttgttcaacagacataaaagaagatggca

SEQ ID NO: 217032 - DNA, 33 bp, Homo sapien
cattttgttcaacagagataaaagaagatggca

SEQ ID NO: 217033 - DNA, 33 bp, Homo sapien
aatgtcaacatagtgaaaaagtcaaataacatc

SEQ ID NO: 217034 - DNA, 33 bp, Homo sapien
aatgtcaacatagtgagaaagtcaaataacatc

SEQ ID NO: 217035 - DNA, 33 bp, Homo sapien
aaattttcttcaccaccggaagaatgtgtgcac

SEQ ID NO: 217036 - DNA, 33 bp, Homo sapien
aaattttcttcaccactggaagaatgtgtgcac

SEQ ID NO: 217037 - DNA, 33 bp, Homo sapien
tgagtttcttgccaaaatgaaattggatgctaa

SEQ ID NO: 217038 - DNA, 33 bp, Homo sapien
tgagtttcttgccaaagtgaaattggatgctaa

SEQ ID NO: 217039 - DNA, 33 bp, Homo sapien
gaggatgagatgccagaatgtctatgcatggtg

SEQ ID NO: 217040 - DNA, 33 bp, Homo sapien
gaggatgagatgccagtatgtctatgcatggtg

SEQ ID NO: 217041 - DNA, 33 bp, Homo sapien
aagttaaacttggaaactgaatcacatacaaaa

SEQ ID NO: 217042 - DNA, 33 bp, Homo sapien
aagttaaacttggaaattgaatcacatacaaaa

SEQ ID NO: 217043 - DNA, 33 bp, Homo sapien
tatctactcaaaagaaacaatagctggtcaaat

SEQ ID NO: 217044 - DNA, 33 bp, Homo sapien
tatctactcaaaagaagcaatagctggtcaaat

SEQ ID NO: 217045 - DNA, 33 bp, Homo sapien
gagaaagaagtttaagcataaggctgcctcaag

SEQ ID NO: 217046 - DNA, 33 bp, Homo sapien
gagaaagaagtttaagtataaggctgcctcaag

SEQ ID NO: 217047 - DNA, 33 bp, Homo sapien
ctgaattccagtaaaacagataatgccaaccat

SEQ ID NO: 217048 - DNA, 33 bp, Homo sapien
ctgaattccagtaaaagagataatgccaaccat

SEQ ID NO: 217049 - DNA, 33 bp, Homo sapien
tttttatggctacatactatcccatggtgtata

SEQ ID NO: 217050 - DNA, 33 bp, Homo sapien
tttttatggctacatattatcccatggtgtata

SEQ ID NO: 217051 - DNA, 33 bp, Homo sapien
aacctacacatcctgcacatataccctgaaact

SEQ ID NO: 217052 - DNA, 33 bp, Homo sapien
aacctacacatcctgcgcatataccctgaaact

SEQ ID NO: 217053 - DNA, 33 bp, Homo sapien
tcttgacaatattgggccatcttatgcatggac

SEQ ID NO: 217054 - DNA, 33 bp, Homo sapien
tcttgacaatattgggtcatcttatgcatggac

SEQ ID NO: 217055 - DNA, 33 bp, Homo sapien
tttctgtcgcagagcagtagtttttcatagata

SEQ ID NO: 217056 - DNA, 33 bp, Homo sapien
tttctgtcgcagagcattagtttttcatagata

SEQ ID NO: 217057 - DNA, 33 bp, Homo sapien
ccacagtggagaaacacactgaaagaaggaaag

SEQ ID NO: 217058 - DNA, 33 bp, Homo sapien
ccacagtggagaaacatactgaaagaaggaaag

SEQ ID NO: 217059 - DNA, 33 bp, Homo sapien
aaagcaaccaccgggactcccagatagtattaa

SEQ ID NO: 217060 - DNA, 33 bp, Homo sapien
aaagcaaccaccgggattcccagatagtattaa

SEQ ID NO: 217061 - DNA, 33 bp, Homo sapien
caattgcctaagcaaccacttgcttcctattga

SEQ ID NO: 217062 - DNA, 33 bp, Homo sapien
caattgcctaagcaacgacttgcttcctattga

SEQ ID NO: 217063 - DNA, 33 bp, Homo sapien
agtgtcctttattggcccagacagcaggatctg

SEQ ID NO: 217064 - DNA, 33 bp, Homo sapien
agtgtcctttattggctcagacagcaggatctg

SEQ ID NO: 217065 - DNA, 33 bp, Homo sapien
agttgggcttgtcccaaatgtagagagaaattc

SEQ ID NO: 217066 - DNA, 33 bp, Homo sapien
agttgggcttgtcccagatgtagagagaaattc

SEQ ID NO: 217067 - DNA, 33 bp, Homo sapien
tggagatacttctaaacgagactcagcaaaaaa

SEQ ID NO: 217068 - DNA, 33 bp, Homo sapien
tggagatacttctaaatgagactcagcaaaaaa

SEQ ID NO: 217069 - DNA, 33 bp, Homo sapien
gccttctcatgagaaaaagtcaaaccatcagtg

SEQ ID NO: 217070 - DNA, 33 bp, Homo sapien
gccttctcatgagaaacagtcaaaccatcagtg

SEQ ID NO: 217071 - DNA, 33 bp, Homo sapien
aagtgaaccaaccagacaaacccaggtccaggt

SEQ ID NO: 217072 - DNA, 33 bp, Homo sapien
aagtgaaccaaccagataaacccaggtccaggt

SEQ ID NO: 217073 - DNA, 33 bp, Homo sapien
gccctgtaaaaataaccaattcctccaactgtg

SEQ ID NO: 217074 - DNA, 33 bp, Homo sapien
gccctgtaaaaataacgaattcctccaactgtg

SEQ ID NO: 217075 - DNA, 33 bp, Homo sapien
ccttggctctcctaaactgactttgctacaact

SEQ ID NO: 217076 - DNA, 33 bp, Homo sapien
ccttggctctcctaaattgactttgctacaact

SEQ ID NO: 217077 - DNA, 33 bp, Homo sapien
aaacaactaggattgccagagaagaaggtttta

SEQ ID NO: 217078 - DNA, 33 bp, Homo sapien
aaacaactaggattgctagagaagaaggtttta

SEQ ID NO: 217079 - DNA, 33 bp, Homo sapien
atatgggccttagatggcaatagaccacacatt

SEQ ID NO: 217080 - DNA, 33 bp, Homo sapien
atatgggccttagatgtcaatagaccacacatt

SEQ ID NO: 217081 - DNA, 33 bp, Homo sapien
tgtggtggctttcatcaaaaaaattatttgcag

SEQ ID NO: 217082 - DNA, 33 bp, Homo sapien
tgtggtggctttcatcgaaaaaattatttgcag

SEQ ID NO: 217083 - DNA, 33 bp, Homo sapien
agtgcctgtaataggccacatactttctcagtt

SEQ ID NO: 217084 - DNA, 33 bp, Homo sapien
agtgcctgtaataggctacatactttctcagtt

SEQ ID NO: 217085 - DNA, 33 bp, Homo sapien
tgtactgtttaagtcccatcaactgagaaagta

SEQ ID NO: 217086 - DNA, 33 bp, Homo sapien
tgtactgtttaagtcctatcaactgagaaagta

SEQ ID NO: 217087 - DNA, 33 bp, Homo sapien
ctgaccttatcttatacggttctacaacatctc

SEQ ID NO: 217088 - DNA, 33 bp, Homo sapien
ctgaccttatcttatatggttctacaacatctc

SEQ ID NO: 217089 - DNA, 33 bp, Homo sapien
gtgagagagggaaggaataagtgaggtcatgaa

SEQ ID NO: 217090 - DNA, 33 bp, Homo sapien
gtgagagagggaaggattaagtgaggtcatgaa

SEQ ID NO: 217091 - DNA, 33 bp, Homo sapien
cctttgtgggccctgacaacaagatctgctcct

SEQ ID NO: 217092 - DNA, 33 bp, Homo sapien
cctttgtgggccctgataacaagatctgctcct

SEQ ID NO: 217093 - DNA, 33 bp, Homo sapien
aatttctttgtatgtgcatgatgacagacacac

SEQ ID NO: 217094 - DNA, 33 bp, Homo sapien
aatttctttgtatgtgtatgatgacagacacac

SEQ ID NO: 217095 - DNA, 33 bp, Homo sapien
aagttctgcaatataaatgtcctatgaactaat

SEQ ID NO: 217096 - DNA, 33 bp, Homo sapien
aagttctgcaatataagtgtcctatgaactaat

SEQ ID NO: 217097 - DNA, 33 bp, Homo sapien
ttaaagagtagattgacgttccaagaaaaccct

SEQ ID NO: 217098 - DNA, 33 bp, Homo sapien
ttaaagagtagattgatgttccaagaaaaccct

SEQ ID NO: 217099 - DNA, 33 bp, Homo sapien
gaaagaacaaaaccaccgaatgaggcattatgt

SEQ ID NO: 217100 - DNA, 33 bp, Homo sapien
gaaagaacaaaaccactgaatgaggcattatgt

SEQ ID NO: 217101 - DNA, 33 bp, Homo sapien
atttattttggccacaacttatttcagcagagt

SEQ ID NO: 217102 - DNA, 33 bp, Homo sapien
atttattttggccacagcttatttcagcagagt

SEQ ID NO: 217103 - DNA, 33 bp, Homo sapien
gattttcataagctctaaaattcactgataaaa

SEQ ID NO: 217104 - DNA, 33 bp, Homo sapien
gattttcataagctctcaaattcactgataaaa

SEQ ID NO: 217105 - DNA, 33 bp, Homo sapien
gaaaactgaaacagaacaaatttggctgtccag

SEQ ID NO: 217106 - DNA, 33 bp, Homo sapien
gaaaactgaaacagaataaatttggctgtccag

SEQ ID NO: 217107 - DNA, 33 bp, Homo sapien
aggttcaaatcctaaacctgatgccaagaattc

SEQ ID NO: 217108 - DNA, 33 bp, Homo sapien
aggttcaaatcctaaatctgatgccaagaattc

SEQ ID NO: 217109 - DNA, 33 bp, Homo sapien
gaaacaaacatgtaaactgcaggaatgtggtaa

SEQ ID NO: 217110 - DNA, 33 bp, Homo sapien
gaaacaaacatgtaaattgcaggaatgtggtaa

SEQ ID NO: 217111 - DNA, 33 bp, Homo sapien
taagaactagctcttaaaagtgtagtcacagtc

SEQ ID NO: 217112 - DNA, 33 bp, Homo sapien
taagaactagctcttacaagtgtagtcacagtc

SEQ ID NO: 217113 - DNA, 33 bp, Homo sapien
tccagttctatgactacgtgatgtaagaaaagg

SEQ ID NO: 217114 - DNA, 33 bp, Homo sapien
tccagttctatgactatgtgatgtaagaaaagg

SEQ ID NO: 217115 - DNA, 33 bp, Homo sapien
aaggtgtttcagaagacactggcatttgaattg

SEQ ID NO: 217116 - DNA, 33 bp, Homo sapien
aaggtgtttcagaagagactggcatttgaattg

SEQ ID NO: 217117 - DNA, 33 bp, Homo sapien
tccatccatagtgagcacagatcttccttcctc

SEQ ID NO: 217118 - DNA, 33 bp, Homo sapien
tccatccatagtgagcgcagatcttccttcctc

SEQ ID NO: 217119 - DNA, 33 bp, Homo sapien
ctgtctgtggacatcagatcttcaggtctttga

SEQ ID NO: 217120 - DNA, 33 bp, Homo sapien
ctgtctgtggacatcatatcttcaggtctttga

SEQ ID NO: 217121 - DNA, 33 bp, Homo sapien
cactagtatcatactcaatggggaaaaactgaa

SEQ ID NO: 217122 - DNA, 33 bp, Homo sapien
cactagtatcatactcgatggggaaaaactgaa

SEQ ID NO: 217123 - DNA, 33 bp, Homo sapien
tttcctctaagatctgcaataaggatgcccact

SEQ ID NO: 217124 - DNA, 33 bp, Homo sapien
tttcctctaagatctggaataaggatgcccact

SEQ ID NO: 217125 - DNA, 33 bp, Homo sapien
tgtctcatgttttataaaggaggttgttgttat

SEQ ID NO: 217126 - DNA, 33 bp, Homo sapien
tgtctcatgttttatagaggaggttgttgttat

SEQ ID NO: 217127 - DNA, 33 bp, Homo sapien
ccgttctatagcggtaagttccttccttgttct

SEQ ID NO: 217128 - DNA, 33 bp, Homo sapien
ccgttctatagcggtaggttccttccttgttct

SEQ ID NO: 217129 - DNA, 33 bp, Homo sapien
tgaaatttgttaatcacacagttcacatgctaa

SEQ ID NO: 217130 - DNA, 33 bp, Homo sapien
tgaaatttgttaatcagacagttcacatgctaa

SEQ ID NO: 217131 - DNA, 33 bp, Homo sapien
tatccttatgtgggcacagtgcaaggcgttact

SEQ ID NO: 217132 - DNA, 33 bp, Homo sapien
tatccttatgtgggcatagtgcaaggcgttact

SEQ ID NO: 217133 - DNA, 33 bp, Homo sapien
gatttgccccatataacatgccaaaaaatgaga

SEQ ID NO: 217134 - DNA, 33 bp, Homo sapien
gatttgccccatataagatgccaaaaaatgaga

SEQ ID NO: 217135 - DNA, 33 bp, Homo sapien
tttaatttttgacaaccctttgagaagccagga

SEQ ID NO: 217136 - DNA, 33 bp, Homo sapien
tttaatttttgacaacgctttgagaagccagga

SEQ ID NO: 217137 - DNA, 33 bp, Homo sapien
cctggcagagaattagaacgcagtaaatgagga

SEQ ID NO: 217138 - DNA, 33 bp, Homo sapien
cctggcagagaattagtacgcagtaaatgagga

SEQ ID NO: 217139 - DNA, 33 bp, Homo sapien
aagtggagctctgctaactgtaacaccaggagg

SEQ ID NO: 217140 - DNA, 33 bp, Homo sapien
aagtggagctctgctatctgtaacaccaggagg

SEQ ID NO: 217141 - DNA, 33 bp, Homo sapien
cctgagacatcacaccaactttgtacttctctt

SEQ ID NO: 217142 - DNA, 33 bp, Homo sapien
cctgagacatcacaccgactttgtacttctctt

SEQ ID NO: 217143 - DNA, 33 bp, Homo sapien
gacattaatgcctggagagtgacctgatggctc

SEQ ID NO: 217144 - DNA, 33 bp, Homo sapien
gacattaatgcctggatagtgacctgatggctc

SEQ ID NO: 217145 - DNA, 33 bp, Homo sapien
agtcaatagagaccacaaatggccaggcttagt

SEQ ID NO: 217146 - DNA, 33 bp, Homo sapien
agtcaatagagaccacgaatggccaggcttagt

SEQ ID NO: 217147 - DNA, 33 bp, Homo sapien
gtaggtttctgttcacggtatctattaaaggag

SEQ ID NO: 217148 - DNA, 33 bp, Homo sapien
gtaggtttctgttcactgtatctattaaaggag

SEQ ID NO: 217149 - DNA, 33 bp, Homo sapien
tcggagtgctatattaagacatcaatggtgcaa

SEQ ID NO: 217150 - DNA, 33 bp, Homo sapien
tcggagtgctatattacgacatcaatggtgcaa

SEQ ID NO: 217151 - DNA, 33 bp, Homo sapien
atgatgaatcagacaaagaagcttaaaagacag

SEQ ID NO: 217152 - DNA, 33 bp, Homo sapien
atgatgaatcagacaaggaagcttaaaagacag

SEQ ID NO: 217153 - DNA, 33 bp, Homo sapien
agataccatcttacaaccatcgaaatggctatt

SEQ ID NO: 217154 - DNA, 33 bp, Homo sapien
agataccatcttacaatcatcgaaatggctatt

SEQ ID NO: 217155 - DNA, 33 bp, Homo sapien
caattttggatctctacggcatactgaaggctt

SEQ ID NO: 217156 - DNA, 33 bp, Homo sapien
caattttggatctctatggcatactgaaggctt

SEQ ID NO: 217157 - DNA, 33 bp, Homo sapien
agcagccagtgacatacaacgatgtggtagatt

SEQ ID NO: 217158 - DNA, 33 bp, Homo sapien
agcagccagtgacatagaacgatgtggtagatt

SEQ ID NO: 217159 - DNA, 33 bp, Homo sapien
gggagtggtaagaagaagtcaaattcaagatct

SEQ ID NO: 217160 - DNA, 33 bp, Homo sapien
gggagtggtaagaagaggtcaaattcaagatct

SEQ ID NO: 217161 - DNA, 33 bp, Homo sapien
gaatatattcctaagcgatacagacggtatatt

SEQ ID NO: 217162 - DNA, 33 bp, Homo sapien
gaatatattcctaagctatacagacggtatatt

SEQ ID NO: 217163 - DNA, 33 bp, Homo sapien
tctcaacccataataaaactctcctctctcaac

SEQ ID NO: 217164 - DNA, 33 bp, Homo sapien
tctcaacccataataagactctcctctctcaac

SEQ ID NO: 217165 - DNA, 33 bp, Homo sapien
ttatggtttgccttgcactctgttagaatctgg

SEQ ID NO: 217166 - DNA, 33 bp, Homo sapien
ttatggtttgccttgcgctctgttagaatctgg

SEQ ID NO: 217167 - DNA, 33 bp, Homo sapien
gttcaaagccatcttacgatagtaccatccagg

SEQ ID NO: 217168 - DNA, 33 bp, Homo sapien
gttcaaagccatcttatgatagtaccatccagg

SEQ ID NO: 217169 - DNA, 33 bp, Homo sapien
gtttgcttgatacaccaaacttgacatcctaat

SEQ ID NO: 217170 - DNA, 33 bp, Homo sapien
gtttgcttgatacaccgaacttgacatcctaat

SEQ ID NO: 217171 - DNA, 33 bp, Homo sapien
taaaatcctagctctaccactcattagccatat

SEQ ID NO: 217172 - DNA, 33 bp, Homo sapien
taaaatcctagctctatcactcattagccatat

SEQ ID NO: 217173 - DNA, 33 bp, Homo sapien
aatctcatcagcaacaaatattagtttcccctg

SEQ ID NO: 217174 - DNA, 33 bp, Homo sapien
aatctcatcagcaacagatattagtttcccctg

SEQ ID NO: 217175 - DNA, 33 bp, Homo sapien
ggtcacagcaagaaaacagaaagatgatggaag

SEQ ID NO: 217176 - DNA, 33 bp, Homo sapien
ggtcacagcaagaaaagagaaagatgatggaag

SEQ ID NO: 217177 - DNA, 33 bp, Homo sapien
tgtatcatgacctagaaagatggtgtcaggcca

SEQ ID NO: 217178 - DNA, 33 bp, Homo sapien
tgtatcatgacctagacagatggtgtcaggcca

SEQ ID NO: 217179 - DNA, 33 bp, Homo sapien
ccttgttttggtcatacgaaattaatacatact

SEQ ID NO: 217180 - DNA, 33 bp, Homo sapien
ccttgttttggtcatatgaaattaatacatact

SEQ ID NO: 217181 - DNA, 33 bp, Homo sapien
tgcccaatacccgaaaaagacatccggcttccg

SEQ ID NO: 217182 - DNA, 33 bp, Homo sapien
tgcccaatacccgaaagagacatccggcttccg

SEQ ID NO: 217183 - DNA, 33 bp, Homo sapien
acccacaataagattaacacgctttttttcaca

SEQ ID NO: 217184 - DNA, 33 bp, Homo sapien
acccacaataagattaccacgctttttttcaca

SEQ ID NO: 217185 - DNA, 33 bp, Homo sapien
aagacactggggaacactacaggcattttccca

SEQ ID NO: 217186 - DNA, 33 bp, Homo sapien
aagacactggggaacattacaggcattttccca

SEQ ID NO: 217187 - DNA, 33 bp, Homo sapien
acactgcttaatagaaaatataaatgtgacaaa

SEQ ID NO: 217188 - DNA, 33 bp, Homo sapien
acactgcttaatagaagatataaatgtgacaaa

SEQ ID NO: 217189 - DNA, 33 bp, Homo sapien
aagagggcacttagaactctcctcaatgggtaa

SEQ ID NO: 217190 - DNA, 33 bp, Homo sapien
aagagggcacttagaagtctcctcaatgggtaa

SEQ ID NO: 217191 - DNA, 33 bp, Homo sapien
ctgagtaacagacacaaccgttactacaaatga

SEQ ID NO: 217192 - DNA, 33 bp, Homo sapien
ctgagtaacagacacatccgttactacaaatga

SEQ ID NO: 217193 - DNA, 33 bp, Homo sapien
cctttgttctcagggactatcatttttattttt

SEQ ID NO: 217194 - DNA, 33 bp, Homo sapien
cctttgttctcagggattatcatttttattttt

SEQ ID NO: 217195 - DNA, 33 bp, Homo sapien
tgagctgattgaaacaactgactccgagacgat

SEQ ID NO: 217196 - DNA, 33 bp, Homo sapien
tgagctgattgaaacatctgactccgagacgat

SEQ ID NO: 217197 - DNA, 33 bp, Homo sapien
agatgtatgattttagaagactgtaaactctat

SEQ ID NO: 217198 - DNA, 33 bp, Homo sapien
agatgtatgattttagcagactgtaaactctat

SEQ ID NO: 217199 - DNA, 33 bp, Homo sapien
atgtctacattaaaaaagatctcaaacaaccta

SEQ ID NO: 217200 - DNA, 33 bp, Homo sapien
atgtctacattaaaaacgatctcaaacaaccta

SEQ ID NO: 217201 - DNA, 33 bp, Homo sapien
aacatttcacacacaaaagttcagaatcctggg

SEQ ID NO: 217202 - DNA, 33 bp, Homo sapien
aacatttcacacacaagagttcagaatcctggg

SEQ ID NO: 217203 - DNA, 33 bp, Homo sapien
gtaatgcacattaatacctctttccctttaata

SEQ ID NO: 217204 - DNA, 33 bp, Homo sapien
gtaatgcacattaatatctctttccctttaata

SEQ ID NO: 217205 - DNA, 33 bp, Homo sapien
cctttgctgtcttctacggatgttctctaaaat

SEQ ID NO: 217206 - DNA, 33 bp, Homo sapien
cctttgctgtcttctatggatgttctctaaaat

SEQ ID NO: 217207 - DNA, 33 bp, Homo sapien
gaacacaactttcaacactattccaatgggcaa

SEQ ID NO: 217208 - DNA, 33 bp, Homo sapien
gaacacaactttcaacgctattccaatgggcaa

SEQ ID NO: 217209 - DNA, 33 bp, Homo sapien
aagtacagttctgttacagcgtactagttgggc

SEQ ID NO: 217210 - DNA, 33 bp, Homo sapien
aagtacagttctgttatagcgtactagttgggc

SEQ ID NO: 217211 - DNA, 33 bp, Homo sapien
ctctaatactctaataagcacagattttttttt

SEQ ID NO: 217212 - DNA, 33 bp, Homo sapien
ctctaatactctaatatgcacagattttttttt

SEQ ID NO: 217213 - DNA, 33 bp, Homo sapien
ctcaagctgtttctcaaagtagcctgataattt

SEQ ID NO: 217214 - DNA, 33 bp, Homo sapien
ctcaagctgtttctcagagtagcctgataattt

SEQ ID NO: 217215 - DNA, 33 bp, Homo sapien
tgcagtactggaataacaacagataagtacata

SEQ ID NO: 217216 - DNA, 33 bp, Homo sapien
tgcagtactggaataagaacagataagtacata

SEQ ID NO: 217217 - DNA, 33 bp, Homo sapien
aggacatccaaaaattaaagtgattatgcttct

SEQ ID NO: 217218 - DNA, 33 bp, Homo sapien
aggacatccaaaaattgaagtgattatgcttct

SEQ ID NO: 217219 - DNA, 33 bp, Homo sapien
acttacccatacaaatcacgatgcaaaccagca

SEQ ID NO: 217220 - DNA, 33 bp, Homo sapien
acttacccatacaaatgacgatgcaaaccagca

SEQ ID NO: 217221 - DNA, 33 bp, Homo sapien
aagtgtgtatctagaaactgatttaggtattac

SEQ ID NO: 217222 - DNA, 33 bp, Homo sapien
aagtgtgtatctagaacctgatttaggtattac

SEQ ID NO: 217223 - DNA, 33 bp, Homo sapien
tataaaaaatcatgtacgtgaagactatcccga

SEQ ID NO: 217224 - DNA, 33 bp, Homo sapien
tataaaaaatcatgtatgtgaagactatcccga

SEQ ID NO: 217225 - DNA, 33 bp, Homo sapien
aggcaaactacgttcacgttcttcataaagctg

SEQ ID NO: 217226 - DNA, 33 bp, Homo sapien
aggcaaactacgttcatgttcttcataaagctg

SEQ ID NO: 217227 - DNA, 33 bp, Homo sapien
tgttctatttacagccaattcaaaaaaccttaa

SEQ ID NO: 217228 - DNA, 33 bp, Homo sapien
tgttctatttacagccgattcaaaaaaccttaa

SEQ ID NO: 217229 - DNA, 33 bp, Homo sapien
aaagaaatggactgtcacttagaatagggggaa

SEQ ID NO: 217230 - DNA, 33 bp, Homo sapien
aaagaaatggactgtcgcttagaatagggggaa

SEQ ID NO: 217231 - DNA, 33 bp, Homo sapien
tatgaaatatgataccagatattagaggctggg

SEQ ID NO: 217232 - DNA, 33 bp, Homo sapien
tatgaaatatgataccggatattagaggctggg

SEQ ID NO: 217233 - DNA, 33 bp, Homo sapien
tatttattgatgccctaagctcgtttcaggtag

SEQ ID NO: 217234 - DNA, 33 bp, Homo sapien
tatttattgatgccctcagctcgtttcaggtag

SEQ ID NO: 217235 - DNA, 33 bp, Homo sapien
atcaccatgatttaccaagtgaaacttattaga

SEQ ID NO: 217236 - DNA, 33 bp, Homo sapien
atcaccatgatttaccgagtgaaacttattaga

SEQ ID NO: 217237 - DNA, 33 bp, Homo sapien
agtgatttgtctaataaatccgggcaaagtaaa

SEQ ID NO: 217238 - DNA, 33 bp, Homo sapien
agtgatttgtctaatagatccgggcaaagtaaa

SEQ ID NO: 217239 - DNA, 33 bp, Homo sapien
tgtagggctttgtagacacactaaggacatttt

SEQ ID NO: 217240 - DNA, 33 bp, Homo sapien
tgtagggctttgtagatacactaaggacatttt

SEQ ID NO: 217241 - DNA, 33 bp, Homo sapien
aacttttgcttcctgacactaattacaaacaaa

SEQ ID NO: 217242 - DNA, 33 bp, Homo sapien
aacttttgcttcctgatactaattacaaacaaa

SEQ ID NO: 217243 - DNA, 33 bp, Homo sapien
ttttttctaggaaagtcaccttcagatgcaggt

SEQ ID NO: 217244 - DNA, 33 bp, Homo sapien
ttttttctaggaaagttaccttcagatgcaggt

SEQ ID NO: 217245 - DNA, 33 bp, Homo sapien
tcaatggaagtgtatacagagagaagtggacag

SEQ ID NO: 217246 - DNA, 33 bp, Homo sapien
tcaatggaagtgtatatagagagaagtggacag

SEQ ID NO: 217247 - DNA, 33 bp, Homo sapien
tttggtgaggtagagagaaattaaaacagattt

SEQ ID NO: 217248 - DNA, 33 bp, Homo sapien
tttggtgaggtagagataaattaaaacagattt

SEQ ID NO: 217249 - DNA, 33 bp, Homo sapien
taaatttagacctagaatacaatgactggttgt

SEQ ID NO: 217250 - DNA, 33 bp, Homo sapien
taaatttagacctagagtacaatgactggttgt

SEQ ID NO: 217251 - DNA, 33 bp, Homo sapien
caggcagtatctagtaccaagcacattgctttc

SEQ ID NO: 217252 - DNA, 33 bp, Homo sapien
caggcagtatctagtatcaagcacattgctttc

SEQ ID NO: 217253 - DNA, 33 bp, Homo sapien
cagatgtgataacagacgtagtactacagatgt

SEQ ID NO: 217254 - DNA, 33 bp, Homo sapien
cagatgtgataacagatgtagtactacagatgt

SEQ ID NO: 217255 - DNA, 33 bp, Homo sapien
ggtcccacatagcaaacacttataccacgcagt

SEQ ID NO: 217256 - DNA, 33 bp, Homo sapien
ggtcccacatagcaaagacttataccacgcagt

SEQ ID NO: 217257 - DNA, 33 bp, Homo sapien
ccctttctaagttatacgccaaaaatcacatag

SEQ ID NO: 217258 - DNA, 33 bp, Homo sapien
ccctttctaagttatatgccaaaaatcacatag

SEQ ID NO: 217259 - DNA, 33 bp, Homo sapien
agatgcatctagaggaaaaaggattcaggattg

SEQ ID NO: 217260 - DNA, 33 bp, Homo sapien
agatgcatctagaggataaaggattcaggattg

SEQ ID NO: 217261 - DNA, 33 bp, Homo sapien
gcaaatctgtgcttcacgttttaaaagcaacct

SEQ ID NO: 217262 - DNA, 33 bp, Homo sapien
gcaaatctgtgcttcatgttttaaaagcaacct

SEQ ID NO: 217263 - DNA, 33 bp, Homo sapien
ataatttcatgtaataacatcctcaaaatgaca

SEQ ID NO: 217264 - DNA, 33 bp, Homo sapien
ataatttcatgtaataccatcctcaaaatgaca

SEQ ID NO: 217265 - DNA, 33 bp, Homo sapien
acaaaccaaagagcccagcctatcttctccatg

SEQ ID NO: 217266 - DNA, 33 bp, Homo sapien
acaaaccaaagagcccggcctatcttctccatg

SEQ ID NO: 217267 - DNA, 33 bp, Homo sapien
aaaattaaaacagcaaatactggtttggtctag

SEQ ID NO: 217268 - DNA, 33 bp, Homo sapien
aaaattaaaacagcaagtactggtttggtctag

SEQ ID NO: 217269 - DNA, 33 bp, Homo sapien
tcccttctcttggccacgttgctggcgggttct

SEQ ID NO: 217270 - DNA, 33 bp, Homo sapien
tcccttctcttggccatgttgctggcgggttct

SEQ ID NO: 217271 - DNA, 33 bp, Homo sapien
aggatctcttcactaaagaaaagagcaaactgc

SEQ ID NO: 217272 - DNA, 33 bp, Homo sapien
aggatctcttcactaaggaaaagagcaaactgc

SEQ ID NO: 217273 - DNA, 33 bp, Homo sapien
tccacagcctgtcctaggaacttgcatttcaga

SEQ ID NO: 217274 - DNA, 33 bp, Homo sapien
tccacagcctgtcctatgaacttgcatttcaga

SEQ ID NO: 217275 - DNA, 33 bp, Homo sapien
ctgacaaaatgaaacacagtcaacacaaaacca

SEQ ID NO: 217276 - DNA, 33 bp, Homo sapien
ctgacaaaatgaaacatagtcaacacaaaacca

SEQ ID NO: 217277 - DNA, 33 bp, Homo sapien
agctagtccttcctcaatataaagtactttcag

SEQ ID NO: 217278 - DNA, 33 bp, Homo sapien
agctagtccttcctcagtataaagtactttcag

SEQ ID NO: 217279 - DNA, 33 bp, Homo sapien
taaccaatagtcatcaatatgttttccagtgag

SEQ ID NO: 217280 - DNA, 33 bp, Homo sapien
taaccaatagtcatcagtatgttttccagtgag

SEQ ID NO: 217281 - DNA, 33 bp, Homo sapien
cccttccagccctctacggtaacttaaggctgc

SEQ ID NO: 217282 - DNA, 33 bp, Homo sapien
cccttccagccctctatggtaacttaaggctgc

SEQ ID NO: 217283 - DNA, 33 bp, Homo sapien
agtctgacatggtcctaagatggtgtcctaaac

SEQ ID NO: 217284 - DNA, 33 bp, Homo sapien
agtctgacatggtcctcagatggtgtcctaaac

SEQ ID NO: 217285 - DNA, 33 bp, Homo sapien
aaggcagagaaactggaagagacaccgcatagg

SEQ ID NO: 217286 - DNA, 33 bp, Homo sapien
aaggcagagaaactgggagagacaccgcatagg

SEQ ID NO: 217287 - DNA, 33 bp, Homo sapien
ctagagccattcagaccaaggtatacatctctt

SEQ ID NO: 217288 - DNA, 33 bp, Homo sapien
ctagagccattcagactaaggtatacatctctt
